United States Patent Application Publication US 2015/0191722 A1 - sequence listing, part 2

SEQ ID NO: 19838 - DNA, 15 bp, Homo sapiens
aagaatagtttgcat

SEQ ID NO: 19839 - DNA, 15 bp, Homo sapiens
caagaatagtttgca

SEQ ID NO: 19840 - DNA, 15 bp, Homo sapiens
tcaagaatagtttgc

SEQ ID NO: 19841 - DNA, 15 bp, Homo sapiens
atcaagaatagtttg

SEQ ID NO: 19842 - DNA, 15 bp, Homo sapiens
tatcaagaatagttt

SEQ ID NO: 19843 - DNA, 15 bp, Homo sapiens
ctatcaagaatagtt

SEQ ID NO: 19844 - DNA, 15 bp, Homo sapiens
actatcaagaatagt

SEQ ID NO: 19845 - DNA, 15 bp, Homo sapiens
aactatcaagaatag

SEQ ID NO: 19846 - DNA, 15 bp, Homo sapiens
aaactatcaagaata

SEQ ID NO: 19847 - DNA, 15 bp, Homo sapiens
aaaactatcaagaat

SEQ ID NO: 19848 - DNA, 15 bp, Homo sapiens
taaaactatcaagaa

SEQ ID NO: 19849 - DNA, 15 bp, Homo sapiens
ataaaactatcaaga

SEQ ID NO: 19850 - DNA, 15 bp, Homo sapiens
cataaaactatcaag

SEQ ID NO: 19851 - DNA, 15 bp, Homo sapiens
ccataaaactatcaa

SEQ ID NO: 19852 - DNA, 15 bp, Homo sapiens
accataaaactatca

SEQ ID NO: 19853 - DNA, 15 bp, Homo sapiens
taccataaaactatc

SEQ ID NO: 19854 - DNA, 15 bp, Homo sapiens
ttaccataaaactat

SEQ ID NO: 19855 - DNA, 15 bp, Homo sapiens
gttaccataaaacta

SEQ ID NO: 19856 - DNA, 15 bp, Homo sapiens
tgttaccataaaact

SEQ ID NO: 19857 - DNA, 15 bp, Homo sapiens
ctgttaccataaaac

SEQ ID NO: 19858 - DNA, 15 bp, Homo sapiens
actgttaccataaaa

SEQ ID NO: 19859 - DNA, 15 bp, Homo sapiens
cactgttaccataaa

SEQ ID NO: 19860 - DNA, 15 bp, Homo sapiens
acactgttaccataa

SEQ ID NO: 19861 - DNA, 15 bp, Homo sapiens
aacactgttaccata

SEQ ID NO: 19862 - DNA, 15 bp, Homo sapiens
aaacactgttaccat

SEQ ID NO: 19863 - DNA, 15 bp, Homo sapiens
aaaacactgttacca

SEQ ID NO: 19864 - DNA, 15 bp, Homo sapiens
aaaaacactgttacc

SEQ ID NO: 19865 - DNA, 15 bp, Homo sapiens
aaaaaacactgttac

SEQ ID NO: 19866 - DNA, 15 bp, Homo sapiens
aaaaaaacactgtta

SEQ ID NO: 19867 - DNA, 15 bp, Homo sapiens
caaaaaaacactgtt

SEQ ID NO: 19868 - DNA, 15 bp, Homo sapiens
acaaaaaaacactgt

SEQ ID NO: 19869 - DNA, 15 bp, Homo sapiens
aacaaaaaaacactg

SEQ ID NO: 19870 - DNA, 15 bp, Homo sapiens
gaacaaaaaaacact

SEQ ID NO: 19871 - DNA, 15 bp, Homo sapiens
ggaacaaaaaaacac

SEQ ID NO: 19872 - DNA, 15 bp, Homo sapiens
tggaacaaaaaaaca

SEQ ID NO: 19873 - DNA, 15 bp, Homo sapiens
atggaacaaaaaaac

SEQ ID NO: 19874 - DNA, 15 bp, Homo sapiens
catggaacaaaaaaa

SEQ ID NO: 19875 - DNA, 15 bp, Homo sapiens
tcatggaacaaaaaa

SEQ ID NO: 19876 - DNA, 15 bp, Homo sapiens
ctcatggaacaaaaa

SEQ ID NO: 19877 - DNA, 15 bp, Homo sapiens
tctcatggaacaaaa

SEQ ID NO: 19878 - DNA, 15 bp, Homo sapiens
atctcatggaacaaa

SEQ ID NO: 19879 - DNA, 15 bp, Homo sapiens
tatctcatggaacaa

SEQ ID NO: 19880 - DNA, 15 bp, Homo sapiens
ttatctcatggaaca

SEQ ID NO: 19881 - DNA, 15 bp, Homo sapiens
attatctcatggaac

SEQ ID NO: 19882 - DNA, 15 bp, Homo sapiens
aattatctcatggaa

SEQ ID NO: 19883 - DNA, 15 bp, Homo sapiens
aaattatctcatgga

SEQ ID NO: 19884 - DNA, 15 bp, Homo sapiens
taaattatctcatgg

SEQ ID NO: 19885 - DNA, 15 bp, Homo sapiens
ataaattatctcatg

SEQ ID NO: 19886 - DNA, 15 bp, Homo sapiens
tataaattatctcat

SEQ ID NO: 19887 - DNA, 15 bp, Homo sapiens
gtataaattatctca

SEQ ID NO: 19888 - DNA, 15 bp, Homo sapiens
tgtataaattatctc

SEQ ID NO: 19889 - DNA, 15 bp, Homo sapiens
atgtataaattatct

SEQ ID NO: 19890 - DNA, 15 bp, Homo sapiens
catgtataaattatc

SEQ ID NO: 19891 - DNA, 15 bp, Homo sapiens
gcatgtataaattat

SEQ ID NO: 19892 - DNA, 15 bp, Homo sapiens
agcatgtataaatta

SEQ ID NO: 19893 - DNA, 15 bp, Homo sapiens
gagcatgtataaatt

SEQ ID NO: 19894 - DNA, 15 bp, Homo sapiens
tgagcatgtataaat

SEQ ID NO: 19895 - DNA, 15 bp, Homo sapiens
atgagcatgtataaa

SEQ ID NO: 19896 - DNA, 15 bp, Homo sapiens
aatgagcatgtataa

SEQ ID NO: 19897 - DNA, 15 bp, Homo sapiens
caatgagcatgtata

SEQ ID NO: 19898 - DNA, 15 bp, Homo sapiens
acaatgagcatgtat

SEQ ID NO: 19899 - DNA, 15 bp, Homo sapiens
cacaatgagcatgta

SEQ ID NO: 19900 - DNA, 15 bp, Homo sapiens
ccacaatgagcatgt

SEQ ID NO: 19901 - DNA, 15 bp, Homo sapiens
tccacaatgagcatg

SEQ ID NO: 19902 - DNA, 15 bp, Homo sapiens
ttccacaatgagcat

SEQ ID NO: 19903 - DNA, 15 bp, Homo sapiens
tttccacaatgagca

SEQ ID NO: 19904 - DNA, 15 bp, Homo sapiens
ttttccacaatgagc

SEQ ID NO: 19905 - DNA, 15 bp, Homo sapiens
attttccacaatgag

SEQ ID NO: 19906 - DNA, 15 bp, Homo sapiens
aattttccacaatga

SEQ ID NO: 19907 - DNA, 15 bp, Homo sapiens
aaattttccacaatg

SEQ ID NO: 19908 - DNA, 15 bp, Homo sapiens
taaattttccacaat

SEQ ID NO: 19909 - DNA, 15 bp, Homo sapiens
ctaaattttccacaa

SEQ ID NO: 19910 - DNA, 15 bp, Homo sapiens
tctaaattttccaca

SEQ ID NO: 19911 - DNA, 15 bp, Homo sapiens
ttctaaattttccac

SEQ ID NO: 19912 - DNA, 15 bp, Homo sapiens
tttctaaattttcca

SEQ ID NO: 19913 - DNA, 15 bp, Homo sapiens
ttttctaaattttcc

SEQ ID NO: 19914 - DNA, 15 bp, Homo sapiens
cttttctaaattttc

SEQ ID NO: 19915 - DNA, 15 bp, Homo sapiens
tcttttctaaatttt

SEQ ID NO: 19916 - DNA, 15 bp, Homo sapiens
gtcttttctaaattt

SEQ ID NO: 19917 - DNA, 15 bp, Homo sapiens
tgtcttttctaaatt

SEQ ID NO: 19918 - DNA, 15 bp, Homo sapiens
ctgtcttttctaaat

SEQ ID NO: 19919 - DNA, 15 bp, Homo sapiens
cctgtcttttctaaa

SEQ ID NO: 19920 - DNA, 15 bp, Homo sapiens
tcctgtcttttctaa

SEQ ID NO: 19921 - DNA, 15 bp, Homo sapiens
ttcctgtcttttcta

SEQ ID NO: 19922 - DNA, 15 bp, Homo sapiens
tttcctgtcttttct

SEQ ID NO: 19923 - DNA, 15 bp, Homo sapiens
ctttcctgtcttttc

SEQ ID NO: 19924 - DNA, 15 bp, Homo sapiens
actttcctgtctttt

SEQ ID NO: 19925 - DNA, 15 bp, Homo sapiens
tactttcctgtcttt

SEQ ID NO: 19926 - DNA, 15 bp, Homo sapiens
atactttcctgtctt

SEQ ID NO: 19927 - DNA, 15 bp, Homo sapiens
aatactttcctgtct

SEQ ID NO: 19928 - DNA, 15 bp, Homo sapiens
taatactttcctgtc

SEQ ID NO: 19929 - DNA, 15 bp, Homo sapiens
ttaatactttcctgt

SEQ ID NO: 19930 - DNA, 15 bp, Homo sapiens
tttaatactttcctg

SEQ ID NO: 19931 - DNA, 15 bp, Homo sapiens
ttttaatactttcct

SEQ ID NO: 19932 - DNA, 15 bp, Homo sapiens
tttttaatactttcc

SEQ ID NO: 19933 - DNA, 15 bp, Homo sapiens
gtttttaatactttc

SEQ ID NO: 19934 - DNA, 15 bp, Homo sapiens
tgtttttaatacttt

SEQ ID NO: 19935 - DNA, 15 bp, Homo sapiens
atgtttttaatactt

SEQ ID NO: 19936 - DNA, 15 bp, Homo sapiens
gatgtttttaatact

SEQ ID NO: 19937 - DNA, 15 bp, Homo sapiens
tgatgtttttaatac

SEQ ID NO: 19938 - DNA, 15 bp, Homo sapiens
gtgatgtttttaata

SEQ ID NO: 19939 - DNA, 15 bp, Homo sapiens
agtgatgtttttaat

SEQ ID NO: 19940 - DNA, 15 bp, Homo sapiens
aagtgatgtttttaa

SEQ ID NO: 19941 - DNA, 15 bp, Homo sapiens
aaagtgatgttttta

SEQ ID NO: 19942 - DNA, 15 bp, Homo sapiens
aaaagtgatgttttt

SEQ ID NO: 19943 - DNA, 15 bp, Homo sapiens
aaaaagtgatgtttt

SEQ ID NO: 19944 - DNA, 15 bp, Homo sapiens
aaaaaagtgatgttt

SEQ ID NO: 19945 - DNA, 15 bp, Homo sapiens
aaaaaaagtgatgtt

SEQ ID NO: 19946 - DNA, 15 bp, Homo sapiens
aaaaaaaagtgatgt

SEQ ID NO: 19947 - DNA, 15 bp, Homo sapiens
aaaaaaaaagtgatg

SEQ ID NO: 19948 - DNA, 15 bp, Homo sapiens
aaaaaaaaaagtgat

SEQ ID NO: 19949 - DNA, 15 bp, Homo sapiens
aaaaaaaaaaagtga

SEQ ID NO: 19950 - DNA, 15 bp, Homo sapiens
aaaaaaaaaaaagtg

SEQ ID NO: 19951 - DNA, 15 bp, Homo sapiens
ctcttaaaaaaaaaa

SEQ ID NO: 19952 - DNA, 15 bp, Homo sapiens
tctcttaaaaaaaaa

SEQ ID NO: 19953 - DNA, 15 bp, Homo sapiens
gtctcttaaaaaaaa

SEQ ID NO: 19954 - DNA, 15 bp, Homo sapiens
tgtctcttaaaaaaa

SEQ ID NO: 19955 - DNA, 15 bp, Homo sapiens
ctgtctcttaaaaaa

SEQ ID NO: 19956 - DNA, 15 bp, Homo sapiens
tctgtctcttaaaaa

SEQ ID NO: 19957 - DNA, 15 bp, Homo sapiens
ctctgtctcttaaaa

SEQ ID NO: 19958 - DNA, 15 bp, Homo sapiens
actctgtctcttaaa

SEQ ID NO: 19959 - DNA, 15 bp, Homo sapiens
gactctgtctcttaa

SEQ ID NO: 19960 - DNA, 15 bp, Homo sapiens
agactctgtctctta

SEQ ID NO: 19961 - DNA, 15 bp, Homo sapiens
aagactctgtctctt

SEQ ID NO: 19962 - DNA, 15 bp, Homo sapiens
caagactctgtctct

SEQ ID NO: 19963 - DNA, 15 bp, Homo sapiens
gcaagactctgtctc

SEQ ID NO: 19964 - DNA, 15 bp, Homo sapiens
agcaagactctgtct

SEQ ID NO: 19965 - DNA, 15 bp, Homo sapiens
gagcaagactctgtc

SEQ ID NO: 19966 - DNA, 15 bp, Homo sapiens
agagcaagactctgt

SEQ ID NO: 19967 - DNA, 15 bp, Homo sapiens
cagagcaagactctg

SEQ ID NO: 19968 - DNA, 15 bp, Homo sapiens
acagagcaagactct

SEQ ID NO: 19969 - DNA, 15 bp, Homo sapiens
cgacagagcaagact

SEQ ID NO: 19970 - DNA, 15 bp, Homo sapiens
gcgacagagcaagac

SEQ ID NO: 19971 - DNA, 15 bp, Homo sapiens
ggcgacagagcaaga

SEQ ID NO: 19972 - DNA, 15 bp, Homo sapiens
gggcgacagagcaag

SEQ ID NO: 19973 - DNA, 15 bp, Homo sapiens
tgggcgacagagcaa

SEQ ID NO: 19974 - DNA, 15 bp, Homo sapiens
ctgggcgacagagca

SEQ ID NO: 19975 - DNA, 15 bp, Homo sapiens
ggcctgggcgacaga

SEQ ID NO: 19976 - DNA, 15 bp, Homo sapiens
cggcctgggcgacag

SEQ ID NO: 19977 - DNA, 15 bp, Homo sapiens
ccggcctgggcgaca

SEQ ID NO: 19978 - DNA, 15 bp, Homo sapiens
tccggcctgggcgac

SEQ ID NO: 19979 - DNA, 15 bp, Homo sapiens
ctccggcctgggcga

SEQ ID NO: 19980 - DNA, 15 bp, Homo sapiens
actccggcctgggcg

SEQ ID NO: 19981 - DNA, 15 bp, Homo sapiens
cactccggcctgggc

SEQ ID NO: 19982 - DNA, 15 bp, Homo sapiens
gcactccggcctggg

SEQ ID NO: 19983 - DNA, 15 bp, Homo sapiens
tgcactccggcctgg

SEQ ID NO: 19984 - DNA, 15 bp, Homo sapiens
ctgcactccggcctg

SEQ ID NO: 19985 - DNA, 15 bp, Homo sapiens
actgcactccggcct

SEQ ID NO: 19986 - DNA, 15 bp, Homo sapiens
cactgcactccggcc

SEQ ID NO: 19987 - DNA, 15 bp, Homo sapiens
ccactgcactccggc

SEQ ID NO: 19988 - DNA, 15 bp, Homo sapiens
gccactgcactccgg

SEQ ID NO: 19989 - DNA, 15 bp, Homo sapiens
cgccactgcactccg

SEQ ID NO: 19990 - DNA, 15 bp, Homo sapiens
acgccactgcactcc

SEQ ID NO: 19991 - DNA, 15 bp, Homo sapiens
cacgccactgcactc

SEQ ID NO: 19992 - DNA, 15 bp, Homo sapiens
tcacgccactgcact

SEQ ID NO: 19993 - DNA, 15 bp, Homo sapiens
atcacgccactgcac

SEQ ID NO: 19994 - DNA, 15 bp, Homo sapiens
gatcacgccactgca

SEQ ID NO: 19995 - DNA, 15 bp, Homo sapiens
agatcacgccactgc

SEQ ID NO: 19996 - DNA, 15 bp, Homo sapiens
gagatcacgccactg

SEQ ID NO: 19997 - DNA, 15 bp, Homo sapiens
tgagatcacgccact

SEQ ID NO: 19998 - DNA, 15 bp, Homo sapiens
ctgagatcacgccac

SEQ ID NO: 19999 - DNA, 15 bp, Homo sapiens
gctgagatcacgcca

SEQ ID NO: 20000 - DNA, 15 bp, Homo sapiens
agctgagatcacgcc

SEQ ID NO: 20001 - DNA, 15 bp, Homo sapiens
gagctgagatcacgc

SEQ ID NO: 20002 - DNA, 15 bp, Homo sapiens
tgagctgagatcacg

SEQ ID NO: 20003 - DNA, 15 bp, Homo sapiens
gtgagctgagatcac

SEQ ID NO: 20004 - DNA, 15 bp, Homo sapiens
tgtgagctgagatca

SEQ ID NO: 20005 - DNA, 15 bp, Homo sapiens
ctgtgagctgagatc

SEQ ID NO: 20006 - DNA, 15 bp, Homo sapiens
gctgtgagctgagat

SEQ ID NO: 20007 - DNA, 15 bp, Homo sapiens
tgctgtgagctgaga

SEQ ID NO: 20008 - DNA, 15 bp, Homo sapiens
ttgctgtgagctgag

SEQ ID NO: 20009 - DNA, 15 bp, Homo sapiens
gttgctgtgagctga

SEQ ID NO: 20010 - DNA, 15 bp, Homo sapiens
ggttgctgtgagctg

SEQ ID NO: 20011 - DNA, 15 bp, Homo sapiens
aggttgctgtgagct

SEQ ID NO: 20012 - DNA, 15 bp, Homo sapiens
gaggttgctgtgagc

SEQ ID NO: 20013 - DNA, 15 bp, Homo sapiens
ggaggttgctgtgag

SEQ ID NO: 20014 - DNA, 15 bp, Homo sapiens
cggaggttgctgtga

SEQ ID NO: 20015 - DNA, 15 bp, Homo sapiens
gcggaggttgctgtg

SEQ ID NO: 20016 - DNA, 15 bp, Homo sapiens
agcggaggttgctgt

SEQ ID NO: 20017 - DNA, 15 bp, Homo sapiens
aagcggaggttgctg

SEQ ID NO: 20018 - DNA, 15 bp, Homo sapiens
gaagcggaggttgct

SEQ ID NO: 20019 - DNA, 15 bp, Homo sapiens
ggaagcggaggttgc

SEQ ID NO: 20020 - DNA, 15 bp, Homo sapiens
gggaagcggaggttg

SEQ ID NO: 20021 - DNA, 15 bp, Homo sapiens
tgggaagcggaggtt

SEQ ID NO: 20022 - DNA, 15 bp, Homo sapiens
ctgggaagcggaggt

SEQ ID NO: 20023 - DNA, 15 bp, Homo sapiens
cctgggaagcggagg

SEQ ID NO: 20024 - DNA, 15 bp, Homo sapiens
acctgggaagcggag

SEQ ID NO: 20025 - DNA, 15 bp, Homo sapiens
aacctgggaagcgga

SEQ ID NO: 20026 - DNA, 15 bp, Homo sapiens
aaacctgggaagcgg

SEQ ID NO: 20027 - DNA, 15 bp, Homo sapiens
taaacctgggaagcg

SEQ ID NO: 20028 - DNA, 15 bp, Homo sapiens
ttaaacctgggaagc

SEQ ID NO: 20029 - DNA, 15 bp, Homo sapiens
cttaaacctgggaag

SEQ ID NO: 20030 - DNA, 15 bp, Homo sapiens
acttaaacctgggaa

SEQ ID NO: 20031 - DNA, 15 bp, Homo sapiens
cacttaaacctggga

SEQ ID NO: 20032 - DNA, 15 bp, Homo sapiens
tcacttaaacctggg

SEQ ID NO: 20033 - DNA, 15 bp, Homo sapiens
atcacttaaacctgg

SEQ ID NO: 20034 - DNA, 15 bp, Homo sapiens
aatcacttaaacctg

SEQ ID NO: 20035 - DNA, 15 bp, Homo sapiens
gaatcacttaaacct

SEQ ID NO: 20036 - DNA, 15 bp, Homo sapiens
agaatcacttaaacc

SEQ ID NO: 20037 - DNA, 15 bp, Homo sapiens
gagaatcacttaaac

SEQ ID NO: 20038 - DNA, 15 bp, Homo sapiens
ggagaatcacttaaa

SEQ ID NO: 20039 - DNA, 15 bp, Homo sapiens
aggagaatcacttaa

SEQ ID NO: 20040 - DNA, 15 bp, Homo sapiens
caggagaatcactta

SEQ ID NO: 20041 - DNA, 15 bp, Homo sapiens
ctcccagctacttgg

SEQ ID NO: 20042 - DNA, 15 bp, Homo sapiens
actcccagctacttg

SEQ ID NO: 20043 - DNA, 15 bp, Homo sapiens
tactcccagctactt

SEQ ID NO: 20044 - DNA, 15 bp, Homo sapiens
gtactcccagctact

SEQ ID NO: 20045 - DNA, 15 bp, Homo sapiens
tgtactcccagctac

SEQ ID NO: 20046 - DNA, 15 bp, Homo sapiens
ctgtactcccagcta

SEQ ID NO: 20047 - DNA, 15 bp, Homo sapiens
cctgtactcccagct

SEQ ID NO: 20048 - DNA, 15 bp, Homo sapiens
gcctgtactcccagc

SEQ ID NO: 20049 - DNA, 15 bp, Homo sapiens
tgcctgtactcccag

SEQ ID NO: 20050 - DNA, 15 bp, Homo sapiens
atgcctgtactccca

SEQ ID NO: 20051 - DNA, 15 bp, Homo sapiens
catgcctgtactccc

SEQ ID NO: 20052 - DNA, 15 bp, Homo sapiens
gcatgcctgtactcc

SEQ ID NO: 20053 - DNA, 15 bp, Homo sapiens
tgcatgcctgtactc

SEQ ID NO: 20054 - DNA, 15 bp, Homo sapiens
gtgcatgcctgtact

SEQ ID NO: 20055 - DNA, 15 bp, Homo sapiens
ggtgcatgcctgtac

SEQ ID NO: 20056 - DNA, 15 bp, Homo sapiens
gtggtggtgcatgcc

SEQ ID NO: 20057 - DNA, 15 bp, Homo sapiens
cgtggtggtgcatgc

SEQ ID NO: 20058 - DNA, 15 bp, Homo sapiens
gcgtggtggtgcatg

SEQ ID NO: 20059 - DNA, 15 bp, Homo sapiens
ggcgtggtggtgcat

SEQ ID NO: 20060 - DNA, 15 bp, Homo sapiens
gggcgtggtggtgca

SEQ ID NO: 20061 - DNA, 15 bp, Homo sapiens
cgggcgtggtggtgc

SEQ ID NO: 20062 - DNA, 15 bp, Homo sapiens
ccgggcgtggtggtg

SEQ ID NO: 20063 - DNA, 15 bp, Homo sapiens
gccgggcgtggtggt

SEQ ID NO: 20064 - DNA, 15 bp, Homo sapiens
agccgggcgtggtgg

SEQ ID NO: 20065 - DNA, 15 bp, Homo sapiens
tagccgggcgtggtg

SEQ ID NO: 20066 - DNA, 15 bp, Homo sapiens
ttagccgggcgtggt

SEQ ID NO: 20067 - DNA, 15 bp, Homo sapiens
attagccgggcgtgg

SEQ ID NO: 20068 - DNA, 15 bp, Homo sapiens
aattagccgggcgtg

SEQ ID NO: 20069 - DNA, 15 bp, Homo sapiens
caaaattagccgggc

SEQ ID NO: 20070 - DNA, 15 bp, Homo sapiens
acaaaattagccggg

SEQ ID NO: 20071 - DNA, 15 bp, Homo sapiens
tacaaaattagccgg

SEQ ID NO: 20072 - DNA, 15 bp, Homo sapiens
atacaaaattagccg

SEQ ID NO: 20073 - DNA, 15 bp, Homo sapiens
aatacaaaattagcc

SEQ ID NO: 20074 - DNA, 15 bp, Homo sapiens
aaatacaaaattagc

SEQ ID NO: 20075 - DNA, 15 bp, Homo sapiens
aaaatacaaaattag

SEQ ID NO: 20076 - DNA, 15 bp, Homo sapiens
aaaaatacaaaatta

SEQ ID NO: 20077 - DNA, 15 bp, Homo sapiens
taaaaatacaaaatt

SEQ ID NO: 20078 - DNA, 15 bp, Homo sapiens
aggcggatcacctga

SEQ ID NO: 20079 - DNA, 15 bp, Homo sapiens
caggcggatcacctg

SEQ ID NO: 20080 - DNA, 15 bp, Homo sapiens
gcaggcggatcacct

SEQ ID NO: 20081 - DNA, 15 bp, Homo sapiens
ggcaggcggatcacc

SEQ ID NO: 20082 - DNA, 15 bp, Homo sapiens
aaggcaggcggatca

SEQ ID NO: 20083 - DNA, 15 bp, Homo sapiens
caaggcaggcggatc

SEQ ID NO: 20084 - DNA, 15 bp, Homo sapiens
ccaaggcaggcggat

SEQ ID NO: 20085 - DNA, 15 bp, Homo sapiens
gccaaggcaggcgga

SEQ ID NO: 20086 - DNA, 15 bp, Homo sapiens
ggccaaggcaggcgg

SEQ ID NO: 20087 - DNA, 15 bp, Homo sapiens
aggccaaggcaggcg

SEQ ID NO: 20088 - DNA, 15 bp, Homo sapiens
gaggccaaggcaggc

SEQ ID NO: 20089 - DNA, 15 bp, Homo sapiens
cgaggccaaggcagg

SEQ ID NO: 20090 - DNA, 15 bp, Homo sapiens
gcgaggccaaggcag

SEQ ID NO: 20091 - DNA, 15 bp, Homo sapiens
tgcgaggccaaggca

SEQ ID NO: 20092 - DNA, 15 bp, Homo sapiens
ttgcgaggccaaggc

SEQ ID NO: 20093 - DNA, 15 bp, Homo sapiens
tttgcgaggccaagg

SEQ ID NO: 20094 - DNA, 15 bp, Homo sapiens
ctttgcgaggccaag

SEQ ID NO: 20095 - DNA, 15 bp, Homo sapiens
actttgcgaggccaa

SEQ ID NO: 20096 - DNA, 15 bp, Homo sapiens
aactttgcgaggcca

SEQ ID NO: 20097 - DNA, 15 bp, Homo sapiens
gaactttgcgaggcc

SEQ ID NO: 20098 - DNA, 15 bp, Homo sapiens
agaactttgcgaggc

SEQ ID NO: 20099 - DNA, 15 bp, Homo sapiens
cagaactttgcgagg

SEQ ID NO: 20100 - DNA, 15 bp, Homo sapiens
ccagaactttgcgag

SEQ ID NO: 20101 - DNA, 15 bp, Homo sapiens
cccagaactttgcga

SEQ ID NO: 20102 - DNA, 15 bp, Homo sapiens
tcccagaactttgcg

SEQ ID NO: 20103 - DNA, 15 bp, Homo sapiens
atcccagaactttgc

SEQ ID NO: 20104 - DNA, 15 bp, Homo sapiens
aatcccagaactttg

SEQ ID NO: 20105 - DNA, 15 bp, Homo sapiens
taatcccagaacttt

SEQ ID NO: 20106 - DNA, 15 bp, Homo sapiens
ataatcccagaactt

SEQ ID NO: 20107 - DNA, 15 bp, Homo sapiens
tataatcccagaact

SEQ ID NO: 20108 - DNA, 15 bp, Homo sapiens
ctataatcccagaac

SEQ ID NO: 20109 - DNA, 15 bp, Homo sapiens
cctataatcccagaa

SEQ ID NO: 20110 - DNA, 15 bp, Homo sapiens
gcctataatcccaga

SEQ ID NO: 20111 - DNA, 15 bp, Homo sapiens
ctgcctataatccca

SEQ ID NO: 20112 - DNA, 15 bp, Homo sapiens
cctgcctataatccc

SEQ ID NO: 20113 - DNA, 15 bp, Homo sapiens
tcctgcctataatcc

SEQ ID NO: 20114 - DNA, 15 bp, Homo sapiens
ctcctgcctataatc

SEQ ID NO: 20115 - DNA, 15 bp, Homo sapiens
gctcctgcctataat

SEQ ID NO: 20116 - DNA, 15 bp, Homo sapiens
ggctcctgcctataa

SEQ ID NO: 20117 - DNA, 15 bp, Homo sapiens
tggctcctgcctata

SEQ ID NO: 20118 - DNA, 15 bp, Homo sapiens
gtggctcctgcctat

SEQ ID NO: 20119 - DNA, 15 bp, Homo sapiens
agtggctcctgccta

SEQ ID NO: 20120 - DNA, 15 bp, Homo sapiens
cagtggctcctgcct

SEQ ID NO: 20121 - DNA, 15 bp, Homo sapiens
gcagtggctcctgcc

SEQ ID NO: 20122 - DNA, 15 bp, Homo sapiens
cgcagtggctcctgc

SEQ ID NO: 20123 - DNA, 15 bp, Homo sapiens
gcgcagtggctcctg

SEQ ID NO: 20124 - DNA, 15 bp, Homo sapiens
ggcgcagtggctcct

SEQ ID NO: 20125 - DNA, 15 bp, Homo sapiens
tggcgcagtggctcc

SEQ ID NO: 20126 - DNA, 15 bp, Homo sapiens
ctggcgcagtggctc

SEQ ID NO: 20127 - DNA, 15 bp, Homo sapiens
gctggcgcagtggct

SEQ ID NO: 20128 - DNA, 15 bp, Homo sapiens
ggctggcgcagtggc

SEQ ID NO: 20129 - DNA, 15 bp, Homo sapiens
tggctggcgcagtgg

SEQ ID NO: 20130 - DNA, 15 bp, Homo sapiens
gtggctggcgcagtg

SEQ ID NO: 20131 - DNA, 15 bp, Homo sapiens
tgtggctggcgcagt

SEQ ID NO: 20132 - DNA, 15 bp, Homo sapiens
gtgtggctggcgcag

SEQ ID NO: 20133 - DNA, 15 bp, Homo sapiens
ggtgtggctggcgca

SEQ ID NO: 20134 - DNA, 15 bp, Homo sapiens
aggtgtggctggcgc

SEQ ID NO: 20135 - DNA, 15 bp, Homo sapiens
taggtgtggctggcg

SEQ ID NO: 20136 - DNA, 15 bp, Homo sapiens
gtaggtgtggctggc

SEQ ID NO: 20137 - DNA, 15 bp, Homo sapiens
cgtaggtgtggctgg

SEQ ID NO: 20138 - DNA, 15 bp, Homo sapiens
acgtaggtgtggctg

SEQ ID NO: 20139 - DNA, 15 bp, Homo sapiens
aacgtaggtgtggct

SEQ ID NO: 20140 - DNA, 15 bp, Homo sapiens
gaacgtaggtgtggc

SEQ ID NO: 20141 - DNA, 15 bp, Homo sapiens
agaacgtaggtgtgg

SEQ ID NO: 20142 - DNA, 15 bp, Homo sapiens
aagaacgtaggtgtg

SEQ ID NO: 20143 - DNA, 15 bp, Homo sapiens
taagaacgtaggtgt

SEQ ID NO: 20144 - DNA, 15 bp, Homo sapiens
ataagaacgtaggtg

SEQ ID NO: 20145 - DNA, 15 bp, Homo sapiens
gataagaacgtaggt

SEQ ID NO: 20146 - DNA, 15 bp, Homo sapiens
tgataagaacgtagg

SEQ ID NO: 20147 - DNA, 15 bp, Homo sapiens
atgataagaacgtag

SEQ ID NO: 20148 - DNA, 15 bp, Homo sapiens
gatgataagaacgta

SEQ ID NO: 20149 - DNA, 15 bp, Homo sapiens
ggatgataagaacgt

SEQ ID NO: 20150 - DNA, 15 bp, Homo sapiens
aggatgataagaacg

SEQ ID NO: 20151 - DNA, 15 bp, Homo sapiens
taggatgataagaac

SEQ ID NO: 20152 - DNA, 15 bp, Homo sapiens
ctaggatgataagaa

SEQ ID NO: 20153 - DNA, 15 bp, Homo sapiens
actaggatgataaga

SEQ ID NO: 20154 - DNA, 15 bp, Homo sapiens
tactaggatgataag

SEQ ID NO: 20155 - DNA, 15 bp, Homo sapiens
gtactaggatgataa

SEQ ID NO: 20156 - DNA, 15 bp, Homo sapiens
tgtactaggatgata

SEQ ID NO: 20157 - DNA, 15 bp, Homo sapiens
atgtactaggatgat

SEQ ID NO: 20158 - DNA, 15 bp, Homo sapiens
gatgtactaggatga

SEQ ID NO: 20159 - DNA, 15 bp, Homo sapiens
ggatgtactaggatg

SEQ ID NO: 20160 - DNA, 15 bp, Homo sapiens
tggatgtactaggat

SEQ ID NO: 20161 - DNA, 15 bp, Homo sapiens
gtggatgtactagga

SEQ ID NO: 20162 - DNA, 15 bp, Homo sapiens
agtggatgtactagg

SEQ ID NO: 20163 - DNA, 15 bp, Homo sapiens
cagtggatgtactag

SEQ ID NO: 20164 - DNA, 15 bp, Homo sapiens
acagtggatgtacta

SEQ ID NO: 20165 - DNA, 15 bp, Homo sapiens
gacagtggatgtact

SEQ ID NO: 20166 - DNA, 15 bp, Homo sapiens
tgacagtggatgtac

SEQ ID NO: 20167 - DNA, 15 bp, Homo sapiens
atgacagtggatgta

SEQ ID NO: 20168 - DNA, 15 bp, Homo sapiens
aatgacagtggatgt

SEQ ID NO: 20169 - DNA, 15 bp, Homo sapiens
taatgacagtggatg

SEQ ID NO: 20170 - DNA, 15 bp, Homo sapiens
ataatgacagtggat

SEQ ID NO: 20171 - DNA, 15 bp, Homo sapiens
gataatgacagtgga

SEQ ID NO: 20172 - DNA, 15 bp, Homo sapiens
agataatgacagtgg

SEQ ID NO: 20173 - DNA, 15 bp, Homo sapiens
aagataatgacagtg

SEQ ID NO: 20174 - DNA, 15 bp, Homo sapiens
caagataatgacagt

SEQ ID NO: 20175 - DNA, 15 bp, Homo sapiens
gcaagataatgacag

SEQ ID NO: 20176 - DNA, 15 bp, Homo sapiens
agcaagataatgaca

SEQ ID NO: 20177 - DNA, 15 bp, Homo sapiens
cagcaagataatgac

SEQ ID NO: 20178 - DNA, 15 bp, Homo sapiens
acagcaagataatga

SEQ ID NO: 20179 - DNA, 15 bp, Homo sapiens
tacagcaagataatg

SEQ ID NO: 20180 - DNA, 15 bp, Homo sapiens
atacagcaagataat

SEQ ID NO: 20181 - DNA, 15 bp, Homo sapiens
aatacagcaagataa

SEQ ID NO: 20182 - DNA, 15 bp, Homo sapiens
aaatacagcaagata

SEQ ID NO: 20183 - DNA, 15 bp, Homo sapiens
gaaatacagcaagat

SEQ ID NO: 20184 - DNA, 15 bp, Homo sapiens
ggaaatacagcaaga

SEQ ID NO: 20185 - DNA, 15 bp, Homo sapiens
aggaaatacagcaag

SEQ ID NO: 20186 - DNA, 15 bp, Homo sapiens
aaggaaatacagcaa

SEQ ID NO: 20187 - DNA, 15 bp, Homo sapiens
gaaggaaatacagca

SEQ ID NO: 20188 - DNA, 15 bp, Homo sapiens
agaaggaaatacagc

SEQ ID NO: 20189 - DNA, 15 bp, Homo sapiens
cagaaggaaatacag

SEQ ID NO: 20190 - DNA, 15 bp, Homo sapiens
gcagaaggaaataca

SEQ ID NO: 20191 - DNA, 15 bp, Homo sapiens
ggcagaaggaaatac

SEQ ID NO: 20192 - DNA, 15 bp, Homo sapiens
gggcagaaggaaata

SEQ ID NO: 20193 - DNA, 15 bp, Homo sapiens
tgggcagaaggaaat

SEQ ID NO: 20194 - DNA, 15 bp, Homo sapiens
ctgggcagaaggaaa

SEQ ID NO: 20195 - DNA, 15 bp, Homo sapiens
actgggcagaaggaa

SEQ ID NO: 20196 - DNA, 15 bp, Homo sapiens
gactgggcagaagga

SEQ ID NO: 20197 - DNA, 15 bp, Homo sapiens
agactgggcagaagg

SEQ ID NO: 20198 - DNA, 15 bp, Homo sapiens
gagactgggcagaag

SEQ ID NO: 20199 - DNA, 15 bp, Homo sapiens
tgagactgggcagaa

SEQ ID NO: 20200 - DNA, 15 bp, Homo sapiens
gtgagactgggcaga

SEQ ID NO: 20201 - DNA, 15 bp, Homo sapiens
agtgagactgggcag

SEQ ID NO: 20202 - DNA, 15 bp, Homo sapiens
gagtgagactgggca

SEQ ID NO: 20203 - DNA, 15 bp, Homo sapiens
agagtgagactgggc

SEQ ID NO: 20204 - DNA, 15 bp, Homo sapiens
cagagtgagactggg

SEQ ID NO: 20205 - DNA, 15 bp, Homo sapiens
tcagagtgagactgg

SEQ ID NO: 20206 - DNA, 15 bp, Homo sapiens
atcagagtgagactg

SEQ ID NO: 20207 - DNA, 15 bp, Homo sapiens
gatcagagtgagact

SEQ ID NO: 20208 - DNA, 15 bp, Homo sapiens
tgatcagagtgagac

SEQ ID NO: 20209 - DNA, 15 bp, Homo sapiens
atgatcagagtgaga

SEQ ID NO: 20210 - DNA, 15 bp, Homo sapiens
catgatcagagtgag

SEQ ID NO: 20211 - DNA, 15 bp, Homo sapiens
gcatgatcagagtga

SEQ ID NO: 20212 - DNA, 15 bp, Homo sapiens
tgcatgatcagagtg

SEQ ID NO: 20213 - DNA, 15 bp, Homo sapiens
ctgcatgatcagagt

SEQ ID NO: 20214 - DNA, 15 bp, Homo sapiens
actgcatgatcagag

SEQ ID NO: 20215 - DNA, 15 bp, Homo sapiens
cactgcatgatcaga

SEQ ID NO: 20216 - DNA, 15 bp, Homo sapiens
ccactgcatgatcag

SEQ ID NO: 20217 - DNA, 15 bp, Homo sapiens
gccactgcatgatca

SEQ ID NO: 20218 - DNA, 15 bp, Homo sapiens
cgccactgcatgatc

SEQ ID NO: 20219 - DNA, 15 bp, Homo sapiens
acgccactgcatgat

SEQ ID NO: 20220 - DNA, 15 bp, Homo sapiens
cacgccactgcatga

SEQ ID NO: 20221 - DNA, 15 bp, Homo sapiens
tcacgccactgcatg

SEQ ID NO: 20222 - DNA, 15 bp, Homo sapiens
atcacgccactgcat

SEQ ID NO: 20223 - DNA, 15 bp, Homo sapiens
tgatcacgccactgc

SEQ ID NO: 20224 - DNA, 15 bp, Homo sapiens
atgatcacgccactg

SEQ ID NO: 20225 - DNA, 15 bp, Homo sapiens
catgatcacgccact

SEQ ID NO: 20226 - DNA, 15 bp, Homo sapiens
gcatgatcacgccac

SEQ ID NO: 20227 - DNA, 15 bp, Homo sapiens
tgcatgatcacgcca

SEQ ID NO: 20228 - DNA, 15 bp, Homo sapiens
ctgcatgatcacgcc

SEQ ID NO: 20229 - DNA, 15 bp, Homo sapiens
actgcatgatcacgc

SEQ ID NO: 20230 - DNA, 15 bp, Homo sapiens
cactgcatgatcacg

SEQ ID NO: 20231 - DNA, 15 bp, Homo sapiens
tcactgcatgatcac

SEQ ID NO: 20232 - DNA, 15 bp, Homo sapiens
atcactgcatgatca

SEQ ID NO: 20233 - DNA, 15 bp, Homo sapiens
gatcactgcatgatc

SEQ ID NO: 20234 - DNA, 15 bp, Homo sapiens
agatcactgcatgat

SEQ ID NO: 20235 - DNA, 15 bp, Homo sapiens
gagatcactgcatga

SEQ ID NO: 20236 - DNA, 15 bp, Homo sapiens
cgagatcactgcatg

SEQ ID NO: 20237 - DNA, 15 bp, Homo sapiens
ccgagatcactgcat

SEQ ID NO: 20238 - DNA, 15 bp, Homo sapiens
gccgagatcactgca

SEQ ID NO: 20239 - DNA, 15 bp, Homo sapiens
agccgagatcactgc

SEQ ID NO: 20240 - DNA, 15 bp, Homo sapiens
gagccgagatcactg

SEQ ID NO: 20241 - DNA, 15 bp, Homo sapiens
tgagccgagatcact

SEQ ID NO: 20242 - DNA, 15 bp, Homo sapiens
gtgagccgagatcac

SEQ ID NO: 20243 - DNA, 15 bp, Homo sapiens
taggttgcagtgagc

SEQ ID NO: 20244 - DNA, 15 bp, Homo sapiens
ctaggttgcagtgag

SEQ ID NO: 20245 - DNA, 15 bp, Homo sapiens
cctaggttgcagtga

SEQ ID NO: 20246 - DNA, 15 bp, Homo sapiens
gcctaggttgcagtg

SEQ ID NO: 20247 - DNA, 15 bp, Homo sapiens
ggcctaggttgcagt

SEQ ID NO: 20248 - DNA, 15 bp, Homo sapiens
aggcctaggttgcag

SEQ ID NO: 20249 - DNA, 15 bp, Homo sapiens
aaggcctaggttgca

SEQ ID NO: 20250 - DNA, 15 bp, Homo sapiens
gaaggcctaggttgc

SEQ ID NO: 20251 - DNA, 15 bp, Homo sapiens
agaaggcctaggttg

SEQ ID NO: 20252 - DNA, 15 bp, Homo sapiens
cagaaggcctaggtt

SEQ ID NO: 20253 - DNA, 15 bp, Homo sapiens
ccagaaggcctaggt

SEQ ID NO: 20254 - DNA, 15 bp, Homo sapiens
cccagaaggcctagg

SEQ ID NO: 20255 - DNA, 15 bp, Homo sapiens
acccagaaggcctag

SEQ ID NO: 20256 - DNA, 15 bp, Homo sapiens
aacccagaaggccta

SEQ ID NO: 20257 - DNA, 15 bp, Homo sapiens
gaacccagaaggcct

SEQ ID NO: 20258 - DNA, 15 bp, Homo sapiens
cgaacccagaaggcc

SEQ ID NO: 20259 - DNA, 15 bp, Homo sapiens
tcgaacccagaaggc

SEQ ID NO: 20260 - DNA, 15 bp, Homo sapiens
ctcgaacccagaagg

SEQ ID NO: 20261 - DNA, 15 bp, Homo sapiens
actcgaacccagaag

SEQ ID NO: 20262 - DNA, 15 bp, Homo sapiens
cactcgaacccagaa

SEQ ID NO: 20263 - DNA, 15 bp, Homo sapiens
tcactcgaacccaga

SEQ ID NO: 20264 - DNA, 15 bp, Homo sapiens
atcactcgaacccag

SEQ ID NO: 20265 - DNA, 15 bp, Homo sapiens
aatcactcgaaccca

SEQ ID NO: 20266 - DNA, 15 bp, Homo sapiens
gaatcactcgaaccc

SEQ ID NO: 20267 - DNA, 15 bp, Homo sapiens
agaatcactcgaacc

SEQ ID NO: 20268 - DNA, 15 bp, Homo sapiens
gagaatcactcgaac

SEQ ID NO: 20269 - DNA, 15 bp, Homo sapiens
ggagaatcactcgaa

SEQ ID NO: 20270 - DNA, 15 bp, Homo sapiens
aggagaatcactcga

SEQ ID NO: 20271 - DNA, 15 bp, Homo sapiens
caggagaatcactcg

SEQ ID NO: 20272 - DNA, 15 bp, Homo sapiens
gcaggagaatcactc

SEQ ID NO: 20273 - DNA, 15 bp, Homo sapiens
aaggcaggagaatca

SEQ ID NO: 20274 - DNA, 15 bp, Homo sapiens
taaggcaggagaatc

SEQ ID NO: 20275 - DNA, 15 bp, Homo sapiens
ctaaggcaggagaat

SEQ ID NO: 20276 - DNA, 15 bp, Homo sapiens
gctaaggcaggagaa

SEQ ID NO: 20277 - DNA, 15 bp, Homo sapiens
ggctaaggcaggaga

SEQ ID NO: 20278 - DNA, 15 bp, Homo sapiens
aggctaaggcaggag

SEQ ID NO: 20279 - DNA, 15 bp, Homo sapiens
gaggctaaggcagga

SEQ ID NO: 20280 - DNA, 15 bp, Homo sapiens
ggaggctaaggcagg

SEQ ID NO: 20281 - DNA, 15 bp, Homo sapiens
aggaggctaaggcag

SEQ ID NO: 20282 - DNA, 15 bp, Homo sapiens
caggaggctaaggca

SEQ ID NO: 20283 - DNA, 15 bp, Homo sapiens
ccaggaggctaaggc

SEQ ID NO: 20284 - DNA, 15 bp, Homo sapiens
cccaggaggctaagg

SEQ ID NO: 20285 - DNA, 15 bp, Homo sapiens
acccaggaggctaag

SEQ ID NO: 20286 - DNA, 15 bp, Homo sapiens
aacccaggaggctaa

SEQ ID NO: 20287 - DNA, 15 bp, Homo sapiens
gaacccaggaggcta

SEQ ID NO: 20288 - DNA, 15 bp, Homo sapiens
tgaacccaggaggct

SEQ ID NO: 20289 - DNA, 15 bp, Homo sapiens
acttgaacccaggag

SEQ ID NO: 20290 - DNA, 15 bp, Homo sapiens
cacttgaacccagga

SEQ ID NO: 20291 - DNA, 15 bp, Homo sapiens
tcacttgaacccagg

SEQ ID NO: 20292 - DNA, 15 bp, Homo sapiens
atcacttgaacccag

SEQ ID NO: 20293 - DNA, 15 bp, Homo sapiens
aatcacttgaaccca

SEQ ID NO: 20294 - DNA, 15 bp, Homo sapiens
gaatcacttgaaccc

SEQ ID NO: 20295 - DNA, 15 bp, Homo sapiens
agaatcacttgaacc

SEQ ID NO: 20296 - DNA, 15 bp, Homo sapiens
gagaatcacttgaac

SEQ ID NO: 20297 - DNA, 15 bp, Homo sapiens
agagaatcacttgaa

SEQ ID NO: 20298 - DNA, 15 bp, Homo sapiens
aagagaatcacttga

SEQ ID NO: 20299 - DNA, 15 bp, Homo sapiens
caagagaatcacttg

SEQ ID NO: 20300 - DNA, 15 bp, Homo sapiens
gcaagagaatcactt

SEQ ID NO: 20301 - DNA, 15 bp, Homo sapiens
ggcaagagaatcact

SEQ ID NO: 20302 - DNA, 15 bp, Homo sapiens
aggcaagagaatcac

SEQ ID NO: 20303 - DNA, 15 bp, Homo sapiens
aaggcaagagaatca

SEQ ID NO: 20304 - DNA, 15 bp, Homo sapiens
caaggcaagagaatc

SEQ ID NO: 20305 - DNA, 15 bp, Homo sapiens
ccaaggcaagagaat

SEQ ID NO: 20306 - DNA, 15 bp, Homo sapiens
gccaaggcaagagaa

SEQ ID NO: 20307 - DNA, 15 bp, Homo sapiens
ggccaaggcaagaga

SEQ ID NO: 20308 - DNA, 15 bp, Homo sapiens
aggccaaggcaagag

SEQ ID NO: 20309 - DNA, 15 bp, Homo sapiens
gaggccaaggcaaga

SEQ ID NO: 20310 - DNA, 15 bp, Homo sapiens
ggaggccaaggcaag

SEQ ID NO: 20311 - DNA, 15 bp, Homo sapiens
gggaggccaaggcaa

SEQ ID NO: 20312 - DNA, 15 bp, Homo sapiens
cttgggaggccaagg

SEQ ID NO: 20313 - DNA, 15 bp, Homo sapiens
acttgggaggccaag

SEQ ID NO: 20314 - DNA, 15 bp, Homo sapiens
tacttgggaggccaa

SEQ ID NO: 20315 - DNA, 15 bp, Homo sapiens
ctacttgggaggcca

SEQ ID NO: 20316 - DNA, 15 bp, Homo sapiens
gctacttgggaggcc

SEQ ID NO: 20317 - DNA, 15 bp, Homo sapiens
atcccagctacttgg

SEQ ID NO: 20318 - DNA, 15 bp, Homo sapiens
taatcccagctactt

SEQ ID NO: 20319 - DNA, 15 bp, Homo sapiens
gtatgcctgtaatcc

SEQ ID NO: 20320 - DNA, 15 bp, Homo sapiens
tgtatgcctgtaatc

SEQ ID NO: 20321 - DNA, 15 bp, Homo sapiens
gtgtatgcctgtaat

SEQ ID NO: 20322 - DNA, 15 bp, Homo sapiens
ggtgtatgcctgtaa

SEQ ID NO: 20323 - DNA, 15 bp, Homo sapiens
gggtgtatgcctgta

SEQ ID NO: 20324 - DNA, 15 bp, Homo sapiens
ggggtgtatgcctgt

SEQ ID NO: 20325 - DNA, 15 bp, Homo sapiens
gggggtgtatgcctg

SEQ ID NO: 20326 - DNA, 15 bp, Homo sapiens
tgggggtgtatgcct

SEQ ID NO: 20327 - DNA, 15 bp, Homo sapiens
atgggggtgtatgcc

SEQ ID NO: 20328 - DNA, 15 bp, Homo sapiens
catgggggtgtatgc

SEQ ID NO: 20329 - DNA, 15 bp, Homo sapiens
gcatgggggtgtatg

SEQ ID NO: 20330 - DNA, 15 bp, Homo sapiens
ggcatgggggtgtat

SEQ ID NO: 20331 - DNA, 15 bp, Homo sapiens
gggcatgggggtgta

SEQ ID NO: 20332 - DNA, 15 bp, Homo sapiens
tgggcatgggggtgt

SEQ ID NO: 20333 - DNA, 15 bp, Homo sapiens
atgggcatgggggtg

SEQ ID NO: 20334 - DNA, 15 bp, Homo sapiens
gatgggcatgggggt

SEQ ID NO: 20335 - DNA, 15 bp, Homo sapiens
agatgggcatggggg

SEQ ID NO: 20336 - DNA, 15 bp, Homo sapiens
tagatgggcatgggg

SEQ ID NO: 20337 - DNA, 15 bp, Homo sapiens
ttagatgggcatggg

SEQ ID NO: 20338 - DNA, 15 bp, Homo sapiens
attagatgggcatgg

SEQ ID NO: 20339 - DNA, 15 bp, Homo sapiens
aattagatgggcatg

SEQ ID NO: 20340 - DNA, 15 bp, Homo sapiens
aaattagatgggcat

SEQ ID NO: 20341 - DNA, 15 bp, Homo sapiens
aaaattagatgggca

SEQ ID NO: 20342 - DNA, 15 bp, Homo sapiens
aaaaattagatgggc

SEQ ID NO: 20343 - DNA, 15 bp, Homo sapiens
caaaaattagatggg

SEQ ID NO: 20344 - DNA, 15 bp, Homo sapiens
acaaaaattagatgg

SEQ ID NO: 20345 - DNA, 15 bp, Homo sapiens
tacaaaaattagatg

SEQ ID NO: 20346 - DNA, 15 bp, Homo sapiens
atacaaaaattagat

SEQ ID NO: 20347 - DNA, 15 bp, Homo sapiens
aatacaaaaattaga

SEQ ID NO: 20348 - DNA, 15 bp, Homo sapiens
tgtgtctactaaaaa

SEQ ID NO: 20349 - DNA, 15 bp, Homo sapiens
ctgtgtctactaaaa

SEQ ID NO: 20350 - DNA, 15 bp, Homo sapiens
gctgtgtctactaaa

SEQ ID NO: 20351 - DNA, 15 bp, Homo sapiens
cgctgtgtctactaa

SEQ ID NO: 20352 - DNA, 15 bp, Homo sapiens
acgctgtgtctacta

SEQ ID NO: 20353 - DNA, 15 bp, Homo sapiens
aacgctgtgtctact

SEQ ID NO: 20354 - DNA, 15 bp, Homo sapiens
aaacgctgtgtctac

SEQ ID NO: 20355 - DNA, 15 bp, Homo sapiens
gaaacgctgtgtcta

SEQ ID NO: 20356 - DNA, 15 bp, Homo sapiens
tgaaacgctgtgtct

SEQ ID NO: 20357 - DNA, 15 bp, Homo sapiens
gtgaaacgctgtgtc

SEQ ID NO: 20358 - DNA, 15 bp, Homo sapiens
agtgaaacgctgtgt

SEQ ID NO: 20359 - DNA, 15 bp, Homo sapiens
tagtgaaacgctgtg

SEQ ID NO: 20360 - DNA, 15 bp, Homo sapiens
ttagtgaaacgctgt

SEQ ID NO: 20361 - DNA, 15 bp, Homo sapiens
tttagtgaaacgctg

SEQ ID NO: 20362 - DNA, 15 bp, Homo sapiens
ttttagtgaaacgct

SEQ ID NO: 20363 - DNA, 15 bp, Homo sapiens
attttagtgaaacgc

SEQ ID NO: 20364 - DNA, 15 bp, Homo sapiens
aattttagtgaaacg

SEQ ID NO: 20365 - DNA, 15 bp, Homo sapiens
aaattttagtgaaac

SEQ ID NO: 20366 - DNA, 15 bp, Homo sapiens
aaaattttagtgaaa

SEQ ID NO: 20367 - DNA, 15 bp, Homo sapiens
caaaattttagtgaa

SEQ ID NO: 20368 - DNA, 15 bp, Homo sapiens
acaaaattttagtga

SEQ ID NO: 20369 - DNA, 15 bp, Homo sapiens
tacaaaattttagtg

SEQ ID NO: 20370 - DNA, 15 bp, Homo sapiens
atacaaaattttagt

SEQ ID NO: 20371 - DNA, 15 bp, Homo sapiens
aatacaaaattttag

SEQ ID NO: 20372 - DNA, 15 bp, Homo sapiens
aaatacaaaatttta

SEQ ID NO: 20373 - DNA, 15 bp, Homo sapiens
aaaatacaaaatttt

SEQ ID NO: 20374 - DNA, 15 bp, Homo sapiens
aaaaatacaaaattt

SEQ ID NO: 20375 - DNA, 15 bp, Homo sapiens
tgaggccaaggcagg

SEQ ID NO: 20376 - DNA, 15 bp, Homo sapiens
gtgaggccaaggcag

SEQ ID NO: 20377 - DNA, 15 bp, Homo sapiens
tgtgaggccaaggca

SEQ ID NO: 20378 - DNA, 15 bp, Homo sapiens
ttgtgaggccaaggc

SEQ ID NO: 20379 - DNA, 15 bp, Homo sapiens
tttgtgaggccaagg

SEQ ID NO: 20380 - DNA, 15 bp, Homo sapiens
ctttgtgaggccaag

SEQ ID NO: 20381 - DNA, 15 bp, Homo sapiens
actttgtgaggccaa

SEQ ID NO: 20382 - DNA, 15 bp, Homo sapiens
cactttgtgaggcca

SEQ ID NO: 20383 - DNA, 15 bp, Homo sapiens
tcactttgtgaggcc

SEQ ID NO: 20384 - DNA, 15 bp, Homo sapiens
atcactttgtgaggc

SEQ ID NO: 20385 - DNA, 15 bp, Homo sapiens
aatcactttgtgagg

SEQ ID NO: 20386 - DNA, 15 bp, Homo sapiens
taatcactttgtgag

SEQ ID NO: 20387 - DNA, 15 bp, Homo sapiens
gtaatcactttgtga

SEQ ID NO: 20388 - DNA, 15 bp, Homo sapiens
tgtaatcactttgtg

SEQ ID NO: 20389 - DNA, 15 bp, Homo sapiens
ctgtaatcactttgt

SEQ ID NO: 20390 - DNA, 15 bp, Homo sapiens
cctgtaatcactttg

SEQ ID NO: 20391 - DNA, 15 bp, Homo sapiens
gcctgtaatcacttt

SEQ ID NO: 20392 - DNA, 15 bp, Homo sapiens
tgcctgtaatcactt

SEQ ID NO: 20393 - DNA, 15 bp, Homo sapiens
atgcctgtaatcact

SEQ ID NO: 20394 - DNA, 15 bp, Homo sapiens
catgcctgtaatcac

SEQ ID NO: 20395 - DNA, 15 bp, Homo sapiens
tcatgcctgtaatca

SEQ ID NO: 20396 - DNA, 15 bp, Homo sapiens
atgcagtggctcatg

SEQ ID NO: 20397 - DNA, 15 bp, Homo sapiens
gatgcagtggctcat

SEQ ID NO: 20398 - DNA, 15 bp, Homo sapiens
ggatgcagtggctca

SEQ ID NO: 20399 - DNA, 15 bp, Homo sapiens
tggatgcagtggctc

SEQ ID NO: 20400 - DNA, 15 bp, Homo sapiens
atggatgcagtggct

SEQ ID NO: 20401 - DNA, 15 bp, Homo sapiens
gatggatgcagtggc

SEQ ID NO: 20402 - DNA, 15 bp, Homo sapiens
cgatggatgcagtgg

SEQ ID NO: 20403 - DNA, 15 bp, Homo sapiens
gcgatggatgcagtg

SEQ ID NO: 20404 - DNA, 15 bp, Homo sapiens
ggcgatggatgcagt

SEQ ID NO: 20405 - DNA, 15 bp, Homo sapiens
tggcgatggatgcag

SEQ ID NO: 20406 - DNA, 15 bp, Homo sapiens
ttggcgatggatgca

SEQ ID NO: 20407 - DNA, 15 bp, Homo sapiens
tttggcgatggatgc

SEQ ID NO: 20408 - DNA, 15 bp, Homo sapiens
ttttggcgatggatg

SEQ ID NO: 20409 - DNA, 15 bp, Homo sapiens
tttttggcgatggat

SEQ ID NO: 20410 - DNA, 15 bp, Homo sapiens
ctttttggcgatgga

SEQ ID NO: 20411 - DNA, 15 bp, Homo sapiens
tctttttggcgatgg

SEQ ID NO: 20412 - DNA, 15 bp, Homo sapiens
atctttttggcgatg

SEQ ID NO: 20413 - DNA, 15 bp, Homo sapiens
aatctttttggcgat

SEQ ID NO: 20414 - DNA, 15 bp, Homo sapiens
aaatctttttggcga

SEQ ID NO: 20415 - DNA, 15 bp, Homo sapiens
aaaatctttttggcg

SEQ ID NO: 20416 - DNA, 15 bp, Homo sapiens
aaaaatctttttggc

SEQ ID NO: 20417 - DNA, 15 bp, Homo sapiens
aaaaaatctttttgg

SEQ ID NO: 20418 - DNA, 15 bp, Homo sapiens
taaaaaatctttttg

SEQ ID NO: 20419 - DNA, 15 bp, Homo sapiens
ttaaaaaatcttttt

SEQ ID NO: 20420 - DNA, 15 bp, Homo sapiens
tttaaaaaatctttt

SEQ ID NO: 20421 - DNA, 15 bp, Homo sapiens
ttttaaaaaatcttt

SEQ ID NO: 20422 - DNA, 15 bp, Homo sapiens
cttttaaaaaatctt

SEQ ID NO: 20423 - DNA, 15 bp, Homo sapiens
tcttttaaaaaatct

SEQ ID NO: 20424 - DNA, 15 bp, Homo sapiens
ctcttttaaaaaatc

SEQ ID NO: 20425 - DNA, 15 bp, Homo sapiens
actcttttaaaaaat

SEQ ID NO: 20426 - DNA, 15 bp, Homo sapiens
aactcttttaaaaaa

SEQ ID NO: 20427 - DNA, 15 bp, Homo sapiens
aaactcttttaaaaa

SEQ ID NO: 20428 - DNA, 15 bp, Homo sapiens
taaactcttttaaaa

SEQ ID NO: 20429 - DNA, 15 bp, Homo sapiens
ttaaactcttttaaa

SEQ ID NO: 20430 - DNA, 15 bp, Homo sapiens
attaaactcttttaa

SEQ ID NO: 20431 - DNA, 15 bp, Homo sapiens
cattaaactctttta

SEQ ID NO: 20432 - DNA, 15 bp, Homo sapiens
acattaaactctttt

SEQ ID NO: 20433 - DNA, 15 bp, Homo sapiens
tacattaaactcttt

SEQ ID NO: 20434 - DNA, 15 bp, Homo sapiens
ctacattaaactctt

SEQ ID NO: 20435 - DNA, 15 bp, Homo sapiens
tctacattaaactct

SEQ ID NO: 20436 - DNA, 15 bp, Homo sapiens
ttctacattaaactc

SEQ ID NO: 20437 - DNA, 15 bp, Homo sapiens
gttctacattaaact

SEQ ID NO: 20438 - DNA, 15 bp, Homo sapiens
ggttctacattaaac

SEQ ID NO: 20439 - DNA, 15 bp, Homo sapiens
tggttctacattaaa

SEQ ID NO: 20440 - DNA, 15 bp, Homo sapiens
atggttctacattaa

SEQ ID NO: 20441 - DNA, 15 bp, Homo sapiens
tatggttctacatta

SEQ ID NO: 20442 - DNA, 15 bp, Homo sapiens
atatggttctacatt

SEQ ID NO: 20443 - DNA, 15 bp, Homo sapiens
gatatggttctacat

SEQ ID NO: 20444 - DNA, 15 bp, Homo sapiens
tgatatggttctaca

SEQ ID NO: 20445 - DNA, 15 bp, Homo sapiens
ttgatatggttctac

SEQ ID NO: 20446 - DNA, 15 bp, Homo sapiens
tttgatatggttcta

SEQ ID NO: 20447 - DNA, 15 bp, Homo sapiens
ctttgatatggttct

SEQ ID NO: 20448 - DNA, 15 bp, Homo sapiens
cctttgatatggttc

SEQ ID NO: 20449 - DNA, 15 bp, Homo sapiens
acctttgatatggtt

SEQ ID NO: 20450 - DNA, 15 bp, Homo sapiens
gacctttgatatggt

SEQ ID NO: 20451 - DNA, 15 bp, Homo sapiens
agacctttgatatgg

SEQ ID NO: 20452 - DNA, 15 bp, Homo sapiens
aagacctttgatatg

SEQ ID NO: 20453 - DNA, 15 bp, Homo sapiens
aaagacctttgatat

SEQ ID NO: 20454 - DNA, 15 bp, Homo sapiens
caaagacctttgata

SEQ ID NO: 20455 - DNA, 15 bp, Homo sapiens
ccaaagacctttgat

SEQ ID NO: 20456 - DNA, 15 bp, Homo sapiens
tccaaagacctttga

SEQ ID NO: 20457 - DNA, 15 bp, Homo sapiens
ttccaaagacctttg

SEQ ID NO: 20458 - DNA, 15 bp, Homo sapiens
tttccaaagaccttt

SEQ ID NO: 20459 - DNA, 15 bp, Homo sapiens
atttccaaagacctt

SEQ ID NO: 20460 - DNA, 15 bp, Homo sapiens
tatttccaaagacct

SEQ ID NO: 20461 - DNA, 15 bp, Homo sapiens
ttatttccaaagacc

SEQ ID NO: 20462 - DNA, 15 bp, Homo sapiens
tttatttccaaagac

SEQ ID NO: 20463 - DNA, 15 bp, Homo sapiens
ttttatttccaaaga

SEQ ID NO: 20464 - DNA, 15 bp, Homo sapiens
tttttatttccaaag

SEQ ID NO: 20465 - DNA, 15 bp, Homo sapiens
ttttttatttccaaa

SEQ ID NO: 20466 - DNA, 15 bp, Homo sapiens
gttttttatttccaa

SEQ ID NO: 20467 - DNA, 15 bp, Homo sapiens
tgttttttatttcca

SEQ ID NO: 20468 - DNA, 15 bp, Homo sapiens
ctgttttttatttcc

SEQ ID NO: 20469 - DNA, 15 bp, Homo sapiens
actgttttttatttc

SEQ ID NO: 20470 - DNA, 15 bp, Homo sapiens
aactgttttttattt

SEQ ID NO: 20471 - DNA, 15 bp, Homo sapiens
aaactgttttttatt

SEQ ID NO: 20472 - DNA, 15 bp, Homo sapiens
aaaactgttttttat

SEQ ID NO: 20473 - DNA, 15 bp, Homo sapiens
aaaaactgtttttta

SEQ ID NO: 20474 - DNA, 15 bp, Homo sapiens
aaaaaactgtttttt

SEQ ID NO: 20475 - DNA, 15 bp, Homo sapiens
taaaaaactgttttt

SEQ ID NO: 20476 - DNA, 15 bp, Homo sapiens
ttaaaaaactgtttt

SEQ ID NO: 20477 - DNA, 15 bp, Homo sapiens
tttaaaaaactgttt

SEQ ID NO: 20478 - DNA, 15 bp, Homo sapiens
ttttaaaaaactgtt

SEQ ID NO: 20479 - DNA, 15 bp, Homo sapiens
tttttaaaaaactgt

SEQ ID NO: 20480 - DNA, 15 bp, Homo sapiens
atttttaaaaaactg

SEQ ID NO: 20481 - DNA, 15 bp, Homo sapiens
tatttttaaaaaact

SEQ ID NO: 20482 - DNA, 15 bp, Homo sapiens
atatttttaaaaaac

SEQ ID NO: 20483 - DNA, 15 bp, Homo sapiens
gatatttttaaaaaa

SEQ ID NO: 20484 - DNA, 15 bp, Homo sapiens
tgatatttttaaaaa

SEQ ID NO: 20485 - DNA, 15 bp, Homo sapiens
ctgatatttttaaaa

SEQ ID NO: 20486 - DNA, 15 bp, Homo sapiens
tctgatatttttaaa

SEQ ID NO: 20487 - DNA, 15 bp, Homo sapiens
ttctgatatttttaa

SEQ ID NO: 20488 - DNA, 15 bp, Homo sapiens
tttctgatattttta

SEQ ID NO: 20489 - DNA, 15 bp, Homo sapiens
atttctgatattttt

SEQ ID NO: 20490 - DNA, 15 bp, Homo sapiens
tatttctgatatttt

SEQ ID NO: 20491 - DNA, 15 bp, Homo sapiens
ttatttctgatattt

SEQ ID NO: 20492 - DNA, 15 bp, Homo sapiens
tttatttctgatatt

SEQ ID NO: 20493 - DNA, 15 bp, Homo sapiens
ttttatttctgatat

SEQ ID NO: 20494 - DNA, 15 bp, Homo sapiens
gttttatttctgata

SEQ ID NO: 20495 - DNA, 15 bp, Homo sapiens
tgttttatttctgat

SEQ ID NO: 20496 - DNA, 15 bp, Homo sapiens
ttgttttatttctga

SEQ ID NO: 20497 - DNA, 15 bp, Homo sapiens
gttgttttatttctg

SEQ ID NO: 20498 - DNA, 15 bp, Homo sapiens
tgttgttttatttct

SEQ ID NO: 20499 - DNA, 15 bp, Homo sapiens
ttgttgttttatttc

SEQ ID NO: 20500 - DNA, 15 bp, Homo sapiens
tttgttgttttattt

SEQ ID NO: 20501 - DNA, 15 bp, Homo sapiens
atttgttgttttatt

SEQ ID NO: 20502 - DNA, 15 bp, Homo sapiens
tatttgttgttttat

SEQ ID NO: 20503 - DNA, 15 bp, Homo sapiens
ttatttgttgtttta

SEQ ID NO: 20504 - DNA, 15 bp, Homo sapiens
tttatttgttgtttt

SEQ ID NO: 20505 - DNA, 15 bp, Homo sapiens
atttatttgttgttt

SEQ ID NO: 20506 - DNA, 15 bp, Homo sapiens
tatttatttgttgtt

SEQ ID NO: 20507 - DNA, 15 bp, Homo sapiens
ttatttatttgttgt

SEQ ID NO: 20508 - DNA, 15 bp, Homo sapiens
tttatttatttgttg

SEQ ID NO: 20509 - DNA, 15 bp, Homo sapiens
atttatttatttgtt

SEQ ID NO: 20510 - DNA, 15 bp, Homo sapiens
tatttatttatttgt

SEQ ID NO: 20511 - DNA, 15 bp, Homo sapiens
ttatttatttatttg

SEQ ID NO: 20512 - DNA, 15 bp, Homo sapiens
tttatttatttattt

SEQ ID NO: 20513 - DNA, 15 bp, Homo sapiens
atttatttatttatt

SEQ ID NO: 20514 - DNA, 15 bp, Homo sapiens
tatttatttatttat

SEQ ID NO: 20515 - DNA, 15 bp, Homo sapiens
ttatttatttattta

SEQ ID NO: 20516 - DNA, 15 bp, Homo sapiens
ttttatttatttatt

SEQ ID NO: 20517 - DNA, 15 bp, Homo sapiens
tttttatttatttat

SEQ ID NO: 20518 - DNA, 15 bp, Homo sapiens
gtttttatttattta

SEQ ID NO: 20519 - DNA, 15 bp, Homo sapiens
tgtttttatttattt

SEQ ID NO: 20520 - DNA, 15 bp, Homo sapiens
gtgtttttatttatt

SEQ ID NO: 20521 - DNA, 15 bp, Homo sapiens
ggtgtttttatttat

SEQ ID NO: 20522 - DNA, 15 bp, Homo sapiens
gggtgtttttattta

SEQ ID NO: 20523 - DNA, 15 bp, Homo sapiens
tgggtgtttttattt

SEQ ID NO: 20524 - DNA, 15 bp, Homo sapiens
ttgggtgtttttatt

SEQ ID NO: 20525 - DNA, 15 bp, Homo sapiens
tttgggtgtttttat

SEQ ID NO: 20526 - DNA, 15 bp, Homo sapiens
ttttgggtgttttta

SEQ ID NO: 20527 - DNA, 15 bp, Homo sapiens
gttttgggtgttttt

SEQ ID NO: 20528 - DNA, 15 bp, Homo sapiens
tgttttgggtgtttt

SEQ ID NO: 20529 - DNA, 15 bp, Homo sapiens
ttgttttgggtgttt

SEQ ID NO: 20530 - DNA, 15 bp, Homo sapiens
attgttttgggtgtt

SEQ ID NO: 20531 - DNA, 15 bp, Homo sapiens
gattgttttgggtgt

SEQ ID NO: 20532 - DNA, 15 bp, Homo sapiens
agattgttttgggtg

SEQ ID NO: 20533 - DNA, 15 bp, Homo sapiens
cagattgttttgggt

SEQ ID NO: 20534 - DNA, 15 bp, Homo sapiens
tcagattgttttggg

SEQ ID NO: 20535 - DNA, 15 bp, Homo sapiens
ttcagattgttttgg

SEQ ID NO: 20536 - DNA, 15 bp, Homo sapiens
cttcagattgttttg

SEQ ID NO: 20537 - DNA, 15 bp, Homo sapiens
gcttcagattgtttt

SEQ ID NO: 20538 - DNA, 15 bp, Homo sapiens
tgcttcagattgttt

SEQ ID NO: 20539 - DNA, 15 bp, Homo sapiens
gtgcttcagattgtt

SEQ ID NO: 20540 - DNA, 15 bp, Homo sapiens
cgtgcttcagattgt

SEQ ID NO: 20541 - DNA, 15 bp, Homo sapiens
tcgtgcttcagattg

SEQ ID NO: 20542 - DNA, 15 bp, Homo sapiens
ctcgtgcttcagatt

SEQ ID NO: 20543 - DNA, 15 bp, Homo sapiens
gctcgtgcttcagat

SEQ ID NO: 20544 - DNA, 15 bp, Homo sapiens
tgctcgtgcttcaga

SEQ ID NO: 20545 - DNA, 15 bp, Homo sapiens
gtgctcgtgcttcag

SEQ ID NO: 20546 - DNA, 15 bp, Homo sapiens
ggtgctcgtgcttca

SEQ ID NO: 20547 - DNA, 15 bp, Homo sapiens
aggtgctcgtgcttc

SEQ ID NO: 20548 - DNA, 15 bp, Homo sapiens
taggtgctcgtgctt

SEQ ID NO: 20549 - DNA, 15 bp, Homo sapiens
ctaggtgctcgtgct

SEQ ID NO: 20550 - DNA, 15 bp, Homo sapiens
gctaggtgctcgtgc

SEQ ID NO: 20551 - DNA, 15 bp, Homo sapiens
tgctaggtgctcgtg

SEQ ID NO: 20552 - DNA, 15 bp, Homo sapiens
ctgctaggtgctcgt

SEQ ID NO: 20553 - DNA, 15 bp, Homo sapiens
tctgctaggtgctcg

SEQ ID NO: 20554 - DNA, 15 bp, Homo sapiens
ttctgctaggtgctc

SEQ ID NO: 20555 - DNA, 15 bp, Homo sapiens
tttctgctaggtgct

SEQ ID NO: 20556 - DNA, 15 bp, Homo sapiens
ctttctgctaggtgc

SEQ ID NO: 20557 - DNA, 15 bp, Homo sapiens
cctttctgctaggtg

SEQ ID NO: 20558 - DNA, 15 bp, Homo sapiens
acctttctgctaggt

SEQ ID NO: 20559 - DNA, 15 bp, Homo sapiens
aacctttctgctagg

SEQ ID NO: 20560 - DNA, 15 bp, Homo sapiens
gaacctttctgctag

SEQ ID NO: 20561 - DNA, 15 bp, Homo sapiens
tgaacctttctgcta

SEQ ID NO: 20562 - DNA, 15 bp, Homo sapiens
ttgaacctttctgct

SEQ ID NO: 20563 - DNA, 15 bp, Homo sapiens
attgaacctttctgc

SEQ ID NO: 20564 - DNA, 15 bp, Homo sapiens
aattgaacctttctg

SEQ ID NO: 20565 - DNA, 15 bp, Homo sapiens
taattgaacctttct

SEQ ID NO: 20566 - DNA, 15 bp, Homo sapiens
ataattgaacctttc

SEQ ID NO: 20567 - DNA, 15 bp, Homo sapiens
cataattgaaccttt

SEQ ID NO: 20568 - DNA, 15 bp, Homo sapiens
tcataattgaacctt

SEQ ID NO: 20569 - DNA, 15 bp, Homo sapiens
atcataattgaacct

SEQ ID NO: 20570 - DNA, 15 bp, Homo sapiens
gatcataattgaacc

SEQ ID NO: 20571 - DNA, 15 bp, Homo sapiens
agatcataattgaac

SEQ ID NO: 20572 - DNA, 15 bp, Homo sapiens
tagatcataattgaa

SEQ ID NO: 20573 - DNA, 15 bp, Homo sapiens
atagatcataattga

SEQ ID NO: 20574 - DNA, 15 bp, Homo sapiens
aatagatcataattg

SEQ ID NO: 20575 - DNA, 15 bp, Homo sapiens
gaatagatcataatt

SEQ ID NO: 20576 - DNA, 15 bp, Homo sapiens
tgaatagatcataat

SEQ ID NO: 20577 - DNA, 15 bp, Homo sapiens
atgaatagatcataa

SEQ ID NO: 20578 - DNA, 15 bp, Homo sapiens
tatgaatagatcata

SEQ ID NO: 20579 - DNA, 15 bp, Homo sapiens
ctatgaatagatcat

SEQ ID NO: 20580 - DNA, 15 bp, Homo sapiens
tctatgaatagatca

SEQ ID NO: 20581 - DNA, 15 bp, Homo sapiens
ctctatgaatagatc

SEQ ID NO: 20582 - DNA, 15 bp, Homo sapiens
actctatgaatagat

SEQ ID NO: 20583 - DNA, 15 bp, Homo sapiens
cactctatgaataga

SEQ ID NO: 20584 - DNA, 15 bp, Homo sapiens
ccactctatgaatag

SEQ ID NO: 20585 - DNA, 15 bp, Homo sapiens
tccactctatgaata

SEQ ID NO: 20586 - DNA, 15 bp, Homo sapiens
ttccactctatgaat

SEQ ID NO: 20587 - DNA, 15 bp, Homo sapiens
attccactctatgaa

SEQ ID NO: 20588 - DNA, 15 bp, Homo sapiens
tattccactctatga

SEQ ID NO: 20589 - DNA, 15 bp, Homo sapiens
atattccactctatg

SEQ ID NO: 20590 - DNA, 15 bp, Homo sapiens
gatattccactctat

SEQ ID NO: 20591 - DNA, 15 bp, Homo sapiens
tgatattccactcta

SEQ ID NO: 20592 - DNA, 15 bp, Homo sapiens
ttgatattccactct

SEQ ID NO: 20593 - DNA, 15 bp, Homo sapiens
cttgatattccactc

SEQ ID NO: 20594 - DNA, 15 bp, Homo sapiens
acttgatattccact

SEQ ID NO: 20595 - DNA, 15 bp, Homo sapiens
tacttgatattccac

SEQ ID NO: 20596 - DNA, 15 bp, Homo sapiens
ctacttgatattcca

SEQ ID NO: 20597 - DNA, 15 bp, Homo sapiens
tctacttgatattcc

SEQ ID NO: 20598 - DNA, 15 bp, Homo sapiens
gtctacttgatattc

SEQ ID NO: 20599 - DNA, 15 bp, Homo sapiens
tgtctacttgatatt

SEQ ID NO: 20600 - DNA, 15 bp, Homo sapiens
atgtctacttgatat

SEQ ID NO: 20601 - DNA, 15 bp, Homo sapiens
aatgtctacttgata

SEQ ID NO: 20602 - DNA, 15 bp, Homo sapiens
taatgtctacttgat

SEQ ID NO: 20603 - DNA, 15 bp, Homo sapiens
gtaatgtctacttga

SEQ ID NO: 20604 - DNA, 15 bp, Homo sapiens
tgtaatgtctacttg

SEQ ID NO: 20605 - DNA, 15 bp, Homo sapiens
ctgtaatgtctactt

SEQ ID NO: 20606 - DNA, 15 bp, Homo sapiens
cctgtaatgtctact

SEQ ID NO: 20607 - DNA, 15 bp, Homo sapiens
tcctgtaatgtctac

SEQ ID NO: 20608 - DNA, 15 bp, Homo sapiens
gtcctgtaatgtcta

SEQ ID NO: 20609 - DNA, 15 bp, Homo sapiens
tgtcctgtaatgtct

SEQ ID NO: 20610 - DNA, 15 bp, Homo sapiens
atgtcctgtaatgtc

SEQ ID NO: 20611 - DNA, 15 bp, Homo sapiens
catgtcctgtaatgt

SEQ ID NO: 20612 - DNA, 15 bp, Homo sapiens
acatgtcctgtaatg

SEQ ID NO: 20613 - DNA, 15 bp, Homo sapiens
aacatgtcctgtaat

SEQ ID NO: 20614 - DNA, 15 bp, Homo sapiens
aaacatgtcctgtaa

SEQ ID NO: 20615 - DNA, 15 bp, Homo sapiens
aaaacatgtcctgta

SEQ ID NO: 20616 - DNA, 15 bp, Homo sapiens
taaaacatgtcctgt

SEQ ID NO: 20617 - DNA, 15 bp, Homo sapiens
ttaaaacatgtcctg

SEQ ID NO: 20618 - DNA, 15 bp, Homo sapiens
cttaaaacatgtcct

SEQ ID NO: 20619 - DNA, 15 bp, Homo sapiens
tcttaaaacatgtcc

SEQ ID NO: 20620 - DNA, 15 bp, Homo sapiens
atcttaaaacatgtc

SEQ ID NO: 20621 - DNA, 15 bp, Homo sapiens
aatcttaaaacatgt

SEQ ID NO: 20622 - DNA, 15 bp, Homo sapiens
taatcttaaaacatg

SEQ ID NO: 20623 - DNA, 15 bp, Homo sapiens
ataatcttaaaacat

SEQ ID NO: 20624 - DNA, 15 bp, Homo sapiens
tataatcttaaaaca

SEQ ID NO: 20625 - DNA, 15 bp, Homo sapiens
atataatcttaaaac

SEQ ID NO: 20626 - DNA, 15 bp, Homo sapiens
aatataatcttaaaa

SEQ ID NO: 20627 - DNA, 15 bp, Homo sapiens
aaatataatcttaaa

SEQ ID NO: 20628 - DNA, 15 bp, Homo sapiens
aaaatataatcttaa

SEQ ID NO: 20629 - DNA, 15 bp, Homo sapiens
taaaatataatctta

SEQ ID NO: 20630 - DNA, 15 bp, Homo sapiens
ataaaatataatctt

SEQ ID NO: 20631 - DNA, 15 bp, Homo sapiens
cataaaatataatct

SEQ ID NO: 20632 - DNA, 15 bp, Homo sapiens
acataaaatataatc

SEQ ID NO: 20633 - DNA, 15 bp, Homo sapiens
gacataaaatataat

SEQ ID NO: 20634 - DNA, 15 bp, Homo sapiens
tgacataaaatataa

SEQ ID NO: 20635 - DNA, 15 bp, Homo sapiens
atgacataaaatata

SEQ ID NO: 20636 - DNA, 15 bp, Homo sapiens
catgacataaaatat

SEQ ID NO: 20637 - DNA, 15 bp, Homo sapiens
ccatgacataaaata

SEQ ID NO: 20638 - DNA, 15 bp, Homo sapiens
cccatgacataaaat

SEQ ID NO: 20639 - DNA, 15 bp, Homo sapiens
tcccatgacataaaa

SEQ ID NO: 20640 - DNA, 15 bp, Homo sapiens
ttcccatgacataaa

SEQ ID NO: 20641 - DNA, 15 bp, Homo sapiens
tttcccatgacataa

SEQ ID NO: 20642 - DNA, 15 bp, Homo sapiens
atttcccatgacata

SEQ ID NO: 20643 - DNA, 15 bp, Homo sapiens
catttcccatgacat

SEQ ID NO: 20644 - DNA, 15 bp, Homo sapiens
gcatttcccatgaca

SEQ ID NO: 20645 - DNA, 15 bp, Homo sapiens
agcatttcccatgac

SEQ ID NO: 20646 - DNA, 15 bp, Homo sapiens
gagcatttcccatga

SEQ ID NO: 20647 - DNA, 15 bp, Homo sapiens
agagcatttcccatg

SEQ ID NO: 20648 - DNA, 15 bp, Homo sapiens
gagagcatttcccat

SEQ ID NO: 20649 - DNA, 15 bp, Homo sapiens
ggagagcatttccca

SEQ ID NO: 20650 - DNA, 15 bp, Homo sapiens
gggagagcatttccc

SEQ ID NO: 20651 - DNA, 15 bp, Homo sapiens
tgggagagcatttcc

SEQ ID NO: 20652 - DNA, 15 bp, Homo sapiens
ctgggagagcatttc

SEQ ID NO: 20653 - DNA, 15 bp, Homo sapiens
actgggagagcattt

SEQ ID NO: 20654 - DNA, 15 bp, Homo sapiens
tactgggagagcatt

SEQ ID NO: 20655 - DNA, 15 bp, Homo sapiens
atactgggagagcat

SEQ ID NO: 20656 - DNA, 15 bp, Homo sapiens
catactgggagagca

SEQ ID NO: 20657 - DNA, 15 bp, Homo sapiens
tcatactgggagagc

SEQ ID NO: 20658 - DNA, 15 bp, Homo sapiens
atcatactgggagag

SEQ ID NO: 20659 - DNA, 15 bp, Homo sapiens
catcatactgggaga

SEQ ID NO: 20660 - DNA, 15 bp, Homo sapiens
acatcatactgggag

SEQ ID NO: 20661 - DNA, 15 bp, Homo sapiens
aacatcatactggga

SEQ ID NO: 20662 - DNA, 15 bp, Homo sapiens
taacatcatactggg

SEQ ID NO: 20663 - DNA, 15 bp, Homo sapiens
ttaacatcatactgg

SEQ ID NO: 20664 - DNA, 15 bp, Homo sapiens
tttaacatcatactg

SEQ ID NO: 20665 - DNA, 15 bp, Homo sapiens
atttaacatcatact

SEQ ID NO: 20666 - DNA, 15 bp, Homo sapiens
catttaacatcatac

SEQ ID NO: 20667 - DNA, 15 bp, Homo sapiens
tcatttaacatcata

SEQ ID NO: 20668 - DNA, 15 bp, Homo sapiens
ttcatttaacatcat

SEQ ID NO: 20669 - DNA, 15 bp, Homo sapiens
tttcatttaacatca

SEQ ID NO: 20670 - DNA, 15 bp, Homo sapiens
ttttcatttaacatc

SEQ ID NO: 20671 - DNA, 15 bp, Homo sapiens
tttttcatttaacat

SEQ ID NO: 20672 - DNA, 15 bp, Homo sapiens
ttttttcatttaaca

SEQ ID NO: 20673 - DNA, 15 bp, Homo sapiens
gttttttcatttaac

SEQ ID NO: 20674 - DNA, 15 bp, Homo sapiens
tgttttttcatttaa

SEQ ID NO: 20675 - DNA, 15 bp, Homo sapiens
ctgttttttcattta

SEQ ID NO: 20676 - DNA, 15 bp, Homo sapiens
tctgttttttcattt

SEQ ID NO: 20677 - DNA, 15 bp, Homo sapiens
ttctgttttttcatt

SEQ ID NO: 20678 - DNA, 15 bp, Homo sapiens
attctgttttttcat

SEQ ID NO: 20679 - DNA, 15 bp, Homo sapiens
tattctgttttttca

SEQ ID NO: 20680 - DNA, 15 bp, Homo sapiens
gtattctgttttttc

SEQ ID NO: 20681 - DNA, 15 bp, Homo sapiens
tgtattctgtttttt

SEQ ID NO: 20682 - DNA, 15 bp, Homo sapiens
ttgtattctgttttt

SEQ ID NO: 20683 - DNA, 15 bp, Homo sapiens
tttgtattctgtttt

SEQ ID NO: 20684 - DNA, 15 bp, Homo sapiens
ttttgtattctgttt

SEQ ID NO: 20685 - DNA, 15 bp, Homo sapiens
cttttgtattctgtt

SEQ ID NO: 20686 - DNA, 15 bp, Homo sapiens
acttttgtattctgt

SEQ ID NO: 20687 - DNA, 15 bp, Homo sapiens
tacttttgtattctg

SEQ ID NO: 20688 - DNA, 15 bp, Homo sapiens
atacttttgtattct

SEQ ID NO: 20689 - DNA, 15 bp, Homo sapiens
tatacttttgtattc

SEQ ID NO: 20690 - DNA, 15 bp, Homo sapiens
atatacttttgtatt

SEQ ID NO: 20691 - DNA, 15 bp, Homo sapiens
tatatacttttgtat

SEQ ID NO: 20692 - DNA, 15 bp, Homo sapiens
atatatacttttgta

SEQ ID NO: 20693 - DNA, 15 bp, Homo sapiens
catatatacttttgt

SEQ ID NO: 20694 - DNA, 15 bp, Homo sapiens
gcatatatacttttg

SEQ ID NO: 20695 - DNA, 15 bp, Homo sapiens
agcatatatactttt

SEQ ID NO: 20696 - DNA, 15 bp, Homo sapiens
cagcatatatacttt

SEQ ID NO: 20697 - DNA, 15 bp, Homo sapiens
gcagcatatatactt

SEQ ID NO: 20698 - DNA, 15 bp, Homo sapiens
tgcagcatatatact

SEQ ID NO: 20699 - DNA, 15 bp, Homo sapiens
atgcagcatatatac

SEQ ID NO: 20700 - DNA, 15 bp, Homo sapiens
tatgcagcatatata

SEQ ID NO: 20701 - DNA, 15 bp, Homo sapiens
ctatgcagcatatat

SEQ ID NO: 20702 - DNA, 15 bp, Homo sapiens
actatgcagcatata

SEQ ID NO: 20703 - DNA, 15 bp, Homo sapiens
gactatgcagcatat

SEQ ID NO: 20704 - DNA, 15 bp, Homo sapiens
agactatgcagcata

SEQ ID NO: 20705 - DNA, 15 bp, Homo sapiens
gagactatgcagcat

SEQ ID NO: 20706 - DNA, 15 bp, Homo sapiens
tgagactatgcagca

SEQ ID NO: 20707 - DNA, 15 bp, Homo sapiens
ttgagactatgcagc

SEQ ID NO: 20708 - DNA, 15 bp, Homo sapiens
attgagactatgcag

SEQ ID NO: 20709 - DNA, 15 bp, Homo sapiens
tattgagactatgca

SEQ ID NO: 20710 - DNA, 15 bp, Homo sapiens
atattgagactatgc

SEQ ID NO: 20711 - DNA, 15 bp, Homo sapiens
aatattgagactatg

SEQ ID NO: 20712 - DNA, 15 bp, Homo sapiens
caatattgagactat

SEQ ID NO: 20713 - DNA, 15 bp, Homo sapiens
acaatattgagacta

SEQ ID NO: 20714 - DNA, 15 bp, Homo sapiens
tacaatattgagact

SEQ ID NO: 20715 - DNA, 15 bp, Homo sapiens
ctacaatattgagac

SEQ ID NO: 20716 - DNA, 15 bp, Homo sapiens
tctacaatattgaga

SEQ ID NO: 20717 - DNA, 15 bp, Homo sapiens
ctctacaatattgag

SEQ ID NO: 20718 - DNA, 15 bp, Homo sapiens
tctctacaatattga

SEQ ID NO: 20719 - DNA, 15 bp, Homo sapiens
ttctctacaatattg

SEQ ID NO: 20720 - DNA, 15 bp, Homo sapiens
tttctctacaatatt

SEQ ID NO: 20721 - DNA, 15 bp, Homo sapiens
ttttctctacaatat

SEQ ID NO: 20722 - DNA, 15 bp, Homo sapiens
tttttctctacaata

SEQ ID NO: 20723 - DNA, 15 bp, Homo sapiens
ttttttctctacaat

SEQ ID NO: 20724 - DNA, 15 bp, Homo sapiens
attttttctctacaa

SEQ ID NO: 20725 - DNA, 15 bp, Homo sapiens
tattttttctctaca

SEQ ID NO: 20726 - DNA, 15 bp, Homo sapiens
atattttttctctac

SEQ ID NO: 20727 - DNA, 15 bp, Homo sapiens
aatattttttctcta

SEQ ID NO: 20728 - DNA, 15 bp, Homo sapiens
taatattttttctct

SEQ ID NO: 20729 - DNA, 15 bp, Homo sapiens
ataatattttttctc

SEQ ID NO: 20730 - DNA, 15 bp, Homo sapiens
aataatattttttct

SEQ ID NO: 20731 - DNA, 15 bp, Homo sapiens
aaataatattttttc

SEQ ID NO: 20732 - DNA, 15 bp, Homo sapiens
taaataatatttttt

SEQ ID NO: 20733 - DNA, 15 bp, Homo sapiens
ataaataatattttt

SEQ ID NO: 20734 - DNA, 15 bp, Homo sapiens
cataaataatatttt

SEQ ID NO: 20735 - DNA, 15 bp, Homo sapiens
acataaataatattt

SEQ ID NO: 20736 - DNA, 15 bp, Homo sapiens
tacataaataatatt

SEQ ID NO: 20737 - DNA, 15 bp, Homo sapiens
atacataaataatat

SEQ ID NO: 20738 - DNA, 15 bp, Homo sapiens
catacataaataata

SEQ ID NO: 20739 - DNA, 15 bp, Homo sapiens
gcatacataaataat

SEQ ID NO: 20740 - DNA, 15 bp, Homo sapiens
tgcatacataaataa

SEQ ID NO: 20741 - DNA, 15 bp, Homo sapiens
atgcatacataaata

SEQ ID NO: 20742 - DNA, 15 bp, Homo sapiens
catgcatacataaat

SEQ ID NO: 20743 - DNA, 15 bp, Homo sapiens
tcatgcatacataaa

SEQ ID NO: 20744 - DNA, 15 bp, Homo sapiens
ttcatgcatacataa

SEQ ID NO: 20745 - DNA, 15 bp, Homo sapiens
tttcatgcatacata

SEQ ID NO: 20746 - DNA, 15 bp, Homo sapiens
ttttcatgcatacat

SEQ ID NO: 20747 - DNA, 15 bp, Homo sapiens
tttttcatgcataca

SEQ ID NO: 20748 - DNA, 15 bp, Homo sapiens
ttttttcatgcatac

SEQ ID NO: 20749 - DNA, 15 bp, Homo sapiens
cttttttcatgcata

SEQ ID NO: 20750 - DNA, 15 bp, Homo sapiens
tcttttttcatgcat

SEQ ID NO: 20751 - DNA, 15 bp, Homo sapiens
gtcttttttcatgca

SEQ ID NO: 20752 - DNA, 15 bp, Homo sapiens
tgtcttttttcatgc

SEQ ID NO: 20753 - DNA, 15 bp, Homo sapiens
ttgtcttttttcatg

SEQ ID NO: 20754 - DNA, 15 bp, Homo sapiens
tttgtcttttttcat

SEQ ID NO: 20755 - DNA, 15 bp, Homo sapiens
ttttgtcttttttca

SEQ ID NO: 20756 - DNA, 15 bp, Homo sapiens
cttttgtcttttttc

SEQ ID NO: 20757 - DNA, 15 bp, Homo sapiens
tcttttgtctttttt

SEQ ID NO: 20758 - DNA, 15 bp, Homo sapiens
atcttttgtcttttt

SEQ ID NO: 20759 - DNA, 15 bp, Homo sapiens
catcttttgtctttt

SEQ ID NO: 20760 - DNA, 15 bp, Homo sapiens
acatcttttgtcttt

SEQ ID NO: 20761 - DNA, 15 bp, Homo sapiens
aacatcttttgtctt

SEQ ID NO: 20762 - DNA, 15 bp, Homo sapiens
taacatcttttgtct

SEQ ID NO: 20763 - DNA, 15 bp, Homo sapiens
ttaacatcttttgtc

SEQ ID NO: 20764 - DNA, 15 bp, Homo sapiens
gttaacatcttttgt

SEQ ID NO: 20765 - DNA, 15 bp, Homo sapiens
tgttaacatcttttg

SEQ ID NO: 20766 - DNA, 15 bp, Homo sapiens
ctgttaacatctttt

SEQ ID NO: 20767 - DNA, 15 bp, Homo sapiens
tctgttaacatcttt

SEQ ID NO: 20768 - DNA, 15 bp, Homo sapiens
ctctgttaacatctt

SEQ ID NO: 20769 - DNA, 15 bp, Homo sapiens
tctctgttaacatct

SEQ ID NO: 20770 - DNA, 15 bp, Homo sapiens
atctctgttaacatc

SEQ ID NO: 20771 - DNA, 15 bp, Homo sapiens
gatctctgttaacat

SEQ ID NO: 20772 - DNA, 15 bp, Homo sapiens
ggatctctgttaaca

SEQ ID NO: 20773 - DNA, 15 bp, Homo sapiens
tggatctctgttaac

SEQ ID NO: 20774 - DNA, 15 bp, Homo sapiens
atggatctctgttaa

SEQ ID NO: 20775 - DNA, 15 bp, Homo sapiens
aatggatctctgtta

SEQ ID NO: 20776 - DNA, 15 bp, Homo sapiens
caatggatctctgtt

SEQ ID NO: 20777 - DNA, 15 bp, Homo sapiens
acaatggatctctgt

SEQ ID NO: 20778 - DNA, 15 bp, Homo sapiens
aacaatggatctctg

SEQ ID NO: 20779 - DNA, 15 bp, Homo sapiens
taacaatggatctct

SEQ ID NO: 20780 - DNA, 15 bp, Homo sapiens
gtaacaatggatctc

SEQ ID NO: 20781 - DNA, 15 bp, Homo sapiens
agtaacaatggatct

SEQ ID NO: 20782 - DNA, 15 bp, Homo sapiens
aagtaacaatggatc

SEQ ID NO: 20783 - DNA, 15 bp, Homo sapiens
gaagtaacaatggat

SEQ ID NO: 20784 - DNA, 15 bp, Homo sapiens
tgaagtaacaatgga

SEQ ID NO: 20785 - DNA, 15 bp, Homo sapiens
ctgaagtaacaatgg

SEQ ID NO: 20786 - DNA, 15 bp, Homo sapiens
actgaagtaacaatg

SEQ ID NO: 20787 - DNA, 15 bp, Homo sapiens
aactgaagtaacaat

SEQ ID NO: 20788 - DNA, 15 bp, Homo sapiens
aaactgaagtaacaa

SEQ ID NO: 20789 - DNA, 15 bp, Homo sapiens
taaactgaagtaaca

SEQ ID NO: 20790 - DNA, 15 bp, Homo sapiens
gtaaactgaagtaac

SEQ ID NO: 20791 - DNA, 15 bp, Homo sapiens
agtaaactgaagtaa

SEQ ID NO: 20792 - DNA, 15 bp, Homo sapiens
tagtaaactgaagta

SEQ ID NO: 20793 - DNA, 15 bp, Homo sapiens
ctagtaaactgaagt

SEQ ID NO: 20794 - DNA, 15 bp, Homo sapiens
cctagtaaactgaag

SEQ ID NO: 20795 - DNA, 15 bp, Homo sapiens
ccctagtaaactgaa

SEQ ID NO: 20796 - DNA, 15 bp, Homo sapiens
tccctagtaaactga

SEQ ID NO: 20797 - DNA, 15 bp, Homo sapiens
atccctagtaaactg

SEQ ID NO: 20798 - DNA, 15 bp, Homo sapiens
aatccctagtaaact

SEQ ID NO: 20799 - DNA, 15 bp, Homo sapiens
caatccctagtaaac

SEQ ID NO: 20800 - DNA, 15 bp, Homo sapiens
acaatccctagtaaa

SEQ ID NO: 20801 - DNA, 15 bp, Homo sapiens
gacaatccctagtaa

SEQ ID NO: 20802 - DNA, 15 bp, Homo sapiens
agacaatccctagta

SEQ ID NO: 20803 - DNA, 15 bp, Homo sapiens
gagacaatccctagt

SEQ ID NO: 20804 - DNA, 15 bp, Homo sapiens
agagacaatccctag

SEQ ID NO: 20805 - DNA, 15 bp, Homo sapiens
cagagacaatcccta

SEQ ID NO: 20806 - DNA, 15 bp, Homo sapiens
ccagagacaatccct

SEQ ID NO: 20807 - DNA, 15 bp, Homo sapiens
cccagagacaatccc

SEQ ID NO: 20808 - DNA, 15 bp, Homo sapiens
tcccagagacaatcc

SEQ ID NO: 20809 - DNA, 15 bp, Homo sapiens
ctcccagagacaatc

SEQ ID NO: 20810 - DNA, 15 bp, Homo sapiens
cctcccagagacaat

SEQ ID NO: 20811 - DNA, 15 bp, Homo sapiens
acctcccagagacaa

SEQ ID NO: 20812 - DNA, 15 bp, Homo sapiens
tacctcccagagaca

SEQ ID NO: 20813 - DNA, 15 bp, Homo sapiens
ctacctcccagagac

SEQ ID NO: 20814 - DNA, 15 bp, Homo sapiens
cctacctcccagaga

SEQ ID NO: 20815 - DNA, 15 bp, Homo sapiens
tcctacctcccagag

SEQ ID NO: 20816 - DNA, 15 bp, Homo sapiens
atcctacctcccaga

SEQ ID NO: 20817 - DNA, 15 bp, Homo sapiens
aatcctacctcccag

SEQ ID NO: 20818 - DNA, 15 bp, Homo sapiens
taatcctacctccca

SEQ ID NO: 20819 - DNA, 15 bp, Homo sapiens
ttaatcctacctccc

SEQ ID NO: 20820 - DNA, 15 bp, Homo sapiens
cttaatcctacctcc

SEQ ID NO: 20821 - DNA, 15 bp, Homo sapiens
ccttaatcctacctc

SEQ ID NO: 20822 - DNA, 15 bp, Homo sapiens
accttaatcctacct

SEQ ID NO: 20823 - DNA, 15 bp, Homo sapiens
caccttaatcctacc

SEQ ID NO: 20824 - DNA, 15 bp, Homo sapiens
tcaccttaatcctac

SEQ ID NO: 20825 - DNA, 15 bp, Homo sapiens
atcaccttaatccta

SEQ ID NO: 20826 - DNA, 15 bp, Homo sapiens
aatcaccttaatcct

SEQ ID NO: 20827 - DNA, 15 bp, Homo sapiens
aaatcaccttaatcc

SEQ ID NO: 20828 - DNA, 15 bp, Homo sapiens
taaatcaccttaatc

SEQ ID NO: 20829 - DNA, 15 bp, Homo sapiens
ataaatcaccttaat

SEQ ID NO: 20830 - DNA, 15 bp, Homo sapiens
tataaatcaccttaa

SEQ ID NO: 20831 - DNA, 15 bp, Homo sapiens
atataaatcacctta

SEQ ID NO: 20832 - DNA, 15 bp, Homo sapiens
aatataaatcacctt

SEQ ID NO: 20833 - DNA, 15 bp, Homo sapiens
aaatataaatcacct

SEQ ID NO: 20834 - DNA, 15 bp, Homo sapiens
taaatataaatcacc

SEQ ID NO: 20835 - DNA, 15 bp, Homo sapiens
gtaaatataaatcac

SEQ ID NO: 20836 - DNA, 15 bp, Homo sapiens
ggtaaatataaatca

SEQ ID NO: 20837 - DNA, 15 bp, Homo sapiens
aggtaaatataaatc

SEQ ID NO: 20838 - DNA, 15 bp, Homo sapiens
aaggtaaatataaat

SEQ ID NO: 20839 - DNA, 15 bp, Homo sapiens
aaaggtaaatataaa

SEQ ID NO: 20840 - DNA, 15 bp, Homo sapiens
aaaaggtaaatataa

SEQ ID NO: 20841 - DNA, 15 bp, Homo sapiens
aaaaaggtaaatata

SEQ ID NO: 20842 - DNA, 15 bp, Homo sapiens
taaaaaggtaaatat

SEQ ID NO: 20843 - DNA, 15 bp, Homo sapiens
ttaaaaaggtaaata

SEQ ID NO: 20844 - DNA, 15 bp, Homo sapiens
tttaaaaaggtaaat

SEQ ID NO: 20845 - DNA, 15 bp, Homo sapiens
gtttaaaaaggtaaa

SEQ ID NO: 20846 - DNA, 15 bp, Homo sapiens
agtttaaaaaggtaa

SEQ ID NO: 20847 - DNA, 15 bp, Homo sapiens
aagtttaaaaaggta

SEQ ID NO: 20848 - DNA, 15 bp, Homo sapiens
aaagtttaaaaaggt

SEQ ID NO: 20849 - DNA, 15 bp, Homo sapiens
aaaagtttaaaaagg

SEQ ID NO: 20850 - DNA, 15 bp, Homo sapiens
gaaaagtttaaaaag

SEQ ID NO: 20851 - DNA, 15 bp, Homo sapiens
agaaaagtttaaaaa

SEQ ID NO: 20852 - DNA, 15 bp, Homo sapiens
cagaaaagtttaaaa

SEQ ID NO: 20853 - DNA, 15 bp, Homo sapiens
acagaaaagtttaaa

SEQ ID NO: 20854 - DNA, 15 bp, Homo sapiens
tacagaaaagtttaa

SEQ ID NO: 20855 - DNA, 15 bp, Homo sapiens
atacagaaaagttta

SEQ ID NO: 20856 - DNA, 15 bp, Homo sapiens
aatacagaaaagttt

SEQ ID NO: 20857 - DNA, 15 bp, Homo sapiens
aaatacagaaaagtt

SEQ ID NO: 20858 - DNA, 15 bp, Homo sapiens
aaaatacagaaaagt

SEQ ID NO: 20859 - DNA, 15 bp, Homo sapiens
aaaaatacagaaaag

SEQ ID NO: 20860 - DNA, 15 bp, Homo sapiens
aaaaaatacagaaaa

SEQ ID NO: 20861 - DNA, 15 bp, Homo sapiens
aaaaaaatacagaaa

SEQ ID NO: 20862 - DNA, 15 bp, Homo sapiens
taaaaaaatacagaa

SEQ ID NO: 20863 - DNA, 15 bp, Homo sapiens
ataaaaaaatacaga

SEQ ID NO: 20864 - DNA, 15 bp, Homo sapiens
aataaaaaaatacag

SEQ ID NO: 20865 - DNA, 15 bp, Homo sapiens
aaataaaaaaataca

SEQ ID NO: 20866 - DNA, 15 bp, Homo sapiens
aaaataaaaaaatac

SEQ ID NO: 20867 - DNA, 15 bp, Homo sapiens
gaaaataaaaaaata

SEQ ID NO: 20868 - DNA, 15 bp, Homo sapiens
tgaaaataaaaaaat

SEQ ID NO: 20869 - DNA, 15 bp, Homo sapiens
ttgaaaataaaaaaa

SEQ ID NO: 20870 - DNA, 15 bp, Homo sapiens
tttgaaaataaaaaa

SEQ ID NO: 20871 - DNA, 15 bp, Homo sapiens
atttgaaaataaaaa

SEQ ID NO: 20872 - DNA, 15 bp, Homo sapiens
aatttgaaaataaaa

SEQ ID NO: 20873 - DNA, 15 bp, Homo sapiens
aaatttgaaaataaa

SEQ ID NO: 20874 - DNA, 15 bp, Homo sapiens
aaaatttgaaaataa

SEQ ID NO: 20875 - DNA, 15 bp, Homo sapiens
gaaaatttgaaaata

SEQ ID NO: 20876 - DNA, 15 bp, Homo sapiens
ggaaaatttgaaaat

SEQ ID NO: 20877 - DNA, 15 bp, Homo sapiens
tggaaaatttgaaaa

SEQ ID NO: 20878 - DNA, 15 bp, Homo sapiens
atggaaaatttgaaa

SEQ ID NO: 20879 - DNA, 15 bp, Homo sapiens
tatggaaaatttgaa

SEQ ID NO: 20880 - DNA, 15 bp, Homo sapiens
ttatggaaaatttga

SEQ ID NO: 20881 - DNA, 15 bp, Homo sapiens
tttatggaaaatttg

SEQ ID NO: 20882 - DNA, 15 bp, Homo sapiens
ttttatggaaaattt

SEQ ID NO: 20883 - DNA, 15 bp, Homo sapiens
tttttatggaaaatt

SEQ ID NO: 20884 - DNA, 15 bp, Homo sapiens
atttttatggaaaat

SEQ ID NO: 20885 - DNA, 15 bp, Homo sapiens
tatttttatggaaaa

SEQ ID NO: 20886 - DNA, 15 bp, Homo sapiens
atatttttatggaaa

SEQ ID NO: 20887 - DNA, 15 bp, Homo sapiens
tatatttttatggaa

SEQ ID NO: 20888 - DNA, 15 bp, Homo sapiens
ttatatttttatgga

SEQ ID NO: 20889 - DNA, 15 bp, Homo sapiens
cttatatttttatgg

SEQ ID NO: 20890 - DNA, 15 bp, Homo sapiens
ccttatatttttatg

SEQ ID NO: 20891 - DNA, 15 bp, Homo sapiens
tccttatatttttat

SEQ ID NO: 20892 - DNA, 15 bp, Homo sapiens
gtccttatattttta

SEQ ID NO: 20893 - DNA, 15 bp, Homo sapiens
agtccttatattttt

SEQ ID NO: 20894 - DNA, 15 bp, Homo sapiens
aagtccttatatttt

SEQ ID NO: 20895 - DNA, 15 bp, Homo sapiens
caagtccttatattt

SEQ ID NO: 20896 - DNA, 15 bp, Homo sapiens
tcaagtccttatatt

SEQ ID NO: 20897 - DNA, 15 bp, Homo sapiens
ttcaagtccttatat

SEQ ID NO: 20898 - DNA, 15 bp, Homo sapiens
cttcaagtccttata

SEQ ID NO: 20899 - DNA, 15 bp, Homo sapiens
tcttcaagtccttat

SEQ ID NO: 20900 - DNA, 15 bp, Homo sapiens
atcttcaagtcctta

SEQ ID NO: 20901 - DNA, 15 bp, Homo sapiens
gatcttcaagtcctt

SEQ ID NO: 20902 - DNA, 15 bp, Homo sapiens
tgatcttcaagtcct

SEQ ID NO: 20903 - DNA, 15 bp, Homo sapiens
ttgatcttcaagtcc

SEQ ID NO: 20904 - DNA, 15 bp, Homo sapiens
cttgatcttcaagtc

SEQ ID NO: 20905 - DNA, 15 bp, Homo sapiens
tcttgatcttcaagt

SEQ ID NO: 20906 - DNA, 15 bp, Homo sapiens
ttcttgatcttcaag

SEQ ID NO: 20907 - DNA, 15 bp, Homo sapiens
tttcttgatcttcaa

SEQ ID NO: 20908 - DNA, 15 bp, Homo sapiens
ttttcttgatcttca

SEQ ID NO: 20909 - DNA, 15 bp, Homo sapiens
tttttcttgatcttc

SEQ ID NO: 20910 - DNA, 15 bp, Homo sapiens
ttttttcttgatctt

SEQ ID NO: 20911 - DNA, 15 bp, Homo sapiens
attttttcttgatct

SEQ ID NO: 20912 - DNA, 15 bp, Homo sapiens
aattttttcttgatc

SEQ ID NO: 20913 - DNA, 15 bp, Homo sapiens
aaattttttcttgat

SEQ ID NO: 20914 - DNA, 15 bp, Homo sapiens
gaaattttttcttga

SEQ ID NO: 20915 - DNA, 15 bp, Homo sapiens
agaaattttttcttg

SEQ ID NO: 20916 - DNA, 15 bp, Homo sapiens
cagaaattttttctt

SEQ ID NO: 20917 - DNA, 15 bp, Homo sapiens
gcagaaattttttct

SEQ ID NO: 20918 - DNA, 15 bp, Homo sapiens
agcagaaattttttc

SEQ ID NO: 20919 - DNA, 15 bp, Homo sapiens
aagcagaaatttttt

SEQ ID NO: 20920 - DNA, 15 bp, Homo sapiens
aaagcagaaattttt

SEQ ID NO: 20921 - DNA, 15 bp, Homo sapiens
caaagcagaaatttt

SEQ ID NO: 20922 - DNA, 15 bp, Homo sapiens
ccaaagcagaaattt

SEQ ID NO: 20923 - DNA, 15 bp, Homo sapiens
gccaaagcagaaatt

SEQ ID NO: 20924 - DNA, 15 bp, Homo sapiens
agccaaagcagaaat

SEQ ID NO: 20925 - DNA, 15 bp, Homo sapiens
gagccaaagcagaaa

SEQ ID NO: 20926 - DNA, 15 bp, Homo sapiens
tgagccaaagcagaa

SEQ ID NO: 20927 - DNA, 15 bp, Homo sapiens
ctgagccaaagcaga

SEQ ID NO: 20928 - DNA, 15 bp, Homo sapiens
actgagccaaagcag

SEQ ID NO: 20929 - DNA, 15 bp, Homo sapiens
cactgagccaaagca

SEQ ID NO: 20930 - DNA, 15 bp, Homo sapiens
gcactgagccaaagc

SEQ ID NO: 20931 - DNA, 15 bp, Homo sapiens
tgcactgagccaaag

SEQ ID NO: 20932 - DNA, 15 bp, Homo sapiens
ctgcactgagccaaa

SEQ ID NO: 20933 - DNA, 15 bp, Homo sapiens
actgcactgagccaa

SEQ ID NO: 20934 - DNA, 15 bp, Homo sapiens
cactgcactgagcca

SEQ ID NO: 20935 - DNA, 15 bp, Homo sapiens
ccactgcactgagcc

SEQ ID NO: 20936 - DNA, 15 bp, Homo sapiens
gccactgcactgagc

SEQ ID NO: 20937 - DNA, 15 bp, Homo sapiens
agccactgcactgag

SEQ ID NO: 20938 - DNA, 15 bp, Homo sapiens
gagccactgcactga

SEQ ID NO: 20939 - DNA, 15 bp, Homo sapiens
tgagccactgcactg

SEQ ID NO: 20940 - DNA, 15 bp, Homo sapiens
gtgagccactgcact

SEQ ID NO: 20941 - DNA, 15 bp, Homo sapiens
cgtgagccactgcac

SEQ ID NO: 20942 - DNA, 15 bp, Homo sapiens
gcgtgagccactgca

SEQ ID NO: 20943 - DNA, 15 bp, Homo sapiens
ggcgtgagccactgc

SEQ ID NO: 20944 - DNA, 15 bp, Homo sapiens
aggcgtgagccactg

SEQ ID NO: 20945 - DNA, 15 bp, Homo sapiens
caggcgtgagccact

SEQ ID NO: 20946 - DNA, 15 bp, Homo sapiens
ctgctgggattacag

SEQ ID NO: 20947 - DNA, 15 bp, Homo sapiens
actgctgggattaca

SEQ ID NO: 20948 - DNA, 15 bp, Homo sapiens
aactgctgggattac

SEQ ID NO: 20949 - DNA, 15 bp, Homo sapiens
aaactgctgggatta

SEQ ID NO: 20950 - DNA, 15 bp, Homo sapiens
caaactgctgggatt

SEQ ID NO: 20951 - DNA, 15 bp, Homo sapiens
ccaaactgctgggat

SEQ ID NO: 20952 - DNA, 15 bp, Homo sapiens
cccaaactgctggga

SEQ ID NO: 20953 - DNA, 15 bp, Homo sapiens
tcccaaactgctggg

SEQ ID NO: 20954 - DNA, 15 bp, Homo sapiens
ctcccaaactgctgg

SEQ ID NO: 20955 - DNA, 15 bp, Homo sapiens
gctcccaaactgctg

SEQ ID NO: 20956 - DNA, 15 bp, Homo sapiens
ggctcccaaactgct

SEQ ID NO: 20957 - DNA, 15 bp, Homo sapiens
gggctcccaaactgc

SEQ ID NO: 20958 - DNA, 15 bp, Homo sapiens
agggctcccaaactg

SEQ ID NO: 20959 - DNA, 15 bp, Homo sapiens
tagggctcccaaact

SEQ ID NO: 20960 - DNA, 15 bp, Homo sapiens
ctagggctcccaaac

SEQ ID NO: 20961 - DNA, 15 bp, Homo sapiens
cctagggctcccaaa

SEQ ID NO: 20962 - DNA, 15 bp, Homo sapiens
ccctagggctcccaa

SEQ ID NO: 20963 - DNA, 15 bp, Homo sapiens
cccctagggctccca

SEQ ID NO: 20964 - DNA, 15 bp, Homo sapiens
tcccctagggctccc

SEQ ID NO: 20965 - DNA, 15 bp, Homo sapiens
ctcccctagggctcc

SEQ ID NO: 20966 - DNA, 15 bp, Homo sapiens
tctcccctagggctc

SEQ ID NO: 20967 - DNA, 15 bp, Homo sapiens
ctctcccctagggct

SEQ ID NO: 20968 - DNA, 15 bp, Homo sapiens
cctctcccctagggc

SEQ ID NO: 20969 - DNA, 15 bp, Homo sapiens
tcctctcccctaggg

SEQ ID NO: 20970 - DNA, 15 bp, Homo sapiens
atcctctcccctagg

SEQ ID NO: 20971 - DNA, 15 bp, Homo sapiens
gatcctctcccctag

SEQ ID NO: 20972 - DNA, 15 bp, Homo sapiens
tgatcctctccccta

SEQ ID NO: 20973 - DNA, 15 bp, Homo sapiens
gtgatcctctcccct

SEQ ID NO: 20974 - DNA, 15 bp, Homo sapiens
agtgatcctctcccc

SEQ ID NO: 20975 - DNA, 15 bp, Homo sapiens
aagtgatcctctccc

SEQ ID NO: 20976 - DNA, 15 bp, Homo sapiens
caagtgatcctctcc

SEQ ID NO: 20977 - DNA, 15 bp, Homo sapiens
tcaagtgatcctctc

SEQ ID NO: 20978 - DNA, 15 bp, Homo sapiens
ttcaagtgatcctct

SEQ ID NO: 20979 - DNA, 15 bp, Homo sapiens
gttcaagtgatcctc

SEQ ID NO: 20980 - DNA, 15 bp, Homo sapiens
ggttcaagtgatcct

SEQ ID NO: 20981 - DNA, 15 bp, Homo sapiens
gggttcaagtgatcc

SEQ ID NO: 20982 - DNA, 15 bp, Homo sapiens
tgggttcaagtgatc

SEQ ID NO: 20983 - DNA, 15 bp, Homo sapiens
ttgggttcaagtgat

SEQ ID NO: 20984 - DNA, 15 bp, Homo sapiens
cttgggttcaagtga

SEQ ID NO: 20985 - DNA, 15 bp, Homo sapiens
tcttgggttcaagtg

SEQ ID NO: 20986 - DNA, 15 bp, Homo sapiens
ctcttgggttcaagt

SEQ ID NO: 20987 - DNA, 15 bp, Homo sapiens
actcttgggttcaag

SEQ ID NO: 20988 - DNA, 15 bp, Homo sapiens
aactcttgggttcaa

SEQ ID NO: 20989 - DNA, 15 bp, Homo sapiens
aaactcttgggttca

SEQ ID NO: 20990 - DNA, 15 bp, Homo sapiens
caaactcttgggttc

SEQ ID NO: 20991 - DNA, 15 bp, Homo sapiens
tcaaactcttgggtt

SEQ ID NO: 20992 - DNA, 15 bp, Homo sapiens
gtcaaactcttgggt

SEQ ID NO: 20993 - DNA, 15 bp, Homo sapiens
cgtcaaactcttggg

SEQ ID NO: 20994 - DNA, 15 bp, Homo sapiens
acgtcaaactcttgg

SEQ ID NO: 20995 - DNA, 15 bp, Homo sapiens
aacgtcaaactcttg

SEQ ID NO: 20996 - DNA, 15 bp, Homo sapiens
gaacgtcaaactctt

SEQ ID NO: 20997 - DNA, 15 bp, Homo sapiens
ggaacgtcaaactct

SEQ ID NO: 20998 - DNA, 15 bp, Homo sapiens
tggaacgtcaaactc

SEQ ID NO: 20999 - DNA, 15 bp, Homo sapiens
ctggaacgtcaaact

SEQ ID NO: 21000 - DNA, 15 bp, Homo sapiens
actggaacgtcaaac

SEQ ID NO: 21001 - DNA, 15 bp, Homo sapiens
cactggaacgtcaaa

SEQ ID NO: 21002 - DNA, 15 bp, Homo sapiens
tcactggaacgtcaa

SEQ ID NO: 21003 - DNA, 15 bp, Homo sapiens
ctcactggaacgtca

SEQ ID NO: 21004 - DNA, 15 bp, Homo sapiens
gctcactggaacgtc

SEQ ID NO: 21005 - DNA, 15 bp, Homo sapiens
agctcactggaacgt

SEQ ID NO: 21006 - DNA, 15 bp, Homo sapiens
tagctcactggaacg

SEQ ID NO: 21007 - DNA, 15 bp, Homo sapiens
atagctcactggaac

SEQ ID NO: 21008 - DNA, 15 bp, Homo sapiens
catagctcactggaa

SEQ ID NO: 21009 - DNA, 15 bp, Homo sapiens
tcatagctcactgga

SEQ ID NO: 21010 - DNA, 15 bp, Homo sapiens
atcatagctcactgg

SEQ ID NO: 21011 - DNA, 15 bp, Homo sapiens
gatcatagctcactg

SEQ ID NO: 21012 - DNA, 15 bp, Homo sapiens
agatcatagctcact

SEQ ID NO: 21013 - DNA, 15 bp, Homo sapiens
gagatcatagctcac

SEQ ID NO: 21014 - DNA, 15 bp, Homo sapiens
ggagatcatagctca

SEQ ID NO: 21015 - DNA, 15 bp, Homo sapiens
cggagatcatagctc

SEQ ID NO: 21016 - DNA, 15 bp, Homo sapiens
ccggagatcatagct

SEQ ID NO: 21017 - DNA, 15 bp, Homo sapiens
tccggagatcatagc

SEQ ID NO: 21018 - DNA, 15 bp, Homo sapiens
atccggagatcatag

SEQ ID NO: 21019 - DNA, 15 bp, Homo sapiens
gatccggagatcata

SEQ ID NO: 21020 - DNA, 15 bp, Homo sapiens
cgatccggagatcat

SEQ ID NO: 21021 - DNA, 15 bp, Homo sapiens
acgatccggagatca

SEQ ID NO: 21022 - DNA, 15 bp, Homo sapiens
tacgatccggagatc

SEQ ID NO: 21023 - DNA, 15 bp, Homo sapiens
gtacgatccggagat

SEQ ID NO: 21024 - DNA, 15 bp, Homo sapiens
ggtacgatccggaga

SEQ ID NO: 21025 - DNA, 15 bp, Homo sapiens
cggtacgatccggag

SEQ ID NO: 21026 - DNA, 15 bp, Homo sapiens
gcggtacgatccgga

SEQ ID NO: 21027 - DNA, 15 bp, Homo sapiens
ggcggtacgatccgg

SEQ ID NO: 21028 - DNA, 15 bp, Homo sapiens
aggcggtacgatccg

SEQ ID NO: 21029 - DNA, 15 bp, Homo sapiens
caggcggtacgatcc

SEQ ID NO: 21030 - DNA, 15 bp, Homo sapiens
ccaggcggtacgatc

SEQ ID NO: 21031 - DNA, 15 bp, Homo sapiens
tccaggcggtacgat

SEQ ID NO: 21032 - DNA, 15 bp, Homo sapiens
gtccaggcggtacga

SEQ ID NO: 21033 - DNA, 15 bp, Homo sapiens
cgtccaggcggtacg

SEQ ID NO: 21034 - DNA, 15 bp, Homo sapiens
tcgtccaggcggtac

SEQ ID NO: 21035 - DNA, 15 bp, Homo sapiens
atcgtccaggcggta

SEQ ID NO: 21036 - DNA, 15 bp, Homo sapiens
catcgtccaggcggt

SEQ ID NO: 21037 - DNA, 15 bp, Homo sapiens
ccatcgtccaggcgg

SEQ ID NO: 21038 - DNA, 15 bp, Homo sapiens
tccatcgtccaggcg

SEQ ID NO: 21039 - DNA, 15 bp, Homo sapiens
ctccatcgtccaggc

SEQ ID NO: 21040 - DNA, 15 bp, Homo sapiens
gctccatcgtccagg

SEQ ID NO: 21041 - DNA, 15 bp, Homo sapiens
tgctccatcgtccag

SEQ ID NO: 21042 - DNA, 15 bp, Homo sapiens
ttgctccatcgtcca

SEQ ID NO: 21043 - DNA, 15 bp, Homo sapiens
cttgctccatcgtcc

SEQ ID NO: 21044 - DNA, 15 bp, Homo sapiens
tcttgctccatcgtc

SEQ ID NO: 21045 - DNA, 15 bp, Homo sapiens
gtcttgctccatcgt

SEQ ID NO: 21046 - DNA, 15 bp, Homo sapiens
ggtcttgctccatcg

SEQ ID NO: 21047 - DNA, 15 bp, Homo sapiens
gggtcttgctccatc

SEQ ID NO: 21048 - DNA, 15 bp, Homo sapiens
agggtcttgctccat

SEQ ID NO: 21049 - DNA, 15 bp, Homo sapiens
cagggtcttgctcca

SEQ ID NO: 21050 - DNA, 15 bp, Homo sapiens
acagggtcttgctcc

SEQ ID NO: 21051 - DNA, 15 bp, Homo sapiens
ttttttttttgagac

SEQ ID NO: 21052 - DNA, 15 bp, Homo sapiens
tttttttttttgaga

SEQ ID NO: 21053 - DNA, 15 bp, Homo sapiens
atttttttttttgag

SEQ ID NO: 21054 - DNA, 15 bp, Homo sapiens
gatttttttttttga

SEQ ID NO: 21055 - DNA, 15 bp, Homo sapiens
agatttttttttttg

SEQ ID NO: 21056 - DNA, 15 bp, Homo sapiens
aagattttttttttt

SEQ ID NO: 21057 - DNA, 15 bp, Homo sapiens
aaagatttttttttt

SEQ ID NO: 21058 - DNA, 15 bp, Homo sapiens
caaagattttttttt

SEQ ID NO: 21059 - DNA, 15 bp, Homo sapiens
gcaaagatttttttt

SEQ ID NO: 21060 - DNA, 15 bp, Homo sapiens
agcaaagattttttt

SEQ ID NO: 21061 - DNA, 15 bp, Homo sapiens
aagcaaagatttttt

SEQ ID NO: 21062 - DNA, 15 bp, Homo sapiens
aaagcaaagattttt

SEQ ID NO: 21063 - DNA, 15 bp, Homo sapiens
aaaagcaaagatttt

SEQ ID NO: 21064 - DNA, 15 bp, Homo sapiens
aaaaagcaaagattt

SEQ ID NO: 21065 - DNA, 15 bp, Homo sapiens
aaaaaagcaaagatt

SEQ ID NO: 21066 - DNA, 15 bp, Homo sapiens
aaaaaaagcaaagat

SEQ ID NO: 21067 - DNA, 15 bp, Homo sapiens
aaaaaaaagcaaaga

SEQ ID NO: 21068 - DNA, 15 bp, Homo sapiens
aaaaaaaaaaagcaa

SEQ ID NO: 21069 - DNA, 15 bp, Homo sapiens
caaaaaaaaaaagca

SEQ ID NO: 21070 - DNA, 15 bp, Homo sapiens
acaaaaaaaaaaagc

SEQ ID NO: 21071 - DNA, 15 bp, Homo sapiens
aacaaaaaaaaaaag

SEQ ID NO: 21072 - DNA, 15 bp, Homo sapiens
caaacaaaaaaaaaa

SEQ ID NO: 21073 - DNA, 15 bp, Homo sapiens
acaaacaaaaaaaaa

SEQ ID NO: 21074 - DNA, 15 bp, Homo sapiens
aacaaacaaaaaaaa

SEQ ID NO: 21075 - DNA, 15 bp, Homo sapiens
aaacaaacaaaaaaa

SEQ ID NO: 21076 - DNA, 15 bp, Homo sapiens
aaaacaaacaaaaaa

SEQ ID NO: 21077 - DNA, 15 bp, Homo sapiens
aaaaacaaacaaaaa

SEQ ID NO: 21078 - DNA, 15 bp, Homo sapiens
caaaaacaaacaaaa

SEQ ID NO: 21079 - DNA, 15 bp, Homo sapiens
tcaaaaacaaacaaa

SEQ ID NO: 21080 - DNA, 15 bp, Homo sapiens
ctcaaaaacaaacaa

SEQ ID NO: 21081 - DNA, 15 bp, Homo sapiens
tctcaaaaacaaaca

SEQ ID NO: 21082 - DNA, 15 bp, Homo sapiens
gtctcaaaaacaaac

SEQ ID NO: 21083 - DNA, 15 bp, Homo sapiens
cgtctcaaaaacaaa

SEQ ID NO: 21084 - DNA, 15 bp, Homo sapiens
ccgtctcaaaaacaa

SEQ ID NO: 21085 - DNA, 15 bp, Homo sapiens
tccgtctcaaaaaca

SEQ ID NO: 21086 - DNA, 15 bp, Homo sapiens
ctccgtctcaaaaac

SEQ ID NO: 21087 - DNA, 15 bp, Homo sapiens
agagactccgtctca

SEQ ID NO: 21088 - DNA, 15 bp, Homo sapiens
gagagactccgtctc

SEQ ID NO: 21089 - DNA, 15 bp, Homo sapiens
agagagactccgtct

SEQ ID NO: 21090 - DNA, 15 bp, Homo sapiens
gagagagactccgtc

SEQ ID NO: 21091 - DNA, 15 bp, Homo sapiens
agagagagactccgt

SEQ ID NO: 21092 - DNA, 15 bp, Homo sapiens
cagagagagactccg

SEQ ID NO: 21093 - DNA, 15 bp, Homo sapiens
acagagagagactcc

SEQ ID NO: 21094 - DNA, 15 bp, Homo sapiens
aacagagagagactc

SEQ ID NO: 21095 - DNA, 15 bp, Homo sapiens
caacagagagagact

SEQ ID NO: 21096 - DNA, 15 bp, Homo sapiens
gcaacagagagagac

SEQ ID NO: 21097 - DNA, 15 bp, Homo sapiens
ggcaacagagagaga

SEQ ID NO: 21098 - DNA, 15 bp, Homo sapiens
gggcaacagagagag

SEQ ID NO: 21099 - DNA, 15 bp, Homo sapiens
ggggcaacagagaga

SEQ ID NO: 21100 - DNA, 15 bp, Homo sapiens
tggggcaacagagag

SEQ ID NO: 21101 - DNA, 15 bp, Homo sapiens
ctggggcaacagaga

SEQ ID NO: 21102 - DNA, 15 bp, Homo sapiens
gctggggcaacagag

SEQ ID NO: 21103 - DNA, 15 bp, Homo sapiens
agctggggcaacaga

SEQ ID NO: 21104 - DNA, 15 bp, Homo sapiens
cagctggggcaacag

SEQ ID NO: 21105 - DNA, 15 bp, Homo sapiens
ccagctggggcaaca

SEQ ID NO: 21106 - DNA, 15 bp, Homo sapiens
tccagctggggcaac

SEQ ID NO: 21107 - DNA, 15 bp, Homo sapiens
ctccagctggggcaa

SEQ ID NO: 21108 - DNA, 15 bp, Homo sapiens
actccagctggggca

SEQ ID NO: 21109 - DNA, 15 bp, Homo sapiens
tactccagctggggc

SEQ ID NO: 21110 - DNA, 15 bp, Homo sapiens
gtactccagctgggg

SEQ ID NO: 21111 - DNA, 15 bp, Homo sapiens
tgtactccagctggg

SEQ ID NO: 21112 - DNA, 15 bp, Homo sapiens
ctgtactccagctgg

SEQ ID NO: 21113 - DNA, 15 bp, Homo sapiens
actgtactccagctg

SEQ ID NO: 21114 - DNA, 15 bp, Homo sapiens
cactgtactccagct

SEQ ID NO: 21115 - DNA, 15 bp, Homo sapiens
tgccactgtactcca

SEQ ID NO: 21116 - DNA, 15 bp, Homo sapiens
gtgccactgtactcc

SEQ ID NO: 21117 - DNA, 15 bp, Homo sapiens
tgtgccactgtactc

SEQ ID NO: 21118 - DNA, 15 bp, Homo sapiens
ttgtgccactgtact

SEQ ID NO: 21119 - DNA, 15 bp, Homo sapiens
attgtgccactgtac

SEQ ID NO: 21120 - DNA, 15 bp, Homo sapiens
gattgtgccactgta

SEQ ID NO: 21121 - DNA, 15 bp, Homo sapiens
agattgtgccactgt

SEQ ID NO: 21122 - DNA, 15 bp, Homo sapiens
gagattgtgccactg

SEQ ID NO: 21123 - DNA, 15 bp, Homo sapiens
tgagattgtgccact

SEQ ID NO: 21124 - DNA, 15 bp, Homo sapiens
ctgagattgtgccac

SEQ ID NO: 21125 - DNA, 15 bp, Homo sapiens
gctgagattgtgcca

SEQ ID NO: 21126 - DNA, 15 bp, Homo sapiens
agctgagattgtgcc

SEQ ID NO: 21127 - DNA, 15 bp, Homo sapiens
gagctgagattgtgc

SEQ ID NO: 21128 - DNA, 15 bp, Homo sapiens
tgagctgagattgtg

SEQ ID NO: 21129 - DNA, 15 bp, Homo sapiens
gtgagctgagattgt

SEQ ID NO: 21130 - DNA, 15 bp, Homo sapiens
ggtgagctgagattg

SEQ ID NO: 21131 - DNA, 15 bp, Homo sapiens
cggtgagctgagatt

SEQ ID NO: 21132 - DNA, 15 bp, Homo sapiens
gcggtgagctgagat

SEQ ID NO: 21133 - DNA, 15 bp, Homo sapiens
tgcggtgagctgaga

SEQ ID NO: 21134 - DNA, 15 bp, Homo sapiens
ttgcggtgagctgag

SEQ ID NO: 21135 - DNA, 15 bp, Homo sapiens
gttgcggtgagctga

SEQ ID NO: 21136 - DNA, 15 bp, Homo sapiens
ggttgcggtgagctg

SEQ ID NO: 21137 - DNA, 15 bp, Homo sapiens
aggttgcggtgagct

SEQ ID NO: 21138 - DNA, 15 bp, Homo sapiens
gaggttgcggtgagc

SEQ ID NO: 21139 - DNA, 15 bp, Homo sapiens
agaggttgcggtgag

SEQ ID NO: 21140 - DNA, 15 bp, Homo sapiens
cagaggttgcggtga

SEQ ID NO: 21141 - DNA, 15 bp, Homo sapiens
gcagaggttgcggtg

SEQ ID NO: 21142 - DNA, 15 bp, Homo sapiens
agagaatcgcttgaa

SEQ ID NO: 21143 - DNA, 15 bp, Homo sapiens
aagagaatcgcttga

SEQ ID NO: 21144 - DNA, 15 bp, Homo sapiens
caagagaatcgcttg

SEQ ID NO: 21145 - DNA, 15 bp, Homo sapiens
gcaagagaatcgctt

SEQ ID NO: 21146 - DNA, 15 bp, Homo sapiens
ggcaagagaatcgct

SEQ ID NO: 21147 - DNA, 15 bp, Homo sapiens
aggcaagagaatcgc

SEQ ID NO: 21148 - DNA, 15 bp, Homo sapiens
gaggcaagagaatcg

SEQ ID NO: 21149 - DNA, 15 bp, Homo sapiens
tgaggcaagagaatc

SEQ ID NO: 21150 - DNA, 15 bp, Homo sapiens
gtacttgggaggctg

SEQ ID NO: 21151 - DNA, 15 bp, Homo sapiens
ggtacttgggaggct

SEQ ID NO: 21152 - DNA, 15 bp, Homo sapiens
aggtacttgggaggc

SEQ ID NO: 21153 - DNA, 15 bp, Homo sapiens
caggtacttgggagg

SEQ ID NO: 21154 - DNA, 15 bp, Homo sapiens
ccaggtacttgggag

SEQ ID NO: 21155 - DNA, 15 bp, Homo sapiens
cccaggtacttggga

SEQ ID NO: 21156 - DNA, 15 bp, Homo sapiens
tcccaggtacttggg

SEQ ID NO: 21157 - DNA, 15 bp, Homo sapiens
atcccaggtacttgg

SEQ ID NO: 21158 - DNA, 15 bp, Homo sapiens
aatcccaggtacttg

SEQ ID NO: 21159 - DNA, 15 bp, Homo sapiens
gaatcccaggtactt

SEQ ID NO: 21160 - DNA, 15 bp, Homo sapiens
ggaatcccaggtact

SEQ ID NO: 21161 - DNA, 15 bp, Homo sapiens
tggaatcccaggtac

SEQ ID NO: 21162 - DNA, 15 bp, Homo sapiens
atggaatcccaggta

SEQ ID NO: 21163 - DNA, 15 bp, Homo sapiens
catggaatcccaggt

SEQ ID NO: 21164 - DNA, 15 bp, Homo sapiens
gcatggaatcccagg

SEQ ID NO: 21165 - DNA, 15 bp, Homo sapiens
tgcatggaatcccag

SEQ ID NO: 21166 - DNA, 15 bp, Homo sapiens
gtgcatggaatccca

SEQ ID NO: 21167 - DNA, 15 bp, Homo sapiens
ggtgcatggaatccc

SEQ ID NO: 21168 - DNA, 15 bp, Homo sapiens
gggtgcatggaatcc

SEQ ID NO: 21169 - DNA, 15 bp, Homo sapiens
tgggtgcatggaatc

SEQ ID NO: 21170 - DNA, 15 bp, Homo sapiens
gtgggtgcatggaat

SEQ ID NO: 21171 - DNA, 15 bp, Homo sapiens
ggtgggtgcatggaa

SEQ ID NO: 21172 - DNA, 15 bp, Homo sapiens
tggtgggtgcatgga

SEQ ID NO: 21173 - DNA, 15 bp, Homo sapiens
gtggtgggtgcatgg

SEQ ID NO: 21174 - DNA, 15 bp, Homo sapiens
agtggtgggtgcatg

SEQ ID NO: 21175 - DNA, 15 bp, Homo sapiens
tagtggtgggtgcat

SEQ ID NO: 21176 - DNA, 15 bp, Homo sapiens
atagtggtgggtgca

SEQ ID NO: 21177 - DNA, 15 bp, Homo sapiens
catagtggtgggtgc

SEQ ID NO: 21178 - DNA, 15 bp, Homo sapiens
gcatagtggtgggtg

SEQ ID NO: 21179 - DNA, 15 bp, Homo sapiens
ggcatagtggtgggt

SEQ ID NO: 21180 - DNA, 15 bp, Homo sapiens
gggcatagtggtggg

SEQ ID NO: 21181 - DNA, 15 bp, Homo sapiens
tgggcatagtggtgg

SEQ ID NO: 21182 - DNA, 15 bp, Homo sapiens
ctgggcatagtggtg

SEQ ID NO: 21183 - DNA, 15 bp, Homo sapiens
gctgggcatagtggt

SEQ ID NO: 21184 - DNA, 15 bp, Homo sapiens
agctgggcatagtgg

SEQ ID NO: 21185 - DNA, 15 bp, Homo sapiens
tagctgggcatagtg

SEQ ID NO: 21186 - DNA, 15 bp, Homo sapiens
gtagctgggcatagt

SEQ ID NO: 21187 - DNA, 15 bp, Homo sapiens
agtagctgggcatag

SEQ ID NO: 21188 - DNA, 15 bp, Homo sapiens
aagtagctgggcata

SEQ ID NO: 21189 - DNA, 15 bp, Homo sapiens
gaaaatacaaaaaag

SEQ ID NO: 21190 - DNA, 15 bp, Homo sapiens
cctgtctctactgaa

SEQ ID NO: 21191 - DNA, 15 bp, Homo sapiens
ccctgtctctactga

SEQ ID NO: 21192 - DNA, 15 bp, Homo sapiens
accctgtctctactg

SEQ ID NO: 21193 - DNA, 15 bp, Homo sapiens
tgaaaccctgtctct

SEQ ID NO: 21194 - DNA, 15 bp, Homo sapiens
gtgaaaccctgtctc

SEQ ID NO: 21195 - DNA, 15 bp, Homo sapiens
ggtgaaaccctgtct

SEQ ID NO: 21196 - DNA, 15 bp, Homo sapiens
attcgagaccagcct

SEQ ID NO: 21197 - DNA, 15 bp, Homo sapiens
aattcgagaccagcc

SEQ ID NO: 21198 - DNA, 15 bp, Homo sapiens
gaattcgagaccagc

SEQ ID NO: 21199 - DNA, 15 bp, Homo sapiens
ggaattcgagaccag

SEQ ID NO: 21200 - DNA, 15 bp, Homo sapiens
aggaattcgagacca

SEQ ID NO: 21201 - DNA, 15 bp, Homo sapiens
caggaattcgagacc

SEQ ID NO: 21202 - DNA, 15 bp, Homo sapiens
tcaggaattcgagac

SEQ ID NO: 21203 - DNA, 15 bp, Homo sapiens
gtcaggaattcgaga

SEQ ID NO: 21204 - DNA, 15 bp, Homo sapiens
ggtcaggaattcgag

SEQ ID NO: 21205 - DNA, 15 bp, Homo sapiens
aggtcaggaattcga

SEQ ID NO: 21206 - DNA, 15 bp, Homo sapiens
gaggtcaggaattcg

SEQ ID NO: 21207 - DNA, 15 bp, Homo sapiens
tgaggtcaggaattc

SEQ ID NO: 21208 - DNA, 15 bp, Homo sapiens
ctgaggtcaggaatt

SEQ ID NO: 21209 - DNA, 15 bp, Homo sapiens
gctgaggtcaggaat

SEQ ID NO: 21210 - DNA, 15 bp, Homo sapiens
agctgaggtcaggaa

SEQ ID NO: 21211 - DNA, 15 bp, Homo sapiens
cagctgaggtcagga

SEQ ID NO: 21212 - DNA, 15 bp, Homo sapiens
tcagctgaggtcagg

SEQ ID NO: 21213 - DNA, 15 bp, Homo sapiens
atcagctgaggtcag

SEQ ID NO: 21214 - DNA, 15 bp, Homo sapiens
gatcagctgaggtca

SEQ ID NO: 21215 - DNA, 15 bp, Homo sapiens
ggatcagctgaggtc

SEQ ID NO: 21216 - DNA, 15 bp, Homo sapiens
tggatcagctgaggt

SEQ ID NO: 21217 - DNA, 15 bp, Homo sapiens
gtggatcagctgagg

SEQ ID NO: 21218 - DNA, 15 bp, Homo sapiens
ggtggatcagctgag

SEQ ID NO: 21219 - DNA, 15 bp, Homo sapiens
cggtggatcagctga

SEQ ID NO: 21220 - DNA, 15 bp, Homo sapiens
ccggtggatcagctg

SEQ ID NO: 21221 - DNA, 15 bp, Homo sapiens
gccggtggatcagct

SEQ ID NO: 21222 - DNA, 15 bp, Homo sapiens
ggccggtggatcagc

SEQ ID NO: 21223 - DNA, 15 bp, Homo sapiens
aggccggtggatcag

SEQ ID NO: 21224 - DNA, 15 bp, Homo sapiens
aaggccggtggatca

SEQ ID NO: 21225 - DNA, 15 bp, Homo sapiens
caaggccggtggatc

SEQ ID NO: 21226 - DNA, 15 bp, Homo sapiens
ccaaggccggtggat

SEQ ID NO: 21227 - DNA, 15 bp, Homo sapiens
gccaaggccggtgga

SEQ ID NO: 21228 - DNA, 15 bp, Homo sapiens
ggccaaggccggtgg

SEQ ID NO: 21229 - DNA, 15 bp, Homo sapiens
aggccaaggccggtg

SEQ ID NO: 21230 - DNA, 15 bp, Homo sapiens
gaggccaaggccggt

SEQ ID NO: 21231 - DNA, 15 bp, Homo sapiens
ggaggccaaggccgg

SEQ ID NO: 21232 - DNA, 15 bp, Homo sapiens
gggaggccaaggccg

SEQ ID NO: 21233 - DNA, 15 bp, Homo sapiens
tgggaggccaaggcc

SEQ ID NO: 21234 - DNA, 15 bp, Homo sapiens
tgggctgggcacagt

SEQ ID NO: 21235 - DNA, 15 bp, Homo sapiens
ttgggctgggcacag

SEQ ID NO: 21236 - DNA, 15 bp, Homo sapiens
attgggctgggcaca

SEQ ID NO: 21237 - DNA, 15 bp, Homo sapiens
gattgggctgggcac

SEQ ID NO: 21238 - DNA, 15 bp, Homo sapiens
agattgggctgggca

SEQ ID NO: 21239 - DNA, 15 bp, Homo sapiens
aagattgggctgggc

SEQ ID NO: 21240 - DNA, 15 bp, Homo sapiens
aaagattgggctggg

SEQ ID NO: 21241 - DNA, 15 bp, Homo sapiens
aaaagattgggctgg

SEQ ID NO: 21242 - DNA, 15 bp, Homo sapiens
caaaagattgggctg

SEQ ID NO: 21243 - DNA, 15 bp, Homo sapiens
gcaaaagattgggct

SEQ ID NO: 21244 - DNA, 15 bp, Homo sapiens
agcaaaagattgggc

SEQ ID NO: 21245 - DNA, 15 bp, Homo sapiens
aagcaaaagattggg

SEQ ID NO: 21246 - DNA, 15 bp, Homo sapiens
aaagcaaaagattgg

SEQ ID NO: 21247 - DNA, 15 bp, Homo sapiens
aaaagcaaaagattg

SEQ ID NO: 21248 - DNA, 15 bp, Homo sapiens
aaaaagcaaaagatt

SEQ ID NO: 21249 - DNA, 15 bp, Homo sapiens
aaaaaagcaaaagat

SEQ ID NO: 21250 - DNA, 15 bp, Homo sapiens
aaaaaaagcaaaaga

SEQ ID NO: 21251 - DNA, 15 bp, Homo sapiens
taaaaaaagcaaaag

SEQ ID NO: 21252 - DNA, 15 bp, Homo sapiens
ttaaaaaaagcaaaa

SEQ ID NO: 21253 - DNA, 15 bp, Homo sapiens
tttaaaaaaagcaaa

SEQ ID NO: 21254 - DNA, 15 bp, Homo sapiens
ttttaaaaaaagcaa

SEQ ID NO: 21255 - DNA, 15 bp, Homo sapiens
tctttttttaaaaaa

SEQ ID NO: 21256 - DNA, 15 bp, Homo sapiens
ttctttttttaaaaa

SEQ ID NO: 21257 - DNA, 15 bp, Homo sapiens
cttctttttttaaaa

SEQ ID NO: 21258 - DNA, 15 bp, Homo sapiens
tcttctttttttaaa

SEQ ID NO: 21259 - DNA, 15 bp, Homo sapiens
gtcttctttttttaa

SEQ ID NO: 21260 - DNA, 15 bp, Homo sapiens
tgtcttcttttttta

SEQ ID NO: 21261 - DNA, 15 bp, Homo sapiens
ttgtcttcttttttt

SEQ ID NO: 21262 - DNA, 15 bp, Homo sapiens
tttgtcttctttttt

SEQ ID NO: 21263 - DNA, 15 bp, Homo sapiens
ttttgtcttcttttt

SEQ ID NO: 21264 - DNA, 15 bp, Homo sapiens
tttttgtcttctttt

SEQ ID NO: 21265 - DNA, 15 bp, Homo sapiens
ctttttgtcttcttt

SEQ ID NO: 21266 - DNA, 15 bp, Homo sapiens
cctttttgtcttctt

SEQ ID NO: 21267 - DNA, 15 bp, Homo sapiens
ccctttttgtcttct

SEQ ID NO: 21268 - DNA, 15 bp, Homo sapiens
tccctttttgtcttc

SEQ ID NO: 21269 - DNA, 15 bp, Homo sapiens
atccctttttgtctt

SEQ ID NO: 21270 - DNA, 15 bp, Homo sapiens
aatccctttttgtct

SEQ ID NO: 21271 - DNA, 15 bp, Homo sapiens
aaatccctttttgtc

SEQ ID NO: 21272 - DNA, 15 bp, Homo sapiens
aaaatccctttttgt

SEQ ID NO: 21273 - DNA, 15 bp, Homo sapiens
taaaatccctttttg

SEQ ID NO: 21274 - DNA, 15 bp, Homo sapiens
ataaaatcccttttt

SEQ ID NO: 21275 - DNA, 15 bp, Homo sapiens
tataaaatccctttt

SEQ ID NO: 21276 - DNA, 15 bp, Homo sapiens
gtataaaatcccttt

SEQ ID NO: 21277 - DNA, 15 bp, Homo sapiens
ggtataaaatccctt

SEQ ID NO: 21278 - DNA, 15 bp, Homo sapiens
tggtataaaatccct

SEQ ID NO: 21279 - DNA, 15 bp, Homo sapiens
ctggtataaaatccc

SEQ ID NO: 21280 - DNA, 15 bp, Homo sapiens
actggtataaaatcc

SEQ ID NO: 21281 - DNA, 15 bp, Homo sapiens
tactggtataaaatc

SEQ ID NO: 21282 - DNA, 15 bp, Homo sapiens
atactggtataaaat

SEQ ID NO: 21283 - DNA, 15 bp, Homo sapiens
aatactggtataaaa

SEQ ID NO: 21284 - DNA, 15 bp, Homo sapiens
taatactggtataaa

SEQ ID NO: 21285 - DNA, 15 bp, Homo sapiens
ataatactggtataa

SEQ ID NO: 21286 - DNA, 15 bp, Homo sapiens
gataatactggtata

SEQ ID NO: 21287 - DNA, 15 bp, Homo sapiens
agataatactggtat

SEQ ID NO: 21288 - DNA, 15 bp, Homo sapiens
aagataatactggta

SEQ ID NO: 21289 - DNA, 15 bp, Homo sapiens
caagataatactggt

SEQ ID NO: 21290 - DNA, 15 bp, Homo sapiens
ccaagataatactgg

SEQ ID NO: 21291 - DNA, 15 bp, Homo sapiens
gccaagataatactg

SEQ ID NO: 21292 - DNA, 15 bp, Homo sapiens
agccaagataatact

SEQ ID NO: 21293 - DNA, 15 bp, Homo sapiens
cagccaagataatac

SEQ ID NO: 21294 - DNA, 15 bp, Homo sapiens
acagccaagataata

SEQ ID NO: 21295 - DNA, 15 bp, Homo sapiens
cacagccaagataat

SEQ ID NO: 21296 - DNA, 15 bp, Homo sapiens
acacagccaagataa

SEQ ID NO: 21297 - DNA, 15 bp, Homo sapiens
cacacagccaagata

SEQ ID NO: 21298 - DNA, 15 bp, Homo sapiens
tcacacagccaagat

SEQ ID NO: 21299 - DNA, 15 bp, Homo sapiens
gtcacacagccaaga

SEQ ID NO: 21300 - DNA, 15 bp, Homo sapiens
agtcacacagccaag

SEQ ID NO: 21301 - DNA, 15 bp, Homo sapiens
gagtcacacagccaa

SEQ ID NO: 21302 - DNA, 15 bp, Homo sapiens
agagtcacacagcca

SEQ ID NO: 21303 - DNA, 15 bp, Homo sapiens
cagagtcacacagcc

SEQ ID NO: 21304 - DNA, 15 bp, Homo sapiens
tcagagtcacacagc

SEQ ID NO: 21305 - DNA, 15 bp, Homo sapiens
ttcagagtcacacag

SEQ ID NO: 21306 - DNA, 15 bp, Homo sapiens
cttcagagtcacaca

SEQ ID NO: 21307 - DNA, 15 bp, Homo sapiens
gcttcagagtcacac

SEQ ID NO: 21308 - DNA, 15 bp, Homo sapiens
ggcttcagagtcaca

SEQ ID NO: 21309 - DNA, 15 bp, Homo sapiens
tggcttcagagtcac

SEQ ID NO: 21310 - DNA, 15 bp, Homo sapiens
gtggcttcagagtca

SEQ ID NO: 21311 - DNA, 15 bp, Homo sapiens
tgtggcttcagagtc

SEQ ID NO: 21312 - DNA, 15 bp, Homo sapiens
ctgtggcttcagagt

SEQ ID NO: 21313 - DNA, 15 bp, Homo sapiens
actgtggcttcagag

SEQ ID NO: 21314 - DNA, 15 bp, Homo sapiens
aactgtggcttcaga

SEQ ID NO: 21315 - DNA, 15 bp, Homo sapiens
caactgtggcttcag

SEQ ID NO: 21316 - DNA, 15 bp, Homo sapiens
acaactgtggcttca

SEQ ID NO: 21317 - DNA, 15 bp, Homo sapiens
tacaactgtggcttc

SEQ ID NO: 21318 - DNA, 15 bp, Homo sapiens
ttacaactgtggctt

SEQ ID NO: 21319 - DNA, 15 bp, Homo sapiens
cttacaactgtggct

SEQ ID NO: 21320 - DNA, 15 bp, Homo sapiens
acttacaactgtggc

SEQ ID NO: 21321 - DNA, 15 bp, Homo sapiens
aacttacaactgtgg

SEQ ID NO: 21322 - DNA, 15 bp, Homo sapiens
taacttacaactgtg

SEQ ID NO: 21323 - DNA, 15 bp, Homo sapiens
ataacttacaactgt

SEQ ID NO: 21324 - DNA, 15 bp, Homo sapiens
tataacttacaactg

SEQ ID NO: 21325 - DNA, 15 bp, Homo sapiens
ttataacttacaact

SEQ ID NO: 21326 - DNA, 15 bp, Homo sapiens
attataacttacaac

SEQ ID NO: 21327 - DNA, 15 bp, Homo sapiens
aattataacttacaa

SEQ ID NO: 21328 - DNA, 15 bp, Homo sapiens
taattataacttaca

SEQ ID NO: 21329 - DNA, 15 bp, Homo sapiens
gtaattataacttac

SEQ ID NO: 21330 - DNA, 15 bp, Homo sapiens
agtaattataactta

SEQ ID NO: 21331 - DNA, 15 bp, Homo sapiens
gagtaattataactt

SEQ ID NO: 21332 - DNA, 15 bp, Homo sapiens
agagtaattataact

SEQ ID NO: 21333 - DNA, 15 bp, Homo sapiens
cagagtaattataac

SEQ ID NO: 21334 - DNA, 15 bp, Homo sapiens
tcagagtaattataa

SEQ ID NO: 21335 - DNA, 15 bp, Homo sapiens
ttcagagtaattata

SEQ ID NO: 21336 - DNA, 15 bp, Homo sapiens
tttcagagtaattat

SEQ ID NO: 21337 - DNA, 15 bp, Homo sapiens
gtttcagagtaatta

SEQ ID NO: 21338 - DNA, 15 bp, Homo sapiens
tgtttcagagtaatt

SEQ ID NO: 21339 - DNA, 15 bp, Homo sapiens
gtgtttcagagtaat

SEQ ID NO: 21340 - DNA, 15 bp, Homo sapiens
tgtgtttcagagtaa

SEQ ID NO: 21341 - DNA, 15 bp, Homo sapiens
ttgtgtttcagagta

SEQ ID NO: 21342 - DNA, 15 bp, Homo sapiens
cttgtgtttcagagt

SEQ ID NO: 21343 - DNA, 15 bp, Homo sapiens
ccttgtgtttcagag

SEQ ID NO: 21344 - DNA, 15 bp, Homo sapiens
gccttgtgtttcaga

SEQ ID NO: 21345 - DNA, 15 bp, Homo sapiens
ggccttgtgtttcag

SEQ ID NO: 21346 - DNA, 15 bp, Homo sapiens
gggccttgtgtttca

SEQ ID NO: 21347 - DNA, 15 bp, Homo sapiens
agggccttgtgtttc

SEQ ID NO: 21348 - DNA, 15 bp, Homo sapiens
cagggccttgtgttt

SEQ ID NO: 21349 - DNA, 15 bp, Homo sapiens
acagggccttgtgtt

SEQ ID NO: 21350 - DNA, 15 bp, Homo sapiens
cacagggccttgtgt

SEQ ID NO: 21351 - DNA, 15 bp, Homo sapiens
tcacagggccttgtg

SEQ ID NO: 21352 - DNA, 15 bp, Homo sapiens
gtcacagggccttgt

SEQ ID NO: 21353 - DNA, 15 bp, Homo sapiens
agtcacagggccttg

SEQ ID NO: 21354 - DNA, 15 bp, Homo sapiens
gagtcacagggcctt

SEQ ID NO: 21355 - DNA, 15 bp, Homo sapiens
agagtcacagggcct

SEQ ID NO: 21356 - DNA, 15 bp, Homo sapiens
aagagtcacagggcc

SEQ ID NO: 21357 - DNA, 15 bp, Homo sapiens
aaagagtcacagggc

SEQ ID NO: 21358 - DNA, 15 bp, Homo sapiens
aaaagagtcacaggg

SEQ ID NO: 21359 - DNA, 15 bp, Homo sapiens
caaaagagtcacagg

SEQ ID NO: 21360 - DNA, 15 bp, Homo sapiens
ccaaaagagtcacag

SEQ ID NO: 21361 - DNA, 15 bp, Homo sapiens
cccaaaagagtcaca

SEQ ID NO: 21362 - DNA, 15 bp, Homo sapiens
gcccaaaagagtcac

SEQ ID NO: 21363 - DNA, 15 bp, Homo sapiens
agcccaaaagagtca

SEQ ID NO: 21364 - DNA, 15 bp, Homo sapiens
gagcccaaaagagtc

SEQ ID NO: 21365 - DNA, 15 bp, Homo sapiens
agagcccaaaagagt

SEQ ID NO: 21366 - DNA, 15 bp, Homo sapiens
aagagcccaaaagag

SEQ ID NO: 21367 - DNA, 15 bp, Homo sapiens
aaagagcccaaaaga

SEQ ID NO: 21368 - DNA, 15 bp, Homo sapiens
caaagagcccaaaag

SEQ ID NO: 21369 - DNA, 15 bp, Homo sapiens
ccaaagagcccaaaa

SEQ ID NO: 21370 - DNA, 15 bp, Homo sapiens
accaaagagcccaaa

SEQ ID NO: 21371 - DNA, 15 bp, Homo sapiens
caccaaagagcccaa

SEQ ID NO: 21372 - DNA, 15 bp, Homo sapiens
acaccaaagagccca

SEQ ID NO: 21373 - DNA, 15 bp, Homo sapiens
aacaccaaagagccc

SEQ ID NO: 21374 - DNA, 15 bp, Homo sapiens
aaacaccaaagagcc

SEQ ID NO: 21375 - DNA, 15 bp, Homo sapiens
taaacaccaaagagc

SEQ ID NO: 21376 - DNA, 15 bp, Homo sapiens
ataaacaccaaagag

SEQ ID NO: 21377 - DNA, 15 bp, Homo sapiens
gataaacaccaaaga

SEQ ID NO: 21378 - DNA, 15 bp, Homo sapiens
agataaacaccaaag

SEQ ID NO: 21379 - DNA, 15 bp, Homo sapiens
aagataaacaccaaa

SEQ ID NO: 21380 - DNA, 15 bp, Homo sapiens
caagataaacaccaa

SEQ ID NO: 21381 - DNA, 15 bp, Homo sapiens
tcaagataaacacca

SEQ ID NO: 21382 - DNA, 15 bp, Homo sapiens
atcaagataaacacc

SEQ ID NO: 21383 - DNA, 15 bp, Homo sapiens
aatcaagataaacac

SEQ ID NO: 21384 - DNA, 15 bp, Homo sapiens
taatcaagataaaca

SEQ ID NO: 21385 - DNA, 15 bp, Homo sapiens
gtaatcaagataaac

SEQ ID NO: 21386 - DNA, 15 bp, Homo sapiens
tgtaatcaagataaa

SEQ ID NO: 21387 - DNA, 15 bp, Homo sapiens
ttgtaatcaagataa

SEQ ID NO: 21388 - DNA, 15 bp, Homo sapiens
gttgtaatcaagata

SEQ ID NO: 21389 - DNA, 15 bp, Homo sapiens
cgttgtaatcaagat

SEQ ID NO: 21390 - DNA, 15 bp, Homo sapiens
acgttgtaatcaaga

SEQ ID NO: 21391 - DNA, 15 bp, Homo sapiens
aacgttgtaatcaag

SEQ ID NO: 21392 - DNA, 15 bp, Homo sapiens
caacgttgtaatcaa

SEQ ID NO: 21393 - DNA, 15 bp, Homo sapiens
ccaacgttgtaatca

SEQ ID NO: 21394 - DNA, 15 bp, Homo sapiens
tccaacgttgtaatc

SEQ ID NO: 21395 - DNA, 15 bp, Homo sapiens
ttccaacgttgtaat

SEQ ID NO: 21396 - DNA, 15 bp, Homo sapiens
attccaacgttgtaa

SEQ ID NO: 21397 - DNA, 15 bp, Homo sapiens
tattccaacgttgta

SEQ ID NO: 21398 - DNA, 15 bp, Homo sapiens
atattccaacgttgt

SEQ ID NO: 21399 - DNA, 15 bp, Homo sapiens
tatattccaacgttg

SEQ ID NO: 21400 - DNA, 15 bp, Homo sapiens
ctatattccaacgtt

SEQ ID NO: 21401 - DNA, 15 bp, Homo sapiens
tctatattccaacgt

SEQ ID NO: 21402 - DNA, 15 bp, Homo sapiens
ttctatattccaacg

SEQ ID NO: 21403 - DNA, 15 bp, Homo sapiens
tttctatattccaac

SEQ ID NO: 21404 - DNA, 15 bp, Homo sapiens
atttctatattccaa

SEQ ID NO: 21405 - DNA, 15 bp, Homo sapiens
catttctatattcca

SEQ ID NO: 21406 - DNA, 15 bp, Homo sapiens
tcatttctatattcc

SEQ ID NO: 21407 - DNA, 15 bp, Homo sapiens
ttcatttctatattc

SEQ ID NO: 21408 - DNA, 15 bp, Homo sapiens
tttcatttctatatt

SEQ ID NO: 21409 - DNA, 15 bp, Homo sapiens
ctttcatttctatat

SEQ ID NO: 21410 - DNA, 15 bp, Homo sapiens
cctttcatttctata

SEQ ID NO: 21411 - DNA, 15 bp, Homo sapiens
tcctttcatttctat

SEQ ID NO: 21412 - DNA, 15 bp, Homo sapiens
ttcctttcatttcta

SEQ ID NO: 21413 - DNA, 15 bp, Homo sapiens
attcctttcatttct

SEQ ID NO: 21414 - DNA, 15 bp, Homo sapiens
cattcctttcatttc

SEQ ID NO: 21415 - DNA, 15 bp, Homo sapiens
ccattcctttcattt

SEQ ID NO: 21416 - DNA, 15 bp, Homo sapiens
cccattcctttcatt

SEQ ID NO: 21417 - DNA, 15 bp, Homo sapiens
tcccattcctttcat

SEQ ID NO: 21418 - DNA, 15 bp, Homo sapiens
ctcccattcctttca

SEQ ID NO: 21419 - DNA, 15 bp, Homo sapiens
tctcccattcctttc

SEQ ID NO: 21420 - DNA, 15 bp, Homo sapiens
ctctcccattccttt

SEQ ID NO: 21421 - DNA, 15 bp, Homo sapiens
cctctcccattcctt

SEQ ID NO: 21422 - DNA, 15 bp, Homo sapiens
acctctcccattcct

SEQ ID NO: 21423 - DNA, 15 bp, Homo sapiens
cacctctcccattcc

SEQ ID NO: 21424 - DNA, 15 bp, Homo sapiens
tcacctctcccattc

SEQ ID NO: 21425 - DNA, 15 bp, Homo sapiens
atcacctctcccatt

SEQ ID NO: 21426 - DNA, 15 bp, Homo sapiens
tatcacctctcccat

SEQ ID NO: 21427 - DNA, 15 bp, Homo sapiens
ctatcacctctccca

SEQ ID NO: 21428 - DNA, 15 bp, Homo sapiens
tctatcacctctccc

SEQ ID NO: 21429 - DNA, 15 bp, Homo sapiens
gtctatcacctctcc

SEQ ID NO: 21430 - DNA, 15 bp, Homo sapiens
agtctatcacctctc

SEQ ID NO: 21431 - DNA, 15 bp, Homo sapiens
aagtctatcacctct

SEQ ID NO: 21432 - DNA, 15 bp, Homo sapiens
gaagtctatcacctc

SEQ ID NO: 21433 - DNA, 15 bp, Homo sapiens
tgaagtctatcacct

SEQ ID NO: 21434 - DNA, 15 bp, Homo sapiens
ctgaagtctatcacc

SEQ ID NO: 21435 - DNA, 15 bp, Homo sapiens
cctgaagtctatcac

SEQ ID NO: 21436 - DNA, 15 bp, Homo sapiens
gcctgaagtctatca

SEQ ID NO: 21437 - DNA, 15 bp, Homo sapiens
tgcctgaagtctatc

SEQ ID NO: 21438 - DNA, 15 bp, Homo sapiens
ctgcctgaagtctat

SEQ ID NO: 21439 - DNA, 15 bp, Homo sapiens
actgcctgaagtcta

SEQ ID NO: 21440 - DNA, 15 bp, Homo sapiens
cactgcctgaagtct

SEQ ID NO: 21441 - DNA, 15 bp, Homo sapiens
acactgcctgaagtc

SEQ ID NO: 21442 - DNA, 15 bp, Homo sapiens
tacactgcctgaagt

SEQ ID NO: 21443 - DNA, 15 bp, Homo sapiens
ttacactgcctgaag

SEQ ID NO: 21444 - DNA, 15 bp, Homo sapiens
gttacactgcctgaa

SEQ ID NO: 21445 - DNA, 15 bp, Homo sapiens
agttacactgcctga

SEQ ID NO: 21446 - DNA, 15 bp, Homo sapiens
tagttacactgcctg

SEQ ID NO: 21447 - DNA, 15 bp, Homo sapiens
ctagttacactgcct

SEQ ID NO: 21448 - DNA, 15 bp, Homo sapiens
actagttacactgcc

SEQ ID NO: 21449 - DNA, 15 bp, Homo sapiens
aactagttacactgc

SEQ ID NO: 21450 - DNA, 15 bp, Homo sapiens
caactagttacactg

SEQ ID NO: 21451 - DNA, 15 bp, Homo sapiens
acaactagttacact

SEQ ID NO: 21452 - DNA, 15 bp, Homo sapiens
gacaactagttacac

SEQ ID NO: 21453 - DNA, 15 bp, Homo sapiens
agacaactagttaca

SEQ ID NO: 21454 - DNA, 15 bp, Homo sapiens
cagacaactagttac

SEQ ID NO: 21455 - DNA, 15 bp, Homo sapiens
tcagacaactagtta

SEQ ID NO: 21456 - DNA, 15 bp, Homo sapiens
ttcagacaactagtt

SEQ ID NO: 21457 - DNA, 15 bp, Homo sapiens
gttcagacaactagt

SEQ ID NO: 21458 - DNA, 15 bp, Homo sapiens
tgttcagacaactag

SEQ ID NO: 21459 - DNA, 15 bp, Homo sapiens
gtgttcagacaacta

SEQ ID NO: 21460 - DNA, 15 bp, Homo sapiens
agtgttcagacaact

SEQ ID NO: 21461 - DNA, 15 bp, Homo sapiens
tagtgttcagacaac

SEQ ID NO: 21462 - DNA, 15 bp, Homo sapiens
gtagtgttcagacaa

SEQ ID NO: 21463 - DNA, 15 bp, Homo sapiens
agtagtgttcagaca

SEQ ID NO: 21464 - DNA, 15 bp, Homo sapiens
cagtagtgttcagac

SEQ ID NO: 21465 - DNA, 15 bp, Homo sapiens
ccagtagtgttcaga

SEQ ID NO: 21466 - DNA, 15 bp, Homo sapiens
gccagtagtgttcag

SEQ ID NO: 21467 - DNA, 15 bp, Homo sapiens
agccagtagtgttca

SEQ ID NO: 21468 - DNA, 15 bp, Homo sapiens
gagccagtagtgttc

SEQ ID NO: 21469 - DNA, 15 bp, Homo sapiens
tgagccagtagtgtt

SEQ ID NO: 21470 - DNA, 15 bp, Homo sapiens
ttgagccagtagtgt

SEQ ID NO: 21471 - DNA, 15 bp, Homo sapiens
attgagccagtagtg

SEQ ID NO: 21472 - DNA, 15 bp, Homo sapiens
aattgagccagtagt

SEQ ID NO: 21473 - DNA, 15 bp, Homo sapiens
taattgagccagtag

SEQ ID NO: 21474 - DNA, 15 bp, Homo sapiens
ataattgagccagta

SEQ ID NO: 21475 - DNA, 15 bp, Homo sapiens
tataattgagccagt

SEQ ID NO: 21476 - DNA, 15 bp, Homo sapiens
atataattgagccag

SEQ ID NO: 21477 - DNA, 15 bp, Homo sapiens
aatataattgagcca

SEQ ID NO: 21478 - DNA, 15 bp, Homo sapiens
caatataattgagcc

SEQ ID NO: 21479 - DNA, 15 bp, Homo sapiens
acaatataattgagc

SEQ ID NO: 21480 - DNA, 15 bp, Homo sapiens
cacaatataattgag

SEQ ID NO: 21481 - DNA, 15 bp, Homo sapiens
acacaatataattga

SEQ ID NO: 21482 - DNA, 15 bp, Homo sapiens
gacacaatataattg

SEQ ID NO: 21483 - DNA, 15 bp, Homo sapiens
agacacaatataatt

SEQ ID NO: 21484 - DNA, 15 bp, Homo sapiens
tagacacaatataat

SEQ ID NO: 21485 - DNA, 15 bp, Homo sapiens
ctagacacaatataa

SEQ ID NO: 21486 - DNA, 15 bp, Homo sapiens
actagacacaatata

SEQ ID NO: 21487 - DNA, 15 bp, Homo sapiens
cactagacacaatat

SEQ ID NO: 21488 - DNA, 15 bp, Homo sapiens
tcactagacacaata

SEQ ID NO: 21489 - DNA, 15 bp, Homo sapiens
atcactagacacaat

SEQ ID NO: 21490 - DNA, 15 bp, Homo sapiens
aatcactagacacaa

SEQ ID NO: 21491 - DNA, 15 bp, Homo sapiens
aaatcactagacaca

SEQ ID NO: 21492 - DNA, 15 bp, Homo sapiens
gaaatcactagacac

SEQ ID NO: 21493 - DNA, 15 bp, Homo sapiens
ggaaatcactagaca

SEQ ID NO: 21494 - DNA, 15 bp, Homo sapiens
tggaaatcactagac

SEQ ID NO: 21495 - DNA, 15 bp, Homo sapiens
atggaaatcactaga

SEQ ID NO: 21496 - DNA, 15 bp, Homo sapiens
gatggaaatcactag

SEQ ID NO: 21497 - DNA, 15 bp, Homo sapiens
agatggaaatcacta

SEQ ID NO: 21498 - DNA, 15 bp, Homo sapiens
aagatggaaatcact

SEQ ID NO: 21499 - DNA, 15 bp, Homo sapiens
caagatggaaatcac

SEQ ID NO: 21500 - DNA, 15 bp, Homo sapiens
acaagatggaaatca

SEQ ID NO: 21501 - DNA, 15 bp, Homo sapiens
gacaagatggaaatc

SEQ ID NO: 21502 - DNA, 15 bp, Homo sapiens
ggacaagatggaaat

SEQ ID NO: 21503 - DNA, 15 bp, Homo sapiens
cggacaagatggaaa

SEQ ID NO: 21504 - DNA, 15 bp, Homo sapiens
acggacaagatggaa

SEQ ID NO: 21505 - DNA, 15 bp, Homo sapiens
gacggacaagatgga

SEQ ID NO: 21506 - DNA, 15 bp, Homo sapiens
agacggacaagatgg

SEQ ID NO: 21507 - DNA, 15 bp, Homo sapiens
cagacggacaagatg

SEQ ID NO: 21508 - DNA, 15 bp, Homo sapiens
gcagacggacaagat

SEQ ID NO: 21509 - DNA, 15 bp, Homo sapiens
agcagacggacaaga

SEQ ID NO: 21510 - DNA, 15 bp, Homo sapiens
tagcagacggacaag

SEQ ID NO: 21511 - DNA, 15 bp, Homo sapiens
ttagcagacggacaa

SEQ ID NO: 21512 - DNA, 15 bp, Homo sapiens
attagcagacggaca

SEQ ID NO: 21513 - DNA, 15 bp, Homo sapiens
aattagcagacggac

SEQ ID NO: 21514 - DNA, 15 bp, Homo sapiens
aaattagcagacgga

SEQ ID NO: 21515 - DNA, 15 bp, Homo sapiens
taaattagcagacgg

SEQ ID NO: 21516 - DNA, 15 bp, Homo sapiens
ataaattagcagacg

SEQ ID NO: 21517 - DNA, 15 bp, Homo sapiens
gataaattagcagac

SEQ ID NO: 21518 - DNA, 15 bp, Homo sapiens
cgataaattagcaga

SEQ ID NO: 21519 - DNA, 15 bp, Homo sapiens
gcgataaattagcag

SEQ ID NO: 21520 - DNA, 15 bp, Homo sapiens
ggcgataaattagca

SEQ ID NO: 21521 - DNA, 15 bp, Homo sapiens
aggcgataaattagc

SEQ ID NO: 21522 - DNA, 15 bp, Homo sapiens
caggcgataaattag

SEQ ID NO: 21523 - DNA, 15 bp, Homo sapiens
ccaggcgataaatta

SEQ ID NO: 21524 - DNA, 15 bp, Homo sapiens
accaggcgataaatt

SEQ ID NO: 21525 - DNA, 15 bp, Homo sapiens
taccaggcgataaat

SEQ ID NO: 21526 - DNA, 15 bp, Homo sapiens
ttaccaggcgataaa

SEQ ID NO: 21527 - DNA, 15 bp, Homo sapiens
gttaccaggcgataa

SEQ ID NO: 21528 - DNA, 15 bp, Homo sapiens
agttaccaggcgata

SEQ ID NO: 21529 - DNA, 15 bp, Homo sapiens
gagttaccaggcgat

SEQ ID NO: 21530 - DNA, 15 bp, Homo sapiens
tgagttaccaggcga

SEQ ID NO: 21531 - DNA, 15 bp, Homo sapiens
gtgagttaccaggcg

SEQ ID NO: 21532 - DNA, 15 bp, Homo sapiens
agtgagttaccaggc

SEQ ID NO: 21533 - DNA, 15 bp, Homo sapiens
cagtgagttaccagg

SEQ ID NO: 21534 - DNA, 15 bp, Homo sapiens
tcagtgagttaccag

SEQ ID NO: 21535 - DNA, 15 bp, Homo sapiens
ctcagtgagttacca

SEQ ID NO: 21536 - DNA, 15 bp, Homo sapiens
cctcagtgagttacc

SEQ ID NO: 21537 - DNA, 15 bp, Homo sapiens
gcctcagtgagttac

SEQ ID NO: 21538 - DNA, 15 bp, Homo sapiens
tgcctcagtgagtta

SEQ ID NO: 21539 - DNA, 15 bp, Homo sapiens
ctgcctcagtgagtt

SEQ ID NO: 21540 - DNA, 15 bp, Homo sapiens
cctgcctcagtgagt

SEQ ID NO: 21541 - DNA, 15 bp, Homo sapiens
ccctgcctcagtgag

SEQ ID NO: 21542 - DNA, 15 bp, Homo sapiens
accctgcctcagtga

SEQ ID NO: 21543 - DNA, 15 bp, Homo sapiens
aaccctgcctcagtg

SEQ ID NO: 21544 - DNA, 15 bp, Homo sapiens
aaaccctgcctcagt

SEQ ID NO: 21545 - DNA, 15 bp, Homo sapiens
aaaaccctgcctcag

SEQ ID NO: 21546 - DNA, 15 bp, Homo sapiens
gaaaaccctgcctca

SEQ ID NO: 21547 - DNA, 15 bp, Homo sapiens
ggaaaaccctgcctc

SEQ ID NO: 21548 - DNA, 15 bp, Homo sapiens
aggaaaaccctgcct

SEQ ID NO: 21549 - DNA, 15 bp, Homo sapiens
aaggaaaaccctgcc

SEQ ID NO: 21550 - DNA, 15 bp, Homo sapiens
aaaggaaaaccctgc

SEQ ID NO: 21551 - DNA, 15 bp, Homo sapiens
caaaggaaaaccctg

SEQ ID NO: 21552 - DNA, 15 bp, Homo sapiens
ccaaaggaaaaccct

SEQ ID NO: 21553 - DNA, 15 bp, Homo sapiens
tccaaaggaaaaccc

SEQ ID NO: 21554 - DNA, 15 bp, Homo sapiens
ctccaaaggaaaacc

SEQ ID NO: 21555 - DNA, 15 bp, Homo sapiens
tctccaaaggaaaac

SEQ ID NO: 21556 - DNA, 15 bp, Homo sapiens
ttctccaaaggaaaa

SEQ ID NO: 21557 - DNA, 15 bp, Homo sapiens
tttctccaaaggaaa

SEQ ID NO: 21558 - DNA, 15 bp, Homo sapiens
gtttctccaaaggaa

SEQ ID NO: 21559 - DNA, 15 bp, Homo sapiens
ggtttctccaaagga

SEQ ID NO: 21560 - DNA, 15 bp, Homo sapiens
aggtttctccaaagg

SEQ ID NO: 21561 - DNA, 15 bp, Homo sapiens
gaggtttctccaaag

SEQ ID NO: 21562 - DNA, 15 bp, Homo sapiens
tgaggtttctccaaa

SEQ ID NO: 21563 - DNA, 15 bp, Homo sapiens
atgaggtttctccaa

SEQ ID NO: 21564 - DNA, 15 bp, Homo sapiens
aatgaggtttctcca

SEQ ID NO: 21565 - DNA, 15 bp, Homo sapiens
caatgaggtttctcc

SEQ ID NO: 21566 - DNA, 15 bp, Homo sapiens
acaatgaggtttctc

SEQ ID NO: 21567 - DNA, 15 bp, Homo sapiens
aacaatgaggtttct

SEQ ID NO: 21568 - DNA, 15 bp, Homo sapiens
aaacaatgaggtttc

SEQ ID NO: 21569 - DNA, 15 bp, Homo sapiens
aaaacaatgaggttt

SEQ ID NO: 21570 - DNA, 15 bp, Homo sapiens
taaaacaatgaggtt

SEQ ID NO: 21571 - DNA, 15 bp, Homo sapiens
ttaaaacaatgaggt

SEQ ID NO: 21572 - DNA, 15 bp, Homo sapiens
gttaaaacaatgagg

SEQ ID NO: 21573 - DNA, 15 bp, Homo sapiens
ggttaaaacaatgag

SEQ ID NO: 21574 - DNA, 15 bp, Homo sapiens
tggttaaaacaatga

SEQ ID NO: 21575 - DNA, 15 bp, Homo sapiens
ctggttaaaacaatg

SEQ ID NO: 21576 - DNA, 15 bp, Homo sapiens
actggttaaaacaat

SEQ ID NO: 21577 - DNA, 15 bp, Homo sapiens
cactggttaaaacaa

SEQ ID NO: 21578 - DNA, 15 bp, Homo sapiens
acactggttaaaaca

SEQ ID NO: 21579 - DNA, 15 bp, Homo sapiens
tacactggttaaaac

SEQ ID NO: 21580 - DNA, 15 bp, Homo sapiens
atacactggttaaaa

SEQ ID NO: 21581 - DNA, 15 bp, Homo sapiens
gatacactggttaaa

SEQ ID NO: 21582 - DNA, 15 bp, Homo sapiens
tgatacactggttaa

SEQ ID NO: 21583 - DNA, 15 bp, Homo sapiens
atgatacactggtta

SEQ ID NO: 21584 - DNA, 15 bp, Homo sapiens
catgatacactggtt

SEQ ID NO: 21585 - DNA, 15 bp, Homo sapiens
gcatgatacactggt

SEQ ID NO: 21586 - DNA, 15 bp, Homo sapiens
agcatgatacactgg

SEQ ID NO: 21587 - DNA, 15 bp, Homo sapiens
aagcatgatacactg

SEQ ID NO: 21588 - DNA, 15 bp, Homo sapiens
caagcatgatacact

SEQ ID NO: 21589 - DNA, 15 bp, Homo sapiens
acaagcatgatacac

SEQ ID NO: 21590 - DNA, 15 bp, Homo sapiens
aacaagcatgataca

SEQ ID NO: 21591 - DNA, 15 bp, Homo sapiens
aaacaagcatgatac

SEQ ID NO: 21592 - DNA, 15 bp, Homo sapiens
taaacaagcatgata

SEQ ID NO: 21593 - DNA, 15 bp, Homo sapiens
ctaaacaagcatgat

SEQ ID NO: 21594 - DNA, 15 bp, Homo sapiens
tctaaacaagcatga

SEQ ID NO: 21595 - DNA, 15 bp, Homo sapiens
ttctaaacaagcatg

SEQ ID NO: 21596 - DNA, 15 bp, Homo sapiens
cttctaaacaagcat

SEQ ID NO: 21597 - DNA, 15 bp, Homo sapiens
acttctaaacaagca

SEQ ID NO: 21598 - DNA, 15 bp, Homo sapiens
aacttctaaacaagc

SEQ ID NO: 21599 - DNA, 15 bp, Homo sapiens
gaacttctaaacaag

SEQ ID NO: 21600 - DNA, 15 bp, Homo sapiens
tgaacttctaaacaa

SEQ ID NO: 21601 - DNA, 15 bp, Homo sapiens
ttgaacttctaaaca

SEQ ID NO: 21602 - DNA, 15 bp, Homo sapiens
attgaacttctaaac

SEQ ID NO: 21603 - DNA, 15 bp, Homo sapiens
cattgaacttctaaa

SEQ ID NO: 21604 - DNA, 15 bp, Homo sapiens
tcattgaacttctaa

SEQ ID NO: 21605 - DNA, 15 bp, Homo sapiens
atcattgaacttcta

SEQ ID NO: 21606 - DNA, 15 bp, Homo sapiens
gatcattgaacttct

SEQ ID NO: 21607 - DNA, 15 bp, Homo sapiens
agatcattgaacttc

SEQ ID NO: 21608 - DNA, 15 bp, Homo sapiens
aagatcattgaactt

SEQ ID NO: 21609 - DNA, 15 bp, Homo sapiens
aaagatcattgaact

SEQ ID NO: 21610 - DNA, 15 bp, Homo sapiens
aaaagatcattgaac

SEQ ID NO: 21611 - DNA, 15 bp, Homo sapiens
aaaaagatcattgaa

SEQ ID NO: 21612 - DNA, 15 bp, Homo sapiens
taaaaagatcattga

SEQ ID NO: 21613 - DNA, 15 bp, Homo sapiens
ttaaaaagatcattg

SEQ ID NO: 21614 - DNA, 15 bp, Homo sapiens
gttaaaaagatcatt

SEQ ID NO: 21615 - DNA, 15 bp, Homo sapiens
agttaaaaagatcat

SEQ ID NO: 21616 - DNA, 15 bp, Homo sapiens
gagttaaaaagatca

SEQ ID NO: 21617 - DNA, 15 bp, Homo sapiens
tgagttaaaaagatc

SEQ ID NO: 21618 - DNA, 15 bp, Homo sapiens
atgagttaaaaagat

SEQ ID NO: 21619 - DNA, 15 bp, Homo sapiens
gatgagttaaaaaga

SEQ ID NO: 21620 - DNA, 15 bp, Homo sapiens
cgatgagttaaaaag

SEQ ID NO: 21621 - DNA, 15 bp, Homo sapiens
ccgatgagttaaaaa

SEQ ID NO: 21622 - DNA, 15 bp, Homo sapiens
tccgatgagttaaaa

SEQ ID NO: 21623 - DNA, 15 bp, Homo sapiens
ctccgatgagttaaa

SEQ ID NO: 21624 - DNA, 15 bp, Homo sapiens
tctccgatgagttaa

SEQ ID NO: 21625 - DNA, 15 bp, Homo sapiens
ttctccgatgagtta

SEQ ID NO: 21626 - DNA, 15 bp, Homo sapiens
cttctccgatgagtt

SEQ ID NO: 21627 - DNA, 15 bp, Homo sapiens
tcttctccgatgagt

SEQ ID NO: 21628 - DNA, 15 bp, Homo sapiens
atcttctccgatgag

SEQ ID NO: 21629 - DNA, 15 bp, Homo sapiens
catcttctccgatga

SEQ ID NO: 21630 - DNA, 15 bp, Homo sapiens
tcatcttctccgatg

SEQ ID NO: 21631 - DNA, 15 bp, Homo sapiens
atcatcttctccgat

SEQ ID NO: 21632 - DNA, 15 bp, Homo sapiens
catcatcttctccga

SEQ ID NO: 21633 - DNA, 15 bp, Homo sapiens
tcatcatcttctccg

SEQ ID NO: 21634 - DNA, 15 bp, Homo sapiens
gtcatcatcttctcc

SEQ ID NO: 21635 - DNA, 15 bp, Homo sapiens
ggtcatcatcttctc

SEQ ID NO: 21636 - DNA, 15 bp, Homo sapiens
tggtcatcatcttct

SEQ ID NO: 21637 - DNA, 15 bp, Homo sapiens
ctggtcatcatcttc

SEQ ID NO: 21638 - DNA, 15 bp, Homo sapiens
tctggtcatcatctt

SEQ ID NO: 21639 - DNA, 15 bp, Homo sapiens
gtctggtcatcatct

SEQ ID NO: 21640 - DNA, 15 bp, Homo sapiens
ggtctggtcatcatc

SEQ ID NO: 21641 - DNA, 15 bp, Homo sapiens
aggtctggtcatcat

SEQ ID NO: 21642 - DNA, 15 bp, Homo sapiens
caggtctggtcatca

SEQ ID NO: 21643 - DNA, 15 bp, Homo sapiens
ccaggtctggtcatc

SEQ ID NO: 21644 - DNA, 15 bp, Homo sapiens
tccaggtctggtcat

SEQ ID NO: 21645 - DNA, 15 bp, Homo sapiens
gtccaggtctggtca

SEQ ID NO: 21646 - DNA, 15 bp, Homo sapiens
tgtccaggtctggtc

SEQ ID NO: 21647 - DNA, 15 bp, Homo sapiens
ctgtccaggtctggt

SEQ ID NO: 21648 - DNA, 15 bp, Homo sapiens
tctgtccaggtctgg

SEQ ID NO: 21649 - DNA, 15 bp, Homo sapiens
atctgtccaggtctg

SEQ ID NO: 21650 - DNA, 15 bp, Homo sapiens
catctgtccaggtct

SEQ ID NO: 21651 - DNA, 15 bp, Homo sapiens
ccatctgtccaggtc

SEQ ID NO: 21652 - DNA, 15 bp, Homo sapiens
cccatctgtccaggt

SEQ ID NO: 21653 - DNA, 15 bp, Homo sapiens
ccccatctgtccagg

SEQ ID NO: 21654 - DNA, 15 bp, Homo sapiens
tccccatctgtccag

SEQ ID NO: 21655 - DNA, 15 bp, Homo sapiens
ttccccatctgtcca

SEQ ID NO: 21656 - DNA, 15 bp, Homo sapiens
cttccccatctgtcc

SEQ ID NO: 21657 - DNA, 15 bp, Homo sapiens
ccttccccatctgtc

SEQ ID NO: 21658 - DNA, 15 bp, Homo sapiens
tccttccccatctgt

SEQ ID NO: 21659 - DNA, 15 bp, Homo sapiens
gtccttccccatctg

SEQ ID NO: 21660 - DNA, 15 bp, Homo sapiens
agtccttccccatct

SEQ ID NO: 21661 - DNA, 15 bp, Homo sapiens
aagtccttccccatc

SEQ ID NO: 21662 - DNA, 15 bp, Homo sapiens
aaagtccttccccat

SEQ ID NO: 21663 - DNA, 15 bp, Homo sapiens
caaagtccttcccca

SEQ ID NO: 21664 - DNA, 15 bp, Homo sapiens
gcaaagtccttcccc

SEQ ID NO: 21665 - DNA, 15 bp, Homo sapiens
tgcaaagtccttccc

SEQ ID NO: 21666 - DNA, 15 bp, Homo sapiens
gtgcaaagtccttcc

SEQ ID NO: 21667 - DNA, 15 bp, Homo sapiens
agtgcaaagtccttc

SEQ ID NO: 21668 - DNA, 15 bp, Homo sapiens
gagtgcaaagtcctt

SEQ ID NO: 21669 - DNA, 15 bp, Homo sapiens
agagtgcaaagtcct

SEQ ID NO: 21670 - DNA, 15 bp, Homo sapiens
gagagtgcaaagtcc

SEQ ID NO: 21671 - DNA, 15 bp, Homo sapiens
agagagtgcaaagtc

SEQ ID NO: 21672 - DNA, 15 bp, Homo sapiens
gagagagtgcaaagt

SEQ ID NO: 21673 - DNA, 15 bp, Homo sapiens
agagagagtgcaaag

SEQ ID NO: 21674 - DNA, 15 bp, Homo sapiens
aagagagagtgcaaa

SEQ ID NO: 21675 - DNA, 15 bp, Homo sapiens
aaagagagagtgcaa

SEQ ID NO: 21676 - DNA, 15 bp, Homo sapiens
taaagagagagtgca

SEQ ID NO: 21677 - DNA, 15 bp, Homo sapiens
gtaaagagagagtgc

SEQ ID NO: 21678 - DNA, 15 bp, Homo sapiens
tgtaaagagagagtg

SEQ ID NO: 21679 - DNA, 15 bp, Homo sapiens
ctgtaaagagagagt

SEQ ID NO: 21680 - DNA, 15 bp, Homo sapiens
actgtaaagagagag

SEQ ID NO: 21681 - DNA, 15 bp, Homo sapiens
gactgtaaagagaga

SEQ ID NO: 21682 - DNA, 15 bp, Homo sapiens
ggactgtaaagagag

SEQ ID NO: 21683 - DNA, 15 bp, Homo sapiens
aggactgtaaagaga

SEQ ID NO: 21684 - DNA, 15 bp, Homo sapiens
caggactgtaaagag

SEQ ID NO: 21685 - DNA, 15 bp, Homo sapiens
tcaggactgtaaaga

SEQ ID NO: 21686 - DNA, 15 bp, Homo sapiens
ctcaggactgtaaag

SEQ ID NO: 21687 - DNA, 15 bp, Homo sapiens
actcaggactgtaaa

SEQ ID NO: 21688 - DNA, 15 bp, Homo sapiens
cactcaggactgtaa

SEQ ID NO: 21689 - DNA, 15 bp, Homo sapiens
gcactcaggactgta

SEQ ID NO: 21690 - DNA, 15 bp, Homo sapiens
tgcactcaggactgt

SEQ ID NO: 21691 - DNA, 15 bp, Homo sapiens
gtgcactcaggactg

SEQ ID NO: 21692 - DNA, 15 bp, Homo sapiens
tgtgcactcaggact

SEQ ID NO: 21693 - DNA, 15 bp, Homo sapiens
gtgtgcactcaggac

SEQ ID NO: 21694 - DNA, 15 bp, Homo sapiens
tgtgtgcactcagga

SEQ ID NO: 21695 - DNA, 15 bp, Homo sapiens
ctgtgtgcactcagg

SEQ ID NO: 21696 - DNA, 15 bp, Homo sapiens
cctgtgtgcactcag

SEQ ID NO: 21697 - DNA, 15 bp, Homo sapiens
acctgtgtgcactca

SEQ ID NO: 21698 - DNA, 15 bp, Homo sapiens
gacctgtgtgcactc

SEQ ID NO: 21699 - DNA, 15 bp, Homo sapiens
tgacctgtgtgcact

SEQ ID NO: 21700 - DNA, 15 bp, Homo sapiens
ttgacctgtgtgcac

SEQ ID NO: 21701 - DNA, 15 bp, Homo sapiens
attgacctgtgtgca

SEQ ID NO: 21702 - DNA, 15 bp, Homo sapiens
tattgacctgtgtgc

SEQ ID NO: 21703 - DNA, 15 bp, Homo sapiens
atattgacctgtgtg

SEQ ID NO: 21704 - DNA, 15 bp, Homo sapiens
catattgacctgtgt

SEQ ID NO: 21705 - DNA, 15 bp, Homo sapiens
ccatattgacctgtg

SEQ ID NO: 21706 - DNA, 15 bp, Homo sapiens
tccatattgacctgt

SEQ ID NO: 21707 - DNA, 15 bp, Homo sapiens
ttccatattgacctg

SEQ ID NO: 21708 - DNA, 15 bp, Homo sapiens
gttccatattgacct

SEQ ID NO: 21709 - DNA, 15 bp, Homo sapiens
agttccatattgacc

SEQ ID NO: 21710 - DNA, 15 bp, Homo sapiens
tagttccatattgac

SEQ ID NO: 21711 - DNA, 15 bp, Homo sapiens
atagttccatattga

SEQ ID NO: 21712 - DNA, 15 bp, Homo sapiens
catagttccatattg

SEQ ID NO: 21713 - DNA, 15 bp, Homo sapiens
acatagttccatatt

SEQ ID NO: 21714 - DNA, 15 bp, Homo sapiens
cacatagttccatat

SEQ ID NO: 21715 - DNA, 15 bp, Homo sapiens
acacatagttccata

SEQ ID NO: 21716 - DNA, 15 bp, Homo sapiens
cacacatagttccat

SEQ ID NO: 21717 - DNA, 15 bp, Homo sapiens
tcacacatagttcca

SEQ ID NO: 21718 - DNA, 15 bp, Homo sapiens
ttcacacatagttcc

SEQ ID NO: 21719 - DNA, 15 bp, Homo sapiens
attcacacatagttc

SEQ ID NO: 21720 - DNA, 15 bp, Homo sapiens
aattcacacatagtt

SEQ ID NO: 21721 - DNA, 15 bp, Homo sapiens
aaattcacacatagt

SEQ ID NO: 21722 - DNA, 15 bp, Homo sapiens
aaaattcacacatag

SEQ ID NO: 21723 - DNA, 15 bp, Homo sapiens
gaaaattcacacata

SEQ ID NO: 21724 - DNA, 15 bp, Homo sapiens
tgaaaattcacacat

SEQ ID NO: 21725 - DNA, 15 bp, Homo sapiens
atgaaaattcacaca

SEQ ID NO: 21726 - DNA, 15 bp, Homo sapiens
aatgaaaattcacac

SEQ ID NO: 21727 - DNA, 15 bp, Homo sapiens
caatgaaaattcaca

SEQ ID NO: 21728 - DNA, 15 bp, Homo sapiens
acaatgaaaattcac

SEQ ID NO: 21729 - DNA, 15 bp, Homo sapiens
gacaatgaaaattca

SEQ ID NO: 21730 - DNA, 15 bp, Homo sapiens
agacaatgaaaattc

SEQ ID NO: 21731 - DNA, 15 bp, Homo sapiens
aagacaatgaaaatt

SEQ ID NO: 21732 - DNA, 15 bp, Homo sapiens
aaagacaatgaaaat

SEQ ID NO: 21733 - DNA, 15 bp, Homo sapiens
caaagacaatgaaaa

SEQ ID NO: 21734 - DNA, 15 bp, Homo sapiens
tcaaagacaatgaaa

SEQ ID NO: 21735 - DNA, 15 bp, Homo sapiens
ctcaaagacaatgaa

SEQ ID NO: 21736 - DNA, 15 bp, Homo sapiens
tctcaaagacaatga

SEQ ID NO: 21737 - DNA, 15 bp, Homo sapiens
ctctcaaagacaatg

SEQ ID NO: 21738 - DNA, 15 bp, Homo sapiens
gctctcaaagacaat

SEQ ID NO: 21739 - DNA, 15 bp, Homo sapiens
ggctctcaaagacaa

SEQ ID NO: 21740 - DNA, 15 bp, Homo sapiens
gggctctcaaagaca

SEQ ID NO: 21741 - DNA, 15 bp, Homo sapiens
agggctctcaaagac

SEQ ID NO: 21742 - DNA, 15 bp, Homo sapiens
gagggctctcaaaga

SEQ ID NO: 21743 - DNA, 15 bp, Homo sapiens
agagggctctcaaag

SEQ ID NO: 21744 - DNA, 15 bp, Homo sapiens
aagagggctctcaaa

SEQ ID NO: 21745 - DNA, 15 bp, Homo sapiens
gaagagggctctcaa

SEQ ID NO: 21746 - DNA, 15 bp, Homo sapiens
agaagagggctctca

SEQ ID NO: 21747 - DNA, 15 bp, Homo sapiens
gagaagagggctctc

SEQ ID NO: 21748 - DNA, 15 bp, Homo sapiens
agagaagagggctct

SEQ ID NO: 21749 - DNA, 15 bp, Homo sapiens
cagagaagagggctc

SEQ ID NO: 21750 - DNA, 15 bp, Homo sapiens
gcagagaagagggct

SEQ ID NO: 21751 - DNA, 15 bp, Homo sapiens
ggcagagaagagggc

SEQ ID NO: 21752 - DNA, 15 bp, Homo sapiens
gggcagagaagaggg

SEQ ID NO: 21753 - DNA, 15 bp, Homo sapiens
ggggcagagaagagg

SEQ ID NO: 21754 - DNA, 15 bp, Homo sapiens
tggggcagagaagag

SEQ ID NO: 21755 - DNA, 15 bp, Homo sapiens
atggggcagagaaga

SEQ ID NO: 21756 - DNA, 15 bp, Homo sapiens
tatggggcagagaag

SEQ ID NO: 21757 - DNA, 15 bp, Homo sapiens
ctatggggcagagaa

SEQ ID NO: 21758 - DNA, 15 bp, Homo sapiens
cctatggggcagaga

SEQ ID NO: 21759 - DNA, 15 bp, Homo sapiens
ccctatggggcagag

SEQ ID NO: 21760 - DNA, 15 bp, Homo sapiens
tccctatggggcaga

SEQ ID NO: 21761 - DNA, 15 bp, Homo sapiens
ctccctatggggcag

SEQ ID NO: 21762 - DNA, 15 bp, Homo sapiens
gctccctatggggca

SEQ ID NO: 21763 - DNA, 15 bp, Homo sapiens
tgctccctatggggc

SEQ ID NO: 21764 - DNA, 15 bp, Homo sapiens
ctgctccctatgggg

SEQ ID NO: 21765 - DNA, 15 bp, Homo sapiens
gctgctccctatggg

SEQ ID NO: 21766 - DNA, 15 bp, Homo sapiens
agctgctccctatgg

SEQ ID NO: 21767 - DNA, 15 bp, Homo sapiens
aagctgctccctatg

SEQ ID NO: 21768 - DNA, 15 bp, Homo sapiens
aaagctgctccctat

SEQ ID NO: 21769 - DNA, 15 bp, Homo sapiens
caaagctgctcccta

SEQ ID NO: 21770 - DNA, 15 bp, Homo sapiens
acaaagctgctccct

SEQ ID NO: 21771 - DNA, 15 bp, Homo sapiens
cacaaagctgctccc

SEQ ID NO: 21772 - DNA, 15 bp, Homo sapiens
acacaaagctgctcc

SEQ ID NO: 21773 - DNA, 15 bp, Homo sapiens
cacacaaagctgctc

SEQ ID NO: 21774 - DNA, 15 bp, Homo sapiens
gcacacaaagctgct

SEQ ID NO: 21775 - DNA, 15 bp, Homo sapiens
tgcacacaaagctgc

SEQ ID NO: 21776 - DNA, 15 bp, Homo sapiens
ttgcacacaaagctg

SEQ ID NO: 21777 - DNA, 15 bp, Homo sapiens
attgcacacaaagct

SEQ ID NO: 21778 - DNA, 15 bp, Homo sapiens
aattgcacacaaagc

SEQ ID NO: 21779 - DNA, 15 bp, Homo sapiens
taattgcacacaaag

SEQ ID NO: 21780 - DNA, 15 bp, Homo sapiens
ctaattgcacacaaa

SEQ ID NO: 21781 - DNA, 15 bp, Homo sapiens
tctaattgcacacaa

SEQ ID NO: 21782 - DNA, 15 bp, Homo sapiens
ctctaattgcacaca

SEQ ID NO: 21783 - DNA, 15 bp, Homo sapiens
cctctaattgcacac

SEQ ID NO: 21784 - DNA, 15 bp, Homo sapiens
tcctctaattgcaca

SEQ ID NO: 21785 - DNA, 15 bp, Homo sapiens
ctcctctaattgcac

SEQ ID NO: 21786 - DNA, 15 bp, Homo sapiens
gctcctctaattgca

SEQ ID NO: 21787 - DNA, 15 bp, Homo sapiens
tgctcctctaattgc

SEQ ID NO: 21788 - DNA, 15 bp, Homo sapiens
ttgctcctctaattg

SEQ ID NO: 21789 - DNA, 15 bp, Homo sapiens
cttgctcctctaatt

SEQ ID NO: 21790 - DNA, 15 bp, Homo sapiens
ccttgctcctctaat

SEQ ID NO: 21791 - DNA, 15 bp, Homo sapiens
cccttgctcctctaa

SEQ ID NO: 21792 - DNA, 15 bp, Homo sapiens
acccttgctcctcta

SEQ ID NO: 21793 - DNA, 15 bp, Homo sapiens
aacccttgctcctct

SEQ ID NO: 21794 - DNA, 15 bp, Homo sapiens
caacccttgctcctc

SEQ ID NO: 21795 - DNA, 15 bp, Homo sapiens
acaacccttgctcct

SEQ ID NO: 21796 - DNA, 15 bp, Homo sapiens
cacaacccttgctcc

SEQ ID NO: 21797 - DNA, 15 bp, Homo sapiens
acacaacccttgctc

SEQ ID NO: 21798 - DNA, 15 bp, Homo sapiens
cacacaacccttgct

SEQ ID NO: 21799 - DNA, 15 bp, Homo sapiens
acacacaacccttgc

SEQ ID NO: 21800 - DNA, 15 bp, Homo sapiens
tacacacaacccttg

SEQ ID NO: 21801 - DNA, 15 bp, Homo sapiens
atacacacaaccctt

SEQ ID NO: 21802 - DNA, 15 bp, Homo sapiens
aatacacacaaccct

SEQ ID NO: 21803 - DNA, 15 bp, Homo sapiens
aaatacacacaaccc

SEQ ID NO: 21804 - DNA, 15 bp, Homo sapiens
taaatacacacaacc

SEQ ID NO: 21805 - DNA, 15 bp, Homo sapiens
ctaaatacacacaac

SEQ ID NO: 21806 - DNA, 15 bp, Homo sapiens
gctaaatacacacaa

SEQ ID NO: 21807 - DNA, 15 bp, Homo sapiens
tgctaaatacacaca

SEQ ID NO: 21808 - DNA, 15 bp, Homo sapiens
gtgctaaatacacac

SEQ ID NO: 21809 - DNA, 15 bp, Homo sapiens
tgtgctaaatacaca

SEQ ID NO: 21810 - DNA, 15 bp, Homo sapiens
ctgtgctaaatacac

SEQ ID NO: 21811 - DNA, 15 bp, Homo sapiens
gctgtgctaaataca

SEQ ID NO: 21812 - DNA, 15 bp, Homo sapiens
tgctgtgctaaatac

SEQ ID NO: 21813 - DNA, 15 bp, Homo sapiens
ctgctgtgctaaata

SEQ ID NO: 21814 - DNA, 15 bp, Homo sapiens
cctgctgtgctaaat

SEQ ID NO: 21815 - DNA, 15 bp, Homo sapiens
acctgctgtgctaaa

SEQ ID NO: 21816 - DNA, 15 bp, Homo sapiens
aacctgctgtgctaa

SEQ ID NO: 21817 - DNA, 15 bp, Homo sapiens
caacctgctgtgcta

SEQ ID NO: 21818 - DNA, 15 bp, Homo sapiens
ccaacctgctgtgct

SEQ ID NO: 21819 - DNA, 15 bp, Homo sapiens
gccaacctgctgtgc

SEQ ID NO: 21820 - DNA, 15 bp, Homo sapiens
ggccaacctgctgtg

SEQ ID NO: 21821 - DNA, 15 bp, Homo sapiens
aggccaacctgctgt

SEQ ID NO: 21822 - DNA, 15 bp, Homo sapiens
caggccaacctgctg

SEQ ID NO: 21823 - DNA, 15 bp, Homo sapiens
ccaggccaacctgct

SEQ ID NO: 21824 - DNA, 15 bp, Homo sapiens
accaggccaacctgc

SEQ ID NO: 21825 - DNA, 15 bp, Homo sapiens
gaccaggccaacctg

SEQ ID NO: 21826 - DNA, 15 bp, Homo sapiens
ggaccaggccaacct

SEQ ID NO: 21827 - DNA, 15 bp, Homo sapiens
aggaccaggccaacc

SEQ ID NO: 21828 - DNA, 15 bp, Homo sapiens
gaggaccaggccaac

SEQ ID NO: 21829 - DNA, 15 bp, Homo sapiens
agaggaccaggccaa

SEQ ID NO: 21830 - DNA, 15 bp, Homo sapiens
gagaggaccaggcca

SEQ ID NO: 21831 - DNA, 15 bp, Homo sapiens
ggagaggaccaggcc

SEQ ID NO: 21832 - DNA, 15 bp, Homo sapiens
aggagaggaccaggc

SEQ ID NO: 21833 - DNA, 15 bp, Homo sapiens
gaggagaggaccagg

SEQ ID NO: 21834 - DNA, 15 bp, Homo sapiens
agaggagaggaccag

SEQ ID NO: 21835 - DNA, 15 bp, Homo sapiens
gagaggagaggacca

SEQ ID NO: 21836 - DNA, 15 bp, Homo sapiens
tgagaggagaggacc

SEQ ID NO: 21837 - DNA, 15 bp, Homo sapiens
ttgagaggagaggac

SEQ ID NO: 21838 - DNA, 15 bp, Homo sapiens
gttgagaggagagga

SEQ ID NO: 21839 - DNA, 15 bp, Homo sapiens
tgttgagaggagagg

SEQ ID NO: 21840 - DNA, 15 bp, Homo sapiens
atgttgagaggagag

SEQ ID NO: 21841 - DNA, 15 bp, Homo sapiens
tatgttgagaggaga

SEQ ID NO: 21842 - DNA, 15 bp, Homo sapiens
ctatgttgagaggag

SEQ ID NO: 21843 - DNA, 15 bp, Homo sapiens
actatgttgagagga

SEQ ID NO: 21844 - DNA, 15 bp, Homo sapiens
gactatgttgagagg

SEQ ID NO: 21845 - DNA, 15 bp, Homo sapiens
tgactatgttgagag

SEQ ID NO: 21846 - DNA, 15 bp, Homo sapiens
gtgactatgttgaga

SEQ ID NO: 21847 - DNA, 15 bp, Homo sapiens
ggtgactatgttgag

SEQ ID NO: 21848 - DNA, 15 bp, Homo sapiens
tggtgactatgttga

SEQ ID NO: 21849 - DNA, 15 bp, Homo sapiens
gtggtgactatgttg

SEQ ID NO: 21850 - DNA, 15 bp, Homo sapiens
tgtggtgactatgtt

SEQ ID NO: 21851 - DNA, 15 bp, Homo sapiens
atgtggtgactatgt

SEQ ID NO: 21852 - DNA, 15 bp, Homo sapiens
tatgtggtgactatg

SEQ ID NO: 21853 - DNA, 15 bp, Homo sapiens
gtatgtggtgactat

SEQ ID NO: 21854 - DNA, 15 bp, Homo sapiens
ggtatgtggtgacta

SEQ ID NO: 21855 - DNA, 15 bp, Homo sapiens
aggtatgtggtgact

SEQ ID NO: 21856 - DNA, 15 bp, Homo sapiens
caggtatgtggtgac

SEQ ID NO: 21857 - DNA, 15 bp, Homo sapiens
ccaggtatgtggtga

SEQ ID NO: 21858 - DNA, 15 bp, Homo sapiens
gccaggtatgtggtg

SEQ ID NO: 21859 - DNA, 15 bp, Homo sapiens
tgccaggtatgtggt

SEQ ID NO: 21860 - DNA, 15 bp, Homo sapiens
gtgccaggtatgtgg

SEQ ID NO: 21861 - DNA, 15 bp, Homo sapiens
agtgccaggtatgtg

SEQ ID NO: 21862 - DNA, 15 bp, Homo sapiens
tagtgccaggtatgt

SEQ ID NO: 21863 - DNA, 15 bp, Homo sapiens
atagtgccaggtatg

SEQ ID NO: 21864 - DNA, 15 bp, Homo sapiens
catagtgccaggtat

SEQ ID NO: 21865 - DNA, 15 bp, Homo sapiens
gcatagtgccaggta

SEQ ID NO: 21866 - DNA, 15 bp, Homo sapiens
agcatagtgccaggt

SEQ ID NO: 21867 - DNA, 15 bp, Homo sapiens
tagcatagtgccagg

SEQ ID NO: 21868 - DNA, 15 bp, Homo sapiens
ttagcatagtgccag

SEQ ID NO: 21869 - DNA, 15 bp, Homo sapiens
cttagcatagtgcca

SEQ ID NO: 21870 - DNA, 15 bp, Homo sapiens
ccttagcatagtgcc

SEQ ID NO: 21871 - DNA, 15 bp, Homo sapiens
gccttagcatagtgc

SEQ ID NO: 21872 - DNA, 15 bp, Homo sapiens
agccttagcatagtg

SEQ ID NO: 21873 - DNA, 15 bp, Homo sapiens
cagccttagcatagt

SEQ ID NO: 21874 - DNA, 15 bp, Homo sapiens
ccagccttagcatag

SEQ ID NO: 21875 - DNA, 15 bp, Homo sapiens
cccagccttagcata

SEQ ID NO: 21876 - DNA, 15 bp, Homo sapiens
tcccagccttagcat

SEQ ID NO: 21877 - DNA, 15 bp, Homo sapiens
ttcccagccttagca

SEQ ID NO: 21878 - DNA, 15 bp, Homo sapiens
attcccagccttagc

SEQ ID NO: 21879 - DNA, 15 bp, Homo sapiens
cattcccagccttag

SEQ ID NO: 21880 - DNA, 15 bp, Homo sapiens
gcattcccagcctta

SEQ ID NO: 21881 - DNA, 15 bp, Homo sapiens
tgcattcccagcctt

SEQ ID NO: 21882 - DNA, 15 bp, Homo sapiens
ctgcattcccagcct

SEQ ID NO: 21883 - DNA, 15 bp, Homo sapiens
tctgcattcccagcc

SEQ ID NO: 21884 - DNA, 15 bp, Homo sapiens
gtctgcattcccagc

SEQ ID NO: 21885 - DNA, 15 bp, Homo sapiens
tgtctgcattcccag

SEQ ID NO: 21886 - DNA, 15 bp, Homo sapiens
ctgtctgcattccca

SEQ ID NO: 21887 - DNA, 15 bp, Homo sapiens
tctgtctgcattccc

SEQ ID NO: 21888 - DNA, 15 bp, Homo sapiens
atctgtctgcattcc

SEQ ID NO: 21889 - DNA, 15 bp, Homo sapiens
catctgtctgcattc

SEQ ID NO: 21890 - DNA, 15 bp, Homo sapiens
ccatctgtctgcatt

SEQ ID NO: 21891 - DNA, 15 bp, Homo sapiens
cccatctgtctgcat

SEQ ID NO: 21892 - DNA, 15 bp, Homo sapiens
acccatctgtctgca

SEQ ID NO: 21893 - DNA, 15 bp, Homo sapiens
cacccatctgtctgc

SEQ ID NO: 21894 - DNA, 15 bp, Homo sapiens
gcacccatctgtctg

SEQ ID NO: 21895 - DNA, 15 bp, Homo sapiens
ggcacccatctgtct

SEQ ID NO: 21896 - DNA, 15 bp, Homo sapiens
aggcacccatctgtc

SEQ ID NO: 21897 - DNA, 15 bp, Homo sapiens
caggcacccatctgt

SEQ ID NO: 21898 - DNA, 15 bp, Homo sapiens
gcaggcacccatctg

SEQ ID NO: 21899 - DNA, 15 bp, Homo sapiens
agcaggcacccatct

SEQ ID NO: 21900 - DNA, 15 bp, Homo sapiens
aagcaggcacccatc

SEQ ID NO: 21901 - DNA, 15 bp, Homo sapiens
aaagcaggcacccat

SEQ ID NO: 21902 - DNA, 15 bp, Homo sapiens
gaaagcaggcaccca

SEQ ID NO: 21903 - DNA, 15 bp, Homo sapiens
tgaaagcaggcaccc

SEQ ID NO: 21904 - DNA, 15 bp, Homo sapiens
ctgaaagcaggcacc

SEQ ID NO: 21905 - DNA, 15 bp, Homo sapiens
tctgaaagcaggcac

SEQ ID NO: 21906 - DNA, 15 bp, Homo sapiens
ctctgaaagcaggca

SEQ ID NO: 21907 - DNA, 15 bp, Homo sapiens
actctgaaagcaggc

SEQ ID NO: 21908 - DNA, 15 bp, Homo sapiens
cactctgaaagcagg

SEQ ID NO: 21909 - DNA, 15 bp, Homo sapiens
gcactctgaaagcag

SEQ ID NO: 21910 - DNA, 15 bp, Homo sapiens
agcactctgaaagca

SEQ ID NO: 21911 - DNA, 15 bp, Homo sapiens
gagcactctgaaagc

SEQ ID NO: 21912 - DNA, 15 bp, Homo sapiens
tgagcactctgaaag

SEQ ID NO: 21913 - DNA, 15 bp, Homo sapiens
ttgagcactctgaaa

SEQ ID NO: 21914 - DNA, 15 bp, Homo sapiens
attgagcactctgaa

SEQ ID NO: 21915 - DNA, 15 bp, Homo sapiens
cattgagcactctga

SEQ ID NO: 21916 - DNA, 15 bp, Homo sapiens
acattgagcactctg

SEQ ID NO: 21917 - DNA, 15 bp, Homo sapiens
cacattgagcactct

SEQ ID NO: 21918 - DNA, 15 bp, Homo sapiens
gcacattgagcactc

SEQ ID NO: 21919 - DNA, 15 bp, Homo sapiens
agcacattgagcact

SEQ ID NO: 21920 - DNA, 15 bp, Homo sapiens
cagcacattgagcac

SEQ ID NO: 21921 - DNA, 15 bp, Homo sapiens
tcagcacattgagca

SEQ ID NO: 21922 - DNA, 15 bp, Homo sapiens
ctcagcacattgagc

SEQ ID NO: 21923 - DNA, 15 bp, Homo sapiens
cctcagcacattgag

SEQ ID NO: 21924 - DNA, 15 bp, Homo sapiens
tcctcagcacattga

SEQ ID NO: 21925 - DNA, 15 bp, Homo sapiens
ttcctcagcacattg

SEQ ID NO: 21926 - DNA, 15 bp, Homo sapiens
cttcctcagcacatt

SEQ ID NO: 21927 - DNA, 15 bp, Homo sapiens
gcttcctcagcacat

SEQ ID NO: 21928 - DNA, 15 bp, Homo sapiens
ggcttcctcagcaca

SEQ ID NO: 21929 - DNA, 15 bp, Homo sapiens
tggcttcctcagcac

SEQ ID NO: 21930 - DNA, 15 bp, Homo sapiens
ctggcttcctcagca

SEQ ID NO: 21931 - DNA, 15 bp, Homo sapiens
gctggcttcctcagc

SEQ ID NO: 21932 - DNA, 15 bp, Homo sapiens
tgctggcttcctcag

SEQ ID NO: 21933 - DNA, 15 bp, Homo sapiens
ttgctggcttcctca

SEQ ID NO: 21934 - DNA, 15 bp, Homo sapiens
gttgctggcttcctc

SEQ ID NO: 21935 - DNA, 15 bp, Homo sapiens
tgttgctggcttcct

SEQ ID NO: 21936 - DNA, 15 bp, Homo sapiens
ctgttgctggcttcc

SEQ ID NO: 21937 - DNA, 15 bp, Homo sapiens
tctgttgctggcttc

SEQ ID NO: 21938 - DNA, 15 bp, Homo sapiens
ttctgttgctggctt

SEQ ID NO: 21939 - DNA, 15 bp, Homo sapiens
tttctgttgctggct

SEQ ID NO: 21940 - DNA, 15 bp, Homo sapiens
gtttctgttgctggc

SEQ ID NO: 21941 - DNA, 15 bp, Homo sapiens
tgtttctgttgctgg

SEQ ID NO: 21942 - DNA, 15 bp, Homo sapiens
ctgtttctgttgctg

SEQ ID NO: 21943 - DNA, 15 bp, Homo sapiens
tctgtttctgttgct

SEQ ID NO: 21944 - DNA, 15 bp, Homo sapiens
atctgtttctgttgc

SEQ ID NO: 21945 - DNA, 15 bp, Homo sapiens
catctgtttctgttg

SEQ ID NO: 21946 - DNA, 15 bp, Homo sapiens
tcatctgtttctgtt

SEQ ID NO: 21947 - DNA, 15 bp, Homo sapiens
atcatctgtttctgt

SEQ ID NO: 21948 - DNA, 15 bp, Homo sapiens
aatcatctgtttctg

SEQ ID NO: 21949 - DNA, 15 bp, Homo sapiens
aaatcatctgtttct

SEQ ID NO: 21950 - DNA, 15 bp, Homo sapiens
gaaatcatctgtttc

SEQ ID NO: 21951 - DNA, 15 bp, Homo sapiens
tgaaatcatctgttt

SEQ ID NO: 21952 - DNA, 15 bp, Homo sapiens
ctgaaatcatctgtt

SEQ ID NO: 21953 - DNA, 15 bp, Homo sapiens
cctgaaatcatctgt

SEQ ID NO: 21954 - DNA, 15 bp, Homo sapiens
tcctgaaatcatctg

SEQ ID NO: 21955 - DNA, 15 bp, Homo sapiens
ctcctgaaatcatct

SEQ ID NO: 21956 - DNA, 15 bp, Homo sapiens
gctcctgaaatcatc

SEQ ID NO: 21957 - DNA, 15 bp, Homo sapiens
agctcctgaaatcat

SEQ ID NO: 21958 - DNA, 15 bp, Homo sapiens
gagctcctgaaatca

SEQ ID NO: 21959 - DNA, 15 bp, Homo sapiens
ggagctcctgaaatc

SEQ ID NO: 21960 - DNA, 15 bp, Homo sapiens
tggagctcctgaaat

SEQ ID NO: 21961 - DNA, 15 bp, Homo sapiens
ctggagctcctgaaa

SEQ ID NO: 21962 - DNA, 15 bp, Homo sapiens
cctggagctcctgaa

SEQ ID NO: 21963 - DNA, 15 bp, Homo sapiens
tcctggagctcctga

SEQ ID NO: 21964 - DNA, 15 bp, Homo sapiens
ttcctggagctcctg

SEQ ID NO: 21965 - DNA, 15 bp, Homo sapiens
tttcctggagctcct

SEQ ID NO: 21966 - DNA, 15 bp, Homo sapiens
ttttcctggagctcc

SEQ ID NO: 21967 - DNA, 15 bp, Homo sapiens
attttcctggagctc

SEQ ID NO: 21968 - DNA, 15 bp, Homo sapiens
cattttcctggagct

SEQ ID NO: 21969 - DNA, 15 bp, Homo sapiens
gcattttcctggagc

SEQ ID NO: 21970 - DNA, 15 bp, Homo sapiens
agcattttcctggag

SEQ ID NO: 21971 - DNA, 15 bp, Homo sapiens
tagcattttcctgga

SEQ ID NO: 21972 - DNA, 15 bp, Homo sapiens
gtagcattttcctgg

SEQ ID NO: 21973 - DNA, 15 bp, Homo sapiens
tgtagcattttcctg

SEQ ID NO: 21974 - DNA, 15 bp, Homo sapiens
ctgtagcattttcct

SEQ ID NO: 21975 - DNA, 15 bp, Homo sapiens
cctgtagcattttcc

SEQ ID NO: 21976 - DNA, 15 bp, Homo sapiens
tcctgtagcattttc

SEQ ID NO: 21977 - DNA, 15 bp, Homo sapiens
ctcctgtagcatttt

SEQ ID NO: 21978 - DNA, 15 bp, Homo sapiens
cctcctgtagcattt

SEQ ID NO: 21979 - DNA, 15 bp, Homo sapiens
tcctcctgtagcatt

SEQ ID NO: 21980 - DNA, 15 bp, Homo sapiens
ctcctcctgtagcat

SEQ ID NO: 21981 - DNA, 15 bp, Homo sapiens
actcctcctgtagca

SEQ ID NO: 21982 - DNA, 15 bp, Homo sapiens
cactcctcctgtagc

SEQ ID NO: 21983 - DNA, 15 bp, Homo sapiens
acactcctcctgtag

SEQ ID NO: 21984 - DNA, 15 bp, Homo sapiens
cacactcctcctgta

SEQ ID NO: 21985 - DNA, 15 bp, Homo sapiens
gcacactcctcctgt

SEQ ID NO: 21986 - DNA, 15 bp, Homo sapiens
ggcacactcctcctg

SEQ ID NO: 21987 - DNA, 15 bp, Homo sapiens
aggcacactcctcct

SEQ ID NO: 21988 - DNA, 15 bp, Homo sapiens
caggcacactcctcc

SEQ ID NO: 21989 - DNA, 15 bp, Homo sapiens
ccaggcacactcctc

SEQ ID NO: 21990 - DNA, 15 bp, Homo sapiens
cccaggcacactcct

SEQ ID NO: 21991 - DNA, 15 bp, Homo sapiens
acccaggcacactcc

SEQ ID NO: 21992 - DNA, 15 bp, Homo sapiens
aacccaggcacactc

SEQ ID NO: 21993 - DNA, 15 bp, Homo sapiens
taacccaggcacact

SEQ ID NO: 21994 - DNA, 15 bp, Homo sapiens
gtaacccaggcacac

SEQ ID NO: 21995 - DNA, 15 bp, Homo sapiens
agtaacccaggcaca

SEQ ID NO: 21996 - DNA, 15 bp, Homo sapiens
cagtaacccaggcac

SEQ ID NO: 21997 - DNA, 15 bp, Homo sapiens
ccagtaacccaggca

SEQ ID NO: 21998 - DNA, 15 bp, Homo sapiens
tccagtaacccaggc

SEQ ID NO: 21999 - DNA, 15 bp, Homo sapiens
ctccagtaacccagg

SEQ ID NO: 22000 - DNA, 15 bp, Homo sapiens
actccagtaacccag

SEQ ID NO: 22001 - DNA, 15 bp, Homo sapiens
tactccagtaaccca

SEQ ID NO: 22002 - DNA, 15 bp, Homo sapiens
ctactccagtaaccc

SEQ ID NO: 22003 - DNA, 15 bp, Homo sapiens
gctactccagtaacc

SEQ ID NO: 22004 - DNA, 15 bp, Homo sapiens
tgctactccagtaac

SEQ ID NO: 22005 - DNA, 15 bp, Homo sapiens
gtgctactccagtaa

SEQ ID NO: 22006 - DNA, 15 bp, Homo sapiens
tgtgctactccagta

SEQ ID NO: 22007 - DNA, 15 bp, Homo sapiens
ctgtgctactccagt

SEQ ID NO: 22008 - DNA, 15 bp, Homo sapiens
cctgtgctactccag

SEQ ID NO: 22009 - DNA, 15 bp, Homo sapiens
tcctgtgctactcca

SEQ ID NO: 22010 - DNA, 15 bp, Homo sapiens
ctcctgtgctactcc

SEQ ID NO: 22011 - DNA, 15 bp, Homo sapiens
cctcctgtgctactc

SEQ ID NO: 22012 - DNA, 15 bp, Homo sapiens
tcctcctgtgctact

SEQ ID NO: 22013 - DNA, 15 bp, Homo sapiens
ctcctcctgtgctac

SEQ ID NO: 22014 - DNA, 15 bp, Homo sapiens
cctcctcctgtgcta

SEQ ID NO: 22015 - DNA, 15 bp, Homo sapiens
ccctcctcctgtgct

SEQ ID NO: 22016 - DNA, 15 bp, Homo sapiens
gccctcctcctgtgc

SEQ ID NO: 22017 - DNA, 15 bp, Homo sapiens
agccctcctcctgtg

SEQ ID NO: 22018 - DNA, 15 bp, Homo sapiens
aagccctcctcctgt

SEQ ID NO: 22019 - DNA, 15 bp, Homo sapiens
gaagccctcctcctg

SEQ ID NO: 22020 - DNA, 15 bp, Homo sapiens
agaagccctcctcct

SEQ ID NO: 22021 - DNA, 15 bp, Homo sapiens
tagaagccctcctcc

SEQ ID NO: 22022 - DNA, 15 bp, Homo sapiens
ctagaagccctcctc

SEQ ID NO: 22023 - DNA, 15 bp, Homo sapiens
gctagaagccctcct

SEQ ID NO: 22024 - DNA, 15 bp, Homo sapiens
agctagaagccctcc

SEQ ID NO: 22025 - DNA, 15 bp, Homo sapiens
gagctagaagccctc

SEQ ID NO: 22026 - DNA, 15 bp, Homo sapiens
tgagctagaagccct

SEQ ID NO: 22027 - DNA, 15 bp, Homo sapiens
ctgagctagaagccc

SEQ ID NO: 22028 - DNA, 15 bp, Homo sapiens
cctgagctagaagcc

SEQ ID NO: 22029 - DNA, 15 bp, Homo sapiens
gcctgagctagaagc

SEQ ID NO: 22030 - DNA, 15 bp, Homo sapiens
agcctgagctagaag

SEQ ID NO: 22031 - DNA, 15 bp, Homo sapiens
cagcctgagctagaa

SEQ ID NO: 22032 - DNA, 15 bp, Homo sapiens
tcagcctgagctaga

SEQ ID NO: 22033 - DNA, 15 bp, Homo sapiens
ctcagcctgagctag

SEQ ID NO: 22034 - DNA, 15 bp, Homo sapiens
tctcagcctgagcta

SEQ ID NO: 22035 - DNA, 15 bp, Homo sapiens
atctcagcctgagct

SEQ ID NO: 22036 - DNA, 15 bp, Homo sapiens
aatctcagcctgagc

SEQ ID NO: 22037 - DNA, 15 bp, Homo sapiens
aaatctcagcctgag

SEQ ID NO: 22038 - DNA, 15 bp, Homo sapiens
aaaatctcagcctga

SEQ ID NO: 22039 - DNA, 15 bp, Homo sapiens
taaaatctcagcctg

SEQ ID NO: 22040 - DNA, 15 bp, Homo sapiens
ctaaaatctcagcct

SEQ ID NO: 22041 - DNA, 15 bp, Homo sapiens
actaaaatctcagcc

SEQ ID NO: 22042 - DNA, 15 bp, Homo sapiens
tactaaaatctcagc

SEQ ID NO: 22043 - DNA, 15 bp, Homo sapiens
ttactaaaatctcag

SEQ ID NO: 22044 - DNA, 15 bp, Homo sapiens
tttactaaaatctca

SEQ ID NO: 22045 - DNA, 15 bp, Homo sapiens
ctttactaaaatctc

SEQ ID NO: 22046 - DNA, 15 bp, Homo sapiens
cctttactaaaatct

SEQ ID NO: 22047 - DNA, 15 bp, Homo sapiens
tcctttactaaaatc

SEQ ID NO: 22048 - DNA, 15 bp, Homo sapiens
ttcctttactaaaat

SEQ ID NO: 22049 - DNA, 15 bp, Homo sapiens
tttcctttactaaaa

SEQ ID NO: 22050 - DNA, 15 bp, Homo sapiens
atttcctttactaaa

SEQ ID NO: 22051 - DNA, 15 bp, Homo sapiens
aatttcctttactaa

SEQ ID NO: 22052 - DNA, 15 bp, Homo sapiens
taatttcctttacta

SEQ ID NO: 22053 - DNA, 15 bp, Homo sapiens
ataatttcctttact

SEQ ID NO: 22054 - DNA, 15 bp, Homo sapiens
cataatttcctttac

SEQ ID NO: 22055 - DNA, 15 bp, Homo sapiens
gcataatttccttta

SEQ ID NO: 22056 - DNA, 15 bp, Homo sapiens
ggcataatttccttt

SEQ ID NO: 22057 - DNA, 15 bp, Homo sapiens
tggcataatttcctt

SEQ ID NO: 22058 - DNA, 15 bp, Homo sapiens
gtggcataatttcct

SEQ ID NO: 22059 - DNA, 15 bp, Homo sapiens
cgtggcataatttcc

SEQ ID NO: 22060 - DNA, 15 bp, Homo sapiens
tcgtggcataatttc

SEQ ID NO: 22061 - DNA, 15 bp, Homo sapiens
atcgtggcataattt

SEQ ID NO: 22062 - DNA, 15 bp, Homo sapiens
catcgtggcataatt

SEQ ID NO: 22063 - DNA, 15 bp, Homo sapiens
tcatcgtggcataat

SEQ ID NO: 22064 - DNA, 15 bp, Homo sapiens
ttcatcgtggcataa

SEQ ID NO: 22065 - DNA, 15 bp, Homo sapiens
attcatcgtggcata

SEQ ID NO: 22066 - DNA, 15 bp, Homo sapiens
gattcatcgtggcat

SEQ ID NO: 22067 - DNA, 15 bp, Homo sapiens
ggattcatcgtggca

SEQ ID NO: 22068 - DNA, 15 bp, Homo sapiens
aggattcatcgtggc

SEQ ID NO: 22069 - DNA, 15 bp, Homo sapiens
caggattcatcgtgg

SEQ ID NO: 22070 - DNA, 15 bp, Homo sapiens
tcaggattcatcgtg

SEQ ID NO: 22071 - DNA, 15 bp, Homo sapiens
ttcaggattcatcgt

SEQ ID NO: 22072 - DNA, 15 bp, Homo sapiens
cttcaggattcatcg

SEQ ID NO: 22073 - DNA, 15 bp, Homo sapiens
tcttcaggattcatc

SEQ ID NO: 22074 - DNA, 15 bp, Homo sapiens
ttcttcaggattcat

SEQ ID NO: 22075 - DNA, 15 bp, Homo sapiens
attcttcaggattca

SEQ ID NO: 22076 - DNA, 15 bp, Homo sapiens
cattcttcaggattc

SEQ ID NO: 22077 - DNA, 15 bp, Homo sapiens
tcattcttcaggatt

SEQ ID NO: 22078 - DNA, 15 bp, Homo sapiens
ttcattcttcaggat

SEQ ID NO: 22079 - DNA, 15 bp, Homo sapiens
attcattcttcagga

SEQ ID NO: 22080 - DNA, 15 bp, Homo sapiens
tattcattcttcagg

SEQ ID NO: 22081 - DNA, 15 bp, Homo sapiens
ctattcattcttcag

SEQ ID NO: 22082 - DNA, 15 bp, Homo sapiens
tctattcattcttca

SEQ ID NO: 22083 - DNA, 15 bp, Homo sapiens
ttctattcattcttc

SEQ ID NO: 22084 - DNA, 15 bp, Homo sapiens
cttctattcattctt

SEQ ID NO: 22085 - DNA, 15 bp, Homo sapiens
acttctattcattct

SEQ ID NO: 22086 - DNA, 15 bp, Homo sapiens
cacttctattcattc

SEQ ID NO: 22087 - DNA, 15 bp, Homo sapiens
tcacttctattcatt

SEQ ID NO: 22088 - DNA, 15 bp, Homo sapiens
ttcacttctattcat

SEQ ID NO: 22089 - DNA, 15 bp, Homo sapiens
gttcacttctattca

SEQ ID NO: 22090 - DNA, 15 bp, Homo sapiens
ggttcacttctattc

SEQ ID NO: 22091 - DNA, 15 bp, Homo sapiens
tggttcacttctatt

SEQ ID NO: 22092 - DNA, 15 bp, Homo sapiens
ctggttcacttctat

SEQ ID NO: 22093 - DNA, 15 bp, Homo sapiens
tctggttcacttcta

SEQ ID NO: 22094 - DNA, 15 bp, Homo sapiens
atctggttcacttct

SEQ ID NO: 22095 - DNA, 15 bp, Homo sapiens
tatctggttcacttc

SEQ ID NO: 22096 - DNA, 15 bp, Homo sapiens
ttatctggttcactt

SEQ ID NO: 22097 - DNA, 15 bp, Homo sapiens
tttatctggttcact

SEQ ID NO: 22098 - DNA, 15 bp, Homo sapiens
ctttatctggttcac

SEQ ID NO: 22099 - DNA, 15 bp, Homo sapiens
gctttatctggttca

SEQ ID NO: 22100 - DNA, 15 bp, Homo sapiens
tgctttatctggttc

SEQ ID NO: 22101 - DNA, 15 bp, Homo sapiens
gtgctttatctggtt

SEQ ID NO: 22102 - DNA, 15 bp, Homo sapiens
cgtgctttatctggt

SEQ ID NO: 22103 - DNA, 15 bp, Homo sapiens
tcgtgctttatctgg

SEQ ID NO: 22104 - DNA, 15 bp, Homo sapiens
atcgtgctttatctg

SEQ ID NO: 22105 - DNA, 15 bp, Homo sapiens
tatcgtgctttatct

SEQ ID NO: 22106 - DNA, 15 bp, Homo sapiens
ctatcgtgctttatc

SEQ ID NO: 22107 - DNA, 15 bp, Homo sapiens
cctatcgtgctttat

SEQ ID NO: 22108 - DNA, 15 bp, Homo sapiens
tcctatcgtgcttta

SEQ ID NO: 22109 - DNA, 15 bp, Homo sapiens
ttcctatcgtgcttt

SEQ ID NO: 22110 - DNA, 15 bp, Homo sapiens
cttcctatcgtgctt

SEQ ID NO: 22111 - DNA, 15 bp, Homo sapiens
gcttcctatcgtgct

SEQ ID NO: 22112 - DNA, 15 bp, Homo sapiens
tgcttcctatcgtgc

SEQ ID NO: 22113 - DNA, 15 bp, Homo sapiens
atgcttcctatcgtg

SEQ ID NO: 22114 - DNA, 15 bp, Homo sapiens
gatgcttcctatcgt

SEQ ID NO: 22115 - DNA, 15 bp, Homo sapiens
agatgcttcctatcg

SEQ ID NO: 22116 - DNA, 15 bp, Homo sapiens
aagatgcttcctatc

SEQ ID NO: 22117 - DNA, 15 bp, Homo sapiens
gaagatgcttcctat

SEQ ID NO: 22118 - DNA, 15 bp, Homo sapiens
ggaagatgcttccta

SEQ ID NO: 22119 - DNA, 15 bp, Homo sapiens
gggaagatgcttcct

SEQ ID NO: 22120 - DNA, 15 bp, Homo sapiens
agggaagatgcttcc

SEQ ID NO: 22121 - DNA, 15 bp, Homo sapiens
aagggaagatgcttc

SEQ ID NO: 22122 - DNA, 15 bp, Homo sapiens
taagggaagatgctt

SEQ ID NO: 22123 - DNA, 15 bp, Homo sapiens
gtaagggaagatgct

SEQ ID NO: 22124 - DNA, 15 bp, Homo sapiens
ggtaagggaagatgc

SEQ ID NO: 22125 - DNA, 15 bp, Homo sapiens
aggtaagggaagatg

SEQ ID NO: 22126 - DNA, 15 bp, Homo sapiens
taggtaagggaagat

SEQ ID NO: 22127 - DNA, 15 bp, Homo sapiens
ttaggtaagggaaga

SEQ ID NO: 22128 - DNA, 15 bp, Homo sapiens
cttaggtaagggaag

SEQ ID NO: 22129 - DNA, 15 bp, Homo sapiens
ccttaggtaagggaa

SEQ ID NO: 22130 - DNA, 15 bp, Homo sapiens
cccttaggtaaggga

SEQ ID NO: 22131 - DNA, 15 bp, Homo sapiens
tcccttaggtaaggg

SEQ ID NO: 22132 - DNA, 15 bp, Homo sapiens
ttcccttaggtaagg

SEQ ID NO: 22133 - DNA, 15 bp, Homo sapiens
cttcccttaggtaag

SEQ ID NO: 22134 - DNA, 15 bp, Homo sapiens
tcttcccttaggtaa

SEQ ID NO: 22135 - DNA, 15 bp, Homo sapiens
gtcttcccttaggta

SEQ ID NO: 22136 - DNA, 15 bp, Homo sapiens
tgtcttcccttaggt

SEQ ID NO: 22137 - DNA, 15 bp, Homo sapiens
gtgtcttcccttagg

SEQ ID NO: 22138 - DNA, 15 bp, Homo sapiens
tgtgtcttcccttag

SEQ ID NO: 22139 - DNA, 15 bp, Homo sapiens
ctgtgtcttccctta

SEQ ID NO: 22140 - DNA, 15 bp, Homo sapiens
tctgtgtcttccctt

SEQ ID NO: 22141 - DNA, 15 bp, Homo sapiens
ctctgtgtcttccct

SEQ ID NO: 22142 - DNA, 15 bp, Homo sapiens
cctctgtgtcttccc

SEQ ID NO: 22143 - DNA, 15 bp, Homo sapiens
acctctgtgtcttcc

SEQ ID NO: 22144 - DNA, 15 bp, Homo sapiens
tacctctgtgtcttc

SEQ ID NO: 22145 - DNA, 15 bp, Homo sapiens
atacctctgtgtctt

SEQ ID NO: 22146 - DNA, 15 bp, Homo sapiens
tatacctctgtgtct

SEQ ID NO: 22147 - DNA, 15 bp, Homo sapiens
atatacctctgtgtc

SEQ ID NO: 22148 - DNA, 15 bp, Homo sapiens
catatacctctgtgt

SEQ ID NO: 22149 - DNA, 15 bp, Homo sapiens
ccatatacctctgtg

SEQ ID NO: 22150 - DNA, 15 bp, Homo sapiens
tccatatacctctgt

SEQ ID NO: 22151 - DNA, 15 bp, Homo sapiens
ttccatatacctctg

SEQ ID NO: 22152 - DNA, 15 bp, Homo sapiens
attccatatacctct

SEQ ID NO: 22153 - DNA, 15 bp, Homo sapiens
cattccatatacctc

SEQ ID NO: 22154 - DNA, 15 bp, Homo sapiens
ccattccatatacct

SEQ ID NO: 22155 - DNA, 15 bp, Homo sapiens
accattccatatacc

SEQ ID NO: 22156 - DNA, 15 bp, Homo sapiens
taccattccatatac

SEQ ID NO: 22157 - DNA, 15 bp, Homo sapiens
ataccattccatata

SEQ ID NO: 22158 - DNA, 15 bp, Homo sapiens
cataccattccatat

SEQ ID NO: 22159 - DNA, 15 bp, Homo sapiens
acataccattccata

SEQ ID NO: 22160 - DNA, 15 bp, Homo sapiens
aacataccattccat

SEQ ID NO: 22161 - DNA, 15 bp, Homo sapiens
taacataccattcca

SEQ ID NO: 22162 - DNA, 15 bp, Homo sapiens
ttaacataccattcc

SEQ ID NO: 22163 - DNA, 15 bp, Homo sapiens
tttaacataccattc

SEQ ID NO: 22164 - DNA, 15 bp, Homo sapiens
ttttaacataccatt

SEQ ID NO: 22165 - DNA, 15 bp, Homo sapiens
cttttaacataccat

SEQ ID NO: 22166 - DNA, 15 bp, Homo sapiens
ccttttaacatacca

SEQ ID NO: 22167 - DNA, 15 bp, Homo sapiens
accttttaacatacc

SEQ ID NO: 22168 - DNA, 15 bp, Homo sapiens
aaccttttaacatac

SEQ ID NO: 22169 - DNA, 15 bp, Homo sapiens
caaccttttaacata

SEQ ID NO: 22170 - DNA, 15 bp, Homo sapiens
ccaaccttttaacat

SEQ ID NO: 22171 - DNA, 15 bp, Homo sapiens
cccaaccttttaaca

SEQ ID NO: 22172 - DNA, 15 bp, Homo sapiens
tcccaaccttttaac

SEQ ID NO: 22173 - DNA, 15 bp, Homo sapiens
gtcccaaccttttaa

SEQ ID NO: 22174 - DNA, 15 bp, Homo sapiens
agtcccaacctttta

SEQ ID NO: 22175 - DNA, 15 bp, Homo sapiens
gagtcccaacctttt

SEQ ID NO: 22176 - DNA, 15 bp, Homo sapiens
ggagtcccaaccttt

SEQ ID NO: 22177 - DNA, 15 bp, Homo sapiens
tggagtcccaacctt

SEQ ID NO: 22178 - DNA, 15 bp, Homo sapiens
ttggagtcccaacct

SEQ ID NO: 22179 - DNA, 15 bp, Homo sapiens
tttggagtcccaacc

SEQ ID NO: 22180 - DNA, 15 bp, Homo sapiens
gtttggagtcccaac

SEQ ID NO: 22181 - DNA, 15 bp, Homo sapiens
tgtttggagtcccaa

SEQ ID NO: 22182 - DNA, 15 bp, Homo sapiens
ctgtttggagtccca

SEQ ID NO: 22183 - DNA, 15 bp, Homo sapiens
actgtttggagtccc

SEQ ID NO: 22184 - DNA, 15 bp, Homo sapiens
aactgtttggagtcc

SEQ ID NO: 22185 - DNA, 15 bp, Homo sapiens
gaactgtttggagtc

SEQ ID NO: 22186 - DNA, 15 bp, Homo sapiens
agaactgtttggagt

SEQ ID NO: 22187 - DNA, 15 bp, Homo sapiens
cagaactgtttggag

SEQ ID NO: 22188 - DNA, 15 bp, Homo sapiens
acagaactgtttgga

SEQ ID NO: 22189 - DNA, 15 bp, Homo sapiens
aacagaactgtttgg

SEQ ID NO: 22190 - DNA, 15 bp, Homo sapiens
taacagaactgtttg

SEQ ID NO: 22191 - DNA, 15 bp, Homo sapiens
ttaacagaactgttt

SEQ ID NO: 22192 - DNA, 15 bp, Homo sapiens
tttaacagaactgtt

SEQ ID NO: 22193 - DNA, 15 bp, Homo sapiens
ctttaacagaactgt

SEQ ID NO: 22194 - DNA, 15 bp, Homo sapiens
gctttaacagaactg

SEQ ID NO: 22195 - DNA, 15 bp, Homo sapiens
agctttaacagaact

SEQ ID NO: 22196 - DNA, 15 bp, Homo sapiens
aagctttaacagaac

SEQ ID NO: 22197 - DNA, 15 bp, Homo sapiens
taagctttaacagaa

SEQ ID NO: 22198 - DNA, 15 bp, Homo sapiens
ctaagctttaacaga

SEQ ID NO: 22199 - DNA, 15 bp, Homo sapiens
tctaagctttaacag

SEQ ID NO: 22200 - DNA, 15 bp, Homo sapiens
ctctaagctttaaca

SEQ ID NO: 22201 - DNA, 15 bp, Homo sapiens
tctctaagctttaac

SEQ ID NO: 22202 - DNA, 15 bp, Homo sapiens
ctctctaagctttaa

SEQ ID NO: 22203 - DNA, 15 bp, Homo sapiens
actctctaagcttta

SEQ ID NO: 22204 - DNA, 15 bp, Homo sapiens
cactctctaagcttt

SEQ ID NO: 22205 - DNA, 15 bp, Homo sapiens
ccactctctaagctt

SEQ ID NO: 22206 - DNA, 15 bp, Homo sapiens
accactctctaagct

SEQ ID NO: 22207 - DNA, 15 bp, Homo sapiens
caccactctctaagc

SEQ ID NO: 22208 - DNA, 15 bp, Homo sapiens
ccaccactctctaag

SEQ ID NO: 22209 - DNA, 15 bp, Homo sapiens
cccaccactctctaa

SEQ ID NO: 22210 - DNA, 15 bp, Homo sapiens
tcccaccactctcta

SEQ ID NO: 22211 - DNA, 15 bp, Homo sapiens
ctcccaccactctct

SEQ ID NO: 22212 - DNA, 15 bp, Homo sapiens
tctcccaccactctc

SEQ ID NO: 22213 - DNA, 15 bp, Homo sapiens
ctctcccaccactct

SEQ ID NO: 22214 - DNA, 15 bp, Homo sapiens
tctctcccaccactc

SEQ ID NO: 22215 - DNA, 15 bp, Homo sapiens
gtctctcccaccact

SEQ ID NO: 22216 - DNA, 15 bp, Homo sapiens
agtctctcccaccac

SEQ ID NO: 22217 - DNA, 15 bp, Homo sapiens
cagtctctcccacca

SEQ ID NO: 22218 - DNA, 15 bp, Homo sapiens
ccagtctctcccacc

SEQ ID NO: 22219 - DNA, 15 bp, Homo sapiens
tccagtctctcccac

SEQ ID NO: 22220 - DNA, 15 bp, Homo sapiens
ctccagtctctccca

SEQ ID NO: 22221 - DNA, 15 bp, Homo sapiens
tctccagtctctccc

SEQ ID NO: 22222 - DNA, 15 bp, Homo sapiens
ttctccagtctctcc

SEQ ID NO: 22223 - DNA, 15 bp, Homo sapiens
cttctccagtctctc

SEQ ID NO: 22224 - DNA, 15 bp, Homo sapiens
acttctccagtctct

SEQ ID NO: 22225 - DNA, 15 bp, Homo sapiens
aacttctccagtctc

SEQ ID NO: 22226 - DNA, 15 bp, Homo sapiens
caacttctccagtct

SEQ ID NO: 22227 - DNA, 15 bp, Homo sapiens
tcaacttctccagtc

SEQ ID NO: 22228 - DNA, 15 bp, Homo sapiens
atcaacttctccagt

SEQ ID NO: 22229 - DNA, 15 bp, Homo sapiens
aatcaacttctccag

SEQ ID NO: 22230 - DNA, 15 bp, Homo sapiens
taatcaacttctcca

SEQ ID NO: 22231 - DNA, 15 bp, Homo sapiens
ttaatcaacttctcc

SEQ ID NO: 22232 - DNA, 15 bp, Homo sapiens
attaatcaacttctc

SEQ ID NO: 22233 - DNA, 15 bp, Homo sapiens
aattaatcaacttct

SEQ ID NO: 22234 - DNA, 15 bp, Homo sapiens
taattaatcaacttc

SEQ ID NO: 22235 - DNA, 15 bp, Homo sapiens
ctaattaatcaactt

SEQ ID NO: 22236 - DNA, 15 bp, Homo sapiens
actaattaatcaact

SEQ ID NO: 22237 - DNA, 15 bp, Homo sapiens
tactaattaatcaac

SEQ ID NO: 22238 - DNA, 15 bp, Homo sapiens
ttactaattaatcaa

SEQ ID NO: 22239 - DNA, 15 bp, Homo sapiens
tttactaattaatca

SEQ ID NO: 22240 - DNA, 15 bp, Homo sapiens
atttactaattaatc

SEQ ID NO: 22241 - DNA, 15 bp, Homo sapiens
catttactaattaat

SEQ ID NO: 22242 - DNA, 15 bp, Homo sapiens
tcatttactaattaa

SEQ ID NO: 22243 - DNA, 15 bp, Homo sapiens
ttcatttactaatta

SEQ ID NO: 22244 - DNA, 15 bp, Homo sapiens
cttcatttactaatt

SEQ ID NO: 22245 - DNA, 15 bp, Homo sapiens
acttcatttactaat

SEQ ID NO: 22246 - DNA, 15 bp, Homo sapiens
aacttcatttactaa

SEQ ID NO: 22247 - DNA, 15 bp, Homo sapiens
caacttcatttacta

SEQ ID NO: 22248 - DNA, 15 bp, Homo sapiens
acaacttcatttact

SEQ ID NO: 22249 - DNA, 15 bp, Homo sapiens
gacaacttcatttac

SEQ ID NO: 22250 - DNA, 15 bp, Homo sapiens
agacaacttcattta

SEQ ID NO: 22251 - DNA, 15 bp, Homo sapiens
cagacaacttcattt

SEQ ID NO: 22252 - DNA, 15 bp, Homo sapiens
acagacaacttcatt

SEQ ID NO: 22253 - DNA, 15 bp, Homo sapiens
cacagacaacttcat

SEQ ID NO: 22254 - DNA, 15 bp, Homo sapiens
ccacagacaacttca

SEQ ID NO: 22255 - DNA, 15 bp, Homo sapiens
tccacagacaacttc

SEQ ID NO: 22256 - DNA, 15 bp, Homo sapiens
atccacagacaactt

SEQ ID NO: 22257 - DNA, 15 bp, Homo sapiens
aatccacagacaact

SEQ ID NO: 22258 - DNA, 15 bp, Homo sapiens
aaatccacagacaac

SEQ ID NO: 22259 - DNA, 15 bp, Homo sapiens
gaaatccacagacaa

SEQ ID NO: 22260 - DNA, 15 bp, Homo sapiens
ggaaatccacagaca

SEQ ID NO: 22261 - DNA, 15 bp, Homo sapiens
gggaaatccacagac

SEQ ID NO: 22262 - DNA, 15 bp, Homo sapiens
tgggaaatccacaga

SEQ ID NO: 22263 - DNA, 15 bp, Homo sapiens
ctgggaaatccacag

SEQ ID NO: 22264 - DNA, 15 bp, Homo sapiens
tctgggaaatccaca

SEQ ID NO: 22265 - DNA, 15 bp, Homo sapiens
atctgggaaatccac

SEQ ID NO: 22266 - DNA, 15 bp, Homo sapiens
gatctgggaaatcca

SEQ ID NO: 22267 - DNA, 15 bp, Homo sapiens
ggatctgggaaatcc

SEQ ID NO: 22268 - DNA, 15 bp, Homo sapiens
gggatctgggaaatc

SEQ ID NO: 22269 - DNA, 15 bp, Homo sapiens
tgggatctgggaaat

SEQ ID NO: 22270 - DNA, 15 bp, Homo sapiens
ctgggatctgggaaa

SEQ ID NO: 22271 - DNA, 15 bp, Homo sapiens
actgggatctgggaa

SEQ ID NO: 22272 - DNA, 15 bp, Homo sapiens
cactgggatctggga

SEQ ID NO: 22273 - DNA, 15 bp, Homo sapiens
ccactgggatctggg

SEQ ID NO: 22274 - DNA, 15 bp, Homo sapiens
gccactgggatctgg

SEQ ID NO: 22275 - DNA, 15 bp, Homo sapiens
tgccactgggatctg

SEQ ID NO: 22276 - DNA, 15 bp, Homo sapiens
atgccactgggatct

SEQ ID NO: 22277 - DNA, 15 bp, Homo sapiens
aatgccactgggatc

SEQ ID NO: 22278 - DNA, 15 bp, Homo sapiens
caatgccactgggat

SEQ ID NO: 22279 - DNA, 15 bp, Homo sapiens
ccaatgccactggga

SEQ ID NO: 22280 - DNA, 15 bp, Homo sapiens
tccaatgccactggg

SEQ ID NO: 22281 - DNA, 15 bp, Homo sapiens
atccaatgccactgg

SEQ ID NO: 22282 - DNA, 15 bp, Homo sapiens
tatccaatgccactg

SEQ ID NO: 22283 - DNA, 15 bp, Homo sapiens
atatccaatgccact

SEQ ID NO: 22284 - DNA, 15 bp, Homo sapiens
gatatccaatgccac

SEQ ID NO: 22285 - DNA, 15 bp, Homo sapiens
ggatatccaatgcca

SEQ ID NO: 22286 - DNA, 15 bp, Homo sapiens
tggatatccaatgcc

SEQ ID NO: 22287 - DNA, 15 bp, Homo sapiens
atggatatccaatgc

SEQ ID NO: 22288 - DNA, 15 bp, Homo sapiens
tatggatatccaatg

SEQ ID NO: 22289 - DNA, 15 bp, Homo sapiens
atatggatatccaat

SEQ ID NO: 22290 - DNA, 15 bp, Homo sapiens
aatatggatatccaa

SEQ ID NO: 22291 - DNA, 15 bp, Homo sapiens
taatatggatatcca

SEQ ID NO: 22292 - DNA, 15 bp, Homo sapiens
ataatatggatatcc

SEQ ID NO: 22293 - DNA, 15 bp, Homo sapiens
aataatatggatatc

SEQ ID NO: 22294 - DNA, 15 bp, Homo sapiens
aaataatatggatat

SEQ ID NO: 22295 - DNA, 15 bp, Homo sapiens
aaaataatatggata

SEQ ID NO: 22296 - DNA, 15 bp, Homo sapiens
aaaaataatatggat

SEQ ID NO: 22297 - DNA, 15 bp, Homo sapiens
taaaaataatatgga

SEQ ID NO: 22298 - DNA, 15 bp, Homo sapiens
ttaaaaataatatgg

SEQ ID NO: 22299 - DNA, 15 bp, Homo sapiens
tttaaaaataatatg

SEQ ID NO: 22300 - DNA, 15 bp, Homo sapiens
atttaaaaataatat

SEQ ID NO: 22301 - DNA, 15 bp, Homo sapiens
aatttaaaaataata

SEQ ID NO: 22302 - DNA, 15 bp, Homo sapiens
aaatttaaaaataat

SEQ ID NO: 22303 - DNA, 15 bp, Homo sapiens
taaatttaaaaataa

SEQ ID NO: 22304 - DNA, 15 bp, Homo sapiens
gtaaatttaaaaata

SEQ ID NO: 22305 - DNA, 15 bp, Homo sapiens
tgtaaatttaaaaat

SEQ ID NO: 22306 - DNA, 15 bp, Homo sapiens
ctgtaaatttaaaaa

SEQ ID NO: 22307 - DNA, 15 bp, Homo sapiens
actgtaaatttaaaa

SEQ ID NO: 22308 - DNA, 15 bp, Homo sapiens
cactgtaaatttaaa

SEQ ID NO: 22309 - DNA, 15 bp, Homo sapiens
acactgtaaatttaa

SEQ ID NO: 22310 - DNA, 15 bp, Homo sapiens
aacactgtaaattta

SEQ ID NO: 22311 - DNA, 15 bp, Homo sapiens
gaacactgtaaattt

SEQ ID NO: 22312 - DNA, 15 bp, Homo sapiens
agaacactgtaaatt

SEQ ID NO: 22313 - DNA, 15 bp, Homo sapiens
tagaacactgtaaat

SEQ ID NO: 22314 - DNA, 15 bp, Homo sapiens
atagaacactgtaaa

SEQ ID NO: 22315 - DNA, 15 bp, Homo sapiens
gatagaacactgtaa

SEQ ID NO: 22316 - DNA, 15 bp, Homo sapiens
agatagaacactgta

SEQ ID NO: 22317 - DNA, 15 bp, Homo sapiens
aagatagaacactgt

SEQ ID NO: 22318 - DNA, 15 bp, Homo sapiens
taagatagaacactg

SEQ ID NO: 22319 - DNA, 15 bp, Homo sapiens
ataagatagaacact

SEQ ID NO: 22320 - DNA, 15 bp, Homo sapiens
aataagatagaacac

SEQ ID NO: 22321 - DNA, 15 bp, Homo sapiens
aaataagatagaaca

SEQ ID NO: 22322 - DNA, 15 bp, Homo sapiens
gaaataagatagaac

SEQ ID NO: 22323 - DNA, 15 bp, Homo sapiens
ggaaataagatagaa

SEQ ID NO: 22324 - DNA, 15 bp, Homo sapiens
gggaaataagataga

SEQ ID NO: 22325 - DNA, 15 bp, Homo sapiens
tgggaaataagatag

SEQ ID NO: 22326 - DNA, 15 bp, Homo sapiens
gtgggaaataagata

SEQ ID NO: 22327 - DNA, 15 bp, Homo sapiens
agtgggaaataagat

SEQ ID NO: 22328 - DNA, 15 bp, Homo sapiens
gagtgggaaataaga

SEQ ID NO: 22329 - DNA, 15 bp, Homo sapiens
tgagtgggaaataag

SEQ ID NO: 22330 - DNA, 15 bp, Homo sapiens
ctgagtgggaaataa

SEQ ID NO: 22331 - DNA, 15 bp, Homo sapiens
actgagtgggaaata

SEQ ID NO: 22332 - DNA, 15 bp, Homo sapiens
cactgagtgggaaat

SEQ ID NO: 22333 - DNA, 15 bp, Homo sapiens
acactgagtgggaaa

SEQ ID NO: 22334 - DNA, 15 bp, Homo sapiens
gacactgagtgggaa

SEQ ID NO: 22335 - DNA, 15 bp, Homo sapiens
tgacactgagtggga

SEQ ID NO: 22336 - DNA, 15 bp, Homo sapiens
ctgacactgagtggg

SEQ ID NO: 22337 - DNA, 15 bp, Homo sapiens
gctgacactgagtgg

SEQ ID NO: 22338 - DNA, 15 bp, Homo sapiens
agctgacactgagtg

SEQ ID NO: 22339 - DNA, 15 bp, Homo sapiens
cagctgacactgagt

SEQ ID NO: 22340 - DNA, 15 bp, Homo sapiens
gcagctgacactgag

SEQ ID NO: 22341 - DNA, 15 bp, Homo sapiens
agcagctgacactga

SEQ ID NO: 22342 - DNA, 15 bp, Homo sapiens
cagcagctgacactg

SEQ ID NO: 22343 - DNA, 15 bp, Homo sapiens
gcagcagctgacact

SEQ ID NO: 22344 - DNA, 15 bp, Homo sapiens
agcagcagctgacac

SEQ ID NO: 22345 - DNA, 15 bp, Homo sapiens
cagcagcagctgaca

SEQ ID NO: 22346 - DNA, 15 bp, Homo sapiens
ccagcagcagctgac

SEQ ID NO: 22347 - DNA, 15 bp, Homo sapiens
tccagcagcagctga

SEQ ID NO: 22348 - DNA, 15 bp, Homo sapiens
ttccagcagcagctg

SEQ ID NO: 22349 - DNA, 15 bp, Homo sapiens
cttccagcagcagct

SEQ ID NO: 22350 - DNA, 15 bp, Homo sapiens
acttccagcagcagc

SEQ ID NO: 22351 - DNA, 15 bp, Homo sapiens
cacttccagcagcag

SEQ ID NO: 22352 - DNA, 15 bp, Homo sapiens
ccacttccagcagca

SEQ ID NO: 22353 - DNA, 15 bp, Homo sapiens
gccacttccagcagc

SEQ ID NO: 22354 - DNA, 15 bp, Homo sapiens
ggccacttccagcag

SEQ ID NO: 22355 - DNA, 15 bp, Homo sapiens
aggccacttccagca

SEQ ID NO: 22356 - DNA, 15 bp, Homo sapiens
caggccacttccagc

SEQ ID NO: 22357 - DNA, 15 bp, Homo sapiens
ccaggccacttccag

SEQ ID NO: 22358 - DNA, 15 bp, Homo sapiens
gccaggccacttcca

SEQ ID NO: 22359 - DNA, 15 bp, Homo sapiens
ggccaggccacttcc

SEQ ID NO: 22360 - DNA, 15 bp, Homo sapiens
aggccaggccacttc

SEQ ID NO: 22361 - DNA, 15 bp, Homo sapiens
gaggccaggccactt

SEQ ID NO: 22362 - DNA, 15 bp, Homo sapiens
agaggccaggccact

SEQ ID NO: 22363 - DNA, 15 bp, Homo sapiens
tagaggccaggccac

SEQ ID NO: 22364 - DNA, 15 bp, Homo sapiens
atagaggccaggcca

SEQ ID NO: 22365 - DNA, 15 bp, Homo sapiens
aatagaggccaggcc

SEQ ID NO: 22366 - DNA, 15 bp, Homo sapiens
aaatagaggccaggc

SEQ ID NO: 22367 - DNA, 15 bp, Homo sapiens
taaatagaggccagg

SEQ ID NO: 22368 - DNA, 15 bp, Homo sapiens
ataaatagaggccag

SEQ ID NO: 22369 - DNA, 15 bp, Homo sapiens
gataaatagaggcca

SEQ ID NO: 22370 - DNA, 15 bp, Homo sapiens
agataaatagaggcc

SEQ ID NO: 22371 - DNA, 15 bp, Homo sapiens
aagataaatagaggc

SEQ ID NO: 22372 - DNA, 15 bp, Homo sapiens
gaagataaatagagg

SEQ ID NO: 22373 - DNA, 15 bp, Homo sapiens
ggaagataaatagag

SEQ ID NO: 22374 - DNA, 15 bp, Homo sapiens
aggaagataaataga

SEQ ID NO: 22375 - DNA, 15 bp, Homo sapiens
caggaagataaatag

SEQ ID NO: 22376 - DNA, 15 bp, Homo sapiens
tcaggaagataaata

SEQ ID NO: 22377 - DNA, 15 bp, Homo sapiens
atcaggaagataaat

SEQ ID NO: 22378 - DNA, 15 bp, Homo sapiens
gatcaggaagataaa

SEQ ID NO: 22379 - DNA, 15 bp, Homo sapiens
ggatcaggaagataa

SEQ ID NO: 22380 - DNA, 15 bp, Homo sapiens
aggatcaggaagata

SEQ ID NO: 22381 - DNA, 15 bp, Homo sapiens
caggatcaggaagat

SEQ ID NO: 22382 - DNA, 15 bp, Homo sapiens
tcaggatcaggaaga

SEQ ID NO: 22383 - DNA, 15 bp, Homo sapiens
atcaggatcaggaag

SEQ ID NO: 22384 - DNA, 15 bp, Homo sapiens
gatcaggatcaggaa

SEQ ID NO: 22385 - DNA, 15 bp, Homo sapiens
agatcaggatcagga

SEQ ID NO: 22386 - DNA, 15 bp, Homo sapiens
gagatcaggatcagg

SEQ ID NO: 22387 - DNA, 15 bp, Homo sapiens
agagatcaggatcag

SEQ ID NO: 22388 - DNA, 15 bp, Homo sapiens
cagagatcaggatca

SEQ ID NO: 22389 - DNA, 15 bp, Homo sapiens
acagagatcaggatc

SEQ ID NO: 22390 - DNA, 15 bp, Homo sapiens
aacagagatcaggat

SEQ ID NO: 22391 - DNA, 15 bp, Homo sapiens
gaacagagatcagga

SEQ ID NO: 22392 - DNA, 15 bp, Homo sapiens
cgaacagagatcagg

SEQ ID NO: 22393 - DNA, 15 bp, Homo sapiens
ccgaacagagatcag

SEQ ID NO: 22394 - DNA, 15 bp, Homo sapiens
gccgaacagagatca

SEQ ID NO: 22395 - DNA, 15 bp, Homo sapiens
agccgaacagagatc

SEQ ID NO: 22396 - DNA, 15 bp, Homo sapiens
cagccgaacagagat

SEQ ID NO: 22397 - DNA, 15 bp, Homo sapiens
tcagccgaacagaga

SEQ ID NO: 22398 - DNA, 15 bp, Homo sapiens
ctcagccgaacagag

SEQ ID NO: 22399 - DNA, 15 bp, Homo sapiens
gctcagccgaacaga

SEQ ID NO: 22400 - DNA, 15 bp, Homo sapiens
agctcagccgaacag

SEQ ID NO: 22401 - DNA, 15 bp, Homo sapiens
tagctcagccgaaca

SEQ ID NO: 22402 - DNA, 15 bp, Homo sapiens
gtagctcagccgaac

SEQ ID NO: 22403 - DNA, 15 bp, Homo sapiens
ggtagctcagccgaa

SEQ ID NO: 22404 - DNA, 15 bp, Homo sapiens
gggtagctcagccga

SEQ ID NO: 22405 - DNA, 15 bp, Homo sapiens
tgggtagctcagccg

SEQ ID NO: 22406 - DNA, 15 bp, Homo sapiens
gtgggtagctcagcc

SEQ ID NO: 22407 - DNA, 15 bp, Homo sapiens
ggtgggtagctcagc

SEQ ID NO: 22408 - DNA, 15 bp, Homo sapiens
gggtgggtagctcag

SEQ ID NO: 22409 - DNA, 15 bp, Homo sapiens
agggtgggtagctca

SEQ ID NO: 22410 - DNA, 15 bp, Homo sapiens
tagggtgggtagctc

SEQ ID NO: 22411 - DNA, 15 bp, Homo sapiens
atagggtgggtagct

SEQ ID NO: 22412 - DNA, 15 bp, Homo sapiens
catagggtgggtagc

SEQ ID NO: 22413 - DNA, 15 bp, Homo sapiens
tcatagggtgggtag

SEQ ID NO: 22414 - DNA, 15 bp, Homo sapiens
ttcatagggtgggta

SEQ ID NO: 22415 - DNA, 15 bp, Homo sapiens
gttcatagggtgggt

SEQ ID NO: 22416 - DNA, 15 bp, Homo sapiens
tgttcatagggtggg

SEQ ID NO: 22417 - DNA, 15 bp, Homo sapiens
ttgttcatagggtgg

SEQ ID NO: 22418 - DNA, 15 bp, Homo sapiens
gttgttcatagggtg

SEQ ID NO: 22419 - DNA, 15 bp, Homo sapiens
tgttgttcatagggt

SEQ ID NO: 22420 - DNA, 15 bp, Homo sapiens
atgttgttcataggg

SEQ ID NO: 22421 - DNA, 15 bp, Homo sapiens
catgttgttcatagg

SEQ ID NO: 22422 - DNA, 15 bp, Homo sapiens
tcatgttgttcatag

SEQ ID NO: 22423 - DNA, 15 bp, Homo sapiens
ttcatgttgttcata

SEQ ID NO: 22424 - DNA, 15 bp, Homo sapiens
attcatgttgttcat

SEQ ID NO: 22425 - DNA, 15 bp, Homo sapiens
cattcatgttgttca

SEQ ID NO: 22426 - DNA, 15 bp, Homo sapiens
acattcatgttgttc

SEQ ID NO: 22427 - DNA, 15 bp, Homo sapiens
tacattcatgttgtt

SEQ ID NO: 22428 - DNA, 15 bp, Homo sapiens
ttacattcatgttgt

SEQ ID NO: 22429 - DNA, 15 bp, Homo sapiens
cttacattcatgttg

SEQ ID NO: 22430 - DNA, 15 bp, Homo sapiens
acttacattcatgtt

SEQ ID NO: 22431 - DNA, 15 bp, Homo sapiens
tacttacattcatgt

SEQ ID NO: 22432 - DNA, 15 bp, Homo sapiens
ttacttacattcatg

SEQ ID NO: 22433 - DNA, 15 bp, Homo sapiens
gttacttacattcat

SEQ ID NO: 22434 - DNA, 15 bp, Homo sapiens
agttacttacattca

SEQ ID NO: 22435 - DNA, 15 bp, Homo sapiens
cagttacttacattc

SEQ ID NO: 22436 - DNA, 15 bp, Homo sapiens
acagttacttacatt

SEQ ID NO: 22437 - DNA, 15 bp, Homo sapiens
cacagttacttacat

SEQ ID NO: 22438 - DNA, 15 bp, Homo sapiens
ccacagttacttaca

SEQ ID NO: 22439 - DNA, 15 bp, Homo sapiens
tccacagttacttac

SEQ ID NO: 22440 - DNA, 15 bp, Homo sapiens
atccacagttactta

SEQ ID NO: 22441 - DNA, 15 bp, Homo sapiens
catccacagttactt

SEQ ID NO: 22442 - DNA, 15 bp, Homo sapiens
acatccacagttact

SEQ ID NO: 22443 - DNA, 15 bp, Homo sapiens
aacatccacagttac

SEQ ID NO: 22444 - DNA, 15 bp, Homo sapiens
caacatccacagtta

SEQ ID NO: 22445 - DNA, 15 bp, Homo sapiens
gcaacatccacagtt

SEQ ID NO: 22446 - DNA, 15 bp, Homo sapiens
ggcaacatccacagt

SEQ ID NO: 22447 - DNA, 15 bp, Homo sapiens
aggcaacatccacag

SEQ ID NO: 22448 - DNA, 15 bp, Homo sapiens
caggcaacatccaca

SEQ ID NO: 22449 - DNA, 15 bp, Homo sapiens
tcaggcaacatccac

SEQ ID NO: 22450 - DNA, 15 bp, Homo sapiens
ctcaggcaacatcca

SEQ ID NO: 22451 - DNA, 15 bp, Homo sapiens
tctcaggcaacatcc

SEQ ID NO: 22452 - DNA, 15 bp, Homo sapiens
gtctcaggcaacatc

SEQ ID NO: 22453 - DNA, 15 bp, Homo sapiens
agtctcaggcaacat

SEQ ID NO: 22454 - DNA, 15 bp, Homo sapiens
gagtctcaggcaaca

SEQ ID NO: 22455 - DNA, 15 bp, Homo sapiens
tgagtctcaggcaac

SEQ ID NO: 22456 - DNA, 15 bp, Homo sapiens
gtgagtctcaggcaa

SEQ ID NO: 22457 - DNA, 15 bp, Homo sapiens
ggtgagtctcaggca

SEQ ID NO: 22458 - DNA, 15 bp, Homo sapiens
tggtgagtctcaggc

SEQ ID NO: 22459 - DNA, 15 bp, Homo sapiens
ttggtgagtctcagg

SEQ ID NO: 22460 - DNA, 15 bp, Homo sapiens
attggtgagtctcag

SEQ ID NO: 22461 - DNA, 15 bp, Homo sapiens
cattggtgagtctca

SEQ ID NO: 22462 - DNA, 15 bp, Homo sapiens
ccattggtgagtctc

SEQ ID NO: 22463 - DNA, 15 bp, Homo sapiens
gccattggtgagtct

SEQ ID NO: 22464 - DNA, 15 bp, Homo sapiens
tgccattggtgagtc

SEQ ID NO: 22465 - DNA, 15 bp, Homo sapiens
ctgccattggtgagt

SEQ ID NO: 22466 - DNA, 15 bp, Homo sapiens
cctgccattggtgag

SEQ ID NO: 22467 - DNA, 15 bp, Homo sapiens
ccctgccattggtga

SEQ ID NO: 22468 - DNA, 15 bp, Homo sapiens
tccctgccattggtg

SEQ ID NO: 22469 - DNA, 15 bp, Homo sapiens
ttccctgccattggt

SEQ ID NO: 22470 - DNA, 15 bp, Homo sapiens
tttccctgccattgg

SEQ ID NO: 22471 - DNA, 15 bp, Homo sapiens
ttttccctgccattg

SEQ ID NO: 22472 - DNA, 15 bp, Homo sapiens
attttccctgccatt

SEQ ID NO: 22473 - DNA, 15 bp, Homo sapiens
gattttccctgccat

SEQ ID NO: 22474 - DNA, 15 bp, Homo sapiens
ggattttccctgcca

SEQ ID NO: 22475 - DNA, 15 bp, Homo sapiens
tggattttccctgcc

SEQ ID NO: 22476 - DNA, 15 bp, Homo sapiens
ctggattttccctgc

SEQ ID NO: 22477 - DNA, 15 bp, Homo sapiens
cctggattttccctg

SEQ ID NO: 22478 - DNA, 15 bp, Homo sapiens
gcctggattttccct

SEQ ID NO: 22479 - DNA, 15 bp, Homo sapiens
tgcctggattttccc

SEQ ID NO: 22480 - DNA, 15 bp, Homo sapiens
ttgcctggattttcc

SEQ ID NO: 22481 - DNA, 15 bp, Homo sapiens
attgcctggattttc

SEQ ID NO: 22482 - DNA, 15 bp, Homo sapiens
aattgcctggatttt

SEQ ID NO: 22483 - DNA, 15 bp, Homo sapiens
taattgcctggattt

SEQ ID NO: 22484 - DNA, 15 bp, Homo sapiens
ttaattgcctggatt

SEQ ID NO: 22485 - DNA, 15 bp, Homo sapiens
gttaattgcctggat

SEQ ID NO: 22486 - DNA, 15 bp, Homo sapiens
cgttaattgcctgga

SEQ ID NO: 22487 - DNA, 15 bp, Homo sapiens
acgttaattgcctgg

SEQ ID NO: 22488 - DNA, 15 bp, Homo sapiens
cacgttaattgcctg

SEQ ID NO: 22489 - DNA, 15 bp, Homo sapiens
ccacgttaattgcct

SEQ ID NO: 22490 - DNA, 15 bp, Homo sapiens
cccacgttaattgcc

SEQ ID NO: 22491 - DNA, 15 bp, Homo sapiens
gcccacgttaattgc

SEQ ID NO: 22492 - DNA, 15 bp, Homo sapiens
agcccacgttaattg

SEQ ID NO: 22493 - DNA, 15 bp, Homo sapiens
tagcccacgttaatt

SEQ ID NO: 22494 - DNA, 15 bp, Homo sapiens
ttagcccacgttaat

SEQ ID NO: 22495 - DNA, 15 bp, Homo sapiens
tttagcccacgttaa

SEQ ID NO: 22496 - DNA, 15 bp, Homo sapiens
atttagcccacgtta

SEQ ID NO: 22497 - DNA, 15 bp, Homo sapiens
aatttagcccacgtt

SEQ ID NO: 22498 - DNA, 15 bp, Homo sapiens
caatttagcccacgt

SEQ ID NO: 22499 - DNA, 15 bp, Homo sapiens
ccaatttagcccacg

SEQ ID NO: 22500 - DNA, 15 bp, Homo sapiens
tccaatttagcccac

SEQ ID NO: 22501 - DNA, 15 bp, Homo sapiens
gtccaatttagccca

SEQ ID NO: 22502 - DNA, 15 bp, Homo sapiens
agtccaatttagccc

SEQ ID NO: 22503 - DNA, 15 bp, Homo sapiens
aagtccaatttagcc

SEQ ID NO: 22504 - DNA, 15 bp, Homo sapiens
aaagtccaatttagc

SEQ ID NO: 22505 - DNA, 15 bp, Homo sapiens
aaaagtccaatttag

SEQ ID NO: 22506 - DNA, 15 bp, Homo sapiens
gaaaagtccaattta

SEQ ID NO: 22507 - DNA, 15 bp, Homo sapiens
ggaaaagtccaattt

SEQ ID NO: 22508 - DNA, 15 bp, Homo sapiens
tggaaaagtccaatt

SEQ ID NO: 22509 - DNA, 15 bp, Homo sapiens
ttggaaaagtccaat

SEQ ID NO: 22510 - DNA, 15 bp, Homo sapiens
tttggaaaagtccaa

SEQ ID NO: 22511 - DNA, 15 bp, Homo sapiens
ctttggaaaagtcca

SEQ ID NO: 22512 - DNA, 15 bp, Homo sapiens
tctttggaaaagtcc

SEQ ID NO: 22513 - DNA, 15 bp, Homo sapiens
atctttggaaaagtc

SEQ ID NO: 22514 - DNA, 15 bp, Homo sapiens
catctttggaaaagt

SEQ ID NO: 22515 - DNA, 15 bp, Homo sapiens
gcatctttggaaaag

SEQ ID NO: 22516 - DNA, 15 bp, Homo sapiens
agcatctttggaaaa

SEQ ID NO: 22517 - DNA, 15 bp, Homo sapiens
cagcatctttggaaa

SEQ ID NO: 22518 - DNA, 15 bp, Homo sapiens
acagcatctttggaa

SEQ ID NO: 22519 - DNA, 15 bp, Homo sapiens
gacagcatctttgga

SEQ ID NO: 22520 - DNA, 15 bp, Homo sapiens
agacagcatctttgg

SEQ ID NO: 22521 - DNA, 15 bp, Homo sapiens
aagacagcatctttg

SEQ ID NO: 22522 - DNA, 15 bp, Homo sapiens
aaagacagcatcttt

SEQ ID NO: 22523 - DNA, 15 bp, Homo sapiens
caaagacagcatctt

SEQ ID NO: 22524 - DNA, 15 bp, Homo sapiens
ccaaagacagcatct

SEQ ID NO: 22525 - DNA, 15 bp, Homo sapiens
cccaaagacagcatc

SEQ ID NO: 22526 - DNA, 15 bp, Homo sapiens
tcccaaagacagcat

SEQ ID NO: 22527 - DNA, 15 bp, Homo sapiens
ttcccaaagacagca

SEQ ID NO: 22528 - DNA, 15 bp, Homo sapiens
tttcccaaagacagc

SEQ ID NO: 22529 - DNA, 15 bp, Homo sapiens
gtttcccaaagacag

SEQ ID NO: 22530 - DNA, 15 bp, Homo sapiens
tgtttcccaaagaca

SEQ ID NO: 22531 - DNA, 15 bp, Homo sapiens
atgtttcccaaagac

SEQ ID NO: 22532 - DNA, 15 bp, Homo sapiens
gatgtttcccaaaga

SEQ ID NO: 22533 - DNA, 15 bp, Homo sapiens
tgatgtttcccaaag

SEQ ID NO: 22534 - DNA, 15 bp, Homo sapiens
gtgatgtttcccaaa

SEQ ID NO: 22535 - DNA, 15 bp, Homo sapiens
tgtgatgtttcccaa

SEQ ID NO: 22536 - DNA, 15 bp, Homo sapiens
gtgtgatgtttccca

SEQ ID NO: 22537 - DNA, 15 bp, Homo sapiens
tgtgtgatgtttccc

SEQ ID NO: 22538 - DNA, 15 bp, Homo sapiens
atgtgtgatgtttcc

SEQ ID NO: 22539 - DNA, 15 bp, Homo sapiens
catgtgtgatgtttc

SEQ ID NO: 22540 - DNA, 15 bp, Homo sapiens
gcatgtgtgatgttt

SEQ ID NO: 22541 - DNA, 15 bp, Homo sapiens
agcatgtgtgatgtt

SEQ ID NO: 22542 - DNA, 15 bp, Homo sapiens
aagcatgtgtgatgt

SEQ ID NO: 22543 - DNA, 15 bp, Homo sapiens
aaagcatgtgtgatg

SEQ ID NO: 22544 - DNA, 15 bp, Homo sapiens
caaagcatgtgtgat

SEQ ID NO: 22545 - DNA, 15 bp, Homo sapiens
ccaaagcatgtgtga

SEQ ID NO: 22546 - DNA, 15 bp, Homo sapiens
tccaaagcatgtgtg

SEQ ID NO: 22547 - DNA, 15 bp, Homo sapiens
atccaaagcatgtgt

SEQ ID NO: 22548 - DNA, 15 bp, Homo sapiens
gatccaaagcatgtg

SEQ ID NO: 22549 - DNA, 15 bp, Homo sapiens
tgatccaaagcatgt

SEQ ID NO: 22550 - DNA, 15 bp, Homo sapiens
ctgatccaaagcatg

SEQ ID NO: 22551 - DNA, 15 bp, Homo sapiens
tctgatccaaagcat

SEQ ID NO: 22552 - DNA, 15 bp, Homo sapiens
ttctgatccaaagca

SEQ ID NO: 22553 - DNA, 15 bp, Homo sapiens
tttctgatccaaagc

SEQ ID NO: 22554 - DNA, 15 bp, Homo sapiens
ttttctgatccaaag

SEQ ID NO: 22555 - DNA, 15 bp, Homo sapiens
gttttctgatccaaa

SEQ ID NO: 22556 - DNA, 15 bp, Homo sapiens
ggttttctgatccaa

SEQ ID NO: 22557 - DNA, 15 bp, Homo sapiens
aggttttctgatcca

SEQ ID NO: 22558 - DNA, 15 bp, Homo sapiens
taggttttctgatcc

SEQ ID NO: 22559 - DNA, 15 bp, Homo sapiens
ctaggttttctgatc

SEQ ID NO: 22560 - DNA, 15 bp, Homo sapiens
cctaggttttctgat

SEQ ID NO: 22561 - DNA, 15 bp, Homo sapiens
gcctaggttttctga

SEQ ID NO: 22562 - DNA, 15 bp, Homo sapiens
agcctaggttttctg

SEQ ID NO: 22563 - DNA, 15 bp, Homo sapiens
aagcctaggttttct

SEQ ID NO: 22564 - DNA, 15 bp, Homo sapiens
gaagcctaggttttc

SEQ ID NO: 22565 - DNA, 15 bp, Homo sapiens
agaagcctaggtttt

SEQ ID NO: 22566 - DNA, 15 bp, Homo sapiens
tagaagcctaggttt

SEQ ID NO: 22567 - DNA, 15 bp, Homo sapiens
ttagaagcctaggtt

SEQ ID NO: 22568 - DNA, 15 bp, Homo sapiens
attagaagcctaggt

SEQ ID NO: 22569 - DNA, 15 bp, Homo sapiens
aattagaagcctagg

SEQ ID NO: 22570 - DNA, 15 bp, Homo sapiens
aaattagaagcctag

SEQ ID NO: 22571 - DNA, 15 bp, Homo sapiens
caaattagaagccta

SEQ ID NO: 22572 - DNA, 15 bp, Homo sapiens
acaaattagaagcct

SEQ ID NO: 22573 - DNA, 15 bp, Homo sapiens
aacaaattagaagcc

SEQ ID NO: 22574 - DNA, 15 bp, Homo sapiens
caacaaattagaagc

SEQ ID NO: 22575 - DNA, 15 bp, Homo sapiens
tcaacaaattagaag

SEQ ID NO: 22576 - DNA, 15 bp, Homo sapiens
atcaacaaattagaa

SEQ ID NO: 22577 - DNA, 15 bp, Homo sapiens
tatcaacaaattaga

SEQ ID NO: 22578 - DNA, 15 bp, Homo sapiens
ttatcaacaaattag

SEQ ID NO: 22579 - DNA, 15 bp, Homo sapiens
cttatcaacaaatta

SEQ ID NO: 22580 - DNA, 15 bp, Homo sapiens
ccttatcaacaaatt

SEQ ID NO: 22581 - DNA, 15 bp, Homo sapiens
gccttatcaacaaat

SEQ ID NO: 22582 - DNA, 15 bp, Homo sapiens
tgccttatcaacaaa

SEQ ID NO: 22583 - DNA, 15 bp, Homo sapiens
atgccttatcaacaa

SEQ ID NO: 22584 - DNA, 15 bp, Homo sapiens
catgccttatcaaca

SEQ ID NO: 22585 - DNA, 15 bp, Homo sapiens
tcatgccttatcaac

SEQ ID NO: 22586 - DNA, 15 bp, Homo sapiens
ttcatgccttatcaa

SEQ ID NO: 22587 - DNA, 15 bp, Homo sapiens
gttcatgccttatca

SEQ ID NO: 22588 - DNA, 15 bp, Homo sapiens
agttcatgccttatc

SEQ ID NO: 22589 - DNA, 15 bp, Homo sapiens
gagttcatgccttat

SEQ ID NO: 22590 - DNA, 15 bp, Homo sapiens
tgagttcatgcctta

SEQ ID NO: 22591 - DNA, 15 bp, Homo sapiens
ctgagttcatgcctt

SEQ ID NO: 22592 - DNA, 15 bp, Homo sapiens
cctgagttcatgcct

SEQ ID NO: 22593 - DNA, 15 bp, Homo sapiens
tcctgagttcatgcc

SEQ ID NO: 22594 - DNA, 15 bp, Homo sapiens
ctcctgagttcatgc

SEQ ID NO: 22595 - DNA, 15 bp, Homo sapiens
tctcctgagttcatg

SEQ ID NO: 22596 - DNA, 15 bp, Homo sapiens
gtctcctgagttcat

SEQ ID NO: 22597 - DNA, 15 bp, Homo sapiens
agtctcctgagttca

SEQ ID NO: 22598 - DNA, 15 bp, Homo sapiens
cagtctcctgagttc

SEQ ID NO: 22599 - DNA, 15 bp, Homo sapiens
acagtctcctgagtt

SEQ ID NO: 22600 - DNA, 15 bp, Homo sapiens
aacagtctcctgagt

SEQ ID NO: 22601 - DNA, 15 bp, Homo sapiens
aaacagtctcctgag

SEQ ID NO: 22602 - DNA, 15 bp, Homo sapiens
aaaacagtctcctga

SEQ ID NO: 22603 - DNA, 15 bp, Homo sapiens
gaaaacagtctcctg

SEQ ID NO: 22604 - DNA, 15 bp, Homo sapiens
tgaaaacagtctcct

SEQ ID NO: 22605 - DNA, 15 bp, Homo sapiens
ctgaaaacagtctcc

SEQ ID NO: 22606 - DNA, 15 bp, Homo sapiens
actgaaaacagtctc

SEQ ID NO: 22607 - DNA, 15 bp, Homo sapiens
gactgaaaacagtct

SEQ ID NO: 22608 - DNA, 15 bp, Homo sapiens
ggactgaaaacagtc

SEQ ID NO: 22609 - DNA, 15 bp, Homo sapiens
aggactgaaaacagt

SEQ ID NO: 22610 - DNA, 15 bp, Homo sapiens
taggactgaaaacag

SEQ ID NO: 22611 - DNA, 15 bp, Homo sapiens
ctaggactgaaaaca

SEQ ID NO: 22612 - DNA, 15 bp, Homo sapiens
actaggactgaaaac

SEQ ID NO: 22613 - DNA, 15 bp, Homo sapiens
cactaggactgaaaa

SEQ ID NO: 22614 - DNA, 15 bp, Homo sapiens
tcactaggactgaaa

SEQ ID NO: 22615 - DNA, 15 bp, Homo sapiens
ttcactaggactgaa

SEQ ID NO: 22616 - DNA, 15 bp, Homo sapiens
attcactaggactga

SEQ ID NO: 22617 - DNA, 15 bp, Homo sapiens
cattcactaggactg

SEQ ID NO: 22618 - DNA, 15 bp, Homo sapiens
ccattcactaggact

SEQ ID NO: 22619 - DNA, 15 bp, Homo sapiens
accattcactaggac

SEQ ID NO: 22620 - DNA, 15 bp, Homo sapiens
caccattcactagga

SEQ ID NO: 22621 - DNA, 15 bp, Homo sapiens
tcaccattcactagg

SEQ ID NO: 22622 - DNA, 15 bp, Homo sapiens
atcaccattcactag

SEQ ID NO: 22623 - DNA, 15 bp, Homo sapiens
tatcaccattcacta

SEQ ID NO: 22624 - DNA, 15 bp, Homo sapiens
ttatcaccattcact

SEQ ID NO: 22625 - DNA, 15 bp, Homo sapiens
attatcaccattcac

SEQ ID NO: 22626 - DNA, 15 bp, Homo sapiens
aattatcaccattca

SEQ ID NO: 22627 - DNA, 15 bp, Homo sapiens
caattatcaccattc

SEQ ID NO: 22628 - DNA, 15 bp, Homo sapiens
acaattatcaccatt

SEQ ID NO: 22629 - DNA, 15 bp, Homo sapiens
tacaattatcaccat

SEQ ID NO: 22630 - DNA, 15 bp, Homo sapiens
ttacaattatcacca

SEQ ID NO: 22631 - DNA, 15 bp, Homo sapiens
attacaattatcacc

SEQ ID NO: 22632 - DNA, 15 bp, Homo sapiens
aattacaattatcac

SEQ ID NO: 22633 - DNA, 15 bp, Homo sapiens
taattacaattatca

SEQ ID NO: 22634 - DNA, 15 bp, Homo sapiens
ataattacaattatc

SEQ ID NO: 22635 - DNA, 15 bp, Homo sapiens
tataattacaattat

SEQ ID NO: 22636 - DNA, 15 bp, Homo sapiens
ttataattacaatta

SEQ ID NO: 22637 - DNA, 15 bp, Homo sapiens
gttataattacaatt

SEQ ID NO: 22638 - DNA, 15 bp, Homo sapiens
tgttataattacaat

SEQ ID NO: 22639 - DNA, 15 bp, Homo sapiens
ctgttataattacaa

SEQ ID NO: 22640 - DNA, 15 bp, Homo sapiens
actgttataattaca

SEQ ID NO: 22641 - DNA, 15 bp, Homo sapiens
tactgttataattac

SEQ ID NO: 22642 - DNA, 15 bp, Homo sapiens
ctactgttataatta

SEQ ID NO: 22643 - DNA, 15 bp, Homo sapiens
tctactgttataatt

SEQ ID NO: 22644 - DNA, 15 bp, Homo sapiens
gtctactgttataat

SEQ ID NO: 22645 - DNA, 15 bp, Homo sapiens
tgtctactgttataa

SEQ ID NO: 22646 - DNA, 15 bp, Homo sapiens
ttgtctactgttata

SEQ ID NO: 22647 - DNA, 15 bp, Homo sapiens
gttgtctactgttat

SEQ ID NO: 22648 - DNA, 15 bp, Homo sapiens
tgttgtctactgtta

SEQ ID NO: 22649 - DNA, 15 bp, Homo sapiens
atgttgtctactgtt

SEQ ID NO: 22650 - DNA, 15 bp, Homo sapiens
gatgttgtctactgt

SEQ ID NO: 22651 - DNA, 15 bp, Homo sapiens
agatgttgtctactg

SEQ ID NO: 22652 - DNA, 15 bp, Homo sapiens
gagatgttgtctact

SEQ ID NO: 22653 - DNA, 15 bp, Homo sapiens
agagatgttgtctac

SEQ ID NO: 22654 - DNA, 15 bp, Homo sapiens
aagagatgttgtcta

SEQ ID NO: 22655 - DNA, 15 bp, Homo sapiens
aaagagatgttgtct

SEQ ID NO: 22656 - DNA, 15 bp, Homo sapiens
aaaagagatgttgtc

SEQ ID NO: 22657 - DNA, 15 bp, Homo sapiens
taaaagagatgttgt

SEQ ID NO: 22658 - DNA, 15 bp, Homo sapiens
gtaaaagagatgttg

SEQ ID NO: 22659 - DNA, 15 bp, Homo sapiens
tgtaaaagagatgtt

SEQ ID NO: 22660 - DNA, 15 bp, Homo sapiens
gtgtaaaagagatgt

SEQ ID NO: 22661 - DNA, 15 bp, Homo sapiens
tgtgtaaaagagatg

SEQ ID NO: 22662 - DNA, 15 bp, Homo sapiens
atgtgtaaaagagat

SEQ ID NO: 22663 - DNA, 15 bp, Homo sapiens
aatgtgtaaaagaga

SEQ ID NO: 22664 - DNA, 15 bp, Homo sapiens
aaatgtgtaaaagag

SEQ ID NO: 22665 - DNA, 15 bp, Homo sapiens
aaaatgtgtaaaaga

SEQ ID NO: 22666 - DNA, 15 bp, Homo sapiens
taaaatgtgtaaaag

SEQ ID NO: 22667 - DNA, 15 bp, Homo sapiens
ttaaaatgtgtaaaa

SEQ ID NO: 22668 - DNA, 15 bp, Homo sapiens
tttaaaatgtgtaaa

SEQ ID NO: 22669 - DNA, 15 bp, Homo sapiens
atttaaaatgtgtaa

SEQ ID NO: 22670 - DNA, 15 bp, Homo sapiens
gatttaaaatgtgta

SEQ ID NO: 22671 - DNA, 15 bp, Homo sapiens
tgatttaaaatgtgt

SEQ ID NO: 22672 - DNA, 15 bp, Homo sapiens
atgatttaaaatgtg

SEQ ID NO: 22673 - DNA, 15 bp, Homo sapiens
catgatttaaaatgt

SEQ ID NO: 22674 - DNA, 15 bp, Homo sapiens
tcatgatttaaaatg

SEQ ID NO: 22675 - DNA, 15 bp, Homo sapiens
ttcatgatttaaaat

SEQ ID NO: 22676 - DNA, 15 bp, Homo sapiens
tttcatgatttaaaa

SEQ ID NO: 22677 - DNA, 15 bp, Homo sapiens
ttttcatgatttaaa

SEQ ID NO: 22678 - DNA, 15 bp, Homo sapiens
attttcatgatttaa

SEQ ID NO: 22679 - DNA, 15 bp, Homo sapiens
tattttcatgattta

SEQ ID NO: 22680 - DNA, 15 bp, Homo sapiens
ctattttcatgattt

SEQ ID NO: 22681 - DNA, 15 bp, Homo sapiens
tctattttcatgatt

SEQ ID NO: 22682 - DNA, 15 bp, Homo sapiens
ttctattttcatgat

SEQ ID NO: 22683 - DNA, 15 bp, Homo sapiens
attctattttcatga

SEQ ID NO: 22684 - DNA, 15 bp, Homo sapiens
tattctattttcatg

SEQ ID NO: 22685 - DNA, 15 bp, Homo sapiens
ttattctattttcat

SEQ ID NO: 22686 - DNA, 15 bp, Homo sapiens
gttattctattttca

SEQ ID NO: 22687 - DNA, 15 bp, Homo sapiens
ggttattctattttc

SEQ ID NO: 22688 - DNA, 15 bp, Homo sapiens
aggttattctatttt

SEQ ID NO: 22689 - DNA, 15 bp, Homo sapiens
aaggttattctattt

SEQ ID NO: 22690 - DNA, 15 bp, Homo sapiens
taaggttattctatt

SEQ ID NO: 22691 - DNA, 15 bp, Homo sapiens
gtaaggttattctat

SEQ ID NO: 22692 - DNA, 15 bp, Homo sapiens
agtaaggttattcta

SEQ ID NO: 22693 - DNA, 15 bp, Homo sapiens
cagtaaggttattct

SEQ ID NO: 22694 - DNA, 15 bp, Homo sapiens
tcagtaaggttattc

SEQ ID NO: 22695 - DNA, 15 bp, Homo sapiens
atcagtaaggttatt

SEQ ID NO: 22696 - DNA, 15 bp, Homo sapiens
tatcagtaaggttat

SEQ ID NO: 22697 - DNA, 15 bp, Homo sapiens
ttatcagtaaggtta

SEQ ID NO: 22698 - DNA, 15 bp, Homo sapiens
attatcagtaaggtt

SEQ ID NO: 22699 - DNA, 15 bp, Homo sapiens
aattatcagtaaggt

SEQ ID NO: 22700 - DNA, 15 bp, Homo sapiens
aaattatcagtaagg

SEQ ID NO: 22701 - DNA, 15 bp, Homo sapiens
aaaattatcagtaag

SEQ ID NO: 22702 - DNA, 15 bp, Homo sapiens
taaaattatcagtaa

SEQ ID NO: 22703 - DNA, 15 bp, Homo sapiens
ctaaaattatcagta

SEQ ID NO: 22704 - DNA, 15 bp, Homo sapiens
tctaaaattatcagt

SEQ ID NO: 22705 - DNA, 15 bp, Homo sapiens
ttctaaaattatcag

SEQ ID NO: 22706 - DNA, 15 bp, Homo sapiens
tttctaaaattatca

SEQ ID NO: 22707 - DNA, 15 bp, Homo sapiens
ctttctaaaattatc

SEQ ID NO: 22708 - DNA, 15 bp, Homo sapiens
actttctaaaattat

SEQ ID NO: 22709 - DNA, 15 bp, Homo sapiens
cactttctaaaatta

SEQ ID NO: 22710 - DNA, 15 bp, Homo sapiens
ccactttctaaaatt

SEQ ID NO: 22711 - DNA, 15 bp, Homo sapiens
accactttctaaaat

SEQ ID NO: 22712 - DNA, 15 bp, Homo sapiens
caccactttctaaaa

SEQ ID NO: 22713 - DNA, 15 bp, Homo sapiens
tcaccactttctaaa

SEQ ID NO: 22714 - DNA, 15 bp, Homo sapiens
atcaccactttctaa

SEQ ID NO: 22715 - DNA, 15 bp, Homo sapiens
aatcaccactttcta

SEQ ID NO: 22716 - DNA, 15 bp, Homo sapiens
taatcaccactttct

SEQ ID NO: 22717 - DNA, 15 bp, Homo sapiens
ttaatcaccactttc

SEQ ID NO: 22718 - DNA, 15 bp, Homo sapiens
tttaatcaccacttt

SEQ ID NO: 22719 - DNA, 15 bp, Homo sapiens
ttttaatcaccactt

SEQ ID NO: 22720 - DNA, 15 bp, Homo sapiens
cttttaatcaccact

SEQ ID NO: 22721 - DNA, 15 bp, Homo sapiens
gcttttaatcaccac

SEQ ID NO: 22722 - DNA, 15 bp, Homo sapiens
tgcttttaatcacca

SEQ ID NO: 22723 - DNA, 15 bp, Homo sapiens
gtgcttttaatcacc

SEQ ID NO: 22724 - DNA, 15 bp, Homo sapiens
tgtgcttttaatcac

SEQ ID NO: 22725 - DNA, 15 bp, Homo sapiens
atgtgcttttaatca

SEQ ID NO: 22726 - DNA, 15 bp, Homo sapiens
aatgtgcttttaatc

SEQ ID NO: 22727 - DNA, 15 bp, Homo sapiens
aaatgtgcttttaat

SEQ ID NO: 22728 - DNA, 15 bp, Homo sapiens
taaatgtgcttttaa

SEQ ID NO: 22729 - DNA, 15 bp, Homo sapiens
ttaaatgtgctttta

SEQ ID NO: 22730 - DNA, 15 bp, Homo sapiens
cttaaatgtgctttt

SEQ ID NO: 22731 - DNA, 15 bp, Homo sapiens
tcttaaatgtgcttt

SEQ ID NO: 22732 - DNA, 15 bp, Homo sapiens
atcttaaatgtgctt

SEQ ID NO: 22733 - DNA, 15 bp, Homo sapiens
tatcttaaatgtgct

SEQ ID NO: 22734 - DNA, 15 bp, Homo sapiens
ttatcttaaatgtgc

SEQ ID NO: 22735 - DNA, 15 bp, Homo sapiens
attatcttaaatgtg

SEQ ID NO: 22736 - DNA, 15 bp, Homo sapiens
cattatcttaaatgt

SEQ ID NO: 22737 - DNA, 15 bp, Homo sapiens
gcattatcttaaatg

SEQ ID NO: 22738 - DNA, 15 bp, Homo sapiens
ggcattatcttaaat

SEQ ID NO: 22739 - DNA, 15 bp, Homo sapiens
aggcattatcttaaa

SEQ ID NO: 22740 - DNA, 15 bp, Homo sapiens
aaggcattatcttaa

SEQ ID NO: 22741 - DNA, 15 bp, Homo sapiens
taaggcattatctta

SEQ ID NO: 22742 - DNA, 15 bp, Homo sapiens
ttaaggcattatctt

SEQ ID NO: 22743 - DNA, 15 bp, Homo sapiens
gttaaggcattatct

SEQ ID NO: 22744 - DNA, 15 bp, Homo sapiens
tgttaaggcattatc

SEQ ID NO: 22745 - DNA, 15 bp, Homo sapiens
gtgttaaggcattat

SEQ ID NO: 22746 - DNA, 15 bp, Homo sapiens
ggtgttaaggcatta

SEQ ID NO: 22747 - DNA, 15 bp, Homo sapiens
aggtgttaaggcatt

SEQ ID NO: 22748 - DNA, 15 bp, Homo sapiens
taggtgttaaggcat

SEQ ID NO: 22749 - DNA, 15 bp, Homo sapiens
ctaggtgttaaggca

SEQ ID NO: 22750 - DNA, 15 bp, Homo sapiens
actaggtgttaaggc

SEQ ID NO: 22751 - DNA, 15 bp, Homo sapiens
gactaggtgttaagg

SEQ ID NO: 22752 - DNA, 15 bp, Homo sapiens
agactaggtgttaag

SEQ ID NO: 22753 - DNA, 15 bp, Homo sapiens
aagactaggtgttaa

SEQ ID NO: 22754 - DNA, 15 bp, Homo sapiens
aaagactaggtgtta

SEQ ID NO: 22755 - DNA, 15 bp, Homo sapiens
aaaagactaggtgtt

SEQ ID NO: 22756 - DNA, 15 bp, Homo sapiens
gaaaagactaggtgt

SEQ ID NO: 22757 - DNA, 15 bp, Homo sapiens
ggaaaagactaggtg

SEQ ID NO: 22758 - DNA, 15 bp, Homo sapiens
tggaaaagactaggt

SEQ ID NO: 22759 - DNA, 15 bp, Homo sapiens
atggaaaagactagg

SEQ ID NO: 22760 - DNA, 15 bp, Homo sapiens
tatggaaaagactag

SEQ ID NO: 22761 - DNA, 15 bp, Homo sapiens
atatggaaaagacta

SEQ ID NO: 22762 - DNA, 15 bp, Homo sapiens
catatggaaaagact

SEQ ID NO: 22763 - DNA, 15 bp, Homo sapiens
gcatatggaaaagac

SEQ ID NO: 22764 - DNA, 15 bp, Homo sapiens
tgcatatggaaaaga

SEQ ID NO: 22765 - DNA, 15 bp, Homo sapiens
atgcatatggaaaag

SEQ ID NO: 22766 - DNA, 15 bp, Homo sapiens
catgcatatggaaaa

SEQ ID NO: 22767 - DNA, 15 bp, Homo sapiens
tcatgcatatggaaa

SEQ ID NO: 22768 - DNA, 15 bp, Homo sapiens
atcatgcatatggaa

SEQ ID NO: 22769 - DNA, 15 bp, Homo sapiens
catcatgcatatgga

SEQ ID NO: 22770 - DNA, 15 bp, Homo sapiens
acatcatgcatatgg

SEQ ID NO: 22771 - DNA, 15 bp, Homo sapiens
gacatcatgcatatg

SEQ ID NO: 22772 - DNA, 15 bp, Homo sapiens
agacatcatgcatat

SEQ ID NO: 22773 - DNA, 15 bp, Homo sapiens
aagacatcatgcata

SEQ ID NO: 22774 - DNA, 15 bp, Homo sapiens
taagacatcatgcat

SEQ ID NO: 22775 - DNA, 15 bp, Homo sapiens
ttaagacatcatgca

SEQ ID NO: 22776 - DNA, 15 bp, Homo sapiens
attaagacatcatgc

SEQ ID NO: 22777 - DNA, 15 bp, Homo sapiens
gattaagacatcatg

SEQ ID NO: 22778 - DNA, 15 bp, Homo sapiens
tgattaagacatcat

SEQ ID NO: 22779 - DNA, 15 bp, Homo sapiens
gtgattaagacatca

SEQ ID NO: 22780 - DNA, 15 bp, Homo sapiens
tgtgattaagacatc

SEQ ID NO: 22781 - DNA, 15 bp, Homo sapiens
gtgtgattaagacat

SEQ ID NO: 22782 - DNA, 15 bp, Homo sapiens
tgtgtgattaagaca

SEQ ID NO: 22783 - DNA, 15 bp, Homo sapiens
atgtgtgattaagac

SEQ ID NO: 22784 - DNA, 15 bp, Homo sapiens
aatgtgtgattaaga

SEQ ID NO: 22785 - DNA, 15 bp, Homo sapiens
caatgtgtgattaag

SEQ ID NO: 22786 - DNA, 15 bp, Homo sapiens
gcaatgtgtgattaa

SEQ ID NO: 22787 - DNA, 15 bp, Homo sapiens
tgcaatgtgtgatta

SEQ ID NO: 22788 - DNA, 15 bp, Homo sapiens
ttgcaatgtgtgatt

SEQ ID NO: 22789 - DNA, 15 bp, Homo sapiens
tttgcaatgtgtgat

SEQ ID NO: 22790 - DNA, 15 bp, Homo sapiens
atttgcaatgtgtga

SEQ ID NO: 22791 - DNA, 15 bp, Homo sapiens
gatttgcaatgtgtg

SEQ ID NO: 22792 - DNA, 15 bp, Homo sapiens
tgatttgcaatgtgt

SEQ ID NO: 22793 - DNA, 15 bp, Homo sapiens
atgatttgcaatgtg

SEQ ID NO: 22794 - DNA, 15 bp, Homo sapiens
catgatttgcaatgt

SEQ ID NO: 22795 - DNA, 15 bp, Homo sapiens
ccatgatttgcaatg

SEQ ID NO: 22796 - DNA, 15 bp, Homo sapiens
tccatgatttgcaat

SEQ ID NO: 22797 - DNA, 15 bp, Homo sapiens
ttccatgatttgcaa

SEQ ID NO: 22798 - DNA, 15 bp, Homo sapiens
gttccatgatttgca

SEQ ID NO: 22799 - DNA, 15 bp, Homo sapiens
tgttccatgatttgc

SEQ ID NO: 22800 - DNA, 15 bp, Homo sapiens
gtgttccatgatttg

SEQ ID NO: 22801 - DNA, 15 bp, Homo sapiens
tgtgttccatgattt

SEQ ID NO: 22802 - DNA, 15 bp, Homo sapiens
ctgtgttccatgatt

SEQ ID NO: 22803 - DNA, 15 bp, Homo sapiens
tctgtgttccatgat

SEQ ID NO: 22804 - DNA, 15 bp, Homo sapiens
ttctgtgttccatga

SEQ ID NO: 22805 - DNA, 15 bp, Homo sapiens
attctgtgttccatg

SEQ ID NO: 22806 - DNA, 15 bp, Homo sapiens
aattctgtgttccat

SEQ ID NO: 22807 - DNA, 15 bp, Homo sapiens
aaattctgtgttcca

SEQ ID NO: 22808 - DNA, 15 bp, Homo sapiens
aaaattctgtgttcc

SEQ ID NO: 22809 - DNA, 15 bp, Homo sapiens
taaaattctgtgttc

SEQ ID NO: 22810 - DNA, 15 bp, Homo sapiens
ttaaaattctgtgtt

SEQ ID NO: 22811 - DNA, 15 bp, Homo sapiens
cttaaaattctgtgt

SEQ ID NO: 22812 - DNA, 15 bp, Homo sapiens
gcttaaaattctgtg

SEQ ID NO: 22813 - DNA, 15 bp, Homo sapiens
tgcttaaaattctgt

SEQ ID NO: 22814 - DNA, 15 bp, Homo sapiens
ctgcttaaaattctg

SEQ ID NO: 22815 - DNA, 15 bp, Homo sapiens
gctgcttaaaattct

SEQ ID NO: 22816 - DNA, 15 bp, Homo sapiens
tgctgcttaaaattc

SEQ ID NO: 22817 - DNA, 15 bp, Homo sapiens
atgctgcttaaaatt

SEQ ID NO: 22818 - DNA, 15 bp, Homo sapiens
aatgctgcttaaaat

SEQ ID NO: 22819 - DNA, 15 bp, Homo sapiens
aaatgctgcttaaaa

SEQ ID NO: 22820 - DNA, 15 bp, Homo sapiens
caaatgctgcttaaa

SEQ ID NO: 22821 - DNA, 15 bp, Homo sapiens
acaaatgctgcttaa

SEQ ID NO: 22822 - DNA, 15 bp, Homo sapiens
cacaaatgctgctta

SEQ ID NO: 22823 - DNA, 15 bp, Homo sapiens
acacaaatgctgctt

SEQ ID NO: 22824 - DNA, 15 bp, Homo sapiens
tacacaaatgctgct

SEQ ID NO: 22825 - DNA, 15 bp, Homo sapiens
ctacacaaatgctgc

SEQ ID NO: 22826 - DNA, 15 bp, Homo sapiens
tctacacaaatgctg

SEQ ID NO: 22827 - DNA, 15 bp, Homo sapiens
ttctacacaaatgct

SEQ ID NO: 22828 - DNA, 15 bp, Homo sapiens
gttctacacaaatgc

SEQ ID NO: 22829 - DNA, 15 bp, Homo sapiens
agttctacacaaatg

SEQ ID NO: 22830 - DNA, 15 bp, Homo sapiens
aagttctacacaaat

SEQ ID NO: 22831 - DNA, 15 bp, Homo sapiens
gaagttctacacaaa

SEQ ID NO: 22832 - DNA, 15 bp, Homo sapiens
agaagttctacacaa

SEQ ID NO: 22833 - DNA, 15 bp, Homo sapiens
gagaagttctacaca

SEQ ID NO: 22834 - DNA, 15 bp, Homo sapiens
tgagaagttctacac

SEQ ID NO: 22835 - DNA, 15 bp, Homo sapiens
ctgagaagttctaca

SEQ ID NO: 22836 - DNA, 15 bp, Homo sapiens
actgagaagttctac

SEQ ID NO: 22837 - DNA, 15 bp, Homo sapiens
aactgagaagttcta

SEQ ID NO: 22838 - DNA, 15 bp, Homo sapiens
aaactgagaagttct

SEQ ID NO: 22839 - DNA, 15 bp, Homo sapiens
aaaactgagaagttc

SEQ ID NO: 22840 - DNA, 15 bp, Homo sapiens
taaaactgagaagtt

SEQ ID NO: 22841 - DNA, 15 bp, Homo sapiens
gtaaaactgagaagt

SEQ ID NO: 22842 - DNA, 15 bp, Homo sapiens
agtaaaactgagaag

SEQ ID NO: 22843 - DNA, 15 bp, Homo sapiens
tagtaaaactgagaa

SEQ ID NO: 22844 - DNA, 15 bp, Homo sapiens
ttagtaaaactgaga

SEQ ID NO: 22845 - DNA, 15 bp, Homo sapiens
attagtaaaactgag

SEQ ID NO: 22846 - DNA, 15 bp, Homo sapiens
tattagtaaaactga

SEQ ID NO: 22847 - DNA, 15 bp, Homo sapiens
atattagtaaaactg

SEQ ID NO: 22848 - DNA, 15 bp, Homo sapiens
aatattagtaaaact

SEQ ID NO: 22849 - DNA, 15 bp, Homo sapiens
taatattagtaaaac

SEQ ID NO: 22850 - DNA, 15 bp, Homo sapiens
ataatattagtaaaa

SEQ ID NO: 22851 - DNA, 15 bp, Homo sapiens
aataatattagtaaa

SEQ ID NO: 22852 - DNA, 15 bp, Homo sapiens
aaataatattagtaa

SEQ ID NO: 22853 - DNA, 15 bp, Homo sapiens
aaaataatattagta

SEQ ID NO: 22854 - DNA, 15 bp, Homo sapiens
taaaataatattagt

SEQ ID NO: 22855 - DNA, 15 bp, Homo sapiens
ataaaataatattag

SEQ ID NO: 22856 - DNA, 15 bp, Homo sapiens
aataaaataatatta

SEQ ID NO: 22857 - DNA, 15 bp, Homo sapiens
aaataaaataatatt

SEQ ID NO: 22858 - DNA, 15 bp, Homo sapiens
aaaataaaataatat

SEQ ID NO: 22859 - DNA, 15 bp, Homo sapiens
taaaataaaataata

SEQ ID NO: 22860 - DNA, 15 bp, Homo sapiens
ataaaataaaataat

SEQ ID NO: 22861 - DNA, 15 bp, Homo sapiens
aataaaataaaataa

SEQ ID NO: 22862 - DNA, 15 bp, Homo sapiens
gaataaaataaaata

SEQ ID NO: 22863 - DNA, 15 bp, Homo sapiens
agaataaaataaaat

SEQ ID NO: 22864 - DNA, 15 bp, Homo sapiens
gagaataaaataaaa

SEQ ID NO: 22865 - DNA, 15 bp, Homo sapiens
tgagaataaaataaa

SEQ ID NO: 22866 - DNA, 15 bp, Homo sapiens
atgagaataaaataa

SEQ ID NO: 22867 - DNA, 15 bp, Homo sapiens
tatgagaataaaata

SEQ ID NO: 22868 - DNA, 15 bp, Homo sapiens
ttatgagaataaaat

SEQ ID NO: 22869 - DNA, 15 bp, Homo sapiens
gttatgagaataaaa

SEQ ID NO: 22870 - DNA, 15 bp, Homo sapiens
tgttatgagaataaa

SEQ ID NO: 22871 - DNA, 15 bp, Homo sapiens
ttgttatgagaataa

SEQ ID NO: 22872 - DNA, 15 bp, Homo sapiens
gttgttatgagaata

SEQ ID NO: 22873 - DNA, 15 bp, Homo sapiens
ggttgttatgagaat

SEQ ID NO: 22874 - DNA, 15 bp, Homo sapiens
aggttgttatgagaa

SEQ ID NO: 22875 - DNA, 15 bp, Homo sapiens
aaggttgttatgaga

SEQ ID NO: 22876 - DNA, 15 bp, Homo sapiens
caaggttgttatgag

SEQ ID NO: 22877 - DNA, 15 bp, Homo sapiens
tcaaggttgttatga

SEQ ID NO: 22878 - DNA, 15 bp, Homo sapiens
ttcaaggttgttatg

SEQ ID NO: 22879 - DNA, 15 bp, Homo sapiens
attcaaggttgttat

SEQ ID NO: 22880 - DNA, 15 bp, Homo sapiens
tattcaaggttgtta

SEQ ID NO: 22881 - DNA, 15 bp, Homo sapiens
ctattcaaggttgtt

SEQ ID NO: 22882 - DNA, 15 bp, Homo sapiens
tctattcaaggttgt

SEQ ID NO: 22883 - DNA, 15 bp, Homo sapiens
ttctattcaaggttg

SEQ ID NO: 22884 - DNA, 15 bp, Homo sapiens
gttctattcaaggtt

SEQ ID NO: 22885 - DNA, 15 bp, Homo sapiens
agttctattcaaggt

SEQ ID NO: 22886 - DNA, 15 bp, Homo sapiens
gagttctattcaagg

SEQ ID NO: 22887 - DNA, 15 bp, Homo sapiens
tgagttctattcaag

SEQ ID NO: 22888 - DNA, 15 bp, Homo sapiens
ctgagttctattcaa

SEQ ID NO: 22889 - DNA, 15 bp, Homo sapiens
tctgagttctattca

SEQ ID NO: 22890 - DNA, 15 bp, Homo sapiens
atctgagttctattc

SEQ ID NO: 22891 - DNA, 15 bp, Homo sapiens
gatctgagttctatt

SEQ ID NO: 22892 - DNA, 15 bp, Homo sapiens
tgatctgagttctat

SEQ ID NO: 22893 - DNA, 15 bp, Homo sapiens
atgatctgagttcta

SEQ ID NO: 22894 - DNA, 15 bp, Homo sapiens
gatgatctgagttct

SEQ ID NO: 22895 - DNA, 15 bp, Homo sapiens
agatgatctgagttc

SEQ ID NO: 22896 - DNA, 15 bp, Homo sapiens
cagatgatctgagtt

SEQ ID NO: 22897 - DNA, 15 bp, Homo sapiens
acagatgatctgagt

SEQ ID NO: 22898 - DNA, 15 bp, Homo sapiens
gacagatgatctgag

SEQ ID NO: 22899 - DNA, 15 bp, Homo sapiens
tgacagatgatctga

SEQ ID NO: 22900 - DNA, 15 bp, Homo sapiens
ttgacagatgatctg

SEQ ID NO: 22901 - DNA, 15 bp, Homo sapiens
attgacagatgatct

SEQ ID NO: 22902 - DNA, 15 bp, Homo sapiens
gattgacagatgatc

SEQ ID NO: 22903 - DNA, 15 bp, Homo sapiens
tgattgacagatgat

SEQ ID NO: 22904 - DNA, 15 bp, Homo sapiens
atgattgacagatga

SEQ ID NO: 22905 - DNA, 15 bp, Homo sapiens
catgattgacagatg

SEQ ID NO: 22906 - DNA, 15 bp, Homo sapiens
acatgattgacagat

SEQ ID NO: 22907 - DNA, 15 bp, Homo sapiens
tacatgattgacaga

SEQ ID NO: 22908 - DNA, 15 bp, Homo sapiens
atacatgattgacag

SEQ ID NO: 22909 - DNA, 15 bp, Homo sapiens
aatacatgattgaca

SEQ ID NO: 22910 - DNA, 15 bp, Homo sapiens
aaatacatgattgac

SEQ ID NO: 22911 - DNA, 15 bp, Homo sapiens
aaaatacatgattga

SEQ ID NO: 22912 - DNA, 15 bp, Homo sapiens
caaaatacatgattg

SEQ ID NO: 22913 - DNA, 15 bp, Homo sapiens
tcaaaatacatgatt

SEQ ID NO: 22914 - DNA, 15 bp, Homo sapiens
atcaaaatacatgat

SEQ ID NO: 22915 - DNA, 15 bp, Homo sapiens
tatcaaaatacatga

SEQ ID NO: 22916 - DNA, 15 bp, Homo sapiens
ttatcaaaatacatg

SEQ ID NO: 22917 - DNA, 15 bp, Homo sapiens
gttatcaaaatacat

SEQ ID NO: 22918 - DNA, 15 bp, Homo sapiens
tgttatcaaaataca

SEQ ID NO: 22919 - DNA, 15 bp, Homo sapiens
ctgttatcaaaatac

SEQ ID NO: 22920 - DNA, 15 bp, Homo sapiens
gctgttatcaaaata

SEQ ID NO: 22921 - DNA, 15 bp, Homo sapiens
ggctgttatcaaaat

SEQ ID NO: 22922 - DNA, 15 bp, Homo sapiens
aggctgttatcaaaa

SEQ ID NO: 22923 - DNA, 15 bp, Homo sapiens
aaggctgttatcaaa

SEQ ID NO: 22924 - DNA, 15 bp, Homo sapiens
aaaggctgttatcaa

SEQ ID NO: 22925 - DNA, 15 bp, Homo sapiens
taaaggctgttatca

SEQ ID NO: 22926 - DNA, 15 bp, Homo sapiens
gtaaaggctgttatc

SEQ ID NO: 22927 - DNA, 15 bp, Homo sapiens
tgtaaaggctgttat

SEQ ID NO: 22928 - DNA, 15 bp, Homo sapiens
ctgtaaaggctgtta

SEQ ID NO: 22929 - DNA, 15 bp, Homo sapiens
actgtaaaggctgtt

SEQ ID NO: 22930 - DNA, 15 bp, Homo sapiens
cactgtaaaggctgt

SEQ ID NO: 22931 - DNA, 15 bp, Homo sapiens
tcactgtaaaggctg

SEQ ID NO: 22932 - DNA, 15 bp, Homo sapiens
ctcactgtaaaggct

SEQ ID NO: 22933 - DNA, 15 bp, Homo sapiens
gctcactgtaaaggc

SEQ ID NO: 22934 - DNA, 15 bp, Homo sapiens
tgctcactgtaaagg

SEQ ID NO: 22935 - DNA, 15 bp, Homo sapiens
atgctcactgtaaag

SEQ ID NO: 22936 - DNA, 15 bp, Homo sapiens
tatgctcactgtaaa

SEQ ID NO: 22937 - DNA, 15 bp, Homo sapiens
ctatgctcactgtaa

SEQ ID NO: 22938 - DNA, 15 bp, Homo sapiens
tctatgctcactgta

SEQ ID NO: 22939 - DNA, 15 bp, Homo sapiens
ttctatgctcactgt

SEQ ID NO: 22940 - DNA, 15 bp, Homo sapiens
tttctatgctcactg

SEQ ID NO: 22941 - DNA, 15 bp, Homo sapiens
ttttctatgctcact

SEQ ID NO: 22942 - DNA, 15 bp, Homo sapiens
attttctatgctcac

SEQ ID NO: 22943 - DNA, 15 bp, Homo sapiens
tattttctatgctca

SEQ ID NO: 22944 - DNA, 15 bp, Homo sapiens
gtattttctatgctc

SEQ ID NO: 22945 - DNA, 15 bp, Homo sapiens
tgtattttctatgct

SEQ ID NO: 22946 - DNA, 15 bp, Homo sapiens
ctgtattttctatgc

SEQ ID NO: 22947 - DNA, 15 bp, Homo sapiens
actgtattttctatg

SEQ ID NO: 22948 - DNA, 15 bp, Homo sapiens
tactgtattttctat

SEQ ID NO: 22949 - DNA, 15 bp, Homo sapiens
ctactgtattttcta

SEQ ID NO: 22950 - DNA, 15 bp, Homo sapiens
actactgtattttct

SEQ ID NO: 22951 - DNA, 15 bp, Homo sapiens
cactactgtattttc

SEQ ID NO: 22952 - DNA, 15 bp, Homo sapiens
ccactactgtatttt

SEQ ID NO: 22953 - DNA, 15 bp, Homo sapiens
gccactactgtattt

SEQ ID NO: 22954 - DNA, 15 bp, Homo sapiens
agccactactgtatt

SEQ ID NO: 22955 - DNA, 15 bp, Homo sapiens
tagccactactgtat

SEQ ID NO: 22956 - DNA, 15 bp, Homo sapiens
ttagccactactgta

SEQ ID NO: 22957 - DNA, 15 bp, Homo sapiens
gttagccactactgt

SEQ ID NO: 22958 - DNA, 15 bp, Homo sapiens
tgttagccactactg

SEQ ID NO: 22959 - DNA, 15 bp, Homo sapiens
ttgttagccactact

SEQ ID NO: 22960 - DNA, 15 bp, Homo sapiens
gttgttagccactac

SEQ ID NO: 22961 - DNA, 15 bp, Homo sapiens
tgttgttagccacta

SEQ ID NO: 22962 - DNA, 15 bp, Homo sapiens
gtgttgttagccact

SEQ ID NO: 22963 - DNA, 15 bp, Homo sapiens
tgtgttgttagccac

SEQ ID NO: 22964 - DNA, 15 bp, Homo sapiens
ctgtgttgttagcca

SEQ ID NO: 22965 - DNA, 15 bp, Homo sapiens
cctgtgttgttagcc

SEQ ID NO: 22966 - DNA, 15 bp, Homo sapiens
gcctgtgttgttagc

SEQ ID NO: 22967 - DNA, 15 bp, Homo sapiens
agcctgtgttgttag

SEQ ID NO: 22968 - DNA, 15 bp, Homo sapiens
gagcctgtgttgtta

SEQ ID NO: 22969 - DNA, 15 bp, Homo sapiens
ggagcctgtgttgtt

SEQ ID NO: 22970 - DNA, 15 bp, Homo sapiens
tggagcctgtgttgt

SEQ ID NO: 22971 - DNA, 15 bp, Homo sapiens
ctggagcctgtgttg

SEQ ID NO: 22972 - DNA, 15 bp, Homo sapiens
tctggagcctgtgtt

SEQ ID NO: 22973 - DNA, 15 bp, Homo sapiens
atctggagcctgtgt

SEQ ID NO: 22974 - DNA, 15 bp, Homo sapiens
catctggagcctgtg

SEQ ID NO: 22975 - DNA, 15 bp, Homo sapiens
acatctggagcctgt

SEQ ID NO: 22976 - DNA, 15 bp, Homo sapiens
gacatctggagcctg

SEQ ID NO: 22977 - DNA, 15 bp, Homo sapiens
tgacatctggagcct

SEQ ID NO: 22978 - DNA, 15 bp, Homo sapiens
ctgacatctggagcc

SEQ ID NO: 22979 - DNA, 15 bp, Homo sapiens
cctgacatctggagc

SEQ ID NO: 22980 - DNA, 15 bp, Homo sapiens
acctgacatctggag

SEQ ID NO: 22981 - DNA, 15 bp, Homo sapiens
aacctgacatctgga

SEQ ID NO: 22982 - DNA, 15 bp, Homo sapiens
taacctgacatctgg

SEQ ID NO: 22983 - DNA, 15 bp, Homo sapiens
ataacctgacatctg

SEQ ID NO: 22984 - DNA, 15 bp, Homo sapiens
gataacctgacatct

SEQ ID NO: 22985 - DNA, 15 bp, Homo sapiens
agataacctgacatc

SEQ ID NO: 22986 - DNA, 15 bp, Homo sapiens
cagataacctgacat

SEQ ID NO: 22987 - DNA, 15 bp, Homo sapiens
ccagataacctgaca

SEQ ID NO: 22988 - DNA, 15 bp, Homo sapiens
cccagataacctgac

SEQ ID NO: 22989 - DNA, 15 bp, Homo sapiens
acccagataacctga

SEQ ID NO: 22990 - DNA, 15 bp, Homo sapiens
tacccagataacctg

SEQ ID NO: 22991 - DNA, 15 bp, Homo sapiens
atacccagataacct

SEQ ID NO: 22992 - DNA, 15 bp, Homo sapiens
catacccagataacc

SEQ ID NO: 22993 - DNA, 15 bp, Homo sapiens
tcatacccagataac

SEQ ID NO: 22994 - DNA, 15 bp, Homo sapiens
ttcatacccagataa

SEQ ID NO: 22995 - DNA, 15 bp, Homo sapiens
attcatacccagata

SEQ ID NO: 22996 - DNA, 15 bp, Homo sapiens
aattcatacccagat

SEQ ID NO: 22997 - DNA, 15 bp, Homo sapiens
gaattcatacccaga

SEQ ID NO: 22998 - DNA, 15 bp, Homo sapiens
agaattcatacccag

SEQ ID NO: 22999 - DNA, 15 bp, Homo sapiens
cagaattcataccca

SEQ ID NO: 23000 - DNA, 15 bp, Homo sapiens
ccagaattcataccc

SEQ ID NO: 23001 - DNA, 15 bp, Homo sapiens
accagaattcatacc

SEQ ID NO: 23002 - DNA, 15 bp, Homo sapiens
caccagaattcatac

SEQ ID NO: 23003 - DNA, 15 bp, Homo sapiens
acaccagaattcata

SEQ ID NO: 23004 - DNA, 15 bp, Homo sapiens
gacaccagaattcat

SEQ ID NO: 23005 - DNA, 15 bp, Homo sapiens
tgacaccagaattca

SEQ ID NO: 23006 - DNA, 15 bp, Homo sapiens
ctgacaccagaattc

SEQ ID NO: 23007 - DNA, 15 bp, Homo sapiens
gctgacaccagaatt

SEQ ID NO: 23008 - DNA, 15 bp, Homo sapiens
tgctgacaccagaat

SEQ ID NO: 23009 - DNA, 15 bp, Homo sapiens
atgctgacaccagaa

SEQ ID NO: 23010 - DNA, 15 bp, Homo sapiens
aatgctgacaccaga

SEQ ID NO: 23011 - DNA, 15 bp, Homo sapiens
gaatgctgacaccag

SEQ ID NO: 23012 - DNA, 15 bp, Homo sapiens
tgaatgctgacacca

SEQ ID NO: 23013 - DNA, 15 bp, Homo sapiens
gtgaatgctgacacc

SEQ ID NO: 23014 - DNA, 15 bp, Homo sapiens
agtgaatgctgacac

SEQ ID NO: 23015 - DNA, 15 bp, Homo sapiens
tagtgaatgctgaca

SEQ ID NO: 23016 - DNA, 15 bp, Homo sapiens
ttagtgaatgctgac

SEQ ID NO: 23017 - DNA, 15 bp, Homo sapiens
cttagtgaatgctga

SEQ ID NO: 23018 - DNA, 15 bp, Homo sapiens
gcttagtgaatgctg

SEQ ID NO: 23019 - DNA, 15 bp, Homo sapiens
tgcttagtgaatgct

SEQ ID NO: 23020 - DNA, 15 bp, Homo sapiens
atgcttagtgaatgc

SEQ ID NO: 23021 - DNA, 15 bp, Homo sapiens
tatgcttagtgaatg

SEQ ID NO: 23022 - DNA, 15 bp, Homo sapiens
atatgcttagtgaat

SEQ ID NO: 23023 - DNA, 15 bp, Homo sapiens
catatgcttagtgaa

SEQ ID NO: 23024 - DNA, 15 bp, Homo sapiens
tcatatgcttagtga

SEQ ID NO: 23025 - DNA, 15 bp, Homo sapiens
gtcatatgcttagtg

SEQ ID NO: 23026 - DNA, 15 bp, Homo sapiens
ggtcatatgcttagt

SEQ ID NO: 23027 - DNA, 15 bp, Homo sapiens
aggtcatatgcttag

SEQ ID NO: 23028 - DNA, 15 bp, Homo sapiens
aaggtcatatgctta

SEQ ID NO: 23029 - DNA, 15 bp, Homo sapiens
caaggtcatatgctt

SEQ ID NO: 23030 - DNA, 15 bp, Homo sapiens
ccaaggtcatatgct

SEQ ID NO: 23031 - DNA, 15 bp, Homo sapiens
tccaaggtcatatgc

SEQ ID NO: 23032 - DNA, 15 bp, Homo sapiens
gtccaaggtcatatg

SEQ ID NO: 23033 - DNA, 15 bp, Homo sapiens
tgtccaaggtcatat

SEQ ID NO: 23034 - DNA, 15 bp, Homo sapiens
ttgtccaaggtcata

SEQ ID NO: 23035 - DNA, 15 bp, Homo sapiens
cttgtccaaggtcat

SEQ ID NO: 23036 - DNA, 15 bp, Homo sapiens
cacttgtccaaggtc

SEQ ID NO: 23037 - DNA, 15 bp, Homo sapiens
tcacttgtccaaggt

SEQ ID NO: 23038 - DNA, 15 bp, Homo sapiens
atcacttgtccaagg

SEQ ID NO: 23039 - DNA, 15 bp, Homo sapiens
aatcacttgtccaag

SEQ ID NO: 23040 - DNA, 15 bp, Homo sapiens
aaatcacttgtccaa

SEQ ID NO: 23041 - DNA, 15 bp, Homo sapiens
taaatcacttgtcca

SEQ ID NO: 23042 - DNA, 15 bp, Homo sapiens
ttaaatcacttgtcc

SEQ ID NO: 23043 - DNA, 15 bp, Homo sapiens
cttaaatcacttgtc

SEQ ID NO: 23044 - DNA, 15 bp, Homo sapiens
acttaaatcacttgt

SEQ ID NO: 23045 - DNA, 15 bp, Homo sapiens
aacttaaatcacttg

SEQ ID NO: 23046 - DNA, 15 bp, Homo sapiens
aaacttaaatcactt

SEQ ID NO: 23047 - DNA, 15 bp, Homo sapiens
gaaacttaaatcact

SEQ ID NO: 23048 - DNA, 15 bp, Homo sapiens
agaaacttaaatcac

SEQ ID NO: 23049 - DNA, 15 bp, Homo sapiens
aagaaacttaaatca

SEQ ID NO: 23050 - DNA, 15 bp, Homo sapiens
aaagaaacttaaatc

SEQ ID NO: 23051 - DNA, 15 bp, Homo sapiens
aaaagaaacttaaat

SEQ ID NO: 23052 - DNA, 15 bp, Homo sapiens
taaaagaaacttaaa

SEQ ID NO: 23053 - DNA, 15 bp, Homo sapiens
ttaaaagaaacttaa

SEQ ID NO: 23054 - DNA, 15 bp, Homo sapiens
tttaaaagaaactta

SEQ ID NO: 23055 - DNA, 15 bp, Homo sapiens
gtttaaaagaaactt

SEQ ID NO: 23056 - DNA, 15 bp, Homo sapiens
tgtttaaaagaaact

SEQ ID NO: 23057 - DNA, 15 bp, Homo sapiens
ctgtttaaaagaaac

SEQ ID NO: 23058 - DNA, 15 bp, Homo sapiens
tctgtttaaaagaaa

SEQ ID NO: 23059 - DNA, 15 bp, Homo sapiens
ctctgtttaaaagaa

SEQ ID NO: 23060 - DNA, 15 bp, Homo sapiens
tctctgtttaaaaga

SEQ ID NO: 23061 - DNA, 15 bp, Homo sapiens
ttctctgtttaaaag

SEQ ID NO: 23062 - DNA, 15 bp, Homo sapiens
attctctgtttaaaa

SEQ ID NO: 23063 - DNA, 15 bp, Homo sapiens
tattctctgtttaaa

SEQ ID NO: 23064 - DNA, 15 bp, Homo sapiens
ctattctctgtttaa

SEQ ID NO: 23065 - DNA, 15 bp, Homo sapiens
actattctctgttta

SEQ ID NO: 23066 - DNA, 15 bp, Homo sapiens
tactattctctgttt

SEQ ID NO: 23067 - DNA, 15 bp, Homo sapiens
ttactattctctgtt

SEQ ID NO: 23068 - DNA, 15 bp, Homo sapiens
attactattctctgt

SEQ ID NO: 23069 - DNA, 15 bp, Homo sapiens
tattactattctctg

SEQ ID NO: 23070 - DNA, 15 bp, Homo sapiens
gtattactattctct

SEQ ID NO: 23071 - DNA, 15 bp, Homo sapiens
ggtattactattctc

SEQ ID NO: 23072 - DNA, 15 bp, Homo sapiens
aggtattactattct

SEQ ID NO: 23073 - DNA, 15 bp, Homo sapiens
taggtattactattc

SEQ ID NO: 23074 - DNA, 15 bp, Homo sapiens
gtaggtattactatt

SEQ ID NO: 23075 - DNA, 15 bp, Homo sapiens
ggtaggtattactat

SEQ ID NO: 23076 - DNA, 15 bp, Homo sapiens
aggtaggtattacta

SEQ ID NO: 23077 - DNA, 15 bp, Homo sapiens
gaggtaggtattact

SEQ ID NO: 23078 - DNA, 15 bp, Homo sapiens
tgaggtaggtattac

SEQ ID NO: 23079 - DNA, 15 bp, Homo sapiens
atgaggtaggtatta

SEQ ID NO: 23080 - DNA, 15 bp, Homo sapiens
tatgaggtaggtatt

SEQ ID NO: 23081 - DNA, 15 bp, Homo sapiens
atatgaggtaggtat

SEQ ID NO: 23082 - DNA, 15 bp, Homo sapiens
aatatgaggtaggta

SEQ ID NO: 23083 - DNA, 15 bp, Homo sapiens
taatatgaggtaggt

SEQ ID NO: 23084 - DNA, 15 bp, Homo sapiens
ataatatgaggtagg

SEQ ID NO: 23085 - DNA, 15 bp, Homo sapiens
aataatatgaggtag

SEQ ID NO: 23086 - DNA, 15 bp, Homo sapiens
taataatatgaggta

SEQ ID NO: 23087 - DNA, 15 bp, Homo sapiens
ataataatatgaggt

SEQ ID NO: 23088 - DNA, 15 bp, Homo sapiens
aataataatatgagg

SEQ ID NO: 23089 - DNA, 15 bp, Homo sapiens
caataataatatgag

SEQ ID NO: 23090 - DNA, 15 bp, Homo sapiens
acaataataatatga

SEQ ID NO: 23091 - DNA, 15 bp, Homo sapiens
gacaataataatatg

SEQ ID NO: 23092 - DNA, 15 bp, Homo sapiens
tgacaataataatat

SEQ ID NO: 23093 - DNA, 15 bp, Homo sapiens
ctgacaataataata

SEQ ID NO: 23094 - DNA, 15 bp, Homo sapiens
actgacaataataat

SEQ ID NO: 23095 - DNA, 15 bp, Homo sapiens
cactgacaataataa

SEQ ID NO: 23096 - DNA, 15 bp, Homo sapiens
acactgacaataata

SEQ ID NO: 23097 - DNA, 15 bp, Homo sapiens
tacactgacaataat

SEQ ID NO: 23098 - DNA, 15 bp, Homo sapiens
atacactgacaataa

SEQ ID NO: 23099 - DNA, 15 bp, Homo sapiens
gatacactgacaata

SEQ ID NO: 23100 - DNA, 15 bp, Homo sapiens
tgatacactgacaat

SEQ ID NO: 23101 - DNA, 15 bp, Homo sapiens
atgatacactgacaa

SEQ ID NO: 23102 - DNA, 15 bp, Homo sapiens
gatgatacactgaca

SEQ ID NO: 23103 - DNA, 15 bp, Homo sapiens
agatgatacactgac

SEQ ID NO: 23104 - DNA, 15 bp, Homo sapiens
aagatgatacactga

SEQ ID NO: 23105 - DNA, 15 bp, Homo sapiens
taagatgatacactg

SEQ ID NO: 23106 - DNA, 15 bp, Homo sapiens
gtaagatgatacact

SEQ ID NO: 23107 - DNA, 15 bp, Homo sapiens
tgtaagatgatacac

SEQ ID NO: 23108 - DNA, 15 bp, Homo sapiens
ttgtaagatgataca

SEQ ID NO: 23109 - DNA, 15 bp, Homo sapiens
attgtaagatgatac

SEQ ID NO: 23110 - DNA, 15 bp, Homo sapiens
gattgtaagatgata

SEQ ID NO: 23111 - DNA, 15 bp, Homo sapiens
tgattgtaagatgat

SEQ ID NO: 23112 - DNA, 15 bp, Homo sapiens
gtgattgtaagatga

SEQ ID NO: 23113 - DNA, 15 bp, Homo sapiens
tgtgattgtaagatg

SEQ ID NO: 23114 - DNA, 15 bp, Homo sapiens
ctgtgattgtaagat

SEQ ID NO: 23115 - DNA, 15 bp, Homo sapiens
actgtgattgtaaga

SEQ ID NO: 23116 - DNA, 15 bp, Homo sapiens
gactgtgattgtaag

SEQ ID NO: 23117 - DNA, 15 bp, Homo sapiens
agactgtgattgtaa

SEQ ID NO: 23118 - DNA, 15 bp, Homo sapiens
aagactgtgattgta

SEQ ID NO: 23119 - DNA, 15 bp, Homo sapiens
aaagactgtgattgt

SEQ ID NO: 23120 - DNA, 15 bp, Homo sapiens
gaaagactgtgattg

SEQ ID NO: 23121 - DNA, 15 bp, Homo sapiens
agaaagactgtgatt

SEQ ID NO: 23122 - DNA, 15 bp, Homo sapiens
gagaaagactgtgat

SEQ ID NO: 23123 - DNA, 15 bp, Homo sapiens
agagaaagactgtga

SEQ ID NO: 23124 - DNA, 15 bp, Homo sapiens
aagagaaagactgtg

SEQ ID NO: 23125 - DNA, 15 bp, Homo sapiens
taagagaaagactgt

SEQ ID NO: 23126 - DNA, 15 bp, Homo sapiens
ctaagagaaagactg

SEQ ID NO: 23127 - DNA, 15 bp, Homo sapiens
cctaagagaaagact

SEQ ID NO: 23128 - DNA, 15 bp, Homo sapiens
ccctaagagaaagac

SEQ ID NO: 23129 - DNA, 15 bp, Homo sapiens
gccctaagagaaaga

SEQ ID NO: 23130 - DNA, 15 bp, Homo sapiens
agccctaagagaaag

SEQ ID NO: 23131 - DNA, 15 bp, Homo sapiens
cagccctaagagaaa

SEQ ID NO: 23132 - DNA, 15 bp, Homo sapiens
ccagccctaagagaa

SEQ ID NO: 23133 - DNA, 15 bp, Homo sapiens
cccagccctaagaga

SEQ ID NO: 23134 - DNA, 15 bp, Homo sapiens
gcccagccctaagag

SEQ ID NO: 23135 - DNA, 15 bp, Homo sapiens
agcccagccctaaga

SEQ ID NO: 23136 - DNA, 15 bp, Homo sapiens
gagcccagccctaag

SEQ ID NO: 23137 - DNA, 15 bp, Homo sapiens
tgagcccagccctaa

SEQ ID NO: 23138 - DNA, 15 bp, Homo sapiens
ctgagcccagcccta

SEQ ID NO: 23139 - DNA, 15 bp, Homo sapiens
actgagcccagccct

SEQ ID NO: 23140 - DNA, 15 bp, Homo sapiens
cactgagcccagccc

SEQ ID NO: 23141 - DNA, 15 bp, Homo sapiens
ccactgagcccagcc

SEQ ID NO: 23142 - DNA, 15 bp, Homo sapiens
cccactgagcccagc

SEQ ID NO: 23143 - DNA, 15 bp, Homo sapiens
acccactgagcccag

SEQ ID NO: 23144 - DNA, 15 bp, Homo sapiens
cacccactgagccca

SEQ ID NO: 23145 - DNA, 15 bp, Homo sapiens
ccacccactgagccc

SEQ ID NO: 23146 - DNA, 15 bp, Homo sapiens
tccacccactgagcc

SEQ ID NO: 23147 - DNA, 15 bp, Homo sapiens
atccacccactgagc

SEQ ID NO: 23148 - DNA, 15 bp, Homo sapiens
aatccacccactgag

SEQ ID NO: 23149 - DNA, 15 bp, Homo sapiens
caatccacccactga

SEQ ID NO: 23150 - DNA, 15 bp, Homo sapiens
tcaatccacccactg

SEQ ID NO: 23151 - DNA, 15 bp, Homo sapiens
gtcaatccacccact

SEQ ID NO: 23152 - DNA, 15 bp, Homo sapiens
tgtcaatccacccac

SEQ ID NO: 23153 - DNA, 15 bp, Homo sapiens
gtgtcaatccaccca

SEQ ID NO: 23154 - DNA, 15 bp, Homo sapiens
agtgtcaatccaccc

SEQ ID NO: 23155 - DNA, 15 bp, Homo sapiens
cagtgtcaatccacc

SEQ ID NO: 23156 - DNA, 15 bp, Homo sapiens
gcagtgtcaatccac

SEQ ID NO: 23157 - DNA, 15 bp, Homo sapiens
tgcagtgtcaatcca

SEQ ID NO: 23158 - DNA, 15 bp, Homo sapiens
ctgcagtgtcaatcc

SEQ ID NO: 23159 - DNA, 15 bp, Homo sapiens
tctgcagtgtcaatc

SEQ ID NO: 23160 - DNA, 15 bp, Homo sapiens
ttctgcagtgtcaat

SEQ ID NO: 23161 - DNA, 15 bp, Homo sapiens
tttctgcagtgtcaa

SEQ ID NO: 23162 - DNA, 15 bp, Homo sapiens
atttctgcagtgtca

SEQ ID NO: 23163 - DNA, 15 bp, Homo sapiens
catttctgcagtgtc

SEQ ID NO: 23164 - DNA, 15 bp, Homo sapiens
ccatttctgcagtgt

SEQ ID NO: 23165 - DNA, 15 bp, Homo sapiens
gccatttctgcagtg

SEQ ID NO: 23166 - DNA, 15 bp, Homo sapiens
ggccatttctgcagt

SEQ ID NO: 23167 - DNA, 15 bp, Homo sapiens
tggccatttctgcag

SEQ ID NO: 23168 - DNA, 15 bp, Homo sapiens
ctggccatttctgca

SEQ ID NO: 23169 - DNA, 15 bp, Homo sapiens
tctggccatttctgc

SEQ ID NO: 23170 - DNA, 15 bp, Homo sapiens
atctggccatttctg

SEQ ID NO: 23171 - DNA, 15 bp, Homo sapiens
gatctggccatttct

SEQ ID NO: 23172 - DNA, 15 bp, Homo sapiens
agatctggccatttc

SEQ ID NO: 23173 - DNA, 15 bp, Homo sapiens
tagatctggccattt

SEQ ID NO: 23174 - DNA, 15 bp, Homo sapiens
ttagatctggccatt

SEQ ID NO: 23175 - DNA, 15 bp, Homo sapiens
tttagatctggccat

SEQ ID NO: 23176 - DNA, 15 bp, Homo sapiens
ctttagatctggcca

SEQ ID NO: 23177 - DNA, 15 bp, Homo sapiens
cctttagatctggcc

SEQ ID NO: 23178 - DNA, 15 bp, Homo sapiens
tcctttagatctggc

SEQ ID NO: 23179 - DNA, 15 bp, Homo sapiens
atcctttagatctgg

SEQ ID NO: 23180 - DNA, 15 bp, Homo sapiens
gatcctttagatctg

SEQ ID NO: 23181 - DNA, 15 bp, Homo sapiens
tgatcctttagatct

SEQ ID NO: 23182 - DNA, 15 bp, Homo sapiens
ttgatcctttagatc

SEQ ID NO: 23183 - DNA, 15 bp, Homo sapiens
gttgatcctttagat

SEQ ID NO: 23184 - DNA, 15 bp, Homo sapiens
tgttgatcctttaga

SEQ ID NO: 23185 - DNA, 15 bp, Homo sapiens
atgttgatcctttag

SEQ ID NO: 23186 - DNA, 15 bp, Homo sapiens
aatgttgatccttta

SEQ ID NO: 23187 - DNA, 15 bp, Homo sapiens
aaatgttgatccttt

SEQ ID NO: 23188 - DNA, 15 bp, Homo sapiens
taaatgttgatcctt

SEQ ID NO: 23189 - DNA, 15 bp, Homo sapiens
gtaaatgttgatcct

SEQ ID NO: 23190 - DNA, 15 bp, Homo sapiens
cgtaaatgttgatcc

SEQ ID NO: 23191 - DNA, 15 bp, Homo sapiens
acgtaaatgttgatc

SEQ ID NO: 23192 - DNA, 15 bp, Homo sapiens
tacgtaaatgttgat

SEQ ID NO: 23193 - DNA, 15 bp, Homo sapiens
ctacgtaaatgttga

SEQ ID NO: 23194 - DNA, 15 bp, Homo sapiens
gctacgtaaatgttg

SEQ ID NO: 23195 - DNA, 15 bp, Homo sapiens
agctacgtaaatgtt

SEQ ID NO: 23196 - DNA, 15 bp, Homo sapiens
cagctacgtaaatgt

SEQ ID NO: 23197 - DNA, 15 bp, Homo sapiens
ccagctacgtaaatg

SEQ ID NO: 23198 - DNA, 15 bp, Homo sapiens
cccagctacgtaaat

SEQ ID NO: 23199 - DNA, 15 bp, Homo sapiens
tcccagctacgtaaa

SEQ ID NO: 23200 - DNA, 15 bp, Homo sapiens
ttcccagctacgtaa

SEQ ID NO: 23201 - DNA, 15 bp, Homo sapiens
tttcccagctacgta

SEQ ID NO: 23202 - DNA, 15 bp, Homo sapiens
atttcccagctacgt

SEQ ID NO: 23203 - DNA, 15 bp, Homo sapiens
catttcccagctacg

SEQ ID NO: 23204 - DNA, 15 bp, Homo sapiens
acatttcccagctac

SEQ ID NO: 23205 - DNA, 15 bp, Homo sapiens
tacatttcccagcta

SEQ ID NO: 23206 - DNA, 15 bp, Homo sapiens
ctacatttcccagct

SEQ ID NO: 23207 - DNA, 15 bp, Homo sapiens
gctacatttcccagc

SEQ ID NO: 23208 - DNA, 15 bp, Homo sapiens
agctacatttcccag

SEQ ID NO: 23209 - DNA, 15 bp, Homo sapiens
cagctacatttccca

SEQ ID NO: 23210 - DNA, 15 bp, Homo sapiens
ccagctacatttccc

SEQ ID NO: 23211 - DNA, 15 bp, Homo sapiens
cccagctacatttcc

SEQ ID NO: 23212 - DNA, 15 bp, Homo sapiens
tcccagctacatttc

SEQ ID NO: 23213 - DNA, 15 bp, Homo sapiens
gtcccagctacattt

SEQ ID NO: 23214 - DNA, 15 bp, Homo sapiens
agtcccagctacatt

SEQ ID NO: 23215 - DNA, 15 bp, Homo sapiens
aagtcccagctacat

SEQ ID NO: 23216 - DNA, 15 bp, Homo sapiens
gaagtcccagctaca

SEQ ID NO: 23217 - DNA, 15 bp, Homo sapiens
tgaagtcccagctac

SEQ ID NO: 23218 - DNA, 15 bp, Homo sapiens
ctgaagtcccagcta

SEQ ID NO: 23219 - DNA, 15 bp, Homo sapiens
actgaagtcccagct

SEQ ID NO: 23220 - DNA, 15 bp, Homo sapiens
aactgaagtcccagc

SEQ ID NO: 23221 - DNA, 15 bp, Homo sapiens
aaactgaagtcccag

SEQ ID NO: 23222 - DNA, 15 bp, Homo sapiens
gaaactgaagtccca

SEQ ID NO: 23223 - DNA, 15 bp, Homo sapiens
tgaaactgaagtccc

SEQ ID NO: 23224 - DNA, 15 bp, Homo sapiens
gtgaaactgaagtcc

SEQ ID NO: 23225 - DNA, 15 bp, Homo sapiens
agtgaaactgaagtc

SEQ ID NO: 23226 - DNA, 15 bp, Homo sapiens
cagtgaaactgaagt

SEQ ID NO: 23227 - DNA, 15 bp, Homo sapiens
gcagtgaaactgaag

SEQ ID NO: 23228 - DNA, 15 bp, Homo sapiens
ggcagtgaaactgaa

SEQ ID NO: 23229 - DNA, 15 bp, Homo sapiens
gggcagtgaaactga

SEQ ID NO: 23230 - DNA, 15 bp, Homo sapiens
agggcagtgaaactg

SEQ ID NO: 23231 - DNA, 15 bp, Homo sapiens
tagggcagtgaaact

SEQ ID NO: 23232 - DNA, 15 bp, Homo sapiens
ctagggcagtgaaac

SEQ ID NO: 23233 - DNA, 15 bp, Homo sapiens
actagggcagtgaaa

SEQ ID NO: 23234 - DNA, 15 bp, Homo sapiens
cactagggcagtgaa

SEQ ID NO: 23235 - DNA, 15 bp, Homo sapiens
tcactagggcagtga

SEQ ID NO: 23236 - DNA, 15 bp, Homo sapiens
atcactagggcagtg

SEQ ID NO: 23237 - DNA, 15 bp, Homo sapiens
aatcactagggcagt

SEQ ID NO: 23238 - DNA, 15 bp, Homo sapiens
aaatcactagggcag

SEQ ID NO: 23239 - DNA, 15 bp, Homo sapiens
aaaatcactagggca

SEQ ID NO: 23240 - DNA, 15 bp, Homo sapiens
aaaaatcactagggc

SEQ ID NO: 23241 - DNA, 15 bp, Homo sapiens
gaaaaatcactaggg

SEQ ID NO: 23242 - DNA, 15 bp, Homo sapiens
ggaaaaatcactagg

SEQ ID NO: 23243 - DNA, 15 bp, Homo sapiens
aggaaaaatcactag

SEQ ID NO: 23244 - DNA, 15 bp, Homo sapiens
taggaaaaatcacta

SEQ ID NO: 23245 - DNA, 15 bp, Homo sapiens
gtaggaaaaatcact

SEQ ID NO: 23246 - DNA, 15 bp, Homo sapiens
ggtaggaaaaatcac

SEQ ID NO: 23247 - DNA, 15 bp, Homo sapiens
tggtaggaaaaatca

SEQ ID NO: 23248 - DNA, 15 bp, Homo sapiens
gtggtaggaaaaatc

SEQ ID NO: 23249 - DNA, 15 bp, Homo sapiens
agtggtaggaaaaat

SEQ ID NO: 23250 - DNA, 15 bp, Homo sapiens
tagtggtaggaaaaa

SEQ ID NO: 23251 - DNA, 15 bp, Homo sapiens
ttagtggtaggaaaa

SEQ ID NO: 23252 - DNA, 15 bp, Homo sapiens
cttagtggtaggaaa

SEQ ID NO: 23253 - DNA, 15 bp, Homo sapiens
gcttagtggtaggaa

SEQ ID NO: 23254 - DNA, 15 bp, Homo sapiens
tgcttagtggtagga

SEQ ID NO: 23255 - DNA, 15 bp, Homo sapiens
ctgcttagtggtagg

SEQ ID NO: 23256 - DNA, 15 bp, Homo sapiens
gctgcttagtggtag

SEQ ID NO: 23257 - DNA, 15 bp, Homo sapiens
agctgcttagtggta

SEQ ID NO: 23258 - DNA, 15 bp, Homo sapiens
gagctgcttagtggt

SEQ ID NO: 23259 - DNA, 15 bp, Homo sapiens
tgagctgcttagtgg

SEQ ID NO: 23260 - DNA, 15 bp, Homo sapiens
ctgagctgcttagtg

SEQ ID NO: 23261 - DNA, 15 bp, Homo sapiens
actgagctgcttagt

SEQ ID NO: 23262 - DNA, 15 bp, Homo sapiens
gactgagctgcttag

SEQ ID NO: 23263 - DNA, 15 bp, Homo sapiens
ggactgagctgctta

SEQ ID NO: 23264 - DNA, 15 bp, Homo sapiens
tggactgagctgctt

SEQ ID NO: 23265 - DNA, 15 bp, Homo sapiens
atggactgagctgct

SEQ ID NO: 23266 - DNA, 15 bp, Homo sapiens
tatggactgagctgc

SEQ ID NO: 23267 - DNA, 15 bp, Homo sapiens
gtatggactgagctg

SEQ ID NO: 23268 - DNA, 15 bp, Homo sapiens
ggtatggactgagct

SEQ ID NO: 23269 - DNA, 15 bp, Homo sapiens
gggtatggactgagc

SEQ ID NO: 23270 - DNA, 15 bp, Homo sapiens
ggggtatggactgag

SEQ ID NO: 23271 - DNA, 15 bp, Homo sapiens
aggggtatggactga

SEQ ID NO: 23272 - DNA, 15 bp, Homo sapiens
taggggtatggactg

SEQ ID NO: 23273 - DNA, 15 bp, Homo sapiens
gtaggggtatggact

SEQ ID NO: 23274 - DNA, 15 bp, Homo sapiens
cgtaggggtatggac

SEQ ID NO: 23275 - DNA, 15 bp, Homo sapiens
tcgtaggggtatgga

SEQ ID NO: 23276 - DNA, 15 bp, Homo sapiens
ctcgtaggggtatgg

SEQ ID NO: 23277 - DNA, 15 bp, Homo sapiens
tctcgtaggggtatg

SEQ ID NO: 23278 - DNA, 15 bp, Homo sapiens
gtctcgtaggggtat

SEQ ID NO: 23279 - DNA, 15 bp, Homo sapiens
ggtctcgtaggggta

SEQ ID NO: 23280 - DNA, 15 bp, Homo sapiens
gggtctcgtaggggt

SEQ ID NO: 23281 - DNA, 15 bp, Homo sapiens
tgggtctcgtagggg

SEQ ID NO: 23282 - DNA, 15 bp, Homo sapiens
gtgggtctcgtaggg

SEQ ID NO: 23283 - DNA, 15 bp, Homo sapiens
tgtgggtctcgtagg

SEQ ID NO: 23284 - DNA, 15 bp, Homo sapiens
ttgtgggtctcgtag

SEQ ID NO: 23285 - DNA, 15 bp, Homo sapiens
cttgtgggtctcgta

SEQ ID NO: 23286 - DNA, 15 bp, Homo sapiens
gcttgtgggtctcgt

SEQ ID NO: 23287 - DNA, 15 bp, Homo sapiens
agcttgtgggtctcg

SEQ ID NO: 23288 - DNA, 15 bp, Homo sapiens
aagcttgtgggtctc

SEQ ID NO: 23289 - DNA, 15 bp, Homo sapiens
taagcttgtgggtct

SEQ ID NO: 23290 - DNA, 15 bp, Homo sapiens
ataagcttgtgggtc

SEQ ID NO: 23291 - DNA, 15 bp, Homo sapiens
cataagcttgtgggt

SEQ ID NO: 23292 - DNA, 15 bp, Homo sapiens
tcataagcttgtggg

SEQ ID NO: 23293 - DNA, 15 bp, Homo sapiens
ctcataagcttgtgg

SEQ ID NO: 23294 - DNA, 15 bp, Homo sapiens
tctcataagcttgtg

SEQ ID NO: 23295 - DNA, 15 bp, Homo sapiens
atctcataagcttgt

SEQ ID NO: 23296 - DNA, 15 bp, Homo sapiens
tatctcataagcttg

SEQ ID NO: 23297 - DNA, 15 bp, Homo sapiens
gtatctcataagctt

SEQ ID NO: 23298 - DNA, 15 bp, Homo sapiens
agtatctcataagct

SEQ ID NO: 23299 - DNA, 15 bp, Homo sapiens
cagtatctcataagc

SEQ ID NO: 23300 - DNA, 15 bp, Homo sapiens
acagtatctcataag

SEQ ID NO: 23301 - DNA, 15 bp, Homo sapiens
aacagtatctcataa

SEQ ID NO: 23302 - DNA, 15 bp, Homo sapiens
gaacagtatctcata

SEQ ID NO: 23303 - DNA, 15 bp, Homo sapiens
agaacagtatctcat

SEQ ID NO: 23304 - DNA, 15 bp, Homo sapiens
gaagaacagtatctc

SEQ ID NO: 23305 - DNA, 15 bp, Homo sapiens
ggaagaacagtatct

SEQ ID NO: 23306 - DNA, 15 bp, Homo sapiens
tggaagaacagtatc

SEQ ID NO: 23307 - DNA, 15 bp, Homo sapiens
ctggaagaacagtat

SEQ ID NO: 23308 - DNA, 15 bp, Homo sapiens
cctggaagaacagta

SEQ ID NO: 23309 - DNA, 15 bp, Homo sapiens
tcctggaagaacagt

SEQ ID NO: 23310 - DNA, 15 bp, Homo sapiens
ttcctggaagaacag

SEQ ID NO: 23311 - DNA, 15 bp, Homo sapiens
tttcctggaagaaca

SEQ ID NO: 23312 - DNA, 15 bp, Homo sapiens
ctttcctggaagaac

SEQ ID NO: 23313 - DNA, 15 bp, Homo sapiens
gctttcctggaagaa

SEQ ID NO: 23314 - DNA, 15 bp, Homo sapiens
tgctttcctggaaga

SEQ ID NO: 23315 - DNA, 15 bp, Homo sapiens
ctgctttcctggaag

SEQ ID NO: 23316 - DNA, 15 bp, Homo sapiens
actgctttcctggaa

SEQ ID NO: 23317 - DNA, 15 bp, Homo sapiens
cactgctttcctgga

SEQ ID NO: 23318 - DNA, 15 bp, Homo sapiens
ccactgctttcctgg

SEQ ID NO: 23319 - DNA, 15 bp, Homo sapiens
cccactgctttcctg

SEQ ID NO: 23320 - DNA, 15 bp, Homo sapiens
ccccactgctttcct

SEQ ID NO: 23321 - DNA, 15 bp, Homo sapiens
gccccactgctttcc

SEQ ID NO: 23322 - DNA, 15 bp, Homo sapiens
ggccccactgctttc

SEQ ID NO: 23323 - DNA, 15 bp, Homo sapiens
tggccccactgcttt

SEQ ID NO: 23324 - DNA, 15 bp, Homo sapiens
ctggccccactgctt

SEQ ID NO: 23325 - DNA, 15 bp, Homo sapiens
cctggccccactgct

SEQ ID NO: 23326 - DNA, 15 bp, Homo sapiens
ccctggccccactgc

SEQ ID NO: 23327 - DNA, 15 bp, Homo sapiens
gccctggccccactg

SEQ ID NO: 23328 - DNA, 15 bp, Homo sapiens
ggccctggccccact

SEQ ID NO: 23329 - DNA, 15 bp, Homo sapiens
tggccctggccccac

SEQ ID NO: 23330 - DNA, 15 bp, Homo sapiens
gtggccctggcccca

SEQ ID NO: 23331 - DNA, 15 bp, Homo sapiens
ggtggccctggcccc

SEQ ID NO: 23332 - DNA, 15 bp, Homo sapiens
aggtggccctggccc

SEQ ID NO: 23333 - DNA, 15 bp, Homo sapiens
aaggtggccctggcc

SEQ ID NO: 23334 - DNA, 15 bp, Homo sapiens
aaaggtggccctggc

SEQ ID NO: 23335 - DNA, 15 bp, Homo sapiens
aaaaggtggccctgg

SEQ ID NO: 23336 - DNA, 15 bp, Homo sapiens
taaaaggtggccctg

SEQ ID NO: 23337 - DNA, 15 bp, Homo sapiens
ttaaaaggtggccct

SEQ ID NO: 23338 - DNA, 15 bp, Homo sapiens
attaaaaggtggccc

SEQ ID NO: 23339 - DNA, 15 bp, Homo sapiens
aattaaaaggtggcc

SEQ ID NO: 23340 - DNA, 15 bp, Homo sapiens
caattaaaaggtggc

SEQ ID NO: 23341 - DNA, 15 bp, Homo sapiens
acaattaaaaggtgg

SEQ ID NO: 23342 - DNA, 15 bp, Homo sapiens
cacaattaaaaggtg

SEQ ID NO: 23343 - DNA, 15 bp, Homo sapiens
acacaattaaaaggt

SEQ ID NO: 23344 - DNA, 15 bp, Homo sapiens
aacacaattaaaagg

SEQ ID NO: 23345 - DNA, 15 bp, Homo sapiens
aaacacaattaaaag

SEQ ID NO: 23346 - DNA, 15 bp, Homo sapiens
gaaacacaattaaaa

SEQ ID NO: 23347 - DNA, 15 bp, Homo sapiens
agaaacacaattaaa

SEQ ID NO: 23348 - DNA, 15 bp, Homo sapiens
aagaaacacaattaa

SEQ ID NO: 23349 - DNA, 15 bp, Homo sapiens
caagaaacacaatta

SEQ ID NO: 23350 - DNA, 15 bp, Homo sapiens
ccaagaaacacaatt

SEQ ID NO: 23351 - DNA, 15 bp, Homo sapiens
gccaagaaacacaat

SEQ ID NO: 23352 - DNA, 15 bp, Homo sapiens
ggccaagaaacacaa

SEQ ID NO: 23353 - DNA, 15 bp, Homo sapiens
aggccaagaaacaca

SEQ ID NO: 23354 - DNA, 15 bp, Homo sapiens
caggccaagaaacac

SEQ ID NO: 23355 - DNA, 15 bp, Homo sapiens
ccaggccaagaaaca

SEQ ID NO: 23356 - DNA, 15 bp, Homo sapiens
accaggccaagaaac

SEQ ID NO: 23357 - DNA, 15 bp, Homo sapiens
gaccaggccaagaaa

SEQ ID NO: 23358 - DNA, 15 bp, Homo sapiens
ggaccaggccaagaa

SEQ ID NO: 23359 - DNA, 15 bp, Homo sapiens
gggaccaggccaaga

SEQ ID NO: 23360 - DNA, 15 bp, Homo sapiens
tgggaccaggccaag

SEQ ID NO: 23361 - DNA, 15 bp, Homo sapiens
atgggaccaggccaa

SEQ ID NO: 23362 - DNA, 15 bp, Homo sapiens
gatgggaccaggcca

SEQ ID NO: 23363 - DNA, 15 bp, Homo sapiens
agatgggaccaggcc

SEQ ID NO: 23364 - DNA, 15 bp, Homo sapiens
aagatgggaccaggc

SEQ ID NO: 23365 - DNA, 15 bp, Homo sapiens
aaagatgggaccagg

SEQ ID NO: 23366 - DNA, 15 bp, Homo sapiens
gaaagatgggaccag

SEQ ID NO: 23367 - DNA, 15 bp, Homo sapiens
agaaagatgggacca

SEQ ID NO: 23368 - DNA, 15 bp, Homo sapiens
gagaaagatgggacc

SEQ ID NO: 23369 - DNA, 15 bp, Homo sapiens
tgagaaagatgggac

SEQ ID NO: 23370 - DNA, 15 bp, Homo sapiens
gtgagaaagatggga

SEQ ID NO: 23371 - DNA, 15 bp, Homo sapiens
tgtgagaaagatggg

SEQ ID NO: 23372 - DNA, 15 bp, Homo sapiens
ttgtgagaaagatgg

SEQ ID NO: 23373 - DNA, 15 bp, Homo sapiens
attgtgagaaagatg

SEQ ID NO: 23374 - DNA, 15 bp, Homo sapiens
tattgtgagaaagat

SEQ ID NO: 23375 - DNA, 15 bp, Homo sapiens
atattgtgagaaaga

SEQ ID NO: 23376 - DNA, 15 bp, Homo sapiens
tatattgtgagaaag

SEQ ID NO: 23377 - DNA, 15 bp, Homo sapiens
atatattgtgagaaa

SEQ ID NO: 23378 - DNA, 15 bp, Homo sapiens
tatatattgtgagaa

SEQ ID NO: 23379 - DNA, 15 bp, Homo sapiens
ctatatattgtgaga

SEQ ID NO: 23380 - DNA, 15 bp, Homo sapiens
gctatatattgtgag

SEQ ID NO: 23381 - DNA, 15 bp, Homo sapiens
tgctatatattgtga

SEQ ID NO: 23382 - DNA, 15 bp, Homo sapiens
ttgctatatattgtg

SEQ ID NO: 23383 - DNA, 15 bp, Homo sapiens
gttgctatatattgt

SEQ ID NO: 23384 - DNA, 15 bp, Homo sapiens
tgttgctatatattg

SEQ ID NO: 23385 - DNA, 15 bp, Homo sapiens
ctgttgctatatatt

SEQ ID NO: 23386 - DNA, 15 bp, Homo sapiens
actgttgctatatat

SEQ ID NO: 23387 - DNA, 15 bp, Homo sapiens
aactgttgctatata

SEQ ID NO: 23388 - DNA, 15 bp, Homo sapiens
taactgttgctatat

SEQ ID NO: 23389 - DNA, 15 bp, Homo sapiens
ataactgttgctata

SEQ ID NO: 23390 - DNA, 15 bp, Homo sapiens
aataactgttgctat

SEQ ID NO: 23391 - DNA, 15 bp, Homo sapiens
aaataactgttgcta

SEQ ID NO: 23392 - DNA, 15 bp, Homo sapiens
taaataactgttgct

SEQ ID NO: 23393 - DNA, 15 bp, Homo sapiens
gtaaataactgttgc

SEQ ID NO: 23394 - DNA, 15 bp, Homo sapiens
agtaaataactgttg

SEQ ID NO: 23395 - DNA, 15 bp, Homo sapiens
aagtaaataactgtt

SEQ ID NO: 23396 - DNA, 15 bp, Homo sapiens
caagtaaataactgt

SEQ ID NO: 23397 - DNA, 15 bp, Homo sapiens
gcaagtaaataactg

SEQ ID NO: 23398 - DNA, 15 bp, Homo sapiens
agcaagtaaataact

SEQ ID NO: 23399 - DNA, 15 bp, Homo sapiens
cagcaagtaaataac

SEQ ID NO: 23400 - DNA, 15 bp, Homo sapiens
tcagcaagtaaataa

SEQ ID NO: 23401 - DNA, 15 bp, Homo sapiens
atcagcaagtaaata

SEQ ID NO: 23402 - DNA, 15 bp, Homo sapiens
aatcagcaagtaaat

SEQ ID NO: 23403 - DNA, 15 bp, Homo sapiens
aaatcagcaagtaaa

SEQ ID NO: 23404 - DNA, 15 bp, Homo sapiens
aaaatcagcaagtaa

SEQ ID NO: 23405 - DNA, 15 bp, Homo sapiens
gaaaatcagcaagta

SEQ ID NO: 23406 - DNA, 15 bp, Homo sapiens
agaaaatcagcaagt

SEQ ID NO: 23407 - DNA, 15 bp, Homo sapiens
tagaaaatcagcaag

SEQ ID NO: 23408 - DNA, 15 bp, Homo sapiens
ttagaaaatcagcaa

SEQ ID NO: 23409 - DNA, 15 bp, Homo sapiens
attagaaaatcagca

SEQ ID NO: 23410 - DNA, 15 bp, Homo sapiens
cattagaaaatcagc

SEQ ID NO: 23411 - DNA, 15 bp, Homo sapiens
gcattagaaaatcag

SEQ ID NO: 23412 - DNA, 15 bp, Homo sapiens
tgcattagaaaatca

SEQ ID NO: 23413 - DNA, 15 bp, Homo sapiens
gtgcattagaaaatc

SEQ ID NO: 23414 - DNA, 15 bp, Homo sapiens
tgtgcattagaaaat

SEQ ID NO: 23415 - DNA, 15 bp, Homo sapiens
atgtgcattagaaaa

SEQ ID NO: 23416 - DNA, 15 bp, Homo sapiens
gatgtgcattagaaa

SEQ ID NO: 23417 - DNA, 15 bp, Homo sapiens
tgatgtgcattagaa

SEQ ID NO: 23418 - DNA, 15 bp, Homo sapiens
gtgatgtgcattaga

SEQ ID NO: 23419 - DNA, 15 bp, Homo sapiens
tgtgatgtgcattag

SEQ ID NO: 23420 - DNA, 15 bp, Homo sapiens
gtgtgatgtgcatta

SEQ ID NO: 23421 - DNA, 15 bp, Homo sapiens
tgtgtgatgtgcatt

SEQ ID NO: 23422 - DNA, 15 bp, Homo sapiens
atgtgtgatgtgcat

SEQ ID NO: 23423 - DNA, 15 bp, Homo sapiens
tatgtgtgatgtgca

SEQ ID NO: 23424 - DNA, 15 bp, Homo sapiens
ctatgtgtgatgtgc

SEQ ID NO: 23425 - DNA, 15 bp, Homo sapiens
actatgtgtgatgtg

SEQ ID NO: 23426 - DNA, 15 bp, Homo sapiens
gactatgtgtgatgt

SEQ ID NO: 23427 - DNA, 15 bp, Homo sapiens
tgactatgtgtgatg

SEQ ID NO: 23428 - DNA, 15 bp, Homo sapiens
atgactatgtgtgat

SEQ ID NO: 23429 - DNA, 15 bp, Homo sapiens
tatgactatgtgtga

SEQ ID NO: 23430 - DNA, 15 bp, Homo sapiens
atatgactatgtgtg

SEQ ID NO: 23431 - DNA, 15 bp, Homo sapiens
aatatgactatgtgt

SEQ ID NO: 23432 - DNA, 15 bp, Homo sapiens
taatatgactatgtg

SEQ ID NO: 23433 - DNA, 15 bp, Homo sapiens
ttaatatgactatgt

SEQ ID NO: 23434 - DNA, 15 bp, Homo sapiens
tttaatatgactatg

SEQ ID NO: 23435 - DNA, 15 bp, Homo sapiens
gtttaatatgactat

SEQ ID NO: 23436 - DNA, 15 bp, Homo sapiens
tgtttaatatgacta

SEQ ID NO: 23437 - DNA, 15 bp, Homo sapiens
gtgtttaatatgact

SEQ ID NO: 23438 - DNA, 15 bp, Homo sapiens
tgtgtttaatatgac

SEQ ID NO: 23439 - DNA, 15 bp, Homo sapiens
gtgtgtttaatatga

SEQ ID NO: 23440 - DNA, 15 bp, Homo sapiens
tgtgtgtttaatatg

SEQ ID NO: 23441 - DNA, 15 bp, Homo sapiens
gtgtgtgtttaatat

SEQ ID NO: 23442 - DNA, 15 bp, Homo sapiens
tgtgtgtgtttaata

SEQ ID NO: 23443 - DNA, 15 bp, Homo sapiens
gtgtgtgtgtttaat

SEQ ID NO: 23444 - DNA, 15 bp, Homo sapiens
tgtgtgtgtgtttaa

SEQ ID NO: 23445 - DNA, 15 bp, Homo sapiens
gtgtgtgtgtgttta

SEQ ID NO: 23446 - DNA, 15 bp, Homo sapiens
tgtgtgtgtgtgttt

SEQ ID NO: 23447 - DNA, 15 bp, Homo sapiens
gtgtgtgtgtgtgtt

SEQ ID NO: 23448 - DNA, 15 bp, Homo sapiens
tgtgtgtgtgtgtgt

SEQ ID NO: 23449 - DNA, 15 bp, Homo sapiens
gtgtgtgtgtgtgtg

SEQ ID NO: 23450 - DNA, 15 bp, Homo sapiens
ggtgtgtgtgtgtgt

SEQ ID NO: 23451 - DNA, 15 bp, Homo sapiens
gggtgtgtgtgtgtg

SEQ ID NO: 23452 - DNA, 15 bp, Homo sapiens
ggggtgtgtgtgtgt

SEQ ID NO: 23453 - DNA, 15 bp, Homo sapiens
aggggtgtgtgtgtg

SEQ ID NO: 23454 - DNA, 15 bp, Homo sapiens
gaggggtgtgtgtgt

SEQ ID NO: 23455 - DNA, 15 bp, Homo sapiens
tgaggggtgtgtgtg

SEQ ID NO: 23456 - DNA, 15 bp, Homo sapiens
ttgaggggtgtgtgt

SEQ ID NO: 23457 - DNA, 15 bp, Homo sapiens
cttgaggggtgtgtg

SEQ ID NO: 23458 - DNA, 15 bp, Homo sapiens
tcttgaggggtgtgt

SEQ ID NO: 23459 - DNA, 15 bp, Homo sapiens
ttcttgaggggtgtg

SEQ ID NO: 23460 - DNA, 15 bp, Homo sapiens
tttcttgaggggtgt

SEQ ID NO: 23461 - DNA, 15 bp, Homo sapiens
gtttcttgaggggtg

SEQ ID NO: 23462 - DNA, 15 bp, Homo sapiens
tgtttcttgaggggt

SEQ ID NO: 23463 - DNA, 15 bp, Homo sapiens
atgtttcttgagggg

SEQ ID NO: 23464 - DNA, 15 bp, Homo sapiens
aatgtttcttgaggg

SEQ ID NO: 23465 - DNA, 15 bp, Homo sapiens
aaatgtttcttgagg

SEQ ID NO: 23466 - DNA, 15 bp, Homo sapiens
aaaatgtttcttgag

SEQ ID NO: 23467 - DNA, 15 bp, Homo sapiens
gaaaatgtttcttga

SEQ ID NO: 23468 - DNA, 15 bp, Homo sapiens
agaaaatgtttcttg

SEQ ID NO: 23469 - DNA, 15 bp, Homo sapiens
cagaaaatgtttctt

SEQ ID NO: 23470 - DNA, 15 bp, Homo sapiens
tcagaaaatgtttct

SEQ ID NO: 23471 - DNA, 15 bp, Homo sapiens
ctcagaaaatgtttc

SEQ ID NO: 23472 - DNA, 15 bp, Homo sapiens
tctcagaaaatgttt

SEQ ID NO: 23473 - DNA, 15 bp, Homo sapiens
gtctcagaaaatgtt

SEQ ID NO: 23474 - DNA, 15 bp, Homo sapiens
cgtctcagaaaatgt

SEQ ID NO: 23475 - DNA, 15 bp, Homo sapiens
acgtctcagaaaatg

SEQ ID NO: 23476 - DNA, 15 bp, Homo sapiens
cacgtctcagaaaat

SEQ ID NO: 23477 - DNA, 15 bp, Homo sapiens
tcacgtctcagaaaa

SEQ ID NO: 23478 - DNA, 15 bp, Homo sapiens
atcacgtctcagaaa

SEQ ID NO: 23479 - DNA, 15 bp, Homo sapiens
aatcacgtctcagaa

SEQ ID NO: 23480 - DNA, 15 bp, Homo sapiens
aaatcacgtctcaga

SEQ ID NO: 23481 - DNA, 15 bp, Homo sapiens
gaaatcacgtctcag

SEQ ID NO: 23482 - DNA, 15 bp, Homo sapiens
ggaaatcacgtctca

SEQ ID NO: 23483 - DNA, 15 bp, Homo sapiens
aggaaatcacgtctc

SEQ ID NO: 23484 - DNA, 15 bp, Homo sapiens
caggaaatcacgtct

SEQ ID NO: 23485 - DNA, 15 bp, Homo sapiens
tcaggaaatcacgtc

SEQ ID NO: 23486 - DNA, 15 bp, Homo sapiens
atcaggaaatcacgt

SEQ ID NO: 23487 - DNA, 15 bp, Homo sapiens
aatcaggaaatcacg

SEQ ID NO: 23488 - DNA, 15 bp, Homo sapiens
aaatcaggaaatcac

SEQ ID NO: 23489 - DNA, 15 bp, Homo sapiens
gaaatcaggaaatca

SEQ ID NO: 23490 - DNA, 15 bp, Homo sapiens
tgaaatcaggaaatc

SEQ ID NO: 23491 - DNA, 15 bp, Homo sapiens
atgaaatcaggaaat

SEQ ID NO: 23492 - DNA, 15 bp, Homo sapiens
gatgaaatcaggaaa

SEQ ID NO: 23493 - DNA, 15 bp, Homo sapiens
tgatgaaatcaggaa

SEQ ID NO: 23494 - DNA, 15 bp, Homo sapiens
ttgatgaaatcagga

SEQ ID NO: 23495 - DNA, 15 bp, Homo sapiens
tttgatgaaatcagg

SEQ ID NO: 23496 - DNA, 15 bp, Homo sapiens
ttttgatgaaatcag

SEQ ID NO: 23497 - DNA, 15 bp, Homo sapiens
tttttgatgaaatca

SEQ ID NO: 23498 - DNA, 15 bp, Homo sapiens
ttttttgatgaaatc

SEQ ID NO: 23499 - DNA, 15 bp, Homo sapiens
cttttttgatgaaat

SEQ ID NO: 23500 - DNA, 15 bp, Homo sapiens
tcttttttgatgaaa

SEQ ID NO: 23501 - DNA, 15 bp, Homo sapiens
ttcttttttgatgaa

SEQ ID NO: 23502 - DNA, 15 bp, Homo sapiens
tttcttttttgatga

SEQ ID NO: 23503 - DNA, 15 bp, Homo sapiens
ttttcttttttgatg

SEQ ID NO: 23504 - DNA, 15 bp, Homo sapiens
cttttcttttttgat

SEQ ID NO: 23505 - DNA, 15 bp, Homo sapiens
tcttttcttttttga

SEQ ID NO: 23506 - DNA, 15 bp, Homo sapiens
ctcttttcttttttg

SEQ ID NO: 23507 - DNA, 15 bp, Homo sapiens
gctcttttctttttt

SEQ ID NO: 23508 - DNA, 15 bp, Homo sapiens
cgctcttttcttttt

SEQ ID NO: 23509 - DNA, 15 bp, Homo sapiens
ccgctcttttctttt

SEQ ID NO: 23510 - DNA, 15 bp, Homo sapiens
cccgctcttttcttt

SEQ ID NO: 23511 - DNA, 15 bp, Homo sapiens
gcccgctcttttctt

SEQ ID NO: 23512 - DNA, 15 bp, Homo sapiens
ggcccgctcttttct

SEQ ID NO: 23513 - DNA, 15 bp, Homo sapiens
tggcccgctcttttc

SEQ ID NO: 23514 - DNA, 15 bp, Homo sapiens
ctggcccgctctttt

SEQ ID NO: 23515 - DNA, 15 bp, Homo sapiens
cctggcccgctcttt

SEQ ID NO: 23516 - DNA, 15 bp, Homo sapiens
gcctggcccgctctt

SEQ ID NO: 23517 - DNA, 15 bp, Homo sapiens
tgcctggcccgctct

SEQ ID NO: 23518 - DNA, 15 bp, Homo sapiens
gtgcctggcccgctc

SEQ ID NO: 23519 - DNA, 15 bp, Homo sapiens
tgtgcctggcccgct

SEQ ID NO: 23520 - DNA, 15 bp, Homo sapiens
ctgtgcctggcccgc

SEQ ID NO: 23521 - DNA, 15 bp, Homo sapiens
actgtgcctggcccg

SEQ ID NO: 23522 - DNA, 15 bp, Homo sapiens
cactgtgcctggccc

SEQ ID NO: 23523 - DNA, 15 bp, Homo sapiens
ccactgtgcctggcc

SEQ ID NO: 23524 - DNA, 15 bp, Homo sapiens
cccactgtgcctggc

SEQ ID NO: 23525 - DNA, 15 bp, Homo sapiens
tcccactgtgcctgg

SEQ ID NO: 23526 - DNA, 15 bp, Homo sapiens
ttcccactgtgcctg

SEQ ID NO: 23527 - DNA, 15 bp, Homo sapiens
cttcccactgtgcct

SEQ ID NO: 23528 - DNA, 15 bp, Homo sapiens
acttcccactgtgcc

SEQ ID NO: 23529 - DNA, 15 bp, Homo sapiens
gacttcccactgtgc

SEQ ID NO: 23530 - DNA, 15 bp, Homo sapiens
tgacttcccactgtg

SEQ ID NO: 23531 - DNA, 15 bp, Homo sapiens
ttgacttcccactgt

SEQ ID NO: 23532 - DNA, 15 bp, Homo sapiens
cttgacttcccactg

SEQ ID NO: 23533 - DNA, 15 bp, Homo sapiens
ccttgacttcccact

SEQ ID NO: 23534 - DNA, 15 bp, Homo sapiens
accttgacttcccac

SEQ ID NO: 23535 - DNA, 15 bp, Homo sapiens
caccttgacttccca

SEQ ID NO: 23536 - DNA, 15 bp, Homo sapiens
ccaccttgacttccc

SEQ ID NO: 23537 - DNA, 15 bp, Homo sapiens
cccaccttgacttcc

SEQ ID NO: 23538 - DNA, 15 bp, Homo sapiens
acccaccttgacttc

SEQ ID NO: 23539 - DNA, 15 bp, Homo sapiens
cacccaccttgactt

SEQ ID NO: 23540 - DNA, 15 bp, Homo sapiens
ccacccaccttgact

SEQ ID NO: 23541 - DNA, 15 bp, Homo sapiens
tccacccaccttgac

SEQ ID NO: 23542 - DNA, 15 bp, Homo sapiens
atccacccaccttga

SEQ ID NO: 23543 - DNA, 15 bp, Homo sapiens
gatccacccaccttg

SEQ ID NO: 23544 - DNA, 15 bp, Homo sapiens
tgatccacccacctt

SEQ ID NO: 23545 - DNA, 15 bp, Homo sapiens
gtgatccacccacct

SEQ ID NO: 23546 - DNA, 15 bp, Homo sapiens
agtgatccacccacc

SEQ ID NO: 23547 - DNA, 15 bp, Homo sapiens
aagtgatccacccac

SEQ ID NO: 23548 - DNA, 15 bp, Homo sapiens
caagtgatccaccca

SEQ ID NO: 23549 - DNA, 15 bp, Homo sapiens
tcaagtgatccaccc

SEQ ID NO: 23550 - DNA, 15 bp, Homo sapiens
ctcaagtgatccacc

SEQ ID NO: 23551 - DNA, 15 bp, Homo sapiens
cctcaagtgatccac

SEQ ID NO: 23552 - DNA, 15 bp, Homo sapiens
acctcaagtgatcca

SEQ ID NO: 23553 - DNA, 15 bp, Homo sapiens
ttcaaactcctgacc

SEQ ID NO: 23554 - DNA, 15 bp, Homo sapiens
tttcaaactcctgac

SEQ ID NO: 23555 - DNA, 15 bp, Homo sapiens
gtttcaaactcctga

SEQ ID NO: 23556 - DNA, 15 bp, Homo sapiens
ggtttcaaactcctg

SEQ ID NO: 23557 - DNA, 15 bp, Homo sapiens
tggtttcaaactcct

SEQ ID NO: 23558 - DNA, 15 bp, Homo sapiens
ctggtttcaaactcc

SEQ ID NO: 23559 - DNA, 15 bp, Homo sapiens
gtgttggccaggctg

SEQ ID NO: 23560 - DNA, 15 bp, Homo sapiens
cgtgttggccaggct

SEQ ID NO: 23561 - DNA, 15 bp, Homo sapiens
ccgtgttggccaggc

SEQ ID NO: 23562 - DNA, 15 bp, Homo sapiens
accgtgttggccagg

SEQ ID NO: 23563 - DNA, 15 bp, Homo sapiens
caccgtgttggccag

SEQ ID NO: 23564 - DNA, 15 bp, Homo sapiens
ccaccgtgttggcca

SEQ ID NO: 23565 - DNA, 15 bp, Homo sapiens
tccaccgtgttggcc

SEQ ID NO: 23566 - DNA, 15 bp, Homo sapiens
ttccaccgtgttggc

SEQ ID NO: 23567 - DNA, 15 bp, Homo sapiens
gttccaccgtgttgg

SEQ ID NO: 23568 - DNA, 15 bp, Homo sapiens
ggttccaccgtgttg

SEQ ID NO: 23569 - DNA, 15 bp, Homo sapiens
aggttccaccgtgtt

SEQ ID NO: 23570 - DNA, 15 bp, Homo sapiens
gaggttccaccgtgt

SEQ ID NO: 23571 - DNA, 15 bp, Homo sapiens
cgaggttccaccgtg

SEQ ID NO: 23572 - DNA, 15 bp, Homo sapiens
acgaggttccaccgt

SEQ ID NO: 23573 - DNA, 15 bp, Homo sapiens
gacgaggttccaccg

SEQ ID NO: 23574 - DNA, 15 bp, Homo sapiens
agacgaggttccacc

SEQ ID NO: 23575 - DNA, 15 bp, Homo sapiens
gagacgaggttccac

SEQ ID NO: 23576 - DNA, 15 bp, Homo sapiens
agagacgaggttcca

SEQ ID NO: 23577 - DNA, 15 bp, Homo sapiens
tagagacgaggttcc

SEQ ID NO: 23578 - DNA, 15 bp, Homo sapiens
gtagagacgaggttc

SEQ ID NO: 23579 - DNA, 15 bp, Homo sapiens
agtagagacgaggtt

SEQ ID NO: 23580 - DNA, 15 bp, Homo sapiens
tagtagagacgaggt

SEQ ID NO: 23581 - DNA, 15 bp, Homo sapiens
ttagtagagacgagg

SEQ ID NO: 23582 - DNA, 15 bp, Homo sapiens
tttagtagagacgag

SEQ ID NO: 23583 - DNA, 15 bp, Homo sapiens
ttttagtagagacga

SEQ ID NO: 23584 - DNA, 15 bp, Homo sapiens
caccacgcctggcta

SEQ ID NO: 23585 - DNA, 15 bp, Homo sapiens
ccaccacgcctggct

SEQ ID NO: 23586 - DNA, 15 bp, Homo sapiens
cgccaccacgcctgg

SEQ ID NO: 23587 - DNA, 15 bp, Homo sapiens
gcgccaccacgcctg

SEQ ID NO: 23588 - DNA, 15 bp, Homo sapiens
tgcgccaccacgcct

SEQ ID NO: 23589 - DNA, 15 bp, Homo sapiens
gtgcgccaccacgcc

SEQ ID NO: 23590 - DNA, 15 bp, Homo sapiens
tgtgcgccaccacgc

SEQ ID NO: 23591 - DNA, 15 bp, Homo sapiens
gtgtgcgccaccacg

SEQ ID NO: 23592 - DNA, 15 bp, Homo sapiens
ggtgtgcgccaccac

SEQ ID NO: 23593 - DNA, 15 bp, Homo sapiens
aggtgtgcgccacca

SEQ ID NO: 23594 - DNA, 15 bp, Homo sapiens
caggtgtgcgccacc

SEQ ID NO: 23595 - DNA, 15 bp, Homo sapiens
acaggtgtgcgccac

SEQ ID NO: 23596 - DNA, 15 bp, Homo sapiens
tacaggtgtgcgcca

SEQ ID NO: 23597 - DNA, 15 bp, Homo sapiens
ttacaggtgtgcgcc

SEQ ID NO: 23598 - DNA, 15 bp, Homo sapiens
attacaggtgtgcgc

SEQ ID NO: 23599 - DNA, 15 bp, Homo sapiens
gattacaggtgtgcg

SEQ ID NO: 23600 - DNA, 15 bp, Homo sapiens
ggattacaggtgtgc

SEQ ID NO: 23601 - DNA, 15 bp, Homo sapiens
ccccagtagctggga

SEQ ID NO: 23602 - DNA, 15 bp, Homo sapiens
tccccagtagctggg

SEQ ID NO: 23603 - DNA, 15 bp, Homo sapiens
ctccccagtagctgg

SEQ ID NO: 23604 - DNA, 15 bp, Homo sapiens
cctccccagtagctg

SEQ ID NO: 23605 - DNA, 15 bp, Homo sapiens
gcctccccagtagct

SEQ ID NO: 23606 - DNA, 15 bp, Homo sapiens
agcctccccagtagc

SEQ ID NO: 23607 - DNA, 15 bp, Homo sapiens
cagcctccccagtag

SEQ ID NO: 23608 - DNA, 15 bp, Homo sapiens
tcagcctccccagta

SEQ ID NO: 23609 - DNA, 15 bp, Homo sapiens
ctcagcctccccagt

SEQ ID NO: 23610 - DNA, 15 bp, Homo sapiens
cctcagcctccccag

SEQ ID NO: 23611 - DNA, 15 bp, Homo sapiens
gcctcagcctcccca

SEQ ID NO: 23612 - DNA, 15 bp, Homo sapiens
tgcctcagcctcccc

SEQ ID NO: 23613 - DNA, 15 bp, Homo sapiens
gaagcaattctcctg

SEQ ID NO: 23614 - DNA, 15 bp, Homo sapiens
tgaagcaattctcct

SEQ ID NO: 23615 - DNA, 15 bp, Homo sapiens
ttgaagcaattctcc

SEQ ID NO: 23616 - DNA, 15 bp, Homo sapiens
gttgaagcaattctc

SEQ ID NO: 23617 - DNA, 15 bp, Homo sapiens
ggttgaagcaattct

SEQ ID NO: 23618 - DNA, 15 bp, Homo sapiens
aggttgaagcaattc

SEQ ID NO: 23619 - DNA, 15 bp, Homo sapiens
caggttgaagcaatt

SEQ ID NO: 23620 - DNA, 15 bp, Homo sapiens
gcaggttgaagcaat

SEQ ID NO: 23621 - DNA, 15 bp, Homo sapiens
cgcaggttgaagcaa

SEQ ID NO: 23622 - DNA, 15 bp, Homo sapiens
tcgcaggttgaagca

SEQ ID NO: 23623 - DNA, 15 bp, Homo sapiens
ctcgcaggttgaagc

SEQ ID NO: 23624 - DNA, 15 bp, Homo sapiens
cctcgcaggttgaag

SEQ ID NO: 23625 - DNA, 15 bp, Homo sapiens
gcctcgcaggttgaa

SEQ ID NO: 23626 - DNA, 15 bp, Homo sapiens
agcctcgcaggttga

SEQ ID NO: 23627 - DNA, 15 bp, Homo sapiens
cagcctcgcaggttg

SEQ ID NO: 23628 - DNA, 15 bp, Homo sapiens
tcagcctcgcaggtt

SEQ ID NO: 23629 - DNA, 15 bp, Homo sapiens
ctcagcctcgcaggt

SEQ ID NO: 23630 - DNA, 15 bp, Homo sapiens
cctcagcctcgcagg

SEQ ID NO: 23631 - DNA, 15 bp, Homo sapiens
acctcagcctcgcag

SEQ ID NO: 23632 - DNA, 15 bp, Homo sapiens
aacctcagcctcgca

SEQ ID NO: 23633 - DNA, 15 bp, Homo sapiens
caacctcagcctcgc

SEQ ID NO: 23634 - DNA, 15 bp, Homo sapiens
gcaacctcagcctcg

SEQ ID NO: 23635 - DNA, 15 bp, Homo sapiens
tgcaacctcagcctc

SEQ ID NO: 23636 - DNA, 15 bp, Homo sapiens
ctgcaacctcagcct

SEQ ID NO: 23637 - DNA, 15 bp, Homo sapiens
actgcaacctcagcc

SEQ ID NO: 23638 - DNA, 15 bp, Homo sapiens
cactgcaacctcagc

SEQ ID NO: 23639 - DNA, 15 bp, Homo sapiens
tcactgcaacctcag

SEQ ID NO: 23640 - DNA, 15 bp, Homo sapiens
ctcactgcaacctca

SEQ ID NO: 23641 - DNA, 15 bp, Homo sapiens
aatctcggctcactg

SEQ ID NO: 23642 - DNA, 15 bp, Homo sapiens
caatctcggctcact

SEQ ID NO: 23643 - DNA, 15 bp, Homo sapiens
gcaatctcggctcac

SEQ ID NO: 23644 - DNA, 15 bp, Homo sapiens
cgcaatctcggctca

SEQ ID NO: 23645 - DNA, 15 bp, Homo sapiens
gcgcaatctcggctc

SEQ ID NO: 23646 - DNA, 15 bp, Homo sapiens
ggcgcaatctcggct

SEQ ID NO: 23647 - DNA, 15 bp, Homo sapiens
tggcgcaatctcggc

SEQ ID NO: 23648 - DNA, 15 bp, Homo sapiens
atggcgcaatctcgg

SEQ ID NO: 23649 - DNA, 15 bp, Homo sapiens
aatggcgcaatctcg

SEQ ID NO: 23650 - DNA, 15 bp, Homo sapiens
caatggcgcaatctc

SEQ ID NO: 23651 - DNA, 15 bp, Homo sapiens
gcaatggcgcaatct

SEQ ID NO: 23652 - DNA, 15 bp, Homo sapiens
tgcaatggcgcaatc

SEQ ID NO: 23653 - DNA, 15 bp, Homo sapiens
gtgcaatggcgcaat

SEQ ID NO: 23654 - DNA, 15 bp, Homo sapiens
agtgcaatggcgcaa

SEQ ID NO: 23655 - DNA, 15 bp, Homo sapiens
gagtgcaatggcgca

SEQ ID NO: 23656 - DNA, 15 bp, Homo sapiens
ggagtgcaatggcgc

SEQ ID NO: 23657 - DNA, 15 bp, Homo sapiens
tggagtgcaatggcg

SEQ ID NO: 23658 - DNA, 15 bp, Homo sapiens
ctggagtgcaatggc

SEQ ID NO: 23659 - DNA, 15 bp, Homo sapiens
agtctcactctgttg

SEQ ID NO: 23660 - DNA, 15 bp, Homo sapiens
gagtctcactctgtt

SEQ ID NO: 23661 - DNA, 15 bp, Homo sapiens
agagtctcactctgt

SEQ ID NO: 23662 - DNA, 15 bp, Homo sapiens
cagagtctcactctg

SEQ ID NO: 23663 - DNA, 15 bp, Homo sapiens
acagagtctcactct

SEQ ID NO: 23664 - DNA, 15 bp, Homo sapiens
gacagagtctcactc

SEQ ID NO: 23665 - DNA, 15 bp, Homo sapiens
agacagagtctcact

SEQ ID NO: 23666 - DNA, 15 bp, Homo sapiens
gagacagagtctcac

SEQ ID NO: 23667 - DNA, 15 bp, Homo sapiens
tgagacagagtctca

SEQ ID NO: 23668 - DNA, 15 bp, Homo sapiens
ttttttttttttgag

SEQ ID NO: 23669 - DNA, 15 bp, Homo sapiens
tttttttttttttga

SEQ ID NO: 23670 - DNA, 15 bp, Homo sapiens
ttttttttttttttg

SEQ ID NO: 23671 - DNA, 15 bp, Homo sapiens
atgcttttttttttt

SEQ ID NO: 23672 - DNA, 15 bp, Homo sapiens
tatgctttttttttt

SEQ ID NO: 23673 - DNA, 15 bp, Homo sapiens
ttatgcttttttttt

SEQ ID NO: 23674 - DNA, 15 bp, Homo sapiens
tttatgctttttttt

SEQ ID NO: 23675 - DNA, 15 bp, Homo sapiens
gtttatgcttttttt

SEQ ID NO: 23676 - DNA, 15 bp, Homo sapiens
agtttatgctttttt

SEQ ID NO: 23677 - DNA, 15 bp, Homo sapiens
cagtttatgcttttt

SEQ ID NO: 23678 - DNA, 15 bp, Homo sapiens
tcagtttatgctttt

SEQ ID NO: 23679 - DNA, 15 bp, Homo sapiens
ttcagtttatgcttt

SEQ ID NO: 23680 - DNA, 15 bp, Homo sapiens
tttcagtttatgctt

SEQ ID NO: 23681 - DNA, 15 bp, Homo sapiens
atttcagtttatgct

SEQ ID NO: 23682 - DNA, 15 bp, Homo sapiens
aatttcagtttatgc

SEQ ID NO: 23683 - DNA, 15 bp, Homo sapiens
aaatttcagtttatg

SEQ ID NO: 23684 - DNA, 15 bp, Homo sapiens
taaatttcagtttat

SEQ ID NO: 23685 - DNA, 15 bp, Homo sapiens
ataaatttcagttta

SEQ ID NO: 23686 - DNA, 15 bp, Homo sapiens
tataaatttcagttt

SEQ ID NO: 23687 - DNA, 15 bp, Homo sapiens
atataaatttcagtt

SEQ ID NO: 23688 - DNA, 15 bp, Homo sapiens
catataaatttcagt

SEQ ID NO: 23689 - DNA, 15 bp, Homo sapiens
gcatataaatttcag

SEQ ID NO: 23690 - DNA, 15 bp, Homo sapiens
tgcatataaatttca

SEQ ID NO: 23691 - DNA, 15 bp, Homo sapiens
ttgcatataaatttc

SEQ ID NO: 23692 - DNA, 15 bp, Homo sapiens
attgcatataaattt

SEQ ID NO: 23693 - DNA, 15 bp, Homo sapiens
aattgcatataaatt

SEQ ID NO: 23694 - DNA, 15 bp, Homo sapiens
aaattgcatataaat

SEQ ID NO: 23695 - DNA, 15 bp, Homo sapiens
taaattgcatataaa

SEQ ID NO: 23696 - DNA, 15 bp, Homo sapiens
ataaattgcatataa

SEQ ID NO: 23697 - DNA, 15 bp, Homo sapiens
tataaattgcatata

SEQ ID NO: 23698 - DNA, 15 bp, Homo sapiens
atataaattgcatat

SEQ ID NO: 23699 - DNA, 15 bp, Homo sapiens
catataaattgcata

SEQ ID NO: 23700 - DNA, 15 bp, Homo sapiens
gcatataaattgcat

SEQ ID NO: 23701 - DNA, 15 bp, Homo sapiens
ggcatataaattgca

SEQ ID NO: 23702 - DNA, 15 bp, Homo sapiens
aggcatataaattgc

SEQ ID NO: 23703 - DNA, 15 bp, Homo sapiens
caggcatataaattg

SEQ ID NO: 23704 - DNA, 15 bp, Homo sapiens
acaggcatataaatt

SEQ ID NO: 23705 - DNA, 15 bp, Homo sapiens
cacaggcatataaat

SEQ ID NO: 23706 - DNA, 15 bp, Homo sapiens
tcacaggcatataaa

SEQ ID NO: 23707 - DNA, 15 bp, Homo sapiens
ctcacaggcatataa

SEQ ID NO: 23708 - DNA, 15 bp, Homo sapiens
tctcacaggcatata

SEQ ID NO: 23709 - DNA, 15 bp, Homo sapiens
atctcacaggcatat

SEQ ID NO: 23710 - DNA, 15 bp, Homo sapiens
tatctcacaggcata

SEQ ID NO: 23711 - DNA, 15 bp, Homo sapiens
ttatctcacaggcat

SEQ ID NO: 23712 - DNA, 15 bp, Homo sapiens
attatctcacaggca

SEQ ID NO: 23713 - DNA, 15 bp, Homo sapiens
aattatctcacaggc

SEQ ID NO: 23714 - DNA, 15 bp, Homo sapiens
gaattatctcacagg

SEQ ID NO: 23715 - DNA, 15 bp, Homo sapiens
agaattatctcacag

SEQ ID NO: 23716 - DNA, 15 bp, Homo sapiens
cagaattatctcaca

SEQ ID NO: 23717 - DNA, 15 bp, Homo sapiens
acagaattatctcac

SEQ ID NO: 23718 - DNA, 15 bp, Homo sapiens
aacagaattatctca

SEQ ID NO: 23719 - DNA, 15 bp, Homo sapiens
aaacagaattatctc

SEQ ID NO: 23720 - DNA, 15 bp, Homo sapiens
aaaacagaattatct

SEQ ID NO: 23721 - DNA, 15 bp, Homo sapiens
gaaaacagaattatc

SEQ ID NO: 23722 - DNA, 15 bp, Homo sapiens
agaaaacagaattat

SEQ ID NO: 23723 - DNA, 15 bp, Homo sapiens
gagaaaacagaatta

SEQ ID NO: 23724 - DNA, 15 bp, Homo sapiens
agagaaaacagaatt

SEQ ID NO: 23725 - DNA, 15 bp, Homo sapiens
aagagaaaacagaat

SEQ ID NO: 23726 - DNA, 15 bp, Homo sapiens
aaagagaaaacagaa

SEQ ID NO: 23727 - DNA, 15 bp, Homo sapiens
aaaagagaaaacaga

SEQ ID NO: 23728 - DNA, 15 bp, Homo sapiens
caaaagagaaaacag

SEQ ID NO: 23729 - DNA, 15 bp, Homo sapiens
ccaaaagagaaaaca

SEQ ID NO: 23730 - DNA, 15 bp, Homo sapiens
tccaaaagagaaaac

SEQ ID NO: 23731 - DNA, 15 bp, Homo sapiens
ttccaaaagagaaaa

SEQ ID NO: 23732 - DNA, 15 bp, Homo sapiens
gttccaaaagagaaa

SEQ ID NO: 23733 - DNA, 15 bp, Homo sapiens
ggttccaaaagagaa

SEQ ID NO: 23734 - DNA, 15 bp, Homo sapiens
gggttccaaaagaga

SEQ ID NO: 23735 - DNA, 15 bp, Homo sapiens
ggggttccaaaagag

SEQ ID NO: 23736 - DNA, 15 bp, Homo sapiens
tggggttccaaaaga

SEQ ID NO: 23737 - DNA, 15 bp, Homo sapiens
ttggggttccaaaag

SEQ ID NO: 23738 - DNA, 15 bp, Homo sapiens
tttggggttccaaaa

SEQ ID NO: 23739 - DNA, 15 bp, Homo sapiens
ctttggggttccaaa

SEQ ID NO: 23740 - DNA, 15 bp, Homo sapiens
tctttggggttccaa

SEQ ID NO: 23741 - DNA, 15 bp, Homo sapiens
ctctttggggttcca

SEQ ID NO: 23742 - DNA, 15 bp, Homo sapiens
tctctttggggttcc

SEQ ID NO: 23743 - DNA, 15 bp, Homo sapiens
atctctttggggttc

SEQ ID NO: 23744 - DNA, 15 bp, Homo sapiens
aatctctttggggtt

SEQ ID NO: 23745 - DNA, 15 bp, Homo sapiens
aaatctctttggggt

SEQ ID NO: 23746 - DNA, 15 bp, Homo sapiens
aaaatctctttgggg

SEQ ID NO: 23747 - DNA, 15 bp, Homo sapiens
aaaaatctctttggg

SEQ ID NO: 23748 - DNA, 15 bp, Homo sapiens
aaaaaatctctttgg

SEQ ID NO: 23749 - DNA, 15 bp, Homo sapiens
aaaaaaatctctttg

SEQ ID NO: 23750 - DNA, 15 bp, Homo sapiens
caaaaaaatctcttt

SEQ ID NO: 23751 - DNA, 15 bp, Homo sapiens
tcaaaaaaatctctt

SEQ ID NO: 23752 - DNA, 15 bp, Homo sapiens
atcaaaaaaatctct

SEQ ID NO: 23753 - DNA, 15 bp, Homo sapiens
aatcaaaaaaatctc

SEQ ID NO: 23754 - DNA, 15 bp, Homo sapiens
caatcaaaaaaatct

SEQ ID NO: 23755 - DNA, 15 bp, Homo sapiens
tcaatcaaaaaaatc

SEQ ID NO: 23756 - DNA, 15 bp, Homo sapiens
atcaatcaaaaaaat

SEQ ID NO: 23757 - DNA, 15 bp, Homo sapiens
catcaatcaaaaaaa

SEQ ID NO: 23758 - DNA, 15 bp, Homo sapiens
tcatcaatcaaaaaa

SEQ ID NO: 23759 - DNA, 15 bp, Homo sapiens
ctcatcaatcaaaaa

SEQ ID NO: 23760 - DNA, 15 bp, Homo sapiens
gctcatcaatcaaaa

SEQ ID NO: 23761 - DNA, 15 bp, Homo sapiens
tgctcatcaatcaaa

SEQ ID NO: 23762 - DNA, 15 bp, Homo sapiens
ttgctcatcaatcaa

SEQ ID NO: 23763 - DNA, 15 bp, Homo sapiens
tttgctcatcaatca

SEQ ID NO: 23764 - DNA, 15 bp, Homo sapiens
atttgctcatcaatc

SEQ ID NO: 23765 - DNA, 15 bp, Homo sapiens
tatttgctcatcaat

SEQ ID NO: 23766 - DNA, 15 bp, Homo sapiens
gtatttgctcatcaa

SEQ ID NO: 23767 - DNA, 15 bp, Homo sapiens
tgtatttgctcatca

SEQ ID NO: 23768 - DNA, 15 bp, Homo sapiens
atgtatttgctcatc

SEQ ID NO: 23769 - DNA, 15 bp, Homo sapiens
aatgtatttgctcat

SEQ ID NO: 23770 - DNA, 15 bp, Homo sapiens
aaatgtatttgctca

SEQ ID NO: 23771 - DNA, 15 bp, Homo sapiens
aaaatgtatttgctc

SEQ ID NO: 23772 - DNA, 15 bp, Homo sapiens
taaaatgtatttgct

SEQ ID NO: 23773 - DNA, 15 bp, Homo sapiens
ctaaaatgtatttgc

SEQ ID NO: 23774 - DNA, 15 bp, Homo sapiens
tctaaaatgtatttg

SEQ ID NO: 23775 - DNA, 15 bp, Homo sapiens
atctaaaatgtattt

SEQ ID NO: 23776 - DNA, 15 bp, Homo sapiens
aatctaaaatgtatt

SEQ ID NO: 23777 - DNA, 15 bp, Homo sapiens
aaatctaaaatgtat

SEQ ID NO: 23778 - DNA, 15 bp, Homo sapiens
aaaatctaaaatgta

SEQ ID NO: 23779 - DNA, 15 bp, Homo sapiens
taaaatctaaaatgt

SEQ ID NO: 23780 - DNA, 15 bp, Homo sapiens
ataaaatctaaaatg

SEQ ID NO: 23781 - DNA, 15 bp, Homo sapiens
aataaaatctaaaat

SEQ ID NO: 23782 - DNA, 15 bp, Homo sapiens
aaataaaatctaaaa

SEQ ID NO: 23783 - DNA, 15 bp, Homo sapiens
taaataaaatctaaa

SEQ ID NO: 23784 - DNA, 15 bp, Homo sapiens
ttaaataaaatctaa

SEQ ID NO: 23785 - DNA, 15 bp, Homo sapiens
cttaaataaaatcta

SEQ ID NO: 23786 - DNA, 15 bp, Homo sapiens
gcttaaataaaatct

SEQ ID NO: 23787 - DNA, 15 bp, Homo sapiens
tgcttaaataaaatc

SEQ ID NO: 23788 - DNA, 15 bp, Homo sapiens
atgcttaaataaaat

SEQ ID NO: 23789 - DNA, 15 bp, Homo sapiens
aatgcttaaataaaa

SEQ ID NO: 23790 - DNA, 15 bp, Homo sapiens
taatgcttaaataaa

SEQ ID NO: 23791 - DNA, 15 bp, Homo sapiens
ataatgcttaaataa

SEQ ID NO: 23792 - DNA, 15 bp, Homo sapiens
cataatgcttaaata

SEQ ID NO: 23793 - DNA, 15 bp, Homo sapiens
gcataatgcttaaat

SEQ ID NO: 23794 - DNA, 15 bp, Homo sapiens
ggcataatgcttaaa

SEQ ID NO: 23795 - DNA, 15 bp, Homo sapiens
tggcataatgcttaa

SEQ ID NO: 23796 - DNA, 15 bp, Homo sapiens
ttggcataatgctta

SEQ ID NO: 23797 - DNA, 15 bp, Homo sapiens
cttggcataatgctt

SEQ ID NO: 23798 - DNA, 15 bp, Homo sapiens
gcttggcataatgct

SEQ ID NO: 23799 - DNA, 15 bp, Homo sapiens
tgcttggcataatgc

SEQ ID NO: 23800 - DNA, 15 bp, Homo sapiens
gtgcttggcataatg

SEQ ID NO: 23801 - DNA, 15 bp, Homo sapiens
ggtgcttggcataat

SEQ ID NO: 23802 - DNA, 15 bp, Homo sapiens
tggtgcttggcataa

SEQ ID NO: 23803 - DNA, 15 bp, Homo sapiens
gtggtgcttggcata

SEQ ID NO: 23804 - DNA, 15 bp, Homo sapiens
agtggtgcttggcat

SEQ ID NO: 23805 - DNA, 15 bp, Homo sapiens
cagtggtgcttggca

SEQ ID NO: 23806 - DNA, 15 bp, Homo sapiens
tcagtggtgcttggc

SEQ ID NO: 23807 - DNA, 15 bp, Homo sapiens
ttcagtggtgcttgg

SEQ ID NO: 23808 - DNA, 15 bp, Homo sapiens
cttcagtggtgcttg

SEQ ID NO: 23809 - DNA, 15 bp, Homo sapiens
acttcagtggtgctt

SEQ ID NO: 23810 - DNA, 15 bp, Homo sapiens
tacttcagtggtgct

SEQ ID NO: 23811 - DNA, 15 bp, Homo sapiens
atacttcagtggtgc

SEQ ID NO: 23812 - DNA, 15 bp, Homo sapiens
tatacttcagtggtg

SEQ ID NO: 23813 - DNA, 15 bp, Homo sapiens
ttatacttcagtggt

SEQ ID NO: 23814 - DNA, 15 bp, Homo sapiens
cttatacttcagtgg

SEQ ID NO: 23815 - DNA, 15 bp, Homo sapiens
acttatacttcagtg

SEQ ID NO: 23816 - DNA, 15 bp, Homo sapiens
aacttatacttcagt

SEQ ID NO: 23817 - DNA, 15 bp, Homo sapiens
aaacttatacttcag

SEQ ID NO: 23818 - DNA, 15 bp, Homo sapiens
gaaacttatacttca

SEQ ID NO: 23819 - DNA, 15 bp, Homo sapiens
tgaaacttatacttc

SEQ ID NO: 23820 - DNA, 15 bp, Homo sapiens
ttgaaacttatactt

SEQ ID NO: 23821 - DNA, 15 bp, Homo sapiens
cttgaaacttatact

SEQ ID NO: 23822 - DNA, 15 bp, Homo sapiens
ccttgaaacttatac

SEQ ID NO: 23823 - DNA, 15 bp, Homo sapiens
cccttgaaacttata

SEQ ID NO: 23824 - DNA, 15 bp, Homo sapiens
gcccttgaaacttat

SEQ ID NO: 23825 - DNA, 15 bp, Homo sapiens
tgcccttgaaactta

SEQ ID NO: 23826 - DNA, 15 bp, Homo sapiens
ttgcccttgaaactt

SEQ ID NO: 23827 - DNA, 15 bp, Homo sapiens
tttgcccttgaaact

SEQ ID NO: 23828 - DNA, 15 bp, Homo sapiens
gtttgcccttgaaac

SEQ ID NO: 23829 - DNA, 15 bp, Homo sapiens
agtttgcccttgaaa

SEQ ID NO: 23830 - DNA, 15 bp, Homo sapiens
gagtttgcccttgaa

SEQ ID NO: 23831 - DNA, 15 bp, Homo sapiens
tgagtttgcccttga

SEQ ID NO: 23832 - DNA, 15 bp, Homo sapiens
ctgagtttgcccttg

SEQ ID NO: 23833 - DNA, 15 bp, Homo sapiens
actgagtttgccctt

SEQ ID NO: 23834 - DNA, 15 bp, Homo sapiens
aactgagtttgccct

SEQ ID NO: 23835 - DNA, 15 bp, Homo sapiens
aaactgagtttgccc

SEQ ID NO: 23836 - DNA, 15 bp, Homo sapiens
aaaactgagtttgcc

SEQ ID NO: 23837 - DNA, 15 bp, Homo sapiens
aaaaactgagtttgc

SEQ ID NO: 23838 - DNA, 15 bp, Homo sapiens
aaaaaactgagtttg

SEQ ID NO: 23839 - DNA, 15 bp, Homo sapiens
gaaaaaactgagttt

SEQ ID NO: 23840 - DNA, 15 bp, Homo sapiens
tgaaaaaactgagtt

SEQ ID NO: 23841 - DNA, 15 bp, Homo sapiens
atgaaaaaactgagt

SEQ ID NO: 23842 - DNA, 15 bp, Homo sapiens
gatgaaaaaactgag

SEQ ID NO: 23843 - DNA, 15 bp, Homo sapiens
agatgaaaaaactga

SEQ ID NO: 23844 - DNA, 15 bp, Homo sapiens
tagatgaaaaaactg

SEQ ID NO: 23845 - DNA, 15 bp, Homo sapiens
gtagatgaaaaaact

SEQ ID NO: 23846 - DNA, 15 bp, Homo sapiens
agtagatgaaaaaac

SEQ ID NO: 23847 - DNA, 15 bp, Homo sapiens
tagtagatgaaaaaa

SEQ ID NO: 23848 - DNA, 15 bp, Homo sapiens
ctagtagatgaaaaa

SEQ ID NO: 23849 - DNA, 15 bp, Homo sapiens
tctagtagatgaaaa

SEQ ID NO: 23850 - DNA, 15 bp, Homo sapiens
gtctagtagatgaaa

SEQ ID NO: 23851 - DNA, 15 bp, Homo sapiens
cgtctagtagatgaa

SEQ ID NO: 23852 - DNA, 15 bp, Homo sapiens
tcgtctagtagatga

SEQ ID NO: 23853 - DNA, 15 bp, Homo sapiens
ttcgtctagtagatg

SEQ ID NO: 23854 - DNA, 15 bp, Homo sapiens
attcgtctagtagat

SEQ ID NO: 23855 - DNA, 15 bp, Homo sapiens
cattcgtctagtaga

SEQ ID NO: 23856 - DNA, 15 bp, Homo sapiens
tcattcgtctagtag

SEQ ID NO: 23857 - DNA, 15 bp, Homo sapiens
atcattcgtctagta

SEQ ID NO: 23858 - DNA, 15 bp, Homo sapiens
aatcattcgtctagt

SEQ ID NO: 23859 - DNA, 15 bp, Homo sapiens
aaatcattcgtctag

SEQ ID NO: 23860 - DNA, 15 bp, Homo sapiens
aaaatcattcgtcta

SEQ ID NO: 23861 - DNA, 15 bp, Homo sapiens
gaaaatcattcgtct

SEQ ID NO: 23862 - DNA, 15 bp, Homo sapiens
agaaaatcattcgtc

SEQ ID NO: 23863 - DNA, 15 bp, Homo sapiens
cagaaaatcattcgt

SEQ ID NO: 23864 - DNA, 15 bp, Homo sapiens
ccagaaaatcattcg

SEQ ID NO: 23865 - DNA, 15 bp, Homo sapiens
tccagaaaatcattc

SEQ ID NO: 23866 - DNA, 15 bp, Homo sapiens
ttccagaaaatcatt

SEQ ID NO: 23867 - DNA, 15 bp, Homo sapiens
attccagaaaatcat

SEQ ID NO: 23868 - DNA, 15 bp, Homo sapiens
cattccagaaaatca

SEQ ID NO: 23869 - DNA, 15 bp, Homo sapiens
tcattccagaaaatc

SEQ ID NO: 23870 - DNA, 15 bp, Homo sapiens
atcattccagaaaat

SEQ ID NO: 23871 - DNA, 15 bp, Homo sapiens
aatcattccagaaaa

SEQ ID NO: 23872 - DNA, 15 bp, Homo sapiens
taatcattccagaaa

SEQ ID NO: 23873 - DNA, 15 bp, Homo sapiens
gtaatcattccagaa

SEQ ID NO: 23874 - DNA, 15 bp, Homo sapiens
tgtaatcattccaga

SEQ ID NO: 23875 - DNA, 15 bp, Homo sapiens
ttgtaatcattccag

SEQ ID NO: 23876 - DNA, 15 bp, Homo sapiens
cttgtaatcattcca

SEQ ID NO: 23877 - DNA, 15 bp, Homo sapiens
gcttgtaatcattcc

SEQ ID NO: 23878 - DNA, 15 bp, Homo sapiens
tgcttgtaatcattc

SEQ ID NO: 23879 - DNA, 15 bp, Homo sapiens
ctgcttgtaatcatt

SEQ ID NO: 23880 - DNA, 15 bp, Homo sapiens
cctgcttgtaatcat

SEQ ID NO: 23881 - DNA, 15 bp, Homo sapiens
gcctgcttgtaatca

SEQ ID NO: 23882 - DNA, 15 bp, Homo sapiens
tgcctgcttgtaatc

SEQ ID NO: 23883 - DNA, 15 bp, Homo sapiens
ttgcctgcttgtaat

SEQ ID NO: 23884 - DNA, 15 bp, Homo sapiens
cttgcctgcttgtaa

SEQ ID NO: 23885 - DNA, 15 bp, Homo sapiens
tcttgcctgcttgta

SEQ ID NO: 23886 - DNA, 15 bp, Homo sapiens
atcttgcctgcttgt

SEQ ID NO: 23887 - DNA, 15 bp, Homo sapiens
catcttgcctgcttg

SEQ ID NO: 23888 - DNA, 15 bp, Homo sapiens
ccatcttgcctgctt

SEQ ID NO: 23889 - DNA, 15 bp, Homo sapiens
accatcttgcctgct

SEQ ID NO: 23890 - DNA, 15 bp, Homo sapiens
caccatcttgcctgc

SEQ ID NO: 23891 - DNA, 15 bp, Homo sapiens
acaccatcttgcctg

SEQ ID NO: 23892 - DNA, 15 bp, Homo sapiens
tacaccatcttgcct

SEQ ID NO: 23893 - DNA, 15 bp, Homo sapiens
ctacaccatcttgcc

SEQ ID NO: 23894 - DNA, 15 bp, Homo sapiens
actacaccatcttgc

SEQ ID NO: 23895 - DNA, 15 bp, Homo sapiens
cactacaccatcttg

SEQ ID NO: 23896 - DNA, 15 bp, Homo sapiens
ccactacaccatctt

SEQ ID NO: 23897 - DNA, 15 bp, Homo sapiens
tccactacaccatct

SEQ ID NO: 23898 - DNA, 15 bp, Homo sapiens
ttccactacaccatc

SEQ ID NO: 23899 - DNA, 15 bp, Homo sapiens
tttccactacaccat

SEQ ID NO: 23900 - DNA, 15 bp, Homo sapiens
atttccactacacca

SEQ ID NO: 23901 - DNA, 15 bp, Homo sapiens
tatttccactacacc

SEQ ID NO: 23902 - DNA, 15 bp, Homo sapiens
ctatttccactacac

SEQ ID NO: 23903 - DNA, 15 bp, Homo sapiens
gctatttccactaca

SEQ ID NO: 23904 - DNA, 15 bp, Homo sapiens
tgctatttccactac

SEQ ID NO: 23905 - DNA, 15 bp, Homo sapiens
ttgctatttccacta

SEQ ID NO: 23906 - DNA, 15 bp, Homo sapiens
tttgctatttccact

SEQ ID NO: 23907 - DNA, 15 bp, Homo sapiens
atttgctatttccac

SEQ ID NO: 23908 - DNA, 15 bp, Homo sapiens
catttgctatttcca

SEQ ID NO: 23909 - DNA, 15 bp, Homo sapiens
acatttgctatttcc

SEQ ID NO: 23910 - DNA, 15 bp, Homo sapiens
gacatttgctatttc

SEQ ID NO: 23911 - DNA, 15 bp, Homo sapiens
agacatttgctattt

SEQ ID NO: 23912 - DNA, 15 bp, Homo sapiens
aagacatttgctatt

SEQ ID NO: 23913 - DNA, 15 bp, Homo sapiens
gaagacatttgctat

SEQ ID NO: 23914 - DNA, 15 bp, Homo sapiens
cgaagacatttgcta

SEQ ID NO: 23915 - DNA, 15 bp, Homo sapiens
ccgaagacatttgct

SEQ ID NO: 23916 - DNA, 15 bp, Homo sapiens
gccgaagacatttgc

SEQ ID NO: 23917 - DNA, 15 bp, Homo sapiens
tgccgaagacatttg

SEQ ID NO: 23918 - DNA, 15 bp, Homo sapiens
atgccgaagacattt

SEQ ID NO: 23919 - DNA, 15 bp, Homo sapiens
gatgccgaagacatt

SEQ ID NO: 23920 - DNA, 15 bp, Homo sapiens
tgatgccgaagacat

SEQ ID NO: 23921 - DNA, 15 bp, Homo sapiens
ctgatgccgaagaca

SEQ ID NO: 23922 - DNA, 15 bp, Homo sapiens
tctgatgccgaagac

SEQ ID NO: 23923 - DNA, 15 bp, Homo sapiens
gtctgatgccgaaga

SEQ ID NO: 23924 - DNA, 15 bp, Homo sapiens
tgtctgatgccgaag

SEQ ID NO: 23925 - DNA, 15 bp, Homo sapiens
ttgtctgatgccgaa

SEQ ID NO: 23926 - DNA, 15 bp, Homo sapiens
cttgtctgatgccga

SEQ ID NO: 23927 - DNA, 15 bp, Homo sapiens
acttgtctgatgccg

SEQ ID NO: 23928 - DNA, 15 bp, Homo sapiens
aacttgtctgatgcc

SEQ ID NO: 23929 - DNA, 15 bp, Homo sapiens
caacttgtctgatgc

SEQ ID NO: 23930 - DNA, 15 bp, Homo sapiens
ccaacttgtctgatg

SEQ ID NO: 23931 - DNA, 15 bp, Homo sapiens
cccaacttgtctgat

SEQ ID NO: 23932 - DNA, 15 bp, Homo sapiens
ccccaacttgtctga

SEQ ID NO: 23933 - DNA, 15 bp, Homo sapiens
accccaacttgtctg

SEQ ID NO: 23934 - DNA, 15 bp, Homo sapiens
aaccccaacttgtct

SEQ ID NO: 23935 - DNA, 15 bp, Homo sapiens
aaaccccaacttgtc

SEQ ID NO: 23936 - DNA, 15 bp, Homo sapiens
caaaccccaacttgt

SEQ ID NO: 23937 - DNA, 15 bp, Homo sapiens
acaaaccccaacttg

SEQ ID NO: 23938 - DNA, 15 bp, Homo sapiens
aacaaaccccaactt

SEQ ID NO: 23939 - DNA, 15 bp, Homo sapiens
aaacaaaccccaact

SEQ ID NO: 23940 - DNA, 15 bp, Homo sapiens
caaacaaaccccaac

SEQ ID NO: 23941 - DNA, 15 bp, Homo sapiens
acaaacaaaccccaa

SEQ ID NO: 23942 - DNA, 15 bp, Homo sapiens
tacaaacaaacccca

SEQ ID NO: 23943 - DNA, 15 bp, Homo sapiens
atacaaacaaacccc

SEQ ID NO: 23944 - DNA, 15 bp, Homo sapiens
gatacaaacaaaccc

SEQ ID NO: 23945 - DNA, 15 bp, Homo sapiens
ggatacaaacaaacc

SEQ ID NO: 23946 - DNA, 15 bp, Homo sapiens
aggatacaaacaaac

SEQ ID NO: 23947 - DNA, 15 bp, Homo sapiens
caggatacaaacaaa

SEQ ID NO: 23948 - DNA, 15 bp, Homo sapiens
gcaggatacaaacaa

SEQ ID NO: 23949 - DNA, 15 bp, Homo sapiens
ggcaggatacaaaca

SEQ ID NO: 23950 - DNA, 15 bp, Homo sapiens
aggcaggatacaaac

SEQ ID NO: 23951 - DNA, 15 bp, Homo sapiens
gaggcaggatacaaa

SEQ ID NO: 23952 - DNA, 15 bp, Homo sapiens
agaggcaggatacaa

SEQ ID NO: 23953 - DNA, 15 bp, Homo sapiens
cagaggcaggataca

SEQ ID NO: 23954 - DNA, 15 bp, Homo sapiens
gcagaggcaggatac

SEQ ID NO: 23955 - DNA, 15 bp, Homo sapiens
ggcagaggcaggata

SEQ ID NO: 23956 - DNA, 15 bp, Homo sapiens
gggcagaggcaggat

SEQ ID NO: 23957 - DNA, 15 bp, Homo sapiens
agggcagaggcagga

SEQ ID NO: 23958 - DNA, 15 bp, Homo sapiens
aagggcagaggcagg

SEQ ID NO: 23959 - DNA, 15 bp, Homo sapiens
gaagggcagaggcag

SEQ ID NO: 23960 - DNA, 15 bp, Homo sapiens
tgaagggcagaggca

SEQ ID NO: 23961 - DNA, 15 bp, Homo sapiens
gtgaagggcagaggc

SEQ ID NO: 23962 - DNA, 15 bp, Homo sapiens
ggtgaagggcagagg

SEQ ID NO: 23963 - DNA, 15 bp, Homo sapiens
cggtgaagggcagag

SEQ ID NO: 23964 - DNA, 15 bp, Homo sapiens
tcggtgaagggcaga

SEQ ID NO: 23965 - DNA, 15 bp, Homo sapiens
ctcggtgaagggcag

SEQ ID NO: 23966 - DNA, 15 bp, Homo sapiens
cctcggtgaagggca

SEQ ID NO: 23967 - DNA, 15 bp, Homo sapiens
acctcggtgaagggc

SEQ ID NO: 23968 - DNA, 15 bp, Homo sapiens
aacctcggtgaaggg

SEQ ID NO: 23969 - DNA, 15 bp, Homo sapiens
caacctcggtgaagg

SEQ ID NO: 23970 - DNA, 15 bp, Homo sapiens
acaacctcggtgaag

SEQ ID NO: 23971 - DNA, 15 bp, Homo sapiens
cacaacctcggtgaa

SEQ ID NO: 23972 - DNA, 15 bp, Homo sapiens
tcacaacctcggtga

SEQ ID NO: 23973 - DNA, 15 bp, Homo sapiens
atcacaacctcggtg

SEQ ID NO: 23974 - DNA, 15 bp, Homo sapiens
gatcacaacctcggt

SEQ ID NO: 23975 - DNA, 15 bp, Homo sapiens
agatcacaacctcgg

SEQ ID NO: 23976 - DNA, 15 bp, Homo sapiens
aagatcacaacctcg

SEQ ID NO: 23977 - DNA, 15 bp, Homo sapiens
caagatcacaacctc

SEQ ID NO: 23978 - DNA, 15 bp, Homo sapiens
ccaagatcacaacct

SEQ ID NO: 23979 - DNA, 15 bp, Homo sapiens
cccaagatcacaacc

SEQ ID NO: 23980 - DNA, 15 bp, Homo sapiens
gcccaagatcacaac

SEQ ID NO: 23981 - DNA, 15 bp, Homo sapiens
tgcccaagatcacaa

SEQ ID NO: 23982 - DNA, 15 bp, Homo sapiens
ctgcccaagatcaca

SEQ ID NO: 23983 - DNA, 15 bp, Homo sapiens
tctgcccaagatcac

SEQ ID NO: 23984 - DNA, 15 bp, Homo sapiens
atctgcccaagatca

SEQ ID NO: 23985 - DNA, 15 bp, Homo sapiens
aatctgcccaagatc

SEQ ID NO: 23986 - DNA, 15 bp, Homo sapiens
caatctgcccaagat

SEQ ID NO: 23987 - DNA, 15 bp, Homo sapiens
acaatctgcccaaga

SEQ ID NO: 23988 - DNA, 15 bp, Homo sapiens
aacaatctgcccaag

SEQ ID NO: 23989 - DNA, 15 bp, Homo sapiens
caacaatctgcccaa

SEQ ID NO: 23990 - DNA, 15 bp, Homo sapiens
tcaacaatctgccca

SEQ ID NO: 23991 - DNA, 15 bp, Homo sapiens
ctcaacaatctgccc

SEQ ID NO: 23992 - DNA, 15 bp, Homo sapiens
actcaacaatctgcc

SEQ ID NO: 23993 - DNA, 15 bp, Homo sapiens
aactcaacaatctgc

SEQ ID NO: 23994 - DNA, 15 bp, Homo sapiens
aaactcaacaatctg

SEQ ID NO: 23995 - DNA, 15 bp, Homo sapiens
aaaactcaacaatct

SEQ ID NO: 23996 - DNA, 15 bp, Homo sapiens
taaaactcaacaatc

SEQ ID NO: 23997 - DNA, 15 bp, Homo sapiens
ttaaaactcaacaat

SEQ ID NO: 23998 - DNA, 15 bp, Homo sapiens
gttaaaactcaacaa

SEQ ID NO: 23999 - DNA, 15 bp, Homo sapiens
ggttaaaactcaaca

SEQ ID NO: 24000 - DNA, 15 bp, Homo sapiens
aggttaaaactcaac

SEQ ID NO: 24001 - DNA, 15 bp, Homo sapiens
taggttaaaactcaa

SEQ ID NO: 24002 - DNA, 15 bp, Homo sapiens
ctaggttaaaactca

SEQ ID NO: 24003 - DNA, 15 bp, Homo sapiens
tctaggttaaaactc

SEQ ID NO: 24004 - DNA, 15 bp, Homo sapiens
atctaggttaaaact

SEQ ID NO: 24005 - DNA, 15 bp, Homo sapiens
aatctaggttaaaac

SEQ ID NO: 24006 - DNA, 15 bp, Homo sapiens
gaatctaggttaaaa

SEQ ID NO: 24007 - DNA, 15 bp, Homo sapiens
ggaatctaggttaaa

SEQ ID NO: 24008 - DNA, 15 bp, Homo sapiens
aggaatctaggttaa

SEQ ID NO: 24009 - DNA, 15 bp, Homo sapiens
gaggaatctaggtta

SEQ ID NO: 24010 - DNA, 15 bp, Homo sapiens
agaggaatctaggtt

SEQ ID NO: 24011 - DNA, 15 bp, Homo sapiens
cagaggaatctaggt

SEQ ID NO: 24012 - DNA, 15 bp, Homo sapiens
tcagaggaatctagg

SEQ ID NO: 24013 - DNA, 15 bp, Homo sapiens
gtcagaggaatctag

SEQ ID NO: 24014 - DNA, 15 bp, Homo sapiens
agtcagaggaatcta

SEQ ID NO: 24015 - DNA, 15 bp, Homo sapiens
gagtcagaggaatct

SEQ ID NO: 24016 - DNA, 15 bp, Homo sapiens
ggagtcagaggaatc

SEQ ID NO: 24017 - DNA, 15 bp, Homo sapiens
tggagtcagaggaat

SEQ ID NO: 24018 - DNA, 15 bp, Homo sapiens
ctggagtcagaggaa

SEQ ID NO: 24019 - DNA, 15 bp, Homo sapiens
tctggagtcagagga

SEQ ID NO: 24020 - DNA, 15 bp, Homo sapiens
atctggagtcagagg

SEQ ID NO: 24021 - DNA, 15 bp, Homo sapiens
gatctggagtcagag

SEQ ID NO: 24022 - DNA, 15 bp, Homo sapiens
tgatctggagtcaga

SEQ ID NO: 24023 - DNA, 15 bp, Homo sapiens
atgatctggagtcag

SEQ ID NO: 24024 - DNA, 15 bp, Homo sapiens
tatgatctggagtca

SEQ ID NO: 24025 - DNA, 15 bp, Homo sapiens
ttatgatctggagtc

SEQ ID NO: 24026 - DNA, 15 bp, Homo sapiens
tttatgatctggagt

SEQ ID NO: 24027 - DNA, 15 bp, Homo sapiens
atttatgatctggag

SEQ ID NO: 24028 - DNA, 15 bp, Homo sapiens
aatttatgatctgga

SEQ ID NO: 24029 - DNA, 15 bp, Homo sapiens
aaatttatgatctgg

SEQ ID NO: 24030 - DNA, 15 bp, Homo sapiens
aaaatttatgatctg

SEQ ID NO: 24031 - DNA, 15 bp, Homo sapiens
gaaaatttatgatct

SEQ ID NO: 24032 - DNA, 15 bp, Homo sapiens
tgaaaatttatgatc

SEQ ID NO: 24033 - DNA, 15 bp, Homo sapiens
ctgaaaatttatgat

SEQ ID NO: 24034 - DNA, 15 bp, Homo sapiens
tctgaaaatttatga

SEQ ID NO: 24035 - DNA, 15 bp, Homo sapiens
ttctgaaaatttatg

SEQ ID NO: 24036 - DNA, 15 bp, Homo sapiens
tttctgaaaatttat

SEQ ID NO: 24037 - DNA, 15 bp, Homo sapiens
ttttctgaaaattta

SEQ ID NO: 24038 - DNA, 15 bp, Homo sapiens
cttttctgaaaattt

SEQ ID NO: 24039 - DNA, 15 bp, Homo sapiens
acttttctgaaaatt

SEQ ID NO: 24040 - DNA, 15 bp, Homo sapiens
aacttttctgaaaat

SEQ ID NO: 24041 - DNA, 15 bp, Homo sapiens
gaacttttctgaaaa

SEQ ID NO: 24042 - DNA, 15 bp, Homo sapiens
agaacttttctgaaa

SEQ ID NO: 24043 - DNA, 15 bp, Homo sapiens
cagaacttttctgaa

SEQ ID NO: 24044 - DNA, 15 bp, Homo sapiens
tcagaacttttctga

SEQ ID NO: 24045 - DNA, 15 bp, Homo sapiens
ttcagaacttttctg

SEQ ID NO: 24046 - DNA, 15 bp, Homo sapiens
tttcagaacttttct

SEQ ID NO: 24047 - DNA, 15 bp, Homo sapiens
atttcagaacttttc

SEQ ID NO: 24048 - DNA, 15 bp, Homo sapiens
aatttcagaactttt

SEQ ID NO: 24049 - DNA, 15 bp, Homo sapiens
gaatttcagaacttt

SEQ ID NO: 24050 - DNA, 15 bp, Homo sapiens
agaatttcagaactt

SEQ ID NO: 24051 - DNA, 15 bp, Homo sapiens
aagaatttcagaact

SEQ ID NO: 24052 - DNA, 15 bp, Homo sapiens
caagaatttcagaac

SEQ ID NO: 24053 - DNA, 15 bp, Homo sapiens
acaagaatttcagaa

SEQ ID NO: 24054 - DNA, 15 bp, Homo sapiens
tacaagaatttcaga

SEQ ID NO: 24055 - DNA, 15 bp, Homo sapiens
atacaagaatttcag

SEQ ID NO: 24056 - DNA, 15 bp, Homo sapiens
tatacaagaatttca

SEQ ID NO: 24057 - DNA, 15 bp, Homo sapiens
atatacaagaatttc

SEQ ID NO: 24058 - DNA, 15 bp, Homo sapiens
tatatacaagaattt

SEQ ID NO: 24059 - DNA, 15 bp, Homo sapiens
gtatatacaagaatt

SEQ ID NO: 24060 - DNA, 15 bp, Homo sapiens
agtatatacaagaat

SEQ ID NO: 24061 - DNA, 15 bp, Homo sapiens
cagtatatacaagaa

SEQ ID NO: 24062 - DNA, 15 bp, Homo sapiens
tcagtatatacaaga

SEQ ID NO: 24063 - DNA, 15 bp, Homo sapiens
atcagtatatacaag

SEQ ID NO: 24064 - DNA, 15 bp, Homo sapiens
catcagtatatacaa

SEQ ID NO: 24065 - DNA, 15 bp, Homo sapiens
ccatcagtatataca

SEQ ID NO: 24066 - DNA, 15 bp, Homo sapiens
accatcagtatatac

SEQ ID NO: 24067 - DNA, 15 bp, Homo sapiens
taccatcagtatata

SEQ ID NO: 24068 - DNA, 15 bp, Homo sapiens
ttaccatcagtatat

SEQ ID NO: 24069 - DNA, 15 bp, Homo sapiens
tttaccatcagtata

SEQ ID NO: 24070 - DNA, 15 bp, Homo sapiens
atttaccatcagtat

SEQ ID NO: 24071 - DNA, 15 bp, Homo sapiens
catttaccatcagta

SEQ ID NO: 24072 - DNA, 15 bp, Homo sapiens
tcatttaccatcagt

SEQ ID NO: 24073 - DNA, 15 bp, Homo sapiens
ctcatttaccatcag

SEQ ID NO: 24074 - DNA, 15 bp, Homo sapiens
tctcatttaccatca

SEQ ID NO: 24075 - DNA, 15 bp, Homo sapiens
gtctcatttaccatc

SEQ ID NO: 24076 - DNA, 15 bp, Homo sapiens
agtctcatttaccat

SEQ ID NO: 24077 - DNA, 15 bp, Homo sapiens
aagtctcatttacca

SEQ ID NO: 24078 - DNA, 15 bp, Homo sapiens
aaagtctcatttacc

SEQ ID NO: 24079 - DNA, 15 bp, Homo sapiens
aaaagtctcatttac

SEQ ID NO: 24080 - DNA, 15 bp, Homo sapiens
gaaaagtctcattta

SEQ ID NO: 24081 - DNA, 15 bp, Homo sapiens
ggaaaagtctcattt

SEQ ID NO: 24082 - DNA, 15 bp, Homo sapiens
aggaaaagtctcatt

SEQ ID NO: 24083 - DNA, 15 bp, Homo sapiens
aaggaaaagtctcat

SEQ ID NO: 24084 - DNA, 15 bp, Homo sapiens
taaggaaaagtctca

SEQ ID NO: 24085 - DNA, 15 bp, Homo sapiens
gtaaggaaaagtctc

SEQ ID NO: 24086 - DNA, 15 bp, Homo sapiens
tgtaaggaaaagtct

SEQ ID NO: 24087 - DNA, 15 bp, Homo sapiens
atgtaaggaaaagtc

SEQ ID NO: 24088 - DNA, 15 bp, Homo sapiens
gatgtaaggaaaagt

SEQ ID NO: 24089 - DNA, 15 bp, Homo sapiens
agatgtaaggaaaag

SEQ ID NO: 24090 - DNA, 15 bp, Homo sapiens
tagatgtaaggaaaa

SEQ ID NO: 24091 - DNA, 15 bp, Homo sapiens
atagatgtaaggaaa

SEQ ID NO: 24092 - DNA, 15 bp, Homo sapiens
catagatgtaaggaa

SEQ ID NO: 24093 - DNA, 15 bp, Homo sapiens
gcatagatgtaagga

SEQ ID NO: 24094 - DNA, 15 bp, Homo sapiens
tgcatagatgtaagg

SEQ ID NO: 24095 - DNA, 15 bp, Homo sapiens
gtgcatagatgtaag

SEQ ID NO: 24096 - DNA, 15 bp, Homo sapiens
agtgcatagatgtaa

SEQ ID NO: 24097 - DNA, 15 bp, Homo sapiens
aagtgcatagatgta

SEQ ID NO: 24098 - DNA, 15 bp, Homo sapiens
gaagtgcatagatgt

SEQ ID NO: 24099 - DNA, 15 bp, Homo sapiens
agaagtgcatagatg

SEQ ID NO: 24100 - DNA, 15 bp, Homo sapiens
aagaagtgcatagat

SEQ ID NO: 24101 - DNA, 15 bp, Homo sapiens
aaagaagtgcataga

SEQ ID NO: 24102 - DNA, 15 bp, Homo sapiens
caaagaagtgcatag

SEQ ID NO: 24103 - DNA, 15 bp, Homo sapiens
acaaagaagtgcata

SEQ ID NO: 24104 - DNA, 15 bp, Homo sapiens
aacaaagaagtgcat

SEQ ID NO: 24105 - DNA, 15 bp, Homo sapiens
aaacaaagaagtgca

SEQ ID NO: 24106 - DNA, 15 bp, Homo sapiens
caaacaaagaagtgc

SEQ ID NO: 24107 - DNA, 15 bp, Homo sapiens
acaaacaaagaagtg

SEQ ID NO: 24108 - DNA, 15 bp, Homo sapiens
aacaaacaaagaagt

SEQ ID NO: 24109 - DNA, 15 bp, Homo sapiens
aaacaaacaaagaag

SEQ ID NO: 24110 - DNA, 15 bp, Homo sapiens
caaacaaacaaagaa

SEQ ID NO: 24111 - DNA, 15 bp, Homo sapiens
acaaacaaacaaaga

SEQ ID NO: 24112 - DNA, 15 bp, Homo sapiens
aacaaacaaacaaag

SEQ ID NO: 24113 - DNA, 15 bp, Homo sapiens
aaaacaaacaaacaa

SEQ ID NO: 24114 - DNA, 15 bp, Homo sapiens
caaaacaaacaaaca

SEQ ID NO: 24115 - DNA, 15 bp, Homo sapiens
tcaaaacaaacaaac

SEQ ID NO: 24116 - DNA, 15 bp, Homo sapiens
ctcaaaacaaacaaa

SEQ ID NO: 24117 - DNA, 15 bp, Homo sapiens
tctcaaaacaaacaa

SEQ ID NO: 24118 - DNA, 15 bp, Homo sapiens
atctcaaaacaaaca

SEQ ID NO: 24119 - DNA, 15 bp, Homo sapiens
catctcaaaacaaac

SEQ ID NO: 24120 - DNA, 15 bp, Homo sapiens
ccatctcaaaacaaa

SEQ ID NO: 24121 - DNA, 15 bp, Homo sapiens
accatctcaaaacaa

SEQ ID NO: 24122 - DNA, 15 bp, Homo sapiens
gaccatctcaaaaca

SEQ ID NO: 24123 - DNA, 15 bp, Homo sapiens
agaccatctcaaaac

SEQ ID NO: 24124 - DNA, 15 bp, Homo sapiens
aagaccatctcaaaa

SEQ ID NO: 24125 - DNA, 15 bp, Homo sapiens
caagaccatctcaaa

SEQ ID NO: 24126 - DNA, 15 bp, Homo sapiens
gcaagaccatctcaa

SEQ ID NO: 24127 - DNA, 15 bp, Homo sapiens
agcaagaccatctca

SEQ ID NO: 24128 - DNA, 15 bp, Homo sapiens
gagcaagaccatctc

SEQ ID NO: 24129 - DNA, 15 bp, Homo sapiens
agagcaagaccatct

SEQ ID NO: 24130 - DNA, 15 bp, Homo sapiens
cagagcaagaccatc

SEQ ID NO: 24131 - DNA, 15 bp, Homo sapiens
acagagcaagaccat

SEQ ID NO: 24132 - DNA, 15 bp, Homo sapiens
aacagagcaagacca

SEQ ID NO: 24133 - DNA, 15 bp, Homo sapiens
tctgggcaacagagc

SEQ ID NO: 24134 - DNA, 15 bp, Homo sapiens
gtctgggcaacagag

SEQ ID NO: 24135 - DNA, 15 bp, Homo sapiens
agtctgggcaacaga

SEQ ID NO: 24136 - DNA, 15 bp, Homo sapiens
cagtctgggcaacag

SEQ ID NO: 24137 - DNA, 15 bp, Homo sapiens
ccagtctgggcaaca

SEQ ID NO: 24138 - DNA, 15 bp, Homo sapiens
tccagtctgggcaac

SEQ ID NO: 24139 - DNA, 15 bp, Homo sapiens
ctccagtctgggcaa

SEQ ID NO: 24140 - DNA, 15 bp, Homo sapiens
actccagtctgggca

SEQ ID NO: 24141 - DNA, 15 bp, Homo sapiens
cactccagtctgggc

SEQ ID NO: 24142 - DNA, 15 bp, Homo sapiens
gcactccagtctggg

SEQ ID NO: 24143 - DNA, 15 bp, Homo sapiens
tgcactccagtctgg

SEQ ID NO: 24144 - DNA, 15 bp, Homo sapiens
ctgcactccagtctg

SEQ ID NO: 24145 - DNA, 15 bp, Homo sapiens
actgcactccagtct

SEQ ID NO: 24146 - DNA, 15 bp, Homo sapiens
tactgcactccagtc

SEQ ID NO: 24147 - DNA, 15 bp, Homo sapiens
ctactgcactccagt

SEQ ID NO: 24148 - DNA, 15 bp, Homo sapiens
actactgcactccag

SEQ ID NO: 24149 - DNA, 15 bp, Homo sapiens
cactactgcactcca

SEQ ID NO: 24150 - DNA, 15 bp, Homo sapiens
gcactactgcactcc

SEQ ID NO: 24151 - DNA, 15 bp, Homo sapiens
tgcactactgcactc

SEQ ID NO: 24152 - DNA, 15 bp, Homo sapiens
ttgcactactgcact

SEQ ID NO: 24153 - DNA, 15 bp, Homo sapiens
attgcactactgcac

SEQ ID NO: 24154 - DNA, 15 bp, Homo sapiens
gattgcactactgca

SEQ ID NO: 24155 - DNA, 15 bp, Homo sapiens
agattgcactactgc

SEQ ID NO: 24156 - DNA, 15 bp, Homo sapiens
gagattgcactactg

SEQ ID NO: 24157 - DNA, 15 bp, Homo sapiens
ggagattgcactact

SEQ ID NO: 24158 - DNA, 15 bp, Homo sapiens
cggagattgcactac

SEQ ID NO: 24159 - DNA, 15 bp, Homo sapiens
gcggagattgcacta

SEQ ID NO: 24160 - DNA, 15 bp, Homo sapiens
agcggagattgcact

SEQ ID NO: 24161 - DNA, 15 bp, Homo sapiens
gagcggagattgcac

SEQ ID NO: 24162 - DNA, 15 bp, Homo sapiens
tgagcggagattgca

SEQ ID NO: 24163 - DNA, 15 bp, Homo sapiens
gtgagcggagattgc

SEQ ID NO: 24164 - DNA, 15 bp, Homo sapiens
agtgagcggagattg

SEQ ID NO: 24165 - DNA, 15 bp, Homo sapiens
tagtgagcggagatt

SEQ ID NO: 24166 - DNA, 15 bp, Homo sapiens
gtagtgagcggagat

SEQ ID NO: 24167 - DNA, 15 bp, Homo sapiens
tgtagtgagcggaga

SEQ ID NO: 24168 - DNA, 15 bp, Homo sapiens
ttgtagtgagcggag

SEQ ID NO: 24169 - DNA, 15 bp, Homo sapiens
attgtagtgagcgga

SEQ ID NO: 24170 - DNA, 15 bp, Homo sapiens
cattgtagtgagcgg

SEQ ID NO: 24171 - DNA, 15 bp, Homo sapiens
acattgtagtgagcg

SEQ ID NO: 24172 - DNA, 15 bp, Homo sapiens
gacattgtagtgagc

SEQ ID NO: 24173 - DNA, 15 bp, Homo sapiens
agacattgtagtgag

SEQ ID NO: 24174 - DNA, 15 bp, Homo sapiens
cagacattgtagtga

SEQ ID NO: 24175 - DNA, 15 bp, Homo sapiens
gcagacattgtagtg

SEQ ID NO: 24176 - DNA, 15 bp, Homo sapiens
ggcagacattgtagt

SEQ ID NO: 24177 - DNA, 15 bp, Homo sapiens
aggcagacattgtag

SEQ ID NO: 24178 - DNA, 15 bp, Homo sapiens
gaggcagacattgta

SEQ ID NO: 24179 - DNA, 15 bp, Homo sapiens
ggaggcagacattgt

SEQ ID NO: 24180 - DNA, 15 bp, Homo sapiens
gggaggcagacattg

SEQ ID NO: 24181 - DNA, 15 bp, Homo sapiens
tgggaggcagacatt

SEQ ID NO: 24182 - DNA, 15 bp, Homo sapiens
ctgggaggcagacat

SEQ ID NO: 24183 - DNA, 15 bp, Homo sapiens
cctgggaggcagaca

SEQ ID NO: 24184 - DNA, 15 bp, Homo sapiens
acctgggaggcagac

SEQ ID NO: 24185 - DNA, 15 bp, Homo sapiens
aacctgggaggcaga

SEQ ID NO: 24186 - DNA, 15 bp, Homo sapiens
gaacctgggaggcag

SEQ ID NO: 24187 - DNA, 15 bp, Homo sapiens
ggaacctgggaggca

SEQ ID NO: 24188 - DNA, 15 bp, Homo sapiens
tggaacctgggaggc

SEQ ID NO: 24189 - DNA, 15 bp, Homo sapiens
ctggaacctgggagg

SEQ ID NO: 24190 - DNA, 15 bp, Homo sapiens
actggaacctgggag

SEQ ID NO: 24191 - DNA, 15 bp, Homo sapiens
cactggaacctggga

SEQ ID NO: 24192 - DNA, 15 bp, Homo sapiens
tcactggaacctggg

SEQ ID NO: 24193 - DNA, 15 bp, Homo sapiens
ctcactggaacctgg

SEQ ID NO: 24194 - DNA, 15 bp, Homo sapiens
gctcactggaacctg

SEQ ID NO: 24195 - DNA, 15 bp, Homo sapiens
ggctcactggaacct

SEQ ID NO: 24196 - DNA, 15 bp, Homo sapiens
aggctcactggaacc

SEQ ID NO: 24197 - DNA, 15 bp, Homo sapiens
gaggctcactggaac

SEQ ID NO: 24198 - DNA, 15 bp, Homo sapiens
ggaggctcactggaa

SEQ ID NO: 24199 - DNA, 15 bp, Homo sapiens
aggaggctcactgga

SEQ ID NO: 24200 - DNA, 15 bp, Homo sapiens
caggaggctcactgg

SEQ ID NO: 24201 - DNA, 15 bp, Homo sapiens
gcaggaggctcactg

SEQ ID NO: 24202 - DNA, 15 bp, Homo sapiens
ggcaggaggctcact

SEQ ID NO: 24203 - DNA, 15 bp, Homo sapiens
aggcaggaggctcac

SEQ ID NO: 24204 - DNA, 15 bp, Homo sapiens
gaggcaggaggctca

SEQ ID NO: 24205 - DNA, 15 bp, Homo sapiens
tgaggcaggaggctc

SEQ ID NO: 24206 - DNA, 15 bp, Homo sapiens
ctgaggcaggaggct

SEQ ID NO: 24207 - DNA, 15 bp, Homo sapiens
gctgaggcaggaggc

SEQ ID NO: 24208 - DNA, 15 bp, Homo sapiens
ggctgaggcaggagg

SEQ ID NO: 24209 - DNA, 15 bp, Homo sapiens
atttgggaggctgag

SEQ ID NO: 24210 - DNA, 15 bp, Homo sapiens
tatttgggaggctga

SEQ ID NO: 24211 - DNA, 15 bp, Homo sapiens
ctatttgggaggctg

SEQ ID NO: 24212 - DNA, 15 bp, Homo sapiens
gctatttgggaggct

SEQ ID NO: 24213 - DNA, 15 bp, Homo sapiens
agctatttgggaggc

SEQ ID NO: 24214 - DNA, 15 bp, Homo sapiens
cagctatttgggagg

SEQ ID NO: 24215 - DNA, 15 bp, Homo sapiens
tcagctatttgggag

SEQ ID NO: 24216 - DNA, 15 bp, Homo sapiens
ctcagctatttggga

SEQ ID NO: 24217 - DNA, 15 bp, Homo sapiens
tctcagctatttggg

SEQ ID NO: 24218 - DNA, 15 bp, Homo sapiens
gtctcagctatttgg

SEQ ID NO: 24219 - DNA, 15 bp, Homo sapiens
agtctcagctatttg

SEQ ID NO: 24220 - DNA, 15 bp, Homo sapiens
tagtctcagctattt

SEQ ID NO: 24221 - DNA, 15 bp, Homo sapiens
gtagtctcagctatt

SEQ ID NO: 24222 - DNA, 15 bp, Homo sapiens
tgtagtctcagctat

SEQ ID NO: 24223 - DNA, 15 bp, Homo sapiens
ctgtagtctcagcta

SEQ ID NO: 24224 - DNA, 15 bp, Homo sapiens
cctgtagtctcagct

SEQ ID NO: 24225 - DNA, 15 bp, Homo sapiens
gcctgtagtctcagc

SEQ ID NO: 24226 - DNA, 15 bp, Homo sapiens
tgcctgtagtctcag

SEQ ID NO: 24227 - DNA, 15 bp, Homo sapiens
atgcctgtagtctca

SEQ ID NO: 24228 - DNA, 15 bp, Homo sapiens
catgcctgtagtctc

SEQ ID NO: 24229 - DNA, 15 bp, Homo sapiens
acatgcctgtagtct

SEQ ID NO: 24230 - DNA, 15 bp, Homo sapiens
gtggtggcacatgcc

SEQ ID NO: 24231 - DNA, 15 bp, Homo sapiens
cgtggtggcacatgc

SEQ ID NO: 24232 - DNA, 15 bp, Homo sapiens
acgtggtggcacatg

SEQ ID NO: 24233 - DNA, 15 bp, Homo sapiens
gacgtggtggcacat

SEQ ID NO: 24234 - DNA, 15 bp, Homo sapiens
ggacgtggtggcaca

SEQ ID NO: 24235 - DNA, 15 bp, Homo sapiens
cggacgtggtggcac

SEQ ID NO: 24236 - DNA, 15 bp, Homo sapiens
ccggacgtggtggca

SEQ ID NO: 24237 - DNA, 15 bp, Homo sapiens
gccggacgtggtggc

SEQ ID NO: 24238 - DNA, 15 bp, Homo sapiens
agccggacgtggtgg

SEQ ID NO: 24239 - DNA, 15 bp, Homo sapiens
tagccggacgtggtg

SEQ ID NO: 24240 - DNA, 15 bp, Homo sapiens
ttagccggacgtggt

SEQ ID NO: 24241 - DNA, 15 bp, Homo sapiens
attagccggacgtgg

SEQ ID NO: 24242 - DNA, 15 bp, Homo sapiens
aattagccggacgtg

SEQ ID NO: 24243 - DNA, 15 bp, Homo sapiens
aaattagccggacgt

SEQ ID NO: 24244 - DNA, 15 bp, Homo sapiens
aaaattagccggacg

SEQ ID NO: 24245 - DNA, 15 bp, Homo sapiens
aaaaccctgtctcta

SEQ ID NO: 24246 - DNA, 15 bp, Homo sapiens
caaaaccctgtctct

SEQ ID NO: 24247 - DNA, 15 bp, Homo sapiens
gcaaaaccctgtctc

SEQ ID NO: 24248 - DNA, 15 bp, Homo sapiens
ggcaaaaccctgtct

SEQ ID NO: 24249 - DNA, 15 bp, Homo sapiens
tggcaaaaccctgtc

SEQ ID NO: 24250 - DNA, 15 bp, Homo sapiens
atggcaaaaccctgt

SEQ ID NO: 24251 - DNA, 15 bp, Homo sapiens
catggcaaaaccctg

SEQ ID NO: 24252 - DNA, 15 bp, Homo sapiens
acatggcaaaaccct

SEQ ID NO: 24253 - DNA, 15 bp, Homo sapiens
aacatggcaaaaccc

SEQ ID NO: 24254 - DNA, 15 bp, Homo sapiens
caacatggcaaaacc

SEQ ID NO: 24255 - DNA, 15 bp, Homo sapiens
tcaacatggcaaaac

SEQ ID NO: 24256 - DNA, 15 bp, Homo sapiens
gtcaacatggcaaaa

SEQ ID NO: 24257 - DNA, 15 bp, Homo sapiens
ggtcaacatggcaaa

SEQ ID NO: 24258 - DNA, 15 bp, Homo sapiens
tggtcaacatggcaa

SEQ ID NO: 24259 - DNA, 15 bp, Homo sapiens
gtggtcaacatggca

SEQ ID NO: 24260 - DNA, 15 bp, Homo sapiens
tgtggtcaacatggc

SEQ ID NO: 24261 - DNA, 15 bp, Homo sapiens
gtgtggtcaacatgg

SEQ ID NO: 24262 - DNA, 15 bp, Homo sapiens
agtgtggtcaacatg

SEQ ID NO: 24263 - DNA, 15 bp, Homo sapiens
cagtgtggtcaacat

SEQ ID NO: 24264 - DNA, 15 bp, Homo sapiens
ccagtgtggtcaaca

SEQ ID NO: 24265 - DNA, 15 bp, Homo sapiens
accagtgtggtcaac

SEQ ID NO: 24266 - DNA, 15 bp, Homo sapiens
gaccagtgtggtcaa

SEQ ID NO: 24267 - DNA, 15 bp, Homo sapiens
agaccagtgtggtca

SEQ ID NO: 24268 - DNA, 15 bp, Homo sapiens
gagaccagtgtggtc

SEQ ID NO: 24269 - DNA, 15 bp, Homo sapiens
cgagaccagtgtggt

SEQ ID NO: 24270 - DNA, 15 bp, Homo sapiens
tcgagaccagtgtgg

SEQ ID NO: 24271 - DNA, 15 bp, Homo sapiens
ttcgagaccagtgtg

SEQ ID NO: 24272 - DNA, 15 bp, Homo sapiens
gttcgagaccagtgt

SEQ ID NO: 24273 - DNA, 15 bp, Homo sapiens
agttcgagaccagtg

SEQ ID NO: 24274 - DNA, 15 bp, Homo sapiens
gagttcgagaccagt

SEQ ID NO: 24275 - DNA, 15 bp, Homo sapiens
ccaggagttcgagac

SEQ ID NO: 24276 - DNA, 15 bp, Homo sapiens
gccaggagttcgaga

SEQ ID NO: 24277 - DNA, 15 bp, Homo sapiens
ggccaggagttcgag

SEQ ID NO: 24278 - DNA, 15 bp, Homo sapiens
aggccaggagttcga

SEQ ID NO: 24279 - DNA, 15 bp, Homo sapiens
gaggccaggagttcg

SEQ ID NO: 24280 - DNA, 15 bp, Homo sapiens
tgaggccaggagttc

SEQ ID NO: 24281 - DNA, 15 bp, Homo sapiens
ctgaggccaggagtt

SEQ ID NO: 24282 - DNA, 15 bp, Homo sapiens
cctgaggccaggagt

SEQ ID NO: 24283 - DNA, 15 bp, Homo sapiens
acctgaggccaggag

SEQ ID NO: 24284 - DNA, 15 bp, Homo sapiens
cacctgaggccagga

SEQ ID NO: 24285 - DNA, 15 bp, Homo sapiens
tcacctgaggccagg

SEQ ID NO: 24286 - DNA, 15 bp, Homo sapiens
atcacctgaggccag

SEQ ID NO: 24287 - DNA, 15 bp, Homo sapiens
aatcacctgaggcca

SEQ ID NO: 24288 - DNA, 15 bp, Homo sapiens
gaatcacctgaggcc

SEQ ID NO: 24289 - DNA, 15 bp, Homo sapiens
cgaatcacctgaggc

SEQ ID NO: 24290 - DNA, 15 bp, Homo sapiens
gcgaatcacctgagg

SEQ ID NO: 24291 - DNA, 15 bp, Homo sapiens
ggcgaatcacctgag

SEQ ID NO: 24292 - DNA, 15 bp, Homo sapiens
gggcgaatcacctga

SEQ ID NO: 24293 - DNA, 15 bp, Homo sapiens
cgggcgaatcacctg

SEQ ID NO: 24294 - DNA, 15 bp, Homo sapiens
gcgggcgaatcacct

SEQ ID NO: 24295 - DNA, 15 bp, Homo sapiens
ggcgggcgaatcacc

SEQ ID NO: 24296 - DNA, 15 bp, Homo sapiens
aggcgggcgaatcac

SEQ ID NO: 24297 - DNA, 15 bp, Homo sapiens
gaggcgggcgaatca

SEQ ID NO: 24298 - DNA, 15 bp, Homo sapiens
tgaggcgggcgaatc

SEQ ID NO: 24299 - DNA, 15 bp, Homo sapiens
ctgaggcgggcgaat

SEQ ID NO: 24300 - DNA, 15 bp, Homo sapiens
gctgaggcgggcgaa

SEQ ID NO: 24301 - DNA, 15 bp, Homo sapiens
ggctgaggcgggcga

SEQ ID NO: 24302 - DNA, 15 bp, Homo sapiens
aggctgaggcgggcg

SEQ ID NO: 24303 - DNA, 15 bp, Homo sapiens
gaggctgaggcgggc

SEQ ID NO: 24304 - DNA, 15 bp, Homo sapiens
ggaggctgaggcggg

SEQ ID NO: 24305 - DNA, 15 bp, Homo sapiens
gggaggctgaggcgg

SEQ ID NO: 24306 - DNA, 15 bp, Homo sapiens
tgggaggctgaggcg

SEQ ID NO: 24307 - DNA, 15 bp, Homo sapiens
atggtggctcatgcc

SEQ ID NO: 24308 - DNA, 15 bp, Homo sapiens
catggtggctcatgc

SEQ ID NO: 24309 - DNA, 15 bp, Homo sapiens
gcatggtggctcatg

SEQ ID NO: 24310 - DNA, 15 bp, Homo sapiens
ggcatggtggctcat

SEQ ID NO: 24311 - DNA, 15 bp, Homo sapiens
gggcatggtggctca

SEQ ID NO: 24312 - DNA, 15 bp, Homo sapiens
cgggcatggtggctc

SEQ ID NO: 24313 - DNA, 15 bp, Homo sapiens
ccgggcatggtggct

SEQ ID NO: 24314 - DNA, 15 bp, Homo sapiens
gccgggcatggtggc

SEQ ID NO: 24315 - DNA, 15 bp, Homo sapiens
ggccgggcatggtgg

SEQ ID NO: 24316 - DNA, 15 bp, Homo sapiens
tggccgggcatggtg

SEQ ID NO: 24317 - DNA, 15 bp, Homo sapiens
atggccgggcatggt

SEQ ID NO: 24318 - DNA, 15 bp, Homo sapiens
tatggccgggcatgg

SEQ ID NO: 24319 - DNA, 15 bp, Homo sapiens
atatggccgggcatg

SEQ ID NO: 24320 - DNA, 15 bp, Homo sapiens
gatatggccgggcat

SEQ ID NO: 24321 - DNA, 15 bp, Homo sapiens
ggatatggccgggca

SEQ ID NO: 24322 - DNA, 15 bp, Homo sapiens
tggatatggccgggc

SEQ ID NO: 24323 - DNA, 15 bp, Homo sapiens
atggatatggccggg

SEQ ID NO: 24324 - DNA, 15 bp, Homo sapiens
catggatatggccgg

SEQ ID NO: 24325 - DNA, 15 bp, Homo sapiens
gcatggatatggccg

SEQ ID NO: 24326 - DNA, 15 bp, Homo sapiens
tgcatggatatggcc

SEQ ID NO: 24327 - DNA, 15 bp, Homo sapiens
gtgcatggatatggc

SEQ ID NO: 24328 - DNA, 15 bp, Homo sapiens
agtgcatggatatgg

SEQ ID NO: 24329 - DNA, 15 bp, Homo sapiens
aagtgcatggatatg

SEQ ID NO: 24330 - DNA, 15 bp, Homo sapiens
gaagtgcatggatat

SEQ ID NO: 24331 - DNA, 15 bp, Homo sapiens
agaagtgcatggata

SEQ ID NO: 24332 - DNA, 15 bp, Homo sapiens
aagaagtgcatggat

SEQ ID NO: 24333 - DNA, 15 bp, Homo sapiens
caagaagtgcatgga

SEQ ID NO: 24334 - DNA, 15 bp, Homo sapiens
gcaagaagtgcatgg

SEQ ID NO: 24335 - DNA, 15 bp, Homo sapiens
tgcaagaagtgcatg

SEQ ID NO: 24336 - DNA, 15 bp, Homo sapiens
ttgcaagaagtgcat

SEQ ID NO: 24337 - DNA, 15 bp, Homo sapiens
gttgcaagaagtgca

SEQ ID NO: 24338 - DNA, 15 bp, Homo sapiens
ggttgcaagaagtgc

SEQ ID NO: 24339 - DNA, 15 bp, Homo sapiens
aggttgcaagaagtg

SEQ ID NO: 24340 - DNA, 15 bp, Homo sapiens
aaggttgcaagaagt

SEQ ID NO: 24341 - DNA, 15 bp, Homo sapiens
taaggttgcaagaag

SEQ ID NO: 24342 - DNA, 15 bp, Homo sapiens
gtaaggttgcaagaa

SEQ ID NO: 24343 - DNA, 15 bp, Homo sapiens
ggtaaggttgcaaga

SEQ ID NO: 24344 - DNA, 15 bp, Homo sapiens
aggtaaggttgcaag

SEQ ID NO: 24345 - DNA, 15 bp, Homo sapiens
aaggtaaggttgcaa

SEQ ID NO: 24346 - DNA, 15 bp, Homo sapiens
gaaggtaaggttgca

SEQ ID NO: 24347 - DNA, 15 bp, Homo sapiens
agaaggtaaggttgc

SEQ ID NO: 24348 - DNA, 15 bp, Homo sapiens
aagaaggtaaggttg

SEQ ID NO: 24349 - DNA, 15 bp, Homo sapiens
aaagaaggtaaggtt

SEQ ID NO: 24350 - DNA, 15 bp, Homo sapiens
aaaagaaggtaaggt

SEQ ID NO: 24351 - DNA, 15 bp, Homo sapiens
gaaaagaaggtaagg

SEQ ID NO: 24352 - DNA, 15 bp, Homo sapiens
agaaaagaaggtaag

SEQ ID NO: 24353 - DNA, 15 bp, Homo sapiens
gagaaaagaaggtaa

SEQ ID NO: 24354 - DNA, 15 bp, Homo sapiens
tgagaaaagaaggta

SEQ ID NO: 24355 - DNA, 15 bp, Homo sapiens
atgagaaaagaaggt

SEQ ID NO: 24356 - DNA, 15 bp, Homo sapiens
gatgagaaaagaagg

SEQ ID NO: 24357 - DNA, 15 bp, Homo sapiens
tgatgagaaaagaag

SEQ ID NO: 24358 - DNA, 15 bp, Homo sapiens
gtgatgagaaaagaa

SEQ ID NO: 24359 - DNA, 15 bp, Homo sapiens
ggtgatgagaaaaga

SEQ ID NO: 24360 - DNA, 15 bp, Homo sapiens
gggtgatgagaaaag

SEQ ID NO: 24361 - DNA, 15 bp, Homo sapiens
agggtgatgagaaaa

SEQ ID NO: 24362 - DNA, 15 bp, Homo sapiens
gagggtgatgagaaa

SEQ ID NO: 24363 - DNA, 15 bp, Homo sapiens
ggagggtgatgagaa

SEQ ID NO: 24364 - DNA, 15 bp, Homo sapiens
tggagggtgatgaga

SEQ ID NO: 24365 - DNA, 15 bp, Homo sapiens
ctggagggtgatgag

SEQ ID NO: 24366 - DNA, 15 bp, Homo sapiens
cctggagggtgatga

SEQ ID NO: 24367 - DNA, 15 bp, Homo sapiens
ccctggagggtgatg

SEQ ID NO: 24368 - DNA, 15 bp, Homo sapiens
tccctggagggtgat

SEQ ID NO: 24369 - DNA, 15 bp, Homo sapiens
gtccctggagggtga

SEQ ID NO: 24370 - DNA, 15 bp, Homo sapiens
ggtccctggagggtg

SEQ ID NO: 24371 - DNA, 15 bp, Homo sapiens
aggtccctggagggt

SEQ ID NO: 24372 - DNA, 15 bp, Homo sapiens
taggtccctggaggg

SEQ ID NO: 24373 - DNA, 15 bp, Homo sapiens
ctaggtccctggagg

SEQ ID NO: 24374 - DNA, 15 bp, Homo sapiens
actaggtccctggag

SEQ ID NO: 24375 - DNA, 15 bp, Homo sapiens
aactaggtccctgga

SEQ ID NO: 24376 - DNA, 15 bp, Homo sapiens
caactaggtccctgg

SEQ ID NO: 24377 - DNA, 15 bp, Homo sapiens
ccaactaggtccctg

SEQ ID NO: 24378 - DNA, 15 bp, Homo sapiens
tccaactaggtccct

SEQ ID NO: 24379 - DNA, 15 bp, Homo sapiens
ttccaactaggtccc

SEQ ID NO: 24380 - DNA, 15 bp, Homo sapiens
cttccaactaggtcc

SEQ ID NO: 24381 - DNA, 15 bp, Homo sapiens
tcttccaactaggtc

SEQ ID NO: 24382 - DNA, 15 bp, Homo sapiens
ctcttccaactaggt

SEQ ID NO: 24383 - DNA, 15 bp, Homo sapiens
gctcttccaactagg

SEQ ID NO: 24384 - DNA, 15 bp, Homo sapiens
tgctcttccaactag

SEQ ID NO: 24385 - DNA, 15 bp, Homo sapiens
ctgctcttccaacta

SEQ ID NO: 24386 - DNA, 15 bp, Homo sapiens
tctgctcttccaact

SEQ ID NO: 24387 - DNA, 15 bp, Homo sapiens
ctctgctcttccaac

SEQ ID NO: 24388 - DNA, 15 bp, Homo sapiens
actctgctcttccaa

SEQ ID NO: 24389 - DNA, 15 bp, Homo sapiens
aactctgctcttcca

SEQ ID NO: 24390 - DNA, 15 bp, Homo sapiens
taactctgctcttcc

SEQ ID NO: 24391 - DNA, 15 bp, Homo sapiens
ttaactctgctcttc

SEQ ID NO: 24392 - DNA, 15 bp, Homo sapiens
tttaactctgctctt

SEQ ID NO: 24393 - DNA, 15 bp, Homo sapiens
ttttaactctgctct

SEQ ID NO: 24394 - DNA, 15 bp, Homo sapiens
cttttaactctgctc

SEQ ID NO: 24395 - DNA, 15 bp, Homo sapiens
acttttaactctgct

SEQ ID NO: 24396 - DNA, 15 bp, Homo sapiens
aacttttaactctgc

SEQ ID NO: 24397 - DNA, 15 bp, Homo sapiens
taacttttaactctg

SEQ ID NO: 24398 - DNA, 15 bp, Homo sapiens
ttaacttttaactct

SEQ ID NO: 24399 - DNA, 15 bp, Homo sapiens
cttaacttttaactc

SEQ ID NO: 24400 - DNA, 15 bp, Homo sapiens
ccttaacttttaact

SEQ ID NO: 24401 - DNA, 15 bp, Homo sapiens
accttaacttttaac

SEQ ID NO: 24402 - DNA, 15 bp, Homo sapiens
caccttaacttttaa

SEQ ID NO: 24403 - DNA, 15 bp, Homo sapiens
tcaccttaactttta

SEQ ID NO: 24404 - DNA, 15 bp, Homo sapiens
ttcaccttaactttt

SEQ ID NO: 24405 - DNA, 15 bp, Homo sapiens
tttcaccttaacttt

SEQ ID NO: 24406 - DNA, 15 bp, Homo sapiens
gtttcaccttaactt

SEQ ID NO: 24407 - DNA, 15 bp, Homo sapiens
agtttcaccttaact

SEQ ID NO: 24408 - DNA, 15 bp, Homo sapiens
aagtttcaccttaac

SEQ ID NO: 24409 - DNA, 15 bp, Homo sapiens
caagtttcaccttaa

SEQ ID NO: 24410 - DNA, 15 bp, Homo sapiens
ccaagtttcacctta

SEQ ID NO: 24411 - DNA, 15 bp, Homo sapiens
tccaagtttcacctt

SEQ ID NO: 24412 - DNA, 15 bp, Homo sapiens
ctccaagtttcacct

SEQ ID NO: 24413 - DNA, 15 bp, Homo sapiens
tctccaagtttcacc

SEQ ID NO: 24414 - DNA, 15 bp, Homo sapiens
ctctccaagtttcac

SEQ ID NO: 24415 - DNA, 15 bp, Homo sapiens
cctctccaagtttca

SEQ ID NO: 24416 - DNA, 15 bp, Homo sapiens
acctctccaagtttc

SEQ ID NO: 24417 - DNA, 15 bp, Homo sapiens
cacctctccaagttt

SEQ ID NO: 24418 - DNA, 15 bp, Homo sapiens
acacctctccaagtt

SEQ ID NO: 24419 - DNA, 15 bp, Homo sapiens
gacacctctccaagt

SEQ ID NO: 24420 - DNA, 15 bp, Homo sapiens
agacacctctccaag

SEQ ID NO: 24421 - DNA, 15 bp, Homo sapiens
aagacacctctccaa

SEQ ID NO: 24422 - DNA, 15 bp, Homo sapiens
caagacacctctcca

SEQ ID NO: 24423 - DNA, 15 bp, Homo sapiens
acaagacacctctcc

SEQ ID NO: 24424 - DNA, 15 bp, Homo sapiens
gacaagacacctctc

SEQ ID NO: 24425 - DNA, 15 bp, Homo sapiens
ggacaagacacctct

SEQ ID NO: 24426 - DNA, 15 bp, Homo sapiens
gggacaagacacctc

SEQ ID NO: 24427 - DNA, 15 bp, Homo sapiens
agggacaagacacct

SEQ ID NO: 24428 - DNA, 15 bp, Homo sapiens
tagggacaagacacc

SEQ ID NO: 24429 - DNA, 15 bp, Homo sapiens
ctagggacaagacac

SEQ ID NO: 24430 - DNA, 15 bp, Homo sapiens
cctagggacaagaca

SEQ ID NO: 24431 - DNA, 15 bp, Homo sapiens
tcctagggacaagac

SEQ ID NO: 24432 - DNA, 15 bp, Homo sapiens
ttcctagggacaaga

SEQ ID NO: 24433 - DNA, 15 bp, Homo sapiens
gttcctagggacaag

SEQ ID NO: 24434 - DNA, 15 bp, Homo sapiens
tgttcctagggacaa

SEQ ID NO: 24435 - DNA, 15 bp, Homo sapiens
ttgttcctagggaca

SEQ ID NO: 24436 - DNA, 15 bp, Homo sapiens
tttgttcctagggac

SEQ ID NO: 24437 - DNA, 15 bp, Homo sapiens
ctttgttcctaggga

SEQ ID NO: 24438 - DNA, 15 bp, Homo sapiens
cctttgttcctaggg

SEQ ID NO: 24439 - DNA, 15 bp, Homo sapiens
tcctttgttcctagg

SEQ ID NO: 24440 - DNA, 15 bp, Homo sapiens
gtcctttgttcctag

SEQ ID NO: 24441 - DNA, 15 bp, Homo sapiens
agtcctttgttccta

SEQ ID NO: 24442 - DNA, 15 bp, Homo sapiens
cagtcctttgttcct

SEQ ID NO: 24443 - DNA, 15 bp, Homo sapiens
ccagtcctttgttcc

SEQ ID NO: 24444 - DNA, 15 bp, Homo sapiens
accagtcctttgttc

SEQ ID NO: 24445 - DNA, 15 bp, Homo sapiens
aaccagtcctttgtt

SEQ ID NO: 24446 - DNA, 15 bp, Homo sapiens
aaaccagtcctttgt

SEQ ID NO: 24447 - DNA, 15 bp, Homo sapiens
caaaccagtcctttg

SEQ ID NO: 24448 - DNA, 15 bp, Homo sapiens
tcaaaccagtccttt

SEQ ID NO: 24449 - DNA, 15 bp, Homo sapiens
ttcaaaccagtcctt

SEQ ID NO: 24450 - DNA, 15 bp, Homo sapiens
tttcaaaccagtcct

SEQ ID NO: 24451 - DNA, 15 bp, Homo sapiens
atttcaaaccagtcc

SEQ ID NO: 24452 - DNA, 15 bp, Homo sapiens
aatttcaaaccagtc

SEQ ID NO: 24453 - DNA, 15 bp, Homo sapiens
gaatttcaaaccagt

SEQ ID NO: 24454 - DNA, 15 bp, Homo sapiens
agaatttcaaaccag

SEQ ID NO: 24455 - DNA, 15 bp, Homo sapiens
gagaatttcaaacca

SEQ ID NO: 24456 - DNA, 15 bp, Homo sapiens
agagaatttcaaacc

SEQ ID NO: 24457 - DNA, 15 bp, Homo sapiens
cagagaatttcaaac

SEQ ID NO: 24458 - DNA, 15 bp, Homo sapiens
acagagaatttcaaa

SEQ ID NO: 24459 - DNA, 15 bp, Homo sapiens
tacagagaatttcaa

SEQ ID NO: 24460 - DNA, 15 bp, Homo sapiens
ttacagagaatttca

SEQ ID NO: 24461 - DNA, 15 bp, Homo sapiens
tttacagagaatttc

SEQ ID NO: 24462 - DNA, 15 bp, Homo sapiens
atttacagagaattt

SEQ ID NO: 24463 - DNA, 15 bp, Homo sapiens
gatttacagagaatt

SEQ ID NO: 24464 - DNA, 15 bp, Homo sapiens
agatttacagagaat

SEQ ID NO: 24465 - DNA, 15 bp, Homo sapiens
aagatttacagagaa

SEQ ID NO: 24466 - DNA, 15 bp, Homo sapiens
gaagatttacagaga

SEQ ID NO: 24467 - DNA, 15 bp, Homo sapiens
ggaagatttacagag

SEQ ID NO: 24468 - DNA, 15 bp, Homo sapiens
gggaagatttacaga

SEQ ID NO: 24469 - DNA, 15 bp, Homo sapiens
ggggaagatttacag

SEQ ID NO: 24470 - DNA, 15 bp, Homo sapiens
tggggaagatttaca

SEQ ID NO: 24471 - DNA, 15 bp, Homo sapiens
ctggggaagatttac

SEQ ID NO: 24472 - DNA, 15 bp, Homo sapiens
actggggaagattta

SEQ ID NO: 24473 - DNA, 15 bp, Homo sapiens
aactggggaagattt

SEQ ID NO: 24474 - DNA, 15 bp, Homo sapiens
gaactggggaagatt

SEQ ID NO: 24475 - DNA, 15 bp, Homo sapiens
tgaactggggaagat

SEQ ID NO: 24476 - DNA, 15 bp, Homo sapiens
ttgaactggggaaga

SEQ ID NO: 24477 - DNA, 15 bp, Homo sapiens
tttgaactggggaag

SEQ ID NO: 24478 - DNA, 15 bp, Homo sapiens
gtttgaactggggaa

SEQ ID NO: 24479 - DNA, 15 bp, Homo sapiens
ggtttgaactgggga

SEQ ID NO: 24480 - DNA, 15 bp, Homo sapiens
tggtttgaactgggg

SEQ ID NO: 24481 - DNA, 15 bp, Homo sapiens
ctggtttgaactggg

SEQ ID NO: 24482 - DNA, 15 bp, Homo sapiens
tctggtttgaactgg

SEQ ID NO: 24483 - DNA, 15 bp, Homo sapiens
ctctggtttgaactg

SEQ ID NO: 24484 - DNA, 15 bp, Homo sapiens
actctggtttgaact

SEQ ID NO: 24485 - DNA, 15 bp, Homo sapiens
aactctggtttgaac

SEQ ID NO: 24486 - DNA, 15 bp, Homo sapiens
taactctggtttgaa

SEQ ID NO: 24487 - DNA, 15 bp, Homo sapiens
ataactctggtttga

SEQ ID NO: 24488 - DNA, 15 bp, Homo sapiens
gataactctggtttg

SEQ ID NO: 24489 - DNA, 15 bp, Homo sapiens
tgataactctggttt

SEQ ID NO: 24490 - DNA, 15 bp, Homo sapiens
ttgataactctggtt

SEQ ID NO: 24491 - DNA, 15 bp, Homo sapiens
cttgataactctggt

SEQ ID NO: 24492 - DNA, 15 bp, Homo sapiens
ccttgataactctgg

SEQ ID NO: 24493 - DNA, 15 bp, Homo sapiens
accttgataactctg

SEQ ID NO: 24494 - DNA, 15 bp, Homo sapiens
gaccttgataactct

SEQ ID NO: 24495 - DNA, 15 bp, Homo sapiens
agaccttgataactc

SEQ ID NO: 24496 - DNA, 15 bp, Homo sapiens
aagaccttgataact

SEQ ID NO: 24497 - DNA, 15 bp, Homo sapiens
taagaccttgataac

SEQ ID NO: 24498 - DNA, 15 bp, Homo sapiens
ttaagaccttgataa

SEQ ID NO: 24499 - DNA, 15 bp, Homo sapiens
tttaagaccttgata

SEQ ID NO: 24500 - DNA, 15 bp, Homo sapiens
ttttaagaccttgat

SEQ ID NO: 24501 - DNA, 15 bp, Homo sapiens
tttttaagaccttga

SEQ ID NO: 24502 - DNA, 15 bp, Homo sapiens
gtttttaagaccttg

SEQ ID NO: 24503 - DNA, 15 bp, Homo sapiens
agtttttaagacctt

SEQ ID NO: 24504 - DNA, 15 bp, Homo sapiens
aagtttttaagacct

SEQ ID NO: 24505 - DNA, 15 bp, Homo sapiens
gaagtttttaagacc

SEQ ID NO: 24506 - DNA, 15 bp, Homo sapiens
ggaagtttttaagac

SEQ ID NO: 24507 - DNA, 15 bp, Homo sapiens
gggaagtttttaaga

SEQ ID NO: 24508 - DNA, 15 bp, Homo sapiens
agggaagtttttaag

SEQ ID NO: 24509 - DNA, 15 bp, Homo sapiens
cagggaagtttttaa

SEQ ID NO: 24510 - DNA, 15 bp, Homo sapiens
ccagggaagttttta

SEQ ID NO: 24511 - DNA, 15 bp, Homo sapiens
cccagggaagttttt

SEQ ID NO: 24512 - DNA, 15 bp, Homo sapiens
acccagggaagtttt

SEQ ID NO: 24513 - DNA, 15 bp, Homo sapiens
gacccagggaagttt

SEQ ID NO: 24514 - DNA, 15 bp, Homo sapiens
ggacccagggaagtt

SEQ ID NO: 24515 - DNA, 15 bp, Homo sapiens
aggacccagggaagt

SEQ ID NO: 24516 - DNA, 15 bp, Homo sapiens
caggacccagggaag

SEQ ID NO: 24517 - DNA, 15 bp, Homo sapiens
tcaggacccagggaa

SEQ ID NO: 24518 - DNA, 15 bp, Homo sapiens
ctcaggacccaggga

SEQ ID NO: 24519 - DNA, 15 bp, Homo sapiens
tctcaggacccaggg

SEQ ID NO: 24520 - DNA, 15 bp, Homo sapiens
ctctcaggacccagg

SEQ ID NO: 24521 - DNA, 15 bp, Homo sapiens
gctctcaggacccag

SEQ ID NO: 24522 - DNA, 15 bp, Homo sapiens
ggctctcaggaccca

SEQ ID NO: 24523 - DNA, 15 bp, Homo sapiens
gggctctcaggaccc

SEQ ID NO: 24524 - DNA, 15 bp, Homo sapiens
tgggctctcaggacc

SEQ ID NO: 24525 - DNA, 15 bp, Homo sapiens
atgggctctcaggac

SEQ ID NO: 24526 - DNA, 15 bp, Homo sapiens
aatgggctctcagga

SEQ ID NO: 24527 - DNA, 15 bp, Homo sapiens
taatgggctctcagg

SEQ ID NO: 24528 - DNA, 15 bp, Homo sapiens
ataatgggctctcag

SEQ ID NO: 24529 - DNA, 15 bp, Homo sapiens
tataatgggctctca

SEQ ID NO: 24530 - DNA, 15 bp, Homo sapiens
atataatgggctctc

SEQ ID NO: 24531 - DNA, 15 bp, Homo sapiens
aatataatgggctct

SEQ ID NO: 24532 - DNA, 15 bp, Homo sapiens
taatataatgggctc

SEQ ID NO: 24533 - DNA, 15 bp, Homo sapiens
ataatataatgggct

SEQ ID NO: 24534 - DNA, 15 bp, Homo sapiens
aataatataatgggc

SEQ ID NO: 24535 - DNA, 15 bp, Homo sapiens
aaataatataatggg

SEQ ID NO: 24536 - DNA, 15 bp, Homo sapiens
taaataatataatgg

SEQ ID NO: 24537 - DNA, 15 bp, Homo sapiens
gtaaataatataatg

SEQ ID NO: 24538 - DNA, 15 bp, Homo sapiens
agtaaataatataat

SEQ ID NO: 24539 - DNA, 15 bp, Homo sapiens
aagtaaataatataa

SEQ ID NO: 24540 - DNA, 15 bp, Homo sapiens
caagtaaataatata

SEQ ID NO: 24541 - DNA, 15 bp, Homo sapiens
acaagtaaataatat

SEQ ID NO: 24542 - DNA, 15 bp, Homo sapiens
gacaagtaaataata

SEQ ID NO: 24543 - DNA, 15 bp, Homo sapiens
agacaagtaaataat

SEQ ID NO: 24544 - DNA, 15 bp, Homo sapiens
aagacaagtaaataa

SEQ ID NO: 24545 - DNA, 15 bp, Homo sapiens
gaagacaagtaaata

SEQ ID NO: 24546 - DNA, 15 bp, Homo sapiens
ggaagacaagtaaat

SEQ ID NO: 24547 - DNA, 15 bp, Homo sapiens
aggaagacaagtaaa

SEQ ID NO: 24548 - DNA, 15 bp, Homo sapiens
caggaagacaagtaa

SEQ ID NO: 24549 - DNA, 15 bp, Homo sapiens
acaggaagacaagta

SEQ ID NO: 24550 - DNA, 15 bp, Homo sapiens
tacaggaagacaagt

SEQ ID NO: 24551 - DNA, 15 bp, Homo sapiens
gtacaggaagacaag

SEQ ID NO: 24552 - DNA, 15 bp, Homo sapiens
tgtacaggaagacaa

SEQ ID NO: 24553 - DNA, 15 bp, Homo sapiens
gtgtacaggaagaca

SEQ ID NO: 24554 - DNA, 15 bp, Homo sapiens
ggtgtacaggaagac

SEQ ID NO: 24555 - DNA, 15 bp, Homo sapiens
gggtgtacaggaaga

SEQ ID NO: 24556 - DNA, 15 bp, Homo sapiens
tgggtgtacaggaag

SEQ ID NO: 24557 - DNA, 15 bp, Homo sapiens
gtgggtgtacaggaa

SEQ ID NO: 24558 - DNA, 15 bp, Homo sapiens
agtgggtgtacagga

SEQ ID NO: 24559 - DNA, 15 bp, Homo sapiens
cagtgggtgtacagg

SEQ ID NO: 24560 - DNA, 15 bp, Homo sapiens
gcagtgggtgtacag

SEQ ID NO: 24561 - DNA, 15 bp, Homo sapiens
ggcagtgggtgtaca

SEQ ID NO: 24562 - DNA, 15 bp, Homo sapiens
aggcagtgggtgtac

SEQ ID NO: 24563 - DNA, 15 bp, Homo sapiens
taggcagtgggtgta

SEQ ID NO: 24564 - DNA, 15 bp, Homo sapiens
ctaggcagtgggtgt

SEQ ID NO: 24565 - DNA, 15 bp, Homo sapiens
actaggcagtgggtg

SEQ ID NO: 24566 - DNA, 15 bp, Homo sapiens
gactaggcagtgggt

SEQ ID NO: 24567 - DNA, 15 bp, Homo sapiens
ggactaggcagtggg

SEQ ID NO: 24568 - DNA, 15 bp, Homo sapiens
aggactaggcagtgg

SEQ ID NO: 24569 - DNA, 15 bp, Homo sapiens
caggactaggcagtg

SEQ ID NO: 24570 - DNA, 15 bp, Homo sapiens
tcaggactaggcagt

SEQ ID NO: 24571 - DNA, 15 bp, Homo sapiens
atcaggactaggcag

SEQ ID NO: 24572 - DNA, 15 bp, Homo sapiens
gatcaggactaggca

SEQ ID NO: 24573 - DNA, 15 bp, Homo sapiens
ggatcaggactaggc

SEQ ID NO: 24574 - DNA, 15 bp, Homo sapiens
aggatcaggactagg

SEQ ID NO: 24575 - DNA, 15 bp, Homo sapiens
taggatcaggactag

SEQ ID NO: 24576 - DNA, 15 bp, Homo sapiens
gtaggatcaggacta

SEQ ID NO: 24577 - DNA, 15 bp, Homo sapiens
agtaggatcaggact

SEQ ID NO: 24578 - DNA, 15 bp, Homo sapiens
aagtaggatcaggac

SEQ ID NO: 24579 - DNA, 15 bp, Homo sapiens
aaagtaggatcagga

SEQ ID NO: 24580 - DNA, 15 bp, Homo sapiens
aaaagtaggatcagg

SEQ ID NO: 24581 - DNA, 15 bp, Homo sapiens
caaaagtaggatcag

SEQ ID NO: 24582 - DNA, 15 bp, Homo sapiens
acaaaagtaggatca

SEQ ID NO: 24583 - DNA, 15 bp, Homo sapiens
aacaaaagtaggatc

SEQ ID NO: 24584 - DNA, 15 bp, Homo sapiens
aaacaaaagtaggat

SEQ ID NO: 24585 - DNA, 15 bp, Homo sapiens
caaacaaaagtagga

SEQ ID NO: 24586 - DNA, 15 bp, Homo sapiens
gcaaacaaaagtagg

SEQ ID NO: 24587 - DNA, 15 bp, Homo sapiens
tgcaaacaaaagtag

SEQ ID NO: 24588 - DNA, 15 bp, Homo sapiens
ttgcaaacaaaagta

SEQ ID NO: 24589 - DNA, 15 bp, Homo sapiens
tttgcaaacaaaagt

SEQ ID NO: 24590 - DNA, 15 bp, Homo sapiens
atttgcaaacaaaag

SEQ ID NO: 24591 - DNA, 15 bp, Homo sapiens
tatttgcaaacaaaa

SEQ ID NO: 24592 - DNA, 15 bp, Homo sapiens
ctatttgcaaacaaa

SEQ ID NO: 24593 - DNA, 15 bp, Homo sapiens
cctatttgcaaacaa

SEQ ID NO: 24594 - DNA, 15 bp, Homo sapiens
tcctatttgcaaaca

SEQ ID NO: 24595 - DNA, 15 bp, Homo sapiens
atcctatttgcaaac

SEQ ID NO: 24596 - DNA, 15 bp, Homo sapiens
catcctatttgcaaa

SEQ ID NO: 24597 - DNA, 15 bp, Homo sapiens
ccatcctatttgcaa

SEQ ID NO: 24598 - DNA, 15 bp, Homo sapiens
cccatcctatttgca

SEQ ID NO: 24599 - DNA, 15 bp, Homo sapiens
ccccatcctatttgc

SEQ ID NO: 24600 - DNA, 15 bp, Homo sapiens
gccccatcctatttg

SEQ ID NO: 24601 - DNA, 15 bp, Homo sapiens
tgccccatcctattt

SEQ ID NO: 24602 - DNA, 15 bp, Homo sapiens
gtgccccatcctatt

SEQ ID NO: 24603 - DNA, 15 bp, Homo sapiens
tgtgccccatcctat

SEQ ID NO: 24604 - DNA, 15 bp, Homo sapiens
ttgtgccccatccta

SEQ ID NO: 24605 - DNA, 15 bp, Homo sapiens
gttgtgccccatcct

SEQ ID NO: 24606 - DNA, 15 bp, Homo sapiens
cgttgtgccccatcc

SEQ ID NO: 24607 - DNA, 15 bp, Homo sapiens
acgttgtgccccatc

SEQ ID NO: 24608 - DNA, 15 bp, Homo sapiens
tacgttgtgccccat

SEQ ID NO: 24609 - DNA, 15 bp, Homo sapiens
gtacgttgtgcccca

SEQ ID NO: 24610 - DNA, 15 bp, Homo sapiens
tgtacgttgtgcccc

SEQ ID NO: 24611 - DNA, 15 bp, Homo sapiens
ttgtacgttgtgccc

SEQ ID NO: 24612 - DNA, 15 bp, Homo sapiens
cttgtacgttgtgcc

SEQ ID NO: 24613 - DNA, 15 bp, Homo sapiens
ccttgtacgttgtgc

SEQ ID NO: 24614 - DNA, 15 bp, Homo sapiens
tccttgtacgttgtg

SEQ ID NO: 24615 - DNA, 15 bp, Homo sapiens
ttccttgtacgttgt

SEQ ID NO: 24616 - DNA, 15 bp, Homo sapiens
cttccttgtacgttg

SEQ ID NO: 24617 - DNA, 15 bp, Homo sapiens
ccttccttgtacgtt

SEQ ID NO: 24618 - DNA, 15 bp, Homo sapiens
cccttccttgtacgt

SEQ ID NO: 24619 - DNA, 15 bp, Homo sapiens
gcccttccttgtacg

SEQ ID NO: 24620 - DNA, 15 bp, Homo sapiens
ggcccttccttgtac

SEQ ID NO: 24621 - DNA, 15 bp, Homo sapiens
aggcccttccttgta

SEQ ID NO: 24622 - DNA, 15 bp, Homo sapiens
aaggcccttccttgt

SEQ ID NO: 24623 - DNA, 15 bp, Homo sapiens
aaaggcccttccttg

SEQ ID NO: 24624 - DNA, 15 bp, Homo sapiens
caaaggcccttcctt

SEQ ID NO: 24625 - DNA, 15 bp, Homo sapiens
gcaaaggcccttcct

SEQ ID NO: 24626 - DNA, 15 bp, Homo sapiens
ggcaaaggcccttcc

SEQ ID NO: 24627 - DNA, 15 bp, Homo sapiens
tggcaaaggcccttc

SEQ ID NO: 24628 - DNA, 15 bp, Homo sapiens
gtggcaaaggccctt

SEQ ID NO: 24629 - DNA, 15 bp, Homo sapiens
ggtggcaaaggccct

SEQ ID NO: 24630 - DNA, 15 bp, Homo sapiens
gggtggcaaaggccc

SEQ ID NO: 24631 - DNA, 15 bp, Homo sapiens
ggggtggcaaaggcc

SEQ ID NO: 24632 - DNA, 15 bp, Homo sapiens
aggggtggcaaaggc

SEQ ID NO: 24633 - DNA, 15 bp, Homo sapiens
caggggtggcaaagg

SEQ ID NO: 24634 - DNA, 15 bp, Homo sapiens
gcaggggtggcaaag

SEQ ID NO: 24635 - DNA, 15 bp, Homo sapiens
agcaggggtggcaaa

SEQ ID NO: 24636 - DNA, 15 bp, Homo sapiens
tagcaggggtggcaa

SEQ ID NO: 24637 - DNA, 15 bp, Homo sapiens
ttagcaggggtggca

SEQ ID NO: 24638 - DNA, 15 bp, Homo sapiens
cttagcaggggtggc

SEQ ID NO: 24639 - DNA, 15 bp, Homo sapiens
ccttagcaggggtgg

SEQ ID NO: 24640 - DNA, 15 bp, Homo sapiens
cccttagcaggggtg

SEQ ID NO: 24641 - DNA, 15 bp, Homo sapiens
tcccttagcaggggt

SEQ ID NO: 24642 - DNA, 15 bp, Homo sapiens
atcccttagcagggg

SEQ ID NO: 24643 - DNA, 15 bp, Homo sapiens
tatcccttagcaggg

SEQ ID NO: 24644 - DNA, 15 bp, Homo sapiens
ttatcccttagcagg

SEQ ID NO: 24645 - DNA, 15 bp, Homo sapiens
gttatcccttagcag

SEQ ID NO: 24646 - DNA, 15 bp, Homo sapiens
ggttatcccttagca

SEQ ID NO: 24647 - DNA, 15 bp, Homo sapiens
aggttatcccttagc

SEQ ID NO: 24648 - DNA, 15 bp, Homo sapiens
caggttatcccttag

SEQ ID NO: 24649 - DNA, 15 bp, Homo sapiens
tcaggttatccctta

SEQ ID NO: 24650 - DNA, 15 bp, Homo sapiens
ttcaggttatccctt

SEQ ID NO: 24651 - DNA, 15 bp, Homo sapiens
tttcaggttatccct

SEQ ID NO: 24652 - DNA, 15 bp, Homo sapiens
atttcaggttatccc

SEQ ID NO: 24653 - DNA, 15 bp, Homo sapiens
tatttcaggttatcc

SEQ ID NO: 24654 - DNA, 15 bp, Homo sapiens
gtatttcaggttatc

SEQ ID NO: 24655 - DNA, 15 bp, Homo sapiens
ggtatttcaggttat

SEQ ID NO: 24656 - DNA, 15 bp, Homo sapiens
aggtatttcaggtta

SEQ ID NO: 24657 - DNA, 15 bp, Homo sapiens
aaggtatttcaggtt

SEQ ID NO: 24658 - DNA, 15 bp, Homo sapiens
gaaggtatttcaggt

SEQ ID NO: 24659 - DNA, 15 bp, Homo sapiens
tgaaggtatttcagg

SEQ ID NO: 24660 - DNA, 15 bp, Homo sapiens
gtgaaggtatttcag

SEQ ID NO: 24661 - DNA, 15 bp, Homo sapiens
ggtgaaggtatttca

SEQ ID NO: 24662 - DNA, 15 bp, Homo sapiens
tggtgaaggtatttc

SEQ ID NO: 24663 - DNA, 15 bp, Homo sapiens
atggtgaaggtattt

SEQ ID NO: 24664 - DNA, 15 bp, Homo sapiens
gatggtgaaggtatt

SEQ ID NO: 24665 - DNA, 15 bp, Homo sapiens
tgatggtgaaggtat

SEQ ID NO: 24666 - DNA, 15 bp, Homo sapiens
gtgatggtgaaggta

SEQ ID NO: 24667 - DNA, 15 bp, Homo sapiens
agtgatggtgaaggt

SEQ ID NO: 24668 - DNA, 15 bp, Homo sapiens
cagtgatggtgaagg

SEQ ID NO: 24669 - DNA, 15 bp, Homo sapiens
gcagtgatggtgaag

SEQ ID NO: 24670 - DNA, 15 bp, Homo sapiens
ggcagtgatggtgaa

SEQ ID NO: 24671 - DNA, 15 bp, Homo sapiens
gggcagtgatggtga

SEQ ID NO: 24672 - DNA, 15 bp, Homo sapiens
agggcagtgatggtg

SEQ ID NO: 24673 - DNA, 15 bp, Homo sapiens
cagggcagtgatggt

SEQ ID NO: 24674 - DNA, 15 bp, Homo sapiens
acagggcagtgatgg

SEQ ID NO: 24675 - DNA, 15 bp, Homo sapiens
cacagggcagtgatg

SEQ ID NO: 24676 - DNA, 15 bp, Homo sapiens
gcacagggcagtgat

SEQ ID NO: 24677 - DNA, 15 bp, Homo sapiens
agcacagggcagtga

SEQ ID NO: 24678 - DNA, 15 bp, Homo sapiens
cagcacagggcagtg

SEQ ID NO: 24679 - DNA, 15 bp, Homo sapiens
gcagcacagggcagt

SEQ ID NO: 24680 - DNA, 15 bp, Homo sapiens
agcagcacagggcag

SEQ ID NO: 24681 - DNA, 15 bp, Homo sapiens
aagcagcacagggca

SEQ ID NO: 24682 - DNA, 15 bp, Homo sapiens
aaagcagcacagggc

SEQ ID NO: 24683 - DNA, 15 bp, Homo sapiens
aaaagcagcacaggg

SEQ ID NO: 24684 - DNA, 15 bp, Homo sapiens
gaaaagcagcacagg

SEQ ID NO: 24685 - DNA, 15 bp, Homo sapiens
tgaaaagcagcacag

SEQ ID NO: 24686 - DNA, 15 bp, Homo sapiens
gtgaaaagcagcaca

SEQ ID NO: 24687 - DNA, 15 bp, Homo sapiens
ggtgaaaagcagcac

SEQ ID NO: 24688 - DNA, 15 bp, Homo sapiens
aggtgaaaagcagca

SEQ ID NO: 24689 - DNA, 15 bp, Homo sapiens
taggtgaaaagcagc

SEQ ID NO: 24690 - DNA, 15 bp, Homo sapiens
ataggtgaaaagcag

SEQ ID NO: 24691 - DNA, 15 bp, Homo sapiens
cataggtgaaaagca

SEQ ID NO: 24692 - DNA, 15 bp, Homo sapiens
gcataggtgaaaagc

SEQ ID NO: 24693 - DNA, 15 bp, Homo sapiens
ggcataggtgaaaag

SEQ ID NO: 24694 - DNA, 15 bp, Homo sapiens
tggcataggtgaaaa

SEQ ID NO: 24695 - DNA, 15 bp, Homo sapiens
ctggcataggtgaaa

SEQ ID NO: 24696 - DNA, 15 bp, Homo sapiens
actggcataggtgaa

SEQ ID NO: 24697 - DNA, 15 bp, Homo sapiens
gactggcataggtga

SEQ ID NO: 24698 - DNA, 15 bp, Homo sapiens
agactggcataggtg

SEQ ID NO: 24699 - DNA, 15 bp, Homo sapiens
cagactggcataggt

SEQ ID NO: 24700 - DNA, 15 bp, Homo sapiens
acagactggcatagg

SEQ ID NO: 24701 - DNA, 15 bp, Homo sapiens
gacagactggcatag

SEQ ID NO: 24702 - DNA, 15 bp, Homo sapiens
agacagactggcata

SEQ ID NO: 24703 - DNA, 15 bp, Homo sapiens
tagacagactggcat

SEQ ID NO: 24704 - DNA, 15 bp, Homo sapiens
gtagacagactggca

SEQ ID NO: 24705 - DNA, 15 bp, Homo sapiens
tgtagacagactggc

SEQ ID NO: 24706 - DNA, 15 bp, Homo sapiens
ctgtagacagactgg

SEQ ID NO: 24707 - DNA, 15 bp, Homo sapiens
actgtagacagactg

SEQ ID NO: 24708 - DNA, 15 bp, Homo sapiens
cactgtagacagact

SEQ ID NO: 24709 - DNA, 15 bp, Homo sapiens
gcactgtagacagac

SEQ ID NO: 24710 - DNA, 15 bp, Homo sapiens
ggcactgtagacaga

SEQ ID NO: 24711 - DNA, 15 bp, Homo sapiens
tggcactgtagacag

SEQ ID NO: 24712 - DNA, 15 bp, Homo sapiens
ctggcactgtagaca

SEQ ID NO: 24713 - DNA, 15 bp, Homo sapiens
actggcactgtagac

SEQ ID NO: 24714 - DNA, 15 bp, Homo sapiens
cactggcactgtaga

SEQ ID NO: 24715 - DNA, 15 bp, Homo sapiens
acactggcactgtag

SEQ ID NO: 24716 - DNA, 15 bp, Homo sapiens
gacactggcactgta

SEQ ID NO: 24717 - DNA, 15 bp, Homo sapiens
agacactggcactgt

SEQ ID NO: 24718 - DNA, 15 bp, Homo sapiens
gagacactggcactg

SEQ ID NO: 24719 - DNA, 15 bp, Homo sapiens
ggagacactggcact

SEQ ID NO: 24720 - DNA, 15 bp, Homo sapiens
aggagacactggcac

SEQ ID NO: 24721 - DNA, 15 bp, Homo sapiens
caggagacactggca

SEQ ID NO: 24722 - DNA, 15 bp, Homo sapiens
ccaggagacactggc

SEQ ID NO: 24723 - DNA, 15 bp, Homo sapiens
gccaggagacactgg

SEQ ID NO: 24724 - DNA, 15 bp, Homo sapiens
tgccaggagacactg

SEQ ID NO: 24725 - DNA, 15 bp, Homo sapiens
atgccaggagacact

SEQ ID NO: 24726 - DNA, 15 bp, Homo sapiens
aatgccaggagacac

SEQ ID NO: 24727 - DNA, 15 bp, Homo sapiens
caatgccaggagaca

SEQ ID NO: 24728 - DNA, 15 bp, Homo sapiens
tcaatgccaggagac

SEQ ID NO: 24729 - DNA, 15 bp, Homo sapiens
ttcaatgccaggaga

SEQ ID NO: 24730 - DNA, 15 bp, Homo sapiens
tttcaatgccaggag

SEQ ID NO: 24731 - DNA, 15 bp, Homo sapiens
ctttcaatgccagga

SEQ ID NO: 24732 - DNA, 15 bp, Homo sapiens
cctttcaatgccagg

SEQ ID NO: 24733 - DNA, 15 bp, Homo sapiens
ccctttcaatgccag

SEQ ID NO: 24734 - DNA, 15 bp, Homo sapiens
cccctttcaatgcca

SEQ ID NO: 24735 - DNA, 15 bp, Homo sapiens
tcccctttcaatgcc

SEQ ID NO: 24736 - DNA, 15 bp, Homo sapiens
ctcccctttcaatgc

SEQ ID NO: 24737 - DNA, 15 bp, Homo sapiens
tctcccctttcaatg

SEQ ID NO: 24738 - DNA, 15 bp, Homo sapiens
ttctcccctttcaat

SEQ ID NO: 24739 - DNA, 15 bp, Homo sapiens
attctcccctttcaa

SEQ ID NO: 24740 - DNA, 15 bp, Homo sapiens
gattctcccctttca

SEQ ID NO: 24741 - DNA, 15 bp, Homo sapiens
agattctcccctttc

SEQ ID NO: 24742 - DNA, 15 bp, Homo sapiens
aagattctccccttt

SEQ ID NO: 24743 - DNA, 15 bp, Homo sapiens
aaagattctcccctt

SEQ ID NO: 24744 - DNA, 15 bp, Homo sapiens
aaaagattctcccct

SEQ ID NO: 24745 - DNA, 15 bp, Homo sapiens
caaaagattctcccc

SEQ ID NO: 24746 - DNA, 15 bp, Homo sapiens
ccaaaagattctccc

SEQ ID NO: 24747 - DNA, 15 bp, Homo sapiens
accaaaagattctcc

SEQ ID NO: 24748 - DNA, 15 bp, Homo sapiens
gaccaaaagattctc

SEQ ID NO: 24749 - DNA, 15 bp, Homo sapiens
ggaccaaaagattct

SEQ ID NO: 24750 - DNA, 15 bp, Homo sapiens
aggaccaaaagattc

SEQ ID NO: 24751 - DNA, 15 bp, Homo sapiens
aaggaccaaaagatt

SEQ ID NO: 24752 - DNA, 15 bp, Homo sapiens
aaaggaccaaaagat

SEQ ID NO: 24753 - DNA, 15 bp, Homo sapiens
caaaggaccaaaaga

SEQ ID NO: 24754 - DNA, 15 bp, Homo sapiens
tcaaaggaccaaaag

SEQ ID NO: 24755 - DNA, 15 bp, Homo sapiens
ctcaaaggaccaaaa

SEQ ID NO: 24756 - DNA, 15 bp, Homo sapiens
actcaaaggaccaaa

SEQ ID NO: 24757 - DNA, 15 bp, Homo sapiens
tactcaaaggaccaa

SEQ ID NO: 24758 - DNA, 15 bp, Homo sapiens
atactcaaaggacca

SEQ ID NO: 24759 - DNA, 15 bp, Homo sapiens
aatactcaaaggacc

SEQ ID NO: 24760 - DNA, 15 bp, Homo sapiens
aaatactcaaaggac

SEQ ID NO: 24761 - DNA, 15 bp, Homo sapiens
caaatactcaaagga

SEQ ID NO: 24762 - DNA, 15 bp, Homo sapiens
ccaaatactcaaagg

SEQ ID NO: 24763 - DNA, 15 bp, Homo sapiens
accaaatactcaaag

SEQ ID NO: 24764 - DNA, 15 bp, Homo sapiens
aaccaaatactcaaa

SEQ ID NO: 24765 - DNA, 15 bp, Homo sapiens
caaccaaatactcaa

SEQ ID NO: 24766 - DNA, 15 bp, Homo sapiens
ccaaccaaatactca

SEQ ID NO: 24767 - DNA, 15 bp, Homo sapiens
cccaaccaaatactc

SEQ ID NO: 24768 - DNA, 15 bp, Homo sapiens
acccaaccaaatact

SEQ ID NO: 24769 - DNA, 15 bp, Homo sapiens
aacccaaccaaatac

SEQ ID NO: 24770 - DNA, 15 bp, Homo sapiens
taacccaaccaaata

SEQ ID NO: 24771 - DNA, 15 bp, Homo sapiens
gtaacccaaccaaat

SEQ ID NO: 24772 - DNA, 15 bp, Homo sapiens
tgtaacccaaccaaa

SEQ ID NO: 24773 - DNA, 15 bp, Homo sapiens
atgtaacccaaccaa

SEQ ID NO: 24774 - DNA, 15 bp, Homo sapiens
tatgtaacccaacca

SEQ ID NO: 24775 - DNA, 15 bp, Homo sapiens
ttatgtaacccaacc

SEQ ID NO: 24776 - DNA, 15 bp, Homo sapiens
tttatgtaacccaac

SEQ ID NO: 24777 - DNA, 15 bp, Homo sapiens
atttatgtaacccaa

SEQ ID NO: 24778 - DNA, 15 bp, Homo sapiens
gatttatgtaaccca

SEQ ID NO: 24779 - DNA, 15 bp, Homo sapiens
agatttatgtaaccc

SEQ ID NO: 24780 - DNA, 15 bp, Homo sapiens
gagatttatgtaacc

SEQ ID NO: 24781 - DNA, 15 bp, Homo sapiens
ggagatttatgtaac

SEQ ID NO: 24782 - DNA, 15 bp, Homo sapiens
gggagatttatgtaa

SEQ ID NO: 24783 - DNA, 15 bp, Homo sapiens
agggagatttatgta

SEQ ID NO: 24784 - DNA, 15 bp, Homo sapiens
cagggagatttatgt

SEQ ID NO: 24785 - DNA, 15 bp, Homo sapiens
tcagggagatttatg

SEQ ID NO: 24786 - DNA, 15 bp, Homo sapiens
ttcagggagatttat

SEQ ID NO: 24787 - DNA, 15 bp, Homo sapiens
attcagggagattta

SEQ ID NO: 24788 - DNA, 15 bp, Homo sapiens
cattcagggagattt

SEQ ID NO: 24789 - DNA, 15 bp, Homo sapiens
tcattcagggagatt

SEQ ID NO: 24790 - DNA, 15 bp, Homo sapiens
ttcattcagggagat

SEQ ID NO: 24791 - DNA, 15 bp, Homo sapiens
cttcattcagggaga

SEQ ID NO: 24792 - DNA, 15 bp, Homo sapiens
tcttcattcagggag

SEQ ID NO: 24793 - DNA, 15 bp, Homo sapiens
ctcttcattcaggga

SEQ ID NO: 24794 - DNA, 15 bp, Homo sapiens
gctcttcattcaggg

SEQ ID NO: 24795 - DNA, 15 bp, Homo sapiens
tgctcttcattcagg

SEQ ID NO: 24796 - DNA, 15 bp, Homo sapiens
ctgctcttcattcag

SEQ ID NO: 24797 - DNA, 15 bp, Homo sapiens
gctgctcttcattca

SEQ ID NO: 24798 - DNA, 15 bp, Homo sapiens
agctgctcttcattc

SEQ ID NO: 24799 - DNA, 15 bp, Homo sapiens
cagctgctcttcatt

SEQ ID NO: 24800 - DNA, 15 bp, Homo sapiens
tcagctgctcttcat

SEQ ID NO: 24801 - DNA, 15 bp, Homo sapiens
gtcagctgctcttca

SEQ ID NO: 24802 - DNA, 15 bp, Homo sapiens
agtcagctgctcttc

SEQ ID NO: 24803 - DNA, 15 bp, Homo sapiens
aagtcagctgctctt

SEQ ID NO: 24804 - DNA, 15 bp, Homo sapiens
taagtcagctgctct

SEQ ID NO: 24805 - DNA, 15 bp, Homo sapiens
ctaagtcagctgctc

SEQ ID NO: 24806 - DNA, 15 bp, Homo sapiens
cctaagtcagctgct

SEQ ID NO: 24807 - DNA, 15 bp, Homo sapiens
gcctaagtcagctgc

SEQ ID NO: 24808 - DNA, 15 bp, Homo sapiens
tgcctaagtcagctg

SEQ ID NO: 24809 - DNA, 15 bp, Homo sapiens
ttgcctaagtcagct

SEQ ID NO: 24810 - DNA, 15 bp, Homo sapiens
cttgcctaagtcagc

SEQ ID NO: 24811 - DNA, 15 bp, Homo sapiens
ccttgcctaagtcag

SEQ ID NO: 24812 - DNA, 15 bp, Homo sapiens
cccttgcctaagtca

SEQ ID NO: 24813 - DNA, 15 bp, Homo sapiens
ccccttgcctaagtc

SEQ ID NO: 24814 - DNA, 15 bp, Homo sapiens
gccccttgcctaagt

SEQ ID NO: 24815 - DNA, 15 bp, Homo sapiens
ggccccttgcctaag

SEQ ID NO: 24816 - DNA, 15 bp, Homo sapiens
aggccccttgcctaa

SEQ ID NO: 24817 - DNA, 15 bp, Homo sapiens
aaggccccttgccta

SEQ ID NO: 24818 - DNA, 15 bp, Homo sapiens
caaggccccttgcct

SEQ ID NO: 24819 - DNA, 15 bp, Homo sapiens
acaaggccccttgcc

SEQ ID NO: 24820 - DNA, 15 bp, Homo sapiens
aacaaggccccttgc

SEQ ID NO: 24821 - DNA, 15 bp, Homo sapiens
aaacaaggccccttg

SEQ ID NO: 24822 - DNA, 15 bp, Homo sapiens
caaacaaggcccctt

SEQ ID NO: 24823 - DNA, 15 bp, Homo sapiens
ccaaacaaggcccct

SEQ ID NO: 24824 - DNA, 15 bp, Homo sapiens
accaaacaaggcccc

SEQ ID NO: 24825 - DNA, 15 bp, Homo sapiens
aaccaaacaaggccc

SEQ ID NO: 24826 - DNA, 15 bp, Homo sapiens
aaaccaaacaaggcc

SEQ ID NO: 24827 - DNA, 15 bp, Homo sapiens
aaaaccaaacaaggc

SEQ ID NO: 24828 - DNA, 15 bp, Homo sapiens
gaaaaccaaacaagg

SEQ ID NO: 24829 - DNA, 15 bp, Homo sapiens
ggaaaaccaaacaag

SEQ ID NO: 24830 - DNA, 15 bp, Homo sapiens
aggaaaaccaaacaa

SEQ ID NO: 24831 - DNA, 15 bp, Homo sapiens
aaggaaaaccaaaca

SEQ ID NO: 24832 - DNA, 15 bp, Homo sapiens
caaggaaaaccaaac

SEQ ID NO: 24833 - DNA, 15 bp, Homo sapiens
tcaaggaaaaccaaa

SEQ ID NO: 24834 - DNA, 15 bp, Homo sapiens
ttcaaggaaaaccaa

SEQ ID NO: 24835 - DNA, 15 bp, Homo sapiens
gttcaaggaaaacca

SEQ ID NO: 24836 - DNA, 15 bp, Homo sapiens
agttcaaggaaaacc

SEQ ID NO: 24837 - DNA, 15 bp, Homo sapiens
tagttcaaggaaaac

SEQ ID NO: 24838 - DNA, 15 bp, Homo sapiens
atagttcaaggaaaa

SEQ ID NO: 24839 - DNA, 15 bp, Homo sapiens
aatagttcaaggaaa

SEQ ID NO: 24840 - DNA, 15 bp, Homo sapiens
taatagttcaaggaa

SEQ ID NO: 24841 - DNA, 15 bp, Homo sapiens
ttaatagttcaagga

SEQ ID NO: 24842 - DNA, 15 bp, Homo sapiens
gttaatagttcaagg

SEQ ID NO: 24843 - DNA, 15 bp, Homo sapiens
tgttaatagttcaag

SEQ ID NO: 24844 - DNA, 15 bp, Homo sapiens
ctgttaatagttcaa

SEQ ID NO: 24845 - DNA, 15 bp, Homo sapiens
cctgttaatagttca

SEQ ID NO: 24846 - DNA, 15 bp, Homo sapiens
tcctgttaatagttc

SEQ ID NO: 24847 - DNA, 15 bp, Homo sapiens
ttcctgttaatagtt

SEQ ID NO: 24848 - DNA, 15 bp, Homo sapiens
cttcctgttaatagt

SEQ ID NO: 24849 - DNA, 15 bp, Homo sapiens
tcttcctgttaatag

SEQ ID NO: 24850 - DNA, 15 bp, Homo sapiens
atcttcctgttaata

SEQ ID NO: 24851 - DNA, 15 bp, Homo sapiens
tatcttcctgttaat

SEQ ID NO: 24852 - DNA, 15 bp, Homo sapiens
ctatcttcctgttaa

SEQ ID NO: 24853 - DNA, 15 bp, Homo sapiens
cctatcttcctgtta

SEQ ID NO: 24854 - DNA, 15 bp, Homo sapiens
ccctatcttcctgtt

SEQ ID NO: 24855 - DNA, 15 bp, Homo sapiens
tccctatcttcctgt

SEQ ID NO: 24856 - DNA, 15 bp, Homo sapiens
ctccctatcttcctg

SEQ ID NO: 24857 - DNA, 15 bp, Homo sapiens
tctccctatcttcct

SEQ ID NO: 24858 - DNA, 15 bp, Homo sapiens
atctccctatcttcc

SEQ ID NO: 24859 - DNA, 15 bp, Homo sapiens
aatctccctatcttc

SEQ ID NO: 24860 - DNA, 15 bp, Homo sapiens
taatctccctatctt

SEQ ID NO: 24861 - DNA, 15 bp, Homo sapiens
ttaatctccctatct

SEQ ID NO: 24862 - DNA, 15 bp, Homo sapiens
gttaatctccctatc

SEQ ID NO: 24863 - DNA, 15 bp, Homo sapiens
agttaatctccctat

SEQ ID NO: 24864 - DNA, 15 bp, Homo sapiens
cagttaatctcccta

SEQ ID NO: 24865 - DNA, 15 bp, Homo sapiens
acagttaatctccct

SEQ ID NO: 24866 - DNA, 15 bp, Homo sapiens
cacagttaatctccc

SEQ ID NO: 24867 - DNA, 15 bp, Homo sapiens
acacagttaatctcc

SEQ ID NO: 24868 - DNA, 15 bp, Homo sapiens
tacacagttaatctc

SEQ ID NO: 24869 - DNA, 15 bp, Homo sapiens
ttacacagttaatct

SEQ ID NO: 24870 - DNA, 15 bp, Homo sapiens
tttacacagttaatc

SEQ ID NO: 24871 - DNA, 15 bp, Homo sapiens
atttacacagttaat

SEQ ID NO: 24872 - DNA, 15 bp, Homo sapiens
catttacacagttaa

SEQ ID NO: 24873 - DNA, 15 bp, Homo sapiens
acatttacacagtta

SEQ ID NO: 24874 - DNA, 15 bp, Homo sapiens
aacatttacacagtt

SEQ ID NO: 24875 - DNA, 15 bp, Homo sapiens
gaacatttacacagt

SEQ ID NO: 24876 - DNA, 15 bp, Homo sapiens
tgaacatttacacag

SEQ ID NO: 24877 - DNA, 15 bp, Homo sapiens
ttgaacatttacaca

SEQ ID NO: 24878 - DNA, 15 bp, Homo sapiens
attgaacatttacac

SEQ ID NO: 24879 - DNA, 15 bp, Homo sapiens
tattgaacatttaca

SEQ ID NO: 24880 - DNA, 15 bp, Homo sapiens
ctattgaacatttac

SEQ ID NO: 24881 - DNA, 15 bp, Homo sapiens
cctattgaacattta

SEQ ID NO: 24882 - DNA, 15 bp, Homo sapiens
gcctattgaacattt

SEQ ID NO: 24883 - DNA, 15 bp, Homo sapiens
ggcctattgaacatt

SEQ ID NO: 24884 - DNA, 15 bp, Homo sapiens
tggcctattgaacat

SEQ ID NO: 24885 - DNA, 15 bp, Homo sapiens
ctggcctattgaaca

SEQ ID NO: 24886 - DNA, 15 bp, Homo sapiens
tctggcctattgaac

SEQ ID NO: 24887 - DNA, 15 bp, Homo sapiens
ctctggcctattgaa

SEQ ID NO: 24888 - DNA, 15 bp, Homo sapiens
actctggcctattga

SEQ ID NO: 24889 - DNA, 15 bp, Homo sapiens
gactctggcctattg

SEQ ID NO: 24890 - DNA, 15 bp, Homo sapiens
ggactctggcctatt

SEQ ID NO: 24891 - DNA, 15 bp, Homo sapiens
gggactctggcctat

SEQ ID NO: 24892 - DNA, 15 bp, Homo sapiens
agggactctggccta

SEQ ID NO: 24893 - DNA, 15 bp, Homo sapiens
cagggactctggcct

SEQ ID NO: 24894 - DNA, 15 bp, Homo sapiens
gcagggactctggcc

SEQ ID NO: 24895 - DNA, 15 bp, Homo sapiens
tgcagggactctggc

SEQ ID NO: 24896 - DNA, 15 bp, Homo sapiens
ctgcagggactctgg

SEQ ID NO: 24897 - DNA, 15 bp, Homo sapiens
tctgcagggactctg

SEQ ID NO: 24898 - DNA, 15 bp, Homo sapiens
ctctgcagggactct

SEQ ID NO: 24899 - DNA, 15 bp, Homo sapiens
cctctgcagggactc

SEQ ID NO: 24900 - DNA, 15 bp, Homo sapiens
ccctctgcagggact

SEQ ID NO: 24901 - DNA, 15 bp, Homo sapiens
accctctgcagggac

SEQ ID NO: 24902 - DNA, 15 bp, Homo sapiens
caccctctgcaggga

SEQ ID NO: 24903 - DNA, 15 bp, Homo sapiens
ccaccctctgcaggg

SEQ ID NO: 24904 - DNA, 15 bp, Homo sapiens
gccaccctctgcagg

SEQ ID NO: 24905 - DNA, 15 bp, Homo sapiens
ggccaccctctgcag

SEQ ID NO: 24906 - DNA, 15 bp, Homo sapiens
tggccaccctctgca

SEQ ID NO: 24907 - DNA, 15 bp, Homo sapiens
gtggccaccctctgc

SEQ ID NO: 24908 - DNA, 15 bp, Homo sapiens
tgtggccaccctctg

SEQ ID NO: 24909 - DNA, 15 bp, Homo sapiens
ctgtggccaccctct

SEQ ID NO: 24910 - DNA, 15 bp, Homo sapiens
actgtggccaccctc

SEQ ID NO: 24911 - DNA, 15 bp, Homo sapiens
cactgtggccaccct

SEQ ID NO: 24912 - DNA, 15 bp, Homo sapiens
tcactgtggccaccc

SEQ ID NO: 24913 - DNA, 15 bp, Homo sapiens
atcactgtggccacc

SEQ ID NO: 24914 - DNA, 15 bp, Homo sapiens
gatcactgtggccac

SEQ ID NO: 24915 - DNA, 15 bp, Homo sapiens
tgatcactgtggcca

SEQ ID NO: 24916 - DNA, 15 bp, Homo sapiens
ctgatcactgtggcc

SEQ ID NO: 24917 - DNA, 15 bp, Homo sapiens
tctgatcactgtggc

SEQ ID NO: 24918 - DNA, 15 bp, Homo sapiens
atctgatcactgtgg

SEQ ID NO: 24919 - DNA, 15 bp, Homo sapiens
gatctgatcactgtg

SEQ ID NO: 24920 - DNA, 15 bp, Homo sapiens
agatctgatcactgt

SEQ ID NO: 24921 - DNA, 15 bp, Homo sapiens
aagatctgatcactg

SEQ ID NO: 24922 - DNA, 15 bp, Homo sapiens
taagatctgatcact

SEQ ID NO: 24923 - DNA, 15 bp, Homo sapiens
ataagatctgatcac

SEQ ID NO: 24924 - DNA, 15 bp, Homo sapiens
gataagatctgatca

SEQ ID NO: 24925 - DNA, 15 bp, Homo sapiens
tgataagatctgatc

SEQ ID NO: 24926 - DNA, 15 bp, Homo sapiens
gtgataagatctgat

SEQ ID NO: 24927 - DNA, 15 bp, Homo sapiens
tgtgataagatctga

SEQ ID NO: 24928 - DNA, 15 bp, Homo sapiens
atgtgataagatctg

SEQ ID NO: 24929 - DNA, 15 bp, Homo sapiens
gatgtgataagatct

SEQ ID NO: 24930 - DNA, 15 bp, Homo sapiens
ggatgtgataagatc

SEQ ID NO: 24931 - DNA, 15 bp, Homo sapiens
aggatgtgataagat

SEQ ID NO: 24932 - DNA, 15 bp, Homo sapiens
aaggatgtgataaga

SEQ ID NO: 24933 - DNA, 15 bp, Homo sapiens
caaggatgtgataag

SEQ ID NO: 24934 - DNA, 15 bp, Homo sapiens
gcaaggatgtgataa

SEQ ID NO: 24935 - DNA, 15 bp, Homo sapiens
agcaaggatgtgata

SEQ ID NO: 24936 - DNA, 15 bp, Homo sapiens
aagcaaggatgtgat

SEQ ID NO: 24937 - DNA, 15 bp, Homo sapiens
aaagcaaggatgtga

SEQ ID NO: 24938 - DNA, 15 bp, Homo sapiens
caaagcaaggatgtg

SEQ ID NO: 24939 - DNA, 15 bp, Homo sapiens
ccaaagcaaggatgt

SEQ ID NO: 24940 - DNA, 15 bp, Homo sapiens
cccaaagcaaggatg

SEQ ID NO: 24941 - DNA, 15 bp, Homo sapiens
acccaaagcaaggat

SEQ ID NO: 24942 - DNA, 15 bp, Homo sapiens
cacccaaagcaagga

SEQ ID NO: 24943 - DNA, 15 bp, Homo sapiens
acacccaaagcaagg

SEQ ID NO: 24944 - DNA, 15 bp, Homo sapiens
aacacccaaagcaag

SEQ ID NO: 24945 - DNA, 15 bp, Homo sapiens
caacacccaaagcaa

SEQ ID NO: 24946 - DNA, 15 bp, Homo sapiens
gcaacacccaaagca

SEQ ID NO: 24947 - DNA, 15 bp, Homo sapiens
ggcaacacccaaagc

SEQ ID NO: 24948 - DNA, 15 bp, Homo sapiens
aggcaacacccaaag

SEQ ID NO: 24949 - DNA, 15 bp, Homo sapiens
gaggcaacacccaaa

SEQ ID NO: 24950 - DNA, 15 bp, Homo sapiens
agaggcaacacccaa

SEQ ID NO: 24951 - DNA, 15 bp, Homo sapiens
gagaggcaacaccca

SEQ ID NO: 24952 - DNA, 15 bp, Homo sapiens
agagaggcaacaccc

SEQ ID NO: 24953 - DNA, 15 bp, Homo sapiens
cagagaggcaacacc

SEQ ID NO: 24954 - DNA, 15 bp, Homo sapiens
ccagagaggcaacac

SEQ ID NO: 24955 - DNA, 15 bp, Homo sapiens
accagagaggcaaca

SEQ ID NO: 24956 - DNA, 15 bp, Homo sapiens
aaccagagaggcaac

SEQ ID NO: 24957 - DNA, 15 bp, Homo sapiens
caaccagagaggcaa

SEQ ID NO: 24958 - DNA, 15 bp, Homo sapiens
ccaaccagagaggca

SEQ ID NO: 24959 - DNA, 15 bp, Homo sapiens
tccaaccagagaggc

SEQ ID NO: 24960 - DNA, 15 bp, Homo sapiens
ctccaaccagagagg

SEQ ID NO: 24961 - DNA, 15 bp, Homo sapiens
actccaaccagagag

SEQ ID NO: 24962 - DNA, 15 bp, Homo sapiens
tactccaaccagaga

SEQ ID NO: 24963 - DNA, 15 bp, Homo sapiens
atactccaaccagag

SEQ ID NO: 24964 - DNA, 15 bp, Homo sapiens
catactccaaccaga

SEQ ID NO: 24965 - DNA, 15 bp, Homo sapiens
ccatactccaaccag

SEQ ID NO: 24966 - DNA, 15 bp, Homo sapiens
tccatactccaacca

SEQ ID NO: 24967 - DNA, 15 bp, Homo sapiens
atccatactccaacc

SEQ ID NO: 24968 - DNA, 15 bp, Homo sapiens
tatccatactccaac

SEQ ID NO: 24969 - DNA, 15 bp, Homo sapiens
ctatccatactccaa

SEQ ID NO: 24970 - DNA, 15 bp, Homo sapiens
tctatccatactcca

SEQ ID NO: 24971 - DNA, 15 bp, Homo sapiens
ttctatccatactcc

SEQ ID NO: 24972 - DNA, 15 bp, Homo sapiens
tttctatccatactc

SEQ ID NO: 24973 - DNA, 15 bp, Homo sapiens
ttttctatccatact

SEQ ID NO: 24974 - DNA, 15 bp, Homo sapiens
cttttctatccatac

SEQ ID NO: 24975 - DNA, 15 bp, Homo sapiens
tcttttctatccata

SEQ ID NO: 24976 - DNA, 15 bp, Homo sapiens
ttcttttctatccat

SEQ ID NO: 24977 - DNA, 15 bp, Homo sapiens
tttcttttctatcca

SEQ ID NO: 24978 - DNA, 15 bp, Homo sapiens
ctttcttttctatcc

SEQ ID NO: 24979 - DNA, 15 bp, Homo sapiens
tctttcttttctatc

SEQ ID NO: 24980 - DNA, 15 bp, Homo sapiens
ttctttcttttctat

SEQ ID NO: 24981 - DNA, 15 bp, Homo sapiens
tttctttcttttcta

SEQ ID NO: 24982 - DNA, 15 bp, Homo sapiens
ctttctttcttttct

SEQ ID NO: 24983 - DNA, 15 bp, Homo sapiens
ggtctttctttcttt

SEQ ID NO: 24984 - DNA, 15 bp, Homo sapiens
gggtctttctttctt

SEQ ID NO: 24985 - DNA, 15 bp, Homo sapiens
agggtctttctttct

SEQ ID NO: 24986 - DNA, 15 bp, Homo sapiens
tagggtctttctttc

SEQ ID NO: 24987 - DNA, 15 bp, Homo sapiens
atagggtctttcttt

SEQ ID NO: 24988 - DNA, 15 bp, Homo sapiens
tatagggtctttctt

SEQ ID NO: 24989 - DNA, 15 bp, Homo sapiens
atatagggtctttct

SEQ ID NO: 24990 - DNA, 15 bp, Homo sapiens
aatatagggtctttc

SEQ ID NO: 24991 - DNA, 15 bp, Homo sapiens
caatatagggtcttt

SEQ ID NO: 24992 - DNA, 15 bp, Homo sapiens
tcaatatagggtctt

SEQ ID NO: 24993 - DNA, 15 bp, Homo sapiens
ttcaatatagggtct

SEQ ID NO: 24994 - DNA, 15 bp, Homo sapiens
tttcaatatagggtc

SEQ ID NO: 24995 - DNA, 15 bp, Homo sapiens
atttcaatatagggt

SEQ ID NO: 24996 - DNA, 15 bp, Homo sapiens
catttcaatataggg

SEQ ID NO: 24997 - DNA, 15 bp, Homo sapiens
gcatttcaatatagg

SEQ ID NO: 24998 - DNA, 15 bp, Homo sapiens
tgcatttcaatatag

SEQ ID NO: 24999 - DNA, 15 bp, Homo sapiens
ttgcatttcaatata

SEQ ID NO: 25000 - DNA, 15 bp, Homo sapiens
tttgcatttcaatat

SEQ ID NO: 25001 - DNA, 15 bp, Homo sapiens
ctttgcatttcaata

SEQ ID NO: 25002 - DNA, 15 bp, Homo sapiens
actttgcatttcaat

SEQ ID NO: 25003 - DNA, 15 bp, Homo sapiens
cactttgcatttcaa

SEQ ID NO: 25004 - DNA, 15 bp, Homo sapiens
gcactttgcatttca

SEQ ID NO: 25005 - DNA, 15 bp, Homo sapiens
tgcactttgcatttc

SEQ ID NO: 25006 - DNA, 15 bp, Homo sapiens
ctgcactttgcattt

SEQ ID NO: 25007 - DNA, 15 bp, Homo sapiens
gctgcactttgcatt

SEQ ID NO: 25008 - DNA, 15 bp, Homo sapiens
tgctgcactttgcat

SEQ ID NO: 25009 - DNA, 15 bp, Homo sapiens
ttgctgcactttgca

SEQ ID NO: 25010 - DNA, 15 bp, Homo sapiens
cttgctgcactttgc

SEQ ID NO: 25011 - DNA, 15 bp, Homo sapiens
acttgctgcactttg

SEQ ID NO: 25012 - DNA, 15 bp, Homo sapiens
gacttgctgcacttt

SEQ ID NO: 25013 - DNA, 15 bp, Homo sapiens
ggacttgctgcactt

SEQ ID NO: 25014 - DNA, 15 bp, Homo sapiens
aggacttgctgcact

SEQ ID NO: 25015 - DNA, 15 bp, Homo sapiens
caggacttgctgcac

SEQ ID NO: 25016 - DNA, 15 bp, Homo sapiens
tcaggacttgctgca

SEQ ID NO: 25017 - DNA, 15 bp, Homo sapiens
gtcaggacttgctgc

SEQ ID NO: 25018 - DNA, 15 bp, Homo sapiens
agtcaggacttgctg

SEQ ID NO: 25019 - DNA, 15 bp, Homo sapiens
aagtcaggacttgct

SEQ ID NO: 25020 - DNA, 15 bp, Homo sapiens
aaagtcaggacttgc

SEQ ID NO: 25021 - DNA, 15 bp, Homo sapiens
caaagtcaggacttg

SEQ ID NO: 25022 - DNA, 15 bp, Homo sapiens
ccaaagtcaggactt

SEQ ID NO: 25023 - DNA, 15 bp, Homo sapiens
tccaaagtcaggact

SEQ ID NO: 25024 - DNA, 15 bp, Homo sapiens
atccaaagtcaggac

SEQ ID NO: 25025 - DNA, 15 bp, Homo sapiens
aatccaaagtcagga

SEQ ID NO: 25026 - DNA, 15 bp, Homo sapiens
taatccaaagtcagg

SEQ ID NO: 25027 - DNA, 15 bp, Homo sapiens
ttaatccaaagtcag

SEQ ID NO: 25028 - DNA, 15 bp, Homo sapiens
gttaatccaaagtca

SEQ ID NO: 25029 - DNA, 15 bp, Homo sapiens
agttaatccaaagtc

SEQ ID NO: 25030 - DNA, 15 bp, Homo sapiens
aagttaatccaaagt

SEQ ID NO: 25031 - DNA, 15 bp, Homo sapiens
gaagttaatccaaag

SEQ ID NO: 25032 - DNA, 15 bp, Homo sapiens
agaagttaatccaaa

SEQ ID NO: 25033 - DNA, 15 bp, Homo sapiens
gagaagttaatccaa

SEQ ID NO: 25034 - DNA, 15 bp, Homo sapiens
tgagaagttaatcca

SEQ ID NO: 25035 - DNA, 15 bp, Homo sapiens
ctgagaagttaatcc

SEQ ID NO: 25036 - DNA, 15 bp, Homo sapiens
gctgagaagttaatc

SEQ ID NO: 25037 - DNA, 15 bp, Homo sapiens
ggctgagaagttaat

SEQ ID NO: 25038 - DNA, 15 bp, Homo sapiens
gggctgagaagttaa

SEQ ID NO: 25039 - DNA, 15 bp, Homo sapiens
tgggctgagaagtta

SEQ ID NO: 25040 - DNA, 15 bp, Homo sapiens
atgggctgagaagtt

SEQ ID NO: 25041 - DNA, 15 bp, Homo sapiens
aatgggctgagaagt

SEQ ID NO: 25042 - DNA, 15 bp, Homo sapiens
aaatgggctgagaag

SEQ ID NO: 25043 - DNA, 15 bp, Homo sapiens
caaatgggctgagaa

SEQ ID NO: 25044 - DNA, 15 bp, Homo sapiens
gcaaatgggctgaga

SEQ ID NO: 25045 - DNA, 15 bp, Homo sapiens
tgcaaatgggctgag

SEQ ID NO: 25046 - DNA, 15 bp, Homo sapiens
atgcaaatgggctga

SEQ ID NO: 25047 - DNA, 15 bp, Homo sapiens
catgcaaatgggctg

SEQ ID NO: 25048 - DNA, 15 bp, Homo sapiens
tcatgcaaatgggct

SEQ ID NO: 25049 - DNA, 15 bp, Homo sapiens
ttcatgcaaatgggc

SEQ ID NO: 25050 - DNA, 15 bp, Homo sapiens
tttcatgcaaatggg

SEQ ID NO: 25051 - DNA, 15 bp, Homo sapiens
ttttcatgcaaatgg

SEQ ID NO: 25052 - DNA, 15 bp, Homo sapiens
attttcatgcaaatg

SEQ ID NO: 25053 - DNA, 15 bp, Homo sapiens
tattttcatgcaaat

SEQ ID NO: 25054 - DNA, 15 bp, Homo sapiens
ttattttcatgcaaa

SEQ ID NO: 25055 - DNA, 15 bp, Homo sapiens
tttattttcatgcaa

SEQ ID NO: 25056 - DNA, 15 bp, Homo sapiens
ttttattttcatgca

SEQ ID NO: 25057 - DNA, 15 bp, Homo sapiens
tttttattttcatgc

SEQ ID NO: 25058 - DNA, 15 bp, Homo sapiens
ctttttattttcatg

SEQ ID NO: 25059 - DNA, 15 bp, Homo sapiens
tctttttattttcat

SEQ ID NO: 25060 - DNA, 15 bp, Homo sapiens
atctttttattttca

SEQ ID NO: 25061 - DNA, 15 bp, Homo sapiens
catctttttattttc

SEQ ID NO: 25062 - DNA, 15 bp, Homo sapiens
tcatctttttatttt

SEQ ID NO: 25063 - DNA, 15 bp, Homo sapiens
ttcatctttttattt

SEQ ID NO: 25064 - DNA, 15 bp, Homo sapiens
attcatctttttatt

SEQ ID NO: 25065 - DNA, 15 bp, Homo sapiens
tattcatctttttat

SEQ ID NO: 25066 - DNA, 15 bp, Homo sapiens
ttattcatcttttta

SEQ ID NO: 25067 - DNA, 15 bp, Homo sapiens
tttattcatcttttt

SEQ ID NO: 25068 - DNA, 15 bp, Homo sapiens
ttttattcatctttt

SEQ ID NO: 25069 - DNA, 15 bp, Homo sapiens
gttttattcatcttt

SEQ ID NO: 25070 - DNA, 15 bp, Homo sapiens
tgttttattcatctt

SEQ ID NO: 25071 - DNA, 15 bp, Homo sapiens
ttgttttattcatct

SEQ ID NO: 25072 - DNA, 15 bp, Homo sapiens
cttgttttattcatc

SEQ ID NO: 25073 - DNA, 15 bp, Homo sapiens
ccttgttttattcat

SEQ ID NO: 25074 - DNA, 15 bp, Homo sapiens
accttgttttattca

SEQ ID NO: 25075 - DNA, 15 bp, Homo sapiens
aaccttgttttattc

SEQ ID NO: 25076 - DNA, 15 bp, Homo sapiens
gaaccttgttttatt

SEQ ID NO: 25077 - DNA, 15 bp, Homo sapiens
ggaaccttgttttat

SEQ ID NO: 25078 - DNA, 15 bp, Homo sapiens
gggaaccttgtttta

SEQ ID NO: 25079 - DNA, 15 bp, Homo sapiens
tgggaaccttgtttt

SEQ ID NO: 25080 - DNA, 15 bp, Homo sapiens
gtgggaaccttgttt

SEQ ID NO: 25081 - DNA, 15 bp, Homo sapiens
agtgggaaccttgtt

SEQ ID NO: 25082 - DNA, 15 bp, Homo sapiens
aagtgggaaccttgt

SEQ ID NO: 25083 - DNA, 15 bp, Homo sapiens
aaagtgggaaccttg

SEQ ID NO: 25084 - DNA, 15 bp, Homo sapiens
caaagtgggaacctt

SEQ ID NO: 25085 - DNA, 15 bp, Homo sapiens
ccaaagtgggaacct

SEQ ID NO: 25086 - DNA, 15 bp, Homo sapiens
tccaaagtgggaacc

SEQ ID NO: 25087 - DNA, 15 bp, Homo sapiens
ctccaaagtgggaac

SEQ ID NO: 25088 - DNA, 15 bp, Homo sapiens
cctccaaagtgggaa

SEQ ID NO: 25089 - DNA, 15 bp, Homo sapiens
ccctccaaagtggga

SEQ ID NO: 25090 - DNA, 15 bp, Homo sapiens
tccctccaaagtggg

SEQ ID NO: 25091 - DNA, 15 bp, Homo sapiens
ctccctccaaagtgg

SEQ ID NO: 25092 - DNA, 15 bp, Homo sapiens
cctccctccaaagtg

SEQ ID NO: 25093 - DNA, 15 bp, Homo sapiens
acctccctccaaagt

SEQ ID NO: 25094 - DNA, 15 bp, Homo sapiens
cacctccctccaaag

SEQ ID NO: 25095 - DNA, 15 bp, Homo sapiens
ccacctccctccaaa

SEQ ID NO: 25096 - DNA, 15 bp, Homo sapiens
accacctccctccaa

SEQ ID NO: 25097 - DNA, 15 bp, Homo sapiens
taccacctccctcca

SEQ ID NO: 25098 - DNA, 15 bp, Homo sapiens
ctaccacctccctcc

SEQ ID NO: 25099 - DNA, 15 bp, Homo sapiens
gctaccacctccctc

SEQ ID NO: 25100 - DNA, 15 bp, Homo sapiens
agctaccacctccct

SEQ ID NO: 25101 - DNA, 15 bp, Homo sapiens
cagctaccacctccc

SEQ ID NO: 25102 - DNA, 15 bp, Homo sapiens
acagctaccacctcc

SEQ ID NO: 25103 - DNA, 15 bp, Homo sapiens
cacagctaccacctc

SEQ ID NO: 25104 - DNA, 15 bp, Homo sapiens
tcacagctaccacct

SEQ ID NO: 25105 - DNA, 15 bp, Homo sapiens
ctcacagctaccacc

SEQ ID NO: 25106 - DNA, 15 bp, Homo sapiens
tctcacagctaccac

SEQ ID NO: 25107 - DNA, 15 bp, Homo sapiens
atctcacagctacca

SEQ ID NO: 25108 - DNA, 15 bp, Homo sapiens
catctcacagctacc

SEQ ID NO: 25109 - DNA, 15 bp, Homo sapiens
ccatctcacagctac

SEQ ID NO: 25110 - DNA, 15 bp, Homo sapiens
tccatctcacagcta

SEQ ID NO: 25111 - DNA, 15 bp, Homo sapiens
ttccatctcacagct

SEQ ID NO: 25112 - DNA, 15 bp, Homo sapiens
cttccatctcacagc

SEQ ID NO: 25113 - DNA, 15 bp, Homo sapiens
ccttccatctcacag

SEQ ID NO: 25114 - DNA, 15 bp, Homo sapiens
tccttccatctcaca

SEQ ID NO: 25115 - DNA, 15 bp, Homo sapiens
ctccttccatctcac

SEQ ID NO: 25116 - DNA, 15 bp, Homo sapiens
actccttccatctca

SEQ ID NO: 25117 - DNA, 15 bp, Homo sapiens
cactccttccatctc

SEQ ID NO: 25118 - DNA, 15 bp, Homo sapiens
acactccttccatct

SEQ ID NO: 25119 - DNA, 15 bp, Homo sapiens
aacactccttccatc

SEQ ID NO: 25120 - DNA, 15 bp, Homo sapiens
gaacactccttccat

SEQ ID NO: 25121 - DNA, 15 bp, Homo sapiens
ggaacactccttcca

SEQ ID NO: 25122 - DNA, 15 bp, Homo sapiens
aggaacactccttcc

SEQ ID NO: 25123 - DNA, 15 bp, Homo sapiens
caggaacactccttc

SEQ ID NO: 25124 - DNA, 15 bp, Homo sapiens
gcaggaacactcctt

SEQ ID NO: 25125 - DNA, 15 bp, Homo sapiens
agcaggaacactcct

SEQ ID NO: 25126 - DNA, 15 bp, Homo sapiens
cagcaggaacactcc

SEQ ID NO: 25127 - DNA, 15 bp, Homo sapiens
ccagcaggaacactc

SEQ ID NO: 25128 - DNA, 15 bp, Homo sapiens
cccagcaggaacact

SEQ ID NO: 25129 - DNA, 15 bp, Homo sapiens
gcccagcaggaacac

SEQ ID NO: 25130 - DNA, 15 bp, Homo sapiens
tgcccagcaggaaca

SEQ ID NO: 25131 - DNA, 15 bp, Homo sapiens
ttgcccagcaggaac

SEQ ID NO: 25132 - DNA, 15 bp, Homo sapiens
gttgcccagcaggaa

SEQ ID NO: 25133 - DNA, 15 bp, Homo sapiens
tgttgcccagcagga

SEQ ID NO: 25134 - DNA, 15 bp, Homo sapiens
ctgttgcccagcagg

SEQ ID NO: 25135 - DNA, 15 bp, Homo sapiens
gctgttgcccagcag

SEQ ID NO: 25136 - DNA, 15 bp, Homo sapiens
tgctgttgcccagca

SEQ ID NO: 25137 - DNA, 15 bp, Homo sapiens
ctgctgttgcccagc

SEQ ID NO: 25138 - DNA, 15 bp, Homo sapiens
tctgctgttgcccag

SEQ ID NO: 25139 - DNA, 15 bp, Homo sapiens
ctctgctgttgccca

SEQ ID NO: 25140 - DNA, 15 bp, Homo sapiens
actctgctgttgccc

SEQ ID NO: 25141 - DNA, 15 bp, Homo sapiens
tactctgctgttgcc

SEQ ID NO: 25142 - DNA, 15 bp, Homo sapiens
ttactctgctgttgc

SEQ ID NO: 25143 - DNA, 15 bp, Homo sapiens
cttactctgctgttg

SEQ ID NO: 25144 - DNA, 15 bp, Homo sapiens
acttactctgctgtt

SEQ ID NO: 25145 - DNA, 15 bp, Homo sapiens
cacttactctgctgt

SEQ ID NO: 25146 - DNA, 15 bp, Homo sapiens
gcacttactctgctg

SEQ ID NO: 25147 - DNA, 15 bp, Homo sapiens
agcacttactctgct

SEQ ID NO: 25148 - DNA, 15 bp, Homo sapiens
cagcacttactctgc

SEQ ID NO: 25149 - DNA, 15 bp, Homo sapiens
ccagcacttactctg

SEQ ID NO: 25150 - DNA, 15 bp, Homo sapiens
cccagcacttactct

SEQ ID NO: 25151 - DNA, 15 bp, Homo sapiens
ccccagcacttactc

SEQ ID NO: 25152 - DNA, 15 bp, Homo sapiens
accccagcacttact

SEQ ID NO: 25153 - DNA, 15 bp, Homo sapiens
taccccagcacttac

SEQ ID NO: 25154 - DNA, 15 bp, Homo sapiens
ctaccccagcactta

SEQ ID NO: 25155 - DNA, 15 bp, Homo sapiens
tctaccccagcactt

SEQ ID NO: 25156 - DNA, 15 bp, Homo sapiens
atctaccccagcact

SEQ ID NO: 25157 - DNA, 15 bp, Homo sapiens
aatctaccccagcac

SEQ ID NO: 25158 - DNA, 15 bp, Homo sapiens
gaatctaccccagca

SEQ ID NO: 25159 - DNA, 15 bp, Homo sapiens
tgaatctaccccagc

SEQ ID NO: 25160 - DNA, 15 bp, Homo sapiens
gtgaatctaccccag

SEQ ID NO: 25161 - DNA, 15 bp, Homo sapiens
agtgaatctacccca

SEQ ID NO: 25162 - DNA, 15 bp, Homo sapiens
gagtgaatctacccc

SEQ ID NO: 25163 - DNA, 15 bp, Homo sapiens
ggagtgaatctaccc

SEQ ID NO: 25164 - DNA, 15 bp, Homo sapiens
gggagtgaatctacc

SEQ ID NO: 25165 - DNA, 15 bp, Homo sapiens
tgggagtgaatctac

SEQ ID NO: 25166 - DNA, 15 bp, Homo sapiens
gtgggagtgaatcta

SEQ ID NO: 25167 - DNA, 15 bp, Homo sapiens
tgtgggagtgaatct

SEQ ID NO: 25168 - DNA, 15 bp, Homo sapiens
ctgtgggagtgaatc

SEQ ID NO: 25169 - DNA, 15 bp, Homo sapiens
actgtgggagtgaat

SEQ ID NO: 25170 - DNA, 15 bp, Homo sapiens
cactgtgggagtgaa

SEQ ID NO: 25171 - DNA, 15 bp, Homo sapiens
gcactgtgggagtga

SEQ ID NO: 25172 - DNA, 15 bp, Homo sapiens
ggcactgtgggagtg

SEQ ID NO: 25173 - DNA, 15 bp, Homo sapiens
aggcactgtgggagt

SEQ ID NO: 25174 - DNA, 15 bp, Homo sapiens
caggcactgtgggag

SEQ ID NO: 25175 - DNA, 15 bp, Homo sapiens
ccaggcactgtggga

SEQ ID NO: 25176 - DNA, 15 bp, Homo sapiens
tccaggcactgtggg

SEQ ID NO: 25177 - DNA, 15 bp, Homo sapiens
ttccaggcactgtgg

SEQ ID NO: 25178 - DNA, 15 bp, Homo sapiens
tttccaggcactgtg

SEQ ID NO: 25179 - DNA, 15 bp, Homo sapiens
ttttccaggcactgt

SEQ ID NO: 25180 - DNA, 15 bp, Homo sapiens
attttccaggcactg

SEQ ID NO: 25181 - DNA, 15 bp, Homo sapiens
gattttccaggcact

SEQ ID NO: 25182 - DNA, 15 bp, Homo sapiens
ggattttccaggcac

SEQ ID NO: 25183 - DNA, 15 bp, Homo sapiens
aggattttccaggca

SEQ ID NO: 25184 - DNA, 15 bp, Homo sapiens
gaggattttccaggc

SEQ ID NO: 25185 - DNA, 15 bp, Homo sapiens
tgaggattttccagg

SEQ ID NO: 25186 - DNA, 15 bp, Homo sapiens
atgaggattttccag

SEQ ID NO: 25187 - DNA, 15 bp, Homo sapiens
tatgaggattttcca

SEQ ID NO: 25188 - DNA, 15 bp, Homo sapiens
ctatgaggattttcc

SEQ ID NO: 25189 - DNA, 15 bp, Homo sapiens
cctatgaggattttc

SEQ ID NO: 25190 - DNA, 15 bp, Homo sapiens
gcctatgaggatttt

SEQ ID NO: 25191 - DNA, 15 bp, Homo sapiens
agcctatgaggattt

SEQ ID NO: 25192 - DNA, 15 bp, Homo sapiens
gagcctatgaggatt

SEQ ID NO: 25193 - DNA, 15 bp, Homo sapiens
tgagcctatgaggat

SEQ ID NO: 25194 - DNA, 15 bp, Homo sapiens
atgagcctatgagga

SEQ ID NO: 25195 - DNA, 15 bp, Homo sapiens
aatgagcctatgagg

SEQ ID NO: 25196 - DNA, 15 bp, Homo sapiens
aaatgagcctatgag

SEQ ID NO: 25197 - DNA, 15 bp, Homo sapiens
caaatgagcctatga

SEQ ID NO: 25198 - DNA, 15 bp, Homo sapiens
acaaatgagcctatg

SEQ ID NO: 25199 - DNA, 15 bp, Homo sapiens
aacaaatgagcctat

SEQ ID NO: 25200 - DNA, 15 bp, Homo sapiens
caacaaatgagccta

SEQ ID NO: 25201 - DNA, 15 bp, Homo sapiens
tcaacaaatgagcct

SEQ ID NO: 25202 - DNA, 15 bp, Homo sapiens
ctcaacaaatgagcc

SEQ ID NO: 25203 - DNA, 15 bp, Homo sapiens
actcaacaaatgagc

SEQ ID NO: 25204 - DNA, 15 bp, Homo sapiens
gactcaacaaatgag

SEQ ID NO: 25205 - DNA, 15 bp, Homo sapiens
agactcaacaaatga

SEQ ID NO: 25206 - DNA, 15 bp, Homo sapiens
aagactcaacaaatg

SEQ ID NO: 25207 - DNA, 15 bp, Homo sapiens
aaagactcaacaaat

SEQ ID NO: 25208 - DNA, 15 bp, Homo sapiens
caaagactcaacaaa

SEQ ID NO: 25209 - DNA, 15 bp, Homo sapiens
acaaagactcaacaa

SEQ ID NO: 25210 - DNA, 15 bp, Homo sapiens
gacaaagactcaaca

SEQ ID NO: 25211 - DNA, 15 bp, Homo sapiens
ggacaaagactcaac

SEQ ID NO: 25212 - DNA, 15 bp, Homo sapiens
aggacaaagactcaa

SEQ ID NO: 25213 - DNA, 15 bp, Homo sapiens
taggacaaagactca

SEQ ID NO: 25214 - DNA, 15 bp, Homo sapiens
gtaggacaaagactc

SEQ ID NO: 25215 - DNA, 15 bp, Homo sapiens
tgtaggacaaagact

SEQ ID NO: 25216 - DNA, 15 bp, Homo sapiens
gtgtaggacaaagac

SEQ ID NO: 25217 - DNA, 15 bp, Homo sapiens
ggtgtaggacaaaga

SEQ ID NO: 25218 - DNA, 15 bp, Homo sapiens
tggtgtaggacaaag

SEQ ID NO: 25219 - DNA, 15 bp, Homo sapiens
ctggtgtaggacaaa

SEQ ID NO: 25220 - DNA, 15 bp, Homo sapiens
cctggtgtaggacaa

SEQ ID NO: 25221 - DNA, 15 bp, Homo sapiens
gcctggtgtaggaca

SEQ ID NO: 25222 - DNA, 15 bp, Homo sapiens
tgcctggtgtaggac

SEQ ID NO: 25223 - DNA, 15 bp, Homo sapiens
gtgcctggtgtagga

SEQ ID NO: 25224 - DNA, 15 bp, Homo sapiens
agtgcctggtgtagg

SEQ ID NO: 25225 - DNA, 15 bp, Homo sapiens
gagtgcctggtgtag

SEQ ID NO: 25226 - DNA, 15 bp, Homo sapiens
agagtgcctggtgta

SEQ ID NO: 25227 - DNA, 15 bp, Homo sapiens
cagagtgcctggtgt

SEQ ID NO: 25228 - DNA, 15 bp, Homo sapiens
gcagagtgcctggtg

SEQ ID NO: 25229 - DNA, 15 bp, Homo sapiens
tgcagagtgcctggt

SEQ ID NO: 25230 - DNA, 15 bp, Homo sapiens
ttgcagagtgcctgg

SEQ ID NO: 25231 - DNA, 15 bp, Homo sapiens
tttgcagagtgcctg

SEQ ID NO: 25232 - DNA, 15 bp, Homo sapiens
ttttgcagagtgcct

SEQ ID NO: 25233 - DNA, 15 bp, Homo sapiens
tttttgcagagtgcc

SEQ ID NO: 25234 - DNA, 15 bp, Homo sapiens
gtttttgcagagtgc

SEQ ID NO: 25235 - DNA, 15 bp, Homo sapiens
cgtttttgcagagtg

SEQ ID NO: 25236 - DNA, 15 bp, Homo sapiens
gcgtttttgcagagt

SEQ ID NO: 25237 - DNA, 15 bp, Homo sapiens
agcgtttttgcagag

SEQ ID NO: 25238 - DNA, 15 bp, Homo sapiens
aagcgtttttgcaga

SEQ ID NO: 25239 - DNA, 15 bp, Homo sapiens
aaagcgtttttgcag

SEQ ID NO: 25240 - DNA, 15 bp, Homo sapiens
caaagcgtttttgca

SEQ ID NO: 25241 - DNA, 15 bp, Homo sapiens
gcaaagcgtttttgc

SEQ ID NO: 25242 - DNA, 15 bp, Homo sapiens
ggcaaagcgtttttg

SEQ ID NO: 25243 - DNA, 15 bp, Homo sapiens
aggcaaagcgttttt

SEQ ID NO: 25244 - DNA, 15 bp, Homo sapiens
caggcaaagcgtttt

SEQ ID NO: 25245 - DNA, 15 bp, Homo sapiens
gcaggcaaagcgttt

SEQ ID NO: 25246 - DNA, 15 bp, Homo sapiens
tgcaggcaaagcgtt

SEQ ID NO: 25247 - DNA, 15 bp, Homo sapiens
ttgcaggcaaagcgt

SEQ ID NO: 25248 - DNA, 15 bp, Homo sapiens
cttgcaggcaaagcg

SEQ ID NO: 25249 - DNA, 15 bp, Homo sapiens
ccttgcaggcaaagc

SEQ ID NO: 25250 - DNA, 15 bp, Homo sapiens
accttgcaggcaaag

SEQ ID NO: 25251 - DNA, 15 bp, Homo sapiens
gaccttgcaggcaaa

SEQ ID NO: 25252 - DNA, 15 bp, Homo sapiens
agaccttgcaggcaa

SEQ ID NO: 25253 - DNA, 15 bp, Homo sapiens
gagaccttgcaggca

SEQ ID NO: 25254 - DNA, 15 bp, Homo sapiens
tgagaccttgcaggc

SEQ ID NO: 25255 - DNA, 15 bp, Homo sapiens
atgagaccttgcagg

SEQ ID NO: 25256 - DNA, 15 bp, Homo sapiens
catgagaccttgcag

SEQ ID NO: 25257 - DNA, 15 bp, Homo sapiens
gcatgagaccttgca

SEQ ID NO: 25258 - DNA, 15 bp, Homo sapiens
cgcatgagaccttgc

SEQ ID NO: 25259 - DNA, 15 bp, Homo sapiens
tcgcatgagaccttg

SEQ ID NO: 25260 - DNA, 15 bp, Homo sapiens
atcgcatgagacctt

SEQ ID NO: 25261 - DNA, 15 bp, Homo sapiens
catcgcatgagacct

SEQ ID NO: 25262 - DNA, 15 bp, Homo sapiens
gcatcgcatgagacc

SEQ ID NO: 25263 - DNA, 15 bp, Homo sapiens
agcatcgcatgagac

SEQ ID NO: 25264 - DNA, 15 bp, Homo sapiens
gagcatcgcatgaga

SEQ ID NO: 25265 - DNA, 15 bp, Homo sapiens
tgagcatcgcatgag

SEQ ID NO: 25266 - DNA, 15 bp, Homo sapiens
gtgagcatcgcatga

SEQ ID NO: 25267 - DNA, 15 bp, Homo sapiens
ggtgagcatcgcatg

SEQ ID NO: 25268 - DNA, 15 bp, Homo sapiens
tggtgagcatcgcat

SEQ ID NO: 25269 - DNA, 15 bp, Homo sapiens
gtggtgagcatcgca

SEQ ID NO: 25270 - DNA, 15 bp, Homo sapiens
tgtggtgagcatcgc

SEQ ID NO: 25271 - DNA, 15 bp, Homo sapiens
ctgtggtgagcatcg

SEQ ID NO: 25272 - DNA, 15 bp, Homo sapiens
gctgtggtgagcatc

SEQ ID NO: 25273 - DNA, 15 bp, Homo sapiens
agctgtggtgagcat

SEQ ID NO: 25274 - DNA, 15 bp, Homo sapiens
gagctgtggtgagca

SEQ ID NO: 25275 - DNA, 15 bp, Homo sapiens
agagctgtggtgagc

SEQ ID NO: 25276 - DNA, 15 bp, Homo sapiens
cagagctgtggtgag

SEQ ID NO: 25277 - DNA, 15 bp, Homo sapiens
acagagctgtggtga

SEQ ID NO: 25278 - DNA, 15 bp, Homo sapiens
cacagagctgtggtg

SEQ ID NO: 25279 - DNA, 15 bp, Homo sapiens
tcacagagctgtggt

SEQ ID NO: 25280 - DNA, 15 bp, Homo sapiens
ttcacagagctgtgg

SEQ ID NO: 25281 - DNA, 15 bp, Homo sapiens
cttcacagagctgtg

SEQ ID NO: 25282 - DNA, 15 bp, Homo sapiens
acttcacagagctgt

SEQ ID NO: 25283 - DNA, 15 bp, Homo sapiens
aacttcacagagctg

SEQ ID NO: 25284 - DNA, 15 bp, Homo sapiens
taacttcacagagct

SEQ ID NO: 25285 - DNA, 15 bp, Homo sapiens
ttaacttcacagagc

SEQ ID NO: 25286 - DNA, 15 bp, Homo sapiens
attaacttcacagag

SEQ ID NO: 25287 - DNA, 15 bp, Homo sapiens
aattaacttcacaga

SEQ ID NO: 25288 - DNA, 15 bp, Homo sapiens
caattaacttcacag

SEQ ID NO: 25289 - DNA, 15 bp, Homo sapiens
acaattaacttcaca

SEQ ID NO: 25290 - DNA, 15 bp, Homo sapiens
tacaattaacttcac

SEQ ID NO: 25291 - DNA, 15 bp, Homo sapiens
gtacaattaacttca

SEQ ID NO: 25292 - DNA, 15 bp, Homo sapiens
agtacaattaacttc

SEQ ID NO: 25293 - DNA, 15 bp, Homo sapiens
aagtacaattaactt

SEQ ID NO: 25294 - DNA, 15 bp, Homo sapiens
aaagtacaattaact

SEQ ID NO: 25295 - DNA, 15 bp, Homo sapiens
aaaagtacaattaac

SEQ ID NO: 25296 - DNA, 15 bp, Homo sapiens
taaaagtacaattaa

SEQ ID NO: 25297 - DNA, 15 bp, Homo sapiens
ataaaagtacaatta

SEQ ID NO: 25298 - DNA, 15 bp, Homo sapiens
gataaaagtacaatt

SEQ ID NO: 25299 - DNA, 15 bp, Homo sapiens
tgataaaagtacaat

SEQ ID NO: 25300 - DNA, 15 bp, Homo sapiens
gtgataaaagtacaa

SEQ ID NO: 25301 - DNA, 15 bp, Homo sapiens
ggtgataaaagtaca

SEQ ID NO: 25302 - DNA, 15 bp, Homo sapiens
tggtgataaaagtac

SEQ ID NO: 25303 - DNA, 15 bp, Homo sapiens
atggtgataaaagta

SEQ ID NO: 25304 - DNA, 15 bp, Homo sapiens
aatggtgataaaagt

SEQ ID NO: 25305 - DNA, 15 bp, Homo sapiens
aaatggtgataaaag

SEQ ID NO: 25306 - DNA, 15 bp, Homo sapiens
aaaatggtgataaaa

SEQ ID NO: 25307 - DNA, 15 bp, Homo sapiens
taaaatggtgataaa

SEQ ID NO: 25308 - DNA, 15 bp, Homo sapiens
gtaaaatggtgataa

SEQ ID NO: 25309 - DNA, 15 bp, Homo sapiens
tgtaaaatggtgata

SEQ ID NO: 25310 - DNA, 15 bp, Homo sapiens
ctgtaaaatggtgat

SEQ ID NO: 25311 - DNA, 15 bp, Homo sapiens
tctgtaaaatggtga

SEQ ID NO: 25312 - DNA, 15 bp, Homo sapiens
atctgtaaaatggtg

SEQ ID NO: 25313 - DNA, 15 bp, Homo sapiens
catctgtaaaatggt

SEQ ID NO: 25314 - DNA, 15 bp, Homo sapiens
tctcatctgtaaaat

SEQ ID NO: 25315 - DNA, 15 bp, Homo sapiens
ttctcatctgtaaaa

SEQ ID NO: 25316 - DNA, 15 bp, Homo sapiens
tttctcatctgtaaa

SEQ ID NO: 25317 - DNA, 15 bp, Homo sapiens
ttttctcatctgtaa

SEQ ID NO: 25318 - DNA, 15 bp, Homo sapiens
gttttctcatctgta

SEQ ID NO: 25319 - DNA, 15 bp, Homo sapiens
agttttctcatctgt

SEQ ID NO: 25320 - DNA, 15 bp, Homo sapiens
cagttttctcatctg

SEQ ID NO: 25321 - DNA, 15 bp, Homo sapiens
tcagttttctcatct

SEQ ID NO: 25322 - DNA, 15 bp, Homo sapiens
ctcagttttctcatc

SEQ ID NO: 25323 - DNA, 15 bp, Homo sapiens
cctcagttttctcat

SEQ ID NO: 25324 - DNA, 15 bp, Homo sapiens
ccctcagttttctca

SEQ ID NO: 25325 - DNA, 15 bp, Homo sapiens
accctcagttttctc

SEQ ID NO: 25326 - DNA, 15 bp, Homo sapiens
taccctcagttttct

SEQ ID NO: 25327 - DNA, 15 bp, Homo sapiens
ataccctcagttttc

SEQ ID NO: 25328 - DNA, 15 bp, Homo sapiens
cataccctcagtttt

SEQ ID NO: 25329 - DNA, 15 bp, Homo sapiens
ccataccctcagttt

SEQ ID NO: 25330 - DNA, 15 bp, Homo sapiens
cccataccctcagtt

SEQ ID NO: 25331 - DNA, 15 bp, Homo sapiens
ccccataccctcagt

SEQ ID NO: 25332 - DNA, 15 bp, Homo sapiens
accccataccctcag

SEQ ID NO: 25333 - DNA, 15 bp, Homo sapiens
gaccccataccctca

SEQ ID NO: 25334 - DNA, 15 bp, Homo sapiens
tgaccccataccctc

SEQ ID NO: 25335 - DNA, 15 bp, Homo sapiens
ttgaccccataccct

SEQ ID NO: 25336 - DNA, 15 bp, Homo sapiens
attgaccccataccc

SEQ ID NO: 25337 - DNA, 15 bp, Homo sapiens
cattgaccccatacc

SEQ ID NO: 25338 - DNA, 15 bp, Homo sapiens
tcattgaccccatac

SEQ ID NO: 25339 - DNA, 15 bp, Homo sapiens
gtcattgaccccata

SEQ ID NO: 25340 - DNA, 15 bp, Homo sapiens
agtcattgaccccat

SEQ ID NO: 25341 - DNA, 15 bp, Homo sapiens
aagtcattgacccca

SEQ ID NO: 25342 - DNA, 15 bp, Homo sapiens
caagtcattgacccc

SEQ ID NO: 25343 - DNA, 15 bp, Homo sapiens
ccaagtcattgaccc

SEQ ID NO: 25344 - DNA, 15 bp, Homo sapiens
gccaagtcattgacc

SEQ ID NO: 25345 - DNA, 15 bp, Homo sapiens
agccaagtcattgac

SEQ ID NO: 25346 - DNA, 15 bp, Homo sapiens
tagccaagtcattga

SEQ ID NO: 25347 - DNA, 15 bp, Homo sapiens
ttagccaagtcattg

SEQ ID NO: 25348 - DNA, 15 bp, Homo sapiens
tttagccaagtcatt

SEQ ID NO: 25349 - DNA, 15 bp, Homo sapiens
ctttagccaagtcat

SEQ ID NO: 25350 - DNA, 15 bp, Homo sapiens
actttagccaagtca

SEQ ID NO: 25351 - DNA, 15 bp, Homo sapiens
gactttagccaagtc

SEQ ID NO: 25352 - DNA, 15 bp, Homo sapiens
tgactttagccaagt

SEQ ID NO: 25353 - DNA, 15 bp, Homo sapiens
gtgactttagccaag

SEQ ID NO: 25354 - DNA, 15 bp, Homo sapiens
agtgactttagccaa

SEQ ID NO: 25355 - DNA, 15 bp, Homo sapiens
cagtgactttagcca

SEQ ID NO: 25356 - DNA, 15 bp, Homo sapiens
gcagtgactttagcc

SEQ ID NO: 25357 - DNA, 15 bp, Homo sapiens
agcagtgactttagc

SEQ ID NO: 25358 - DNA, 15 bp, Homo sapiens
aagcagtgactttag

SEQ ID NO: 25359 - DNA, 15 bp, Homo sapiens
taagcagtgacttta

SEQ ID NO: 25360 - DNA, 15 bp, Homo sapiens
ctaagcagtgacttt

SEQ ID NO: 25361 - DNA, 15 bp, Homo sapiens
gctaagcagtgactt

SEQ ID NO: 25362 - DNA, 15 bp, Homo sapiens
tgctaagcagtgact

SEQ ID NO: 25363 - DNA, 15 bp, Homo sapiens
ttgctaagcagtgac

SEQ ID NO: 25364 - DNA, 15 bp, Homo sapiens
cttgctaagcagtga

SEQ ID NO: 25365 - DNA, 15 bp, Homo sapiens
gcttgctaagcagtg

SEQ ID NO: 25366 - DNA, 15 bp, Homo sapiens
agcttgctaagcagt

SEQ ID NO: 25367 - DNA, 15 bp, Homo sapiens
cagcttgctaagcag

SEQ ID NO: 25368 - DNA, 15 bp, Homo sapiens
gcagcttgctaagca

SEQ ID NO: 25369 - DNA, 15 bp, Homo sapiens
tgcagcttgctaagc

SEQ ID NO: 25370 - DNA, 15 bp, Homo sapiens
ctgcagcttgctaag

SEQ ID NO: 25371 - DNA, 15 bp, Homo sapiens
cctgcagcttgctaa

SEQ ID NO: 25372 - DNA, 15 bp, Homo sapiens
ccctgcagcttgcta

SEQ ID NO: 25373 - DNA, 15 bp, Homo sapiens
tccctgcagcttgct

SEQ ID NO: 25374 - DNA, 15 bp, Homo sapiens
gtccctgcagcttgc

SEQ ID NO: 25375 - DNA, 15 bp, Homo sapiens
ccagtccctgcagct

SEQ ID NO: 25376 - DNA, 15 bp, Homo sapiens
tccagtccctgcagc

SEQ ID NO: 25377 - DNA, 15 bp, Homo sapiens
atccagtccctgcag

SEQ ID NO: 25378 - DNA, 15 bp, Homo sapiens
catccagtccctgca

SEQ ID NO: 25379 - DNA, 15 bp, Homo sapiens
acatccagtccctgc

SEQ ID NO: 25380 - DNA, 15 bp, Homo sapiens
cacatccagtccctg

SEQ ID NO: 25381 - DNA, 15 bp, Homo sapiens
tcacatccagtccct

SEQ ID NO: 25382 - DNA, 15 bp, Homo sapiens
ttcacatccagtccc

SEQ ID NO: 25383 - DNA, 15 bp, Homo sapiens
attcacatccagtcc

SEQ ID NO: 25384 - DNA, 15 bp, Homo sapiens
aattcacatccagtc

SEQ ID NO: 25385 - DNA, 15 bp, Homo sapiens
gaattcacatccagt

SEQ ID NO: 25386 - DNA, 15 bp, Homo sapiens
ggaattcacatccag

SEQ ID NO: 25387 - DNA, 15 bp, Homo sapiens
tggaattcacatcca

SEQ ID NO: 25388 - DNA, 15 bp, Homo sapiens
ttggaattcacatcc

SEQ ID NO: 25389 - DNA, 15 bp, Homo sapiens
attggaattcacatc

SEQ ID NO: 25390 - DNA, 15 bp, Homo sapiens
aattggaattcacat

SEQ ID NO: 25391 - DNA, 15 bp, Homo sapiens
caattggaattcaca

SEQ ID NO: 25392 - DNA, 15 bp, Homo sapiens
ccaattggaattcac

SEQ ID NO: 25393 - DNA, 15 bp, Homo sapiens
accaattggaattca

SEQ ID NO: 25394 - DNA, 15 bp, Homo sapiens
aaccaattggaattc

SEQ ID NO: 25395 - DNA, 15 bp, Homo sapiens
aaaccaattggaatt

SEQ ID NO: 25396 - DNA, 15 bp, Homo sapiens
caaaccaattggaat

SEQ ID NO: 25397 - DNA, 15 bp, Homo sapiens
tcaaaccaattggaa

SEQ ID NO: 25398 - DNA, 15 bp, Homo sapiens
gtcaaaccaattgga

SEQ ID NO: 25399 - DNA, 15 bp, Homo sapiens
agtcaaaccaattgg

SEQ ID NO: 25400 - DNA, 15 bp, Homo sapiens
gagtcaaaccaattg

SEQ ID NO: 25401 - DNA, 15 bp, Homo sapiens
ggagtcaaaccaatt

SEQ ID NO: 25402 - DNA, 15 bp, Homo sapiens
tggagtcaaaccaat

SEQ ID NO: 25403 - DNA, 15 bp, Homo sapiens
ttggagtcaaaccaa

SEQ ID NO: 25404 - DNA, 15 bp, Homo sapiens
tttggagtcaaacca

SEQ ID NO: 25405 - DNA, 15 bp, Homo sapiens
ctttggagtcaaacc

SEQ ID NO: 25406 - DNA, 15 bp, Homo sapiens
ggctttggagtcaaa

SEQ ID NO: 25407 - DNA, 15 bp, Homo sapiens
aggctttggagtcaa

SEQ ID NO: 25408 - DNA, 15 bp, Homo sapiens
caggctttggagtca

SEQ ID NO: 25409 - DNA, 15 bp, Homo sapiens
acaggctttggagtc

SEQ ID NO: 25410 - DNA, 15 bp, Homo sapiens
cacaggctttggagt

SEQ ID NO: 25411 - DNA, 15 bp, Homo sapiens
tcacaggctttggag

SEQ ID NO: 25412 - DNA, 15 bp, Homo sapiens
ttcacaggctttgga

SEQ ID NO: 25413 - DNA, 15 bp, Homo sapiens
cttcacaggctttgg

SEQ ID NO: 25414 - DNA, 15 bp, Homo sapiens
gcttcacaggctttg

SEQ ID NO: 25415 - DNA, 15 bp, Homo sapiens
agcttcacaggcttt

SEQ ID NO: 25416 - DNA, 15 bp, Homo sapiens
tagcttcacaggctt

SEQ ID NO: 25417 - DNA, 15 bp, Homo sapiens
gtagcttcacaggct

SEQ ID NO: 25418 - DNA, 15 bp, Homo sapiens
agtagcttcacaggc

SEQ ID NO: 25419 - DNA, 15 bp, Homo sapiens
aagtagcttcacagg

SEQ ID NO: 25420 - DNA, 15 bp, Homo sapiens
caagtagcttcacag

SEQ ID NO: 25421 - DNA, 15 bp, Homo sapiens
acaagtagcttcaca

SEQ ID NO: 25422 - DNA, 15 bp, Homo sapiens
aacaagtagcttcac

SEQ ID NO: 25423 - DNA, 15 bp, Homo sapiens
gaacaagtagcttca

SEQ ID NO: 25424 - DNA, 15 bp, Homo sapiens
agaacaagtagcttc

SEQ ID NO: 25425 - DNA, 15 bp, Homo sapiens
aagaacaagtagctt

SEQ ID NO: 25426 - DNA, 15 bp, Homo sapiens
gaagaacaagtagct

SEQ ID NO: 25427 - DNA, 15 bp, Homo sapiens
tgaagaacaagtagc

SEQ ID NO: 25428 - DNA, 15 bp, Homo sapiens
gtgaagaacaagtag

SEQ ID NO: 25429 - DNA, 15 bp, Homo sapiens
ggtgaagaacaagta

SEQ ID NO: 25430 - DNA, 15 bp, Homo sapiens
tggtgaagaacaagt

SEQ ID NO: 25431 - DNA, 15 bp, Homo sapiens
gtggtgaagaacaag

SEQ ID NO: 25432 - DNA, 15 bp, Homo sapiens
ggtggtgaagaacaa

SEQ ID NO: 25433 - DNA, 15 bp, Homo sapiens
aggtggtgaagaaca

SEQ ID NO: 25434 - DNA, 15 bp, Homo sapiens
taggtggtgaagaac

SEQ ID NO: 25435 - DNA, 15 bp, Homo sapiens
ctaggtggtgaagaa

SEQ ID NO: 25436 - DNA, 15 bp, Homo sapiens
tctaggtggtgaaga

SEQ ID NO: 25437 - DNA, 15 bp, Homo sapiens
ctctaggtggtgaag

SEQ ID NO: 25438 - DNA, 15 bp, Homo sapiens
gctctaggtggtgaa

SEQ ID NO: 25439 - DNA, 15 bp, Homo sapiens
agctctaggtggtga

SEQ ID NO: 25440 - DNA, 15 bp, Homo sapiens
cagctctaggtggtg

SEQ ID NO: 25441 - DNA, 15 bp, Homo sapiens
acagctctaggtggt

SEQ ID NO: 25442 - DNA, 15 bp, Homo sapiens
cacagctctaggtgg

SEQ ID NO: 25443 - DNA, 15 bp, Homo sapiens
ccacagctctaggtg

SEQ ID NO: 25444 - DNA, 15 bp, Homo sapiens
accacagctctaggt

SEQ ID NO: 25445 - DNA, 15 bp, Homo sapiens
aaccacagctctagg

SEQ ID NO: 25446 - DNA, 15 bp, Homo sapiens
gaaccacagctctag

SEQ ID NO: 25447 - DNA, 15 bp, Homo sapiens
agaaccacagctcta

SEQ ID NO: 25448 - DNA, 15 bp, Homo sapiens
aagaaccacagctct

SEQ ID NO: 25449 - DNA, 15 bp, Homo sapiens
caagaaccacagctc

SEQ ID NO: 25450 - DNA, 15 bp, Homo sapiens
tcaagaaccacagct

SEQ ID NO: 25451 - DNA, 15 bp, Homo sapiens
atcaagaaccacagc

SEQ ID NO: 25452 - DNA, 15 bp, Homo sapiens
tatcaagaaccacag

SEQ ID NO: 25453 - DNA, 15 bp, Homo sapiens
ttatcaagaaccaca

SEQ ID NO: 25454 - DNA, 15 bp, Homo sapiens
gttatcaagaaccac

SEQ ID NO: 25455 - DNA, 15 bp, Homo sapiens
agttatcaagaacca

SEQ ID NO: 25456 - DNA, 15 bp, Homo sapiens
cagttatcaagaacc

SEQ ID NO: 25457 - DNA, 15 bp, Homo sapiens
acagttatcaagaac

SEQ ID NO: 25458 - DNA, 15 bp, Homo sapiens
cacagttatcaagaa

SEQ ID NO: 25459 - DNA, 15 bp, Homo sapiens
tcacagttatcaaga

SEQ ID NO: 25460 - DNA, 15 bp, Homo sapiens
ttcacagttatcaag

SEQ ID NO: 25461 - DNA, 15 bp, Homo sapiens
gttcacagttatcaa

SEQ ID NO: 25462 - DNA, 15 bp, Homo sapiens
agttcacagttatca

SEQ ID NO: 25463 - DNA, 15 bp, Homo sapiens
gagttcacagttatc

SEQ ID NO: 25464 - DNA, 15 bp, Homo sapiens
agagttcacagttat

SEQ ID NO: 25465 - DNA, 15 bp, Homo sapiens
aagagttcacagtta

SEQ ID NO: 25466 - DNA, 15 bp, Homo sapiens
aaagagttcacagtt

SEQ ID NO: 25467 - DNA, 15 bp, Homo sapiens
aaaagagttcacagt

SEQ ID NO: 25468 - DNA, 15 bp, Homo sapiens
caaaagagttcacag

SEQ ID NO: 25469 - DNA, 15 bp, Homo sapiens
ccaaaagagttcaca

SEQ ID NO: 25470 - DNA, 15 bp, Homo sapiens
cccaaaagagttcac

SEQ ID NO: 25471 - DNA, 15 bp, Homo sapiens
ccccaaaagagttca

SEQ ID NO: 25472 - DNA, 15 bp, Homo sapiens
accccaaaagagttc

SEQ ID NO: 25473 - DNA, 15 bp, Homo sapiens
gaccccaaaagagtt

SEQ ID NO: 25474 - DNA, 15 bp, Homo sapiens
tgaccccaaaagagt

SEQ ID NO: 25475 - DNA, 15 bp, Homo sapiens
gtgaccccaaaagag

SEQ ID NO: 25476 - DNA, 15 bp, Homo sapiens
tgtgaccccaaaaga

SEQ ID NO: 25477 - DNA, 15 bp, Homo sapiens
ttgtgaccccaaaag

SEQ ID NO: 25478 - DNA, 15 bp, Homo sapiens
tttgtgaccccaaaa

SEQ ID NO: 25479 - DNA, 15 bp, Homo sapiens
atttgtgaccccaaa

SEQ ID NO: 25480 - DNA, 15 bp, Homo sapiens
tatttgtgaccccaa

SEQ ID NO: 25481 - DNA, 15 bp, Homo sapiens
ctatttgtgacccca

SEQ ID NO: 25482 - DNA, 15 bp, Homo sapiens
gctatttgtgacccc

SEQ ID NO: 25483 - DNA, 15 bp, Homo sapiens
ggctatttgtgaccc

SEQ ID NO: 25484 - DNA, 15 bp, Homo sapiens
gggctatttgtgacc

SEQ ID NO: 25485 - DNA, 15 bp, Homo sapiens
agggctatttgtgac

SEQ ID NO: 25486 - DNA, 15 bp, Homo sapiens
cagggctatttgtga

SEQ ID NO: 25487 - DNA, 15 bp, Homo sapiens
tcagggctatttgtg

SEQ ID NO: 25488 - DNA, 15 bp, Homo sapiens
ctcagggctatttgt

SEQ ID NO: 25489 - DNA, 15 bp, Homo sapiens
tctcagggctatttg

SEQ ID NO: 25490 - DNA, 15 bp, Homo sapiens
ttctcagggctattt

SEQ ID NO: 25491 - DNA, 15 bp, Homo sapiens
attctcagggctatt

SEQ ID NO: 25492 - DNA, 15 bp, Homo sapiens
tattctcagggctat

SEQ ID NO: 25493 - DNA, 15 bp, Homo sapiens
atattctcagggcta

SEQ ID NO: 25494 - DNA, 15 bp, Homo sapiens
catattctcagggct

SEQ ID NO: 25495 - DNA, 15 bp, Homo sapiens
tcatattctcagggc

SEQ ID NO: 25496 - DNA, 15 bp, Homo sapiens
atcatattctcaggg

SEQ ID NO: 25497 - DNA, 15 bp, Homo sapiens
tatcatattctcagg

SEQ ID NO: 25498 - DNA, 15 bp, Homo sapiens
ctatcatattctcag

SEQ ID NO: 25499 - DNA, 15 bp, Homo sapiens
tctatcatattctca

SEQ ID NO: 25500 - DNA, 15 bp, Homo sapiens
ttctatcatattctc

SEQ ID NO: 25501 - DNA, 15 bp, Homo sapiens
cttctatcatattct

SEQ ID NO: 25502 - DNA, 15 bp, Homo sapiens
gcttctatcatattc

SEQ ID NO: 25503 - DNA, 15 bp, Homo sapiens
tgcttctatcatatt

SEQ ID NO: 25504 - DNA, 15 bp, Homo sapiens
ctgcttctatcatat

SEQ ID NO: 25505 - DNA, 15 bp, Homo sapiens
cctgcttctatcata

SEQ ID NO: 25506 - DNA, 15 bp, Homo sapiens
tcctgcttctatcat

SEQ ID NO: 25507 - DNA, 15 bp, Homo sapiens
ctcctgcttctatca

SEQ ID NO: 25508 - DNA, 15 bp, Homo sapiens
gctcctgcttctatc

SEQ ID NO: 25509 - DNA, 15 bp, Homo sapiens
agctcctgcttctat

SEQ ID NO: 25510 - DNA, 15 bp, Homo sapiens
gagctcctgcttcta

SEQ ID NO: 25511 - DNA, 15 bp, Homo sapiens
agagctcctgcttct

SEQ ID NO: 25512 - DNA, 15 bp, Homo sapiens
cagagctcctgcttc

SEQ ID NO: 25513 - DNA, 15 bp, Homo sapiens
ccagagctcctgctt

SEQ ID NO: 25514 - DNA, 15 bp, Homo sapiens
gccagagctcctgct

SEQ ID NO: 25515 - DNA, 15 bp, Homo sapiens
ggccagagctcctgc

SEQ ID NO: 25516 - DNA, 15 bp, Homo sapiens
aggccagagctcctg

SEQ ID NO: 25517 - DNA, 15 bp, Homo sapiens
aaggccagagctcct

SEQ ID NO: 25518 - DNA, 15 bp, Homo sapiens
aaaggccagagctcc

SEQ ID NO: 25519 - DNA, 15 bp, Homo sapiens
gaaaggccagagctc

SEQ ID NO: 25520 - DNA, 15 bp, Homo sapiens
agaaaggccagagct

SEQ ID NO: 25521 - DNA, 15 bp, Homo sapiens
cagaaaggccagagc

SEQ ID NO: 25522 - DNA, 15 bp, Homo sapiens
acagaaaggccagag

SEQ ID NO: 25523 - DNA, 15 bp, Homo sapiens
gacagaaaggccaga

SEQ ID NO: 25524 - DNA, 15 bp, Homo sapiens
ggacagaaaggccag

SEQ ID NO: 25525 - DNA, 15 bp, Homo sapiens
tggacagaaaggcca

SEQ ID NO: 25526 - DNA, 15 bp, Homo sapiens
atggacagaaaggcc

SEQ ID NO: 25527 - DNA, 15 bp, Homo sapiens
tatggacagaaaggc

SEQ ID NO: 25528 - DNA, 15 bp, Homo sapiens
gtatggacagaaagg

SEQ ID NO: 25529 - DNA, 15 bp, Homo sapiens
ggtatggacagaaag

SEQ ID NO: 25530 - DNA, 15 bp, Homo sapiens
aggtatggacagaaa

SEQ ID NO: 25531 - DNA, 15 bp, Homo sapiens
caggtatggacagaa

SEQ ID NO: 25532 - DNA, 15 bp, Homo sapiens
tcaggtatggacaga

SEQ ID NO: 25533 - DNA, 15 bp, Homo sapiens
ttcaggtatggacag

SEQ ID NO: 25534 - DNA, 15 bp, Homo sapiens
gttcaggtatggaca

SEQ ID NO: 25535 - DNA, 15 bp, Homo sapiens
tgttcaggtatggac

SEQ ID NO: 25536 - DNA, 15 bp, Homo sapiens
ctgttcaggtatgga

SEQ ID NO: 25537 - DNA, 15 bp, Homo sapiens
cctgttcaggtatgg

SEQ ID NO: 25538 - DNA, 15 bp, Homo sapiens
acctgttcaggtatg

SEQ ID NO: 25539 - DNA, 15 bp, Homo sapiens
gacctgttcaggtat

SEQ ID NO: 25540 - DNA, 15 bp, Homo sapiens
ggacctgttcaggta

SEQ ID NO: 25541 - DNA, 15 bp, Homo sapiens
aggacctgttcaggt

SEQ ID NO: 25542 - DNA, 15 bp, Homo sapiens
aaggacctgttcagg

SEQ ID NO: 25543 - DNA, 15 bp, Homo sapiens
caaggacctgttcag

SEQ ID NO: 25544 - DNA, 15 bp, Homo sapiens
ccaaggacctgttca

SEQ ID NO: 25545 - DNA, 15 bp, Homo sapiens
cccaaggacctgttc

SEQ ID NO: 25546 - DNA, 15 bp, Homo sapiens
acccaaggacctgtt

SEQ ID NO: 25547 - DNA, 15 bp, Homo sapiens
aacccaaggacctgt

SEQ ID NO: 25548 - DNA, 15 bp, Homo sapiens
taacccaaggacctg

SEQ ID NO: 25549 - DNA, 15 bp, Homo sapiens
ttaacccaaggacct

SEQ ID NO: 25550 - DNA, 15 bp, Homo sapiens
cttaacccaaggacc

SEQ ID NO: 25551 - DNA, 15 bp, Homo sapiens
tcttaacccaaggac

SEQ ID NO: 25552 - DNA, 15 bp, Homo sapiens
ctcttaacccaagga

SEQ ID NO: 25553 - DNA, 15 bp, Homo sapiens
gctcttaacccaagg

SEQ ID NO: 25554 - DNA, 15 bp, Homo sapiens
ggctcttaacccaag

SEQ ID NO: 25555 - DNA, 15 bp, Homo sapiens
gggctcttaacccaa

SEQ ID NO: 25556 - DNA, 15 bp, Homo sapiens
ggggctcttaaccca

SEQ ID NO: 25557 - DNA, 15 bp, Homo sapiens
aggggctcttaaccc

SEQ ID NO: 25558 - DNA, 15 bp, Homo sapiens
gaggggctcttaacc

SEQ ID NO: 25559 - DNA, 15 bp, Homo sapiens
cgaggggctcttaac

SEQ ID NO: 25560 - DNA, 15 bp, Homo sapiens
acgaggggctcttaa

SEQ ID NO: 25561 - DNA, 15 bp, Homo sapiens
gacgaggggctctta

SEQ ID NO: 25562 - DNA, 15 bp, Homo sapiens
ggacgaggggctctt

SEQ ID NO: 25563 - DNA, 15 bp, Homo sapiens
tggacgaggggctct

SEQ ID NO: 25564 - DNA, 15 bp, Homo sapiens
ctggacgaggggctc

SEQ ID NO: 25565 - DNA, 15 bp, Homo sapiens
cctggacgaggggct

SEQ ID NO: 25566 - DNA, 15 bp, Homo sapiens
ccctggacgaggggc

SEQ ID NO: 25567 - DNA, 15 bp, Homo sapiens
gccctggacgagggg

SEQ ID NO: 25568 - DNA, 15 bp, Homo sapiens
ggccctggacgaggg

SEQ ID NO: 25569 - DNA, 15 bp, Homo sapiens
aggccctggacgagg

SEQ ID NO: 25570 - DNA, 15 bp, Homo sapiens
taggccctggacgag

SEQ ID NO: 25571 - DNA, 15 bp, Homo sapiens
ataggccctggacga

SEQ ID NO: 25572 - DNA, 15 bp, Homo sapiens
aataggccctggacg

SEQ ID NO: 25573 - DNA, 15 bp, Homo sapiens
taataggccctggac

SEQ ID NO: 25574 - DNA, 15 bp, Homo sapiens
ttaataggccctgga

SEQ ID NO: 25575 - DNA, 15 bp, Homo sapiens
attaataggccctgg

SEQ ID NO: 25576 - DNA, 15 bp, Homo sapiens
gattaataggccctg

SEQ ID NO: 25577 - DNA, 15 bp, Homo sapiens
agattaataggccct

SEQ ID NO: 25578 - DNA, 15 bp, Homo sapiens
aagattaataggccc

SEQ ID NO: 25579 - DNA, 15 bp, Homo sapiens
caagattaataggcc

SEQ ID NO: 25580 - DNA, 15 bp, Homo sapiens
tcaagattaataggc

SEQ ID NO: 25581 - DNA, 15 bp, Homo sapiens
atcaagattaatagg

SEQ ID NO: 25582 - DNA, 15 bp, Homo sapiens
gatcaagattaatag

SEQ ID NO: 25583 - DNA, 15 bp, Homo sapiens
ggatcaagattaata

SEQ ID NO: 25584 - DNA, 15 bp, Homo sapiens
aggatcaagattaat

SEQ ID NO: 25585 - DNA, 15 bp, Homo sapiens
gaggatcaagattaa

SEQ ID NO: 25586 - DNA, 15 bp, Homo sapiens
tgaggatcaagatta

SEQ ID NO: 25587 - DNA, 15 bp, Homo sapiens
atgaggatcaagatt

SEQ ID NO: 25588 - DNA, 15 bp, Homo sapiens
tatgaggatcaagat

SEQ ID NO: 25589 - DNA, 15 bp, Homo sapiens
ttatgaggatcaaga

SEQ ID NO: 25590 - DNA, 15 bp, Homo sapiens
cttatgaggatcaag

SEQ ID NO: 25591 - DNA, 15 bp, Homo sapiens
gcttatgaggatcaa

SEQ ID NO: 25592 - DNA, 15 bp, Homo sapiens
tgcttatgaggatca

SEQ ID NO: 25593 - DNA, 15 bp, Homo sapiens
ctgcttatgaggatc

SEQ ID NO: 25594 - DNA, 15 bp, Homo sapiens
gctgcttatgaggat

SEQ ID NO: 25595 - DNA, 15 bp, Homo sapiens
tgctgcttatgagga

SEQ ID NO: 25596 - DNA, 15 bp, Homo sapiens
atgctgcttatgagg

SEQ ID NO: 25597 - DNA, 15 bp, Homo sapiens
gatgctgcttatgag

SEQ ID NO: 25598 - DNA, 15 bp, Homo sapiens
ggatgctgcttatga

SEQ ID NO: 25599 - DNA, 15 bp, Homo sapiens
tggatgctgcttatg

SEQ ID NO: 25600 - DNA, 15 bp, Homo sapiens
atggatgctgcttat

SEQ ID NO: 25601 - DNA, 15 bp, Homo sapiens
catggatgctgctta

SEQ ID NO: 25602 - DNA, 15 bp, Homo sapiens
acatggatgctgctt

SEQ ID NO: 25603 - DNA, 15 bp, Homo sapiens
tacatggatgctgct

SEQ ID NO: 25604 - DNA, 15 bp, Homo sapiens
atacatggatgctgc

SEQ ID NO: 25605 - DNA, 15 bp, Homo sapiens
aatacatggatgctg

SEQ ID NO: 25606 - DNA, 15 bp, Homo sapiens
taatacatggatgct

SEQ ID NO: 25607 - DNA, 15 bp, Homo sapiens
gtaatacatggatgc

SEQ ID NO: 25608 - DNA, 15 bp, Homo sapiens
cgtaatacatggatg

SEQ ID NO: 25609 - DNA, 15 bp, Homo sapiens
ccgtaatacatggat

SEQ ID NO: 25610 - DNA, 15 bp, Homo sapiens
gccgtaatacatgga

SEQ ID NO: 25611 - DNA, 15 bp, Homo sapiens
ggccgtaatacatgg

SEQ ID NO: 25612 - DNA, 15 bp, Homo sapiens
cggccgtaatacatg

SEQ ID NO: 25613 - DNA, 15 bp, Homo sapiens
gcggccgtaatacat

SEQ ID NO: 25614 - DNA, 15 bp, Homo sapiens
tgcggccgtaataca

SEQ ID NO: 25615 - DNA, 15 bp, Homo sapiens
ttgcggccgtaatac

SEQ ID NO: 25616 - DNA, 15 bp, Homo sapiens
tttgcggccgtaata

SEQ ID NO: 25617 - DNA, 15 bp, Homo sapiens
gtttgcggccgtaat

SEQ ID NO: 25618 - DNA, 15 bp, Homo sapiens
ggtttgcggccgtaa

SEQ ID NO: 25619 - DNA, 15 bp, Homo sapiens
tggtttgcggccgta

SEQ ID NO: 25620 - DNA, 15 bp, Homo sapiens
ttggtttgcggccgt

SEQ ID NO: 25621 - DNA, 15 bp, Homo sapiens
tttggtttgcggccg

SEQ ID NO: 25622 - DNA, 15 bp, Homo sapiens
gtttggtttgcggcc

SEQ ID NO: 25623 - DNA, 15 bp, Homo sapiens
agtttggtttgcggc

SEQ ID NO: 25624 - DNA, 15 bp, Homo sapiens
cagtttggtttgcgg

SEQ ID NO: 25625 - DNA, 15 bp, Homo sapiens
acagtttggtttgcg

SEQ ID NO: 25626 - DNA, 15 bp, Homo sapiens
cacagtttggtttgc

SEQ ID NO: 25627 - DNA, 15 bp, Homo sapiens
gcacagtttggtttg

SEQ ID NO: 25628 - DNA, 15 bp, Homo sapiens
ggcacagtttggttt

SEQ ID NO: 25629 - DNA, 15 bp, Homo sapiens
tggcacagtttggtt

SEQ ID NO: 25630 - DNA, 15 bp, Homo sapiens
ctggcacagtttggt

SEQ ID NO: 25631 - DNA, 15 bp, Homo sapiens
tctggcacagtttgg

SEQ ID NO: 25632 - DNA, 15 bp, Homo sapiens
gtctggcacagtttg

SEQ ID NO: 25633 - DNA, 15 bp, Homo sapiens
ggtctggcacagttt

SEQ ID NO: 25634 - DNA, 15 bp, Homo sapiens
cggtctggcacagtt

SEQ ID NO: 25635 - DNA, 15 bp, Homo sapiens
tcggtctggcacagt

SEQ ID NO: 25636 - DNA, 15 bp, Homo sapiens
ttcggtctggcacag

SEQ ID NO: 25637 - DNA, 15 bp, Homo sapiens
attcggtctggcaca

SEQ ID NO: 25638 - DNA, 15 bp, Homo sapiens
gattcggtctggcac

SEQ ID NO: 25639 - DNA, 15 bp, Homo sapiens
ggattcggtctggca

SEQ ID NO: 25640 - DNA, 15 bp, Homo sapiens
aggattcggtctggc

SEQ ID NO: 25641 - DNA, 15 bp, Homo sapiens
taggattcggtctgg

SEQ ID NO: 25642 - DNA, 15 bp, Homo sapiens
ctaggattcggtctg

SEQ ID NO: 25643 - DNA, 15 bp, Homo sapiens
cctaggattcggtct

SEQ ID NO: 25644 - DNA, 15 bp, Homo sapiens
tcctaggattcggtc

SEQ ID NO: 25645 - DNA, 15 bp, Homo sapiens
gtcctaggattcggt

SEQ ID NO: 25646 - DNA, 15 bp, Homo sapiens
ggtcctaggattcgg

SEQ ID NO: 25647 - DNA, 15 bp, Homo sapiens
tggtcctaggattcg

SEQ ID NO: 25648 - DNA, 15 bp, Homo sapiens
ttggtcctaggattc

SEQ ID NO: 25649 - DNA, 15 bp, Homo sapiens
cttggtcctaggatt

SEQ ID NO: 25650 - DNA, 15 bp, Homo sapiens
gcttggtcctaggat

SEQ ID NO: 25651 - DNA, 15 bp, Homo sapiens
ggcttggtcctagga

SEQ ID NO: 25652 - DNA, 15 bp, Homo sapiens
gggcttggtcctagg

SEQ ID NO: 25653 - DNA, 15 bp, Homo sapiens
tgggcttggtcctag

SEQ ID NO: 25654 - DNA, 15 bp, Homo sapiens
ttgggcttggtccta

SEQ ID NO: 25655 - DNA, 15 bp, Homo sapiens
tttgggcttggtcct

SEQ ID NO: 25656 - DNA, 15 bp, Homo sapiens
atttgggcttggtcc

SEQ ID NO: 25657 - DNA, 15 bp, Homo sapiens
tatttgggcttggtc

SEQ ID NO: 25658 - DNA, 15 bp, Homo sapiens
atatttgggcttggt

SEQ ID NO: 25659 - DNA, 15 bp, Homo sapiens
catatttgggcttgg

SEQ ID NO: 25660 - DNA, 15 bp, Homo sapiens
acatatttgggcttg

SEQ ID NO: 25661 - DNA, 15 bp, Homo sapiens
gacatatttgggctt

SEQ ID NO: 25662 - DNA, 15 bp, Homo sapiens
ggacatatttgggct

SEQ ID NO: 25663 - DNA, 15 bp, Homo sapiens
gggacatatttgggc

SEQ ID NO: 25664 - DNA, 15 bp, Homo sapiens
tgggacatatttggg

SEQ ID NO: 25665 - DNA, 15 bp, Homo sapiens
atgggacatatttgg

SEQ ID NO: 25666 - DNA, 15 bp, Homo sapiens
gatgggacatatttg

SEQ ID NO: 25667 - DNA, 15 bp, Homo sapiens
tgatgggacatattt

SEQ ID NO: 25668 - DNA, 15 bp, Homo sapiens
atgatgggacatatt

SEQ ID NO: 25669 - DNA, 15 bp, Homo sapiens
gatgatgggacatat

SEQ ID NO: 25670 - DNA, 15 bp, Homo sapiens
ggatgatgggacata

SEQ ID NO: 25671 - DNA, 15 bp, Homo sapiens
aggatgatgggacat

SEQ ID NO: 25672 - DNA, 15 bp, Homo sapiens
aaggatgatgggaca

SEQ ID NO: 25673 - DNA, 15 bp, Homo sapiens
aaaggatgatgggac

SEQ ID NO: 25674 - DNA, 15 bp, Homo sapiens
aaaaggatgatggga

SEQ ID NO: 25675 - DNA, 15 bp, Homo sapiens
caaaaggatgatggg

SEQ ID NO: 25676 - DNA, 15 bp, Homo sapiens
ccaaaaggatgatgg

SEQ ID NO: 25677 - DNA, 15 bp, Homo sapiens
accaaaaggatgatg

SEQ ID NO: 25678 - DNA, 15 bp, Homo sapiens
taccaaaaggatgat

SEQ ID NO: 25679 - DNA, 15 bp, Homo sapiens
ttaccaaaaggatga

SEQ ID NO: 25680 - DNA, 15 bp, Homo sapiens
cttaccaaaaggatg

SEQ ID NO: 25681 - DNA, 15 bp, Homo sapiens
tcttaccaaaaggat

SEQ ID NO: 25682 - DNA, 15 bp, Homo sapiens
ttcttaccaaaagga

SEQ ID NO: 25683 - DNA, 15 bp, Homo sapiens
cttcttaccaaaagg

SEQ ID NO: 25684 - DNA, 15 bp, Homo sapiens
gcttcttaccaaaag

SEQ ID NO: 25685 - DNA, 15 bp, Homo sapiens
agcttcttaccaaaa

SEQ ID NO: 25686 - DNA, 15 bp, Homo sapiens
gagcttcttaccaaa

SEQ ID NO: 25687 - DNA, 15 bp, Homo sapiens
tgagcttcttaccaa

SEQ ID NO: 25688 - DNA, 15 bp, Homo sapiens
atgagcttcttacca

SEQ ID NO: 25689 - DNA, 15 bp, Homo sapiens
aatgagcttcttacc

SEQ ID NO: 25690 - DNA, 15 bp, Homo sapiens
caatgagcttcttac

SEQ ID NO: 25691 - DNA, 15 bp, Homo sapiens
acaatgagcttctta

SEQ ID NO: 25692 - DNA, 15 bp, Homo sapiens
tacaatgagcttctt

SEQ ID NO: 25693 - DNA, 15 bp, Homo sapiens
ttacaatgagcttct

SEQ ID NO: 25694 - DNA, 15 bp, Homo sapiens
cttacaatgagcttc

SEQ ID NO: 25695 - DNA, 15 bp, Homo sapiens
tcttacaatgagctt

SEQ ID NO: 25696 - DNA, 15 bp, Homo sapiens
ttcttacaatgagct

SEQ ID NO: 25697 - DNA, 15 bp, Homo sapiens
tttcttacaatgagc

SEQ ID NO: 25698 - DNA, 15 bp, Homo sapiens
ctttcttacaatgag

SEQ ID NO: 25699 - DNA, 15 bp, Homo sapiens
tctttcttacaatga

SEQ ID NO: 25700 - DNA, 15 bp, Homo sapiens
ttctttcttacaatg

SEQ ID NO: 25701 - DNA, 15 bp, Homo sapiens
tttctttcttacaat

SEQ ID NO: 25702 - DNA, 15 bp, Homo sapiens
ctttctttcttacaa

SEQ ID NO: 25703 - DNA, 15 bp, Homo sapiens
tctttctttcttaca

SEQ ID NO: 25704 - DNA, 15 bp, Homo sapiens
ctctttctttcttac

SEQ ID NO: 25705 - DNA, 15 bp, Homo sapiens
cctctttctttctta

SEQ ID NO: 25706 - DNA, 15 bp, Homo sapiens
gctctcctctttctt

SEQ ID NO: 25707 - DNA, 15 bp, Homo sapiens
tgctctcctctttct

SEQ ID NO: 25708 - DNA, 15 bp, Homo sapiens
ttgctctcctctttc

SEQ ID NO: 25709 - DNA, 15 bp, Homo sapiens
cttgctctcctcttt

SEQ ID NO: 25710 - DNA, 15 bp, Homo sapiens
tcttgctctcctctt

SEQ ID NO: 25711 - DNA, 15 bp, Homo sapiens
ctcttgctctcctct

SEQ ID NO: 25712 - DNA, 15 bp, Homo sapiens
cctcttgctctcctc

SEQ ID NO: 25713 - DNA, 15 bp, Homo sapiens
tcctcttgctctcct

SEQ ID NO: 25714 - DNA, 15 bp, Homo sapiens
atcctcttgctctcc

SEQ ID NO: 25715 - DNA, 15 bp, Homo sapiens
catcctcttgctctc

SEQ ID NO: 25716 - DNA, 15 bp, Homo sapiens
tcatcctcttgctct

SEQ ID NO: 25717 - DNA, 15 bp, Homo sapiens
gtcatcctcttgctc

SEQ ID NO: 25718 - DNA, 15 bp, Homo sapiens
ggtcatcctcttgct

SEQ ID NO: 25719 - DNA, 15 bp, Homo sapiens
aggtcatcctcttgc

SEQ ID NO: 25720 - DNA, 15 bp, Homo sapiens
taggtcatcctcttg

SEQ ID NO: 25721 - DNA, 15 bp, Homo sapiens
ctaggtcatcctctt

SEQ ID NO: 25722 - DNA, 15 bp, Homo sapiens
actaggtcatcctct

SEQ ID NO: 25723 - DNA, 15 bp, Homo sapiens
cactaggtcatcctc

SEQ ID NO: 25724 - DNA, 15 bp, Homo sapiens
gcactaggtcatcct

SEQ ID NO: 25725 - DNA, 15 bp, Homo sapiens
tgcactaggtcatcc

SEQ ID NO: 25726 - DNA, 15 bp, Homo sapiens
atgcactaggtcatc

SEQ ID NO: 25727 - DNA, 15 bp, Homo sapiens
catgcactaggtcat

SEQ ID NO: 25728 - DNA, 15 bp, Homo sapiens
ccatgcactaggtca

SEQ ID NO: 25729 - DNA, 15 bp, Homo sapiens
cccatgcactaggtc

SEQ ID NO: 25730 - DNA, 15 bp, Homo sapiens
ccccatgcactaggt

SEQ ID NO: 25731 - DNA, 15 bp, Homo sapiens
gccccatgcactagg

SEQ ID NO: 25732 - DNA, 15 bp, Homo sapiens
ggccccatgcactag

SEQ ID NO: 25733 - DNA, 15 bp, Homo sapiens
aggccccatgcacta

SEQ ID NO: 25734 - DNA, 15 bp, Homo sapiens
gaggccccatgcact

SEQ ID NO: 25735 - DNA, 15 bp, Homo sapiens
tgaggccccatgcac

SEQ ID NO: 25736 - DNA, 15 bp, Homo sapiens
atgaggccccatgca

SEQ ID NO: 25737 - DNA, 15 bp, Homo sapiens
aatgaggccccatgc

SEQ ID NO: 25738 - DNA, 15 bp, Homo sapiens
caatgaggccccatg

SEQ ID NO: 25739 - DNA, 15 bp, Homo sapiens
acaatgaggccccat

SEQ ID NO: 25740 - DNA, 15 bp, Homo sapiens
aacaatgaggcccca

SEQ ID NO: 25741 - DNA, 15 bp, Homo sapiens
aaacaatgaggcccc

SEQ ID NO: 25742 - DNA, 15 bp, Homo sapiens
aaaacaatgaggccc

SEQ ID NO: 25743 - DNA, 15 bp, Homo sapiens
taaaacaatgaggcc

SEQ ID NO: 25744 - DNA, 15 bp, Homo sapiens
ttaaaacaatgaggc

SEQ ID NO: 25745 - DNA, 15 bp, Homo sapiens
attaaaacaatgagg

SEQ ID NO: 25746 - DNA, 15 bp, Homo sapiens
aattaaaacaatgag

SEQ ID NO: 25747 - DNA, 15 bp, Homo sapiens
taattaaaacaatga

SEQ ID NO: 25748 - DNA, 15 bp, Homo sapiens
ctaattaaaacaatg

SEQ ID NO: 25749 - DNA, 15 bp, Homo sapiens
actaattaaaacaat

SEQ ID NO: 25750 - DNA, 15 bp, Homo sapiens
cactaattaaaacaa

SEQ ID NO: 25751 - DNA, 15 bp, Homo sapiens
tcactaattaaaaca

SEQ ID NO: 25752 - DNA, 15 bp, Homo sapiens
gtcactaattaaaac

SEQ ID NO: 25753 - DNA, 15 bp, Homo sapiens
tgtcactaattaaaa

SEQ ID NO: 25754 - DNA, 15 bp, Homo sapiens
ttgtcactaattaaa

SEQ ID NO: 25755 - DNA, 15 bp, Homo sapiens
tttgtcactaattaa

SEQ ID NO: 25756 - DNA, 15 bp, Homo sapiens
ttttgtcactaatta

SEQ ID NO: 25757 - DNA, 15 bp, Homo sapiens
gttttgtcactaatt

SEQ ID NO: 25758 - DNA, 15 bp, Homo sapiens
tgttttgtcactaat

SEQ ID NO: 25759 - DNA, 15 bp, Homo sapiens
ttgttttgtcactaa

SEQ ID NO: 25760 - DNA, 15 bp, Homo sapiens
gttgttttgtcacta

SEQ ID NO: 25761 - DNA, 15 bp, Homo sapiens
tgttgttttgtcact

SEQ ID NO: 25762 - DNA, 15 bp, Homo sapiens
ttgttgttttgtcac

SEQ ID NO: 25763 - DNA, 15 bp, Homo sapiens
attgttgttttgtca

SEQ ID NO: 25764 - DNA, 15 bp, Homo sapiens
tattgttgttttgtc

SEQ ID NO: 25765 - DNA, 15 bp, Homo sapiens
ttattgttgttttgt

SEQ ID NO: 25766 - DNA, 15 bp, Homo sapiens
attattgttgttttg

SEQ ID NO: 25767 - DNA, 15 bp, Homo sapiens
tattattgttgtttt

SEQ ID NO: 25768 - DNA, 15 bp, Homo sapiens
ttattattgttgttt

SEQ ID NO: 25769 - DNA, 15 bp, Homo sapiens
gttattattgttgtt

SEQ ID NO: 25770 - DNA, 15 bp, Homo sapiens
tgttattattgttgt

SEQ ID NO: 25771 - DNA, 15 bp, Homo sapiens
ttgttattattgttg

SEQ ID NO: 25772 - DNA, 15 bp, Homo sapiens
gttgttattattgtt

SEQ ID NO: 25773 - DNA, 15 bp, Homo sapiens
tgttgttattattgt

SEQ ID NO: 25774 - DNA, 15 bp, Homo sapiens
ttgttgttattattg

SEQ ID NO: 25775 - DNA, 15 bp, Homo sapiens
tttgttgttattatt

SEQ ID NO: 25776 - DNA, 15 bp, Homo sapiens
ttttgttgttattat

SEQ ID NO: 25777 - DNA, 15 bp, Homo sapiens
gttttgttgttatta

SEQ ID NO: 25778 - DNA, 15 bp, Homo sapiens
ggttttgttgttatt

SEQ ID NO: 25779 - DNA, 15 bp, Homo sapiens
gggttttgttgttat

SEQ ID NO: 25780 - DNA, 15 bp, Homo sapiens
ggggttttgttgtta

SEQ ID NO: 25781 - DNA, 15 bp, Homo sapiens
gggggttttgttgtt

SEQ ID NO: 25782 - DNA, 15 bp, Homo sapiens
cgggggttttgttgt

SEQ ID NO: 25783 - DNA, 15 bp, Homo sapiens
tcgggggttttgttg

SEQ ID NO: 25784 - DNA, 15 bp, Homo sapiens
ttcgggggttttgtt

SEQ ID NO: 25785 - DNA, 15 bp, Homo sapiens
cttcgggggttttgt

SEQ ID NO: 25786 - DNA, 15 bp, Homo sapiens
gcttcgggggttttg

SEQ ID NO: 25787 - DNA, 15 bp, Homo sapiens
agcttcgggggtttt

SEQ ID NO: 25788 - DNA, 15 bp, Homo sapiens
aagcttcgggggttt

SEQ ID NO: 25789 - DNA, 15 bp, Homo sapiens
gaagcttcgggggtt

SEQ ID NO: 25790 - DNA, 15 bp, Homo sapiens
tgaagcttcgggggt

SEQ ID NO: 25791 - DNA, 15 bp, Homo sapiens
gtgaagcttcggggg

SEQ ID NO: 25792 - DNA, 15 bp, Homo sapiens
tgtgaagcttcgggg

SEQ ID NO: 25793 - DNA, 15 bp, Homo sapiens
ctgtgaagcttcggg

SEQ ID NO: 25794 - DNA, 15 bp, Homo sapiens
tctgtgaagcttcgg

SEQ ID NO: 25795 - DNA, 15 bp, Homo sapiens
atctgtgaagcttcg

SEQ ID NO: 25796 - DNA, 15 bp, Homo sapiens
catctgtgaagcttc

SEQ ID NO: 25797 - DNA, 15 bp, Homo sapiens
tcatctgtgaagctt

SEQ ID NO: 25798 - DNA, 15 bp, Homo sapiens
gtcatctgtgaagct

SEQ ID NO: 25799 - DNA, 15 bp, Homo sapiens
tgtcatctgtgaagc

SEQ ID NO: 25800 - DNA, 15 bp, Homo sapiens
atgtcatctgtgaag

SEQ ID NO: 25801 - DNA, 15 bp, Homo sapiens
gatgtcatctgtgaa

SEQ ID NO: 25802 - DNA, 15 bp, Homo sapiens
tgatgtcatctgtga

SEQ ID NO: 25803 - DNA, 15 bp, Homo sapiens
ctgatgtcatctgtg

SEQ ID NO: 25804 - DNA, 15 bp, Homo sapiens
tctgatgtcatctgt

SEQ ID NO: 25805 - DNA, 15 bp, Homo sapiens
gtctgatgtcatctg

SEQ ID NO: 25806 - DNA, 15 bp, Homo sapiens
ggtctgatgtcatct

SEQ ID NO: 25807 - DNA, 15 bp, Homo sapiens
gggtctgatgtcatc

SEQ ID NO: 25808 - DNA, 15 bp, Homo sapiens
ggggtctgatgtcat

SEQ ID NO: 25809 - DNA, 15 bp, Homo sapiens
tggggtctgatgtca

SEQ ID NO: 25810 - DNA, 15 bp, Homo sapiens
ttggggtctgatgtc

SEQ ID NO: 25811 - DNA, 15 bp, Homo sapiens
cttggggtctgatgt

SEQ ID NO: 25812 - DNA, 15 bp, Homo sapiens
gcttggggtctgatg

SEQ ID NO: 25813 - DNA, 15 bp, Homo sapiens
ggcttggggtctgat

SEQ ID NO: 25814 - DNA, 15 bp, Homo sapiens
aggcttggggtctga

SEQ ID NO: 25815 - DNA, 15 bp, Homo sapiens
caggcttggggtctg

SEQ ID NO: 25816 - DNA, 15 bp, Homo sapiens
acaggcttggggtct

SEQ ID NO: 25817 - DNA, 15 bp, Homo sapiens
cacaggcttggggtc

SEQ ID NO: 25818 - DNA, 15 bp, Homo sapiens
acacaggcttggggt

SEQ ID NO: 25819 - DNA, 15 bp, Homo sapiens
cacacaggcttgggg

SEQ ID NO: 25820 - DNA, 15 bp, Homo sapiens
acacacaggcttggg

SEQ ID NO: 25821 - DNA, 15 bp, Homo sapiens
aacacacaggcttgg

SEQ ID NO: 25822 - DNA, 15 bp, Homo sapiens
aaacacacaggcttg

SEQ ID NO: 25823 - DNA, 15 bp, Homo sapiens
aaaacacacaggctt

SEQ ID NO: 25824 - DNA, 15 bp, Homo sapiens
aaaaacacacaggct

SEQ ID NO: 25825 - DNA, 15 bp, Homo sapiens
gaaaaacacacaggc

SEQ ID NO: 25826 - DNA, 15 bp, Homo sapiens
tgaaaaacacacagg

SEQ ID NO: 25827 - DNA, 15 bp, Homo sapiens
ctgaaaaacacacag

SEQ ID NO: 25828 - DNA, 15 bp, Homo sapiens
cctgaaaaacacaca

SEQ ID NO: 25829 - DNA, 15 bp, Homo sapiens
acctgaaaaacacac

SEQ ID NO: 25830 - DNA, 15 bp, Homo sapiens
cacctgaaaaacaca

SEQ ID NO: 25831 - DNA, 15 bp, Homo sapiens
gcacctgaaaaacac

SEQ ID NO: 25832 - DNA, 15 bp, Homo sapiens
ggcacctgaaaaaca

SEQ ID NO: 25833 - DNA, 15 bp, Homo sapiens
gggcacctgaaaaac

SEQ ID NO: 25834 - DNA, 15 bp, Homo sapiens
agggcacctgaaaaa

SEQ ID NO: 25835 - DNA, 15 bp, Homo sapiens
aagggcacctgaaaa

SEQ ID NO: 25836 - DNA, 15 bp, Homo sapiens
caagggcacctgaaa

SEQ ID NO: 25837 - DNA, 15 bp, Homo sapiens
tcaagggcacctgaa

SEQ ID NO: 25838 - DNA, 15 bp, Homo sapiens
ctcaagggcacctga

SEQ ID NO: 25839 - DNA, 15 bp, Homo sapiens
cctcaagggcacctg

SEQ ID NO: 25840 - DNA, 15 bp, Homo sapiens
tcctcaagggcacct

SEQ ID NO: 25841 - DNA, 15 bp, Homo sapiens
ctcctcaagggcacc

SEQ ID NO: 25842 - DNA, 15 bp, Homo sapiens
gctcctcaagggcac

SEQ ID NO: 25843 - DNA, 15 bp, Homo sapiens
agctcctcaagggca

SEQ ID NO: 25844 - DNA, 15 bp, Homo sapiens
aagctcctcaagggc

SEQ ID NO: 25845 - DNA, 15 bp, Homo sapiens
aaagctcctcaaggg

SEQ ID NO: 25846 - DNA, 15 bp, Homo sapiens
caaagctcctcaagg

SEQ ID NO: 25847 - DNA, 15 bp, Homo sapiens
acaaagctcctcaag

SEQ ID NO: 25848 - DNA, 15 bp, Homo sapiens
tacaaagctcctcaa

SEQ ID NO: 25849 - DNA, 15 bp, Homo sapiens
ctacaaagctcctca

SEQ ID NO: 25850 - DNA, 15 bp, Homo sapiens
gctacaaagctcctc

SEQ ID NO: 25851 - DNA, 15 bp, Homo sapiens
agctacaaagctcct

SEQ ID NO: 25852 - DNA, 15 bp, Homo sapiens
cagctacaaagctcc

SEQ ID NO: 25853 - DNA, 15 bp, Homo sapiens
ccagctacaaagctc

SEQ ID NO: 25854 - DNA, 15 bp, Homo sapiens
gccagctacaaagct

SEQ ID NO: 25855 - DNA, 15 bp, Homo sapiens
tgccagctacaaagc

SEQ ID NO: 25856 - DNA, 15 bp, Homo sapiens
ctgccagctacaaag

SEQ ID NO: 25857 - DNA, 15 bp, Homo sapiens
tctgccagctacaaa

SEQ ID NO: 25858 - DNA, 15 bp, Homo sapiens
ctctgccagctacaa

SEQ ID NO: 25859 - DNA, 15 bp, Homo sapiens
cctctgccagctaca

SEQ ID NO: 25860 - DNA, 15 bp, Homo sapiens
tcctctgccagctac

SEQ ID NO: 25861 - DNA, 15 bp, Homo sapiens
ctcctctgccagcta

SEQ ID NO: 25862 - DNA, 15 bp, Homo sapiens
cctcctctgccagct

SEQ ID NO: 25863 - DNA, 15 bp, Homo sapiens
acctcctctgccagc

SEQ ID NO: 25864 - DNA, 15 bp, Homo sapiens
cacctcctctgccag

SEQ ID NO: 25865 - DNA, 15 bp, Homo sapiens
tcacctcctctgcca

SEQ ID NO: 25866 - DNA, 15 bp, Homo sapiens
ttcacctcctctgcc

SEQ ID NO: 25867 - DNA, 15 bp, Homo sapiens
tttcacctcctctgc

SEQ ID NO: 25868 - DNA, 15 bp, Homo sapiens
gtttcacctcctctg

SEQ ID NO: 25869 - DNA, 15 bp, Homo sapiens
agtttcacctcctct

SEQ ID NO: 25870 - DNA, 15 bp, Homo sapiens
cagtttcacctcctc

SEQ ID NO: 25871 - DNA, 15 bp, Homo sapiens
tcagtttcacctcct

SEQ ID NO: 25872 - DNA, 15 bp, Homo sapiens
gtcagtttcacctcc

SEQ ID NO: 25873 - DNA, 15 bp, Homo sapiens
tgtcagtttcacctc

SEQ ID NO: 25874 - DNA, 15 bp, Homo sapiens
ttgtcagtttcacct

SEQ ID NO: 25875 - DNA, 15 bp, Homo sapiens
tttgtcagtttcacc

SEQ ID NO: 25876 - DNA, 15 bp, Homo sapiens
atttgtcagtttcac

SEQ ID NO: 25877 - DNA, 15 bp, Homo sapiens
catttgtcagtttca

SEQ ID NO: 25878 - DNA, 15 bp, Homo sapiens
acatttgtcagtttc

SEQ ID NO: 25879 - DNA, 15 bp, Homo sapiens
aacatttgtcagttt

SEQ ID NO: 25880 - DNA, 15 bp, Homo sapiens
aaacatttgtcagtt

SEQ ID NO: 25881 - DNA, 15 bp, Homo sapiens
caaacatttgtcagt

SEQ ID NO: 25882 - DNA, 15 bp, Homo sapiens
ccaaacatttgtcag

SEQ ID NO: 25883 - DNA, 15 bp, Homo sapiens
gccaaacatttgtca

SEQ ID NO: 25884 - DNA, 15 bp, Homo sapiens
tgccaaacatttgtc

SEQ ID NO: 25885 - DNA, 15 bp, Homo sapiens
ctgccaaacatttgt

SEQ ID NO: 25886 - DNA, 15 bp, Homo sapiens
tctgccaaacatttg

SEQ ID NO: 25887 - DNA, 15 bp, Homo sapiens
atctgccaaacattt

SEQ ID NO: 25888 - DNA, 15 bp, Homo sapiens
catctgccaaacatt

SEQ ID NO: 25889 - DNA, 15 bp, Homo sapiens
ccatctgccaaacat

SEQ ID NO: 25890 - DNA, 15 bp, Homo sapiens
tccatctgccaaaca

SEQ ID NO: 25891 - DNA, 15 bp, Homo sapiens
ctccatctgccaaac

SEQ ID NO: 25892 - DNA, 15 bp, Homo sapiens
cctccatctgccaaa

SEQ ID NO: 25893 - DNA, 15 bp, Homo sapiens
tcctccatctgccaa

SEQ ID NO: 25894 - DNA, 15 bp, Homo sapiens
ctcctccatctgcca

SEQ ID NO: 25895 - DNA, 15 bp, Homo sapiens
tctcctccatctgcc

SEQ ID NO: 25896 - DNA, 15 bp, Homo sapiens
ctctcctccatctgc

SEQ ID NO: 25897 - DNA, 15 bp, Homo sapiens
actctcctccatctg

SEQ ID NO: 25898 - DNA, 15 bp, Homo sapiens
tactctcctccatct

SEQ ID NO: 25899 - DNA, 15 bp, Homo sapiens
gtactctcctccatc

SEQ ID NO: 25900 - DNA, 15 bp, Homo sapiens
ggtactctcctccat

SEQ ID NO: 25901 - DNA, 15 bp, Homo sapiens
tggtactctcctcca

SEQ ID NO: 25902 - DNA, 15 bp, Homo sapiens
ctggtactctcctcc

SEQ ID NO: 25903 - DNA, 15 bp, Homo sapiens
tctggtactctcctc

SEQ ID NO: 25904 - DNA, 15 bp, Homo sapiens
ctctggtactctcct

SEQ ID NO: 25905 - DNA, 15 bp, Homo sapiens
cctctggtactctcc

SEQ ID NO: 25906 - DNA, 15 bp, Homo sapiens
ccctctggtactctc

SEQ ID NO: 25907 - DNA, 15 bp, Homo sapiens
cccctctggtactct

SEQ ID NO: 25908 - DNA, 15 bp, Homo sapiens
acccctctggtactc

SEQ ID NO: 25909 - DNA, 15 bp, Homo sapiens
aacccctctggtact

SEQ ID NO: 25910 - DNA, 15 bp, Homo sapiens
aaacccctctggtac

SEQ ID NO: 25911 - DNA, 15 bp, Homo sapiens
caaacccctctggta

SEQ ID NO: 25912 - DNA, 15 bp, Homo sapiens
tcaaacccctctggt

SEQ ID NO: 25913 - DNA, 15 bp, Homo sapiens
ctcaaacccctctgg

SEQ ID NO: 25914 - DNA, 15 bp, Homo sapiens
tctcaaacccctctg

SEQ ID NO: 25915 - DNA, 15 bp, Homo sapiens
atctcaaacccctct

SEQ ID NO: 25916 - DNA, 15 bp, Homo sapiens
catctcaaacccctc

SEQ ID NO: 25917 - DNA, 15 bp, Homo sapiens
tcatctcaaacccct

SEQ ID NO: 25918 - DNA, 15 bp, Homo sapiens
ctcatctcaaacccc

SEQ ID NO: 25919 - DNA, 15 bp, Homo sapiens
gctcatctcaaaccc

SEQ ID NO: 25920 - DNA, 15 bp, Homo sapiens
agctcatctcaaacc

SEQ ID NO: 25921 - DNA, 15 bp, Homo sapiens
tagctcatctcaaac

SEQ ID NO: 25922 - DNA, 15 bp, Homo sapiens
ttagctcatctcaaa

SEQ ID NO: 25923 - DNA, 15 bp, Homo sapiens
tttagctcatctcaa

SEQ ID NO: 25924 - DNA, 15 bp, Homo sapiens
atttagctcatctca

SEQ ID NO: 25925 - DNA, 15 bp, Homo sapiens
aatttagctcatctc

SEQ ID NO: 25926 - DNA, 15 bp, Homo sapiens
gaatttagctcatct

SEQ ID NO: 25927 - DNA, 15 bp, Homo sapiens
ggaatttagctcatc

SEQ ID NO: 25928 - DNA, 15 bp, Homo sapiens
tggaatttagctcat

SEQ ID NO: 25929 - DNA, 15 bp, Homo sapiens
ttggaatttagctca

SEQ ID NO: 25930 - DNA, 15 bp, Homo sapiens
attggaatttagctc

SEQ ID NO: 25931 - DNA, 15 bp, Homo sapiens
gattggaatttagct

SEQ ID NO: 25932 - DNA, 15 bp, Homo sapiens
agattggaatttagc

SEQ ID NO: 25933 - DNA, 15 bp, Homo sapiens
tagattggaatttag

SEQ ID NO: 25934 - DNA, 15 bp, Homo sapiens
ttagattggaattta

SEQ ID NO: 25935 - DNA, 15 bp, Homo sapiens
gttagattggaattt

SEQ ID NO: 25936 - DNA, 15 bp, Homo sapiens
ggttagattggaatt

SEQ ID NO: 25937 - DNA, 15 bp, Homo sapiens
cggttagattggaat

SEQ ID NO: 25938 - DNA, 15 bp, Homo sapiens
gcggttagattggaa

SEQ ID NO: 25939 - DNA, 15 bp, Homo sapiens
tgcggttagattgga

SEQ ID NO: 25940 - DNA, 15 bp, Homo sapiens
ctgcggttagattgg

SEQ ID NO: 25941 - DNA, 15 bp, Homo sapiens
cctgcggttagattg

SEQ ID NO: 25942 - DNA, 15 bp, Homo sapiens
acctgcggttagatt

SEQ ID NO: 25943 - DNA, 15 bp, Homo sapiens
cacctgcggttagat

SEQ ID NO: 25944 - DNA, 15 bp, Homo sapiens
acacctgcggttaga

SEQ ID NO: 25945 - DNA, 15 bp, Homo sapiens
cacacctgcggttag

SEQ ID NO: 25946 - DNA, 15 bp, Homo sapiens
tcacacctgcggtta

SEQ ID NO: 25947 - DNA, 15 bp, Homo sapiens
ctcacacctgcggtt

SEQ ID NO: 25948 - DNA, 15 bp, Homo sapiens
cctcacacctgcggt

SEQ ID NO: 25949 - DNA, 15 bp, Homo sapiens
tcctcacacctgcgg

SEQ ID NO: 25950 - DNA, 15 bp, Homo sapiens
ttcctcacacctgcg

SEQ ID NO: 25951 - DNA, 15 bp, Homo sapiens
cttcctcacacctgc

SEQ ID NO: 25952 - DNA, 15 bp, Homo sapiens
tcttcctcacacctg

SEQ ID NO: 25953 - DNA, 15 bp, Homo sapiens
ctcttcctcacacct

SEQ ID NO: 25954 - DNA, 15 bp, Homo sapiens
cctcttcctcacacc

SEQ ID NO: 25955 - DNA, 15 bp, Homo sapiens
gcctcttcctcacac

SEQ ID NO: 25956 - DNA, 15 bp, Homo sapiens
agcctcttcctcaca

SEQ ID NO: 25957 - DNA, 15 bp, Homo sapiens
aagcctcttcctcac

SEQ ID NO: 25958 - DNA, 15 bp, Homo sapiens
caagcctcttcctca

SEQ ID NO: 25959 - DNA, 15 bp, Homo sapiens
ccaagcctcttcctc

SEQ ID NO: 25960 - DNA, 15 bp, Homo sapiens
tccaagcctcttcct

SEQ ID NO: 25961 - DNA, 15 bp, Homo sapiens
atccaagcctcttcc

SEQ ID NO: 25962 - DNA, 15 bp, Homo sapiens
aatccaagcctcttc

SEQ ID NO: 25963 - DNA, 15 bp, Homo sapiens
caatccaagcctctt

SEQ ID NO: 25964 - DNA, 15 bp, Homo sapiens
ccaatccaagcctct

SEQ ID NO: 25965 - DNA, 15 bp, Homo sapiens
cccaatccaagcctc

SEQ ID NO: 25966 - DNA, 15 bp, Homo sapiens
tcccaatccaagcct

SEQ ID NO: 25967 - DNA, 15 bp, Homo sapiens
gtcccaatccaagcc

SEQ ID NO: 25968 - DNA, 15 bp, Homo sapiens
ggtcccaatccaagc

SEQ ID NO: 25969 - DNA, 15 bp, Homo sapiens
tggtcccaatccaag

SEQ ID NO: 25970 - DNA, 15 bp, Homo sapiens
atggtcccaatccaa

SEQ ID NO: 25971 - DNA, 15 bp, Homo sapiens
catggtcccaatcca

SEQ ID NO: 25972 - DNA, 15 bp, Homo sapiens
ccatggtcccaatcc

SEQ ID NO: 25973 - DNA, 15 bp, Homo sapiens
tccatggtcccaatc

SEQ ID NO: 25974 - DNA, 15 bp, Homo sapiens
ctccatggtcccaat

SEQ ID NO: 25975 - DNA, 15 bp, Homo sapiens
tctccatggtcccaa

SEQ ID NO: 25976 - DNA, 15 bp, Homo sapiens
atctccatggtccca

SEQ ID NO: 25977 - DNA, 15 bp, Homo sapiens
catctccatggtccc

SEQ ID NO: 25978 - DNA, 15 bp, Homo sapiens
ccatctccatggtcc

SEQ ID NO: 25979 - DNA, 15 bp, Homo sapiens
cccatctccatggtc

SEQ ID NO: 25980 - DNA, 15 bp, Homo sapiens
ccccatctccatggt

SEQ ID NO: 25981 - DNA, 15 bp, Homo sapiens
cccccatctccatgg

SEQ ID NO: 25982 - DNA, 15 bp, Homo sapiens
acccccatctccatg

SEQ ID NO: 25983 - DNA, 15 bp, Homo sapiens
aacccccatctccat

SEQ ID NO: 25984 - DNA, 15 bp, Homo sapiens
gaacccccatctcca

SEQ ID NO: 25985 - DNA, 15 bp, Homo sapiens
agaacccccatctcc

SEQ ID NO: 25986 - DNA, 15 bp, Homo sapiens
tagaacccccatctc

SEQ ID NO: 25987 - DNA, 15 bp, Homo sapiens
gtagaacccccatct

SEQ ID NO: 25988 - DNA, 15 bp, Homo sapiens
agtagaacccccatc

SEQ ID NO: 25989 - DNA, 15 bp, Homo sapiens
gagtagaacccccat

SEQ ID NO: 25990 - DNA, 15 bp, Homo sapiens
ggagtagaaccccca

SEQ ID NO: 25991 - DNA, 15 bp, Homo sapiens
gggagtagaaccccc

SEQ ID NO: 25992 - DNA, 15 bp, Homo sapiens
tgggagtagaacccc

SEQ ID NO: 25993 - DNA, 15 bp, Homo sapiens
ctgggagtagaaccc

SEQ ID NO: 25994 - DNA, 15 bp, Homo sapiens
actgggagtagaacc

SEQ ID NO: 25995 - DNA, 15 bp, Homo sapiens
gactgggagtagaac

SEQ ID NO: 25996 - DNA, 15 bp, Homo sapiens
tgactgggagtagaa

SEQ ID NO: 25997 - DNA, 15 bp, Homo sapiens
gtgactgggagtaga

SEQ ID NO: 25998 - DNA, 15 bp, Homo sapiens
cgtgactgggagtag

SEQ ID NO: 25999 - DNA, 15 bp, Homo sapiens
gcgtgactgggagta

SEQ ID NO: 26000 - DNA, 15 bp, Homo sapiens
ggcgtgactgggagt

SEQ ID NO: 26001 - DNA, 15 bp, Homo sapiens
tggcgtgactgggag

SEQ ID NO: 26002 - DNA, 15 bp, Homo sapiens
ctggcgtgactggga

SEQ ID NO: 26003 - DNA, 15 bp, Homo sapiens
gctggcgtgactggg

SEQ ID NO: 26004 - DNA, 15 bp, Homo sapiens
agctggcgtgactgg

SEQ ID NO: 26005 - DNA, 15 bp, Homo sapiens
cagctggcgtgactg

SEQ ID NO: 26006 - DNA, 15 bp, Homo sapiens
tcagctggcgtgact

SEQ ID NO: 26007 - DNA, 15 bp, Homo sapiens
gtcagctggcgtgac

SEQ ID NO: 26008 - DNA, 15 bp, Homo sapiens
agtcagctggcgtga

SEQ ID NO: 26009 - DNA, 15 bp, Homo sapiens
aagtcagctggcgtg

SEQ ID NO: 26010 - DNA, 15 bp, Homo sapiens
aaagtcagctggcgt

SEQ ID NO: 26011 - DNA, 15 bp, Homo sapiens
caaagtcagctggcg

SEQ ID NO: 26012 - DNA, 15 bp, Homo sapiens
gcaaagtcagctggc

SEQ ID NO: 26013 - DNA, 15 bp, Homo sapiens
cgcaaagtcagctgg

SEQ ID NO: 26014 - DNA, 15 bp, Homo sapiens
tcgcaaagtcagctg

SEQ ID NO: 26015 - DNA, 15 bp, Homo sapiens
ctcgcaaagtcagct

SEQ ID NO: 26016 - DNA, 15 bp, Homo sapiens
actcgcaaagtcagc

SEQ ID NO: 26017 - DNA, 15 bp, Homo sapiens
cactcgcaaagtcag

SEQ ID NO: 26018 - DNA, 15 bp, Homo sapiens
acactcgcaaagtca

SEQ ID NO: 26019 - DNA, 15 bp, Homo sapiens
aacactcgcaaagtc

SEQ ID NO: 26020 - DNA, 15 bp, Homo sapiens
gaacactcgcaaagt

SEQ ID NO: 26021 - DNA, 15 bp, Homo sapiens
agaacactcgcaaag

SEQ ID NO: 26022 - DNA, 15 bp, Homo sapiens
aagaacactcgcaaa

SEQ ID NO: 26023 - DNA, 15 bp, Homo sapiens
aaagaacactcgcaa

SEQ ID NO: 26024 - DNA, 15 bp, Homo sapiens
caaagaacactcgca

SEQ ID NO: 26025 - DNA, 15 bp, Homo sapiens
acaaagaacactcgc

SEQ ID NO: 26026 - DNA, 15 bp, Homo sapiens
gacaaagaacactcg

SEQ ID NO: 26027 - DNA, 15 bp, Homo sapiens
tgacaaagaacactc

SEQ ID NO: 26028 - DNA, 15 bp, Homo sapiens
ctgacaaagaacact

SEQ ID NO: 26029 - DNA, 15 bp, Homo sapiens
actgacaaagaacac

SEQ ID NO: 26030 - DNA, 15 bp, Homo sapiens
gactgacaaagaaca

SEQ ID NO: 26031 - DNA, 15 bp, Homo sapiens
tgactgacaaagaac

SEQ ID NO: 26032 - DNA, 15 bp, Homo sapiens
gtgactgacaaagaa

SEQ ID NO: 26033 - DNA, 15 bp, Homo sapiens
agtgactgacaaaga

SEQ ID NO: 26034 - DNA, 15 bp, Homo sapiens
aagtgactgacaaag

SEQ ID NO: 26035 - DNA, 15 bp, Homo sapiens
aaagtgactgacaaa

SEQ ID NO: 26036 - DNA, 15 bp, Homo sapiens
taaagtgactgacaa

SEQ ID NO: 26037 - DNA, 15 bp, Homo sapiens
ataaagtgactgaca

SEQ ID NO: 26038 - DNA, 15 bp, Homo sapiens
gataaagtgactgac

SEQ ID NO: 26039 - DNA, 15 bp, Homo sapiens
agataaagtgactga

SEQ ID NO: 26040 - DNA, 15 bp, Homo sapiens
aagataaagtgactg

SEQ ID NO: 26041 - DNA, 15 bp, Homo sapiens
taagataaagtgact

SEQ ID NO: 26042 - DNA, 15 bp, Homo sapiens
ataagataaagtgac

SEQ ID NO: 26043 - DNA, 15 bp, Homo sapiens
aataagataaagtga

SEQ ID NO: 26044 - DNA, 15 bp, Homo sapiens
aaataagataaagtg

SEQ ID NO: 26045 - DNA, 15 bp, Homo sapiens
aaaataagataaagt

SEQ ID NO: 26046 - DNA, 15 bp, Homo sapiens
taaaataagataaag

SEQ ID NO: 26047 - DNA, 15 bp, Homo sapiens
ataaaataagataaa

SEQ ID NO: 26048 - DNA, 15 bp, Homo sapiens
aataaaataagataa

SEQ ID NO: 26049 - DNA, 15 bp, Homo sapiens
aaataaaataagata

SEQ ID NO: 26050 - DNA, 15 bp, Homo sapiens
taaataaaataagat

SEQ ID NO: 26051 - DNA, 15 bp, Homo sapiens
ataaataaaataaga

SEQ ID NO: 26052 - DNA, 15 bp, Homo sapiens
aataaataaaataag

SEQ ID NO: 26053 - DNA, 15 bp, Homo sapiens
aaataaataaaataa

SEQ ID NO: 26054 - DNA, 15 bp, Homo sapiens
aaaataaataaaata

SEQ ID NO: 26055 - DNA, 15 bp, Homo sapiens
aaaaataaataaaat

SEQ ID NO: 26056 - DNA, 15 bp, Homo sapiens
taaaaataaataaaa

SEQ ID NO: 26057 - DNA, 15 bp, Homo sapiens
ataaaaataaataaa

SEQ ID NO: 26058 - DNA, 15 bp, Homo sapiens
aataaaaataaataa

SEQ ID NO: 26059 - DNA, 15 bp, Homo sapiens
aaataaaaataaata

SEQ ID NO: 26060 - DNA, 15 bp, Homo sapiens
aaaataaaaataaat

SEQ ID NO: 26061 - DNA, 15 bp, Homo sapiens
caaaaaaataaaaat

SEQ ID NO: 26062 - DNA, 15 bp, Homo sapiens
tcaaaaaaataaaaa

SEQ ID NO: 26063 - DNA, 15 bp, Homo sapiens
ttcaaaaaaataaaa

SEQ ID NO: 26064 - DNA, 15 bp, Homo sapiens
tttcaaaaaaataaa

SEQ ID NO: 26065 - DNA, 15 bp, Homo sapiens
atttcaaaaaaataa

SEQ ID NO: 26066 - DNA, 15 bp, Homo sapiens
catttcaaaaaaata

SEQ ID NO: 26067 - DNA, 15 bp, Homo sapiens
ccatttcaaaaaaat

SEQ ID NO: 26068 - DNA, 15 bp, Homo sapiens
tccatttcaaaaaaa

SEQ ID NO: 26069 - DNA, 15 bp, Homo sapiens
ctccatttcaaaaaa

SEQ ID NO: 26070 - DNA, 15 bp, Homo sapiens
actccatttcaaaaa

SEQ ID NO: 26071 - DNA, 15 bp, Homo sapiens
aactccatttcaaaa

SEQ ID NO: 26072 - DNA, 15 bp, Homo sapiens
aaactccatttcaaa

SEQ ID NO: 26073 - DNA, 15 bp, Homo sapiens
gaaactccatttcaa

SEQ ID NO: 26074 - DNA, 15 bp, Homo sapiens
cgaaactccatttca

SEQ ID NO: 26075 - DNA, 15 bp, Homo sapiens
gcgaaactccatttc

SEQ ID NO: 26076 - DNA, 15 bp, Homo sapiens
agcgaaactccattt

SEQ ID NO: 26077 - DNA, 15 bp, Homo sapiens
gagcgaaactccatt

SEQ ID NO: 26078 - DNA, 15 bp, Homo sapiens
agagcgaaactccat

SEQ ID NO: 26079 - DNA, 15 bp, Homo sapiens
aagagcgaaactcca

SEQ ID NO: 26080 - DNA, 15 bp, Homo sapiens
caagagcgaaactcc

SEQ ID NO: 26081 - DNA, 15 bp, Homo sapiens
acaagagcgaaactc

SEQ ID NO: 26082 - DNA, 15 bp, Homo sapiens
gacaagagcgaaact

SEQ ID NO: 26083 - DNA, 15 bp, Homo sapiens
cgacaagagcgaaac

SEQ ID NO: 26084 - DNA, 15 bp, Homo sapiens
gcgacaagagcgaaa

SEQ ID NO: 26085 - DNA, 15 bp, Homo sapiens
ggcgacaagagcgaa

SEQ ID NO: 26086 - DNA, 15 bp, Homo sapiens
gggcgacaagagcga

SEQ ID NO: 26087 - DNA, 15 bp, Homo sapiens
tgggcgacaagagcg

SEQ ID NO: 26088 - DNA, 15 bp, Homo sapiens
ctgggcgacaagagc

SEQ ID NO: 26089 - DNA, 15 bp, Homo sapiens
cctgggcgacaagag

SEQ ID NO: 26090 - DNA, 15 bp, Homo sapiens
gcctgggcgacaaga

SEQ ID NO: 26091 - DNA, 15 bp, Homo sapiens
agcctgggcgacaag

SEQ ID NO: 26092 - DNA, 15 bp, Homo sapiens
cagcctgggcgacaa

SEQ ID NO: 26093 - DNA, 15 bp, Homo sapiens
tttcactccagcctg

SEQ ID NO: 26094 - DNA, 15 bp, Homo sapiens
atttcactccagcct

SEQ ID NO: 26095 - DNA, 15 bp, Homo sapiens
catttcactccagcc

SEQ ID NO: 26096 - DNA, 15 bp, Homo sapiens
ccatttcactccagc

SEQ ID NO: 26097 - DNA, 15 bp, Homo sapiens
gccatttcactccag

SEQ ID NO: 26098 - DNA, 15 bp, Homo sapiens
cgccatttcactcca

SEQ ID NO: 26099 - DNA, 15 bp, Homo sapiens
gcgccatttcactcc

SEQ ID NO: 26100 - DNA, 15 bp, Homo sapiens
cgcgccatttcactc

SEQ ID NO: 26101 - DNA, 15 bp, Homo sapiens
tcgcgccatttcact

SEQ ID NO: 26102 - DNA, 15 bp, Homo sapiens
atcgcgccatttcac

SEQ ID NO: 26103 - DNA, 15 bp, Homo sapiens
gatcgcgccatttca

SEQ ID NO: 26104 - DNA, 15 bp, Homo sapiens
agatcgcgccatttc

SEQ ID NO: 26105 - DNA, 15 bp, Homo sapiens
aagatcgcgccattt

SEQ ID NO: 26106 - DNA, 15 bp, Homo sapiens
caagatcgcgccatt

SEQ ID NO: 26107 - DNA, 15 bp, Homo sapiens
ccaagatcgcgccat

SEQ ID NO: 26108 - DNA, 15 bp, Homo sapiens
gccaagatcgcgcca

SEQ ID NO: 26109 - DNA, 15 bp, Homo sapiens
agccaagatcgcgcc

SEQ ID NO: 26110 - DNA, 15 bp, Homo sapiens
gagccaagatcgcgc

SEQ ID NO: 26111 - DNA, 15 bp, Homo sapiens
tgagccaagatcgcg

SEQ ID NO: 26112 - DNA, 15 bp, Homo sapiens
tcaggagggggaggt

SEQ ID NO: 26113 - DNA, 15 bp, Homo sapiens
ctcaggagggggagg

SEQ ID NO: 26114 - DNA, 15 bp, Homo sapiens
actcaggagggggag

SEQ ID NO: 26115 - DNA, 15 bp, Homo sapiens
aactcaggaggggga

SEQ ID NO: 26116 - DNA, 15 bp, Homo sapiens
gaactcaggaggggg

SEQ ID NO: 26117 - DNA, 15 bp, Homo sapiens
tgaactcaggagggg

SEQ ID NO: 26118 - DNA, 15 bp, Homo sapiens
ttgaactcaggaggg

SEQ ID NO: 26119 - DNA, 15 bp, Homo sapiens
cttgaactcaggagg

SEQ ID NO: 26120 - DNA, 15 bp, Homo sapiens
gcttgaactcaggag

SEQ ID NO: 26121 - DNA, 15 bp, Homo sapiens
cgcttgaactcagga

SEQ ID NO: 26122 - DNA, 15 bp, Homo sapiens
tcgcttgaactcagg

SEQ ID NO: 26123 - DNA, 15 bp, Homo sapiens
atcgcttgaactcag

SEQ ID NO: 26124 - DNA, 15 bp, Homo sapiens
aatcgcttgaactca

SEQ ID NO: 26125 - DNA, 15 bp, Homo sapiens
gaatcgcttgaactc

SEQ ID NO: 26126 - DNA, 15 bp, Homo sapiens
agaatcgcttgaact

SEQ ID NO: 26127 - DNA, 15 bp, Homo sapiens
tggaggctgaggcag

SEQ ID NO: 26128 - DNA, 15 bp, Homo sapiens
ctggaggctgaggca

SEQ ID NO: 26129 - DNA, 15 bp, Homo sapiens
tctggaggctgaggc

SEQ ID NO: 26130 - DNA, 15 bp, Homo sapiens
ctctggaggctgagg

SEQ ID NO: 26131 - DNA, 15 bp, Homo sapiens
actctggaggctgag

SEQ ID NO: 26132 - DNA, 15 bp, Homo sapiens
tactctggaggctga

SEQ ID NO: 26133 - DNA, 15 bp, Homo sapiens
gtactctggaggctg

SEQ ID NO: 26134 - DNA, 15 bp, Homo sapiens
ggtactctggaggct

SEQ ID NO: 26135 - DNA, 15 bp, Homo sapiens
aggtactctggaggc

SEQ ID NO: 26136 - DNA, 15 bp, Homo sapiens
caggtactctggagg

SEQ ID NO: 26137 - DNA, 15 bp, Homo sapiens
ccaggtactctggag

SEQ ID NO: 26138 - DNA, 15 bp, Homo sapiens
cccaggtactctgga

SEQ ID NO: 26139 - DNA, 15 bp, Homo sapiens
tcccaggtactctgg

SEQ ID NO: 26140 - DNA, 15 bp, Homo sapiens
atcccaggtactctg

SEQ ID NO: 26141 - DNA, 15 bp, Homo sapiens
aatcccaggtactct

SEQ ID NO: 26142 - DNA, 15 bp, Homo sapiens
taatcccaggtactc

SEQ ID NO: 26143 - DNA, 15 bp, Homo sapiens
gtaatcccaggtact

SEQ ID NO: 26144 - DNA, 15 bp, Homo sapiens
tgtaatcccaggtac

SEQ ID NO: 26145 - DNA, 15 bp, Homo sapiens
ctgtaatcccaggta

SEQ ID NO: 26146 - DNA, 15 bp, Homo sapiens
cctgtaatcccaggt

SEQ ID NO: 26147 - DNA, 15 bp, Homo sapiens
gcctgtaatcccagg

SEQ ID NO: 26148 - DNA, 15 bp, Homo sapiens
ggcgcctgtaatccc

SEQ ID NO: 26149 - DNA, 15 bp, Homo sapiens
aggcgcctgtaatcc

SEQ ID NO: 26150 - DNA, 15 bp, Homo sapiens
caggcgcctgtaatc

SEQ ID NO: 26151 - DNA, 15 bp, Homo sapiens
gcaggcgcctgtaat

SEQ ID NO: 26152 - DNA, 15 bp, Homo sapiens
ggcaggcgcctgtaa

SEQ ID NO: 26153 - DNA, 15 bp, Homo sapiens
ttggtggcaggcgcc

SEQ ID NO: 26154 - DNA, 15 bp, Homo sapiens
cttggtggcaggcgc

SEQ ID NO: 26155 - DNA, 15 bp, Homo sapiens
gcttggtggcaggcg

SEQ ID NO: 26156 - DNA, 15 bp, Homo sapiens
ggcttggtggcaggc

SEQ ID NO: 26157 - DNA, 15 bp, Homo sapiens
gggcttggtggcagg

SEQ ID NO: 26158 - DNA, 15 bp, Homo sapiens
tgggcttggtggcag

SEQ ID NO: 26159 - DNA, 15 bp, Homo sapiens
atgggcttggtggca

SEQ ID NO: 26160 - DNA, 15 bp, Homo sapiens
gatgggcttggtggc

SEQ ID NO: 26161 - DNA, 15 bp, Homo sapiens
cgatgggcttggtgg

SEQ ID NO: 26162 - DNA, 15 bp, Homo sapiens
tcgatgggcttggtg

SEQ ID NO: 26163 - DNA, 15 bp, Homo sapiens
ttcgatgggcttggt

SEQ ID NO: 26164 - DNA, 15 bp, Homo sapiens
attcgatgggcttgg

SEQ ID NO: 26165 - DNA, 15 bp, Homo sapiens
aattcgatgggcttg

SEQ ID NO: 26166 - DNA, 15 bp, Homo sapiens
aaattcgatgggctt

SEQ ID NO: 26167 - DNA, 15 bp, Homo sapiens
aaaattcgatgggct

SEQ ID NO: 26168 - DNA, 15 bp, Homo sapiens
aaaaattcgatgggc

SEQ ID NO: 26169 - DNA, 15 bp, Homo sapiens
caaaaattcgatggg

SEQ ID NO: 26170 - DNA, 15 bp, Homo sapiens
acaaaaattcgatgg

SEQ ID NO: 26171 - DNA, 15 bp, Homo sapiens
tacaaaaattcgatg

SEQ ID NO: 26172 - DNA, 15 bp, Homo sapiens
atacaaaaattcgat

SEQ ID NO: 26173 - DNA, 15 bp, Homo sapiens
catacaaaaattcga

SEQ ID NO: 26174 - DNA, 15 bp, Homo sapiens
gcatacaaaaattcg

SEQ ID NO: 26175 - DNA, 15 bp, Homo sapiens
agcatacaaaaattc

SEQ ID NO: 26176 - DNA, 15 bp, Homo sapiens
aagcatacaaaaatt

SEQ ID NO: 26177 - DNA, 15 bp, Homo sapiens
taagcatacaaaaat

SEQ ID NO: 26178 - DNA, 15 bp, Homo sapiens
ctaagcatacaaaaa

SEQ ID NO: 26179 - DNA, 15 bp, Homo sapiens
actaagcatacaaaa

SEQ ID NO: 26180 - DNA, 15 bp, Homo sapiens
tactaagcatacaaa

SEQ ID NO: 26181 - DNA, 15 bp, Homo sapiens
ctactaagcatacaa

SEQ ID NO: 26182 - DNA, 15 bp, Homo sapiens
tctactaagcataca

SEQ ID NO: 26183 - DNA, 15 bp, Homo sapiens
ctctactaagcatac

SEQ ID NO: 26184 - DNA, 15 bp, Homo sapiens
tctctactaagcata

SEQ ID NO: 26185 - DNA, 15 bp, Homo sapiens
gtctctactaagcat

SEQ ID NO: 26186 - DNA, 15 bp, Homo sapiens
tgtctctactaagca

SEQ ID NO: 26187 - DNA, 15 bp, Homo sapiens
ctgtctctactaagc

SEQ ID NO: 26188 - DNA, 15 bp, Homo sapiens
cctgtctctactaag

SEQ ID NO: 26189 - DNA, 15 bp, Homo sapiens
atggcgaaaccctgt

SEQ ID NO: 26190 - DNA, 15 bp, Homo sapiens
catggcgaaaccctg

SEQ ID NO: 26191 - DNA, 15 bp, Homo sapiens
acatggcgaaaccct

SEQ ID NO: 26192 - DNA, 15 bp, Homo sapiens
aacatggcgaaaccc

SEQ ID NO: 26193 - DNA, 15 bp, Homo sapiens
caacatggcgaaacc

SEQ ID NO: 26194 - DNA, 15 bp, Homo sapiens
ccaacatggcgaaac

SEQ ID NO: 26195 - DNA, 15 bp, Homo sapiens
gccaacatggcgaaa

SEQ ID NO: 26196 - DNA, 15 bp, Homo sapiens
ggccaacatggcgaa

SEQ ID NO: 26197 - DNA, 15 bp, Homo sapiens
tggccaacatggcga

SEQ ID NO: 26198 - DNA, 15 bp, Homo sapiens
ctggccaacatggcg

SEQ ID NO: 26199 - DNA, 15 bp, Homo sapiens
ccctggccaacatgg

SEQ ID NO: 26200 - DNA, 15 bp, Homo sapiens
accctggccaacatg

SEQ ID NO: 26201 - DNA, 15 bp, Homo sapiens
caccctggccaacat

SEQ ID NO: 26202 - DNA, 15 bp, Homo sapiens
ccaccctggccaaca

SEQ ID NO: 26203 - DNA, 15 bp, Homo sapiens
accaccctggccaac

SEQ ID NO: 26204 - DNA, 15 bp, Homo sapiens
gaccaccctggccaa

SEQ ID NO: 26205 - DNA, 15 bp, Homo sapiens
agaccaccctggcca

SEQ ID NO: 26206 - DNA, 15 bp, Homo sapiens
aagaccaccctggcc

SEQ ID NO: 26207 - DNA, 15 bp, Homo sapiens
caagaccaccctggc

SEQ ID NO: 26208 - DNA, 15 bp, Homo sapiens
tcaagaccaccctgg

SEQ ID NO: 26209 - DNA, 15 bp, Homo sapiens
ttcaagaccaccctg

SEQ ID NO: 26210 - DNA, 15 bp, Homo sapiens
gttcaagaccaccct

SEQ ID NO: 26211 - DNA, 15 bp, Homo sapiens
agttcaagaccaccc

SEQ ID NO: 26212 - DNA, 15 bp, Homo sapiens
gagttcaagaccacc

SEQ ID NO: 26213 - DNA, 15 bp, Homo sapiens
ggagttcaagaccac

SEQ ID NO: 26214 - DNA, 15 bp, Homo sapiens
aaggtgggcggatca

SEQ ID NO: 26215 - DNA, 15 bp, Homo sapiens
caaggtgggcggatc

SEQ ID NO: 26216 - DNA, 15 bp, Homo sapiens
ccaaggtgggcggat

SEQ ID NO: 26217 - DNA, 15 bp, Homo sapiens
gccaaggtgggcgga

SEQ ID NO: 26218 - DNA, 15 bp, Homo sapiens
ggccaaggtgggcgg

SEQ ID NO: 26219 - DNA, 15 bp, Homo sapiens
aggccaaggtgggcg

SEQ ID NO: 26220 - DNA, 15 bp, Homo sapiens
tcgcgcctgtaatcc

SEQ ID NO: 26221 - DNA, 15 bp, Homo sapiens
ctcgcgcctgtaatc

SEQ ID NO: 26222 - DNA, 15 bp, Homo sapiens
gctcgcgcctgtaat

SEQ ID NO: 26223 - DNA, 15 bp, Homo sapiens
ggctcgcgcctgtaa

SEQ ID NO: 26224 - DNA, 15 bp, Homo sapiens
tggctcgcgcctgta

SEQ ID NO: 26225 - DNA, 15 bp, Homo sapiens
gtggctcgcgcctgt

SEQ ID NO: 26226 - DNA, 15 bp, Homo sapiens
agtggctcgcgcctg

SEQ ID NO: 26227 - DNA, 15 bp, Homo sapiens
cagtggctcgcgcct

SEQ ID NO: 26228 - DNA, 15 bp, Homo sapiens
acagtggctcgcgcc

SEQ ID NO: 26229 - DNA, 15 bp, Homo sapiens
cacagtggctcgcgc

SEQ ID NO: 26230 - DNA, 15 bp, Homo sapiens
gcacagtggctcgcg

SEQ ID NO: 26231 - DNA, 15 bp, Homo sapiens
ggcacagtggctcgc

SEQ ID NO: 26232 - DNA, 15 bp, Homo sapiens
gggcacagtggctcg

SEQ ID NO: 26233 - DNA, 15 bp, Homo sapiens
gtgggctgggcacag

SEQ ID NO: 26234 - DNA, 15 bp, Homo sapiens
agtgggctgggcaca

SEQ ID NO: 26235 - DNA, 15 bp, Homo sapiens
aagtgggctgggcac

SEQ ID NO: 26236 - DNA, 15 bp, Homo sapiens
gaagtgggctgggca

SEQ ID NO: 26237 - DNA, 15 bp, Homo sapiens
tgaagtgggctgggc

SEQ ID NO: 26238 - DNA, 15 bp, Homo sapiens
atgaagtgggctggg

SEQ ID NO: 26239 - DNA, 15 bp, Homo sapiens
gatgaagtgggctgg

SEQ ID NO: 26240 - DNA, 15 bp, Homo sapiens
agatgaagtgggctg

SEQ ID NO: 26241 - DNA, 15 bp, Homo sapiens
aagatgaagtgggct

SEQ ID NO: 26242 - DNA, 15 bp, Homo sapiens
taagatgaagtgggc

SEQ ID NO: 26243 - DNA, 15 bp, Homo sapiens
gtaagatgaagtggg

SEQ ID NO: 26244 - DNA, 15 bp, Homo sapiens
ggtaagatgaagtgg

SEQ ID NO: 26245 - DNA, 15 bp, Homo sapiens
cggtaagatgaagtg

SEQ ID NO: 26246 - DNA, 15 bp, Homo sapiens
acggtaagatgaagt

SEQ ID NO: 26247 - DNA, 15 bp, Homo sapiens
tacggtaagatgaag

SEQ ID NO: 26248 - DNA, 15 bp, Homo sapiens
ctacggtaagatgaa

SEQ ID NO: 26249 - DNA, 15 bp, Homo sapiens
actacggtaagatga

SEQ ID NO: 26250 - DNA, 15 bp, Homo sapiens
aactacggtaagatg

SEQ ID NO: 26251 - DNA, 15 bp, Homo sapiens
taactacggtaagat

SEQ ID NO: 26252 - DNA, 15 bp, Homo sapiens
gtaactacggtaaga

SEQ ID NO: 26253 - DNA, 15 bp, Homo sapiens
ggtaactacggtaag

SEQ ID NO: 26254 - DNA, 15 bp, Homo sapiens
aggtaactacggtaa

SEQ ID NO: 26255 - DNA, 15 bp, Homo sapiens
gaggtaactacggta

SEQ ID NO: 26256 - DNA, 15 bp, Homo sapiens
ggaggtaactacggt

SEQ ID NO: 26257 - DNA, 15 bp, Homo sapiens
aggaggtaactacgg

SEQ ID NO: 26258 - DNA, 15 bp, Homo sapiens
aaggaggtaactacg

SEQ ID NO: 26259 - DNA, 15 bp, Homo sapiens
taaggaggtaactac

SEQ ID NO: 26260 - DNA, 15 bp, Homo sapiens
ctaaggaggtaacta

SEQ ID NO: 26261 - DNA, 15 bp, Homo sapiens
tctaaggaggtaact

SEQ ID NO: 26262 - DNA, 15 bp, Homo sapiens
ctctaaggaggtaac

SEQ ID NO: 26263 - DNA, 15 bp, Homo sapiens
actctaaggaggtaa

SEQ ID NO: 26264 - DNA, 15 bp, Homo sapiens
tactctaaggaggta

SEQ ID NO: 26265 - DNA, 15 bp, Homo sapiens
atactctaaggaggt

SEQ ID NO: 26266 - DNA, 15 bp, Homo sapiens
catactctaaggagg

SEQ ID NO: 26267 - DNA, 15 bp, Homo sapiens
tcatactctaaggag

SEQ ID NO: 26268 - DNA, 15 bp, Homo sapiens
ttcatactctaagga

SEQ ID NO: 26269 - DNA, 15 bp, Homo sapiens
tttcatactctaagg

SEQ ID NO: 26270 - DNA, 15 bp, Homo sapiens
ttttcatactctaag

SEQ ID NO: 26271 - DNA, 15 bp, Homo sapiens
tttttcatactctaa

SEQ ID NO: 26272 - DNA, 15 bp, Homo sapiens
ttttttcatactcta

SEQ ID NO: 26273 - DNA, 15 bp, Homo sapiens
attttttcatactct

SEQ ID NO: 26274 - DNA, 15 bp, Homo sapiens
tattttttcatactc

SEQ ID NO: 26275 - DNA, 15 bp, Homo sapiens
ctattttttcatact

SEQ ID NO: 26276 - DNA, 15 bp, Homo sapiens
cctattttttcatac

SEQ ID NO: 26277 - DNA, 15 bp, Homo sapiens
gcctattttttcata

SEQ ID NO: 26278 - DNA, 15 bp, Homo sapiens
agcctattttttcat

SEQ ID NO: 26279 - DNA, 15 bp, Homo sapiens
aagcctattttttca

SEQ ID NO: 26280 - DNA, 15 bp, Homo sapiens
taagcctattttttc

SEQ ID NO: 26281 - DNA, 15 bp, Homo sapiens
ctaagcctatttttt

SEQ ID NO: 26282 - DNA, 15 bp, Homo sapiens
cctaagcctattttt

SEQ ID NO: 26283 - DNA, 15 bp, Homo sapiens
ccctaagcctatttt

SEQ ID NO: 26284 - DNA, 15 bp, Homo sapiens
gccctaagcctattt

SEQ ID NO: 26285 - DNA, 15 bp, Homo sapiens
tgccctaagcctatt

SEQ ID NO: 26286 - DNA, 15 bp, Homo sapiens
atgccctaagcctat

SEQ ID NO: 26287 - DNA, 15 bp, Homo sapiens
gatgccctaagccta

SEQ ID NO: 26288 - DNA, 15 bp, Homo sapiens
ggatgccctaagcct

SEQ ID NO: 26289 - DNA, 15 bp, Homo sapiens
gggatgccctaagcc

SEQ ID NO: 26290 - DNA, 15 bp, Homo sapiens
ggggatgccctaagc

SEQ ID NO: 26291 - DNA, 15 bp, Homo sapiens
tggggatgccctaag

SEQ ID NO: 26292 - DNA, 15 bp, Homo sapiens
ttggggatgccctaa

SEQ ID NO: 26293 - DNA, 15 bp, Homo sapiens
cttggggatgcccta

SEQ ID NO: 26294 - DNA, 15 bp, Homo sapiens
acttggggatgccct

SEQ ID NO: 26295 - DNA, 15 bp, Homo sapiens
gacttggggatgccc

SEQ ID NO: 26296 - DNA, 15 bp, Homo sapiens
ggacttggggatgcc

SEQ ID NO: 26297 - DNA, 15 bp, Homo sapiens
gggacttggggatgc

SEQ ID NO: 26298 - DNA, 15 bp, Homo sapiens
ggggacttggggatg

SEQ ID NO: 26299 - DNA, 15 bp, Homo sapiens
aggggacttggggat

SEQ ID NO: 26300 - DNA, 15 bp, Homo sapiens
gaggggacttgggga

SEQ ID NO: 26301 - DNA, 15 bp, Homo sapiens
agaggggacttgggg

SEQ ID NO: 26302 - DNA, 15 bp, Homo sapiens
tagaggggacttggg

SEQ ID NO: 26303 - DNA, 15 bp, Homo sapiens
atagaggggacttgg

SEQ ID NO: 26304 - DNA, 15 bp, Homo sapiens
catagaggggacttg

SEQ ID NO: 26305 - DNA, 15 bp, Homo sapiens
acatagaggggactt

SEQ ID NO: 26306 - DNA, 15 bp, Homo sapiens
gacatagaggggact

SEQ ID NO: 26307 - DNA, 15 bp, Homo sapiens
agacatagaggggac

SEQ ID NO: 26308 - DNA, 15 bp, Homo sapiens
cagacatagagggga

SEQ ID NO: 26309 - DNA, 15 bp, Homo sapiens
tcagacatagagggg

SEQ ID NO: 26310 - DNA, 15 bp, Homo sapiens
ctcagacatagaggg

SEQ ID NO: 26311 - DNA, 15 bp, Homo sapiens
tctcagacatagagg

SEQ ID NO: 26312 - DNA, 15 bp, Homo sapiens
ctctcagacatagag

SEQ ID NO: 26313 - DNA, 15 bp, Homo sapiens
gctctcagacataga

SEQ ID NO: 26314 - DNA, 15 bp, Homo sapiens
agctctcagacatag

SEQ ID NO: 26315 - DNA, 15 bp, Homo sapiens
cagctctcagacata

SEQ ID NO: 26316 - DNA, 15 bp, Homo sapiens
tcagctctcagacat

SEQ ID NO: 26317 - DNA, 15 bp, Homo sapiens
ctcagctctcagaca

SEQ ID NO: 26318 - DNA, 15 bp, Homo sapiens
cctcagctctcagac

SEQ ID NO: 26319 - DNA, 15 bp, Homo sapiens
gcctcagctctcaga

SEQ ID NO: 26320 - DNA, 15 bp, Homo sapiens
agcctcagctctcag

SEQ ID NO: 26321 - DNA, 15 bp, Homo sapiens
cagcctcagctctca

SEQ ID NO: 26322 - DNA, 15 bp, Homo sapiens
ccagcctcagctctc

SEQ ID NO: 26323 - DNA, 15 bp, Homo sapiens
gccagcctcagctct

SEQ ID NO: 26324 - DNA, 15 bp, Homo sapiens
agccagcctcagctc

SEQ ID NO: 26325 - DNA, 15 bp, Homo sapiens
cagccagcctcagct

SEQ ID NO: 26326 - DNA, 15 bp, Homo sapiens
acagccagcctcagc

SEQ ID NO: 26327 - DNA, 15 bp, Homo sapiens
gacagccagcctcag

SEQ ID NO: 26328 - DNA, 15 bp, Homo sapiens
tgacagccagcctca

SEQ ID NO: 26329 - DNA, 15 bp, Homo sapiens
ttgacagccagcctc

SEQ ID NO: 26330 - DNA, 15 bp, Homo sapiens
tttgacagccagcct

SEQ ID NO: 26331 - DNA, 15 bp, Homo sapiens
ctttgacagccagcc

SEQ ID NO: 26332 - DNA, 15 bp, Homo sapiens
tctttgacagccagc

SEQ ID NO: 26333 - DNA, 15 bp, Homo sapiens
ctctttgacagccag

SEQ ID NO: 26334 - DNA, 15 bp, Homo sapiens
cctctttgacagcca

SEQ ID NO: 26335 - DNA, 15 bp, Homo sapiens
tcctctttgacagcc

SEQ ID NO: 26336 - DNA, 15 bp, Homo sapiens
ttcctctttgacagc

SEQ ID NO: 26337 - DNA, 15 bp, Homo sapiens
gttcctctttgacag

SEQ ID NO: 26338 - DNA, 15 bp, Homo sapiens
agttcctctttgaca

SEQ ID NO: 26339 - DNA, 15 bp, Homo sapiens
tagttcctctttgac

SEQ ID NO: 26340 - DNA, 15 bp, Homo sapiens
ttagttcctctttga

SEQ ID NO: 26341 - DNA, 15 bp, Homo sapiens
cttagttcctctttg

SEQ ID NO: 26342 - DNA, 15 bp, Homo sapiens
ccttagttcctcttt

SEQ ID NO: 26343 - DNA, 15 bp, Homo sapiens
tccttagttcctctt

SEQ ID NO: 26344 - DNA, 15 bp, Homo sapiens
atccttagttcctct

SEQ ID NO: 26345 - DNA, 15 bp, Homo sapiens
catccttagttcctc

SEQ ID NO: 26346 - DNA, 15 bp, Homo sapiens
gcatccttagttcct

SEQ ID NO: 26347 - DNA, 15 bp, Homo sapiens
ggcatccttagttcc

SEQ ID NO: 26348 - DNA, 15 bp, Homo sapiens
tggcatccttagttc

SEQ ID NO: 26349 - DNA, 15 bp, Homo sapiens
ctggcatccttagtt

SEQ ID NO: 26350 - DNA, 15 bp, Homo sapiens
cctggcatccttagt

SEQ ID NO: 26351 - DNA, 15 bp, Homo sapiens
ccctggcatccttag

SEQ ID NO: 26352 - DNA, 15 bp, Homo sapiens
tccctggcatcctta

SEQ ID NO: 26353 - DNA, 15 bp, Homo sapiens
gtccctggcatcctt

SEQ ID NO: 26354 - DNA, 15 bp, Homo sapiens
agtccctggcatcct

SEQ ID NO: 26355 - DNA, 15 bp, Homo sapiens
aagtccctggcatcc

SEQ ID NO: 26356 - DNA, 15 bp, Homo sapiens
aaagtccctggcatc

SEQ ID NO: 26357 - DNA, 15 bp, Homo sapiens
gaaagtccctggcat

SEQ ID NO: 26358 - DNA, 15 bp, Homo sapiens
agaaagtccctggca

SEQ ID NO: 26359 - DNA, 15 bp, Homo sapiens
cagaaagtccctggc

SEQ ID NO: 26360 - DNA, 15 bp, Homo sapiens
gcagaaagtccctgg

SEQ ID NO: 26361 - DNA, 15 bp, Homo sapiens
agcagaaagtccctg

SEQ ID NO: 26362 - DNA, 15 bp, Homo sapiens
aagcagaaagtccct

SEQ ID NO: 26363 - DNA, 15 bp, Homo sapiens
taagcagaaagtccc

SEQ ID NO: 26364 - DNA, 15 bp, Homo sapiens
ctaagcagaaagtcc

SEQ ID NO: 26365 - DNA, 15 bp, Homo sapiens
cctaagcagaaagtc

SEQ ID NO: 26366 - DNA, 15 bp, Homo sapiens
tcctaagcagaaagt

SEQ ID NO: 26367 - DNA, 15 bp, Homo sapiens
gtcctaagcagaaag

SEQ ID NO: 26368 - DNA, 15 bp, Homo sapiens
ggtcctaagcagaaa

SEQ ID NO: 26369 - DNA, 15 bp, Homo sapiens
gggtcctaagcagaa

SEQ ID NO: 26370 - DNA, 15 bp, Homo sapiens
ggggtcctaagcaga

SEQ ID NO: 26371 - DNA, 15 bp, Homo sapiens
aggggtcctaagcag

SEQ ID NO: 26372 - DNA, 15 bp, Homo sapiens
gaggggtcctaagca

SEQ ID NO: 26373 - DNA, 15 bp, Homo sapiens
agaggggtcctaagc

SEQ ID NO: 26374 - DNA, 15 bp, Homo sapiens
gagaggggtcctaag

SEQ ID NO: 26375 - DNA, 15 bp, Homo sapiens
tgagaggggtcctaa

SEQ ID NO: 26376 - DNA, 15 bp, Homo sapiens
atgagaggggtccta

SEQ ID NO: 26377 - DNA, 15 bp, Homo sapiens
gatgagaggggtcct

SEQ ID NO: 26378 - DNA, 15 bp, Homo sapiens
tgatgagaggggtcc

SEQ ID NO: 26379 - DNA, 15 bp, Homo sapiens
gtgatgagaggggtc

SEQ ID NO: 26380 - DNA, 15 bp, Homo sapiens
agtgatgagaggggt

SEQ ID NO: 26381 - DNA, 15 bp, Homo sapiens
aagtgatgagagggg

SEQ ID NO: 26382 - DNA, 15 bp, Homo sapiens
gaagtgatgagaggg

SEQ ID NO: 26383 - DNA, 15 bp, Homo sapiens
agaagtgatgagagg

SEQ ID NO: 26384 - DNA, 15 bp, Homo sapiens
gagaagtgatgagag

SEQ ID NO: 26385 - DNA, 15 bp, Homo sapiens
ggagaagtgatgaga

SEQ ID NO: 26386 - DNA, 15 bp, Homo sapiens
tggagaagtgatgag

SEQ ID NO: 26387 - DNA, 15 bp, Homo sapiens
ttggagaagtgatga

SEQ ID NO: 26388 - DNA, 15 bp, Homo sapiens
gttggagaagtgatg

SEQ ID NO: 26389 - DNA, 15 bp, Homo sapiens
cgttggagaagtgat

SEQ ID NO: 26390 - DNA, 15 bp, Homo sapiens
gcgttggagaagtga

SEQ ID NO: 26391 - DNA, 15 bp, Homo sapiens
agcgttggagaagtg

SEQ ID NO: 26392 - DNA, 15 bp, Homo sapiens
cagcgttggagaagt

SEQ ID NO: 26393 - DNA, 15 bp, Homo sapiens
ccagcgttggagaag

SEQ ID NO: 26394 - DNA, 15 bp, Homo sapiens
accagcgttggagaa

SEQ ID NO: 26395 - DNA, 15 bp, Homo sapiens
taccagcgttggaga

SEQ ID NO: 26396 - DNA, 15 bp, Homo sapiens
ataccagcgttggag

SEQ ID NO: 26397 - DNA, 15 bp, Homo sapiens
gataccagcgttgga

SEQ ID NO: 26398 - DNA, 15 bp, Homo sapiens
tgataccagcgttgg

SEQ ID NO: 26399 - DNA, 15 bp, Homo sapiens
atgataccagcgttg

SEQ ID NO: 26400 - DNA, 15 bp, Homo sapiens
catgataccagcgtt

SEQ ID NO: 26401 - DNA, 15 bp, Homo sapiens
tcatgataccagcgt

SEQ ID NO: 26402 - DNA, 15 bp, Homo sapiens
ttcatgataccagcg

SEQ ID NO: 26403 - DNA, 15 bp, Homo sapiens
gttcatgataccagc

SEQ ID NO: 26404 - DNA, 15 bp, Homo sapiens
ggttcatgataccag

SEQ ID NO: 26405 - DNA, 15 bp, Homo sapiens
gggttcatgatacca

SEQ ID NO: 26406 - DNA, 15 bp, Homo sapiens
ggggttcatgatacc

SEQ ID NO: 26407 - DNA, 15 bp, Homo sapiens
tggggttcatgatac

SEQ ID NO: 26408 - DNA, 15 bp, Homo sapiens
atggggttcatgata

SEQ ID NO: 26409 - DNA, 15 bp, Homo sapiens
aatggggttcatgat

SEQ ID NO: 26410 - DNA, 15 bp, Homo sapiens
gaatggggttcatga

SEQ ID NO: 26411 - DNA, 15 bp, Homo sapiens
agaatggggttcatg

SEQ ID NO: 26412 - DNA, 15 bp, Homo sapiens
tagaatggggttcat

SEQ ID NO: 26413 - DNA, 15 bp, Homo sapiens
gtagaatggggttca

SEQ ID NO: 26414 - DNA, 15 bp, Homo sapiens
tgtagaatggggttc

SEQ ID NO: 26415 - DNA, 15 bp, Homo sapiens
ctgtagaatggggtt

SEQ ID NO: 26416 - DNA, 15 bp, Homo sapiens
tctgtagaatggggt

SEQ ID NO: 26417 - DNA, 15 bp, Homo sapiens
atctgtagaatgggg

SEQ ID NO: 26418 - DNA, 15 bp, Homo sapiens
catctgtagaatggg

SEQ ID NO: 26419 - DNA, 15 bp, Homo sapiens
tcatctgtagaatgg

SEQ ID NO: 26420 - DNA, 15 bp, Homo sapiens
atcatctgtagaatg

SEQ ID NO: 26421 - DNA, 15 bp, Homo sapiens
catcatctgtagaat

SEQ ID NO: 26422 - DNA, 15 bp, Homo sapiens
acatcatctgtagaa

SEQ ID NO: 26423 - DNA, 15 bp, Homo sapiens
gacatcatctgtaga

SEQ ID NO: 26424 - DNA, 15 bp, Homo sapiens
ggacatcatctgtag

SEQ ID NO: 26425 - DNA, 15 bp, Homo sapiens
tggacatcatctgta

SEQ ID NO: 26426 - DNA, 15 bp, Homo sapiens
gtggacatcatctgt

SEQ ID NO: 26427 - DNA, 15 bp, Homo sapiens
agtggacatcatctg

SEQ ID NO: 26428 - DNA, 15 bp, Homo sapiens
tagtggacatcatct

SEQ ID NO: 26429 - DNA, 15 bp, Homo sapiens
ctagtggacatcatc

SEQ ID NO: 26430 - DNA, 15 bp, Homo sapiens
tctagtggacatcat

SEQ ID NO: 26431 - DNA, 15 bp, Homo sapiens
atctagtggacatca

SEQ ID NO: 26432 - DNA, 15 bp, Homo sapiens
aatctagtggacatc

SEQ ID NO: 26433 - DNA, 15 bp, Homo sapiens
taatctagtggacat

SEQ ID NO: 26434 - DNA, 15 bp, Homo sapiens
ttaatctagtggaca

SEQ ID NO: 26435 - DNA, 15 bp, Homo sapiens
cttaatctagtggac

SEQ ID NO: 26436 - DNA, 15 bp, Homo sapiens
tcttaatctagtgga

SEQ ID NO: 26437 - DNA, 15 bp, Homo sapiens
ttcttaatctagtgg

SEQ ID NO: 26438 - DNA, 15 bp, Homo sapiens
attcttaatctagtg

SEQ ID NO: 26439 - DNA, 15 bp, Homo sapiens
cattcttaatctagt

SEQ ID NO: 26440 - DNA, 15 bp, Homo sapiens
ccattcttaatctag

SEQ ID NO: 26441 - DNA, 15 bp, Homo sapiens
gccattcttaatcta

SEQ ID NO: 26442 - DNA, 15 bp, Homo sapiens
tgccattcttaatct

SEQ ID NO: 26443 - DNA, 15 bp, Homo sapiens
atgccattcttaatc

SEQ ID NO: 26444 - DNA, 15 bp, Homo sapiens
catgccattcttaat

SEQ ID NO: 26445 - DNA, 15 bp, Homo sapiens
acatgccattcttaa

SEQ ID NO: 26446 - DNA, 15 bp, Homo sapiens
cacatgccattctta

SEQ ID NO: 26447 - DNA, 15 bp, Homo sapiens
tcacatgccattctt

SEQ ID NO: 26448 - DNA, 15 bp, Homo sapiens
ctcacatgccattct

SEQ ID NO: 26449 - DNA, 15 bp, Homo sapiens
cctcacatgccattc

SEQ ID NO: 26450 - DNA, 15 bp, Homo sapiens
gcctcacatgccatt

SEQ ID NO: 26451 - DNA, 15 bp, Homo sapiens
ggcctcacatgccat

SEQ ID NO: 26452 - DNA, 15 bp, Homo sapiens
tggcctcacatgcca

SEQ ID NO: 26453 - DNA, 15 bp, Homo sapiens
ttggcctcacatgcc

SEQ ID NO: 26454 - DNA, 15 bp, Homo sapiens
cttggcctcacatgc

SEQ ID NO: 26455 - DNA, 15 bp, Homo sapiens
acttggcctcacatg

SEQ ID NO: 26456 - DNA, 15 bp, Homo sapiens
aacttggcctcacat

SEQ ID NO: 26457 - DNA, 15 bp, Homo sapiens
aaacttggcctcaca

SEQ ID NO: 26458 - DNA, 15 bp, Homo sapiens
gaaacttggcctcac

SEQ ID NO: 26459 - DNA, 15 bp, Homo sapiens
ggaaacttggcctca

SEQ ID NO: 26460 - DNA, 15 bp, Homo sapiens
tggaaacttggcctc

SEQ ID NO: 26461 - DNA, 15 bp, Homo sapiens
gtggaaacttggcct

SEQ ID NO: 26462 - DNA, 15 bp, Homo sapiens
ggtggaaacttggcc

SEQ ID NO: 26463 - DNA, 15 bp, Homo sapiens
aggtggaaacttggc

SEQ ID NO: 26464 - DNA, 15 bp, Homo sapiens
caggtggaaacttgg

SEQ ID NO: 26465 - DNA, 15 bp, Homo sapiens
tcaggtggaaacttg

SEQ ID NO: 26466 - DNA, 15 bp, Homo sapiens
ctcaggtggaaactt

SEQ ID NO: 26467 - DNA, 15 bp, Homo sapiens
tctcaggtggaaact

SEQ ID NO: 26468 - DNA, 15 bp, Homo sapiens
ctctcaggtggaaac

SEQ ID NO: 26469 - DNA, 15 bp, Homo sapiens
actctcaggtggaaa

SEQ ID NO: 26470 - DNA, 15 bp, Homo sapiens
gactctcaggtggaa

SEQ ID NO: 26471 - DNA, 15 bp, Homo sapiens
tgactctcaggtgga

SEQ ID NO: 26472 - DNA, 15 bp, Homo sapiens
ctgactctcaggtgg

SEQ ID NO: 26473 - DNA, 15 bp, Homo sapiens
actgactctcaggtg

SEQ ID NO: 26474 - DNA, 15 bp, Homo sapiens
aactgactctcaggt

SEQ ID NO: 26475 - DNA, 15 bp, Homo sapiens
aaactgactctcagg

SEQ ID NO: 26476 - DNA, 15 bp, Homo sapiens
aaaactgactctcag

SEQ ID NO: 26477 - DNA, 15 bp, Homo sapiens
taaaactgactctca

SEQ ID NO: 26478 - DNA, 15 bp, Homo sapiens
ataaaactgactctc

SEQ ID NO: 26479 - DNA, 15 bp, Homo sapiens
aataaaactgactct

SEQ ID NO: 26480 - DNA, 15 bp, Homo sapiens
gaataaaactgactc

SEQ ID NO: 26481 - DNA, 15 bp, Homo sapiens
tgaataaaactgact

SEQ ID NO: 26482 - DNA, 15 bp, Homo sapiens
ctgaataaaactgac

SEQ ID NO: 26483 - DNA, 15 bp, Homo sapiens
tctgaataaaactga

SEQ ID NO: 26484 - DNA, 15 bp, Homo sapiens
ttctgaataaaactg

SEQ ID NO: 26485 - DNA, 15 bp, Homo sapiens
cttctgaataaaact

SEQ ID NO: 26486 - DNA, 15 bp, Homo sapiens
tcttctgaataaaac

SEQ ID NO: 26487 - DNA, 15 bp, Homo sapiens
ctcttctgaataaaa

SEQ ID NO: 26488 - DNA, 15 bp, Homo sapiens
tctcttctgaataaa

SEQ ID NO: 26489 - DNA, 15 bp, Homo sapiens
gtctcttctgaataa

SEQ ID NO: 26490 - DNA, 15 bp, Homo sapiens
tgtctcttctgaata

SEQ ID NO: 26491 - DNA, 15 bp, Homo sapiens
ctgtctcttctgaat

SEQ ID NO: 26492 - DNA, 15 bp, Homo sapiens
cctgtctcttctgaa

SEQ ID NO: 26493 - DNA, 15 bp, Homo sapiens
acctgtctcttctga

SEQ ID NO: 26494 - DNA, 15 bp, Homo sapiens
gacctgtctcttctg

SEQ ID NO: 26495 - DNA, 15 bp, Homo sapiens
agacctgtctcttct

SEQ ID NO: 26496 - DNA, 15 bp, Homo sapiens
gagacctgtctcttc

SEQ ID NO: 26497 - DNA, 15 bp, Homo sapiens
agagacctgtctctt

SEQ ID NO: 26498 - DNA, 15 bp, Homo sapiens
cagagacctgtctct

SEQ ID NO: 26499 - DNA, 15 bp, Homo sapiens
ccagagacctgtctc

SEQ ID NO: 26500 - DNA, 15 bp, Homo sapiens
cccagagacctgtct

SEQ ID NO: 26501 - DNA, 15 bp, Homo sapiens
tcccagagacctgtc

SEQ ID NO: 26502 - DNA, 15 bp, Homo sapiens
atcccagagacctgt

SEQ ID NO: 26503 - DNA, 15 bp, Homo sapiens
catcccagagacctg

SEQ ID NO: 26504 - DNA, 15 bp, Homo sapiens
acatcccagagacct

SEQ ID NO: 26505 - DNA, 15 bp, Homo sapiens
cacatcccagagacc

SEQ ID NO: 26506 - DNA, 15 bp, Homo sapiens
ccacatcccagagac

SEQ ID NO: 26507 - DNA, 15 bp, Homo sapiens
cccacatcccagaga

SEQ ID NO: 26508 - DNA, 15 bp, Homo sapiens
ccccacatcccagag

SEQ ID NO: 26509 - DNA, 15 bp, Homo sapiens
tccccacatcccaga

SEQ ID NO: 26510 - DNA, 15 bp, Homo sapiens
ttccccacatcccag

SEQ ID NO: 26511 - DNA, 15 bp, Homo sapiens
attccccacatccca

SEQ ID NO: 26512 - DNA, 15 bp, Homo sapiens
cattccccacatccc

SEQ ID NO: 26513 - DNA, 15 bp, Homo sapiens
ccattccccacatcc

SEQ ID NO: 26514 - DNA, 15 bp, Homo sapiens
cccattccccacatc

SEQ ID NO: 26515 - DNA, 15 bp, Homo sapiens
tcccattccccacat

SEQ ID NO: 26516 - DNA, 15 bp, Homo sapiens
gtcccattccccaca

SEQ ID NO: 26517 - DNA, 15 bp, Homo sapiens
cgtcccattccccac

SEQ ID NO: 26518 - DNA, 15 bp, Homo sapiens
ccgtcccattcccca

SEQ ID NO: 26519 - DNA, 15 bp, Homo sapiens
tccgtcccattcccc

SEQ ID NO: 26520 - DNA, 15 bp, Homo sapiens
gtccgtcccattccc

SEQ ID NO: 26521 - DNA, 15 bp, Homo sapiens
tgtccgtcccattcc

SEQ ID NO: 26522 - DNA, 15 bp, Homo sapiens
ctgtccgtcccattc

SEQ ID NO: 26523 - DNA, 15 bp, Homo sapiens
tctgtccgtcccatt

SEQ ID NO: 26524 - DNA, 15 bp, Homo sapiens
gtctgtccgtcccat

SEQ ID NO: 26525 - DNA, 15 bp, Homo sapiens
agtctgtccgtccca

SEQ ID NO: 26526 - DNA, 15 bp, Homo sapiens
aagtctgtccgtccc

SEQ ID NO: 26527 - DNA, 15 bp, Homo sapiens
caagtctgtccgtcc

SEQ ID NO: 26528 - DNA, 15 bp, Homo sapiens
ccaagtctgtccgtc

SEQ ID NO: 26529 - DNA, 15 bp, Homo sapiens
gccaagtctgtccgt

SEQ ID NO: 26530 - DNA, 15 bp, Homo sapiens
tgccaagtctgtccg

SEQ ID NO: 26531 - DNA, 15 bp, Homo sapiens
atgccaagtctgtcc

SEQ ID NO: 26532 - DNA, 15 bp, Homo sapiens
catgccaagtctgtc

SEQ ID NO: 26533 - DNA, 15 bp, Homo sapiens
tcatgccaagtctgt

SEQ ID NO: 26534 - DNA, 15 bp, Homo sapiens
ttcatgccaagtctg

SEQ ID NO: 26535 - DNA, 15 bp, Homo sapiens
cttcatgccaagtct

SEQ ID NO: 26536 - DNA, 15 bp, Homo sapiens
gcttcatgccaagtc

SEQ ID NO: 26537 - DNA, 15 bp, Homo sapiens
tgcttcatgccaagt

SEQ ID NO: 26538 - DNA, 15 bp, Homo sapiens
atgcttcatgccaag

SEQ ID NO: 26539 - DNA, 15 bp, Homo sapiens
aatgcttcatgccaa

SEQ ID NO: 26540 - DNA, 15 bp, Homo sapiens
caatgcttcatgcca

SEQ ID NO: 26541 - DNA, 15 bp, Homo sapiens
acaatgcttcatgcc

SEQ ID NO: 26542 - DNA, 15 bp, Homo sapiens
tacaatgcttcatgc

SEQ ID NO: 26543 - DNA, 15 bp, Homo sapiens
atacaatgcttcatg

SEQ ID NO: 26544 - DNA, 15 bp, Homo sapiens
tatacaatgcttcat

SEQ ID NO: 26545 - DNA, 15 bp, Homo sapiens
ttatacaatgcttca

SEQ ID NO: 26546 - DNA, 15 bp, Homo sapiens
tttatacaatgcttc

SEQ ID NO: 26547 - DNA, 15 bp, Homo sapiens
atttatacaatgctt

SEQ ID NO: 26548 - DNA, 15 bp, Homo sapiens
catttatacaatgct

SEQ ID NO: 26549 - DNA, 15 bp, Homo sapiens
ccatttatacaatgc

SEQ ID NO: 26550 - DNA, 15 bp, Homo sapiens
tccatttatacaatg

SEQ ID NO: 26551 - DNA, 15 bp, Homo sapiens
ctccatttatacaat

SEQ ID NO: 26552 - DNA, 15 bp, Homo sapiens
gctccatttatacaa

SEQ ID NO: 26553 - DNA, 15 bp, Homo sapiens
ggctccatttataca

SEQ ID NO: 26554 - DNA, 15 bp, Homo sapiens
aggctccatttatac

SEQ ID NO: 26555 - DNA, 15 bp, Homo sapiens
gaggctccatttata

SEQ ID NO: 26556 - DNA, 15 bp, Homo sapiens
tgaggctccatttat

SEQ ID NO: 26557 - DNA, 15 bp, Homo sapiens
ttgaggctccattta

SEQ ID NO: 26558 - DNA, 15 bp, Homo sapiens
tttgaggctccattt

SEQ ID NO: 26559 - DNA, 15 bp, Homo sapiens
ttttgaggctccatt

SEQ ID NO: 26560 - DNA, 15 bp, Homo sapiens
attttgaggctccat

SEQ ID NO: 26561 - DNA, 15 bp, Homo sapiens
gattttgaggctcca

SEQ ID NO: 26562 - DNA, 15 bp, Homo sapiens
cgattttgaggctcc

SEQ ID NO: 26563 - DNA, 15 bp, Homo sapiens
gcgattttgaggctc

SEQ ID NO: 26564 - DNA, 15 bp, Homo sapiens
agcgattttgaggct

SEQ ID NO: 26565 - DNA, 15 bp, Homo sapiens
aagcgattttgaggc

SEQ ID NO: 26566 - DNA, 15 bp, Homo sapiens
gaagcgattttgagg

SEQ ID NO: 26567 - DNA, 15 bp, Homo sapiens
tgaagcgattttgag

SEQ ID NO: 26568 - DNA, 15 bp, Homo sapiens
ctgaagcgattttga

SEQ ID NO: 26569 - DNA, 15 bp, Homo sapiens
cctgaagcgattttg

SEQ ID NO: 26570 - DNA, 15 bp, Homo sapiens
ccctgaagcgatttt

SEQ ID NO: 26571 - DNA, 15 bp, Homo sapiens
tccctgaagcgattt

SEQ ID NO: 26572 - DNA, 15 bp, Homo sapiens
ttccctgaagcgatt

SEQ ID NO: 26573 - DNA, 15 bp, Homo sapiens
attccctgaagcgat

SEQ ID NO: 26574 - DNA, 15 bp, Homo sapiens
aattccctgaagcga

SEQ ID NO: 26575 - DNA, 15 bp, Homo sapiens
taattccctgaagcg

SEQ ID NO: 26576 - DNA, 15 bp, Homo sapiens
ttaattccctgaagc

SEQ ID NO: 26577 - DNA, 15 bp, Homo sapiens
attaattccctgaag

SEQ ID NO: 26578 - DNA, 15 bp, Homo sapiens
cattaattccctgaa

SEQ ID NO: 26579 - DNA, 15 bp, Homo sapiens
acattaattccctga

SEQ ID NO: 26580 - DNA, 15 bp, Homo sapiens
aacattaattccctg

SEQ ID NO: 26581 - DNA, 15 bp, Homo sapiens
aaacattaattccct

SEQ ID NO: 26582 - DNA, 15 bp, Homo sapiens
gaaacattaattccc

SEQ ID NO: 26583 - DNA, 15 bp, Homo sapiens
agaaacattaattcc

SEQ ID NO: 26584 - DNA, 15 bp, Homo sapiens
gagaaacattaattc

SEQ ID NO: 26585 - DNA, 15 bp, Homo sapiens
ggagaaacattaatt

SEQ ID NO: 26586 - DNA, 15 bp, Homo sapiens
gggagaaacattaat

SEQ ID NO: 26587 - DNA, 15 bp, Homo sapiens
agggagaaacattaa

SEQ ID NO: 26588 - DNA, 15 bp, Homo sapiens
cagggagaaacatta

SEQ ID NO: 26589 - DNA, 15 bp, Homo sapiens
acagggagaaacatt

SEQ ID NO: 26590 - DNA, 15 bp, Homo sapiens
cacagggagaaacat

SEQ ID NO: 26591 - DNA, 15 bp, Homo sapiens
acacagggagaaaca

SEQ ID NO: 26592 - DNA, 15 bp, Homo sapiens
aacacagggagaaac

SEQ ID NO: 26593 - DNA, 15 bp, Homo sapiens
aaacacagggagaaa

SEQ ID NO: 26594 - DNA, 15 bp, Homo sapiens
aaaacacagggagaa

SEQ ID NO: 26595 - DNA, 15 bp, Homo sapiens
aaaaacacagggaga

SEQ ID NO: 26596 - DNA, 15 bp, Homo sapiens
gaaaaacacagggag

SEQ ID NO: 26597 - DNA, 15 bp, Homo sapiens
agaaaaacacaggga

SEQ ID NO: 26598 - DNA, 15 bp, Homo sapiens
tagaaaaacacaggg

SEQ ID NO: 26599 - DNA, 15 bp, Homo sapiens
gtagaaaaacacagg

SEQ ID NO: 26600 - DNA, 15 bp, Homo sapiens
agtagaaaaacacag

SEQ ID NO: 26601 - DNA, 15 bp, Homo sapiens
gagtagaaaaacaca

SEQ ID NO: 26602 - DNA, 15 bp, Homo sapiens
ggagtagaaaaacac

SEQ ID NO: 26603 - DNA, 15 bp, Homo sapiens
aggagtagaaaaaca

SEQ ID NO: 26604 - DNA, 15 bp, Homo sapiens
gaggagtagaaaaac

SEQ ID NO: 26605 - DNA, 15 bp, Homo sapiens
cgaggagtagaaaaa

SEQ ID NO: 26606 - DNA, 15 bp, Homo sapiens
tcgaggagtagaaaa

SEQ ID NO: 26607 - DNA, 15 bp, Homo sapiens
atcgaggagtagaaa

SEQ ID NO: 26608 - DNA, 15 bp, Homo sapiens
aatcgaggagtagaa

SEQ ID NO: 26609 - DNA, 15 bp, Homo sapiens
aaatcgaggagtaga

SEQ ID NO: 26610 - DNA, 15 bp, Homo sapiens
gaaatcgaggagtag

SEQ ID NO: 26611 - DNA, 15 bp, Homo sapiens
tgaaatcgaggagta

SEQ ID NO: 26612 - DNA, 15 bp, Homo sapiens
ttgaaatcgaggagt

SEQ ID NO: 26613 - DNA, 15 bp, Homo sapiens
gttgaaatcgaggag

SEQ ID NO: 26614 - DNA, 15 bp, Homo sapiens
tgttgaaatcgagga

SEQ ID NO: 26615 - DNA, 15 bp, Homo sapiens
ctgttgaaatcgagg

SEQ ID NO: 26616 - DNA, 15 bp, Homo sapiens
cctgttgaaatcgag

SEQ ID NO: 26617 - DNA, 15 bp, Homo sapiens
gcctgttgaaatcga

SEQ ID NO: 26618 - DNA, 15 bp, Homo sapiens
ggcctgttgaaatcg

SEQ ID NO: 26619 - DNA, 15 bp, Homo sapiens
tggcctgttgaaatc

SEQ ID NO: 26620 - DNA, 15 bp, Homo sapiens
atggcctgttgaaat

SEQ ID NO: 26621 - DNA, 15 bp, Homo sapiens
aatggcctgttgaaa

SEQ ID NO: 26622 - DNA, 15 bp, Homo sapiens
aaatggcctgttgaa

SEQ ID NO: 26623 - DNA, 15 bp, Homo sapiens
aaaatggcctgttga

SEQ ID NO: 26624 - DNA, 15 bp, Homo sapiens
gaaaatggcctgttg

SEQ ID NO: 26625 - DNA, 15 bp, Homo sapiens
ggaaaatggcctgtt

SEQ ID NO: 26626 - DNA, 15 bp, Homo sapiens
tggaaaatggcctgt

SEQ ID NO: 26627 - DNA, 15 bp, Homo sapiens
ttggaaaatggcctg

SEQ ID NO: 26628 - DNA, 15 bp, Homo sapiens
tttggaaaatggcct

SEQ ID NO: 26629 - DNA, 15 bp, Homo sapiens
atttggaaaatggcc

SEQ ID NO: 26630 - DNA, 15 bp, Homo sapiens
tatttggaaaatggc

SEQ ID NO: 26631 - DNA, 15 bp, Homo sapiens
ttatttggaaaatgg

SEQ ID NO: 26632 - DNA, 15 bp, Homo sapiens
tttatttggaaaatg

SEQ ID NO: 26633 - DNA, 15 bp, Homo sapiens
ctttatttggaaaat

SEQ ID NO: 26634 - DNA, 15 bp, Homo sapiens
gctttatttggaaaa

SEQ ID NO: 26635 - DNA, 15 bp, Homo sapiens
ggctttatttggaaa

SEQ ID NO: 26636 - DNA, 15 bp, Homo sapiens
tggctttatttggaa

SEQ ID NO: 26637 - DNA, 15 bp, Homo sapiens
atggctttatttgga

SEQ ID NO: 26638 - DNA, 15 bp, Homo sapiens
catggctttatttgg

SEQ ID NO: 26639 - DNA, 15 bp, Homo sapiens
gcatggctttatttg

SEQ ID NO: 26640 - DNA, 15 bp, Homo sapiens
ggcatggctttattt

SEQ ID NO: 26641 - DNA, 15 bp, Homo sapiens
gggcatggctttatt

SEQ ID NO: 26642 - DNA, 15 bp, Homo sapiens
agggcatggctttat

SEQ ID NO: 26643 - DNA, 15 bp, Homo sapiens
gagggcatggcttta

SEQ ID NO: 26644 - DNA, 15 bp, Homo sapiens
agagggcatggcttt

SEQ ID NO: 26645 - DNA, 15 bp, Homo sapiens
cagagggcatggctt

SEQ ID NO: 26646 - DNA, 15 bp, Homo sapiens
gcagagggcatggct

SEQ ID NO: 26647 - DNA, 15 bp, Homo sapiens
tgcagagggcatggc

SEQ ID NO: 26648 - DNA, 15 bp, Homo sapiens
ctgcagagggcatgg

SEQ ID NO: 26649 - DNA, 15 bp, Homo sapiens
cctgcagagggcatg

SEQ ID NO: 26650 - DNA, 15 bp, Homo sapiens
tcctgcagagggcat

SEQ ID NO: 26651 - DNA, 15 bp, Homo sapiens
ttcctgcagagggca

SEQ ID NO: 26652 - DNA, 15 bp, Homo sapiens
gttcctgcagagggc

SEQ ID NO: 26653 - DNA, 15 bp, Homo sapiens
tgttcctgcagaggg

SEQ ID NO: 26654 - DNA, 15 bp, Homo sapiens
gtgttcctgcagagg

SEQ ID NO: 26655 - DNA, 15 bp, Homo sapiens
agtgttcctgcagag

SEQ ID NO: 26656 - DNA, 15 bp, Homo sapiens
aagtgttcctgcaga

SEQ ID NO: 26657 - DNA, 15 bp, Homo sapiens
gaagtgttcctgcag

SEQ ID NO: 26658 - DNA, 15 bp, Homo sapiens
ggaagtgttcctgca

SEQ ID NO: 26659 - DNA, 15 bp, Homo sapiens
aggaagtgttcctgc

SEQ ID NO: 26660 - DNA, 15 bp, Homo sapiens
aaggaagtgttcctg

SEQ ID NO: 26661 - DNA, 15 bp, Homo sapiens
caaggaagtgttcct

SEQ ID NO: 26662 - DNA, 15 bp, Homo sapiens
ccaaggaagtgttcc

SEQ ID NO: 26663 - DNA, 15 bp, Homo sapiens
cccaaggaagtgttc

SEQ ID NO: 26664 - DNA, 15 bp, Homo sapiens
acccaaggaagtgtt

SEQ ID NO: 26665 - DNA, 15 bp, Homo sapiens
aacccaaggaagtgt

SEQ ID NO: 26666 - DNA, 15 bp, Homo sapiens
gaacccaaggaagtg

SEQ ID NO: 26667 - DNA, 15 bp, Homo sapiens
tgaacccaaggaagt

SEQ ID NO: 26668 - DNA, 15 bp, Homo sapiens
ctgaacccaaggaag

SEQ ID NO: 26669 - DNA, 15 bp, Homo sapiens
cctgaacccaaggaa

SEQ ID NO: 26670 - DNA, 15 bp, Homo sapiens
ccctgaacccaagga

SEQ ID NO: 26671 - DNA, 15 bp, Homo sapiens
cccctgaacccaagg

SEQ ID NO: 26672 - DNA, 15 bp, Homo sapiens
tcccctgaacccaag

SEQ ID NO: 26673 - DNA, 15 bp, Homo sapiens
atcccctgaacccaa

SEQ ID NO: 26674 - DNA, 15 bp, Homo sapiens
aatcccctgaaccca

SEQ ID NO: 26675 - DNA, 15 bp, Homo sapiens
taatcccctgaaccc

SEQ ID NO: 26676 - DNA, 15 bp, Homo sapiens
ataatcccctgaacc

SEQ ID NO: 26677 - DNA, 15 bp, Homo sapiens
gataatcccctgaac

SEQ ID NO: 26678 - DNA, 15 bp, Homo sapiens
agataatcccctgaa

SEQ ID NO: 26679 - DNA, 15 bp, Homo sapiens
cagataatcccctga

SEQ ID NO: 26680 - DNA, 15 bp, Homo sapiens
acagataatcccctg

SEQ ID NO: 26681 - DNA, 15 bp, Homo sapiens
tacagataatcccct

SEQ ID NO: 26682 - DNA, 15 bp, Homo sapiens
ttacagataatcccc

SEQ ID NO: 26683 - DNA, 15 bp, Homo sapiens
attacagataatccc

SEQ ID NO: 26684 - DNA, 15 bp, Homo sapiens
cattacagataatcc

SEQ ID NO: 26685 - DNA, 15 bp, Homo sapiens
gcattacagataatc

SEQ ID NO: 26686 - DNA, 15 bp, Homo sapiens
ggcattacagataat

SEQ ID NO: 26687 - DNA, 15 bp, Homo sapiens
tggcattacagataa

SEQ ID NO: 26688 - DNA, 15 bp, Homo sapiens
ttggcattacagata

SEQ ID NO: 26689 - DNA, 15 bp, Homo sapiens
gttggcattacagat

SEQ ID NO: 26690 - DNA, 15 bp, Homo sapiens
tgttggcattacaga

SEQ ID NO: 26691 - DNA, 15 bp, Homo sapiens
ttgttggcattacag

SEQ ID NO: 26692 - DNA, 15 bp, Homo sapiens
gttgttggcattaca

SEQ ID NO: 26693 - DNA, 15 bp, Homo sapiens
ggttgttggcattac

SEQ ID NO: 26694 - DNA, 15 bp, Homo sapiens
gggttgttggcatta

SEQ ID NO: 26695 - DNA, 15 bp, Homo sapiens
ggggttgttggcatt

SEQ ID NO: 26696 - DNA, 15 bp, Homo sapiens
aggggttgttggcat

SEQ ID NO: 26697 - DNA, 15 bp, Homo sapiens
caggggttgttggca

SEQ ID NO: 26698 - DNA, 15 bp, Homo sapiens
acaggggttgttggc

SEQ ID NO: 26699 - DNA, 15 bp, Homo sapiens
aacaggggttgttgg

SEQ ID NO: 26700 - DNA, 15 bp, Homo sapiens
aaacaggggttgttg

SEQ ID NO: 26701 - DNA, 15 bp, Homo sapiens
gaaacaggggttgtt

SEQ ID NO: 26702 - DNA, 15 bp, Homo sapiens
ggaaacaggggttgt

SEQ ID NO: 26703 - DNA, 15 bp, Homo sapiens
cggaaacaggggttg

SEQ ID NO: 26704 - DNA, 15 bp, Homo sapiens
acggaaacaggggtt

SEQ ID NO: 26705 - DNA, 15 bp, Homo sapiens
aacggaaacaggggt

SEQ ID NO: 26706 - DNA, 15 bp, Homo sapiens
taacggaaacagggg

SEQ ID NO: 26707 - DNA, 15 bp, Homo sapiens
gtaacggaaacaggg

SEQ ID NO: 26708 - DNA, 15 bp, Homo sapiens
ggtaacggaaacagg

SEQ ID NO: 26709 - DNA, 15 bp, Homo sapiens
gggtaacggaaacag

SEQ ID NO: 26710 - DNA, 15 bp, Homo sapiens
cgggtaacggaaaca

SEQ ID NO: 26711 - DNA, 15 bp, Homo sapiens
tcgggtaacggaaac

SEQ ID NO: 26712 - DNA, 15 bp, Homo sapiens
gtcgggtaacggaaa

SEQ ID NO: 26713 - DNA, 15 bp, Homo sapiens
agtcgggtaacggaa

SEQ ID NO: 26714 - DNA, 15 bp, Homo sapiens
gagtcgggtaacgga

SEQ ID NO: 26715 - DNA, 15 bp, Homo sapiens
ggagtcgggtaacgg

SEQ ID NO: 26716 - DNA, 15 bp, Homo sapiens
aggagtcgggtaacg

SEQ ID NO: 26717 - DNA, 15 bp, Homo sapiens
caggagtcgggtaac

SEQ ID NO: 26718 - DNA, 15 bp, Homo sapiens
ccaggagtcgggtaa

SEQ ID NO: 26719 - DNA, 15 bp, Homo sapiens
cccaggagtcgggta

SEQ ID NO: 26720 - DNA, 15 bp, Homo sapiens
ccccaggagtcgggt

SEQ ID NO: 26721 - DNA, 15 bp, Homo sapiens
tccccaggagtcggg

SEQ ID NO: 26722 - DNA, 15 bp, Homo sapiens
ctccccaggagtcgg

SEQ ID NO: 26723 - DNA, 15 bp, Homo sapiens
cctccccaggagtcg

SEQ ID NO: 26724 - DNA, 15 bp, Homo sapiens
gcctccccaggagtc

SEQ ID NO: 26725 - DNA, 15 bp, Homo sapiens
agcctccccaggagt

SEQ ID NO: 26726 - DNA, 15 bp, Homo sapiens
gagcctccccaggag

SEQ ID NO: 26727 - DNA, 15 bp, Homo sapiens
ggagcctccccagga

SEQ ID NO: 26728 - DNA, 15 bp, Homo sapiens
gggagcctccccagg

SEQ ID NO: 26729 - DNA, 15 bp, Homo sapiens
cgggagcctccccag

SEQ ID NO: 26730 - DNA, 15 bp, Homo sapiens
ccgggagcctcccca

SEQ ID NO: 26731 - DNA, 15 bp, Homo sapiens
tccgggagcctcccc

SEQ ID NO: 26732 - DNA, 15 bp, Homo sapiens
ctccgggagcctccc

SEQ ID NO: 26733 - DNA, 15 bp, Homo sapiens
actccgggagcctcc

SEQ ID NO: 26734 - DNA, 15 bp, Homo sapiens
aactccgggagcctc

SEQ ID NO: 26735 - DNA, 15 bp, Homo sapiens
caactccgggagcct

SEQ ID NO: 26736 - DNA, 15 bp, Homo sapiens
acaactccgggagcc

SEQ ID NO: 26737 - DNA, 15 bp, Homo sapiens
aacaactccgggagc

SEQ ID NO: 26738 - DNA, 15 bp, Homo sapiens
caacaactccgggag

SEQ ID NO: 26739 - DNA, 15 bp, Homo sapiens
ccaacaactccggga

SEQ ID NO: 26740 - DNA, 15 bp, Homo sapiens
tccaacaactccggg

SEQ ID NO: 26741 - DNA, 15 bp, Homo sapiens
ttccaacaactccgg

SEQ ID NO: 26742 - DNA, 15 bp, Homo sapiens
tttccaacaactccg

SEQ ID NO: 26743 - DNA, 15 bp, Homo sapiens
gtttccaacaactcc

SEQ ID NO: 26744 - DNA, 15 bp, Homo sapiens
agtttccaacaactc

SEQ ID NO: 26745 - DNA, 15 bp, Homo sapiens
aagtttccaacaact

SEQ ID NO: 26746 - DNA, 15 bp, Homo sapiens
aaagtttccaacaac

SEQ ID NO: 26747 - DNA, 15 bp, Homo sapiens
cataagaggaaagga

SEQ ID NO: 26748 - DNA, 15 bp, Homo sapiens
ccataagaggaaagg

SEQ ID NO: 26749 - DNA, 15 bp, Homo sapiens
tccataagaggaaag

SEQ ID NO: 26750 - DNA, 15 bp, Homo sapiens
ttccataagaggaaa

SEQ ID NO: 26751 - DNA, 15 bp, Homo sapiens
attccataagaggaa

SEQ ID NO: 26752 - DNA, 15 bp, Homo sapiens
cattccataagagga

SEQ ID NO: 26753 - DNA, 15 bp, Homo sapiens
acattccataagagg

SEQ ID NO: 26754 - DNA, 15 bp, Homo sapiens
aacattccataagag

SEQ ID NO: 26755 - DNA, 15 bp, Homo sapiens
aaacattccataaga

SEQ ID NO: 26756 - DNA, 15 bp, Homo sapiens
aaaacattccataag

SEQ ID NO: 26757 - DNA, 15 bp, Homo sapiens
aaaaacattccataa

SEQ ID NO: 26758 - DNA, 15 bp, Homo sapiens
gaaaaacattccata

SEQ ID NO: 26759 - DNA, 15 bp, Homo sapiens
ggaaaaacattccat

SEQ ID NO: 26760 - DNA, 15 bp, Homo sapiens
aggaaaaacattcca

SEQ ID NO: 26761 - DNA, 15 bp, Homo sapiens
gaggaaaaacattcc

SEQ ID NO: 26762 - DNA, 15 bp, Homo sapiens
ggaggaaaaacattc

SEQ ID NO: 26763 - DNA, 15 bp, Homo sapiens
gggaggaaaaacatt

SEQ ID NO: 26764 - DNA, 15 bp, Homo sapiens
ggggaggaaaaacat

SEQ ID NO: 26765 - DNA, 15 bp, Homo sapiens
tggggaggaaaaaca

SEQ ID NO: 26766 - DNA, 15 bp, Homo sapiens
atggggaggaaaaac

SEQ ID NO: 26767 - DNA, 15 bp, Homo sapiens
aatggggaggaaaaa

SEQ ID NO: 26768 - DNA, 15 bp, Homo sapiens
aaatggggaggaaaa

SEQ ID NO: 26769 - DNA, 15 bp, Homo sapiens
gaaatggggaggaaa

SEQ ID NO: 26770 - DNA, 15 bp, Homo sapiens
agaaatggggaggaa

SEQ ID NO: 26771 - DNA, 15 bp, Homo sapiens
cagaaatggggagga

SEQ ID NO: 26772 - DNA, 15 bp, Homo sapiens
gcagaaatggggagg

SEQ ID NO: 26773 - DNA, 15 bp, Homo sapiens
ggcagaaatggggag

SEQ ID NO: 26774 - DNA, 15 bp, Homo sapiens
aggcagaaatgggga

SEQ ID NO: 26775 - DNA, 15 bp, Homo sapiens
gaggcagaaatgggg

SEQ ID NO: 26776 - DNA, 15 bp, Homo sapiens
agaggcagaaatggg

SEQ ID NO: 26777 - DNA, 15 bp, Homo sapiens
gagaggcagaaatgg

SEQ ID NO: 26778 - DNA, 15 bp, Homo sapiens
ggagaggcagaaatg

SEQ ID NO: 26779 - DNA, 15 bp, Homo sapiens
aggagaggcagaaat

SEQ ID NO: 26780 - DNA, 15 bp, Homo sapiens
gaggagaggcagaaa

SEQ ID NO: 26781 - DNA, 15 bp, Homo sapiens
agaggagaggcagaa

SEQ ID NO: 26782 - DNA, 15 bp, Homo sapiens
cagaggagaggcaga

SEQ ID NO: 26783 - DNA, 15 bp, Homo sapiens
ccagaggagaggcag

SEQ ID NO: 26784 - DNA, 15 bp, Homo sapiens
accagaggagaggca

SEQ ID NO: 26785 - DNA, 15 bp, Homo sapiens
aaccagaggagaggc

SEQ ID NO: 26786 - DNA, 15 bp, Homo sapiens
caaccagaggagagg

SEQ ID NO: 26787 - DNA, 15 bp, Homo sapiens
acaaccagaggagag

SEQ ID NO: 26788 - DNA, 15 bp, Homo sapiens
cacaaccagaggaga

SEQ ID NO: 26789 - DNA, 15 bp, Homo sapiens
acacaaccagaggag

SEQ ID NO: 26790 - DNA, 15 bp, Homo sapiens
aacacaaccagagga

SEQ ID NO: 26791 - DNA, 15 bp, Homo sapiens
aaacacaaccagagg

SEQ ID NO: 26792 - DNA, 15 bp, Homo sapiens
gaaacacaaccagag

SEQ ID NO: 26793 - DNA, 15 bp, Homo sapiens
tgaaacacaaccaga

SEQ ID NO: 26794 - DNA, 15 bp, Homo sapiens
ctgaaacacaaccag

SEQ ID NO: 26795 - DNA, 15 bp, Homo sapiens
actgaaacacaacca

SEQ ID NO: 26796 - DNA, 15 bp, Homo sapiens
tactgaaacacaacc

SEQ ID NO: 26797 - DNA, 15 bp, Homo sapiens
atactgaaacacaac

SEQ ID NO: 26798 - DNA, 15 bp, Homo sapiens
catactgaaacacaa

SEQ ID NO: 26799 - DNA, 15 bp, Homo sapiens
acatactgaaacaca

SEQ ID NO: 26800 - DNA, 15 bp, Homo sapiens
gacatactgaaacac

SEQ ID NO: 26801 - DNA, 15 bp, Homo sapiens
agacatactgaaaca

SEQ ID NO: 26802 - DNA, 15 bp, Homo sapiens
cagacatactgaaac

SEQ ID NO: 26803 - DNA, 15 bp, Homo sapiens
acagacatactgaaa

SEQ ID NO: 26804 - DNA, 15 bp, Homo sapiens
cacagacatactgaa

SEQ ID NO: 26805 - DNA, 15 bp, Homo sapiens
acacagacatactga

SEQ ID NO: 26806 - DNA, 15 bp, Homo sapiens
cacacagacatactg

SEQ ID NO: 26807 - DNA, 15 bp, Homo sapiens
gcacacagacatact

SEQ ID NO: 26808 - DNA, 15 bp, Homo sapiens
agcacacagacatac

SEQ ID NO: 26809 - DNA, 15 bp, Homo sapiens
aagcacacagacata

SEQ ID NO: 26810 - DNA, 15 bp, Homo sapiens
gaagcacacagacat

SEQ ID NO: 26811 - DNA, 15 bp, Homo sapiens
agaagcacacagaca

SEQ ID NO: 26812 - DNA, 15 bp, Homo sapiens
aagaagcacacagac

SEQ ID NO: 26813 - DNA, 15 bp, Homo sapiens
caagaagcacacaga

SEQ ID NO: 26814 - DNA, 15 bp, Homo sapiens
tcaagaagcacacag

SEQ ID NO: 26815 - DNA, 15 bp, Homo sapiens
ttcaagaagcacaca

SEQ ID NO: 26816 - DNA, 15 bp, Homo sapiens
cttcaagaagcacac

SEQ ID NO: 26817 - DNA, 15 bp, Homo sapiens
acttcaagaagcaca

SEQ ID NO: 26818 - DNA, 15 bp, Homo sapiens
aacttcaagaagcac

SEQ ID NO: 26819 - DNA, 15 bp, Homo sapiens
aaacttcaagaagca

SEQ ID NO: 26820 - DNA, 15 bp, Homo sapiens
taaacttcaagaagc

SEQ ID NO: 26821 - DNA, 15 bp, Homo sapiens
gtaaacttcaagaag

SEQ ID NO: 26822 - DNA, 15 bp, Homo sapiens
agtaaacttcaagaa

SEQ ID NO: 26823 - DNA, 15 bp, Homo sapiens
cagtaaacttcaaga

SEQ ID NO: 26824 - DNA, 15 bp, Homo sapiens
ccagtaaacttcaag

SEQ ID NO: 26825 - DNA, 15 bp, Homo sapiens
tccagtaaacttcaa

SEQ ID NO: 26826 - DNA, 15 bp, Homo sapiens
ttccagtaaacttca

SEQ ID NO: 26827 - DNA, 15 bp, Homo sapiens
tttccagtaaacttc

SEQ ID NO: 26828 - DNA, 15 bp, Homo sapiens
atttccagtaaactt

SEQ ID NO: 26829 - DNA, 15 bp, Homo sapiens
aatttccagtaaact

SEQ ID NO: 26830 - DNA, 15 bp, Homo sapiens
taatttccagtaaac

SEQ ID NO: 26831 - DNA, 15 bp, Homo sapiens
ataatttccagtaaa

SEQ ID NO: 26832 - DNA, 15 bp, Homo sapiens
cataatttccagtaa

SEQ ID NO: 26833 - DNA, 15 bp, Homo sapiens
tcataatttccagta

SEQ ID NO: 26834 - DNA, 15 bp, Homo sapiens
ttcataatttccagt

SEQ ID NO: 26835 - DNA, 15 bp, Homo sapiens
tttcataatttccag

SEQ ID NO: 26836 - DNA, 15 bp, Homo sapiens
ctttcataatttcca

SEQ ID NO: 26837 - DNA, 15 bp, Homo sapiens
actttcataatttcc

SEQ ID NO: 26838 - DNA, 15 bp, Homo sapiens
tactttcataatttc

SEQ ID NO: 26839 - DNA, 15 bp, Homo sapiens
atactttcataattt

SEQ ID NO: 26840 - DNA, 15 bp, Homo sapiens
aatactttcataatt

SEQ ID NO: 26841 - DNA, 15 bp, Homo sapiens
gaatactttcataat

SEQ ID NO: 26842 - DNA, 15 bp, Homo sapiens
agaatactttcataa

SEQ ID NO: 26843 - DNA, 15 bp, Homo sapiens
cagaatactttcata

SEQ ID NO: 26844 - DNA, 15 bp, Homo sapiens
ccagaatactttcat

SEQ ID NO: 26845 - DNA, 15 bp, Homo sapiens
gccagaatactttca

SEQ ID NO: 26846 - DNA, 15 bp, Homo sapiens
tgccagaatactttc

SEQ ID NO: 26847 - DNA, 15 bp, Homo sapiens
gtgccagaatacttt

SEQ ID NO: 26848 - DNA, 15 bp, Homo sapiens
tgtgccagaatactt

SEQ ID NO: 26849 - DNA, 15 bp, Homo sapiens
ctgtgccagaatact

SEQ ID NO: 26850 - DNA, 15 bp, Homo sapiens
tctgtgccagaatac

SEQ ID NO: 26851 - DNA, 15 bp, Homo sapiens
ctctgtgccagaata

SEQ ID NO: 26852 - DNA, 15 bp, Homo sapiens
cctctgtgccagaat

SEQ ID NO: 26853 - DNA, 15 bp, Homo sapiens
tcctctgtgccagaa

SEQ ID NO: 26854 - DNA, 15 bp, Homo sapiens
ctcctctgtgccaga

SEQ ID NO: 26855 - DNA, 15 bp, Homo sapiens
tcctcctctgtgcca

SEQ ID NO: 26856 - DNA, 15 bp, Homo sapiens
ttcctcctctgtgcc

SEQ ID NO: 26857 - DNA, 15 bp, Homo sapiens
cttcctcctctgtgc

SEQ ID NO: 26858 - DNA, 15 bp, Homo sapiens
ccttcctcctctgtg

SEQ ID NO: 26859 - DNA, 15 bp, Homo sapiens
cccttcctcctctgt

SEQ ID NO: 26860 - DNA, 15 bp, Homo sapiens
tcccttcctcctctg

SEQ ID NO: 26861 - DNA, 15 bp, Homo sapiens
atcccttcctcctct

SEQ ID NO: 26862 - DNA, 15 bp, Homo sapiens
aatcccttcctcctc

SEQ ID NO: 26863 - DNA, 15 bp, Homo sapiens
aaatcccttcctcct

SEQ ID NO: 26864 - DNA, 15 bp, Homo sapiens
aaaatcccttcctcc

SEQ ID NO: 26865 - DNA, 15 bp, Homo sapiens
aaaaatcccttcctc

SEQ ID NO: 26866 - DNA, 15 bp, Homo sapiens
caaaaatcccttcct

SEQ ID NO: 26867 - DNA, 15 bp, Homo sapiens
gcaaaaatcccttcc

SEQ ID NO: 26868 - DNA, 15 bp, Homo sapiens
ggcaaaaatcccttc

SEQ ID NO: 26869 - DNA, 15 bp, Homo sapiens
aggcaaaaatccctt

SEQ ID NO: 26870 - DNA, 15 bp, Homo sapiens
gaggcaaaaatccct

SEQ ID NO: 26871 - DNA, 15 bp, Homo sapiens
ggaggcaaaaatccc

SEQ ID NO: 26872 - DNA, 15 bp, Homo sapiens
gggaggcaaaaatcc

SEQ ID NO: 26873 - DNA, 15 bp, Homo sapiens
agggaggcaaaaatc

SEQ ID NO: 26874 - DNA, 15 bp, Homo sapiens
aagggaggcaaaaat

SEQ ID NO: 26875 - DNA, 15 bp, Homo sapiens
caagggaggcaaaaa

SEQ ID NO: 26876 - DNA, 15 bp, Homo sapiens
acaagggaggcaaaa

SEQ ID NO: 26877 - DNA, 15 bp, Homo sapiens
aacaagggaggcaaa

SEQ ID NO: 26878 - DNA, 15 bp, Homo sapiens
gaacaagggaggcaa

SEQ ID NO: 26879 - DNA, 15 bp, Homo sapiens
agaacaagggaggca

SEQ ID NO: 26880 - DNA, 15 bp, Homo sapiens
cagaacaagggaggc

SEQ ID NO: 26881 - DNA, 15 bp, Homo sapiens
tcagaacaagggagg

SEQ ID NO: 26882 - DNA, 15 bp, Homo sapiens
ctcagaacaagggag

SEQ ID NO: 26883 - DNA, 15 bp, Homo sapiens
actcagaacaaggga

SEQ ID NO: 26884 - DNA, 15 bp, Homo sapiens
cactcagaacaaggg

SEQ ID NO: 26885 - DNA, 15 bp, Homo sapiens
gcactcagaacaagg

SEQ ID NO: 26886 - DNA, 15 bp, Homo sapiens
agcactcagaacaag

SEQ ID NO: 26887 - DNA, 15 bp, Homo sapiens
tagcactcagaacaa

SEQ ID NO: 26888 - DNA, 15 bp, Homo sapiens
gtagcactcagaaca

SEQ ID NO: 26889 - DNA, 15 bp, Homo sapiens
tgtagcactcagaac

SEQ ID NO: 26890 - DNA, 15 bp, Homo sapiens
atgtagcactcagaa

SEQ ID NO: 26891 - DNA, 15 bp, Homo sapiens
aatgtagcactcaga

SEQ ID NO: 26892 - DNA, 15 bp, Homo sapiens
aaatgtagcactcag

SEQ ID NO: 26893 - DNA, 15 bp, Homo sapiens
gaaatgtagcactca

SEQ ID NO: 26894 - DNA, 15 bp, Homo sapiens
ggaaatgtagcactc

SEQ ID NO: 26895 - DNA, 15 bp, Homo sapiens
cggaaatgtagcact

SEQ ID NO: 26896 - DNA, 15 bp, Homo sapiens
acggaaatgtagcac

SEQ ID NO: 26897 - DNA, 15 bp, Homo sapiens
aacggaaatgtagca

SEQ ID NO: 26898 - DNA, 15 bp, Homo sapiens
taacggaaatgtagc

SEQ ID NO: 26899 - DNA, 15 bp, Homo sapiens
ttaacggaaatgtag

SEQ ID NO: 26900 - DNA, 15 bp, Homo sapiens
attaacggaaatgta

SEQ ID NO: 26901 - DNA, 15 bp, Homo sapiens
cattaacggaaatgt

SEQ ID NO: 26902 - DNA, 15 bp, Homo sapiens
gcattaacggaaatg

SEQ ID NO: 26903 - DNA, 15 bp, Homo sapiens
tgcattaacggaaat

SEQ ID NO: 26904 - DNA, 15 bp, Homo sapiens
ctgcattaacggaaa

SEQ ID NO: 26905 - DNA, 15 bp, Homo sapiens
actgcattaacggaa

SEQ ID NO: 26906 - DNA, 15 bp, Homo sapiens
gactgcattaacgga

SEQ ID NO: 26907 - DNA, 15 bp, Homo sapiens
agactgcattaacgg

SEQ ID NO: 26908 - DNA, 15 bp, Homo sapiens
cagactgcattaacg

SEQ ID NO: 26909 - DNA, 15 bp, Homo sapiens
tcagactgcattaac

SEQ ID NO: 26910 - DNA, 15 bp, Homo sapiens
ctcagactgcattaa

SEQ ID NO: 26911 - DNA, 15 bp, Homo sapiens
tctcagactgcatta

SEQ ID NO: 26912 - DNA, 15 bp, Homo sapiens
atctcagactgcatt

SEQ ID NO: 26913 - DNA, 15 bp, Homo sapiens
aatctcagactgcat

SEQ ID NO: 26914 - DNA, 15 bp, Homo sapiens
caatctcagactgca

SEQ ID NO: 26915 - DNA, 15 bp, Homo sapiens
acaatctcagactgc

SEQ ID NO: 26916 - DNA, 15 bp, Homo sapiens
tacaatctcagactg

SEQ ID NO: 26917 - DNA, 15 bp, Homo sapiens
atacaatctcagact

SEQ ID NO: 26918 - DNA, 15 bp, Homo sapiens
aatacaatctcagac

SEQ ID NO: 26919 - DNA, 15 bp, Homo sapiens
taatacaatctcaga

SEQ ID NO: 26920 - DNA, 15 bp, Homo sapiens
ctaatacaatctcag

SEQ ID NO: 26921 - DNA, 15 bp, Homo sapiens
cctaatacaatctca

SEQ ID NO: 26922 - DNA, 15 bp, Homo sapiens
gcctaatacaatctc

SEQ ID NO: 26923 - DNA, 15 bp, Homo sapiens
tgcctaatacaatct

SEQ ID NO: 26924 - DNA, 15 bp, Homo sapiens
atgcctaatacaatc

SEQ ID NO: 26925 - DNA, 15 bp, Homo sapiens
aatgcctaatacaat

SEQ ID NO: 26926 - DNA, 15 bp, Homo sapiens
aaatgcctaatacaa

SEQ ID NO: 26927 - DNA, 15 bp, Homo sapiens
aaaatgcctaataca

SEQ ID NO: 26928 - DNA, 15 bp, Homo sapiens
caaaatgcctaatac

SEQ ID NO: 26929 - DNA, 15 bp, Homo sapiens
ccaaaatgcctaata

SEQ ID NO: 26930 - DNA, 15 bp, Homo sapiens
gccaaaatgcctaat

SEQ ID NO: 26931 - DNA, 15 bp, Homo sapiens
tgccaaaatgcctaa

SEQ ID NO: 26932 - DNA, 15 bp, Homo sapiens
atgccaaaatgccta

SEQ ID NO: 26933 - DNA, 15 bp, Homo sapiens
aatgccaaaatgcct

SEQ ID NO: 26934 - DNA, 15 bp, Homo sapiens
gaatgccaaaatgcc

SEQ ID NO: 26935 - DNA, 15 bp, Homo sapiens
tgaatgccaaaatgc

SEQ ID NO: 26936 - DNA, 15 bp, Homo sapiens
gtgaatgccaaaatg

SEQ ID NO: 26937 - DNA, 15 bp, Homo sapiens
cgtgaatgccaaaat

SEQ ID NO: 26938 - DNA, 15 bp, Homo sapiens
acgtgaatgccaaaa

SEQ ID NO: 26939 - DNA, 15 bp, Homo sapiens
gacgtgaatgccaaa

SEQ ID NO: 26940 - DNA, 15 bp, Homo sapiens
tgacgtgaatgccaa

SEQ ID NO: 26941 - DNA, 15 bp, Homo sapiens
gtgacgtgaatgcca

SEQ ID NO: 26942 - DNA, 15 bp, Homo sapiens
ggtgacgtgaatgcc

SEQ ID NO: 26943 - DNA, 15 bp, Homo sapiens
aggtgacgtgaatgc

SEQ ID NO: 26944 - DNA, 15 bp, Homo sapiens
aaggtgacgtgaatg

SEQ ID NO: 26945 - DNA, 15 bp, Homo sapiens
caaggtgacgtgaat

SEQ ID NO: 26946 - DNA, 15 bp, Homo sapiens
acaaggtgacgtgaa

SEQ ID NO: 26947 - DNA, 15 bp, Homo sapiens
aacaaggtgacgtga

SEQ ID NO: 26948 - DNA, 15 bp, Homo sapiens
caacaaggtgacgtg

SEQ ID NO: 26949 - DNA, 15 bp, Homo sapiens
tcaacaaggtgacgt

SEQ ID NO: 26950 - DNA, 15 bp, Homo sapiens
gtcaacaaggtgacg

SEQ ID NO: 26951 - DNA, 15 bp, Homo sapiens
agtcaacaaggtgac

SEQ ID NO: 26952 - DNA, 15 bp, Homo sapiens
gagtcaacaaggtga

SEQ ID NO: 26953 - DNA, 15 bp, Homo sapiens
tgagtcaacaaggtg

SEQ ID NO: 26954 - DNA, 15 bp, Homo sapiens
atgagtcaacaaggt

SEQ ID NO: 26955 - DNA, 15 bp, Homo sapiens
tatgagtcaacaagg

SEQ ID NO: 26956 - DNA, 15 bp, Homo sapiens
atatgagtcaacaag

SEQ ID NO: 26957 - DNA, 15 bp, Homo sapiens
aatatgagtcaacaa

SEQ ID NO: 26958 - DNA, 15 bp, Homo sapiens
gaatatgagtcaaca

SEQ ID NO: 26959 - DNA, 15 bp, Homo sapiens
ggaatatgagtcaac

SEQ ID NO: 26960 - DNA, 15 bp, Homo sapiens
tggaatatgagtcaa

SEQ ID NO: 26961 - DNA, 15 bp, Homo sapiens
atggaatatgagtca

SEQ ID NO: 26962 - DNA, 15 bp, Homo sapiens
catggaatatgagtc

SEQ ID NO: 26963 - DNA, 15 bp, Homo sapiens
acatggaatatgagt

SEQ ID NO: 26964 - DNA, 15 bp, Homo sapiens
cacatggaatatgag

SEQ ID NO: 26965 - DNA, 15 bp, Homo sapiens
gcacatggaatatga

SEQ ID NO: 26966 - DNA, 15 bp, Homo sapiens
tgcacatggaatatg

SEQ ID NO: 26967 - DNA, 15 bp, Homo sapiens
gtgcacatggaatat

SEQ ID NO: 26968 - DNA, 15 bp, Homo sapiens
agtgcacatggaata

SEQ ID NO: 26969 - DNA, 15 bp, Homo sapiens
gagtgcacatggaat

SEQ ID NO: 26970 - DNA, 15 bp, Homo sapiens
tgagtgcacatggaa

SEQ ID NO: 26971 - DNA, 15 bp, Homo sapiens
ttgagtgcacatgga

SEQ ID NO: 26972 - DNA, 15 bp, Homo sapiens
tttgagtgcacatgg

SEQ ID NO: 26973 - DNA, 15 bp, Homo sapiens
gtttgagtgcacatg

SEQ ID NO: 26974 - DNA, 15 bp, Homo sapiens
tgtttgagtgcacat

SEQ ID NO: 26975 - DNA, 15 bp, Homo sapiens
ttgtttgagtgcaca

SEQ ID NO: 26976 - DNA, 15 bp, Homo sapiens
tttgtttgagtgcac

SEQ ID NO: 26977 - DNA, 15 bp, Homo sapiens
ttttgtttgagtgca

SEQ ID NO: 26978 - DNA, 15 bp, Homo sapiens
attttgtttgagtgc

SEQ ID NO: 26979 - DNA, 15 bp, Homo sapiens
aattttgtttgagtg

SEQ ID NO: 26980 - DNA, 15 bp, Homo sapiens
caattttgtttgagt

SEQ ID NO: 26981 - DNA, 15 bp, Homo sapiens
acaattttgtttgag

SEQ ID NO: 26982 - DNA, 15 bp, Homo sapiens
cacaattttgtttga

SEQ ID NO: 26983 - DNA, 15 bp, Homo sapiens
tcacaattttgtttg

SEQ ID NO: 26984 - DNA, 15 bp, Homo sapiens
atcacaattttgttt

SEQ ID NO: 26985 - DNA, 15 bp, Homo sapiens
aatcacaattttgtt

SEQ ID NO: 26986 - DNA, 15 bp, Homo sapiens
taatcacaattttgt

SEQ ID NO: 26987 - DNA, 15 bp, Homo sapiens
ataatcacaattttg

SEQ ID NO: 26988 - DNA, 15 bp, Homo sapiens
aataatcacaatttt

SEQ ID NO: 26989 - DNA, 15 bp, Homo sapiens
aaataatcacaattt

SEQ ID NO: 26990 - DNA, 15 bp, Homo sapiens
aaaataatcacaatt

SEQ ID NO: 26991 - DNA, 15 bp, Homo sapiens
taaaataatcacaat

SEQ ID NO: 26992 - DNA, 15 bp, Homo sapiens
ttaaaataatcacaa

SEQ ID NO: 26993 - DNA, 15 bp, Homo sapiens
tttaaaataatcaca

SEQ ID NO: 26994 - DNA, 15 bp, Homo sapiens
atttaaaataatcac

SEQ ID NO: 26995 - DNA, 15 bp, Homo sapiens
tatttaaaataatca

SEQ ID NO: 26996 - DNA, 15 bp, Homo sapiens
ctatttaaaataatc

SEQ ID NO: 26997 - DNA, 15 bp, Homo sapiens
cctatttaaaataat

SEQ ID NO: 26998 - DNA, 15 bp, Homo sapiens
gcctatttaaaataa

SEQ ID NO: 26999 - DNA, 15 bp, Homo sapiens
tgcctatttaaaata

SEQ ID NO: 27000 - DNA, 15 bp, Homo sapiens
ctgcctatttaaaat

SEQ ID NO: 27001 - DNA, 15 bp, Homo sapiens
tctgcctatttaaaa

SEQ ID NO: 27002 - DNA, 15 bp, Homo sapiens
ttctgcctatttaaa

SEQ ID NO: 27003 - DNA, 15 bp, Homo sapiens
attctgcctatttaa

SEQ ID NO: 27004 - DNA, 15 bp, Homo sapiens
aattctgcctattta

SEQ ID NO: 27005 - DNA, 15 bp, Homo sapiens
caattctgcctattt

SEQ ID NO: 27006 - DNA, 15 bp, Homo sapiens
gcaattctgcctatt

SEQ ID NO: 27007 - DNA, 15 bp, Homo sapiens
tgcaattctgcctat

SEQ ID NO: 27008 - DNA, 15 bp, Homo sapiens
ttgcaattctgccta

SEQ ID NO: 27009 - DNA, 15 bp, Homo sapiens
cttgcaattctgcct

SEQ ID NO: 27010 - DNA, 15 bp, Homo sapiens
acttgcaattctgcc

SEQ ID NO: 27011 - DNA, 15 bp, Homo sapiens
aacttgcaattctgc

SEQ ID NO: 27012 - DNA, 15 bp, Homo sapiens
taacttgcaattctg

SEQ ID NO: 27013 - DNA, 15 bp, Homo sapiens
gtaacttgcaattct

SEQ ID NO: 27014 - DNA, 15 bp, Homo sapiens
cgtaacttgcaattc

SEQ ID NO: 27015 - DNA, 15 bp, Homo sapiens
acgtaacttgcaatt

SEQ ID NO: 27016 - DNA, 15 bp, Homo sapiens
cacgtaacttgcaat

SEQ ID NO: 27017 - DNA, 15 bp, Homo sapiens
acacgtaacttgcaa

SEQ ID NO: 27018 - DNA, 15 bp, Homo sapiens
aacacgtaacttgca

SEQ ID NO: 27019 - DNA, 15 bp, Homo sapiens
gaacacgtaacttgc

SEQ ID NO: 27020 - DNA, 15 bp, Homo sapiens
agaacacgtaacttg

SEQ ID NO: 27021 - DNA, 15 bp, Homo sapiens
gagaacacgtaactt

SEQ ID NO: 27022 - DNA, 15 bp, Homo sapiens
ggagaacacgtaact

SEQ ID NO: 27023 - DNA, 15 bp, Homo sapiens
tggagaacacgtaac

SEQ ID NO: 27024 - DNA, 15 bp, Homo sapiens
atggagaacacgtaa

SEQ ID NO: 27025 - DNA, 15 bp, Homo sapiens
aatggagaacacgta

SEQ ID NO: 27026 - DNA, 15 bp, Homo sapiens
aaatggagaacacgt

SEQ ID NO: 27027 - DNA, 15 bp, Homo sapiens
gaaatggagaacacg

SEQ ID NO: 27028 - DNA, 15 bp, Homo sapiens
agaaatggagaacac

SEQ ID NO: 27029 - DNA, 15 bp, Homo sapiens
aagaaatggagaaca

SEQ ID NO: 27030 - DNA, 15 bp, Homo sapiens
aaagaaatggagaac

SEQ ID NO: 27031 - DNA, 15 bp, Homo sapiens
caaagaaatggagaa

SEQ ID NO: 27032 - DNA, 15 bp, Homo sapiens
acaaagaaatggaga

SEQ ID NO: 27033 - DNA, 15 bp, Homo sapiens
aacaaagaaatggag

SEQ ID NO: 27034 - DNA, 15 bp, Homo sapiens
caacaaagaaatgga

SEQ ID NO: 27035 - DNA, 15 bp, Homo sapiens
acaacaaagaaatgg

SEQ ID NO: 27036 - DNA, 15 bp, Homo sapiens
tacaacaaagaaatg

SEQ ID NO: 27037 - DNA, 15 bp, Homo sapiens
atacaacaaagaaat

SEQ ID NO: 27038 - DNA, 15 bp, Homo sapiens
aatacaacaaagaaa

SEQ ID NO: 27039 - DNA, 15 bp, Homo sapiens
caatacaacaaagaa

SEQ ID NO: 27040 - DNA, 15 bp, Homo sapiens
acaatacaacaaaga

SEQ ID NO: 27041 - DNA, 15 bp, Homo sapiens
aacaatacaacaaag

SEQ ID NO: 27042 - DNA, 15 bp, Homo sapiens
caacaatacaacaaa

SEQ ID NO: 27043 - DNA, 15 bp, Homo sapiens
ccaacaatacaacaa

SEQ ID NO: 27044 - DNA, 15 bp, Homo sapiens
gccaacaatacaaca

SEQ ID NO: 27045 - DNA, 15 bp, Homo sapiens
agccaacaatacaac

SEQ ID NO: 27046 - DNA, 15 bp, Homo sapiens
aagccaacaatacaa

SEQ ID NO: 27047 - DNA, 15 bp, Homo sapiens
aaagccaacaataca

SEQ ID NO: 27048 - DNA, 15 bp, Homo sapiens
aaaagccaacaatac

SEQ ID NO: 27049 - DNA, 15 bp, Homo sapiens
aaaaagccaacaata

SEQ ID NO: 27050 - DNA, 15 bp, Homo sapiens
caaaaagccaacaat

SEQ ID NO: 27051 - DNA, 15 bp, Homo sapiens
tcaaaaagccaacaa

SEQ ID NO: 27052 - DNA, 15 bp, Homo sapiens
ttcaaaaagccaaca

SEQ ID NO: 27053 - DNA, 15 bp, Homo sapiens
gttcaaaaagccaac

SEQ ID NO: 27054 - DNA, 15 bp, Homo sapiens
agttcaaaaagccaa

SEQ ID NO: 27055 - DNA, 15 bp, Homo sapiens
tagttcaaaaagcca

SEQ ID NO: 27056 - DNA, 15 bp, Homo sapiens
ttagttcaaaaagcc

SEQ ID NO: 27057 - DNA, 15 bp, Homo sapiens
tttagttcaaaaagc

SEQ ID NO: 27058 - DNA, 15 bp, Homo sapiens
ctttagttcaaaaag

SEQ ID NO: 27059 - DNA, 15 bp, Homo sapiens
cctttagttcaaaaa

SEQ ID NO: 27060 - DNA, 15 bp, Homo sapiens
ccctttagttcaaaa

SEQ ID NO: 27061 - DNA, 15 bp, Homo sapiens
tccctttagttcaaa

SEQ ID NO: 27062 - DNA, 15 bp, Homo sapiens
ttccctttagttcaa

SEQ ID NO: 27063 - DNA, 15 bp, Homo sapiens
tttccctttagttca

SEQ ID NO: 27064 - DNA, 15 bp, Homo sapiens
ttttccctttagttc

SEQ ID NO: 27065 - DNA, 15 bp, Homo sapiens
tttttccctttagtt

SEQ ID NO: 27066 - DNA, 15 bp, Homo sapiens
atttttccctttagt

SEQ ID NO: 27067 - DNA, 15 bp, Homo sapiens
catttttccctttag

SEQ ID NO: 27068 - DNA, 15 bp, Homo sapiens
acatttttcccttta

SEQ ID NO: 27069 - DNA, 15 bp, Homo sapiens
gacatttttcccttt

SEQ ID NO: 27070 - DNA, 15 bp, Homo sapiens
agacatttttccctt

SEQ ID NO: 27071 - DNA, 15 bp, Homo sapiens
aagacatttttccct

SEQ ID NO: 27072 - DNA, 15 bp, Homo sapiens
aaagacatttttccc

SEQ ID NO: 27073 - DNA, 15 bp, Homo sapiens
aaaagacatttttcc

SEQ ID NO: 27074 - DNA, 15 bp, Homo sapiens
aaaaagacatttttc

SEQ ID NO: 27075 - DNA, 15 bp, Homo sapiens
aaaaaagacattttt

SEQ ID NO: 27076 - DNA, 15 bp, Homo sapiens
gaaaaaagacatttt

SEQ ID NO: 27077 - DNA, 15 bp, Homo sapiens
agaaaaaagacattt

SEQ ID NO: 27078 - DNA, 15 bp, Homo sapiens
cagaaaaaagacatt

SEQ ID NO: 27079 - DNA, 15 bp, Homo sapiens
acagaaaaaagacat

SEQ ID NO: 27080 - DNA, 15 bp, Homo sapiens
aacagaaaaaagaca

SEQ ID NO: 27081 - DNA, 15 bp, Homo sapiens
aaacagaaaaaagac

SEQ ID NO: 27082 - DNA, 15 bp, Homo sapiens
aaaacagaaaaaaga

SEQ ID NO: 27083 - DNA, 15 bp, Homo sapiens
taaaacagaaaaaag

SEQ ID NO: 27084 - DNA, 15 bp, Homo sapiens
gtaaaacagaaaaaa

SEQ ID NO: 27085 - DNA, 15 bp, Homo sapiens
tgtaaaacagaaaaa

SEQ ID NO: 27086 - DNA, 15 bp, Homo sapiens
atgtaaaacagaaaa

SEQ ID NO: 27087 - DNA, 15 bp, Homo sapiens
catgtaaaacagaaa

SEQ ID NO: 27088 - DNA, 15 bp, Homo sapiens
acatgtaaaacagaa

SEQ ID NO: 27089 - DNA, 15 bp, Homo sapiens
aacatgtaaaacaga

SEQ ID NO: 27090 - DNA, 15 bp, Homo sapiens
aaacatgtaaaacag

SEQ ID NO: 27091 - DNA, 15 bp, Homo sapiens
taaacatgtaaaaca

SEQ ID NO: 27092 - DNA, 15 bp, Homo sapiens
ctaaacatgtaaaac

SEQ ID NO: 27093 - DNA, 15 bp, Homo sapiens
tctaaacatgtaaaa

SEQ ID NO: 27094 - DNA, 15 bp, Homo sapiens
atctaaacatgtaaa

SEQ ID NO: 27095 - DNA, 15 bp, Homo sapiens
aatctaaacatgtaa

SEQ ID NO: 27096 - DNA, 15 bp, Homo sapiens
gaatctaaacatgta

SEQ ID NO: 27097 - DNA, 15 bp, Homo sapiens
ggaatctaaacatgt

SEQ ID NO: 27098 - DNA, 15 bp, Homo sapiens
gggaatctaaacatg

SEQ ID NO: 27099 - DNA, 15 bp, Homo sapiens
agggaatctaaacat

SEQ ID NO: 27100 - DNA, 15 bp, Homo sapiens
tagggaatctaaaca

SEQ ID NO: 27101 - DNA, 15 bp, Homo sapiens
atagggaatctaaac

SEQ ID NO: 27102 - DNA, 15 bp, Homo sapiens
catagggaatctaaa

SEQ ID NO: 27103 - DNA, 15 bp, Homo sapiens
gcatagggaatctaa

SEQ ID NO: 27104 - DNA, 15 bp, Homo sapiens
agcatagggaatcta

SEQ ID NO: 27105 - DNA, 15 bp, Homo sapiens
tagcatagggaatct

SEQ ID NO: 27106 - DNA, 15 bp, Homo sapiens
atagcatagggaatc

SEQ ID NO: 27107 - DNA, 15 bp, Homo sapiens
gatagcatagggaat

SEQ ID NO: 27108 - DNA, 15 bp, Homo sapiens
ggatagcatagggaa

SEQ ID NO: 27109 - DNA, 15 bp, Homo sapiens
aggatagcataggga

SEQ ID NO: 27110 - DNA, 15 bp, Homo sapiens
taggatagcataggg

SEQ ID NO: 27111 - DNA, 15 bp, Homo sapiens
ataggatagcatagg

SEQ ID NO: 27112 - DNA, 15 bp, Homo sapiens
gataggatagcatag

SEQ ID NO: 27113 - DNA, 15 bp, Homo sapiens
ggataggatagcata

SEQ ID NO: 27114 - DNA, 15 bp, Homo sapiens
aggataggatagcat

SEQ ID NO: 27115 - DNA, 15 bp, Homo sapiens
gaggataggatagca

SEQ ID NO: 27116 - DNA, 15 bp, Homo sapiens
ggaggataggatagc

SEQ ID NO: 27117 - DNA, 15 bp, Homo sapiens
gggaggataggatag

SEQ ID NO: 27118 - DNA, 15 bp, Homo sapiens
tgggaggataggata

SEQ ID NO: 27119 - DNA, 15 bp, Homo sapiens
ttgggaggataggat

SEQ ID NO: 27120 - DNA, 15 bp, Homo sapiens
tttgggaggatagga

SEQ ID NO: 27121 - DNA, 15 bp, Homo sapiens
ttttgggaggatagg

SEQ ID NO: 27122 - DNA, 15 bp, Homo sapiens
gttttgggaggatag

SEQ ID NO: 27123 - DNA, 15 bp, Homo sapiens
ggttttgggaggata

SEQ ID NO: 27124 - DNA, 15 bp, Homo sapiens
tggttttgggaggat

SEQ ID NO: 27125 - DNA, 15 bp, Homo sapiens
atggttttgggagga

SEQ ID NO: 27126 - DNA, 15 bp, Homo sapiens
aatggttttgggagg

SEQ ID NO: 27127 - DNA, 15 bp, Homo sapiens
aaatggttttgggag

SEQ ID NO: 27128 - DNA, 15 bp, Homo sapiens
aaaatggttttggga

SEQ ID NO: 27129 - DNA, 15 bp, Homo sapiens
taaaatggttttggg

SEQ ID NO: 27130 - DNA, 15 bp, Homo sapiens
ctaaaatggttttgg

SEQ ID NO: 27131 - DNA, 15 bp, Homo sapiens
tctaaaatggttttg

SEQ ID NO: 27132 - DNA, 15 bp, Homo sapiens
atctaaaatggtttt

SEQ ID NO: 27133 - DNA, 15 bp, Homo sapiens
aatctaaaatggttt

SEQ ID NO: 27134 - DNA, 15 bp, Homo sapiens
gaatctaaaatggtt

SEQ ID NO: 27135 - DNA, 15 bp, Homo sapiens
agaatctaaaatggt

SEQ ID NO: 27136 - DNA, 15 bp, Homo sapiens
cagaatctaaaatgg

SEQ ID NO: 27137 - DNA, 15 bp, Homo sapiens
tcagaatctaaaatg

SEQ ID NO: 27138 - DNA, 15 bp, Homo sapiens
atcagaatctaaaat

SEQ ID NO: 27139 - DNA, 15 bp, Homo sapiens
aatcagaatctaaaa

SEQ ID NO: 27140 - DNA, 15 bp, Homo sapiens
aaatcagaatctaaa

SEQ ID NO: 27141 - DNA, 15 bp, Homo sapiens
aaaatcagaatctaa

SEQ ID NO: 27142 - DNA, 15 bp, Homo sapiens
caaaatcagaatcta

SEQ ID NO: 27143 - DNA, 15 bp, Homo sapiens
gcaaaatcagaatct

SEQ ID NO: 27144 - DNA, 15 bp, Homo sapiens
ggcaaaatcagaatc

SEQ ID NO: 27145 - DNA, 15 bp, Homo sapiens
tggcaaaatcagaat

SEQ ID NO: 27146 - DNA, 15 bp, Homo sapiens
atggcaaaatcagaa

SEQ ID NO: 27147 - DNA, 15 bp, Homo sapiens
catggcaaaatcaga

SEQ ID NO: 27148 - DNA, 15 bp, Homo sapiens
acatggcaaaatcag

SEQ ID NO: 27149 - DNA, 15 bp, Homo sapiens
tacatggcaaaatca

SEQ ID NO: 27150 - DNA, 15 bp, Homo sapiens
atacatggcaaaatc

SEQ ID NO: 27151 - DNA, 15 bp, Homo sapiens
aatacatggcaaaat

SEQ ID NO: 27152 - DNA, 15 bp, Homo sapiens
taatacatggcaaaa

SEQ ID NO: 27153 - DNA, 15 bp, Homo sapiens
ataatacatggcaaa

SEQ ID NO: 27154 - DNA, 15 bp, Homo sapiens
tataatacatggcaa

SEQ ID NO: 27155 - DNA, 15 bp, Homo sapiens
atataatacatggca

SEQ ID NO: 27156 - DNA, 15 bp, Homo sapiens
gatataatacatggc

SEQ ID NO: 27157 - DNA, 15 bp, Homo sapiens
agatataatacatgg

SEQ ID NO: 27158 - DNA, 15 bp, Homo sapiens
cagatataatacatg

SEQ ID NO: 27159 - DNA, 15 bp, Homo sapiens
tcagatataatacat

SEQ ID NO: 27160 - DNA, 15 bp, Homo sapiens
atcagatataataca

SEQ ID NO: 27161 - DNA, 15 bp, Homo sapiens
tatcagatataatac

SEQ ID NO: 27162 - DNA, 15 bp, Homo sapiens
gtatcagatataata

SEQ ID NO: 27163 - DNA, 15 bp, Homo sapiens
agtatcagatataat

SEQ ID NO: 27164 - DNA, 15 bp, Homo sapiens
gagtatcagatataa

SEQ ID NO: 27165 - DNA, 15 bp, Homo sapiens
ggagtatcagatata

SEQ ID NO: 27166 - DNA, 15 bp, Homo sapiens
aggagtatcagatat

SEQ ID NO: 27167 - DNA, 15 bp, Homo sapiens
aaggagtatcagata

SEQ ID NO: 27168 - DNA, 15 bp, Homo sapiens
aaaggagtatcagat

SEQ ID NO: 27169 - DNA, 15 bp, Homo sapiens
gaaaggagtatcaga

SEQ ID NO: 27170 - DNA, 15 bp, Homo sapiens
agaaaggagtatcag

SEQ ID NO: 27171 - DNA, 15 bp, Homo sapiens
gagaaaggagtatca

SEQ ID NO: 27172 - DNA, 15 bp, Homo sapiens
cgagaaaggagtatc

SEQ ID NO: 27173 - DNA, 15 bp, Homo sapiens
acgagaaaggagtat

SEQ ID NO: 27174 - DNA, 15 bp, Homo sapiens
gacgagaaaggagta

SEQ ID NO: 27175 - DNA, 15 bp, Homo sapiens
tgacgagaaaggagt

SEQ ID NO: 27176 - DNA, 15 bp, Homo sapiens
atgacgagaaaggag

SEQ ID NO: 27177 - DNA, 15 bp, Homo sapiens
gatgacgagaaagga

SEQ ID NO: 27178 - DNA, 15 bp, Homo sapiens
agatgacgagaaagg

SEQ ID NO: 27179 - DNA, 15 bp, Homo sapiens
tagatgacgagaaag

SEQ ID NO: 27180 - DNA, 15 bp, Homo sapiens
ctagatgacgagaaa

SEQ ID NO: 27181 - DNA, 15 bp, Homo sapiens
tctagatgacgagaa

SEQ ID NO: 27182 - DNA, 15 bp, Homo sapiens
ctctagatgacgaga

SEQ ID NO: 27183 - DNA, 15 bp, Homo sapiens
tctctagatgacgag

SEQ ID NO: 27184 - DNA, 15 bp, Homo sapiens
atctctagatgacga

SEQ ID NO: 27185 - DNA, 15 bp, Homo sapiens
catctctagatgacg

SEQ ID NO: 27186 - DNA, 15 bp, Homo sapiens
acatctctagatgac

SEQ ID NO: 27187 - DNA, 15 bp, Homo sapiens
cacatctctagatga

SEQ ID NO: 27188 - DNA, 15 bp, Homo sapiens
tcacatctctagatg

SEQ ID NO: 27189 - DNA, 15 bp, Homo sapiens
atcacatctctagat

SEQ ID NO: 27190 - DNA, 15 bp, Homo sapiens
tatcacatctctaga

SEQ ID NO: 27191 - DNA, 15 bp, Homo sapiens
ttatcacatctctag

SEQ ID NO: 27192 - DNA, 15 bp, Homo sapiens
tttatcacatctcta

SEQ ID NO: 27193 - DNA, 15 bp, Homo sapiens
gtttatcacatctct

SEQ ID NO: 27194 - DNA, 15 bp, Homo sapiens
tgtttatcacatctc

SEQ ID NO: 27195 - DNA, 15 bp, Homo sapiens
ttgtttatcacatct

SEQ ID NO: 27196 - DNA, 15 bp, Homo sapiens
gttgtttatcacatc

SEQ ID NO: 27197 - DNA, 15 bp, Homo sapiens
agttgtttatcacat

SEQ ID NO: 27198 - DNA, 15 bp, Homo sapiens
gagttgtttatcaca

SEQ ID NO: 27199 - DNA, 15 bp, Homo sapiens
agagttgtttatcac

SEQ ID NO: 27200 - DNA, 15 bp, Homo sapiens
gagagttgtttatca

SEQ ID NO: 27201 - DNA, 15 bp, Homo sapiens
agagagttgtttatc

SEQ ID NO: 27202 - DNA, 15 bp, Homo sapiens
aagagagttgtttat

SEQ ID NO: 27203 - DNA, 15 bp, Homo sapiens
aaagagagttgttta

SEQ ID NO: 27204 - DNA, 15 bp, Homo sapiens
caaagagagttgttt

SEQ ID NO: 27205 - DNA, 15 bp, Homo sapiens
ccaaagagagttgtt

SEQ ID NO: 27206 - DNA, 15 bp, Homo sapiens
gccaaagagagttgt

SEQ ID NO: 27207 - DNA, 15 bp, Homo sapiens
ggccaaagagagttg

SEQ ID NO: 27208 - DNA, 15 bp, Homo sapiens
aggccaaagagagtt

SEQ ID NO: 27209 - DNA, 15 bp, Homo sapiens
gaggccaaagagagt

SEQ ID NO: 27210 - DNA, 15 bp, Homo sapiens
tgaggccaaagagag

SEQ ID NO: 27211 - DNA, 15 bp, Homo sapiens
atgaggccaaagaga

SEQ ID NO: 27212 - DNA, 15 bp, Homo sapiens
aatgaggccaaagag

SEQ ID NO: 27213 - DNA, 15 bp, Homo sapiens
gaatgaggccaaaga

SEQ ID NO: 27214 - DNA, 15 bp, Homo sapiens
ggaatgaggccaaag

SEQ ID NO: 27215 - DNA, 15 bp, Homo sapiens
tggaatgaggccaaa

SEQ ID NO: 27216 - DNA, 15 bp, Homo sapiens
ctggaatgaggccaa

SEQ ID NO: 27217 - DNA, 15 bp, Homo sapiens
actggaatgaggcca

SEQ ID NO: 27218 - DNA, 15 bp, Homo sapiens
gactggaatgaggcc

SEQ ID NO: 27219 - DNA, 15 bp, Homo sapiens
tgactggaatgaggc

SEQ ID NO: 27220 - DNA, 15 bp, Homo sapiens
atgactggaatgagg

SEQ ID NO: 27221 - DNA, 15 bp, Homo sapiens
gatgactggaatgag

SEQ ID NO: 27222 - DNA, 15 bp, Homo sapiens
cgatgactggaatga

SEQ ID NO: 27223 - DNA, 15 bp, Homo sapiens
tcgatgactggaatg

SEQ ID NO: 27224 - DNA, 15 bp, Homo sapiens
atcgatgactggaat

SEQ ID NO: 27225 - DNA, 15 bp, Homo sapiens
tatcgatgactggaa

SEQ ID NO: 27226 - DNA, 15 bp, Homo sapiens
ttatcgatgactgga

SEQ ID NO: 27227 - DNA, 15 bp, Homo sapiens
gttatcgatgactgg

SEQ ID NO: 27228 - DNA, 15 bp, Homo sapiens
agttatcgatgactg

SEQ ID NO: 27229 - DNA, 15 bp, Homo sapiens
cagttatcgatgact

SEQ ID NO: 27230 - DNA, 15 bp, Homo sapiens
acagttatcgatgac

SEQ ID NO: 27231 - DNA, 15 bp, Homo sapiens
cacagttatcgatga

SEQ ID NO: 27232 - DNA, 15 bp, Homo sapiens
ccacagttatcgatg

SEQ ID NO: 27233 - DNA, 15 bp, Homo sapiens
cccacagttatcgat

SEQ ID NO: 27234 - DNA, 15 bp, Homo sapiens
tcccacagttatcga

SEQ ID NO: 27235 - DNA, 15 bp, Homo sapiens
gtcccacagttatcg

SEQ ID NO: 27236 - DNA, 15 bp, Homo sapiens
tgtcccacagttatc

SEQ ID NO: 27237 - DNA, 15 bp, Homo sapiens
ttgtcccacagttat

SEQ ID NO: 27238 - DNA, 15 bp, Homo sapiens
tttgtcccacagtta

SEQ ID NO: 27239 - DNA, 15 bp, Homo sapiens
ctttgtcccacagtt

SEQ ID NO: 27240 - DNA, 15 bp, Homo sapiens
tctttgtcccacagt

SEQ ID NO: 27241 - DNA, 15 bp, Homo sapiens
gtctttgtcccacag

SEQ ID NO: 27242 - DNA, 15 bp, Homo sapiens
agtctttgtcccaca

SEQ ID NO: 27243 - DNA, 15 bp, Homo sapiens
aagtctttgtcccac

SEQ ID NO: 27244 - DNA, 15 bp, Homo sapiens
caagtctttgtccca

SEQ ID NO: 27245 - DNA, 15 bp, Homo sapiens
tcaagtctttgtccc

SEQ ID NO: 27246 - DNA, 15 bp, Homo sapiens
ttcaagtctttgtcc

SEQ ID NO: 27247 - DNA, 15 bp, Homo sapiens
cttcaagtctttgtc

SEQ ID NO: 27248 - DNA, 15 bp, Homo sapiens
gcttcaagtctttgt

SEQ ID NO: 27249 - DNA, 15 bp, Homo sapiens
agcttcaagtctttg

SEQ ID NO: 27250 - DNA, 15 bp, Homo sapiens
aagcttcaagtcttt

SEQ ID NO: 27251 - DNA, 15 bp, Homo sapiens
caagcttcaagtctt

SEQ ID NO: 27252 - DNA, 15 bp, Homo sapiens
ccaagcttcaagtct

SEQ ID NO: 27253 - DNA, 15 bp, Homo sapiens
tccaagcttcaagtc

SEQ ID NO: 27254 - DNA, 15 bp, Homo sapiens
atccaagcttcaagt

SEQ ID NO: 27255 - DNA, 15 bp, Homo sapiens
gatccaagcttcaag

SEQ ID NO: 27256 - DNA, 15 bp, Homo sapiens
tgatccaagcttcaa

SEQ ID NO: 27257 - DNA, 15 bp, Homo sapiens
ctgatccaagcttca

SEQ ID NO: 27258 - DNA, 15 bp, Homo sapiens
actgatccaagcttc

SEQ ID NO: 27259 - DNA, 15 bp, Homo sapiens
gactgatccaagctt

SEQ ID NO: 27260 - DNA, 15 bp, Homo sapiens
ggactgatccaagct

SEQ ID NO: 27261 - DNA, 15 bp, Homo sapiens
tggactgatccaagc

SEQ ID NO: 27262 - DNA, 15 bp, Homo sapiens
ctggactgatccaag

SEQ ID NO: 27263 - DNA, 15 bp, Homo sapiens
actggactgatccaa

SEQ ID NO: 27264 - DNA, 15 bp, Homo sapiens
cactggactgatcca

SEQ ID NO: 27265 - DNA, 15 bp, Homo sapiens
ccactggactgatcc

SEQ ID NO: 27266 - DNA, 15 bp, Homo sapiens
tccactggactgatc

SEQ ID NO: 27267 - DNA, 15 bp, Homo sapiens
ctccactggactgat

SEQ ID NO: 27268 - DNA, 15 bp, Homo sapiens
tctccactggactga

SEQ ID NO: 27269 - DNA, 15 bp, Homo sapiens
gtctccactggactg

SEQ ID NO: 27270 - DNA, 15 bp, Homo sapiens
agtctccactggact

SEQ ID NO: 27271 - DNA, 15 bp, Homo sapiens
tagtctccactggac

SEQ ID NO: 27272 - DNA, 15 bp, Homo sapiens
ttagtctccactgga

SEQ ID NO: 27273 - DNA, 15 bp, Homo sapiens
gttagtctccactgg

SEQ ID NO: 27274 - DNA, 15 bp, Homo sapiens
ggttagtctccactg

SEQ ID NO: 27275 - DNA, 15 bp, Homo sapiens
tggttagtctccact

SEQ ID NO: 27276 - DNA, 15 bp, Homo sapiens
gtggttagtctccac

SEQ ID NO: 27277 - DNA, 15 bp, Homo sapiens
ggtggttagtctcca

SEQ ID NO: 27278 - DNA, 15 bp, Homo sapiens
gggtggttagtctcc

SEQ ID NO: 27279 - DNA, 15 bp, Homo sapiens
ggggtggttagtctc

SEQ ID NO: 27280 - DNA, 15 bp, Homo sapiens
aggggtggttagtct

SEQ ID NO: 27281 - DNA, 15 bp, Homo sapiens
caggggtggttagtc

SEQ ID NO: 27282 - DNA, 15 bp, Homo sapiens
acaggggtggttagt

SEQ ID NO: 27283 - DNA, 15 bp, Homo sapiens
tacaggggtggttag

SEQ ID NO: 27284 - DNA, 15 bp, Homo sapiens
ctacaggggtggtta

SEQ ID NO: 27285 - DNA, 15 bp, Homo sapiens
tctacaggggtggtt

SEQ ID NO: 27286 - DNA, 15 bp, Homo sapiens
gtctacaggggtggt

SEQ ID NO: 27287 - DNA, 15 bp, Homo sapiens
ggtctacaggggtgg

SEQ ID NO: 27288 - DNA, 15 bp, Homo sapiens
gggtctacaggggtg

SEQ ID NO: 27289 - DNA, 15 bp, Homo sapiens
agggtctacaggggt

SEQ ID NO: 27290 - DNA, 15 bp, Homo sapiens
aagggtctacagggg

SEQ ID NO: 27291 - DNA, 15 bp, Homo sapiens
aaagggtctacaggg

SEQ ID NO: 27292 - DNA, 15 bp, Homo sapiens
aaaagggtctacagg

SEQ ID NO: 27293 - DNA, 15 bp, Homo sapiens
aaaaagggtctacag

SEQ ID NO: 27294 - DNA, 15 bp, Homo sapiens
aaaaaagggtctaca

SEQ ID NO: 27295 - DNA, 15 bp, Homo sapiens
gaaaaaagggtctac

SEQ ID NO: 27296 - DNA, 15 bp, Homo sapiens
ggaaaaaagggtcta

SEQ ID NO: 27297 - DNA, 15 bp, Homo sapiens
aggaaaaaagggtct

SEQ ID NO: 27298 - DNA, 15 bp, Homo sapiens
gaggaaaaaagggtc

SEQ ID NO: 27299 - DNA, 15 bp, Homo sapiens
tgaggaaaaaagggt

SEQ ID NO: 27300 - DNA, 15 bp, Homo sapiens
ttgaggaaaaaaggg

SEQ ID NO: 27301 - DNA, 15 bp, Homo sapiens
gttgaggaaaaaagg

SEQ ID NO: 27302 - DNA, 15 bp, Homo sapiens
agttgaggaaaaaag

SEQ ID NO: 27303 - DNA, 15 bp, Homo sapiens
tagttgaggaaaaaa

SEQ ID NO: 27304 - DNA, 15 bp, Homo sapiens
atagttgaggaaaaa

SEQ ID NO: 27305 - DNA, 15 bp, Homo sapiens
tatagttgaggaaaa

SEQ ID NO: 27306 - DNA, 15 bp, Homo sapiens
gaagaatactggctc

SEQ ID NO: 27307 - DNA, 15 bp, Homo sapiens
agaagaatactggct

SEQ ID NO: 27308 - DNA, 15 bp, Homo sapiens
tagaagaatactggc

SEQ ID NO: 27309 - DNA, 15 bp, Homo sapiens
ttagaagaatactgg

SEQ ID NO: 27310 - DNA, 15 bp, Homo sapiens
cttagaagaatactg

SEQ ID NO: 27311 - DNA, 15 bp, Homo sapiens
tcttagaagaatact

SEQ ID NO: 27312 - DNA, 15 bp, Homo sapiens
gtcttagaagaatac

SEQ ID NO: 27313 - DNA, 15 bp, Homo sapiens
tgtcttagaagaata

SEQ ID NO: 27314 - DNA, 15 bp, Homo sapiens
ctgtcttagaagaat

SEQ ID NO: 27315 - DNA, 15 bp, Homo sapiens
actgtcttagaagaa

SEQ ID NO: 27316 - DNA, 15 bp, Homo sapiens
cactgtcttagaaga

SEQ ID NO: 27317 - DNA, 15 bp, Homo sapiens
tcactgtcttagaag

SEQ ID NO: 27318 - DNA, 15 bp, Homo sapiens
gtgttttaaggcagt

SEQ ID NO: 27319 - DNA, 15 bp, Homo sapiens
ggtgttttaaggcag

SEQ ID NO: 27320 - DNA, 15 bp, Homo sapiens
tggtgttttaaggca

SEQ ID NO: 27321 - DNA, 15 bp, Homo sapiens
gtggtgttttaaggc

SEQ ID NO: 27322 - DNA, 15 bp, Homo sapiens
agtggtgttttaagg

SEQ ID NO: 27323 - DNA, 15 bp, Homo sapiens
tagtggtgttttaag

SEQ ID NO: 27324 - DNA, 15 bp, Homo sapiens
ttagtggtgttttaa

SEQ ID NO: 27325 - DNA, 15 bp, Homo sapiens
attagtggtgtttta

SEQ ID NO: 27326 - DNA, 15 bp, Homo sapiens
aattagtggtgtttt

SEQ ID NO: 27327 - DNA, 15 bp, Homo sapiens
aaattagtggtgttt

SEQ ID NO: 27328 - DNA, 15 bp, Homo sapiens
gaaattagtggtgtt

SEQ ID NO: 27329 - DNA, 15 bp, Homo sapiens
ggaaattagtggtgt

SEQ ID NO: 27330 - DNA, 15 bp, Homo sapiens
aggaaattagtggtg

SEQ ID NO: 27331 - DNA, 15 bp, Homo sapiens
aaggaaattagtggt

SEQ ID NO: 27332 - DNA, 15 bp, Homo sapiens
aaaggaaattagtgg

SEQ ID NO: 27333 - DNA, 15 bp, Homo sapiens
gaaagaaaagaaaag

SEQ ID NO: 27334 - DNA, 15 bp, Homo sapiens
agaaagaaaagaaaa

SEQ ID NO: 27335 - DNA, 15 bp, Homo sapiens
aagaaagaaaagaaa

SEQ ID NO: 27336 - DNA, 15 bp, Homo sapiens
aaagaaagaaaagaa

SEQ ID NO: 27337 - DNA, 15 bp, Homo sapiens
aaaagaaagaaaaga

SEQ ID NO: 27338 - DNA, 15 bp, Homo sapiens
aaaaagaaagaaaag

SEQ ID NO: 27339 - DNA, 15 bp, Homo sapiens
taaaaaaaaaaaaga

SEQ ID NO: 27340 - DNA, 15 bp, Homo sapiens
gtcttaaaaaaaaaa

SEQ ID NO: 27341 - DNA, 15 bp, Homo sapiens
tgtcttaaaaaaaaa

SEQ ID NO: 27342 - DNA, 15 bp, Homo sapiens
ctgtcttaaaaaaaa

SEQ ID NO: 27343 - DNA, 15 bp, Homo sapiens
tctgtcttaaaaaaa

SEQ ID NO: 27344 - DNA, 15 bp, Homo sapiens
ctctgtcttaaaaaa

SEQ ID NO: 27345 - DNA, 15 bp, Homo sapiens
gctctgtcttaaaaa

SEQ ID NO: 27346 - DNA, 15 bp, Homo sapiens
aagattgcgccactg

SEQ ID NO: 27347 - DNA, 15 bp, Homo sapiens
caagattgcgccact

SEQ ID NO: 27348 - DNA, 15 bp, Homo sapiens
ccaagattgcgccac

SEQ ID NO: 27349 - DNA, 15 bp, Homo sapiens
gccaagattgcgcca

SEQ ID NO: 27350 - DNA, 15 bp, Homo sapiens
agccaagattgcgcc

SEQ ID NO: 27351 - DNA, 15 bp, Homo sapiens
gagccaagattgcgc

SEQ ID NO: 27352 - DNA, 15 bp, Homo sapiens
tgagccaagattgcg

SEQ ID NO: 27353 - DNA, 15 bp, Homo sapiens
gtgagccaagattgc

SEQ ID NO: 27354 - DNA, 15 bp, Homo sapiens
aagaatcacttgaac

SEQ ID NO: 27355 - DNA, 15 bp, Homo sapiens
caagaatcacttgaa

SEQ ID NO: 27356 - DNA, 15 bp, Homo sapiens
tcaagaatcacttga

SEQ ID NO: 27357 - DNA, 15 bp, Homo sapiens
atcaagaatcacttg

SEQ ID NO: 27358 - DNA, 15 bp, Homo sapiens
aatcaagaatcactt

SEQ ID NO: 27359 - DNA, 15 bp, Homo sapiens
gaatcaagaatcact

SEQ ID NO: 27360 - DNA, 15 bp, Homo sapiens
agaatcaagaatcac

SEQ ID NO: 27361 - DNA, 15 bp, Homo sapiens
cagaatcaagaatca

SEQ ID NO: 27362 - DNA, 15 bp, Homo sapiens
acagaatcaagaatc

SEQ ID NO: 27363 - DNA, 15 bp, Homo sapiens
tacagaatcaagaat

SEQ ID NO: 27364 - DNA, 15 bp, Homo sapiens
ctacagaatcaagaa

SEQ ID NO: 27365 - DNA, 15 bp, Homo sapiens
tctacagaatcaaga

SEQ ID NO: 27366 - DNA, 15 bp, Homo sapiens
gtctacagaatcaag

SEQ ID NO: 27367 - DNA, 15 bp, Homo sapiens
tgtctacagaatcaa

SEQ ID NO: 27368 - DNA, 15 bp, Homo sapiens
gtgtctacagaatca

SEQ ID NO: 27369 - DNA, 15 bp, Homo sapiens
agtgtctacagaatc

SEQ ID NO: 27370 - DNA, 15 bp, Homo sapiens
tagtgtctacagaat

SEQ ID NO: 27371 - DNA, 15 bp, Homo sapiens
gtagtgtctacagaa

SEQ ID NO: 27372 - DNA, 15 bp, Homo sapiens
ggtagtgtctacaga

SEQ ID NO: 27373 - DNA, 15 bp, Homo sapiens
tggtagtgtctacag

SEQ ID NO: 27374 - DNA, 15 bp, Homo sapiens
gtggtagtgtctaca

SEQ ID NO: 27375 - DNA, 15 bp, Homo sapiens
agtggtagtgtctac

SEQ ID NO: 27376 - DNA, 15 bp, Homo sapiens
gagtggtagtgtcta

SEQ ID NO: 27377 - DNA, 15 bp, Homo sapiens
tgagtggtagtgtct

SEQ ID NO: 27378 - DNA, 15 bp, Homo sapiens
ctgagtggtagtgtc

SEQ ID NO: 27379 - DNA, 15 bp, Homo sapiens
cctgagtggtagtgt

SEQ ID NO: 27380 - DNA, 15 bp, Homo sapiens
gcctgagtggtagtg

SEQ ID NO: 27381 - DNA, 15 bp, Homo sapiens
ggcctgagtggtagt

SEQ ID NO: 27382 - DNA, 15 bp, Homo sapiens
aggcctgagtggtag

SEQ ID NO: 27383 - DNA, 15 bp, Homo sapiens
taggcctgagtggta

SEQ ID NO: 27384 - DNA, 15 bp, Homo sapiens
ataggcctgagtggt

SEQ ID NO: 27385 - DNA, 15 bp, Homo sapiens
tataggcctgagtgg

SEQ ID NO: 27386 - DNA, 15 bp, Homo sapiens
atataggcctgagtg

SEQ ID NO: 27387 - DNA, 15 bp, Homo sapiens
aatataggcctgagt

SEQ ID NO: 27388 - DNA, 15 bp, Homo sapiens
caatataggcctgag

SEQ ID NO: 27389 - DNA, 15 bp, Homo sapiens
acaatataggcctga

SEQ ID NO: 27390 - DNA, 15 bp, Homo sapiens
tacaatataggcctg

SEQ ID NO: 27391 - DNA, 15 bp, Homo sapiens
ttacaatataggcct

SEQ ID NO: 27392 - DNA, 15 bp, Homo sapiens
attacaatataggcc

SEQ ID NO: 27393 - DNA, 15 bp, Homo sapiens
gattacaatataggc

SEQ ID NO: 27394 - DNA, 15 bp, Homo sapiens
tgattacaatatagg

SEQ ID NO: 27395 - DNA, 15 bp, Homo sapiens
ctgattacaatatag

SEQ ID NO: 27396 - DNA, 15 bp, Homo sapiens
actgattacaatata

SEQ ID NO: 27397 - DNA, 15 bp, Homo sapiens
cactgattacaatat

SEQ ID NO: 27398 - DNA, 15 bp, Homo sapiens
gcactgattacaata

SEQ ID NO: 27399 - DNA, 15 bp, Homo sapiens
agcactgattacaat

SEQ ID NO: 27400 - DNA, 15 bp, Homo sapiens
cagcactgattacaa

SEQ ID NO: 27401 - DNA, 15 bp, Homo sapiens
ccagcactgattaca

SEQ ID NO: 27402 - DNA, 15 bp, Homo sapiens
cccagcactgattac

SEQ ID NO: 27403 - DNA, 15 bp, Homo sapiens
gcccagcactgatta

SEQ ID NO: 27404 - DNA, 15 bp, Homo sapiens
ggcccagcactgatt

SEQ ID NO: 27405 - DNA, 15 bp, Homo sapiens
tggcccagcactgat

SEQ ID NO: 27406 - DNA, 15 bp, Homo sapiens
gtggcccagcactga

SEQ ID NO: 27407 - DNA, 15 bp, Homo sapiens
agtggcccagcactg

SEQ ID NO: 27408 - DNA, 15 bp, Homo sapiens
cagtggcccagcact

SEQ ID NO: 27409 - DNA, 15 bp, Homo sapiens
ccagtggcccagcac

SEQ ID NO: 27410 - DNA, 15 bp, Homo sapiens
cccagtggcccagca

SEQ ID NO: 27411 - DNA, 15 bp, Homo sapiens
gcccagtggcccagc

SEQ ID NO: 27412 - DNA, 15 bp, Homo sapiens
agcccagtggcccag

SEQ ID NO: 27413 - DNA, 15 bp, Homo sapiens
gagcccagtggccca

SEQ ID NO: 27414 - DNA, 15 bp, Homo sapiens
ggagcccagtggccc

SEQ ID NO: 27415 - DNA, 15 bp, Homo sapiens
aggagcccagtggcc

SEQ ID NO: 27416 - DNA, 15 bp, Homo sapiens
caggagcccagtggc

SEQ ID NO: 27417 - DNA, 15 bp, Homo sapiens
gcaggagcccagtgg

SEQ ID NO: 27418 - DNA, 15 bp, Homo sapiens
agcaggagcccagtg

SEQ ID NO: 27419 - DNA, 15 bp, Homo sapiens
aagcaggagcccagt

SEQ ID NO: 27420 - DNA, 15 bp, Homo sapiens
gaagcaggagcccag

SEQ ID NO: 27421 - DNA, 15 bp, Homo sapiens
agaagcaggagccca

SEQ ID NO: 27422 - DNA, 15 bp, Homo sapiens
cagaagcaggagccc

SEQ ID NO: 27423 - DNA, 15 bp, Homo sapiens
acagaagcaggagcc

SEQ ID NO: 27424 - DNA, 15 bp, Homo sapiens
cacagaagcaggagc

SEQ ID NO: 27425 - DNA, 15 bp, Homo sapiens
tcacagaagcaggag

SEQ ID NO: 27426 - DNA, 15 bp, Homo sapiens
atcacagaagcagga

SEQ ID NO: 27427 - DNA, 15 bp, Homo sapiens
gatcacagaagcagg

SEQ ID NO: 27428 - DNA, 15 bp, Homo sapiens
ggatcacagaagcag

SEQ ID NO: 27429 - DNA, 15 bp, Homo sapiens
tggatcacagaagca

SEQ ID NO: 27430 - DNA, 15 bp, Homo sapiens
ctggatcacagaagc

SEQ ID NO: 27431 - DNA, 15 bp, Homo sapiens
actggatcacagaag

SEQ ID NO: 27432 - DNA, 15 bp, Homo sapiens
aactggatcacagaa

SEQ ID NO: 27433 - DNA, 15 bp, Homo sapiens
caactggatcacaga

SEQ ID NO: 27434 - DNA, 15 bp, Homo sapiens
ccaactggatcacag

SEQ ID NO: 27435 - DNA, 15 bp, Homo sapiens
cccaactggatcaca

SEQ ID NO: 27436 - DNA, 15 bp, Homo sapiens
tcccaactggatcac

SEQ ID NO: 27437 - DNA, 15 bp, Homo sapiens
ttcccaactggatca

SEQ ID NO: 27438 - DNA, 15 bp, Homo sapiens
cttcccaactggatc

SEQ ID NO: 27439 - DNA, 15 bp, Homo sapiens
acttcccaactggat

SEQ ID NO: 27440 - DNA, 15 bp, Homo sapiens
aacttcccaactgga

SEQ ID NO: 27441 - DNA, 15 bp, Homo sapiens
aaacttcccaactgg

SEQ ID NO: 27442 - DNA, 15 bp, Homo sapiens
taaacttcccaactg

SEQ ID NO: 27443 - DNA, 15 bp, Homo sapiens
ataaacttcccaact

SEQ ID NO: 27444 - DNA, 15 bp, Homo sapiens
gataaacttcccaac

SEQ ID NO: 27445 - DNA, 15 bp, Homo sapiens
agataaacttcccaa

SEQ ID NO: 27446 - DNA, 15 bp, Homo sapiens
aagataaacttccca

SEQ ID NO: 27447 - DNA, 15 bp, Homo sapiens
caagataaacttccc

SEQ ID NO: 27448 - DNA, 15 bp, Homo sapiens
acaagataaacttcc

SEQ ID NO: 27449 - DNA, 15 bp, Homo sapiens
aacaagataaacttc

SEQ ID NO: 27450 - DNA, 15 bp, Homo sapiens
gaacaagataaactt

SEQ ID NO: 27451 - DNA, 15 bp, Homo sapiens
agaacaagataaact

SEQ ID NO: 27452 - DNA, 15 bp, Homo sapiens
aagaacaagataaac

SEQ ID NO: 27453 - DNA, 15 bp, Homo sapiens
gaagaacaagataaa

SEQ ID NO: 27454 - DNA, 15 bp, Homo sapiens
ggaagaacaagataa

SEQ ID NO: 27455 - DNA, 15 bp, Homo sapiens
gggaagaacaagata

SEQ ID NO: 27456 - DNA, 15 bp, Homo sapiens
agggaagaacaagat

SEQ ID NO: 27457 - DNA, 15 bp, Homo sapiens
aagggaagaacaaga

SEQ ID NO: 27458 - DNA, 15 bp, Homo sapiens
gaagggaagaacaag

SEQ ID NO: 27459 - DNA, 15 bp, Homo sapiens
tgaagggaagaacaa

SEQ ID NO: 27460 - DNA, 15 bp, Homo sapiens
ctgaagggaagaaca

SEQ ID NO: 27461 - DNA, 15 bp, Homo sapiens
gctgaagggaagaac

SEQ ID NO: 27462 - DNA, 15 bp, Homo sapiens
agctgaagggaagaa

SEQ ID NO: 27463 - DNA, 15 bp, Homo sapiens
aagctgaagggaaga

SEQ ID NO: 27464 - DNA, 15 bp, Homo sapiens
caagctgaagggaag

SEQ ID NO: 27465 - DNA, 15 bp, Homo sapiens
gcaagctgaagggaa

SEQ ID NO: 27466 - DNA, 15 bp, Homo sapiens
tgcaagctgaaggga

SEQ ID NO: 27467 - DNA, 15 bp, Homo sapiens
atgcaagctgaaggg

SEQ ID NO: 27468 - DNA, 15 bp, Homo sapiens
gatgcaagctgaagg

SEQ ID NO: 27469 - DNA, 15 bp, Homo sapiens
agatgcaagctgaag

SEQ ID NO: 27470 - DNA, 15 bp, Homo sapiens
cagatgcaagctgaa

SEQ ID NO: 27471 - DNA, 15 bp, Homo sapiens
gcagatgcaagctga

SEQ ID NO: 27472 - DNA, 15 bp, Homo sapiens
agcagatgcaagctg

SEQ ID NO: 27473 - DNA, 15 bp, Homo sapiens
tagcagatgcaagct

SEQ ID NO: 27474 - DNA, 15 bp, Homo sapiens
ttagcagatgcaagc

SEQ ID NO: 27475 - DNA, 15 bp, Homo sapiens
tttagcagatgcaag

SEQ ID NO: 27476 - DNA, 15 bp, Homo sapiens
atttagcagatgcaa

SEQ ID NO: 27477 - DNA, 15 bp, Homo sapiens
aatttagcagatgca

SEQ ID NO: 27478 - DNA, 15 bp, Homo sapiens
gaatttagcagatgc

SEQ ID NO: 27479 - DNA, 15 bp, Homo sapiens
cgaatttagcagatg

SEQ ID NO: 27480 - DNA, 15 bp, Homo sapiens
gcgaatttagcagat

SEQ ID NO: 27481 - DNA, 15 bp, Homo sapiens
agcgaatttagcaga

SEQ ID NO: 27482 - DNA, 15 bp, Homo sapiens
cagcgaatttagcag

SEQ ID NO: 27483 - DNA, 15 bp, Homo sapiens
ccagcgaatttagca

SEQ ID NO: 27484 - DNA, 15 bp, Homo sapiens
tccagcgaatttagc

SEQ ID NO: 27485 - DNA, 15 bp, Homo sapiens
gtccagcgaatttag

SEQ ID NO: 27486 - DNA, 15 bp, Homo sapiens
agtccagcgaattta

SEQ ID NO: 27487 - DNA, 15 bp, Homo sapiens
tagtccagcgaattt

SEQ ID NO: 27488 - DNA, 15 bp, Homo sapiens
atagtccagcgaatt

SEQ ID NO: 27489 - DNA, 15 bp, Homo sapiens
tatagtccagcgaat

SEQ ID NO: 27490 - DNA, 15 bp, Homo sapiens
gtatagtccagcgaa

SEQ ID NO: 27491 - DNA, 15 bp, Homo sapiens
tgtatagtccagcga

SEQ ID NO: 27492 - DNA, 15 bp, Homo sapiens
gtgtatagtccagcg

SEQ ID NO: 27493 - DNA, 15 bp, Homo sapiens
tgtgtatagtccagc

SEQ ID NO: 27494 - DNA, 15 bp, Homo sapiens
ctgtgtatagtccag

SEQ ID NO: 27495 - DNA, 15 bp, Homo sapiens
cctgtgtatagtcca

SEQ ID NO: 27496 - DNA, 15 bp, Homo sapiens
acctgtgtatagtcc

SEQ ID NO: 27497 - DNA, 15 bp, Homo sapiens
cacctgtgtatagtc

SEQ ID NO: 27498 - DNA, 15 bp, Homo sapiens
tcacctgtgtatagt

SEQ ID NO: 27499 - DNA, 15 bp, Homo sapiens
atcacctgtgtatag

SEQ ID NO: 27500 - DNA, 15 bp, Homo sapiens
aatcacctgtgtata

SEQ ID NO: 27501 - DNA, 15 bp, Homo sapiens
aaatcacctgtgtat

SEQ ID NO: 27502 - DNA, 15 bp, Homo sapiens
caaatcacctgtgta

SEQ ID NO: 27503 - DNA, 15 bp, Homo sapiens
acaaatcacctgtgt

SEQ ID NO: 27504 - DNA, 15 bp, Homo sapiens
tacaaatcacctgtg

SEQ ID NO: 27505 - DNA, 15 bp, Homo sapiens
ctacaaatcacctgt

SEQ ID NO: 27506 - DNA, 15 bp, Homo sapiens
tctacaaatcacctg

SEQ ID NO: 27507 - DNA, 15 bp, Homo sapiens
atctacaaatcacct

SEQ ID NO: 27508 - DNA, 15 bp, Homo sapiens
tatctacaaatcacc

SEQ ID NO: 27509 - DNA, 15 bp, Homo sapiens
atatctacaaatcac

SEQ ID NO: 27510 - DNA, 15 bp, Homo sapiens
catatctacaaatca

SEQ ID NO: 27511 - DNA, 15 bp, Homo sapiens
ccatatctacaaatc

SEQ ID NO: 27512 - DNA, 15 bp, Homo sapiens
cccatatctacaaat

SEQ ID NO: 27513 - DNA, 15 bp, Homo sapiens
ccccatatctacaaa

SEQ ID NO: 27514 - DNA, 15 bp, Homo sapiens
tccccatatctacaa

SEQ ID NO: 27515 - DNA, 15 bp, Homo sapiens
atccccatatctaca

SEQ ID NO: 27516 - DNA, 15 bp, Homo sapiens
gatccccatatctac

SEQ ID NO: 27517 - DNA, 15 bp, Homo sapiens
agatccccatatcta

SEQ ID NO: 27518 - DNA, 15 bp, Homo sapiens
gagatccccatatct

SEQ ID NO: 27519 - DNA, 15 bp, Homo sapiens
agagatccccatatc

SEQ ID NO: 27520 - DNA, 15 bp, Homo sapiens
tagagatccccatat

SEQ ID NO: 27521 - DNA, 15 bp, Homo sapiens
gtagagatccccata

SEQ ID NO: 27522 - DNA, 15 bp, Homo sapiens
agtagagatccccat

SEQ ID NO: 27523 - DNA, 15 bp, Homo sapiens
gagtagagatcccca

SEQ ID NO: 27524 - DNA, 15 bp, Homo sapiens
tgagtagagatcccc

SEQ ID NO: 27525 - DNA, 15 bp, Homo sapiens
ttgagtagagatccc

SEQ ID NO: 27526 - DNA, 15 bp, Homo sapiens
tttgagtagagatcc

SEQ ID NO: 27527 - DNA, 15 bp, Homo sapiens
atttgagtagagatc

SEQ ID NO: 27528 - DNA, 15 bp, Homo sapiens
tatttgagtagagat

SEQ ID NO: 27529 - DNA, 15 bp, Homo sapiens
gtatttgagtagaga

SEQ ID NO: 27530 - DNA, 15 bp, Homo sapiens
agtatttgagtagag

SEQ ID NO: 27531 - DNA, 15 bp, Homo sapiens
gagtatttgagtaga

SEQ ID NO: 27532 - DNA, 15 bp, Homo sapiens
agagtatttgagtag

SEQ ID NO: 27533 - DNA, 15 bp, Homo sapiens
gagagtatttgagta

SEQ ID NO: 27534 - DNA, 15 bp, Homo sapiens
tgagagtatttgagt

SEQ ID NO: 27535 - DNA, 15 bp, Homo sapiens
atgagagtatttgag

SEQ ID NO: 27536 - DNA, 15 bp, Homo sapiens
catgagagtatttga

SEQ ID NO: 27537 - DNA, 15 bp, Homo sapiens
tcatgagagtatttg

SEQ ID NO: 27538 - DNA, 15 bp, Homo sapiens
atcatgagagtattt

SEQ ID NO: 27539 - DNA, 15 bp, Homo sapiens
aatcatgagagtatt

SEQ ID NO: 27540 - DNA, 15 bp, Homo sapiens
aaatcatgagagtat

SEQ ID NO: 27541 - DNA, 15 bp, Homo sapiens
gaaatcatgagagta

SEQ ID NO: 27542 - DNA, 15 bp, Homo sapiens
ggaaatcatgagagt

SEQ ID NO: 27543 - DNA, 15 bp, Homo sapiens
aggaaatcatgagag

SEQ ID NO: 27544 - DNA, 15 bp, Homo sapiens
aaggaaatcatgaga

SEQ ID NO: 27545 - DNA, 15 bp, Homo sapiens
caaggaaatcatgag

SEQ ID NO: 27546 - DNA, 15 bp, Homo sapiens
ccaaggaaatcatga

SEQ ID NO: 27547 - DNA, 15 bp, Homo sapiens
gccaaggaaatcatg

SEQ ID NO: 27548 - DNA, 15 bp, Homo sapiens
agccaaggaaatcat

SEQ ID NO: 27549 - DNA, 15 bp, Homo sapiens
tagccaaggaaatca

SEQ ID NO: 27550 - DNA, 15 bp, Homo sapiens
ctagccaaggaaatc

SEQ ID NO: 27551 - DNA, 15 bp, Homo sapiens
tctagccaaggaaat

SEQ ID NO: 27552 - DNA, 15 bp, Homo sapiens
ctctagccaaggaaa

SEQ ID NO: 27553 - DNA, 15 bp, Homo sapiens
gctctagccaaggaa

SEQ ID NO: 27554 - DNA, 15 bp, Homo sapiens
tgctctagccaagga

SEQ ID NO: 27555 - DNA, 15 bp, Homo sapiens
atgctctagccaagg

SEQ ID NO: 27556 - DNA, 15 bp, Homo sapiens
gatgctctagccaag

SEQ ID NO: 27557 - DNA, 15 bp, Homo sapiens
tgatgctctagccaa

SEQ ID NO: 27558 - DNA, 15 bp, Homo sapiens
atgatgctctagcca

SEQ ID NO: 27559 - DNA, 15 bp, Homo sapiens
aatgatgctctagcc

SEQ ID NO: 27560 - DNA, 15 bp, Homo sapiens
aaatgatgctctagc

SEQ ID NO: 27561 - DNA, 15 bp, Homo sapiens
aaaatgatgctctag

SEQ ID NO: 27562 - DNA, 15 bp, Homo sapiens
taaaatgatgctcta

SEQ ID NO: 27563 - DNA, 15 bp, Homo sapiens
ataaaatgatgctct

SEQ ID NO: 27564 - DNA, 15 bp, Homo sapiens
aataaaatgatgctc

SEQ ID NO: 27565 - DNA, 15 bp, Homo sapiens
aaataaaatgatgct

SEQ ID NO: 27566 - DNA, 15 bp, Homo sapiens
gaaataaaatgatgc

SEQ ID NO: 27567 - DNA, 15 bp, Homo sapiens
ggaaataaaatgatg

SEQ ID NO: 27568 - DNA, 15 bp, Homo sapiens
tggaaataaaatgat

SEQ ID NO: 27569 - DNA, 15 bp, Homo sapiens
gtggaaataaaatga

SEQ ID NO: 27570 - DNA, 15 bp, Homo sapiens
agtggaaataaaatg

SEQ ID NO: 27571 - DNA, 15 bp, Homo sapiens
aagtggaaataaaat

SEQ ID NO: 27572 - DNA, 15 bp, Homo sapiens
taagtggaaataaaa

SEQ ID NO: 27573 - DNA, 15 bp, Homo sapiens
ataagtggaaataaa

SEQ ID NO: 27574 - DNA, 15 bp, Homo sapiens
aataagtggaaataa

SEQ ID NO: 27575 - DNA, 15 bp, Homo sapiens
caataagtggaaata

SEQ ID NO: 27576 - DNA, 15 bp, Homo sapiens
ccaataagtggaaat

SEQ ID NO: 27577 - DNA, 15 bp, Homo sapiens
tccaataagtggaaa

SEQ ID NO: 27578 - DNA, 15 bp, Homo sapiens
ttccaataagtggaa

SEQ ID NO: 27579 - DNA, 15 bp, Homo sapiens
cttccaataagtgga

SEQ ID NO: 27580 - DNA, 15 bp, Homo sapiens
tcttccaataagtgg

SEQ ID NO: 27581 - DNA, 15 bp, Homo sapiens
ctcttccaataagtg

SEQ ID NO: 27582 - DNA, 15 bp, Homo sapiens
tctcttccaataagt

SEQ ID NO: 27583 - DNA, 15 bp, Homo sapiens
gtctcttccaataag

SEQ ID NO: 27584 - DNA, 15 bp, Homo sapiens
ggtctcttccaataa

SEQ ID NO: 27585 - DNA, 15 bp, Homo sapiens
aggtctcttccaata

SEQ ID NO: 27586 - DNA, 15 bp, Homo sapiens
aaggtctcttccaat

SEQ ID NO: 27587 - DNA, 15 bp, Homo sapiens
taaggtctcttccaa

SEQ ID NO: 27588 - DNA, 15 bp, Homo sapiens
ctaaggtctcttcca

SEQ ID NO: 27589 - DNA, 15 bp, Homo sapiens
tctaaggtctcttcc

SEQ ID NO: 27590 - DNA, 15 bp, Homo sapiens
ctctaaggtctcttc

SEQ ID NO: 27591 - DNA, 15 bp, Homo sapiens
tctctaaggtctctt

SEQ ID NO: 27592 - DNA, 15 bp, Homo sapiens
gtctctaaggtctct

SEQ ID NO: 27593 - DNA, 15 bp, Homo sapiens
ggtctctaaggtctc

SEQ ID NO: 27594 - DNA, 15 bp, Homo sapiens
tggtctctaaggtct

SEQ ID NO: 27595 - DNA, 15 bp, Homo sapiens
ctggtctctaaggtc

SEQ ID NO: 27596 - DNA, 15 bp, Homo sapiens
actggtctctaaggt

SEQ ID NO: 27597 - DNA, 15 bp, Homo sapiens
aactggtctctaagg

SEQ ID NO: 27598 - DNA, 15 bp, Homo sapiens
taactggtctctaag

SEQ ID NO: 27599 - DNA, 15 bp, Homo sapiens
ctaactggtctctaa

SEQ ID NO: 27600 - DNA, 15 bp, Homo sapiens
actaactggtctcta

SEQ ID NO: 27601 - DNA, 15 bp, Homo sapiens
aactaactggtctct

SEQ ID NO: 27602 - DNA, 15 bp, Homo sapiens
gaactaactggtctc

SEQ ID NO: 27603 - DNA, 15 bp, Homo sapiens
tgaactaactggtct

SEQ ID NO: 27604 - DNA, 15 bp, Homo sapiens
atgaactaactggtc

SEQ ID NO: 27605 - DNA, 15 bp, Homo sapiens
aatgaactaactggt

SEQ ID NO: 27606 - DNA, 15 bp, Homo sapiens
aaatgaactaactgg

SEQ ID NO: 27607 - DNA, 15 bp, Homo sapiens
taaatgaactaactg

SEQ ID NO: 27608 - DNA, 15 bp, Homo sapiens
ataaatgaactaact

SEQ ID NO: 27609 - DNA, 15 bp, Homo sapiens
tataaatgaactaac

SEQ ID NO: 27610 - DNA, 15 bp, Homo sapiens
ctataaatgaactaa

SEQ ID NO: 27611 - DNA, 15 bp, Homo sapiens
tctataaatgaacta

SEQ ID NO: 27612 - DNA, 15 bp, Homo sapiens
atctataaatgaact

SEQ ID NO: 27613 - DNA, 15 bp, Homo sapiens
tatctataaatgaac

SEQ ID NO: 27614 - DNA, 15 bp, Homo sapiens
ttatctataaatgaa

SEQ ID NO: 27615 - DNA, 15 bp, Homo sapiens
tttatctataaatga

SEQ ID NO: 27616 - DNA, 15 bp, Homo sapiens
atttatctataaatg

SEQ ID NO: 27617 - DNA, 15 bp, Homo sapiens
aatttatctataaat

SEQ ID NO: 27618 - DNA, 15 bp, Homo sapiens
taatttatctataaa

SEQ ID NO: 27619 - DNA, 15 bp, Homo sapiens
ctaatttatctataa

SEQ ID NO: 27620 - DNA, 15 bp, Homo sapiens
actaatttatctata

SEQ ID NO: 27621 - DNA, 15 bp, Homo sapiens
aactaatttatctat

SEQ ID NO: 27622 - DNA, 15 bp, Homo sapiens
caactaatttatcta

SEQ ID NO: 27623 - DNA, 15 bp, Homo sapiens
tcaactaatttatct

SEQ ID NO: 27624 - DNA, 15 bp, Homo sapiens
atcaactaatttatc

SEQ ID NO: 27625 - DNA, 15 bp, Homo sapiens
aatcaactaatttat

SEQ ID NO: 27626 - DNA, 15 bp, Homo sapiens
gaatcaactaattta

SEQ ID NO: 27627 - DNA, 15 bp, Homo sapiens
agaatcaactaattt

SEQ ID NO: 27628 - DNA, 15 bp, Homo sapiens
cagaatcaactaatt

SEQ ID NO: 27629 - DNA, 15 bp, Homo sapiens
acagaatcaactaat

SEQ ID NO: 27630 - DNA, 15 bp, Homo sapiens
gacagaatcaactaa

SEQ ID NO: 27631 - DNA, 15 bp, Homo sapiens
tgacagaatcaacta

SEQ ID NO: 27632 - DNA, 15 bp, Homo sapiens
atgacagaatcaact

SEQ ID NO: 27633 - DNA, 15 bp, Homo sapiens
aatgacagaatcaac

SEQ ID NO: 27634 - DNA, 15 bp, Homo sapiens
gaatgacagaatcaa

SEQ ID NO: 27635 - DNA, 15 bp, Homo sapiens
tgaatgacagaatca

SEQ ID NO: 27636 - DNA, 15 bp, Homo sapiens
ttgaatgacagaatc

SEQ ID NO: 27637 - DNA, 15 bp, Homo sapiens
gttgaatgacagaat

SEQ ID NO: 27638 - DNA, 15 bp, Homo sapiens
ggttgaatgacagaa

SEQ ID NO: 27639 - DNA, 15 bp, Homo sapiens
gggttgaatgacaga

SEQ ID NO: 27640 - DNA, 15 bp, Homo sapiens
agggttgaatgacag

SEQ ID NO: 27641 - DNA, 15 bp, Homo sapiens
aagggttgaatgaca

SEQ ID NO: 27642 - DNA, 15 bp, Homo sapiens
taagggttgaatgac

SEQ ID NO: 27643 - DNA, 15 bp, Homo sapiens
ataagggttgaatga

SEQ ID NO: 27644 - DNA, 15 bp, Homo sapiens
tataagggttgaatg

SEQ ID NO: 27645 - DNA, 15 bp, Homo sapiens
atataagggttgaat

SEQ ID NO: 27646 - DNA, 15 bp, Homo sapiens
tatataagggttgaa

SEQ ID NO: 27647 - DNA, 15 bp, Homo sapiens
atatataagggttga

SEQ ID NO: 27648 - DNA, 15 bp, Homo sapiens
aatatataagggttg

SEQ ID NO: 27649 - DNA, 15 bp, Homo sapiens
caatatataagggtt

SEQ ID NO: 27650 - DNA, 15 bp, Homo sapiens
tcaatatataagggt

SEQ ID NO: 27651 - DNA, 15 bp, Homo sapiens
ctcaatatataaggg

SEQ ID NO: 27652 - DNA, 15 bp, Homo sapiens
gctcaatatataagg

SEQ ID NO: 27653 - DNA, 15 bp, Homo sapiens
cgctcaatatataag

SEQ ID NO: 27654 - DNA, 15 bp, Homo sapiens
acgctcaatatataa

SEQ ID NO: 27655 - DNA, 15 bp, Homo sapiens
gacgctcaatatata

SEQ ID NO: 27656 - DNA, 15 bp, Homo sapiens
agacgctcaatatat

SEQ ID NO: 27657 - DNA, 15 bp, Homo sapiens
gagacgctcaatata

SEQ ID NO: 27658 - DNA, 15 bp, Homo sapiens
ggagacgctcaatat

SEQ ID NO: 27659 - DNA, 15 bp, Homo sapiens
aggagacgctcaata

SEQ ID NO: 27660 - DNA, 15 bp, Homo sapiens
taggagacgctcaat

SEQ ID NO: 27661 - DNA, 15 bp, Homo sapiens
ataggagacgctcaa

SEQ ID NO: 27662 - DNA, 15 bp, Homo sapiens
tataggagacgctca

SEQ ID NO: 27663 - DNA, 15 bp, Homo sapiens
atataggagacgctc

SEQ ID NO: 27664 - DNA, 15 bp, Homo sapiens
catataggagacgct

SEQ ID NO: 27665 - DNA, 15 bp, Homo sapiens
gcatataggagacgc

SEQ ID NO: 27666 - DNA, 15 bp, Homo sapiens
cgcatataggagacg

SEQ ID NO: 27667 - DNA, 15 bp, Homo sapiens
tcgcatataggagac

SEQ ID NO: 27668 - DNA, 15 bp, Homo sapiens
ttcgcatataggaga

SEQ ID NO: 27669 - DNA, 15 bp, Homo sapiens
attcgcatataggag

SEQ ID NO: 27670 - DNA, 15 bp, Homo sapiens
gattcgcatatagga

SEQ ID NO: 27671 - DNA, 15 bp, Homo sapiens
tgattcgcatatagg

SEQ ID NO: 27672 - DNA, 15 bp, Homo sapiens
gtgattcgcatatag

SEQ ID NO: 27673 - DNA, 15 bp, Homo sapiens
agtgattcgcatata

SEQ ID NO: 27674 - DNA, 15 bp, Homo sapiens
cagtgattcgcatat

SEQ ID NO: 27675 - DNA, 15 bp, Homo sapiens
acagtgattcgcata

SEQ ID NO: 27676 - DNA, 15 bp, Homo sapiens
aacagtgattcgcat

SEQ ID NO: 27677 - DNA, 15 bp, Homo sapiens
gaacagtgattcgca

SEQ ID NO: 27678 - DNA, 15 bp, Homo sapiens
agaacagtgattcgc

SEQ ID NO: 27679 - DNA, 15 bp, Homo sapiens
tagaacagtgattcg

SEQ ID NO: 27680 - DNA, 15 bp, Homo sapiens
ttagaacagtgattc

SEQ ID NO: 27681 - DNA, 15 bp, Homo sapiens
cttagaacagtgatt

SEQ ID NO: 27682 - DNA, 15 bp, Homo sapiens
acttagaacagtgat

SEQ ID NO: 27683 - DNA, 15 bp, Homo sapiens
cacttagaacagtga

SEQ ID NO: 27684 - DNA, 15 bp, Homo sapiens
gcacttagaacagtg

SEQ ID NO: 27685 - DNA, 15 bp, Homo sapiens
ggcacttagaacagt

SEQ ID NO: 27686 - DNA, 15 bp, Homo sapiens
cggcacttagaacag

SEQ ID NO: 27687 - DNA, 15 bp, Homo sapiens
tcggcacttagaaca

SEQ ID NO: 27688 - DNA, 15 bp, Homo sapiens
ctcggcacttagaac

SEQ ID NO: 27689 - DNA, 15 bp, Homo sapiens
tctcggcacttagaa

SEQ ID NO: 27690 - DNA, 15 bp, Homo sapiens
gtctcggcacttaga

SEQ ID NO: 27691 - DNA, 15 bp, Homo sapiens
tgtctcggcacttag

SEQ ID NO: 27692 - DNA, 15 bp, Homo sapiens
gtgtctcggcactta

SEQ ID NO: 27693 - DNA, 15 bp, Homo sapiens
tgtgtctcggcactt

SEQ ID NO: 27694 - DNA, 15 bp, Homo sapiens
ctgtgtctcggcact

SEQ ID NO: 27695 - DNA, 15 bp, Homo sapiens
tctgtgtctcggcac

SEQ ID NO: 27696 - DNA, 15 bp, Homo sapiens
ctctgtgtctcggca

SEQ ID NO: 27697 - DNA, 15 bp, Homo sapiens
cctctgtgtctcggc

SEQ ID NO: 27698 - DNA, 15 bp, Homo sapiens
acctctgtgtctcgg

SEQ ID NO: 27699 - DNA, 15 bp, Homo sapiens
cacctctgtgtctcg

SEQ ID NO: 27700 - DNA, 15 bp, Homo sapiens
acacctctgtgtctc

SEQ ID NO: 27701 - DNA, 15 bp, Homo sapiens
gacacctctgtgtct

SEQ ID NO: 27702 - DNA, 15 bp, Homo sapiens
ggacacctctgtgtc

SEQ ID NO: 27703 - DNA, 15 bp, Homo sapiens
tggacacctctgtgt

SEQ ID NO: 27704 - DNA, 15 bp, Homo sapiens
ttggacacctctgtg

SEQ ID NO: 27705 - DNA, 15 bp, Homo sapiens
tttggacacctctgt

SEQ ID NO: 27706 - DNA, 15 bp, Homo sapiens
ttttggacacctctg

SEQ ID NO: 27707 - DNA, 15 bp, Homo sapiens
gttttggacacctct

SEQ ID NO: 27708 - DNA, 15 bp, Homo sapiens
tgttttggacacctc

SEQ ID NO: 27709 - DNA, 15 bp, Homo sapiens
ttgttttggacacct

SEQ ID NO: 27710 - DNA, 15 bp, Homo sapiens
tttgttttggacacc

SEQ ID NO: 27711 - DNA, 15 bp, Homo sapiens
atttgttttggacac

SEQ ID NO: 27712 - DNA, 15 bp, Homo sapiens
tatttgttttggaca

SEQ ID NO: 27713 - DNA, 15 bp, Homo sapiens
atatttgttttggac

SEQ ID NO: 27714 - DNA, 15 bp, Homo sapiens
catatttgttttgga

SEQ ID NO: 27715 - DNA, 15 bp, Homo sapiens
ccatatttgttttgg

SEQ ID NO: 27716 - DNA, 15 bp, Homo sapiens
gccatatttgttttg

SEQ ID NO: 27717 - DNA, 15 bp, Homo sapiens
ggccatatttgtttt

SEQ ID NO: 27718 - DNA, 15 bp, Homo sapiens
gggccatatttgttt

SEQ ID NO: 27719 - DNA, 15 bp, Homo sapiens
ggggccatatttgtt

SEQ ID NO: 27720 - DNA, 15 bp, Homo sapiens
aggggccatatttgt

SEQ ID NO: 27721 - DNA, 15 bp, Homo sapiens
gaggggccatatttg

SEQ ID NO: 27722 - DNA, 15 bp, Homo sapiens
agaggggccatattt

SEQ ID NO: 27723 - DNA, 15 bp, Homo sapiens
gagaggggccatatt

SEQ ID NO: 27724 - DNA, 15 bp, Homo sapiens
ggagaggggccatat

SEQ ID NO: 27725 - DNA, 15 bp, Homo sapiens
tggagaggggccata

SEQ ID NO: 27726 - DNA, 15 bp, Homo sapiens
atggagaggggccat

SEQ ID NO: 27727 - DNA, 15 bp, Homo sapiens
tatggagaggggcca

SEQ ID NO: 27728 - DNA, 15 bp, Homo sapiens
atatggagaggggcc

SEQ ID NO: 27729 - DNA, 15 bp, Homo sapiens
catatggagaggggc

SEQ ID NO: 27730 - DNA, 15 bp, Homo sapiens
ccatatggagagggg

SEQ ID NO: 27731 - DNA, 15 bp, Homo sapiens
tccatatggagaggg

SEQ ID NO: 27732 - DNA, 15 bp, Homo sapiens
ttccatatggagagg

SEQ ID NO: 27733 - DNA, 15 bp, Homo sapiens
attccatatggagag

SEQ ID NO: 27734 - DNA, 15 bp, Homo sapiens
aattccatatggaga

SEQ ID NO: 27735 - DNA, 15 bp, Homo sapiens
aaattccatatggag

SEQ ID NO: 27736 - DNA, 15 bp, Homo sapiens
gaaattccatatgga

SEQ ID NO: 27737 - DNA, 15 bp, Homo sapiens
agaaattccatatgg

SEQ ID NO: 27738 - DNA, 15 bp, Homo sapiens
tagaaattccatatg

SEQ ID NO: 27739 - DNA, 15 bp, Homo sapiens
atagaaattccatat

SEQ ID NO: 27740 - DNA, 15 bp, Homo sapiens
aatagaaattccata

SEQ ID NO: 27741 - DNA, 15 bp, Homo sapiens
gaatagaaattccat

SEQ ID NO: 27742 - DNA, 15 bp, Homo sapiens
agaatagaaattcca

SEQ ID NO: 27743 - DNA, 15 bp, Homo sapiens
tagaatagaaattcc

SEQ ID NO: 27744 - DNA, 15 bp, Homo sapiens
ctagaatagaaattc

SEQ ID NO: 27745 - DNA, 15 bp, Homo sapiens
tctagaatagaaatt

SEQ ID NO: 27746 - DNA, 15 bp, Homo sapiens
ctctagaatagaaat

SEQ ID NO: 27747 - DNA, 15 bp, Homo sapiens
tctctagaatagaaa

SEQ ID NO: 27748 - DNA, 15 bp, Homo sapiens
ttctctagaatagaa

SEQ ID NO: 27749 - DNA, 15 bp, Homo sapiens
cttctctagaataga

SEQ ID NO: 27750 - DNA, 15 bp, Homo sapiens
tcttctctagaatag

SEQ ID NO: 27751 - DNA, 15 bp, Homo sapiens
ttcttctctagaata

SEQ ID NO: 27752 - DNA, 15 bp, Homo sapiens
attcttctctagaat

SEQ ID NO: 27753 - DNA, 15 bp, Homo sapiens
gattcttctctagaa

SEQ ID NO: 27754 - DNA, 15 bp, Homo sapiens
agattcttctctaga

SEQ ID NO: 27755 - DNA, 15 bp, Homo sapiens
cagattcttctctag

SEQ ID NO: 27756 - DNA, 15 bp, Homo sapiens
tcagattcttctcta

SEQ ID NO: 27757 - DNA, 15 bp, Homo sapiens
gtcagattcttctct

SEQ ID NO: 27758 - DNA, 15 bp, Homo sapiens
ggtcagattcttctc

SEQ ID NO: 27759 - DNA, 15 bp, Homo sapiens
gggtcagattcttct

SEQ ID NO: 27760 - DNA, 15 bp, Homo sapiens
tgggtcagattcttc

SEQ ID NO: 27761 - DNA, 15 bp, Homo sapiens
ctgggtcagattctt

SEQ ID NO: 27762 - DNA, 15 bp, Homo sapiens
tctgggtcagattct

SEQ ID NO: 27763 - DNA, 15 bp, Homo sapiens
ttctgggtcagattc

SEQ ID NO: 27764 - DNA, 15 bp, Homo sapiens
cttctgggtcagatt

SEQ ID NO: 27765 - DNA, 15 bp, Homo sapiens
ccttctgggtcagat

SEQ ID NO: 27766 - DNA, 15 bp, Homo sapiens
cccttctgggtcaga

SEQ ID NO: 27767 - DNA, 15 bp, Homo sapiens
ccccttctgggtcag

SEQ ID NO: 27768 - DNA, 15 bp, Homo sapiens
cccccttctgggtca

SEQ ID NO: 27769 - DNA, 15 bp, Homo sapiens
tcccccttctgggtc

SEQ ID NO: 27770 - DNA, 15 bp, Homo sapiens
ttcccccttctgggt

SEQ ID NO: 27771 - DNA, 15 bp, Homo sapiens
cttcccccttctggg

SEQ ID NO: 27772 - DNA, 15 bp, Homo sapiens
acttcccccttctgg

SEQ ID NO: 27773 - DNA, 15 bp, Homo sapiens
cacttcccccttctg

SEQ ID NO: 27774 - DNA, 15 bp, Homo sapiens
tcacttcccccttct

SEQ ID NO: 27775 - DNA, 15 bp, Homo sapiens
gtcacttcccccttc

SEQ ID NO: 27776 - DNA, 15 bp, Homo sapiens
agtcacttccccctt

SEQ ID NO: 27777 - DNA, 15 bp, Homo sapiens
cagtcacttccccct

SEQ ID NO: 27778 - DNA, 15 bp, Homo sapiens
acagtcacttccccc

SEQ ID NO: 27779 - DNA, 15 bp, Homo sapiens
gacagtcacttcccc

SEQ ID NO: 27780 - DNA, 15 bp, Homo sapiens
ggacagtcacttccc

SEQ ID NO: 27781 - DNA, 15 bp, Homo sapiens
gggacagtcacttcc

SEQ ID NO: 27782 - DNA, 15 bp, Homo sapiens
tgggacagtcacttc

SEQ ID NO: 27783 - DNA, 15 bp, Homo sapiens
ttgggacagtcactt

SEQ ID NO: 27784 - DNA, 15 bp, Homo sapiens
cttgggacagtcact

SEQ ID NO: 27785 - DNA, 15 bp, Homo sapiens
acttgggacagtcac

SEQ ID NO: 27786 - DNA, 15 bp, Homo sapiens
gacttgggacagtca

SEQ ID NO: 27787 - DNA, 15 bp, Homo sapiens
agacttgggacagtc

SEQ ID NO: 27788 - DNA, 15 bp, Homo sapiens
tagacttgggacagt

SEQ ID NO: 27789 - DNA, 15 bp, Homo sapiens
gtagacttgggacag

SEQ ID NO: 27790 - DNA, 15 bp, Homo sapiens
tgtagacttgggaca

SEQ ID NO: 27791 - DNA, 15 bp, Homo sapiens
gtgtagacttgggac

SEQ ID NO: 27792 - DNA, 15 bp, Homo sapiens
tgtgtagacttggga

SEQ ID NO: 27793 - DNA, 15 bp, Homo sapiens
ttgtgtagacttggg

SEQ ID NO: 27794 - DNA, 15 bp, Homo sapiens
gttgtgtagacttgg

SEQ ID NO: 27795 - DNA, 15 bp, Homo sapiens
ggttgtgtagacttg

SEQ ID NO: 27796 - DNA, 15 bp, Homo sapiens
tggttgtgtagactt

SEQ ID NO: 27797 - DNA, 15 bp, Homo sapiens
gtggttgtgtagact

SEQ ID NO: 27798 - DNA, 15 bp, Homo sapiens
tgtggttgtgtagac

SEQ ID NO: 27799 - DNA, 15 bp, Homo sapiens
ctgtggttgtgtaga

SEQ ID NO: 27800 - DNA, 15 bp, Homo sapiens
tctgtggttgtgtag

SEQ ID NO: 27801 - DNA, 15 bp, Homo sapiens
ttctgtggttgtgta

SEQ ID NO: 27802 - DNA, 15 bp, Homo sapiens
cttctgtggttgtgt

SEQ ID NO: 27803 - DNA, 15 bp, Homo sapiens
ccttctgtggttgtg

SEQ ID NO: 27804 - DNA, 15 bp, Homo sapiens
cccttctgtggttgt

SEQ ID NO: 27805 - DNA, 15 bp, Homo sapiens
tcccttctgtggttg

SEQ ID NO: 27806 - DNA, 15 bp, Homo sapiens
atcccttctgtggtt

SEQ ID NO: 27807 - DNA, 15 bp, Homo sapiens
tatcccttctgtggt

SEQ ID NO: 27808 - DNA, 15 bp, Homo sapiens
atatcccttctgtgg

SEQ ID NO: 27809 - DNA, 15 bp, Homo sapiens
aatatcccttctgtg

SEQ ID NO: 27810 - DNA, 15 bp, Homo sapiens
gaatatcccttctgt

SEQ ID NO: 27811 - DNA, 15 bp, Homo sapiens
agaatatcccttctg

SEQ ID NO: 27812 - DNA, 15 bp, Homo sapiens
cagaatatcccttct

SEQ ID NO: 27813 - DNA, 15 bp, Homo sapiens
ccagaatatcccttc

SEQ ID NO: 27814 - DNA, 15 bp, Homo sapiens
cccagaatatccctt

SEQ ID NO: 27815 - DNA, 15 bp, Homo sapiens
tcccagaatatccct

SEQ ID NO: 27816 - DNA, 15 bp, Homo sapiens
ttcccagaatatccc

SEQ ID NO: 27817 - DNA, 15 bp, Homo sapiens
attcccagaatatcc

SEQ ID NO: 27818 - DNA, 15 bp, Homo sapiens
tattcccagaatatc

SEQ ID NO: 27819 - DNA, 15 bp, Homo sapiens
ttattcccagaatat

SEQ ID NO: 27820 - DNA, 15 bp, Homo sapiens
tttattcccagaata

SEQ ID NO: 27821 - DNA, 15 bp, Homo sapiens
atttattcccagaat

SEQ ID NO: 27822 - DNA, 15 bp, Homo sapiens
gatttattcccagaa

SEQ ID NO: 27823 - DNA, 15 bp, Homo sapiens
tgatttattcccaga

SEQ ID NO: 27824 - DNA, 15 bp, Homo sapiens
gtgatttattcccag

SEQ ID NO: 27825 - DNA, 15 bp, Homo sapiens
cgtgatttattccca

SEQ ID NO: 27826 - DNA, 15 bp, Homo sapiens
ccgtgatttattccc

SEQ ID NO: 27827 - DNA, 15 bp, Homo sapiens
gccgtgatttattcc

SEQ ID NO: 27828 - DNA, 15 bp, Homo sapiens
agccgtgatttattc

SEQ ID NO: 27829 - DNA, 15 bp, Homo sapiens
tagccgtgatttatt

SEQ ID NO: 27830 - DNA, 15 bp, Homo sapiens
ttagccgtgatttat

SEQ ID NO: 27831 - DNA, 15 bp, Homo sapiens
tttagccgtgattta

SEQ ID NO: 27832 - DNA, 15 bp, Homo sapiens
gtttagccgtgattt

SEQ ID NO: 27833 - DNA, 15 bp, Homo sapiens
ggtttagccgtgatt

SEQ ID NO: 27834 - DNA, 15 bp, Homo sapiens
gggtttagccgtgat

SEQ ID NO: 27835 - DNA, 15 bp, Homo sapiens
ggggtttagccgtga

SEQ ID NO: 27836 - DNA, 15 bp, Homo sapiens
gggggtttagccgtg

SEQ ID NO: 27837 - DNA, 15 bp, Homo sapiens
ggggggtttagccgt

SEQ ID NO: 27838 - DNA, 15 bp, Homo sapiens
aggggggtttagccg

SEQ ID NO: 27839 - DNA, 15 bp, Homo sapiens
caggggggtttagcc

SEQ ID NO: 27840 - DNA, 15 bp, Homo sapiens
gcaggggggtttagc

SEQ ID NO: 27841 - DNA, 15 bp, Homo sapiens
agcaggggggtttag

SEQ ID NO: 27842 - DNA, 15 bp, Homo sapiens
cagcaggggggttta

SEQ ID NO: 27843 - DNA, 15 bp, Homo sapiens
gcagcaggggggttt

SEQ ID NO: 27844 - DNA, 15 bp, Homo sapiens
agcagcaggggggtt

SEQ ID NO: 27845 - DNA, 15 bp, Homo sapiens
gagcagcaggggggt

SEQ ID NO: 27846 - DNA, 15 bp, Homo sapiens
ggagcagcagggggg

SEQ ID NO: 27847 - DNA, 15 bp, Homo sapiens
tggagcagcaggggg

SEQ ID NO: 27848 - DNA, 15 bp, Homo sapiens
ctggagcagcagggg

SEQ ID NO: 27849 - DNA, 15 bp, Homo sapiens
cctggagcagcaggg

SEQ ID NO: 27850 - DNA, 15 bp, Homo sapiens
gcctggagcagcagg

SEQ ID NO: 27851 - DNA, 15 bp, Homo sapiens
tgcctggagcagcag

SEQ ID NO: 27852 - DNA, 15 bp, Homo sapiens
ctgcctggagcagca

SEQ ID NO: 27853 - DNA, 15 bp, Homo sapiens
actgcctggagcagc

SEQ ID NO: 27854 - DNA, 15 bp, Homo sapiens
aactgcctggagcag

SEQ ID NO: 27855 - DNA, 15 bp, Homo sapiens
gaactgcctggagca

SEQ ID NO: 27856 - DNA, 15 bp, Homo sapiens
agaactgcctggagc

SEQ ID NO: 27857 - DNA, 15 bp, Homo sapiens
gagaactgcctggag

SEQ ID NO: 27858 - DNA, 15 bp, Homo sapiens
ggagaactgcctgga

SEQ ID NO: 27859 - DNA, 15 bp, Homo sapiens
aggagaactgcctgg

SEQ ID NO: 27860 - DNA, 15 bp, Homo sapiens
aaggagaactgcctg

SEQ ID NO: 27861 - DNA, 15 bp, Homo sapiens
gaaggagaactgcct

SEQ ID NO: 27862 - DNA, 15 bp, Homo sapiens
agaaggagaactgcc

SEQ ID NO: 27863 - DNA, 15 bp, Homo sapiens
tagaaggagaactgc

SEQ ID NO: 27864 - DNA, 15 bp, Homo sapiens
gtagaaggagaactg

SEQ ID NO: 27865 - DNA, 15 bp, Homo sapiens
tgtagaaggagaact

SEQ ID NO: 27866 - DNA, 15 bp, Homo sapiens
ctgtagaaggagaac

SEQ ID NO: 27867 - DNA, 15 bp, Homo sapiens
actgtagaaggagaa

SEQ ID NO: 27868 - DNA, 15 bp, Homo sapiens
cactgtagaaggaga

SEQ ID NO: 27869 - DNA, 15 bp, Homo sapiens
gcactgtagaaggag

SEQ ID NO: 27870 - DNA, 15 bp, Homo sapiens
agcactgtagaagga

SEQ ID NO: 27871 - DNA, 15 bp, Homo sapiens
gagcactgtagaagg

SEQ ID NO: 27872 - DNA, 15 bp, Homo sapiens
agagcactgtagaag

SEQ ID NO: 27873 - DNA, 15 bp, Homo sapiens
tagagcactgtagaa

SEQ ID NO: 27874 - DNA, 15 bp, Homo sapiens
atagagcactgtaga

SEQ ID NO: 27875 - DNA, 15 bp, Homo sapiens
aatagagcactgtag

SEQ ID NO: 27876 - DNA, 15 bp, Homo sapiens
caatagagcactgta

SEQ ID NO: 27877 - DNA, 15 bp, Homo sapiens
acaatagagcactgt

SEQ ID NO: 27878 - DNA, 15 bp, Homo sapiens
cacaatagagcactg

SEQ ID NO: 27879 - DNA, 15 bp, Homo sapiens
gcacaatagagcact

SEQ ID NO: 27880 - DNA, 15 bp, Homo sapiens
agcacaatagagcac

SEQ ID NO: 27881 - DNA, 15 bp, Homo sapiens
cagcacaatagagca

SEQ ID NO: 27882 - DNA, 15 bp, Homo sapiens
acagcacaatagagc

SEQ ID NO: 27883 - DNA, 15 bp, Homo sapiens
aacagcacaatagag

SEQ ID NO: 27884 - DNA, 15 bp, Homo sapiens
aaacagcacaataga

SEQ ID NO: 27885 - DNA, 15 bp, Homo sapiens
aaaacagcacaatag

SEQ ID NO: 27886 - DNA, 15 bp, Homo sapiens
taaaacagcacaata

SEQ ID NO: 27887 - DNA, 15 bp, Homo sapiens
ttaaaacagcacaat

SEQ ID NO: 27888 - DNA, 15 bp, Homo sapiens
attaaaacagcacaa

SEQ ID NO: 27889 - DNA, 15 bp, Homo sapiens
tattaaaacagcaca

SEQ ID NO: 27890 - DNA, 15 bp, Homo sapiens
ttattaaaacagcac

SEQ ID NO: 27891 - DNA, 15 bp, Homo sapiens
attattaaaacagca

SEQ ID NO: 27892 - DNA, 15 bp, Homo sapiens
gattattaaaacagc

SEQ ID NO: 27893 - DNA, 15 bp, Homo sapiens
agattattaaaacag

SEQ ID NO: 27894 - DNA, 15 bp, Homo sapiens
aagattattaaaaca

SEQ ID NO: 27895 - DNA, 15 bp, Homo sapiens
aaagattattaaaac

SEQ ID NO: 27896 - DNA, 15 bp, Homo sapiens
gaaagattattaaaa

SEQ ID NO: 27897 - DNA, 15 bp, Homo sapiens
tgaaagattattaaa

SEQ ID NO: 27898 - DNA, 15 bp, Homo sapiens
ttgaaagattattaa

SEQ ID NO: 27899 - DNA, 15 bp, Homo sapiens
gttgaaagattatta

SEQ ID NO: 27900 - DNA, 15 bp, Homo sapiens
agttgaaagattatt

SEQ ID NO: 27901 - DNA, 15 bp, Homo sapiens
cagttgaaagattat

SEQ ID NO: 27902 - DNA, 15 bp, Homo sapiens
ccagttgaaagatta

SEQ ID NO: 27903 - DNA, 15 bp, Homo sapiens
cccagttgaaagatt

SEQ ID NO: 27904 - DNA, 15 bp, Homo sapiens
tcccagttgaaagat

SEQ ID NO: 27905 - DNA, 15 bp, Homo sapiens
ttcccagttgaaaga

SEQ ID NO: 27906 - DNA, 15 bp, Homo sapiens
cttcccagttgaaag

SEQ ID NO: 27907 - DNA, 15 bp, Homo sapiens
tcttcccagttgaaa

SEQ ID NO: 27908 - DNA, 15 bp, Homo sapiens
ttcttcccagttgaa

SEQ ID NO: 27909 - DNA, 15 bp, Homo sapiens
gttcttcccagttga

SEQ ID NO: 27910 - DNA, 15 bp, Homo sapiens
agttcttcccagttg

SEQ ID NO: 27911 - DNA, 15 bp, Homo sapiens
gagttcttcccagtt

SEQ ID NO: 27912 - DNA, 15 bp, Homo sapiens
ggagttcttcccagt

SEQ ID NO: 27913 - DNA, 15 bp, Homo sapiens
gggagttcttcccag

SEQ ID NO: 27914 - DNA, 15 bp, Homo sapiens
tgggagttcttccca

SEQ ID NO: 27915 - DNA, 15 bp, Homo sapiens
atgggagttcttccc

SEQ ID NO: 27916 - DNA, 15 bp, Homo sapiens
aatgggagttcttcc

SEQ ID NO: 27917 - DNA, 15 bp, Homo sapiens
aaatgggagttcttc

SEQ ID NO: 27918 - DNA, 15 bp, Homo sapiens
gaaatgggagttctt

SEQ ID NO: 27919 - DNA, 15 bp, Homo sapiens
tgaaatgggagttct

SEQ ID NO: 27920 - DNA, 15 bp, Homo sapiens
ctgaaatgggagttc

SEQ ID NO: 27921 - DNA, 15 bp, Homo sapiens
cctgaaatgggagtt

SEQ ID NO: 27922 - DNA, 15 bp, Homo sapiens
tcctgaaatgggagt

SEQ ID NO: 27923 - DNA, 15 bp, Homo sapiens
ttcctgaaatgggag

SEQ ID NO: 27924 - DNA, 15 bp, Homo sapiens
attcctgaaatggga

SEQ ID NO: 27925 - DNA, 15 bp, Homo sapiens
aattcctgaaatggg

SEQ ID NO: 27926 - DNA, 15 bp, Homo sapiens
taattcctgaaatgg

SEQ ID NO: 27927 - DNA, 15 bp, Homo sapiens
ttaattcctgaaatg

SEQ ID NO: 27928 - DNA, 15 bp, Homo sapiens
cttaattcctgaaat

SEQ ID NO: 27929 - DNA, 15 bp, Homo sapiens
gcttaattcctgaaa

SEQ ID NO: 27930 - DNA, 15 bp, Homo sapiens
ggcttaattcctgaa

SEQ ID NO: 27931 - DNA, 15 bp, Homo sapiens
cggcttaattcctga

SEQ ID NO: 27932 - DNA, 15 bp, Homo sapiens
acggcttaattcctg

SEQ ID NO: 27933 - DNA, 15 bp, Homo sapiens
cacggcttaattcct

SEQ ID NO: 27934 - DNA, 15 bp, Homo sapiens
ccacggcttaattcc

SEQ ID NO: 27935 - DNA, 15 bp, Homo sapiens
tccacggcttaattc

SEQ ID NO: 27936 - DNA, 15 bp, Homo sapiens
gtccacggcttaatt

SEQ ID NO: 27937 - DNA, 15 bp, Homo sapiens
tgtccacggcttaat

SEQ ID NO: 27938 - DNA, 15 bp, Homo sapiens
ttgtccacggcttaa

SEQ ID NO: 27939 - DNA, 15 bp, Homo sapiens
tttgtccacggctta

SEQ ID NO: 27940 - DNA, 15 bp, Homo sapiens
atttgtccacggctt

SEQ ID NO: 27941 - DNA, 15 bp, Homo sapiens
gatttgtccacggct

SEQ ID NO: 27942 - DNA, 15 bp, Homo sapiens
agatttgtccacggc

SEQ ID NO: 27943 - DNA, 15 bp, Homo sapiens
aagatttgtccacgg

SEQ ID NO: 27944 - DNA, 15 bp, Homo sapiens
aaagatttgtccacg

SEQ ID NO: 27945 - DNA, 15 bp, Homo sapiens
aaaagatttgtccac

SEQ ID NO: 27946 - DNA, 15 bp, Homo sapiens
taaaagatttgtcca

SEQ ID NO: 27947 - DNA, 15 bp, Homo sapiens
ttaaaagatttgtcc

SEQ ID NO: 27948 - DNA, 15 bp, Homo sapiens
attaaaagatttgtc

SEQ ID NO: 27949 - DNA, 15 bp, Homo sapiens
aattaaaagatttgt

SEQ ID NO: 27950 - DNA, 15 bp, Homo sapiens
taattaaaagatttg

SEQ ID NO: 27951 - DNA, 15 bp, Homo sapiens
ataattaaaagattt

SEQ ID NO: 27952 - DNA, 15 bp, Homo sapiens
gataattaaaagatt

SEQ ID NO: 27953 - DNA, 15 bp, Homo sapiens
ggataattaaaagat

SEQ ID NO: 27954 - DNA, 15 bp, Homo sapiens
aggataattaaaaga

SEQ ID NO: 27955 - DNA, 15 bp, Homo sapiens
aaggataattaaaag

SEQ ID NO: 27956 - DNA, 15 bp, Homo sapiens
caaggataattaaaa

SEQ ID NO: 27957 - DNA, 15 bp, Homo sapiens
tcaaggataattaaa

SEQ ID NO: 27958 - DNA, 15 bp, Homo sapiens
ttcaaggataattaa

SEQ ID NO: 27959 - DNA, 15 bp, Homo sapiens
tttcaaggataatta

SEQ ID NO: 27960 - DNA, 15 bp, Homo sapiens
atttcaaggataatt

SEQ ID NO: 27961 - DNA, 15 bp, Homo sapiens
gatttcaaggataat

SEQ ID NO: 27962 - DNA, 15 bp, Homo sapiens
tgatttcaaggataa

SEQ ID NO: 27963 - DNA, 15 bp, Homo sapiens
atgatttcaaggata

SEQ ID NO: 27964 - DNA, 15 bp, Homo sapiens
gatgatttcaaggat

SEQ ID NO: 27965 - DNA, 15 bp, Homo sapiens
ggatgatttcaagga

SEQ ID NO: 27966 - DNA, 15 bp, Homo sapiens
aggatgatttcaagg

SEQ ID NO: 27967 - DNA, 15 bp, Homo sapiens
taggatgatttcaag

SEQ ID NO: 27968 - DNA, 15 bp, Homo sapiens
ttaggatgatttcaa

SEQ ID NO: 27969 - DNA, 15 bp, Homo sapiens
attaggatgatttca

SEQ ID NO: 27970 - DNA, 15 bp, Homo sapiens
tattaggatgatttc

SEQ ID NO: 27971 - DNA, 15 bp, Homo sapiens
ttattaggatgattt

SEQ ID NO: 27972 - DNA, 15 bp, Homo sapiens
cttattaggatgatt

SEQ ID NO: 27973 - DNA, 15 bp, Homo sapiens
tcttattaggatgat

SEQ ID NO: 27974 - DNA, 15 bp, Homo sapiens
ttcttattaggatga

SEQ ID NO: 27975 - DNA, 15 bp, Homo sapiens
tttcttattaggatg

SEQ ID NO: 27976 - DNA, 15 bp, Homo sapiens
atttcttattaggat

SEQ ID NO: 27977 - DNA, 15 bp, Homo sapiens
gatttcttattagga

SEQ ID NO: 27978 - DNA, 15 bp, Homo sapiens
ggatttcttattagg

SEQ ID NO: 27979 - DNA, 15 bp, Homo sapiens
tggatttcttattag

SEQ ID NO: 27980 - DNA, 15 bp, Homo sapiens
ttggatttcttatta

SEQ ID NO: 27981 - DNA, 15 bp, Homo sapiens
cttggatttcttatt

SEQ ID NO: 27982 - DNA, 15 bp, Homo sapiens
ccttggatttcttat

SEQ ID NO: 27983 - DNA, 15 bp, Homo sapiens
tccttggatttctta

SEQ ID NO: 27984 - DNA, 15 bp, Homo sapiens
ctccttggatttctt

SEQ ID NO: 27985 - DNA, 15 bp, Homo sapiens
cctccttggatttct

SEQ ID NO: 27986 - DNA, 15 bp, Homo sapiens
tcctccttggatttc

SEQ ID NO: 27987 - DNA, 15 bp, Homo sapiens
ttcctccttggattt

SEQ ID NO: 27988 - DNA, 15 bp, Homo sapiens
cttcctccttggatt

SEQ ID NO: 27989 - DNA, 15 bp, Homo sapiens
acttcctccttggat

SEQ ID NO: 27990 - DNA, 15 bp, Homo sapiens
gacttcctccttgga

SEQ ID NO: 27991 - DNA, 15 bp, Homo sapiens
agacttcctccttgg

SEQ ID NO: 27992 - DNA, 15 bp, Homo sapiens
aagacttcctccttg

SEQ ID NO: 27993 - DNA, 15 bp, Homo sapiens
taagacttcctcctt

SEQ ID NO: 27994 - DNA, 15 bp, Homo sapiens
gtaagacttcctcct

SEQ ID NO: 27995 - DNA, 15 bp, Homo sapiens
tgtaagacttcctcc

SEQ ID NO: 27996 - DNA, 15 bp, Homo sapiens
ctgtaagacttcctc

SEQ ID NO: 27997 - DNA, 15 bp, Homo sapiens
cctgtaagacttcct

SEQ ID NO: 27998 - DNA, 15 bp, Homo sapiens
ccctgtaagacttcc

SEQ ID NO: 27999 - DNA, 15 bp, Homo sapiens
accctgtaagacttc

SEQ ID NO: 28000 - DNA, 15 bp, Homo sapiens
caccctgtaagactt

SEQ ID NO: 28001 - DNA, 15 bp, Homo sapiens
gcaccctgtaagact

SEQ ID NO: 28002 - DNA, 15 bp, Homo sapiens
ggcaccctgtaagac

SEQ ID NO: 28003 - DNA, 15 bp, Homo sapiens
aggcaccctgtaaga

SEQ ID NO: 28004 - DNA, 15 bp, Homo sapiens
gaggcaccctgtaag

SEQ ID NO: 28005 - DNA, 15 bp, Homo sapiens
tgaggcaccctgtaa

SEQ ID NO: 28006 - DNA, 15 bp, Homo sapiens
gtgaggcaccctgta

SEQ ID NO: 28007 - DNA, 15 bp, Homo sapiens
ggtgaggcaccctgt

SEQ ID NO: 28008 - DNA, 15 bp, Homo sapiens
gggtgaggcaccctg

SEQ ID NO: 28009 - DNA, 15 bp, Homo sapiens
tgggtgaggcaccct

SEQ ID NO: 28010 - DNA, 15 bp, Homo sapiens
gtgggtgaggcaccc

SEQ ID NO: 28011 - DNA, 15 bp, Homo sapiens
agtgggtgaggcacc

SEQ ID NO: 28012 - DNA, 15 bp, Homo sapiens
aagtgggtgaggcac

SEQ ID NO: 28013 - DNA, 15 bp, Homo sapiens
aaagtgggtgaggca

SEQ ID NO: 28014 - DNA, 15 bp, Homo sapiens
aaaagtgggtgaggc

SEQ ID NO: 28015 - DNA, 15 bp, Homo sapiens
gaaaagtgggtgagg

SEQ ID NO: 28016 - DNA, 15 bp, Homo sapiens
agaaaagtgggtgag

SEQ ID NO: 28017 - DNA, 15 bp, Homo sapiens
gagaaaagtgggtga

SEQ ID NO: 28018 - DNA, 15 bp, Homo sapiens
tgagaaaagtgggtg

SEQ ID NO: 28019 - DNA, 15 bp, Homo sapiens
atgagaaaagtgggt

SEQ ID NO: 28020 - DNA, 15 bp, Homo sapiens
gatgagaaaagtggg

SEQ ID NO: 28021 - DNA, 15 bp, Homo sapiens
tgatgagaaaagtgg

SEQ ID NO: 28022 - DNA, 15 bp, Homo sapiens
gtgatgagaaaagtg

SEQ ID NO: 28023 - DNA, 15 bp, Homo sapiens
agtgatgagaaaagt

SEQ ID NO: 28024 - DNA, 15 bp, Homo sapiens
cagtgatgagaaaag

SEQ ID NO: 28025 - DNA, 15 bp, Homo sapiens
ccagtgatgagaaaa

SEQ ID NO: 28026 - DNA, 15 bp, Homo sapiens
tccagtgatgagaaa

SEQ ID NO: 28027 - DNA, 15 bp, Homo sapiens
ttccagtgatgagaa

SEQ ID NO: 28028 - DNA, 15 bp, Homo sapiens
gttccagtgatgaga

SEQ ID NO: 28029 - DNA, 15 bp, Homo sapiens
agttccagtgatgag

SEQ ID NO: 28030 - DNA, 15 bp, Homo sapiens
aagttccagtgatga

SEQ ID NO: 28031 - DNA, 15 bp, Homo sapiens
aaagttccagtgatg

SEQ ID NO: 28032 - DNA, 15 bp, Homo sapiens
aaaagttccagtgat

SEQ ID NO: 28033 - DNA, 15 bp, Homo sapiens
aaaaagttccagtga

SEQ ID NO: 28034 - DNA, 15 bp, Homo sapiens
taaaaagttccagtg

SEQ ID NO: 28035 - DNA, 15 bp, Homo sapiens
ctaaaaagttccagt

SEQ ID NO: 28036 - DNA, 15 bp, Homo sapiens
tctaaaaagttccag

SEQ ID NO: 28037 - DNA, 15 bp, Homo sapiens
gtctaaaaagttcca

SEQ ID NO: 28038 - DNA, 15 bp, Homo sapiens
tgtctaaaaagttcc

SEQ ID NO: 28039 - DNA, 15 bp, Homo sapiens
atgtctaaaaagttc

SEQ ID NO: 28040 - DNA, 15 bp, Homo sapiens
aatgtctaaaaagtt

SEQ ID NO: 28041 - DNA, 15 bp, Homo sapiens
aaatgtctaaaaagt

SEQ ID NO: 28042 - DNA, 15 bp, Homo sapiens
aaaatgtctaaaaag

SEQ ID NO: 28043 - DNA, 15 bp, Homo sapiens
taaaatgtctaaaaa

SEQ ID NO: 28044 - DNA, 15 bp, Homo sapiens
ataaaatgtctaaaa

SEQ ID NO: 28045 - DNA, 15 bp, Homo sapiens
aataaaatgtctaaa

SEQ ID NO: 28046 - DNA, 15 bp, Homo sapiens
taataaaatgtctaa

SEQ ID NO: 28047 - DNA, 15 bp, Homo sapiens
ataataaaatgtcta

SEQ ID NO: 28048 - DNA, 15 bp, Homo sapiens
aataataaaatgtct

SEQ ID NO: 28049 - DNA, 15 bp, Homo sapiens
aaataataaaatgtc

SEQ ID NO: 28050 - DNA, 15 bp, Homo sapiens
aaaataataaaatgt

SEQ ID NO: 28051 - DNA, 15 bp, Homo sapiens
gaaaataataaaatg

SEQ ID NO: 28052 - DNA, 15 bp, Homo sapiens
agaaaataataaaat

SEQ ID NO: 28053 - DNA, 15 bp, Homo sapiens
aagaaaataataaaa

SEQ ID NO: 28054 - DNA, 15 bp, Homo sapiens
gaagaaaataataaa

SEQ ID NO: 28055 - DNA, 15 bp, Homo sapiens
ggaagaaaataataa

SEQ ID NO: 28056 - DNA, 15 bp, Homo sapiens
aggaagaaaataata

SEQ ID NO: 28057 - DNA, 15 bp, Homo sapiens
taggaagaaaataat

SEQ ID NO: 28058 - DNA, 15 bp, Homo sapiens
ttaggaagaaaataa

SEQ ID NO: 28059 - DNA, 15 bp, Homo sapiens
tttaggaagaaaata

SEQ ID NO: 28060 - DNA, 15 bp, Homo sapiens
gtttaggaagaaaat

SEQ ID NO: 28061 - DNA, 15 bp, Homo sapiens
ggtttaggaagaaaa

SEQ ID NO: 28062 - DNA, 15 bp, Homo sapiens
tggtttaggaagaaa

SEQ ID NO: 28063 - DNA, 15 bp, Homo sapiens
ctggtttaggaagaa

SEQ ID NO: 28064 - DNA, 15 bp, Homo sapiens
tctggtttaggaaga

SEQ ID NO: 28065 - DNA, 15 bp, Homo sapiens
ctctggtttaggaag

SEQ ID NO: 28066 - DNA, 15 bp, Homo sapiens
actctggtttaggaa

SEQ ID NO: 28067 - DNA, 15 bp, Homo sapiens
tactctggtttagga

SEQ ID NO: 28068 - DNA, 15 bp, Homo sapiens
gtactctggtttagg

SEQ ID NO: 28069 - DNA, 15 bp, Homo sapiens
tgtactctggtttag

SEQ ID NO: 28070 - DNA, 15 bp, Homo sapiens
ctgtactctggttta

SEQ ID NO: 28071 - DNA, 15 bp, Homo sapiens
cctgtactctggttt

SEQ ID NO: 28072 - DNA, 15 bp, Homo sapiens
gcctgtactctggtt

SEQ ID NO: 28073 - DNA, 15 bp, Homo sapiens
tgcctgtactctggt

SEQ ID NO: 28074 - DNA, 15 bp, Homo sapiens
gtgcctgtactctgg

SEQ ID NO: 28075 - DNA, 15 bp, Homo sapiens
tgtgcctgtactctg

SEQ ID NO: 28076 - DNA, 15 bp, Homo sapiens
gtgtgcctgtactct

SEQ ID NO: 28077 - DNA, 15 bp, Homo sapiens
tgtgtgcctgtactc

SEQ ID NO: 28078 - DNA, 15 bp, Homo sapiens
ttgtgtgcctgtact

SEQ ID NO: 28079 - DNA, 15 bp, Homo sapiens
cttgtgtgcctgtac

SEQ ID NO: 28080 - DNA, 15 bp, Homo sapiens
acttgtgtgcctgta

SEQ ID NO: 28081 - DNA, 15 bp, Homo sapiens
aacttgtgtgcctgt

SEQ ID NO: 28082 - DNA, 15 bp, Homo sapiens
caacttgtgtgcctg

SEQ ID NO: 28083 - DNA, 15 bp, Homo sapiens
tcaacttgtgtgcct

SEQ ID NO: 28084 - DNA, 15 bp, Homo sapiens
ctcaacttgtgtgcc

SEQ ID NO: 28085 - DNA, 15 bp, Homo sapiens
actcaacttgtgtgc

SEQ ID NO: 28086 - DNA, 15 bp, Homo sapiens
cactcaacttgtgtg

SEQ ID NO: 28087 - DNA, 15 bp, Homo sapiens
ccactcaacttgtgt

SEQ ID NO: 28088 - DNA, 15 bp, Homo sapiens
accactcaacttgtg

SEQ ID NO: 28089 - DNA, 15 bp, Homo sapiens
caccactcaacttgt

SEQ ID NO: 28090 - DNA, 15 bp, Homo sapiens
acaccactcaacttg

SEQ ID NO: 28091 - DNA, 15 bp, Homo sapiens
cacaccactcaactt

SEQ ID NO: 28092 - DNA, 15 bp, Homo sapiens
ccacaccactcaact

SEQ ID NO: 28093 - DNA, 15 bp, Homo sapiens
accacaccactcaac

SEQ ID NO: 28094 - DNA, 15 bp, Homo sapiens
caccacaccactcaa

SEQ ID NO: 28095 - DNA, 15 bp, Homo sapiens
ccaccacaccactca

SEQ ID NO: 28096 - DNA, 15 bp, Homo sapiens
gccaccacaccactc

SEQ ID NO: 28097 - DNA, 15 bp, Homo sapiens
agccaccacaccact

SEQ ID NO: 28098 - DNA, 15 bp, Homo sapiens
tagccaccacaccac

SEQ ID NO: 28099 - DNA, 15 bp, Homo sapiens
ttagccaccacacca

SEQ ID NO: 28100 - DNA, 15 bp, Homo sapiens
tttagccaccacacc

SEQ ID NO: 28101 - DNA, 15 bp, Homo sapiens
atttagccaccacac

SEQ ID NO: 28102 - DNA, 15 bp, Homo sapiens
aatttagccaccaca

SEQ ID NO: 28103 - DNA, 15 bp, Homo sapiens
taatttagccaccac

SEQ ID NO: 28104 - DNA, 15 bp, Homo sapiens
ttaatttagccacca

SEQ ID NO: 28105 - DNA, 15 bp, Homo sapiens
attaatttagccacc

SEQ ID NO: 28106 - DNA, 15 bp, Homo sapiens
aattaatttagccac

SEQ ID NO: 28107 - DNA, 15 bp, Homo sapiens
taattaatttagcca

SEQ ID NO: 28108 - DNA, 15 bp, Homo sapiens
ttaattaatttagcc

SEQ ID NO: 28109 - DNA, 15 bp, Homo sapiens
attaattaatttagc

SEQ ID NO: 28110 - DNA, 15 bp, Homo sapiens
cattaattaatttag

SEQ ID NO: 28111 - DNA, 15 bp, Homo sapiens
acattaattaattta

SEQ ID NO: 28112 - DNA, 15 bp, Homo sapiens
aacattaattaattt

SEQ ID NO: 28113 - DNA, 15 bp, Homo sapiens
aaacattaattaatt

SEQ ID NO: 28114 - DNA, 15 bp, Homo sapiens
caaacattaattaat

SEQ ID NO: 28115 - DNA, 15 bp, Homo sapiens
gcaaacattaattaa

SEQ ID NO: 28116 - DNA, 15 bp, Homo sapiens
tgcaaacattaatta

SEQ ID NO: 28117 - DNA, 15 bp, Homo sapiens
ttgcaaacattaatt

SEQ ID NO: 28118 - DNA, 15 bp, Homo sapiens
cttgcaaacattaat

SEQ ID NO: 28119 - DNA, 15 bp, Homo sapiens
ccttgcaaacattaa

SEQ ID NO: 28120 - DNA, 15 bp, Homo sapiens
gccttgcaaacatta

SEQ ID NO: 28121 - DNA, 15 bp, Homo sapiens
tgccttgcaaacatt

SEQ ID NO: 28122 - DNA, 15 bp, Homo sapiens
ctgccttgcaaacat

SEQ ID NO: 28123 - DNA, 15 bp, Homo sapiens
actgccttgcaaaca

SEQ ID NO: 28124 - DNA, 15 bp, Homo sapiens
cactgccttgcaaac

SEQ ID NO: 28125 - DNA, 15 bp, Homo sapiens
acactgccttgcaaa

SEQ ID NO: 28126 - DNA, 15 bp, Homo sapiens
cacactgccttgcaa

SEQ ID NO: 28127 - DNA, 15 bp, Homo sapiens
tcacactgccttgca

SEQ ID NO: 28128 - DNA, 15 bp, Homo sapiens
ctcacactgccttgc

SEQ ID NO: 28129 - DNA, 15 bp, Homo sapiens
tctcacactgccttg

SEQ ID NO: 28130 - DNA, 15 bp, Homo sapiens
ttctcacactgcctt

SEQ ID NO: 28131 - DNA, 15 bp, Homo sapiens
cttctcacactgcct

SEQ ID NO: 28132 - DNA, 15 bp, Homo sapiens
gcttctcacactgcc

SEQ ID NO: 28133 - DNA, 15 bp, Homo sapiens
tgcttctcacactgc

SEQ ID NO: 28134 - DNA, 15 bp, Homo sapiens
atgcttctcacactg

SEQ ID NO: 28135 - DNA, 15 bp, Homo sapiens
aatgcttctcacact

SEQ ID NO: 28136 - DNA, 15 bp, Homo sapiens
gaatgcttctcacac

SEQ ID NO: 28137 - DNA, 15 bp, Homo sapiens
tgaatgcttctcaca

SEQ ID NO: 28138 - DNA, 15 bp, Homo sapiens
atgaatgcttctcac

SEQ ID NO: 28139 - DNA, 15 bp, Homo sapiens
aatgaatgcttctca

SEQ ID NO: 28140 - DNA, 15 bp, Homo sapiens
gaatgaatgcttctc

SEQ ID NO: 28141 - DNA, 15 bp, Homo sapiens
tgaatgaatgcttct

SEQ ID NO: 28142 - DNA, 15 bp, Homo sapiens
atgaatgaatgcttc

SEQ ID NO: 28143 - DNA, 15 bp, Homo sapiens
gatgaatgaatgctt

SEQ ID NO: 28144 - DNA, 15 bp, Homo sapiens
agatgaatgaatgct

SEQ ID NO: 28145 - DNA, 15 bp, Homo sapiens
aagatgaatgaatgc

SEQ ID NO: 28146 - DNA, 15 bp, Homo sapiens
taagatgaatgaatg

SEQ ID NO: 28147 - DNA, 15 bp, Homo sapiens
ttaagatgaatgaat

SEQ ID NO: 28148 - DNA, 15 bp, Homo sapiens
tttaagatgaatgaa

SEQ ID NO: 28149 - DNA, 15 bp, Homo sapiens
atttaagatgaatga

SEQ ID NO: 28150 - DNA, 15 bp, Homo sapiens
tatttaagatgaatg

SEQ ID NO: 28151 - DNA, 15 bp, Homo sapiens
gtatttaagatgaat

SEQ ID NO: 28152 - DNA, 15 bp, Homo sapiens
ggtatttaagatgaa

SEQ ID NO: 28153 - DNA, 15 bp, Homo sapiens
aggtatttaagatga

SEQ ID NO: 28154 - DNA, 15 bp, Homo sapiens
taggtatttaagatg

SEQ ID NO: 28155 - DNA, 15 bp, Homo sapiens
ataggtatttaagat

SEQ ID NO: 28156 - DNA, 15 bp, Homo sapiens
cataggtatttaaga

SEQ ID NO: 28157 - DNA, 15 bp, Homo sapiens
ccataggtatttaag

SEQ ID NO: 28158 - DNA, 15 bp, Homo sapiens
accataggtatttaa

SEQ ID NO: 28159 - DNA, 15 bp, Homo sapiens
caccataggtattta

SEQ ID NO: 28160 - DNA, 15 bp, Homo sapiens
tcaccataggtattt

SEQ ID NO: 28161 - DNA, 15 bp, Homo sapiens
gtcaccataggtatt

SEQ ID NO: 28162 - DNA, 15 bp, Homo sapiens
agtcaccataggtat

SEQ ID NO: 28163 - DNA, 15 bp, Homo sapiens
cagtcaccataggta

SEQ ID NO: 28164 - DNA, 15 bp, Homo sapiens
gcagtcaccataggt

SEQ ID NO: 28165 - DNA, 15 bp, Homo sapiens
tgcagtcaccatagg

SEQ ID NO: 28166 - DNA, 15 bp, Homo sapiens
ttgcagtcaccatag

SEQ ID NO: 28167 - DNA, 15 bp, Homo sapiens
gttgcagtcaccata

SEQ ID NO: 28168 - DNA, 15 bp, Homo sapiens
agttgcagtcaccat

SEQ ID NO: 28169 - DNA, 15 bp, Homo sapiens
gagttgcagtcacca

SEQ ID NO: 28170 - DNA, 15 bp, Homo sapiens
tgagttgcagtcacc

SEQ ID NO: 28171 - DNA, 15 bp, Homo sapiens
ctgagttgcagtcac

SEQ ID NO: 28172 - DNA, 15 bp, Homo sapiens
tctgagttgcagtca

SEQ ID NO: 28173 - DNA, 15 bp, Homo sapiens
atctgagttgcagtc

SEQ ID NO: 28174 - DNA, 15 bp, Homo sapiens
catctgagttgcagt

SEQ ID NO: 28175 - DNA, 15 bp, Homo sapiens
acatctgagttgcag

SEQ ID NO: 28176 - DNA, 15 bp, Homo sapiens
tacatctgagttgca

SEQ ID NO: 28177 - DNA, 15 bp, Homo sapiens
ttacatctgagttgc

SEQ ID NO: 28178 - DNA, 15 bp, Homo sapiens
tttacatctgagttg

SEQ ID NO: 28179 - DNA, 15 bp, Homo sapiens
ttttacatctgagtt

SEQ ID NO: 28180 - DNA, 15 bp, Homo sapiens
tttttacatctgagt

SEQ ID NO: 28181 - DNA, 15 bp, Homo sapiens
atttttacatctgag

SEQ ID NO: 28182 - DNA, 15 bp, Homo sapiens
aatttttacatctga

SEQ ID NO: 28183 - DNA, 15 bp, Homo sapiens
caatttttacatctg

SEQ ID NO: 28184 - DNA, 15 bp, Homo sapiens
ccaatttttacatct

SEQ ID NO: 28185 - DNA, 15 bp, Homo sapiens
tccaatttttacatc

SEQ ID NO: 28186 - DNA, 15 bp, Homo sapiens
atccaatttttacat

SEQ ID NO: 28187 - DNA, 15 bp, Homo sapiens
tatccaatttttaca

SEQ ID NO: 28188 - DNA, 15 bp, Homo sapiens
ttatccaatttttac

SEQ ID NO: 28189 - DNA, 15 bp, Homo sapiens
tttatccaattttta

SEQ ID NO: 28190 - DNA, 15 bp, Homo sapiens
atttatccaattttt

SEQ ID NO: 28191 - DNA, 15 bp, Homo sapiens
gatttatccaatttt

SEQ ID NO: 28192 - DNA, 15 bp, Homo sapiens
ggatttatccaattt

SEQ ID NO: 28193 - DNA, 15 bp, Homo sapiens
aggatttatccaatt

SEQ ID NO: 28194 - DNA, 15 bp, Homo sapiens
gaggatttatccaat

SEQ ID NO: 28195 - DNA, 15 bp, Homo sapiens
tgaggatttatccaa

SEQ ID NO: 28196 - DNA, 15 bp, Homo sapiens
ctgaggatttatcca

SEQ ID NO: 28197 - DNA, 15 bp, Homo sapiens
tctgaggatttatcc

SEQ ID NO: 28198 - DNA, 15 bp, Homo sapiens
ttctgaggatttatc

SEQ ID NO: 28199 - DNA, 15 bp, Homo sapiens
tttctgaggatttat

SEQ ID NO: 28200 - DNA, 15 bp, Homo sapiens
gtttctgaggattta

SEQ ID NO: 28201 - DNA, 15 bp, Homo sapiens
ggtttctgaggattt

SEQ ID NO: 28202 - DNA, 15 bp, Homo sapiens
gggtttctgaggatt

SEQ ID NO: 28203 - DNA, 15 bp, Homo sapiens
agggtttctgaggat

SEQ ID NO: 28204 - DNA, 15 bp, Homo sapiens
tagggtttctgagga

SEQ ID NO: 28205 - DNA, 15 bp, Homo sapiens
ctagggtttctgagg

SEQ ID NO: 28206 - DNA, 15 bp, Homo sapiens
cctagggtttctgag

SEQ ID NO: 28207 - DNA, 15 bp, Homo sapiens
ccctagggtttctga

SEQ ID NO: 28208 - DNA, 15 bp, Homo sapiens
tccctagggtttctg

SEQ ID NO: 28209 - DNA, 15 bp, Homo sapiens
ttccctagggtttct

SEQ ID NO: 28210 - DNA, 15 bp, Homo sapiens
tttccctagggtttc

SEQ ID NO: 28211 - DNA, 15 bp, Homo sapiens
ctttccctagggttt

SEQ ID NO: 28212 - DNA, 15 bp, Homo sapiens
actttccctagggtt

SEQ ID NO: 28213 - DNA, 15 bp, Homo sapiens
cactttccctagggt

SEQ ID NO: 28214 - DNA, 15 bp, Homo sapiens
tcactttccctaggg

SEQ ID NO: 28215 - DNA, 15 bp, Homo sapiens
gtcactttccctagg

SEQ ID NO: 28216 - DNA, 15 bp, Homo sapiens
tgtcactttccctag

SEQ ID NO: 28217 - DNA, 15 bp, Homo sapiens
atgtcactttcccta

SEQ ID NO: 28218 - DNA, 15 bp, Homo sapiens
catgtcactttccct

SEQ ID NO: 28219 - DNA, 15 bp, Homo sapiens
acatgtcactttccc

SEQ ID NO: 28220 - DNA, 15 bp, Homo sapiens
gacatgtcactttcc

SEQ ID NO: 28221 - DNA, 15 bp, Homo sapiens
agacatgtcactttc

SEQ ID NO: 28222 - DNA, 15 bp, Homo sapiens
cagacatgtcacttt

SEQ ID NO: 28223 - DNA, 15 bp, Homo sapiens
acagacatgtcactt

SEQ ID NO: 28224 - DNA, 15 bp, Homo sapiens
tacagacatgtcact

SEQ ID NO: 28225 - DNA, 15 bp, Homo sapiens
atacagacatgtcac

SEQ ID NO: 28226 - DNA, 15 bp, Homo sapiens
aatacagacatgtca

SEQ ID NO: 28227 - DNA, 15 bp, Homo sapiens
aaatacagacatgtc

SEQ ID NO: 28228 - DNA, 15 bp, Homo sapiens
aaaatacagacatgt

SEQ ID NO: 28229 - DNA, 15 bp, Homo sapiens
caaaatacagacatg

SEQ ID NO: 28230 - DNA, 15 bp, Homo sapiens
acaaaatacagacat

SEQ ID NO: 28231 - DNA, 15 bp, Homo sapiens
gacaaaatacagaca

SEQ ID NO: 28232 - DNA, 15 bp, Homo sapiens
agacaaaatacagac

SEQ ID NO: 28233 - DNA, 15 bp, Homo sapiens
gagacaaaatacaga

SEQ ID NO: 28234 - DNA, 15 bp, Homo sapiens
agagacaaaatacag

SEQ ID NO: 28235 - DNA, 15 bp, Homo sapiens
cagagacaaaataca

SEQ ID NO: 28236 - DNA, 15 bp, Homo sapiens
acagagacaaaatac

SEQ ID NO: 28237 - DNA, 15 bp, Homo sapiens
cacagagacaaaata

SEQ ID NO: 28238 - DNA, 15 bp, Homo sapiens
tcacagagacaaaat

SEQ ID NO: 28239 - DNA, 15 bp, Homo sapiens
ctcacagagacaaaa

SEQ ID NO: 28240 - DNA, 15 bp, Homo sapiens
tctcacagagacaaa

SEQ ID NO: 28241 - DNA, 15 bp, Homo sapiens
atctcacagagacaa

SEQ ID NO: 28242 - DNA, 15 bp, Homo sapiens
tatctcacagagaca

SEQ ID NO: 28243 - DNA, 15 bp, Homo sapiens
gtatctcacagagac

SEQ ID NO: 28244 - DNA, 15 bp, Homo sapiens
tgtatctcacagaga

SEQ ID NO: 28245 - DNA, 15 bp, Homo sapiens
ctgtatctcacagag

SEQ ID NO: 28246 - DNA, 15 bp, Homo sapiens
tctgtatctcacaga

SEQ ID NO: 28247 - DNA, 15 bp, Homo sapiens
gtctgtatctcacag

SEQ ID NO: 28248 - DNA, 15 bp, Homo sapiens
agtctgtatctcaca

SEQ ID NO: 28249 - DNA, 15 bp, Homo sapiens
cagtctgtatctcac

SEQ ID NO: 28250 - DNA, 15 bp, Homo sapiens
ccagtctgtatctca

SEQ ID NO: 28251 - DNA, 15 bp, Homo sapiens
gccagtctgtatctc

SEQ ID NO: 28252 - DNA, 15 bp, Homo sapiens
tgccagtctgtatct

SEQ ID NO: 28253 - DNA, 15 bp, Homo sapiens
ctgccagtctgtatc

SEQ ID NO: 28254 - DNA, 15 bp, Homo sapiens
tctgccagtctgtat

SEQ ID NO: 28255 - DNA, 15 bp, Homo sapiens
ctctgccagtctgta

SEQ ID NO: 28256 - DNA, 15 bp, Homo sapiens
tctctgccagtctgt

SEQ ID NO: 28257 - DNA, 15 bp, Homo sapiens
atctctgccagtctg

SEQ ID NO: 28258 - DNA, 15 bp, Homo sapiens
tatctctgccagtct

SEQ ID NO: 28259 - DNA, 15 bp, Homo sapiens
ttatctctgccagtc

SEQ ID NO: 28260 - DNA, 15 bp, Homo sapiens
cttatctctgccagt

SEQ ID NO: 28261 - DNA, 15 bp, Homo sapiens
acttatctctgccag

SEQ ID NO: 28262 - DNA, 15 bp, Homo sapiens
cacttatctctgcca

SEQ ID NO: 28263 - DNA, 15 bp, Homo sapiens
acacttatctctgcc

SEQ ID NO: 28264 - DNA, 15 bp, Homo sapiens
aacacttatctctgc

SEQ ID NO: 28265 - DNA, 15 bp, Homo sapiens
aaacacttatctctg

SEQ ID NO: 28266 - DNA, 15 bp, Homo sapiens
gaaacacttatctct

SEQ ID NO: 28267 - DNA, 15 bp, Homo sapiens
agaaacacttatctc

SEQ ID NO: 28268 - DNA, 15 bp, Homo sapiens
gagaaacacttatct

SEQ ID NO: 28269 - DNA, 15 bp, Homo sapiens
agagaaacacttatc

SEQ ID NO: 28270 - DNA, 15 bp, Homo sapiens
cagagaaacacttat

SEQ ID NO: 28271 - DNA, 15 bp, Homo sapiens
ccagagaaacactta

SEQ ID NO: 28272 - DNA, 15 bp, Homo sapiens
cccagagaaacactt

SEQ ID NO: 28273 - DNA, 15 bp, Homo sapiens
acccagagaaacact

SEQ ID NO: 28274 - DNA, 15 bp, Homo sapiens
cacccagagaaacac

SEQ ID NO: 28275 - DNA, 15 bp, Homo sapiens
tcacccagagaaaca

SEQ ID NO: 28276 - DNA, 15 bp, Homo sapiens
ctcacccagagaaac

SEQ ID NO: 28277 - DNA, 15 bp, Homo sapiens
actcacccagagaaa

SEQ ID NO: 28278 - DNA, 15 bp, Homo sapiens
aactcacccagagaa

SEQ ID NO: 28279 - DNA, 15 bp, Homo sapiens
aaactcacccagaga

SEQ ID NO: 28280 - DNA, 15 bp, Homo sapiens
aaaactcacccagag

SEQ ID NO: 28281 - DNA, 15 bp, Homo sapiens
caaaactcacccaga

SEQ ID NO: 28282 - DNA, 15 bp, Homo sapiens
acaaaactcacccag

SEQ ID NO: 28283 - DNA, 15 bp, Homo sapiens
cacaaaactcaccca

SEQ ID NO: 28284 - DNA, 15 bp, Homo sapiens
acacaaaactcaccc

SEQ ID NO: 28285 - DNA, 15 bp, Homo sapiens
cacacaaaactcacc

SEQ ID NO: 28286 - DNA, 15 bp, Homo sapiens
ccacacaaaactcac

SEQ ID NO: 28287 - DNA, 15 bp, Homo sapiens
accacacaaaactca

SEQ ID NO: 28288 - DNA, 15 bp, Homo sapiens
taccacacaaaactc

SEQ ID NO: 28289 - DNA, 15 bp, Homo sapiens
ataccacacaaaact

SEQ ID NO: 28290 - DNA, 15 bp, Homo sapiens
gataccacacaaaac

SEQ ID NO: 28291 - DNA, 15 bp, Homo sapiens
agataccacacaaaa

SEQ ID NO: 28292 - DNA, 15 bp, Homo sapiens
cagataccacacaaa

SEQ ID NO: 28293 - DNA, 15 bp, Homo sapiens
ccagataccacacaa

SEQ ID NO: 28294 - DNA, 15 bp, Homo sapiens
cccagataccacaca

SEQ ID NO: 28295 - DNA, 15 bp, Homo sapiens
tcccagataccacac

SEQ ID NO: 28296 - DNA, 15 bp, Homo sapiens
atcccagataccaca

SEQ ID NO: 28297 - DNA, 15 bp, Homo sapiens
catcccagataccac

SEQ ID NO: 28298 - DNA, 15 bp, Homo sapiens
tcatcccagatacca

SEQ ID NO: 28299 - DNA, 15 bp, Homo sapiens
atcatcccagatacc

SEQ ID NO: 28300 - DNA, 15 bp, Homo sapiens
aatcatcccagatac

SEQ ID NO: 28301 - DNA, 15 bp, Homo sapiens
aaatcatcccagata

SEQ ID NO: 28302 - DNA, 15 bp, Homo sapiens
aaaatcatcccagat

SEQ ID NO: 28303 - DNA, 15 bp, Homo sapiens
taaaatcatcccaga

SEQ ID NO: 28304 - DNA, 15 bp, Homo sapiens
ctaaaatcatcccag

SEQ ID NO: 28305 - DNA, 15 bp, Homo sapiens
cctaaaatcatccca

SEQ ID NO: 28306 - DNA, 15 bp, Homo sapiens
gcctaaaatcatccc

SEQ ID NO: 28307 - DNA, 15 bp, Homo sapiens
tgcctaaaatcatcc

SEQ ID NO: 28308 - DNA, 15 bp, Homo sapiens
ctgcctaaaatcatc

SEQ ID NO: 28309 - DNA, 15 bp, Homo sapiens
actgcctaaaatcat

SEQ ID NO: 28310 - DNA, 15 bp, Homo sapiens
tactgcctaaaatca

SEQ ID NO: 28311 - DNA, 15 bp, Homo sapiens
gtactgcctaaaatc

SEQ ID NO: 28312 - DNA, 15 bp, Homo sapiens
cgtactgcctaaaat

SEQ ID NO: 28313 - DNA, 15 bp, Homo sapiens
acgtactgcctaaaa

SEQ ID NO: 28314 - DNA, 15 bp, Homo sapiens
cacgtactgcctaaa

SEQ ID NO: 28315 - DNA, 15 bp, Homo sapiens
ccacgtactgcctaa

SEQ ID NO: 28316 - DNA, 15 bp, Homo sapiens
tccacgtactgccta

SEQ ID NO: 28317 - DNA, 15 bp, Homo sapiens
atccacgtactgcct

SEQ ID NO: 28318 - DNA, 15 bp, Homo sapiens
catccacgtactgcc

SEQ ID NO: 28319 - DNA, 15 bp, Homo sapiens
tcatccacgtactgc

SEQ ID NO: 28320 - DNA, 15 bp, Homo sapiens
ctcatccacgtactg

SEQ ID NO: 28321 - DNA, 15 bp, Homo sapiens
tctcatccacgtact

SEQ ID NO: 28322 - DNA, 15 bp, Homo sapiens
ttctcatccacgtac

SEQ ID NO: 28323 - DNA, 15 bp, Homo sapiens
gttctcatccacgta

SEQ ID NO: 28324 - DNA, 15 bp, Homo sapiens
agttctcatccacgt

SEQ ID NO: 28325 - DNA, 15 bp, Homo sapiens
aagttctcatccacg

SEQ ID NO: 28326 - DNA, 15 bp, Homo sapiens
aaagttctcatccac

SEQ ID NO: 28327 - DNA, 15 bp, Homo sapiens
aaaagttctcatcca

SEQ ID NO: 28328 - DNA, 15 bp, Homo sapiens
taaaagttctcatcc

SEQ ID NO: 28329 - DNA, 15 bp, Homo sapiens
ttaaaagttctcatc

SEQ ID NO: 28330 - DNA, 15 bp, Homo sapiens
attaaaagttctcat

SEQ ID NO: 28331 - DNA, 15 bp, Homo sapiens
aattaaaagttctca

SEQ ID NO: 28332 - DNA, 15 bp, Homo sapiens
aaattaaaagttctc

SEQ ID NO: 28333 - DNA, 15 bp, Homo sapiens
aaaattaaaagttct

SEQ ID NO: 28334 - DNA, 15 bp, Homo sapiens
taaaattaaaagttc

SEQ ID NO: 28335 - DNA, 15 bp, Homo sapiens
ttaaaattaaaagtt

SEQ ID NO: 28336 - DNA, 15 bp, Homo sapiens
gttaaaattaaaagt

SEQ ID NO: 28337 - DNA, 15 bp, Homo sapiens
ggttaaaattaaaag

SEQ ID NO: 28338 - DNA, 15 bp, Homo sapiens
gggttaaaattaaaa

SEQ ID NO: 28339 - DNA, 15 bp, Homo sapiens
tgggttaaaattaaa

SEQ ID NO: 28340 - DNA, 15 bp, Homo sapiens
gtgggttaaaattaa

SEQ ID NO: 28341 - DNA, 15 bp, Homo sapiens
tgtgggttaaaatta

SEQ ID NO: 28342 - DNA, 15 bp, Homo sapiens
atgtgggttaaaatt

SEQ ID NO: 28343 - DNA, 15 bp, Homo sapiens
gatgtgggttaaaat

SEQ ID NO: 28344 - DNA, 15 bp, Homo sapiens
ggatgtgggttaaaa

SEQ ID NO: 28345 - DNA, 15 bp, Homo sapiens
tggatgtgggttaaa

SEQ ID NO: 28346 - DNA, 15 bp, Homo sapiens
ttggatgtgggttaa

SEQ ID NO: 28347 - DNA, 15 bp, Homo sapiens
attggatgtgggtta

SEQ ID NO: 28348 - DNA, 15 bp, Homo sapiens
aattggatgtgggtt

SEQ ID NO: 28349 - DNA, 15 bp, Homo sapiens
caattggatgtgggt

SEQ ID NO: 28350 - DNA, 15 bp, Homo sapiens
gcaattggatgtggg

SEQ ID NO: 28351 - DNA, 15 bp, Homo sapiens
tgcaattggatgtgg

SEQ ID NO: 28352 - DNA, 15 bp, Homo sapiens
ttgcaattggatgtg

SEQ ID NO: 28353 - DNA, 15 bp, Homo sapiens
attgcaattggatgt

SEQ ID NO: 28354 - DNA, 15 bp, Homo sapiens
aattgcaattggatg

SEQ ID NO: 28355 - DNA, 15 bp, Homo sapiens
aaattgcaattggat

SEQ ID NO: 28356 - DNA, 15 bp, Homo sapiens
gaaattgcaattgga

SEQ ID NO: 28357 - DNA, 15 bp, Homo sapiens
tgaaattgcaattgg

SEQ ID NO: 28358 - DNA, 15 bp, Homo sapiens
atgaaattgcaattg

SEQ ID NO: 28359 - DNA, 15 bp, Homo sapiens
catgaaattgcaatt

SEQ ID NO: 28360 - DNA, 15 bp, Homo sapiens
ccatgaaattgcaat

SEQ ID NO: 28361 - DNA, 15 bp, Homo sapiens
tccatgaaattgcaa

SEQ ID NO: 28362 - DNA, 15 bp, Homo sapiens
ttccatgaaattgca

SEQ ID NO: 28363 - DNA, 15 bp, Homo sapiens
tttccatgaaattgc

SEQ ID NO: 28364 - DNA, 15 bp, Homo sapiens
atttccatgaaattg

SEQ ID NO: 28365 - DNA, 15 bp, Homo sapiens
aatttccatgaaatt

SEQ ID NO: 28366 - DNA, 15 bp, Homo sapiens
taatttccatgaaat

SEQ ID NO: 28367 - DNA, 15 bp, Homo sapiens
ataatttccatgaaa

SEQ ID NO: 28368 - DNA, 15 bp, Homo sapiens
aataatttccatgaa

SEQ ID NO: 28369 - DNA, 15 bp, Homo sapiens
caataatttccatga

SEQ ID NO: 28370 - DNA, 15 bp, Homo sapiens
gcaataatttccatg

SEQ ID NO: 28371 - DNA, 15 bp, Homo sapiens
agcaataatttccat

SEQ ID NO: 28372 - DNA, 15 bp, Homo sapiens
aagcaataatttcca

SEQ ID NO: 28373 - DNA, 15 bp, Homo sapiens
taagcaataatttcc

SEQ ID NO: 28374 - DNA, 15 bp, Homo sapiens
ctaagcaataatttc

SEQ ID NO: 28375 - DNA, 15 bp, Homo sapiens
cctaagcaataattt

SEQ ID NO: 28376 - DNA, 15 bp, Homo sapiens
tcctaagcaataatt

SEQ ID NO: 28377 - DNA, 15 bp, Homo sapiens
ctcctaagcaataat

SEQ ID NO: 28378 - DNA, 15 bp, Homo sapiens
cctcctaagcaataa

SEQ ID NO: 28379 - DNA, 15 bp, Homo sapiens
tcctcctaagcaata

SEQ ID NO: 28380 - DNA, 15 bp, Homo sapiens
atcctcctaagcaat

SEQ ID NO: 28381 - DNA, 15 bp, Homo sapiens
catcctcctaagcaa

SEQ ID NO: 28382 - DNA, 15 bp, Homo sapiens
acatcctcctaagca

SEQ ID NO: 28383 - DNA, 15 bp, Homo sapiens
aacatcctcctaagc

SEQ ID NO: 28384 - DNA, 15 bp, Homo sapiens
gaacatcctcctaag

SEQ ID NO: 28385 - DNA, 15 bp, Homo sapiens
tgaacatcctcctaa

SEQ ID NO: 28386 - DNA, 15 bp, Homo sapiens
ttgaacatcctccta

SEQ ID NO: 28387 - DNA, 15 bp, Homo sapiens
gttgaacatcctcct

SEQ ID NO: 28388 - DNA, 15 bp, Homo sapiens
tgttgaacatcctcc

SEQ ID NO: 28389 - DNA, 15 bp, Homo sapiens
ctgttgaacatcctc

SEQ ID NO: 28390 - DNA, 15 bp, Homo sapiens
cctgttgaacatcct

SEQ ID NO: 28391 - DNA, 15 bp, Homo sapiens
tcctgttgaacatcc

SEQ ID NO: 28392 - DNA, 15 bp, Homo sapiens
ttcctgttgaacatc

SEQ ID NO: 28393 - DNA, 15 bp, Homo sapiens
tttcctgttgaacat

SEQ ID NO: 28394 - DNA, 15 bp, Homo sapiens
ttttcctgttgaaca

SEQ ID NO: 28395 - DNA, 15 bp, Homo sapiens
tttttcctgttgaac

SEQ ID NO: 28396 - DNA, 15 bp, Homo sapiens
atttttcctgttgaa

SEQ ID NO: 28397 - DNA, 15 bp, Homo sapiens
tatttttcctgttga

SEQ ID NO: 28398 - DNA, 15 bp, Homo sapiens
atatttttcctgttg

SEQ ID NO: 28399 - DNA, 15 bp, Homo sapiens
tatatttttcctgtt

SEQ ID NO: 28400 - DNA, 15 bp, Homo sapiens
ttatatttttcctgt

SEQ ID NO: 28401 - DNA, 15 bp, Homo sapiens
attatatttttcctg

SEQ ID NO: 28402 - DNA, 15 bp, Homo sapiens
aattatatttttcct

SEQ ID NO: 28403 - DNA, 15 bp, Homo sapiens
taattatatttttcc

SEQ ID NO: 28404 - DNA, 15 bp, Homo sapiens
ttaattatatttttc

SEQ ID NO: 28405 - DNA, 15 bp, Homo sapiens
tttaattatattttt

SEQ ID NO: 28406 - DNA, 15 bp, Homo sapiens
ctttaattatatttt

SEQ ID NO: 28407 - DNA, 15 bp, Homo sapiens
actttaattatattt

SEQ ID NO: 28408 - DNA, 15 bp, Homo sapiens
aactttaattatatt

SEQ ID NO: 28409 - DNA, 15 bp, Homo sapiens
taactttaattatat

SEQ ID NO: 28410 - DNA, 15 bp, Homo sapiens
ttaactttaattata

SEQ ID NO: 28411 - DNA, 15 bp, Homo sapiens
attaactttaattat

SEQ ID NO: 28412 - DNA, 15 bp, Homo sapiens
aattaactttaatta

SEQ ID NO: 28413 - DNA, 15 bp, Homo sapiens
gaattaactttaatt

SEQ ID NO: 28414 - DNA, 15 bp, Homo sapiens
tgaattaactttaat

SEQ ID NO: 28415 - DNA, 15 bp, Homo sapiens
ttgaattaactttaa

SEQ ID NO: 28416 - DNA, 15 bp, Homo sapiens
tttgaattaacttta

SEQ ID NO: 28417 - DNA, 15 bp, Homo sapiens
ttttgaattaacttt

SEQ ID NO: 28418 - DNA, 15 bp, Homo sapiens
cttttgaattaactt

SEQ ID NO: 28419 - DNA, 15 bp, Homo sapiens
tcttttgaattaact

SEQ ID NO: 28420 - DNA, 15 bp, Homo sapiens
ttcttttgaattaac

SEQ ID NO: 28421 - DNA, 15 bp, Homo sapiens
tttcttttgaattaa

SEQ ID NO: 28422 - DNA, 15 bp, Homo sapiens
gtttcttttgaatta

SEQ ID NO: 28423 - DNA, 15 bp, Homo sapiens
tgtttcttttgaatt

SEQ ID NO: 28424 - DNA, 15 bp, Homo sapiens
atgtttcttttgaat

SEQ ID NO: 28425 - DNA, 15 bp, Homo sapiens
aatgtttcttttgaa

SEQ ID NO: 28426 - DNA, 15 bp, Homo sapiens
aaatgtttcttttga

SEQ ID NO: 28427 - DNA, 15 bp, Homo sapiens
aaaatgtttcttttg

SEQ ID NO: 28428 - DNA, 15 bp, Homo sapiens
gaaaatgtttctttt

SEQ ID NO: 28429 - DNA, 15 bp, Homo sapiens
agaaaatgtttcttt

SEQ ID NO: 28430 - DNA, 15 bp, Homo sapiens
acagaaaatgtttct

SEQ ID NO: 28431 - DNA, 15 bp, Homo sapiens
cacagaaaatgtttc

SEQ ID NO: 28432 - DNA, 15 bp, Homo sapiens
tcacagaaaatgttt

SEQ ID NO: 28433 - DNA, 15 bp, Homo sapiens
ttcacagaaaatgtt

SEQ ID NO: 28434 - DNA, 15 bp, Homo sapiens
attcacagaaaatgt

SEQ ID NO: 28435 - DNA, 15 bp, Homo sapiens
tattcacagaaaatg

SEQ ID NO: 28436 - DNA, 15 bp, Homo sapiens
atattcacagaaaat

SEQ ID NO: 28437 - DNA, 15 bp, Homo sapiens
catattcacagaaaa

SEQ ID NO: 28438 - DNA, 15 bp, Homo sapiens
ccatattcacagaaa

SEQ ID NO: 28439 - DNA, 15 bp, Homo sapiens
accatattcacagaa

SEQ ID NO: 28440 - DNA, 15 bp, Homo sapiens
taccatattcacaga

SEQ ID NO: 28441 - DNA, 15 bp, Homo sapiens
ttaccatattcacag

SEQ ID NO: 28442 - DNA, 15 bp, Homo sapiens
tttaccatattcaca

SEQ ID NO: 28443 - DNA, 15 bp, Homo sapiens
ttttaccatattcac

SEQ ID NO: 28444 - DNA, 15 bp, Homo sapiens
gttttaccatattca

SEQ ID NO: 28445 - DNA, 15 bp, Homo sapiens
agttttaccatattc

SEQ ID NO: 28446 - DNA, 15 bp, Homo sapiens
aagttttaccatatt

SEQ ID NO: 28447 - DNA, 15 bp, Homo sapiens
caagttttaccatat

SEQ ID NO: 28448 - DNA, 15 bp, Homo sapiens
acaagttttaccata

SEQ ID NO: 28449 - DNA, 15 bp, Homo sapiens
cacaagttttaccat

SEQ ID NO: 28450 - DNA, 15 bp, Homo sapiens
tcacaagttttacca

SEQ ID NO: 28451 - DNA, 15 bp, Homo sapiens
ctcacaagttttacc

SEQ ID NO: 28452 - DNA, 15 bp, Homo sapiens
tctcacaagttttac

SEQ ID NO: 28453 - DNA, 15 bp, Homo sapiens
ctctcacaagtttta

SEQ ID NO: 28454 - DNA, 15 bp, Homo sapiens
actctcacaagtttt

SEQ ID NO: 28455 - DNA, 15 bp, Homo sapiens
tactctcacaagttt

SEQ ID NO: 28456 - DNA, 15 bp, Homo sapiens
ctactctcacaagtt

SEQ ID NO: 28457 - DNA, 15 bp, Homo sapiens
actactctcacaagt

SEQ ID NO: 28458 - DNA, 15 bp, Homo sapiens
aactactctcacaag

SEQ ID NO: 28459 - DNA, 15 bp, Homo sapiens
aaactactctcacaa

SEQ ID NO: 28460 - DNA, 15 bp, Homo sapiens
caaactactctcaca

SEQ ID NO: 28461 - DNA, 15 bp, Homo sapiens
acaaactactctcac

SEQ ID NO: 28462 - DNA, 15 bp, Homo sapiens
tacaaactactctca

SEQ ID NO: 28463 - DNA, 15 bp, Homo sapiens
ttacaaactactctc

SEQ ID NO: 28464 - DNA, 15 bp, Homo sapiens
tttacaaactactct

SEQ ID NO: 28465 - DNA, 15 bp, Homo sapiens
atttacaaactactc

SEQ ID NO: 28466 - DNA, 15 bp, Homo sapiens
catttacaaactact

SEQ ID NO: 28467 - DNA, 15 bp, Homo sapiens
tcatttacaaactac

SEQ ID NO: 28468 - DNA, 15 bp, Homo sapiens
atcatttacaaacta

SEQ ID NO: 28469 - DNA, 15 bp, Homo sapiens
aatcatttacaaact

SEQ ID NO: 28470 - DNA, 15 bp, Homo sapiens
caatcatttacaaac

SEQ ID NO: 28471 - DNA, 15 bp, Homo sapiens
tcaatcatttacaaa

SEQ ID NO: 28472 - DNA, 15 bp, Homo sapiens
ttcaatcatttacaa

SEQ ID NO: 28473 - DNA, 15 bp, Homo sapiens
cttcaatcatttaca

SEQ ID NO: 28474 - DNA, 15 bp, Homo sapiens
tcttcaatcatttac

SEQ ID NO: 28475 - DNA, 15 bp, Homo sapiens
atcttcaatcattta

SEQ ID NO: 28476 - DNA, 15 bp, Homo sapiens
aatcttcaatcattt

SEQ ID NO: 28477 - DNA, 15 bp, Homo sapiens
caatcttcaatcatt

SEQ ID NO: 28478 - DNA, 15 bp, Homo sapiens
ccaatcttcaatcat

SEQ ID NO: 28479 - DNA, 15 bp, Homo sapiens
tccaatcttcaatca

SEQ ID NO: 28480 - DNA, 15 bp, Homo sapiens
ttccaatcttcaatc

SEQ ID NO: 28481 - DNA, 15 bp, Homo sapiens
tttccaatcttcaat

SEQ ID NO: 28482 - DNA, 15 bp, Homo sapiens
ttttccaatcttcaa

SEQ ID NO: 28483 - DNA, 15 bp, Homo sapiens
gttttccaatcttca

SEQ ID NO: 28484 - DNA, 15 bp, Homo sapiens
tgttttccaatcttc

SEQ ID NO: 28485 - DNA, 15 bp, Homo sapiens
atgttttccaatctt

SEQ ID NO: 28486 - DNA, 15 bp, Homo sapiens
aatgttttccaatct

SEQ ID NO: 28487 - DNA, 15 bp, Homo sapiens
caatgttttccaatc

SEQ ID NO: 28488 - DNA, 15 bp, Homo sapiens
ccaatgttttccaat

SEQ ID NO: 28489 - DNA, 15 bp, Homo sapiens
accaatgttttccaa

SEQ ID NO: 28490 - DNA, 15 bp, Homo sapiens
taccaatgttttcca

SEQ ID NO: 28491 - DNA, 15 bp, Homo sapiens
ataccaatgttttcc

SEQ ID NO: 28492 - DNA, 15 bp, Homo sapiens
tataccaatgttttc

SEQ ID NO: 28493 - DNA, 15 bp, Homo sapiens
ttataccaatgtttt

SEQ ID NO: 28494 - DNA, 15 bp, Homo sapiens
cttataccaatgttt

SEQ ID NO: 28495 - DNA, 15 bp, Homo sapiens
tcttataccaatgtt

SEQ ID NO: 28496 - DNA, 15 bp, Homo sapiens
ctcttataccaatgt

SEQ ID NO: 28497 - DNA, 15 bp, Homo sapiens
actcttataccaatg

SEQ ID NO: 28498 - DNA, 15 bp, Homo sapiens
cactcttataccaat

SEQ ID NO: 28499 - DNA, 15 bp, Homo sapiens
tcactcttataccaa

SEQ ID NO: 28500 - DNA, 15 bp, Homo sapiens
ctcactcttatacca

SEQ ID NO: 28501 - DNA, 15 bp, Homo sapiens
actcactcttatacc

SEQ ID NO: 28502 - DNA, 15 bp, Homo sapiens
cactcactcttatac

SEQ ID NO: 28503 - DNA, 15 bp, Homo sapiens
acactcactcttata

SEQ ID NO: 28504 - DNA, 15 bp, Homo sapiens
cacactcactcttat

SEQ ID NO: 28505 - DNA, 15 bp, Homo sapiens
ccacactcactctta

SEQ ID NO: 28506 - DNA, 15 bp, Homo sapiens
cccacactcactctt

SEQ ID NO: 28507 - DNA, 15 bp, Homo sapiens
ccccacactcactct

SEQ ID NO: 28508 - DNA, 15 bp, Homo sapiens
accccacactcactc

SEQ ID NO: 28509 - DNA, 15 bp, Homo sapiens
aaccccacactcact

SEQ ID NO: 28510 - DNA, 15 bp, Homo sapiens
aaaccccacactcac

SEQ ID NO: 28511 - DNA, 15 bp, Homo sapiens
aaaaccccacactca

SEQ ID NO: 28512 - DNA, 15 bp, Homo sapiens
caaaaccccacactc

SEQ ID NO: 28513 - DNA, 15 bp, Homo sapiens
acaaaaccccacact

SEQ ID NO: 28514 - DNA, 15 bp, Homo sapiens
tacaaaaccccacac

SEQ ID NO: 28515 - DNA, 15 bp, Homo sapiens
atacaaaaccccaca

SEQ ID NO: 28516 - DNA, 15 bp, Homo sapiens
aatacaaaaccccac

SEQ ID NO: 28517 - DNA, 15 bp, Homo sapiens
taatacaaaacccca

SEQ ID NO: 28518 - DNA, 15 bp, Homo sapiens
ttaatacaaaacccc

SEQ ID NO: 28519 - DNA, 15 bp, Homo sapiens
cttaatacaaaaccc

SEQ ID NO: 28520 - DNA, 15 bp, Homo sapiens
tcttaatacaaaacc

SEQ ID NO: 28521 - DNA, 15 bp, Homo sapiens
atcttaatacaaaac

SEQ ID NO: 28522 - DNA, 15 bp, Homo sapiens
aatcttaatacaaaa

SEQ ID NO: 28523 - DNA, 15 bp, Homo sapiens
gaatcttaatacaaa

SEQ ID NO: 28524 - DNA, 15 bp, Homo sapiens
tgaatcttaatacaa

SEQ ID NO: 28525 - DNA, 15 bp, Homo sapiens
atgaatcttaataca

SEQ ID NO: 28526 - DNA, 15 bp, Homo sapiens
aatgaatcttaatac

SEQ ID NO: 28527 - DNA, 15 bp, Homo sapiens
aaatgaatcttaata

SEQ ID NO: 28528 - DNA, 15 bp, Homo sapiens
aaaatgaatcttaat

SEQ ID NO: 28529 - DNA, 15 bp, Homo sapiens
caaaatgaatcttaa

SEQ ID NO: 28530 - DNA, 15 bp, Homo sapiens
ccaaaatgaatctta

SEQ ID NO: 28531 - DNA, 15 bp, Homo sapiens
cccaaaatgaatctt

SEQ ID NO: 28532 - DNA, 15 bp, Homo sapiens
tcccaaaatgaatct

SEQ ID NO: 28533 - DNA, 15 bp, Homo sapiens
ttcccaaaatgaatc

SEQ ID NO: 28534 - DNA, 15 bp, Homo sapiens
cttcccaaaatgaat

SEQ ID NO: 28535 - DNA, 15 bp, Homo sapiens
tcttcccaaaatgaa

SEQ ID NO: 28536 - DNA, 15 bp, Homo sapiens
ttcttcccaaaatga

SEQ ID NO: 28537 - DNA, 15 bp, Homo sapiens
tttcttcccaaaatg

SEQ ID NO: 28538 - DNA, 15 bp, Homo sapiens
atttcttcccaaaat

SEQ ID NO: 28539 - DNA, 15 bp, Homo sapiens
gatttcttcccaaaa

SEQ ID NO: 28540 - DNA, 15 bp, Homo sapiens
ggatttcttcccaaa

SEQ ID NO: 28541 - DNA, 15 bp, Homo sapiens
tggatttcttcccaa

SEQ ID NO: 28542 - DNA, 15 bp, Homo sapiens
atggatttcttccca

SEQ ID NO: 28543 - DNA, 15 bp, Homo sapiens
catggatttcttccc

SEQ ID NO: 28544 - DNA, 15 bp, Homo sapiens
gcatggatttcttcc

SEQ ID NO: 28545 - DNA, 15 bp, Homo sapiens
agcatggatttcttc

SEQ ID NO: 28546 - DNA, 15 bp, Homo sapiens
cagcatggatttctt

SEQ ID NO: 28547 - DNA, 15 bp, Homo sapiens
gcagcatggatttct

SEQ ID NO: 28548 - DNA, 15 bp, Homo sapiens
tgcagcatggatttc

SEQ ID NO: 28549 - DNA, 15 bp, Homo sapiens
atgcagcatggattt

SEQ ID NO: 28550 - DNA, 15 bp, Homo sapiens
gatgcagcatggatt

SEQ ID NO: 28551 - DNA, 15 bp, Homo sapiens
ggatgcagcatggat

SEQ ID NO: 28552 - DNA, 15 bp, Homo sapiens
gggatgcagcatgga

SEQ ID NO: 28553 - DNA, 15 bp, Homo sapiens
agggatgcagcatgg

SEQ ID NO: 28554 - DNA, 15 bp, Homo sapiens
gagggatgcagcatg

SEQ ID NO: 28555 - DNA, 15 bp, Homo sapiens
tgagggatgcagcat

SEQ ID NO: 28556 - DNA, 15 bp, Homo sapiens
atgagggatgcagca

SEQ ID NO: 28557 - DNA, 15 bp, Homo sapiens
catgagggatgcagc

SEQ ID NO: 28558 - DNA, 15 bp, Homo sapiens
tcatgagggatgcag

SEQ ID NO: 28559 - DNA, 15 bp, Homo sapiens
ttcatgagggatgca

SEQ ID NO: 28560 - DNA, 15 bp, Homo sapiens
cttcatgagggatgc

SEQ ID NO: 28561 - DNA, 15 bp, Homo sapiens
acttcatgagggatg

SEQ ID NO: 28562 - DNA, 15 bp, Homo sapiens
cacttcatgagggat

SEQ ID NO: 28563 - DNA, 15 bp, Homo sapiens
acacttcatgaggga

SEQ ID NO: 28564 - DNA, 15 bp, Homo sapiens
cacacttcatgaggg

SEQ ID NO: 28565 - DNA, 15 bp, Homo sapiens
tcacacttcatgagg

SEQ ID NO: 28566 - DNA, 15 bp, Homo sapiens
ttcacacttcatgag

SEQ ID NO: 28567 - DNA, 15 bp, Homo sapiens
gttcacacttcatga

SEQ ID NO: 28568 - DNA, 15 bp, Homo sapiens
agttcacacttcatg

SEQ ID NO: 28569 - DNA, 15 bp, Homo sapiens
aagttcacacttcat

SEQ ID NO: 28570 - DNA, 15 bp, Homo sapiens
aaagttcacacttca

SEQ ID NO: 28571 - DNA, 15 bp, Homo sapiens
caaagttcacacttc

SEQ ID NO: 28572 - DNA, 15 bp, Homo sapiens
ccaaagttcacactt

SEQ ID NO: 28573 - DNA, 15 bp, Homo sapiens
cccaaagttcacact

SEQ ID NO: 28574 - DNA, 15 bp, Homo sapiens
gcccaaagttcacac

SEQ ID NO: 28575 - DNA, 15 bp, Homo sapiens
tgcccaaagttcaca

SEQ ID NO: 28576 - DNA, 15 bp, Homo sapiens
atgcccaaagttcac

SEQ ID NO: 28577 - DNA, 15 bp, Homo sapiens
catgcccaaagttca

SEQ ID NO: 28578 - DNA, 15 bp, Homo sapiens
acatgcccaaagttc

SEQ ID NO: 28579 - DNA, 15 bp, Homo sapiens
cacatgcccaaagtt

SEQ ID NO: 28580 - DNA, 15 bp, Homo sapiens
acacatgcccaaagt

SEQ ID NO: 28581 - DNA, 15 bp, Homo sapiens
aacacatgcccaaag

SEQ ID NO: 28582 - DNA, 15 bp, Homo sapiens
caacacatgcccaaa

SEQ ID NO: 28583 - DNA, 15 bp, Homo sapiens
tcaacacatgcccaa

SEQ ID NO: 28584 - DNA, 15 bp, Homo sapiens
atcaacacatgccca

SEQ ID NO: 28585 - DNA, 15 bp, Homo sapiens
aatcaacacatgccc

SEQ ID NO: 28586 - DNA, 15 bp, Homo sapiens
gaatcaacacatgcc

SEQ ID NO: 28587 - DNA, 15 bp, Homo sapiens
agaatcaacacatgc

SEQ ID NO: 28588 - DNA, 15 bp, Homo sapiens
aagaatcaacacatg

SEQ ID NO: 28589 - DNA, 15 bp, Homo sapiens
aaagaatcaacacat

SEQ ID NO: 28590 - DNA, 15 bp, Homo sapiens
gaaagaatcaacaca

SEQ ID NO: 28591 - DNA, 15 bp, Homo sapiens
agaaagaatcaacac

SEQ ID NO: 28592 - DNA, 15 bp, Homo sapiens
cagaaagaatcaaca

SEQ ID NO: 28593 - DNA, 15 bp, Homo sapiens
ccagaaagaatcaac

SEQ ID NO: 28594 - DNA, 15 bp, Homo sapiens
gccagaaagaatcaa

SEQ ID NO: 28595 - DNA, 15 bp, Homo sapiens
ggccagaaagaatca

SEQ ID NO: 28596 - DNA, 15 bp, Homo sapiens
gggccagaaagaatc

SEQ ID NO: 28597 - DNA, 15 bp, Homo sapiens
tgggccagaaagaat

SEQ ID NO: 28598 - DNA, 15 bp, Homo sapiens
ctgggccagaaagaa

SEQ ID NO: 28599 - DNA, 15 bp, Homo sapiens
tctgggccagaaaga

SEQ ID NO: 28600 - DNA, 15 bp, Homo sapiens
ctctgggccagaaag

SEQ ID NO: 28601 - DNA, 15 bp, Homo sapiens
actctgggccagaaa

SEQ ID NO: 28602 - DNA, 15 bp, Homo sapiens
aactctgggccagaa

SEQ ID NO: 28603 - DNA, 15 bp, Homo sapiens
aaactctgggccaga

SEQ ID NO: 28604 - DNA, 15 bp, Homo sapiens
taaactctgggccag

SEQ ID NO: 28605 - DNA, 15 bp, Homo sapiens
gtaaactctgggcca

SEQ ID NO: 28606 - DNA, 15 bp, Homo sapiens
ggtaaactctgggcc

SEQ ID NO: 28607 - DNA, 15 bp, Homo sapiens
aggtaaactctgggc

SEQ ID NO: 28608 - DNA, 15 bp, Homo sapiens
caggtaaactctggg

SEQ ID NO: 28609 - DNA, 15 bp, Homo sapiens
tcaggtaaactctgg

SEQ ID NO: 28610 - DNA, 15 bp, Homo sapiens
ttcaggtaaactctg

SEQ ID NO: 28611 - DNA, 15 bp, Homo sapiens
cttcaggtaaactct

SEQ ID NO: 28612 - DNA, 15 bp, Homo sapiens
tcttcaggtaaactc

SEQ ID NO: 28613 - DNA, 15 bp, Homo sapiens
atcttcaggtaaact

SEQ ID NO: 28614 - DNA, 15 bp, Homo sapiens
aatcttcaggtaaac

SEQ ID NO: 28615 - DNA, 15 bp, Homo sapiens
taatcttcaggtaaa

SEQ ID NO: 28616 - DNA, 15 bp, Homo sapiens
ctaatcttcaggtaa

SEQ ID NO: 28617 - DNA, 15 bp, Homo sapiens
gctaatcttcaggta

SEQ ID NO: 28618 - DNA, 15 bp, Homo sapiens
agctaatcttcaggt

SEQ ID NO: 28619 - DNA, 15 bp, Homo sapiens
cagctaatcttcagg

SEQ ID NO: 28620 - DNA, 15 bp, Homo sapiens
gcagctaatcttcag

SEQ ID NO: 28621 - DNA, 15 bp, Homo sapiens
ggcagctaatcttca

SEQ ID NO: 28622 - DNA, 15 bp, Homo sapiens
gggcagctaatcttc

SEQ ID NO: 28623 - DNA, 15 bp, Homo sapiens
agggcagctaatctt

SEQ ID NO: 28624 - DNA, 15 bp, Homo sapiens
cagggcagctaatct

SEQ ID NO: 28625 - DNA, 15 bp, Homo sapiens
tcagggcagctaatc

SEQ ID NO: 28626 - DNA, 15 bp, Homo sapiens
ctcagggcagctaat

SEQ ID NO: 28627 - DNA, 15 bp, Homo sapiens
cctcagggcagctaa

SEQ ID NO: 28628 - DNA, 15 bp, Homo sapiens
ccctcagggcagcta

SEQ ID NO: 28629 - DNA, 15 bp, Homo sapiens
accctcagggcagct

SEQ ID NO: 28630 - DNA, 15 bp, Homo sapiens
gaccctcagggcagc

SEQ ID NO: 28631 - DNA, 15 bp, Homo sapiens
tgaccctcagggcag

SEQ ID NO: 28632 - DNA, 15 bp, Homo sapiens
gtgaccctcagggca

SEQ ID NO: 28633 - DNA, 15 bp, Homo sapiens
agtgaccctcagggc

SEQ ID NO: 28634 - DNA, 15 bp, Homo sapiens
cagtgaccctcaggg

SEQ ID NO: 28635 - DNA, 15 bp, Homo sapiens
tcagtgaccctcagg

SEQ ID NO: 28636 - DNA, 15 bp, Homo sapiens
ctcagtgaccctcag

SEQ ID NO: 28637 - DNA, 15 bp, Homo sapiens
gctcagtgaccctca

SEQ ID NO: 28638 - DNA, 15 bp, Homo sapiens
tgctcagtgaccctc

SEQ ID NO: 28639 - DNA, 15 bp, Homo sapiens
atgctcagtgaccct

SEQ ID NO: 28640 - DNA, 15 bp, Homo sapiens
aatgctcagtgaccc

SEQ ID NO: 28641 - DNA, 15 bp, Homo sapiens
taatgctcagtgacc

SEQ ID NO: 28642 - DNA, 15 bp, Homo sapiens
ttaatgctcagtgac

SEQ ID NO: 28643 - DNA, 15 bp, Homo sapiens
tttaatgctcagtga

SEQ ID NO: 28644 - DNA, 15 bp, Homo sapiens
atttaatgctcagtg

SEQ ID NO: 28645 - DNA, 15 bp, Homo sapiens
aatttaatgctcagt

SEQ ID NO: 28646 - DNA, 15 bp, Homo sapiens
taatttaatgctcag

SEQ ID NO: 28647 - DNA, 15 bp, Homo sapiens
ctaatttaatgctca

SEQ ID NO: 28648 - DNA, 15 bp, Homo sapiens
tctaatttaatgctc

SEQ ID NO: 28649 - DNA, 15 bp, Homo sapiens
atctaatttaatgct

SEQ ID NO: 28650 - DNA, 15 bp, Homo sapiens
catctaatttaatgc

SEQ ID NO: 28651 - DNA, 15 bp, Homo sapiens
tcatctaatttaatg

SEQ ID NO: 28652 - DNA, 15 bp, Homo sapiens
atcatctaatttaat

SEQ ID NO: 28653 - DNA, 15 bp, Homo sapiens
catcatctaatttaa

SEQ ID NO: 28654 - DNA, 15 bp, Homo sapiens
acatcatctaattta

SEQ ID NO: 28655 - DNA, 15 bp, Homo sapiens
gacatcatctaattt

SEQ ID NO: 28656 - DNA, 15 bp, Homo sapiens
agacatcatctaatt

SEQ ID NO: 28657 - DNA, 15 bp, Homo sapiens
cagacatcatctaat

SEQ ID NO: 28658 - DNA, 15 bp, Homo sapiens
acagacatcatctaa

SEQ ID NO: 28659 - DNA, 15 bp, Homo sapiens
cacagacatcatcta

SEQ ID NO: 28660 - DNA, 15 bp, Homo sapiens
ccacagacatcatct

SEQ ID NO: 28661 - DNA, 15 bp, Homo sapiens
tccacagacatcatc

SEQ ID NO: 28662 - DNA, 15 bp, Homo sapiens
atccacagacatcat

SEQ ID NO: 28663 - DNA, 15 bp, Homo sapiens
catccacagacatca

SEQ ID NO: 28664 - DNA, 15 bp, Homo sapiens
tcatccacagacatc

SEQ ID NO: 28665 - DNA, 15 bp, Homo sapiens
gtcatccacagacat

SEQ ID NO: 28666 - DNA, 15 bp, Homo sapiens
agtcatccacagaca

SEQ ID NO: 28667 - DNA, 15 bp, Homo sapiens
cagtcatccacagac

SEQ ID NO: 28668 - DNA, 15 bp, Homo sapiens
tcagtcatccacaga

SEQ ID NO: 28669 - DNA, 15 bp, Homo sapiens
atcagtcatccacag

SEQ ID NO: 28670 - DNA, 15 bp, Homo sapiens
tatcagtcatccaca

SEQ ID NO: 28671 - DNA, 15 bp, Homo sapiens
ctatcagtcatccac

SEQ ID NO: 28672 - DNA, 15 bp, Homo sapiens
actatcagtcatcca

SEQ ID NO: 28673 - DNA, 15 bp, Homo sapiens
cactatcagtcatcc

SEQ ID NO: 28674 - DNA, 15 bp, Homo sapiens
tcactatcagtcatc

SEQ ID NO: 28675 - DNA, 15 bp, Homo sapiens
ttcactatcagtcat

SEQ ID NO: 28676 - DNA, 15 bp, Homo sapiens
cttcactatcagtca

SEQ ID NO: 28677 - DNA, 15 bp, Homo sapiens
gcttcactatcagtc

SEQ ID NO: 28678 - DNA, 15 bp, Homo sapiens
agcttcactatcagt

SEQ ID NO: 28679 - DNA, 15 bp, Homo sapiens
gagcttcactatcag

SEQ ID NO: 28680 - DNA, 15 bp, Homo sapiens
tgagcttcactatca

SEQ ID NO: 28681 - DNA, 15 bp, Homo sapiens
atgagcttcactatc

SEQ ID NO: 28682 - DNA, 15 bp, Homo sapiens
tatgagcttcactat

SEQ ID NO: 28683 - DNA, 15 bp, Homo sapiens
ctatgagcttcacta

SEQ ID NO: 28684 - DNA, 15 bp, Homo sapiens
gctatgagcttcact

SEQ ID NO: 28685 - DNA, 15 bp, Homo sapiens
ggctatgagcttcac

SEQ ID NO: 28686 - DNA, 15 bp, Homo sapiens
gggctatgagcttca

SEQ ID NO: 28687 - DNA, 15 bp, Homo sapiens
tgggctatgagcttc

SEQ ID NO: 28688 - DNA, 15 bp, Homo sapiens
gtgggctatgagctt

SEQ ID NO: 28689 - DNA, 15 bp, Homo sapiens
tgtgggctatgagct

SEQ ID NO: 28690 - DNA, 15 bp, Homo sapiens
ctgtgggctatgagc

SEQ ID NO: 28691 - DNA, 15 bp, Homo sapiens
actgtgggctatgag

SEQ ID NO: 28692 - DNA, 15 bp, Homo sapiens
aactgtgggctatga

SEQ ID NO: 28693 - DNA, 15 bp, Homo sapiens
caactgtgggctatg

SEQ ID NO: 28694 - DNA, 15 bp, Homo sapiens
tcaactgtgggctat

SEQ ID NO: 28695 - DNA, 15 bp, Homo sapiens
gtcaactgtgggcta

SEQ ID NO: 28696 - DNA, 15 bp, Homo sapiens
tgtcaactgtgggct

SEQ ID NO: 28697 - DNA, 15 bp, Homo sapiens
gtgtcaactgtgggc

SEQ ID NO: 28698 - DNA, 15 bp, Homo sapiens
tgtgtcaactgtggg

SEQ ID NO: 28699 - DNA, 15 bp, Homo sapiens
atgtgtcaactgtgg

SEQ ID NO: 28700 - DNA, 15 bp, Homo sapiens
tatgtgtcaactgtg

SEQ ID NO: 28701 - DNA, 15 bp, Homo sapiens
ttatgtgtcaactgt

SEQ ID NO: 28702 - DNA, 15 bp, Homo sapiens
attatgtgtcaactg

SEQ ID NO: 28703 - DNA, 15 bp, Homo sapiens
tattatgtgtcaact

SEQ ID NO: 28704 - DNA, 15 bp, Homo sapiens
ttattatgtgtcaac

SEQ ID NO: 28705 - DNA, 15 bp, Homo sapiens
tttattatgtgtcaa

SEQ ID NO: 28706 - DNA, 15 bp, Homo sapiens
atttattatgtgtca

SEQ ID NO: 28707 - DNA, 15 bp, Homo sapiens
aatttattatgtgtc

SEQ ID NO: 28708 - DNA, 15 bp, Homo sapiens
gaatttattatgtgt

SEQ ID NO: 28709 - DNA, 15 bp, Homo sapiens
cgaatttattatgtg

SEQ ID NO: 28710 - DNA, 15 bp, Homo sapiens
tcgaatttattatgt

SEQ ID NO: 28711 - DNA, 15 bp, Homo sapiens
ctcgaatttattatg

SEQ ID NO: 28712 - DNA, 15 bp, Homo sapiens
actcgaatttattat

SEQ ID NO: 28713 - DNA, 15 bp, Homo sapiens
aactcgaatttatta

SEQ ID NO: 28714 - DNA, 15 bp, Homo sapiens
caactcgaatttatt

SEQ ID NO: 28715 - DNA, 15 bp, Homo sapiens
gcaactcgaatttat

SEQ ID NO: 28716 - DNA, 15 bp, Homo sapiens
agcaactcgaattta

SEQ ID NO: 28717 - DNA, 15 bp, Homo sapiens
aagcaactcgaattt

SEQ ID NO: 28718 - DNA, 15 bp, Homo sapiens
aaagcaactcgaatt

SEQ ID NO: 28719 - DNA, 15 bp, Homo sapiens
caaagcaactcgaat

SEQ ID NO: 28720 - DNA, 15 bp, Homo sapiens
gcaaagcaactcgaa

SEQ ID NO: 28721 - DNA, 15 bp, Homo sapiens
agcaaagcaactcga

SEQ ID NO: 28722 - DNA, 15 bp, Homo sapiens
aagcaaagcaactcg

SEQ ID NO: 28723 - DNA, 15 bp, Homo sapiens
gaagcaaagcaactc

SEQ ID NO: 28724 - DNA, 15 bp, Homo sapiens
ggaagcaaagcaact

SEQ ID NO: 28725 - DNA, 15 bp, Homo sapiens
gggaagcaaagcaac

SEQ ID NO: 28726 - DNA, 15 bp, Homo sapiens
ggggaagcaaagcaa

SEQ ID NO: 28727 - DNA, 15 bp, Homo sapiens
aggggaagcaaagca

SEQ ID NO: 28728 - DNA, 15 bp, Homo sapiens
aaggggaagcaaagc

SEQ ID NO: 28729 - DNA, 15 bp, Homo sapiens
gaaggggaagcaaag

SEQ ID NO: 28730 - DNA, 15 bp, Homo sapiens
agaaggggaagcaaa

SEQ ID NO: 28731 - DNA, 15 bp, Homo sapiens
cagaaggggaagcaa

SEQ ID NO: 28732 - DNA, 15 bp, Homo sapiens
acagaaggggaagca

SEQ ID NO: 28733 - DNA, 15 bp, Homo sapiens
aacagaaggggaagc

SEQ ID NO: 28734 - DNA, 15 bp, Homo sapiens
gaacagaaggggaag

SEQ ID NO: 28735 - DNA, 15 bp, Homo sapiens
ggaacagaaggggaa

SEQ ID NO: 28736 - DNA, 15 bp, Homo sapiens
aggaacagaagggga

SEQ ID NO: 28737 - DNA, 15 bp, Homo sapiens
caggaacagaagggg

SEQ ID NO: 28738 - DNA, 15 bp, Homo sapiens
ccaggaacagaaggg

SEQ ID NO: 28739 - DNA, 15 bp, Homo sapiens
gccaggaacagaagg

SEQ ID NO: 28740 - DNA, 15 bp, Homo sapiens
agccaggaacagaag

SEQ ID NO: 28741 - DNA, 15 bp, Homo sapiens
cagccaggaacagaa

SEQ ID NO: 28742 - DNA, 15 bp, Homo sapiens
tcagccaggaacaga

SEQ ID NO: 28743 - DNA, 15 bp, Homo sapiens
gtcagccaggaacag

SEQ ID NO: 28744 - DNA, 15 bp, Homo sapiens
agtcagccaggaaca

SEQ ID NO: 28745 - DNA, 15 bp, Homo sapiens
cagtcagccaggaac

SEQ ID NO: 28746 - DNA, 15 bp, Homo sapiens
acagtcagccaggaa

SEQ ID NO: 28747 - DNA, 15 bp, Homo sapiens
aacagtcagccagga

SEQ ID NO: 28748 - DNA, 15 bp, Homo sapiens
aaacagtcagccagg

SEQ ID NO: 28749 - DNA, 15 bp, Homo sapiens
caaacagtcagccag

SEQ ID NO: 28750 - DNA, 15 bp, Homo sapiens
ccaaacagtcagcca

SEQ ID NO: 28751 - DNA, 15 bp, Homo sapiens
gccaaacagtcagcc

SEQ ID NO: 28752 - DNA, 15 bp, Homo sapiens
ggccaaacagtcagc

SEQ ID NO: 28753 - DNA, 15 bp, Homo sapiens
aggccaaacagtcag

SEQ ID NO: 28754 - DNA, 15 bp, Homo sapiens
aaggccaaacagtca

SEQ ID NO: 28755 - DNA, 15 bp, Homo sapiens
aaaggccaaacagtc

SEQ ID NO: 28756 - DNA, 15 bp, Homo sapiens
caaaggccaaacagt

SEQ ID NO: 28757 - DNA, 15 bp, Homo sapiens
gcaaaggccaaacag

SEQ ID NO: 28758 - DNA, 15 bp, Homo sapiens
ggcaaaggccaaaca

SEQ ID NO: 28759 - DNA, 15 bp, Homo sapiens
tggcaaaggccaaac

SEQ ID NO: 28760 - DNA, 15 bp, Homo sapiens
gtggcaaaggccaaa

SEQ ID NO: 28761 - DNA, 15 bp, Homo sapiens
agtggcaaaggccaa

SEQ ID NO: 28762 - DNA, 15 bp, Homo sapiens
aagtggcaaaggcca

SEQ ID NO: 28763 - DNA, 15 bp, Homo sapiens
caagtggcaaaggcc

SEQ ID NO: 28764 - DNA, 15 bp, Homo sapiens
acaagtggcaaaggc

SEQ ID NO: 28765 - DNA, 15 bp, Homo sapiens
aacaagtggcaaagg

SEQ ID NO: 28766 - DNA, 15 bp, Homo sapiens
gaacaagtggcaaag

SEQ ID NO: 28767 - DNA, 15 bp, Homo sapiens
cgaacaagtggcaaa

SEQ ID NO: 28768 - DNA, 15 bp, Homo sapiens
ccgaacaagtggcaa

SEQ ID NO: 28769 - DNA, 15 bp, Homo sapiens
gccgaacaagtggca

SEQ ID NO: 28770 - DNA, 15 bp, Homo sapiens
ggccgaacaagtggc

SEQ ID NO: 28771 - DNA, 15 bp, Homo sapiens
aggccgaacaagtgg

SEQ ID NO: 28772 - DNA, 15 bp, Homo sapiens
gaggccgaacaagtg

SEQ ID NO: 28773 - DNA, 15 bp, Homo sapiens
agaggccgaacaagt

SEQ ID NO: 28774 - DNA, 15 bp, Homo sapiens
gagaggccgaacaag

SEQ ID NO: 28775 - DNA, 15 bp, Homo sapiens
agagaggccgaacaa

SEQ ID NO: 28776 - DNA, 15 bp, Homo sapiens
cagagaggccgaaca

SEQ ID NO: 28777 - DNA, 15 bp, Homo sapiens
ccagagaggccgaac

SEQ ID NO: 28778 - DNA, 15 bp, Homo sapiens
cccagagaggccgaa

SEQ ID NO: 28779 - DNA, 15 bp, Homo sapiens
gcccagagaggccga

SEQ ID NO: 28780 - DNA, 15 bp, Homo sapiens
ggcccagagaggccg

SEQ ID NO: 28781 - DNA, 15 bp, Homo sapiens
aggcccagagaggcc

SEQ ID NO: 28782 - DNA, 15 bp, Homo sapiens
aaggcccagagaggc

SEQ ID NO: 28783 - DNA, 15 bp, Homo sapiens
taaggcccagagagg

SEQ ID NO: 28784 - DNA, 15 bp, Homo sapiens
ttaaggcccagagag

SEQ ID NO: 28785 - DNA, 15 bp, Homo sapiens
cttaaggcccagaga

SEQ ID NO: 28786 - DNA, 15 bp, Homo sapiens
acttaaggcccagag

SEQ ID NO: 28787 - DNA, 15 bp, Homo sapiens
aacttaaggcccaga

SEQ ID NO: 28788 - DNA, 15 bp, Homo sapiens
aaacttaaggcccag

SEQ ID NO: 28789 - DNA, 15 bp, Homo sapiens
gaaacttaaggccca

SEQ ID NO: 28790 - DNA, 15 bp, Homo sapiens
agaaacttaaggccc

SEQ ID NO: 28791 - DNA, 15 bp, Homo sapiens
aagaaacttaaggcc

SEQ ID NO: 28792 - DNA, 15 bp, Homo sapiens
aaagaaacttaaggc

SEQ ID NO: 28793 - DNA, 15 bp, Homo sapiens
caaagaaacttaagg

SEQ ID NO: 28794 - DNA, 15 bp, Homo sapiens
gcaaagaaacttaag

SEQ ID NO: 28795 - DNA, 15 bp, Homo sapiens
ggcaaagaaacttaa

SEQ ID NO: 28796 - DNA, 15 bp, Homo sapiens
aggcaaagaaactta

SEQ ID NO: 28797 - DNA, 15 bp, Homo sapiens
aaggcaaagaaactt

SEQ ID NO: 28798 - DNA, 15 bp, Homo sapiens
caaggcaaagaaact

SEQ ID NO: 28799 - DNA, 15 bp, Homo sapiens
tcaaggcaaagaaac

SEQ ID NO: 28800 - DNA, 15 bp, Homo sapiens
ttcaaggcaaagaaa

SEQ ID NO: 28801 - DNA, 15 bp, Homo sapiens
tttcaaggcaaagaa

SEQ ID NO: 28802 - DNA, 15 bp, Homo sapiens
atttcaaggcaaaga

SEQ ID NO: 28803 - DNA, 15 bp, Homo sapiens
aatttcaaggcaaag

SEQ ID NO: 28804 - DNA, 15 bp, Homo sapiens
caatttcaaggcaaa

SEQ ID NO: 28805 - DNA, 15 bp, Homo sapiens
ccaatttcaaggcaa

SEQ ID NO: 28806 - DNA, 15 bp, Homo sapiens
tccaatttcaaggca

SEQ ID NO: 28807 - DNA, 15 bp, Homo sapiens
ttccaatttcaaggc

SEQ ID NO: 28808 - DNA, 15 bp, Homo sapiens
gttccaatttcaagg

SEQ ID NO: 28809 - DNA, 15 bp, Homo sapiens
agttccaatttcaag

SEQ ID NO: 28810 - DNA, 15 bp, Homo sapiens
aagttccaatttcaa

SEQ ID NO: 28811 - DNA, 15 bp, Homo sapiens
aaagttccaatttca

SEQ ID NO: 28812 - DNA, 15 bp, Homo sapiens
gaaagttccaatttc

SEQ ID NO: 28813 - DNA, 15 bp, Homo sapiens
agaaagttccaattt

SEQ ID NO: 28814 - DNA, 15 bp, Homo sapiens
aagaaagttccaatt

SEQ ID NO: 28815 - DNA, 15 bp, Homo sapiens
aaagaaagttccaat

SEQ ID NO: 28816 - DNA, 15 bp, Homo sapiens
caaagaaagttccaa

SEQ ID NO: 28817 - DNA, 15 bp, Homo sapiens
ccaaagaaagttcca

SEQ ID NO: 28818 - DNA, 15 bp, Homo sapiens
accaaagaaagttcc

SEQ ID NO: 28819 - DNA, 15 bp, Homo sapiens
caccaaagaaagttc

SEQ ID NO: 28820 - DNA, 15 bp, Homo sapiens
tcaccaaagaaagtt

SEQ ID NO: 28821 - DNA, 15 bp, Homo sapiens
ttcaccaaagaaagt

SEQ ID NO: 28822 - DNA, 15 bp, Homo sapiens
tttcaccaaagaaag

SEQ ID NO: 28823 - DNA, 15 bp, Homo sapiens
gtttcaccaaagaaa

SEQ ID NO: 28824 - DNA, 15 bp, Homo sapiens
tgtttcaccaaagaa

SEQ ID NO: 28825 - DNA, 15 bp, Homo sapiens
ttgtttcaccaaaga

SEQ ID NO: 28826 - DNA, 15 bp, Homo sapiens
gttgtttcaccaaag

SEQ ID NO: 28827 - DNA, 15 bp, Homo sapiens
ggttgtttcaccaaa

SEQ ID NO: 28828 - DNA, 15 bp, Homo sapiens
tggttgtttcaccaa

SEQ ID NO: 28829 - DNA, 15 bp, Homo sapiens
ctggttgtttcacca

SEQ ID NO: 28830 - DNA, 15 bp, Homo sapiens
tctggttgtttcacc

SEQ ID NO: 28831 - DNA, 15 bp, Homo sapiens
ttctggttgtttcac

SEQ ID NO: 28832 - DNA, 15 bp, Homo sapiens
tttctggttgtttca

SEQ ID NO: 28833 - DNA, 15 bp, Homo sapiens
ttttctggttgtttc

SEQ ID NO: 28834 - DNA, 15 bp, Homo sapiens
attttctggttgttt

SEQ ID NO: 28835 - DNA, 15 bp, Homo sapiens
cattttctggttgtt

SEQ ID NO: 28836 - DNA, 15 bp, Homo sapiens
gcattttctggttgt

SEQ ID NO: 28837 - DNA, 15 bp, Homo sapiens
agcattttctggttg

SEQ ID NO: 28838 - DNA, 15 bp, Homo sapiens
aagcattttctggtt

SEQ ID NO: 28839 - DNA, 15 bp, Homo sapiens
gaagcattttctggt

SEQ ID NO: 28840 - DNA, 15 bp, Homo sapiens
tgaagcattttctgg

SEQ ID NO: 28841 - DNA, 15 bp, Homo sapiens
ctgaagcattttctg

SEQ ID NO: 28842 - DNA, 15 bp, Homo sapiens
gctgaagcattttct

SEQ ID NO: 28843 - DNA, 15 bp, Homo sapiens
ggctgaagcattttc

SEQ ID NO: 28844 - DNA, 15 bp, Homo sapiens
gggctgaagcatttt

SEQ ID NO: 28845 - DNA, 15 bp, Homo sapiens
tgggctgaagcattt

SEQ ID NO: 28846 - DNA, 15 bp, Homo sapiens
ctgggctgaagcatt

SEQ ID NO: 28847 - DNA, 15 bp, Homo sapiens
tctgggctgaagcat

SEQ ID NO: 28848 - DNA, 15 bp, Homo sapiens
ttctgggctgaagca

SEQ ID NO: 28849 - DNA, 15 bp, Homo sapiens
tttctgggctgaagc

SEQ ID NO: 28850 - DNA, 15 bp, Homo sapiens
gtttctgggctgaag

SEQ ID NO: 28851 - DNA, 15 bp, Homo sapiens
agtttctgggctgaa

SEQ ID NO: 28852 - DNA, 15 bp, Homo sapiens
aagtttctgggctga

SEQ ID NO: 28853 - DNA, 15 bp, Homo sapiens
caagtttctgggctg

SEQ ID NO: 28854 - DNA, 15 bp, Homo sapiens
ccaagtttctgggct

SEQ ID NO: 28855 - DNA, 15 bp, Homo sapiens
accaagtttctgggc

SEQ ID NO: 28856 - DNA, 15 bp, Homo sapiens
gaccaagtttctggg

SEQ ID NO: 28857 - DNA, 15 bp, Homo sapiens
tgaccaagtttctgg

SEQ ID NO: 28858 - DNA, 15 bp, Homo sapiens
ctgaccaagtttctg

SEQ ID NO: 28859 - DNA, 15 bp, Homo sapiens
actgaccaagtttct

SEQ ID NO: 28860 - DNA, 15 bp, Homo sapiens
tactgaccaagtttc

SEQ ID NO: 28861 - DNA, 15 bp, Homo sapiens
gtactgaccaagttt

SEQ ID NO: 28862 - DNA, 15 bp, Homo sapiens
agtactgaccaagtt

SEQ ID NO: 28863 - DNA, 15 bp, Homo sapiens
aagtactgaccaagt

SEQ ID NO: 28864 - DNA, 15 bp, Homo sapiens
caagtactgaccaag

SEQ ID NO: 28865 - DNA, 15 bp, Homo sapiens
ccaagtactgaccaa

SEQ ID NO: 28866 - DNA, 15 bp, Homo sapiens
tccaagtactgacca

SEQ ID NO: 28867 - DNA, 15 bp, Homo sapiens
atccaagtactgacc

SEQ ID NO: 28868 - DNA, 15 bp, Homo sapiens
catccaagtactgac

SEQ ID NO: 28869 - DNA, 15 bp, Homo sapiens
ccatccaagtactga

SEQ ID NO: 28870 - DNA, 15 bp, Homo sapiens
cccatccaagtactg

SEQ ID NO: 28871 - DNA, 15 bp, Homo sapiens
ccccatccaagtact

SEQ ID NO: 28872 - DNA, 15 bp, Homo sapiens
cccccatccaagtac

SEQ ID NO: 28873 - DNA, 15 bp, Homo sapiens
tcccccatccaagta

SEQ ID NO: 28874 - DNA, 15 bp, Homo sapiens
atcccccatccaagt

SEQ ID NO: 28875 - DNA, 15 bp, Homo sapiens
gatcccccatccaag

SEQ ID NO: 28876 - DNA, 15 bp, Homo sapiens
tgatcccccatccaa

SEQ ID NO: 28877 - DNA, 15 bp, Homo sapiens
gtgatcccccatcca

SEQ ID NO: 28878 - DNA, 15 bp, Homo sapiens
ggtgatcccccatcc

SEQ ID NO: 28879 - DNA, 15 bp, Homo sapiens
aggtgatcccccatc

SEQ ID NO: 28880 - DNA, 15 bp, Homo sapiens
caggtgatcccccat

SEQ ID NO: 28881 - DNA, 15 bp, Homo sapiens
ccaggtgatccccca

SEQ ID NO: 28882 - DNA, 15 bp, Homo sapiens
cccaggtgatccccc

SEQ ID NO: 28883 - DNA, 15 bp, Homo sapiens
tcccaggtgatcccc

SEQ ID NO: 28884 - DNA, 15 bp, Homo sapiens
gtcccaggtgatccc

SEQ ID NO: 28885 - DNA, 15 bp, Homo sapiens
agtcccaggtgatcc

SEQ ID NO: 28886 - DNA, 15 bp, Homo sapiens
tagtcccaggtgatc

SEQ ID NO: 28887 - DNA, 15 bp, Homo sapiens
gtagtcccaggtgat

SEQ ID NO: 28888 - DNA, 15 bp, Homo sapiens
ggtagtcccaggtga

SEQ ID NO: 28889 - DNA, 15 bp, Homo sapiens
gggtagtcccaggtg

SEQ ID NO: 28890 - DNA, 15 bp, Homo sapiens
tgggtagtcccaggt

SEQ ID NO: 28891 - DNA, 15 bp, Homo sapiens
ttgggtagtcccagg

SEQ ID NO: 28892 - DNA, 15 bp, Homo sapiens
cttgggtagtcccag

SEQ ID NO: 28893 - DNA, 15 bp, Homo sapiens
ccttgggtagtccca

SEQ ID NO: 28894 - DNA, 15 bp, Homo sapiens
tccttgggtagtccc

SEQ ID NO: 28895 - DNA, 15 bp, Homo sapiens
atccttgggtagtcc

SEQ ID NO: 28896 - DNA, 15 bp, Homo sapiens
catccttgggtagtc

SEQ ID NO: 28897 - DNA, 15 bp, Homo sapiens
acatccttgggtagt

SEQ ID NO: 28898 - DNA, 15 bp, Homo sapiens
cacatccttgggtag

SEQ ID NO: 28899 - DNA, 15 bp, Homo sapiens
ccacatccttgggta

SEQ ID NO: 28900 - DNA, 15 bp, Homo sapiens
cccacatccttgggt

SEQ ID NO: 28901 - DNA, 15 bp, Homo sapiens
gcccacatccttggg

SEQ ID NO: 28902 - DNA, 15 bp, Homo sapiens
agcccacatccttgg

SEQ ID NO: 28903 - DNA, 15 bp, Homo sapiens
cagcccacatccttg

SEQ ID NO: 28904 - DNA, 15 bp, Homo sapiens
acagcccacatcctt

SEQ ID NO: 28905 - DNA, 15 bp, Homo sapiens
gacagcccacatcct

SEQ ID NO: 28906 - DNA, 15 bp, Homo sapiens
agacagcccacatcc

SEQ ID NO: 28907 - DNA, 15 bp, Homo sapiens
cagacagcccacatc

SEQ ID NO: 28908 - DNA, 15 bp, Homo sapiens
gcagacagcccacat

SEQ ID NO: 28909 - DNA, 15 bp, Homo sapiens
agcagacagcccaca

SEQ ID NO: 28910 - DNA, 15 bp, Homo sapiens
tagcagacagcccac

SEQ ID NO: 28911 - DNA, 15 bp, Homo sapiens
ctagcagacagccca

SEQ ID NO: 28912 - DNA, 15 bp, Homo sapiens
tctagcagacagccc

SEQ ID NO: 28913 - DNA, 15 bp, Homo sapiens
gtctagcagacagcc

SEQ ID NO: 28914 - DNA, 15 bp, Homo sapiens
agtctagcagacagc

SEQ ID NO: 28915 - DNA, 15 bp, Homo sapiens
tagtctagcagacag

SEQ ID NO: 28916 - DNA, 15 bp, Homo sapiens
atagtctagcagaca

SEQ ID NO: 28917 - DNA, 15 bp, Homo sapiens
tatagtctagcagac

SEQ ID NO: 28918 - DNA, 15 bp, Homo sapiens
ctatagtctagcaga

SEQ ID NO: 28919 - DNA, 15 bp, Homo sapiens
gctatagtctagcag

SEQ ID NO: 28920 - DNA, 15 bp, Homo sapiens
ggctatagtctagca

SEQ ID NO: 28921 - DNA, 15 bp, Homo sapiens
gggctatagtctagc

SEQ ID NO: 28922 - DNA, 15 bp, Homo sapiens
ggggctatagtctag

SEQ ID NO: 28923 - DNA, 15 bp, Homo sapiens
aggggctatagtcta

SEQ ID NO: 28924 - DNA, 15 bp, Homo sapiens
aaggggctatagtct

SEQ ID NO: 28925 - DNA, 15 bp, Homo sapiens
caaggggctatagtc

SEQ ID NO: 28926 - DNA, 15 bp, Homo sapiens
tcaaggggctatagt

SEQ ID NO: 28927 - DNA, 15 bp, Homo sapiens
ctcaaggggctatag

SEQ ID NO: 28928 - DNA, 15 bp, Homo sapiens
cctcaaggggctata

SEQ ID NO: 28929 - DNA, 15 bp, Homo sapiens
ccctcaaggggctat

SEQ ID NO: 28930 - DNA, 15 bp, Homo sapiens
gccctcaaggggcta

SEQ ID NO: 28931 - DNA, 15 bp, Homo sapiens
tgccctcaaggggct

SEQ ID NO: 28932 - DNA, 15 bp, Homo sapiens
ttgccctcaaggggc

SEQ ID NO: 28933 - DNA, 15 bp, Homo sapiens
cttgccctcaagggg

SEQ ID NO: 28934 - DNA, 15 bp, Homo sapiens
ccttgccctcaaggg

SEQ ID NO: 28935 - DNA, 15 bp, Homo sapiens
accttgccctcaagg

SEQ ID NO: 28936 - DNA, 15 bp, Homo sapiens
caccttgccctcaag

SEQ ID NO: 28937 - DNA, 15 bp, Homo sapiens
ccaccttgccctcaa

SEQ ID NO: 28938 - DNA, 15 bp, Homo sapiens
cccaccttgccctca

SEQ ID NO: 28939 - DNA, 15 bp, Homo sapiens
gcccaccttgccctc

SEQ ID NO: 28940 - DNA, 15 bp, Homo sapiens
cgcccaccttgccct

SEQ ID NO: 28941 - DNA, 15 bp, Homo sapiens
gcgcccaccttgccc

SEQ ID NO: 28942 - DNA, 15 bp, Homo sapiens
ggcgcccaccttgcc

SEQ ID NO: 28943 - DNA, 15 bp, Homo sapiens
aggcgcccaccttgc

SEQ ID NO: 28944 - DNA, 15 bp, Homo sapiens
aaggcgcccaccttg

SEQ ID NO: 28945 - DNA, 15 bp, Homo sapiens
caaggcgcccacctt

SEQ ID NO: 28946 - DNA, 15 bp, Homo sapiens
gcaaggcgcccacct

SEQ ID NO: 28947 - DNA, 15 bp, Homo sapiens
agcaaggcgcccacc

SEQ ID NO: 28948 - DNA, 15 bp, Homo sapiens
gagcaaggcgcccac

SEQ ID NO: 28949 - DNA, 15 bp, Homo sapiens
tgagcaaggcgccca

SEQ ID NO: 28950 - DNA, 15 bp, Homo sapiens
atgagcaaggcgccc

SEQ ID NO: 28951 - DNA, 15 bp, Homo sapiens
catgagcaaggcgcc

SEQ ID NO: 28952 - DNA, 15 bp, Homo sapiens
ccatgagcaaggcgc

SEQ ID NO: 28953 - DNA, 15 bp, Homo sapiens
accatgagcaaggcg

SEQ ID NO: 28954 - DNA, 15 bp, Homo sapiens
aaccatgagcaaggc

SEQ ID NO: 28955 - DNA, 15 bp, Homo sapiens
gaaccatgagcaagg

SEQ ID NO: 28956 - DNA, 15 bp, Homo sapiens
ggaaccatgagcaag

SEQ ID NO: 28957 - DNA, 15 bp, Homo sapiens
tggaaccatgagcaa

SEQ ID NO: 28958 - DNA, 15 bp, Homo sapiens
atggaaccatgagca

SEQ ID NO: 28959 - DNA, 15 bp, Homo sapiens
gatggaaccatgagc

SEQ ID NO: 28960 - DNA, 15 bp, Homo sapiens
ggatggaaccatgag

SEQ ID NO: 28961 - DNA, 15 bp, Homo sapiens
aggatggaaccatga

SEQ ID NO: 28962 - DNA, 15 bp, Homo sapiens
taggatggaaccatg

SEQ ID NO: 28963 - DNA, 15 bp, Homo sapiens
ttaggatggaaccat

SEQ ID NO: 28964 - DNA, 15 bp, Homo sapiens
cttaggatggaacca

SEQ ID NO: 28965 - DNA, 15 bp, Homo sapiens
gcttaggatggaacc

SEQ ID NO: 28966 - DNA, 15 bp, Homo sapiens
ggcttaggatggaac

SEQ ID NO: 28967 - DNA, 15 bp, Homo sapiens
gggcttaggatggaa

SEQ ID NO: 28968 - DNA, 15 bp, Homo sapiens
ggggcttaggatgga

SEQ ID NO: 28969 - DNA, 15 bp, Homo sapiens
tggggcttaggatgg

SEQ ID NO: 28970 - DNA, 15 bp, Homo sapiens
ctggggcttaggatg

SEQ ID NO: 28971 - DNA, 15 bp, Homo sapiens
gctggggcttaggat

SEQ ID NO: 28972 - DNA, 15 bp, Homo sapiens
tgctggggcttagga

SEQ ID NO: 28973 - DNA, 15 bp, Homo sapiens
gtgctggggcttagg

SEQ ID NO: 28974 - DNA, 15 bp, Homo sapiens
tgtgctggggcttag

SEQ ID NO: 28975 - DNA, 15 bp, Homo sapiens
ctgtgctggggctta

SEQ ID NO: 28976 - DNA, 15 bp, Homo sapiens
actgtgctggggctt

SEQ ID NO: 28977 - DNA, 15 bp, Homo sapiens
tactgtgctggggct

SEQ ID NO: 28978 - DNA, 15 bp, Homo sapiens
ctactgtgctggggc

SEQ ID NO: 28979 - DNA, 15 bp, Homo sapiens
actactgtgctgggg

SEQ ID NO: 28980 - DNA, 15 bp, Homo sapiens
cactactgtgctggg

SEQ ID NO: 28981 - DNA, 15 bp, Homo sapiens
ccactactgtgctgg

SEQ ID NO: 28982 - DNA, 15 bp, Homo sapiens
cccactactgtgctg

SEQ ID NO: 28983 - DNA, 15 bp, Homo sapiens
acccactactgtgct

SEQ ID NO: 28984 - DNA, 15 bp, Homo sapiens
cacccactactgtgc

SEQ ID NO: 28985 - DNA, 15 bp, Homo sapiens
gcacccactactgtg

SEQ ID NO: 28986 - DNA, 15 bp, Homo sapiens
tgcacccactactgt

SEQ ID NO: 28987 - DNA, 15 bp, Homo sapiens
atgcacccactactg

SEQ ID NO: 28988 - DNA, 15 bp, Homo sapiens
catgcacccactact

SEQ ID NO: 28989 - DNA, 15 bp, Homo sapiens
ccatgcacccactac

SEQ ID NO: 28990 - DNA, 15 bp, Homo sapiens
accatgcacccacta

SEQ ID NO: 28991 - DNA, 15 bp, Homo sapiens
caccatgcacccact

SEQ ID NO: 28992 - DNA, 15 bp, Homo sapiens
tcaccatgcacccac

SEQ ID NO: 28993 - DNA, 15 bp, Homo sapiens
ctcaccatgcaccca

SEQ ID NO: 28994 - DNA, 15 bp, Homo sapiens
gctcaccatgcaccc

SEQ ID NO: 28995 - DNA, 15 bp, Homo sapiens
ggctcaccatgcacc

SEQ ID NO: 28996 - DNA, 15 bp, Homo sapiens
tggctcaccatgcac

SEQ ID NO: 28997 - DNA, 15 bp, Homo sapiens
atggctcaccatgca

SEQ ID NO: 28998 - DNA, 15 bp, Homo sapiens
aatggctcaccatgc

SEQ ID NO: 28999 - DNA, 15 bp, Homo sapiens
taatggctcaccatg

SEQ ID NO: 29000 - DNA, 15 bp, Homo sapiens
ctaatggctcaccat

SEQ ID NO: 29001 - DNA, 15 bp, Homo sapiens
actaatggctcacca

SEQ ID NO: 29002 - DNA, 15 bp, Homo sapiens
cactaatggctcacc

SEQ ID NO: 29003 - DNA, 15 bp, Homo sapiens
tcactaatggctcac

SEQ ID NO: 29004 - DNA, 15 bp, Homo sapiens
ttcactaatggctca

SEQ ID NO: 29005 - DNA, 15 bp, Homo sapiens
attcactaatggctc

SEQ ID NO: 29006 - DNA, 15 bp, Homo sapiens
gattcactaatggct

SEQ ID NO: 29007 - DNA, 15 bp, Homo sapiens
agattcactaatggc

SEQ ID NO: 29008 - DNA, 15 bp, Homo sapiens
aagattcactaatgg

SEQ ID NO: 29009 - DNA, 15 bp, Homo sapiens
aaagattcactaatg

SEQ ID NO: 29010 - DNA, 15 bp, Homo sapiens
caaagattcactaat

SEQ ID NO: 29011 - DNA, 15 bp, Homo sapiens
acaaagattcactaa

SEQ ID NO: 29012 - DNA, 15 bp, Homo sapiens
cacaaagattcacta

SEQ ID NO: 29013 - DNA, 15 bp, Homo sapiens
ccacaaagattcact

SEQ ID NO: 29014 - DNA, 15 bp, Homo sapiens
tccacaaagattcac

SEQ ID NO: 29015 - DNA, 15 bp, Homo sapiens
ttccacaaagattca

SEQ ID NO: 29016 - DNA, 15 bp, Homo sapiens
attccacaaagattc

SEQ ID NO: 29017 - DNA, 15 bp, Homo sapiens
cattccacaaagatt

SEQ ID NO: 29018 - DNA, 15 bp, Homo sapiens
tcattccacaaagat

SEQ ID NO: 29019 - DNA, 15 bp, Homo sapiens
ttcattccacaaaga

SEQ ID NO: 29020 - DNA, 15 bp, Homo sapiens
cttcattccacaaag

SEQ ID NO: 29021 - DNA, 15 bp, Homo sapiens
ccttcattccacaaa

SEQ ID NO: 29022 - DNA, 15 bp, Homo sapiens
accttcattccacaa

SEQ ID NO: 29023 - DNA, 15 bp, Homo sapiens
caccttcattccaca

SEQ ID NO: 29024 - DNA, 15 bp, Homo sapiens
ccaccttcattccac

SEQ ID NO: 29025 - DNA, 15 bp, Homo sapiens
cccaccttcattcca

SEQ ID NO: 29026 - DNA, 15 bp, Homo sapiens
tcccaccttcattcc

SEQ ID NO: 29027 - DNA, 15 bp, Homo sapiens
ctcccaccttcattc

SEQ ID NO: 29028 - DNA, 15 bp, Homo sapiens
tctcccaccttcatt

SEQ ID NO: 29029 - DNA, 15 bp, Homo sapiens
ttctcccaccttcat

SEQ ID NO: 29030 - DNA, 15 bp, Homo sapiens
tttctcccaccttca

SEQ ID NO: 29031 - DNA, 15 bp, Homo sapiens
ttttctcccaccttc

SEQ ID NO: 29032 - DNA, 15 bp, Homo sapiens
attttctcccacctt

SEQ ID NO: 29033 - DNA, 15 bp, Homo sapiens
tattttctcccacct

SEQ ID NO: 29034 - DNA, 15 bp, Homo sapiens
ttattttctcccacc

SEQ ID NO: 29035 - DNA, 15 bp, Homo sapiens
tttattttctcccac

SEQ ID NO: 29036 - DNA, 15 bp, Homo sapiens
ttttattttctccca

SEQ ID NO: 29037 - DNA, 15 bp, Homo sapiens
attttattttctccc

SEQ ID NO: 29038 - DNA, 15 bp, Homo sapiens
tattttattttctcc

SEQ ID NO: 29039 - DNA, 15 bp, Homo sapiens
gtattttattttctc

SEQ ID NO: 29040 - DNA, 15 bp, Homo sapiens
ggtattttattttct

SEQ ID NO: 29041 - DNA, 15 bp, Homo sapiens
aggtattttattttc

SEQ ID NO: 29042 - DNA, 15 bp, Homo sapiens
caggtattttatttt

SEQ ID NO: 29043 - DNA, 15 bp, Homo sapiens
acaggtattttattt

SEQ ID NO: 29044 - DNA, 15 bp, Homo sapiens
tacaggtattttatt

SEQ ID NO: 29045 - DNA, 15 bp, Homo sapiens
gtacaggtattttat

SEQ ID NO: 29046 - DNA, 15 bp, Homo sapiens
agtacaggtatttta

SEQ ID NO: 29047 - DNA, 15 bp, Homo sapiens
aagtacaggtatttt

SEQ ID NO: 29048 - DNA, 15 bp, Homo sapiens
gaagtacaggtattt

SEQ ID NO: 29049 - DNA, 15 bp, Homo sapiens
tgaagtacaggtatt

SEQ ID NO: 29050 - DNA, 15 bp, Homo sapiens
gtgaagtacaggtat

SEQ ID NO: 29051 - DNA, 15 bp, Homo sapiens
tgtgaagtacaggta

SEQ ID NO: 29052 - DNA, 15 bp, Homo sapiens
ctgtgaagtacaggt

SEQ ID NO: 29053 - DNA, 15 bp, Homo sapiens
cctgtgaagtacagg

SEQ ID NO: 29054 - DNA, 15 bp, Homo sapiens
ccctgtgaagtacag

SEQ ID NO: 29055 - DNA, 15 bp, Homo sapiens
accctgtgaagtaca

SEQ ID NO: 29056 - DNA, 15 bp, Homo sapiens
taccctgtgaagtac

SEQ ID NO: 29057 - DNA, 15 bp, Homo sapiens
ataccctgtgaagta

SEQ ID NO: 29058 - DNA, 15 bp, Homo sapiens
aataccctgtgaagt

SEQ ID NO: 29059 - DNA, 15 bp, Homo sapiens
caataccctgtgaag

SEQ ID NO: 29060 - DNA, 15 bp, Homo sapiens
acaataccctgtgaa

SEQ ID NO: 29061 - DNA, 15 bp, Homo sapiens
cacaataccctgtga

SEQ ID NO: 29062 - DNA, 15 bp, Homo sapiens
tcacaataccctgtg

SEQ ID NO: 29063 - DNA, 15 bp, Homo sapiens
ctcacaataccctgt

SEQ ID NO: 29064 - DNA, 15 bp, Homo sapiens
cctcacaataccctg

SEQ ID NO: 29065 - DNA, 15 bp, Homo sapiens
ccctcacaataccct

SEQ ID NO: 29066 - DNA, 15 bp, Homo sapiens
accctcacaataccc

SEQ ID NO: 29067 - DNA, 15 bp, Homo sapiens
gaccctcacaatacc

SEQ ID NO: 29068 - DNA, 15 bp, Homo sapiens
tgaccctcacaatac

SEQ ID NO: 29069 - DNA, 15 bp, Homo sapiens
ttgaccctcacaata

SEQ ID NO: 29070 - DNA, 15 bp, Homo sapiens
cttgaccctcacaat

SEQ ID NO: 29071 - DNA, 15 bp, Homo sapiens
acttgaccctcacaa

SEQ ID NO: 29072 - DNA, 15 bp, Homo sapiens
tacttgaccctcaca

SEQ ID NO: 29073 - DNA, 15 bp, Homo sapiens
ttacttgaccctcac

SEQ ID NO: 29074 - DNA, 15 bp, Homo sapiens
tttacttgaccctca

SEQ ID NO: 29075 - DNA, 15 bp, Homo sapiens
ttttacttgaccctc

SEQ ID NO: 29076 - DNA, 15 bp, Homo sapiens
cttttacttgaccct

SEQ ID NO: 29077 - DNA, 15 bp, Homo sapiens
acttttacttgaccc

SEQ ID NO: 29078 - DNA, 15 bp, Homo sapiens
cacttttacttgacc

SEQ ID NO: 29079 - DNA, 15 bp, Homo sapiens
gcacttttacttgac

SEQ ID NO: 29080 - DNA, 15 bp, Homo sapiens
agcacttttacttga

SEQ ID NO: 29081 - DNA, 15 bp, Homo sapiens
aagcacttttacttg

SEQ ID NO: 29082 - DNA, 15 bp, Homo sapiens
aaagcacttttactt

SEQ ID NO: 29083 - DNA, 15 bp, Homo sapiens
taaagcacttttact

SEQ ID NO: 29084 - DNA, 15 bp, Homo sapiens
ttaaagcacttttac

SEQ ID NO: 29085 - DNA, 15 bp, Homo sapiens
tttaaagcactttta

SEQ ID NO: 29086 - DNA, 15 bp, Homo sapiens
ttttaaagcactttt

SEQ ID NO: 29087 - DNA, 15 bp, Homo sapiens
tttttaaagcacttt

SEQ ID NO: 29088 - DNA, 15 bp, Homo sapiens
ttttttaaagcactt

SEQ ID NO: 29089 - DNA, 15 bp, Homo sapiens
attttttaaagcact

SEQ ID NO: 29090 - DNA, 15 bp, Homo sapiens
aattttttaaagcac

SEQ ID NO: 29091 - DNA, 15 bp, Homo sapiens
caattttttaaagca

SEQ ID NO: 29092 - DNA, 15 bp, Homo sapiens
acaattttttaaagc

SEQ ID NO: 29093 - DNA, 15 bp, Homo sapiens
tacaattttttaaag

SEQ ID NO: 29094 - DNA, 15 bp, Homo sapiens
atacaattttttaaa

SEQ ID NO: 29095 - DNA, 15 bp, Homo sapiens
aatacaattttttaa

SEQ ID NO: 29096 - DNA, 15 bp, Homo sapiens
taatacaatttttta

SEQ ID NO: 29097 - DNA, 15 bp, Homo sapiens
ataatacaatttttt

SEQ ID NO: 29098 - DNA, 15 bp, Homo sapiens
tataatacaattttt

SEQ ID NO: 29099 - DNA, 15 bp, Homo sapiens
atataatacaatttt

SEQ ID NO: 29100 - DNA, 15 bp, Homo sapiens
tatataatacaattt

SEQ ID NO: 29101 - DNA, 15 bp, Homo sapiens
ctatataatacaatt

SEQ ID NO: 29102 - DNA, 15 bp, Homo sapiens
actatataatacaat

SEQ ID NO: 29103 - DNA, 15 bp, Homo sapiens
aactatataatacaa

SEQ ID NO: 29104 - DNA, 15 bp, Homo sapiens
aaactatataataca

SEQ ID NO: 29105 - DNA, 15 bp, Homo sapiens
taaactatataatac

SEQ ID NO: 29106 - DNA, 15 bp, Homo sapiens
ataaactatataata

SEQ ID NO: 29107 - DNA, 15 bp, Homo sapiens
aataaactatataat

SEQ ID NO: 29108 - DNA, 15 bp, Homo sapiens
gaataaactatataa

SEQ ID NO: 29109 - DNA, 15 bp, Homo sapiens
ggaataaactatata

SEQ ID NO: 29110 - DNA, 15 bp, Homo sapiens
gggaataaactatat

SEQ ID NO: 29111 - DNA, 15 bp, Homo sapiens
agggaataaactata

SEQ ID NO: 29112 - DNA, 15 bp, Homo sapiens
aagggaataaactat

SEQ ID NO: 29113 - DNA, 15 bp, Homo sapiens
caagggaataaacta

SEQ ID NO: 29114 - DNA, 15 bp, Homo sapiens
acaagggaataaact

SEQ ID NO: 29115 - DNA, 15 bp, Homo sapiens
cacaagggaataaac

SEQ ID NO: 29116 - DNA, 15 bp, Homo sapiens
acacaagggaataaa

SEQ ID NO: 29117 - DNA, 15 bp, Homo sapiens
aacacaagggaataa

SEQ ID NO: 29118 - DNA, 15 bp, Homo sapiens
taacacaagggaata

SEQ ID NO: 29119 - DNA, 15 bp, Homo sapiens
ctaacacaagggaat

SEQ ID NO: 29120 - DNA, 15 bp, Homo sapiens
gctaacacaagggaa

SEQ ID NO: 29121 - DNA, 15 bp, Homo sapiens
ggctaacacaaggga

SEQ ID NO: 29122 - DNA, 15 bp, Homo sapiens
gggctaacacaaggg

SEQ ID NO: 29123 - DNA, 15 bp, Homo sapiens
tgggctaacacaagg

SEQ ID NO: 29124 - DNA, 15 bp, Homo sapiens
ctgggctaacacaag

SEQ ID NO: 29125 - DNA, 15 bp, Homo sapiens
cctgggctaacacaa

SEQ ID NO: 29126 - DNA, 15 bp, Homo sapiens
acctgggctaacaca

SEQ ID NO: 29127 - DNA, 15 bp, Homo sapiens
gacctgggctaacac

SEQ ID NO: 29128 - DNA, 15 bp, Homo sapiens
tgacctgggctaaca

SEQ ID NO: 29129 - DNA, 15 bp, Homo sapiens
ttgacctgggctaac

SEQ ID NO: 29130 - DNA, 15 bp, Homo sapiens
gttgacctgggctaa

SEQ ID NO: 29131 - DNA, 15 bp, Homo sapiens
tgttgacctgggcta

SEQ ID NO: 29132 - DNA, 15 bp, Homo sapiens
ctgttgacctgggct

SEQ ID NO: 29133 - DNA, 15 bp, Homo sapiens
tctgttgacctgggc

SEQ ID NO: 29134 - DNA, 15 bp, Homo sapiens
ctctgttgacctggg

SEQ ID NO: 29135 - DNA, 15 bp, Homo sapiens
gctctgttgacctgg

SEQ ID NO: 29136 - DNA, 15 bp, Homo sapiens
ggctctgttgacctg

SEQ ID NO: 29137 - DNA, 15 bp, Homo sapiens
aggctctgttgacct

SEQ ID NO: 29138 - DNA, 15 bp, Homo sapiens
taggctctgttgacc

SEQ ID NO: 29139 - DNA, 15 bp, Homo sapiens
gtaggctctgttgac

SEQ ID NO: 29140 - DNA, 15 bp, Homo sapiens
cgtaggctctgttga

SEQ ID NO: 29141 - DNA, 15 bp, Homo sapiens
tcgtaggctctgttg

SEQ ID NO: 29142 - DNA, 15 bp, Homo sapiens
ttcgtaggctctgtt

SEQ ID NO: 29143 - DNA, 15 bp, Homo sapiens
attcgtaggctctgt

SEQ ID NO: 29144 - DNA, 15 bp, Homo sapiens
tattcgtaggctctg

SEQ ID NO: 29145 - DNA, 15 bp, Homo sapiens
ttattcgtaggctct

SEQ ID NO: 29146 - DNA, 15 bp, Homo sapiens
attattcgtaggctc

SEQ ID NO: 29147 - DNA, 15 bp, Homo sapiens
tattattcgtaggct

SEQ ID NO: 29148 - DNA, 15 bp, Homo sapiens
ttattattcgtaggc

SEQ ID NO: 29149 - DNA, 15 bp, Homo sapiens
attattattcgtagg

SEQ ID NO: 29150 - DNA, 15 bp, Homo sapiens
cattattattcgtag

SEQ ID NO: 29151 - DNA, 15 bp, Homo sapiens
tcattattattcgta

SEQ ID NO: 29152 - DNA, 15 bp, Homo sapiens
atcattattattcgt

SEQ ID NO: 29153 - DNA, 15 bp, Homo sapiens
catcattattattcg

SEQ ID NO: 29154 - DNA, 15 bp, Homo sapiens
tcatcattattattc

SEQ ID NO: 29155 - DNA, 15 bp, Homo sapiens
gtcatcattattatt

SEQ ID NO: 29156 - DNA, 15 bp, Homo sapiens
tgtcatcattattat

SEQ ID NO: 29157 - DNA, 15 bp, Homo sapiens
ctgtcatcattatta

SEQ ID NO: 29158 - DNA, 15 bp, Homo sapiens
tctgtcatcattatt

SEQ ID NO: 29159 - DNA, 15 bp, Homo sapiens
ttctgtcatcattat

SEQ ID NO: 29160 - DNA, 15 bp, Homo sapiens
cttctgtcatcatta

SEQ ID NO: 29161 - DNA, 15 bp, Homo sapiens
acttctgtcatcatt

SEQ ID NO: 29162 - DNA, 15 bp, Homo sapiens
aacttctgtcatcat

SEQ ID NO: 29163 - DNA, 15 bp, Homo sapiens
gaacttctgtcatca

SEQ ID NO: 29164 - DNA, 15 bp, Homo sapiens
agaacttctgtcatc

SEQ ID NO: 29165 - DNA, 15 bp, Homo sapiens
aagaacttctgtcat

SEQ ID NO: 29166 - DNA, 15 bp, Homo sapiens
gaagaacttctgtca

SEQ ID NO: 29167 - DNA, 15 bp, Homo sapiens
tgaagaacttctgtc

SEQ ID NO: 29168 - DNA, 15 bp, Homo sapiens
ttgaagaacttctgt

SEQ ID NO: 29169 - DNA, 15 bp, Homo sapiens
tttgaagaacttctg

SEQ ID NO: 29170 - DNA, 15 bp, Homo sapiens
ttttgaagaacttct

SEQ ID NO: 29171 - DNA, 15 bp, Homo sapiens
tttttgaagaacttc

SEQ ID NO: 29172 - DNA, 15 bp, Homo sapiens
ctttttgaagaactt

SEQ ID NO: 29173 - DNA, 15 bp, Homo sapiens
actttttgaagaact

SEQ ID NO: 29174 - DNA, 15 bp, Homo sapiens
gactttttgaagaac

SEQ ID NO: 29175 - DNA, 15 bp, Homo sapiens
agactttttgaagaa

SEQ ID NO: 29176 - DNA, 15 bp, Homo sapiens
aagactttttgaaga

SEQ ID NO: 29177 - DNA, 15 bp, Homo sapiens
caagactttttgaag

SEQ ID NO: 29178 - DNA, 15 bp, Homo sapiens
ccaagactttttgaa

SEQ ID NO: 29179 - DNA, 15 bp, Homo sapiens
gccaagactttttga

SEQ ID NO: 29180 - DNA, 15 bp, Homo sapiens
ggccaagactttttg

SEQ ID NO: 29181 - DNA, 15 bp, Homo sapiens
aggccaagacttttt

SEQ ID NO: 29182 - DNA, 15 bp, Homo sapiens
aaggccaagactttt

SEQ ID NO: 29183 - DNA, 15 bp, Homo sapiens
gaaggccaagacttt

SEQ ID NO: 29184 - DNA, 15 bp, Homo sapiens
agaaggccaagactt

SEQ ID NO: 29185 - DNA, 15 bp, Homo sapiens
aagaaggccaagact

SEQ ID NO: 29186 - DNA, 15 bp, Homo sapiens
aaagaaggccaagac

SEQ ID NO: 29187 - DNA, 15 bp, Homo sapiens
gaaagaaggccaaga

SEQ ID NO: 29188 - DNA, 15 bp, Homo sapiens
agaaagaaggccaag

SEQ ID NO: 29189 - DNA, 15 bp, Homo sapiens
aagaaagaaggccaa

SEQ ID NO: 29190 - DNA, 15 bp, Homo sapiens
aaagaaagaaggcca

SEQ ID NO: 29191 - DNA, 15 bp, Homo sapiens
gaaagaaagaaggcc

SEQ ID NO: 29192 - DNA, 15 bp, Homo sapiens
tgaaagaaagaaggc

SEQ ID NO: 29193 - DNA, 15 bp, Homo sapiens
gtgaaagaaagaagg

SEQ ID NO: 29194 - DNA, 15 bp, Homo sapiens
tgtgaaagaaagaag

SEQ ID NO: 29195 - DNA, 15 bp, Homo sapiens
ttgtgaaagaaagaa

SEQ ID NO: 29196 - DNA, 15 bp, Homo sapiens
tttgtgaaagaaaga

SEQ ID NO: 29197 - DNA, 15 bp, Homo sapiens
ttttgtgaaagaaag

SEQ ID NO: 29198 - DNA, 15 bp, Homo sapiens
attttgtgaaagaaa

SEQ ID NO: 29199 - DNA, 15 bp, Homo sapiens
aattttgtgaaagaa

SEQ ID NO: 29200 - DNA, 15 bp, Homo sapiens
caattttgtgaaaga

SEQ ID NO: 29201 - DNA, 15 bp, Homo sapiens
gcaattttgtgaaag

SEQ ID NO: 29202 - DNA, 15 bp, Homo sapiens
ggcaattttgtgaaa

SEQ ID NO: 29203 - DNA, 15 bp, Homo sapiens
gggcaattttgtgaa

SEQ ID NO: 29204 - DNA, 15 bp, Homo sapiens
ggggcaattttgtga

SEQ ID NO: 29205 - DNA, 15 bp, Homo sapiens
gggggcaattttgtg

SEQ ID NO: 29206 - DNA, 15 bp, Homo sapiens
ggggggcaattttgt

SEQ ID NO: 29207 - DNA, 15 bp, Homo sapiens
tggggggcaattttg

SEQ ID NO: 29208 - DNA, 15 bp, Homo sapiens
ctggggggcaatttt

SEQ ID NO: 29209 - DNA, 15 bp, Homo sapiens
tctggggggcaattt

SEQ ID NO: 29210 - DNA, 15 bp, Homo sapiens
ctctggggggcaatt

SEQ ID NO: 29211 - DNA, 15 bp, Homo sapiens
gctctggggggcaat

SEQ ID NO: 29212 - DNA, 15 bp, Homo sapiens
agctctggggggcaa

SEQ ID NO: 29213 - DNA, 15 bp, Homo sapiens
aagctctggggggca

SEQ ID NO: 29214 - DNA, 15 bp, Homo sapiens
aaagctctggggggc

SEQ ID NO: 29215 - DNA, 15 bp, Homo sapiens
gaaagctctgggggg

SEQ ID NO: 29216 - DNA, 15 bp, Homo sapiens
agaaagctctggggg

SEQ ID NO: 29217 - DNA, 15 bp, Homo sapiens
cagaaagctctgggg

SEQ ID NO: 29218 - DNA, 15 bp, Homo sapiens
ccagaaagctctggg

SEQ ID NO: 29219 - DNA, 15 bp, Homo sapiens
tccagaaagctctgg

SEQ ID NO: 29220 - DNA, 15 bp, Homo sapiens
ttccagaaagctctg

SEQ ID NO: 29221 - DNA, 15 bp, Homo sapiens
cttccagaaagctct

SEQ ID NO: 29222 - DNA, 15 bp, Homo sapiens
ccttccagaaagctc

SEQ ID NO: 29223 - DNA, 15 bp, Homo sapiens
cccttccagaaagct

SEQ ID NO: 29224 - DNA, 15 bp, Homo sapiens
gcccttccagaaagc

SEQ ID NO: 29225 - DNA, 15 bp, Homo sapiens
tgcccttccagaaag

SEQ ID NO: 29226 - DNA, 15 bp, Homo sapiens
ctgcccttccagaaa

SEQ ID NO: 29227 - DNA, 15 bp, Homo sapiens
gctgcccttccagaa

SEQ ID NO: 29228 - DNA, 15 bp, Homo sapiens
ggctgcccttccaga

SEQ ID NO: 29229 - DNA, 15 bp, Homo sapiens
tggctgcccttccag

SEQ ID NO: 29230 - DNA, 15 bp, Homo sapiens
atggctgcccttcca

SEQ ID NO: 29231 - DNA, 15 bp, Homo sapiens
catggctgcccttcc

SEQ ID NO: 29232 - DNA, 15 bp, Homo sapiens
tcatggctgcccttc

SEQ ID NO: 29233 - DNA, 15 bp, Homo sapiens
ttcatggctgccctt

SEQ ID NO: 29234 - DNA, 15 bp, Homo sapiens
gttcatggctgccct

SEQ ID NO: 29235 - DNA, 15 bp, Homo sapiens
ggttcatggctgccc

SEQ ID NO: 29236 - DNA, 15 bp, Homo sapiens
gggttcatggctgcc

SEQ ID NO: 29237 - DNA, 15 bp, Homo sapiens
tgggttcatggctgc

SEQ ID NO: 29238 - DNA, 15 bp, Homo sapiens
ctgggttcatggctg

SEQ ID NO: 29239 - DNA, 15 bp, Homo sapiens
tctgggttcatggct

SEQ ID NO: 29240 - DNA, 15 bp, Homo sapiens
ctctgggttcatggc

SEQ ID NO: 29241 - DNA, 15 bp, Homo sapiens
cctctgggttcatgg

SEQ ID NO: 29242 - DNA, 15 bp, Homo sapiens
gcctctgggttcatg

SEQ ID NO: 29243 - DNA, 15 bp, Homo sapiens
ggcctctgggttcat

SEQ ID NO: 29244 - DNA, 15 bp, Homo sapiens
aggcctctgggttca

SEQ ID NO: 29245 - DNA, 15 bp, Homo sapiens
taggcctctgggttc

SEQ ID NO: 29246 - DNA, 15 bp, Homo sapiens
ttaggcctctgggtt

SEQ ID NO: 29247 - DNA, 15 bp, Homo sapiens
tttaggcctctgggt

SEQ ID NO: 29248 - DNA, 15 bp, Homo sapiens
ctttaggcctctggg

SEQ ID NO: 29249 - DNA, 15 bp, Homo sapiens
actttaggcctctgg

SEQ ID NO: 29250 - DNA, 15 bp, Homo sapiens
tactttaggcctctg

SEQ ID NO: 29251 - DNA, 15 bp, Homo sapiens
ctactttaggcctct

SEQ ID NO: 29252 - DNA, 15 bp, Homo sapiens
tctactttaggcctc

SEQ ID NO: 29253 - DNA, 15 bp, Homo sapiens
atctactttaggcct

SEQ ID NO: 29254 - DNA, 15 bp, Homo sapiens
aatctactttaggcc

SEQ ID NO: 29255 - DNA, 15 bp, Homo sapiens
aaatctactttaggc

SEQ ID NO: 29256 - DNA, 15 bp, Homo sapiens
taaatctactttagg

SEQ ID NO: 29257 - DNA, 15 bp, Homo sapiens
gtaaatctactttag

SEQ ID NO: 29258 - DNA, 15 bp, Homo sapiens
agtaaatctacttta

SEQ ID NO: 29259 - DNA, 15 bp, Homo sapiens
cagtaaatctacttt

SEQ ID NO: 29260 - DNA, 15 bp, Homo sapiens
ccagtaaatctactt

SEQ ID NO: 29261 - DNA, 15 bp, Homo sapiens
cccagtaaatctact

SEQ ID NO: 29262 - DNA, 15 bp, Homo sapiens
tcccagtaaatctac

SEQ ID NO: 29263 - DNA, 15 bp, Homo sapiens
ttcccagtaaatcta

SEQ ID NO: 29264 - DNA, 15 bp, Homo sapiens
cttcccagtaaatct

SEQ ID NO: 29265 - DNA, 15 bp, Homo sapiens
gcttcccagtaaatc

SEQ ID NO: 29266 - DNA, 15 bp, Homo sapiens
agcttcccagtaaat

SEQ ID NO: 29267 - DNA, 15 bp, Homo sapiens
tagcttcccagtaaa

SEQ ID NO: 29268 - DNA, 15 bp, Homo sapiens
ttagcttcccagtaa

SEQ ID NO: 29269 - DNA, 15 bp, Homo sapiens
tttagcttcccagta

SEQ ID NO: 29270 - DNA, 15 bp, Homo sapiens
ttttagcttcccagt

SEQ ID NO: 29271 - DNA, 15 bp, Homo sapiens
tttttagcttcccag

SEQ ID NO: 29272 - DNA, 15 bp, Homo sapiens
atttttagcttccca

SEQ ID NO: 29273 - DNA, 15 bp, Homo sapiens
tatttttagcttccc

SEQ ID NO: 29274 - DNA, 15 bp, Homo sapiens
atatttttagcttcc

SEQ ID NO: 29275 - DNA, 15 bp, Homo sapiens
aatatttttagcttc

SEQ ID NO: 29276 - DNA, 15 bp, Homo sapiens
aaatatttttagctt

SEQ ID NO: 29277 - DNA, 15 bp, Homo sapiens
taaatatttttagct

SEQ ID NO: 29278 - DNA, 15 bp, Homo sapiens
gtaaatatttttagc

SEQ ID NO: 29279 - DNA, 15 bp, Homo sapiens
agtaaatatttttag

SEQ ID NO: 29280 - DNA, 15 bp, Homo sapiens
aagtaaatattttta

SEQ ID NO: 29281 - DNA, 15 bp, Homo sapiens
aaagtaaatattttt

SEQ ID NO: 29282 - DNA, 15 bp, Homo sapiens
taaagtaaatatttt

SEQ ID NO: 29283 - DNA, 15 bp, Homo sapiens
ataaagtaaatattt

SEQ ID NO: 29284 - DNA, 15 bp, Homo sapiens
aataaagtaaatatt

SEQ ID NO: 29285 - DNA, 15 bp, Homo sapiens
aaataaagtaaatat

SEQ ID NO: 29286 - DNA, 15 bp, Homo sapiens
aaaataaagtaaata

SEQ ID NO: 29287 - DNA, 15 bp, Homo sapiens
aaaaataaagtaaat

SEQ ID NO: 29288 - DNA, 15 bp, Homo sapiens
gaaaaataaagtaaa

SEQ ID NO: 29289 - DNA, 15 bp, Homo sapiens
tgaaaaataaagtaa

SEQ ID NO: 29290 - DNA, 15 bp, Homo sapiens
atgaaaaataaagta

SEQ ID NO: 29291 - DNA, 15 bp, Homo sapiens
tatgaaaaataaagt

SEQ ID NO: 29292 - DNA, 15 bp, Homo sapiens
ctatgaaaaataaag

SEQ ID NO: 29293 - DNA, 15 bp, Homo sapiens
gctatgaaaaataaa

SEQ ID NO: 29294 - DNA, 15 bp, Homo sapiens
agctatgaaaaataa

SEQ ID NO: 29295 - DNA, 15 bp, Homo sapiens
gagctatgaaaaata

SEQ ID NO: 29296 - DNA, 15 bp, Homo sapiens
ggagctatgaaaaat

SEQ ID NO: 29297 - DNA, 15 bp, Homo sapiens
aggagctatgaaaaa

SEQ ID NO: 29298 - DNA, 15 bp, Homo sapiens
aaggagctatgaaaa

SEQ ID NO: 29299 - DNA, 15 bp, Homo sapiens
aaaggagctatgaaa

SEQ ID NO: 29300 - DNA, 15 bp, Homo sapiens
gaaaggagctatgaa

SEQ ID NO: 29301 - DNA, 15 bp, Homo sapiens
tgaaaggagctatga

SEQ ID NO: 29302 - DNA, 15 bp, Homo sapiens
ttgaaaggagctatg

SEQ ID NO: 29303 - DNA, 15 bp, Homo sapiens
cttgaaaggagctat

SEQ ID NO: 29304 - DNA, 15 bp, Homo sapiens
ccttgaaaggagcta

SEQ ID NO: 29305 - DNA, 15 bp, Homo sapiens
accttgaaaggagct

SEQ ID NO: 29306 - DNA, 15 bp, Homo sapiens
gaccttgaaaggagc

SEQ ID NO: 29307 - DNA, 15 bp, Homo sapiens
ggaccttgaaaggag

SEQ ID NO: 29308 - DNA, 15 bp, Homo sapiens
aggaccttgaaagga

SEQ ID NO: 29309 - DNA, 15 bp, Homo sapiens
gaggaccttgaaagg

SEQ ID NO: 29310 - DNA, 15 bp, Homo sapiens
agaggaccttgaaag

SEQ ID NO: 29311 - DNA, 15 bp, Homo sapiens
gagaggaccttgaaa

SEQ ID NO: 29312 - DNA, 15 bp, Homo sapiens
agagaggaccttgaa

SEQ ID NO: 29313 - DNA, 15 bp, Homo sapiens
cagagaggaccttga

SEQ ID NO: 29314 - DNA, 15 bp, Homo sapiens
ccagagaggaccttg

SEQ ID NO: 29315 - DNA, 15 bp, Homo sapiens
cccagagaggacctt

SEQ ID NO: 29316 - DNA, 15 bp, Homo sapiens
ccccagagaggacct

SEQ ID NO: 29317 - DNA, 15 bp, Homo sapiens
cccccagagaggacc

SEQ ID NO: 29318 - DNA, 15 bp, Homo sapiens
acccccagagaggac

SEQ ID NO: 29319 - DNA, 15 bp, Homo sapiens
gacccccagagagga

SEQ ID NO: 29320 - DNA, 15 bp, Homo sapiens
agacccccagagagg

SEQ ID NO: 29321 - DNA, 15 bp, Homo sapiens
aagacccccagagag

SEQ ID NO: 29322 - DNA, 15 bp, Homo sapiens
taagacccccagaga

SEQ ID NO: 29323 - DNA, 15 bp, Homo sapiens
ctaagacccccagag

SEQ ID NO: 29324 - DNA, 15 bp, Homo sapiens
gctaagacccccaga

SEQ ID NO: 29325 - DNA, 15 bp, Homo sapiens
tgctaagacccccag

SEQ ID NO: 29326 - DNA, 15 bp, Homo sapiens
ttgctaagaccccca

SEQ ID NO: 29327 - DNA, 15 bp, Homo sapiens
attgctaagaccccc

SEQ ID NO: 29328 - DNA, 15 bp, Homo sapiens
tattgctaagacccc

SEQ ID NO: 29329 - DNA, 15 bp, Homo sapiens
atattgctaagaccc

SEQ ID NO: 29330 - DNA, 15 bp, Homo sapiens
catattgctaagacc

SEQ ID NO: 29331 - DNA, 15 bp, Homo sapiens
acatattgctaagac

SEQ ID NO: 29332 - DNA, 15 bp, Homo sapiens
aacatattgctaaga

SEQ ID NO: 29333 - DNA, 15 bp, Homo sapiens
aaacatattgctaag

SEQ ID NO: 29334 - DNA, 15 bp, Homo sapiens
taaacatattgctaa

SEQ ID NO: 29335 - DNA, 15 bp, Homo sapiens
gtaaacatattgcta

SEQ ID NO: 29336 - DNA, 15 bp, Homo sapiens
tgtaaacatattgct

SEQ ID NO: 29337 - DNA, 15 bp, Homo sapiens
gtgtaaacatattgc

SEQ ID NO: 29338 - DNA, 15 bp, Homo sapiens
tgtgtaaacatattg

SEQ ID NO: 29339 - DNA, 15 bp, Homo sapiens
ctgtgtaaacatatt

SEQ ID NO: 29340 - DNA, 15 bp, Homo sapiens
actgtgtaaacatat

SEQ ID NO: 29341 - DNA, 15 bp, Homo sapiens
cactgtgtaaacata

SEQ ID NO: 29342 - DNA, 15 bp, Homo sapiens
ccactgtgtaaacat

SEQ ID NO: 29343 - DNA, 15 bp, Homo sapiens
accactgtgtaaaca

SEQ ID NO: 29344 - DNA, 15 bp, Homo sapiens
taccactgtgtaaac

SEQ ID NO: 29345 - DNA, 15 bp, Homo sapiens
ataccactgtgtaaa

SEQ ID NO: 29346 - DNA, 15 bp, Homo sapiens
cataccactgtgtaa

SEQ ID NO: 29347 - DNA, 15 bp, Homo sapiens
acataccactgtgta

SEQ ID NO: 29348 - DNA, 15 bp, Homo sapiens
aacataccactgtgt

SEQ ID NO: 29349 - DNA, 15 bp, Homo sapiens
aaacataccactgtg

SEQ ID NO: 29350 - DNA, 15 bp, Homo sapiens
aaaacataccactgt

SEQ ID NO: 29351 - DNA, 15 bp, Homo sapiens
aaaaacataccactg

SEQ ID NO: 29352 - DNA, 15 bp, Homo sapiens
caaaaacataccact

SEQ ID NO: 29353 - DNA, 15 bp, Homo sapiens
acaaaaacataccac

SEQ ID NO: 29354 - DNA, 15 bp, Homo sapiens
tacaaaaacatacca

SEQ ID NO: 29355 - DNA, 15 bp, Homo sapiens
ttacaaaaacatacc

SEQ ID NO: 29356 - DNA, 15 bp, Homo sapiens
cttacaaaaacatac

SEQ ID NO: 29357 - DNA, 15 bp, Homo sapiens
ccttacaaaaacata

SEQ ID NO: 29358 - DNA, 15 bp, Homo sapiens
accttacaaaaacat

SEQ ID NO: 29359 - DNA, 15 bp, Homo sapiens
aaccttacaaaaaca

SEQ ID NO: 29360 - DNA, 15 bp, Homo sapiens
aaaccttacaaaaac

SEQ ID NO: 29361 - DNA, 15 bp, Homo sapiens
caaaccttacaaaaa

SEQ ID NO: 29362 - DNA, 15 bp, Homo sapiens
gcaaaccttacaaaa

SEQ ID NO: 29363 - DNA, 15 bp, Homo sapiens
tgcaaaccttacaaa

SEQ ID NO: 29364 - DNA, 15 bp, Homo sapiens
ttgcaaaccttacaa

SEQ ID NO: 29365 - DNA, 15 bp, Homo sapiens
tttgcaaaccttaca

SEQ ID NO: 29366 - DNA, 15 bp, Homo sapiens
ttttgcaaaccttac

SEQ ID NO: 29367 - DNA, 15 bp, Homo sapiens
cttttgcaaacctta

SEQ ID NO: 29368 - DNA, 15 bp, Homo sapiens
acttttgcaaacctt

SEQ ID NO: 29369 - DNA, 15 bp, Homo sapiens
tacttttgcaaacct

SEQ ID NO: 29370 - DNA, 15 bp, Homo sapiens
ttacttttgcaaacc

SEQ ID NO: 29371 - DNA, 15 bp, Homo sapiens
cttacttttgcaaac

SEQ ID NO: 29372 - DNA, 15 bp, Homo sapiens
tcttacttttgcaaa

SEQ ID NO: 29373 - DNA, 15 bp, Homo sapiens
atcttacttttgcaa

SEQ ID NO: 29374 - DNA, 15 bp, Homo sapiens
aatcttacttttgca

SEQ ID NO: 29375 - DNA, 15 bp, Homo sapiens
aaatcttacttttgc

SEQ ID NO: 29376 - DNA, 15 bp, Homo sapiens
aaaatcttacttttg

SEQ ID NO: 29377 - DNA, 15 bp, Homo sapiens
aaaaatcttactttt

SEQ ID NO: 29378 - DNA, 15 bp, Homo sapiens
aaaaaatcttacttt

SEQ ID NO: 29379 - DNA, 15 bp, Homo sapiens
taaaaaatcttactt

SEQ ID NO: 29380 - DNA, 15 bp, Homo sapiens
ttaaaaaatcttact

SEQ ID NO: 29381 - DNA, 15 bp, Homo sapiens
tttaaaaaatcttac

SEQ ID NO: 29382 - DNA, 15 bp, Homo sapiens
ttttaaaaaatctta

SEQ ID NO: 29383 - DNA, 15 bp, Homo sapiens
tttttaaaaaatctt

SEQ ID NO: 29384 - DNA, 15 bp, Homo sapiens
atttttaaaaaatct

SEQ ID NO: 29385 - DNA, 15 bp, Homo sapiens
tatttttaaaaaatc

SEQ ID NO: 29386 - DNA, 15 bp, Homo sapiens
gtatttttaaaaaat

SEQ ID NO: 29387 - DNA, 15 bp, Homo sapiens
agtatttttaaaaaa

SEQ ID NO: 29388 - DNA, 15 bp, Homo sapiens
tagtatttttaaaaa

SEQ ID NO: 29389 - DNA, 15 bp, Homo sapiens
atagtatttttaaaa

SEQ ID NO: 29390 - DNA, 15 bp, Homo sapiens
gatagtatttttaaa

SEQ ID NO: 29391 - DNA, 15 bp, Homo sapiens
agatagtatttttaa

SEQ ID NO: 29392 - DNA, 15 bp, Homo sapiens
aagatagtattttta

SEQ ID NO: 29393 - DNA, 15 bp, Homo sapiens
caagatagtattttt

SEQ ID NO: 29394 - DNA, 15 bp, Homo sapiens
acaagatagtatttt

SEQ ID NO: 29395 - DNA, 15 bp, Homo sapiens
aacaagatagtattt

SEQ ID NO: 29396 - DNA, 15 bp, Homo sapiens
aaacaagatagtatt

SEQ ID NO: 29397 - DNA, 15 bp, Homo sapiens
aaaacaagatagtat

SEQ ID NO: 29398 - DNA, 15 bp, Homo sapiens
taaaacaagatagta

SEQ ID NO: 29399 - DNA, 15 bp, Homo sapiens
ttaaaacaagatagt

SEQ ID NO: 29400 - DNA, 15 bp, Homo sapiens
tttaaaacaagatag

SEQ ID NO: 29401 - DNA, 15 bp, Homo sapiens
ttttaaaacaagata

SEQ ID NO: 29402 - DNA, 15 bp, Homo sapiens
tttttaaaacaagat

SEQ ID NO: 29403 - DNA, 15 bp, Homo sapiens
ctttttaaaacaaga

SEQ ID NO: 29404 - DNA, 15 bp, Homo sapiens
tctttttaaaacaag

SEQ ID NO: 29405 - DNA, 15 bp, Homo sapiens
ctctttttaaaacaa

SEQ ID NO: 29406 - DNA, 15 bp, Homo sapiens
tctctttttaaaaca

SEQ ID NO: 29407 - DNA, 15 bp, Homo sapiens
ctctctttttaaaac

SEQ ID NO: 29408 - DNA, 15 bp, Homo sapiens
gctctctttttaaaa

SEQ ID NO: 29409 - DNA, 15 bp, Homo sapiens
ggctctctttttaaa

SEQ ID NO: 29410 - DNA, 15 bp, Homo sapiens
gggctctctttttaa

SEQ ID NO: 29411 - DNA, 15 bp, Homo sapiens
ggggctctcttttta

SEQ ID NO: 29412 - DNA, 15 bp, Homo sapiens
gggggctctcttttt

SEQ ID NO: 29413 - DNA, 15 bp, Homo sapiens
agggggctctctttt

SEQ ID NO: 29414 - DNA, 15 bp, Homo sapiens
tagggggctctcttt

SEQ ID NO: 29415 - DNA, 15 bp, Homo sapiens
gtagggggctctctt

SEQ ID NO: 29416 - DNA, 15 bp, Homo sapiens
ggtagggggctctct

SEQ ID NO: 29417 - DNA, 15 bp, Homo sapiens
tggtagggggctctc

SEQ ID NO: 29418 - DNA, 15 bp, Homo sapiens
ttggtagggggctct

SEQ ID NO: 29419 - DNA, 15 bp, Homo sapiens
gttggtagggggctc

SEQ ID NO: 29420 - DNA, 15 bp, Homo sapiens
agttggtagggggct

SEQ ID NO: 29421 - DNA, 15 bp, Homo sapiens
aagttggtagggggc

SEQ ID NO: 29422 - DNA, 15 bp, Homo sapiens
caagttggtaggggg

SEQ ID NO: 29423 - DNA, 15 bp, Homo sapiens
acaagttggtagggg

SEQ ID NO: 29424 - DNA, 15 bp, Homo sapiens
cacaagttggtaggg

SEQ ID NO: 29425 - DNA, 15 bp, Homo sapiens
acacaagttggtagg

SEQ ID NO: 29426 - DNA, 15 bp, Homo sapiens
gacacaagttggtag

SEQ ID NO: 29427 - DNA, 15 bp, Homo sapiens
tgacacaagttggta

SEQ ID NO: 29428 - DNA, 15 bp, Homo sapiens
ctgacacaagttggt

SEQ ID NO: 29429 - DNA, 15 bp, Homo sapiens
gctgacacaagttgg

SEQ ID NO: 29430 - DNA, 15 bp, Homo sapiens
ggctgacacaagttg

SEQ ID NO: 29431 - DNA, 15 bp, Homo sapiens
aggctgacacaagtt

SEQ ID NO: 29432 - DNA, 15 bp, Homo sapiens
gaggctgacacaagt

SEQ ID NO: 29433 - DNA, 15 bp, Homo sapiens
tgaggctgacacaag

SEQ ID NO: 29434 - DNA, 15 bp, Homo sapiens
ctgaggctgacacaa

SEQ ID NO: 29435 - DNA, 15 bp, Homo sapiens
cctgaggctgacaca

SEQ ID NO: 29436 - DNA, 15 bp, Homo sapiens
gcctgaggctgacac

SEQ ID NO: 29437 - DNA, 15 bp, Homo sapiens
ggcctgaggctgaca

SEQ ID NO: 29438 - DNA, 15 bp, Homo sapiens
gggcctgaggctgac

SEQ ID NO: 29439 - DNA, 15 bp, Homo sapiens
ggggcctgaggctga

SEQ ID NO: 29440 - DNA, 15 bp, Homo sapiens
gggggcctgaggctg

SEQ ID NO: 29441 - DNA, 15 bp, Homo sapiens
tgggggcctgaggct

SEQ ID NO: 29442 - DNA, 15 bp, Homo sapiens
gtgggggcctgaggc

SEQ ID NO: 29443 - DNA, 15 bp, Homo sapiens
ggtgggggcctgagg

SEQ ID NO: 29444 - DNA, 15 bp, Homo sapiens
aggtgggggcctgag

SEQ ID NO: 29445 - DNA, 15 bp, Homo sapiens
caggtgggggcctga

SEQ ID NO: 29446 - DNA, 15 bp, Homo sapiens
gcaggtgggggcctg

SEQ ID NO: 29447 - DNA, 15 bp, Homo sapiens
tgcaggtgggggcct

SEQ ID NO: 29448 - DNA, 15 bp, Homo sapiens
atgcaggtgggggcc

SEQ ID NO: 29449 - DNA, 15 bp, Homo sapiens
gatgcaggtgggggc

SEQ ID NO: 29450 - DNA, 15 bp, Homo sapiens
agatgcaggtggggg

SEQ ID NO: 29451 - DNA, 15 bp, Homo sapiens
cagatgcaggtgggg

SEQ ID NO: 29452 - DNA, 15 bp, Homo sapiens
gcagatgcaggtggg

SEQ ID NO: 29453 - DNA, 15 bp, Homo sapiens
agcagatgcaggtgg

SEQ ID NO: 29454 - DNA, 15 bp, Homo sapiens
gagcagatgcaggtg

SEQ ID NO: 29455 - DNA, 15 bp, Homo sapiens
ggagcagatgcaggt

SEQ ID NO: 29456 - DNA, 15 bp, Homo sapiens
aggagcagatgcagg

SEQ ID NO: 29457 - DNA, 15 bp, Homo sapiens
caggagcagatgcag

SEQ ID NO: 29458 - DNA, 15 bp, Homo sapiens
gcaggagcagatgca

SEQ ID NO: 29459 - DNA, 15 bp, Homo sapiens
ggcaggagcagatgc

SEQ ID NO: 29460 - DNA, 15 bp, Homo sapiens
tggcaggagcagatg

SEQ ID NO: 29461 - DNA, 15 bp, Homo sapiens
ctggcaggagcagat

SEQ ID NO: 29462 - DNA, 15 bp, Homo sapiens
cctggcaggagcaga

SEQ ID NO: 29463 - DNA, 15 bp, Homo sapiens
ccctggcaggagcag

SEQ ID NO: 29464 - DNA, 15 bp, Homo sapiens
gccctggcaggagca

SEQ ID NO: 29465 - DNA, 15 bp, Homo sapiens
tgccctggcaggagc

SEQ ID NO: 29466 - DNA, 15 bp, Homo sapiens
atgccctggcaggag

SEQ ID NO: 29467 - DNA, 15 bp, Homo sapiens
catgccctggcagga

SEQ ID NO: 29468 - DNA, 15 bp, Homo sapiens
ccatgccctggcagg

SEQ ID NO: 29469 - DNA, 15 bp, Homo sapiens
accatgccctggcag

SEQ ID NO: 29470 - DNA, 15 bp, Homo sapiens
caccatgccctggca

SEQ ID NO: 29471 - DNA, 15 bp, Homo sapiens
ccaccatgccctggc

SEQ ID NO: 29472 - DNA, 15 bp, Homo sapiens
cccaccatgccctgg

SEQ ID NO: 29473 - DNA, 15 bp, Homo sapiens
ccccaccatgccctg

SEQ ID NO: 29474 - DNA, 15 bp, Homo sapiens
gccccaccatgccct

SEQ ID NO: 29475 - DNA, 15 bp, Homo sapiens
tgccccaccatgccc

SEQ ID NO: 29476 - DNA, 15 bp, Homo sapiens
ttgccccaccatgcc

SEQ ID NO: 29477 - DNA, 15 bp, Homo sapiens
cttgccccaccatgc

SEQ ID NO: 29478 - DNA, 15 bp, Homo sapiens
tcttgccccaccatg

SEQ ID NO: 29479 - DNA, 15 bp, Homo sapiens
ttcttgccccaccat

SEQ ID NO: 29480 - DNA, 15 bp, Homo sapiens
cttcttgccccacca

SEQ ID NO: 29481 - DNA, 15 bp, Homo sapiens
gcttcttgccccacc

SEQ ID NO: 29482 - DNA, 15 bp, Homo sapiens
tgcttcttgccccac

SEQ ID NO: 29483 - DNA, 15 bp, Homo sapiens
gtgcttcttgcccca

SEQ ID NO: 29484 - DNA, 15 bp, Homo sapiens
agtgcttcttgcccc

SEQ ID NO: 29485 - DNA, 15 bp, Homo sapiens
cagtgcttcttgccc

SEQ ID NO: 29486 - DNA, 15 bp, Homo sapiens
gcagtgcttcttgcc

SEQ ID NO: 29487 - DNA, 15 bp, Homo sapiens
agcagtgcttcttgc

SEQ ID NO: 29488 - DNA, 15 bp, Homo sapiens
gagcagtgcttcttg

SEQ ID NO: 29489 - DNA, 15 bp, Homo sapiens
ggagcagtgcttctt

SEQ ID NO: 29490 - DNA, 15 bp, Homo sapiens
gggagcagtgcttct

SEQ ID NO: 29491 - DNA, 15 bp, Homo sapiens
ggggagcagtgcttc

SEQ ID NO: 29492 - DNA, 15 bp, Homo sapiens
aggggagcagtgctt

SEQ ID NO: 29493 - DNA, 15 bp, Homo sapiens
aaggggagcagtgct

SEQ ID NO: 29494 - DNA, 15 bp, Homo sapiens
gaaggggagcagtgc

SEQ ID NO: 29495 - DNA, 15 bp, Homo sapiens
ggaaggggagcagtg

SEQ ID NO: 29496 - DNA, 15 bp, Homo sapiens
tggaaggggagcagt

SEQ ID NO: 29497 - DNA, 15 bp, Homo sapiens
ttggaaggggagcag

SEQ ID NO: 29498 - DNA, 15 bp, Homo sapiens
tttggaaggggagca

SEQ ID NO: 29499 - DNA, 15 bp, Homo sapiens
ctttggaaggggagc

SEQ ID NO: 29500 - DNA, 15 bp, Homo sapiens
gctttggaaggggag

SEQ ID NO: 29501 - DNA, 15 bp, Homo sapiens
agctttggaagggga

SEQ ID NO: 29502 - DNA, 15 bp, Homo sapiens
aagctttggaagggg

SEQ ID NO: 29503 - DNA, 15 bp, Homo sapiens
gaagctttggaaggg

SEQ ID NO: 29504 - DNA, 15 bp, Homo sapiens
ggaagctttggaagg

SEQ ID NO: 29505 - DNA, 15 bp, Homo sapiens
aggaagctttggaag

SEQ ID NO: 29506 - DNA, 15 bp, Homo sapiens
aaggaagctttggaa

SEQ ID NO: 29507 - DNA, 15 bp, Homo sapiens
gaaggaagctttgga

SEQ ID NO: 29508 - DNA, 15 bp, Homo sapiens
ggaaggaagctttgg

SEQ ID NO: 29509 - DNA, 15 bp, Homo sapiens
aggaaggaagctttg

SEQ ID NO: 29510 - DNA, 15 bp, Homo sapiens
aaggaaggaagcttt

SEQ ID NO: 29511 - DNA, 15 bp, Homo sapiens
caaggaaggaagctt

SEQ ID NO: 29512 - DNA, 15 bp, Homo sapiens
gcaaggaaggaagct

SEQ ID NO: 29513 - DNA, 15 bp, Homo sapiens
ggcaaggaaggaagc

SEQ ID NO: 29514 - DNA, 15 bp, Homo sapiens
gggcaaggaaggaag

SEQ ID NO: 29515 - DNA, 15 bp, Homo sapiens
agggcaaggaaggaa

SEQ ID NO: 29516 - DNA, 15 bp, Homo sapiens
cagggcaaggaagga

SEQ ID NO: 29517 - DNA, 15 bp, Homo sapiens
ccagggcaaggaagg

SEQ ID NO: 29518 - DNA, 15 bp, Homo sapiens
tccagggcaaggaag

SEQ ID NO: 29519 - DNA, 15 bp, Homo sapiens
ctccagggcaaggaa

SEQ ID NO: 29520 - DNA, 15 bp, Homo sapiens
actccagggcaagga

SEQ ID NO: 29521 - DNA, 15 bp, Homo sapiens
gactccagggcaagg

SEQ ID NO: 29522 - DNA, 15 bp, Homo sapiens
tgactccagggcaag

SEQ ID NO: 29523 - DNA, 15 bp, Homo sapiens
atgactccagggcaa

SEQ ID NO: 29524 - DNA, 15 bp, Homo sapiens
gatgactccagggca

SEQ ID NO: 29525 - DNA, 15 bp, Homo sapiens
ggatgactccagggc

SEQ ID NO: 29526 - DNA, 15 bp, Homo sapiens
aggatgactccaggg

SEQ ID NO: 29527 - DNA, 15 bp, Homo sapiens
gaggatgactccagg

SEQ ID NO: 29528 - DNA, 15 bp, Homo sapiens
tgaggatgactccag

SEQ ID NO: 29529 - DNA, 15 bp, Homo sapiens
gtgaggatgactcca

SEQ ID NO: 29530 - DNA, 15 bp, Homo sapiens
agtgaggatgactcc

SEQ ID NO: 29531 - DNA, 15 bp, Homo sapiens
gagtgaggatgactc

SEQ ID NO: 29532 - DNA, 15 bp, Homo sapiens
ggagtgaggatgact

SEQ ID NO: 29533 - DNA, 15 bp, Homo sapiens
gggagtgaggatgac

SEQ ID NO: 29534 - DNA, 15 bp, Homo sapiens
ggggagtgaggatga

SEQ ID NO: 29535 - DNA, 15 bp, Homo sapiens
tggggagtgaggatg

SEQ ID NO: 29536 - DNA, 15 bp, Homo sapiens
gtggggagtgaggat

SEQ ID NO: 29537 - DNA, 15 bp, Homo sapiens
agtggggagtgagga

SEQ ID NO: 29538 - DNA, 15 bp, Homo sapiens
gagtggggagtgagg

SEQ ID NO: 29539 - DNA, 15 bp, Homo sapiens
ggagtggggagtgag

SEQ ID NO: 29540 - DNA, 15 bp, Homo sapiens
tggagtggggagtga

SEQ ID NO: 29541 - DNA, 15 bp, Homo sapiens
ttggagtggggagtg

SEQ ID NO: 29542 - DNA, 15 bp, Homo sapiens
cttggagtggggagt

SEQ ID NO: 29543 - DNA, 15 bp, Homo sapiens
gcttggagtggggag

SEQ ID NO: 29544 - DNA, 15 bp, Homo sapiens
ggcttggagtgggga

SEQ ID NO: 29545 - DNA, 15 bp, Homo sapiens
tggcttggagtgggg

SEQ ID NO: 29546 - DNA, 15 bp, Homo sapiens
gtggcttggagtggg

SEQ ID NO: 29547 - DNA, 15 bp, Homo sapiens
ggtggcttggagtgg

SEQ ID NO: 29548 - DNA, 15 bp, Homo sapiens
aggtggcttggagtg

SEQ ID NO: 29549 - DNA, 15 bp, Homo sapiens
caggtggcttggagt

SEQ ID NO: 29550 - DNA, 15 bp, Homo sapiens
gcaggtggcttggag

SEQ ID NO: 29551 - DNA, 15 bp, Homo sapiens
ggcaggtggcttgga

SEQ ID NO: 29552 - DNA, 15 bp, Homo sapiens
tggcaggtggcttgg

SEQ ID NO: 29553 - DNA, 15 bp, Homo sapiens
atggcaggtggcttg

SEQ ID NO: 29554 - DNA, 15 bp, Homo sapiens
gatggcaggtggctt

SEQ ID NO: 29555 - DNA, 15 bp, Homo sapiens
cgatggcaggtggct

SEQ ID NO: 29556 - DNA, 15 bp, Homo sapiens
gcgatggcaggtggc

SEQ ID NO: 29557 - DNA, 15 bp, Homo sapiens
agcgatggcaggtgg

SEQ ID NO: 29558 - DNA, 15 bp, Homo sapiens
cagcgatggcaggtg

SEQ ID NO: 29559 - DNA, 15 bp, Homo sapiens
acagcgatggcaggt

SEQ ID NO: 29560 - DNA, 15 bp, Homo sapiens
cacagcgatggcagg

SEQ ID NO: 29561 - DNA, 15 bp, Homo sapiens
gcacagcgatggcag

SEQ ID NO: 29562 - DNA, 15 bp, Homo sapiens
ggcacagcgatggca

SEQ ID NO: 29563 - DNA, 15 bp, Homo sapiens
gggcacagcgatggc

SEQ ID NO: 29564 - DNA, 15 bp, Homo sapiens
ggggcacagcgatgg

SEQ ID NO: 29565 - DNA, 15 bp, Homo sapiens
gggggcacagcgatg

SEQ ID NO: 29566 - DNA, 15 bp, Homo sapiens
agggggcacagcgat

SEQ ID NO: 29567 - DNA, 15 bp, Homo sapiens
gagggggcacagcga

SEQ ID NO: 29568 - DNA, 15 bp, Homo sapiens
agagggggcacagcg

SEQ ID NO: 29569 - DNA, 15 bp, Homo sapiens
gagagggggcacagc

SEQ ID NO: 29570 - DNA, 15 bp, Homo sapiens
agagagggggcacag

SEQ ID NO: 29571 - DNA, 15 bp, Homo sapiens
cagagagggggcaca

SEQ ID NO: 29572 - DNA, 15 bp, Homo sapiens
ccagagagggggcac

SEQ ID NO: 29573 - DNA, 15 bp, Homo sapiens
accagagagggggca

SEQ ID NO: 29574 - DNA, 15 bp, Homo sapiens
caccagagagggggc

SEQ ID NO: 29575 - DNA, 15 bp, Homo sapiens
tcaccagagaggggg

SEQ ID NO: 29576 - DNA, 15 bp, Homo sapiens
ttcaccagagagggg

SEQ ID NO: 29577 - DNA, 15 bp, Homo sapiens
attcaccagagaggg

SEQ ID NO: 29578 - DNA, 15 bp, Homo sapiens
gattcaccagagagg

SEQ ID NO: 29579 - DNA, 15 bp, Homo sapiens
agattcaccagagag

SEQ ID NO: 29580 - DNA, 15 bp, Homo sapiens
cagattcaccagaga

SEQ ID NO: 29581 - DNA, 15 bp, Homo sapiens
ccagattcaccagag

SEQ ID NO: 29582 - DNA, 15 bp, Homo sapiens
gccagattcaccaga

SEQ ID NO: 29583 - DNA, 15 bp, Homo sapiens
tgccagattcaccag

SEQ ID NO: 29584 - DNA, 15 bp, Homo sapiens
atgccagattcacca

SEQ ID NO: 29585 - DNA, 15 bp, Homo sapiens
aatgccagattcacc

SEQ ID NO: 29586 - DNA, 15 bp, Homo sapiens
gaatgccagattcac

SEQ ID NO: 29587 - DNA, 15 bp, Homo sapiens
agaatgccagattca

SEQ ID NO: 29588 - DNA, 15 bp, Homo sapiens
aagaatgccagattc

SEQ ID NO: 29589 - DNA, 15 bp, Homo sapiens
taagaatgccagatt

SEQ ID NO: 29590 - DNA, 15 bp, Homo sapiens
ctaagaatgccagat

SEQ ID NO: 29591 - DNA, 15 bp, Homo sapiens
cctaagaatgccaga

SEQ ID NO: 29592 - DNA, 15 bp, Homo sapiens
acctaagaatgccag

SEQ ID NO: 29593 - DNA, 15 bp, Homo sapiens
cacctaagaatgcca

SEQ ID NO: 29594 - DNA, 15 bp, Homo sapiens
ccacctaagaatgcc

SEQ ID NO: 29595 - DNA, 15 bp, Homo sapiens
cccacctaagaatgc

SEQ ID NO: 29596 - DNA, 15 bp, Homo sapiens
gcccacctaagaatg

SEQ ID NO: 29597 - DNA, 15 bp, Homo sapiens
agcccacctaagaat

SEQ ID NO: 29598 - DNA, 15 bp, Homo sapiens
cagcccacctaagaa

SEQ ID NO: 29599 - DNA, 15 bp, Homo sapiens
tcagcccacctaaga

SEQ ID NO: 29600 - DNA, 15 bp, Homo sapiens
ctcagcccacctaag

SEQ ID NO: 29601 - DNA, 15 bp, Homo sapiens
tctcagcccacctaa

SEQ ID NO: 29602 - DNA, 15 bp, Homo sapiens
ttctcagcccaccta

SEQ ID NO: 29603 - DNA, 15 bp, Homo sapiens
cttctcagcccacct

SEQ ID NO: 29604 - DNA, 15 bp, Homo sapiens
gcttctcagcccacc

SEQ ID NO: 29605 - DNA, 15 bp, Homo sapiens
tgcttctcagcccac

SEQ ID NO: 29606 - DNA, 15 bp, Homo sapiens
ctgcttctcagccca

SEQ ID NO: 29607 - DNA, 15 bp, Homo sapiens
tctgcttctcagccc

SEQ ID NO: 29608 - DNA, 15 bp, Homo sapiens
gtctgcttctcagcc

SEQ ID NO: 29609 - DNA, 15 bp, Homo sapiens
agtctgcttctcagc

SEQ ID NO: 29610 - DNA, 15 bp, Homo sapiens
cagtctgcttctcag

SEQ ID NO: 29611 - DNA, 15 bp, Homo sapiens
ccagtctgcttctca

SEQ ID NO: 29612 - DNA, 15 bp, Homo sapiens
gccagtctgcttctc

SEQ ID NO: 29613 - DNA, 15 bp, Homo sapiens
ggccagtctgcttct

SEQ ID NO: 29614 - DNA, 15 bp, Homo sapiens
gggccagtctgcttc

SEQ ID NO: 29615 - DNA, 15 bp, Homo sapiens
tgggccagtctgctt

SEQ ID NO: 29616 - DNA, 15 bp, Homo sapiens
ttgggccagtctgct

SEQ ID NO: 29617 - DNA, 15 bp, Homo sapiens
cttgggccagtctgc

SEQ ID NO: 29618 - DNA, 15 bp, Homo sapiens
gcttgggccagtctg

SEQ ID NO: 29619 - DNA, 15 bp, Homo sapiens
agcttgggccagtct

SEQ ID NO: 29620 - DNA, 15 bp, Homo sapiens
tagcttgggccagtc

SEQ ID NO: 29621 - DNA, 15 bp, Homo sapiens
ttagcttgggccagt

SEQ ID NO: 29622 - DNA, 15 bp, Homo sapiens
cttagcttgggccag

SEQ ID NO: 29623 - DNA, 15 bp, Homo sapiens
ccttagcttgggcca

SEQ ID NO: 29624 - DNA, 15 bp, Homo sapiens
gccttagcttgggcc

SEQ ID NO: 29625 - DNA, 15 bp, Homo sapiens
ggccttagcttgggc

SEQ ID NO: 29626 - DNA, 15 bp, Homo sapiens
aggccttagcttggg

SEQ ID NO: 29627 - DNA, 15 bp, Homo sapiens
aaggccttagcttgg

SEQ ID NO: 29628 - DNA, 15 bp, Homo sapiens
aaaggccttagcttg

SEQ ID NO: 29629 - DNA, 15 bp, Homo sapiens
gaaaggccttagctt

SEQ ID NO: 29630 - DNA, 15 bp, Homo sapiens
agaaaggccttagct

SEQ ID NO: 29631 - DNA, 15 bp, Homo sapiens
cagaaaggccttagc

SEQ ID NO: 29632 - DNA, 15 bp, Homo sapiens
tcagaaaggccttag

SEQ ID NO: 29633 - DNA, 15 bp, Homo sapiens
atcagaaaggcctta

SEQ ID NO: 29634 - DNA, 15 bp, Homo sapiens
catcagaaaggcctt

SEQ ID NO: 29635 - DNA, 15 bp, Homo sapiens
ccatcagaaaggcct

SEQ ID NO: 29636 - DNA, 15 bp, Homo sapiens
cccatcagaaaggcc

SEQ ID NO: 29637 - DNA, 15 bp, Homo sapiens
ccccatcagaaaggc

SEQ ID NO: 29638 - DNA, 15 bp, Homo sapiens
accccatcagaaagg

SEQ ID NO: 29639 - DNA, 15 bp, Homo sapiens
aaccccatcagaaag

SEQ ID NO: 29640 - DNA, 15 bp, Homo sapiens
caaccccatcagaaa

SEQ ID NO: 29641 - DNA, 15 bp, Homo sapiens
acaaccccatcagaa

SEQ ID NO: 29642 - DNA, 15 bp, Homo sapiens
aacaaccccatcaga

SEQ ID NO: 29643 - DNA, 15 bp, Homo sapiens
caacaaccccatcag

SEQ ID NO: 29644 - DNA, 15 bp, Homo sapiens
gcaacaaccccatca

SEQ ID NO: 29645 - DNA, 15 bp, Homo sapiens
agcaacaaccccatc

SEQ ID NO: 29646 - DNA, 15 bp, Homo sapiens
cagcaacaaccccat

SEQ ID NO: 29647 - DNA, 15 bp, Homo sapiens
gcagcaacaacccca

SEQ ID NO: 29648 - DNA, 15 bp, Homo sapiens
agcagcaacaacccc

SEQ ID NO: 29649 - DNA, 15 bp, Homo sapiens
cagcagcaacaaccc

SEQ ID NO: 29650 - DNA, 15 bp, Homo sapiens
tcagcagcaacaacc

SEQ ID NO: 29651 - DNA, 15 bp, Homo sapiens
ctcagcagcaacaac

SEQ ID NO: 29652 - DNA, 15 bp, Homo sapiens
tctcagcagcaacaa

SEQ ID NO: 29653 - DNA, 15 bp, Homo sapiens
ttctcagcagcaaca

SEQ ID NO: 29654 - DNA, 15 bp, Homo sapiens
attctcagcagcaac

SEQ ID NO: 29655 - DNA, 15 bp, Homo sapiens
gattctcagcagcaa

SEQ ID NO: 29656 - DNA, 15 bp, Homo sapiens
tgattctcagcagca

SEQ ID NO: 29657 - DNA, 15 bp, Homo sapiens
atgattctcagcagc

SEQ ID NO: 29658 - DNA, 15 bp, Homo sapiens
catgattctcagcag

SEQ ID NO: 29659 - DNA, 15 bp, Homo sapiens
tcatgattctcagca

SEQ ID NO: 29660 - DNA, 15 bp, Homo sapiens
gtcatgattctcagc

SEQ ID NO: 29661 - DNA, 15 bp, Homo sapiens
agtcatgattctcag

SEQ ID NO: 29662 - DNA, 15 bp, Homo sapiens
cagtcatgattctca

SEQ ID NO: 29663 - DNA, 15 bp, Homo sapiens
ccagtcatgattctc

SEQ ID NO: 29664 - DNA, 15 bp, Homo sapiens
cccagtcatgattct

SEQ ID NO: 29665 - DNA, 15 bp, Homo sapiens
acccagtcatgattc

SEQ ID NO: 29666 - DNA, 15 bp, Homo sapiens
cacccagtcatgatt

SEQ ID NO: 29667 - DNA, 15 bp, Homo sapiens
ccacccagtcatgat

SEQ ID NO: 29668 - DNA, 15 bp, Homo sapiens
cccacccagtcatga

SEQ ID NO: 29669 - DNA, 15 bp, Homo sapiens
tcccacccagtcatg

SEQ ID NO: 29670 - DNA, 15 bp, Homo sapiens
ctcccacccagtcat

SEQ ID NO: 29671 - DNA, 15 bp, Homo sapiens
tctcccacccagtca

SEQ ID NO: 29672 - DNA, 15 bp, Homo sapiens
ttctcccacccagtc

SEQ ID NO: 29673 - DNA, 15 bp, Homo sapiens
cttctcccacccagt

SEQ ID NO: 29674 - DNA, 15 bp, Homo sapiens
ccttctcccacccag

SEQ ID NO: 29675 - DNA, 15 bp, Homo sapiens
tccttctcccaccca

SEQ ID NO: 29676 - DNA, 15 bp, Homo sapiens
ctccttctcccaccc

SEQ ID NO: 29677 - DNA, 15 bp, Homo sapiens
cctccttctcccacc

SEQ ID NO: 29678 - DNA, 15 bp, Homo sapiens
acctccttctcccac

SEQ ID NO: 29679 - DNA, 15 bp, Homo sapiens
cacctccttctccca

SEQ ID NO: 29680 - DNA, 15 bp, Homo sapiens
tcacctccttctccc

SEQ ID NO: 29681 - DNA, 15 bp, Homo sapiens
gtcacctccttctcc

SEQ ID NO: 29682 - DNA, 15 bp, Homo sapiens
ggtcacctccttctc

SEQ ID NO: 29683 - DNA, 15 bp, Homo sapiens
gggtcacctccttct

SEQ ID NO: 29684 - DNA, 15 bp, Homo sapiens
agggtcacctccttc

SEQ ID NO: 29685 - DNA, 15 bp, Homo sapiens
aagggtcacctcctt

SEQ ID NO: 29686 - DNA, 15 bp, Homo sapiens
aaagggtcacctcct

SEQ ID NO: 29687 - DNA, 15 bp, Homo sapiens
caaagggtcacctcc

SEQ ID NO: 29688 - DNA, 15 bp, Homo sapiens
gcaaagggtcacctc

SEQ ID NO: 29689 - DNA, 15 bp, Homo sapiens
agcaaagggtcacct

SEQ ID NO: 29690 - DNA, 15 bp, Homo sapiens
cagcaaagggtcacc

SEQ ID NO: 29691 - DNA, 15 bp, Homo sapiens
acagcaaagggtcac

SEQ ID NO: 29692 - DNA, 15 bp, Homo sapiens
gacagcaaagggtca

SEQ ID NO: 29693 - DNA, 15 bp, Homo sapiens
agacagcaaagggtc

SEQ ID NO: 29694 - DNA, 15 bp, Homo sapiens
aagacagcaaagggt

SEQ ID NO: 29695 - DNA, 15 bp, Homo sapiens
taagacagcaaaggg

SEQ ID NO: 29696 - DNA, 15 bp, Homo sapiens
ataagacagcaaagg

SEQ ID NO: 29697 - DNA, 15 bp, Homo sapiens
aataagacagcaaag

SEQ ID NO: 29698 - DNA, 15 bp, Homo sapiens
aaataagacagcaaa

SEQ ID NO: 29699 - DNA, 15 bp, Homo sapiens
aaaataagacagcaa

SEQ ID NO: 29700 - DNA, 15 bp, Homo sapiens
aaaaataagacagca

SEQ ID NO: 29701 - DNA, 15 bp, Homo sapiens
taaaaataagacagc

SEQ ID NO: 29702 - DNA, 15 bp, Homo sapiens
gtaaaaataagacag

SEQ ID NO: 29703 - DNA, 15 bp, Homo sapiens
agtaaaaataagaca

SEQ ID NO: 29704 - DNA, 15 bp, Homo sapiens
cagtaaaaataagac

SEQ ID NO: 29705 - DNA, 15 bp, Homo sapiens
acagtaaaaataaga

SEQ ID NO: 29706 - DNA, 15 bp, Homo sapiens
cacagtaaaaataag

SEQ ID NO: 29707 - DNA, 15 bp, Homo sapiens
acacagtaaaaataa

SEQ ID NO: 29708 - DNA, 15 bp, Homo sapiens
tacacagtaaaaata

SEQ ID NO: 29709 - DNA, 15 bp, Homo sapiens
atacacagtaaaaat

SEQ ID NO: 29710 - DNA, 15 bp, Homo sapiens
aatacacagtaaaaa

SEQ ID NO: 29711 - DNA, 15 bp, Homo sapiens
aaatacacagtaaaa

SEQ ID NO: 29712 - DNA, 15 bp, Homo sapiens
gaaatacacagtaaa

SEQ ID NO: 29713 - DNA, 15 bp, Homo sapiens
ggaaatacacagtaa

SEQ ID NO: 29714 - DNA, 15 bp, Homo sapiens
aggaaatacacagta

SEQ ID NO: 29715 - DNA, 15 bp, Homo sapiens
aaggaaatacacagt

SEQ ID NO: 29716 - DNA, 15 bp, Homo sapiens
aaaggaaatacacag

SEQ ID NO: 29717 - DNA, 15 bp, Homo sapiens
aaaaggaaatacaca

SEQ ID NO: 29718 - DNA, 15 bp, Homo sapiens
gaaaaggaaatacac

SEQ ID NO: 29719 - DNA, 15 bp, Homo sapiens
tgaaaaggaaataca

SEQ ID NO: 29720 - DNA, 15 bp, Homo sapiens
ctgaaaaggaaatac

SEQ ID NO: 29721 - DNA, 15 bp, Homo sapiens
gctgaaaaggaaata

SEQ ID NO: 29722 - DNA, 15 bp, Homo sapiens
agctgaaaaggaaat

SEQ ID NO: 29723 - DNA, 15 bp, Homo sapiens
tagctgaaaaggaaa

SEQ ID NO: 29724 - DNA, 15 bp, Homo sapiens
gtagctgaaaaggaa

SEQ ID NO: 29725 - DNA, 15 bp, Homo sapiens
agtagctgaaaagga

SEQ ID NO: 29726 - DNA, 15 bp, Homo sapiens
aagtagctgaaaagg

SEQ ID NO: 29727 - DNA, 15 bp, Homo sapiens
taagtagctgaaaag

SEQ ID NO: 29728 - DNA, 15 bp, Homo sapiens
ttaagtagctgaaaa

SEQ ID NO: 29729 - DNA, 15 bp, Homo sapiens
tttaagtagctgaaa

SEQ ID NO: 29730 - DNA, 15 bp, Homo sapiens
ttttaagtagctgaa

SEQ ID NO: 29731 - DNA, 15 bp, Homo sapiens
attttaagtagctga

SEQ ID NO: 29732 - DNA, 15 bp, Homo sapiens
cattttaagtagctg

SEQ ID NO: 29733 - DNA, 15 bp, Homo sapiens
acattttaagtagct

SEQ ID NO: 29734 - DNA, 15 bp, Homo sapiens
tacattttaagtagc

SEQ ID NO: 29735 - DNA, 15 bp, Homo sapiens
atacattttaagtag

SEQ ID NO: 29736 - DNA, 15 bp, Homo sapiens
aatacattttaagta

SEQ ID NO: 29737 - DNA, 15 bp, Homo sapiens
caatacattttaagt

SEQ ID NO: 29738 - DNA, 15 bp, Homo sapiens
gcaatacattttaag

SEQ ID NO: 29739 - DNA, 15 bp, Homo sapiens
agcaatacattttaa

SEQ ID NO: 29740 - DNA, 15 bp, Homo sapiens
aagcaatacatttta

SEQ ID NO: 29741 - DNA, 15 bp, Homo sapiens
taagcaatacatttt

SEQ ID NO: 29742 - DNA, 15 bp, Homo sapiens
ctaagcaatacattt

SEQ ID NO: 29743 - DNA, 15 bp, Homo sapiens
actaagcaatacatt

SEQ ID NO: 29744 - DNA, 15 bp, Homo sapiens
cactaagcaatacat

SEQ ID NO: 29745 - DNA, 15 bp, Homo sapiens
tcactaagcaataca

SEQ ID NO: 29746 - DNA, 15 bp, Homo sapiens
atcactaagcaatac

SEQ ID NO: 29747 - DNA, 15 bp, Homo sapiens
tatcactaagcaata

SEQ ID NO: 29748 - DNA, 15 bp, Homo sapiens
gtatcactaagcaat

SEQ ID NO: 29749 - DNA, 15 bp, Homo sapiens
ggtatcactaagcaa

SEQ ID NO: 29750 - DNA, 15 bp, Homo sapiens
aggtatcactaagca

SEQ ID NO: 29751 - DNA, 15 bp, Homo sapiens
taggtatcactaagc

SEQ ID NO: 29752 - DNA, 15 bp, Homo sapiens
ttaggtatcactaag

SEQ ID NO: 29753 - DNA, 15 bp, Homo sapiens
attaggtatcactaa

SEQ ID NO: 29754 - DNA, 15 bp, Homo sapiens
cattaggtatcacta

SEQ ID NO: 29755 - DNA, 15 bp, Homo sapiens
ccattaggtatcact

SEQ ID NO: 29756 - DNA, 15 bp, Homo sapiens
cccattaggtatcac

SEQ ID NO: 29757 - DNA, 15 bp, Homo sapiens
acccattaggtatca

SEQ ID NO: 29758 - DNA, 15 bp, Homo sapiens
aacccattaggtatc

SEQ ID NO: 29759 - DNA, 15 bp, Homo sapiens
gaacccattaggtat

SEQ ID NO: 29760 - DNA, 15 bp, Homo sapiens
tgaacccattaggta

SEQ ID NO: 29761 - DNA, 15 bp, Homo sapiens
atgaacccattaggt

SEQ ID NO: 29762 - DNA, 15 bp, Homo sapiens
aatgaacccattagg

SEQ ID NO: 29763 - DNA, 15 bp, Homo sapiens
taatgaacccattag

SEQ ID NO: 29764 - DNA, 15 bp, Homo sapiens
ctaatgaacccatta

SEQ ID NO: 29765 - DNA, 15 bp, Homo sapiens
gctaatgaacccatt

SEQ ID NO: 29766 - DNA, 15 bp, Homo sapiens
ggctaatgaacccat

SEQ ID NO: 29767 - DNA, 15 bp, Homo sapiens
aggctaatgaaccca

SEQ ID NO: 29768 - DNA, 15 bp, Homo sapiens
caggctaatgaaccc

SEQ ID NO: 29769 - DNA, 15 bp, Homo sapiens
gcaggctaatgaacc

SEQ ID NO: 29770 - DNA, 15 bp, Homo sapiens
agcaggctaatgaac

SEQ ID NO: 29771 - DNA, 15 bp, Homo sapiens
aagcaggctaatgaa

SEQ ID NO: 29772 - DNA, 15 bp, Homo sapiens
gaagcaggctaatga

SEQ ID NO: 29773 - DNA, 15 bp, Homo sapiens
ggaagcaggctaatg

SEQ ID NO: 29774 - DNA, 15 bp, Homo sapiens
aggaagcaggctaat

SEQ ID NO: 29775 - DNA, 15 bp, Homo sapiens
taggaagcaggctaa

SEQ ID NO: 29776 - DNA, 15 bp, Homo sapiens
gtaggaagcaggcta

SEQ ID NO: 29777 - DNA, 15 bp, Homo sapiens
agtaggaagcaggct

SEQ ID NO: 29778 - DNA, 15 bp, Homo sapiens
cagtaggaagcaggc

SEQ ID NO: 29779 - DNA, 15 bp, Homo sapiens
tcagtaggaagcagg

SEQ ID NO: 29780 - DNA, 15 bp, Homo sapiens
ttcagtaggaagcag

SEQ ID NO: 29781 - DNA, 15 bp, Homo sapiens
gttcagtaggaagca

SEQ ID NO: 29782 - DNA, 15 bp, Homo sapiens
tgttcagtaggaagc

SEQ ID NO: 29783 - DNA, 15 bp, Homo sapiens
atgttcagtaggaag

SEQ ID NO: 29784 - DNA, 15 bp, Homo sapiens
aatgttcagtaggaa

SEQ ID NO: 29785 - DNA, 15 bp, Homo sapiens
aaatgttcagtagga

SEQ ID NO: 29786 - DNA, 15 bp, Homo sapiens
gaaatgttcagtagg

SEQ ID NO: 29787 - DNA, 15 bp, Homo sapiens
ggaaatgttcagtag

SEQ ID NO: 29788 - DNA, 15 bp, Homo sapiens
cggaaatgttcagta

SEQ ID NO: 29789 - DNA, 15 bp, Homo sapiens
gcggaaatgttcagt

SEQ ID NO: 29790 - DNA, 15 bp, Homo sapiens
agcggaaatgttcag

SEQ ID NO: 29791 - DNA, 15 bp, Homo sapiens
gagcggaaatgttca

SEQ ID NO: 29792 - DNA, 15 bp, Homo sapiens
tgagcggaaatgttc

SEQ ID NO: 29793 - DNA, 15 bp, Homo sapiens
ctgagcggaaatgtt

SEQ ID NO: 29794 - DNA, 15 bp, Homo sapiens
cctgagcggaaatgt

SEQ ID NO: 29795 - DNA, 15 bp, Homo sapiens
gcctgagcggaaatg

SEQ ID NO: 29796 - DNA, 15 bp, Homo sapiens
tgcctgagcggaaat

SEQ ID NO: 29797 - DNA, 15 bp, Homo sapiens
atgcctgagcggaaa

SEQ ID NO: 29798 - DNA, 15 bp, Homo sapiens
gatgcctgagcggaa

SEQ ID NO: 29799 - DNA, 15 bp, Homo sapiens
ggatgcctgagcgga

SEQ ID NO: 29800 - DNA, 15 bp, Homo sapiens
tggatgcctgagcgg

SEQ ID NO: 29801 - DNA, 15 bp, Homo sapiens
gtggatgcctgagcg

SEQ ID NO: 29802 - DNA, 15 bp, Homo sapiens
agtggatgcctgagc

SEQ ID NO: 29803 - DNA, 15 bp, Homo sapiens
aagtggatgcctgag

SEQ ID NO: 29804 - DNA, 15 bp, Homo sapiens
caagtggatgcctga

SEQ ID NO: 29805 - DNA, 15 bp, Homo sapiens
ccaagtggatgcctg

SEQ ID NO: 29806 - DNA, 15 bp, Homo sapiens
accaagtggatgcct

SEQ ID NO: 29807 - DNA, 15 bp, Homo sapiens
gaccaagtggatgcc

SEQ ID NO: 29808 - DNA, 15 bp, Homo sapiens
ggaccaagtggatgc

SEQ ID NO: 29809 - DNA, 15 bp, Homo sapiens
gggaccaagtggatg

SEQ ID NO: 29810 - DNA, 15 bp, Homo sapiens
tgggaccaagtggat

SEQ ID NO: 29811 - DNA, 15 bp, Homo sapiens
ttgggaccaagtgga

SEQ ID NO: 29812 - DNA, 15 bp, Homo sapiens
cttgggaccaagtgg

SEQ ID NO: 29813 - DNA, 15 bp, Homo sapiens
ccttgggaccaagtg

SEQ ID NO: 29814 - DNA, 15 bp, Homo sapiens
gccttgggaccaagt

SEQ ID NO: 29815 - DNA, 15 bp, Homo sapiens
ggccttgggaccaag

SEQ ID NO: 29816 - DNA, 15 bp, Homo sapiens
aggccttgggaccaa

SEQ ID NO: 29817 - DNA, 15 bp, Homo sapiens
caggccttgggacca

SEQ ID NO: 29818 - DNA, 15 bp, Homo sapiens
gcaggccttgggacc

SEQ ID NO: 29819 - DNA, 15 bp, Homo sapiens
agcaggccttgggac

SEQ ID NO: 29820 - DNA, 15 bp, Homo sapiens
gagcaggccttggga

SEQ ID NO: 29821 - DNA, 15 bp, Homo sapiens
ggagcaggccttggg

SEQ ID NO: 29822 - DNA, 15 bp, Homo sapiens
aggagcaggccttgg

SEQ ID NO: 29823 - DNA, 15 bp, Homo sapiens
gaggagcaggccttg

SEQ ID NO: 29824 - DNA, 15 bp, Homo sapiens
agaggagcaggcctt

SEQ ID NO: 29825 - DNA, 15 bp, Homo sapiens
gagaggagcaggcct

SEQ ID NO: 29826 - DNA, 15 bp, Homo sapiens
ggagaggagcaggcc

SEQ ID NO: 29827 - DNA, 15 bp, Homo sapiens
gggagaggagcaggc

SEQ ID NO: 29828 - DNA, 15 bp, Homo sapiens
tgggagaggagcagg

SEQ ID NO: 29829 - DNA, 15 bp, Homo sapiens
atgggagaggagcag

SEQ ID NO: 29830 - DNA, 15 bp, Homo sapiens
tatgggagaggagca

SEQ ID NO: 29831 - DNA, 15 bp, Homo sapiens
atatgggagaggagc

SEQ ID NO: 29832 - DNA, 15 bp, Homo sapiens
aatatgggagaggag

SEQ ID NO: 29833 - DNA, 15 bp, Homo sapiens
gaatatgggagagga

SEQ ID NO: 29834 - DNA, 15 bp, Homo sapiens
agaatatgggagagg

SEQ ID NO: 29835 - DNA, 15 bp, Homo sapiens
cagaatatgggagag

SEQ ID NO: 29836 - DNA, 15 bp, Homo sapiens
tcagaatatgggaga

SEQ ID NO: 29837 - DNA, 15 bp, Homo sapiens
ttcagaatatgggag

SEQ ID NO: 29838 - DNA, 15 bp, Homo sapiens
tttcagaatatggga

SEQ ID NO: 29839 - DNA, 15 bp, Homo sapiens
atttcagaatatggg

SEQ ID NO: 29840 - DNA, 15 bp, Homo sapiens
gatttcagaatatgg

SEQ ID NO: 29841 - DNA, 15 bp, Homo sapiens
agatttcagaatatg

SEQ ID NO: 29842 - DNA, 15 bp, Homo sapiens
cagatttcagaatat

SEQ ID NO: 29843 - DNA, 15 bp, Homo sapiens
ccagatttcagaata

SEQ ID NO: 29844 - DNA, 15 bp, Homo sapiens
tccagatttcagaat

SEQ ID NO: 29845 - DNA, 15 bp, Homo sapiens
gtccagatttcagaa

SEQ ID NO: 29846 - DNA, 15 bp, Homo sapiens
agtccagatttcaga

SEQ ID NO: 29847 - DNA, 15 bp, Homo sapiens
tagtccagatttcag

SEQ ID NO: 29848 - DNA, 15 bp, Homo sapiens
gtagtccagatttca

SEQ ID NO: 29849 - DNA, 15 bp, Homo sapiens
tgtagtccagatttc

SEQ ID NO: 29850 - DNA, 15 bp, Homo sapiens
ctgtagtccagattt

SEQ ID NO: 29851 - DNA, 15 bp, Homo sapiens
tctgtagtccagatt

SEQ ID NO: 29852 - DNA, 15 bp, Homo sapiens
gtctgtagtccagat

SEQ ID NO: 29853 - DNA, 15 bp, Homo sapiens
agtctgtagtccaga

SEQ ID NO: 29854 - DNA, 15 bp, Homo sapiens
gagtctgtagtccag

SEQ ID NO: 29855 - DNA, 15 bp, Homo sapiens
agagtctgtagtcca

SEQ ID NO: 29856 - DNA, 15 bp, Homo sapiens
gagagtctgtagtcc

SEQ ID NO: 29857 - DNA, 15 bp, Homo sapiens
tgagagtctgtagtc

SEQ ID NO: 29858 - DNA, 15 bp, Homo sapiens
atgagagtctgtagt

SEQ ID NO: 29859 - DNA, 15 bp, Homo sapiens
aatgagagtctgtag

SEQ ID NO: 29860 - DNA, 15 bp, Homo sapiens
gaatgagagtctgta

SEQ ID NO: 29861 - DNA, 15 bp, Homo sapiens
tgaatgagagtctgt

SEQ ID NO: 29862 - DNA, 15 bp, Homo sapiens
ttgaatgagagtctg

SEQ ID NO: 29863 - DNA, 15 bp, Homo sapiens
gttgaatgagagtct

SEQ ID NO: 29864 - DNA, 15 bp, Homo sapiens
agttgaatgagagtc

SEQ ID NO: 29865 - DNA, 15 bp, Homo sapiens
gagttgaatgagagt

SEQ ID NO: 29866 - DNA, 15 bp, Homo sapiens
ggagttgaatgagag

SEQ ID NO: 29867 - DNA, 15 bp, Homo sapiens
tggagttgaatgaga

SEQ ID NO: 29868 - DNA, 15 bp, Homo sapiens
ctggagttgaatgag

SEQ ID NO: 29869 - DNA, 15 bp, Homo sapiens
cctggagttgaatga

SEQ ID NO: 29870 - DNA, 15 bp, Homo sapiens
acctggagttgaatg

SEQ ID NO: 29871 - DNA, 15 bp, Homo sapiens
aacctggagttgaat

SEQ ID NO: 29872 - DNA, 15 bp, Homo sapiens
caacctggagttgaa

SEQ ID NO: 29873 - DNA, 15 bp, Homo sapiens
gcaacctggagttga

SEQ ID NO: 29874 - DNA, 15 bp, Homo sapiens
tgcaacctggagttg

SEQ ID NO: 29875 - DNA, 15 bp, Homo sapiens
gtgcaacctggagtt

SEQ ID NO: 29876 - DNA, 15 bp, Homo sapiens
agtgcaacctggagt

SEQ ID NO: 29877 - DNA, 15 bp, Homo sapiens
cagtgcaacctggag

SEQ ID NO: 29878 - DNA, 15 bp, Homo sapiens
acagtgcaacctgga

SEQ ID NO: 29879 - DNA, 15 bp, Homo sapiens
cacagtgcaacctgg

SEQ ID NO: 29880 - DNA, 15 bp, Homo sapiens
ccacagtgcaacctg

SEQ ID NO: 29881 - DNA, 15 bp, Homo sapiens
tccacagtgcaacct

SEQ ID NO: 29882 - DNA, 15 bp, Homo sapiens
gtccacagtgcaacc

SEQ ID NO: 29883 - DNA, 15 bp, Homo sapiens
tgtccacagtgcaac

SEQ ID NO: 29884 - DNA, 15 bp, Homo sapiens
gtgtccacagtgcaa

SEQ ID NO: 29885 - DNA, 15 bp, Homo sapiens
tgtgtccacagtgca

SEQ ID NO: 29886 - DNA, 15 bp, Homo sapiens
ctgtgtccacagtgc

SEQ ID NO: 29887 - DNA, 15 bp, Homo sapiens
actgtgtccacagtg

SEQ ID NO: 29888 - DNA, 15 bp, Homo sapiens
gactgtgtccacagt

SEQ ID NO: 29889 - DNA, 15 bp, Homo sapiens
ggactgtgtccacag

SEQ ID NO: 29890 - DNA, 15 bp, Homo sapiens
gggactgtgtccaca

SEQ ID NO: 29891 - DNA, 15 bp, Homo sapiens
ggggactgtgtccac

SEQ ID NO: 29892 - DNA, 15 bp, Homo sapiens
aggggactgtgtcca

SEQ ID NO: 29893 - DNA, 15 bp, Homo sapiens
gaggggactgtgtcc

SEQ ID NO: 29894 - DNA, 15 bp, Homo sapiens
agaggggactgtgtc

SEQ ID NO: 29895 - DNA, 15 bp, Homo sapiens
aagaggggactgtgt

SEQ ID NO: 29896 - DNA, 15 bp, Homo sapiens
caagaggggactgtg

SEQ ID NO: 29897 - DNA, 15 bp, Homo sapiens
tcaagaggggactgt

SEQ ID NO: 29898 - DNA, 15 bp, Homo sapiens
ctcaagaggggactg

SEQ ID NO: 29899 - DNA, 15 bp, Homo sapiens
gctcaagaggggact

SEQ ID NO: 29900 - DNA, 15 bp, Homo sapiens
tgctcaagaggggac

SEQ ID NO: 29901 - DNA, 15 bp, Homo sapiens
ctgctcaagagggga

SEQ ID NO: 29902 - DNA, 15 bp, Homo sapiens
cctgctcaagagggg

SEQ ID NO: 29903 - DNA, 15 bp, Homo sapiens
acctgctcaagaggg

SEQ ID NO: 29904 - DNA, 15 bp, Homo sapiens
tacctgctcaagagg

SEQ ID NO: 29905 - DNA, 15 bp, Homo sapiens
gtacctgctcaagag

SEQ ID NO: 29906 - DNA, 15 bp, Homo sapiens
ggtacctgctcaaga

SEQ ID NO: 29907 - DNA, 15 bp, Homo sapiens
aggtacctgctcaag

SEQ ID NO: 29908 - DNA, 15 bp, Homo sapiens
gaggtacctgctcaa

SEQ ID NO: 29909 - DNA, 15 bp, Homo sapiens
ggaggtacctgctca

SEQ ID NO: 29910 - DNA, 15 bp, Homo sapiens
aggaggtacctgctc

SEQ ID NO: 29911 - DNA, 15 bp, Homo sapiens
aaggaggtacctgct

SEQ ID NO: 29912 - DNA, 15 bp, Homo sapiens
caaggaggtacctgc

SEQ ID NO: 29913 - DNA, 15 bp, Homo sapiens
gcaaggaggtacctg

SEQ ID NO: 29914 - DNA, 15 bp, Homo sapiens
tgcaaggaggtacct

SEQ ID NO: 29915 - DNA, 15 bp, Homo sapiens
ctgcaaggaggtacc

SEQ ID NO: 29916 - DNA, 15 bp, Homo sapiens
actgcaaggaggtac

SEQ ID NO: 29917 - DNA, 15 bp, Homo sapiens
cactgcaaggaggta

SEQ ID NO: 29918 - DNA, 15 bp, Homo sapiens
ccactgcaaggaggt

SEQ ID NO: 29919 - DNA, 15 bp, Homo sapiens
accactgcaaggagg

SEQ ID NO: 29920 - DNA, 15 bp, Homo sapiens
aaccactgcaaggag

SEQ ID NO: 29921 - DNA, 15 bp, Homo sapiens
caaccactgcaagga

SEQ ID NO: 29922 - DNA, 15 bp, Homo sapiens
ccaaccactgcaagg

SEQ ID NO: 29923 - DNA, 15 bp, Homo sapiens
cccaaccactgcaag

SEQ ID NO: 29924 - DNA, 15 bp, Homo sapiens
tcccaaccactgcaa

SEQ ID NO: 29925 - DNA, 15 bp, Homo sapiens
gtcccaaccactgca

SEQ ID NO: 29926 - DNA, 15 bp, Homo sapiens
cgtcccaaccactgc

SEQ ID NO: 29927 - DNA, 15 bp, Homo sapiens
acgtcccaaccactg

SEQ ID NO: 29928 - DNA, 15 bp, Homo sapiens
gacgtcccaaccact

SEQ ID NO: 29929 - DNA, 15 bp, Homo sapiens
ggacgtcccaaccac

SEQ ID NO: 29930 - DNA, 15 bp, Homo sapiens
aggacgtcccaacca

SEQ ID NO: 29931 - DNA, 15 bp, Homo sapiens
taggacgtcccaacc

SEQ ID NO: 29932 - DNA, 15 bp, Homo sapiens
gtaggacgtcccaac

SEQ ID NO: 29933 - DNA, 15 bp, Homo sapiens
agtaggacgtcccaa

SEQ ID NO: 29934 - DNA, 15 bp, Homo sapiens
aagtaggacgtccca

SEQ ID NO: 29935 - DNA, 15 bp, Homo sapiens
caagtaggacgtccc

SEQ ID NO: 29936 - DNA, 15 bp, Homo sapiens
ccaagtaggacgtcc

SEQ ID NO: 29937 - DNA, 15 bp, Homo sapiens
gccaagtaggacgtc

SEQ ID NO: 29938 - DNA, 15 bp, Homo sapiens
agccaagtaggacgt

SEQ ID NO: 29939 - DNA, 15 bp, Homo sapiens
gagccaagtaggacg

SEQ ID NO: 29940 - DNA, 15 bp, Homo sapiens
tgagccaagtaggac

SEQ ID NO: 29941 - DNA, 15 bp, Homo sapiens
atgagccaagtagga

SEQ ID NO: 29942 - DNA, 15 bp, Homo sapiens
tatgagccaagtagg

SEQ ID NO: 29943 - DNA, 15 bp, Homo sapiens
ctatgagccaagtag

SEQ ID NO: 29944 - DNA, 15 bp, Homo sapiens
actatgagccaagta

SEQ ID NO: 29945 - DNA, 15 bp, Homo sapiens
aactatgagccaagt

SEQ ID NO: 29946 - DNA, 15 bp, Homo sapiens
caactatgagccaag

SEQ ID NO: 29947 - DNA, 15 bp, Homo sapiens
ccaactatgagccaa

SEQ ID NO: 29948 - DNA, 15 bp, Homo sapiens
cccaactatgagcca

SEQ ID NO: 29949 - DNA, 15 bp, Homo sapiens
tcccaactatgagcc

SEQ ID NO: 29950 - DNA, 15 bp, Homo sapiens
ttcccaactatgagc

SEQ ID NO: 29951 - DNA, 15 bp, Homo sapiens
cttcccaactatgag

SEQ ID NO: 29952 - DNA, 15 bp, Homo sapiens
acttcccaactatga

SEQ ID NO: 29953 - DNA, 15 bp, Homo sapiens
cacttcccaactatg

SEQ ID NO: 29954 - DNA, 15 bp, Homo sapiens
gcacttcccaactat

SEQ ID NO: 29955 - DNA, 15 bp, Homo sapiens
tgcacttcccaacta

SEQ ID NO: 29956 - DNA, 15 bp, Homo sapiens
atgcacttcccaact

SEQ ID NO: 29957 - DNA, 15 bp, Homo sapiens
tatgcacttcccaac

SEQ ID NO: 29958 - DNA, 15 bp, Homo sapiens
atatgcacttcccaa

SEQ ID NO: 29959 - DNA, 15 bp, Homo sapiens
catatgcacttccca

SEQ ID NO: 29960 - DNA, 15 bp, Homo sapiens
gcatatgcacttccc

SEQ ID NO: 29961 - DNA, 15 bp, Homo sapiens
agcatatgcacttcc

SEQ ID NO: 29962 - DNA, 15 bp, Homo sapiens
cagcatatgcacttc

SEQ ID NO: 29963 - DNA, 15 bp, Homo sapiens
ccagcatatgcactt

SEQ ID NO: 29964 - DNA, 15 bp, Homo sapiens
tccagcatatgcact

SEQ ID NO: 29965 - DNA, 15 bp, Homo sapiens
ctccagcatatgcac

SEQ ID NO: 29966 - DNA, 15 bp, Homo sapiens
gctccagcatatgca

SEQ ID NO: 29967 - DNA, 15 bp, Homo sapiens
agctccagcatatgc

SEQ ID NO: 29968 - DNA, 15 bp, Homo sapiens
cagctccagcatatg

SEQ ID NO: 29969 - DNA, 15 bp, Homo sapiens
tcagctccagcatat

SEQ ID NO: 29970 - DNA, 15 bp, Homo sapiens
ttcagctccagcata

SEQ ID NO: 29971 - DNA, 15 bp, Homo sapiens
cttcagctccagcat

SEQ ID NO: 29972 - DNA, 15 bp, Homo sapiens
gcttcagctccagca

SEQ ID NO: 29973 - DNA, 15 bp, Homo sapiens
ggcttcagctccagc

SEQ ID NO: 29974 - DNA, 15 bp, Homo sapiens
aggcttcagctccag

SEQ ID NO: 29975 - DNA, 15 bp, Homo sapiens
gaggcttcagctcca

SEQ ID NO: 29976 - DNA, 15 bp, Homo sapiens
agaggcttcagctcc

SEQ ID NO: 29977 - DNA, 15 bp, Homo sapiens
aagaggcttcagctc

SEQ ID NO: 29978 - DNA, 15 bp, Homo sapiens
caagaggcttcagct

SEQ ID NO: 29979 - DNA, 15 bp, Homo sapiens
gcaagaggcttcagc

SEQ ID NO: 29980 - DNA, 15 bp, Homo sapiens
ggcaagaggcttcag

SEQ ID NO: 29981 - DNA, 15 bp, Homo sapiens
aggcaagaggcttca

SEQ ID NO: 29982 - DNA, 15 bp, Homo sapiens
aaggcaagaggcttc

SEQ ID NO: 29983 - DNA, 15 bp, Homo sapiens
gaaggcaagaggctt

SEQ ID NO: 29984 - DNA, 15 bp, Homo sapiens
ggaaggcaagaggct

SEQ ID NO: 29985 - DNA, 15 bp, Homo sapiens
gggaaggcaagaggc

SEQ ID NO: 29986 - DNA, 15 bp, Homo sapiens
cgggaaggcaagagg

SEQ ID NO: 29987 - DNA, 15 bp, Homo sapiens
ccgggaaggcaagag

SEQ ID NO: 29988 - DNA, 15 bp, Homo sapiens
cccgggaaggcaaga

SEQ ID NO: 29989 - DNA, 15 bp, Homo sapiens
tcccgggaaggcaag

SEQ ID NO: 29990 - DNA, 15 bp, Homo sapiens
atcccgggaaggcaa

SEQ ID NO: 29991 - DNA, 15 bp, Homo sapiens
tatcccgggaaggca

SEQ ID NO: 29992 - DNA, 15 bp, Homo sapiens
ctatcccgggaaggc

SEQ ID NO: 29993 - DNA, 15 bp, Homo sapiens
cctatcccgggaagg

SEQ ID NO: 29994 - DNA, 15 bp, Homo sapiens
ccctatcccgggaag

SEQ ID NO: 29995 - DNA, 15 bp, Homo sapiens
gccctatcccgggaa

SEQ ID NO: 29996 - DNA, 15 bp, Homo sapiens
cgccctatcccggga

SEQ ID NO: 29997 - DNA, 15 bp, Homo sapiens
acgccctatcccggg

SEQ ID NO: 29998 - DNA, 15 bp, Homo sapiens
gacgccctatcccgg

SEQ ID NO: 29999 - DNA, 15 bp, Homo sapiens
ggacgccctatcccg

SEQ ID NO: 30000 - DNA, 15 bp, Homo sapiens
aggacgccctatccc

SEQ ID NO: 30001 - DNA, 15 bp, Homo sapiens
gaggacgccctatcc

SEQ ID NO: 30002 - DNA, 15 bp, Homo sapiens
tgaggacgccctatc

SEQ ID NO: 30003 - DNA, 15 bp, Homo sapiens
gtgaggacgccctat

SEQ ID NO: 30004 - DNA, 15 bp, Homo sapiens
tgtgaggacgcccta

SEQ ID NO: 30005 - DNA, 15 bp, Homo sapiens
atgtgaggacgccct

SEQ ID NO: 30006 - DNA, 15 bp, Homo sapiens
gatgtgaggacgccc

SEQ ID NO: 30007 - DNA, 15 bp, Homo sapiens
ggatgtgaggacgcc

SEQ ID NO: 30008 - DNA, 15 bp, Homo sapiens
gggatgtgaggacgc

SEQ ID NO: 30009 - DNA, 15 bp, Homo sapiens
ggggatgtgaggacg

SEQ ID NO: 30010 - DNA, 15 bp, Homo sapiens
aggggatgtgaggac

SEQ ID NO: 30011 - DNA, 15 bp, Homo sapiens
gaggggatgtgagga

SEQ ID NO: 30012 - DNA, 15 bp, Homo sapiens
agaggggatgtgagg

SEQ ID NO: 30013 - DNA, 15 bp, Homo sapiens
cagaggggatgtgag

SEQ ID NO: 30014 - DNA, 15 bp, Homo sapiens
tcagaggggatgtga

SEQ ID NO: 30015 - DNA, 15 bp, Homo sapiens
ctcagaggggatgtg

SEQ ID NO: 30016 - DNA, 15 bp, Homo sapiens
tctcagaggggatgt

SEQ ID NO: 30017 - DNA, 15 bp, Homo sapiens
ttctcagaggggatg

SEQ ID NO: 30018 - DNA, 15 bp, Homo sapiens
cttctcagaggggat

SEQ ID NO: 30019 - DNA, 15 bp, Homo sapiens
acttctcagagggga

SEQ ID NO: 30020 - DNA, 15 bp, Homo sapiens
aacttctcagagggg

SEQ ID NO: 30021 - DNA, 15 bp, Homo sapiens
gaacttctcagaggg

SEQ ID NO: 30022 - DNA, 15 bp, Homo sapiens
ggaacttctcagagg

SEQ ID NO: 30023 - DNA, 15 bp, Homo sapiens
gggaacttctcagag

SEQ ID NO: 30024 - DNA, 15 bp, Homo sapiens
ggggaacttctcaga

SEQ ID NO: 30025 - DNA, 15 bp, Homo sapiens
tggggaacttctcag

SEQ ID NO: 30026 - DNA, 15 bp, Homo sapiens
ctggggaacttctca

SEQ ID NO: 30027 - DNA, 15 bp, Homo sapiens
gctggggaacttctc

SEQ ID NO: 30028 - DNA, 15 bp, Homo sapiens
agctggggaacttct

SEQ ID NO: 30029 - DNA, 15 bp, Homo sapiens
aagctggggaacttc

SEQ ID NO: 30030 - DNA, 15 bp, Homo sapiens
gaagctggggaactt

SEQ ID NO: 30031 - DNA, 15 bp, Homo sapiens
ggaagctggggaact

SEQ ID NO: 30032 - DNA, 15 bp, Homo sapiens
gggaagctggggaac

SEQ ID NO: 30033 - DNA, 15 bp, Homo sapiens
agggaagctggggaa

SEQ ID NO: 30034 - DNA, 15 bp, Homo sapiens
gagggaagctgggga

SEQ ID NO: 30035 - DNA, 15 bp, Homo sapiens
agagggaagctgggg

SEQ ID NO: 30036 - DNA, 15 bp, Homo sapiens
cagagggaagctggg

SEQ ID NO: 30037 - DNA, 15 bp, Homo sapiens
acagagggaagctgg

SEQ ID NO: 30038 - DNA, 15 bp, Homo sapiens
aacagagggaagctg

SEQ ID NO: 30039 - DNA, 15 bp, Homo sapiens
gaacagagggaagct

SEQ ID NO: 30040 - DNA, 15 bp, Homo sapiens
ggaacagagggaagc

SEQ ID NO: 30041 - DNA, 15 bp, Homo sapiens
gggaacagagggaag

SEQ ID NO: 30042 - DNA, 15 bp, Homo sapiens
ggggaacagagggaa

SEQ ID NO: 30043 - DNA, 15 bp, Homo sapiens
cggggaacagaggga

SEQ ID NO: 30044 - DNA, 15 bp, Homo sapiens
acggggaacagaggg

SEQ ID NO: 30045 - DNA, 15 bp, Homo sapiens
aacggggaacagagg

SEQ ID NO: 30046 - DNA, 15 bp, Homo sapiens
aaacggggaacagag

SEQ ID NO: 30047 - DNA, 15 bp, Homo sapiens
gaaacggggaacaga

SEQ ID NO: 30048 - DNA, 15 bp, Homo sapiens
ggaaacggggaacag

SEQ ID NO: 30049 - DNA, 15 bp, Homo sapiens
tggaaacggggaaca

SEQ ID NO: 30050 - DNA, 15 bp, Homo sapiens
gtggaaacggggaac

SEQ ID NO: 30051 - DNA, 15 bp, Homo sapiens
tgtggaaacggggaa

SEQ ID NO: 30052 - DNA, 15 bp, Homo sapiens
gtgtggaaacgggga

SEQ ID NO: 30053 - DNA, 15 bp, Homo sapiens
agtgtggaaacgggg

SEQ ID NO: 30054 - DNA, 15 bp, Homo sapiens
aagtgtggaaacggg

SEQ ID NO: 30055 - DNA, 15 bp, Homo sapiens
taagtgtggaaacgg

SEQ ID NO: 30056 - DNA, 15 bp, Homo sapiens
ctaagtgtggaaacg

SEQ ID NO: 30057 - DNA, 15 bp, Homo sapiens
gctaagtgtggaaac

SEQ ID NO: 30058 - DNA, 15 bp, Homo sapiens
cgctaagtgtggaaa

SEQ ID NO: 30059 - DNA, 15 bp, Homo sapiens
tcgctaagtgtggaa

SEQ ID NO: 30060 - DNA, 15 bp, Homo sapiens
ctcgctaagtgtgga

SEQ ID NO: 30061 - DNA, 15 bp, Homo sapiens
cctcgctaagtgtgg

SEQ ID NO: 30062 - DNA, 15 bp, Homo sapiens
gcctcgctaagtgtg

SEQ ID NO: 30063 - DNA, 15 bp, Homo sapiens
agcctcgctaagtgt

SEQ ID NO: 30064 - DNA, 15 bp, Homo sapiens
gagcctcgctaagtg

SEQ ID NO: 30065 - DNA, 15 bp, Homo sapiens
agagcctcgctaagt

SEQ ID NO: 30066 - DNA, 15 bp, Homo sapiens
aagagcctcgctaag

SEQ ID NO: 30067 - DNA, 15 bp, Homo sapiens
caagagcctcgctaa

SEQ ID NO: 30068 - DNA, 15 bp, Homo sapiens
acaagagcctcgcta

SEQ ID NO: 30069 - DNA, 15 bp, Homo sapiens
gacaagagcctcgct

SEQ ID NO: 30070 - DNA, 15 bp, Homo sapiens
ggacaagagcctcgc

SEQ ID NO: 30071 - DNA, 15 bp, Homo sapiens
tggacaagagcctcg

SEQ ID NO: 30072 - DNA, 15 bp, Homo sapiens
gtggacaagagcctc

SEQ ID NO: 30073 - DNA, 15 bp, Homo sapiens
agtggacaagagcct

SEQ ID NO: 30074 - DNA, 15 bp, Homo sapiens
cagtggacaagagcc

SEQ ID NO: 30075 - DNA, 15 bp, Homo sapiens
gcagtggacaagagc

SEQ ID NO: 30076 - DNA, 15 bp, Homo sapiens
agcagtggacaagag

SEQ ID NO: 30077 - DNA, 15 bp, Homo sapiens
tagcagtggacaaga

SEQ ID NO: 30078 - DNA, 15 bp, Homo sapiens
gtagcagtggacaag

SEQ ID NO: 30079 - DNA, 15 bp, Homo sapiens
tgtagcagtggacaa

SEQ ID NO: 30080 - DNA, 15 bp, Homo sapiens
atgtagcagtggaca

SEQ ID NO: 30081 - DNA, 15 bp, Homo sapiens
gatgtagcagtggac

SEQ ID NO: 30082 - DNA, 15 bp, Homo sapiens
ggatgtagcagtgga

SEQ ID NO: 30083 - DNA, 15 bp, Homo sapiens
gggatgtagcagtgg

SEQ ID NO: 30084 - DNA, 15 bp, Homo sapiens
ggggatgtagcagtg

SEQ ID NO: 30085 - DNA, 15 bp, Homo sapiens
gggggatgtagcagt

SEQ ID NO: 30086 - DNA, 15 bp, Homo sapiens
tgggggatgtagcag

SEQ ID NO: 30087 - DNA, 15 bp, Homo sapiens
atgggggatgtagca

SEQ ID NO: 30088 - DNA, 15 bp, Homo sapiens
tatgggggatgtagc

SEQ ID NO: 30089 - DNA, 15 bp, Homo sapiens
ctatgggggatgtag

SEQ ID NO: 30090 - DNA, 15 bp, Homo sapiens
gctatgggggatgta

SEQ ID NO: 30091 - DNA, 15 bp, Homo sapiens
ggctatgggggatgt

SEQ ID NO: 30092 - DNA, 15 bp, Homo sapiens
tggctatgggggatg

SEQ ID NO: 30093 - DNA, 15 bp, Homo sapiens
ctggctatgggggat

SEQ ID NO: 30094 - DNA, 15 bp, Homo sapiens
actggctatggggga

SEQ ID NO: 30095 - DNA, 15 bp, Homo sapiens
gactggctatggggg

SEQ ID NO: 30096 - DNA, 15 bp, Homo sapiens
ggactggctatgggg

SEQ ID NO: 30097 - DNA, 15 bp, Homo sapiens
gggactggctatggg

SEQ ID NO: 30098 - DNA, 15 bp, Homo sapiens
agggactggctatgg

SEQ ID NO: 30099 - DNA, 15 bp, Homo sapiens
gagggactggctatg

SEQ ID NO: 30100 - DNA, 15 bp, Homo sapiens
tgagggactggctat

SEQ ID NO: 30101 - DNA, 15 bp, Homo sapiens
ctgagggactggcta

SEQ ID NO: 30102 - DNA, 15 bp, Homo sapiens
gctgagggactggct

SEQ ID NO: 30103 - DNA, 15 bp, Homo sapiens
ggctgagggactggc

SEQ ID NO: 30104 - DNA, 15 bp, Homo sapiens
aggctgagggactgg

SEQ ID NO: 30105 - DNA, 15 bp, Homo sapiens
aaggctgagggactg

SEQ ID NO: 30106 - DNA, 15 bp, Homo sapiens
caaggctgagggact

SEQ ID NO: 30107 - DNA, 15 bp, Homo sapiens
gcaaggctgagggac

SEQ ID NO: 30108 - DNA, 15 bp, Homo sapiens
ggcaaggctgaggga

SEQ ID NO: 30109 - DNA, 15 bp, Homo sapiens
tggcaaggctgaggg

SEQ ID NO: 30110 - DNA, 15 bp, Homo sapiens
atggcaaggctgagg

SEQ ID NO: 30111 - DNA, 15 bp, Homo sapiens
aatggcaaggctgag

SEQ ID NO: 30112 - DNA, 15 bp, Homo sapiens
caatggcaaggctga

SEQ ID NO: 30113 - DNA, 15 bp, Homo sapiens
gcaatggcaaggctg

SEQ ID NO: 30114 - DNA, 15 bp, Homo sapiens
agcaatggcaaggct

SEQ ID NO: 30115 - DNA, 15 bp, Homo sapiens
aagcaatggcaaggc

SEQ ID NO: 30116 - DNA, 15 bp, Homo sapiens
taagcaatggcaagg

SEQ ID NO: 30117 - DNA, 15 bp, Homo sapiens
ataagcaatggcaag

SEQ ID NO: 30118 - DNA, 15 bp, Homo sapiens
cataagcaatggcaa

SEQ ID NO: 30119 - DNA, 15 bp, Homo sapiens
gcataagcaatggca

SEQ ID NO: 30120 - DNA, 15 bp, Homo sapiens
agcataagcaatggc

SEQ ID NO: 30121 - DNA, 15 bp, Homo sapiens
cagcataagcaatgg

SEQ ID NO: 30122 - DNA, 15 bp, Homo sapiens
ccagcataagcaatg

SEQ ID NO: 30123 - DNA, 15 bp, Homo sapiens
accagcataagcaat

SEQ ID NO: 30124 - DNA, 15 bp, Homo sapiens
gaccagcataagcaa

SEQ ID NO: 30125 - DNA, 15 bp, Homo sapiens
agaccagcataagca

SEQ ID NO: 30126 - DNA, 15 bp, Homo sapiens
cagaccagcataagc

SEQ ID NO: 30127 - DNA, 15 bp, Homo sapiens
ccagaccagcataag

SEQ ID NO: 30128 - DNA, 15 bp, Homo sapiens
tccagaccagcataa

SEQ ID NO: 30129 - DNA, 15 bp, Homo sapiens
ttccagaccagcata

SEQ ID NO: 30130 - DNA, 15 bp, Homo sapiens
tttccagaccagcat

SEQ ID NO: 30131 - DNA, 15 bp, Homo sapiens
gtttccagaccagca

SEQ ID NO: 30132 - DNA, 15 bp, Homo sapiens
tgtttccagaccagc

SEQ ID NO: 30133 - DNA, 15 bp, Homo sapiens
ttgtttccagaccag

SEQ ID NO: 30134 - DNA, 15 bp, Homo sapiens
attgtttccagacca

SEQ ID NO: 30135 - DNA, 15 bp, Homo sapiens
aattgtttccagacc

SEQ ID NO: 30136 - DNA, 15 bp, Homo sapiens
gaattgtttccagac

SEQ ID NO: 30137 - DNA, 15 bp, Homo sapiens
ggaattgtttccaga

SEQ ID NO: 30138 - DNA, 15 bp, Homo sapiens
aggaattgtttccag

SEQ ID NO: 30139 - DNA, 15 bp, Homo sapiens
taggaattgtttcca

SEQ ID NO: 30140 - DNA, 15 bp, Homo sapiens
ctaggaattgtttcc

SEQ ID NO: 30141 - DNA, 15 bp, Homo sapiens
tctaggaattgtttc

SEQ ID NO: 30142 - DNA, 15 bp, Homo sapiens
gtctaggaattgttt

SEQ ID NO: 30143 - DNA, 15 bp, Homo sapiens
agtctaggaattgtt

SEQ ID NO: 30144 - DNA, 15 bp, Homo sapiens
aagtctaggaattgt

SEQ ID NO: 30145 - DNA, 15 bp, Homo sapiens
caagtctaggaattg

SEQ ID NO: 30146 - DNA, 15 bp, Homo sapiens
acaagtctaggaatt

SEQ ID NO: 30147 - DNA, 15 bp, Homo sapiens
cacaagtctaggaat

SEQ ID NO: 30148 - DNA, 15 bp, Homo sapiens
ccacaagtctaggaa

SEQ ID NO: 30149 - DNA, 15 bp, Homo sapiens
cccacaagtctagga

SEQ ID NO: 30150 - DNA, 15 bp, Homo sapiens
ccccacaagtctagg

SEQ ID NO: 30151 - DNA, 15 bp, Homo sapiens
gccccacaagtctag

SEQ ID NO: 30152 - DNA, 15 bp, Homo sapiens
tgccccacaagtcta

SEQ ID NO: 30153 - DNA, 15 bp, Homo sapiens
atgccccacaagtct

SEQ ID NO: 30154 - DNA, 15 bp, Homo sapiens
gatgccccacaagtc

SEQ ID NO: 30155 - DNA, 15 bp, Homo sapiens
agatgccccacaagt

SEQ ID NO: 30156 - DNA, 15 bp, Homo sapiens
cagatgccccacaag

SEQ ID NO: 30157 - DNA, 15 bp, Homo sapiens
ccagatgccccacaa

SEQ ID NO: 30158 - DNA, 15 bp, Homo sapiens
cccagatgccccaca

SEQ ID NO: 30159 - DNA, 15 bp, Homo sapiens
ccccagatgccccac

SEQ ID NO: 30160 - DNA, 15 bp, Homo sapiens
tccccagatgcccca

SEQ ID NO: 30161 - DNA, 15 bp, Homo sapiens
ttccccagatgcccc

SEQ ID NO: 30162 - DNA, 15 bp, Homo sapiens
cttccccagatgccc

SEQ ID NO: 30163 - DNA, 15 bp, Homo sapiens
acttccccagatgcc

SEQ ID NO: 30164 - DNA, 15 bp, Homo sapiens
aacttccccagatgc

SEQ ID NO: 30165 - DNA, 15 bp, Homo sapiens
gaacttccccagatg

SEQ ID NO: 30166 - DNA, 15 bp, Homo sapiens
agaacttccccagat

SEQ ID NO: 30167 - DNA, 15 bp, Homo sapiens
gagaacttccccaga

SEQ ID NO: 30168 - DNA, 15 bp, Homo sapiens
ggagaacttccccag

SEQ ID NO: 30169 - DNA, 15 bp, Homo sapiens
tggagaacttcccca

SEQ ID NO: 30170 - DNA, 15 bp, Homo sapiens
atggagaacttcccc

SEQ ID NO: 30171 - DNA, 15 bp, Homo sapiens
gatggagaacttccc

SEQ ID NO: 30172 - DNA, 15 bp, Homo sapiens
agatggagaacttcc

SEQ ID NO: 30173 - DNA, 15 bp, Homo sapiens
aagatggagaacttc

SEQ ID NO: 30174 - DNA, 15 bp, Homo sapiens
aaagatggagaactt

SEQ ID NO: 30175 - DNA, 15 bp, Homo sapiens
aaaagatggagaact

SEQ ID NO: 30176 - DNA, 15 bp, Homo sapiens
aaaaagatggagaac

SEQ ID NO: 30177 - DNA, 15 bp, Homo sapiens
aaaaaagatggagaa

SEQ ID NO: 30178 - DNA, 15 bp, Homo sapiens
aaaaaaagatggaga

SEQ ID NO: 30179 - DNA, 15 bp, Homo sapiens
taaaaaaagatggag

SEQ ID NO: 30180 - DNA, 15 bp, Homo sapiens
ctaaaaaaagatgga

SEQ ID NO: 30181 - DNA, 15 bp, Homo sapiens
gctaaaaaaagatgg

SEQ ID NO: 30182 - DNA, 15 bp, Homo sapiens
agctaaaaaaagatg

SEQ ID NO: 30183 - DNA, 15 bp, Homo sapiens
cagctaaaaaaagat

SEQ ID NO: 30184 - DNA, 15 bp, Homo sapiens
ccagctaaaaaaaga

SEQ ID NO: 30185 - DNA, 15 bp, Homo sapiens
gccagctaaaaaaag

SEQ ID NO: 30186 - DNA, 15 bp, Homo sapiens
tgccagctaaaaaaa

SEQ ID NO: 30187 - DNA, 15 bp, Homo sapiens
atgccagctaaaaaa

SEQ ID NO: 30188 - DNA, 15 bp, Homo sapiens
catgccagctaaaaa

SEQ ID NO: 30189 - DNA, 15 bp, Homo sapiens
tcatgccagctaaaa

SEQ ID NO: 30190 - DNA, 15 bp, Homo sapiens
gtcatgccagctaaa

SEQ ID NO: 30191 - DNA, 15 bp, Homo sapiens
ggtcatgccagctaa

SEQ ID NO: 30192 - DNA, 15 bp, Homo sapiens
gggtcatgccagcta

SEQ ID NO: 30193 - DNA, 15 bp, Homo sapiens
tgggtcatgccagct

SEQ ID NO: 30194 - DNA, 15 bp, Homo sapiens
ttgggtcatgccagc

SEQ ID NO: 30195 - DNA, 15 bp, Homo sapiens
cttgggtcatgccag

SEQ ID NO: 30196 - DNA, 15 bp, Homo sapiens
acttgggtcatgcca

SEQ ID NO: 30197 - DNA, 15 bp, Homo sapiens
cacttgggtcatgcc

SEQ ID NO: 30198 - DNA, 15 bp, Homo sapiens
ccacttgggtcatgc

SEQ ID NO: 30199 - DNA, 15 bp, Homo sapiens
accacttgggtcatg

SEQ ID NO: 30200 - DNA, 15 bp, Homo sapiens
caccacttgggtcat

SEQ ID NO: 30201 - DNA, 15 bp, Homo sapiens
acaccacttgggtca

SEQ ID NO: 30202 - DNA, 15 bp, Homo sapiens
cacaccacttgggtc

SEQ ID NO: 30203 - DNA, 15 bp, Homo sapiens
ccacaccacttgggt

SEQ ID NO: 30204 - DNA, 15 bp, Homo sapiens
cccacaccacttggg

SEQ ID NO: 30205 - DNA, 15 bp, Homo sapiens
gcccacaccacttgg

SEQ ID NO: 30206 - DNA, 15 bp, Homo sapiens
tgcccacaccacttg

SEQ ID NO: 30207 - DNA, 15 bp, Homo sapiens
ctgcccacaccactt

SEQ ID NO: 30208 - DNA, 15 bp, Homo sapiens
cctgcccacaccact

SEQ ID NO: 30209 - DNA, 15 bp, Homo sapiens
ccctgcccacaccac

SEQ ID NO: 30210 - DNA, 15 bp, Homo sapiens
gccctgcccacacca

SEQ ID NO: 30211 - DNA, 15 bp, Homo sapiens
agccctgcccacacc

SEQ ID NO: 30212 - DNA, 15 bp, Homo sapiens
cagccctgcccacac

SEQ ID NO: 30213 - DNA, 15 bp, Homo sapiens
acagccctgcccaca

SEQ ID NO: 30214 - DNA, 15 bp, Homo sapiens
cacagccctgcccac

SEQ ID NO: 30215 - DNA, 15 bp, Homo sapiens
ccacagccctgccca

SEQ ID NO: 30216 - DNA, 15 bp, Homo sapiens
tccacagccctgccc

SEQ ID NO: 30217 - DNA, 15 bp, Homo sapiens
atccacagccctgcc

SEQ ID NO: 30218 - DNA, 15 bp, Homo sapiens
aatccacagccctgc

SEQ ID NO: 30219 - DNA, 15 bp, Homo sapiens
gaatccacagccctg

SEQ ID NO: 30220 - DNA, 15 bp, Homo sapiens
agaatccacagccct

SEQ ID NO: 30221 - DNA, 15 bp, Homo sapiens
tagaatccacagccc

SEQ ID NO: 30222 - DNA, 15 bp, Homo sapiens
atagaatccacagcc

SEQ ID NO: 30223 - DNA, 15 bp, Homo sapiens
catagaatccacagc

SEQ ID NO: 30224 - DNA, 15 bp, Homo sapiens
ccatagaatccacag

SEQ ID NO: 30225 - DNA, 15 bp, Homo sapiens
accatagaatccaca

SEQ ID NO: 30226 - DNA, 15 bp, Homo sapiens
caccatagaatccac

SEQ ID NO: 30227 - DNA, 15 bp, Homo sapiens
acaccatagaatcca

SEQ ID NO: 30228 - DNA, 15 bp, Homo sapiens
cacaccatagaatcc

SEQ ID NO: 30229 - DNA, 15 bp, Homo sapiens
ccacaccatagaatc

SEQ ID NO: 30230 - DNA, 15 bp, Homo sapiens
gccacaccatagaat

SEQ ID NO: 30231 - DNA, 15 bp, Homo sapiens
agccacaccatagaa

SEQ ID NO: 30232 - DNA, 15 bp, Homo sapiens
cagccacaccataga

SEQ ID NO: 30233 - DNA, 15 bp, Homo sapiens
ccagccacaccatag

SEQ ID NO: 30234 - DNA, 15 bp, Homo sapiens
tccagccacaccata

SEQ ID NO: 30235 - DNA, 15 bp, Homo sapiens
ttccagccacaccat

SEQ ID NO: 30236 - DNA, 15 bp, Homo sapiens
cttccagccacacca

SEQ ID NO: 30237 - DNA, 15 bp, Homo sapiens
gcttccagccacacc

SEQ ID NO: 30238 - DNA, 15 bp, Homo sapiens
ggcttccagccacac

SEQ ID NO: 30239 - DNA, 15 bp, Homo sapiens
tggcttccagccaca

SEQ ID NO: 30240 - DNA, 15 bp, Homo sapiens
ctggcttccagccac

SEQ ID NO: 30241 - DNA, 15 bp, Homo sapiens
cctggcttccagcca

SEQ ID NO: 30242 - DNA, 15 bp, Homo sapiens
acctggcttccagcc

SEQ ID NO: 30243 - DNA, 15 bp, Homo sapiens
tacctggcttccagc

SEQ ID NO: 30244 - DNA, 15 bp, Homo sapiens
ctacctggcttccag

SEQ ID NO: 30245 - DNA, 15 bp, Homo sapiens
gctacctggcttcca

SEQ ID NO: 30246 - DNA, 15 bp, Homo sapiens
ggctacctggcttcc

SEQ ID NO: 30247 - DNA, 15 bp, Homo sapiens
aggctacctggcttc

SEQ ID NO: 30248 - DNA, 15 bp, Homo sapiens
gaggctacctggctt

SEQ ID NO: 30249 - DNA, 15 bp, Homo sapiens
agaggctacctggct

SEQ ID NO: 30250 - DNA, 15 bp, Homo sapiens
gagaggctacctggc

SEQ ID NO: 30251 - DNA, 15 bp, Homo sapiens
agagaggctacctgg

SEQ ID NO: 30252 - DNA, 15 bp, Homo sapiens
gagagaggctacctg

SEQ ID NO: 30253 - DNA, 15 bp, Homo sapiens
agagagaggctacct

SEQ ID NO: 30254 - DNA, 15 bp, Homo sapiens
tagagagaggctacc

SEQ ID NO: 30255 - DNA, 15 bp, Homo sapiens
gtagagagaggctac

SEQ ID NO: 30256 - DNA, 15 bp, Homo sapiens
agtagagagaggcta

SEQ ID NO: 30257 - DNA, 15 bp, Homo sapiens
cagtagagagaggct

SEQ ID NO: 30258 - DNA, 15 bp, Homo sapiens
acagtagagagaggc

SEQ ID NO: 30259 - DNA, 15 bp, Homo sapiens
tacagtagagagagg

SEQ ID NO: 30260 - DNA, 15 bp, Homo sapiens
gtacagtagagagag

SEQ ID NO: 30261 - DNA, 15 bp, Homo sapiens
tgtacagtagagaga

SEQ ID NO: 30262 - DNA, 15 bp, Homo sapiens
atgtacagtagagag

SEQ ID NO: 30263 - DNA, 15 bp, Homo sapiens
catgtacagtagaga

SEQ ID NO: 30264 - DNA, 15 bp, Homo sapiens
ccatgtacagtagag

SEQ ID NO: 30265 - DNA, 15 bp, Homo sapiens
tccatgtacagtaga

SEQ ID NO: 30266 - DNA, 15 bp, Homo sapiens
ttccatgtacagtag

SEQ ID NO: 30267 - DNA, 15 bp, Homo sapiens
gttccatgtacagta

SEQ ID NO: 30268 - DNA, 15 bp, Homo sapiens
agttccatgtacagt

SEQ ID NO: 30269 - DNA, 15 bp, Homo sapiens
gagttccatgtacag

SEQ ID NO: 30270 - DNA, 15 bp, Homo sapiens
tgagttccatgtaca

SEQ ID NO: 30271 - DNA, 15 bp, Homo sapiens
ctgagttccatgtac

SEQ ID NO: 30272 - DNA, 15 bp, Homo sapiens
gctgagttccatgta

SEQ ID NO: 30273 - DNA, 15 bp, Homo sapiens
tgctgagttccatgt

SEQ ID NO: 30274 - DNA, 15 bp, Homo sapiens
ttgctgagttccatg

SEQ ID NO: 30275 - DNA, 15 bp, Homo sapiens
gttgctgagttccat

SEQ ID NO: 30276 - DNA, 15 bp, Homo sapiens
agttgctgagttcca

SEQ ID NO: 30277 - DNA, 15 bp, Homo sapiens
aagttgctgagttcc

SEQ ID NO: 30278 - DNA, 15 bp, Homo sapiens
gaagttgctgagttc

SEQ ID NO: 30279 - DNA, 15 bp, Homo sapiens
agaagttgctgagtt

SEQ ID NO: 30280 - DNA, 15 bp, Homo sapiens
cagaagttgctgagt

SEQ ID NO: 30281 - DNA, 15 bp, Homo sapiens
tcagaagttgctgag

SEQ ID NO: 30282 - DNA, 15 bp, Homo sapiens
ctcagaagttgctga

SEQ ID NO: 30283 - DNA, 15 bp, Homo sapiens
actcagaagttgctg

SEQ ID NO: 30284 - DNA, 15 bp, Homo sapiens
gactcagaagttgct

SEQ ID NO: 30285 - DNA, 15 bp, Homo sapiens
tgactcagaagttgc

SEQ ID NO: 30286 - DNA, 15 bp, Homo sapiens
ttgactcagaagttg

SEQ ID NO: 30287 - DNA, 15 bp, Homo sapiens
cttgactcagaagtt

SEQ ID NO: 30288 - DNA, 15 bp, Homo sapiens
gcttgactcagaagt

SEQ ID NO: 30289 - DNA, 15 bp, Homo sapiens
tgcttgactcagaag

SEQ ID NO: 30290 - DNA, 15 bp, Homo sapiens
ttgcttgactcagaa

SEQ ID NO: 30291 - DNA, 15 bp, Homo sapiens
cttgcttgactcaga

SEQ ID NO: 30292 - DNA, 15 bp, Homo sapiens
tcttgcttgactcag

SEQ ID NO: 30293 - DNA, 15 bp, Homo sapiens
atcttgcttgactca

SEQ ID NO: 30294 - DNA, 15 bp, Homo sapiens
gatcttgcttgactc

SEQ ID NO: 30295 - DNA, 15 bp, Homo sapiens
agatcttgcttgact

SEQ ID NO: 30296 - DNA, 15 bp, Homo sapiens
aagatcttgcttgac

SEQ ID NO: 30297 - DNA, 15 bp, Homo sapiens
taagatcttgcttga

SEQ ID NO: 30298 - DNA, 15 bp, Homo sapiens
ctaagatcttgcttg

SEQ ID NO: 30299 - DNA, 15 bp, Homo sapiens
gctaagatcttgctt

SEQ ID NO: 30300 - DNA, 15 bp, Homo sapiens
agctaagatcttgct

SEQ ID NO: 30301 - DNA, 15 bp, Homo sapiens
gagctaagatcttgc

SEQ ID NO: 30302 - DNA, 15 bp, Homo sapiens
agagctaagatcttg

SEQ ID NO: 30303 - DNA, 15 bp, Homo sapiens
cagagctaagatctt

SEQ ID NO: 30304 - DNA, 15 bp, Homo sapiens
gcagagctaagatct

SEQ ID NO: 30305 - DNA, 15 bp, Homo sapiens
tgcagagctaagatc

SEQ ID NO: 30306 - DNA, 15 bp, Homo sapiens
ctgcagagctaagat

SEQ ID NO: 30307 - DNA, 15 bp, Homo sapiens
cctgcagagctaaga

SEQ ID NO: 30308 - DNA, 15 bp, Homo sapiens
acctgcagagctaag

SEQ ID NO: 30309 - DNA, 15 bp, Homo sapiens
cacctgcagagctaa

SEQ ID NO: 30310 - DNA, 15 bp, Homo sapiens
acacctgcagagcta

SEQ ID NO: 30311 - DNA, 15 bp, Homo sapiens
gacacctgcagagct

SEQ ID NO: 30312 - DNA, 15 bp, Homo sapiens
agacacctgcagagc

SEQ ID NO: 30313 - DNA, 15 bp, Homo sapiens
aagacacctgcagag

SEQ ID NO: 30314 - DNA, 15 bp, Homo sapiens
caagacacctgcaga

SEQ ID NO: 30315 - DNA, 15 bp, Homo sapiens
gcaagacacctgcag

SEQ ID NO: 30316 - DNA, 15 bp, Homo sapiens
ggcaagacacctgca

SEQ ID NO: 30317 - DNA, 15 bp, Homo sapiens
gggcaagacacctgc

SEQ ID NO: 30318 - DNA, 15 bp, Homo sapiens
agggcaagacacctg

SEQ ID NO: 30319 - DNA, 15 bp, Homo sapiens
cagggcaagacacct

SEQ ID NO: 30320 - DNA, 15 bp, Homo sapiens
acagggcaagacacc

SEQ ID NO: 30321 - DNA, 15 bp, Homo sapiens
gacagggcaagacac

SEQ ID NO: 30322 - DNA, 15 bp, Homo sapiens
ggacagggcaagaca

SEQ ID NO: 30323 - DNA, 15 bp, Homo sapiens
tggacagggcaagac

SEQ ID NO: 30324 - DNA, 15 bp, Homo sapiens
ttggacagggcaaga

SEQ ID NO: 30325 - DNA, 15 bp, Homo sapiens
tttggacagggcaag

SEQ ID NO: 30326 - DNA, 15 bp, Homo sapiens
ctttggacagggcaa

SEQ ID NO: 30327 - DNA, 15 bp, Homo sapiens
actttggacagggca

SEQ ID NO: 30328 - DNA, 15 bp, Homo sapiens
aactttggacagggc

SEQ ID NO: 30329 - DNA, 15 bp, Homo sapiens
taactttggacaggg

SEQ ID NO: 30330 - DNA, 15 bp, Homo sapiens
ataactttggacagg

SEQ ID NO: 30331 - DNA, 15 bp, Homo sapiens
cataactttggacag

SEQ ID NO: 30332 - DNA, 15 bp, Homo sapiens
ccataactttggaca

SEQ ID NO: 30333 - DNA, 15 bp, Homo sapiens
gccataactttggac

SEQ ID NO: 30334 - DNA, 15 bp, Homo sapiens
ggccataactttgga

SEQ ID NO: 30335 - DNA, 15 bp, Homo sapiens
tggccataactttgg

SEQ ID NO: 30336 - DNA, 15 bp, Homo sapiens
gtggccataactttg

SEQ ID NO: 30337 - DNA, 15 bp, Homo sapiens
tgtggccataacttt

SEQ ID NO: 30338 - DNA, 15 bp, Homo sapiens
gtgtggccataactt

SEQ ID NO: 30339 - DNA, 15 bp, Homo sapiens
ggtgtggccataact

SEQ ID NO: 30340 - DNA, 15 bp, Homo sapiens
tggtgtggccataac

SEQ ID NO: 30341 - DNA, 15 bp, Homo sapiens
ctggtgtggccataa

SEQ ID NO: 30342 - DNA, 15 bp, Homo sapiens
actggtgtggccata

SEQ ID NO: 30343 - DNA, 15 bp, Homo sapiens
tactggtgtggccat

SEQ ID NO: 30344 - DNA, 15 bp, Homo sapiens
gtactggtgtggcca

SEQ ID NO: 30345 - DNA, 15 bp, Homo sapiens
ggtactggtgtggcc

SEQ ID NO: 30346 - DNA, 15 bp, Homo sapiens
aggtactggtgtggc

SEQ ID NO: 30347 - DNA, 15 bp, Homo sapiens
aaggtactggtgtgg

SEQ ID NO: 30348 - DNA, 15 bp, Homo sapiens
aaaggtactggtgtg

SEQ ID NO: 30349 - DNA, 15 bp, Homo sapiens
aaaaggtactggtgt

SEQ ID NO: 30350 - DNA, 15 bp, Homo sapiens
taaaaggtactggtg

SEQ ID NO: 30351 - DNA, 15 bp, Homo sapiens
ttaaaaggtactggt

SEQ ID NO: 30352 - DNA, 15 bp, Homo sapiens
gttaaaaggtactgg

SEQ ID NO: 30353 - DNA, 15 bp, Homo sapiens
agttaaaaggtactg

SEQ ID NO: 30354 - DNA, 15 bp, Homo sapiens
gagttaaaaggtact

SEQ ID NO: 30355 - DNA, 15 bp, Homo sapiens
agagttaaaaggtac

SEQ ID NO: 30356 - DNA, 15 bp, Homo sapiens
tagagttaaaaggta

SEQ ID NO: 30357 - DNA, 15 bp, Homo sapiens
ctagagttaaaaggt

SEQ ID NO: 30358 - DNA, 15 bp, Homo sapiens
tctagagttaaaagg

SEQ ID NO: 30359 - DNA, 15 bp, Homo sapiens
ttctagagttaaaag

SEQ ID NO: 30360 - DNA, 15 bp, Homo sapiens
cttctagagttaaaa

SEQ ID NO: 30361 - DNA, 15 bp, Homo sapiens
gcttctagagttaaa

SEQ ID NO: 30362 - DNA, 15 bp, Homo sapiens
ggcttctagagttaa

SEQ ID NO: 30363 - DNA, 15 bp, Homo sapiens
gggcttctagagtta

SEQ ID NO: 30364 - DNA, 15 bp, Homo sapiens
tgggcttctagagtt

SEQ ID NO: 30365 - DNA, 15 bp, Homo sapiens
ctgggcttctagagt

SEQ ID NO: 30366 - DNA, 15 bp, Homo sapiens
actgggcttctagag

SEQ ID NO: 30367 - DNA, 15 bp, Homo sapiens
tactgggcttctaga

SEQ ID NO: 30368 - DNA, 15 bp, Homo sapiens
ttactgggcttctag

SEQ ID NO: 30369 - DNA, 15 bp, Homo sapiens
cttactgggcttcta

SEQ ID NO: 30370 - DNA, 15 bp, Homo sapiens
acttactgggcttct

SEQ ID NO: 30371 - DNA, 15 bp, Homo sapiens
cacttactgggcttc

SEQ ID NO: 30372 - DNA, 15 bp, Homo sapiens
acacttactgggctt

SEQ ID NO: 30373 - DNA, 15 bp, Homo sapiens
aacacttactgggct

SEQ ID NO: 30374 - DNA, 15 bp, Homo sapiens
aaacacttactgggc

SEQ ID NO: 30375 - DNA, 15 bp, Homo sapiens
aaaacacttactggg

SEQ ID NO: 30376 - DNA, 15 bp, Homo sapiens
caaaacacttactgg

SEQ ID NO: 30377 - DNA, 15 bp, Homo sapiens
acaaaacacttactg

SEQ ID NO: 30378 - DNA, 15 bp, Homo sapiens
cacaaaacacttact

SEQ ID NO: 30379 - DNA, 15 bp, Homo sapiens
ccacaaaacacttac

SEQ ID NO: 30380 - DNA, 15 bp, Homo sapiens
cccacaaaacactta

SEQ ID NO: 30381 - DNA, 15 bp, Homo sapiens
tcccacaaaacactt

SEQ ID NO: 30382 - DNA, 15 bp, Homo sapiens
gtcccacaaaacact

SEQ ID NO: 30383 - DNA, 15 bp, Homo sapiens
ggtcccacaaaacac

SEQ ID NO: 30384 - DNA, 15 bp, Homo sapiens
cggtcccacaaaaca

SEQ ID NO: 30385 - DNA, 15 bp, Homo sapiens
gcggtcccacaaaac

SEQ ID NO: 30386 - DNA, 15 bp, Homo sapiens
tgcggtcccacaaaa

SEQ ID NO: 30387 - DNA, 15 bp, Homo sapiens
ttgcggtcccacaaa

SEQ ID NO: 30388 - DNA, 15 bp, Homo sapiens
tttgcggtcccacaa

SEQ ID NO: 30389 - DNA, 15 bp, Homo sapiens
ctttgcggtcccaca

SEQ ID NO: 30390 - DNA, 15 bp, Homo sapiens
tctttgcggtcccac

SEQ ID NO: 30391 - DNA, 15 bp, Homo sapiens
atctttgcggtccca

SEQ ID NO: 30392 - DNA, 15 bp, Homo sapiens
gatctttgcggtccc

SEQ ID NO: 30393 - DNA, 15 bp, Homo sapiens
tgatctttgcggtcc

SEQ ID NO: 30394 - DNA, 15 bp, Homo sapiens
atgatctttgcggtc

SEQ ID NO: 30395 - DNA, 15 bp, Homo sapiens
aatgatctttgcggt

SEQ ID NO: 30396 - DNA, 15 bp, Homo sapiens
aaatgatctttgcgg

SEQ ID NO: 30397 - DNA, 15 bp, Homo sapiens
aaaatgatctttgcg

SEQ ID NO: 30398 - DNA, 15 bp, Homo sapiens
gaaaatgatctttgc

SEQ ID NO: 30399 - DNA, 15 bp, Homo sapiens
agaaaatgatctttg

SEQ ID NO: 30400 - DNA, 15 bp, Homo sapiens
tagaaaatgatcttt

SEQ ID NO: 30401 - DNA, 15 bp, Homo sapiens
ctagaaaatgatctt

SEQ ID NO: 30402 - DNA, 15 bp, Homo sapiens
tctagaaaatgatct

SEQ ID NO: 30403 - DNA, 15 bp, Homo sapiens
gtctagaaaatgatc

SEQ ID NO: 30404 - DNA, 15 bp, Homo sapiens
ggtctagaaaatgat

SEQ ID NO: 30405 - DNA, 15 bp, Homo sapiens
aggtctagaaaatga

SEQ ID NO: 30406 - DNA, 15 bp, Homo sapiens
caggtctagaaaatg

SEQ ID NO: 30407 - DNA, 15 bp, Homo sapiens
gcaggtctagaaaat

SEQ ID NO: 30408 - DNA, 15 bp, Homo sapiens
agcaggtctagaaaa

SEQ ID NO: 30409 - DNA, 15 bp, Homo sapiens
cagcaggtctagaaa

SEQ ID NO: 30410 - DNA, 15 bp, Homo sapiens
tcagcaggtctagaa

SEQ ID NO: 30411 - DNA, 15 bp, Homo sapiens
ttcagcaggtctaga

SEQ ID NO: 30412 - DNA, 15 bp, Homo sapiens
attcagcaggtctag

SEQ ID NO: 30413 - DNA, 15 bp, Homo sapiens
tattcagcaggtcta

SEQ ID NO: 30414 - DNA, 15 bp, Homo sapiens
atattcagcaggtct

SEQ ID NO: 30415 - DNA, 15 bp, Homo sapiens
catattcagcaggtc

SEQ ID NO: 30416 - DNA, 15 bp, Homo sapiens
gcatattcagcaggt

SEQ ID NO: 30417 - DNA, 15 bp, Homo sapiens
ggcatattcagcagg

SEQ ID NO: 30418 - DNA, 15 bp, Homo sapiens
aggcatattcagcag

SEQ ID NO: 30419 - DNA, 15 bp, Homo sapiens
taggcatattcagca

SEQ ID NO: 30420 - DNA, 15 bp, Homo sapiens
ctaggcatattcagc

SEQ ID NO: 30421 - DNA, 15 bp, Homo sapiens
tctaggcatattcag

SEQ ID NO: 30422 - DNA, 15 bp, Homo sapiens
ttctaggcatattca

SEQ ID NO: 30423 - DNA, 15 bp, Homo sapiens
gttctaggcatattc

SEQ ID NO: 30424 - DNA, 15 bp, Homo sapiens
cgttctaggcatatt

SEQ ID NO: 30425 - DNA, 15 bp, Homo sapiens
ccgttctaggcatat

SEQ ID NO: 30426 - DNA, 15 bp, Homo sapiens
cccgttctaggcata

SEQ ID NO: 30427 - DNA, 15 bp, Homo sapiens
acccgttctaggcat

SEQ ID NO: 30428 - DNA, 15 bp, Homo sapiens
tacccgttctaggca

SEQ ID NO: 30429 - DNA, 15 bp, Homo sapiens
ctacccgttctaggc

SEQ ID NO: 30430 - DNA, 15 bp, Homo sapiens
cctacccgttctagg

SEQ ID NO: 30431 - DNA, 15 bp, Homo sapiens
ccctacccgttctag

SEQ ID NO: 30432 - DNA, 15 bp, Homo sapiens
tccctacccgttcta

SEQ ID NO: 30433 - DNA, 15 bp, Homo sapiens
atccctacccgttct

SEQ ID NO: 30434 - DNA, 15 bp, Homo sapiens
catccctacccgttc

SEQ ID NO: 30435 - DNA, 15 bp, Homo sapiens
ccatccctacccgtt

SEQ ID NO: 30436 - DNA, 15 bp, Homo sapiens
gccatccctacccgt

SEQ ID NO: 30437 - DNA, 15 bp, Homo sapiens
agccatccctacccg

SEQ ID NO: 30438 - DNA, 15 bp, Homo sapiens
aagccatccctaccc

SEQ ID NO: 30439 - DNA, 15 bp, Homo sapiens
aaagccatccctacc

SEQ ID NO: 30440 - DNA, 15 bp, Homo sapiens
gaaagccatccctac

SEQ ID NO: 30441 - DNA, 15 bp, Homo sapiens
tgaaagccatcccta

SEQ ID NO: 30442 - DNA, 15 bp, Homo sapiens
gtgaaagccatccct

SEQ ID NO: 30443 - DNA, 15 bp, Homo sapiens
cgtgaaagccatccc

SEQ ID NO: 30444 - DNA, 15 bp, Homo sapiens
gcgtgaaagccatcc

SEQ ID NO: 30445 - DNA, 15 bp, Homo sapiens
agcgtgaaagccatc

SEQ ID NO: 30446 - DNA, 15 bp, Homo sapiens
cagcgtgaaagccat

SEQ ID NO: 30447 - DNA, 15 bp, Homo sapiens
acagcgtgaaagcca

SEQ ID NO: 30448 - DNA, 15 bp, Homo sapiens
aacagcgtgaaagcc

SEQ ID NO: 30449 - DNA, 15 bp, Homo sapiens
gaacagcgtgaaagc

SEQ ID NO: 30450 - DNA, 15 bp, Homo sapiens
ggaacagcgtgaaag

SEQ ID NO: 30451 - DNA, 15 bp, Homo sapiens
aggaacagcgtgaaa

SEQ ID NO: 30452 - DNA, 15 bp, Homo sapiens
taggaacagcgtgaa

SEQ ID NO: 30453 - DNA, 15 bp, Homo sapiens
ctaggaacagcgtga

SEQ ID NO: 30454 - DNA, 15 bp, Homo sapiens
cctaggaacagcgtg

SEQ ID NO: 30455 - DNA, 15 bp, Homo sapiens
ccctaggaacagcgt

SEQ ID NO: 30456 - DNA, 15 bp, Homo sapiens
gccctaggaacagcg

SEQ ID NO: 30457 - DNA, 15 bp, Homo sapiens
agccctaggaacagc

SEQ ID NO: 30458 - DNA, 15 bp, Homo sapiens
cagccctaggaacag

SEQ ID NO: 30459 - DNA, 15 bp, Homo sapiens
tcagccctaggaaca

SEQ ID NO: 30460 - DNA, 15 bp, Homo sapiens
gtcagccctaggaac

SEQ ID NO: 30461 - DNA, 15 bp, Homo sapiens
tgtcagccctaggaa

SEQ ID NO: 30462 - DNA, 15 bp, Homo sapiens
ttgtcagccctagga

SEQ ID NO: 30463 - DNA, 15 bp, Homo sapiens
cttgtcagccctagg

SEQ ID NO: 30464 - DNA, 15 bp, Homo sapiens
acttgtcagccctag

SEQ ID NO: 30465 - DNA, 15 bp, Homo sapiens
gacttgtcagcccta

SEQ ID NO: 30466 - DNA, 15 bp, Homo sapiens
tgacttgtcagccct

SEQ ID NO: 30467 - DNA, 15 bp, Homo sapiens
gtgacttgtcagccc

SEQ ID NO: 30468 - DNA, 15 bp, Homo sapiens
tgtgacttgtcagcc

SEQ ID NO: 30469 - DNA, 15 bp, Homo sapiens
gtgtgacttgtcagc

SEQ ID NO: 30470 - DNA, 15 bp, Homo sapiens
cgtgtgacttgtcag

SEQ ID NO: 30471 - DNA, 15 bp, Homo sapiens
acgtgtgacttgtca

SEQ ID NO: 30472 - DNA, 15 bp, Homo sapiens
aacgtgtgacttgtc

SEQ ID NO: 30473 - DNA, 15 bp, Homo sapiens
aaacgtgtgacttgt

SEQ ID NO: 30474 - DNA, 15 bp, Homo sapiens
gaaacgtgtgacttg

SEQ ID NO: 30475 - DNA, 15 bp, Homo sapiens
agaaacgtgtgactt

SEQ ID NO: 30476 - DNA, 15 bp, Homo sapiens
cagaaacgtgtgact

SEQ ID NO: 30477 - DNA, 15 bp, Homo sapiens
ccagaaacgtgtgac

SEQ ID NO: 30478 - DNA, 15 bp, Homo sapiens
cccagaaacgtgtga

SEQ ID NO: 30479 - DNA, 15 bp, Homo sapiens
ccccagaaacgtgtg

SEQ ID NO: 30480 - DNA, 15 bp, Homo sapiens
cccccagaaacgtgt

SEQ ID NO: 30481 - DNA, 15 bp, Homo sapiens
acccccagaaacgtg

SEQ ID NO: 30482 - DNA, 15 bp, Homo sapiens
tacccccagaaacgt

SEQ ID NO: 30483 - DNA, 15 bp, Homo sapiens
gtacccccagaaacg

SEQ ID NO: 30484 - DNA, 15 bp, Homo sapiens
tgtacccccagaaac

SEQ ID NO: 30485 - DNA, 15 bp, Homo sapiens
atgtacccccagaaa

SEQ ID NO: 30486 - DNA, 15 bp, Homo sapiens
tatgtacccccagaa

SEQ ID NO: 30487 - DNA, 15 bp, Homo sapiens
gggatgagattcttc

SEQ ID NO: 30488 - DNA, 15 bp, Homo sapiens
ggggatgagattctt

SEQ ID NO: 30489 - DNA, 15 bp, Homo sapiens
tggggatgagattct

SEQ ID NO: 30490 - DNA, 15 bp, Homo sapiens
ttggggatgagattc

SEQ ID NO: 30491 - DNA, 15 bp, Homo sapiens
gttggggatgagatt

SEQ ID NO: 30492 - DNA, 15 bp, Homo sapiens
agttggggatgagat

SEQ ID NO: 30493 - DNA, 15 bp, Homo sapiens
aagttggggatgaga

SEQ ID NO: 30494 - DNA, 15 bp, Homo sapiens
caagttggggatgag

SEQ ID NO: 30495 - DNA, 15 bp, Homo sapiens
acaagttggggatga

SEQ ID NO: 30496 - DNA, 15 bp, Homo sapiens
tacaagttggggatg

SEQ ID NO: 30497 - DNA, 15 bp, Homo sapiens
ttacaagttggggat

SEQ ID NO: 30498 - DNA, 15 bp, Homo sapiens
tttacaagttgggga

SEQ ID NO: 30499 - DNA, 15 bp, Homo sapiens
gtttacaagttgggg

SEQ ID NO: 30500 - DNA, 15 bp, Homo sapiens
agtttacaagttggg

SEQ ID NO: 30501 - DNA, 15 bp, Homo sapiens
gagtttacaagttgg

SEQ ID NO: 30502 - DNA, 15 bp, Homo sapiens
tgagtttacaagttg

SEQ ID NO: 30503 - DNA, 15 bp, Homo sapiens
atgagtttacaagtt

SEQ ID NO: 30504 - DNA, 15 bp, Homo sapiens
gatgagtttacaagt

SEQ ID NO: 30505 - DNA, 15 bp, Homo sapiens
agatgagtttacaag

SEQ ID NO: 30506 - DNA, 15 bp, Homo sapiens
aagatgagtttacaa

SEQ ID NO: 30507 - DNA, 15 bp, Homo sapiens
aaagatgagtttaca

SEQ ID NO: 30508 - DNA, 15 bp, Homo sapiens
aaaagatgagtttac

SEQ ID NO: 30509 - DNA, 15 bp, Homo sapiens
aaaaagatgagttta

SEQ ID NO: 30510 - DNA, 15 bp, Homo sapiens
gaaaaagatgagttt

SEQ ID NO: 30511 - DNA, 15 bp, Homo sapiens
ggaaaaagatgagtt

SEQ ID NO: 30512 - DNA, 15 bp, Homo sapiens
cggaaaaagatgagt

SEQ ID NO: 30513 - DNA, 15 bp, Homo sapiens
acggaaaaagatgag

SEQ ID NO: 30514 - DNA, 15 bp, Homo sapiens
aacggaaaaagatga

SEQ ID NO: 30515 - DNA, 15 bp, Homo sapiens
gaacggaaaaagatg

SEQ ID NO: 30516 - DNA, 15 bp, Homo sapiens
agaacggaaaaagat

SEQ ID NO: 30517 - DNA, 15 bp, Homo sapiens
aagaacggaaaaaga

SEQ ID NO: 30518 - DNA, 15 bp, Homo sapiens
aaagaacggaaaaag

SEQ ID NO: 30519 - DNA, 15 bp, Homo sapiens
aaaagaacggaaaaa

SEQ ID NO: 30520 - DNA, 15 bp, Homo sapiens
aaaaagaacggaaaa

SEQ ID NO: 30521 - DNA, 15 bp, Homo sapiens
caaaaagaacggaaa

SEQ ID NO: 30522 - DNA, 15 bp, Homo sapiens
acaaaaagaacggaa

SEQ ID NO: 30523 - DNA, 15 bp, Homo sapiens
cacaaaaagaacgga

SEQ ID NO: 30524 - DNA, 15 bp, Homo sapiens
gcacaaaaagaacgg

SEQ ID NO: 30525 - DNA, 15 bp, Homo sapiens
ggcacaaaaagaacg

SEQ ID NO: 30526 - DNA, 15 bp, Homo sapiens
aggcacaaaaagaac

SEQ ID NO: 30527 - DNA, 15 bp, Homo sapiens
caggcacaaaaagaa

SEQ ID NO: 30528 - DNA, 15 bp, Homo sapiens
ccaggcacaaaaaga

SEQ ID NO: 30529 - DNA, 15 bp, Homo sapiens
tccaggcacaaaaag

SEQ ID NO: 30530 - DNA, 15 bp, Homo sapiens
gtccaggcacaaaaa

SEQ ID NO: 30531 - DNA, 15 bp, Homo sapiens
agtccaggcacaaaa

SEQ ID NO: 30532 - DNA, 15 bp, Homo sapiens
aagtccaggcacaaa

SEQ ID NO: 30533 - DNA, 15 bp, Homo sapiens
gaagtccaggcacaa

SEQ ID NO: 30534 - DNA, 15 bp, Homo sapiens
agaagtccaggcaca

SEQ ID NO: 30535 - DNA, 15 bp, Homo sapiens
gagaagtccaggcac

SEQ ID NO: 30536 - DNA, 15 bp, Homo sapiens
tgagaagtccaggca

SEQ ID NO: 30537 - DNA, 15 bp, Homo sapiens
ctgagaagtccaggc

SEQ ID NO: 30538 - DNA, 15 bp, Homo sapiens
cctgagaagtccagg

SEQ ID NO: 30539 - DNA, 15 bp, Homo sapiens
ccctgagaagtccag

SEQ ID NO: 30540 - DNA, 15 bp, Homo sapiens
gccctgagaagtcca

SEQ ID NO: 30541 - DNA, 15 bp, Homo sapiens
ggccctgagaagtcc

SEQ ID NO: 30542 - DNA, 15 bp, Homo sapiens
gggccctgagaagtc

SEQ ID NO: 30543 - DNA, 15 bp, Homo sapiens
agggccctgagaagt

SEQ ID NO: 30544 - DNA, 15 bp, Homo sapiens
cagggccctgagaag

SEQ ID NO: 30545 - DNA, 15 bp, Homo sapiens
gcagggccctgagaa

SEQ ID NO: 30546 - DNA, 15 bp, Homo sapiens
tgcagggccctgaga

SEQ ID NO: 30547 - DNA, 15 bp, Homo sapiens
ctgcagggccctgag

SEQ ID NO: 30548 - DNA, 15 bp, Homo sapiens
cctgcagggccctga

SEQ ID NO: 30549 - DNA, 15 bp, Homo sapiens
gcctgcagggccctg

SEQ ID NO: 30550 - DNA, 15 bp, Homo sapiens
agcctgcagggccct

SEQ ID NO: 30551 - DNA, 15 bp, Homo sapiens
cagcctgcagggccc

SEQ ID NO: 30552 - DNA, 15 bp, Homo sapiens
tcagcctgcagggcc

SEQ ID NO: 30553 - DNA, 15 bp, Homo sapiens
atcagcctgcagggc

SEQ ID NO: 30554 - DNA, 15 bp, Homo sapiens
aatcagcctgcaggg

SEQ ID NO: 30555 - DNA, 15 bp, Homo sapiens
gaatcagcctgcagg

SEQ ID NO: 30556 - DNA, 15 bp, Homo sapiens
agaatcagcctgcag

SEQ ID NO: 30557 - DNA, 15 bp, Homo sapiens
tagaatcagcctgca

SEQ ID NO: 30558 - DNA, 15 bp, Homo sapiens
ctagaatcagcctgc

SEQ ID NO: 30559 - DNA, 15 bp, Homo sapiens
actagaatcagcctg

SEQ ID NO: 30560 - DNA, 15 bp, Homo sapiens
gactagaatcagcct

SEQ ID NO: 30561 - DNA, 15 bp, Homo sapiens
ggactagaatcagcc

SEQ ID NO: 30562 - DNA, 15 bp, Homo sapiens
gggactagaatcagc

SEQ ID NO: 30563 - DNA, 15 bp, Homo sapiens
tgggactagaatcag

SEQ ID NO: 30564 - DNA, 15 bp, Homo sapiens
atgggactagaatca

SEQ ID NO: 30565 - DNA, 15 bp, Homo sapiens
catgggactagaatc

SEQ ID NO: 30566 - DNA, 15 bp, Homo sapiens
acatgggactagaat

SEQ ID NO: 30567 - DNA, 15 bp, Homo sapiens
aacatgggactagaa

SEQ ID NO: 30568 - DNA, 15 bp, Homo sapiens
caacatgggactaga

SEQ ID NO: 30569 - DNA, 15 bp, Homo sapiens
acaacatgggactag

SEQ ID NO: 30570 - DNA, 15 bp, Homo sapiens
cacaacatgggacta

SEQ ID NO: 30571 - DNA, 15 bp, Homo sapiens
acacaacatgggact

SEQ ID NO: 30572 - DNA, 15 bp, Homo sapiens
cacacaacatgggac

SEQ ID NO: 30573 - DNA, 15 bp, Homo sapiens
ccacacaacatggga

SEQ ID NO: 30574 - DNA, 15 bp, Homo sapiens
accacacaacatggg

SEQ ID NO: 30575 - DNA, 15 bp, Homo sapiens
caccacacaacatgg

SEQ ID NO: 30576 - DNA, 15 bp, Homo sapiens
acaccacacaacatg

SEQ ID NO: 30577 - DNA, 15 bp, Homo sapiens
aacaccacacaacat

SEQ ID NO: 30578 - DNA, 15 bp, Homo sapiens
aaacaccacacaaca

SEQ ID NO: 30579 - DNA, 15 bp, Homo sapiens
caaacaccacacaac

SEQ ID NO: 30580 - DNA, 15 bp, Homo sapiens
tcaaacaccacacaa

SEQ ID NO: 30581 - DNA, 15 bp, Homo sapiens
ttcaaacaccacaca

SEQ ID NO: 30582 - DNA, 15 bp, Homo sapiens
cttcaaacaccacac

SEQ ID NO: 30583 - DNA, 15 bp, Homo sapiens
acttcaaacaccaca

SEQ ID NO: 30584 - DNA, 15 bp, Homo sapiens
cacttcaaacaccac

SEQ ID NO: 30585 - DNA, 15 bp, Homo sapiens
acacttcaaacacca

SEQ ID NO: 30586 - DNA, 15 bp, Homo sapiens
gacacttcaaacacc

SEQ ID NO: 30587 - DNA, 15 bp, Homo sapiens
agacacttcaaacac

SEQ ID NO: 30588 - DNA, 15 bp, Homo sapiens
cagacacttcaaaca

SEQ ID NO: 30589 - DNA, 15 bp, Homo sapiens
ccagacacttcaaac

SEQ ID NO: 30590 - DNA, 15 bp, Homo sapiens
accagacacttcaaa

SEQ ID NO: 30591 - DNA, 15 bp, Homo sapiens
gaccagacacttcaa

SEQ ID NO: 30592 - DNA, 15 bp, Homo sapiens
ggaccagacacttca

SEQ ID NO: 30593 - DNA, 15 bp, Homo sapiens
gggaccagacacttc

SEQ ID NO: 30594 - DNA, 15 bp, Homo sapiens
agggaccagacactt

SEQ ID NO: 30595 - DNA, 15 bp, Homo sapiens
aagggaccagacact

SEQ ID NO: 30596 - DNA, 15 bp, Homo sapiens
aaagggaccagacac

SEQ ID NO: 30597 - DNA, 15 bp, Homo sapiens
aaaagggaccagaca

SEQ ID NO: 30598 - DNA, 15 bp, Homo sapiens
aaaaagggaccagac

SEQ ID NO: 30599 - DNA, 15 bp, Homo sapiens
aaaaaagggaccaga

SEQ ID NO: 30600 - DNA, 15 bp, Homo sapiens
gaaaaaagggaccag

SEQ ID NO: 30601 - DNA, 15 bp, Homo sapiens
tgaaaaaagggacca

SEQ ID NO: 30602 - DNA, 15 bp, Homo sapiens
ctgaaaaaagggacc

SEQ ID NO: 30603 - DNA, 15 bp, Homo sapiens
actgaaaaaagggac

SEQ ID NO: 30604 - DNA, 15 bp, Homo sapiens
cactgaaaaaaggga

SEQ ID NO: 30605 - DNA, 15 bp, Homo sapiens
tcactgaaaaaaggg

SEQ ID NO: 30606 - DNA, 15 bp, Homo sapiens
ctcactgaaaaaagg

SEQ ID NO: 30607 - DNA, 15 bp, Homo sapiens
tctcactgaaaaaag

SEQ ID NO: 30608 - DNA, 15 bp, Homo sapiens
ctctcactgaaaaaa

SEQ ID NO: 30609 - DNA, 15 bp, Homo sapiens
tctctcactgaaaaa

SEQ ID NO: 30610 - DNA, 15 bp, Homo sapiens
gtctctcactgaaaa

SEQ ID NO: 30611 - DNA, 15 bp, Homo sapiens
ggtctctcactgaaa

SEQ ID NO: 30612 - DNA, 15 bp, Homo sapiens
tggtctctcactgaa

SEQ ID NO: 30613 - DNA, 15 bp, Homo sapiens
ctggtctctcactga

SEQ ID NO: 30614 - DNA, 15 bp, Homo sapiens
gctggtctctcactg

SEQ ID NO: 30615 - DNA, 15 bp, Homo sapiens
agctggtctctcact

SEQ ID NO: 30616 - DNA, 15 bp, Homo sapiens
gagctggtctctcac

SEQ ID NO: 30617 - DNA, 15 bp, Homo sapiens
tgagctggtctctca

SEQ ID NO: 30618 - DNA, 15 bp, Homo sapiens
atgagctggtctctc

SEQ ID NO: 30619 - DNA, 15 bp, Homo sapiens
gatgagctggtctct

SEQ ID NO: 30620 - DNA, 15 bp, Homo sapiens
ggatgagctggtctc

SEQ ID NO: 30621 - DNA, 15 bp, Homo sapiens
aggatgagctggtct

SEQ ID NO: 30622 - DNA, 15 bp, Homo sapiens
aaggatgagctggtc

SEQ ID NO: 30623 - DNA, 15 bp, Homo sapiens
caaggatgagctggt

SEQ ID NO: 30624 - DNA, 15 bp, Homo sapiens
ccaaggatgagctgg

SEQ ID NO: 30625 - DNA, 15 bp, Homo sapiens
cccaaggatgagctg

SEQ ID NO: 30626 - DNA, 15 bp, Homo sapiens
tcccaaggatgagct

SEQ ID NO: 30627 - DNA, 15 bp, Homo sapiens
ttcccaaggatgagc

SEQ ID NO: 30628 - DNA, 15 bp, Homo sapiens
gttcccaaggatgag

SEQ ID NO: 30629 - DNA, 15 bp, Homo sapiens
agttcccaaggatga

SEQ ID NO: 30630 - DNA, 15 bp, Homo sapiens
cagttcccaaggatg

SEQ ID NO: 30631 - DNA, 15 bp, Homo sapiens
tcagttcccaaggat

SEQ ID NO: 30632 - DNA, 15 bp, Homo sapiens
ttcagttcccaagga

SEQ ID NO: 30633 - DNA, 15 bp, Homo sapiens
attcagttcccaagg

SEQ ID NO: 30634 - DNA, 15 bp, Homo sapiens
cattcagttcccaag

SEQ ID NO: 30635 - DNA, 15 bp, Homo sapiens
gcattcagttcccaa

SEQ ID NO: 30636 - DNA, 15 bp, Homo sapiens
ggcattcagttccca

SEQ ID NO: 30637 - DNA, 15 bp, Homo sapiens
aggcattcagttccc

SEQ ID NO: 30638 - DNA, 15 bp, Homo sapiens
gaggcattcagttcc

SEQ ID NO: 30639 - DNA, 15 bp, Homo sapiens
tgaggcattcagttc

SEQ ID NO: 30640 - DNA, 15 bp, Homo sapiens
ttgaggcattcagtt

SEQ ID NO: 30641 - DNA, 15 bp, Homo sapiens
tttgaggcattcagt

SEQ ID NO: 30642 - DNA, 15 bp, Homo sapiens
gtttgaggcattcag

SEQ ID NO: 30643 - DNA, 15 bp, Homo sapiens
agtttgaggcattca

SEQ ID NO: 30644 - DNA, 15 bp, Homo sapiens
gagtttgaggcattc

SEQ ID NO: 30645 - DNA, 15 bp, Homo sapiens
agagtttgaggcatt

SEQ ID NO: 30646 - DNA, 15 bp, Homo sapiens
gagagtttgaggcat

SEQ ID NO: 30647 - DNA, 15 bp, Homo sapiens
agagagtttgaggca

SEQ ID NO: 30648 - DNA, 15 bp, Homo sapiens
aagagagtttgaggc

SEQ ID NO: 30649 - DNA, 15 bp, Homo sapiens
aaagagagtttgagg

SEQ ID NO: 30650 - DNA, 15 bp, Homo sapiens
aaaagagagtttgag

SEQ ID NO: 30651 - DNA, 15 bp, Homo sapiens
gaaaagagagtttga

SEQ ID NO: 30652 - DNA, 15 bp, Homo sapiens
agaaaagagagtttg

SEQ ID NO: 30653 - DNA, 15 bp, Homo sapiens
aagaaaagagagttt

SEQ ID NO: 30654 - DNA, 15 bp, Homo sapiens
aaagaaaagagagtt

SEQ ID NO: 30655 - DNA, 15 bp, Homo sapiens
aaaagaaaagagagt

SEQ ID NO: 30656 - DNA, 15 bp, Homo sapiens
aaaaagaaaagagag

SEQ ID NO: 30657 - DNA, 15 bp, Homo sapiens
gaaaaagaaaagaga

SEQ ID NO: 30658 - DNA, 15 bp, Homo sapiens
agaaaaagaaaagag

SEQ ID NO: 30659 - DNA, 15 bp, Homo sapiens
gagaaaaagaaaaga

SEQ ID NO: 30660 - DNA, 15 bp, Homo sapiens
agagaaaaagaaaag

SEQ ID NO: 30661 - DNA, 15 bp, Homo sapiens
gagagaaaaagaaaa

SEQ ID NO: 30662 - DNA, 15 bp, Homo sapiens
agagagaaaaagaaa

SEQ ID NO: 30663 - DNA, 15 bp, Homo sapiens
aagagagaaaaagaa

SEQ ID NO: 30664 - DNA, 15 bp, Homo sapiens
gaagagagaaaaaga

SEQ ID NO: 30665 - DNA, 15 bp, Homo sapiens
ggaagagagaaaaag

SEQ ID NO: 30666 - DNA, 15 bp, Homo sapiens
gggaagagagaaaaa

SEQ ID NO: 30667 - DNA, 15 bp, Homo sapiens
ggggaagagagaaaa

SEQ ID NO: 30668 - DNA, 15 bp, Homo sapiens
aggggaagagagaaa

SEQ ID NO: 30669 - DNA, 15 bp, Homo sapiens
aaggggaagagagaa

SEQ ID NO: 30670 - DNA, 15 bp, Homo sapiens
gaaggggaagagaga

SEQ ID NO: 30671 - DNA, 15 bp, Homo sapiens
agaaggggaagagag

SEQ ID NO: 30672 - DNA, 15 bp, Homo sapiens
cagaaggggaagaga

SEQ ID NO: 30673 - DNA, 15 bp, Homo sapiens
acagaaggggaagag

SEQ ID NO: 30674 - DNA, 15 bp, Homo sapiens
aacagaaggggaaga

SEQ ID NO: 30675 - DNA, 15 bp, Homo sapiens
aaacagaaggggaag

SEQ ID NO: 30676 - DNA, 15 bp, Homo sapiens
caaacagaaggggaa

SEQ ID NO: 30677 - DNA, 15 bp, Homo sapiens
tcaaacagaagggga

SEQ ID NO: 30678 - DNA, 15 bp, Homo sapiens
atcaaacagaagggg

SEQ ID NO: 30679 - DNA, 15 bp, Homo sapiens
catcaaacagaaggg

SEQ ID NO: 30680 - DNA, 15 bp, Homo sapiens
acatcaaacagaagg

SEQ ID NO: 30681 - DNA, 15 bp, Homo sapiens
tacatcaaacagaag

SEQ ID NO: 30682 - DNA, 15 bp, Homo sapiens
ctacatcaaacagaa

SEQ ID NO: 30683 - DNA, 15 bp, Homo sapiens
actacatcaaacaga

SEQ ID NO: 30684 - DNA, 15 bp, Homo sapiens
gactacatcaaacag

SEQ ID NO: 30685 - DNA, 15 bp, Homo sapiens
agactacatcaaaca

SEQ ID NO: 30686 - DNA, 15 bp, Homo sapiens
aagactacatcaaac

SEQ ID NO: 30687 - DNA, 15 bp, Homo sapiens
aaagactacatcaaa

SEQ ID NO: 30688 - DNA, 15 bp, Homo sapiens
gaaagactacatcaa

SEQ ID NO: 30689 - DNA, 15 bp, Homo sapiens
ggaaagactacatca

SEQ ID NO: 30690 - DNA, 15 bp, Homo sapiens
aggaaagactacatc

SEQ ID NO: 30691 - DNA, 15 bp, Homo sapiens
caggaaagactacat

SEQ ID NO: 30692 - DNA, 15 bp, Homo sapiens
acaggaaagactaca

SEQ ID NO: 30693 - DNA, 15 bp, Homo sapiens
aacaggaaagactac

SEQ ID NO: 30694 - DNA, 15 bp, Homo sapiens
aaacaggaaagacta

SEQ ID NO: 30695 - DNA, 15 bp, Homo sapiens
gaaacaggaaagact

SEQ ID NO: 30696 - DNA, 15 bp, Homo sapiens
agaaacaggaaagac

SEQ ID NO: 30697 - DNA, 15 bp, Homo sapiens
cagaaacaggaaaga

SEQ ID NO: 30698 - DNA, 15 bp, Homo sapiens
ccagaaacaggaaag

SEQ ID NO: 30699 - DNA, 15 bp, Homo sapiens
tccagaaacaggaaa

SEQ ID NO: 30700 - DNA, 15 bp, Homo sapiens
gtccagaaacaggaa

SEQ ID NO: 30701 - DNA, 15 bp, Homo sapiens
agtccagaaacagga

SEQ ID NO: 30702 - DNA, 15 bp, Homo sapiens
gagtccagaaacagg

SEQ ID NO: 30703 - DNA, 15 bp, Homo sapiens
agagtccagaaacag

SEQ ID NO: 30704 - DNA, 15 bp, Homo sapiens
cagagtccagaaaca

SEQ ID NO: 30705 - DNA, 15 bp, Homo sapiens
acagagtccagaaac

SEQ ID NO: 30706 - DNA, 15 bp, Homo sapiens
aacagagtccagaaa

SEQ ID NO: 30707 - DNA, 15 bp, Homo sapiens
aaacagagtccagaa

SEQ ID NO: 30708 - DNA, 15 bp, Homo sapiens
gaaacagagtccaga

SEQ ID NO: 30709 - DNA, 15 bp, Homo sapiens
agaaacagagtccag

SEQ ID NO: 30710 - DNA, 15 bp, Homo sapiens
aagaaacagagtcca

SEQ ID NO: 30711 - DNA, 15 bp, Homo sapiens
gaagaaacagagtcc

SEQ ID NO: 30712 - DNA, 15 bp, Homo sapiens
tgaagaaacagagtc

SEQ ID NO: 30713 - DNA, 15 bp, Homo sapiens
atgaagaaacagagt

SEQ ID NO: 30714 - DNA, 15 bp, Homo sapiens
tatgaagaaacagag

SEQ ID NO: 30715 - DNA, 15 bp, Homo sapiens
gtatgaagaaacaga

SEQ ID NO: 30716 - DNA, 15 bp, Homo sapiens
agtatgaagaaacag

SEQ ID NO: 30717 - DNA, 15 bp, Homo sapiens
aagtatgaagaaaca

SEQ ID NO: 30718 - DNA, 15 bp, Homo sapiens
gaagtatgaagaaac

SEQ ID NO: 30719 - DNA, 15 bp, Homo sapiens
ggaagtatgaagaaa

SEQ ID NO: 30720 - DNA, 15 bp, Homo sapiens
aggaagtatgaagaa

SEQ ID NO: 30721 - DNA, 15 bp, Homo sapiens
taggaagtatgaaga

SEQ ID NO: 30722 - DNA, 15 bp, Homo sapiens
ataggaagtatgaag

SEQ ID NO: 30723 - DNA, 15 bp, Homo sapiens
gataggaagtatgaa

SEQ ID NO: 30724 - DNA, 15 bp, Homo sapiens
agataggaagtatga

SEQ ID NO: 30725 - DNA, 15 bp, Homo sapiens
gagataggaagtatg

SEQ ID NO: 30726 - DNA, 15 bp, Homo sapiens
agagataggaagtat

SEQ ID NO: 30727 - DNA, 15 bp, Homo sapiens
aagagataggaagta

SEQ ID NO: 30728 - DNA, 15 bp, Homo sapiens
taagagataggaagt

SEQ ID NO: 30729 - DNA, 15 bp, Homo sapiens
gtaagagataggaag

SEQ ID NO: 30730 - DNA, 15 bp, Homo sapiens
ggtaagagataggaa

SEQ ID NO: 30731 - DNA, 15 bp, Homo sapiens
aggtaagagatagga

SEQ ID NO: 30732 - DNA, 15 bp, Homo sapiens
aaggtaagagatagg

SEQ ID NO: 30733 - DNA, 15 bp, Homo sapiens
gaaggtaagagatag

SEQ ID NO: 30734 - DNA, 15 bp, Homo sapiens
agaaggtaagagata

SEQ ID NO: 30735 - DNA, 15 bp, Homo sapiens
aagaaggtaagagat

SEQ ID NO: 30736 - DNA, 15 bp, Homo sapiens
aaagaaggtaagaga

SEQ ID NO: 30737 - DNA, 15 bp, Homo sapiens
aaaagaaggtaagag

SEQ ID NO: 30738 - DNA, 15 bp, Homo sapiens
gaaaagaaggtaaga

SEQ ID NO: 30739 - DNA, 15 bp, Homo sapiens
tgaaaagaaggtaag

SEQ ID NO: 30740 - DNA, 15 bp, Homo sapiens
gtgaaaagaaggtaa

SEQ ID NO: 30741 - DNA, 15 bp, Homo sapiens
agtgaaaagaaggta

SEQ ID NO: 30742 - DNA, 15 bp, Homo sapiens
gagtgaaaagaaggt

SEQ ID NO: 30743 - DNA, 15 bp, Homo sapiens
ggagtgaaaagaagg

SEQ ID NO: 30744 - DNA, 15 bp, Homo sapiens
aggagtgaaaagaag

SEQ ID NO: 30745 - DNA, 15 bp, Homo sapiens
aaggagtgaaaagaa

SEQ ID NO: 30746 - DNA, 15 bp, Homo sapiens
aaaggagtgaaaaga

SEQ ID NO: 30747 - DNA, 15 bp, Homo sapiens
aaaaggagtgaaaag

SEQ ID NO: 30748 - DNA, 15 bp, Homo sapiens
caaaaggagtgaaaa

SEQ ID NO: 30749 - DNA, 15 bp, Homo sapiens
acaaaaggagtgaaa

SEQ ID NO: 30750 - DNA, 15 bp, Homo sapiens
gacaaaaggagtgaa

SEQ ID NO: 30751 - DNA, 15 bp, Homo sapiens
agacaaaaggagtga

SEQ ID NO: 30752 - DNA, 15 bp, Homo sapiens
aagacaaaaggagtg

SEQ ID NO: 30753 - DNA, 15 bp, Homo sapiens
gaagacaaaaggagt

SEQ ID NO: 30754 - DNA, 15 bp, Homo sapiens
ggaagacaaaaggag

SEQ ID NO: 30755 - DNA, 15 bp, Homo sapiens
tggaagacaaaagga

SEQ ID NO: 30756 - DNA, 15 bp, Homo sapiens
ctggaagacaaaagg

SEQ ID NO: 30757 - DNA, 15 bp, Homo sapiens
gctggaagacaaaag

SEQ ID NO: 30758 - DNA, 15 bp, Homo sapiens
agctggaagacaaaa

SEQ ID NO: 30759 - DNA, 15 bp, Homo sapiens
cagctggaagacaaa

SEQ ID NO: 30760 - DNA, 15 bp, Homo sapiens
acagctggaagacaa

SEQ ID NO: 30761 - DNA, 15 bp, Homo sapiens
gacagctggaagaca

SEQ ID NO: 30762 - DNA, 15 bp, Homo sapiens
ggacagctggaagac

SEQ ID NO: 30763 - DNA, 15 bp, Homo sapiens
aggacagctggaaga

SEQ ID NO: 30764 - DNA, 15 bp, Homo sapiens
gaggacagctggaag

SEQ ID NO: 30765 - DNA, 15 bp, Homo sapiens
agaggacagctggaa

SEQ ID NO: 30766 - DNA, 15 bp, Homo sapiens
gagaggacagctgga

SEQ ID NO: 30767 - DNA, 15 bp, Homo sapiens
agagaggacagctgg

SEQ ID NO: 30768 - DNA, 15 bp, Homo sapiens
gagagaggacagctg

SEQ ID NO: 30769 - DNA, 15 bp, Homo sapiens
tgagagaggacagct

SEQ ID NO: 30770 - DNA, 15 bp, Homo sapiens
atgagagaggacagc

SEQ ID NO: 30771 - DNA, 15 bp, Homo sapiens
aatgagagaggacag

SEQ ID NO: 30772 - DNA, 15 bp, Homo sapiens
aaatgagagaggaca

SEQ ID NO: 30773 - DNA, 15 bp, Homo sapiens
aaaatgagagaggac

SEQ ID NO: 30774 - DNA, 15 bp, Homo sapiens
aaaaatgagagagga

SEQ ID NO: 30775 - DNA, 15 bp, Homo sapiens
gaaaaatgagagagg

SEQ ID NO: 30776 - DNA, 15 bp, Homo sapiens
agaaaaatgagagag

SEQ ID NO: 30777 - DNA, 15 bp, Homo sapiens
cagaaaaatgagaga

SEQ ID NO: 30778 - DNA, 15 bp, Homo sapiens
gcagaaaaatgagag

SEQ ID NO: 30779 - DNA, 15 bp, Homo sapiens
ggcagaaaaatgaga

SEQ ID NO: 30780 - DNA, 15 bp, Homo sapiens
aggcagaaaaatgag

SEQ ID NO: 30781 - DNA, 15 bp, Homo sapiens
gaggcagaaaaatga

SEQ ID NO: 30782 - DNA, 15 bp, Homo sapiens
agaggcagaaaaatg

SEQ ID NO: 30783 - DNA, 15 bp, Homo sapiens
gagaggcagaaaaat

SEQ ID NO: 30784 - DNA, 15 bp, Homo sapiens
agagaggcagaaaaa

SEQ ID NO: 30785 - DNA, 15 bp, Homo sapiens
cagagaggcagaaaa

SEQ ID NO: 30786 - DNA, 15 bp, Homo sapiens
ccagagaggcagaaa

SEQ ID NO: 30787 - DNA, 15 bp, Homo sapiens
accagagaggcagaa

SEQ ID NO: 30788 - DNA, 15 bp, Homo sapiens
gaccagagaggcaga

SEQ ID NO: 30789 - DNA, 15 bp, Homo sapiens
agaccagagaggcag

SEQ ID NO: 30790 - DNA, 15 bp, Homo sapiens
aagaccagagaggca

SEQ ID NO: 30791 - DNA, 15 bp, Homo sapiens
gaagaccagagaggc

SEQ ID NO: 30792 - DNA, 15 bp, Homo sapiens
tgaagaccagagagg

SEQ ID NO: 30793 - DNA, 15 bp, Homo sapiens
ctgaagaccagagag

SEQ ID NO: 30794 - DNA, 15 bp, Homo sapiens
cctgaagaccagaga

SEQ ID NO: 30795 - DNA, 15 bp, Homo sapiens
acctgaagaccagag

SEQ ID NO: 30796 - DNA, 15 bp, Homo sapiens
tacctgaagaccaga

SEQ ID NO: 30797 - DNA, 15 bp, Homo sapiens
ctacctgaagaccag

SEQ ID NO: 30798 - DNA, 15 bp, Homo sapiens
tctacctgaagacca

SEQ ID NO: 30799 - DNA, 15 bp, Homo sapiens
ctctacctgaagacc

SEQ ID NO: 30800 - DNA, 15 bp, Homo sapiens
actctacctgaagac

SEQ ID NO: 30801 - DNA, 15 bp, Homo sapiens
aactctacctgaaga

SEQ ID NO: 30802 - DNA, 15 bp, Homo sapiens
aaactctacctgaag

SEQ ID NO: 30803 - DNA, 15 bp, Homo sapiens
aaaactctacctgaa

SEQ ID NO: 30804 - DNA, 15 bp, Homo sapiens
gaaaactctacctga

SEQ ID NO: 30805 - DNA, 15 bp, Homo sapiens
tgaaaactctacctg

SEQ ID NO: 30806 - DNA, 15 bp, Homo sapiens
atgaaaactctacct

SEQ ID NO: 30807 - DNA, 15 bp, Homo sapiens
gatgaaaactctacc

SEQ ID NO: 30808 - DNA, 15 bp, Homo sapiens
agatgaaaactctac

SEQ ID NO: 30809 - DNA, 15 bp, Homo sapiens
gagatgaaaactcta

SEQ ID NO: 30810 - DNA, 15 bp, Homo sapiens
tgagatgaaaactct

SEQ ID NO: 30811 - DNA, 15 bp, Homo sapiens
ctgagatgaaaactc

SEQ ID NO: 30812 - DNA, 15 bp, Homo sapiens
gctgagatgaaaact

SEQ ID NO: 30813 - DNA, 15 bp, Homo sapiens
agctgagatgaaaac

SEQ ID NO: 30814 - DNA, 15 bp, Homo sapiens
tagctgagatgaaaa

SEQ ID NO: 30815 - DNA, 15 bp, Homo sapiens
atagctgagatgaaa

SEQ ID NO: 30816 - DNA, 15 bp, Homo sapiens
gatagctgagatgaa

SEQ ID NO: 30817 - DNA, 15 bp, Homo sapiens
agatagctgagatga

SEQ ID NO: 30818 - DNA, 15 bp, Homo sapiens
aagatagctgagatg

SEQ ID NO: 30819 - DNA, 15 bp, Homo sapiens
gaagatagctgagat

SEQ ID NO: 30820 - DNA, 15 bp, Homo sapiens
agaagatagctgaga

SEQ ID NO: 30821 - DNA, 15 bp, Homo sapiens
aagaagatagctgag

SEQ ID NO: 30822 - DNA, 15 bp, Homo sapiens
caagaagatagctga

SEQ ID NO: 30823 - DNA, 15 bp, Homo sapiens
gcaagaagatagctg

SEQ ID NO: 30824 - DNA, 15 bp, Homo sapiens
agcaagaagatagct

SEQ ID NO: 30825 - DNA, 15 bp, Homo sapiens
aagcaagaagatagc

SEQ ID NO: 30826 - DNA, 15 bp, Homo sapiens
aaagcaagaagatag

SEQ ID NO: 30827 - DNA, 15 bp, Homo sapiens
aaaagcaagaagata

SEQ ID NO: 30828 - DNA, 15 bp, Homo sapiens
aaaaagcaagaagat

SEQ ID NO: 30829 - DNA, 15 bp, Homo sapiens
gaaaaagcaagaaga

SEQ ID NO: 30830 - DNA, 15 bp, Homo sapiens
agaaaaagcaagaag

SEQ ID NO: 30831 - DNA, 15 bp, Homo sapiens
cagaaaaagcaagaa

SEQ ID NO: 30832 - DNA, 15 bp, Homo sapiens
tcagaaaaagcaaga

SEQ ID NO: 30833 - DNA, 15 bp, Homo sapiens
atcagaaaaagcaag

SEQ ID NO: 30834 - DNA, 15 bp, Homo sapiens
catcagaaaaagcaa

SEQ ID NO: 30835 - DNA, 15 bp, Homo sapiens
acatcagaaaaagca

SEQ ID NO: 30836 - DNA, 15 bp, Homo sapiens
aacatcagaaaaagc

SEQ ID NO: 30837 - DNA, 15 bp, Homo sapiens
caacatcagaaaaag

SEQ ID NO: 30838 - DNA, 15 bp, Homo sapiens
ccaacatcagaaaaa

SEQ ID NO: 30839 - DNA, 15 bp, Homo sapiens
accaacatcagaaaa

SEQ ID NO: 30840 - DNA, 15 bp, Homo sapiens
aaccaacatcagaaa

SEQ ID NO: 30841 - DNA, 15 bp, Homo sapiens
gaaccaacatcagaa

SEQ ID NO: 30842 - DNA, 15 bp, Homo sapiens
agaaccaacatcaga

SEQ ID NO: 30843 - DNA, 15 bp, Homo sapiens
aagaaccaacatcag

SEQ ID NO: 30844 - DNA, 15 bp, Homo sapiens
aaagaaccaacatca

SEQ ID NO: 30845 - DNA, 15 bp, Homo sapiens
caaagaaccaacatc

SEQ ID NO: 30846 - DNA, 15 bp, Homo sapiens
acaaagaaccaacat

SEQ ID NO: 30847 - DNA, 15 bp, Homo sapiens
aacaaagaaccaaca

SEQ ID NO: 30848 - DNA, 15 bp, Homo sapiens
aaacaaagaaccaac

SEQ ID NO: 30849 - DNA, 15 bp, Homo sapiens
gaaacaaagaaccaa

SEQ ID NO: 30850 - DNA, 15 bp, Homo sapiens
agaaacaaagaacca

SEQ ID NO: 30851 - DNA, 15 bp, Homo sapiens
aagaaacaaagaacc

SEQ ID NO: 30852 - DNA, 15 bp, Homo sapiens
gaagaaacaaagaac

SEQ ID NO: 30853 - DNA, 15 bp, Homo sapiens
agaagaaacaaagaa

SEQ ID NO: 30854 - DNA, 15 bp, Homo sapiens
aagaagaaacaaaga

SEQ ID NO: 30855 - DNA, 15 bp, Homo sapiens
gaagaagaaacaaag

SEQ ID NO: 30856 - DNA, 15 bp, Homo sapiens
agaagaagaaacaaa

SEQ ID NO: 30857 - DNA, 15 bp, Homo sapiens
gagaagaagaaacaa

SEQ ID NO: 30858 - DNA, 15 bp, Homo sapiens
tgagaagaagaaaca

SEQ ID NO: 30859 - DNA, 15 bp, Homo sapiens
atgagaagaagaaac

SEQ ID NO: 30860 - DNA, 15 bp, Homo sapiens
aatgagaagaagaaa

SEQ ID NO: 30861 - DNA, 15 bp, Homo sapiens
gaatgagaagaagaa

SEQ ID NO: 30862 - DNA, 15 bp, Homo sapiens
agaatgagaagaaga

SEQ ID NO: 30863 - DNA, 15 bp, Homo sapiens
cagaatgagaagaag

SEQ ID NO: 30864 - DNA, 15 bp, Homo sapiens
acagaatgagaagaa

SEQ ID NO: 30865 - DNA, 15 bp, Homo sapiens
aacagaatgagaaga

SEQ ID NO: 30866 - DNA, 15 bp, Homo sapiens
gaacagaatgagaag

SEQ ID NO: 30867 - DNA, 15 bp, Homo sapiens
tgaacagaatgagaa

SEQ ID NO: 30868 - DNA, 15 bp, Homo sapiens
ctgaacagaatgaga

SEQ ID NO: 30869 - DNA, 15 bp, Homo sapiens
cctgaacagaatgag

SEQ ID NO: 30870 - DNA, 15 bp, Homo sapiens
acctgaacagaatga

SEQ ID NO: 30871 - DNA, 15 bp, Homo sapiens
gacctgaacagaatg

SEQ ID NO: 30872 - DNA, 15 bp, Homo sapiens
ggacctgaacagaat

SEQ ID NO: 30873 - DNA, 15 bp, Homo sapiens
tggacctgaacagaa

SEQ ID NO: 30874 - DNA, 15 bp, Homo sapiens
ttggacctgaacaga

SEQ ID NO: 30875 - DNA, 15 bp, Homo sapiens
tttggacctgaacag

SEQ ID NO: 30876 - DNA, 15 bp, Homo sapiens
ttttggacctgaaca

SEQ ID NO: 30877 - DNA, 15 bp, Homo sapiens
attttggacctgaac

SEQ ID NO: 30878 - DNA, 15 bp, Homo sapiens
aattttggacctgaa

SEQ ID NO: 30879 - DNA, 15 bp, Homo sapiens
gaattttggacctga

SEQ ID NO: 30880 - DNA, 15 bp, Homo sapiens
tgaattttggacctg

SEQ ID NO: 30881 - DNA, 15 bp, Homo sapiens
atgaattttggacct

SEQ ID NO: 30882 - DNA, 15 bp, Homo sapiens
aatgaattttggacc

SEQ ID NO: 30883 - DNA, 15 bp, Homo sapiens
aaatgaattttggac

SEQ ID NO: 30884 - DNA, 15 bp, Homo sapiens
caaatgaattttgga

SEQ ID NO: 30885 - DNA, 15 bp, Homo sapiens
ccaaatgaattttgg

SEQ ID NO: 30886 - DNA, 15 bp, Homo sapiens
cccaaatgaattttg

SEQ ID NO: 30887 - DNA, 15 bp, Homo sapiens
acccaaatgaatttt

SEQ ID NO: 30888 - DNA, 15 bp, Homo sapiens
gacccaaatgaattt

SEQ ID NO: 30889 - DNA, 15 bp, Homo sapiens
tgacccaaatgaatt

SEQ ID NO: 30890 - DNA, 15 bp, Homo sapiens
ttgacccaaatgaat

SEQ ID NO: 30891 - DNA, 15 bp, Homo sapiens
attgacccaaatgaa

SEQ ID NO: 30892 - DNA, 15 bp, Homo sapiens
cattgacccaaatga

SEQ ID NO: 30893 - DNA, 15 bp, Homo sapiens
acattgacccaaatg

SEQ ID NO: 30894 - DNA, 15 bp, Homo sapiens
aacattgacccaaat

SEQ ID NO: 30895 - DNA, 15 bp, Homo sapiens
taacattgacccaaa

SEQ ID NO: 30896 - DNA, 15 bp, Homo sapiens
ataacattgacccaa

SEQ ID NO: 30897 - DNA, 15 bp, Homo sapiens
cataacattgaccca

SEQ ID NO: 30898 - DNA, 15 bp, Homo sapiens
acataacattgaccc

SEQ ID NO: 30899 - DNA, 15 bp, Homo sapiens
gacataacattgacc

SEQ ID NO: 30900 - DNA, 15 bp, Homo sapiens
agacataacattgac

SEQ ID NO: 30901 - DNA, 15 bp, Homo sapiens
aagacataacattga

SEQ ID NO: 30902 - DNA, 15 bp, Homo sapiens
taagacataacattg

SEQ ID NO: 30903 - DNA, 15 bp, Homo sapiens
ctaagacataacatt

SEQ ID NO: 30904 - DNA, 15 bp, Homo sapiens
actaagacataacat

SEQ ID NO: 30905 - DNA, 15 bp, Homo sapiens
cactaagacataaca

SEQ ID NO: 30906 - DNA, 15 bp, Homo sapiens
acactaagacataac

SEQ ID NO: 30907 - DNA, 15 bp, Homo sapiens
aacactaagacataa

SEQ ID NO: 30908 - DNA, 15 bp, Homo sapiens
taacactaagacata

SEQ ID NO: 30909 - DNA, 15 bp, Homo sapiens
ataacactaagacat

SEQ ID NO: 30910 - DNA, 15 bp, Homo sapiens
gataacactaagaca

SEQ ID NO: 30911 - DNA, 15 bp, Homo sapiens
agataacactaagac

SEQ ID NO: 30912 - DNA, 15 bp, Homo sapiens
aagataacactaaga

SEQ ID NO: 30913 - DNA, 15 bp, Homo sapiens
gaagataacactaag

SEQ ID NO: 30914 - DNA, 15 bp, Homo sapiens
ggaagataacactaa

SEQ ID NO: 30915 - DNA, 15 bp, Homo sapiens
tggaagataacacta

SEQ ID NO: 30916 - DNA, 15 bp, Homo sapiens
atggaagataacact

SEQ ID NO: 30917 - DNA, 15 bp, Homo sapiens
aatggaagataacac

SEQ ID NO: 30918 - DNA, 15 bp, Homo sapiens
aaatggaagataaca

SEQ ID NO: 30919 - DNA, 15 bp, Homo sapiens
gaaatggaagataac

SEQ ID NO: 30920 - DNA, 15 bp, Homo sapiens
ggaaatggaagataa

SEQ ID NO: 30921 - DNA, 15 bp, Homo sapiens
aggaaatggaagata

SEQ ID NO: 30922 - DNA, 15 bp, Homo sapiens
aaggaaatggaagat

SEQ ID NO: 30923 - DNA, 15 bp, Homo sapiens
gaaggaaatggaaga

SEQ ID NO: 30924 - DNA, 15 bp, Homo sapiens
agaaggaaatggaag

SEQ ID NO: 30925 - DNA, 15 bp, Homo sapiens
cagaaggaaatggaa

SEQ ID NO: 30926 - DNA, 15 bp, Homo sapiens
tcagaaggaaatgga

SEQ ID NO: 30927 - DNA, 15 bp, Homo sapiens
ctcagaaggaaatgg

SEQ ID NO: 30928 - DNA, 15 bp, Homo sapiens
gctcagaaggaaatg

SEQ ID NO: 30929 - DNA, 15 bp, Homo sapiens
agctcagaaggaaat

SEQ ID NO: 30930 - DNA, 15 bp, Homo sapiens
aagctcagaaggaaa

SEQ ID NO: 30931 - DNA, 15 bp, Homo sapiens
gaagctcagaaggaa

SEQ ID NO: 30932 - DNA, 15 bp, Homo sapiens
tgaagctcagaagga

SEQ ID NO: 30933 - DNA, 15 bp, Homo sapiens
ttgaagctcagaagg

SEQ ID NO: 30934 - DNA, 15 bp, Homo sapiens
tttgaagctcagaag

SEQ ID NO: 30935 - DNA, 15 bp, Homo sapiens
ctttgaagctcagaa

SEQ ID NO: 30936 - DNA, 15 bp, Homo sapiens
gctttgaagctcaga

SEQ ID NO: 30937 - DNA, 15 bp, Homo sapiens
ggctttgaagctcag

SEQ ID NO: 30938 - DNA, 15 bp, Homo sapiens
tggctttgaagctca

SEQ ID NO: 30939 - DNA, 15 bp, Homo sapiens
ctggctttgaagctc

SEQ ID NO: 30940 - DNA, 15 bp, Homo sapiens
cctggctttgaagct

SEQ ID NO: 30941 - DNA, 15 bp, Homo sapiens
gcctggctttgaagc

SEQ ID NO: 30942 - DNA, 15 bp, Homo sapiens
agcctggctttgaag

SEQ ID NO: 30943 - DNA, 15 bp, Homo sapiens
cagcctggctttgaa

SEQ ID NO: 30944 - DNA, 15 bp, Homo sapiens
tcagcctggctttga

SEQ ID NO: 30945 - DNA, 15 bp, Homo sapiens
gtcagcctggctttg

SEQ ID NO: 30946 - DNA, 15 bp, Homo sapiens
agtcagcctggcttt

SEQ ID NO: 30947 - DNA, 15 bp, Homo sapiens
cagtcagcctggctt

SEQ ID NO: 30948 - DNA, 15 bp, Homo sapiens
acagtcagcctggct

SEQ ID NO: 30949 - DNA, 15 bp, Homo sapiens
cacagtcagcctggc

SEQ ID NO: 30950 - DNA, 15 bp, Homo sapiens
gcacagtcagcctgg

SEQ ID NO: 30951 - DNA, 15 bp, Homo sapiens
ggcacagtcagcctg

SEQ ID NO: 30952 - DNA, 15 bp, Homo sapiens
gggcacagtcagcct

SEQ ID NO: 30953 - DNA, 15 bp, Homo sapiens
agggcacagtcagcc

SEQ ID NO: 30954 - DNA, 15 bp, Homo sapiens
aagggcacagtcagc

SEQ ID NO: 30955 - DNA, 15 bp, Homo sapiens
gaagggcacagtcag

SEQ ID NO: 30956 - DNA, 15 bp, Homo sapiens
ggaagggcacagtca

SEQ ID NO: 30957 - DNA, 15 bp, Homo sapiens
tggaagggcacagtc

SEQ ID NO: 30958 - DNA, 15 bp, Homo sapiens
gtggaagggcacagt

SEQ ID NO: 30959 - DNA, 15 bp, Homo sapiens
cgtggaagggcacag

SEQ ID NO: 30960 - DNA, 15 bp, Homo sapiens
gcgtggaagggcaca

SEQ ID NO: 30961 - DNA, 15 bp, Homo sapiens
ggcgtggaagggcac

SEQ ID NO: 30962 - DNA, 15 bp, Homo sapiens
gggcgtggaagggca

SEQ ID NO: 30963 - DNA, 15 bp, Homo sapiens
agggcgtggaagggc

SEQ ID NO: 30964 - DNA, 15 bp, Homo sapiens
cagggcgtggaaggg

SEQ ID NO: 30965 - DNA, 15 bp, Homo sapiens
ccagggcgtggaagg

SEQ ID NO: 30966 - DNA, 15 bp, Homo sapiens
gccagggcgtggaag

SEQ ID NO: 30967 - DNA, 15 bp, Homo sapiens
ggccagggcgtggaa

SEQ ID NO: 30968 - DNA, 15 bp, Homo sapiens
tggccagggcgtgga

SEQ ID NO: 30969 - DNA, 15 bp, Homo sapiens
ctggccagggcgtgg

SEQ ID NO: 30970 - DNA, 15 bp, Homo sapiens
actggccagggcgtg

SEQ ID NO: 30971 - DNA, 15 bp, Homo sapiens
cactggccagggcgt

SEQ ID NO: 30972 - DNA, 15 bp, Homo sapiens
acactggccagggcg

SEQ ID NO: 30973 - DNA, 15 bp, Homo sapiens
cacactggccagggc

SEQ ID NO: 30974 - DNA, 15 bp, Homo sapiens
tcacactggccaggg

SEQ ID NO: 30975 - DNA, 15 bp, Homo sapiens
gtcacactggccagg

SEQ ID NO: 30976 - DNA, 15 bp, Homo sapiens
ggtcacactggccag

SEQ ID NO: 30977 - DNA, 15 bp, Homo sapiens
tggtcacactggcca

SEQ ID NO: 30978 - DNA, 15 bp, Homo sapiens
ctggtcacactggcc

SEQ ID NO: 30979 - DNA, 15 bp, Homo sapiens
cctggtcacactggc

SEQ ID NO: 30980 - DNA, 15 bp, Homo sapiens
tcctggtcacactgg

SEQ ID NO: 30981 - DNA, 15 bp, Homo sapiens
gtcctggtcacactg

SEQ ID NO: 30982 - DNA, 15 bp, Homo sapiens
tgtcctggtcacact

SEQ ID NO: 30983 - DNA, 15 bp, Homo sapiens
atgtcctggtcacac

SEQ ID NO: 30984 - DNA, 15 bp, Homo sapiens
gatgtcctggtcaca

SEQ ID NO: 30985 - DNA, 15 bp, Homo sapiens
ggatgtcctggtcac

SEQ ID NO: 30986 - DNA, 15 bp, Homo sapiens
aggatgtcctggtca

SEQ ID NO: 30987 - DNA, 15 bp, Homo sapiens
aaggatgtcctggtc

SEQ ID NO: 30988 - DNA, 15 bp, Homo sapiens
aaaggatgtcctggt

SEQ ID NO: 30989 - DNA, 15 bp, Homo sapiens
gaaaggatgtcctgg

SEQ ID NO: 30990 - DNA, 15 bp, Homo sapiens
ggaaaggatgtcctg

SEQ ID NO: 30991 - DNA, 15 bp, Homo sapiens
gggaaaggatgtcct

SEQ ID NO: 30992 - DNA, 15 bp, Homo sapiens
agggaaaggatgtcc

SEQ ID NO: 30993 - DNA, 15 bp, Homo sapiens
gagggaaaggatgtc

SEQ ID NO: 30994 - DNA, 15 bp, Homo sapiens
agagggaaaggatgt

SEQ ID NO: 30995 - DNA, 15 bp, Homo sapiens
cagagggaaaggatg

SEQ ID NO: 30996 - DNA, 15 bp, Homo sapiens
ccagagggaaaggat

SEQ ID NO: 30997 - DNA, 15 bp, Homo sapiens
cccagagggaaagga

SEQ ID NO: 30998 - DNA, 15 bp, Homo sapiens
ccccagagggaaagg

SEQ ID NO: 30999 - DNA, 15 bp, Homo sapiens
gccccagagggaaag

SEQ ID NO: 31000 - DNA, 15 bp, Homo sapiens
agccccagagggaaa

SEQ ID NO: 31001 - DNA, 15 bp, Homo sapiens
cagccccagagggaa

SEQ ID NO: 31002 - DNA, 15 bp, Homo sapiens
gcagccccagaggga

SEQ ID NO: 31003 - DNA, 15 bp, Homo sapiens
tgcagccccagaggg

SEQ ID NO: 31004 - DNA, 15 bp, Homo sapiens
gtgcagccccagagg

SEQ ID NO: 31005 - DNA, 15 bp, Homo sapiens
agtgcagccccagag

SEQ ID NO: 31006 - DNA, 15 bp, Homo sapiens
cagtgcagccccaga

SEQ ID NO: 31007 - DNA, 15 bp, Homo sapiens
ccagtgcagccccag

SEQ ID NO: 31008 - DNA, 15 bp, Homo sapiens
gccagtgcagcccca

SEQ ID NO: 31009 - DNA, 15 bp, Homo sapiens
agccagtgcagcccc

SEQ ID NO: 31010 - DNA, 15 bp, Homo sapiens
gagccagtgcagccc

SEQ ID NO: 31011 - DNA, 15 bp, Homo sapiens
agagccagtgcagcc

SEQ ID NO: 31012 - DNA, 15 bp, Homo sapiens
aagagccagtgcagc

SEQ ID NO: 31013 - DNA, 15 bp, Homo sapiens
aaagagccagtgcag

SEQ ID NO: 31014 - DNA, 15 bp, Homo sapiens
caaagagccagtgca

SEQ ID NO: 31015 - DNA, 15 bp, Homo sapiens
ccaaagagccagtgc

SEQ ID NO: 31016 - DNA, 15 bp, Homo sapiens
cccaaagagccagtg

SEQ ID NO: 31017 - DNA, 15 bp, Homo sapiens
ccccaaagagccagt

SEQ ID NO: 31018 - DNA, 15 bp, Homo sapiens
cccccaaagagccag

SEQ ID NO: 31019 - DNA, 15 bp, Homo sapiens
tcccccaaagagcca

SEQ ID NO: 31020 - DNA, 15 bp, Homo sapiens
ttcccccaaagagcc

SEQ ID NO: 31021 - DNA, 15 bp, Homo sapiens
attcccccaaagagc

SEQ ID NO: 31022 - DNA, 15 bp, Homo sapiens
aattcccccaaagag

SEQ ID NO: 31023 - DNA, 15 bp, Homo sapiens
caattcccccaaaga

SEQ ID NO: 31024 - DNA, 15 bp, Homo sapiens
acaattcccccaaag

SEQ ID NO: 31025 - DNA, 15 bp, Homo sapiens
aacaattcccccaaa

SEQ ID NO: 31026 - DNA, 15 bp, Homo sapiens
taacaattcccccaa

SEQ ID NO: 31027 - DNA, 15 bp, Homo sapiens
gtaacaattccccca

SEQ ID NO: 31028 - DNA, 15 bp, Homo sapiens
ggtaacaattccccc

SEQ ID NO: 31029 - DNA, 15 bp, Homo sapiens
tggtaacaattcccc

SEQ ID NO: 31030 - DNA, 15 bp, Homo sapiens
atggtaacaattccc

SEQ ID NO: 31031 - DNA, 15 bp, Homo sapiens
aatggtaacaattcc

SEQ ID NO: 31032 - DNA, 15 bp, Homo sapiens
gaatggtaacaattc

SEQ ID NO: 31033 - DNA, 15 bp, Homo sapiens
tgaatggtaacaatt

SEQ ID NO: 31034 - DNA, 15 bp, Homo sapiens
ctgaatggtaacaat

SEQ ID NO: 31035 - DNA, 15 bp, Homo sapiens
cctgaatggtaacaa

SEQ ID NO: 31036 - DNA, 15 bp, Homo sapiens
ccctgaatggtaaca

SEQ ID NO: 31037 - DNA, 15 bp, Homo sapiens
accctgaatggtaac

SEQ ID NO: 31038 - DNA, 15 bp, Homo sapiens
gaccctgaatggtaa

SEQ ID NO: 31039 - DNA, 15 bp, Homo sapiens
agaccctgaatggta

SEQ ID NO: 31040 - DNA, 15 bp, Homo sapiens
aagaccctgaatggt

SEQ ID NO: 31041 - DNA, 15 bp, Homo sapiens
gaagaccctgaatgg

SEQ ID NO: 31042 - DNA, 15 bp, Homo sapiens
tgaagaccctgaatg

SEQ ID NO: 31043 - DNA, 15 bp, Homo sapiens
ttgaagaccctgaat

SEQ ID NO: 31044 - DNA, 15 bp, Homo sapiens
gttgaagaccctgaa

SEQ ID NO: 31045 - DNA, 15 bp, Homo sapiens
ggttgaagaccctga

SEQ ID NO: 31046 - DNA, 15 bp, Homo sapiens
gggttgaagaccctg

SEQ ID NO: 31047 - DNA, 15 bp, Homo sapiens
agggttgaagaccct

SEQ ID NO: 31048 - DNA, 15 bp, Homo sapiens
gagggttgaagaccc

SEQ ID NO: 31049 - DNA, 15 bp, Homo sapiens
tgagggttgaagacc

SEQ ID NO: 31050 - DNA, 15 bp, Homo sapiens
atgagggttgaagac

SEQ ID NO: 31051 - DNA, 15 bp, Homo sapiens
aatgagggttgaaga

SEQ ID NO: 31052 - DNA, 15 bp, Homo sapiens
gaatgagggttgaag

SEQ ID NO: 31053 - DNA, 15 bp, Homo sapiens
agaatgagggttgaa

SEQ ID NO: 31054 - DNA, 15 bp, Homo sapiens
tagaatgagggttga

SEQ ID NO: 31055 - DNA, 15 bp, Homo sapiens
ctagaatgagggttg

SEQ ID NO: 31056 - DNA, 15 bp, Homo sapiens
cctagaatgagggtt

SEQ ID NO: 31057 - DNA, 15 bp, Homo sapiens
ccctagaatgagggt

SEQ ID NO: 31058 - DNA, 15 bp, Homo sapiens
tccctagaatgaggg

SEQ ID NO: 31059 - DNA, 15 bp, Homo sapiens
gtccctagaatgagg

SEQ ID NO: 31060 - DNA, 15 bp, Homo sapiens
agtccctagaatgag

SEQ ID NO: 31061 - DNA, 15 bp, Homo sapiens
aagtccctagaatga

SEQ ID NO: 31062 - DNA, 15 bp, Homo sapiens
gaagtccctagaatg

SEQ ID NO: 31063 - DNA, 15 bp, Homo sapiens
ggaagtccctagaat

SEQ ID NO: 31064 - DNA, 15 bp, Homo sapiens
tggaagtccctagaa

SEQ ID NO: 31065 - DNA, 15 bp, Homo sapiens
ctggaagtccctaga

SEQ ID NO: 31066 - DNA, 15 bp, Homo sapiens
actggaagtccctag

SEQ ID NO: 31067 - DNA, 15 bp, Homo sapiens
tactggaagtcccta

SEQ ID NO: 31068 - DNA, 15 bp, Homo sapiens
ttactggaagtccct

SEQ ID NO: 31069 - DNA, 15 bp, Homo sapiens
gttactggaagtccc

SEQ ID NO: 31070 - DNA, 15 bp, Homo sapiens
agttactggaagtcc

SEQ ID NO: 31071 - DNA, 15 bp, Homo sapiens
aagttactggaagtc

SEQ ID NO: 31072 - DNA, 15 bp, Homo sapiens
gaagttactggaagt

SEQ ID NO: 31073 - DNA, 15 bp, Homo sapiens
agaagttactggaag

SEQ ID NO: 31074 - DNA, 15 bp, Homo sapiens
gagaagttactggaa

SEQ ID NO: 31075 - DNA, 15 bp, Homo sapiens
ggagaagttactgga

SEQ ID NO: 31076 - DNA, 15 bp, Homo sapiens
gggagaagttactgg

SEQ ID NO: 31077 - DNA, 15 bp, Homo sapiens
tgggagaagttactg

SEQ ID NO: 31078 - DNA, 15 bp, Homo sapiens
gtgggagaagttact

SEQ ID NO: 31079 - DNA, 15 bp, Homo sapiens
ggtgggagaagttac

SEQ ID NO: 31080 - DNA, 15 bp, Homo sapiens
aggtgggagaagtta

SEQ ID NO: 31081 - DNA, 15 bp, Homo sapiens
aaggtgggagaagtt

SEQ ID NO: 31082 - DNA, 15 bp, Homo sapiens
gaaggtgggagaagt

SEQ ID NO: 31083 - DNA, 15 bp, Homo sapiens
ggaaggtgggagaag

SEQ ID NO: 31084 - DNA, 15 bp, Homo sapiens
gggaaggtgggagaa

SEQ ID NO: 31085 - DNA, 15 bp, Homo sapiens
agggaaggtgggaga

SEQ ID NO: 31086 - DNA, 15 bp, Homo sapiens
gagggaaggtgggag

SEQ ID NO: 31087 - DNA, 15 bp, Homo sapiens
agagggaaggtggga

SEQ ID NO: 31088 - DNA, 15 bp, Homo sapiens
aagagggaaggtggg

SEQ ID NO: 31089 - DNA, 15 bp, Homo sapiens
gaagagggaaggtgg

SEQ ID NO: 31090 - DNA, 15 bp, Homo sapiens
agaagagggaaggtg

SEQ ID NO: 31091 - DNA, 15 bp, Homo sapiens
gagaagagggaaggt

SEQ ID NO: 31092 - DNA, 15 bp, Homo sapiens
tgagaagagggaagg

SEQ ID NO: 31093 - DNA, 15 bp, Homo sapiens
ctgagaagagggaag

SEQ ID NO: 31094 - DNA, 15 bp, Homo sapiens
actgagaagagggaa

SEQ ID NO: 31095 - DNA, 15 bp, Homo sapiens
tactgagaagaggga

SEQ ID NO: 31096 - DNA, 15 bp, Homo sapiens
ttactgagaagaggg

SEQ ID NO: 31097 - DNA, 15 bp, Homo sapiens
cttactgagaagagg

SEQ ID NO: 31098 - DNA, 15 bp, Homo sapiens
tcttactgagaagag

SEQ ID NO: 31099 - DNA, 15 bp, Homo sapiens
gtcttactgagaaga

SEQ ID NO: 31100 - DNA, 15 bp, Homo sapiens
tgtcttactgagaag

SEQ ID NO: 31101 - DNA, 15 bp, Homo sapiens
atgtcttactgagaa

SEQ ID NO: 31102 - DNA, 15 bp, Homo sapiens
catgtcttactgaga

SEQ ID NO: 31103 - DNA, 15 bp, Homo sapiens
ccatgtcttactgag

SEQ ID NO: 31104 - DNA, 15 bp, Homo sapiens
cccatgtcttactga

SEQ ID NO: 31105 - DNA, 15 bp, Homo sapiens
acccatgtcttactg

SEQ ID NO: 31106 - DNA, 15 bp, Homo sapiens
tacccatgtcttact

SEQ ID NO: 31107 - DNA, 15 bp, Homo sapiens
atacccatgtcttac

SEQ ID NO: 31108 - DNA, 15 bp, Homo sapiens
aatacccatgtctta

SEQ ID NO: 31109 - DNA, 15 bp, Homo sapiens
caatacccatgtctt

SEQ ID NO: 31110 - DNA, 15 bp, Homo sapiens
acaatacccatgtct

SEQ ID NO: 31111 - DNA, 15 bp, Homo sapiens
gacaatacccatgtc

SEQ ID NO: 31112 - DNA, 15 bp, Homo sapiens
agacaatacccatgt

SEQ ID NO: 31113 - DNA, 15 bp, Homo sapiens
aagacaatacccatg

SEQ ID NO: 31114 - DNA, 15 bp, Homo sapiens
taagacaatacccat

SEQ ID NO: 31115 - DNA, 15 bp, Homo sapiens
ataagacaataccca

SEQ ID NO: 31116 - DNA, 15 bp, Homo sapiens
aataagacaataccc

SEQ ID NO: 31117 - DNA, 15 bp, Homo sapiens
gaataagacaatacc

SEQ ID NO: 31118 - DNA, 15 bp, Homo sapiens
agaataagacaatac

SEQ ID NO: 31119 - DNA, 15 bp, Homo sapiens
cagaataagacaata

SEQ ID NO: 31120 - DNA, 15 bp, Homo sapiens
acagaataagacaat

SEQ ID NO: 31121 - DNA, 15 bp, Homo sapiens
aacagaataagacaa

SEQ ID NO: 31122 - DNA, 15 bp, Homo sapiens
aaacagaataagaca

SEQ ID NO: 31123 - DNA, 15 bp, Homo sapiens
gaaacagaataagac

SEQ ID NO: 31124 - DNA, 15 bp, Homo sapiens
agaaacagaataaga

SEQ ID NO: 31125 - DNA, 15 bp, Homo sapiens
cagaaacagaataag

SEQ ID NO: 31126 - DNA, 15 bp, Homo sapiens
gcagaaacagaataa

SEQ ID NO: 31127 - DNA, 15 bp, Homo sapiens
agcagaaacagaata

SEQ ID NO: 31128 - DNA, 15 bp, Homo sapiens
cagcagaaacagaat

SEQ ID NO: 31129 - DNA, 15 bp, Homo sapiens
gcagcagaaacagaa

SEQ ID NO: 31130 - DNA, 15 bp, Homo sapiens
agcagcagaaacaga

SEQ ID NO: 31131 - DNA, 15 bp, Homo sapiens
tagcagcagaaacag

SEQ ID NO: 31132 - DNA, 15 bp, Homo sapiens
ctagcagcagaaaca

SEQ ID NO: 31133 - DNA, 15 bp, Homo sapiens
tctagcagcagaaac

SEQ ID NO: 31134 - DNA, 15 bp, Homo sapiens
ttctagcagcagaaa

SEQ ID NO: 31135 - DNA, 15 bp, Homo sapiens
cttctagcagcagaa

SEQ ID NO: 31136 - DNA, 15 bp, Homo sapiens
tcttctagcagcaga

SEQ ID NO: 31137 - DNA, 15 bp, Homo sapiens
ttcttctagcagcag

SEQ ID NO: 31138 - DNA, 15 bp, Homo sapiens
tttcttctagcagca

SEQ ID NO: 31139 - DNA, 15 bp, Homo sapiens
ttttcttctagcagc

SEQ ID NO: 31140 - DNA, 15 bp, Homo sapiens
attttcttctagcag

SEQ ID NO: 31141 - DNA, 15 bp, Homo sapiens
aattttcttctagca

SEQ ID NO: 31142 - DNA, 15 bp, Homo sapiens
gaattttcttctagc

SEQ ID NO: 31143 - DNA, 15 bp, Homo sapiens
agaattttcttctag

SEQ ID NO: 31144 - DNA, 15 bp, Homo sapiens
gagaattttcttcta

SEQ ID NO: 31145 - DNA, 15 bp, Homo sapiens
cgagaattttcttct

SEQ ID NO: 31146 - DNA, 15 bp, Homo sapiens
tcgagaattttcttc

SEQ ID NO: 31147 - DNA, 15 bp, Homo sapiens
ctcgagaattttctt

SEQ ID NO: 31148 - DNA, 15 bp, Homo sapiens
tctcgagaattttct

SEQ ID NO: 31149 - DNA, 15 bp, Homo sapiens
gtctcgagaattttc

SEQ ID NO: 31150 - DNA, 15 bp, Homo sapiens
agtctcgagaatttt

SEQ ID NO: 31151 - DNA, 15 bp, Homo sapiens
cagtctcgagaattt

SEQ ID NO: 31152 - DNA, 15 bp, Homo sapiens
tcagtctcgagaatt

SEQ ID NO: 31153 - DNA, 15 bp, Homo sapiens
ctcagtctcgagaat

SEQ ID NO: 31154 - DNA, 15 bp, Homo sapiens
actcagtctcgagaa

SEQ ID NO: 31155 - DNA, 15 bp, Homo sapiens
tactcagtctcgaga

SEQ ID NO: 31156 - DNA, 15 bp, Homo sapiens
ttactcagtctcgag

SEQ ID NO: 31157 - DNA, 15 bp, Homo sapiens
attactcagtctcga

SEQ ID NO: 31158 - DNA, 15 bp, Homo sapiens
aattactcagtctcg

SEQ ID NO: 31159 - DNA, 15 bp, Homo sapiens
aaattactcagtctc

SEQ ID NO: 31160 - DNA, 15 bp, Homo sapiens
taaattactcagtct

SEQ ID NO: 31161 - DNA, 15 bp, Homo sapiens
ataaattactcagtc

SEQ ID NO: 31162 - DNA, 15 bp, Homo sapiens
tataaattactcagt

SEQ ID NO: 31163 - DNA, 15 bp, Homo sapiens
gtataaattactcag

SEQ ID NO: 31164 - DNA, 15 bp, Homo sapiens
tgtataaattactca

SEQ ID NO: 31165 - DNA, 15 bp, Homo sapiens
gtgtataaattactc

SEQ ID NO: 31166 - DNA, 15 bp, Homo sapiens
tgtgtataaattact

SEQ ID NO: 31167 - DNA, 15 bp, Homo sapiens
ttgtgtataaattac

SEQ ID NO: 31168 - DNA, 15 bp, Homo sapiens
attgtgtataaatta

SEQ ID NO: 31169 - DNA, 15 bp, Homo sapiens
tattgtgtataaatt

SEQ ID NO: 31170 - DNA, 15 bp, Homo sapiens
ctattgtgtataaat

SEQ ID NO: 31171 - DNA, 15 bp, Homo sapiens
tctattgtgtataaa

SEQ ID NO: 31172 - DNA, 15 bp, Homo sapiens
ttctattgtgtataa

SEQ ID NO: 31173 - DNA, 15 bp, Homo sapiens
tttctattgtgtata

SEQ ID NO: 31174 - DNA, 15 bp, Homo sapiens
atttctattgtgtat

SEQ ID NO: 31175 - DNA, 15 bp, Homo sapiens
aatttctattgtgta

SEQ ID NO: 31176 - DNA, 15 bp, Homo sapiens
aaatttctattgtgt

SEQ ID NO: 31177 - DNA, 15 bp, Homo sapiens
taaatttctattgtg

SEQ ID NO: 31178 - DNA, 15 bp, Homo sapiens
gtaaatttctattgt

SEQ ID NO: 31179 - DNA, 15 bp, Homo sapiens
agtaaatttctattg

SEQ ID NO: 31180 - DNA, 15 bp, Homo sapiens
aagtaaatttctatt

SEQ ID NO: 31181 - DNA, 15 bp, Homo sapiens
gaagtaaatttctat

SEQ ID NO: 31182 - DNA, 15 bp, Homo sapiens
agaagtaaatttcta

SEQ ID NO: 31183 - DNA, 15 bp, Homo sapiens
gagaagtaaatttct

SEQ ID NO: 31184 - DNA, 15 bp, Homo sapiens
tgagaagtaaatttc

SEQ ID NO: 31185 - DNA, 15 bp, Homo sapiens
gtgagaagtaaattt

SEQ ID NO: 31186 - DNA, 15 bp, Homo sapiens
tgtgagaagtaaatt

SEQ ID NO: 31187 - DNA, 15 bp, Homo sapiens
ctgtgagaagtaaat

SEQ ID NO: 31188 - DNA, 15 bp, Homo sapiens
actgtgagaagtaaa

SEQ ID NO: 31189 - DNA, 15 bp, Homo sapiens
aactgtgagaagtaa

SEQ ID NO: 31190 - DNA, 15 bp, Homo sapiens
gaactgtgagaagta

SEQ ID NO: 31191 - DNA, 15 bp, Homo sapiens
agaactgtgagaagt

SEQ ID NO: 31192 - DNA, 15 bp, Homo sapiens
cagaactgtgagaag

SEQ ID NO: 31193 - DNA, 15 bp, Homo sapiens
ccagaactgtgagaa

SEQ ID NO: 31194 - DNA, 15 bp, Homo sapiens
tccagaactgtgaga

SEQ ID NO: 31195 - DNA, 15 bp, Homo sapiens
ctccagaactgtgag

SEQ ID NO: 31196 - DNA, 15 bp, Homo sapiens
cctccagaactgtga

SEQ ID NO: 31197 - DNA, 15 bp, Homo sapiens
gcctccagaactgtg

SEQ ID NO: 31198 - DNA, 15 bp, Homo sapiens
agcctccagaactgt

SEQ ID NO: 31199 - DNA, 15 bp, Homo sapiens
cagcctccagaactg

SEQ ID NO: 31200 - DNA, 15 bp, Homo sapiens
ccagcctccagaact

SEQ ID NO: 31201 - DNA, 15 bp, Homo sapiens
cccagcctccagaac

SEQ ID NO: 31202 - DNA, 15 bp, Homo sapiens
tcccagcctccagaa

SEQ ID NO: 31203 - DNA, 15 bp, Homo sapiens
ttcccagcctccaga

SEQ ID NO: 31204 - DNA, 15 bp, Homo sapiens
tttcccagcctccag

SEQ ID NO: 31205 - DNA, 15 bp, Homo sapiens
atttcccagcctcca

SEQ ID NO: 31206 - DNA, 15 bp, Homo sapiens
gatttcccagcctcc

SEQ ID NO: 31207 - DNA, 15 bp, Homo sapiens
ggatttcccagcctc

SEQ ID NO: 31208 - DNA, 15 bp, Homo sapiens
tggatttcccagcct

SEQ ID NO: 31209 - DNA, 15 bp, Homo sapiens
ttggatttcccagcc

SEQ ID NO: 31210 - DNA, 15 bp, Homo sapiens
tttggatttcccagc

SEQ ID NO: 31211 - DNA, 15 bp, Homo sapiens
ttttggatttcccag

SEQ ID NO: 31212 - DNA, 15 bp, Homo sapiens
attttggatttccca

SEQ ID NO: 31213 - DNA, 15 bp, Homo sapiens
gattttggatttccc

SEQ ID NO: 31214 - DNA, 15 bp, Homo sapiens
tgattttggatttcc

SEQ ID NO: 31215 - DNA, 15 bp, Homo sapiens
ttgattttggatttc

SEQ ID NO: 31216 - DNA, 15 bp, Homo sapiens
cttgattttggattt

SEQ ID NO: 31217 - DNA, 15 bp, Homo sapiens
ccttgattttggatt

SEQ ID NO: 31218 - DNA, 15 bp, Homo sapiens
accttgattttggat

SEQ ID NO: 31219 - DNA, 15 bp, Homo sapiens
caccttgattttgga

SEQ ID NO: 31220 - DNA, 15 bp, Homo sapiens
acaccttgattttgg

SEQ ID NO: 31221 - DNA, 15 bp, Homo sapiens
aacaccttgattttg

SEQ ID NO: 31222 - DNA, 15 bp, Homo sapiens
caacaccttgatttt

SEQ ID NO: 31223 - DNA, 15 bp, Homo sapiens
ccaacaccttgattt

SEQ ID NO: 31224 - DNA, 15 bp, Homo sapiens
gccaacaccttgatt

SEQ ID NO: 31225 - DNA, 15 bp, Homo sapiens
tgccaacaccttgat

SEQ ID NO: 31226 - DNA, 15 bp, Homo sapiens
ctgccaacaccttga

SEQ ID NO: 31227 - DNA, 15 bp, Homo sapiens
cctgccaacaccttg

SEQ ID NO: 31228 - DNA, 15 bp, Homo sapiens
acctgccaacacctt

SEQ ID NO: 31229 - DNA, 15 bp, Homo sapiens
aacctgccaacacct

SEQ ID NO: 31230 - DNA, 15 bp, Homo sapiens
aaacctgccaacacc

SEQ ID NO: 31231 - DNA, 15 bp, Homo sapiens
caaacctgccaacac

SEQ ID NO: 31232 - DNA, 15 bp, Homo sapiens
ccaaacctgccaaca

SEQ ID NO: 31233 - DNA, 15 bp, Homo sapiens
accaaacctgccaac

SEQ ID NO: 31234 - DNA, 15 bp, Homo sapiens
caccaaacctgccaa

SEQ ID NO: 31235 - DNA, 15 bp, Homo sapiens
acaccaaacctgcca

SEQ ID NO: 31236 - DNA, 15 bp, Homo sapiens
gacaccaaacctgcc

SEQ ID NO: 31237 - DNA, 15 bp, Homo sapiens
agacaccaaacctgc

SEQ ID NO: 31238 - DNA, 15 bp, Homo sapiens
cagacaccaaacctg

SEQ ID NO: 31239 - DNA, 15 bp, Homo sapiens
ccagacaccaaacct

SEQ ID NO: 31240 - DNA, 15 bp, Homo sapiens
accagacaccaaacc

SEQ ID NO: 31241 - DNA, 15 bp, Homo sapiens
caccagacaccaaac

SEQ ID NO: 31242 - DNA, 15 bp, Homo sapiens
tcaccagacaccaaa

SEQ ID NO: 31243 - DNA, 15 bp, Homo sapiens
ctcaccagacaccaa

SEQ ID NO: 31244 - DNA, 15 bp, Homo sapiens
cctcaccagacacca

SEQ ID NO: 31245 - DNA, 15 bp, Homo sapiens
ccctcaccagacacc

SEQ ID NO: 31246 - DNA, 15 bp, Homo sapiens
gccctcaccagacac

SEQ ID NO: 31247 - DNA, 15 bp, Homo sapiens
agccctcaccagaca

SEQ ID NO: 31248 - DNA, 15 bp, Homo sapiens
cagccctcaccagac

SEQ ID NO: 31249 - DNA, 15 bp, Homo sapiens
gcagccctcaccaga

SEQ ID NO: 31250 - DNA, 15 bp, Homo sapiens
agcagccctcaccag

SEQ ID NO: 31251 - DNA, 15 bp, Homo sapiens
gagcagccctcacca

SEQ ID NO: 31252 - DNA, 15 bp, Homo sapiens
agagcagccctcacc

SEQ ID NO: 31253 - DNA, 15 bp, Homo sapiens
gagagcagccctcac

SEQ ID NO: 31254 - DNA, 15 bp, Homo sapiens
agagagcagccctca

SEQ ID NO: 31255 - DNA, 15 bp, Homo sapiens
cagagagcagccctc

SEQ ID NO: 31256 - DNA, 15 bp, Homo sapiens
gcagagagcagccct

SEQ ID NO: 31257 - DNA, 15 bp, Homo sapiens
agcagagagcagccc

SEQ ID NO: 31258 - DNA, 15 bp, Homo sapiens
aagcagagagcagcc

SEQ ID NO: 31259 - DNA, 15 bp, Homo sapiens
gaagcagagagcagc

SEQ ID NO: 31260 - DNA, 15 bp, Homo sapiens
agaagcagagagcag

SEQ ID NO: 31261 - DNA, 15 bp, Homo sapiens
tagaagcagagagca

SEQ ID NO: 31262 - DNA, 15 bp, Homo sapiens
ttagaagcagagagc

SEQ ID NO: 31263 - DNA, 15 bp, Homo sapiens
cttagaagcagagag

SEQ ID NO: 31264 - DNA, 15 bp, Homo sapiens
tcttagaagcagaga

SEQ ID NO: 31265 - DNA, 15 bp, Homo sapiens
atcttagaagcagag

SEQ ID NO: 31266 - DNA, 15 bp, Homo sapiens
catcttagaagcaga

SEQ ID NO: 31267 - DNA, 15 bp, Homo sapiens
ccatcttagaagcag

SEQ ID NO: 31268 - DNA, 15 bp, Homo sapiens
accatcttagaagca

SEQ ID NO: 31269 - DNA, 15 bp, Homo sapiens
caccatcttagaagc

SEQ ID NO: 31270 - DNA, 15 bp, Homo sapiens
gcaccatcttagaag

SEQ ID NO: 31271 - DNA, 15 bp, Homo sapiens
ggcaccatcttagaa

SEQ ID NO: 31272 - DNA, 15 bp, Homo sapiens
aggcaccatcttaga

SEQ ID NO: 31273 - DNA, 15 bp, Homo sapiens
aaggcaccatcttag

SEQ ID NO: 31274 - DNA, 15 bp, Homo sapiens
caaggcaccatctta

SEQ ID NO: 31275 - DNA, 15 bp, Homo sapiens
acaaggcaccatctt

SEQ ID NO: 31276 - DNA, 15 bp, Homo sapiens
aacaaggcaccatct

SEQ ID NO: 31277 - DNA, 15 bp, Homo sapiens
caacaaggcaccatc

SEQ ID NO: 31278 - DNA, 15 bp, Homo sapiens
gcaacaaggcaccat

SEQ ID NO: 31279 - DNA, 15 bp, Homo sapiens
agcaacaaggcacca

SEQ ID NO: 31280 - DNA, 15 bp, Homo sapiens
cagcaacaaggcacc

SEQ ID NO: 31281 - DNA, 15 bp, Homo sapiens
gcagcaacaaggcac

SEQ ID NO: 31282 - DNA, 15 bp, Homo sapiens
tgcagcaacaaggca

SEQ ID NO: 31283 - DNA, 15 bp, Homo sapiens
atgcagcaacaaggc

SEQ ID NO: 31284 - DNA, 15 bp, Homo sapiens
gatgcagcaacaagg

SEQ ID NO: 31285 - DNA, 15 bp, Homo sapiens
ggatgcagcaacaag

SEQ ID NO: 31286 - DNA, 15 bp, Homo sapiens
aggatgcagcaacaa

SEQ ID NO: 31287 - DNA, 15 bp, Homo sapiens
aaggatgcagcaaca

SEQ ID NO: 31288 - DNA, 15 bp, Homo sapiens
taaggatgcagcaac

SEQ ID NO: 31289 - DNA, 15 bp, Homo sapiens
ctaaggatgcagcaa

SEQ ID NO: 31290 - DNA, 15 bp, Homo sapiens
cctaaggatgcagca

SEQ ID NO: 31291 - DNA, 15 bp, Homo sapiens
tcctaaggatgcagc

SEQ ID NO: 31292 - DNA, 15 bp, Homo sapiens
ctcctaaggatgcag

SEQ ID NO: 31293 - DNA, 15 bp, Homo sapiens
cctcctaaggatgca

SEQ ID NO: 31294 - DNA, 15 bp, Homo sapiens
ccctcctaaggatgc

SEQ ID NO: 31295 - DNA, 15 bp, Homo sapiens
cccctcctaaggatg

SEQ ID NO: 31296 - DNA, 15 bp, Homo sapiens
tcccctcctaaggat

SEQ ID NO: 31297 - DNA, 15 bp, Homo sapiens
gtcccctcctaagga

SEQ ID NO: 31298 - DNA, 15 bp, Homo sapiens
tgtcccctcctaagg

SEQ ID NO: 31299 - DNA, 15 bp, Homo sapiens
ttgtcccctcctaag

SEQ ID NO: 31300 - DNA, 15 bp, Homo sapiens
tttgtcccctcctaa

SEQ ID NO: 31301 - DNA, 15 bp, Homo sapiens
gtttgtcccctccta

SEQ ID NO: 31302 - DNA, 15 bp, Homo sapiens
cgtttgtcccctcct

SEQ ID NO: 31303 - DNA, 15 bp, Homo sapiens
gcgtttgtcccctcc

SEQ ID NO: 31304 - DNA, 15 bp, Homo sapiens
ggcgtttgtcccctc

SEQ ID NO: 31305 - DNA, 15 bp, Homo sapiens
tggcgtttgtcccct

SEQ ID NO: 31306 - DNA, 15 bp, Homo sapiens
atggcgtttgtcccc

SEQ ID NO: 31307 - DNA, 15 bp, Homo sapiens
aatggcgtttgtccc

SEQ ID NO: 31308 - DNA, 15 bp, Homo sapiens
aaatggcgtttgtcc

SEQ ID NO: 31309 - DNA, 15 bp, Homo sapiens
gaaatggcgtttgtc

SEQ ID NO: 31310 - DNA, 15 bp, Homo sapiens
ggaaatggcgtttgt

SEQ ID NO: 31311 - DNA, 15 bp, Homo sapiens
aggaaatggcgtttg

SEQ ID NO: 31312 - DNA, 15 bp, Homo sapiens
gaggaaatggcgttt

SEQ ID NO: 31313 - DNA, 15 bp, Homo sapiens
tgaggaaatggcgtt

SEQ ID NO: 31314 - DNA, 15 bp, Homo sapiens
ttgaggaaatggcgt

SEQ ID NO: 31315 - DNA, 15 bp, Homo sapiens
gttgaggaaatggcg

SEQ ID NO: 31316 - DNA, 15 bp, Homo sapiens
agttgaggaaatggc

SEQ ID NO: 31317 - DNA, 15 bp, Homo sapiens
cagttgaggaaatgg

SEQ ID NO: 31318 - DNA, 15 bp, Homo sapiens
ccagttgaggaaatg

SEQ ID NO: 31319 - DNA, 15 bp, Homo sapiens
gccagttgaggaaat

SEQ ID NO: 31320 - DNA, 15 bp, Homo sapiens
tgccagttgaggaaa

SEQ ID NO: 31321 - DNA, 15 bp, Homo sapiens
ctgccagttgaggaa

SEQ ID NO: 31322 - DNA, 15 bp, Homo sapiens
tctgccagttgagga

SEQ ID NO: 31323 - DNA, 15 bp, Homo sapiens
ttctgccagttgagg

SEQ ID NO: 31324 - DNA, 15 bp, Homo sapiens
cttctgccagttgag

SEQ ID NO: 31325 - DNA, 15 bp, Homo sapiens
ccttctgccagttga

SEQ ID NO: 31326 - DNA, 15 bp, Homo sapiens
cccttctgccagttg

SEQ ID NO: 31327 - DNA, 15 bp, Homo sapiens
tcccttctgccagtt

SEQ ID NO: 31328 - DNA, 15 bp, Homo sapiens
gtcccttctgccagt

SEQ ID NO: 31329 - DNA, 15 bp, Homo sapiens
agtcccttctgccag

SEQ ID NO: 31330 - DNA, 15 bp, Homo sapiens
cagtcccttctgcca

SEQ ID NO: 31331 - DNA, 15 bp, Homo sapiens
tcagtcccttctgcc

SEQ ID NO: 31332 - DNA, 15 bp, Homo sapiens
ttcagtcccttctgc

SEQ ID NO: 31333 - DNA, 15 bp, Homo sapiens
cttcagtcccttctg

SEQ ID NO: 31334 - DNA, 15 bp, Homo sapiens
gcttcagtcccttct

SEQ ID NO: 31335 - DNA, 15 bp, Homo sapiens
ggcttcagtcccttc

SEQ ID NO: 31336 - DNA, 15 bp, Homo sapiens
aggcttcagtccctt

SEQ ID NO: 31337 - DNA, 15 bp, Homo sapiens
gaggcttcagtccct

SEQ ID NO: 31338 - DNA, 15 bp, Homo sapiens
agaggcttcagtccc

SEQ ID NO: 31339 - DNA, 15 bp, Homo sapiens
gagaggcttcagtcc

SEQ ID NO: 31340 - DNA, 15 bp, Homo sapiens
ggagaggcttcagtc

SEQ ID NO: 31341 - DNA, 15 bp, Homo sapiens
gggagaggcttcagt

SEQ ID NO: 31342 - DNA, 15 bp, Homo sapiens
agggagaggcttcag

SEQ ID NO: 31343 - DNA, 15 bp, Homo sapiens
gagggagaggcttca

SEQ ID NO: 31344 - DNA, 15 bp, Homo sapiens
tgagggagaggcttc

SEQ ID NO: 31345 - DNA, 15 bp, Homo sapiens
ttgagggagaggctt

SEQ ID NO: 31346 - DNA, 15 bp, Homo sapiens
cttgagggagaggct

SEQ ID NO: 31347 - DNA, 15 bp, Homo sapiens
gcttgagggagaggc

SEQ ID NO: 31348 - DNA, 15 bp, Homo sapiens
ggcttgagggagagg

SEQ ID NO: 31349 - DNA, 15 bp, Homo sapiens
gggcttgagggagag

SEQ ID NO: 31350 - DNA, 15 bp, Homo sapiens
agggcttgagggaga

SEQ ID NO: 31351 - DNA, 15 bp, Homo sapiens
aagggcttgagggag

SEQ ID NO: 31352 - DNA, 15 bp, Homo sapiens
aaagggcttgaggga

SEQ ID NO: 31353 - DNA, 15 bp, Homo sapiens
aaaagggcttgaggg

SEQ ID NO: 31354 - DNA, 15 bp, Homo sapiens
taaaagggcttgagg

SEQ ID NO: 31355 - DNA, 15 bp, Homo sapiens
ataaaagggcttgag

SEQ ID NO: 31356 - DNA, 15 bp, Homo sapiens
tataaaagggcttga

SEQ ID NO: 31357 - DNA, 15 bp, Homo sapiens
ctataaaagggcttg

SEQ ID NO: 31358 - DNA, 15 bp, Homo sapiens
cctataaaagggctt

SEQ ID NO: 31359 - DNA, 15 bp, Homo sapiens
ccctataaaagggct

SEQ ID NO: 31360 - DNA, 15 bp, Homo sapiens
cccctataaaagggc

SEQ ID NO: 31361 - DNA, 15 bp, Homo sapiens
acccctataaaaggg

SEQ ID NO: 31362 - DNA, 15 bp, Homo sapiens
gacccctataaaagg

SEQ ID NO: 31363 - DNA, 15 bp, Homo sapiens
ggacccctataaaag

SEQ ID NO: 31364 - DNA, 15 bp, Homo sapiens
aggacccctataaaa

SEQ ID NO: 31365 - DNA, 15 bp, Homo sapiens
gaggacccctataaa

SEQ ID NO: 31366 - DNA, 15 bp, Homo sapiens
tgaggacccctataa

SEQ ID NO: 31367 - DNA, 15 bp, Homo sapiens
atgaggacccctata

SEQ ID NO: 31368 - DNA, 15 bp, Homo sapiens
aatgaggacccctat

SEQ ID NO: 31369 - DNA, 15 bp, Homo sapiens
caatgaggaccccta

SEQ ID NO: 31370 - DNA, 15 bp, Homo sapiens
acaatgaggacccct

SEQ ID NO: 31371 - DNA, 15 bp, Homo sapiens
gacaatgaggacccc

SEQ ID NO: 31372 - DNA, 15 bp, Homo sapiens
tgacaatgaggaccc

SEQ ID NO: 31373 - DNA, 15 bp, Homo sapiens
ctgacaatgaggacc

SEQ ID NO: 31374 - DNA, 15 bp, Homo sapiens
cctgacaatgaggac

SEQ ID NO: 31375 - DNA, 15 bp, Homo sapiens
gcctgacaatgagga

SEQ ID NO: 31376 - DNA, 15 bp, Homo sapiens
ggcctgacaatgagg

SEQ ID NO: 31377 - DNA, 15 bp, Homo sapiens
aggcctgacaatgag

SEQ ID NO: 31378 - DNA, 15 bp, Homo sapiens
gaggcctgacaatga

SEQ ID NO: 31379 - DNA, 15 bp, Homo sapiens
agaggcctgacaatg

SEQ ID NO: 31380 - DNA, 15 bp, Homo sapiens
tagaggcctgacaat

SEQ ID NO: 31381 - DNA, 15 bp, Homo sapiens
ttagaggcctgacaa

SEQ ID NO: 31382 - DNA, 15 bp, Homo sapiens
cttagaggcctgaca

SEQ ID NO: 31383 - DNA, 15 bp, Homo sapiens
gcttagaggcctgac

SEQ ID NO: 31384 - DNA, 15 bp, Homo sapiens
ggcttagaggcctga

SEQ ID NO: 31385 - DNA, 15 bp, Homo sapiens
gggcttagaggcctg

SEQ ID NO: 31386 - DNA, 15 bp, Homo sapiens
tgggcttagaggcct

SEQ ID NO: 31387 - DNA, 15 bp, Homo sapiens
ttgggcttagaggcc

SEQ ID NO: 31388 - DNA, 15 bp, Homo sapiens
cttgggcttagaggc

SEQ ID NO: 31389 - DNA, 15 bp, Homo sapiens
gcttgggcttagagg

SEQ ID NO: 31390 - DNA, 15 bp, Homo sapiens
ggcttgggcttagag

SEQ ID NO: 31391 - DNA, 15 bp, Homo sapiens
tggcttgggcttaga

SEQ ID NO: 31392 - DNA, 15 bp, Homo sapiens
ttggcttgggcttag

SEQ ID NO: 31393 - DNA, 15 bp, Homo sapiens
cttggcttgggctta

SEQ ID NO: 31394 - DNA, 15 bp, Homo sapiens
gcttggcttgggctt

SEQ ID NO: 31395 - DNA, 15 bp, Homo sapiens
ggcttggcttgggct

SEQ ID NO: 31396 - DNA, 15 bp, Homo sapiens
tggcttggcttgggc

SEQ ID NO: 31397 - DNA, 15 bp, Homo sapiens
atggcttggcttggg

SEQ ID NO: 31398 - DNA, 15 bp, Homo sapiens
gatggcttggcttgg

SEQ ID NO: 31399 - DNA, 15 bp, Homo sapiens
cgatggcttggcttg

SEQ ID NO: 31400 - DNA, 15 bp, Homo sapiens
gcgatggcttggctt

SEQ ID NO: 31401 - DNA, 15 bp, Homo sapiens
tgcgatggcttggct

SEQ ID NO: 31402 - DNA, 15 bp, Homo sapiens
atgcgatggcttggc

SEQ ID NO: 31403 - DNA, 15 bp, Homo sapiens
gatgcgatggcttgg

SEQ ID NO: 31404 - DNA, 15 bp, Homo sapiens
ggatgcgatggcttg

SEQ ID NO: 31405 - DNA, 15 bp, Homo sapiens
gggatgcgatggctt

SEQ ID NO: 31406 - DNA, 15 bp, Homo sapiens
ggggatgcgatggct

SEQ ID NO: 31407 - DNA, 15 bp, Homo sapiens
aggggatgcgatggc

SEQ ID NO: 31408 - DNA, 15 bp, Homo sapiens
caggggatgcgatgg

SEQ ID NO: 31409 - DNA, 15 bp, Homo sapiens
acaggggatgcgatg

SEQ ID NO: 31410 - DNA, 15 bp, Homo sapiens
cacaggggatgcgat

SEQ ID NO: 31411 - DNA, 15 bp, Homo sapiens
tcacaggggatgcga

SEQ ID NO: 31412 - DNA, 15 bp, Homo sapiens
gtcacaggggatgcg

SEQ ID NO: 31413 - DNA, 15 bp, Homo sapiens
agtcacaggggatgc

SEQ ID NO: 31414 - DNA, 15 bp, Homo sapiens
aagtcacaggggatg

SEQ ID NO: 31415 - DNA, 15 bp, Homo sapiens
caagtcacaggggat

SEQ ID NO: 31416 - DNA, 15 bp, Homo sapiens
gcaagtcacagggga

SEQ ID NO: 31417 - DNA, 15 bp, Homo sapiens
tgcaagtcacagggg

SEQ ID NO: 31418 - DNA, 15 bp, Homo sapiens
gtgcaagtcacaggg

SEQ ID NO: 31419 - DNA, 15 bp, Homo sapiens
tgtgcaagtcacagg

SEQ ID NO: 31420 - DNA, 15 bp, Homo sapiens
atgtgcaagtcacag

SEQ ID NO: 31421 - DNA, 15 bp, Homo sapiens
tatgtgcaagtcaca

SEQ ID NO: 31422 - DNA, 15 bp, Homo sapiens
atatgtgcaagtcac

SEQ ID NO: 31423 - DNA, 15 bp, Homo sapiens
tatatgtgcaagtca

SEQ ID NO: 31424 - DNA, 15 bp, Homo sapiens
gtatatgtgcaagtc

SEQ ID NO: 31425 - DNA, 15 bp, Homo sapiens
cgtatatgtgcaagt

SEQ ID NO: 31426 - DNA, 15 bp, Homo sapiens
gcgtatatgtgcaag

SEQ ID NO: 31427 - DNA, 15 bp, Homo sapiens
ggcgtatatgtgcaa

SEQ ID NO: 31428 - DNA, 15 bp, Homo sapiens
gggcgtatatgtgca

SEQ ID NO: 31429 - DNA, 15 bp, Homo sapiens
tgggcgtatatgtgc

SEQ ID NO: 31430 - DNA, 15 bp, Homo sapiens
ctgggcgtatatgtg

SEQ ID NO: 31431 - DNA, 15 bp, Homo sapiens
tctgggcgtatatgt

SEQ ID NO: 31432 - DNA, 15 bp, Homo sapiens
atctgggcgtatatg

SEQ ID NO: 31433 - DNA, 15 bp, Homo sapiens
catctgggcgtatat

SEQ ID NO: 31434 - DNA, 15 bp, Homo sapiens
ccatctgggcgtata

SEQ ID NO: 31435 - DNA, 15 bp, Homo sapiens
gccatctgggcgtat

SEQ ID NO: 31436 - DNA, 15 bp, Homo sapiens
ggccatctgggcgta

SEQ ID NO: 31437 - DNA, 15 bp, Homo sapiens
aggccatctgggcgt

SEQ ID NO: 31438 - DNA, 15 bp, Homo sapiens
caggccatctgggcg

SEQ ID NO: 31439 - DNA, 15 bp, Homo sapiens
tcaggccatctgggc

SEQ ID NO: 31440 - DNA, 15 bp, Homo sapiens
ttcaggccatctggg

SEQ ID NO: 31441 - DNA, 15 bp, Homo sapiens
cttcaggccatctgg

SEQ ID NO: 31442 - DNA, 15 bp, Homo sapiens
acttcaggccatctg

SEQ ID NO: 31443 - DNA, 15 bp, Homo sapiens
tacttcaggccatct

SEQ ID NO: 31444 - DNA, 15 bp, Homo sapiens
ttacttcaggccatc

SEQ ID NO: 31445 - DNA, 15 bp, Homo sapiens
gttacttcaggccat

SEQ ID NO: 31446 - DNA, 15 bp, Homo sapiens
agttacttcaggcca

SEQ ID NO: 31447 - DNA, 15 bp, Homo sapiens
cagttacttcaggcc

SEQ ID NO: 31448 - DNA, 15 bp, Homo sapiens
tcagttacttcaggc

SEQ ID NO: 31449 - DNA, 15 bp, Homo sapiens
ttcagttacttcagg

SEQ ID NO: 31450 - DNA, 15 bp, Homo sapiens
cttcagttacttcag

SEQ ID NO: 31451 - DNA, 15 bp, Homo sapiens
tcttcagttacttca

SEQ ID NO: 31452 - DNA, 15 bp, Homo sapiens
ttcttcagttacttc

SEQ ID NO: 31453 - DNA, 15 bp, Homo sapiens
attcttcagttactt

SEQ ID NO: 31454 - DNA, 15 bp, Homo sapiens
gattcttcagttact

SEQ ID NO: 31455 - DNA, 15 bp, Homo sapiens
tgattcttcagttac

SEQ ID NO: 31456 - DNA, 15 bp, Homo sapiens
gtgattcttcagtta

SEQ ID NO: 31457 - DNA, 15 bp, Homo sapiens
tgtgattcttcagtt

SEQ ID NO: 31458 - DNA, 15 bp, Homo sapiens
ttgtgattcttcagt

SEQ ID NO: 31459 - DNA, 15 bp, Homo sapiens
tttgtgattcttcag

SEQ ID NO: 31460 - DNA, 15 bp, Homo sapiens
ttttgtgattcttca

SEQ ID NO: 31461 - DNA, 15 bp, Homo sapiens
cttttgtgattcttc

SEQ ID NO: 31462 - DNA, 15 bp, Homo sapiens
tcttttgtgattctt

SEQ ID NO: 31463 - DNA, 15 bp, Homo sapiens
ttcttttgtgattct

SEQ ID NO: 31464 - DNA, 15 bp, Homo sapiens
cttcttttgtgattc

SEQ ID NO: 31465 - DNA, 15 bp, Homo sapiens
acttcttttgtgatt

SEQ ID NO: 31466 - DNA, 15 bp, Homo sapiens
cacttcttttgtgat

SEQ ID NO: 31467 - DNA, 15 bp, Homo sapiens
tcacttcttttgtga

SEQ ID NO: 31468 - DNA, 15 bp, Homo sapiens
ttcacttcttttgtg

SEQ ID NO: 31469 - DNA, 15 bp, Homo sapiens
tttcacttcttttgt

SEQ ID NO: 31470 - DNA, 15 bp, Homo sapiens
ttttcacttcttttg

SEQ ID NO: 31471 - DNA, 15 bp, Homo sapiens
cttttcacttctttt

SEQ ID NO: 31472 - DNA, 15 bp, Homo sapiens
ccttttcacttcttt

SEQ ID NO: 31473 - DNA, 15 bp, Homo sapiens
gccttttcacttctt

SEQ ID NO: 31474 - DNA, 15 bp, Homo sapiens
ggccttttcacttct

SEQ ID NO: 31475 - DNA, 15 bp, Homo sapiens
gggccttttcacttc

SEQ ID NO: 31476 - DNA, 15 bp, Homo sapiens
agggccttttcactt

SEQ ID NO: 31477 - DNA, 15 bp, Homo sapiens
cagggccttttcact

SEQ ID NO: 31478 - DNA, 15 bp, Homo sapiens
gcagggccttttcac

SEQ ID NO: 31479 - DNA, 15 bp, Homo sapiens
ggcagggccttttca

SEQ ID NO: 31480 - DNA, 15 bp, Homo sapiens
aggcagggccttttc

SEQ ID NO: 31481 - DNA, 15 bp, Homo sapiens
gaggcagggcctttt

SEQ ID NO: 31482 - DNA, 15 bp, Homo sapiens
cgaggcagggccttt

SEQ ID NO: 31483 - DNA, 15 bp, Homo sapiens
gcgaggcagggcctt

SEQ ID NO: 31484 - DNA, 15 bp, Homo sapiens
ggcgaggcagggcct

SEQ ID NO: 31485 - DNA, 15 bp, Homo sapiens
aggcgaggcagggcc

SEQ ID NO: 31486 - DNA, 15 bp, Homo sapiens
aaggcgaggcagggc

SEQ ID NO: 31487 - DNA, 15 bp, Homo sapiens
taaggcgaggcaggg

SEQ ID NO: 31488 - DNA, 15 bp, Homo sapiens
ttaaggcgaggcagg

SEQ ID NO: 31489 - DNA, 15 bp, Homo sapiens
gttaaggcgaggcag

SEQ ID NO: 31490 - DNA, 15 bp, Homo sapiens
agttaaggcgaggca

SEQ ID NO: 31491 - DNA, 15 bp, Homo sapiens
cagttaaggcgaggc

SEQ ID NO: 31492 - DNA, 15 bp, Homo sapiens
tcagttaaggcgagg

SEQ ID NO: 31493 - DNA, 15 bp, Homo sapiens
atcagttaaggcgag

SEQ ID NO: 31494 - DNA, 15 bp, Homo sapiens
catcagttaaggcga

SEQ ID NO: 31495 - DNA, 15 bp, Homo sapiens
tcatcagttaaggcg

SEQ ID NO: 31496 - DNA, 15 bp, Homo sapiens
gtcatcagttaaggc

SEQ ID NO: 31497 - DNA, 15 bp, Homo sapiens
cgtcatcagttaagg

SEQ ID NO: 31498 - DNA, 15 bp, Homo sapiens
acgtcatcagttaag

SEQ ID NO: 31499 - DNA, 15 bp, Homo sapiens
aacgtcatcagttaa

SEQ ID NO: 31500 - DNA, 15 bp, Homo sapiens
gaacgtcatcagtta

SEQ ID NO: 31501 - DNA, 15 bp, Homo sapiens
ggaacgtcatcagtt

SEQ ID NO: 31502 - DNA, 15 bp, Homo sapiens
tggaacgtcatcagt

SEQ ID NO: 31503 - DNA, 15 bp, Homo sapiens
gtggaacgtcatcag

SEQ ID NO: 31504 - DNA, 15 bp, Homo sapiens
ggtggaacgtcatca

SEQ ID NO: 31505 - DNA, 15 bp, Homo sapiens
tggtggaacgtcatc

SEQ ID NO: 31506 - DNA, 15 bp, Homo sapiens
atggtggaacgtcat

SEQ ID NO: 31507 - DNA, 15 bp, Homo sapiens
aatggtggaacgtca

SEQ ID NO: 31508 - DNA, 15 bp, Homo sapiens
caatggtggaacgtc

SEQ ID NO: 31509 - DNA, 15 bp, Homo sapiens
acaatggtggaacgt

SEQ ID NO: 31510 - DNA, 15 bp, Homo sapiens
cacaatggtggaacg

SEQ ID NO: 31511 - DNA, 15 bp, Homo sapiens
tcacaatggtggaac

SEQ ID NO: 31512 - DNA, 15 bp, Homo sapiens
atcacaatggtggaa

SEQ ID NO: 31513 - DNA, 15 bp, Homo sapiens
aatcacaatggtgga

SEQ ID NO: 31514 - DNA, 15 bp, Homo sapiens
aaatcacaatggtgg

SEQ ID NO: 31515 - DNA, 15 bp, Homo sapiens
caaatcacaatggtg

SEQ ID NO: 31516 - DNA, 15 bp, Homo sapiens
acaaatcacaatggt

SEQ ID NO: 31517 - DNA, 15 bp, Homo sapiens
aacaaatcacaatgg

SEQ ID NO: 31518 - DNA, 15 bp, Homo sapiens
gaacaaatcacaatg

SEQ ID NO: 31519 - DNA, 15 bp, Homo sapiens
ggaacaaatcacaat

SEQ ID NO: 31520 - DNA, 15 bp, Homo sapiens
aggaacaaatcacaa

SEQ ID NO: 31521 - DNA, 15 bp, Homo sapiens
caggaacaaatcaca

SEQ ID NO: 31522 - DNA, 15 bp, Homo sapiens
gcaggaacaaatcac

SEQ ID NO: 31523 - DNA, 15 bp, Homo sapiens
ggcaggaacaaatca

SEQ ID NO: 31524 - DNA, 15 bp, Homo sapiens
gggcaggaacaaatc

SEQ ID NO: 31525 - DNA, 15 bp, Homo sapiens
ggggcaggaacaaat

SEQ ID NO: 31526 - DNA, 15 bp, Homo sapiens
tggggcaggaacaaa

SEQ ID NO: 31527 - DNA, 15 bp, Homo sapiens
gtggggcaggaacaa

SEQ ID NO: 31528 - DNA, 15 bp, Homo sapiens
ggtggggcaggaaca

SEQ ID NO: 31529 - DNA, 15 bp, Homo sapiens
aggtggggcaggaac

SEQ ID NO: 31530 - DNA, 15 bp, Homo sapiens
aaggtggggcaggaa

SEQ ID NO: 31531 - DNA, 15 bp, Homo sapiens
taaggtggggcagga

SEQ ID NO: 31532 - DNA, 15 bp, Homo sapiens
ttaaggtggggcagg

SEQ ID NO: 31533 - DNA, 15 bp, Homo sapiens
gttaaggtggggcag

SEQ ID NO: 31534 - DNA, 15 bp, Homo sapiens
agttaaggtggggca

SEQ ID NO: 31535 - DNA, 15 bp, Homo sapiens
cagttaaggtggggc

SEQ ID NO: 31536 - DNA, 15 bp, Homo sapiens
tcagttaaggtgggg

SEQ ID NO: 31537 - DNA, 15 bp, Homo sapiens
ctcagttaaggtggg

SEQ ID NO: 31538 - DNA, 15 bp, Homo sapiens
actcagttaaggtgg

SEQ ID NO: 31539 - DNA, 15 bp, Homo sapiens
cactcagttaaggtg

SEQ ID NO: 31540 - DNA, 15 bp, Homo sapiens
tcactcagttaaggt

SEQ ID NO: 31541 - DNA, 15 bp, Homo sapiens
atcactcagttaagg

SEQ ID NO: 31542 - DNA, 15 bp, Homo sapiens
aatcactcagttaag

SEQ ID NO: 31543 - DNA, 15 bp, Homo sapiens
taatcactcagttaa

SEQ ID NO: 31544 - DNA, 15 bp, Homo sapiens
ttaatcactcagtta

SEQ ID NO: 31545 - DNA, 15 bp, Homo sapiens
gttaatcactcagtt

SEQ ID NO: 31546 - DNA, 15 bp, Homo sapiens
ggttaatcactcagt

SEQ ID NO: 31547 - DNA, 15 bp, Homo sapiens
gggttaatcactcag

SEQ ID NO: 31548 - DNA, 15 bp, Homo sapiens
agggttaatcactca

SEQ ID NO: 31549 - DNA, 15 bp, Homo sapiens
cagggttaatcactc

SEQ ID NO: 31550 - DNA, 15 bp, Homo sapiens
acagggttaatcact

SEQ ID NO: 31551 - DNA, 15 bp, Homo sapiens
cacagggttaatcac

SEQ ID NO: 31552 - DNA, 15 bp, Homo sapiens
tcacagggttaatca

SEQ ID NO: 31553 - DNA, 15 bp, Homo sapiens
ttcacagggttaatc

SEQ ID NO: 31554 - DNA, 15 bp, Homo sapiens
attcacagggttaat

SEQ ID NO: 31555 - DNA, 15 bp, Homo sapiens
aattcacagggttaa

SEQ ID NO: 31556 - DNA, 15 bp, Homo sapiens
aaattcacagggtta

SEQ ID NO: 31557 - DNA, 15 bp, Homo sapiens
gaaattcacagggtt

SEQ ID NO: 31558 - DNA, 15 bp, Homo sapiens
ggaaattcacagggt

SEQ ID NO: 31559 - DNA, 15 bp, Homo sapiens
aggaaattcacaggg

SEQ ID NO: 31560 - DNA, 15 bp, Homo sapiens
aaggaaattcacagg

SEQ ID NO: 31561 - DNA, 15 bp, Homo sapiens
gaaggaaattcacag

SEQ ID NO: 31562 - DNA, 15 bp, Homo sapiens
agaaggaaattcaca

SEQ ID NO: 31563 - DNA, 15 bp, Homo sapiens
gagaaggaaattcac

SEQ ID NO: 31564 - DNA, 15 bp, Homo sapiens
ggagaaggaaattca

SEQ ID NO: 31565 - DNA, 15 bp, Homo sapiens
aggagaaggaaattc

SEQ ID NO: 31566 - DNA, 15 bp, Homo sapiens
caggagaaggaaatt

SEQ ID NO: 31567 - DNA, 15 bp, Homo sapiens
ccaggagaaggaaat

SEQ ID NO: 31568 - DNA, 15 bp, Homo sapiens
gccaggagaaggaaa

SEQ ID NO: 31569 - DNA, 15 bp, Homo sapiens
agccaggagaaggaa

SEQ ID NO: 31570 - DNA, 15 bp, Homo sapiens
gagccaggagaagga

SEQ ID NO: 31571 - DNA, 15 bp, Homo sapiens
tgagccaggagaagg

SEQ ID NO: 31572 - DNA, 15 bp, Homo sapiens
ctgagccaggagaag

SEQ ID NO: 31573 - DNA, 15 bp, Homo sapiens
tctgagccaggagaa

SEQ ID NO: 31574 - DNA, 15 bp, Homo sapiens
ttctgagccaggaga

SEQ ID NO: 31575 - DNA, 15 bp, Homo sapiens
cttctgagccaggag

SEQ ID NO: 31576 - DNA, 15 bp, Homo sapiens
gcttctgagccagga

SEQ ID NO: 31577 - DNA, 15 bp, Homo sapiens
agcttctgagccagg

SEQ ID NO: 31578 - DNA, 15 bp, Homo sapiens
gagcttctgagccag

SEQ ID NO: 31579 - DNA, 15 bp, Homo sapiens
ggagcttctgagcca

SEQ ID NO: 31580 - DNA, 15 bp, Homo sapiens
gggagcttctgagcc

SEQ ID NO: 31581 - DNA, 15 bp, Homo sapiens
ggggagcttctgagc

SEQ ID NO: 31582 - DNA, 15 bp, Homo sapiens
gggggagcttctgag

SEQ ID NO: 31583 - DNA, 15 bp, Homo sapiens
tgggggagcttctga

SEQ ID NO: 31584 - DNA, 15 bp, Homo sapiens
gtgggggagcttctg

SEQ ID NO: 31585 - DNA, 15 bp, Homo sapiens
agtgggggagcttct

SEQ ID NO: 31586 - DNA, 15 bp, Homo sapiens
cagtgggggagcttc

SEQ ID NO: 31587 - DNA, 15 bp, Homo sapiens
tcagtgggggagctt

SEQ ID NO: 31588 - DNA, 15 bp, Homo sapiens
ctcagtgggggagct

SEQ ID NO: 31589 - DNA, 15 bp, Homo sapiens
gctcagtgggggagc

SEQ ID NO: 31590 - DNA, 15 bp, Homo sapiens
tgctcagtgggggag

SEQ ID NO: 31591 - DNA, 15 bp, Homo sapiens
gtgctcagtggggga

SEQ ID NO: 31592 - DNA, 15 bp, Homo sapiens
ggtgctcagtggggg

SEQ ID NO: 31593 - DNA, 15 bp, Homo sapiens
aggtgctcagtgggg

SEQ ID NO: 31594 - DNA, 15 bp, Homo sapiens
aaggtgctcagtggg

SEQ ID NO: 31595 - DNA, 15 bp, Homo sapiens
caaggtgctcagtgg

SEQ ID NO: 31596 - DNA, 15 bp, Homo sapiens
acaaggtgctcagtg

SEQ ID NO: 31597 - DNA, 15 bp, Homo sapiens
cacaaggtgctcagt

SEQ ID NO: 31598 - DNA, 15 bp, Homo sapiens
tcacaaggtgctcag

SEQ ID NO: 31599 - DNA, 15 bp, Homo sapiens
gtcacaaggtgctca

SEQ ID NO: 31600 - DNA, 15 bp, Homo sapiens
ggtcacaaggtgctc

SEQ ID NO: 31601 - DNA, 15 bp, Homo sapiens
gggtcacaaggtgct

SEQ ID NO: 31602 - DNA, 15 bp, Homo sapiens
ggggtcacaaggtgc

SEQ ID NO: 31603 - DNA, 15 bp, Homo sapiens
gggggtcacaaggtg

SEQ ID NO: 31604 - DNA, 15 bp, Homo sapiens
agggggtcacaaggt

SEQ ID NO: 31605 - DNA, 15 bp, Homo sapiens
cagggggtcacaagg

SEQ ID NO: 31606 - DNA, 15 bp, Homo sapiens
gcagggggtcacaag

SEQ ID NO: 31607 - DNA, 15 bp, Homo sapiens
ggcagggggtcacaa

SEQ ID NO: 31608 - DNA, 15 bp, Homo sapiens
gggcagggggtcaca

SEQ ID NO: 31609 - DNA, 15 bp, Homo sapiens
ggggcagggggtcac

SEQ ID NO: 31610 - DNA, 15 bp, Homo sapiens
aggggcagggggtca

SEQ ID NO: 31611 - DNA, 15 bp, Homo sapiens
caggggcagggggtc

SEQ ID NO: 31612 - DNA, 15 bp, Homo sapiens
gcaggggcagggggt

SEQ ID NO: 31613 - DNA, 15 bp, Homo sapiens
ggcaggggcaggggg

SEQ ID NO: 31614 - DNA, 15 bp, Homo sapiens
gggcaggggcagggg

SEQ ID NO: 31615 - DNA, 15 bp, Homo sapiens
tgggcaggggcaggg

SEQ ID NO: 31616 - DNA, 15 bp, Homo sapiens
gtgggcaggggcagg

SEQ ID NO: 31617 - DNA, 15 bp, Homo sapiens
ggtgggcaggggcag

SEQ ID NO: 31618 - DNA, 15 bp, Homo sapiens
tggtgggcaggggca

SEQ ID NO: 31619 - DNA, 15 bp, Homo sapiens
ctggtgggcaggggc

SEQ ID NO: 31620 - DNA, 15 bp, Homo sapiens
tctggtgggcagggg

SEQ ID NO: 31621 - DNA, 15 bp, Homo sapiens
ctctggtgggcaggg

SEQ ID NO: 31622 - DNA, 15 bp, Homo sapiens
tctctggtgggcagg

SEQ ID NO: 31623 - DNA, 15 bp, Homo sapiens
ttctctggtgggcag

SEQ ID NO: 31624 - DNA, 15 bp, Homo sapiens
gttctctggtgggca

SEQ ID NO: 31625 - DNA, 15 bp, Homo sapiens
tgttctctggtgggc

SEQ ID NO: 31626 - DNA, 15 bp, Homo sapiens
ttgttctctggtggg

SEQ ID NO: 31627 - DNA, 15 bp, Homo sapiens
gttgttctctggtgg

SEQ ID NO: 31628 - DNA, 15 bp, Homo sapiens
ggttgttctctggtg

SEQ ID NO: 31629 - DNA, 15 bp, Homo sapiens
gggttgttctctggt

SEQ ID NO: 31630 - DNA, 15 bp, Homo sapiens
ggggttgttctctgg

SEQ ID NO: 31631 - DNA, 15 bp, Homo sapiens
gggggttgttctctg

SEQ ID NO: 31632 - DNA, 15 bp, Homo sapiens
agggggttgttctct

SEQ ID NO: 31633 - DNA, 15 bp, Homo sapiens
aagggggttgttctc

SEQ ID NO: 31634 - DNA, 15 bp, Homo sapiens
aaagggggttgttct

SEQ ID NO: 31635 - DNA, 15 bp, Homo sapiens
caaagggggttgttc

SEQ ID NO: 31636 - DNA, 15 bp, Homo sapiens
tcaaagggggttgtt

SEQ ID NO: 31637 - DNA, 15 bp, Homo sapiens
gtcaaagggggttgt

SEQ ID NO: 31638 - DNA, 15 bp, Homo sapiens
agtcaaagggggttg

SEQ ID NO: 31639 - DNA, 15 bp, Homo sapiens
cagtcaaagggggtt

SEQ ID NO: 31640 - DNA, 15 bp, Homo sapiens
acagtcaaagggggt

SEQ ID NO: 31641 - DNA, 15 bp, Homo sapiens
tacagtcaaaggggg

SEQ ID NO: 31642 - DNA, 15 bp, Homo sapiens
ttacagtcaaagggg

SEQ ID NO: 31643 - DNA, 15 bp, Homo sapiens
attacagtcaaaggg

SEQ ID NO: 31644 - DNA, 15 bp, Homo sapiens
aattacagtcaaagg

SEQ ID NO: 31645 - DNA, 15 bp, Homo sapiens
aaattacagtcaaag

SEQ ID NO: 31646 - DNA, 15 bp, Homo sapiens
aaaattacagtcaaa

SEQ ID NO: 31647 - DNA, 15 bp, Homo sapiens
gaaaattacagtcaa

SEQ ID NO: 31648 - DNA, 15 bp, Homo sapiens
ggaaaattacagtca

SEQ ID NO: 31649 - DNA, 15 bp, Homo sapiens
tggaaaattacagtc

SEQ ID NO: 31650 - DNA, 15 bp, Homo sapiens
atggaaaattacagt

SEQ ID NO: 31651 - DNA, 15 bp, Homo sapiens
aatggaaaattacag

SEQ ID NO: 31652 - DNA, 15 bp, Homo sapiens
taatggaaaattaca

SEQ ID NO: 31653 - DNA, 15 bp, Homo sapiens
gtaatggaaaattac

SEQ ID NO: 31654 - DNA, 15 bp, Homo sapiens
ggtaatggaaaatta

SEQ ID NO: 31655 - DNA, 15 bp, Homo sapiens
aggtaatggaaaatt

SEQ ID NO: 31656 - DNA, 15 bp, Homo sapiens
aaggtaatggaaaat

SEQ ID NO: 31657 - DNA, 15 bp, Homo sapiens
gaaggtaatggaaaa

SEQ ID NO: 31658 - DNA, 15 bp, Homo sapiens
ggaaggtaatggaaa

SEQ ID NO: 31659 - DNA, 15 bp, Homo sapiens
gggaaggtaatggaa

SEQ ID NO: 31660 - DNA, 15 bp, Homo sapiens
tgggaaggtaatgga

SEQ ID NO: 31661 - DNA, 15 bp, Homo sapiens
ttgggaaggtaatgg

SEQ ID NO: 31662 - DNA, 15 bp, Homo sapiens
tttgggaaggtaatg

SEQ ID NO: 31663 - DNA, 15 bp, Homo sapiens
atttgggaaggtaat

SEQ ID NO: 31664 - DNA, 15 bp, Homo sapiens
gatttgggaaggtaa

SEQ ID NO: 31665 - DNA, 15 bp, Homo sapiens
ggatttgggaaggta

SEQ ID NO: 31666 - DNA, 15 bp, Homo sapiens
aggatttgggaaggt

SEQ ID NO: 31667 - DNA, 15 bp, Homo sapiens
taggatttgggaagg

SEQ ID NO: 31668 - DNA, 15 bp, Homo sapiens
ataggatttgggaag

SEQ ID NO: 31669 - DNA, 15 bp, Homo sapiens
tataggatttgggaa

SEQ ID NO: 31670 - DNA, 15 bp, Homo sapiens
ttataggatttggga

SEQ ID NO: 31671 - DNA, 15 bp, Homo sapiens
tttataggatttggg

SEQ ID NO: 31672 - DNA, 15 bp, Homo sapiens
ttttataggatttgg

SEQ ID NO: 31673 - DNA, 15 bp, Homo sapiens
gttttataggatttg

SEQ ID NO: 31674 - DNA, 15 bp, Homo sapiens
cgttttataggattt

SEQ ID NO: 31675 - DNA, 15 bp, Homo sapiens
ccgttttataggatt

SEQ ID NO: 31676 - DNA, 15 bp, Homo sapiens
gccgttttataggat

SEQ ID NO: 31677 - DNA, 15 bp, Homo sapiens
ggccgttttatagga

SEQ ID NO: 31678 - DNA, 15 bp, Homo sapiens
gggccgttttatagg

SEQ ID NO: 31679 - DNA, 15 bp, Homo sapiens
ggggccgttttatag

SEQ ID NO: 31680 - DNA, 15 bp, Homo sapiens
tggggccgttttata

SEQ ID NO: 31681 - DNA, 15 bp, Homo sapiens
gtggggccgttttat

SEQ ID NO: 31682 - DNA, 15 bp, Homo sapiens
ggtggggccgtttta

SEQ ID NO: 31683 - DNA, 15 bp, Homo sapiens
gggtggggccgtttt

SEQ ID NO: 31684 - DNA, 15 bp, Homo sapiens
ggggtggggccgttt

SEQ ID NO: 31685 - DNA, 15 bp, Homo sapiens
aggggtggggccgtt

SEQ ID NO: 31686 - DNA, 15 bp, Homo sapiens
taggggtggggccgt

SEQ ID NO: 31687 - DNA, 15 bp, Homo sapiens
ataggggtggggccg

SEQ ID NO: 31688 - DNA, 15 bp, Homo sapiens
gataggggtggggcc

SEQ ID NO: 31689 - DNA, 15 bp, Homo sapiens
agataggggtggggc

SEQ ID NO: 31690 - DNA, 15 bp, Homo sapiens
gagataggggtgggg

SEQ ID NO: 31691 - DNA, 15 bp, Homo sapiens
ggagataggggtggg

SEQ ID NO: 31692 - DNA, 15 bp, Homo sapiens
gggagataggggtgg

SEQ ID NO: 31693 - DNA, 15 bp, Homo sapiens
agggagataggggtg

SEQ ID NO: 31694 - DNA, 15 bp, Homo sapiens
aagggagataggggt

SEQ ID NO: 31695 - DNA, 15 bp, Homo sapiens
aaagggagatagggg

SEQ ID NO: 31696 - DNA, 15 bp, Homo sapiens
caaagggagataggg

SEQ ID NO: 31697 - DNA, 15 bp, Homo sapiens
gcaaagggagatagg

SEQ ID NO: 31698 - DNA, 15 bp, Homo sapiens
agcaaagggagatag

SEQ ID NO: 31699 - DNA, 15 bp, Homo sapiens
cagcaaagggagata

SEQ ID NO: 31700 - DNA, 15 bp, Homo sapiens
tcagcaaagggagat

SEQ ID NO: 31701 - DNA, 15 bp, Homo sapiens
gtcagcaaagggaga

SEQ ID NO: 31702 - DNA, 15 bp, Homo sapiens
agtcagcaaagggag

SEQ ID NO: 31703 - DNA, 15 bp, Homo sapiens
gagtcagcaaaggga

SEQ ID NO: 31704 - DNA, 15 bp, Homo sapiens
agagtcagcaaaggg

SEQ ID NO: 31705 - DNA, 15 bp, Homo sapiens
gagagtcagcaaagg

SEQ ID NO: 31706 - DNA, 15 bp, Homo sapiens
agagagtcagcaaag

SEQ ID NO: 31707 - DNA, 15 bp, Homo sapiens
aagagagtcagcaaa

SEQ ID NO: 31708 - DNA, 15 bp, Homo sapiens
aaagagagtcagcaa

SEQ ID NO: 31709 - DNA, 15 bp, Homo sapiens
aaaagagagtcagca

SEQ ID NO: 31710 - DNA, 15 bp, Homo sapiens
gaaaagagagtcagc

SEQ ID NO: 31711 - DNA, 15 bp, Homo sapiens
cgaaaagagagtcag

SEQ ID NO: 31712 - DNA, 15 bp, Homo sapiens
ccgaaaagagagtca

SEQ ID NO: 31713 - DNA, 15 bp, Homo sapiens
tccgaaaagagagtc

SEQ ID NO: 31714 - DNA, 15 bp, Homo sapiens
gtccgaaaagagagt

SEQ ID NO: 31715 - DNA, 15 bp, Homo sapiens
agtccgaaaagagag

SEQ ID NO: 31716 - DNA, 15 bp, Homo sapiens
gagtccgaaaagaga

SEQ ID NO: 31717 - DNA, 15 bp, Homo sapiens
tgagtccgaaaagag

SEQ ID NO: 31718 - DNA, 15 bp, Homo sapiens
ctgagtccgaaaaga

SEQ ID NO: 31719 - DNA, 15 bp, Homo sapiens
gctgagtccgaaaag

SEQ ID NO: 31720 - DNA, 15 bp, Homo sapiens
ggctgagtccgaaaa

SEQ ID NO: 31721 - DNA, 15 bp, Homo sapiens
gggctgagtccgaaa

SEQ ID NO: 31722 - DNA, 15 bp, Homo sapiens
tgggctgagtccgaa

SEQ ID NO: 31723 - DNA, 15 bp, Homo sapiens
gtgggctgagtccga

SEQ ID NO: 31724 - DNA, 15 bp, Homo sapiens
ggtgggctgagtccg

SEQ ID NO: 31725 - DNA, 15 bp, Homo sapiens
aggtgggctgagtcc

SEQ ID NO: 31726 - DNA, 15 bp, Homo sapiens
caggtgggctgagtc

SEQ ID NO: 31727 - DNA, 15 bp, Homo sapiens
gcaggtgggctgagt

SEQ ID NO: 31728 - DNA, 15 bp, Homo sapiens
tgcaggtgggctgag

SEQ ID NO: 31729 - DNA, 15 bp, Homo sapiens
ctgcaggtgggctga

SEQ ID NO: 31730 - DNA, 15 bp, Homo sapiens
gctgcaggtgggctg

SEQ ID NO: 31731 - DNA, 15 bp, Homo sapiens
ggctgcaggtgggct

SEQ ID NO: 31732 - DNA, 15 bp, Homo sapiens
tggctgcaggtgggc

SEQ ID NO: 31733 - DNA, 15 bp, Homo sapiens
ctggctgcaggtggg

SEQ ID NO: 31734 - DNA, 15 bp, Homo sapiens
cctggctgcaggtgg

SEQ ID NO: 31735 - DNA, 15 bp, Homo sapiens
acctggctgcaggtg

SEQ ID NO: 31736 - DNA, 15 bp, Homo sapiens
cacctggctgcaggt

SEQ ID NO: 31737 - DNA, 15 bp, Homo sapiens
tcacctggctgcagg

SEQ ID NO: 31738 - DNA, 15 bp, Homo sapiens
ttcacctggctgcag

SEQ ID NO: 31739 - DNA, 15 bp, Homo sapiens
tttcacctggctgca

SEQ ID NO: 31740 - DNA, 15 bp, Homo sapiens
ttttcacctggctgc

SEQ ID NO: 31741 - DNA, 15 bp, Homo sapiens
tttttcacctggctg

SEQ ID NO: 31742 - DNA, 15 bp, Homo sapiens
ttttttcacctggct

SEQ ID NO: 31743 - DNA, 15 bp, Homo sapiens
tttttttcacctggc

SEQ ID NO: 31744 - DNA, 15 bp, Homo sapiens
gtttttttcacctgg

SEQ ID NO: 31745 - DNA, 15 bp, Homo sapiens
tgtttttttcacctg

SEQ ID NO: 31746 - DNA, 15 bp, Homo sapiens
ctgtttttttcacct

SEQ ID NO: 31747 - DNA, 15 bp, Homo sapiens
gctgtttttttcacc

SEQ ID NO: 31748 - DNA, 15 bp, Homo sapiens
agctgtttttttcac

SEQ ID NO: 31749 - DNA, 15 bp, Homo sapiens
aagctgtttttttca

SEQ ID NO: 31750 - DNA, 15 bp, Homo sapiens
aaagctgtttttttc

SEQ ID NO: 31751 - DNA, 15 bp, Homo sapiens
taaagctgttttttt

SEQ ID NO: 31752 - DNA, 15 bp, Homo sapiens
ataaagctgtttttt

SEQ ID NO: 31753 - DNA, 15 bp, Homo sapiens
aataaagctgttttt

SEQ ID NO: 31754 - DNA, 15 bp, Homo sapiens
caataaagctgtttt

SEQ ID NO: 31755 - DNA, 15 bp, Homo sapiens
gcaataaagctgttt

SEQ ID NO: 31756 - DNA, 15 bp, Homo sapiens
agcaataaagctgtt

SEQ ID NO: 31757 - DNA, 15 bp, Homo sapiens
gagcaataaagctgt

SEQ ID NO: 31758 - DNA, 15 bp, Homo sapiens
tgagcaataaagctg

SEQ ID NO: 31759 - DNA, 15 bp, Homo sapiens
gtgagcaataaagct

SEQ ID NO: 31760 - DNA, 15 bp, Homo sapiens
tgtgagcaataaagc

SEQ ID NO: 31761 - DNA, 15 bp, Homo sapiens
gtgtgagcaataaag

SEQ ID NO: 31762 - DNA, 15 bp, Homo sapiens
tgtgtgagcaataaa

SEQ ID NO: 31763 - DNA, 15 bp, Homo sapiens
ttgtgtgagcaataa

SEQ ID NO: 31764 - DNA, 15 bp, Homo sapiens
tttgtgtgagcaata

SEQ ID NO: 31765 - DNA, 15 bp, Homo sapiens
ctttgtgtgagcaat

SEQ ID NO: 31766 - DNA, 15 bp, Homo sapiens
gctttgtgtgagcaa

SEQ ID NO: 31767 - DNA, 15 bp, Homo sapiens
ggctttgtgtgagca

SEQ ID NO: 31768 - DNA, 15 bp, Homo sapiens
aggctttgtgtgagc

SEQ ID NO: 31769 - DNA, 15 bp, Homo sapiens
caggctttgtgtgag

SEQ ID NO: 31770 - DNA, 15 bp, Homo sapiens
acaggctttgtgtga

SEQ ID NO: 31771 - DNA, 15 bp, Homo sapiens
aacaggctttgtgtg

SEQ ID NO: 31772 - DNA, 15 bp, Homo sapiens
aaacaggctttgtgt

SEQ ID NO: 31773 - DNA, 15 bp, Homo sapiens
caaacaggctttgtg

SEQ ID NO: 31774 - DNA, 15 bp, Homo sapiens
ccaaacaggctttgt

SEQ ID NO: 31775 - DNA, 15 bp, Homo sapiens
accaaacaggctttg

SEQ ID NO: 31776 - DNA, 15 bp, Homo sapiens
caccaaacaggcttt

SEQ ID NO: 31777 - DNA, 15 bp, Homo sapiens
ccaccaaacaggctt

SEQ ID NO: 31778 - DNA, 15 bp, Homo sapiens
accaccaaacaggct

SEQ ID NO: 31779 - DNA, 15 bp, Homo sapiens
gaccaccaaacaggc

SEQ ID NO: 31780 - DNA, 15 bp, Homo sapiens
agaccaccaaacagg

SEQ ID NO: 31781 - DNA, 15 bp, Homo sapiens
gagaccaccaaacag

SEQ ID NO: 31782 - DNA, 15 bp, Homo sapiens
agagaccaccaaaca

SEQ ID NO: 31783 - DNA, 15 bp, Homo sapiens
aagagaccaccaaac

SEQ ID NO: 31784 - DNA, 15 bp, Homo sapiens
gaagagaccaccaaa

SEQ ID NO: 31785 - DNA, 15 bp, Homo sapiens
tgaagagaccaccaa

SEQ ID NO: 31786 - DNA, 15 bp, Homo sapiens
gtgaagagaccacca

SEQ ID NO: 31787 - DNA, 15 bp, Homo sapiens
tgtgaagagaccacc

SEQ ID NO: 31788 - DNA, 15 bp, Homo sapiens
gtgtgaagagaccac

SEQ ID NO: 31789 - DNA, 15 bp, Homo sapiens
tgtgtgaagagacca

SEQ ID NO: 31790 - DNA, 15 bp, Homo sapiens
ctgtgtgaagagacc

SEQ ID NO: 31791 - DNA, 15 bp, Homo sapiens
tctgtgtgaagagac

SEQ ID NO: 31792 - DNA, 15 bp, Homo sapiens
gtctgtgtgaagaga

SEQ ID NO: 31793 - DNA, 15 bp, Homo sapiens
cgtctgtgtgaagag

SEQ ID NO: 31794 - DNA, 15 bp, Homo sapiens
gcgtctgtgtgaaga

SEQ ID NO: 31795 - DNA, 15 bp, Homo sapiens
tgcgtctgtgtgaag

SEQ ID NO: 31796 - DNA, 15 bp, Homo sapiens
gtgcgtctgtgtgaa

SEQ ID NO: 31797 - DNA, 15 bp, Homo sapiens
tgtgcgtctgtgtga

SEQ ID NO: 31798 - DNA, 15 bp, Homo sapiens
atgtgcgtctgtgtg

SEQ ID NO: 31799 - DNA, 15 bp, Homo sapiens
catgtgcgtctgtgt

SEQ ID NO: 31800 - DNA, 15 bp, Homo sapiens
tcatgtgcgtctgtg

SEQ ID NO: 31801 - DNA, 15 bp, Homo sapiens
ttcatgtgcgtctgt

SEQ ID NO: 31802 - DNA, 15 bp, Homo sapiens
tttcatgtgcgtctg

SEQ ID NO: 31803 - DNA, 15 bp, Homo sapiens
gtttcatgtgcgtct

SEQ ID NO: 31804 - DNA, 15 bp, Homo sapiens
agtttcatgtgcgtc

SEQ ID NO: 31805 - DNA, 15 bp, Homo sapiens
gagtttcatgtgcgt

SEQ ID NO: 31806 - DNA, 15 bp, Homo sapiens
tgagtttcatgtgcg

SEQ ID NO: 31807 - DNA, 15 bp, Homo sapiens
atgagtttcatgtgc

SEQ ID NO: 31808 - DNA, 15 bp, Homo sapiens
catgagtttcatgtg

SEQ ID NO: 31809 - DNA, 15 bp, Homo sapiens
ccatgagtttcatgt

SEQ ID NO: 31810 - DNA, 15 bp, Homo sapiens
accatgagtttcatg

SEQ ID NO: 31811 - DNA, 15 bp, Homo sapiens
taccatgagtttcat

SEQ ID NO: 31812 - DNA, 15 bp, Homo sapiens
ataccatgagtttca

SEQ ID NO: 31813 - DNA, 15 bp, Homo sapiens
gataccatgagtttc

SEQ ID NO: 31814 - DNA, 15 bp, Homo sapiens
agataccatgagttt

SEQ ID NO: 31815 - DNA, 15 bp, Homo sapiens
cagataccatgagtt

SEQ ID NO: 31816 - DNA, 15 bp, Homo sapiens
acagataccatgagt

SEQ ID NO: 31817 - DNA, 15 bp, Homo sapiens
cacagataccatgag

SEQ ID NO: 31818 - DNA, 15 bp, Homo sapiens
tcacagataccatga

SEQ ID NO: 31819 - DNA, 15 bp, Homo sapiens
ctcacagataccatg

SEQ ID NO: 31820 - DNA, 15 bp, Homo sapiens
cctcacagataccat

SEQ ID NO: 31821 - DNA, 15 bp, Homo sapiens
ccctcacagatacca

SEQ ID NO: 31822 - DNA, 15 bp, Homo sapiens
cccctcacagatacc

SEQ ID NO: 31823 - DNA, 15 bp, Homo sapiens
gcccctcacagatac

SEQ ID NO: 31824 - DNA, 15 bp, Homo sapiens
ggcccctcacagata

SEQ ID NO: 31825 - DNA, 15 bp, Homo sapiens
gggcccctcacagat

SEQ ID NO: 31826 - DNA, 15 bp, Homo sapiens
agggcccctcacaga

SEQ ID NO: 31827 - DNA, 15 bp, Homo sapiens
tagggcccctcacag

SEQ ID NO: 31828 - DNA, 15 bp, Homo sapiens
ttagggcccctcaca

SEQ ID NO: 31829 - DNA, 15 bp, Homo sapiens
attagggcccctcac

SEQ ID NO: 31830 - DNA, 15 bp, Homo sapiens
cattagggcccctca

SEQ ID NO: 31831 - DNA, 15 bp, Homo sapiens
gcattagggcccctc

SEQ ID NO: 31832 - DNA, 15 bp, Homo sapiens
agcattagggcccct

SEQ ID NO: 31833 - DNA, 15 bp, Homo sapiens
tagcattagggcccc

SEQ ID NO: 31834 - DNA, 15 bp, Homo sapiens
atagcattagggccc

SEQ ID NO: 31835 - DNA, 15 bp, Homo sapiens
aatagcattagggcc

SEQ ID NO: 31836 - DNA, 15 bp, Homo sapiens
caatagcattagggc

SEQ ID NO: 31837 - DNA, 15 bp, Homo sapiens
ccaatagcattaggg

SEQ ID NO: 31838 - DNA, 15 bp, Homo sapiens
accaatagcattagg

SEQ ID NO: 31839 - DNA, 15 bp, Homo sapiens
caccaatagcattag

SEQ ID NO: 31840 - DNA, 15 bp, Homo sapiens
tcaccaatagcatta

SEQ ID NO: 31841 - DNA, 15 bp, Homo sapiens
ctcaccaatagcatt

SEQ ID NO: 31842 - DNA, 15 bp, Homo sapiens
cctcaccaatagcat

SEQ ID NO: 31843 - DNA, 15 bp, Homo sapiens
ccctcaccaatagca

SEQ ID NO: 31844 - DNA, 15 bp, Homo sapiens
gccctcaccaatagc

SEQ ID NO: 31845 - DNA, 15 bp, Homo sapiens
tgccctcaccaatag

SEQ ID NO: 31846 - DNA, 15 bp, Homo sapiens
gtgccctcaccaata

SEQ ID NO: 31847 - DNA, 15 bp, Homo sapiens
agtgccctcaccaat

SEQ ID NO: 31848 - DNA, 15 bp, Homo sapiens
cagtgccctcaccaa

SEQ ID NO: 31849 - DNA, 15 bp, Homo sapiens
gcagtgccctcacca

SEQ ID NO: 31850 - DNA, 15 bp, Homo sapiens
agcagtgccctcacc

SEQ ID NO: 31851 - DNA, 15 bp, Homo sapiens
gagcagtgccctcac

SEQ ID NO: 31852 - DNA, 15 bp, Homo sapiens
tgagcagtgccctca

SEQ ID NO: 31853 - DNA, 15 bp, Homo sapiens
gtgagcagtgccctc

SEQ ID NO: 31854 - DNA, 15 bp, Homo sapiens
tgtgagcagtgccct

SEQ ID NO: 31855 - DNA, 15 bp, Homo sapiens
atgtgagcagtgccc

SEQ ID NO: 31856 - DNA, 15 bp, Homo sapiens
tatgtgagcagtgcc

SEQ ID NO: 31857 - DNA, 15 bp, Homo sapiens
ttatgtgagcagtgc

SEQ ID NO: 31858 - DNA, 15 bp, Homo sapiens
gttatgtgagcagtg

SEQ ID NO: 31859 - DNA, 15 bp, Homo sapiens
agttatgtgagcagt

SEQ ID NO: 31860 - DNA, 15 bp, Homo sapiens
aagttatgtgagcag

SEQ ID NO: 31861 - DNA, 15 bp, Homo sapiens
taagttatgtgagca

SEQ ID NO: 31862 - DNA, 15 bp, Homo sapiens
ttaagttatgtgagc

SEQ ID NO: 31863 - DNA, 15 bp, Homo sapiens
attaagttatgtgag

SEQ ID NO: 31864 - DNA, 15 bp, Homo sapiens
gattaagttatgtga

SEQ ID NO: 31865 - DNA, 15 bp, Homo sapiens
tgattaagttatgtg

SEQ ID NO: 31866 - DNA, 15 bp, Homo sapiens
gtgattaagttatgt

SEQ ID NO: 31867 - DNA, 15 bp, Homo sapiens
ggtgattaagttatg

SEQ ID NO: 31868 - DNA, 15 bp, Homo sapiens
gggtgattaagttat

SEQ ID NO: 31869 - DNA, 15 bp, Homo sapiens
ggggtgattaagtta

SEQ ID NO: 31870 - DNA, 15 bp, Homo sapiens
aggggtgattaagtt

SEQ ID NO: 31871 - DNA, 15 bp, Homo sapiens
aaggggtgattaagt

SEQ ID NO: 31872 - DNA, 15 bp, Homo sapiens
taaggggtgattaag

SEQ ID NO: 31873 - DNA, 15 bp, Homo sapiens
ttaaggggtgattaa

SEQ ID NO: 31874 - DNA, 15 bp, Homo sapiens
tttaaggggtgatta

SEQ ID NO: 31875 - DNA, 15 bp, Homo sapiens
ctttaaggggtgatt

SEQ ID NO: 31876 - DNA, 15 bp, Homo sapiens
cctttaaggggtgat

SEQ ID NO: 31877 - DNA, 15 bp, Homo sapiens
gcctttaaggggtga

SEQ ID NO: 31878 - DNA, 15 bp, Homo sapiens
ggcctttaaggggtg

SEQ ID NO: 31879 - DNA, 15 bp, Homo sapiens
gggcctttaaggggt

SEQ ID NO: 31880 - DNA, 15 bp, Homo sapiens
agggcctttaagggg

SEQ ID NO: 31881 - DNA, 15 bp, Homo sapiens
cagggcctttaaggg

SEQ ID NO: 31882 - DNA, 15 bp, Homo sapiens
gcagggcctttaagg

SEQ ID NO: 31883 - DNA, 15 bp, Homo sapiens
ggcagggcctttaag

SEQ ID NO: 31884 - DNA, 15 bp, Homo sapiens
aggcagggcctttaa

SEQ ID NO: 31885 - DNA, 15 bp, Homo sapiens
gaggcagggccttta

SEQ ID NO: 31886 - DNA, 15 bp, Homo sapiens
agaggcagggccttt

SEQ ID NO: 31887 - DNA, 15 bp, Homo sapiens
aagaggcagggcctt

SEQ ID NO: 31888 - DNA, 15 bp, Homo sapiens
taagaggcagggcct

SEQ ID NO: 31889 - DNA, 15 bp, Homo sapiens
ttaagaggcagggcc

SEQ ID NO: 31890 - DNA, 15 bp, Homo sapiens
attaagaggcagggc

SEQ ID NO: 31891 - DNA, 15 bp, Homo sapiens
tattaagaggcaggg

SEQ ID NO: 31892 - DNA, 15 bp, Homo sapiens
gtattaagaggcagg

SEQ ID NO: 31893 - DNA, 15 bp, Homo sapiens
agtattaagaggcag

SEQ ID NO: 31894 - DNA, 15 bp, Homo sapiens
cagtattaagaggca

SEQ ID NO: 31895 - DNA, 15 bp, Homo sapiens
acagtattaagaggc

SEQ ID NO: 31896 - DNA, 15 bp, Homo sapiens
gacagtattaagagg

SEQ ID NO: 31897 - DNA, 15 bp, Homo sapiens
tgacagtattaagag

SEQ ID NO: 31898 - DNA, 15 bp, Homo sapiens
gtgacagtattaaga

SEQ ID NO: 31899 - DNA, 15 bp, Homo sapiens
tgtgacagtattaag

SEQ ID NO: 31900 - DNA, 15 bp, Homo sapiens
atgtgacagtattaa

SEQ ID NO: 31901 - DNA, 15 bp, Homo sapiens
aatgtgacagtatta

SEQ ID NO: 31902 - DNA, 15 bp, Homo sapiens
caatgtgacagtatt

SEQ ID NO: 31903 - DNA, 15 bp, Homo sapiens
ccaatgtgacagtat

SEQ ID NO: 31904 - DNA, 15 bp, Homo sapiens
accaatgtgacagta

SEQ ID NO: 31905 - DNA, 15 bp, Homo sapiens
caccaatgtgacagt

SEQ ID NO: 31906 - DNA, 15 bp, Homo sapiens
tcaccaatgtgacag

SEQ ID NO: 31907 - DNA, 15 bp, Homo sapiens
atcaccaatgtgaca

SEQ ID NO: 31908 - DNA, 15 bp, Homo sapiens
catcaccaatgtgac

SEQ ID NO: 31909 - DNA, 15 bp, Homo sapiens
tcatcaccaatgtga

SEQ ID NO: 31910 - DNA, 15 bp, Homo sapiens
ttcatcaccaatgtg

SEQ ID NO: 31911 - DNA, 15 bp, Homo sapiens
cttcatcaccaatgt

SEQ ID NO: 31912 - DNA, 15 bp, Homo sapiens
acttcatcaccaatg

SEQ ID NO: 31913 - DNA, 15 bp, Homo sapiens
aacttcatcaccaat

SEQ ID NO: 31914 - DNA, 15 bp, Homo sapiens
aaacttcatcaccaa

SEQ ID NO: 31915 - DNA, 15 bp, Homo sapiens
gaaacttcatcacca

SEQ ID NO: 31916 - DNA, 15 bp, Homo sapiens
tgaaacttcatcacc

SEQ ID NO: 31917 - DNA, 15 bp, Homo sapiens
ttgaaacttcatcac

SEQ ID NO: 31918 - DNA, 15 bp, Homo sapiens
attgaaacttcatca

SEQ ID NO: 31919 - DNA, 15 bp, Homo sapiens
cattgaaacttcatc

SEQ ID NO: 31920 - DNA, 15 bp, Homo sapiens
acattgaaacttcat

SEQ ID NO: 31921 - DNA, 15 bp, Homo sapiens
tacattgaaacttca

SEQ ID NO: 31922 - DNA, 15 bp, Homo sapiens
atacattgaaacttc

SEQ ID NO: 31923 - DNA, 15 bp, Homo sapiens
catacattgaaactt

SEQ ID NO: 31924 - DNA, 15 bp, Homo sapiens
tcatacattgaaact

SEQ ID NO: 31925 - DNA, 15 bp, Homo sapiens
ttcatacattgaaac

SEQ ID NO: 31926 - DNA, 15 bp, Homo sapiens
gttcatacattgaaa

SEQ ID NO: 31927 - DNA, 15 bp, Homo sapiens
agttcatacattgaa

SEQ ID NO: 31928 - DNA, 15 bp, Homo sapiens
aagttcatacattga

SEQ ID NO: 31929 - DNA, 15 bp, Homo sapiens
aaagttcatacattg

SEQ ID NO: 31930 - DNA, 15 bp, Homo sapiens
caaagttcatacatt

SEQ ID NO: 31931 - DNA, 15 bp, Homo sapiens
tcaaagttcatacat

SEQ ID NO: 31932 - DNA, 15 bp, Homo sapiens
ctcaaagttcataca

SEQ ID NO: 31933 - DNA, 15 bp, Homo sapiens
cctcaaagttcatac

SEQ ID NO: 31934 - DNA, 15 bp, Homo sapiens
ccctcaaagttcata

SEQ ID NO: 31935 - DNA, 15 bp, Homo sapiens
cccctcaaagttcat

SEQ ID NO: 31936 - DNA, 15 bp, Homo sapiens
ccccctcaaagttca

SEQ ID NO: 31937 - DNA, 15 bp, Homo sapiens
cccccctcaaagttc

SEQ ID NO: 31938 - DNA, 15 bp, Homo sapiens
tcccccctcaaagtt

SEQ ID NO: 31939 - DNA, 15 bp, Homo sapiens
gtcccccctcaaagt

SEQ ID NO: 31940 - DNA, 15 bp, Homo sapiens
tgtcccccctcaaag

SEQ ID NO: 31941 - DNA, 15 bp, Homo sapiens
gtgtcccccctcaaa

SEQ ID NO: 31942 - DNA, 15 bp, Homo sapiens
cgtgtcccccctcaa

SEQ ID NO: 31943 - DNA, 15 bp, Homo sapiens
acgtgtcccccctca

SEQ ID NO: 31944 - DNA, 15 bp, Homo sapiens
aacgtgtcccccctc

SEQ ID NO: 31945 - DNA, 15 bp, Homo sapiens
gaacgtgtcccccct

SEQ ID NO: 31946 - DNA, 15 bp, Homo sapiens
tgaacgtgtcccccc

SEQ ID NO: 31947 - DNA, 15 bp, Homo sapiens
ttgaacgtgtccccc

SEQ ID NO: 31948 - DNA, 15 bp, Homo sapiens
tttgaacgtgtcccc

SEQ ID NO: 31949 - DNA, 15 bp, Homo sapiens
atttgaacgtgtccc

SEQ ID NO: 31950 - DNA, 15 bp, Homo sapiens
gatttgaacgtgtcc

SEQ ID NO: 31951 - DNA, 15 bp, Homo sapiens
tgatttgaacgtgtc

SEQ ID NO: 31952 - DNA, 15 bp, Homo sapiens
atgatttgaacgtgt

SEQ ID NO: 31953 - DNA, 15 bp, Homo sapiens
tatgatttgaacgtg

SEQ ID NO: 31954 - DNA, 15 bp, Homo sapiens
ctatgatttgaacgt

SEQ ID NO: 31955 - DNA, 15 bp, Homo sapiens
gctatgatttgaacg

SEQ ID NO: 31956 - DNA, 15 bp, Homo sapiens
tgctatgatttgaac

SEQ ID NO: 31957 - DNA, 15 bp, Homo sapiens
ctgctatgatttgaa

SEQ ID NO: 31958 - DNA, 15 bp, Homo sapiens
cctgctatgatttga

SEQ ID NO: 31959 - DNA, 15 bp, Homo sapiens
acctgctatgatttg

SEQ ID NO: 31960 - DNA, 15 bp, Homo sapiens
cacctgctatgattt

SEQ ID NO: 31961 - DNA, 15 bp, Homo sapiens
acacctgctatgatt

SEQ ID NO: 31962 - DNA, 15 bp, Homo sapiens
cacacctgctatgat

SEQ ID NO: 31963 - DNA, 15 bp, Homo sapiens
gcacacctgctatga

SEQ ID NO: 31964 - DNA, 15 bp, Homo sapiens
agcacacctgctatg

SEQ ID NO: 31965 - DNA, 15 bp, Homo sapiens
tagcacacctgctat

SEQ ID NO: 31966 - DNA, 15 bp, Homo sapiens
atagcacacctgcta

SEQ ID NO: 31967 - DNA, 15 bp, Homo sapiens
aatagcacacctgct

SEQ ID NO: 31968 - DNA, 15 bp, Homo sapiens
caatagcacacctgc

SEQ ID NO: 31969 - DNA, 15 bp, Homo sapiens
gcaatagcacacctg

SEQ ID NO: 31970 - DNA, 15 bp, Homo sapiens
ggcaatagcacacct

SEQ ID NO: 31971 - DNA, 15 bp, Homo sapiens
aggcaatagcacacc

SEQ ID NO: 31972 - DNA, 15 bp, Homo sapiens
aaggcaatagcacac

SEQ ID NO: 31973 - DNA, 15 bp, Homo sapiens
taaggcaatagcaca

SEQ ID NO: 31974 - DNA, 15 bp, Homo sapiens
gtaaggcaatagcac

SEQ ID NO: 31975 - DNA, 15 bp, Homo sapiens
agtaaggcaatagca

SEQ ID NO: 31976 - DNA, 15 bp, Homo sapiens
tagtaaggcaatagc

SEQ ID NO: 31977 - DNA, 15 bp, Homo sapiens
ctagtaaggcaatag

SEQ ID NO: 31978 - DNA, 15 bp, Homo sapiens
gctagtaaggcaata

SEQ ID NO: 31979 - DNA, 15 bp, Homo sapiens
tgctagtaaggcaat

SEQ ID NO: 31980 - DNA, 15 bp, Homo sapiens
ttgctagtaaggcaa

SEQ ID NO: 31981 - DNA, 15 bp, Homo sapiens
tttgctagtaaggca

SEQ ID NO: 31982 - DNA, 15 bp, Homo sapiens
ctttgctagtaaggc

SEQ ID NO: 31983 - DNA, 15 bp, Homo sapiens
actttgctagtaagg

SEQ ID NO: 31984 - DNA, 15 bp, Homo sapiens
tactttgctagtaag

SEQ ID NO: 31985 - DNA, 15 bp, Homo sapiens
ttactttgctagtaa

SEQ ID NO: 31986 - DNA, 15 bp, Homo sapiens
attactttgctagta

SEQ ID NO: 31987 - DNA, 15 bp, Homo sapiens
gattactttgctagt

SEQ ID NO: 31988 - DNA, 15 bp, Homo sapiens
agattactttgctag

SEQ ID NO: 31989 - DNA, 15 bp, Homo sapiens
cagattactttgcta

SEQ ID NO: 31990 - DNA, 15 bp, Homo sapiens
ccagattactttgct

SEQ ID NO: 31991 - DNA, 15 bp, Homo sapiens
cccagattactttgc

SEQ ID NO: 31992 - DNA, 15 bp, Homo sapiens
ccccagattactttg

SEQ ID NO: 31993 - DNA, 15 bp, Homo sapiens
cccccagattacttt

SEQ ID NO: 31994 - DNA, 15 bp, Homo sapiens
tcccccagattactt

SEQ ID NO: 31995 - DNA, 15 bp, Homo sapiens
ttcccccagattact

SEQ ID NO: 31996 - DNA, 15 bp, Homo sapiens
cttcccccagattac

SEQ ID NO: 31997 - DNA, 15 bp, Homo sapiens
tcttcccccagatta

SEQ ID NO: 31998 - DNA, 15 bp, Homo sapiens
atcttcccccagatt

SEQ ID NO: 31999 - DNA, 15 bp, Homo sapiens
catcttcccccagat

SEQ ID NO: 32000 - DNA, 15 bp, Homo sapiens
tcatcttcccccaga

SEQ ID NO: 32001 - DNA, 15 bp, Homo sapiens
ctcatcttcccccag

SEQ ID NO: 32002 - DNA, 15 bp, Homo sapiens
actcatcttccccca

SEQ ID NO: 32003 - DNA, 15 bp, Homo sapiens
tactcatcttccccc

SEQ ID NO: 32004 - DNA, 15 bp, Homo sapiens
ttactcatcttcccc

SEQ ID NO: 32005 - DNA, 15 bp, Homo sapiens
attactcatcttccc

SEQ ID NO: 32006 - DNA, 15 bp, Homo sapiens
cattactcatcttcc

SEQ ID NO: 32007 - DNA, 15 bp, Homo sapiens
acattactcatcttc

SEQ ID NO: 32008 - DNA, 15 bp, Homo sapiens
gacattactcatctt

SEQ ID NO: 32009 - DNA, 15 bp, Homo sapiens
agacattactcatct

SEQ ID NO: 32010 - DNA, 15 bp, Homo sapiens
gagacattactcatc

SEQ ID NO: 32011 - DNA, 15 bp, Homo sapiens
cgagacattactcat

SEQ ID NO: 32012 - DNA, 15 bp, Homo sapiens
acgagacattactca

SEQ ID NO: 32013 - DNA, 15 bp, Homo sapiens
aacgagacattactc

SEQ ID NO: 32014 - DNA, 15 bp, Homo sapiens
gaacgagacattact

SEQ ID NO: 32015 - DNA, 15 bp, Homo sapiens
ggaacgagacattac

SEQ ID NO: 32016 - DNA, 15 bp, Homo sapiens
tggaacgagacatta

SEQ ID NO: 32017 - DNA, 15 bp, Homo sapiens
gtggaacgagacatt

SEQ ID NO: 32018 - DNA, 15 bp, Homo sapiens
ggtggaacgagacat

SEQ ID NO: 32019 - DNA, 15 bp, Homo sapiens
gggtggaacgagaca

SEQ ID NO: 32020 - DNA, 15 bp, Homo sapiens
ggggtggaacgagac

SEQ ID NO: 32021 - DNA, 15 bp, Homo sapiens
aggggtggaacgaga

SEQ ID NO: 32022 - DNA, 15 bp, Homo sapiens
caggggtggaacgag

SEQ ID NO: 32023 - DNA, 15 bp, Homo sapiens
tcaggggtggaacga

SEQ ID NO: 32024 - DNA, 15 bp, Homo sapiens
atcaggggtggaacg

SEQ ID NO: 32025 - DNA, 15 bp, Homo sapiens
aatcaggggtggaac

SEQ ID NO: 32026 - DNA, 15 bp, Homo sapiens
gaatcaggggtggaa

SEQ ID NO: 32027 - DNA, 15 bp, Homo sapiens
ggaatcaggggtgga

SEQ ID NO: 32028 - DNA, 15 bp, Homo sapiens
tggaatcaggggtgg

SEQ ID NO: 32029 - DNA, 15 bp, Homo sapiens
ctggaatcaggggtg

SEQ ID NO: 32030 - DNA, 15 bp, Homo sapiens
actggaatcaggggt

SEQ ID NO: 32031 - DNA, 15 bp, Homo sapiens
cactggaatcagggg

SEQ ID NO: 32032 - DNA, 15 bp, Homo sapiens
gcactggaatcaggg

SEQ ID NO: 32033 - DNA, 15 bp, Homo sapiens
agcactggaatcagg

SEQ ID NO: 32034 - DNA, 15 bp, Homo sapiens
cagcactggaatcag

SEQ ID NO: 32035 - DNA, 15 bp, Homo sapiens
tcagcactggaatca

SEQ ID NO: 32036 - DNA, 15 bp, Homo sapiens
gtcagcactggaatc

SEQ ID NO: 32037 - DNA, 15 bp, Homo sapiens
agtcagcactggaat

SEQ ID NO: 32038 - DNA, 15 bp, Homo sapiens
cagtcagcactggaa

SEQ ID NO: 32039 - DNA, 15 bp, Homo sapiens
tcagtcagcactgga

SEQ ID NO: 32040 - DNA, 15 bp, Homo sapiens
atcagtcagcactgg

SEQ ID NO: 32041 - DNA, 15 bp, Homo sapiens
aatcagtcagcactg

SEQ ID NO: 32042 - DNA, 15 bp, Homo sapiens
gaatcagtcagcact

SEQ ID NO: 32043 - DNA, 15 bp, Homo sapiens
agaatcagtcagcac

SEQ ID NO: 32044 - DNA, 15 bp, Homo sapiens
cagaatcagtcagca

SEQ ID NO: 32045 - DNA, 15 bp, Homo sapiens
ccagaatcagtcagc

SEQ ID NO: 32046 - DNA, 15 bp, Homo sapiens
tccagaatcagtcag

SEQ ID NO: 32047 - DNA, 15 bp, Homo sapiens
ctccagaatcagtca

SEQ ID NO: 32048 - DNA, 15 bp, Homo sapiens
actccagaatcagtc

SEQ ID NO: 32049 - DNA, 15 bp, Homo sapiens
cactccagaatcagt

SEQ ID NO: 32050 - DNA, 15 bp, Homo sapiens
ccactccagaatcag

SEQ ID NO: 32051 - DNA, 15 bp, Homo sapiens
gccactccagaatca

SEQ ID NO: 32052 - DNA, 15 bp, Homo sapiens
tgccactccagaatc

SEQ ID NO: 32053 - DNA, 15 bp, Homo sapiens
ctgccactccagaat

SEQ ID NO: 32054 - DNA, 15 bp, Homo sapiens
tctgccactccagaa

SEQ ID NO: 32055 - DNA, 15 bp, Homo sapiens
ctctgccactccaga

SEQ ID NO: 32056 - DNA, 15 bp, Homo sapiens
tctctgccactccag

SEQ ID NO: 32057 - DNA, 15 bp, Homo sapiens
ctctctgccactcca

SEQ ID NO: 32058 - DNA, 15 bp, Homo sapiens
cctctctgccactcc

SEQ ID NO: 32059 - DNA, 15 bp, Homo sapiens
ccctctctgccactc

SEQ ID NO: 32060 - DNA, 15 bp, Homo sapiens
accctctctgccact

SEQ ID NO: 32061 - DNA, 15 bp, Homo sapiens
aaccctctctgccac

SEQ ID NO: 32062 - DNA, 15 bp, Homo sapiens
caaccctctctgcca

SEQ ID NO: 32063 - DNA, 15 bp, Homo sapiens
ccaaccctctctgcc

SEQ ID NO: 32064 - DNA, 15 bp, Homo sapiens
tccaaccctctctgc

SEQ ID NO: 32065 - DNA, 15 bp, Homo sapiens
ctccaaccctctctg

SEQ ID NO: 32066 - DNA, 15 bp, Homo sapiens
cctccaaccctctct

SEQ ID NO: 32067 - DNA, 15 bp, Homo sapiens
gcctccaaccctctc

SEQ ID NO: 32068 - DNA, 15 bp, Homo sapiens
agcctccaaccctct

SEQ ID NO: 32069 - DNA, 15 bp, Homo sapiens
gagcctccaaccctc

SEQ ID NO: 32070 - DNA, 15 bp, Homo sapiens
tgagcctccaaccct

SEQ ID NO: 32071 - DNA, 15 bp, Homo sapiens
gtgagcctccaaccc

SEQ ID NO: 32072 - DNA, 15 bp, Homo sapiens
ggtgagcctccaacc

SEQ ID NO: 32073 - DNA, 15 bp, Homo sapiens
cggtgagcctccaac

SEQ ID NO: 32074 - DNA, 15 bp, Homo sapiens
gcggtgagcctccaa

SEQ ID NO: 32075 - DNA, 15 bp, Homo sapiens
agcggtgagcctcca

SEQ ID NO: 32076 - DNA, 15 bp, Homo sapiens
gagcggtgagcctcc

SEQ ID NO: 32077 - DNA, 15 bp, Homo sapiens
agagcggtgagcctc

SEQ ID NO: 32078 - DNA, 15 bp, Homo sapiens
cagagcggtgagcct

SEQ ID NO: 32079 - DNA, 15 bp, Homo sapiens
gcagagcggtgagcc

SEQ ID NO: 32080 - DNA, 15 bp, Homo sapiens
agcagagcggtgagc

SEQ ID NO: 32081 - DNA, 15 bp, Homo sapiens
gagcagagcggtgag

SEQ ID NO: 32082 - DNA, 15 bp, Homo sapiens
tgagcagagcggtga

SEQ ID NO: 32083 - DNA, 15 bp, Homo sapiens
gtgagcagagcggtg

SEQ ID NO: 32084 - DNA, 15 bp, Homo sapiens
ggtgagcagagcggt

SEQ ID NO: 32085 - DNA, 15 bp, Homo sapiens
gggtgagcagagcgg

SEQ ID NO: 32086 - DNA, 15 bp, Homo sapiens
cgggtgagcagagcg

SEQ ID NO: 32087 - DNA, 15 bp, Homo sapiens
tcgggtgagcagagc

SEQ ID NO: 32088 - DNA, 15 bp, Homo sapiens
gtcgggtgagcagag

SEQ ID NO: 32089 - DNA, 15 bp, Homo sapiens
ggtcgggtgagcaga

SEQ ID NO: 32090 - DNA, 15 bp, Homo sapiens
gggtcgggtgagcag

SEQ ID NO: 32091 - DNA, 15 bp, Homo sapiens
agggtcgggtgagca

SEQ ID NO: 32092 - DNA, 15 bp, Homo sapiens
gagggtcgggtgagc

SEQ ID NO: 32093 - DNA, 15 bp, Homo sapiens
agagggtcgggtgag

SEQ ID NO: 32094 - DNA, 15 bp, Homo sapiens
cagagggtcgggtga

SEQ ID NO: 32095 - DNA, 15 bp, Homo sapiens
ccagagggtcgggtg

SEQ ID NO: 32096 - DNA, 15 bp, Homo sapiens
gccagagggtcgggt

SEQ ID NO: 32097 - DNA, 15 bp, Homo sapiens
ggccagagggtcggg

SEQ ID NO: 32098 - DNA, 15 bp, Homo sapiens
tggccagagggtcgg

SEQ ID NO: 32099 - DNA, 15 bp, Homo sapiens
atggccagagggtcg

SEQ ID NO: 32100 - DNA, 15 bp, Homo sapiens
gatggccagagggtc

SEQ ID NO: 32101 - DNA, 15 bp, Homo sapiens
agatggccagagggt

SEQ ID NO: 32102 - DNA, 15 bp, Homo sapiens
gagatggccagaggg

SEQ ID NO: 32103 - DNA, 15 bp, Homo sapiens
ggagatggccagagg

SEQ ID NO: 32104 - DNA, 15 bp, Homo sapiens
aggagatggccagag

SEQ ID NO: 32105 - DNA, 15 bp, Homo sapiens
gaggagatggccaga

SEQ ID NO: 32106 - DNA, 15 bp, Homo sapiens
agaggagatggccag

SEQ ID NO: 32107 - DNA, 15 bp, Homo sapiens
aagaggagatggcca

SEQ ID NO: 32108 - DNA, 15 bp, Homo sapiens
taagaggagatggcc

SEQ ID NO: 32109 - DNA, 15 bp, Homo sapiens
ctaagaggagatggc

SEQ ID NO: 32110 - DNA, 15 bp, Homo sapiens
tctaagaggagatgg

SEQ ID NO: 32111 - DNA, 15 bp, Homo sapiens
ttctaagaggagatg

SEQ ID NO: 32112 - DNA, 15 bp, Homo sapiens
attctaagaggagat

SEQ ID NO: 32113 - DNA, 15 bp, Homo sapiens
cattctaagaggaga

SEQ ID NO: 32114 - DNA, 15 bp, Homo sapiens
gcattctaagaggag

SEQ ID NO: 32115 - DNA, 15 bp, Homo sapiens
tgcattctaagagga

SEQ ID NO: 32116 - DNA, 15 bp, Homo sapiens
ttgcattctaagagg

SEQ ID NO: 32117 - DNA, 15 bp, Homo sapiens
cttgcattctaagag

SEQ ID NO: 32118 - DNA, 15 bp, Homo sapiens
ccttgcattctaaga

SEQ ID NO: 32119 - DNA, 15 bp, Homo sapiens
cccttgcattctaag

SEQ ID NO: 32120 - DNA, 15 bp, Homo sapiens
gcccttgcattctaa

SEQ ID NO: 32121 - DNA, 15 bp, Homo sapiens
tgcccttgcattcta

SEQ ID NO: 32122 - DNA, 15 bp, Homo sapiens
ctgcccttgcattct

SEQ ID NO: 32123 - DNA, 15 bp, Homo sapiens
cctgcccttgcattc

SEQ ID NO: 32124 - DNA, 15 bp, Homo sapiens
ccctgcccttgcatt

SEQ ID NO: 32125 - DNA, 15 bp, Homo sapiens
tccctgcccttgcat

SEQ ID NO: 32126 - DNA, 15 bp, Homo sapiens
atccctgcccttgca

SEQ ID NO: 32127 - DNA, 15 bp, Homo sapiens
aatccctgcccttgc

SEQ ID NO: 32128 - DNA, 15 bp, Homo sapiens
aaatccctgcccttg

SEQ ID NO: 32129 - DNA, 15 bp, Homo sapiens
aaaatccctgccctt

SEQ ID NO: 32130 - DNA, 15 bp, Homo sapiens
caaaatccctgccct

SEQ ID NO: 32131 - DNA, 15 bp, Homo sapiens
acaaaatccctgccc

SEQ ID NO: 32132 - DNA, 15 bp, Homo sapiens
aacaaaatccctgcc

SEQ ID NO: 32133 - DNA, 15 bp, Homo sapiens
taacaaaatccctgc

SEQ ID NO: 32134 - DNA, 15 bp, Homo sapiens
gtaacaaaatccctg

SEQ ID NO: 32135 - DNA, 15 bp, Homo sapiens
tgtaacaaaatccct

SEQ ID NO: 32136 - DNA, 15 bp, Homo sapiens
gtgtaacaaaatccc

SEQ ID NO: 32137 - DNA, 15 bp, Homo sapiens
tgtgtaacaaaatcc

SEQ ID NO: 32138 - DNA, 15 bp, Homo sapiens
ctgtgtaacaaaatc

SEQ ID NO: 32139 - DNA, 15 bp, Homo sapiens
gctgtgtaacaaaat

SEQ ID NO: 32140 - DNA, 15 bp, Homo sapiens
cgctgtgtaacaaaa

SEQ ID NO: 32141 - DNA, 15 bp, Homo sapiens
gcgctgtgtaacaaa

SEQ ID NO: 32142 - DNA, 15 bp, Homo sapiens
ggcgctgtgtaacaa

SEQ ID NO: 32143 - DNA, 15 bp, Homo sapiens
aggcgctgtgtaaca

SEQ ID NO: 32144 - DNA, 15 bp, Homo sapiens
gaggcgctgtgtaac

SEQ ID NO: 32145 - DNA, 15 bp, Homo sapiens
agaggcgctgtgtaa

SEQ ID NO: 32146 - DNA, 15 bp, Homo sapiens
aagaggcgctgtgta

SEQ ID NO: 32147 - DNA, 15 bp, Homo sapiens
aaagaggcgctgtgt

SEQ ID NO: 32148 - DNA, 15 bp, Homo sapiens
aaaagaggcgctgtg

SEQ ID NO: 32149 - DNA, 15 bp, Homo sapiens
caaaagaggcgctgt

SEQ ID NO: 32150 - DNA, 15 bp, Homo sapiens
acaaaagaggcgctg

SEQ ID NO: 32151 - DNA, 15 bp, Homo sapiens
aacaaaagaggcgct

SEQ ID NO: 32152 - DNA, 15 bp, Homo sapiens
taacaaaagaggcgc

SEQ ID NO: 32153 - DNA, 15 bp, Homo sapiens
ataacaaaagaggcg

SEQ ID NO: 32154 - DNA, 15 bp, Homo sapiens
tataacaaaagaggc

SEQ ID NO: 32155 - DNA, 15 bp, Homo sapiens
ctataacaaaagagg

SEQ ID NO: 32156 - DNA, 15 bp, Homo sapiens
cctataacaaaagag

SEQ ID NO: 32157 - DNA, 15 bp, Homo sapiens
gcctataacaaaaga

SEQ ID NO: 32158 - DNA, 15 bp, Homo sapiens
agcctataacaaaag

SEQ ID NO: 32159 - DNA, 15 bp, Homo sapiens
tagcctataacaaaa

SEQ ID NO: 32160 - DNA, 15 bp, Homo sapiens
ctagcctataacaaa

SEQ ID NO: 32161 - DNA, 15 bp, Homo sapiens
gctagcctataacaa

SEQ ID NO: 32162 - DNA, 15 bp, Homo sapiens
agctagcctataaca

SEQ ID NO: 32163 - DNA, 15 bp, Homo sapiens
gagctagcctataac

SEQ ID NO: 32164 - DNA, 15 bp, Homo sapiens
ggagctagcctataa

SEQ ID NO: 32165 - DNA, 15 bp, Homo sapiens
aggagctagcctata

SEQ ID NO: 32166 - DNA, 15 bp, Homo sapiens
caggagctagcctat

SEQ ID NO: 32167 - DNA, 15 bp, Homo sapiens
gcaggagctagccta

SEQ ID NO: 32168 - DNA, 15 bp, Homo sapiens
ggcaggagctagcct

SEQ ID NO: 32169 - DNA, 15 bp, Homo sapiens
aggcaggagctagcc

SEQ ID NO: 32170 - DNA, 15 bp, Homo sapiens
aaggcaggagctagc

SEQ ID NO: 32171 - DNA, 15 bp, Homo sapiens
gaaggcaggagctag

SEQ ID NO: 32172 - DNA, 15 bp, Homo sapiens
tgaaggcaggagcta

SEQ ID NO: 32173 - DNA, 15 bp, Homo sapiens
ttgaaggcaggagct

SEQ ID NO: 32174 - DNA, 15 bp, Homo sapiens
cttgaaggcaggagc

SEQ ID NO: 32175 - DNA, 15 bp, Homo sapiens
ccttgaaggcaggag

SEQ ID NO: 32176 - DNA, 15 bp, Homo sapiens
tccttgaaggcagga

SEQ ID NO: 32177 - DNA, 15 bp, Homo sapiens
ctccttgaaggcagg

SEQ ID NO: 32178 - DNA, 15 bp, Homo sapiens
gctccttgaaggcag

SEQ ID NO: 32179 - DNA, 15 bp, Homo sapiens
tgctccttgaaggca

SEQ ID NO: 32180 - DNA, 15 bp, Homo sapiens
gtgctccttgaaggc

SEQ ID NO: 32181 - DNA, 15 bp, Homo sapiens
agtgctccttgaagg

SEQ ID NO: 32182 - DNA, 15 bp, Homo sapiens
cagtgctccttgaag

SEQ ID NO: 32183 - DNA, 15 bp, Homo sapiens
tcagtgctccttgaa

SEQ ID NO: 32184 - DNA, 15 bp, Homo sapiens
ctcagtgctccttga

SEQ ID NO: 32185 - DNA, 15 bp, Homo sapiens
tctcagtgctccttg

SEQ ID NO: 32186 - DNA, 15 bp, Homo sapiens
ttctcagtgctcctt

SEQ ID NO: 32187 - DNA, 15 bp, Homo sapiens
tttctcagtgctcct

SEQ ID NO: 32188 - DNA, 15 bp, Homo sapiens
ttttctcagtgctcc

SEQ ID NO: 32189 - DNA, 15 bp, Homo sapiens
tttttctcagtgctc

SEQ ID NO: 32190 - DNA, 15 bp, Homo sapiens
atttttctcagtgct

SEQ ID NO: 32191 - DNA, 15 bp, Homo sapiens
tatttttctcagtgc

SEQ ID NO: 32192 - DNA, 15 bp, Homo sapiens
atatttttctcagtg

SEQ ID NO: 32193 - DNA, 15 bp, Homo sapiens
aatatttttctcagt

SEQ ID NO: 32194 - DNA, 15 bp, Homo sapiens
taatatttttctcag

SEQ ID NO: 32195 - DNA, 15 bp, Homo sapiens
ataatatttttctca

SEQ ID NO: 32196 - DNA, 15 bp, Homo sapiens
gataatatttttctc

SEQ ID NO: 32197 - DNA, 15 bp, Homo sapiens
ggataatatttttct

SEQ ID NO: 32198 - DNA, 15 bp, Homo sapiens
gggataatatttttc

SEQ ID NO: 32199 - DNA, 15 bp, Homo sapiens
agggataatattttt

SEQ ID NO: 32200 - DNA, 15 bp, Homo sapiens
aagggataatatttt

SEQ ID NO: 32201 - DNA, 15 bp, Homo sapiens
aaagggataatattt

SEQ ID NO: 32202 - DNA, 15 bp, Homo sapiens
caaagggataatatt

SEQ ID NO: 32203 - DNA, 15 bp, Homo sapiens
tcaaagggataatat

SEQ ID NO: 32204 - DNA, 15 bp, Homo sapiens
ttcaaagggataata

SEQ ID NO: 32205 - DNA, 15 bp, Homo sapiens
gttcaaagggataat

SEQ ID NO: 32206 - DNA, 15 bp, Homo sapiens
ggttcaaagggataa

SEQ ID NO: 32207 - DNA, 15 bp, Homo sapiens
tggttcaaagggata

SEQ ID NO: 32208 - DNA, 15 bp, Homo sapiens
gtggttcaaagggat

SEQ ID NO: 32209 - DNA, 15 bp, Homo sapiens
tgtggttcaaaggga

SEQ ID NO: 32210 - DNA, 15 bp, Homo sapiens
ttgtggttcaaaggg

SEQ ID NO: 32211 - DNA, 15 bp, Homo sapiens
gttgtggttcaaagg

SEQ ID NO: 32212 - DNA, 15 bp, Homo sapiens
tgttgtggttcaaag

SEQ ID NO: 32213 - DNA, 15 bp, Homo sapiens
gtgttgtggttcaaa

SEQ ID NO: 32214 - DNA, 15 bp, Homo sapiens
agtgttgtggttcaa

SEQ ID NO: 32215 - DNA, 15 bp, Homo sapiens
tagtgttgtggttca

SEQ ID NO: 32216 - DNA, 15 bp, Homo sapiens
ctagtgttgtggttc

SEQ ID NO: 32217 - DNA, 15 bp, Homo sapiens
actagtgttgtggtt

SEQ ID NO: 32218 - DNA, 15 bp, Homo sapiens
tactagtgttgtggt

SEQ ID NO: 32219 - DNA, 15 bp, Homo sapiens
atactagtgttgtgg

SEQ ID NO: 32220 - DNA, 15 bp, Homo sapiens
aatactagtgttgtg

SEQ ID NO: 32221 - DNA, 15 bp, Homo sapiens
aaatactagtgttgt

SEQ ID NO: 32222 - DNA, 15 bp, Homo sapiens
aaaatactagtgttg

SEQ ID NO: 32223 - DNA, 15 bp, Homo sapiens
caaaatactagtgtt

SEQ ID NO: 32224 - DNA, 15 bp, Homo sapiens
ccaaaatactagtgt

SEQ ID NO: 32225 - DNA, 15 bp, Homo sapiens
cccaaaatactagtg

SEQ ID NO: 32226 - DNA, 15 bp, Homo sapiens
acccaaaatactagt

SEQ ID NO: 32227 - DNA, 15 bp, Homo sapiens
tacccaaaatactag

SEQ ID NO: 32228 - DNA, 15 bp, Homo sapiens
gtacccaaaatacta

SEQ ID NO: 32229 - DNA, 15 bp, Homo sapiens
agtacccaaaatact

SEQ ID NO: 32230 - DNA, 15 bp, Homo sapiens
cagtacccaaaatac

SEQ ID NO: 32231 - DNA, 15 bp, Homo sapiens
acagtacccaaaata

SEQ ID NO: 32232 - DNA, 15 bp, Homo sapiens
tacagtacccaaaat

SEQ ID NO: 32233 - DNA, 15 bp, Homo sapiens
ctacagtacccaaaa

SEQ ID NO: 32234 - DNA, 15 bp, Homo sapiens
gctacagtacccaaa

SEQ ID NO: 32235 - DNA, 15 bp, Homo sapiens
ggctacagtacccaa

SEQ ID NO: 32236 - DNA, 15 bp, Homo sapiens
tggctacagtaccca

SEQ ID NO: 32237 - DNA, 15 bp, Homo sapiens
atggctacagtaccc

SEQ ID NO: 32238 - DNA, 15 bp, Homo sapiens
aatggctacagtacc

SEQ ID NO: 32239 - DNA, 15 bp, Homo sapiens
gaatggctacagtac

SEQ ID NO: 32240 - DNA, 15 bp, Homo sapiens
tgaatggctacagta

SEQ ID NO: 32241 - DNA, 15 bp, Homo sapiens
ctgaatggctacagt

SEQ ID NO: 32242 - DNA, 15 bp, Homo sapiens
tctgaatggctacag

SEQ ID NO: 32243 - DNA, 15 bp, Homo sapiens
ttctgaatggctaca

SEQ ID NO: 32244 - DNA, 15 bp, Homo sapiens
cttctgaatggctac

SEQ ID NO: 32245 - DNA, 15 bp, Homo sapiens
acttctgaatggcta

SEQ ID NO: 32246 - DNA, 15 bp, Homo sapiens
aacttctgaatggct

SEQ ID NO: 32247 - DNA, 15 bp, Homo sapiens
aaacttctgaatggc

SEQ ID NO: 32248 - DNA, 15 bp, Homo sapiens
caaacttctgaatgg

SEQ ID NO: 32249 - DNA, 15 bp, Homo sapiens
acaaacttctgaatg

SEQ ID NO: 32250 - DNA, 15 bp, Homo sapiens
aacaaacttctgaat

SEQ ID NO: 32251 - DNA, 15 bp, Homo sapiens
caacaaacttctgaa

SEQ ID NO: 32252 - DNA, 15 bp, Homo sapiens
tcaacaaacttctga

SEQ ID NO: 32253 - DNA, 15 bp, Homo sapiens
ttcaacaaacttctg

SEQ ID NO: 32254 - DNA, 15 bp, Homo sapiens
gttcaacaaacttct

SEQ ID NO: 32255 - DNA, 15 bp, Homo sapiens
agttcaacaaacttc

SEQ ID NO: 32256 - DNA, 15 bp, Homo sapiens
tagttcaacaaactt

SEQ ID NO: 32257 - DNA, 15 bp, Homo sapiens
ttagttcaacaaact

SEQ ID NO: 32258 - DNA, 15 bp, Homo sapiens
attagttcaacaaac

SEQ ID NO: 32259 - DNA, 15 bp, Homo sapiens
tattagttcaacaaa

SEQ ID NO: 32260 - DNA, 15 bp, Homo sapiens
gtattagttcaacaa

SEQ ID NO: 32261 - DNA, 15 bp, Homo sapiens
tgtattagttcaaca

SEQ ID NO: 32262 - DNA, 15 bp, Homo sapiens
ttgtattagttcaac

SEQ ID NO: 32263 - DNA, 15 bp, Homo sapiens
cttgtattagttcaa

SEQ ID NO: 32264 - DNA, 15 bp, Homo sapiens
acttgtattagttca

SEQ ID NO: 32265 - DNA, 15 bp, Homo sapiens
aacttgtattagttc

SEQ ID NO: 32266 - DNA, 15 bp, Homo sapiens
aaacttgtattagtt

SEQ ID NO: 32267 - DNA, 15 bp, Homo sapiens
taaacttgtattagt

SEQ ID NO: 32268 - DNA, 15 bp, Homo sapiens
ataaacttgtattag

SEQ ID NO: 32269 - DNA, 15 bp, Homo sapiens
tataaacttgtatta

SEQ ID NO: 32270 - DNA, 15 bp, Homo sapiens
atataaacttgtatt

SEQ ID NO: 32271 - DNA, 15 bp, Homo sapiens
aatataaacttgtat

SEQ ID NO: 32272 - DNA, 15 bp, Homo sapiens
taatataaacttgta

SEQ ID NO: 32273 - DNA, 15 bp, Homo sapiens
ataatataaacttgt

SEQ ID NO: 32274 - DNA, 15 bp, Homo sapiens
aataatataaacttg

SEQ ID NO: 32275 - DNA, 15 bp, Homo sapiens
aaataatataaactt

SEQ ID NO: 32276 - DNA, 15 bp, Homo sapiens
caaataatataaact

SEQ ID NO: 32277 - DNA, 15 bp, Homo sapiens
acaaataatataaac

SEQ ID NO: 32278 - DNA, 15 bp, Homo sapiens
tacaaataatataaa

SEQ ID NO: 32279 - DNA, 15 bp, Homo sapiens
ttacaaataatataa

SEQ ID NO: 32280 - DNA, 15 bp, Homo sapiens
tttacaaataatata

SEQ ID NO: 32281 - DNA, 15 bp, Homo sapiens
ttttacaaataatat

SEQ ID NO: 32282 - DNA, 15 bp, Homo sapiens
attttacaaataata

SEQ ID NO: 32283 - DNA, 15 bp, Homo sapiens
tattttacaaataat

SEQ ID NO: 32284 - DNA, 15 bp, Homo sapiens
gtattttacaaataa

SEQ ID NO: 32285 - DNA, 15 bp, Homo sapiens
agtattttacaaata

SEQ ID NO: 32286 - DNA, 15 bp, Homo sapiens
tagtattttacaaat

SEQ ID NO: 32287 - DNA, 15 bp, Homo sapiens
ctagtattttacaaa

SEQ ID NO: 32288 - DNA, 15 bp, Homo sapiens
tctagtattttacaa

SEQ ID NO: 32289 - DNA, 15 bp, Homo sapiens
ttctagtattttaca

SEQ ID NO: 32290 - DNA, 15 bp, Homo sapiens
cttctagtattttac

SEQ ID NO: 32291 - DNA, 15 bp, Homo sapiens
ccttctagtatttta

SEQ ID NO: 32292 - DNA, 15 bp, Homo sapiens
tccttctagtatttt

SEQ ID NO: 32293 - DNA, 15 bp, Homo sapiens
ttccttctagtattt

SEQ ID NO: 32294 - DNA, 15 bp, Homo sapiens
attccttctagtatt

SEQ ID NO: 32295 - DNA, 15 bp, Homo sapiens
cattccttctagtat

SEQ ID NO: 32296 - DNA, 15 bp, Homo sapiens
acattccttctagta

SEQ ID NO: 32297 - DNA, 15 bp, Homo sapiens
cacattccttctagt

SEQ ID NO: 32298 - DNA, 15 bp, Homo sapiens
acacattccttctag

SEQ ID NO: 32299 - DNA, 15 bp, Homo sapiens
cacacattccttcta

SEQ ID NO: 32300 - DNA, 15 bp, Homo sapiens
ccacacattccttct

SEQ ID NO: 32301 - DNA, 15 bp, Homo sapiens
accacacattccttc

SEQ ID NO: 32302 - DNA, 15 bp, Homo sapiens
aaccacacattcctt

SEQ ID NO: 32303 - DNA, 15 bp, Homo sapiens
gaaccacacattcct

SEQ ID NO: 32304 - DNA, 15 bp, Homo sapiens
ggaaccacacattcc

SEQ ID NO: 32305 - DNA, 15 bp, Homo sapiens
aggaaccacacattc

SEQ ID NO: 32306 - DNA, 15 bp, Homo sapiens
taggaaccacacatt

SEQ ID NO: 32307 - DNA, 15 bp, Homo sapiens
ttaggaaccacacat

SEQ ID NO: 32308 - DNA, 15 bp, Homo sapiens
tttaggaaccacaca

SEQ ID NO: 32309 - DNA, 15 bp, Homo sapiens
ctttaggaaccacac

SEQ ID NO: 32310 - DNA, 15 bp, Homo sapiens
actttaggaaccaca

SEQ ID NO: 32311 - DNA, 15 bp, Homo sapiens
aactttaggaaccac

SEQ ID NO: 32312 - DNA, 15 bp, Homo sapiens
taactttaggaacca

SEQ ID NO: 32313 - DNA, 15 bp, Homo sapiens
ataactttaggaacc

SEQ ID NO: 32314 - DNA, 15 bp, Homo sapiens
cataactttaggaac

SEQ ID NO: 32315 - DNA, 15 bp, Homo sapiens
ccataactttaggaa

SEQ ID NO: 32316 - DNA, 15 bp, Homo sapiens
accataactttagga

SEQ ID NO: 32317 - DNA, 15 bp, Homo sapiens
taccataactttagg

SEQ ID NO: 32318 - DNA, 15 bp, Homo sapiens
ataccataactttag

SEQ ID NO: 32319 - DNA, 15 bp, Homo sapiens
aataccataacttta

SEQ ID NO: 32320 - DNA, 15 bp, Homo sapiens
gaataccataacttt

SEQ ID NO: 32321 - DNA, 15 bp, Homo sapiens
ggaataccataactt

SEQ ID NO: 32322 - DNA, 15 bp, Homo sapiens
gggaataccataact

SEQ ID NO: 32323 - DNA, 15 bp, Homo sapiens
tgggaataccataac

SEQ ID NO: 32324 - DNA, 15 bp, Homo sapiens
atgggaataccataa

SEQ ID NO: 32325 - DNA, 15 bp, Homo sapiens
aatgggaataccata

SEQ ID NO: 32326 - DNA, 15 bp, Homo sapiens
caatgggaataccat

SEQ ID NO: 32327 - DNA, 15 bp, Homo sapiens
ccaatgggaatacca

SEQ ID NO: 32328 - DNA, 15 bp, Homo sapiens
accaatgggaatacc

SEQ ID NO: 32329 - DNA, 15 bp, Homo sapiens
aaccaatgggaatac

SEQ ID NO: 32330 - DNA, 15 bp, Homo sapiens
caaccaatgggaata

SEQ ID NO: 32331 - DNA, 15 bp, Homo sapiens
tcaaccaatgggaat

SEQ ID NO: 32332 - DNA, 15 bp, Homo sapiens
ttcaaccaatgggaa

SEQ ID NO: 32333 - DNA, 15 bp, Homo sapiens
tttcaaccaatggga

SEQ ID NO: 32334 - DNA, 15 bp, Homo sapiens
ctttcaaccaatggg

SEQ ID NO: 32335 - DNA, 15 bp, Homo sapiens
tctttcaaccaatgg

SEQ ID NO: 32336 - DNA, 15 bp, Homo sapiens
ctctttcaaccaatg

SEQ ID NO: 32337 - DNA, 15 bp, Homo sapiens
tctctttcaaccaat

SEQ ID NO: 32338 - DNA, 15 bp, Homo sapiens
ttctctttcaaccaa

SEQ ID NO: 32339 - DNA, 15 bp, Homo sapiens
cttctctttcaacca

SEQ ID NO: 32340 - DNA, 15 bp, Homo sapiens
tcttctctttcaacc

SEQ ID NO: 32341 - DNA, 15 bp, Homo sapiens
gtcttctctttcaac

SEQ ID NO: 32342 - DNA, 15 bp, Homo sapiens
agtcttctctttcaa

SEQ ID NO: 32343 - DNA, 15 bp, Homo sapiens
gagtcttctctttca

SEQ ID NO: 32344 - DNA, 15 bp, Homo sapiens
agagtcttctctttc

SEQ ID NO: 32345 - DNA, 15 bp, Homo sapiens
cagagtcttctcttt

SEQ ID NO: 32346 - DNA, 15 bp, Homo sapiens
ccagagtcttctctt

SEQ ID NO: 32347 - DNA, 15 bp, Homo sapiens
gccagagtcttctct

SEQ ID NO: 32348 - DNA, 15 bp, Homo sapiens
agccagagtcttctc

SEQ ID NO: 32349 - DNA, 15 bp, Homo sapiens
aagccagagtcttct

SEQ ID NO: 32350 - DNA, 15 bp, Homo sapiens
gaagccagagtcttc

SEQ ID NO: 32351 - DNA, 15 bp, Homo sapiens
ggaagccagagtctt

SEQ ID NO: 32352 - DNA, 15 bp, Homo sapiens
aggaagccagagtct

SEQ ID NO: 32353 - DNA, 15 bp, Homo sapiens
taggaagccagagtc

SEQ ID NO: 32354 - DNA, 15 bp, Homo sapiens
ttaggaagccagagt

SEQ ID NO: 32355 - DNA, 15 bp, Homo sapiens
attaggaagccagag

SEQ ID NO: 32356 - DNA, 15 bp, Homo sapiens
cattaggaagccaga

SEQ ID NO: 32357 - DNA, 15 bp, Homo sapiens
gcattaggaagccag

SEQ ID NO: 32358 - DNA, 15 bp, Homo sapiens
ggcattaggaagcca

SEQ ID NO: 32359 - DNA, 15 bp, Homo sapiens
aggcattaggaagcc

SEQ ID NO: 32360 - DNA, 15 bp, Homo sapiens
aaggcattaggaagc

SEQ ID NO: 32361 - DNA, 15 bp, Homo sapiens
caaggcattaggaag

SEQ ID NO: 32362 - DNA, 15 bp, Homo sapiens
ccaaggcattaggaa

SEQ ID NO: 32363 - DNA, 15 bp, Homo sapiens
tccaaggcattagga

SEQ ID NO: 32364 - DNA, 15 bp, Homo sapiens
ttccaaggcattagg

SEQ ID NO: 32365 - DNA, 15 bp, Homo sapiens
cttccaaggcattag

SEQ ID NO: 32366 - DNA, 15 bp, Homo sapiens
ccttccaaggcatta

SEQ ID NO: 32367 - DNA, 15 bp, Homo sapiens
accttccaaggcatt

SEQ ID NO: 32368 - DNA, 15 bp, Homo sapiens
aaccttccaaggcat

SEQ ID NO: 32369 - DNA, 15 bp, Homo sapiens
gaaccttccaaggca

SEQ ID NO: 32370 - DNA, 15 bp, Homo sapiens
tgaaccttccaaggc

SEQ ID NO: 32371 - DNA, 15 bp, Homo sapiens
ctgaaccttccaagg

SEQ ID NO: 32372 - DNA, 15 bp, Homo sapiens
cctgaaccttccaag

SEQ ID NO: 32373 - DNA, 15 bp, Homo sapiens
ccctgaaccttccaa

SEQ ID NO: 32374 - DNA, 15 bp, Homo sapiens
tccctgaaccttcca

SEQ ID NO: 32375 - DNA, 15 bp, Homo sapiens
ctccctgaaccttcc

SEQ ID NO: 32376 - DNA, 15 bp, Homo sapiens
gctccctgaaccttc

SEQ ID NO: 32377 - DNA, 15 bp, Homo sapiens
tgctccctgaacctt

SEQ ID NO: 32378 - DNA, 15 bp, Homo sapiens
atgctccctgaacct

SEQ ID NO: 32379 - DNA, 15 bp, Homo sapiens
tatgctccctgaacc

SEQ ID NO: 32380 - DNA, 15 bp, Homo sapiens
ttatgctccctgaac

SEQ ID NO: 32381 - DNA, 15 bp, Homo sapiens
cttatgctccctgaa

SEQ ID NO: 32382 - DNA, 15 bp, Homo sapiens
gcttatgctccctga

SEQ ID NO: 32383 - DNA, 15 bp, Homo sapiens
ggcttatgctccctg

SEQ ID NO: 32384 - DNA, 15 bp, Homo sapiens
aggcttatgctccct

SEQ ID NO: 32385 - DNA, 15 bp, Homo sapiens
taggcttatgctccc

SEQ ID NO: 32386 - DNA, 15 bp, Homo sapiens
ttaggcttatgctcc

SEQ ID NO: 32387 - DNA, 15 bp, Homo sapiens
tttaggcttatgctc

SEQ ID NO: 32388 - DNA, 15 bp, Homo sapiens
atttaggcttatgct

SEQ ID NO: 32389 - DNA, 15 bp, Homo sapiens
tatttaggcttatgc

SEQ ID NO: 32390 - DNA, 15 bp, Homo sapiens
atatttaggcttatg

SEQ ID NO: 32391 - DNA, 15 bp, Homo sapiens
gatatttaggcttat

SEQ ID NO: 32392 - DNA, 15 bp, Homo sapiens
ggatatttaggctta

SEQ ID NO: 32393 - DNA, 15 bp, Homo sapiens
aggatatttaggctt

SEQ ID NO: 32394 - DNA, 15 bp, Homo sapiens
caggatatttaggct

SEQ ID NO: 32395 - DNA, 15 bp, Homo sapiens
ccaggatatttaggc

SEQ ID NO: 32396 - DNA, 15 bp, Homo sapiens
accaggatatttagg

SEQ ID NO: 32397 - DNA, 15 bp, Homo sapiens
aaccaggatatttag

SEQ ID NO: 32398 - DNA, 15 bp, Homo sapiens
aaaccaggatattta

SEQ ID NO: 32399 - DNA, 15 bp, Homo sapiens
gaaaccaggatattt

SEQ ID NO: 32400 - DNA, 15 bp, Homo sapiens
agaaaccaggatatt

SEQ ID NO: 32401 - DNA, 15 bp, Homo sapiens
gagaaaccaggatat

SEQ ID NO: 32402 - DNA, 15 bp, Homo sapiens
agagaaaccaggata

SEQ ID NO: 32403 - DNA, 15 bp, Homo sapiens
aagagaaaccaggat

SEQ ID NO: 32404 - DNA, 15 bp, Homo sapiens
caagagaaaccagga

SEQ ID NO: 32405 - DNA, 15 bp, Homo sapiens
ccaagagaaaccagg

SEQ ID NO: 32406 - DNA, 15 bp, Homo sapiens
cccaagagaaaccag

SEQ ID NO: 32407 - DNA, 15 bp, Homo sapiens
tcccaagagaaacca

SEQ ID NO: 32408 - DNA, 15 bp, Homo sapiens
ttcccaagagaaacc

SEQ ID NO: 32409 - DNA, 15 bp, Homo sapiens
attcccaagagaaac

SEQ ID NO: 32410 - DNA, 15 bp, Homo sapiens
aattcccaagagaaa

SEQ ID NO: 32411 - DNA, 15 bp, Homo sapiens
gaattcccaagagaa

SEQ ID NO: 32412 - DNA, 15 bp, Homo sapiens
agaattcccaagaga

SEQ ID NO: 32413 - DNA, 15 bp, Homo sapiens
aagaattcccaagag

SEQ ID NO: 32414 - DNA, 15 bp, Homo sapiens
gaagaattcccaaga

SEQ ID NO: 32415 - DNA, 15 bp, Homo sapiens
tgaagaattcccaag

SEQ ID NO: 32416 - DNA, 15 bp, Homo sapiens
gtgaagaattcccaa

SEQ ID NO: 32417 - DNA, 15 bp, Homo sapiens
tgtgaagaattccca

SEQ ID NO: 32418 - DNA, 15 bp, Homo sapiens
ctgtgaagaattccc

SEQ ID NO: 32419 - DNA, 15 bp, Homo sapiens
gctgtgaagaattcc

SEQ ID NO: 32420 - DNA, 15 bp, Homo sapiens
agctgtgaagaattc

SEQ ID NO: 32421 - DNA, 15 bp, Homo sapiens
aagctgtgaagaatt

SEQ ID NO: 32422 - DNA, 15 bp, Homo sapiens
caagctgtgaagaat

SEQ ID NO: 32423 - DNA, 15 bp, Homo sapiens
acaagctgtgaagaa

SEQ ID NO: 32424 - DNA, 15 bp, Homo sapiens
gacaagctgtgaaga

SEQ ID NO: 32425 - DNA, 15 bp, Homo sapiens
tgacaagctgtgaag

SEQ ID NO: 32426 - DNA, 15 bp, Homo sapiens
atgacaagctgtgaa

SEQ ID NO: 32427 - DNA, 15 bp, Homo sapiens
gatgacaagctgtga

SEQ ID NO: 32428 - DNA, 15 bp, Homo sapiens
agatgacaagctgtg

SEQ ID NO: 32429 - DNA, 15 bp, Homo sapiens
tagatgacaagctgt

SEQ ID NO: 32430 - DNA, 15 bp, Homo sapiens
atagatgacaagctg

SEQ ID NO: 32431 - DNA, 15 bp, Homo sapiens
catagatgacaagct

SEQ ID NO: 32432 - DNA, 15 bp, Homo sapiens
tcatagatgacaagc

SEQ ID NO: 32433 - DNA, 15 bp, Homo sapiens
gtcatagatgacaag

SEQ ID NO: 32434 - DNA, 15 bp, Homo sapiens
agtcatagatgacaa

SEQ ID NO: 32435 - DNA, 15 bp, Homo sapiens
aagtcatagatgaca

SEQ ID NO: 32436 - DNA, 15 bp, Homo sapiens
aaagtcatagatgac

SEQ ID NO: 32437 - DNA, 15 bp, Homo sapiens
taaagtcatagatga

SEQ ID NO: 32438 - DNA, 15 bp, Homo sapiens
ataaagtcatagatg

SEQ ID NO: 32439 - DNA, 15 bp, Homo sapiens
gataaagtcatagat

SEQ ID NO: 32440 - DNA, 15 bp, Homo sapiens
ggataaagtcataga

SEQ ID NO: 32441 - DNA, 15 bp, Homo sapiens
tggataaagtcatag

SEQ ID NO: 32442 - DNA, 15 bp, Homo sapiens
gtggataaagtcata

SEQ ID NO: 32443 - DNA, 15 bp, Homo sapiens
tgtggataaagtcat

SEQ ID NO: 32444 - DNA, 15 bp, Homo sapiens
atgtggataaagtca

SEQ ID NO: 32445 - DNA, 15 bp, Homo sapiens
aatgtggataaagtc

SEQ ID NO: 32446 - DNA, 15 bp, Homo sapiens
aaatgtggataaagt

SEQ ID NO: 32447 - DNA, 15 bp, Homo sapiens
taaatgtggataaag

SEQ ID NO: 32448 - DNA, 15 bp, Homo sapiens
ataaatgtggataaa

SEQ ID NO: 32449 - DNA, 15 bp, Homo sapiens
aataaatgtggataa

SEQ ID NO: 32450 - DNA, 15 bp, Homo sapiens
aaataaatgtggata

SEQ ID NO: 32451 - DNA, 15 bp, Homo sapiens
aaaataaatgtggat

SEQ ID NO: 32452 - DNA, 15 bp, Homo sapiens
caaaataaatgtgga

SEQ ID NO: 32453 - DNA, 15 bp, Homo sapiens
tcaaaataaatgtgg

SEQ ID NO: 32454 - DNA, 15 bp, Homo sapiens
ttcaaaataaatgtg

SEQ ID NO: 32455 - DNA, 15 bp, Homo sapiens
gttcaaaataaatgt

SEQ ID NO: 32456 - DNA, 15 bp, Homo sapiens
tgttcaaaataaatg

SEQ ID NO: 32457 - DNA, 15 bp, Homo sapiens
atgttcaaaataaat

SEQ ID NO: 32458 - DNA, 15 bp, Homo sapiens
catgttcaaaataaa

SEQ ID NO: 32459 - DNA, 15 bp, Homo sapiens
acatgttcaaaataa

SEQ ID NO: 32460 - DNA, 15 bp, Homo sapiens
aacatgttcaaaata

SEQ ID NO: 32461 - DNA, 15 bp, Homo sapiens
aaacatgttcaaaat

SEQ ID NO: 32462 - DNA, 15 bp, Homo sapiens
taaacatgttcaaaa

SEQ ID NO: 32463 - DNA, 15 bp, Homo sapiens
ttaaacatgttcaaa

SEQ ID NO: 32464 - DNA, 15 bp, Homo sapiens
attaaacatgttcaa

SEQ ID NO: 32465 - DNA, 15 bp, Homo sapiens
aattaaacatgttca

SEQ ID NO: 32466 - DNA, 15 bp, Homo sapiens
aaattaaacatgttc

SEQ ID NO: 32467 - DNA, 15 bp, Homo sapiens
aaaattaaacatgtt

SEQ ID NO: 32468 - DNA, 15 bp, Homo sapiens
gaaaattaaacatgt

SEQ ID NO: 32469 - DNA, 15 bp, Homo sapiens
tgaaaattaaacatg

SEQ ID NO: 32470 - DNA, 15 bp, Homo sapiens
ctgaaaattaaacat

SEQ ID NO: 32471 - DNA, 15 bp, Homo sapiens
gctgaaaattaaaca

SEQ ID NO: 32472 - DNA, 15 bp, Homo sapiens
agctgaaaattaaac

SEQ ID NO: 32473 - DNA, 15 bp, Homo sapiens
aagctgaaaattaaa

SEQ ID NO: 32474 - DNA, 15 bp, Homo sapiens
caagctgaaaattaa

SEQ ID NO: 32475 - DNA, 15 bp, Homo sapiens
acaagctgaaaatta

SEQ ID NO: 32476 - DNA, 15 bp, Homo sapiens
tacaagctgaaaatt

SEQ ID NO: 32477 - DNA, 15 bp, Homo sapiens
atacaagctgaaaat

SEQ ID NO: 32478 - DNA, 15 bp, Homo sapiens
aatacaagctgaaaa

SEQ ID NO: 32479 - DNA, 15 bp, Homo sapiens
aaatacaagctgaaa

SEQ ID NO: 32480 - DNA, 15 bp, Homo sapiens
aaaatacaagctgaa

SEQ ID NO: 32481 - DNA, 15 bp, Homo sapiens
gaaaatacaagctga

SEQ ID NO: 32482 - DNA, 15 bp, Homo sapiens
agaaaatacaagctg

SEQ ID NO: 32483 - DNA, 15 bp, Homo sapiens
gagaaaatacaagct

SEQ ID NO: 32484 - DNA, 15 bp, Homo sapiens
tgagaaaatacaagc

SEQ ID NO: 32485 - DNA, 15 bp, Homo sapiens
ttgagaaaatacaag

SEQ ID NO: 32486 - DNA, 15 bp, Homo sapiens
cttgagaaaatacaa

SEQ ID NO: 32487 - DNA, 15 bp, Homo sapiens
ccttgagaaaataca

SEQ ID NO: 32488 - DNA, 15 bp, Homo sapiens
tccttgagaaaatac

SEQ ID NO: 32489 - DNA, 15 bp, Homo sapiens
ctccttgagaaaata

SEQ ID NO: 32490 - DNA, 15 bp, Homo sapiens
actccttgagaaaat

SEQ ID NO: 32491 - DNA, 15 bp, Homo sapiens
tactccttgagaaaa

SEQ ID NO: 32492 - DNA, 15 bp, Homo sapiens
atactccttgagaaa

SEQ ID NO: 32493 - DNA, 15 bp, Homo sapiens
catactccttgagaa

SEQ ID NO: 32494 - DNA, 15 bp, Homo sapiens
acatactccttgaga

SEQ ID NO: 32495 - DNA, 15 bp, Homo sapiens
cacatactccttgag

SEQ ID NO: 32496 - DNA, 15 bp, Homo sapiens
acacatactccttga

SEQ ID NO: 32497 - DNA, 15 bp, Homo sapiens
cacacatactccttg

SEQ ID NO: 32498 - DNA, 15 bp, Homo sapiens
tcacacatactcctt

SEQ ID NO: 32499 - DNA, 15 bp, Homo sapiens
ctcacacatactcct

SEQ ID NO: 32500 - DNA, 15 bp, Homo sapiens
actcacacatactcc

SEQ ID NO: 32501 - DNA, 15 bp, Homo sapiens
gactcacacatactc

SEQ ID NO: 32502 - DNA, 15 bp, Homo sapiens
tgactcacacatact

SEQ ID NO: 32503 - DNA, 15 bp, Homo sapiens
ctgactcacacatac

SEQ ID NO: 32504 - DNA, 15 bp, Homo sapiens
gctgactcacacata

SEQ ID NO: 32505 - DNA, 15 bp, Homo sapiens
tgctgactcacacat

SEQ ID NO: 32506 - DNA, 15 bp, Homo sapiens
atgctgactcacaca

SEQ ID NO: 32507 - DNA, 15 bp, Homo sapiens
aatgctgactcacac

SEQ ID NO: 32508 - DNA, 15 bp, Homo sapiens
gaatgctgactcaca

SEQ ID NO: 32509 - DNA, 15 bp, Homo sapiens
tgaatgctgactcac

SEQ ID NO: 32510 - DNA, 15 bp, Homo sapiens
ctgaatgctgactca

SEQ ID NO: 32511 - DNA, 15 bp, Homo sapiens
tctgaatgctgactc

SEQ ID NO: 32512 - DNA, 15 bp, Homo sapiens
ctctgaatgctgact

SEQ ID NO: 32513 - DNA, 15 bp, Homo sapiens
actctgaatgctgac

SEQ ID NO: 32514 - DNA, 15 bp, Homo sapiens
tactctgaatgctga

SEQ ID NO: 32515 - DNA, 15 bp, Homo sapiens
gtactctgaatgctg

SEQ ID NO: 32516 - DNA, 15 bp, Homo sapiens
agtactctgaatgct

SEQ ID NO: 32517 - DNA, 15 bp, Homo sapiens
aagtactctgaatgc

SEQ ID NO: 32518 - DNA, 15 bp, Homo sapiens
taagtactctgaatg

SEQ ID NO: 32519 - DNA, 15 bp, Homo sapiens
ttaagtactctgaat

SEQ ID NO: 32520 - DNA, 15 bp, Homo sapiens
gttaagtactctgaa

SEQ ID NO: 32521 - DNA, 15 bp, Homo sapiens
tgttaagtactctga

SEQ ID NO: 32522 - DNA, 15 bp, Homo sapiens
gtgttaagtactctg

SEQ ID NO: 32523 - DNA, 15 bp, Homo sapiens
tgtgttaagtactct

SEQ ID NO: 32524 - DNA, 15 bp, Homo sapiens
gtgtgttaagtactc

SEQ ID NO: 32525 - DNA, 15 bp, Homo sapiens
agtgtgttaagtact

SEQ ID NO: 32526 - DNA, 15 bp, Homo sapiens
aagtgtgttaagtac

SEQ ID NO: 32527 - DNA, 15 bp, Homo sapiens
taagtgtgttaagta

SEQ ID NO: 32528 - DNA, 15 bp, Homo sapiens
ctaagtgtgttaagt

SEQ ID NO: 32529 - DNA, 15 bp, Homo sapiens
actaagtgtgttaag

SEQ ID NO: 32530 - DNA, 15 bp, Homo sapiens
cactaagtgtgttaa

SEQ ID NO: 32531 - DNA, 15 bp, Homo sapiens
acactaagtgtgtta

SEQ ID NO: 32532 - DNA, 15 bp, Homo sapiens
gacactaagtgtgtt

SEQ ID NO: 32533 - DNA, 15 bp, Homo sapiens
tgacactaagtgtgt

SEQ ID NO: 32534 - DNA, 15 bp, Homo sapiens
atgacactaagtgtg

SEQ ID NO: 32535 - DNA, 15 bp, Homo sapiens
aatgacactaagtgt

SEQ ID NO: 32536 - DNA, 15 bp, Homo sapiens
taatgacactaagtg

SEQ ID NO: 32537 - DNA, 15 bp, Homo sapiens
ctaatgacactaagt

SEQ ID NO: 32538 - DNA, 15 bp, Homo sapiens
actaatgacactaag

SEQ ID NO: 32539 - DNA, 15 bp, Homo sapiens
cactaatgacactaa

SEQ ID NO: 32540 - DNA, 15 bp, Homo sapiens
tcactaatgacacta

SEQ ID NO: 32541 - DNA, 15 bp, Homo sapiens
atcactaatgacact

SEQ ID NO: 32542 - DNA, 15 bp, Homo sapiens
tatcactaatgacac

SEQ ID NO: 32543 - DNA, 15 bp, Homo sapiens
ttatcactaatgaca

SEQ ID NO: 32544 - DNA, 15 bp, Homo sapiens
gttatcactaatgac

SEQ ID NO: 32545 - DNA, 15 bp, Homo sapiens
agttatcactaatga

SEQ ID NO: 32546 - DNA, 15 bp, Homo sapiens
aagttatcactaatg

SEQ ID NO: 32547 - DNA, 15 bp, Homo sapiens
taagttatcactaat

SEQ ID NO: 32548 - DNA, 15 bp, Homo sapiens
ttaagttatcactaa

SEQ ID NO: 32549 - DNA, 15 bp, Homo sapiens
gttaagttatcacta

SEQ ID NO: 32550 - DNA, 15 bp, Homo sapiens
ggttaagttatcact

SEQ ID NO: 32551 - DNA, 15 bp, Homo sapiens
gggttaagttatcac

SEQ ID NO: 32552 - DNA, 15 bp, Homo sapiens
tgggttaagttatca

SEQ ID NO: 32553 - DNA, 15 bp, Homo sapiens
gtgggttaagttatc

SEQ ID NO: 32554 - DNA, 15 bp, Homo sapiens
tgtgggttaagttat

SEQ ID NO: 32555 - DNA, 15 bp, Homo sapiens
gtgtgggttaagtta

SEQ ID NO: 32556 - DNA, 15 bp, Homo sapiens
cgtgtgggttaagtt

SEQ ID NO: 32557 - DNA, 15 bp, Homo sapiens
acgtgtgggttaagt

SEQ ID NO: 32558 - DNA, 15 bp, Homo sapiens
tacgtgtgggttaag

SEQ ID NO: 32559 - DNA, 15 bp, Homo sapiens
atacgtgtgggttaa

SEQ ID NO: 32560 - DNA, 15 bp, Homo sapiens
tatacgtgtgggtta

SEQ ID NO: 32561 - DNA, 15 bp, Homo sapiens
ctatacgtgtgggtt

SEQ ID NO: 32562 - DNA, 15 bp, Homo sapiens
cctatacgtgtgggt

SEQ ID NO: 32563 - DNA, 15 bp, Homo sapiens
tcctatacgtgtggg

SEQ ID NO: 32564 - DNA, 15 bp, Homo sapiens
ttcctatacgtgtgg

SEQ ID NO: 32565 - DNA, 15 bp, Homo sapiens
cttcctatacgtgtg

SEQ ID NO: 32566 - DNA, 15 bp, Homo sapiens
gcttcctatacgtgt

SEQ ID NO: 32567 - DNA, 15 bp, Homo sapiens
agcttcctatacgtg

SEQ ID NO: 32568 - DNA, 15 bp, Homo sapiens
tagcttcctatacgt

SEQ ID NO: 32569 - DNA, 15 bp, Homo sapiens
ctagcttcctatacg

SEQ ID NO: 32570 - DNA, 15 bp, Homo sapiens
tctagcttcctatac

SEQ ID NO: 32571 - DNA, 15 bp, Homo sapiens
gtctagcttcctata

SEQ ID NO: 32572 - DNA, 15 bp, Homo sapiens
ggtctagcttcctat

SEQ ID NO: 32573 - DNA, 15 bp, Homo sapiens
aggtctagcttccta

SEQ ID NO: 32574 - DNA, 15 bp, Homo sapiens
gaggtctagcttcct

SEQ ID NO: 32575 - DNA, 15 bp, Homo sapiens
ggaggtctagcttcc

SEQ ID NO: 32576 - DNA, 15 bp, Homo sapiens
tggaggtctagcttc

SEQ ID NO: 32577 - DNA, 15 bp, Homo sapiens
atggaggtctagctt

SEQ ID NO: 32578 - DNA, 15 bp, Homo sapiens
aatggaggtctagct

SEQ ID NO: 32579 - DNA, 15 bp, Homo sapiens
aaatggaggtctagc

SEQ ID NO: 32580 - DNA, 15 bp, Homo sapiens
taaatggaggtctag

SEQ ID NO: 32581 - DNA, 15 bp, Homo sapiens
gtaaatggaggtcta

SEQ ID NO: 32582 - DNA, 15 bp, Homo sapiens
tgtaaatggaggtct

SEQ ID NO: 32583 - DNA, 15 bp, Homo sapiens
ctgtaaatggaggtc

SEQ ID NO: 32584 - DNA, 15 bp, Homo sapiens
tctgtaaatggaggt

SEQ ID NO: 32585 - DNA, 15 bp, Homo sapiens
ttctgtaaatggagg

SEQ ID NO: 32586 - DNA, 15 bp, Homo sapiens
tttctgtaaatggag

SEQ ID NO: 32587 - DNA, 15 bp, Homo sapiens
ttttctgtaaatgga

SEQ ID NO: 32588 - DNA, 15 bp, Homo sapiens
tttttctgtaaatgg

SEQ ID NO: 32589 - DNA, 15 bp, Homo sapiens
atttttctgtaaatg

SEQ ID NO: 32590 - DNA, 15 bp, Homo sapiens
catttttctgtaaat

SEQ ID NO: 32591 - DNA, 15 bp, Homo sapiens
ccatttttctgtaaa

SEQ ID NO: 32592 - DNA, 15 bp, Homo sapiens
tccatttttctgtaa

SEQ ID NO: 32593 - DNA, 15 bp, Homo sapiens
ctccatttttctgta

SEQ ID NO: 32594 - DNA, 15 bp, Homo sapiens
cctccatttttctgt

SEQ ID NO: 32595 - DNA, 15 bp, Homo sapiens
gcctccatttttctg

SEQ ID NO: 32596 - DNA, 15 bp, Homo sapiens
agcctccatttttct

SEQ ID NO: 32597 - DNA, 15 bp, Homo sapiens
gagcctccatttttc

SEQ ID NO: 32598 - DNA, 15 bp, Homo sapiens
tgagcctccattttt

SEQ ID NO: 32599 - DNA, 15 bp, Homo sapiens
ctgagcctccatttt

SEQ ID NO: 32600 - DNA, 15 bp, Homo sapiens
tctgagcctccattt

SEQ ID NO: 32601 - DNA, 15 bp, Homo sapiens
ctctgagcctccatt

SEQ ID NO: 32602 - DNA, 15 bp, Homo sapiens
tctctgagcctccat

SEQ ID NO: 32603 - DNA, 15 bp, Homo sapiens
ctctctgagcctcca

SEQ ID NO: 32604 - DNA, 15 bp, Homo sapiens
gctctctgagcctcc

SEQ ID NO: 32605 - DNA, 15 bp, Homo sapiens
ggctctctgagcctc

SEQ ID NO: 32606 - DNA, 15 bp, Homo sapiens
aggctctctgagcct

SEQ ID NO: 32607 - DNA, 15 bp, Homo sapiens
taggctctctgagcc

SEQ ID NO: 32608 - DNA, 15 bp, Homo sapiens
ttaggctctctgagc

SEQ ID NO: 32609 - DNA, 15 bp, Homo sapiens
gttaggctctctgag

SEQ ID NO: 32610 - DNA, 15 bp, Homo sapiens
agttaggctctctga

SEQ ID NO: 32611 - DNA, 15 bp, Homo sapiens
cagttaggctctctg

SEQ ID NO: 32612 - DNA, 15 bp, Homo sapiens
tcagttaggctctct

SEQ ID NO: 32613 - DNA, 15 bp, Homo sapiens
gtcagttaggctctc

SEQ ID NO: 32614 - DNA, 15 bp, Homo sapiens
agtcagttaggctct

SEQ ID NO: 32615 - DNA, 15 bp, Homo sapiens
aagtcagttaggctc

SEQ ID NO: 32616 - DNA, 15 bp, Homo sapiens
aaagtcagttaggct

SEQ ID NO: 32617 - DNA, 15 bp, Homo sapiens
gaaagtcagttaggc

SEQ ID NO: 32618 - DNA, 15 bp, Homo sapiens
ggaaagtcagttagg

SEQ ID NO: 32619 - DNA, 15 bp, Homo sapiens
gggaaagtcagttag

SEQ ID NO: 32620 - DNA, 15 bp, Homo sapiens
tgggaaagtcagtta

SEQ ID NO: 32621 - DNA, 15 bp, Homo sapiens
ttgggaaagtcagtt

SEQ ID NO: 32622 - DNA, 15 bp, Homo sapiens
cttgggaaagtcagt

SEQ ID NO: 32623 - DNA, 15 bp, Homo sapiens
ccttgggaaagtcag

SEQ ID NO: 32624 - DNA, 15 bp, Homo sapiens
gccttgggaaagtca

SEQ ID NO: 32625 - DNA, 15 bp, Homo sapiens
ggccttgggaaagtc

SEQ ID NO: 32626 - DNA, 15 bp, Homo sapiens
tggccttgggaaagt

SEQ ID NO: 32627 - DNA, 15 bp, Homo sapiens
gtggccttgggaaag

SEQ ID NO: 32628 - DNA, 15 bp, Homo sapiens
tgtggccttgggaaa

SEQ ID NO: 32629 - DNA, 15 bp, Homo sapiens
atgtggccttgggaa

SEQ ID NO: 32630 - DNA, 15 bp, Homo sapiens
tatgtggccttggga

SEQ ID NO: 32631 - DNA, 15 bp, Homo sapiens
ttatgtggccttggg

SEQ ID NO: 32632 - DNA, 15 bp, Homo sapiens
gttatgtggccttgg

SEQ ID NO: 32633 - DNA, 15 bp, Homo sapiens
agttatgtggccttg

SEQ ID NO: 32634 - DNA, 15 bp, Homo sapiens
cagttatgtggcctt

SEQ ID NO: 32635 - DNA, 15 bp, Homo sapiens
ccagttatgtggcct

SEQ ID NO: 32636 - DNA, 15 bp, Homo sapiens
tccagttatgtggcc

SEQ ID NO: 32637 - DNA, 15 bp, Homo sapiens
ttccagttatgtggc

SEQ ID NO: 32638 - DNA, 15 bp, Homo sapiens
tttccagttatgtgg

SEQ ID NO: 32639 - DNA, 15 bp, Homo sapiens
ttttccagttatgtg

SEQ ID NO: 32640 - DNA, 15 bp, Homo sapiens
attttccagttatgt

SEQ ID NO: 32641 - DNA, 15 bp, Homo sapiens
aattttccagttatg

SEQ ID NO: 32642 - DNA, 15 bp, Homo sapiens
gaattttccagttat

SEQ ID NO: 32643 - DNA, 15 bp, Homo sapiens
agaattttccagtta

SEQ ID NO: 32644 - DNA, 15 bp, Homo sapiens
cagaattttccagtt

SEQ ID NO: 32645 - DNA, 15 bp, Homo sapiens
ccagaattttccagt

SEQ ID NO: 32646 - DNA, 15 bp, Homo sapiens
tccagaattttccag

SEQ ID NO: 32647 - DNA, 15 bp, Homo sapiens
ttccagaattttcca

SEQ ID NO: 32648 - DNA, 15 bp, Homo sapiens
gttccagaattttcc

SEQ ID NO: 32649 - DNA, 15 bp, Homo sapiens
agttccagaattttc

SEQ ID NO: 32650 - DNA, 15 bp, Homo sapiens
cagttccagaatttt

SEQ ID NO: 32651 - DNA, 15 bp, Homo sapiens
tcagttccagaattt

SEQ ID NO: 32652 - DNA, 15 bp, Homo sapiens
ctcagttccagaatt

SEQ ID NO: 32653 - DNA, 15 bp, Homo sapiens
actcagttccagaat

SEQ ID NO: 32654 - DNA, 15 bp, Homo sapiens
aactcagttccagaa

SEQ ID NO: 32655 - DNA, 15 bp, Homo sapiens
aaactcagttccaga

SEQ ID NO: 32656 - DNA, 15 bp, Homo sapiens
aaaactcagttccag

SEQ ID NO: 32657 - DNA, 15 bp, Homo sapiens
aaaaactcagttcca

SEQ ID NO: 32658 - DNA, 15 bp, Homo sapiens
aaaaaactcagttcc

SEQ ID NO: 32659 - DNA, 15 bp, Homo sapiens
gaaaaaactcagttc

SEQ ID NO: 32660 - DNA, 15 bp, Homo sapiens
tgaaaaaactcagtt

SEQ ID NO: 32661 - DNA, 15 bp, Homo sapiens
ctgaaaaaactcagt

SEQ ID NO: 32662 - DNA, 15 bp, Homo sapiens
cctgaaaaaactcag

SEQ ID NO: 32663 - DNA, 15 bp, Homo sapiens
acctgaaaaaactca

SEQ ID NO: 32664 - DNA, 15 bp, Homo sapiens
tacctgaaaaaactc

SEQ ID NO: 32665 - DNA, 15 bp, Homo sapiens
atacctgaaaaaact

SEQ ID NO: 32666 - DNA, 15 bp, Homo sapiens
catacctgaaaaaac

SEQ ID NO: 32667 - DNA, 15 bp, Homo sapiens
acatacctgaaaaaa

SEQ ID NO: 32668 - DNA, 15 bp, Homo sapiens
gacatacctgaaaaa

SEQ ID NO: 32669 - DNA, 15 bp, Homo sapiens
agacatacctgaaaa

SEQ ID NO: 32670 - DNA, 15 bp, Homo sapiens
aagacatacctgaaa

SEQ ID NO: 32671 - DNA, 15 bp, Homo sapiens
caagacatacctgaa

SEQ ID NO: 32672 - DNA, 15 bp, Homo sapiens
ccaagacatacctga

SEQ ID NO: 32673 - DNA, 15 bp, Homo sapiens
accaagacatacctg

SEQ ID NO: 32674 - DNA, 15 bp, Homo sapiens
taccaagacatacct

SEQ ID NO: 32675 - DNA, 15 bp, Homo sapiens
ataccaagacatacc

SEQ ID NO: 32676 - DNA, 15 bp, Homo sapiens
gataccaagacatac

SEQ ID NO: 32677 - DNA, 15 bp, Homo sapiens
ggataccaagacata

SEQ ID NO: 32678 - DNA, 15 bp, Homo sapiens
gggataccaagacat

SEQ ID NO: 32679 - DNA, 15 bp, Homo sapiens
agggataccaagaca

SEQ ID NO: 32680 - DNA, 15 bp, Homo sapiens
gagggataccaagac

SEQ ID NO: 32681 - DNA, 15 bp, Homo sapiens
cgagggataccaaga

SEQ ID NO: 32682 - DNA, 15 bp, Homo sapiens
ccgagggataccaag

SEQ ID NO: 32683 - DNA, 15 bp, Homo sapiens
accgagggataccaa

SEQ ID NO: 32684 - DNA, 15 bp, Homo sapiens
caccgagggatacca

SEQ ID NO: 32685 - DNA, 15 bp, Homo sapiens
tcaccgagggatacc

SEQ ID NO: 32686 - DNA, 15 bp, Homo sapiens
ctcaccgagggatac

SEQ ID NO: 32687 - DNA, 15 bp, Homo sapiens
gctcaccgagggata

SEQ ID NO: 32688 - DNA, 15 bp, Homo sapiens
ggctcaccgagggat

SEQ ID NO: 32689 - DNA, 15 bp, Homo sapiens
aggctcaccgaggga

SEQ ID NO: 32690 - DNA, 15 bp, Homo sapiens
aaggctcaccgaggg

SEQ ID NO: 32691 - DNA, 15 bp, Homo sapiens
gaaggctcaccgagg

SEQ ID NO: 32692 - DNA, 15 bp, Homo sapiens
agaaggctcaccgag

SEQ ID NO: 32693 - DNA, 15 bp, Homo sapiens
gagaaggctcaccga

SEQ ID NO: 32694 - DNA, 15 bp, Homo sapiens
agagaaggctcaccg

SEQ ID NO: 32695 - DNA, 15 bp, Homo sapiens
cagagaaggctcacc

SEQ ID NO: 32696 - DNA, 15 bp, Homo sapiens
acagagaaggctcac

SEQ ID NO: 32697 - DNA, 15 bp, Homo sapiens
tacagagaaggctca

SEQ ID NO: 32698 - DNA, 15 bp, Homo sapiens
ctacagagaaggctc

SEQ ID NO: 32699 - DNA, 15 bp, Homo sapiens
tctacagagaaggct

SEQ ID NO: 32700 - DNA, 15 bp, Homo sapiens
ctctacagagaaggc

SEQ ID NO: 32701 - DNA, 15 bp, Homo sapiens
tctctacagagaagg

SEQ ID NO: 32702 - DNA, 15 bp, Homo sapiens
ttctctacagagaag

SEQ ID NO: 32703 - DNA, 15 bp, Homo sapiens
cttctctacagagaa

SEQ ID NO: 32704 - DNA, 15 bp, Homo sapiens
ccttctctacagaga

SEQ ID NO: 32705 - DNA, 15 bp, Homo sapiens
tccttctctacagag

SEQ ID NO: 32706 - DNA, 15 bp, Homo sapiens
ttccttctctacaga

SEQ ID NO: 32707 - DNA, 15 bp, Homo sapiens
cttccttctctacag

SEQ ID NO: 32708 - DNA, 15 bp, Homo sapiens
acttccttctctaca

SEQ ID NO: 32709 - DNA, 15 bp, Homo sapiens
cacttccttctctac

SEQ ID NO: 32710 - DNA, 15 bp, Homo sapiens
acacttccttctcta

SEQ ID NO: 32711 - DNA, 15 bp, Homo sapiens
gacacttccttctct

SEQ ID NO: 32712 - DNA, 15 bp, Homo sapiens
agacacttccttctc

SEQ ID NO: 32713 - DNA, 15 bp, Homo sapiens
gagacacttccttct

SEQ ID NO: 32714 - DNA, 15 bp, Homo sapiens
ggagacacttccttc

SEQ ID NO: 32715 - DNA, 15 bp, Homo sapiens
aggagacacttcctt

SEQ ID NO: 32716 - DNA, 15 bp, Homo sapiens
caggagacacttcct

SEQ ID NO: 32717 - DNA, 15 bp, Homo sapiens
ccaggagacacttcc

SEQ ID NO: 32718 - DNA, 15 bp, Homo sapiens
cccaggagacacttc

SEQ ID NO: 32719 - DNA, 15 bp, Homo sapiens
acccaggagacactt

SEQ ID NO: 32720 - DNA, 15 bp, Homo sapiens
aacccaggagacact

SEQ ID NO: 32721 - DNA, 15 bp, Homo sapiens
caacccaggagacac

SEQ ID NO: 32722 - DNA, 15 bp, Homo sapiens
ccaacccaggagaca

SEQ ID NO: 32723 - DNA, 15 bp, Homo sapiens
tccaacccaggagac

SEQ ID NO: 32724 - DNA, 15 bp, Homo sapiens
ttccaacccaggaga

SEQ ID NO: 32725 - DNA, 15 bp, Homo sapiens
tttccaacccaggag

SEQ ID NO: 32726 - DNA, 15 bp, Homo sapiens
ctttccaacccagga

SEQ ID NO: 32727 - DNA, 15 bp, Homo sapiens
gctttccaacccagg

SEQ ID NO: 32728 - DNA, 15 bp, Homo sapiens
ggctttccaacccag

SEQ ID NO: 32729 - DNA, 15 bp, Homo sapiens
gggctttccaaccca

SEQ ID NO: 32730 - DNA, 15 bp, Homo sapiens
tgggctttccaaccc

SEQ ID NO: 32731 - DNA, 15 bp, Homo sapiens
ctgggctttccaacc

SEQ ID NO: 32732 - DNA, 15 bp, Homo sapiens
cctgggctttccaac

SEQ ID NO: 32733 - DNA, 15 bp, Homo sapiens
gcctgggctttccaa

SEQ ID NO: 32734 - DNA, 15 bp, Homo sapiens
ggcctgggctttcca

SEQ ID NO: 32735 - DNA, 15 bp, Homo sapiens
cggcctgggctttcc

SEQ ID NO: 32736 - DNA, 15 bp, Homo sapiens
ccggcctgggctttc

SEQ ID NO: 32737 - DNA, 15 bp, Homo sapiens
cccggcctgggcttt

SEQ ID NO: 32738 - DNA, 15 bp, Homo sapiens
tcccggcctgggctt

SEQ ID NO: 32739 - DNA, 15 bp, Homo sapiens
atcccggcctgggct

SEQ ID NO: 32740 - DNA, 15 bp, Homo sapiens
catcccggcctgggc

SEQ ID NO: 32741 - DNA, 15 bp, Homo sapiens
tcatcccggcctggg

SEQ ID NO: 32742 - DNA, 15 bp, Homo sapiens
ttcatcccggcctgg

SEQ ID NO: 32743 - DNA, 15 bp, Homo sapiens
gttcatcccggcctg

SEQ ID NO: 32744 - DNA, 15 bp, Homo sapiens
tgttcatcccggcct

SEQ ID NO: 32745 - DNA, 15 bp, Homo sapiens
ctgttcatcccggcc

SEQ ID NO: 32746 - DNA, 15 bp, Homo sapiens
gctgttcatcccggc

SEQ ID NO: 32747 - DNA, 15 bp, Homo sapiens
tgctgttcatcccgg

SEQ ID NO: 32748 - DNA, 15 bp, Homo sapiens
atgctgttcatcccg

SEQ ID NO: 32749 - DNA, 15 bp, Homo sapiens
catgctgttcatccc

SEQ ID NO: 32750 - DNA, 15 bp, Homo sapiens
ccatgctgttcatcc

SEQ ID NO: 32751 - DNA, 15 bp, Homo sapiens
cccatgctgttcatc

SEQ ID NO: 32752 - DNA, 15 bp, Homo sapiens
acccatgctgttcat

SEQ ID NO: 32753 - DNA, 15 bp, Homo sapiens
cacccatgctgttca

SEQ ID NO: 32754 - DNA, 15 bp, Homo sapiens
acacccatgctgttc

SEQ ID NO: 32755 - DNA, 15 bp, Homo sapiens
gacacccatgctgtt

SEQ ID NO: 32756 - DNA, 15 bp, Homo sapiens
ggacacccatgctgt

SEQ ID NO: 32757 - DNA, 15 bp, Homo sapiens
aggacacccatgctg

SEQ ID NO: 32758 - DNA, 15 bp, Homo sapiens
aaggacacccatgct

SEQ ID NO: 32759 - DNA, 15 bp, Homo sapiens
taaggacacccatgc

SEQ ID NO: 32760 - DNA, 15 bp, Homo sapiens
ctaaggacacccatg

SEQ ID NO: 32761 - DNA, 15 bp, Homo sapiens
cctaaggacacccat

SEQ ID NO: 32762 - DNA, 15 bp, Homo sapiens
gcctaaggacaccca

SEQ ID NO: 32763 - DNA, 15 bp, Homo sapiens
agcctaaggacaccc

SEQ ID NO: 32764 - DNA, 15 bp, Homo sapiens
cagcctaaggacacc

SEQ ID NO: 32765 - DNA, 15 bp, Homo sapiens
acagcctaaggacac

SEQ ID NO: 32766 - DNA, 15 bp, Homo sapiens
cacagcctaaggaca

SEQ ID NO: 32767 - DNA, 15 bp, Homo sapiens
acacagcctaaggac

SEQ ID NO: 32768 - DNA, 15 bp, Homo sapiens
cacacagcctaagga

SEQ ID NO: 32769 - DNA, 15 bp, Homo sapiens
acacacagcctaagg

SEQ ID NO: 32770 - DNA, 15 bp, Homo sapiens
tacacacagcctaag

SEQ ID NO: 32771 - DNA, 15 bp, Homo sapiens
gtacacacagcctaa

SEQ ID NO: 32772 - DNA, 15 bp, Homo sapiens
ggtacacacagccta

SEQ ID NO: 32773 - DNA, 15 bp, Homo sapiens
tggtacacacagcct

SEQ ID NO: 32774 - DNA, 15 bp, Homo sapiens
gtggtacacacagcc

SEQ ID NO: 32775 - DNA, 15 bp, Homo sapiens
tgtggtacacacagc

SEQ ID NO: 32776 - DNA, 15 bp, Homo sapiens
gtgtggtacacacag

SEQ ID NO: 32777 - DNA, 15 bp, Homo sapiens
tgtgtggtacacaca

SEQ ID NO: 32778 - DNA, 15 bp, Homo sapiens
gtgtgtggtacacac

SEQ ID NO: 32779 - DNA, 15 bp, Homo sapiens
ggtgtgtggtacaca

SEQ ID NO: 32780 - DNA, 15 bp, Homo sapiens
gggtgtgtggtacac

SEQ ID NO: 32781 - DNA, 15 bp, Homo sapiens
ggggtgtgtggtaca

SEQ ID NO: 32782 - DNA, 15 bp, Homo sapiens
aggggtgtgtggtac

SEQ ID NO: 32783 - DNA, 15 bp, Homo sapiens
caggggtgtgtggta

SEQ ID NO: 32784 - DNA, 15 bp, Homo sapiens
ccaggggtgtgtggt

SEQ ID NO: 32785 - DNA, 15 bp, Homo sapiens
gccaggggtgtgtgg

SEQ ID NO: 32786 - DNA, 15 bp, Homo sapiens
ggccaggggtgtgtg

SEQ ID NO: 32787 - DNA, 15 bp, Homo sapiens
aggccaggggtgtgt

SEQ ID NO: 32788 - DNA, 15 bp, Homo sapiens
taggccaggggtgtg

SEQ ID NO: 32789 - DNA, 15 bp, Homo sapiens
gtaggccaggggtgt

SEQ ID NO: 32790 - DNA, 15 bp, Homo sapiens
agtaggccaggggtg

SEQ ID NO: 32791 - DNA, 15 bp, Homo sapiens
gagtaggccaggggt

SEQ ID NO: 32792 - DNA, 15 bp, Homo sapiens
agagtaggccagggg

SEQ ID NO: 32793 - DNA, 15 bp, Homo sapiens
gagagtaggccaggg

SEQ ID NO: 32794 - DNA, 15 bp, Homo sapiens
ggagagtaggccagg

SEQ ID NO: 32795 - DNA, 15 bp, Homo sapiens
gggagagtaggccag

SEQ ID NO: 32796 - DNA, 15 bp, Homo sapiens
ggggagagtaggcca

SEQ ID NO: 32797 - DNA, 15 bp, Homo sapiens
aggggagagtaggcc

SEQ ID NO: 32798 - DNA, 15 bp, Homo sapiens
caggggagagtaggc

SEQ ID NO: 32799 - DNA, 15 bp, Homo sapiens
gcaggggagagtagg

SEQ ID NO: 32800 - DNA, 15 bp, Homo sapiens
agcaggggagagtag

SEQ ID NO: 32801 - DNA, 15 bp, Homo sapiens
gagcaggggagagta

SEQ ID NO: 32802 - DNA, 15 bp, Homo sapiens
agagcaggggagagt

SEQ ID NO: 32803 - DNA, 15 bp, Homo sapiens
tagagcaggggagag

SEQ ID NO: 32804 - DNA, 15 bp, Homo sapiens
ttagagcaggggaga

SEQ ID NO: 32805 - DNA, 15 bp, Homo sapiens
cttagagcaggggag

SEQ ID NO: 32806 - DNA, 15 bp, Homo sapiens
ccttagagcagggga

SEQ ID NO: 32807 - DNA, 15 bp, Homo sapiens
tccttagagcagggg

SEQ ID NO: 32808 - DNA, 15 bp, Homo sapiens
ctccttagagcaggg

SEQ ID NO: 32809 - DNA, 15 bp, Homo sapiens
actccttagagcagg

SEQ ID NO: 32810 - DNA, 15 bp, Homo sapiens
gactccttagagcag

SEQ ID NO: 32811 - DNA, 15 bp, Homo sapiens
tgactccttagagca

SEQ ID NO: 32812 - DNA, 15 bp, Homo sapiens
gtgactccttagagc

SEQ ID NO: 32813 - DNA, 15 bp, Homo sapiens
ggtgactccttagag

SEQ ID NO: 32814 - DNA, 15 bp, Homo sapiens
aggtgactccttaga

SEQ ID NO: 32815 - DNA, 15 bp, Homo sapiens
caggtgactccttag

SEQ ID NO: 32816 - DNA, 15 bp, Homo sapiens
tcaggtgactcctta

SEQ ID NO: 32817 - DNA, 15 bp, Homo sapiens
ttcaggtgactcctt

SEQ ID NO: 32818 - DNA, 15 bp, Homo sapiens
cttcaggtgactcct

SEQ ID NO: 32819 - DNA, 15 bp, Homo sapiens
ccttcaggtgactcc

SEQ ID NO: 32820 - DNA, 15 bp, Homo sapiens
tccttcaggtgactc

SEQ ID NO: 32821 - DNA, 15 bp, Homo sapiens
ctccttcaggtgact

SEQ ID NO: 32822 - DNA, 15 bp, Homo sapiens
gctccttcaggtgac

SEQ ID NO: 32823 - DNA, 15 bp, Homo sapiens
tgctccttcaggtga

SEQ ID NO: 32824 - DNA, 15 bp, Homo sapiens
ctgctccttcaggtg

SEQ ID NO: 32825 - DNA, 15 bp, Homo sapiens
gctgctccttcaggt

SEQ ID NO: 32826 - DNA, 15 bp, Homo sapiens
agctgctccttcagg

SEQ ID NO: 32827 - DNA, 15 bp, Homo sapiens
cagctgctccttcag

SEQ ID NO: 32828 - DNA, 15 bp, Homo sapiens
gcagctgctccttca

SEQ ID NO: 32829 - DNA, 15 bp, Homo sapiens
tgcagctgctccttc

SEQ ID NO: 32830 - DNA, 15 bp, Homo sapiens
atgcagctgctcctt

SEQ ID NO: 32831 - DNA, 15 bp, Homo sapiens
gatgcagctgctcct

SEQ ID NO: 32832 - DNA, 15 bp, Homo sapiens
tgatgcagctgctcc

SEQ ID NO: 32833 - DNA, 15 bp, Homo sapiens
gtgatgcagctgctc

SEQ ID NO: 32834 - DNA, 15 bp, Homo sapiens
ggtgatgcagctgct

SEQ ID NO: 32835 - DNA, 15 bp, Homo sapiens
gggtgatgcagctgc

SEQ ID NO: 32836 - DNA, 15 bp, Homo sapiens
ggggtgatgcagctg

SEQ ID NO: 32837 - DNA, 15 bp, Homo sapiens
cggggtgatgcagct

SEQ ID NO: 32838 - DNA, 15 bp, Homo sapiens
gcggggtgatgcagc

SEQ ID NO: 32839 - DNA, 15 bp, Homo sapiens
ggcggggtgatgcag

SEQ ID NO: 32840 - DNA, 15 bp, Homo sapiens
aggcggggtgatgca

SEQ ID NO: 32841 - DNA, 15 bp, Homo sapiens
gaggcggggtgatgc

SEQ ID NO: 32842 - DNA, 15 bp, Homo sapiens
tgaggcggggtgatg

SEQ ID NO: 32843 - DNA, 15 bp, Homo sapiens
gtgaggcggggtgat

SEQ ID NO: 32844 - DNA, 15 bp, Homo sapiens
ggtgaggcggggtga

SEQ ID NO: 32845 - DNA, 15 bp, Homo sapiens
gggtgaggcggggtg

SEQ ID NO: 32846 - DNA, 15 bp, Homo sapiens
ggggtgaggcggggt

SEQ ID NO: 32847 - DNA, 15 bp, Homo sapiens
aggggtgaggcgggg

SEQ ID NO: 32848 - DNA, 15 bp, Homo sapiens
aaggggtgaggcggg

SEQ ID NO: 32849 - DNA, 15 bp, Homo sapiens
gaaggggtgaggcgg

SEQ ID NO: 32850 - DNA, 15 bp, Homo sapiens
agaaggggtgaggcg

SEQ ID NO: 32851 - DNA, 15 bp, Homo sapiens
gagaaggggtgaggc

SEQ ID NO: 32852 - DNA, 15 bp, Homo sapiens
ggagaaggggtgagg

SEQ ID NO: 32853 - DNA, 15 bp, Homo sapiens
aggagaaggggtgag

SEQ ID NO: 32854 - DNA, 15 bp, Homo sapiens
gaggagaaggggtga

SEQ ID NO: 32855 - DNA, 15 bp, Homo sapiens
tgaggagaaggggtg

SEQ ID NO: 32856 - DNA, 15 bp, Homo sapiens
ctgaggagaaggggt

SEQ ID NO: 32857 - DNA, 15 bp, Homo sapiens
gctgaggagaagggg

SEQ ID NO: 32858 - DNA, 15 bp, Homo sapiens
tgctgaggagaaggg

SEQ ID NO: 32859 - DNA, 15 bp, Homo sapiens
gtgctgaggagaagg

SEQ ID NO: 32860 - DNA, 15 bp, Homo sapiens
ggtgctgaggagaag

SEQ ID NO: 32861 - DNA, 15 bp, Homo sapiens
gggtgctgaggagaa

SEQ ID NO: 32862 - DNA, 15 bp, Homo sapiens
tgggtgctgaggaga

SEQ ID NO: 32863 - DNA, 15 bp, Homo sapiens
ttgggtgctgaggag

SEQ ID NO: 32864 - DNA, 15 bp, Homo sapiens
gttgggtgctgagga

SEQ ID NO: 32865 - DNA, 15 bp, Homo sapiens
tgttgggtgctgagg

SEQ ID NO: 32866 - DNA, 15 bp, Homo sapiens
ttgttgggtgctgag

SEQ ID NO: 32867 - DNA, 15 bp, Homo sapiens
gttgttgggtgctga

SEQ ID NO: 32868 - DNA, 15 bp, Homo sapiens
ggttgttgggtgctg

SEQ ID NO: 32869 - DNA, 15 bp, Homo sapiens
tggttgttgggtgct

SEQ ID NO: 32870 - DNA, 15 bp, Homo sapiens
ctggttgttgggtgc

SEQ ID NO: 32871 - DNA, 15 bp, Homo sapiens
cctggttgttgggtg

SEQ ID NO: 32872 - DNA, 15 bp, Homo sapiens
acctggttgttgggt

SEQ ID NO: 32873 - DNA, 15 bp, Homo sapiens
gacctggttgttggg

SEQ ID NO: 32874 - DNA, 15 bp, Homo sapiens
agacctggttgttgg

SEQ ID NO: 32875 - DNA, 15 bp, Homo sapiens
aagacctggttgttg

SEQ ID NO: 32876 - DNA, 15 bp, Homo sapiens
gaagacctggttgtt

SEQ ID NO: 32877 - DNA, 15 bp, Homo sapiens
ggaagacctggttgt

SEQ ID NO: 32878 - DNA, 15 bp, Homo sapiens
gggaagacctggttg

SEQ ID NO: 32879 - DNA, 15 bp, Homo sapiens
tgggaagacctggtt

SEQ ID NO: 32880 - DNA, 15 bp, Homo sapiens
ctgggaagacctggt

SEQ ID NO: 32881 - DNA, 15 bp, Homo sapiens
tctgggaagacctgg

SEQ ID NO: 32882 - DNA, 15 bp, Homo sapiens
ctctgggaagacctg

SEQ ID NO: 32883 - DNA, 15 bp, Homo sapiens
tctctgggaagacct

SEQ ID NO: 32884 - DNA, 15 bp, Homo sapiens
ctctctgggaagacc

SEQ ID NO: 32885 - DNA, 15 bp, Homo sapiens
actctctgggaagac

SEQ ID NO: 32886 - DNA, 15 bp, Homo sapiens
cactctctgggaaga

SEQ ID NO: 32887 - DNA, 15 bp, Homo sapiens
gcactctctgggaag

SEQ ID NO: 32888 - DNA, 15 bp, Homo sapiens
agcactctctgggaa

SEQ ID NO: 32889 - DNA, 15 bp, Homo sapiens
gagcactctctggga

SEQ ID NO: 32890 - DNA, 15 bp, Homo sapiens
tgagcactctctggg

SEQ ID NO: 32891 - DNA, 15 bp, Homo sapiens
ctgagcactctctgg

SEQ ID NO: 32892 - DNA, 15 bp, Homo sapiens
gctgagcactctctg

SEQ ID NO: 32893 - DNA, 15 bp, Homo sapiens
agctgagcactctct

SEQ ID NO: 32894 - DNA, 15 bp, Homo sapiens
tagctgagcactctc

SEQ ID NO: 32895 - DNA, 15 bp, Homo sapiens
atagctgagcactct

SEQ ID NO: 32896 - DNA, 15 bp, Homo sapiens
aatagctgagcactc

SEQ ID NO: 32897 - DNA, 15 bp, Homo sapiens
caatagctgagcact

SEQ ID NO: 32898 - DNA, 15 bp, Homo sapiens
ccaatagctgagcac

SEQ ID NO: 32899 - DNA, 15 bp, Homo sapiens
accaatagctgagca

SEQ ID NO: 32900 - DNA, 15 bp, Homo sapiens
caccaatagctgagc

SEQ ID NO: 32901 - DNA, 15 bp, Homo sapiens
tcaccaatagctgag

SEQ ID NO: 32902 - DNA, 15 bp, Homo sapiens
ttcaccaatagctga

SEQ ID NO: 32903 - DNA, 15 bp, Homo sapiens
cttcaccaatagctg

SEQ ID NO: 32904 - DNA, 15 bp, Homo sapiens
gcttcaccaatagct

SEQ ID NO: 32905 - DNA, 15 bp, Homo sapiens
tgcttcaccaatagc

SEQ ID NO: 32906 - DNA, 15 bp, Homo sapiens
ctgcttcaccaatag

SEQ ID NO: 32907 - DNA, 15 bp, Homo sapiens
cctgcttcaccaata

SEQ ID NO: 32908 - DNA, 15 bp, Homo sapiens
gcctgcttcaccaat

SEQ ID NO: 32909 - DNA, 15 bp, Homo sapiens
tgcctgcttcaccaa

SEQ ID NO: 32910 - DNA, 15 bp, Homo sapiens
atgcctgcttcacca

SEQ ID NO: 32911 - DNA, 15 bp, Homo sapiens
gatgcctgcttcacc

SEQ ID NO: 32912 - DNA, 15 bp, Homo sapiens
cgatgcctgcttcac

SEQ ID NO: 32913 - DNA, 15 bp, Homo sapiens
acgatgcctgcttca

SEQ ID NO: 32914 - DNA, 15 bp, Homo sapiens
gacgatgcctgcttc

SEQ ID NO: 32915 - DNA, 15 bp, Homo sapiens
agacgatgcctgctt

SEQ ID NO: 32916 - DNA, 15 bp, Homo sapiens
tagacgatgcctgct

SEQ ID NO: 32917 - DNA, 15 bp, Homo sapiens
atagacgatgcctgc

SEQ ID NO: 32918 - DNA, 15 bp, Homo sapiens
aatagacgatgcctg

SEQ ID NO: 32919 - DNA, 15 bp, Homo sapiens
gaatagacgatgcct

SEQ ID NO: 32920 - DNA, 15 bp, Homo sapiens
agaatagacgatgcc

SEQ ID NO: 32921 - DNA, 15 bp, Homo sapiens
aagaatagacgatgc

SEQ ID NO: 32922 - DNA, 15 bp, Homo sapiens
gaagaatagacgatg

SEQ ID NO: 32923 - DNA, 15 bp, Homo sapiens
tgaagaatagacgat

SEQ ID NO: 32924 - DNA, 15 bp, Homo sapiens
ttgaagaatagacga

SEQ ID NO: 32925 - DNA, 15 bp, Homo sapiens
cttgaagaatagacg

SEQ ID NO: 32926 - DNA, 15 bp, Homo sapiens
tcttgaagaatagac

SEQ ID NO: 32927 - DNA, 15 bp, Homo sapiens
ttcttgaagaataga

SEQ ID NO: 32928 - DNA, 15 bp, Homo sapiens
cttcttgaagaatag

SEQ ID NO: 32929 - DNA, 15 bp, Homo sapiens
tcttcttgaagaata

SEQ ID NO: 32930 - DNA, 15 bp, Homo sapiens
gtcttcttgaagaat

SEQ ID NO: 32931 - DNA, 15 bp, Homo sapiens
tgtcttcttgaagaa

SEQ ID NO: 32932 - DNA, 15 bp, Homo sapiens
ctgtcttcttgaaga

SEQ ID NO: 32933 - DNA, 15 bp, Homo sapiens
gctgtcttcttgaag

SEQ ID NO: 32934 - DNA, 15 bp, Homo sapiens
tgctgtcttcttgaa

SEQ ID NO: 32935 - DNA, 15 bp, Homo sapiens
ctgctgtcttcttga

SEQ ID NO: 32936 - DNA, 15 bp, Homo sapiens
tctgctgtcttcttg

SEQ ID NO: 32937 - DNA, 15 bp, Homo sapiens
ctctgctgtcttctt

SEQ ID NO: 32938 - DNA, 15 bp, Homo sapiens
gctctgctgtcttct

SEQ ID NO: 32939 - DNA, 15 bp, Homo sapiens
tgctctgctgtcttc

SEQ ID NO: 32940 - DNA, 15 bp, Homo sapiens
atgctctgctgtctt

SEQ ID NO: 32941 - DNA, 15 bp, Homo sapiens
gatgctctgctgtct

SEQ ID NO: 32942 - DNA, 15 bp, Homo sapiens
tgatgctctgctgtc

SEQ ID NO: 32943 - DNA, 15 bp, Homo sapiens
ctgatgctctgctgt

SEQ ID NO: 32944 - DNA, 15 bp, Homo sapiens
cctgatgctctgctg

SEQ ID NO: 32945 - DNA, 15 bp, Homo sapiens
tcctgatgctctgct

SEQ ID NO: 32946 - DNA, 15 bp, Homo sapiens
ttcctgatgctctgc

SEQ ID NO: 32947 - DNA, 15 bp, Homo sapiens
tttcctgatgctctg

SEQ ID NO: 32948 - DNA, 15 bp, Homo sapiens
ttttcctgatgctct

SEQ ID NO: 32949 - DNA, 15 bp, Homo sapiens
gttttcctgatgctc

SEQ ID NO: 32950 - DNA, 15 bp, Homo sapiens
tgttttcctgatgct

SEQ ID NO: 32951 - DNA, 15 bp, Homo sapiens
ttgttttcctgatgc

SEQ ID NO: 32952 - DNA, 15 bp, Homo sapiens
tttgttttcctgatg

SEQ ID NO: 32953 - DNA, 15 bp, Homo sapiens
ttttgttttcctgat

SEQ ID NO: 32954 - DNA, 15 bp, Homo sapiens
gttttgttttcctga

SEQ ID NO: 32955 - DNA, 15 bp, Homo sapiens
tgttttgttttcctg

SEQ ID NO: 32956 - DNA, 15 bp, Homo sapiens
gtgttttgttttcct

SEQ ID NO: 32957 - DNA, 15 bp, Homo sapiens
ggtgttttgttttcc

SEQ ID NO: 32958 - DNA, 15 bp, Homo sapiens
tggtgttttgttttc

SEQ ID NO: 32959 - DNA, 15 bp, Homo sapiens
ttggtgttttgtttt

SEQ ID NO: 32960 - DNA, 15 bp, Homo sapiens
tttggtgttttgttt

SEQ ID NO: 32961 - DNA, 15 bp, Homo sapiens
ttttggtgttttgtt

SEQ ID NO: 32962 - DNA, 15 bp, Homo sapiens
tttttggtgttttgt

SEQ ID NO: 32963 - DNA, 15 bp, Homo sapiens
ttttttggtgttttg

SEQ ID NO: 32964 - DNA, 15 bp, Homo sapiens
tttttttggtgtttt

SEQ ID NO: 32965 - DNA, 15 bp, Homo sapiens
atttttttggtgttt

SEQ ID NO: 32966 - DNA, 15 bp, Homo sapiens
tatttttttggtgtt

SEQ ID NO: 32967 - DNA, 15 bp, Homo sapiens
gtatttttttggtgt

SEQ ID NO: 32968 - DNA, 15 bp, Homo sapiens
ggtatttttttggtg

SEQ ID NO: 32969 - DNA, 15 bp, Homo sapiens
tggtatttttttggt

SEQ ID NO: 32970 - DNA, 15 bp, Homo sapiens
atggtatttttttgg

SEQ ID NO: 32971 - DNA, 15 bp, Homo sapiens
tatggtatttttttg

SEQ ID NO: 32972 - DNA, 15 bp, Homo sapiens
ttatggtattttttt

SEQ ID NO: 32973 - DNA, 15 bp, Homo sapiens
tttatggtatttttt

SEQ ID NO: 32974 - DNA, 15 bp, Homo sapiens
ctttatggtattttt

SEQ ID NO: 32975 - DNA, 15 bp, Homo sapiens
tctttatggtatttt

SEQ ID NO: 32976 - DNA, 15 bp, Homo sapiens
gtctttatggtattt

SEQ ID NO: 32977 - DNA, 15 bp, Homo sapiens
tgtctttatggtatt

SEQ ID NO: 32978 - DNA, 15 bp, Homo sapiens
gtgtctttatggtat

SEQ ID NO: 32979 - DNA, 15 bp, Homo sapiens
agtgtctttatggta

SEQ ID NO: 32980 - DNA, 15 bp, Homo sapiens
cagtgtctttatggt

SEQ ID NO: 32981 - DNA, 15 bp, Homo sapiens
ccagtgtctttatgg

SEQ ID NO: 32982 - DNA, 15 bp, Homo sapiens
tccagtgtctttatg

SEQ ID NO: 32983 - DNA, 15 bp, Homo sapiens
ctccagtgtctttat

SEQ ID NO: 32984 - DNA, 15 bp, Homo sapiens
actccagtgtcttta

SEQ ID NO: 32985 - DNA, 15 bp, Homo sapiens
cactccagtgtcttt

SEQ ID NO: 32986 - DNA, 15 bp, Homo sapiens
acactccagtgtctt

SEQ ID NO: 32987 - DNA, 15 bp, Homo sapiens
tacactccagtgtct

SEQ ID NO: 32988 - DNA, 15 bp, Homo sapiens
atacactccagtgtc

SEQ ID NO: 32989 - DNA, 15 bp, Homo sapiens
aatacactccagtgt

SEQ ID NO: 32990 - DNA, 15 bp, Homo sapiens
aaatacactccagtg

SEQ ID NO: 32991 - DNA, 15 bp, Homo sapiens
caaatacactccagt

SEQ ID NO: 32992 - DNA, 15 bp, Homo sapiens
acaaatacactccag

SEQ ID NO: 32993 - DNA, 15 bp, Homo sapiens
aacaaatacactcca

SEQ ID NO: 32994 - DNA, 15 bp, Homo sapiens
taacaaatacactcc

SEQ ID NO: 32995 - DNA, 15 bp, Homo sapiens
gtaacaaatacactc

SEQ ID NO: 32996 - DNA, 15 bp, Homo sapiens
ggtaacaaatacact

SEQ ID NO: 32997 - DNA, 15 bp, Homo sapiens
tggtaacaaatacac

SEQ ID NO: 32998 - DNA, 15 bp, Homo sapiens
ctggtaacaaataca

SEQ ID NO: 32999 - DNA, 15 bp, Homo sapiens
gctggtaacaaatac

SEQ ID NO: 33000 - DNA, 15 bp, Homo sapiens
ggctggtaacaaata

SEQ ID NO: 33001 - DNA, 15 bp, Homo sapiens
gggctggtaacaaat

SEQ ID NO: 33002 - DNA, 15 bp, Homo sapiens
agggctggtaacaaa

SEQ ID NO: 33003 - DNA, 15 bp, Homo sapiens
aagggctggtaacaa

SEQ ID NO: 33004 - DNA, 15 bp, Homo sapiens
caagggctggtaaca

SEQ ID NO: 33005 - DNA, 15 bp, Homo sapiens
acaagggctggtaac

SEQ ID NO: 33006 - DNA, 15 bp, Homo sapiens
tacaagggctggtaa

SEQ ID NO: 33007 - DNA, 15 bp, Homo sapiens
atacaagggctggta

SEQ ID NO: 33008 - DNA, 15 bp, Homo sapiens
tatacaagggctggt

SEQ ID NO: 33009 - DNA, 15 bp, Homo sapiens
ttatacaagggctgg

SEQ ID NO: 33010 - DNA, 15 bp, Homo sapiens
gttatacaagggctg

SEQ ID NO: 33011 - DNA, 15 bp, Homo sapiens
tgttatacaagggct

SEQ ID NO: 33012 - DNA, 15 bp, Homo sapiens
ctgttatacaagggc

SEQ ID NO: 33013 - DNA, 15 bp, Homo sapiens
tctgttatacaaggg

SEQ ID NO: 33014 - DNA, 15 bp, Homo sapiens
ctctgttatacaagg

SEQ ID NO: 33015 - DNA, 15 bp, Homo sapiens
tctctgttatacaag

SEQ ID NO: 33016 - DNA, 15 bp, Homo sapiens
ttctctgttatacaa

SEQ ID NO: 33017 - DNA, 15 bp, Homo sapiens
cttctctgttataca

SEQ ID NO: 33018 - DNA, 15 bp, Homo sapiens
acttctctgttatac

SEQ ID NO: 33019 - DNA, 15 bp, Homo sapiens
tacttctctgttata

SEQ ID NO: 33020 - DNA, 15 bp, Homo sapiens
atacttctctgttat

SEQ ID NO: 33021 - DNA, 15 bp, Homo sapiens
aatacttctctgtta

SEQ ID NO: 33022 - DNA, 15 bp, Homo sapiens
aaatacttctctgtt

SEQ ID NO: 33023 - DNA, 15 bp, Homo sapiens
gaaatacttctctgt

SEQ ID NO: 33024 - DNA, 15 bp, Homo sapiens
tgaaatacttctctg

SEQ ID NO: 33025 - DNA, 15 bp, Homo sapiens
ttgaaatacttctct

SEQ ID NO: 33026 - DNA, 15 bp, Homo sapiens
cttgaaatacttctc

SEQ ID NO: 33027 - DNA, 15 bp, Homo sapiens
ccttgaaatacttct

SEQ ID NO: 33028 - DNA, 15 bp, Homo sapiens
accttgaaatacttc

SEQ ID NO: 33029 - DNA, 15 bp, Homo sapiens
gaccttgaaatactt

SEQ ID NO: 33030 - DNA, 15 bp, Homo sapiens
agaccttgaaatact

SEQ ID NO: 33031 - DNA, 15 bp, Homo sapiens
aagaccttgaaatac

SEQ ID NO: 33032 - DNA, 15 bp, Homo sapiens
taagaccttgaaata

SEQ ID NO: 33033 - DNA, 15 bp, Homo sapiens
ataagaccttgaaat

SEQ ID NO: 33034 - DNA, 15 bp, Homo sapiens
aataagaccttgaaa

SEQ ID NO: 33035 - DNA, 15 bp, Homo sapiens
aaataagaccttgaa

SEQ ID NO: 33036 - DNA, 15 bp, Homo sapiens
caaataagaccttga

SEQ ID NO: 33037 - DNA, 15 bp, Homo sapiens
acaaataagaccttg

SEQ ID NO: 33038 - DNA, 15 bp, Homo sapiens
tacaaataagacctt

SEQ ID NO: 33039 - DNA, 15 bp, Homo sapiens
ttacaaataagacct

SEQ ID NO: 33040 - DNA, 15 bp, Homo sapiens
cttacaaataagacc

SEQ ID NO: 33041 - DNA, 15 bp, Homo sapiens
ccttacaaataagac

SEQ ID NO: 33042 - DNA, 15 bp, Homo sapiens
gccttacaaataaga

SEQ ID NO: 33043 - DNA, 15 bp, Homo sapiens
agccttacaaataag

SEQ ID NO: 33044 - DNA, 15 bp, Homo sapiens
cagccttacaaataa

SEQ ID NO: 33045 - DNA, 15 bp, Homo sapiens
ccagccttacaaata

SEQ ID NO: 33046 - DNA, 15 bp, Homo sapiens
tccagccttacaaat

SEQ ID NO: 33047 - DNA, 15 bp, Homo sapiens
gtccagccttacaaa

SEQ ID NO: 33048 - DNA, 15 bp, Homo sapiens
tgtccagccttacaa

SEQ ID NO: 33049 - DNA, 15 bp, Homo sapiens
ttgtccagccttaca

SEQ ID NO: 33050 - DNA, 15 bp, Homo sapiens
cttgtccagccttac

SEQ ID NO: 33051 - DNA, 15 bp, Homo sapiens
gcttgtccagcctta

SEQ ID NO: 33052 - DNA, 15 bp, Homo sapiens
agcttgtccagcctt

SEQ ID NO: 33053 - DNA, 15 bp, Homo sapiens
gagcttgtccagcct

SEQ ID NO: 33054 - DNA, 15 bp, Homo sapiens
tgagcttgtccagcc

SEQ ID NO: 33055 - DNA, 15 bp, Homo sapiens
ctgagcttgtccagc

SEQ ID NO: 33056 - DNA, 15 bp, Homo sapiens
cctgagcttgtccag

SEQ ID NO: 33057 - DNA, 15 bp, Homo sapiens
gcctgagcttgtcca

SEQ ID NO: 33058 - DNA, 15 bp, Homo sapiens
agcctgagcttgtcc

SEQ ID NO: 33059 - DNA, 15 bp, Homo sapiens
cagcctgagcttgtc

SEQ ID NO: 33060 - DNA, 15 bp, Homo sapiens
tcagcctgagcttgt

SEQ ID NO: 33061 - DNA, 15 bp, Homo sapiens
atcagcctgagcttg

SEQ ID NO: 33062 - DNA, 15 bp, Homo sapiens
aatcagcctgagctt

SEQ ID NO: 33063 - DNA, 15 bp, Homo sapiens
taatcagcctgagct

SEQ ID NO: 33064 - DNA, 15 bp, Homo sapiens
ttaatcagcctgagc

SEQ ID NO: 33065 - DNA, 15 bp, Homo sapiens
tttaatcagcctgag

SEQ ID NO: 33066 - DNA, 15 bp, Homo sapiens
ttttaatcagcctga

SEQ ID NO: 33067 - DNA, 15 bp, Homo sapiens
gttttaatcagcctg

SEQ ID NO: 33068 - DNA, 15 bp, Homo sapiens
ggttttaatcagcct

SEQ ID NO: 33069 - DNA, 15 bp, Homo sapiens
tggttttaatcagcc

SEQ ID NO: 33070 - DNA, 15 bp, Homo sapiens
gtggttttaatcagc

SEQ ID NO: 33071 - DNA, 15 bp, Homo sapiens
cgtggttttaatcag

SEQ ID NO: 33072 - DNA, 15 bp, Homo sapiens
tcgtggttttaatca

SEQ ID NO: 33073 - DNA, 15 bp, Homo sapiens
ctcgtggttttaatc

SEQ ID NO: 33074 - DNA, 15 bp, Homo sapiens
actcgtggttttaat

SEQ ID NO: 33075 - DNA, 15 bp, Homo sapiens
aactcgtggttttaa

SEQ ID NO: 33076 - DNA, 15 bp, Homo sapiens
taactcgtggtttta

SEQ ID NO: 33077 - DNA, 15 bp, Homo sapiens
ctaactcgtggtttt

SEQ ID NO: 33078 - DNA, 15 bp, Homo sapiens
tctaactcgtggttt

SEQ ID NO: 33079 - DNA, 15 bp, Homo sapiens
ttctaactcgtggtt

SEQ ID NO: 33080 - DNA, 15 bp, Homo sapiens
attctaactcgtggt

SEQ ID NO: 33081 - DNA, 15 bp, Homo sapiens
aattctaactcgtgg

SEQ ID NO: 33082 - DNA, 15 bp, Homo sapiens
aaattctaactcgtg

SEQ ID NO: 33083 - DNA, 15 bp, Homo sapiens
caaattctaactcgt

SEQ ID NO: 33084 - DNA, 15 bp, Homo sapiens
acaaattctaactcg

SEQ ID NO: 33085 - DNA, 15 bp, Homo sapiens
gacaaattctaactc

SEQ ID NO: 33086 - DNA, 15 bp, Homo sapiens
agacaaattctaact

SEQ ID NO: 33087 - DNA, 15 bp, Homo sapiens
gagacaaattctaac

SEQ ID NO: 33088 - DNA, 15 bp, Homo sapiens
ggagacaaattctaa

SEQ ID NO: 33089 - DNA, 15 bp, Homo sapiens
gggagacaaattcta

SEQ ID NO: 33090 - DNA, 15 bp, Homo sapiens
cgggagacaaattct

SEQ ID NO: 33091 - DNA, 15 bp, Homo sapiens
gcgggagacaaattc

SEQ ID NO: 33092 - DNA, 15 bp, Homo sapiens
agcgggagacaaatt

SEQ ID NO: 33093 - DNA, 15 bp, Homo sapiens
gagcgggagacaaat

SEQ ID NO: 33094 - DNA, 15 bp, Homo sapiens
ggagcgggagacaaa

SEQ ID NO: 33095 - DNA, 15 bp, Homo sapiens
gggagcgggagacaa

SEQ ID NO: 33096 - DNA, 15 bp, Homo sapiens
tgggagcgggagaca

SEQ ID NO: 33097 - DNA, 15 bp, Homo sapiens
ctgggagcgggagac

SEQ ID NO: 33098 - DNA, 15 bp, Homo sapiens
cctgggagcgggaga

SEQ ID NO: 33099 - DNA, 15 bp, Homo sapiens
gcctgggagcgggag

SEQ ID NO: 33100 - DNA, 15 bp, Homo sapiens
ggcctgggagcggga

SEQ ID NO: 33101 - DNA, 15 bp, Homo sapiens
gggcctgggagcggg

SEQ ID NO: 33102 - DNA, 15 bp, Homo sapiens
agggcctgggagcgg

SEQ ID NO: 33103 - DNA, 15 bp, Homo sapiens
cagggcctgggagcg

SEQ ID NO: 33104 - DNA, 15 bp, Homo sapiens
gcagggcctgggagc

SEQ ID NO: 33105 - DNA, 15 bp, Homo sapiens
agcagggcctgggag

SEQ ID NO: 33106 - DNA, 15 bp, Homo sapiens
gagcagggcctggga

SEQ ID NO: 33107 - DNA, 15 bp, Homo sapiens
tgagcagggcctggg

SEQ ID NO: 33108 - DNA, 15 bp, Homo sapiens
ctgagcagggcctgg

SEQ ID NO: 33109 - DNA, 15 bp, Homo sapiens
actgagcagggcctg

SEQ ID NO: 33110 - DNA, 15 bp, Homo sapiens
aactgagcagggcct

SEQ ID NO: 33111 - DNA, 15 bp, Homo sapiens
caactgagcagggcc

SEQ ID NO: 33112 - DNA, 15 bp, Homo sapiens
tcaactgagcagggc

SEQ ID NO: 33113 - DNA, 15 bp, Homo sapiens
gtcaactgagcaggg

SEQ ID NO: 33114 - DNA, 15 bp, Homo sapiens
tgtcaactgagcagg

SEQ ID NO: 33115 - DNA, 15 bp, Homo sapiens
ctgtcaactgagcag

SEQ ID NO: 33116 - DNA, 15 bp, Homo sapiens
gctgtcaactgagca

SEQ ID NO: 33117 - DNA, 15 bp, Homo sapiens
agctgtcaactgagc

SEQ ID NO: 33118 - DNA, 15 bp, Homo sapiens
gagctgtcaactgag

SEQ ID NO: 33119 - DNA, 15 bp, Homo sapiens
ggagctgtcaactga

SEQ ID NO: 33120 - DNA, 15 bp, Homo sapiens
aggagctgtcaactg

SEQ ID NO: 33121 - DNA, 15 bp, Homo sapiens
taggagctgtcaact

SEQ ID NO: 33122 - DNA, 15 bp, Homo sapiens
ctaggagctgtcaac

SEQ ID NO: 33123 - DNA, 15 bp, Homo sapiens
gctaggagctgtcaa

SEQ ID NO: 33124 - DNA, 15 bp, Homo sapiens
tgctaggagctgtca

SEQ ID NO: 33125 - DNA, 15 bp, Homo sapiens
ctgctaggagctgtc

SEQ ID NO: 33126 - DNA, 15 bp, Homo sapiens
cctgctaggagctgt

SEQ ID NO: 33127 - DNA, 15 bp, Homo sapiens
gcctgctaggagctg

SEQ ID NO: 33128 - DNA, 15 bp, Homo sapiens
agcctgctaggagct

SEQ ID NO: 33129 - DNA, 15 bp, Homo sapiens
cagcctgctaggagc

SEQ ID NO: 33130 - DNA, 15 bp, Homo sapiens
ccagcctgctaggag

SEQ ID NO: 33131 - DNA, 15 bp, Homo sapiens
cccagcctgctagga

SEQ ID NO: 33132 - DNA, 15 bp, Homo sapiens
tcccagcctgctagg

SEQ ID NO: 33133 - DNA, 15 bp, Homo sapiens
ctcccagcctgctag

SEQ ID NO: 33134 - DNA, 15 bp, Homo sapiens
cctcccagcctgcta

SEQ ID NO: 33135 - DNA, 15 bp, Homo sapiens
gcctcccagcctgct

SEQ ID NO: 33136 - DNA, 15 bp, Homo sapiens
ggcctcccagcctgc

SEQ ID NO: 33137 - DNA, 15 bp, Homo sapiens
gggcctcccagcctg

SEQ ID NO: 33138 - DNA, 15 bp, Homo sapiens
ggggcctcccagcct

SEQ ID NO: 33139 - DNA, 15 bp, Homo sapiens
tggggcctcccagcc

SEQ ID NO: 33140 - DNA, 15 bp, Homo sapiens
gtggggcctcccagc

SEQ ID NO: 33141 - DNA, 15 bp, Homo sapiens
ggtggggcctcccag

SEQ ID NO: 33142 - DNA, 15 bp, Homo sapiens
gggtggggcctccca

SEQ ID NO: 33143 - DNA, 15 bp, Homo sapiens
ggggtggggcctccc

SEQ ID NO: 33144 - DNA, 15 bp, Homo sapiens
tggggtggggcctcc

SEQ ID NO: 33145 - DNA, 15 bp, Homo sapiens
gtggggtggggcctc

SEQ ID NO: 33146 - DNA, 15 bp, Homo sapiens
ggtggggtggggcct

SEQ ID NO: 33147 - DNA, 15 bp, Homo sapiens
gggtggggtggggcc

SEQ ID NO: 33148 - DNA, 15 bp, Homo sapiens
ggggtggggtggggc

SEQ ID NO: 33149 - DNA, 15 bp, Homo sapiens
gggggtggggtgggg

SEQ ID NO: 33150 - DNA, 15 bp, Homo sapiens
tgggggtggggtggg

SEQ ID NO: 33151 - DNA, 15 bp, Homo sapiens
gtgggggtggggtgg

SEQ ID NO: 33152 - DNA, 15 bp, Homo sapiens
ggtgggggtggggtg

SEQ ID NO: 33153 - DNA, 15 bp, Homo sapiens
gggtgggggtggggt

SEQ ID NO: 33154 - DNA, 15 bp, Homo sapiens
tggggtgggggtggg

SEQ ID NO: 33155 - DNA, 15 bp, Homo sapiens
ctggggtgggggtgg

SEQ ID NO: 33156 - DNA, 15 bp, Homo sapiens
cctggggtgggggtg

SEQ ID NO: 33157 - DNA, 15 bp, Homo sapiens
ccctggggtgggggt

SEQ ID NO: 33158 - DNA, 15 bp, Homo sapiens
cccctggggtggggg

SEQ ID NO: 33159 - DNA, 15 bp, Homo sapiens
acccctggggtgggg

SEQ ID NO: 33160 - DNA, 15 bp, Homo sapiens
gacccctggggtggg

SEQ ID NO: 33161 - DNA, 15 bp, Homo sapiens
ggacccctggggtgg

SEQ ID NO: 33162 - DNA, 15 bp, Homo sapiens
tggacccctggggtg

SEQ ID NO: 33163 - DNA, 15 bp, Homo sapiens
atggacccctggggt

SEQ ID NO: 33164 - DNA, 15 bp, Homo sapiens
aatggacccctgggg

SEQ ID NO: 33165 - DNA, 15 bp, Homo sapiens
caatggacccctggg

SEQ ID NO: 33166 - DNA, 15 bp, Homo sapiens
tcaatggacccctgg

SEQ ID NO: 33167 - DNA, 15 bp, Homo sapiens
ttcaatggacccctg

SEQ ID NO: 33168 - DNA, 15 bp, Homo sapiens
cttcaatggacccct

SEQ ID NO: 33169 - DNA, 15 bp, Homo sapiens
tcttcaatggacccc

SEQ ID NO: 33170 - DNA, 15 bp, Homo sapiens
ttcttcaatggaccc

SEQ ID NO: 33171 - DNA, 15 bp, Homo sapiens
cttcttcaatggacc

SEQ ID NO: 33172 - DNA, 15 bp, Homo sapiens
tcttcttcaatggac

SEQ ID NO: 33173 - DNA, 15 bp, Homo sapiens
gtcttcttcaatgga

SEQ ID NO: 33174 - DNA, 15 bp, Homo sapiens
ggtcttcttcaatgg

SEQ ID NO: 33175 - DNA, 15 bp, Homo sapiens
tggtcttcttcaatg

SEQ ID NO: 33176 - DNA, 15 bp, Homo sapiens
atggtcttcttcaat

SEQ ID NO: 33177 - DNA, 15 bp, Homo sapiens
gatggtcttcttcaa

SEQ ID NO: 33178 - DNA, 15 bp, Homo sapiens
agatggtcttcttca

SEQ ID NO: 33179 - DNA, 15 bp, Homo sapiens
cagatggtcttcttc

SEQ ID NO: 33180 - DNA, 15 bp, Homo sapiens
ccagatggtcttctt

SEQ ID NO: 33181 - DNA, 15 bp, Homo sapiens
cccagatggtcttct

SEQ ID NO: 33182 - DNA, 15 bp, Homo sapiens
gcccagatggtcttc

SEQ ID NO: 33183 - DNA, 15 bp, Homo sapiens
ggcccagatggtctt

SEQ ID NO: 33184 - DNA, 15 bp, Homo sapiens
aggcccagatggtct

SEQ ID NO: 33185 - DNA, 15 bp, Homo sapiens
caggcccagatggtc

SEQ ID NO: 33186 - DNA, 15 bp, Homo sapiens
ccaggcccagatggt

SEQ ID NO: 33187 - DNA, 15 bp, Homo sapiens
cccaggcccagatgg

SEQ ID NO: 33188 - DNA, 15 bp, Homo sapiens
tcccaggcccagatg

SEQ ID NO: 33189 - DNA, 15 bp, Homo sapiens
atcccaggcccagat

SEQ ID NO: 33190 - DNA, 15 bp, Homo sapiens
catcccaggcccaga

SEQ ID NO: 33191 - DNA, 15 bp, Homo sapiens
gcatcccaggcccag

SEQ ID NO: 33192 - DNA, 15 bp, Homo sapiens
agcatcccaggccca

SEQ ID NO: 33193 - DNA, 15 bp, Homo sapiens
cagcatcccaggccc

SEQ ID NO: 33194 - DNA, 15 bp, Homo sapiens
tcagcatcccaggcc

SEQ ID NO: 33195 - DNA, 15 bp, Homo sapiens
atcagcatcccaggc

SEQ ID NO: 33196 - DNA, 15 bp, Homo sapiens
catcagcatcccagg

SEQ ID NO: 33197 - DNA, 15 bp, Homo sapiens
acatcagcatcccag

SEQ ID NO: 33198 - DNA, 15 bp, Homo sapiens
cacatcagcatccca

SEQ ID NO: 33199 - DNA, 15 bp, Homo sapiens
tcacatcagcatccc

SEQ ID NO: 33200 - DNA, 15 bp, Homo sapiens
atcacatcagcatcc

SEQ ID NO: 33201 - DNA, 15 bp, Homo sapiens
aatcacatcagcatc

SEQ ID NO: 33202 - DNA, 15 bp, Homo sapiens
aaatcacatcagcat

SEQ ID NO: 33203 - DNA, 15 bp, Homo sapiens
aaaatcacatcagca

SEQ ID NO: 33204 - DNA, 15 bp, Homo sapiens
gaaaatcacatcagc

SEQ ID NO: 33205 - DNA, 15 bp, Homo sapiens
ggaaaatcacatcag

SEQ ID NO: 33206 - DNA, 15 bp, Homo sapiens
gggaaaatcacatca

SEQ ID NO: 33207 - DNA, 15 bp, Homo sapiens
agggaaaatcacatc

SEQ ID NO: 33208 - DNA, 15 bp, Homo sapiens
tagggaaaatcacat

SEQ ID NO: 33209 - DNA, 15 bp, Homo sapiens
gtagggaaaatcaca

SEQ ID NO: 33210 - DNA, 15 bp, Homo sapiens
agtagggaaaatcac

SEQ ID NO: 33211 - DNA, 15 bp, Homo sapiens
aagtagggaaaatca

SEQ ID NO: 33212 - DNA, 15 bp, Homo sapiens
gaagtagggaaaatc

SEQ ID NO: 33213 - DNA, 15 bp, Homo sapiens
agaagtagggaaaat

SEQ ID NO: 33214 - DNA, 15 bp, Homo sapiens
gagaagtagggaaaa

SEQ ID NO: 33215 - DNA, 15 bp, Homo sapiens
ggagaagtagggaaa

SEQ ID NO: 33216 - DNA, 15 bp, Homo sapiens
aggagaagtagggaa

SEQ ID NO: 33217 - DNA, 15 bp, Homo sapiens
aaggagaagtaggga

SEQ ID NO: 33218 - DNA, 15 bp, Homo sapiens
aaaggagaagtaggg

SEQ ID NO: 33219 - DNA, 15 bp, Homo sapiens
aaaaggagaagtagg

SEQ ID NO: 33220 - DNA, 15 bp, Homo sapiens
aaaaaggagaagtag

SEQ ID NO: 33221 - DNA, 15 bp, Homo sapiens
aaaaaaggagaagta

SEQ ID NO: 33222 - DNA, 15 bp, Homo sapiens
aaaaaaaggagaagt

SEQ ID NO: 33223 - DNA, 15 bp, Homo sapiens
aaaaaaaaggagaag

SEQ ID NO: 33224 - DNA, 15 bp, Homo sapiens
gaaaaaaaaggagaa

SEQ ID NO: 33225 - DNA, 15 bp, Homo sapiens
tgaaaaaaaaggaga

SEQ ID NO: 33226 - DNA, 15 bp, Homo sapiens
atgaaaaaaaaggag

SEQ ID NO: 33227 - DNA, 15 bp, Homo sapiens
aatgaaaaaaaagga

SEQ ID NO: 33228 - DNA, 15 bp, Homo sapiens
aaatgaaaaaaaagg

SEQ ID NO: 33229 - DNA, 15 bp, Homo sapiens
caaatgaaaaaaaag

SEQ ID NO: 33230 - DNA, 15 bp, Homo sapiens
gcaaatgaaaaaaaa

SEQ ID NO: 33231 - DNA, 15 bp, Homo sapiens
ggcaaatgaaaaaaa

SEQ ID NO: 33232 - DNA, 15 bp, Homo sapiens
aggcaaatgaaaaaa

SEQ ID NO: 33233 - DNA, 15 bp, Homo sapiens
gaggcaaatgaaaaa

SEQ ID NO: 33234 - DNA, 15 bp, Homo sapiens
ggaggcaaatgaaaa

SEQ ID NO: 33235 - DNA, 15 bp, Homo sapiens
aggaggcaaatgaaa

SEQ ID NO: 33236 - DNA, 15 bp, Homo sapiens
gaggaggcaaatgaa

SEQ ID NO: 33237 - DNA, 15 bp, Homo sapiens
ggaggaggcaaatga

SEQ ID NO: 33238 - DNA, 15 bp, Homo sapiens
tggaggaggcaaatg

SEQ ID NO: 33239 - DNA, 15 bp, Homo sapiens
gtggaggaggcaaat

SEQ ID NO: 33240 - DNA, 15 bp, Homo sapiens
ggtggaggaggcaaa

SEQ ID NO: 33241 - DNA, 15 bp, Homo sapiens
gggtggaggaggcaa

SEQ ID NO: 33242 - DNA, 15 bp, Homo sapiens
tgggtggaggaggca

SEQ ID NO: 33243 - DNA, 15 bp, Homo sapiens
gtgggtggaggaggc

SEQ ID NO: 33244 - DNA, 15 bp, Homo sapiens
agtgggtggaggagg

SEQ ID NO: 33245 - DNA, 15 bp, Homo sapiens
aagtgggtggaggag

SEQ ID NO: 33246 - DNA, 15 bp, Homo sapiens
gaagtgggtggagga

SEQ ID NO: 33247 - DNA, 15 bp, Homo sapiens
agaagtgggtggagg

SEQ ID NO: 33248 - DNA, 15 bp, Homo sapiens
tagaagtgggtggag

SEQ ID NO: 33249 - DNA, 15 bp, Homo sapiens
ttagaagtgggtgga

SEQ ID NO: 33250 - DNA, 15 bp, Homo sapiens
tttagaagtgggtgg

SEQ ID NO: 33251 - DNA, 15 bp, Homo sapiens
ctttagaagtgggtg

SEQ ID NO: 33252 - DNA, 15 bp, Homo sapiens
gctttagaagtgggt

SEQ ID NO: 33253 - DNA, 15 bp, Homo sapiens
tgctttagaagtggg

SEQ ID NO: 33254 - DNA, 15 bp, Homo sapiens
ctgctttagaagtgg

SEQ ID NO: 33255 - DNA, 15 bp, Homo sapiens
gctgctttagaagtg

SEQ ID NO: 33256 - DNA, 15 bp, Homo sapiens
agctgctttagaagt

SEQ ID NO: 33257 - DNA, 15 bp, Homo sapiens
cagctgctttagaag

SEQ ID NO: 33258 - DNA, 15 bp, Homo sapiens
tcagctgctttagaa

SEQ ID NO: 33259 - DNA, 15 bp, Homo sapiens
atcagctgctttaga

SEQ ID NO: 33260 - DNA, 15 bp, Homo sapiens
aatcagctgctttag

SEQ ID NO: 33261 - DNA, 15 bp, Homo sapiens
caatcagctgcttta

SEQ ID NO: 33262 - DNA, 15 bp, Homo sapiens
gcaatcagctgcttt

SEQ ID NO: 33263 - DNA, 15 bp, Homo sapiens
agcaatcagctgctt

SEQ ID NO: 33264 - DNA, 15 bp, Homo sapiens
gagcaatcagctgct

SEQ ID NO: 33265 - DNA, 15 bp, Homo sapiens
agagcaatcagctgc

SEQ ID NO: 33266 - DNA, 15 bp, Homo sapiens
cagagcaatcagctg

SEQ ID NO: 33267 - DNA, 15 bp, Homo sapiens
ccagagcaatcagct

SEQ ID NO: 33268 - DNA, 15 bp, Homo sapiens
accagagcaatcagc

SEQ ID NO: 33269 - DNA, 15 bp, Homo sapiens
aaccagagcaatcag

SEQ ID NO: 33270 - DNA, 15 bp, Homo sapiens
gaaccagagcaatca

SEQ ID NO: 33271 - DNA, 15 bp, Homo sapiens
ggaaccagagcaatc

SEQ ID NO: 33272 - DNA, 15 bp, Homo sapiens
aggaaccagagcaat

SEQ ID NO: 33273 - DNA, 15 bp, Homo sapiens
aaggaaccagagcaa

SEQ ID NO: 33274 - DNA, 15 bp, Homo sapiens
aaaggaaccagagca

SEQ ID NO: 33275 - DNA, 15 bp, Homo sapiens
aaaaggaaccagagc

SEQ ID NO: 33276 - DNA, 15 bp, Homo sapiens
gaaaaggaaccagag

SEQ ID NO: 33277 - DNA, 15 bp, Homo sapiens
tgaaaaggaaccaga

SEQ ID NO: 33278 - DNA, 15 bp, Homo sapiens
atgaaaaggaaccag

SEQ ID NO: 33279 - DNA, 15 bp, Homo sapiens
catgaaaaggaacca

SEQ ID NO: 33280 - DNA, 15 bp, Homo sapiens
acatgaaaaggaacc

SEQ ID NO: 33281 - DNA, 15 bp, Homo sapiens
aacatgaaaaggaac

SEQ ID NO: 33282 - DNA, 15 bp, Homo sapiens
caacatgaaaaggaa

SEQ ID NO: 33283 - DNA, 15 bp, Homo sapiens
tcaacatgaaaagga

SEQ ID NO: 33284 - DNA, 15 bp, Homo sapiens
ctcaacatgaaaagg

SEQ ID NO: 33285 - DNA, 15 bp, Homo sapiens
gctcaacatgaaaag

SEQ ID NO: 33286 - DNA, 15 bp, Homo sapiens
tgctcaacatgaaaa

SEQ ID NO: 33287 - DNA, 15 bp, Homo sapiens
ttgctcaacatgaaa

SEQ ID NO: 33288 - DNA, 15 bp, Homo sapiens
tttgctcaacatgaa

SEQ ID NO: 33289 - DNA, 15 bp, Homo sapiens
ttttgctcaacatga

SEQ ID NO: 33290 - DNA, 15 bp, Homo sapiens
cttttgctcaacatg

SEQ ID NO: 33291 - DNA, 15 bp, Homo sapiens
tcttttgctcaacat

SEQ ID NO: 33292 - DNA, 15 bp, Homo sapiens
ctcttttgctcaaca

SEQ ID NO: 33293 - DNA, 15 bp, Homo sapiens
tctcttttgctcaac

SEQ ID NO: 33294 - DNA, 15 bp, Homo sapiens
ttctcttttgctcaa

SEQ ID NO: 33295 - DNA, 15 bp, Homo sapiens
cttctcttttgctca

SEQ ID NO: 33296 - DNA, 15 bp, Homo sapiens
tcttctcttttgctc

SEQ ID NO: 33297 - DNA, 15 bp, Homo sapiens
gtcttctcttttgct

SEQ ID NO: 33298 - DNA, 15 bp, Homo sapiens
tgtcttctcttttgc

SEQ ID NO: 33299 - DNA, 15 bp, Homo sapiens
ctgtcttctcttttg

SEQ ID NO: 33300 - DNA, 15 bp, Homo sapiens
tctgtcttctctttt

SEQ ID NO: 33301 - DNA, 15 bp, Homo sapiens
atctgtcttctcttt

SEQ ID NO: 33302 - DNA, 15 bp, Homo sapiens
gatctgtcttctctt

SEQ ID NO: 33303 - DNA, 15 bp, Homo sapiens
agatctgtcttctct

SEQ ID NO: 33304 - DNA, 15 bp, Homo sapiens
aagatctgtcttctc

SEQ ID NO: 33305 - DNA, 15 bp, Homo sapiens
caagatctgtcttct

SEQ ID NO: 33306 - DNA, 15 bp, Homo sapiens
tcaagatctgtcttc

SEQ ID NO: 33307 - DNA, 15 bp, Homo sapiens
ttcaagatctgtctt

SEQ ID NO: 33308 - DNA, 15 bp, Homo sapiens
tttcaagatctgtct

SEQ ID NO: 33309 - DNA, 15 bp, Homo sapiens
gtttcaagatctgtc

SEQ ID NO: 33310 - DNA, 15 bp, Homo sapiens
ggtttcaagatctgt

SEQ ID NO: 33311 - DNA, 15 bp, Homo sapiens
aggtttcaagatctg

SEQ ID NO: 33312 - DNA, 15 bp, Homo sapiens
caggtttcaagatct

SEQ ID NO: 33313 - DNA, 15 bp, Homo sapiens
tcaggtttcaagatc

SEQ ID NO: 33314 - DNA, 15 bp, Homo sapiens
ctcaggtttcaagat

SEQ ID NO: 33315 - DNA, 15 bp, Homo sapiens
gctcaggtttcaaga

SEQ ID NO: 33316 - DNA, 15 bp, Homo sapiens
agctcaggtttcaag

SEQ ID NO: 33317 - DNA, 15 bp, Homo sapiens
cagctcaggtttcaa

SEQ ID NO: 33318 - DNA, 15 bp, Homo sapiens
ccagctcaggtttca

SEQ ID NO: 33319 - DNA, 15 bp, Homo sapiens
cccagctcaggtttc

SEQ ID NO: 33320 - DNA, 15 bp, Homo sapiens
ccccagctcaggttt

SEQ ID NO: 33321 - DNA, 15 bp, Homo sapiens
tccccagctcaggtt

SEQ ID NO: 33322 - DNA, 15 bp, Homo sapiens
gtccccagctcaggt

SEQ ID NO: 33323 - DNA, 15 bp, Homo sapiens
agtccccagctcagg

SEQ ID NO: 33324 - DNA, 15 bp, Homo sapiens
cagtccccagctcag

SEQ ID NO: 33325 - DNA, 15 bp, Homo sapiens
ccagtccccagctca

SEQ ID NO: 33326 - DNA, 15 bp, Homo sapiens
tccagtccccagctc

SEQ ID NO: 33327 - DNA, 15 bp, Homo sapiens
ctccagtccccagct

SEQ ID NO: 33328 - DNA, 15 bp, Homo sapiens
cctccagtccccagc

SEQ ID NO: 33329 - DNA, 15 bp, Homo sapiens
ccctccagtccccag

SEQ ID NO: 33330 - DNA, 15 bp, Homo sapiens
gccctccagtcccca

SEQ ID NO: 33331 - DNA, 15 bp, Homo sapiens
tgccctccagtcccc

SEQ ID NO: 33332 - DNA, 15 bp, Homo sapiens
gtgccctccagtccc

SEQ ID NO: 33333 - DNA, 15 bp, Homo sapiens
agtgccctccagtcc

SEQ ID NO: 33334 - DNA, 15 bp, Homo sapiens
cagtgccctccagtc

SEQ ID NO: 33335 - DNA, 15 bp, Homo sapiens
tcagtgccctccagt

SEQ ID NO: 33336 - DNA, 15 bp, Homo sapiens
gtcagtgccctccag

SEQ ID NO: 33337 - DNA, 15 bp, Homo sapiens
ggtcagtgccctcca

SEQ ID NO: 33338 - DNA, 15 bp, Homo sapiens
cggtcagtgccctcc

SEQ ID NO: 33339 - DNA, 15 bp, Homo sapiens
tcggtcagtgccctc

SEQ ID NO: 33340 - DNA, 15 bp, Homo sapiens
ctcggtcagtgccct

SEQ ID NO: 33341 - DNA, 15 bp, Homo sapiens
tctcggtcagtgccc

SEQ ID NO: 33342 - DNA, 15 bp, Homo sapiens
ctctcggtcagtgcc

SEQ ID NO: 33343 - DNA, 15 bp, Homo sapiens
actctcggtcagtgc

SEQ ID NO: 33344 - DNA, 15 bp, Homo sapiens
tactctcggtcagtg

SEQ ID NO: 33345 - DNA, 15 bp, Homo sapiens
ttactctcggtcagt

SEQ ID NO: 33346 - DNA, 15 bp, Homo sapiens
gttactctcggtcag

SEQ ID NO: 33347 - DNA, 15 bp, Homo sapiens
ggttactctcggtca

SEQ ID NO: 33348 - DNA, 15 bp, Homo sapiens
gggttactctcggtc

SEQ ID NO: 33349 - DNA, 15 bp, Homo sapiens
ggggttactctcggt

SEQ ID NO: 33350 - DNA, 15 bp, Homo sapiens
cggggttactctcgg

SEQ ID NO: 33351 - DNA, 15 bp, Homo sapiens
acggggttactctcg

SEQ ID NO: 33352 - DNA, 15 bp, Homo sapiens
gacggggttactctc

SEQ ID NO: 33353 - DNA, 15 bp, Homo sapiens
agacggggttactct

SEQ ID NO: 33354 - DNA, 15 bp, Homo sapiens
cagacggggttactc

SEQ ID NO: 33355 - DNA, 15 bp, Homo sapiens
ccagacggggttact

SEQ ID NO: 33356 - DNA, 15 bp, Homo sapiens
gccagacggggttac

SEQ ID NO: 33357 - DNA, 15 bp, Homo sapiens
agccagacggggtta

SEQ ID NO: 33358 - DNA, 15 bp, Homo sapiens
gagccagacggggtt

SEQ ID NO: 33359 - DNA, 15 bp, Homo sapiens
tgagccagacggggt

SEQ ID NO: 33360 - DNA, 15 bp, Homo sapiens
ctgagccagacgggg

SEQ ID NO: 33361 - DNA, 15 bp, Homo sapiens
gctgagccagacggg

SEQ ID NO: 33362 - DNA, 15 bp, Homo sapiens
agctgagccagacgg

SEQ ID NO: 33363 - DNA, 15 bp, Homo sapiens
gagctgagccagacg

SEQ ID NO: 33364 - DNA, 15 bp, Homo sapiens
tgagctgagccagac

SEQ ID NO: 33365 - DNA, 15 bp, Homo sapiens
ctgagctgagccaga

SEQ ID NO: 33366 - DNA, 15 bp, Homo sapiens
gctgagctgagccag

SEQ ID NO: 33367 - DNA, 15 bp, Homo sapiens
agctgagctgagcca

SEQ ID NO: 33368 - DNA, 15 bp, Homo sapiens
gagctgagctgagcc

SEQ ID NO: 33369 - DNA, 15 bp, Homo sapiens
tgagctgagctgagc

SEQ ID NO: 33370 - DNA, 15 bp, Homo sapiens
ctgagctgagctgag

SEQ ID NO: 33371 - DNA, 15 bp, Homo sapiens
gctgagctgagctga

SEQ ID NO: 33372 - DNA, 15 bp, Homo sapiens
tgctgagctgagctg

SEQ ID NO: 33373 - DNA, 15 bp, Homo sapiens
ttgctgagctgagct

SEQ ID NO: 33374 - DNA, 15 bp, Homo sapiens
tttgctgagctgagc

SEQ ID NO: 33375 - DNA, 15 bp, Homo sapiens
ctttgctgagctgag

SEQ ID NO: 33376 - DNA, 15 bp, Homo sapiens
cctttgctgagctga

SEQ ID NO: 33377 - DNA, 15 bp, Homo sapiens
ccctttgctgagctg

SEQ ID NO: 33378 - DNA, 15 bp, Homo sapiens
gccctttgctgagct

SEQ ID NO: 33379 - DNA, 15 bp, Homo sapiens
agccctttgctgagc

SEQ ID NO: 33380 - DNA, 15 bp, Homo sapiens
aagccctttgctgag

SEQ ID NO: 33381 - DNA, 15 bp, Homo sapiens
aaagccctttgctga

SEQ ID NO: 33382 - DNA, 15 bp, Homo sapiens
gaaagccctttgctg

SEQ ID NO: 33383 - DNA, 15 bp, Homo sapiens
ggaaagccctttgct

SEQ ID NO: 33384 - DNA, 15 bp, Homo sapiens
aggaaagccctttgc

SEQ ID NO: 33385 - DNA, 15 bp, Homo sapiens
gaggaaagccctttg

SEQ ID NO: 33386 - DNA, 15 bp, Homo sapiens
ggaggaaagcccttt

SEQ ID NO: 33387 - DNA, 15 bp, Homo sapiens
aggaggaaagccctt

SEQ ID NO: 33388 - DNA, 15 bp, Homo sapiens
gaggaggaaagccct

SEQ ID NO: 33389 - DNA, 15 bp, Homo sapiens
ggaggaggaaagccc

SEQ ID NO: 33390 - DNA, 15 bp, Homo sapiens
cggaggaggaaagcc

SEQ ID NO: 33391 - DNA, 15 bp, Homo sapiens
gcggaggaggaaagc

SEQ ID NO: 33392 - DNA, 15 bp, Homo sapiens
ggcggaggaggaaag

SEQ ID NO: 33393 - DNA, 15 bp, Homo sapiens
aggcggaggaggaaa

SEQ ID NO: 33394 - DNA, 15 bp, Homo sapiens
aaggcggaggaggaa

SEQ ID NO: 33395 - DNA, 15 bp, Homo sapiens
gaaggcggaggagga

SEQ ID NO: 33396 - DNA, 15 bp, Homo sapiens
ggaaggcggaggagg

SEQ ID NO: 33397 - DNA, 15 bp, Homo sapiens
aggaaggcggaggag

SEQ ID NO: 33398 - DNA, 15 bp, Homo sapiens
caggaaggcggagga

SEQ ID NO: 33399 - DNA, 15 bp, Homo sapiens
tcaggaaggcggagg

SEQ ID NO: 33400 - DNA, 15 bp, Homo sapiens
ctcaggaaggcggag

SEQ ID NO: 33401 - DNA, 15 bp, Homo sapiens
gctcaggaaggcgga

SEQ ID NO: 33402 - DNA, 15 bp, Homo sapiens
agctcaggaaggcgg

SEQ ID NO: 33403 - DNA, 15 bp, Homo sapiens
cagctcaggaaggcg

SEQ ID NO: 33404 - DNA, 15 bp, Homo sapiens
gcagctcaggaaggc

SEQ ID NO: 33405 - DNA, 15 bp, Homo sapiens
agcagctcaggaagg

SEQ ID NO: 33406 - DNA, 15 bp, Homo sapiens
gagcagctcaggaag

SEQ ID NO: 33407 - DNA, 15 bp, Homo sapiens
agagcagctcaggaa

SEQ ID NO: 33408 - DNA, 15 bp, Homo sapiens
gagagcagctcagga

SEQ ID NO: 33409 - DNA, 15 bp, Homo sapiens
ggagagcagctcagg

SEQ ID NO: 33410 - DNA, 15 bp, Homo sapiens
gggagagcagctcag

SEQ ID NO: 33411 - DNA, 15 bp, Homo sapiens
agggagagcagctca

SEQ ID NO: 33412 - DNA, 15 bp, Homo sapiens
gagggagagcagctc

SEQ ID NO: 33413 - DNA, 15 bp, Homo sapiens
ggagggagagcagct

SEQ ID NO: 33414 - DNA, 15 bp, Homo sapiens
aggagggagagcagc

SEQ ID NO: 33415 - DNA, 15 bp, Homo sapiens
gaggagggagagcag

SEQ ID NO: 33416 - DNA, 15 bp, Homo sapiens
agaggagggagagca

SEQ ID NO: 33417 - DNA, 15 bp, Homo sapiens
gagaggagggagagc

SEQ ID NO: 33418 - DNA, 15 bp, Homo sapiens
ggagaggagggagag

SEQ ID NO: 33419 - DNA, 15 bp, Homo sapiens
aggagaggagggaga

SEQ ID NO: 33420 - DNA, 15 bp, Homo sapiens
aaggagaggagggag

SEQ ID NO: 33421 - DNA, 15 bp, Homo sapiens
aaaggagaggaggga

SEQ ID NO: 33422 - DNA, 15 bp, Homo sapiens
gaaaggagaggaggg

SEQ ID NO: 33423 - DNA, 15 bp, Homo sapiens
ggaaaggagaggagg

SEQ ID NO: 33424 - DNA, 15 bp, Homo sapiens
aggaaaggagaggag

SEQ ID NO: 33425 - DNA, 15 bp, Homo sapiens
gaggaaaggagagga

SEQ ID NO: 33426 - DNA, 15 bp, Homo sapiens
ggaggaaaggagagg

SEQ ID NO: 33427 - DNA, 15 bp, Homo sapiens
aggaggaaaggagag

SEQ ID NO: 33428 - DNA, 15 bp, Homo sapiens
aaggaggaaaggaga

SEQ ID NO: 33429 - DNA, 15 bp, Homo sapiens
gaaggaggaaaggag

SEQ ID NO: 33430 - DNA, 15 bp, Homo sapiens
agaaggaggaaagga

SEQ ID NO: 33431 - DNA, 15 bp, Homo sapiens
aagaaggaggaaagg

SEQ ID NO: 33432 - DNA, 15 bp, Homo sapiens
aaagaaggaggaaag

SEQ ID NO: 33433 - DNA, 15 bp, Homo sapiens
gaaagaaggaggaaa

SEQ ID NO: 33434 - DNA, 15 bp, Homo sapiens
ggaaagaaggaggaa

SEQ ID NO: 33435 - DNA, 15 bp, Homo sapiens
gggaaagaaggagga

SEQ ID NO: 33436 - DNA, 15 bp, Homo sapiens
tgggaaagaaggagg

SEQ ID NO: 33437 - DNA, 15 bp, Homo sapiens
ctgggaaagaaggag

SEQ ID NO: 33438 - DNA, 15 bp, Homo sapiens
gctgggaaagaagga

SEQ ID NO: 33439 - DNA, 15 bp, Homo sapiens
ggctgggaaagaagg

SEQ ID NO: 33440 - DNA, 15 bp, Homo sapiens
aggctgggaaagaag

SEQ ID NO: 33441 - DNA, 15 bp, Homo sapiens
gaggctgggaaagaa

SEQ ID NO: 33442 - DNA, 15 bp, Homo sapiens
ggaggctgggaaaga

SEQ ID NO: 33443 - DNA, 15 bp, Homo sapiens
gggaggctgggaaag

SEQ ID NO: 33444 - DNA, 15 bp, Homo sapiens
ggggaggctgggaaa

SEQ ID NO: 33445 - DNA, 15 bp, Homo sapiens
gggggaggctgggaa

SEQ ID NO: 33446 - DNA, 15 bp, Homo sapiens
tgggggaggctggga

SEQ ID NO: 33447 - DNA, 15 bp, Homo sapiens
ttgggggaggctggg

SEQ ID NO: 33448 - DNA, 15 bp, Homo sapiens
cttgggggaggctgg

SEQ ID NO: 33449 - DNA, 15 bp, Homo sapiens
gcttgggggaggctg

SEQ ID NO: 33450 - DNA, 15 bp, Homo sapiens
agcttgggggaggct

SEQ ID NO: 33451 - DNA, 15 bp, Homo sapiens
gagcttgggggaggc

SEQ ID NO: 33452 - DNA, 15 bp, Homo sapiens
ggagcttgggggagg

SEQ ID NO: 33453 - DNA, 15 bp, Homo sapiens
aggagcttgggggag

SEQ ID NO: 33454 - DNA, 15 bp, Homo sapiens
aaggagcttggggga

SEQ ID NO: 33455 - DNA, 15 bp, Homo sapiens
gaaggagcttggggg

SEQ ID NO: 33456 - DNA, 15 bp, Homo sapiens
tgaaggagcttgggg

SEQ ID NO: 33457 - DNA, 15 bp, Homo sapiens
gtgaaggagcttggg

SEQ ID NO: 33458 - DNA, 15 bp, Homo sapiens
ggtgaaggagcttgg

SEQ ID NO: 33459 - DNA, 15 bp, Homo sapiens
gggtgaaggagcttg

SEQ ID NO: 33460 - DNA, 15 bp, Homo sapiens
ggggtgaaggagctt

SEQ ID NO: 33461 - DNA, 15 bp, Homo sapiens
aggggtgaaggagct

SEQ ID NO: 33462 - DNA, 15 bp, Homo sapiens
gaggggtgaaggagc

SEQ ID NO: 33463 - DNA, 15 bp, Homo sapiens
agaggggtgaaggag

SEQ ID NO: 33464 - DNA, 15 bp, Homo sapiens
gagaggggtgaagga

SEQ ID NO: 33465 - DNA, 15 bp, Homo sapiens
agagaggggtgaagg

SEQ ID NO: 33466 - DNA, 15 bp, Homo sapiens
aagagaggggtgaag

SEQ ID NO: 33467 - DNA, 15 bp, Homo sapiens
gaagagaggggtgaa

SEQ ID NO: 33468 - DNA, 15 bp, Homo sapiens
ggaagagaggggtga

SEQ ID NO: 33469 - DNA, 15 bp, Homo sapiens
gggaagagaggggtg

SEQ ID NO: 33470 - DNA, 15 bp, Homo sapiens
agggaagagaggggt

SEQ ID NO: 33471 - DNA, 15 bp, Homo sapiens
gagggaagagagggg

SEQ ID NO: 33472 - DNA, 15 bp, Homo sapiens
agagggaagagaggg

SEQ ID NO: 33473 - DNA, 15 bp, Homo sapiens
gagagggaagagagg

SEQ ID NO: 33474 - DNA, 15 bp, Homo sapiens
ggagagggaagagag

SEQ ID NO: 33475 - DNA, 15 bp, Homo sapiens
ggaggagagggaaga

SEQ ID NO: 33476 - DNA, 15 bp, Homo sapiens
gggaggagagggaag

SEQ ID NO: 33477 - DNA, 15 bp, Homo sapiens
agggaggagagggaa

SEQ ID NO: 33478 - DNA, 15 bp, Homo sapiens
gagggaggagaggga

SEQ ID NO: 33479 - DNA, 15 bp, Homo sapiens
ggagggaggagaggg

SEQ ID NO: 33480 - DNA, 15 bp, Homo sapiens
aggagggaggagagg

SEQ ID NO: 33481 - DNA, 15 bp, Homo sapiens
gaggagggaggagag

SEQ ID NO: 33482 - DNA, 15 bp, Homo sapiens
ggaggagggaggaga

SEQ ID NO: 33483 - DNA, 15 bp, Homo sapiens
gggaggagggaggag

SEQ ID NO: 33484 - DNA, 15 bp, Homo sapiens
tgggaggagggagga

SEQ ID NO: 33485 - DNA, 15 bp, Homo sapiens
gtgggaggagggagg

SEQ ID NO: 33486 - DNA, 15 bp, Homo sapiens
ggtgggaggagggag

SEQ ID NO: 33487 - DNA, 15 bp, Homo sapiens
aggtgggaggaggga

SEQ ID NO: 33488 - DNA, 15 bp, Homo sapiens
aaggtgggaggaggg

SEQ ID NO: 33489 - DNA, 15 bp, Homo sapiens
gaaggtgggaggagg

SEQ ID NO: 33490 - DNA, 15 bp, Homo sapiens
ggaaggtgggaggag

SEQ ID NO: 33491 - DNA, 15 bp, Homo sapiens
aggaaggtgggagga

SEQ ID NO: 33492 - DNA, 15 bp, Homo sapiens
aaggaaggtgggagg

SEQ ID NO: 33493 - DNA, 15 bp, Homo sapiens
caaggaaggtgggag

SEQ ID NO: 33494 - DNA, 15 bp, Homo sapiens
acaaggaaggtggga

SEQ ID NO: 33495 - DNA, 15 bp, Homo sapiens
gacaaggaaggtggg

SEQ ID NO: 33496 - DNA, 15 bp, Homo sapiens
ggacaaggaaggtgg

SEQ ID NO: 33497 - DNA, 15 bp, Homo sapiens
aggacaaggaaggtg

SEQ ID NO: 33498 - DNA, 15 bp, Homo sapiens
gaggacaaggaaggt

SEQ ID NO: 33499 - DNA, 15 bp, Homo sapiens
agaggacaaggaagg

SEQ ID NO: 33500 - DNA, 15 bp, Homo sapiens
tagaggacaaggaag

SEQ ID NO: 33501 - DNA, 15 bp, Homo sapiens
atagaggacaaggaa

SEQ ID NO: 33502 - DNA, 15 bp, Homo sapiens
catagaggacaagga

SEQ ID NO: 33503 - DNA, 15 bp, Homo sapiens
gcatagaggacaagg

SEQ ID NO: 33504 - DNA, 15 bp, Homo sapiens
agcatagaggacaag

SEQ ID NO: 33505 - DNA, 15 bp, Homo sapiens
gagcatagaggacaa

SEQ ID NO: 33506 - DNA, 15 bp, Homo sapiens
tgagcatagaggaca

SEQ ID NO: 33507 - DNA, 15 bp, Homo sapiens
ctgagcatagaggac

SEQ ID NO: 33508 - DNA, 15 bp, Homo sapiens
tctgagcatagagga

SEQ ID NO: 33509 - DNA, 15 bp, Homo sapiens
ctctgagcatagagg

SEQ ID NO: 33510 - DNA, 15 bp, Homo sapiens
tctctgagcatagag

SEQ ID NO: 33511 - DNA, 15 bp, Homo sapiens
ttctctgagcataga

SEQ ID NO: 33512 - DNA, 15 bp, Homo sapiens
gttctctgagcatag

SEQ ID NO: 33513 - DNA, 15 bp, Homo sapiens
agttctctgagcata

SEQ ID NO: 33514 - DNA, 15 bp, Homo sapiens
cagttctctgagcat

SEQ ID NO: 33515 - DNA, 15 bp, Homo sapiens
tcagttctctgagca

SEQ ID NO: 33516 - DNA, 15 bp, Homo sapiens
ttcagttctctgagc

SEQ ID NO: 33517 - DNA, 15 bp, Homo sapiens
cttcagttctctgag

SEQ ID NO: 33518 - DNA, 15 bp, Homo sapiens
ccttcagttctctga

SEQ ID NO: 33519 - DNA, 15 bp, Homo sapiens
tccttcagttctctg

SEQ ID NO: 33520 - DNA, 15 bp, Homo sapiens
ttccttcagttctct

SEQ ID NO: 33521 - DNA, 15 bp, Homo sapiens
gttccttcagttctc

SEQ ID NO: 33522 - DNA, 15 bp, Homo sapiens
tgttccttcagttct

SEQ ID NO: 33523 - DNA, 15 bp, Homo sapiens
gtgttccttcagttc

SEQ ID NO: 33524 - DNA, 15 bp, Homo sapiens
agtgttccttcagtt

SEQ ID NO: 33525 - DNA, 15 bp, Homo sapiens
cagtgttccttcagt

SEQ ID NO: 33526 - DNA, 15 bp, Homo sapiens
tcagtgttccttcag

SEQ ID NO: 33527 - DNA, 15 bp, Homo sapiens
ttcagtgttccttca

SEQ ID NO: 33528 - DNA, 15 bp, Homo sapiens
attcagtgttccttc

SEQ ID NO: 33529 - DNA, 15 bp, Homo sapiens
cattcagtgttcctt

SEQ ID NO: 33530 - DNA, 15 bp, Homo sapiens
ccattcagtgttcct

SEQ ID NO: 33531 - DNA, 15 bp, Homo sapiens
gccattcagtgttcc

SEQ ID NO: 33532 - DNA, 15 bp, Homo sapiens
ggccattcagtgttc

SEQ ID NO: 33533 - DNA, 15 bp, Homo sapiens
aggccattcagtgtt

SEQ ID NO: 33534 - DNA, 15 bp, Homo sapiens
caggccattcagtgt

SEQ ID NO: 33535 - DNA, 15 bp, Homo sapiens
ccaggccattcagtg

SEQ ID NO: 33536 - DNA, 15 bp, Homo sapiens
tccaggccattcagt

SEQ ID NO: 33537 - DNA, 15 bp, Homo sapiens
ttccaggccattcag

SEQ ID NO: 33538 - DNA, 15 bp, Homo sapiens
tttccaggccattca

SEQ ID NO: 33539 - DNA, 15 bp, Homo sapiens
ctttccaggccattc

SEQ ID NO: 33540 - DNA, 15 bp, Homo sapiens
gctttccaggccatt

SEQ ID NO: 33541 - DNA, 15 bp, Homo sapiens
tgctttccaggccat

SEQ ID NO: 33542 - DNA, 15 bp, Homo sapiens
ctgctttccaggcca

SEQ ID NO: 33543 - DNA, 15 bp, Homo sapiens
cctgctttccaggcc

SEQ ID NO: 33544 - DNA, 15 bp, Homo sapiens
tcctgctttccaggc

SEQ ID NO: 33545 - DNA, 15 bp, Homo sapiens
gtcctgctttccagg

SEQ ID NO: 33546 - DNA, 15 bp, Homo sapiens
ggtcctgctttccag

SEQ ID NO: 33547 - DNA, 15 bp, Homo sapiens
aggtcctgctttcca

SEQ ID NO: 33548 - DNA, 15 bp, Homo sapiens
gaggtcctgctttcc

SEQ ID NO: 33549 - DNA, 15 bp, Homo sapiens
cgaggtcctgctttc

SEQ ID NO: 33550 - DNA, 15 bp, Homo sapiens
gcgaggtcctgcttt

SEQ ID NO: 33551 - DNA, 15 bp, Homo sapiens
ggcgaggtcctgctt

SEQ ID NO: 33552 - DNA, 15 bp, Homo sapiens
gggcgaggtcctgct

SEQ ID NO: 33553 - DNA, 15 bp, Homo sapiens
ggggcgaggtcctgc

SEQ ID NO: 33554 - DNA, 15 bp, Homo sapiens
gggggcgaggtcctg

SEQ ID NO: 33555 - DNA, 15 bp, Homo sapiens
tgggggcgaggtcct

SEQ ID NO: 33556 - DNA, 15 bp, Homo sapiens
gtgggggcgaggtcc

SEQ ID NO: 33557 - DNA, 15 bp, Homo sapiens
ggtgggggcgaggtc

SEQ ID NO: 33558 - DNA, 15 bp, Homo sapiens
gggtgggggcgaggt

SEQ ID NO: 33559 - DNA, 15 bp, Homo sapiens
ggggtgggggcgagg

SEQ ID NO: 33560 - DNA, 15 bp, Homo sapiens
cggggtgggggcgag

SEQ ID NO: 33561 - DNA, 15 bp, Homo sapiens
gcggggtgggggcga

SEQ ID NO: 33562 - DNA, 15 bp, Homo sapiens
cgcggggtgggggcg

SEQ ID NO: 33563 - DNA, 15 bp, Homo sapiens
acgcggggtgggggc

SEQ ID NO: 33564 - DNA, 15 bp, Homo sapiens
gacgcggggtggggg

SEQ ID NO: 33565 - DNA, 15 bp, Homo sapiens
tgacgcggggtgggg

SEQ ID NO: 33566 - DNA, 15 bp, Homo sapiens
atgacgcggggtggg

SEQ ID NO: 33567 - DNA, 15 bp, Homo sapiens
tatgacgcggggtgg

SEQ ID NO: 33568 - DNA, 15 bp, Homo sapiens
gtatgacgcggggtg

SEQ ID NO: 33569 - DNA, 15 bp, Homo sapiens
ggtatgacgcggggt

SEQ ID NO: 33570 - DNA, 15 bp, Homo sapiens
gggtatgacgcgggg

SEQ ID NO: 33571 - DNA, 15 bp, Homo sapiens
ggggtatgacgcggg

SEQ ID NO: 33572 - DNA, 15 bp, Homo sapiens
aggggtatgacgcgg

SEQ ID NO: 33573 - DNA, 15 bp, Homo sapiens
gaggggtatgacgcg

SEQ ID NO: 33574 - DNA, 15 bp, Homo sapiens
ggaggggtatgacgc

SEQ ID NO: 33575 - DNA, 15 bp, Homo sapiens
cggaggggtatgacg

SEQ ID NO: 33576 - DNA, 15 bp, Homo sapiens
gcggaggggtatgac

SEQ ID NO: 33577 - DNA, 15 bp, Homo sapiens
ggcggaggggtatga

SEQ ID NO: 33578 - DNA, 15 bp, Homo sapiens
aggcggaggggtatg

SEQ ID NO: 33579 - DNA, 15 bp, Homo sapiens
caggcggaggggtat

SEQ ID NO: 33580 - DNA, 15 bp, Homo sapiens
gcaggcggaggggta

SEQ ID NO: 33581 - DNA, 15 bp, Homo sapiens
tgcaggcggaggggt

SEQ ID NO: 33582 - DNA, 15 bp, Homo sapiens
gtgcaggcggagggg

SEQ ID NO: 33583 - DNA, 15 bp, Homo sapiens
cgtgcaggcggaggg

SEQ ID NO: 33584 - DNA, 15 bp, Homo sapiens
acgtgcaggcggagg

SEQ ID NO: 33585 - DNA, 15 bp, Homo sapiens
cacgtgcaggcggag

SEQ ID NO: 33586 - DNA, 15 bp, Homo sapiens
gcacgtgcaggcgga

SEQ ID NO: 33587 - DNA, 15 bp, Homo sapiens
tgcacgtgcaggcgg

SEQ ID NO: 33588 - DNA, 15 bp, Homo sapiens
ttgcacgtgcaggcg

SEQ ID NO: 33589 - DNA, 15 bp, Homo sapiens
tttgcacgtgcaggc

SEQ ID NO: 33590 - DNA, 15 bp, Homo sapiens
atttgcacgtgcagg

SEQ ID NO: 33591 - DNA, 15 bp, Homo sapiens
catttgcacgtgcag

SEQ ID NO: 33592 - DNA, 15 bp, Homo sapiens
acatttgcacgtgca

SEQ ID NO: 33593 - DNA, 15 bp, Homo sapiens
cacatttgcacgtgc

SEQ ID NO: 33594 - DNA, 15 bp, Homo sapiens
acacatttgcacgtg

SEQ ID NO: 33595 - DNA, 15 bp, Homo sapiens
aacacatttgcacgt

SEQ ID NO: 33596 - DNA, 15 bp, Homo sapiens
gaacacatttgcacg

SEQ ID NO: 33597 - DNA, 15 bp, Homo sapiens
ggaacacatttgcac

SEQ ID NO: 33598 - DNA, 15 bp, Homo sapiens
aggaacacatttgca

SEQ ID NO: 33599 - DNA, 15 bp, Homo sapiens
gaggaacacatttgc

SEQ ID NO: 33600 - DNA, 15 bp, Homo sapiens
tgaggaacacatttg

SEQ ID NO: 33601 - DNA, 15 bp, Homo sapiens
ctgaggaacacattt

SEQ ID NO: 33602 - DNA, 15 bp, Homo sapiens
gctgaggaacacatt

SEQ ID NO: 33603 - DNA, 15 bp, Homo sapiens
agctgaggaacacat

SEQ ID NO: 33604 - DNA, 15 bp, Homo sapiens
aagctgaggaacaca

SEQ ID NO: 33605 - DNA, 15 bp, Homo sapiens
caagctgaggaacac

SEQ ID NO: 33606 - DNA, 15 bp, Homo sapiens
ccaagctgaggaaca

SEQ ID NO: 33607 - DNA, 15 bp, Homo sapiens
accaagctgaggaac

SEQ ID NO: 33608 - DNA, 15 bp, Homo sapiens
gaccaagctgaggaa

SEQ ID NO: 33609 - DNA, 15 bp, Homo sapiens
ggaccaagctgagga

SEQ ID NO: 33610 - DNA, 15 bp, Homo sapiens
gggaccaagctgagg

SEQ ID NO: 33611 - DNA, 15 bp, Homo sapiens
tgggaccaagctgag

SEQ ID NO: 33612 - DNA, 15 bp, Homo sapiens
ctgggaccaagctga

SEQ ID NO: 33613 - DNA, 15 bp, Homo sapiens
tctgggaccaagctg

SEQ ID NO: 33614 - DNA, 15 bp, Homo sapiens
ctctgggaccaagct

SEQ ID NO: 33615 - DNA, 15 bp, Homo sapiens
cctctgggaccaagc

SEQ ID NO: 33616 - DNA, 15 bp, Homo sapiens
gcctctgggaccaag

SEQ ID NO: 33617 - DNA, 15 bp, Homo sapiens
ggcctctgggaccaa

SEQ ID NO: 33618 - DNA, 15 bp, Homo sapiens
aggcctctgggacca

SEQ ID NO: 33619 - DNA, 15 bp, Homo sapiens
caggcctctgggacc

SEQ ID NO: 33620 - DNA, 15 bp, Homo sapiens
ccaggcctctgggac

SEQ ID NO: 33621 - DNA, 15 bp, Homo sapiens
tccaggcctctggga

SEQ ID NO: 33622 - DNA, 15 bp, Homo sapiens
gtccaggcctctggg

SEQ ID NO: 33623 - DNA, 15 bp, Homo sapiens
ggtccaggcctctgg

SEQ ID NO: 33624 - DNA, 15 bp, Homo sapiens
aggtccaggcctctg

SEQ ID NO: 33625 - DNA, 15 bp, Homo sapiens
caggtccaggcctct

SEQ ID NO: 33626 - DNA, 15 bp, Homo sapiens
ccaggtccaggcctc

SEQ ID NO: 33627 - DNA, 15 bp, Homo sapiens
cccaggtccaggcct

SEQ ID NO: 33628 - DNA, 15 bp, Homo sapiens
acccaggtccaggcc

SEQ ID NO: 33629 - DNA, 15 bp, Homo sapiens
gacccaggtccaggc

SEQ ID NO: 33630 - DNA, 15 bp, Homo sapiens
ggacccaggtccagg

SEQ ID NO: 33631 - DNA, 15 bp, Homo sapiens
gggacccaggtccag

SEQ ID NO: 33632 - DNA, 15 bp, Homo sapiens
tgggacccaggtcca

SEQ ID NO: 33633 - DNA, 15 bp, Homo sapiens
ctgggacccaggtcc

SEQ ID NO: 33634 - DNA, 15 bp, Homo sapiens
tctgggacccaggtc

SEQ ID NO: 33635 - DNA, 15 bp, Homo sapiens
ctctgggacccaggt

SEQ ID NO: 33636 - DNA, 15 bp, Homo sapiens
cctctgggacccagg

SEQ ID NO: 33637 - DNA, 15 bp, Homo sapiens
acctctgggacccag

SEQ ID NO: 33638 - DNA, 15 bp, Homo sapiens
gacctctgggaccca

SEQ ID NO: 33639 - DNA, 15 bp, Homo sapiens
ggacctctgggaccc

SEQ ID NO: 33640 - DNA, 15 bp, Homo sapiens
gggacctctgggacc

SEQ ID NO: 33641 - DNA, 15 bp, Homo sapiens
tgggacctctgggac

SEQ ID NO: 33642 - DNA, 15 bp, Homo sapiens
ctgggacctctggga

SEQ ID NO: 33643 - DNA, 15 bp, Homo sapiens
gctgggacctctggg

SEQ ID NO: 33644 - DNA, 15 bp, Homo sapiens
agctgggacctctgg

SEQ ID NO: 33645 - DNA, 15 bp, Homo sapiens
cagctgggacctctg

SEQ ID NO: 33646 - DNA, 15 bp, Homo sapiens
ccagctgggacctct

SEQ ID NO: 33647 - DNA, 15 bp, Homo sapiens
accagctgggacctc

SEQ ID NO: 33648 - DNA, 15 bp, Homo sapiens
aaccagctgggacct

SEQ ID NO: 33649 - DNA, 15 bp, Homo sapiens
gaaccagctgggacc

SEQ ID NO: 33650 - DNA, 15 bp, Homo sapiens
ggaaccagctgggac

SEQ ID NO: 33651 - DNA, 15 bp, Homo sapiens
gggaaccagctggga

SEQ ID NO: 33652 - DNA, 15 bp, Homo sapiens
ggggaaccagctggg

SEQ ID NO: 33653 - DNA, 15 bp, Homo sapiens
cggggaaccagctgg

SEQ ID NO: 33654 - DNA, 15 bp, Homo sapiens
ccggggaaccagctg

SEQ ID NO: 33655 - DNA, 15 bp, Homo sapiens
gccggggaaccagct

SEQ ID NO: 33656 - DNA, 15 bp, Homo sapiens
agccggggaaccagc

SEQ ID NO: 33657 - DNA, 15 bp, Homo sapiens
aagccggggaaccag

SEQ ID NO: 33658 - DNA, 15 bp, Homo sapiens
caagccggggaacca

SEQ ID NO: 33659 - DNA, 15 bp, Homo sapiens
ccaagccggggaacc

SEQ ID NO: 33660 - DNA, 15 bp, Homo sapiens
accaagccggggaac

SEQ ID NO: 33661 - DNA, 15 bp, Homo sapiens
gaccaagccggggaa

SEQ ID NO: 33662 - DNA, 15 bp, Homo sapiens
ggaccaagccgggga

SEQ ID NO: 33663 - DNA, 15 bp, Homo sapiens
gggaccaagccgggg

SEQ ID NO: 33664 - DNA, 15 bp, Homo sapiens
tgggaccaagccggg

SEQ ID NO: 33665 - DNA, 15 bp, Homo sapiens
ctgggaccaagccgg

SEQ ID NO: 33666 - DNA, 15 bp, Homo sapiens
tctgggaccaagccg

SEQ ID NO: 33667 - DNA, 15 bp, Homo sapiens
ctctgggaccaagcc

SEQ ID NO: 33668 - DNA, 15 bp, Homo sapiens
atccaggcctctggg

SEQ ID NO: 33669 - DNA, 15 bp, Homo sapiens
catccaggcctctgg

SEQ ID NO: 33670 - DNA, 15 bp, Homo sapiens
acatccaggcctctg

SEQ ID NO: 33671 - DNA, 15 bp, Homo sapiens
cacatccaggcctct

SEQ ID NO: 33672 - DNA, 15 bp, Homo sapiens
acacatccaggcctc

SEQ ID NO: 33673 - DNA, 15 bp, Homo sapiens
cacacatccaggcct

SEQ ID NO: 33674 - DNA, 15 bp, Homo sapiens
ccacacatccaggcc

SEQ ID NO: 33675 - DNA, 15 bp, Homo sapiens
gccacacatccaggc

SEQ ID NO: 33676 - DNA, 15 bp, Homo sapiens
tgccacacatccagg

SEQ ID NO: 33677 - DNA, 15 bp, Homo sapiens
ttgccacacatccag

SEQ ID NO: 33678 - DNA, 15 bp, Homo sapiens
cttgccacacatcca

SEQ ID NO: 33679 - DNA, 15 bp, Homo sapiens
tcttgccacacatcc

SEQ ID NO: 33680 - DNA, 15 bp, Homo sapiens
ttcttgccacacatc

SEQ ID NO: 33681 - DNA, 15 bp, Homo sapiens
cttcttgccacacat

SEQ ID NO: 33682 - DNA, 15 bp, Homo sapiens
gcttcttgccacaca

SEQ ID NO: 33683 - DNA, 15 bp, Homo sapiens
agcttcttgccacac

SEQ ID NO: 33684 - DNA, 15 bp, Homo sapiens
cagcttcttgccaca

SEQ ID NO: 33685 - DNA, 15 bp, Homo sapiens
tcagcttcttgccac

SEQ ID NO: 33686 - DNA, 15 bp, Homo sapiens
ctcagcttcttgcca

SEQ ID NO: 33687 - DNA, 15 bp, Homo sapiens
cctcagcttcttgcc

SEQ ID NO: 33688 - DNA, 15 bp, Homo sapiens
ccctcagcttcttgc

SEQ ID NO: 33689 - DNA, 15 bp, Homo sapiens
accctcagcttcttg

SEQ ID NO: 33690 - DNA, 15 bp, Homo sapiens
aaccctcagcttctt

SEQ ID NO: 33691 - DNA, 15 bp, Homo sapiens
gaaccctcagcttct

SEQ ID NO: 33692 - DNA, 15 bp, Homo sapiens
agaaccctcagcttc

SEQ ID NO: 33693 - DNA, 15 bp, Homo sapiens
cagaaccctcagctt

SEQ ID NO: 33694 - DNA, 15 bp, Homo sapiens
gcagaaccctcagct

SEQ ID NO: 33695 - DNA, 15 bp, Homo sapiens
agcagaaccctcagc

SEQ ID NO: 33696 - DNA, 15 bp, Homo sapiens
aagcagaaccctcag

SEQ ID NO: 33697 - DNA, 15 bp, Homo sapiens
gaagcagaaccctca

SEQ ID NO: 33698 - DNA, 15 bp, Homo sapiens
cgaagcagaaccctc

SEQ ID NO: 33699 - DNA, 15 bp, Homo sapiens
acgaagcagaaccct

SEQ ID NO: 33700 - DNA, 15 bp, Homo sapiens
aacgaagcagaaccc

SEQ ID NO: 33701 - DNA, 15 bp, Homo sapiens
aaacgaagcagaacc

SEQ ID NO: 33702 - DNA, 15 bp, Homo sapiens
gaaacgaagcagaac

SEQ ID NO: 33703 - DNA, 15 bp, Homo sapiens
agaaacgaagcagaa

SEQ ID NO: 33704 - DNA, 15 bp, Homo sapiens
aagaaacgaagcaga

SEQ ID NO: 33705 - DNA, 15 bp, Homo sapiens
gaagaaacgaagcag

SEQ ID NO: 33706 - DNA, 15 bp, Homo sapiens
ggaagaaacgaagca

SEQ ID NO: 33707 - DNA, 15 bp, Homo sapiens
tggaagaaacgaagc

SEQ ID NO: 33708 - DNA, 15 bp, Homo sapiens
ctggaagaaacgaag

SEQ ID NO: 33709 - DNA, 15 bp, Homo sapiens
gctggaagaaacgaa

SEQ ID NO: 33710 - DNA, 15 bp, Homo sapiens
ggctggaagaaacga

SEQ ID NO: 33711 - DNA, 15 bp, Homo sapiens
gggctggaagaaacg

SEQ ID NO: 33712 - DNA, 15 bp, Homo sapiens
tgggctggaagaaac

SEQ ID NO: 33713 - DNA, 15 bp, Homo sapiens
gtgggctggaagaaa

SEQ ID NO: 33714 - DNA, 15 bp, Homo sapiens
tgtgggctggaagaa

SEQ ID NO: 33715 - DNA, 15 bp, Homo sapiens
ttgtgggctggaaga

SEQ ID NO: 33716 - DNA, 15 bp, Homo sapiens
tttgtgggctggaag

SEQ ID NO: 33717 - DNA, 15 bp, Homo sapiens
gtttgtgggctggaa

SEQ ID NO: 33718 - DNA, 15 bp, Homo sapiens
tgtttgtgggctgga

SEQ ID NO: 33719 - DNA, 15 bp, Homo sapiens
gtgtttgtgggctgg

SEQ ID NO: 33720 - DNA, 15 bp, Homo sapiens
tgtgtttgtgggctg

SEQ ID NO: 33721 - DNA, 15 bp, Homo sapiens
gtgtgtttgtgggct

SEQ ID NO: 33722 - DNA, 15 bp, Homo sapiens
tgtgtgtttgtgggc

SEQ ID NO: 33723 - DNA, 15 bp, Homo sapiens
atgtgtgtttgtggg

SEQ ID NO: 33724 - DNA, 15 bp, Homo sapiens
catgtgtgtttgtgg

SEQ ID NO: 33725 - DNA, 15 bp, Homo sapiens
acatgtgtgtttgtg

SEQ ID NO: 33726 - DNA, 15 bp, Homo sapiens
gacatgtgtgtttgt

SEQ ID NO: 33727 - DNA, 15 bp, Homo sapiens
tgacatgtgtgtttg

SEQ ID NO: 33728 - DNA, 15 bp, Homo sapiens
gtgacatgtgtgttt

SEQ ID NO: 33729 - DNA, 15 bp, Homo sapiens
ggtgacatgtgtgtt

SEQ ID NO: 33730 - DNA, 15 bp, Homo sapiens
aggtgacatgtgtgt

SEQ ID NO: 33731 - DNA, 15 bp, Homo sapiens
caggtgacatgtgtg

SEQ ID NO: 33732 - DNA, 15 bp, Homo sapiens
acaggtgacatgtgt

SEQ ID NO: 33733 - DNA, 15 bp, Homo sapiens
aacaggtgacatgtg

SEQ ID NO: 33734 - DNA, 15 bp, Homo sapiens
aaacaggtgacatgt

SEQ ID NO: 33735 - DNA, 15 bp, Homo sapiens
aaaacaggtgacatg

SEQ ID NO: 33736 - DNA, 15 bp, Homo sapiens
aaaaacaggtgacat

SEQ ID NO: 33737 - DNA, 15 bp, Homo sapiens
aaaaaacaggtgaca

SEQ ID NO: 33738 - DNA, 15 bp, Homo sapiens
caaaaaacaggtgac

SEQ ID NO: 33739 - DNA, 15 bp, Homo sapiens
acaaaaaacaggtga

SEQ ID NO: 33740 - DNA, 15 bp, Homo sapiens
aacaaaaaacaggtg

SEQ ID NO: 33741 - DNA, 15 bp, Homo sapiens
gaacaaaaaacaggt

SEQ ID NO: 33742 - DNA, 15 bp, Homo sapiens
agaacaaaaaacagg

SEQ ID NO: 33743 - DNA, 15 bp, Homo sapiens
aagaacaaaaaacag

SEQ ID NO: 33744 - DNA, 15 bp, Homo sapiens
aaagaacaaaaaaca

SEQ ID NO: 33745 - DNA, 15 bp, Homo sapiens
aaaagaacaaaaaac

SEQ ID NO: 33746 - DNA, 15 bp, Homo sapiens
gaaaaagaacaaaaa

SEQ ID NO: 33747 - DNA, 15 bp, Homo sapiens
ggaaaaagaacaaaa

SEQ ID NO: 33748 - DNA, 15 bp, Homo sapiens
aggaaaaagaacaaa

SEQ ID NO: 33749 - DNA, 15 bp, Homo sapiens
aaggaaaaagaacaa

SEQ ID NO: 33750 - DNA, 15 bp, Homo sapiens
aaaggaaaaagaaca

SEQ ID NO: 33751 - DNA, 15 bp, Homo sapiens
gaaaggaaaaagaac

SEQ ID NO: 33752 - DNA, 15 bp, Homo sapiens
ggaaaggaaaaagaa

SEQ ID NO: 33753 - DNA, 15 bp, Homo sapiens
aggaaaggaaaaaga

SEQ ID NO: 33754 - DNA, 15 bp, Homo sapiens
aaggaaaggaaaaag

SEQ ID NO: 33755 - DNA, 15 bp, Homo sapiens
aaaggaaaggaaaaa

SEQ ID NO: 33756 - DNA, 15 bp, Homo sapiens
caaaggaaaggaaaa

SEQ ID NO: 33757 - DNA, 15 bp, Homo sapiens
gcaaaggaaaggaaa

SEQ ID NO: 33758 - DNA, 15 bp, Homo sapiens
ggcaaaggaaaggaa

SEQ ID NO: 33759 - DNA, 15 bp, Homo sapiens
gggcaaaggaaagga

SEQ ID NO: 33760 - DNA, 15 bp, Homo sapiens
ggggcaaaggaaagg

SEQ ID NO: 33761 - DNA, 15 bp, Homo sapiens
tggggcaaaggaaag

SEQ ID NO: 33762 - DNA, 15 bp, Homo sapiens
gtggggcaaaggaaa

SEQ ID NO: 33763 - DNA, 15 bp, Homo sapiens
agtggggcaaaggaa

SEQ ID NO: 33764 - DNA, 15 bp, Homo sapiens
aagtggggcaaagga

SEQ ID NO: 33765 - DNA, 15 bp, Homo sapiens
aaagtggggcaaagg

SEQ ID NO: 33766 - DNA, 15 bp, Homo sapiens
taaagtggggcaaag

SEQ ID NO: 33767 - DNA, 15 bp, Homo sapiens
gtaaagtggggcaaa

SEQ ID NO: 33768 - DNA, 15 bp, Homo sapiens
tgtaaagtggggcaa

SEQ ID NO: 33769 - DNA, 15 bp, Homo sapiens
ctgtaaagtggggca

SEQ ID NO: 33770 - DNA, 15 bp, Homo sapiens
tctgtaaagtggggc

SEQ ID NO: 33771 - DNA, 15 bp, Homo sapiens
ttctgtaaagtgggg

SEQ ID NO: 33772 - DNA, 15 bp, Homo sapiens
cttctgtaaagtggg

SEQ ID NO: 33773 - DNA, 15 bp, Homo sapiens
gcttctgtaaagtgg

SEQ ID NO: 33774 - DNA, 15 bp, Homo sapiens
agcttctgtaaagtg

SEQ ID NO: 33775 - DNA, 15 bp, Homo sapiens
gagcttctgtaaagt

SEQ ID NO: 33776 - DNA, 15 bp, Homo sapiens
agagcttctgtaaag

SEQ ID NO: 33777 - DNA, 15 bp, Homo sapiens
aagagcttctgtaaa

SEQ ID NO: 33778 - DNA, 15 bp, Homo sapiens
caagagcttctgtaa

SEQ ID NO: 33779 - DNA, 15 bp, Homo sapiens
ccaagagcttctgta

SEQ ID NO: 33780 - DNA, 15 bp, Homo sapiens
gccaagagcttctgt

SEQ ID NO: 33781 - DNA, 15 bp, Homo sapiens
agccaagagcttctg

SEQ ID NO: 33782 - DNA, 15 bp, Homo sapiens
tagccaagagcttct

SEQ ID NO: 33783 - DNA, 15 bp, Homo sapiens
ttagccaagagcttc

SEQ ID NO: 33784 - DNA, 15 bp, Homo sapiens
attagccaagagctt

SEQ ID NO: 33785 - DNA, 15 bp, Homo sapiens
aattagccaagagct

SEQ ID NO: 33786 - DNA, 15 bp, Homo sapiens
caattagccaagagc

SEQ ID NO: 33787 - DNA, 15 bp, Homo sapiens
ccaattagccaagag

SEQ ID NO: 33788 - DNA, 15 bp, Homo sapiens
accaattagccaaga

SEQ ID NO: 33789 - DNA, 15 bp, Homo sapiens
taccaattagccaag

SEQ ID NO: 33790 - DNA, 15 bp, Homo sapiens
ctaccaattagccaa

SEQ ID NO: 33791 - DNA, 15 bp, Homo sapiens
cctaccaattagcca

SEQ ID NO: 33792 - DNA, 15 bp, Homo sapiens
acctaccaattagcc

SEQ ID NO: 33793 - DNA, 15 bp, Homo sapiens
gacctaccaattagc

SEQ ID NO: 33794 - DNA, 15 bp, Homo sapiens
tgacctaccaattag

SEQ ID NO: 33795 - DNA, 15 bp, Homo sapiens
gtgacctaccaatta

SEQ ID NO: 33796 - DNA, 15 bp, Homo sapiens
agtgacctaccaatt

SEQ ID NO: 33797 - DNA, 15 bp, Homo sapiens
cagtgacctaccaat

SEQ ID NO: 33798 - DNA, 15 bp, Homo sapiens
acagtgacctaccaa

SEQ ID NO: 33799 - DNA, 15 bp, Homo sapiens
aacagtgacctacca

SEQ ID NO: 33800 - DNA, 15 bp, Homo sapiens
aaacagtgacctacc

SEQ ID NO: 33801 - DNA, 15 bp, Homo sapiens
caaacagtgacctac

SEQ ID NO: 33802 - DNA, 15 bp, Homo sapiens
gcaaacagtgaccta

SEQ ID NO: 33803 - DNA, 15 bp, Homo sapiens
agcaaacagtgacct

SEQ ID NO: 33804 - DNA, 15 bp, Homo sapiens
gagcaaacagtgacc

SEQ ID NO: 33805 - DNA, 15 bp, Homo sapiens
ggagcaaacagtgac

SEQ ID NO: 33806 - DNA, 15 bp, Homo sapiens
aggagcaaacagtga

SEQ ID NO: 33807 - DNA, 15 bp, Homo sapiens
gaggagcaaacagtg

SEQ ID NO: 33808 - DNA, 15 bp, Homo sapiens
ggaggagcaaacagt

SEQ ID NO: 33809 - DNA, 15 bp, Homo sapiens
tggaggagcaaacag

SEQ ID NO: 33810 - DNA, 15 bp, Homo sapiens
ctggaggagcaaaca

SEQ ID NO: 33811 - DNA, 15 bp, Homo sapiens
cctggaggagcaaac

SEQ ID NO: 33812 - DNA, 15 bp, Homo sapiens
gcctggaggagcaaa

SEQ ID NO: 33813 - DNA, 15 bp, Homo sapiens
tgcctggaggagcaa

SEQ ID NO: 33814 - DNA, 15 bp, Homo sapiens
ttgcctggaggagca

SEQ ID NO: 33815 - DNA, 15 bp, Homo sapiens
tttgcctggaggagc

SEQ ID NO: 33816 - DNA, 15 bp, Homo sapiens
ttttgcctggaggag

SEQ ID NO: 33817 - DNA, 15 bp, Homo sapiens
gttttgcctggagga

SEQ ID NO: 33818 - DNA, 15 bp, Homo sapiens
ggttttgcctggagg

SEQ ID NO: 33819 - DNA, 15 bp, Homo sapiens
tggttttgcctggag

SEQ ID NO: 33820 - DNA, 15 bp, Homo sapiens
ttggttttgcctgga

SEQ ID NO: 33821 - DNA, 15 bp, Homo sapiens
cttggttttgcctgg

SEQ ID NO: 33822 - DNA, 15 bp, Homo sapiens
ccttggttttgcctg

SEQ ID NO: 33823 - DNA, 15 bp, Homo sapiens
tccttggttttgcct

SEQ ID NO: 33824 - DNA, 15 bp, Homo sapiens
ctccttggttttgcc

SEQ ID NO: 33825 - DNA, 15 bp, Homo sapiens
cctccttggttttgc

SEQ ID NO: 33826 - DNA, 15 bp, Homo sapiens
gcctccttggttttg

SEQ ID NO: 33827 - DNA, 15 bp, Homo sapiens
agcctccttggtttt

SEQ ID NO: 33828 - DNA, 15 bp, Homo sapiens
cagcctccttggttt

SEQ ID NO: 33829 - DNA, 15 bp, Homo sapiens
tcagcctccttggtt

SEQ ID NO: 33830 - DNA, 15 bp, Homo sapiens
ctcagcctccttggt

SEQ ID NO: 33831 - DNA, 15 bp, Homo sapiens
gctcagcctccttgg

SEQ ID NO: 33832 - DNA, 15 bp, Homo sapiens
agctcagcctccttg

SEQ ID NO: 33833 - DNA, 15 bp, Homo sapiens
gagctcagcctcctt

SEQ ID NO: 33834 - DNA, 15 bp, Homo sapiens
tgagctcagcctcct

SEQ ID NO: 33835 - DNA, 15 bp, Homo sapiens
ctgagctcagcctcc

SEQ ID NO: 33836 - DNA, 15 bp, Homo sapiens
gctgagctcagcctc

SEQ ID NO: 33837 - DNA, 15 bp, Homo sapiens
tgctgagctcagcct

SEQ ID NO: 33838 - DNA, 15 bp, Homo sapiens
ctgctgagctcagcc

SEQ ID NO: 33839 - DNA, 15 bp, Homo sapiens
cctgctgagctcagc

SEQ ID NO: 33840 - DNA, 15 bp, Homo sapiens
acctgctgagctcag

SEQ ID NO: 33841 - DNA, 15 bp, Homo sapiens
gacctgctgagctca

SEQ ID NO: 33842 - DNA, 15 bp, Homo sapiens
tgacctgctgagctc

SEQ ID NO: 33843 - DNA, 15 bp, Homo sapiens
ttgacctgctgagct

SEQ ID NO: 33844 - DNA, 15 bp, Homo sapiens
cttgacctgctgagc

SEQ ID NO: 33845 - DNA, 15 bp, Homo sapiens
acttgacctgctgag

SEQ ID NO: 33846 - DNA, 15 bp, Homo sapiens
tacttgacctgctga

SEQ ID NO: 33847 - DNA, 15 bp, Homo sapiens
atacttgacctgctg

SEQ ID NO: 33848 - DNA, 15 bp, Homo sapiens
aatacttgacctgct

SEQ ID NO: 33849 - DNA, 15 bp, Homo sapiens
aaatacttgacctgc

SEQ ID NO: 33850 - DNA, 15 bp, Homo sapiens
aaaatacttgacctg

SEQ ID NO: 33851 - DNA, 15 bp, Homo sapiens
caaaatacttgacct

SEQ ID NO: 33852 - DNA, 15 bp, Homo sapiens
ccaaaatacttgacc

SEQ ID NO: 33853 - DNA, 15 bp, Homo sapiens
accaaaatacttgac

SEQ ID NO: 33854 - DNA, 15 bp, Homo sapiens
gaccaaaatacttga

SEQ ID NO: 33855 - DNA, 15 bp, Homo sapiens
agaccaaaatacttg

SEQ ID NO: 33856 - DNA, 15 bp, Homo sapiens
cagaccaaaatactt

SEQ ID NO: 33857 - DNA, 15 bp, Homo sapiens
acagaccaaaatact

SEQ ID NO: 33858 - DNA, 15 bp, Homo sapiens
tacagaccaaaatac

SEQ ID NO: 33859 - DNA, 15 bp, Homo sapiens
atacagaccaaaata

SEQ ID NO: 33860 - DNA, 15 bp, Homo sapiens
aatacagaccaaaat

SEQ ID NO: 33861 - DNA, 15 bp, Homo sapiens
caatacagaccaaaa

SEQ ID NO: 33862 - DNA, 15 bp, Homo sapiens
tcaatacagaccaaa

SEQ ID NO: 33863 - DNA, 15 bp, Homo sapiens
ttcaatacagaccaa

SEQ ID NO: 33864 - DNA, 15 bp, Homo sapiens
cttcaatacagacca

SEQ ID NO: 33865 - DNA, 15 bp, Homo sapiens
tcttcaatacagacc

SEQ ID NO: 33866 - DNA, 15 bp, Homo sapiens
ctcttcaatacagac

SEQ ID NO: 33867 - DNA, 15 bp, Homo sapiens
tctcttcaatacaga

SEQ ID NO: 33868 - DNA, 15 bp, Homo sapiens
gtctcttcaatacag

SEQ ID NO: 33869 - DNA, 15 bp, Homo sapiens
agtctcttcaataca

SEQ ID NO: 33870 - DNA, 15 bp, Homo sapiens
cagtctcttcaatac

SEQ ID NO: 33871 - DNA, 15 bp, Homo sapiens
acagtctcttcaata

SEQ ID NO: 33872 - DNA, 15 bp, Homo sapiens
cacagtctcttcaat

SEQ ID NO: 33873 - DNA, 15 bp, Homo sapiens
ccacagtctcttcaa

SEQ ID NO: 33874 - DNA, 15 bp, Homo sapiens
accacagtctcttca

SEQ ID NO: 33875 - DNA, 15 bp, Homo sapiens
caccacagtctcttc

SEQ ID NO: 33876 - DNA, 15 bp, Homo sapiens
ccaccacagtctctt

SEQ ID NO: 33877 - DNA, 15 bp, Homo sapiens
cccaccacagtctct

SEQ ID NO: 33878 - DNA, 15 bp, Homo sapiens
tcccaccacagtctc

SEQ ID NO: 33879 - DNA, 15 bp, Homo sapiens
ctcccaccacagtct

SEQ ID NO: 33880 - DNA, 15 bp, Homo sapiens
tctcccaccacagtc

SEQ ID NO: 33881 - DNA, 15 bp, Homo sapiens
ctctcccaccacagt

SEQ ID NO: 33882 - DNA, 15 bp, Homo sapiens
gctctcccaccacag

SEQ ID NO: 33883 - DNA, 15 bp, Homo sapiens
ggctctcccaccaca

SEQ ID NO: 33884 - DNA, 15 bp, Homo sapiens
gggctctcccaccac

SEQ ID NO: 33885 - DNA, 15 bp, Homo sapiens
agggctctcccacca

SEQ ID NO: 33886 - DNA, 15 bp, Homo sapiens
gagggctctcccacc

SEQ ID NO: 33887 - DNA, 15 bp, Homo sapiens
agagggctctcccac

SEQ ID NO: 33888 - DNA, 15 bp, Homo sapiens
aagagggctctccca

SEQ ID NO: 33889 - DNA, 15 bp, Homo sapiens
caagagggctctccc

SEQ ID NO: 33890 - DNA, 15 bp, Homo sapiens
tcaagagggctctcc

SEQ ID NO: 33891 - DNA, 15 bp, Homo sapiens
gtcaagagggctctc

SEQ ID NO: 33892 - DNA, 15 bp, Homo sapiens
ggtcaagagggctct

SEQ ID NO: 33893 - DNA, 15 bp, Homo sapiens
aggtcaagagggctc

SEQ ID NO: 33894 - DNA, 15 bp, Homo sapiens
aaggtcaagagggct

SEQ ID NO: 33895 - DNA, 15 bp, Homo sapiens
gaaggtcaagagggc

SEQ ID NO: 33896 - DNA, 15 bp, Homo sapiens
agaaggtcaagaggg

SEQ ID NO: 33897 - DNA, 15 bp, Homo sapiens
cagaaggtcaagagg

SEQ ID NO: 33898 - DNA, 15 bp, Homo sapiens
gcagaaggtcaagag

SEQ ID NO: 33899 - DNA, 15 bp, Homo sapiens
agcagaaggtcaaga

SEQ ID NO: 33900 - DNA, 15 bp, Homo sapiens
cagcagaaggtcaag

SEQ ID NO: 33901 - DNA, 15 bp, Homo sapiens
ccagcagaaggtcaa

SEQ ID NO: 33902 - DNA, 15 bp, Homo sapiens
tccagcagaaggtca

SEQ ID NO: 33903 - DNA, 15 bp, Homo sapiens
atccagcagaaggtc

SEQ ID NO: 33904 - DNA, 15 bp, Homo sapiens
tatccagcagaaggt

SEQ ID NO: 33905 - DNA, 15 bp, Homo sapiens
ctatccagcagaagg

SEQ ID NO: 33906 - DNA, 15 bp, Homo sapiens
actatccagcagaag

SEQ ID NO: 33907 - DNA, 15 bp, Homo sapiens
cactatccagcagaa

SEQ ID NO: 33908 - DNA, 15 bp, Homo sapiens
tcactatccagcaga

SEQ ID NO: 33909 - DNA, 15 bp, Homo sapiens
gtcactatccagcag

SEQ ID NO: 33910 - DNA, 15 bp, Homo sapiens
agtcactatccagca

SEQ ID NO: 33911 - DNA, 15 bp, Homo sapiens
aagtcactatccagc

SEQ ID NO: 33912 - DNA, 15 bp, Homo sapiens
aaagtcactatccag

SEQ ID NO: 33913 - DNA, 15 bp, Homo sapiens
gaaagtcactatcca

SEQ ID NO: 33914 - DNA, 15 bp, Homo sapiens
agaaagtcactatcc

SEQ ID NO: 33915 - DNA, 15 bp, Homo sapiens
gagaaagtcactatc

SEQ ID NO: 33916 - DNA, 15 bp, Homo sapiens
agagaaagtcactat

SEQ ID NO: 33917 - DNA, 15 bp, Homo sapiens
aagagaaagtcacta

SEQ ID NO: 33918 - DNA, 15 bp, Homo sapiens
gaagagaaagtcact

SEQ ID NO: 33919 - DNA, 15 bp, Homo sapiens
agaagagaaagtcac

SEQ ID NO: 33920 - DNA, 15 bp, Homo sapiens
cagaagagaaagtca

SEQ ID NO: 33921 - DNA, 15 bp, Homo sapiens
gcagaagagaaagtc

SEQ ID NO: 33922 - DNA, 15 bp, Homo sapiens
agcagaagagaaagt

SEQ ID NO: 33923 - DNA, 15 bp, Homo sapiens
cagcagaagagaaag

SEQ ID NO: 33924 - DNA, 15 bp, Homo sapiens
ccagcagaagagaaa

SEQ ID NO: 33925 - DNA, 15 bp, Homo sapiens
gccagcagaagagaa

SEQ ID NO: 33926 - DNA, 15 bp, Homo sapiens
tgccagcagaagaga

SEQ ID NO: 33927 - DNA, 15 bp, Homo sapiens
ctgccagcagaagag

SEQ ID NO: 33928 - DNA, 15 bp, Homo sapiens
gctgccagcagaaga

SEQ ID NO: 33929 - DNA, 15 bp, Homo sapiens
tgctgccagcagaag

SEQ ID NO: 33930 - DNA, 15 bp, Homo sapiens
ctgctgccagcagaa

SEQ ID NO: 33931 - DNA, 15 bp, Homo sapiens
actgctgccagcaga

SEQ ID NO: 33932 - DNA, 15 bp, Homo sapiens
tactgctgccagcag

SEQ ID NO: 33933 - DNA, 15 bp, Homo sapiens
ctactgctgccagca

SEQ ID NO: 33934 - DNA, 15 bp, Homo sapiens
gctactgctgccagc

SEQ ID NO: 33935 - DNA, 15 bp, Homo sapiens
ggctactgctgccag

SEQ ID NO: 33936 - DNA, 15 bp, Homo sapiens
gggctactgctgcca

SEQ ID NO: 33937 - DNA, 15 bp, Homo sapiens
tgggctactgctgcc

SEQ ID NO: 33938 - DNA, 15 bp, Homo sapiens
ctgggctactgctgc

SEQ ID NO: 33939 - DNA, 15 bp, Homo sapiens
gctgggctactgctg

SEQ ID NO: 33940 - DNA, 15 bp, Homo sapiens
agctgggctactgct

SEQ ID NO: 33941 - DNA, 15 bp, Homo sapiens
gagctgggctactgc

SEQ ID NO: 33942 - DNA, 15 bp, Homo sapiens
ggagctgggctactg

SEQ ID NO: 33943 - DNA, 15 bp, Homo sapiens
cggagctgggctact

SEQ ID NO: 33944 - DNA, 15 bp, Homo sapiens
gcggagctgggctac

SEQ ID NO: 33945 - DNA, 15 bp, Homo sapiens
tgcggagctgggcta

SEQ ID NO: 33946 - DNA, 15 bp, Homo sapiens
atgcggagctgggct

SEQ ID NO: 33947 - DNA, 15 bp, Homo sapiens
gatgcggagctgggc

SEQ ID NO: 33948 - DNA, 15 bp, Homo sapiens
ggatgcggagctggg

SEQ ID NO: 33949 - DNA, 15 bp, Homo sapiens
aggatgcggagctgg

SEQ ID NO: 33950 - DNA, 15 bp, Homo sapiens
caggatgcggagctg

SEQ ID NO: 33951 - DNA, 15 bp, Homo sapiens
acaggatgcggagct

SEQ ID NO: 33952 - DNA, 15 bp, Homo sapiens
cacaggatgcggagc

SEQ ID NO: 33953 - DNA, 15 bp, Homo sapiens
tcacaggatgcggag

SEQ ID NO: 33954 - DNA, 15 bp, Homo sapiens
gtcacaggatgcgga

SEQ ID NO: 33955 - DNA, 15 bp, Homo sapiens
tgtcacaggatgcgg

SEQ ID NO: 33956 - DNA, 15 bp, Homo sapiens
ctgtcacaggatgcg

SEQ ID NO: 33957 - DNA, 15 bp, Homo sapiens
tctgtcacaggatgc

SEQ ID NO: 33958 - DNA, 15 bp, Homo sapiens
ctctgtcacaggatg

SEQ ID NO: 33959 - DNA, 15 bp, Homo sapiens
cctctgtcacaggat

SEQ ID NO: 33960 - DNA, 15 bp, Homo sapiens
acctctgtcacagga

SEQ ID NO: 33961 - DNA, 15 bp, Homo sapiens
gacctctgtcacagg

SEQ ID NO: 33962 - DNA, 15 bp, Homo sapiens
tgacctctgtcacag

SEQ ID NO: 33963 - DNA, 15 bp, Homo sapiens
atgacctctgtcaca

SEQ ID NO: 33964 - DNA, 15 bp, Homo sapiens
tatgacctctgtcac

SEQ ID NO: 33965 - DNA, 15 bp, Homo sapiens
gtatgacctctgtca

SEQ ID NO: 33966 - DNA, 15 bp, Homo sapiens
ggtatgacctctgtc

SEQ ID NO: 33967 - DNA, 15 bp, Homo sapiens
aggtatgacctctgt

SEQ ID NO: 33968 - DNA, 15 bp, Homo sapiens
aaggtatgacctctg

SEQ ID NO: 33969 - DNA, 15 bp, Homo sapiens
gaaggtatgacctct

SEQ ID NO: 33970 - DNA, 15 bp, Homo sapiens
ggaaggtatgacctc

SEQ ID NO: 33971 - DNA, 15 bp, Homo sapiens
tggaaggtatgacct

SEQ ID NO: 33972 - DNA, 15 bp, Homo sapiens
ctggaaggtatgacc

SEQ ID NO: 33973 - DNA, 15 bp, Homo sapiens
actggaaggtatgac

SEQ ID NO: 33974 - DNA, 15 bp, Homo sapiens
aactggaaggtatga

SEQ ID NO: 33975 - DNA, 15 bp, Homo sapiens
taactggaaggtatg

SEQ ID NO: 33976 - DNA, 15 bp, Homo sapiens
gtaactggaaggtat

SEQ ID NO: 33977 - DNA, 15 bp, Homo sapiens
ggtaactggaaggta

SEQ ID NO: 33978 - DNA, 15 bp, Homo sapiens
gggtaactggaaggt

SEQ ID NO: 33979 - DNA, 15 bp, Homo sapiens
cgggtaactggaagg

SEQ ID NO: 33980 - DNA, 15 bp, Homo sapiens
tcgggtaactggaag

SEQ ID NO: 33981 - DNA, 15 bp, Homo sapiens
ctcgggtaactggaa

SEQ ID NO: 33982 - DNA, 15 bp, Homo sapiens
gctcgggtaactgga

SEQ ID NO: 33983 - DNA, 15 bp, Homo sapiens
cgctcgggtaactgg

SEQ ID NO: 33984 - DNA, 15 bp, Homo sapiens
tcgctcgggtaactg

SEQ ID NO: 33985 - DNA, 15 bp, Homo sapiens
ttcgctcgggtaact

SEQ ID NO: 33986 - DNA, 15 bp, Homo sapiens
gttcgctcgggtaac

SEQ ID NO: 33987 - DNA, 15 bp, Homo sapiens
tgttcgctcgggtaa

SEQ ID NO: 33988 - DNA, 15 bp, Homo sapiens
gtgttcgctcgggta

SEQ ID NO: 33989 - DNA, 15 bp, Homo sapiens
agtgttcgctcgggt

SEQ ID NO: 33990 - DNA, 15 bp, Homo sapiens
aagtgttcgctcggg

SEQ ID NO: 33991 - DNA, 15 bp, Homo sapiens
caagtgttcgctcgg

SEQ ID NO: 33992 - DNA, 15 bp, Homo sapiens
ccaagtgttcgctcg

SEQ ID NO: 33993 - DNA, 15 bp, Homo sapiens
tccaagtgttcgctc

SEQ ID NO: 33994 - DNA, 15 bp, Homo sapiens
ctccaagtgttcgct

SEQ ID NO: 33995 - DNA, 15 bp, Homo sapiens
gctccaagtgttcgc

SEQ ID NO: 33996 - DNA, 15 bp, Homo sapiens
tgctccaagtgttcg

SEQ ID NO: 33997 - DNA, 15 bp, Homo sapiens
ttgctccaagtgttc

SEQ ID NO: 33998 - DNA, 15 bp, Homo sapiens
cttgctccaagtgtt

SEQ ID NO: 33999 - DNA, 15 bp, Homo sapiens
acttgctccaagtgt

SEQ ID NO: 34000 - DNA, 15 bp, Homo sapiens
gacttgctccaagtg

SEQ ID NO: 34001 - DNA, 15 bp, Homo sapiens
tgacttgctccaagt

SEQ ID NO: 34002 - DNA, 15 bp, Homo sapiens
ctgacttgctccaag

SEQ ID NO: 34003 - DNA, 15 bp, Homo sapiens
gctgacttgctccaa

SEQ ID NO: 34004 - DNA, 15 bp, Homo sapiens
agctgacttgctcca

SEQ ID NO: 34005 - DNA, 15 bp, Homo sapiens
aagctgacttgctcc

SEQ ID NO: 34006 - DNA, 15 bp, Homo sapiens
aaagctgacttgctc

SEQ ID NO: 34007 - DNA, 15 bp, Homo sapiens
aaaagctgacttgct

SEQ ID NO: 34008 - DNA, 15 bp, Homo sapiens
aaaaagctgacttgc

SEQ ID NO: 34009 - DNA, 15 bp, Homo sapiens
gaaaaagctgacttg

SEQ ID NO: 34010 - DNA, 15 bp, Homo sapiens
ggaaaaagctgactt

SEQ ID NO: 34011 - DNA, 15 bp, Homo sapiens
gggaaaaagctgact

SEQ ID NO: 34012 - DNA, 15 bp, Homo sapiens
ggggaaaaagctgac

SEQ ID NO: 34013 - DNA, 15 bp, Homo sapiens
aggggaaaaagctga

SEQ ID NO: 34014 - DNA, 15 bp, Homo sapiens
caggggaaaaagctg

SEQ ID NO: 34015 - DNA, 15 bp, Homo sapiens
tcaggggaaaaagct

SEQ ID NO: 34016 - DNA, 15 bp, Homo sapiens
ttcaggggaaaaagc

SEQ ID NO: 34017 - DNA, 15 bp, Homo sapiens
tttcaggggaaaaag

SEQ ID NO: 34018 - DNA, 15 bp, Homo sapiens
gtttcaggggaaaaa

SEQ ID NO: 34019 - DNA, 15 bp, Homo sapiens
tgtttcaggggaaaa

SEQ ID NO: 34020 - DNA, 15 bp, Homo sapiens
ctgtttcaggggaaa

SEQ ID NO: 34021 - DNA, 15 bp, Homo sapiens
gctgtttcaggggaa

SEQ ID NO: 34022 - DNA, 15 bp, Homo sapiens
tgctgtttcagggga

SEQ ID NO: 34023 - DNA, 15 bp, Homo sapiens
gtgctgtttcagggg

SEQ ID NO: 34024 - DNA, 15 bp, Homo sapiens
cgtgctgtttcaggg

SEQ ID NO: 34025 - DNA, 15 bp, Homo sapiens
acgtgctgtttcagg

SEQ ID NO: 34026 - DNA, 15 bp, Homo sapiens
aacgtgctgtttcag

SEQ ID NO: 34027 - DNA, 15 bp, Homo sapiens
gaacgtgctgtttca

SEQ ID NO: 34028 - DNA, 15 bp, Homo sapiens
tgaacgtgctgtttc

SEQ ID NO: 34029 - DNA, 15 bp, Homo sapiens
gtgaacgtgctgttt

SEQ ID NO: 34030 - DNA, 15 bp, Homo sapiens
cgtgaacgtgctgtt

SEQ ID NO: 34031 - DNA, 15 bp, Homo sapiens
acgtgaacgtgctgt

SEQ ID NO: 34032 - DNA, 15 bp, Homo sapiens
aacgtgaacgtgctg

SEQ ID NO: 34033 - DNA, 15 bp, Homo sapiens
gaacgtgaacgtgct

SEQ ID NO: 34034 - DNA, 15 bp, Homo sapiens
agaacgtgaacgtgc

SEQ ID NO: 34035 - DNA, 15 bp, Homo sapiens
aagaacgtgaacgtg

SEQ ID NO: 34036 - DNA, 15 bp, Homo sapiens
caagaacgtgaacgt

SEQ ID NO: 34037 - DNA, 15 bp, Homo sapiens
tcaagaacgtgaacg

SEQ ID NO: 34038 - DNA, 15 bp, Homo sapiens
atcaagaacgtgaac

SEQ ID NO: 34039 - DNA, 15 bp, Homo sapiens
gatcaagaacgtgaa

SEQ ID NO: 34040 - DNA, 15 bp, Homo sapiens
agatcaagaacgtga

SEQ ID NO: 34041 - DNA, 15 bp, Homo sapiens
aagatcaagaacgtg

SEQ ID NO: 34042 - DNA, 15 bp, Homo sapiens
aaagatcaagaacgt

SEQ ID NO: 34043 - DNA, 15 bp, Homo sapiens
caaagatcaagaacg

SEQ ID NO: 34044 - DNA, 15 bp, Homo sapiens
ccaaagatcaagaac

SEQ ID NO: 34045 - DNA, 15 bp, Homo sapiens
accaaagatcaagaa

SEQ ID NO: 34046 - DNA, 15 bp, Homo sapiens
aaccaaagatcaaga

SEQ ID NO: 34047 - DNA, 15 bp, Homo sapiens
aaaccaaagatcaag

SEQ ID NO: 34048 - DNA, 15 bp, Homo sapiens
caaaccaaagatcaa

SEQ ID NO: 34049 - DNA, 15 bp, Homo sapiens
gcaaaccaaagatca

SEQ ID NO: 34050 - DNA, 15 bp, Homo sapiens
tgcaaaccaaagatc

SEQ ID NO: 34051 - DNA, 15 bp, Homo sapiens
gtgcaaaccaaagat

SEQ ID NO: 34052 - DNA, 15 bp, Homo sapiens
tgtgcaaaccaaaga

SEQ ID NO: 34053 - DNA, 15 bp, Homo sapiens
ttgtgcaaaccaaag

SEQ ID NO: 34054 - DNA, 15 bp, Homo sapiens
gttgtgcaaaccaaa

SEQ ID NO: 34055 - DNA, 15 bp, Homo sapiens
tgttgtgcaaaccaa

SEQ ID NO: 34056 - DNA, 15 bp, Homo sapiens
ttgttgtgcaaacca

SEQ ID NO: 34057 - DNA, 15 bp, Homo sapiens
gttgttgtgcaaacc

SEQ ID NO: 34058 - DNA, 15 bp, Homo sapiens
ggttgttgtgcaaac

SEQ ID NO: 34059 - DNA, 15 bp, Homo sapiens
aggttgttgtgcaaa

SEQ ID NO: 34060 - DNA, 15 bp, Homo sapiens
caggttgttgtgcaa

SEQ ID NO: 34061 - DNA, 15 bp, Homo sapiens
acaggttgttgtgca

SEQ ID NO: 34062 - DNA, 15 bp, Homo sapiens
cacaggttgttgtgc

SEQ ID NO: 34063 - DNA, 15 bp, Homo sapiens
tcacaggttgttgtg

SEQ ID NO: 34064 - DNA, 15 bp, Homo sapiens
ttcacaggttgttgt

SEQ ID NO: 34065 - DNA, 15 bp, Homo sapiens
attcacaggttgttg

SEQ ID NO: 34066 - DNA, 15 bp, Homo sapiens
cattcacaggttgtt

SEQ ID NO: 34067 - DNA, 15 bp, Homo sapiens
acattcacaggttgt

SEQ ID NO: 34068 - DNA, 15 bp, Homo sapiens
aacattcacaggttg

SEQ ID NO: 34069 - DNA, 15 bp, Homo sapiens
taacattcacaggtt

SEQ ID NO: 34070 - DNA, 15 bp, Homo sapiens
ataacattcacaggt

SEQ ID NO: 34071 - DNA, 15 bp, Homo sapiens
aataacattcacagg

SEQ ID NO: 34072 - DNA, 15 bp, Homo sapiens
taataacattcacag

SEQ ID NO: 34073 - DNA, 15 bp, Homo sapiens
ctaataacattcaca

SEQ ID NO: 34074 - DNA, 15 bp, Homo sapiens
gctaataacattcac

SEQ ID NO: 34075 - DNA, 15 bp, Homo sapiens
ggctaataacattca

SEQ ID NO: 34076 - DNA, 15 bp, Homo sapiens
gggctaataacattc

SEQ ID NO: 34077 - DNA, 15 bp, Homo sapiens
ggggctaataacatt

SEQ ID NO: 34078 - DNA, 15 bp, Homo sapiens
cggggctaataacat

SEQ ID NO: 34079 - DNA, 15 bp, Homo sapiens
acggggctaataaca

SEQ ID NO: 34080 - DNA, 15 bp, Homo sapiens
aacggggctaataac

SEQ ID NO: 34081 - DNA, 15 bp, Homo sapiens
aaacggggctaataa

SEQ ID NO: 34082 - DNA, 15 bp, Homo sapiens
aaaacggggctaata

SEQ ID NO: 34083 - DNA, 15 bp, Homo sapiens
aaaaacggggctaat

SEQ ID NO: 34084 - DNA, 15 bp, Homo sapiens
aaaaaacggggctaa

SEQ ID NO: 34085 - DNA, 15 bp, Homo sapiens
aaaaaaacggggcta

SEQ ID NO: 34086 - DNA, 15 bp, Homo sapiens
aaaaaaaacggggct

SEQ ID NO: 34087 - DNA, 15 bp, Homo sapiens
caaaaaaaacggggc

SEQ ID NO: 34088 - DNA, 15 bp, Homo sapiens
acaaaaaaaacgggg

SEQ ID NO: 34089 - DNA, 15 bp, Homo sapiens
aacaaaaaaaacggg

SEQ ID NO: 34090 - DNA, 15 bp, Homo sapiens
aaacaaaaaaaacgg

SEQ ID NO: 34091 - DNA, 15 bp, Homo sapiens
caaacaaaaaaaacg

SEQ ID NO: 34092 - DNA, 15 bp, Homo sapiens
acaaacaaaaaaaac

SEQ ID NO: 34093 - DNA, 15 bp, Homo sapiens
aaaaaacaaacaaac

SEQ ID NO: 34094 - DNA, 15 bp, Homo sapiens
caaaaaacaaacaaa

SEQ ID NO: 34095 - DNA, 15 bp, Homo sapiens
tcaaaaaacaaacaa

SEQ ID NO: 34096 - DNA, 15 bp, Homo sapiens
ctcaaaaaacaaaca

SEQ ID NO: 34097 - DNA, 15 bp, Homo sapiens
tctcaaaaaacaaac

SEQ ID NO: 34098 - DNA, 15 bp, Homo sapiens
gtctcaaaaaacaaa

SEQ ID NO: 34099 - DNA, 15 bp, Homo sapiens
tgtctcaaaaaacaa

SEQ ID NO: 34100 - DNA, 15 bp, Homo sapiens
ctgtctcaaaaaaca

SEQ ID NO: 34101 - DNA, 15 bp, Homo sapiens
tctgtctcaaaaaac

SEQ ID NO: 34102 - DNA, 15 bp, Homo sapiens
cactctgtctcaaaa

SEQ ID NO: 34103 - DNA, 15 bp, Homo sapiens
acactctgtctcaaa

SEQ ID NO: 34104 - DNA, 15 bp, Homo sapiens
gacactctgtctcaa

SEQ ID NO: 34105 - DNA, 15 bp, Homo sapiens
cgacactctgtctca

SEQ ID NO: 34106 - DNA, 15 bp, Homo sapiens
gcgacactctgtctc

SEQ ID NO: 34107 - DNA, 15 bp, Homo sapiens
agcgacactctgtct

SEQ ID NO: 34108 - DNA, 15 bp, Homo sapiens
gagcgacactctgtc

SEQ ID NO: 34109 - DNA, 15 bp, Homo sapiens
agagcgacactctgt

SEQ ID NO: 34110 - DNA, 15 bp, Homo sapiens
aagagcgacactctg

SEQ ID NO: 34111 - DNA, 15 bp, Homo sapiens
caagagcgacactct

SEQ ID NO: 34112 - DNA, 15 bp, Homo sapiens
acaagagcgacactc

SEQ ID NO: 34113 - DNA, 15 bp, Homo sapiens
aacaagagcgacact

SEQ ID NO: 34114 - DNA, 15 bp, Homo sapiens
caacaagagcgacac

SEQ ID NO: 34115 - DNA, 15 bp, Homo sapiens
gcaacaagagcgaca

SEQ ID NO: 34116 - DNA, 15 bp, Homo sapiens
ggcaacaagagcgac

SEQ ID NO: 34117 - DNA, 15 bp, Homo sapiens
cagcctgggcaacaa

SEQ ID NO: 34118 - DNA, 15 bp, Homo sapiens
atccagcctgggcaa

SEQ ID NO: 34119 - DNA, 15 bp, Homo sapiens
aatccagcctgggca

SEQ ID NO: 34120 - DNA, 15 bp, Homo sapiens
caatccagcctgggc

SEQ ID NO: 34121 - DNA, 15 bp, Homo sapiens
gcaatccagcctggg

SEQ ID NO: 34122 - DNA, 15 bp, Homo sapiens
tgcaatccagcctgg

SEQ ID NO: 34123 - DNA, 15 bp, Homo sapiens
ttgcaatccagcctg

SEQ ID NO: 34124 - DNA, 15 bp, Homo sapiens
attgcaatccagcct

SEQ ID NO: 34125 - DNA, 15 bp, Homo sapiens
cattgcaatccagcc

SEQ ID NO: 34126 - DNA, 15 bp, Homo sapiens
ccattgcaatccagc

SEQ ID NO: 34127 - DNA, 15 bp, Homo sapiens
gccattgcaatccag

SEQ ID NO: 34128 - DNA, 15 bp, Homo sapiens
cgccattgcaatcca

SEQ ID NO: 34129 - DNA, 15 bp, Homo sapiens
acgccattgcaatcc

SEQ ID NO: 34130 - DNA, 15 bp, Homo sapiens
cacgccattgcaatc

SEQ ID NO: 34131 - DNA, 15 bp, Homo sapiens
tcacgccattgcaat

SEQ ID NO: 34132 - DNA, 15 bp, Homo sapiens
atcacgccattgcaa

SEQ ID NO: 34133 - DNA, 15 bp, Homo sapiens
gatcacgccattgca

SEQ ID NO: 34134 - DNA, 15 bp, Homo sapiens
agatcacgccattgc

SEQ ID NO: 34135 - DNA, 15 bp, Homo sapiens
gagatcacgccattg

SEQ ID NO: 34136 - DNA, 15 bp, Homo sapiens
cgagatcacgccatt

SEQ ID NO: 34137 - DNA, 15 bp, Homo sapiens
ccgagatcacgccat

SEQ ID NO: 34138 - DNA, 15 bp, Homo sapiens
gccgagatcacgcca

SEQ ID NO: 34139 - DNA, 15 bp, Homo sapiens
agccgagatcacgcc

SEQ ID NO: 34140 - DNA, 15 bp, Homo sapiens
gagccgagatcacgc

SEQ ID NO: 34141 - DNA, 15 bp, Homo sapiens
tgagccgagatcacg

SEQ ID NO: 34142 - DNA, 15 bp, Homo sapiens
tggaggcagaggttg

SEQ ID NO: 34143 - DNA, 15 bp, Homo sapiens
ttggaggcagaggtt

SEQ ID NO: 34144 - DNA, 15 bp, Homo sapiens
cttggaggcagaggt

SEQ ID NO: 34145 - DNA, 15 bp, Homo sapiens
gcttggaggcagagg

SEQ ID NO: 34146 - DNA, 15 bp, Homo sapiens
tgcttggaggcagag

SEQ ID NO: 34147 - DNA, 15 bp, Homo sapiens
ttgcttggaggcaga

SEQ ID NO: 34148 - DNA, 15 bp, Homo sapiens
attgcttggaggcag

SEQ ID NO: 34149 - DNA, 15 bp, Homo sapiens
aattgcttggaggca

SEQ ID NO: 34150 - DNA, 15 bp, Homo sapiens
gaattgcttggaggc

SEQ ID NO: 34151 - DNA, 15 bp, Homo sapiens
agaattgcttggagg

SEQ ID NO: 34152 - DNA, 15 bp, Homo sapiens
gagaattgcttggag

SEQ ID NO: 34153 - DNA, 15 bp, Homo sapiens
ggagaattgcttgga

SEQ ID NO: 34154 - DNA, 15 bp, Homo sapiens
aggagaattgcttgg

SEQ ID NO: 34155 - DNA, 15 bp, Homo sapiens
agctgaggcaggaga

SEQ ID NO: 34156 - DNA, 15 bp, Homo sapiens
aagctgaggcaggag

SEQ ID NO: 34157 - DNA, 15 bp, Homo sapiens
gaagctgaggcagga

SEQ ID NO: 34158 - DNA, 15 bp, Homo sapiens
ggaagctgaggcagg

SEQ ID NO: 34159 - DNA, 15 bp, Homo sapiens
aggaagctgaggcag

SEQ ID NO: 34160 - DNA, 15 bp, Homo sapiens
caggaagctgaggca

SEQ ID NO: 34161 - DNA, 15 bp, Homo sapiens
tcaggaagctgaggc

SEQ ID NO: 34162 - DNA, 15 bp, Homo sapiens
ctcaggaagctgagg

SEQ ID NO: 34163 - DNA, 15 bp, Homo sapiens
actcaggaagctgag

SEQ ID NO: 34164 - DNA, 15 bp, Homo sapiens
tactcaggaagctga

SEQ ID NO: 34165 - DNA, 15 bp, Homo sapiens
ctactcaggaagctg

SEQ ID NO: 34166 - DNA, 15 bp, Homo sapiens
gctactcaggaagct

SEQ ID NO: 34167 - DNA, 15 bp, Homo sapiens
agctactcaggaagc

SEQ ID NO: 34168 - DNA, 15 bp, Homo sapiens
cagctactcaggaag

SEQ ID NO: 34169 - DNA, 15 bp, Homo sapiens
ccagctactcaggaa

SEQ ID NO: 34170 - DNA, 15 bp, Homo sapiens
cgcatgcctgtaatc

SEQ ID NO: 34171 - DNA, 15 bp, Homo sapiens
gcgcatgcctgtaat

SEQ ID NO: 34172 - DNA, 15 bp, Homo sapiens
ggcgcatgcctgtaa

SEQ ID NO: 34173 - DNA, 15 bp, Homo sapiens
tggcgcatgcctgta

SEQ ID NO: 34174 - DNA, 15 bp, Homo sapiens
gtggcgcatgcctgt

SEQ ID NO: 34175 - DNA, 15 bp, Homo sapiens
ggtggcgcatgcctg

SEQ ID NO: 34176 - DNA, 15 bp, Homo sapiens
tggtggcgcatgcct

SEQ ID NO: 34177 - DNA, 15 bp, Homo sapiens
gtggtggcgcatgcc

SEQ ID NO: 34178 - DNA, 15 bp, Homo sapiens
tgtggtggcgcatgc

SEQ ID NO: 34179 - DNA, 15 bp, Homo sapiens
gtgtggtggcgcatg

SEQ ID NO: 34180 - DNA, 15 bp, Homo sapiens
ggtgtggtggcgcat

SEQ ID NO: 34181 - DNA, 15 bp, Homo sapiens
gggtgtggtggcgca

SEQ ID NO: 34182 - DNA, 15 bp, Homo sapiens
cgggtgtggtggcgc

SEQ ID NO: 34183 - DNA, 15 bp, Homo sapiens
ccgggtgtggtggcg

SEQ ID NO: 34184 - DNA, 15 bp, Homo sapiens
caaaattagccgggt

SEQ ID NO: 34185 - DNA, 15 bp, Homo sapiens
aagaaaccccgtctc

SEQ ID NO: 34186 - DNA, 15 bp, Homo sapiens
gaagaaaccccgtct

SEQ ID NO: 34187 - DNA, 15 bp, Homo sapiens
tgaagaaaccccgtc

SEQ ID NO: 34188 - DNA, 15 bp, Homo sapiens
atgaagaaaccccgt

SEQ ID NO: 34189 - DNA, 15 bp, Homo sapiens
catgaagaaaccccg

SEQ ID NO: 34190 - DNA, 15 bp, Homo sapiens
acatgaagaaacccc

SEQ ID NO: 34191 - DNA, 15 bp, Homo sapiens
aacatgaagaaaccc

SEQ ID NO: 34192 - DNA, 15 bp, Homo sapiens
caacatgaagaaacc

SEQ ID NO: 34193 - DNA, 15 bp, Homo sapiens
ccaacatgaagaaac

SEQ ID NO: 34194 - DNA, 15 bp, Homo sapiens
accaacatgaagaaa

SEQ ID NO: 34195 - DNA, 15 bp, Homo sapiens
gaccaacatgaagaa

SEQ ID NO: 34196 - DNA, 15 bp, Homo sapiens
tgaccaacatgaaga

SEQ ID NO: 34197 - DNA, 15 bp, Homo sapiens
ctgaccaacatgaag

SEQ ID NO: 34198 - DNA, 15 bp, Homo sapiens
cctgaccaacatgaa

SEQ ID NO: 34199 - DNA, 15 bp, Homo sapiens
gcctgaccaacatga

SEQ ID NO: 34200 - DNA, 15 bp, Homo sapiens
ggaagttcgagacca

SEQ ID NO: 34201 - DNA, 15 bp, Homo sapiens
cggaagttcgagacc

SEQ ID NO: 34202 - DNA, 15 bp, Homo sapiens
tcggaagttcgagac

SEQ ID NO: 34203 - DNA, 15 bp, Homo sapiens
gtcggaagttcgaga

SEQ ID NO: 34204 - DNA, 15 bp, Homo sapiens
ggtcggaagttcgag

SEQ ID NO: 34205 - DNA, 15 bp, Homo sapiens
aggtcggaagttcga

SEQ ID NO: 34206 - DNA, 15 bp, Homo sapiens
gaggtcggaagttcg

SEQ ID NO: 34207 - DNA, 15 bp, Homo sapiens
tgaggtcggaagttc

SEQ ID NO: 34208 - DNA, 15 bp, Homo sapiens
ctgaggtcggaagtt

SEQ ID NO: 34209 - DNA, 15 bp, Homo sapiens
actgaggtcggaagt

SEQ ID NO: 34210 - DNA, 15 bp, Homo sapiens
aactgaggtcggaag

SEQ ID NO: 34211 - DNA, 15 bp, Homo sapiens
caactgaggtcggaa

SEQ ID NO: 34212 - DNA, 15 bp, Homo sapiens
tcaactgaggtcgga

SEQ ID NO: 34213 - DNA, 15 bp, Homo sapiens
atcaactgaggtcgg

SEQ ID NO: 34214 - DNA, 15 bp, Homo sapiens
gatcaactgaggtcg

SEQ ID NO: 34215 - DNA, 15 bp, Homo sapiens
ggatcaactgaggtc

SEQ ID NO: 34216 - DNA, 15 bp, Homo sapiens
tggatcaactgaggt

SEQ ID NO: 34217 - DNA, 15 bp, Homo sapiens
gtggatcaactgagg

SEQ ID NO: 34218 - DNA, 15 bp, Homo sapiens
ggtggatcaactgag

SEQ ID NO: 34219 - DNA, 15 bp, Homo sapiens
gggtggatcaactga

SEQ ID NO: 34220 - DNA, 15 bp, Homo sapiens
cgggtggatcaactg

SEQ ID NO: 34221 - DNA, 15 bp, Homo sapiens
acgggtggatcaact

SEQ ID NO: 34222 - DNA, 15 bp, Homo sapiens
gacgggtggatcaac

SEQ ID NO: 34223 - DNA, 15 bp, Homo sapiens
agacgggtggatcaa

SEQ ID NO: 34224 - DNA, 15 bp, Homo sapiens
aagacgggtggatca

SEQ ID NO: 34225 - DNA, 15 bp, Homo sapiens
caagacgggtggatc

SEQ ID NO: 34226 - DNA, 15 bp, Homo sapiens
ccaagacgggtggat

SEQ ID NO: 34227 - DNA, 15 bp, Homo sapiens
gccaagacgggtgga

SEQ ID NO: 34228 - DNA, 15 bp, Homo sapiens
ggccaagacgggtgg

SEQ ID NO: 34229 - DNA, 15 bp, Homo sapiens
aggccaagacgggtg

SEQ ID NO: 34230 - DNA, 15 bp, Homo sapiens
gaggccaagacgggt

SEQ ID NO: 34231 - DNA, 15 bp, Homo sapiens
ggaggccaagacggg

SEQ ID NO: 34232 - DNA, 15 bp, Homo sapiens
gggaggccaagacgg

SEQ ID NO: 34233 - DNA, 15 bp, Homo sapiens
tgggaggccaagacg

SEQ ID NO: 34234 - DNA, 15 bp, Homo sapiens
ttgggaggccaagac

SEQ ID NO: 34235 - DNA, 15 bp, Homo sapiens
tttgggaggccaaga

SEQ ID NO: 34236 - DNA, 15 bp, Homo sapiens
acagcactttgggag

SEQ ID NO: 34237 - DNA, 15 bp, Homo sapiens
tacagcactttggga

SEQ ID NO: 34238 - DNA, 15 bp, Homo sapiens
atacagcactttggg

SEQ ID NO: 34239 - DNA, 15 bp, Homo sapiens
aatacagcactttgg

SEQ ID NO: 34240 - DNA, 15 bp, Homo sapiens
taatacagcactttg

SEQ ID NO: 34241 - DNA, 15 bp, Homo sapiens
ctaatacagcacttt

SEQ ID NO: 34242 - DNA, 15 bp, Homo sapiens
gctaatacagcactt

SEQ ID NO: 34243 - DNA, 15 bp, Homo sapiens
ggctaatacagcact

SEQ ID NO: 34244 - DNA, 15 bp, Homo sapiens
gggctaatacagcac

SEQ ID NO: 34245 - DNA, 15 bp, Homo sapiens
ggggctaatacagca

SEQ ID NO: 34246 - DNA, 15 bp, Homo sapiens
tggggctaatacagc

SEQ ID NO: 34247 - DNA, 15 bp, Homo sapiens
atggggctaatacag

SEQ ID NO: 34248 - DNA, 15 bp, Homo sapiens
aatggggctaataca

SEQ ID NO: 34249 - DNA, 15 bp, Homo sapiens
aaatggggctaatac

SEQ ID NO: 34250 - DNA, 15 bp, Homo sapiens
aaaatggggctaata

SEQ ID NO: 34251 - DNA, 15 bp, Homo sapiens
taaaatggggctaat

SEQ ID NO: 34252 - DNA, 15 bp, Homo sapiens
ataaaatggggctaa

SEQ ID NO: 34253 - DNA, 15 bp, Homo sapiens
tataaaatggggcta

SEQ ID NO: 34254 - DNA, 15 bp, Homo sapiens
atataaaatggggct

SEQ ID NO: 34255 - DNA, 15 bp, Homo sapiens
gatataaaatggggc

SEQ ID NO: 34256 - DNA, 15 bp, Homo sapiens
ggatataaaatgggg

SEQ ID NO: 34257 - DNA, 15 bp, Homo sapiens
tggatataaaatggg

SEQ ID NO: 34258 - DNA, 15 bp, Homo sapiens
ttggatataaaatgg

SEQ ID NO: 34259 - DNA, 15 bp, Homo sapiens
cttggatataaaatg

SEQ ID NO: 34260 - DNA, 15 bp, Homo sapiens
ccttggatataaaat

SEQ ID NO: 34261 - DNA, 15 bp, Homo sapiens
tccttggatataaaa

SEQ ID NO: 34262 - DNA, 15 bp, Homo sapiens
ttccttggatataaa

SEQ ID NO: 34263 - DNA, 15 bp, Homo sapiens
tttccttggatataa

SEQ ID NO: 34264 - DNA, 15 bp, Homo sapiens
gtttccttggatata

SEQ ID NO: 34265 - DNA, 15 bp, Homo sapiens
agtttccttggatat

SEQ ID NO: 34266 - DNA, 15 bp, Homo sapiens
cagtttccttggata

SEQ ID NO: 34267 - DNA, 15 bp, Homo sapiens
tcagtttccttggat

SEQ ID NO: 34268 - DNA, 15 bp, Homo sapiens
ctcagtttccttgga

SEQ ID NO: 34269 - DNA, 15 bp, Homo sapiens
cctcagtttccttgg

SEQ ID NO: 34270 - DNA, 15 bp, Homo sapiens
gcctcagtttccttg

SEQ ID NO: 34271 - DNA, 15 bp, Homo sapiens
agcctcagtttcctt

SEQ ID NO: 34272 - DNA, 15 bp, Homo sapiens
aagcctcagtttcct

SEQ ID NO: 34273 - DNA, 15 bp, Homo sapiens
taagcctcagtttcc

SEQ ID NO: 34274 - DNA, 15 bp, Homo sapiens
ctaagcctcagtttc

SEQ ID NO: 34275 - DNA, 15 bp, Homo sapiens
cctaagcctcagttt

SEQ ID NO: 34276 - DNA, 15 bp, Homo sapiens
ccctaagcctcagtt

SEQ ID NO: 34277 - DNA, 15 bp, Homo sapiens
tccctaagcctcagt

SEQ ID NO: 34278 - DNA, 15 bp, Homo sapiens
ctccctaagcctcag

SEQ ID NO: 34279 - DNA, 15 bp, Homo sapiens
tctccctaagcctca

SEQ ID NO: 34280 - DNA, 15 bp, Homo sapiens
atctccctaagcctc

SEQ ID NO: 34281 - DNA, 15 bp, Homo sapiens
aatctccctaagcct

SEQ ID NO: 34282 - DNA, 15 bp, Homo sapiens
aaatctccctaagcc

SEQ ID NO: 34283 - DNA, 15 bp, Homo sapiens
taaatctccctaagc

SEQ ID NO: 34284 - DNA, 15 bp, Homo sapiens
ttaaatctccctaag

SEQ ID NO: 34285 - DNA, 15 bp, Homo sapiens
tttaaatctccctaa

SEQ ID NO: 34286 - DNA, 15 bp, Homo sapiens
atttaaatctcccta

SEQ ID NO: 34287 - DNA, 15 bp, Homo sapiens
tatttaaatctccct

SEQ ID NO: 34288 - DNA, 15 bp, Homo sapiens
ctatttaaatctccc

SEQ ID NO: 34289 - DNA, 15 bp, Homo sapiens
cctatttaaatctcc

SEQ ID NO: 34290 - DNA, 15 bp, Homo sapiens
ccctatttaaatctc

SEQ ID NO: 34291 - DNA, 15 bp, Homo sapiens
cccctatttaaatct

SEQ ID NO: 34292 - DNA, 15 bp, Homo sapiens
ccccctatttaaatc

SEQ ID NO: 34293 - DNA, 15 bp, Homo sapiens
cccccctatttaaat

SEQ ID NO: 34294 - DNA, 15 bp, Homo sapiens
tcccccctatttaaa

SEQ ID NO: 34295 - DNA, 15 bp, Homo sapiens
ttcccccctatttaa

SEQ ID NO: 34296 - DNA, 15 bp, Homo sapiens
tttcccccctattta

SEQ ID NO: 34297 - DNA, 15 bp, Homo sapiens
ctttcccccctattt

SEQ ID NO: 34298 - DNA, 15 bp, Homo sapiens
actttcccccctatt

SEQ ID NO: 34299 - DNA, 15 bp, Homo sapiens
tactttcccccctat

SEQ ID NO: 34300 - DNA, 15 bp, Homo sapiens
atactttccccccta

SEQ ID NO: 34301 - DNA, 15 bp, Homo sapiens
tatactttcccccct

SEQ ID NO: 34302 - DNA, 15 bp, Homo sapiens
ctatactttcccccc

SEQ ID NO: 34303 - DNA, 15 bp, Homo sapiens
gctatactttccccc

SEQ ID NO: 34304 - DNA, 15 bp, Homo sapiens
agctatactttcccc

SEQ ID NO: 34305 - DNA, 15 bp, Homo sapiens
aagctatactttccc

SEQ ID NO: 34306 - DNA, 15 bp, Homo sapiens
gaagctatactttcc

SEQ ID NO: 34307 - DNA, 15 bp, Homo sapiens
tgaagctatactttc

SEQ ID NO: 34308 - DNA, 15 bp, Homo sapiens
atgaagctatacttt

SEQ ID NO: 34309 - DNA, 15 bp, Homo sapiens
catgaagctatactt

SEQ ID NO: 34310 - DNA, 15 bp, Homo sapiens
tcatgaagctatact

SEQ ID NO: 34311 - DNA, 15 bp, Homo sapiens
atcatgaagctatac

SEQ ID NO: 34312 - DNA, 15 bp, Homo sapiens
aatcatgaagctata

SEQ ID NO: 34313 - DNA, 15 bp, Homo sapiens
taatcatgaagctat

SEQ ID NO: 34314 - DNA, 15 bp, Homo sapiens
gtaatcatgaagcta

SEQ ID NO: 34315 - DNA, 15 bp, Homo sapiens
tgtaatcatgaagct

SEQ ID NO: 34316 - DNA, 15 bp, Homo sapiens
gtgtaatcatgaagc

SEQ ID NO: 34317 - DNA, 15 bp, Homo sapiens
tgtgtaatcatgaag

SEQ ID NO: 34318 - DNA, 15 bp, Homo sapiens
ctgtgtaatcatgaa

SEQ ID NO: 34319 - DNA, 15 bp, Homo sapiens
actgtgtaatcatga

SEQ ID NO: 34320 - DNA, 15 bp, Homo sapiens
gactgtgtaatcatg

SEQ ID NO: 34321 - DNA, 15 bp, Homo sapiens
tgactgtgtaatcat

SEQ ID NO: 34322 - DNA, 15 bp, Homo sapiens
ctgactgtgtaatca

SEQ ID NO: 34323 - DNA, 15 bp, Homo sapiens
cctgactgtgtaatc

SEQ ID NO: 34324 - DNA, 15 bp, Homo sapiens
tcctgactgtgtaat

SEQ ID NO: 34325 - DNA, 15 bp, Homo sapiens
ttcctgactgtgtaa

SEQ ID NO: 34326 - DNA, 15 bp, Homo sapiens
tttcctgactgtgta

SEQ ID NO: 34327 - DNA, 15 bp, Homo sapiens
atttcctgactgtgt

SEQ ID NO: 34328 - DNA, 15 bp, Homo sapiens
catttcctgactgtg

SEQ ID NO: 34329 - DNA, 15 bp, Homo sapiens
ccatttcctgactgt

SEQ ID NO: 34330 - DNA, 15 bp, Homo sapiens
gccatttcctgactg

SEQ ID NO: 34331 - DNA, 15 bp, Homo sapiens
tgccatttcctgact

SEQ ID NO: 34332 - DNA, 15 bp, Homo sapiens
ctgccatttcctgac

SEQ ID NO: 34333 - DNA, 15 bp, Homo sapiens
tctgccatttcctga

SEQ ID NO: 34334 - DNA, 15 bp, Homo sapiens
ctctgccatttcctg

SEQ ID NO: 34335 - DNA, 15 bp, Homo sapiens
gctctgccatttcct

SEQ ID NO: 34336 - DNA, 15 bp, Homo sapiens
agctctgccatttcc

SEQ ID NO: 34337 - DNA, 15 bp, Homo sapiens
cagctctgccatttc

SEQ ID NO: 34338 - DNA, 15 bp, Homo sapiens
tcagctctgccattt

SEQ ID NO: 34339 - DNA, 15 bp, Homo sapiens
gtcagctctgccatt

SEQ ID NO: 34340 - DNA, 15 bp, Homo sapiens
agtcagctctgccat

SEQ ID NO: 34341 - DNA, 15 bp, Homo sapiens
gagtcagctctgcca

SEQ ID NO: 34342 - DNA, 15 bp, Homo sapiens
agagtcagctctgcc

SEQ ID NO: 34343 - DNA, 15 bp, Homo sapiens
aagagtcagctctgc

SEQ ID NO: 34344 - DNA, 15 bp, Homo sapiens
caagagtcagctctg

SEQ ID NO: 34345 - DNA, 15 bp, Homo sapiens
tcaagagtcagctct

SEQ ID NO: 34346 - DNA, 15 bp, Homo sapiens
ttcaagagtcagctc

SEQ ID NO: 34347 - DNA, 15 bp, Homo sapiens
attcaagagtcagct

SEQ ID NO: 34348 - DNA, 15 bp, Homo sapiens
aattcaagagtcagc

SEQ ID NO: 34349 - DNA, 15 bp, Homo sapiens
gaattcaagagtcag

SEQ ID NO: 34350 - DNA, 15 bp, Homo sapiens
tgaattcaagagtca

SEQ ID NO: 34351 - DNA, 15 bp, Homo sapiens
ctgaattcaagagtc

SEQ ID NO: 34352 - DNA, 15 bp, Homo sapiens
tctgaattcaagagt

SEQ ID NO: 34353 - DNA, 15 bp, Homo sapiens
gtctgaattcaagag

SEQ ID NO: 34354 - DNA, 15 bp, Homo sapiens
ggtctgaattcaaga

SEQ ID NO: 34355 - DNA, 15 bp, Homo sapiens
gggtctgaattcaag

SEQ ID NO: 34356 - DNA, 15 bp, Homo sapiens
agggtctgaattcaa

SEQ ID NO: 34357 - DNA, 15 bp, Homo sapiens
cagggtctgaattca

SEQ ID NO: 34358 - DNA, 15 bp, Homo sapiens
acagggtctgaattc

SEQ ID NO: 34359 - DNA, 15 bp, Homo sapiens
cacagggtctgaatt

SEQ ID NO: 34360 - DNA, 15 bp, Homo sapiens
tcacagggtctgaat

SEQ ID NO: 34361 - DNA, 15 bp, Homo sapiens
atcacagggtctgaa

SEQ ID NO: 34362 - DNA, 15 bp, Homo sapiens
catcacagggtctga

SEQ ID NO: 34363 - DNA, 15 bp, Homo sapiens
gcatcacagggtctg

SEQ ID NO: 34364 - DNA, 15 bp, Homo sapiens
agcatcacagggtct

SEQ ID NO: 34365 - DNA, 15 bp, Homo sapiens
cagcatcacagggtc

SEQ ID NO: 34366 - DNA, 15 bp, Homo sapiens
acagcatcacagggt

SEQ ID NO: 34367 - DNA, 15 bp, Homo sapiens
tacagcatcacaggg

SEQ ID NO: 34368 - DNA, 15 bp, Homo sapiens
atacagcatcacagg

SEQ ID NO: 34369 - DNA, 15 bp, Homo sapiens
gatacagcatcacag

SEQ ID NO: 34370 - DNA, 15 bp, Homo sapiens
ggatacagcatcaca

SEQ ID NO: 34371 - DNA, 15 bp, Homo sapiens
tggatacagcatcac

SEQ ID NO: 34372 - DNA, 15 bp, Homo sapiens
ctggatacagcatca

SEQ ID NO: 34373 - DNA, 15 bp, Homo sapiens
actggatacagcatc

SEQ ID NO: 34374 - DNA, 15 bp, Homo sapiens
cactggatacagcat

SEQ ID NO: 34375 - DNA, 15 bp, Homo sapiens
gcactggatacagca

SEQ ID NO: 34376 - DNA, 15 bp, Homo sapiens
agcactggatacagc

SEQ ID NO: 34377 - DNA, 15 bp, Homo sapiens
cagcactggatacag

SEQ ID NO: 34378 - DNA, 15 bp, Homo sapiens
tcagcactggataca

SEQ ID NO: 34379 - DNA, 15 bp, Homo sapiens
atcagcactggatac

SEQ ID NO: 34380 - DNA, 15 bp, Homo sapiens
aatcagcactggata

SEQ ID NO: 34381 - DNA, 15 bp, Homo sapiens
aaatcagcactggat

SEQ ID NO: 34382 - DNA, 15 bp, Homo sapiens
aaaatcagcactgga

SEQ ID NO: 34383 - DNA, 15 bp, Homo sapiens
caaaatcagcactgg

SEQ ID NO: 34384 - DNA, 15 bp, Homo sapiens
acaaaatcagcactg

SEQ ID NO: 34385 - DNA, 15 bp, Homo sapiens
aacaaaatcagcact

SEQ ID NO: 34386 - DNA, 15 bp, Homo sapiens
aaacaaaatcagcac

SEQ ID NO: 34387 - DNA, 15 bp, Homo sapiens
aaaacaaaatcagca

SEQ ID NO: 34388 - DNA, 15 bp, Homo sapiens
caaaacaaaatcagc

SEQ ID NO: 34389 - DNA, 15 bp, Homo sapiens
gcaaaacaaaatcag

SEQ ID NO: 34390 - DNA, 15 bp, Homo sapiens
ggcaaaacaaaatca

SEQ ID NO: 34391 - DNA, 15 bp, Homo sapiens
gggcaaaacaaaatc

SEQ ID NO: 34392 - DNA, 15 bp, Homo sapiens
agggcaaaacaaaat

SEQ ID NO: 34393 - DNA, 15 bp, Homo sapiens
cagggcaaaacaaaa

SEQ ID NO: 34394 - DNA, 15 bp, Homo sapiens
acagggcaaaacaaa

SEQ ID NO: 34395 - DNA, 15 bp, Homo sapiens
cacagggcaaaacaa

SEQ ID NO: 34396 - DNA, 15 bp, Homo sapiens
acacagggcaaaaca

SEQ ID NO: 34397 - DNA, 15 bp, Homo sapiens
aacacagggcaaaac

SEQ ID NO: 34398 - DNA, 15 bp, Homo sapiens
gaacacagggcaaaa

SEQ ID NO: 34399 - DNA, 15 bp, Homo sapiens
ggaacacagggcaaa

SEQ ID NO: 34400 - DNA, 15 bp, Homo sapiens
aggaacacagggcaa

SEQ ID NO: 34401 - DNA, 15 bp, Homo sapiens
aaggaacacagggca

SEQ ID NO: 34402 - DNA, 15 bp, Homo sapiens
aaaggaacacagggc

SEQ ID NO: 34403 - DNA, 15 bp, Homo sapiens
gaaaggaacacaggg

SEQ ID NO: 34404 - DNA, 15 bp, Homo sapiens
tgaaaggaacacagg

SEQ ID NO: 34405 - DNA, 15 bp, Homo sapiens
ctgaaaggaacacag

SEQ ID NO: 34406 - DNA, 15 bp, Homo sapiens
actgaaaggaacaca

SEQ ID NO: 34407 - DNA, 15 bp, Homo sapiens
cactgaaaggaacac

SEQ ID NO: 34408 - DNA, 15 bp, Homo sapiens
acactgaaaggaaca

SEQ ID NO: 34409 - DNA, 15 bp, Homo sapiens
gacactgaaaggaac

SEQ ID NO: 34410 - DNA, 15 bp, Homo sapiens
tgacactgaaaggaa

SEQ ID NO: 34411 - DNA, 15 bp, Homo sapiens
ctgacactgaaagga

SEQ ID NO: 34412 - DNA, 15 bp, Homo sapiens
cctgacactgaaagg

SEQ ID NO: 34413 - DNA, 15 bp, Homo sapiens
acctgacactgaaag

SEQ ID NO: 34414 - DNA, 15 bp, Homo sapiens
tacctgacactgaaa

SEQ ID NO: 34415 - DNA, 15 bp, Homo sapiens
ttacctgacactgaa

SEQ ID NO: 34416 - DNA, 15 bp, Homo sapiens
cttacctgacactga

SEQ ID NO: 34417 - DNA, 15 bp, Homo sapiens
tcttacctgacactg

SEQ ID NO: 34418 - DNA, 15 bp, Homo sapiens
ttcttacctgacact

SEQ ID NO: 34419 - DNA, 15 bp, Homo sapiens
cttcttacctgacac

SEQ ID NO: 34420 - DNA, 15 bp, Homo sapiens
tcttcttacctgaca

SEQ ID NO: 34421 - DNA, 15 bp, Homo sapiens
gtcttcttacctgac

SEQ ID NO: 34422 - DNA, 15 bp, Homo sapiens
ggtcttcttacctga

SEQ ID NO: 34423 - DNA, 15 bp, Homo sapiens
aggtcttcttacctg

SEQ ID NO: 34424 - DNA, 15 bp, Homo sapiens
gaggtcttcttacct

SEQ ID NO: 34425 - DNA, 15 bp, Homo sapiens
tgaggtcttcttacc

SEQ ID NO: 34426 - DNA, 15 bp, Homo sapiens
ctgaggtcttcttac

SEQ ID NO: 34427 - DNA, 15 bp, Homo sapiens
tctgaggtcttctta

SEQ ID NO: 34428 - DNA, 15 bp, Homo sapiens
ctctgaggtcttctt

SEQ ID NO: 34429 - DNA, 15 bp, Homo sapiens
tctctgaggtcttct

SEQ ID NO: 34430 - DNA, 15 bp, Homo sapiens
atctctgaggtcttc

SEQ ID NO: 34431 - DNA, 15 bp, Homo sapiens
gatctctgaggtctt

SEQ ID NO: 34432 - DNA, 15 bp, Homo sapiens
tgatctctgaggtct

SEQ ID NO: 34433 - DNA, 15 bp, Homo sapiens
atgatctctgaggtc

SEQ ID NO: 34434 - DNA, 15 bp, Homo sapiens
gatgatctctgaggt

SEQ ID NO: 34435 - DNA, 15 bp, Homo sapiens
agatgatctctgagg

SEQ ID NO: 34436 - DNA, 15 bp, Homo sapiens
aagatgatctctgag

SEQ ID NO: 34437 - DNA, 15 bp, Homo sapiens
gaagatgatctctga

SEQ ID NO: 34438 - DNA, 15 bp, Homo sapiens
agaagatgatctctg

SEQ ID NO: 34439 - DNA, 15 bp, Homo sapiens
gagaagatgatctct

SEQ ID NO: 34440 - DNA, 15 bp, Homo sapiens
ggagaagatgatctc

SEQ ID NO: 34441 - DNA, 15 bp, Homo sapiens
tggagaagatgatct

SEQ ID NO: 34442 - DNA, 15 bp, Homo sapiens
ttggagaagatgatc

SEQ ID NO: 34443 - DNA, 15 bp, Homo sapiens
gttggagaagatgat

SEQ ID NO: 34444 - DNA, 15 bp, Homo sapiens
ggttggagaagatga

SEQ ID NO: 34445 - DNA, 15 bp, Homo sapiens
gggttggagaagatg

SEQ ID NO: 34446 - DNA, 15 bp, Homo sapiens
tgggttggagaagat

SEQ ID NO: 34447 - DNA, 15 bp, Homo sapiens
gtgggttggagaaga

SEQ ID NO: 34448 - DNA, 15 bp, Homo sapiens
tgtgggttggagaag

SEQ ID NO: 34449 - DNA, 15 bp, Homo sapiens
gtgtgggttggagaa

SEQ ID NO: 34450 - DNA, 15 bp, Homo sapiens
tgtgtgggttggaga

SEQ ID NO: 34451 - DNA, 15 bp, Homo sapiens
atgtgtgggttggag

SEQ ID NO: 34452 - DNA, 15 bp, Homo sapiens
aatgtgtgggttgga

SEQ ID NO: 34453 - DNA, 15 bp, Homo sapiens
aaatgtgtgggttgg

SEQ ID NO: 34454 - DNA, 15 bp, Homo sapiens
aaaatgtgtgggttg

SEQ ID NO: 34455 - DNA, 15 bp, Homo sapiens
taaaatgtgtgggtt

SEQ ID NO: 34456 - DNA, 15 bp, Homo sapiens
gtaaaatgtgtgggt

SEQ ID NO: 34457 - DNA, 15 bp, Homo sapiens
agtaaaatgtgtggg

SEQ ID NO: 34458 - DNA, 15 bp, Homo sapiens
cagtaaaatgtgtgg

SEQ ID NO: 34459 - DNA, 15 bp, Homo sapiens
tcagtaaaatgtgtg

SEQ ID NO: 34460 - DNA, 15 bp, Homo sapiens
atcagtaaaatgtgt

SEQ ID NO: 34461 - DNA, 15 bp, Homo sapiens
aatcagtaaaatgtg

SEQ ID NO: 34462 - DNA, 15 bp, Homo sapiens
taatcagtaaaatgt

SEQ ID NO: 34463 - DNA, 15 bp, Homo sapiens
ataatcagtaaaatg

SEQ ID NO: 34464 - DNA, 15 bp, Homo sapiens
tataatcagtaaaat

SEQ ID NO: 34465 - DNA, 15 bp, Homo sapiens
ttataatcagtaaaa

SEQ ID NO: 34466 - DNA, 15 bp, Homo sapiens
tttataatcagtaaa

SEQ ID NO: 34467 - DNA, 15 bp, Homo sapiens
ttttataatcagtaa

SEQ ID NO: 34468 - DNA, 15 bp, Homo sapiens
attttataatcagta

SEQ ID NO: 34469 - DNA, 15 bp, Homo sapiens
gattttataatcagt

SEQ ID NO: 34470 - DNA, 15 bp, Homo sapiens
ggattttataatcag

SEQ ID NO: 34471 - DNA, 15 bp, Homo sapiens
tggattttataatca

SEQ ID NO: 34472 - DNA, 15 bp, Homo sapiens
ctggattttataatc

SEQ ID NO: 34473 - DNA, 15 bp, Homo sapiens
cctggattttataat

SEQ ID NO: 34474 - DNA, 15 bp, Homo sapiens
acctggattttataa

SEQ ID NO: 34475 - DNA, 15 bp, Homo sapiens
gacctggattttata

SEQ ID NO: 34476 - DNA, 15 bp, Homo sapiens
ggacctggattttat

SEQ ID NO: 34477 - DNA, 15 bp, Homo sapiens
cggacctggatttta

SEQ ID NO: 34478 - DNA, 15 bp, Homo sapiens
gcggacctggatttt

SEQ ID NO: 34479 - DNA, 15 bp, Homo sapiens
tgcggacctggattt

SEQ ID NO: 34480 - DNA, 15 bp, Homo sapiens
atgcggacctggatt

SEQ ID NO: 34481 - DNA, 15 bp, Homo sapiens
aatgcggacctggat

SEQ ID NO: 34482 - DNA, 15 bp, Homo sapiens
taatgcggacctgga

SEQ ID NO: 34483 - DNA, 15 bp, Homo sapiens
ttaatgcggacctgg

SEQ ID NO: 34484 - DNA, 15 bp, Homo sapiens
gttaatgcggacctg

SEQ ID NO: 34485 - DNA, 15 bp, Homo sapiens
agttaatgcggacct

SEQ ID NO: 34486 - DNA, 15 bp, Homo sapiens
gagttaatgcggacc

SEQ ID NO: 34487 - DNA, 15 bp, Homo sapiens
tgagttaatgcggac

SEQ ID NO: 34488 - DNA, 15 bp, Homo sapiens
acctgtgtgaaaaca

SEQ ID NO: 34489 - DNA, 15 bp, Homo sapiens
aacctgtgtgaaaac

SEQ ID NO: 34490 - DNA, 15 bp, Homo sapiens
caacctgtgtgaaaa

SEQ ID NO: 34491 - DNA, 15 bp, Homo sapiens
ccaacctgtgtgaaa

SEQ ID NO: 34492 - DNA, 15 bp, Homo sapiens
accaacctgtgtgaa

SEQ ID NO: 34493 - DNA, 15 bp, Homo sapiens
caccaacctgtgtga

SEQ ID NO: 34494 - DNA, 15 bp, Homo sapiens
gcaccaacctgtgtg

SEQ ID NO: 34495 - DNA, 15 bp, Homo sapiens
agcaccaacctgtgt

SEQ ID NO: 34496 - DNA, 15 bp, Homo sapiens
tagcaccaacctgtg

SEQ ID NO: 34497 - DNA, 15 bp, Homo sapiens
ctagcaccaacctgt

SEQ ID NO: 34498 - DNA, 15 bp, Homo sapiens
actagcaccaacctg

SEQ ID NO: 34499 - DNA, 15 bp, Homo sapiens
cactagcaccaacct

SEQ ID NO: 34500 - DNA, 15 bp, Homo sapiens
acactagcaccaacc

SEQ ID NO: 34501 - DNA, 15 bp, Homo sapiens
cacactagcaccaac

SEQ ID NO: 34502 - DNA, 15 bp, Homo sapiens
acacactagcaccaa

SEQ ID NO: 34503 - DNA, 15 bp, Homo sapiens
cacacactagcacca

SEQ ID NO: 34504 - DNA, 15 bp, Homo sapiens
tcacacactagcacc

SEQ ID NO: 34505 - DNA, 15 bp, Homo sapiens
ctcacacactagcac

SEQ ID NO: 34506 - DNA, 15 bp, Homo sapiens
actcacacactagca

SEQ ID NO: 34507 - DNA, 15 bp, Homo sapiens
gactcacacactagc

SEQ ID NO: 34508 - DNA, 15 bp, Homo sapiens
agactcacacactag

SEQ ID NO: 34509 - DNA, 15 bp, Homo sapiens
tagactcacacacta

SEQ ID NO: 34510 - DNA, 15 bp, Homo sapiens
ttagactcacacact

SEQ ID NO: 34511 - DNA, 15 bp, Homo sapiens
cttagactcacacac

SEQ ID NO: 34512 - DNA, 15 bp, Homo sapiens
gcttagactcacaca

SEQ ID NO: 34513 - DNA, 15 bp, Homo sapiens
ggcttagactcacac

SEQ ID NO: 34514 - DNA, 15 bp, Homo sapiens
aggcttagactcaca

SEQ ID NO: 34515 - DNA, 15 bp, Homo sapiens
taggcttagactcac

SEQ ID NO: 34516 - DNA, 15 bp, Homo sapiens
gtaggcttagactca

SEQ ID NO: 34517 - DNA, 15 bp, Homo sapiens
tgtaggcttagactc

SEQ ID NO: 34518 - DNA, 15 bp, Homo sapiens
atgtaggcttagact

SEQ ID NO: 34519 - DNA, 15 bp, Homo sapiens
catgtaggcttagac

SEQ ID NO: 34520 - DNA, 15 bp, Homo sapiens
ccatgtaggcttaga

SEQ ID NO: 34521 - DNA, 15 bp, Homo sapiens
cccatgtaggcttag

SEQ ID NO: 34522 - DNA, 15 bp, Homo sapiens
acccatgtaggctta

SEQ ID NO: 34523 - DNA, 15 bp, Homo sapiens
cacccatgtaggctt

SEQ ID NO: 34524 - DNA, 15 bp, Homo sapiens
ccacccatgtaggct

SEQ ID NO: 34525 - DNA, 15 bp, Homo sapiens
tccacccatgtaggc

SEQ ID NO: 34526 - DNA, 15 bp, Homo sapiens
atccacccatgtagg

SEQ ID NO: 34527 - DNA, 15 bp, Homo sapiens
tatccacccatgtag

SEQ ID NO: 34528 - DNA, 15 bp, Homo sapiens
atatccacccatgta

SEQ ID NO: 34529 - DNA, 15 bp, Homo sapiens
gatatccacccatgt

SEQ ID NO: 34530 - DNA, 15 bp, Homo sapiens
ggatatccacccatg

SEQ ID NO: 34531 - DNA, 15 bp, Homo sapiens
tggatatccacccat

SEQ ID NO: 34532 - DNA, 15 bp, Homo sapiens
gtggatatccaccca

SEQ ID NO: 34533 - DNA, 15 bp, Homo sapiens
cgtggatatccaccc

SEQ ID NO: 34534 - DNA, 15 bp, Homo sapiens
acgtggatatccacc

SEQ ID NO: 34535 - DNA, 15 bp, Homo sapiens
cacgtggatatccac

SEQ ID NO: 34536 - DNA, 15 bp, Homo sapiens
tcacgtggatatcca

SEQ ID NO: 34537 - DNA, 15 bp, Homo sapiens
atcacgtggatatcc

SEQ ID NO: 34538 - DNA, 15 bp, Homo sapiens
gatcacgtggatatc

SEQ ID NO: 34539 - DNA, 15 bp, Homo sapiens
tgatcacgtggatat

SEQ ID NO: 34540 - DNA, 15 bp, Homo sapiens
ctgatcacgtggata

SEQ ID NO: 34541 - DNA, 15 bp, Homo sapiens
cctgatcacgtggat

SEQ ID NO: 34542 - DNA, 15 bp, Homo sapiens
gcctgatcacgtgga

SEQ ID NO: 34543 - DNA, 15 bp, Homo sapiens
agcctgatcacgtgg

SEQ ID NO: 34544 - DNA, 15 bp, Homo sapiens
cagcctgatcacgtg

SEQ ID NO: 34545 - DNA, 15 bp, Homo sapiens
gcagcctgatcacgt

SEQ ID NO: 34546 - DNA, 15 bp, Homo sapiens
tgcagcctgatcacg

SEQ ID NO: 34547 - DNA, 15 bp, Homo sapiens
ttgcagcctgatcac

SEQ ID NO: 34548 - DNA, 15 bp, Homo sapiens
cttgcagcctgatca

SEQ ID NO: 34549 - DNA, 15 bp, Homo sapiens
acttgcagcctgatc

SEQ ID NO: 34550 - DNA, 15 bp, Homo sapiens
aacttgcagcctgat

SEQ ID NO: 34551 - DNA, 15 bp, Homo sapiens
gaacttgcagcctga

SEQ ID NO: 34552 - DNA, 15 bp, Homo sapiens
agaacttgcagcctg

SEQ ID NO: 34553 - DNA, 15 bp, Homo sapiens
aagaacttgcagcct

SEQ ID NO: 34554 - DNA, 15 bp, Homo sapiens
aaagaacttgcagcc

SEQ ID NO: 34555 - DNA, 15 bp, Homo sapiens
caaagaacttgcagc

SEQ ID NO: 34556 - DNA, 15 bp, Homo sapiens
acaaagaacttgcag

SEQ ID NO: 34557 - DNA, 15 bp, Homo sapiens
tacaaagaacttgca

SEQ ID NO: 34558 - DNA, 15 bp, Homo sapiens
ctacaaagaacttgc

SEQ ID NO: 34559 - DNA, 15 bp, Homo sapiens
actacaaagaacttg

SEQ ID NO: 34560 - DNA, 15 bp, Homo sapiens
cactacaaagaactt

SEQ ID NO: 34561 - DNA, 15 bp, Homo sapiens
ccactacaaagaact

SEQ ID NO: 34562 - DNA, 15 bp, Homo sapiens
tccactacaaagaac

SEQ ID NO: 34563 - DNA, 15 bp, Homo sapiens
ctccactacaaagaa

SEQ ID NO: 34564 - DNA, 15 bp, Homo sapiens
cctccactacaaaga

SEQ ID NO: 34565 - DNA, 15 bp, Homo sapiens
tcctccactacaaag

SEQ ID NO: 34566 - DNA, 15 bp, Homo sapiens
atcctccactacaaa

SEQ ID NO: 34567 - DNA, 15 bp, Homo sapiens
gatcctccactacaa

SEQ ID NO: 34568 - DNA, 15 bp, Homo sapiens
agatcctccactaca

SEQ ID NO: 34569 - DNA, 15 bp, Homo sapiens
aagatcctccactac

SEQ ID NO: 34570 - DNA, 15 bp, Homo sapiens
aaagatcctccacta

SEQ ID NO: 34571 - DNA, 15 bp, Homo sapiens
caaagatcctccact

SEQ ID NO: 34572 - DNA, 15 bp, Homo sapiens
ccaaagatcctccac

SEQ ID NO: 34573 - DNA, 15 bp, Homo sapiens
gccaaagatcctcca

SEQ ID NO: 34574 - DNA, 15 bp, Homo sapiens
ggccaaagatcctcc

SEQ ID NO: 34575 - DNA, 15 bp, Homo sapiens
gggccaaagatcctc

SEQ ID NO: 34576 - DNA, 15 bp, Homo sapiens
agggccaaagatcct

SEQ ID NO: 34577 - DNA, 15 bp, Homo sapiens
gagggccaaagatcc

SEQ ID NO: 34578 - DNA, 15 bp, Homo sapiens
ggagggccaaagatc

SEQ ID NO: 34579 - DNA, 15 bp, Homo sapiens
gggagggccaaagat

SEQ ID NO: 34580 - DNA, 15 bp, Homo sapiens
agggagggccaaaga

SEQ ID NO: 34581 - DNA, 15 bp, Homo sapiens
cagggagggccaaag

SEQ ID NO: 34582 - DNA, 15 bp, Homo sapiens
gcagggagggccaaa

SEQ ID NO: 34583 - DNA, 15 bp, Homo sapiens
agcagggagggccaa

SEQ ID NO: 34584 - DNA, 15 bp, Homo sapiens
cagcagggagggcca

SEQ ID NO: 34585 - DNA, 15 bp, Homo sapiens
gcagcagggagggcc

SEQ ID NO: 34586 - DNA, 15 bp, Homo sapiens
agcagcagggagggc

SEQ ID NO: 34587 - DNA, 15 bp, Homo sapiens
aagcagcagggaggg

SEQ ID NO: 34588 - DNA, 15 bp, Homo sapiens
gaagcagcagggagg

SEQ ID NO: 34589 - DNA, 15 bp, Homo sapiens
ggaagcagcagggag

SEQ ID NO: 34590 - DNA, 15 bp, Homo sapiens
gggaagcagcaggga

SEQ ID NO: 34591 - DNA, 15 bp, Homo sapiens
tgggaagcagcaggg

SEQ ID NO: 34592 - DNA, 15 bp, Homo sapiens
ttgggaagcagcagg

SEQ ID NO: 34593 - DNA, 15 bp, Homo sapiens
gttgggaagcagcag

SEQ ID NO: 34594 - DNA, 15 bp, Homo sapiens
ggttgggaagcagca

SEQ ID NO: 34595 - DNA, 15 bp, Homo sapiens
gggttgggaagcagc

SEQ ID NO: 34596 - DNA, 15 bp, Homo sapiens
tgggttgggaagcag

SEQ ID NO: 34597 - DNA, 15 bp, Homo sapiens
ctgggttgggaagca

SEQ ID NO: 34598 - DNA, 15 bp, Homo sapiens
gctgggttgggaagc

SEQ ID NO: 34599 - DNA, 15 bp, Homo sapiens
cgctgggttgggaag

SEQ ID NO: 34600 - DNA, 15 bp, Homo sapiens
tcgctgggttgggaa

SEQ ID NO: 34601 - DNA, 15 bp, Homo sapiens
ttcgctgggttggga

SEQ ID NO: 34602 - DNA, 15 bp, Homo sapiens
gttcgctgggttggg

SEQ ID NO: 34603 - DNA, 15 bp, Homo sapiens
ggttcgctgggttgg

SEQ ID NO: 34604 - DNA, 15 bp, Homo sapiens
aggttcgctgggttg

SEQ ID NO: 34605 - DNA, 15 bp, Homo sapiens
taggttcgctgggtt

SEQ ID NO: 34606 - DNA, 15 bp, Homo sapiens
gtaggttcgctgggt

SEQ ID NO: 34607 - DNA, 15 bp, Homo sapiens
ggtaggttcgctggg

SEQ ID NO: 34608 - DNA, 15 bp, Homo sapiens
tggtaggttcgctgg

SEQ ID NO: 34609 - DNA, 15 bp, Homo sapiens
gtggtaggttcgctg

SEQ ID NO: 34610 - DNA, 15 bp, Homo sapiens
tgtggtaggttcgct

SEQ ID NO: 34611 - DNA, 15 bp, Homo sapiens
gtgtggtaggttcgc

SEQ ID NO: 34612 - DNA, 15 bp, Homo sapiens
ggtgtggtaggttcg

SEQ ID NO: 34613 - DNA, 15 bp, Homo sapiens
tggtgtggtaggttc

SEQ ID NO: 34614 - DNA, 15 bp, Homo sapiens
atggtgtggtaggtt

SEQ ID NO: 34615 - DNA, 15 bp, Homo sapiens
catggtgtggtaggt

SEQ ID NO: 34616 - DNA, 15 bp, Homo sapiens
gcatggtgtggtagg

SEQ ID NO: 34617 - DNA, 15 bp, Homo sapiens
tgcatggtgtggtag

SEQ ID NO: 34618 - DNA, 15 bp, Homo sapiens
gtgcatggtgtggta

SEQ ID NO: 34619 - DNA, 15 bp, Homo sapiens
cgtgcatggtgtggt

SEQ ID NO: 34620 - DNA, 15 bp, Homo sapiens
acgtgcatggtgtgg

SEQ ID NO: 34621 - DNA, 15 bp, Homo sapiens
cacgtgcatggtgtg

SEQ ID NO: 34622 - DNA, 15 bp, Homo sapiens
gcacgtgcatggtgt

SEQ ID NO: 34623 - DNA, 15 bp, Homo sapiens
tgcacgtgcatggtg

SEQ ID NO: 34624 - DNA, 15 bp, Homo sapiens
gtgcacgtgcatggt

SEQ ID NO: 34625 - DNA, 15 bp, Homo sapiens
tgtgcacgtgcatgg

SEQ ID NO: 34626 - DNA, 15 bp, Homo sapiens
ctgtgcacgtgcatg

SEQ ID NO: 34627 - DNA, 15 bp, Homo sapiens
gctgtgcacgtgcat

SEQ ID NO: 34628 - DNA, 15 bp, Homo sapiens
ggctgtgcacgtgca

SEQ ID NO: 34629 - DNA, 15 bp, Homo sapiens
tggctgtgcacgtgc

SEQ ID NO: 34630 - DNA, 15 bp, Homo sapiens
ttggctgtgcacgtg

SEQ ID NO: 34631 - DNA, 15 bp, Homo sapiens
cttggctgtgcacgt

SEQ ID NO: 34632 - DNA, 15 bp, Homo sapiens
ccttggctgtgcacg

SEQ ID NO: 34633 - DNA, 15 bp, Homo sapiens
cccttggctgtgcac

SEQ ID NO: 34634 - DNA, 15 bp, Homo sapiens
acccttggctgtgca

SEQ ID NO: 34635 - DNA, 15 bp, Homo sapiens
aacccttggctgtgc

SEQ ID NO: 34636 - DNA, 15 bp, Homo sapiens
caacccttggctgtg

SEQ ID NO: 34637 - DNA, 15 bp, Homo sapiens
acaacccttggctgt

SEQ ID NO: 34638 - DNA, 15 bp, Homo sapiens
aacaacccttggctg

SEQ ID NO: 34639 - DNA, 15 bp, Homo sapiens
caacaacccttggct

SEQ ID NO: 34640 - DNA, 15 bp, Homo sapiens
tcaacaacccttggc

SEQ ID NO: 34641 - DNA, 15 bp, Homo sapiens
gtcaacaacccttgg

SEQ ID NO: 34642 - DNA, 15 bp, Homo sapiens
agtcaacaacccttg

SEQ ID NO: 34643 - DNA, 15 bp, Homo sapiens
cagtcaacaaccctt

SEQ ID NO: 34644 - DNA, 15 bp, Homo sapiens
acagtcaacaaccct

SEQ ID NO: 34645 - DNA, 15 bp, Homo sapiens
aacagtcaacaaccc

SEQ ID NO: 34646 - DNA, 15 bp, Homo sapiens
aaacagtcaacaacc

SEQ ID NO: 34647 - DNA, 15 bp, Homo sapiens
taaacagtcaacaac

SEQ ID NO: 34648 - DNA, 15 bp, Homo sapiens
ttaaacagtcaacaa

SEQ ID NO: 34649 - DNA, 15 bp, Homo sapiens
attaaacagtcaaca

SEQ ID NO: 34650 - DNA, 15 bp, Homo sapiens
gattaaacagtcaac

SEQ ID NO: 34651 - DNA, 15 bp, Homo sapiens
tgattaaacagtcaa

SEQ ID NO: 34652 - DNA, 15 bp, Homo sapiens
ctgattaaacagtca

SEQ ID NO: 34653 - DNA, 15 bp, Homo sapiens
actgattaaacagtc

SEQ ID NO: 34654 - DNA, 15 bp, Homo sapiens
gactgattaaacagt

SEQ ID NO: 34655 - DNA, 15 bp, Homo sapiens
agactgattaaacag

SEQ ID NO: 34656 - DNA, 15 bp, Homo sapiens
gagactgattaaaca

SEQ ID NO: 34657 - DNA, 15 bp, Homo sapiens
agagactgattaaac

SEQ ID NO: 34658 - DNA, 15 bp, Homo sapiens
cagagactgattaaa

SEQ ID NO: 34659 - DNA, 15 bp, Homo sapiens
ccagagactgattaa

SEQ ID NO: 34660 - DNA, 15 bp, Homo sapiens
cccagagactgatta

SEQ ID NO: 34661 - DNA, 15 bp, Homo sapiens
acccagagactgatt

SEQ ID NO: 34662 - DNA, 15 bp, Homo sapiens
aacccagagactgat

SEQ ID NO: 34663 - DNA, 15 bp, Homo sapiens
gaacccagagactga

SEQ ID NO: 34664 - DNA, 15 bp, Homo sapiens
agaacccagagactg

SEQ ID NO: 34665 - DNA, 15 bp, Homo sapiens
aagaacccagagact

SEQ ID NO: 34666 - DNA, 15 bp, Homo sapiens
taagaacccagagac

SEQ ID NO: 34667 - DNA, 15 bp, Homo sapiens
ataagaacccagaga

SEQ ID NO: 34668 - DNA, 15 bp, Homo sapiens
cataagaacccagag

SEQ ID NO: 34669 - DNA, 15 bp, Homo sapiens
acataagaacccaga

SEQ ID NO: 34670 - DNA, 15 bp, Homo sapiens
gacataagaacccag

SEQ ID NO: 34671 - DNA, 15 bp, Homo sapiens
agacataagaaccca

SEQ ID NO: 34672 - DNA, 15 bp, Homo sapiens
gagacataagaaccc

SEQ ID NO: 34673 - DNA, 15 bp, Homo sapiens
tgagacataagaacc

SEQ ID NO: 34674 - DNA, 15 bp, Homo sapiens
atgagacataagaac

SEQ ID NO: 34675 - DNA, 15 bp, Homo sapiens
gatgagacataagaa

SEQ ID NO: 34676 - DNA, 15 bp, Homo sapiens
ggatgagacataaga

SEQ ID NO: 34677 - DNA, 15 bp, Homo sapiens
cggatgagacataag

SEQ ID NO: 34678 - DNA, 15 bp, Homo sapiens
ccggatgagacataa

SEQ ID NO: 34679 - DNA, 15 bp, Homo sapiens
cccggatgagacata

SEQ ID NO: 34680 - DNA, 15 bp, Homo sapiens
ccccggatgagacat

SEQ ID NO: 34681 - DNA, 15 bp, Homo sapiens
cccccggatgagaca

SEQ ID NO: 34682 - DNA, 15 bp, Homo sapiens
tcccccggatgagac

SEQ ID NO: 34683 - DNA, 15 bp, Homo sapiens
atcccccggatgaga

SEQ ID NO: 34684 - DNA, 15 bp, Homo sapiens
aatcccccggatgag

SEQ ID NO: 34685 - DNA, 15 bp, Homo sapiens
gaatcccccggatga

SEQ ID NO: 34686 - DNA, 15 bp, Homo sapiens
tgaatcccccggatg

SEQ ID NO: 34687 - DNA, 15 bp, Homo sapiens
gtgaatcccccggat

SEQ ID NO: 34688 - DNA, 15 bp, Homo sapiens
agtgaatcccccgga

SEQ ID NO: 34689 - DNA, 15 bp, Homo sapiens
cagtgaatcccccgg

SEQ ID NO: 34690 - DNA, 15 bp, Homo sapiens
tcagtgaatcccccg

SEQ ID NO: 34691 - DNA, 15 bp, Homo sapiens
atcagtgaatccccc

SEQ ID NO: 34692 - DNA, 15 bp, Homo sapiens
tatcagtgaatcccc

SEQ ID NO: 34693 - DNA, 15 bp, Homo sapiens
ctatcagtgaatccc

SEQ ID NO: 34694 - DNA, 15 bp, Homo sapiens
cctatcagtgaatcc

SEQ ID NO: 34695 - DNA, 15 bp, Homo sapiens
tcctatcagtgaatc

SEQ ID NO: 34696 - DNA, 15 bp, Homo sapiens
ctcctatcagtgaat

SEQ ID NO: 34697 - DNA, 15 bp, Homo sapiens
cctcctatcagtgaa

SEQ ID NO: 34698 - DNA, 15 bp, Homo sapiens
gcctcctatcagtga

SEQ ID NO: 34699 - DNA, 15 bp, Homo sapiens
agcctcctatcagtg

SEQ ID NO: 34700 - DNA, 15 bp, Homo sapiens
cagcctcctatcagt

SEQ ID NO: 34701 - DNA, 15 bp, Homo sapiens
ccagcctcctatcag

SEQ ID NO: 34702 - DNA, 15 bp, Homo sapiens
tccagcctcctatca

SEQ ID NO: 34703 - DNA, 15 bp, Homo sapiens
ctccagcctcctatc

SEQ ID NO: 34704 - DNA, 15 bp, Homo sapiens
gctccagcctcctat

SEQ ID NO: 34705 - DNA, 15 bp, Homo sapiens
agctccagcctccta

SEQ ID NO: 34706 - DNA, 15 bp, Homo sapiens
aagctccagcctcct

SEQ ID NO: 34707 - DNA, 15 bp, Homo sapiens
caagctccagcctcc

SEQ ID NO: 34708 - DNA, 15 bp, Homo sapiens
tcaagctccagcctc

SEQ ID NO: 34709 - DNA, 15 bp, Homo sapiens
atcaagctccagcct

SEQ ID NO: 34710 - DNA, 15 bp, Homo sapiens
gatcaagctccagcc

SEQ ID NO: 34711 - DNA, 15 bp, Homo sapiens
tgatcaagctccagc

SEQ ID NO: 34712 - DNA, 15 bp, Homo sapiens
gtgatcaagctccag

SEQ ID NO: 34713 - DNA, 15 bp, Homo sapiens
tgtgatcaagctcca

SEQ ID NO: 34714 - DNA, 15 bp, Homo sapiens
atgtgatcaagctcc

SEQ ID NO: 34715 - DNA, 15 bp, Homo sapiens
gatgtgatcaagctc

SEQ ID NO: 34716 - DNA, 15 bp, Homo sapiens
ggatgtgatcaagct

SEQ ID NO: 34717 - DNA, 15 bp, Homo sapiens
tggatgtgatcaagc

SEQ ID NO: 34718 - DNA, 15 bp, Homo sapiens
ctggatgtgatcaag

SEQ ID NO: 34719 - DNA, 15 bp, Homo sapiens
tctggatgtgatcaa

SEQ ID NO: 34720 - DNA, 15 bp, Homo sapiens
atctggatgtgatca

SEQ ID NO: 34721 - DNA, 15 bp, Homo sapiens
catctggatgtgatc

SEQ ID NO: 34722 - DNA, 15 bp, Homo sapiens
acatctggatgtgat

SEQ ID NO: 34723 - DNA, 15 bp, Homo sapiens
aacatctggatgtga

SEQ ID NO: 34724 - DNA, 15 bp, Homo sapiens
gaacatctggatgtg

SEQ ID NO: 34725 - DNA, 15 bp, Homo sapiens
agaacatctggatgt

SEQ ID NO: 34726 - DNA, 15 bp, Homo sapiens
gagaacatctggatg

SEQ ID NO: 34727 - DNA, 15 bp, Homo sapiens
tgagaacatctggat

SEQ ID NO: 34728 - DNA, 15 bp, Homo sapiens
atgagaacatctgga

SEQ ID NO: 34729 - DNA, 15 bp, Homo sapiens
gatgagaacatctgg

SEQ ID NO: 34730 - DNA, 15 bp, Homo sapiens
agatgagaacatctg

SEQ ID NO: 34731 - DNA, 15 bp, Homo sapiens
aagatgagaacatct

SEQ ID NO: 34732 - DNA, 15 bp, Homo sapiens
gaagatgagaacatc

SEQ ID NO: 34733 - DNA, 15 bp, Homo sapiens
tgaagatgagaacat

SEQ ID NO: 34734 - DNA, 15 bp, Homo sapiens
ctgaagatgagaaca

SEQ ID NO: 34735 - DNA, 15 bp, Homo sapiens
tctgaagatgagaac

SEQ ID NO: 34736 - DNA, 15 bp, Homo sapiens
ctctgaagatgagaa

SEQ ID NO: 34737 - DNA, 15 bp, Homo sapiens
gctctgaagatgaga

SEQ ID NO: 34738 - DNA, 15 bp, Homo sapiens
ggctctgaagatgag

SEQ ID NO: 34739 - DNA, 15 bp, Homo sapiens
aggctctgaagatga

SEQ ID NO: 34740 - DNA, 15 bp, Homo sapiens
caggctctgaagatg

SEQ ID NO: 34741 - DNA, 15 bp, Homo sapiens
acaggctctgaagat

SEQ ID NO: 34742 - DNA, 15 bp, Homo sapiens
aacaggctctgaaga

SEQ ID NO: 34743 - DNA, 15 bp, Homo sapiens
taacaggctctgaag

SEQ ID NO: 34744 - DNA, 15 bp, Homo sapiens
ttaacaggctctgaa

SEQ ID NO: 34745 - DNA, 15 bp, Homo sapiens
gttaacaggctctga

SEQ ID NO: 34746 - DNA, 15 bp, Homo sapiens
tgttaacaggctctg

SEQ ID NO: 34747 - DNA, 15 bp, Homo sapiens
atgttaacaggctct

SEQ ID NO: 34748 - DNA, 15 bp, Homo sapiens
tatgttaacaggctc

SEQ ID NO: 34749 - DNA, 15 bp, Homo sapiens
ttatgttaacaggct

SEQ ID NO: 34750 - DNA, 15 bp, Homo sapiens
gttatgttaacaggc

SEQ ID NO: 34751 - DNA, 15 bp, Homo sapiens
tgttatgttaacagg

SEQ ID NO: 34752 - DNA, 15 bp, Homo sapiens
ctgttatgttaacag

SEQ ID NO: 34753 - DNA, 15 bp, Homo sapiens
tctgttatgttaaca

SEQ ID NO: 34754 - DNA, 15 bp, Homo sapiens
ttctgttatgttaac

SEQ ID NO: 34755 - DNA, 15 bp, Homo sapiens
cttctgttatgttaa

SEQ ID NO: 34756 - DNA, 15 bp, Homo sapiens
acttctgttatgtta

SEQ ID NO: 34757 - DNA, 15 bp, Homo sapiens
gacttctgttatgtt

SEQ ID NO: 34758 - DNA, 15 bp, Homo sapiens
agacttctgttatgt

SEQ ID NO: 34759 - DNA, 15 bp, Homo sapiens
aagacttctgttatg

SEQ ID NO: 34760 - DNA, 15 bp, Homo sapiens
taagacttctgttat

SEQ ID NO: 34761 - DNA, 15 bp, Homo sapiens
ataagacttctgtta

SEQ ID NO: 34762 - DNA, 15 bp, Homo sapiens
tataagacttctgtt

SEQ ID NO: 34763 - DNA, 15 bp, Homo sapiens
ttataagacttctgt

SEQ ID NO: 34764 - DNA, 15 bp, Homo sapiens
tttataagacttctg

SEQ ID NO: 34765 - DNA, 15 bp, Homo sapiens
gtttataagacttct

SEQ ID NO: 34766 - DNA, 15 bp, Homo sapiens
tgtttataagacttc

SEQ ID NO: 34767 - DNA, 15 bp, Homo sapiens
atgtttataagactt

SEQ ID NO: 34768 - DNA, 15 bp, Homo sapiens
catgtttataagact

SEQ ID NO: 34769 - DNA, 15 bp, Homo sapiens
gcatgtttataagac

SEQ ID NO: 34770 - DNA, 15 bp, Homo sapiens
agcatgtttataaga

SEQ ID NO: 34771 - DNA, 15 bp, Homo sapiens
cagcatgtttataag

SEQ ID NO: 34772 - DNA, 15 bp, Homo sapiens
tcagcatgtttataa

SEQ ID NO: 34773 - DNA, 15 bp, Homo sapiens
ctcagcatgtttata

SEQ ID NO: 34774 - DNA, 15 bp, Homo sapiens
gctcagcatgtttat

SEQ ID NO: 34775 - DNA, 15 bp, Homo sapiens
tgctcagcatgttta

SEQ ID NO: 34776 - DNA, 15 bp, Homo sapiens
gtgctcagcatgttt

SEQ ID NO: 34777 - DNA, 15 bp, Homo sapiens
tgtgctcagcatgtt

SEQ ID NO: 34778 - DNA, 15 bp, Homo sapiens
gtgtgctcagcatgt

SEQ ID NO: 34779 - DNA, 15 bp, Homo sapiens
agtgtgctcagcatg

SEQ ID NO: 34780 - DNA, 15 bp, Homo sapiens
gagtgtgctcagcat

SEQ ID NO: 34781 - DNA, 15 bp, Homo sapiens
tgagtgtgctcagca

SEQ ID NO: 34782 - DNA, 15 bp, Homo sapiens
gtgagtgtgctcagc

SEQ ID NO: 34783 - DNA, 15 bp, Homo sapiens
agtgagtgtgctcag

SEQ ID NO: 34784 - DNA, 15 bp, Homo sapiens
cagtgagtgtgctca

SEQ ID NO: 34785 - DNA, 15 bp, Homo sapiens
ccagtgagtgtgctc

SEQ ID NO: 34786 - DNA, 15 bp, Homo sapiens
accagtgagtgtgct

SEQ ID NO: 34787 - DNA, 15 bp, Homo sapiens
gaccagtgagtgtgc

SEQ ID NO: 34788 - DNA, 15 bp, Homo sapiens
agaccagtgagtgtg

SEQ ID NO: 34789 - DNA, 15 bp, Homo sapiens
cagaccagtgagtgt

SEQ ID NO: 34790 - DNA, 15 bp, Homo sapiens
ccagaccagtgagtg

SEQ ID NO: 34791 - DNA, 15 bp, Homo sapiens
tccagaccagtgagt

SEQ ID NO: 34792 - DNA, 15 bp, Homo sapiens
ctccagaccagtgag

SEQ ID NO: 34793 - DNA, 15 bp, Homo sapiens
tctccagaccagtga

SEQ ID NO: 34794 - DNA, 15 bp, Homo sapiens
ctctccagaccagtg

SEQ ID NO: 34795 - DNA, 15 bp, Homo sapiens
actctccagaccagt

SEQ ID NO: 34796 - DNA, 15 bp, Homo sapiens
cactctccagaccag

SEQ ID NO: 34797 - DNA, 15 bp, Homo sapiens
acactctccagacca

SEQ ID NO: 34798 - DNA, 15 bp, Homo sapiens
aacactctccagacc

SEQ ID NO: 34799 - DNA, 15 bp, Homo sapiens
caacactctccagac

SEQ ID NO: 34800 - DNA, 15 bp, Homo sapiens
gcaacactctccaga

SEQ ID NO: 34801 - DNA, 15 bp, Homo sapiens
tgcaacactctccag

SEQ ID NO: 34802 - DNA, 15 bp, Homo sapiens
ctgcaacactctcca

SEQ ID NO: 34803 - DNA, 15 bp, Homo sapiens
cctgcaacactctcc

SEQ ID NO: 34804 - DNA, 15 bp, Homo sapiens
tcctgcaacactctc

SEQ ID NO: 34805 - DNA, 15 bp, Homo sapiens
atcctgcaacactct

SEQ ID NO: 34806 - DNA, 15 bp, Homo sapiens
catcctgcaacactc

SEQ ID NO: 34807 - DNA, 15 bp, Homo sapiens
tcatcctgcaacact

SEQ ID NO: 34808 - DNA, 15 bp, Homo sapiens
gtcatcctgcaacac

SEQ ID NO: 34809 - DNA, 15 bp, Homo sapiens
ggtcatcctgcaaca

SEQ ID NO: 34810 - DNA, 15 bp, Homo sapiens
aggtcatcctgcaac

SEQ ID NO: 34811 - DNA, 15 bp, Homo sapiens
taggtcatcctgcaa

SEQ ID NO: 34812 - DNA, 15 bp, Homo sapiens
ctaggtcatcctgca

SEQ ID NO: 34813 - DNA, 15 bp, Homo sapiens
cctaggtcatcctgc

SEQ ID NO: 34814 - DNA, 15 bp, Homo sapiens
gcctaggtcatcctg

SEQ ID NO: 34815 - DNA, 15 bp, Homo sapiens
ggcctaggtcatcct

SEQ ID NO: 34816 - DNA, 15 bp, Homo sapiens
gggcctaggtcatcc

SEQ ID NO: 34817 - DNA, 15 bp, Homo sapiens
tgggcctaggtcatc

SEQ ID NO: 34818 - DNA, 15 bp, Homo sapiens
atgggcctaggtcat

SEQ ID NO: 34819 - DNA, 15 bp, Homo sapiens
aatgggcctaggtca

SEQ ID NO: 34820 - DNA, 15 bp, Homo sapiens
caatgggcctaggtc

SEQ ID NO: 34821 - DNA, 15 bp, Homo sapiens
gcaatgggcctaggt

SEQ ID NO: 34822 - DNA, 15 bp, Homo sapiens
tgcaatgggcctagg

SEQ ID NO: 34823 - DNA, 15 bp, Homo sapiens
ctgcaatgggcctag

SEQ ID NO: 34824 - DNA, 15 bp, Homo sapiens
cctgcaatgggccta

SEQ ID NO: 34825 - DNA, 15 bp, Homo sapiens
ccctgcaatgggcct

SEQ ID NO: 34826 - DNA, 15 bp, Homo sapiens
cccctgcaatgggcc

SEQ ID NO: 34827 - DNA, 15 bp, Homo sapiens
acccctgcaatgggc

SEQ ID NO: 34828 - DNA, 15 bp, Homo sapiens
cacccctgcaatggg

SEQ ID NO: 34829 - DNA, 15 bp, Homo sapiens
ccacccctgcaatgg

SEQ ID NO: 34830 - DNA, 15 bp, Homo sapiens
gccacccctgcaatg

SEQ ID NO: 34831 - DNA, 15 bp, Homo sapiens
ggccacccctgcaat

SEQ ID NO: 34832 - DNA, 15 bp, Homo sapiens
aggccacccctgcaa

SEQ ID NO: 34833 - DNA, 15 bp, Homo sapiens
caggccacccctgca

SEQ ID NO: 34834 - DNA, 15 bp, Homo sapiens
ccaggccacccctgc

SEQ ID NO: 34835 - DNA, 15 bp, Homo sapiens
cccaggccacccctg

SEQ ID NO: 34836 - DNA, 15 bp, Homo sapiens
acccaggccacccct

SEQ ID NO: 34837 - DNA, 15 bp, Homo sapiens
gacccaggccacccc

SEQ ID NO: 34838 - DNA, 15 bp, Homo sapiens
cgacccaggccaccc

SEQ ID NO: 34839 - DNA, 15 bp, Homo sapiens
gcgacccaggccacc

SEQ ID NO: 34840 - DNA, 15 bp, Homo sapiens
ggcgacccaggccac

SEQ ID NO: 34841 - DNA, 15 bp, Homo sapiens
gggcgacccaggcca

SEQ ID NO: 34842 - DNA, 15 bp, Homo sapiens
agggcgacccaggcc

SEQ ID NO: 34843 - DNA, 15 bp, Homo sapiens
gagggcgacccaggc

SEQ ID NO: 34844 - DNA, 15 bp, Homo sapiens
ggagggcgacccagg

SEQ ID NO: 34845 - DNA, 15 bp, Homo sapiens
gggagggcgacccag

SEQ ID NO: 34846 - DNA, 15 bp, Homo sapiens
tgggagggcgaccca

SEQ ID NO: 34847 - DNA, 15 bp, Homo sapiens
gtgggagggcgaccc

SEQ ID NO: 34848 - DNA, 15 bp, Homo sapiens
tgtgggagggcgacc

SEQ ID NO: 34849 - DNA, 15 bp, Homo sapiens
gtgtgggagggcgac

SEQ ID NO: 34850 - DNA, 15 bp, Homo sapiens
agtgtgggagggcga

SEQ ID NO: 34851 - DNA, 15 bp, Homo sapiens
aagtgtgggagggcg

SEQ ID NO: 34852 - DNA, 15 bp, Homo sapiens
gaagtgtgggagggc

SEQ ID NO: 34853 - DNA, 15 bp, Homo sapiens
agaagtgtgggaggg

SEQ ID NO: 34854 - DNA, 15 bp, Homo sapiens
cagaagtgtgggagg

SEQ ID NO: 34855 - DNA, 15 bp, Homo sapiens
gcagaagtgtgggag

SEQ ID NO: 34856 - DNA, 15 bp, Homo sapiens
ggcagaagtgtggga

SEQ ID NO: 34857 - DNA, 15 bp, Homo sapiens
tggcagaagtgtggg

SEQ ID NO: 34858 - DNA, 15 bp, Homo sapiens
gtggcagaagtgtgg

SEQ ID NO: 34859 - DNA, 15 bp, Homo sapiens
ggtggcagaagtgtg

SEQ ID NO: 34860 - DNA, 15 bp, Homo sapiens
gggtggcagaagtgt

SEQ ID NO: 34861 - DNA, 15 bp, Homo sapiens
agggtggcagaagtg

SEQ ID NO: 34862 - DNA, 15 bp, Homo sapiens
cagggtggcagaagt

SEQ ID NO: 34863 - DNA, 15 bp, Homo sapiens
gcagggtggcagaag

SEQ ID NO: 34864 - DNA, 15 bp, Homo sapiens
agcagggtggcagaa

SEQ ID NO: 34865 - DNA, 15 bp, Homo sapiens
aagcagggtggcaga

SEQ ID NO: 34866 - DNA, 15 bp, Homo sapiens
caagcagggtggcag

SEQ ID NO: 34867 - DNA, 15 bp, Homo sapiens
ccaagcagggtggca

SEQ ID NO: 34868 - DNA, 15 bp, Homo sapiens
cccaagcagggtggc

SEQ ID NO: 34869 - DNA, 15 bp, Homo sapiens
tcccaagcagggtgg

SEQ ID NO: 34870 - DNA, 15 bp, Homo sapiens
ttcccaagcagggtg

SEQ ID NO: 34871 - DNA, 15 bp, Homo sapiens
cttcccaagcagggt

SEQ ID NO: 34872 - DNA, 15 bp, Homo sapiens
ccttcccaagcaggg

SEQ ID NO: 34873 - DNA, 15 bp, Homo sapiens
tccttcccaagcagg

SEQ ID NO: 34874 - DNA, 15 bp, Homo sapiens
ctccttcccaagcag

SEQ ID NO: 34875 - DNA, 15 bp, Homo sapiens
cctccttcccaagca

SEQ ID NO: 34876 - DNA, 15 bp, Homo sapiens
ccctccttcccaagc

SEQ ID NO: 34877 - DNA, 15 bp, Homo sapiens
tccctccttcccaag

SEQ ID NO: 34878 - DNA, 15 bp, Homo sapiens
ctccctccttcccaa

SEQ ID NO: 34879 - DNA, 15 bp, Homo sapiens
gctccctccttccca

SEQ ID NO: 34880 - DNA, 15 bp, Homo sapiens
agctccctccttccc

SEQ ID NO: 34881 - DNA, 15 bp, Homo sapiens
cagctccctccttcc

SEQ ID NO: 34882 - DNA, 15 bp, Homo sapiens
acagctccctccttc

SEQ ID NO: 34883 - DNA, 15 bp, Homo sapiens
aacagctccctcctt

SEQ ID NO: 34884 - DNA, 15 bp, Homo sapiens
aaacagctccctcct

SEQ ID NO: 34885 - DNA, 15 bp, Homo sapiens
aaaacagctccctcc

SEQ ID NO: 34886 - DNA, 15 bp, Homo sapiens
caaaacagctccctc

SEQ ID NO: 34887 - DNA, 15 bp, Homo sapiens
tcaaaacagctccct

SEQ ID NO: 34888 - DNA, 15 bp, Homo sapiens
ttcaaaacagctccc

SEQ ID NO: 34889 - DNA, 15 bp, Homo sapiens
cttcaaaacagctcc

SEQ ID NO: 34890 - DNA, 15 bp, Homo sapiens
acttcaaaacagctc

SEQ ID NO: 34891 - DNA, 15 bp, Homo sapiens
aacttcaaaacagct

SEQ ID NO: 34892 - DNA, 15 bp, Homo sapiens
gaacttcaaaacagc

SEQ ID NO: 34893 - DNA, 15 bp, Homo sapiens
ggaacttcaaaacag

SEQ ID NO: 34894 - DNA, 15 bp, Homo sapiens
gggaacttcaaaaca

SEQ ID NO: 34895 - DNA, 15 bp, Homo sapiens
agggaacttcaaaac

SEQ ID NO: 34896 - DNA, 15 bp, Homo sapiens
cagggaacttcaaaa

SEQ ID NO: 34897 - DNA, 15 bp, Homo sapiens
ccagggaacttcaaa

SEQ ID NO: 34898 - DNA, 15 bp, Homo sapiens
accagggaacttcaa

SEQ ID NO: 34899 - DNA, 15 bp, Homo sapiens
caccagggaacttca

SEQ ID NO: 34900 - DNA, 15 bp, Homo sapiens
gcaccagggaacttc

SEQ ID NO: 34901 - DNA, 15 bp, Homo sapiens
tgcaccagggaactt

SEQ ID NO: 34902 - DNA, 15 bp, Homo sapiens
ttgcaccagggaact

SEQ ID NO: 34903 - DNA, 15 bp, Homo sapiens
attgcaccagggaac

SEQ ID NO: 34904 - DNA, 15 bp, Homo sapiens
tattgcaccagggaa

SEQ ID NO: 34905 - DNA, 15 bp, Homo sapiens
atattgcaccaggga

SEQ ID NO: 34906 - DNA, 15 bp, Homo sapiens
catattgcaccaggg

SEQ ID NO: 34907 - DNA, 15 bp, Homo sapiens
tcatattgcaccagg

SEQ ID NO: 34908 - DNA, 15 bp, Homo sapiens
atcatattgcaccag

SEQ ID NO: 34909 - DNA, 15 bp, Homo sapiens
catcatattgcacca

SEQ ID NO: 34910 - DNA, 15 bp, Homo sapiens
acatcatattgcacc

SEQ ID NO: 34911 - DNA, 15 bp, Homo sapiens
tacatcatattgcac

SEQ ID NO: 34912 - DNA, 15 bp, Homo sapiens
atacatcatattgca

SEQ ID NO: 34913 - DNA, 15 bp, Homo sapiens
aatacatcatattgc

SEQ ID NO: 34914 - DNA, 15 bp, Homo sapiens
caatacatcatattg

SEQ ID NO: 34915 - DNA, 15 bp, Homo sapiens
gcaatacatcatatt

SEQ ID NO: 34916 - DNA, 15 bp, Homo sapiens
agcaatacatcatat

SEQ ID NO: 34917 - DNA, 15 bp, Homo sapiens
gagcaatacatcata

SEQ ID NO: 34918 - DNA, 15 bp, Homo sapiens
agagcaatacatcat

SEQ ID NO: 34919 - DNA, 15 bp, Homo sapiens
cagagcaatacatca

SEQ ID NO: 34920 - DNA, 15 bp, Homo sapiens
ccagagcaatacatc

SEQ ID NO: 34921 - DNA, 15 bp, Homo sapiens
gccagagcaatacat

SEQ ID NO: 34922 - DNA, 15 bp, Homo sapiens
agccagagcaataca

SEQ ID NO: 34923 - DNA, 15 bp, Homo sapiens
gagccagagcaatac

SEQ ID NO: 34924 - DNA, 15 bp, Homo sapiens
agagccagagcaata

SEQ ID NO: 34925 - DNA, 15 bp, Homo sapiens
cagagccagagcaat

SEQ ID NO: 34926 - DNA, 15 bp, Homo sapiens
gcagagccagagcaa

SEQ ID NO: 34927 - DNA, 15 bp, Homo sapiens
agcagagccagagca

SEQ ID NO: 34928 - DNA, 15 bp, Homo sapiens
gagcagagccagagc

SEQ ID NO: 34929 - DNA, 15 bp, Homo sapiens
tgagcagagccagag

SEQ ID NO: 34930 - DNA, 15 bp, Homo sapiens
ctgagcagagccaga

SEQ ID NO: 34931 - DNA, 15 bp, Homo sapiens
cctgagcagagccag

SEQ ID NO: 34932 - DNA, 15 bp, Homo sapiens
tcctgagcagagcca

SEQ ID NO: 34933 - DNA, 15 bp, Homo sapiens
ctcctgagcagagcc

SEQ ID NO: 34934 - DNA, 15 bp, Homo sapiens
cctcctgagcagagc

SEQ ID NO: 34935 - DNA, 15 bp, Homo sapiens
tcctcctgagcagag

SEQ ID NO: 34936 - DNA, 15 bp, Homo sapiens
ttcctcctgagcaga

SEQ ID NO: 34937 - DNA, 15 bp, Homo sapiens
cttcctcctgagcag

SEQ ID NO: 34938 - DNA, 15 bp, Homo sapiens
gcttcctcctgagca

SEQ ID NO: 34939 - DNA, 15 bp, Homo sapiens
agcttcctcctgagc

SEQ ID NO: 34940 - DNA, 15 bp, Homo sapiens
tagcttcctcctgag

SEQ ID NO: 34941 - DNA, 15 bp, Homo sapiens
atagcttcctcctga

SEQ ID NO: 34942 - DNA, 15 bp, Homo sapiens
catagcttcctcctg

SEQ ID NO: 34943 - DNA, 15 bp, Homo sapiens
ccatagcttcctcct

SEQ ID NO: 34944 - DNA, 15 bp, Homo sapiens
gccatagcttcctcc

SEQ ID NO: 34945 - DNA, 15 bp, Homo sapiens
ggccatagcttcctc

SEQ ID NO: 34946 - DNA, 15 bp, Homo sapiens
gggccatagcttcct

SEQ ID NO: 34947 - DNA, 15 bp, Homo sapiens
tgggccatagcttcc

SEQ ID NO: 34948 - DNA, 15 bp, Homo sapiens
gtgggccatagcttc

SEQ ID NO: 34949 - DNA, 15 bp, Homo sapiens
ggtgggccatagctt

SEQ ID NO: 34950 - DNA, 15 bp, Homo sapiens
aggtgggccatagct

SEQ ID NO: 34951 - DNA, 15 bp, Homo sapiens
taggtgggccatagc

SEQ ID NO: 34952 - DNA, 15 bp, Homo sapiens
ctaggtgggccatag

SEQ ID NO: 34953 - DNA, 15 bp, Homo sapiens
actaggtgggccata

SEQ ID NO: 34954 - DNA, 15 bp, Homo sapiens
gactaggtgggccat

SEQ ID NO: 34955 - DNA, 15 bp, Homo sapiens
tgactaggtgggcca

SEQ ID NO: 34956 - DNA, 15 bp, Homo sapiens
ctgactaggtgggcc

SEQ ID NO: 34957 - DNA, 15 bp, Homo sapiens
actgactaggtgggc

SEQ ID NO: 34958 - DNA, 15 bp, Homo sapiens
cactgactaggtggg

SEQ ID NO: 34959 - DNA, 15 bp, Homo sapiens
tcactgactaggtgg

SEQ ID NO: 34960 - DNA, 15 bp, Homo sapiens
ctcactgactaggtg

SEQ ID NO: 34961 - DNA, 15 bp, Homo sapiens
cctcactgactaggt

SEQ ID NO: 34962 - DNA, 15 bp, Homo sapiens
ccctcactgactagg

SEQ ID NO: 34963 - DNA, 15 bp, Homo sapiens
accctcactgactag

SEQ ID NO: 34964 - DNA, 15 bp, Homo sapiens
aaccctcactgacta

SEQ ID NO: 34965 - DNA, 15 bp, Homo sapiens
taaccctcactgact

SEQ ID NO: 34966 - DNA, 15 bp, Homo sapiens
ctaaccctcactgac

SEQ ID NO: 34967 - DNA, 15 bp, Homo sapiens
gctaaccctcactga

SEQ ID NO: 34968 - DNA, 15 bp, Homo sapiens
agctaaccctcactg

SEQ ID NO: 34969 - DNA, 15 bp, Homo sapiens
tagctaaccctcact

SEQ ID NO: 34970 - DNA, 15 bp, Homo sapiens
ttagctaaccctcac

SEQ ID NO: 34971 - DNA, 15 bp, Homo sapiens
attagctaaccctca

SEQ ID NO: 34972 - DNA, 15 bp, Homo sapiens
tattagctaaccctc

SEQ ID NO: 34973 - DNA, 15 bp, Homo sapiens
gtattagctaaccct

SEQ ID NO: 34974 - DNA, 15 bp, Homo sapiens
cgtattagctaaccc

SEQ ID NO: 34975 - DNA, 15 bp, Homo sapiens
acgtattagctaacc

SEQ ID NO: 34976 - DNA, 15 bp, Homo sapiens
cacgtattagctaac

SEQ ID NO: 34977 - DNA, 15 bp, Homo sapiens
acacgtattagctaa

SEQ ID NO: 34978 - DNA, 15 bp, Homo sapiens
tacacgtattagcta

SEQ ID NO: 34979 - DNA, 15 bp, Homo sapiens
atacacgtattagct

SEQ ID NO: 34980 - DNA, 15 bp, Homo sapiens
aatacacgtattagc

SEQ ID NO: 34981 - DNA, 15 bp, Homo sapiens
gaatacacgtattag

SEQ ID NO: 34982 - DNA, 15 bp, Homo sapiens
agaatacacgtatta

SEQ ID NO: 34983 - DNA, 15 bp, Homo sapiens
cagaatacacgtatt

SEQ ID NO: 34984 - DNA, 15 bp, Homo sapiens
acagaatacacgtat

SEQ ID NO: 34985 - DNA, 15 bp, Homo sapiens
aacagaatacacgta

SEQ ID NO: 34986 - DNA, 15 bp, Homo sapiens
aaacagaatacacgt

SEQ ID NO: 34987 - DNA, 15 bp, Homo sapiens
gaaacagaatacacg

SEQ ID NO: 34988 - DNA, 15 bp, Homo sapiens
agaaacagaatacac

SEQ ID NO: 34989 - DNA, 15 bp, Homo sapiens
cagaaacagaataca

SEQ ID NO: 34990 - DNA, 15 bp, Homo sapiens
acagaaacagaatac

SEQ ID NO: 34991 - DNA, 15 bp, Homo sapiens
aacagaaacagaata

SEQ ID NO: 34992 - DNA, 15 bp, Homo sapiens
caacagaaacagaat

SEQ ID NO: 34993 - DNA, 15 bp, Homo sapiens
tcaacagaaacagaa

SEQ ID NO: 34994 - DNA, 15 bp, Homo sapiens
ctcaacagaaacaga

SEQ ID NO: 34995 - DNA, 15 bp, Homo sapiens
cctcaacagaaacag

SEQ ID NO: 34996 - DNA, 15 bp, Homo sapiens
acctcaacagaaaca

SEQ ID NO: 34997 - DNA, 15 bp, Homo sapiens
aacctcaacagaaac

SEQ ID NO: 34998 - DNA, 15 bp, Homo sapiens
aaacctcaacagaaa

SEQ ID NO: 34999 - DNA, 15 bp, Homo sapiens
gaaacctcaacagaa

SEQ ID NO: 35000 - DNA, 15 bp, Homo sapiens
tgaaacctcaacaga

SEQ ID NO: 35001 - DNA, 15 bp, Homo sapiens
gtgaaacctcaacag

SEQ ID NO: 35002 - DNA, 15 bp, Homo sapiens
tgtgaaacctcaaca

SEQ ID NO: 35003 - DNA, 15 bp, Homo sapiens
ctgtgaaacctcaac

SEQ ID NO: 35004 - DNA, 15 bp, Homo sapiens
tctgtgaaacctcaa

SEQ ID NO: 35005 - DNA, 15 bp, Homo sapiens
ctctgtgaaacctca

SEQ ID NO: 35006 - DNA, 15 bp, Homo sapiens
cctctgtgaaacctc

SEQ ID NO: 35007 - DNA, 15 bp, Homo sapiens
gcctctgtgaaacct

SEQ ID NO: 35008 - DNA, 15 bp, Homo sapiens
ggcctctgtgaaacc

SEQ ID NO: 35009 - DNA, 15 bp, Homo sapiens
aggcctctgtgaaac

SEQ ID NO: 35010 - DNA, 15 bp, Homo sapiens
aaggcctctgtgaaa

SEQ ID NO: 35011 - DNA, 15 bp, Homo sapiens
aaaggcctctgtgaa

SEQ ID NO: 35012 - DNA, 15 bp, Homo sapiens
aaaaggcctctgtga

SEQ ID NO: 35013 - DNA, 15 bp, Homo sapiens
aaaaaggcctctgtg

SEQ ID NO: 35014 - DNA, 15 bp, Homo sapiens
aaaaaaggcctctgt

SEQ ID NO: 35015 - DNA, 15 bp, Homo sapiens
caaaaaaggcctctg

SEQ ID NO: 35016 - DNA, 15 bp, Homo sapiens
tcaaaaaaggcctct

SEQ ID NO: 35017 - DNA, 15 bp, Homo sapiens
gtcaaaaaaggcctc

SEQ ID NO: 35018 - DNA, 15 bp, Homo sapiens
ggtcaaaaaaggcct

SEQ ID NO: 35019 - DNA, 15 bp, Homo sapiens
gggtcaaaaaaggcc

SEQ ID NO: 35020 - DNA, 15 bp, Homo sapiens
agggtcaaaaaaggc

SEQ ID NO: 35021 - DNA, 15 bp, Homo sapiens
aagggtcaaaaaagg

SEQ ID NO: 35022 - DNA, 15 bp, Homo sapiens
gaagggtcaaaaaag

SEQ ID NO: 35023 - DNA, 15 bp, Homo sapiens
tgaagggtcaaaaaa

SEQ ID NO: 35024 - DNA, 15 bp, Homo sapiens
atgaagggtcaaaaa

SEQ ID NO: 35025 - DNA, 15 bp, Homo sapiens
aatgaagggtcaaaa

SEQ ID NO: 35026 - DNA, 15 bp, Homo sapiens
aaatgaagggtcaaa

SEQ ID NO: 35027 - DNA, 15 bp, Homo sapiens
aaaatgaagggtcaa

SEQ ID NO: 35028 - DNA, 15 bp, Homo sapiens
taaaatgaagggtca

SEQ ID NO: 35029 - DNA, 15 bp, Homo sapiens
ataaaatgaagggtc

SEQ ID NO: 35030 - DNA, 15 bp, Homo sapiens
tataaaatgaagggt

SEQ ID NO: 35031 - DNA, 15 bp, Homo sapiens
ctataaaatgaaggg

SEQ ID NO: 35032 - DNA, 15 bp, Homo sapiens
tctataaaatgaagg

SEQ ID NO: 35033 - DNA, 15 bp, Homo sapiens
atctataaaatgaag

SEQ ID NO: 35034 - DNA, 15 bp, Homo sapiens
tatctataaaatgaa

SEQ ID NO: 35035 - DNA, 15 bp, Homo sapiens
ttatctataaaatga

SEQ ID NO: 35036 - DNA, 15 bp, Homo sapiens
cttatctataaaatg

SEQ ID NO: 35037 - DNA, 15 bp, Homo sapiens
ccttatctataaaat

SEQ ID NO: 35038 - DNA, 15 bp, Homo sapiens
gccttatctataaaa

SEQ ID NO: 35039 - DNA, 15 bp, Homo sapiens
tgccttatctataaa

SEQ ID NO: 35040 - DNA, 15 bp, Homo sapiens
ctgccttatctataa

SEQ ID NO: 35041 - DNA, 15 bp, Homo sapiens
actgccttatctata

SEQ ID NO: 35042 - DNA, 15 bp, Homo sapiens
cactgccttatctat

SEQ ID NO: 35043 - DNA, 15 bp, Homo sapiens
ccactgccttatcta

SEQ ID NO: 35044 - DNA, 15 bp, Homo sapiens
tccactgccttatct

SEQ ID NO: 35045 - DNA, 15 bp, Homo sapiens
ctccactgccttatc

SEQ ID NO: 35046 - DNA, 15 bp, Homo sapiens
cctccactgccttat

SEQ ID NO: 35047 - DNA, 15 bp, Homo sapiens
gcctccactgcctta

SEQ ID NO: 35048 - DNA, 15 bp, Homo sapiens
tgcctccactgcctt

SEQ ID NO: 35049 - DNA, 15 bp, Homo sapiens
gtgcctccactgcct

SEQ ID NO: 35050 - DNA, 15 bp, Homo sapiens
tgtgcctccactgcc

SEQ ID NO: 35051 - DNA, 15 bp, Homo sapiens
ttgtgcctccactgc

SEQ ID NO: 35052 - DNA, 15 bp, Homo sapiens
gttgtgcctccactg

SEQ ID NO: 35053 - DNA, 15 bp, Homo sapiens
agttgtgcctccact

SEQ ID NO: 35054 - DNA, 15 bp, Homo sapiens
tagttgtgcctccac

SEQ ID NO: 35055 - DNA, 15 bp, Homo sapiens
gtagttgtgcctcca

SEQ ID NO: 35056 - DNA, 15 bp, Homo sapiens
tgtagttgtgcctcc

SEQ ID NO: 35057 - DNA, 15 bp, Homo sapiens
atgtagttgtgcctc

SEQ ID NO: 35058 - DNA, 15 bp, Homo sapiens
catgtagttgtgcct

SEQ ID NO: 35059 - DNA, 15 bp, Homo sapiens
tcatgtagttgtgcc

SEQ ID NO: 35060 - DNA, 15 bp, Homo sapiens
ttcatgtagttgtgc

SEQ ID NO: 35061 - DNA, 15 bp, Homo sapiens
tttcatgtagttgtg

SEQ ID NO: 35062 - DNA, 15 bp, Homo sapiens
atttcatgtagttgt

SEQ ID NO: 35063 - DNA, 15 bp, Homo sapiens
catttcatgtagttg

SEQ ID NO: 35064 - DNA, 15 bp, Homo sapiens
tcatttcatgtagtt

SEQ ID NO: 35065 - DNA, 15 bp, Homo sapiens
gtcatttcatgtagt

SEQ ID NO: 35066 - DNA, 15 bp, Homo sapiens
agtcatttcatgtag

SEQ ID NO: 35067 - DNA, 15 bp, Homo sapiens
gagtcatttcatgta

SEQ ID NO: 35068 - DNA, 15 bp, Homo sapiens
cgagtcatttcatgt

SEQ ID NO: 35069 - DNA, 15 bp, Homo sapiens
tcgagtcatttcatg

SEQ ID NO: 35070 - DNA, 15 bp, Homo sapiens
gtcgagtcatttcat

SEQ ID NO: 35071 - DNA, 15 bp, Homo sapiens
tgtcgagtcatttca

SEQ ID NO: 35072 - DNA, 15 bp, Homo sapiens
ttgtcgagtcatttc

SEQ ID NO: 35073 - DNA, 15 bp, Homo sapiens
tttgtcgagtcattt

SEQ ID NO: 35074 - DNA, 15 bp, Homo sapiens
atttgtcgagtcatt

SEQ ID NO: 35075 - DNA, 15 bp, Homo sapiens
tatttgtcgagtcat

SEQ ID NO: 35076 - DNA, 15 bp, Homo sapiens
ttatttgtcgagtca

SEQ ID NO: 35077 - DNA, 15 bp, Homo sapiens
tttatttgtcgagtc

SEQ ID NO: 35078 - DNA, 15 bp, Homo sapiens
atttatttgtcgagt

SEQ ID NO: 35079 - DNA, 15 bp, Homo sapiens
catttatttgtcgag

SEQ ID NO: 35080 - DNA, 15 bp, Homo sapiens
ccatttatttgtcga

SEQ ID NO: 35081 - DNA, 15 bp, Homo sapiens
tccatttatttgtcg

SEQ ID NO: 35082 - DNA, 15 bp, Homo sapiens
atccatttatttgtc

SEQ ID NO: 35083 - DNA, 15 bp, Homo sapiens
aatccatttatttgt

SEQ ID NO: 35084 - DNA, 15 bp, Homo sapiens
aaatccatttatttg

SEQ ID NO: 35085 - DNA, 15 bp, Homo sapiens
taaatccatttattt

SEQ ID NO: 35086 - DNA, 15 bp, Homo sapiens
ctaaatccatttatt

SEQ ID NO: 35087 - DNA, 15 bp, Homo sapiens
tctaaatccatttat

SEQ ID NO: 35088 - DNA, 15 bp, Homo sapiens
ttctaaatccattta

SEQ ID NO: 35089 - DNA, 15 bp, Homo sapiens
gttctaaatccattt

SEQ ID NO: 35090 - DNA, 15 bp, Homo sapiens
ggttctaaatccatt

SEQ ID NO: 35091 - DNA, 15 bp, Homo sapiens
gggttctaaatccat

SEQ ID NO: 35092 - DNA, 15 bp, Homo sapiens
tgggttctaaatcca

SEQ ID NO: 35093 - DNA, 15 bp, Homo sapiens
ctgggttctaaatcc

SEQ ID NO: 35094 - DNA, 15 bp, Homo sapiens
cctgggttctaaatc

SEQ ID NO: 35095 - DNA, 15 bp, Homo sapiens
acctgggttctaaat

SEQ ID NO: 35096 - DNA, 15 bp, Homo sapiens
aacctgggttctaaa

SEQ ID NO: 35097 - DNA, 15 bp, Homo sapiens
aaacctgggttctaa

SEQ ID NO: 35098 - DNA, 15 bp, Homo sapiens
gaaacctgggttcta

SEQ ID NO: 35099 - DNA, 15 bp, Homo sapiens
agaaacctgggttct

SEQ ID NO: 35100 - DNA, 15 bp, Homo sapiens
cagaaacctgggttc

SEQ ID NO: 35101 - DNA, 15 bp, Homo sapiens
tcagaaacctgggtt

SEQ ID NO: 35102 - DNA, 15 bp, Homo sapiens
gtcagaaacctgggt

SEQ ID NO: 35103 - DNA, 15 bp, Homo sapiens
agtcagaaacctggg

SEQ ID NO: 35104 - DNA, 15 bp, Homo sapiens
gagtcagaaacctgg

SEQ ID NO: 35105 - DNA, 15 bp, Homo sapiens
ggagtcagaaacctg

SEQ ID NO: 35106 - DNA, 15 bp, Homo sapiens
gggagtcagaaacct

SEQ ID NO: 35107 - DNA, 15 bp, Homo sapiens
tgggagtcagaaacc

SEQ ID NO: 35108 - DNA, 15 bp, Homo sapiens
ctgggagtcagaaac

SEQ ID NO: 35109 - DNA, 15 bp, Homo sapiens
cctgggagtcagaaa

SEQ ID NO: 35110 - DNA, 15 bp, Homo sapiens
ccctgggagtcagaa

SEQ ID NO: 35111 - DNA, 15 bp, Homo sapiens
accctgggagtcaga

SEQ ID NO: 35112 - DNA, 15 bp, Homo sapiens
caccctgggagtcag

SEQ ID NO: 35113 - DNA, 15 bp, Homo sapiens
ccaccctgggagtca

SEQ ID NO: 35114 - DNA, 15 bp, Homo sapiens
accaccctgggagtc

SEQ ID NO: 35115 - DNA, 15 bp, Homo sapiens
caccaccctgggagt

SEQ ID NO: 35116 - DNA, 15 bp, Homo sapiens
gcaccaccctgggag

SEQ ID NO: 35117 - DNA, 15 bp, Homo sapiens
agcaccaccctggga

SEQ ID NO: 35118 - DNA, 15 bp, Homo sapiens
aagcaccaccctggg

SEQ ID NO: 35119 - DNA, 15 bp, Homo sapiens
aaagcaccaccctgg

SEQ ID NO: 35120 - DNA, 15 bp, Homo sapiens
aaaagcaccaccctg

SEQ ID NO: 35121 - DNA, 15 bp, Homo sapiens
aaaaagcaccaccct

SEQ ID NO: 35122 - DNA, 15 bp, Homo sapiens
gaaaaagcaccaccc

SEQ ID NO: 35123 - DNA, 15 bp, Homo sapiens
ggaaaaagcaccacc

SEQ ID NO: 35124 - DNA, 15 bp, Homo sapiens
tggaaaaagcaccac

SEQ ID NO: 35125 - DNA, 15 bp, Homo sapiens
atggaaaaagcacca

SEQ ID NO: 35126 - DNA, 15 bp, Homo sapiens
catggaaaaagcacc

SEQ ID NO: 35127 - DNA, 15 bp, Homo sapiens
ccatggaaaaagcac

SEQ ID NO: 35128 - DNA, 15 bp, Homo sapiens
accatggaaaaagca

SEQ ID NO: 35129 - DNA, 15 bp, Homo sapiens
aaccatggaaaaagc

SEQ ID NO: 35130 - DNA, 15 bp, Homo sapiens
caaccatggaaaaag

SEQ ID NO: 35131 - DNA, 15 bp, Homo sapiens
acaaccatggaaaaa

SEQ ID NO: 35132 - DNA, 15 bp, Homo sapiens
tacaaccatggaaaa

SEQ ID NO: 35133 - DNA, 15 bp, Homo sapiens
gtacaaccatggaaa

SEQ ID NO: 35134 - DNA, 15 bp, Homo sapiens
tgtacaaccatggaa

SEQ ID NO: 35135 - DNA, 15 bp, Homo sapiens
ctgtacaaccatgga

SEQ ID NO: 35136 - DNA, 15 bp, Homo sapiens
actgtacaaccatgg

SEQ ID NO: 35137 - DNA, 15 bp, Homo sapiens
cactgtacaaccatg

SEQ ID NO: 35138 - DNA, 15 bp, Homo sapiens
tcactgtacaaccat

SEQ ID NO: 35139 - DNA, 15 bp, Homo sapiens
atcactgtacaacca

SEQ ID NO: 35140 - DNA, 15 bp, Homo sapiens
aatcactgtacaacc

SEQ ID NO: 35141 - DNA, 15 bp, Homo sapiens
taatcactgtacaac

SEQ ID NO: 35142 - DNA, 15 bp, Homo sapiens
ttaatcactgtacaa

SEQ ID NO: 35143 - DNA, 15 bp, Homo sapiens
attaatcactgtaca

SEQ ID NO: 35144 - DNA, 15 bp, Homo sapiens
cattaatcactgtac

SEQ ID NO: 35145 - DNA, 15 bp, Homo sapiens
acattaatcactgta

SEQ ID NO: 35146 - DNA, 15 bp, Homo sapiens
gacattaatcactgt

SEQ ID NO: 35147 - DNA, 15 bp, Homo sapiens
agacattaatcactg

SEQ ID NO: 35148 - DNA, 15 bp, Homo sapiens
tagacattaatcact

SEQ ID NO: 35149 - DNA, 15 bp, Homo sapiens
gtagacattaatcac

SEQ ID NO: 35150 - DNA, 15 bp, Homo sapiens
ggtagacattaatca

SEQ ID NO: 35151 - DNA, 15 bp, Homo sapiens
aggtagacattaatc

SEQ ID NO: 35152 - DNA, 15 bp, Homo sapiens
aaggtagacattaat

SEQ ID NO: 35153 - DNA, 15 bp, Homo sapiens
aaaggtagacattaa

SEQ ID NO: 35154 - DNA, 15 bp, Homo sapiens
aaaaggtagacatta

SEQ ID NO: 35155 - DNA, 15 bp, Homo sapiens
gaaaaggtagacatt

SEQ ID NO: 35156 - DNA, 15 bp, Homo sapiens
tgaaaaggtagacat

SEQ ID NO: 35157 - DNA, 15 bp, Homo sapiens
gtgaaaaggtagaca

SEQ ID NO: 35158 - DNA, 15 bp, Homo sapiens
tgtgaaaaggtagac

SEQ ID NO: 35159 - DNA, 15 bp, Homo sapiens
gtgtgaaaaggtaga

SEQ ID NO: 35160 - DNA, 15 bp, Homo sapiens
ggtgtgaaaaggtag

SEQ ID NO: 35161 - DNA, 15 bp, Homo sapiens
tggtgtgaaaaggta

SEQ ID NO: 35162 - DNA, 15 bp, Homo sapiens
ctggtgtgaaaaggt

SEQ ID NO: 35163 - DNA, 15 bp, Homo sapiens
actggtgtgaaaagg

SEQ ID NO: 35164 - DNA, 15 bp, Homo sapiens
gactggtgtgaaaag

SEQ ID NO: 35165 - DNA, 15 bp, Homo sapiens
ggactggtgtgaaaa

SEQ ID NO: 35166 - DNA, 15 bp, Homo sapiens
aggactggtgtgaaa

SEQ ID NO: 35167 - DNA, 15 bp, Homo sapiens
gaggactggtgtgaa

SEQ ID NO: 35168 - DNA, 15 bp, Homo sapiens
tgaggactggtgtga

SEQ ID NO: 35169 - DNA, 15 bp, Homo sapiens
ttgaggactggtgtg

SEQ ID NO: 35170 - DNA, 15 bp, Homo sapiens
gttgaggactggtgt

SEQ ID NO: 35171 - DNA, 15 bp, Homo sapiens
agttgaggactggtg

SEQ ID NO: 35172 - DNA, 15 bp, Homo sapiens
cagttgaggactggt

SEQ ID NO: 35173 - DNA, 15 bp, Homo sapiens
tcagttgaggactgg

SEQ ID NO: 35174 - DNA, 15 bp, Homo sapiens
ttcagttgaggactg

SEQ ID NO: 35175 - DNA, 15 bp, Homo sapiens
cttcagttgaggact

SEQ ID NO: 35176 - DNA, 15 bp, Homo sapiens
tcttcagttgaggac

SEQ ID NO: 35177 - DNA, 15 bp, Homo sapiens
gtcttcagttgagga

SEQ ID NO: 35178 - DNA, 15 bp, Homo sapiens
tgtcttcagttgagg

SEQ ID NO: 35179 - DNA, 15 bp, Homo sapiens
gtgtcttcagttgag

SEQ ID NO: 35180 - DNA, 15 bp, Homo sapiens
ggtgtcttcagttga

SEQ ID NO: 35181 - DNA, 15 bp, Homo sapiens
tggtgtcttcagttg

SEQ ID NO: 35182 - DNA, 15 bp, Homo sapiens
ctggtgtcttcagtt

SEQ ID NO: 35183 - DNA, 15 bp, Homo sapiens
gctggtgtcttcagt

SEQ ID NO: 35184 - DNA, 15 bp, Homo sapiens
agctggtgtcttcag

SEQ ID NO: 35185 - DNA, 15 bp, Homo sapiens
aagctggtgtcttca

SEQ ID NO: 35186 - DNA, 15 bp, Homo sapiens
taagctggtgtcttc

SEQ ID NO: 35187 - DNA, 15 bp, Homo sapiens
gtaagctggtgtctt

SEQ ID NO: 35188 - DNA, 15 bp, Homo sapiens
tgtaagctggtgtct

SEQ ID NO: 35189 - DNA, 15 bp, Homo sapiens
gtgtaagctggtgtc

SEQ ID NO: 35190 - DNA, 15 bp, Homo sapiens
ggtgtaagctggtgt

SEQ ID NO: 35191 - DNA, 15 bp, Homo sapiens
aggtgtaagctggtg

SEQ ID NO: 35192 - DNA, 15 bp, Homo sapiens
aaggtgtaagctggt

SEQ ID NO: 35193 - DNA, 15 bp, Homo sapiens
gaaggtgtaagctgg

SEQ ID NO: 35194 - DNA, 15 bp, Homo sapiens
ggaaggtgtaagctg

SEQ ID NO: 35195 - DNA, 15 bp, Homo sapiens
aggaaggtgtaagct

SEQ ID NO: 35196 - DNA, 15 bp, Homo sapiens
aaggaaggtgtaagc

SEQ ID NO: 35197 - DNA, 15 bp, Homo sapiens
gaaggaaggtgtaag

SEQ ID NO: 35198 - DNA, 15 bp, Homo sapiens
ggaaggaaggtgtaa

SEQ ID NO: 35199 - DNA, 15 bp, Homo sapiens
aggaaggaaggtgta

SEQ ID NO: 35200 - DNA, 15 bp, Homo sapiens
caggaaggaaggtgt

SEQ ID NO: 35201 - DNA, 15 bp, Homo sapiens
acaggaaggaaggtg

SEQ ID NO: 35202 - DNA, 15 bp, Homo sapiens
aacaggaaggaaggt

SEQ ID NO: 35203 - DNA, 15 bp, Homo sapiens
aaacaggaaggaagg

SEQ ID NO: 35204 - DNA, 15 bp, Homo sapiens
gaaacaggaaggaag

SEQ ID NO: 35205 - DNA, 15 bp, Homo sapiens
agaaacaggaaggaa

SEQ ID NO: 35206 - DNA, 15 bp, Homo sapiens
gagaaacaggaagga

SEQ ID NO: 35207 - DNA, 15 bp, Homo sapiens
ggagaaacaggaagg

SEQ ID NO: 35208 - DNA, 15 bp, Homo sapiens
gggagaaacaggaag

SEQ ID NO: 35209 - DNA, 15 bp, Homo sapiens
tgggagaaacaggaa

SEQ ID NO: 35210 - DNA, 15 bp, Homo sapiens
ttgggagaaacagga

SEQ ID NO: 35211 - DNA, 15 bp, Homo sapiens
cttgggagaaacagg

SEQ ID NO: 35212 - DNA, 15 bp, Homo sapiens
tcttgggagaaacag

SEQ ID NO: 35213 - DNA, 15 bp, Homo sapiens
ttcttgggagaaaca

SEQ ID NO: 35214 - DNA, 15 bp, Homo sapiens
gttcttgggagaaac

SEQ ID NO: 35215 - DNA, 15 bp, Homo sapiens
tgttcttgggagaaa

SEQ ID NO: 35216 - DNA, 15 bp, Homo sapiens
ctgttcttgggagaa

SEQ ID NO: 35217 - DNA, 15 bp, Homo sapiens
tctgttcttgggaga

SEQ ID NO: 35218 - DNA, 15 bp, Homo sapiens
ttctgttcttgggag

SEQ ID NO: 35219 - DNA, 15 bp, Homo sapiens
tttctgttcttggga

SEQ ID NO: 35220 - DNA, 15 bp, Homo sapiens
ctttctgttcttggg

SEQ ID NO: 35221 - DNA, 15 bp, Homo sapiens
actttctgttcttgg

SEQ ID NO: 35222 - DNA, 15 bp, Homo sapiens
cactttctgttcttg

SEQ ID NO: 35223 - DNA, 15 bp, Homo sapiens
tcactttctgttctt

SEQ ID NO: 35224 - DNA, 15 bp, Homo sapiens
gtcactttctgttct

SEQ ID NO: 35225 - DNA, 15 bp, Homo sapiens
ggtcactttctgttc

SEQ ID NO: 35226 - DNA, 15 bp, Homo sapiens
gggtcactttctgtt

SEQ ID NO: 35227 - DNA, 15 bp, Homo sapiens
ggggtcactttctgt

SEQ ID NO: 35228 - DNA, 15 bp, Homo sapiens
cggggtcactttctg

SEQ ID NO: 35229 - DNA, 15 bp, Homo sapiens
ccggggtcactttct

SEQ ID NO: 35230 - DNA, 15 bp, Homo sapiens
tccggggtcactttc

SEQ ID NO: 35231 - DNA, 15 bp, Homo sapiens
atccggggtcacttt

SEQ ID NO: 35232 - DNA, 15 bp, Homo sapiens
catccggggtcactt

SEQ ID NO: 35233 - DNA, 15 bp, Homo sapiens
acatccggggtcact

SEQ ID NO: 35234 - DNA, 15 bp, Homo sapiens
gacatccggggtcac

SEQ ID NO: 35235 - DNA, 15 bp, Homo sapiens
cgacatccggggtca

SEQ ID NO: 35236 - DNA, 15 bp, Homo sapiens
gcgacatccggggtc

SEQ ID NO: 35237 - DNA, 15 bp, Homo sapiens
agcgacatccggggt

SEQ ID NO: 35238 - DNA, 15 bp, Homo sapiens
aagcgacatccgggg

SEQ ID NO: 35239 - DNA, 15 bp, Homo sapiens
aaagcgacatccggg

SEQ ID NO: 35240 - DNA, 15 bp, Homo sapiens
gaaagcgacatccgg

SEQ ID NO: 35241 - DNA, 15 bp, Homo sapiens
agaaagcgacatccg

SEQ ID NO: 35242 - DNA, 15 bp, Homo sapiens
cagaaagcgacatcc

SEQ ID NO: 35243 - DNA, 15 bp, Homo sapiens
acagaaagcgacatc

SEQ ID NO: 35244 - DNA, 15 bp, Homo sapiens
aacagaaagcgacat

SEQ ID NO: 35245 - DNA, 15 bp, Homo sapiens
gaacagaaagcgaca

SEQ ID NO: 35246 - DNA, 15 bp, Homo sapiens
ggaacagaaagcgac

SEQ ID NO: 35247 - DNA, 15 bp, Homo sapiens
aggaacagaaagcga

SEQ ID NO: 35248 - DNA, 15 bp, Homo sapiens
caggaacagaaagcg

SEQ ID NO: 35249 - DNA, 15 bp, Homo sapiens
ccaggaacagaaagc

SEQ ID NO: 35250 - DNA, 15 bp, Homo sapiens
cccaggaacagaaag

SEQ ID NO: 35251 - DNA, 15 bp, Homo sapiens
tcccaggaacagaaa

SEQ ID NO: 35252 - DNA, 15 bp, Homo sapiens
ttcccaggaacagaa

SEQ ID NO: 35253 - DNA, 15 bp, Homo sapiens
cttcccaggaacaga

SEQ ID NO: 35254 - DNA, 15 bp, Homo sapiens
ccttcccaggaacag

SEQ ID NO: 35255 - DNA, 15 bp, Homo sapiens
gccttcccaggaaca

SEQ ID NO: 35256 - DNA, 15 bp, Homo sapiens
tgccttcccaggaac

SEQ ID NO: 35257 - DNA, 15 bp, Homo sapiens
ctgccttcccaggaa

SEQ ID NO: 35258 - DNA, 15 bp, Homo sapiens
actgccttcccagga

SEQ ID NO: 35259 - DNA, 15 bp, Homo sapiens
aactgccttcccagg

SEQ ID NO: 35260 - DNA, 15 bp, Homo sapiens
gaactgccttcccag

SEQ ID NO: 35261 - DNA, 15 bp, Homo sapiens
ggaactgccttccca

SEQ ID NO: 35262 - DNA, 15 bp, Homo sapiens
tggaactgccttccc

SEQ ID NO: 35263 - DNA, 15 bp, Homo sapiens
ctggaactgccttcc

SEQ ID NO: 35264 - DNA, 15 bp, Homo sapiens
actggaactgccttc

SEQ ID NO: 35265 - DNA, 15 bp, Homo sapiens
cactggaactgcctt

SEQ ID NO: 35266 - DNA, 15 bp, Homo sapiens
ccactggaactgcct

SEQ ID NO: 35267 - DNA, 15 bp, Homo sapiens
accactggaactgcc

SEQ ID NO: 35268 - DNA, 15 bp, Homo sapiens
aaccactggaactgc

SEQ ID NO: 35269 - DNA, 15 bp, Homo sapiens
taaccactggaactg

SEQ ID NO: 35270 - DNA, 15 bp, Homo sapiens
ctaaccactggaact

SEQ ID NO: 35271 - DNA, 15 bp, Homo sapiens
tctaaccactggaac

SEQ ID NO: 35272 - DNA, 15 bp, Homo sapiens
ttctaaccactggaa

SEQ ID NO: 35273 - DNA, 15 bp, Homo sapiens
cttctaaccactgga

SEQ ID NO: 35274 - DNA, 15 bp, Homo sapiens
acttctaaccactgg

SEQ ID NO: 35275 - DNA, 15 bp, Homo sapiens
gacttctaaccactg

SEQ ID NO: 35276 - DNA, 15 bp, Homo sapiens
ggacttctaaccact

SEQ ID NO: 35277 - DNA, 15 bp, Homo sapiens
aggacttctaaccac

SEQ ID NO: 35278 - DNA, 15 bp, Homo sapiens
caggacttctaacca

SEQ ID NO: 35279 - DNA, 15 bp, Homo sapiens
acaggacttctaacc

SEQ ID NO: 35280 - DNA, 15 bp, Homo sapiens
aacaggacttctaac

SEQ ID NO: 35281 - DNA, 15 bp, Homo sapiens
gaacaggacttctaa

SEQ ID NO: 35282 - DNA, 15 bp, Homo sapiens
tgaacaggacttcta

SEQ ID NO: 35283 - DNA, 15 bp, Homo sapiens
gtgaacaggacttct

SEQ ID NO: 35284 - DNA, 15 bp, Homo sapiens
agtgaacaggacttc

SEQ ID NO: 35285 - DNA, 15 bp, Homo sapiens
gagtgaacaggactt

SEQ ID NO: 35286 - DNA, 15 bp, Homo sapiens
ggagtgaacaggact

SEQ ID NO: 35287 - DNA, 15 bp, Homo sapiens
aggagtgaacaggac

SEQ ID NO: 35288 - DNA, 15 bp, Homo sapiens
caggagtgaacagga

SEQ ID NO: 35289 - DNA, 15 bp, Homo sapiens
ccaggagtgaacagg

SEQ ID NO: 35290 - DNA, 15 bp, Homo sapiens
cccaggagtgaacag

SEQ ID NO: 35291 - DNA, 15 bp, Homo sapiens
ccccaggagtgaaca

SEQ ID NO: 35292 - DNA, 15 bp, Homo sapiens
accccaggagtgaac

SEQ ID NO: 35293 - DNA, 15 bp, Homo sapiens
caccccaggagtgaa

SEQ ID NO: 35294 - DNA, 15 bp, Homo sapiens
acaccccaggagtga

SEQ ID NO: 35295 - DNA, 15 bp, Homo sapiens
cacaccccaggagtg

SEQ ID NO: 35296 - DNA, 15 bp, Homo sapiens
ccacaccccaggagt

SEQ ID NO: 35297 - DNA, 15 bp, Homo sapiens
gccacaccccaggag

SEQ ID NO: 35298 - DNA, 15 bp, Homo sapiens
ggccacaccccagga

SEQ ID NO: 35299 - DNA, 15 bp, Homo sapiens
aggccacaccccagg

SEQ ID NO: 35300 - DNA, 15 bp, Homo sapiens
caggccacaccccag

SEQ ID NO: 35301 - DNA, 15 bp, Homo sapiens
ccaggccacacccca

SEQ ID NO: 35302 - DNA, 15 bp, Homo sapiens
cccaggccacacccc

SEQ ID NO: 35303 - DNA, 15 bp, Homo sapiens
ccccaggccacaccc

SEQ ID NO: 35304 - DNA, 15 bp, Homo sapiens
tccccaggccacacc

SEQ ID NO: 35305 - DNA, 15 bp, Homo sapiens
atccccaggccacac

SEQ ID NO: 35306 - DNA, 15 bp, Homo sapiens
catccccaggccaca

SEQ ID NO: 35307 - DNA, 15 bp, Homo sapiens
ccatccccaggccac

SEQ ID NO: 35308 - DNA, 15 bp, Homo sapiens
accatccccaggcca

SEQ ID NO: 35309 - DNA, 15 bp, Homo sapiens
gaccatccccaggcc

SEQ ID NO: 35310 - DNA, 15 bp, Homo sapiens
ggaccatccccaggc

SEQ ID NO: 35311 - DNA, 15 bp, Homo sapiens
aggaccatccccagg

SEQ ID NO: 35312 - DNA, 15 bp, Homo sapiens
caggaccatccccag

SEQ ID NO: 35313 - DNA, 15 bp, Homo sapiens
tcaggaccatcccca

SEQ ID NO: 35314 - DNA, 15 bp, Homo sapiens
gtcaggaccatcccc

SEQ ID NO: 35315 - DNA, 15 bp, Homo sapiens
tgtcaggaccatccc

SEQ ID NO: 35316 - DNA, 15 bp, Homo sapiens
atgtcaggaccatcc

SEQ ID NO: 35317 - DNA, 15 bp, Homo sapiens
gatgtcaggaccatc

SEQ ID NO: 35318 - DNA, 15 bp, Homo sapiens
ggatgtcaggaccat

SEQ ID NO: 35319 - DNA, 15 bp, Homo sapiens
gggatgtcaggacca

SEQ ID NO: 35320 - DNA, 15 bp, Homo sapiens
agggatgtcaggacc

SEQ ID NO: 35321 - DNA, 15 bp, Homo sapiens
cagggatgtcaggac

SEQ ID NO: 35322 - DNA, 15 bp, Homo sapiens
ccagggatgtcagga

SEQ ID NO: 35323 - DNA, 15 bp, Homo sapiens
cccagggatgtcagg

SEQ ID NO: 35324 - DNA, 15 bp, Homo sapiens
gcccagggatgtcag

SEQ ID NO: 35325 - DNA, 15 bp, Homo sapiens
agcccagggatgtca

SEQ ID NO: 35326 - DNA, 15 bp, Homo sapiens
gagcccagggatgtc

SEQ ID NO: 35327 - DNA, 15 bp, Homo sapiens
agagcccagggatgt

SEQ ID NO: 35328 - DNA, 15 bp, Homo sapiens
aagagcccagggatg

SEQ ID NO: 35329 - DNA, 15 bp, Homo sapiens
gaagagcccagggat

SEQ ID NO: 35330 - DNA, 15 bp, Homo sapiens
ggaagagcccaggga

SEQ ID NO: 35331 - DNA, 15 bp, Homo sapiens
aggaagagcccaggg

SEQ ID NO: 35332 - DNA, 15 bp, Homo sapiens
caggaagagcccagg

SEQ ID NO: 35333 - DNA, 15 bp, Homo sapiens
ccaggaagagcccag

SEQ ID NO: 35334 - DNA, 15 bp, Homo sapiens
tccaggaagagccca

SEQ ID NO: 35335 - DNA, 15 bp, Homo sapiens
gtccaggaagagccc

SEQ ID NO: 35336 - DNA, 15 bp, Homo sapiens
ggtccaggaagagcc

SEQ ID NO: 35337 - DNA, 15 bp, Homo sapiens
aggtccaggaagagc

SEQ ID NO: 35338 - DNA, 15 bp, Homo sapiens
caggtccaggaagag

SEQ ID NO: 35339 - DNA, 15 bp, Homo sapiens
ccaggtccaggaaga

SEQ ID NO: 35340 - DNA, 15 bp, Homo sapiens
gccaggtccaggaag

SEQ ID NO: 35341 - DNA, 15 bp, Homo sapiens
ggccaggtccaggaa

SEQ ID NO: 35342 - DNA, 15 bp, Homo sapiens
tggccaggtccagga

SEQ ID NO: 35343 - DNA, 15 bp, Homo sapiens
ctggccaggtccagg

SEQ ID NO: 35344 - DNA, 15 bp, Homo sapiens
gctggccaggtccag

SEQ ID NO: 35345 - DNA, 15 bp, Homo sapiens
agctggccaggtcca

SEQ ID NO: 35346 - DNA, 15 bp, Homo sapiens
tagctggccaggtcc

SEQ ID NO: 35347 - DNA, 15 bp, Homo sapiens
ttagctggccaggtc

SEQ ID NO: 35348 - DNA, 15 bp, Homo sapiens
tttagctggccaggt

SEQ ID NO: 35349 - DNA, 15 bp, Homo sapiens
ttttagctggccagg

SEQ ID NO: 35350 - DNA, 15 bp, Homo sapiens
cttttagctggccag

SEQ ID NO: 35351 - DNA, 15 bp, Homo sapiens
ccttttagctggcca

SEQ ID NO: 35352 - DNA, 15 bp, Homo sapiens
tccttttagctggcc

SEQ ID NO: 35353 - DNA, 15 bp, Homo sapiens
ttccttttagctggc

SEQ ID NO: 35354 - DNA, 15 bp, Homo sapiens
tttccttttagctgg

SEQ ID NO: 35355 - DNA, 15 bp, Homo sapiens
atttccttttagctg

SEQ ID NO: 35356 - DNA, 15 bp, Homo sapiens
gatttccttttagct

SEQ ID NO: 35357 - DNA, 15 bp, Homo sapiens
agatttccttttagc

SEQ ID NO: 35358 - DNA, 15 bp, Homo sapiens
gagatttccttttag

SEQ ID NO: 35359 - DNA, 15 bp, Homo sapiens
ggagatttcctttta

SEQ ID NO: 35360 - DNA, 15 bp, Homo sapiens
aggagatttcctttt

SEQ ID NO: 35361 - DNA, 15 bp, Homo sapiens
taggagatttccttt

SEQ ID NO: 35362 - DNA, 15 bp, Homo sapiens
ataggagatttcctt

SEQ ID NO: 35363 - DNA, 15 bp, Homo sapiens
cataggagatttcct

SEQ ID NO: 35364 - DNA, 15 bp, Homo sapiens
tcataggagatttcc

SEQ ID NO: 35365 - DNA, 15 bp, Homo sapiens
atcataggagatttc

SEQ ID NO: 35366 - DNA, 15 bp, Homo sapiens
catcataggagattt

SEQ ID NO: 35367 - DNA, 15 bp, Homo sapiens
ccatcataggagatt

SEQ ID NO: 35368 - DNA, 15 bp, Homo sapiens
accatcataggagat

SEQ ID NO: 35369 - DNA, 15 bp, Homo sapiens
taccatcataggaga

SEQ ID NO: 35370 - DNA, 15 bp, Homo sapiens
gtaccatcataggag

SEQ ID NO: 35371 - DNA, 15 bp, Homo sapiens
agtaccatcatagga

SEQ ID NO: 35372 - DNA, 15 bp, Homo sapiens
gagtaccatcatagg

SEQ ID NO: 35373 - DNA, 15 bp, Homo sapiens
tgagtaccatcatag

SEQ ID NO: 35374 - DNA, 15 bp, Homo sapiens
ctgagtaccatcata

SEQ ID NO: 35375 - DNA, 15 bp, Homo sapiens
tctgagtaccatcat

SEQ ID NO: 35376 - DNA, 15 bp, Homo sapiens
atctgagtaccatca

SEQ ID NO: 35377 - DNA, 15 bp, Homo sapiens
tatctgagtaccatc

SEQ ID NO: 35378 - DNA, 15 bp, Homo sapiens
gtatctgagtaccat

SEQ ID NO: 35379 - DNA, 15 bp, Homo sapiens
agtatctgagtacca

SEQ ID NO: 35380 - DNA, 15 bp, Homo sapiens
aagtatctgagtacc

SEQ ID NO: 35381 - DNA, 15 bp, Homo sapiens
aaagtatctgagtac

SEQ ID NO: 35382 - DNA, 15 bp, Homo sapiens
aaaagtatctgagta

SEQ ID NO: 35383 - DNA, 15 bp, Homo sapiens
caaaagtatctgagt

SEQ ID NO: 35384 - DNA, 15 bp, Homo sapiens
ccaaaagtatctgag

SEQ ID NO: 35385 - DNA, 15 bp, Homo sapiens
tccaaaagtatctga

SEQ ID NO: 35386 - DNA, 15 bp, Homo sapiens
ttccaaaagtatctg

SEQ ID NO: 35387 - DNA, 15 bp, Homo sapiens
gttccaaaagtatct

SEQ ID NO: 35388 - DNA, 15 bp, Homo sapiens
ggttccaaaagtatc

SEQ ID NO: 35389 - DNA, 15 bp, Homo sapiens
aggttccaaaagtat

SEQ ID NO: 35390 - DNA, 15 bp, Homo sapiens
aaggttccaaaagta

SEQ ID NO: 35391 - DNA, 15 bp, Homo sapiens
caaggttccaaaagt

SEQ ID NO: 35392 - DNA, 15 bp, Homo sapiens
acaaggttccaaaag

SEQ ID NO: 35393 - DNA, 15 bp, Homo sapiens
gacaaggttccaaaa

SEQ ID NO: 35394 - DNA, 15 bp, Homo sapiens
tgacaaggttccaaa

SEQ ID NO: 35395 - DNA, 15 bp, Homo sapiens
ctgacaaggttccaa

SEQ ID NO: 35396 - DNA, 15 bp, Homo sapiens
gctgacaaggttcca

SEQ ID NO: 35397 - DNA, 15 bp, Homo sapiens
ggctgacaaggttcc

SEQ ID NO: 35398 - DNA, 15 bp, Homo sapiens
gggctgacaaggttc

SEQ ID NO: 35399 - DNA, 15 bp, Homo sapiens
agggctgacaaggtt

SEQ ID NO: 35400 - DNA, 15 bp, Homo sapiens
tagggctgacaaggt

SEQ ID NO: 35401 - DNA, 15 bp, Homo sapiens
ttagggctgacaagg

SEQ ID NO: 35402 - DNA, 15 bp, Homo sapiens
attagggctgacaag

SEQ ID NO: 35403 - DNA, 15 bp, Homo sapiens
gattagggctgacaa

SEQ ID NO: 35404 - DNA, 15 bp, Homo sapiens
ggattagggctgaca

SEQ ID NO: 35405 - DNA, 15 bp, Homo sapiens
gggattagggctgac

SEQ ID NO: 35406 - DNA, 15 bp, Homo sapiens
tgggattagggctga

SEQ ID NO: 35407 - DNA, 15 bp, Homo sapiens
atgggattagggctg

SEQ ID NO: 35408 - DNA, 15 bp, Homo sapiens
gatgggattagggct

SEQ ID NO: 35409 - DNA, 15 bp, Homo sapiens
agatgggattagggc

SEQ ID NO: 35410 - DNA, 15 bp, Homo sapiens
gagatgggattaggg

SEQ ID NO: 35411 - DNA, 15 bp, Homo sapiens
ggagatgggattagg

SEQ ID NO: 35412 - DNA, 15 bp, Homo sapiens
aggagatgggattag

SEQ ID NO: 35413 - DNA, 15 bp, Homo sapiens
taggagatgggatta

SEQ ID NO: 35414 - DNA, 15 bp, Homo sapiens
ctaggagatgggatt

SEQ ID NO: 35415 - DNA, 15 bp, Homo sapiens
actaggagatgggat

SEQ ID NO: 35416 - DNA, 15 bp, Homo sapiens
cactaggagatggga

SEQ ID NO: 35417 - DNA, 15 bp, Homo sapiens
acactaggagatggg

SEQ ID NO: 35418 - DNA, 15 bp, Homo sapiens
aacactaggagatgg

SEQ ID NO: 35419 - DNA, 15 bp, Homo sapiens
aaacactaggagatg

SEQ ID NO: 35420 - DNA, 15 bp, Homo sapiens
taaacactaggagat

SEQ ID NO: 35421 - DNA, 15 bp, Homo sapiens
ctaaacactaggaga

SEQ ID NO: 35422 - DNA, 15 bp, Homo sapiens
actaaacactaggag

SEQ ID NO: 35423 - DNA, 15 bp, Homo sapiens
tactaaacactagga

SEQ ID NO: 35424 - DNA, 15 bp, Homo sapiens
atactaaacactagg

SEQ ID NO: 35425 - DNA, 15 bp, Homo sapiens
aatactaaacactag

SEQ ID NO: 35426 - DNA, 15 bp, Homo sapiens
gaatactaaacacta

SEQ ID NO: 35427 - DNA, 15 bp, Homo sapiens
tgaatactaaacact

SEQ ID NO: 35428 - DNA, 15 bp, Homo sapiens
ctgaatactaaacac

SEQ ID NO: 35429 - DNA, 15 bp, Homo sapiens
gctgaatactaaaca

SEQ ID NO: 35430 - DNA, 15 bp, Homo sapiens
agctgaatactaaac

SEQ ID NO: 35431 - DNA, 15 bp, Homo sapiens
tagctgaatactaaa

SEQ ID NO: 35432 - DNA, 15 bp, Homo sapiens
gtagctgaatactaa

SEQ ID NO: 35433 - DNA, 15 bp, Homo sapiens
ggtagctgaatacta

SEQ ID NO: 35434 - DNA, 15 bp, Homo sapiens
gggtagctgaatact

SEQ ID NO: 35435 - DNA, 15 bp, Homo sapiens
agggtagctgaatac

SEQ ID NO: 35436 - DNA, 15 bp, Homo sapiens
aagggtagctgaata

SEQ ID NO: 35437 - DNA, 15 bp, Homo sapiens
gaagggtagctgaat

SEQ ID NO: 35438 - DNA, 15 bp, Homo sapiens
tgaagggtagctgaa

SEQ ID NO: 35439 - DNA, 15 bp, Homo sapiens
gtgaagggtagctga

SEQ ID NO: 35440 - DNA, 15 bp, Homo sapiens
agtgaagggtagctg

SEQ ID NO: 35441 - DNA, 15 bp, Homo sapiens
cagtgaagggtagct

SEQ ID NO: 35442 - DNA, 15 bp, Homo sapiens
ccagtgaagggtagc

SEQ ID NO: 35443 - DNA, 15 bp, Homo sapiens
cccagtgaagggtag

SEQ ID NO: 35444 - DNA, 15 bp, Homo sapiens
gcccagtgaagggta

SEQ ID NO: 35445 - DNA, 15 bp, Homo sapiens
tgcccagtgaagggt

SEQ ID NO: 35446 - DNA, 15 bp, Homo sapiens
ctgcccagtgaaggg

SEQ ID NO: 35447 - DNA, 15 bp, Homo sapiens
actgcccagtgaagg

SEQ ID NO: 35448 - DNA, 15 bp, Homo sapiens
tactgcccagtgaag

SEQ ID NO: 35449 - DNA, 15 bp, Homo sapiens
ttactgcccagtgaa

SEQ ID NO: 35450 - DNA, 15 bp, Homo sapiens
attactgcccagtga

SEQ ID NO: 35451 - DNA, 15 bp, Homo sapiens
aattactgcccagtg

SEQ ID NO: 35452 - DNA, 15 bp, Homo sapiens
gaattactgcccagt

SEQ ID NO: 35453 - DNA, 15 bp, Homo sapiens
agaattactgcccag

SEQ ID NO: 35454 - DNA, 15 bp, Homo sapiens
cagaattactgccca

SEQ ID NO: 35455 - DNA, 15 bp, Homo sapiens
acagaattactgccc

SEQ ID NO: 35456 - DNA, 15 bp, Homo sapiens
cacagaattactgcc

SEQ ID NO: 35457 - DNA, 15 bp, Homo sapiens
gcacagaattactgc

SEQ ID NO: 35458 - DNA, 15 bp, Homo sapiens
ggcacagaattactg

SEQ ID NO: 35459 - DNA, 15 bp, Homo sapiens
tggcacagaattact

SEQ ID NO: 35460 - DNA, 15 bp, Homo sapiens
ctggcacagaattac

SEQ ID NO: 35461 - DNA, 15 bp, Homo sapiens
cctggcacagaatta

SEQ ID NO: 35462 - DNA, 15 bp, Homo sapiens
gcctggcacagaatt

SEQ ID NO: 35463 - DNA, 15 bp, Homo sapiens
ggcctggcacagaat

SEQ ID NO: 35464 - DNA, 15 bp, Homo sapiens
aggcctggcacagaa

SEQ ID NO: 35465 - DNA, 15 bp, Homo sapiens
caggcctggcacaga

SEQ ID NO: 35466 - DNA, 15 bp, Homo sapiens
tcaggcctggcacag

SEQ ID NO: 35467 - DNA, 15 bp, Homo sapiens
atcaggcctggcaca

SEQ ID NO: 35468 - DNA, 15 bp, Homo sapiens
gatcaggcctggcac

SEQ ID NO: 35469 - DNA, 15 bp, Homo sapiens
agatcaggcctggca

SEQ ID NO: 35470 - DNA, 15 bp, Homo sapiens
cagatcaggcctggc

SEQ ID NO: 35471 - DNA, 15 bp, Homo sapiens
ccagatcaggcctgg

SEQ ID NO: 35472 - DNA, 15 bp, Homo sapiens
cccagatcaggcctg

SEQ ID NO: 35473 - DNA, 15 bp, Homo sapiens
gcccagatcaggcct

SEQ ID NO: 35474 - DNA, 15 bp, Homo sapiens
tgcccagatcaggcc

SEQ ID NO: 35475 - DNA, 15 bp, Homo sapiens
atgcccagatcaggc

SEQ ID NO: 35476 - DNA, 15 bp, Homo sapiens
aatgcccagatcagg

SEQ ID NO: 35477 - DNA, 15 bp, Homo sapiens
caatgcccagatcag

SEQ ID NO: 35478 - DNA, 15 bp, Homo sapiens
ccaatgcccagatca

SEQ ID NO: 35479 - DNA, 15 bp, Homo sapiens
accaatgcccagatc

SEQ ID NO: 35480 - DNA, 15 bp, Homo sapiens
caccaatgcccagat

SEQ ID NO: 35481 - DNA, 15 bp, Homo sapiens
ccaccaatgcccaga

SEQ ID NO: 35482 - DNA, 15 bp, Homo sapiens
accaccaatgcccag

SEQ ID NO: 35483 - DNA, 15 bp, Homo sapiens
taccaccaatgccca

SEQ ID NO: 35484 - DNA, 15 bp, Homo sapiens
gtaccaccaatgccc

SEQ ID NO: 35485 - DNA, 15 bp, Homo sapiens
agtaccaccaatgcc

SEQ ID NO: 35486 - DNA, 15 bp, Homo sapiens
tagtaccaccaatgc

SEQ ID NO: 35487 - DNA, 15 bp, Homo sapiens
ttagtaccaccaatg

SEQ ID NO: 35488 - DNA, 15 bp, Homo sapiens
cttagtaccaccaat

SEQ ID NO: 35489 - DNA, 15 bp, Homo sapiens
tcttagtaccaccaa

SEQ ID NO: 35490 - DNA, 15 bp, Homo sapiens
ttcttagtaccacca

SEQ ID NO: 35491 - DNA, 15 bp, Homo sapiens
gttcttagtaccacc

SEQ ID NO: 35492 - DNA, 15 bp, Homo sapiens
cgttcttagtaccac

SEQ ID NO: 35493 - DNA, 15 bp, Homo sapiens
gcgttcttagtacca

SEQ ID NO: 35494 - DNA, 15 bp, Homo sapiens
tgcgttcttagtacc

SEQ ID NO: 35495 - DNA, 15 bp, Homo sapiens
atgcgttcttagtac

SEQ ID NO: 35496 - DNA, 15 bp, Homo sapiens
tatgcgttcttagta

SEQ ID NO: 35497 - DNA, 15 bp, Homo sapiens
atatgcgttcttagt

SEQ ID NO: 35498 - DNA, 15 bp, Homo sapiens
aatatgcgttcttag

SEQ ID NO: 35499 - DNA, 15 bp, Homo sapiens
gaatatgcgttctta

SEQ ID NO: 35500 - DNA, 15 bp, Homo sapiens
ggaatatgcgttctt

SEQ ID NO: 35501 - DNA, 15 bp, Homo sapiens
gggaatatgcgttct

SEQ ID NO: 35502 - DNA, 15 bp, Homo sapiens
agggaatatgcgttc

SEQ ID NO: 35503 - DNA, 15 bp, Homo sapiens
tagggaatatgcgtt

SEQ ID NO: 35504 - DNA, 15 bp, Homo sapiens
atagggaatatgcgt

SEQ ID NO: 35505 - DNA, 15 bp, Homo sapiens
gatagggaatatgcg

SEQ ID NO: 35506 - DNA, 15 bp, Homo sapiens
ggatagggaatatgc

SEQ ID NO: 35507 - DNA, 15 bp, Homo sapiens
aggatagggaatatg

SEQ ID NO: 35508 - DNA, 15 bp, Homo sapiens
taggatagggaatat

SEQ ID NO: 35509 - DNA, 15 bp, Homo sapiens
ataggatagggaata

SEQ ID NO: 35510 - DNA, 15 bp, Homo sapiens
tataggatagggaat

SEQ ID NO: 35511 - DNA, 15 bp, Homo sapiens
ctataggatagggaa

SEQ ID NO: 35512 - DNA, 15 bp, Homo sapiens
cctataggataggga

SEQ ID NO: 35513 - DNA, 15 bp, Homo sapiens
gcctataggataggg

SEQ ID NO: 35514 - DNA, 15 bp, Homo sapiens
tgcctataggatagg

SEQ ID NO: 35515 - DNA, 15 bp, Homo sapiens
atgcctataggatag

SEQ ID NO: 35516 - DNA, 15 bp, Homo sapiens
tatgcctataggata

SEQ ID NO: 35517 - DNA, 15 bp, Homo sapiens
ctatgcctataggat

SEQ ID NO: 35518 - DNA, 15 bp, Homo sapiens
actatgcctatagga

SEQ ID NO: 35519 - DNA, 15 bp, Homo sapiens
gactatgcctatagg

SEQ ID NO: 35520 - DNA, 15 bp, Homo sapiens
agactatgcctatag

SEQ ID NO: 35521 - DNA, 15 bp, Homo sapiens
cagactatgcctata

SEQ ID NO: 35522 - DNA, 15 bp, Homo sapiens
ccagactatgcctat

SEQ ID NO: 35523 - DNA, 15 bp, Homo sapiens
accagactatgccta

SEQ ID NO: 35524 - DNA, 15 bp, Homo sapiens
taccagactatgcct

SEQ ID NO: 35525 - DNA, 15 bp, Homo sapiens
ctaccagactatgcc

SEQ ID NO: 35526 - DNA, 15 bp, Homo sapiens
tctaccagactatgc

SEQ ID NO: 35527 - DNA, 15 bp, Homo sapiens
ctctaccagactatg

SEQ ID NO: 35528 - DNA, 15 bp, Homo sapiens
tctctaccagactat

SEQ ID NO: 35529 - DNA, 15 bp, Homo sapiens
gtctctaccagacta

SEQ ID NO: 35530 - DNA, 15 bp, Homo sapiens
tgtctctaccagact

SEQ ID NO: 35531 - DNA, 15 bp, Homo sapiens
ttgtctctaccagac

SEQ ID NO: 35532 - DNA, 15 bp, Homo sapiens
gttgtctctaccaga

SEQ ID NO: 35533 - DNA, 15 bp, Homo sapiens
tgttgtctctaccag

SEQ ID NO: 35534 - DNA, 15 bp, Homo sapiens
atgttgtctctacca

SEQ ID NO: 35535 - DNA, 15 bp, Homo sapiens
catgttgtctctacc

SEQ ID NO: 35536 - DNA, 15 bp, Homo sapiens
gcatgttgtctctac

SEQ ID NO: 35537 - DNA, 15 bp, Homo sapiens
tgcatgttgtctcta

SEQ ID NO: 35538 - DNA, 15 bp, Homo sapiens
ttgcatgttgtctct

SEQ ID NO: 35539 - DNA, 15 bp, Homo sapiens
cttgcatgttgtctc

SEQ ID NO: 35540 - DNA, 15 bp, Homo sapiens
acttgcatgttgtct

SEQ ID NO: 35541 - DNA, 15 bp, Homo sapiens
tacttgcatgttgtc

SEQ ID NO: 35542 - DNA, 15 bp, Homo sapiens
ttacttgcatgttgt

SEQ ID NO: 35543 - DNA, 15 bp, Homo sapiens
tttacttgcatgttg

SEQ ID NO: 35544 - DNA, 15 bp, Homo sapiens
ttttacttgcatgtt

SEQ ID NO: 35545 - DNA, 15 bp, Homo sapiens
gttttacttgcatgt

SEQ ID NO: 35546 - DNA, 15 bp, Homo sapiens
tgttttacttgcatg

SEQ ID NO: 35547 - DNA, 15 bp, Homo sapiens
ttgttttacttgcat

SEQ ID NO: 35548 - DNA, 15 bp, Homo sapiens
attgttttacttgca

SEQ ID NO: 35549 - DNA, 15 bp, Homo sapiens
cattgttttacttgc

SEQ ID NO: 35550 - DNA, 15 bp, Homo sapiens
acattgttttacttg

SEQ ID NO: 35551 - DNA, 15 bp, Homo sapiens
aacattgttttactt

SEQ ID NO: 35552 - DNA, 15 bp, Homo sapiens
gaacattgttttact

SEQ ID NO: 35553 - DNA, 15 bp, Homo sapiens
ggaacattgttttac

SEQ ID NO: 35554 - DNA, 15 bp, Homo sapiens
aggaacattgtttta

SEQ ID NO: 35555 - DNA, 15 bp, Homo sapiens
aaggaacattgtttt

SEQ ID NO: 35556 - DNA, 15 bp, Homo sapiens
taaggaacattgttt

SEQ ID NO: 35557 - DNA, 15 bp, Homo sapiens
ttaaggaacattgtt

SEQ ID NO: 35558 - DNA, 15 bp, Homo sapiens
tttaaggaacattgt

SEQ ID NO: 35559 - DNA, 15 bp, Homo sapiens
gtttaaggaacattg

SEQ ID NO: 35560 - DNA, 15 bp, Homo sapiens
agtttaaggaacatt

SEQ ID NO: 35561 - DNA, 15 bp, Homo sapiens
cagtttaaggaacat

SEQ ID NO: 35562 - DNA, 15 bp, Homo sapiens
acagtttaaggaaca

SEQ ID NO: 35563 - DNA, 15 bp, Homo sapiens
cacagtttaaggaac

SEQ ID NO: 35564 - DNA, 15 bp, Homo sapiens
ccacagtttaaggaa

SEQ ID NO: 35565 - DNA, 15 bp, Homo sapiens
accacagtttaagga

SEQ ID NO: 35566 - DNA, 15 bp, Homo sapiens
aaccacagtttaagg

SEQ ID NO: 35567 - DNA, 15 bp, Homo sapiens
gaaccacagtttaag

SEQ ID NO: 35568 - DNA, 15 bp, Homo sapiens
ggaaccacagtttaa

SEQ ID NO: 35569 - DNA, 15 bp, Homo sapiens
tggaaccacagttta

SEQ ID NO: 35570 - DNA, 15 bp, Homo sapiens
gtggaaccacagttt

SEQ ID NO: 35571 - DNA, 15 bp, Homo sapiens
tgtggaaccacagtt

SEQ ID NO: 35572 - DNA, 15 bp, Homo sapiens
gtgtggaaccacagt

SEQ ID NO: 35573 - DNA, 15 bp, Homo sapiens
ggtgtggaaccacag

SEQ ID NO: 35574 - DNA, 15 bp, Homo sapiens
aggtgtggaaccaca

SEQ ID NO: 35575 - DNA, 15 bp, Homo sapiens
gaggtgtggaaccac

SEQ ID NO: 35576 - DNA, 15 bp, Homo sapiens
ggaggtgtggaacca

SEQ ID NO: 35577 - DNA, 15 bp, Homo sapiens
gggaggtgtggaacc

SEQ ID NO: 35578 - DNA, 15 bp, Homo sapiens
agggaggtgtggaac

SEQ ID NO: 35579 - DNA, 15 bp, Homo sapiens
gagggaggtgtggaa

SEQ ID NO: 35580 - DNA, 15 bp, Homo sapiens
ggagggaggtgtgga

SEQ ID NO: 35581 - DNA, 15 bp, Homo sapiens
gggagggaggtgtgg

SEQ ID NO: 35582 - DNA, 15 bp, Homo sapiens
ggggagggaggtgtg

SEQ ID NO: 35583 - DNA, 15 bp, Homo sapiens
gggggagggaggtgt

SEQ ID NO: 35584 - DNA, 15 bp, Homo sapiens
tgggggagggaggtg

SEQ ID NO: 35585 - DNA, 15 bp, Homo sapiens
ttgggggagggaggt

SEQ ID NO: 35586 - DNA, 15 bp, Homo sapiens
gttgggggagggagg

SEQ ID NO: 35587 - DNA, 15 bp, Homo sapiens
tgttgggggagggag

SEQ ID NO: 35588 - DNA, 15 bp, Homo sapiens
atgttgggggaggga

SEQ ID NO: 35589 - DNA, 15 bp, Homo sapiens
aatgttgggggaggg

SEQ ID NO: 35590 - DNA, 15 bp, Homo sapiens
taatgttgggggagg

SEQ ID NO: 35591 - DNA, 15 bp, Homo sapiens
ttaatgttgggggag

SEQ ID NO: 35592 - DNA, 15 bp, Homo sapiens
tttaatgttggggga

SEQ ID NO: 35593 - DNA, 15 bp, Homo sapiens
ttttaatgttggggg

SEQ ID NO: 35594 - DNA, 15 bp, Homo sapiens
cttttaatgttgggg

SEQ ID NO: 35595 - DNA, 15 bp, Homo sapiens
acttttaatgttggg

SEQ ID NO: 35596 - DNA, 15 bp, Homo sapiens
cacttttaatgttgg

SEQ ID NO: 35597 - DNA, 15 bp, Homo sapiens
acacttttaatgttg

SEQ ID NO: 35598 - DNA, 15 bp, Homo sapiens
tacacttttaatgtt

SEQ ID NO: 35599 - DNA, 15 bp, Homo sapiens
ttacacttttaatgt

SEQ ID NO: 35600 - DNA, 15 bp, Homo sapiens
cttacacttttaatg

SEQ ID NO: 35601 - DNA, 15 bp, Homo sapiens
ccttacacttttaat

SEQ ID NO: 35602 - DNA, 15 bp, Homo sapiens
cccttacacttttaa

SEQ ID NO: 35603 - DNA, 15 bp, Homo sapiens
tcccttacactttta

SEQ ID NO: 35604 - DNA, 15 bp, Homo sapiens
atcccttacactttt

SEQ ID NO: 35605 - DNA, 15 bp, Homo sapiens
catcccttacacttt

SEQ ID NO: 35606 - DNA, 15 bp, Homo sapiens
gcatcccttacactt

SEQ ID NO: 35607 - DNA, 15 bp, Homo sapiens
agcatcccttacact

SEQ ID NO: 35608 - DNA, 15 bp, Homo sapiens
aagcatcccttacac

SEQ ID NO: 35609 - DNA, 15 bp, Homo sapiens
taagcatcccttaca

SEQ ID NO: 35610 - DNA, 15 bp, Homo sapiens
ataagcatcccttac

SEQ ID NO: 35611 - DNA, 15 bp, Homo sapiens
aataagcatccctta

SEQ ID NO: 35612 - DNA, 15 bp, Homo sapiens
gaataagcatccctt

SEQ ID NO: 35613 - DNA, 15 bp, Homo sapiens
tgaataagcatccct

SEQ ID NO: 35614 - DNA, 15 bp, Homo sapiens
ttgaataagcatccc

SEQ ID NO: 35615 - DNA, 15 bp, Homo sapiens
tttgaataagcatcc

SEQ ID NO: 35616 - DNA, 15 bp, Homo sapiens
atttgaataagcatc

SEQ ID NO: 35617 - DNA, 15 bp, Homo sapiens
catttgaataagcat

SEQ ID NO: 35618 - DNA, 15 bp, Homo sapiens
acatttgaataagca

SEQ ID NO: 35619 - DNA, 15 bp, Homo sapiens
tacatttgaataagc

SEQ ID NO: 35620 - DNA, 15 bp, Homo sapiens
ctacatttgaataag

SEQ ID NO: 35621 - DNA, 15 bp, Homo sapiens
tctacatttgaataa

SEQ ID NO: 35622 - DNA, 15 bp, Homo sapiens
atctacatttgaata

SEQ ID NO: 35623 - DNA, 15 bp, Homo sapiens
aatctacatttgaat

SEQ ID NO: 35624 - DNA, 15 bp, Homo sapiens
aaatctacatttgaa

SEQ ID NO: 35625 - DNA, 15 bp, Homo sapiens
caaatctacatttga

SEQ ID NO: 35626 - DNA, 15 bp, Homo sapiens
acaaatctacatttg

SEQ ID NO: 35627 - DNA, 15 bp, Homo sapiens
tacaaatctacattt

SEQ ID NO: 35628 - DNA, 15 bp, Homo sapiens
ctacaaatctacatt

SEQ ID NO: 35629 - DNA, 15 bp, Homo sapiens
cctacaaatctacat

SEQ ID NO: 35630 - DNA, 15 bp, Homo sapiens
gcctacaaatctaca

SEQ ID NO: 35631 - DNA, 15 bp, Homo sapiens
agcctacaaatctac

SEQ ID NO: 35632 - DNA, 15 bp, Homo sapiens
gagcctacaaatcta

SEQ ID NO: 35633 - DNA, 15 bp, Homo sapiens
agagcctacaaatct

SEQ ID NO: 35634 - DNA, 15 bp, Homo sapiens
cagagcctacaaatc

SEQ ID NO: 35635 - DNA, 15 bp, Homo sapiens
gcagagcctacaaat

SEQ ID NO: 35636 - DNA, 15 bp, Homo sapiens
tgcagagcctacaaa

SEQ ID NO: 35637 - DNA, 15 bp, Homo sapiens
gtgcagagcctacaa

SEQ ID NO: 35638 - DNA, 15 bp, Homo sapiens
agtgcagagcctaca

SEQ ID NO: 35639 - DNA, 15 bp, Homo sapiens
gagtgcagagcctac

SEQ ID NO: 35640 - DNA, 15 bp, Homo sapiens
agagtgcagagccta

SEQ ID NO: 35641 - DNA, 15 bp, Homo sapiens
tagagtgcagagcct

SEQ ID NO: 35642 - DNA, 15 bp, Homo sapiens
ctagagtgcagagcc

SEQ ID NO: 35643 - DNA, 15 bp, Homo sapiens
tctagagtgcagagc

SEQ ID NO: 35644 - DNA, 15 bp, Homo sapiens
gtctagagtgcagag

SEQ ID NO: 35645 - DNA, 15 bp, Homo sapiens
ggtctagagtgcaga

SEQ ID NO: 35646 - DNA, 15 bp, Homo sapiens
gggtctagagtgcag

SEQ ID NO: 35647 - DNA, 15 bp, Homo sapiens
tgggtctagagtgca

SEQ ID NO: 35648 - DNA, 15 bp, Homo sapiens
gtgggtctagagtgc

SEQ ID NO: 35649 - DNA, 15 bp, Homo sapiens
agtgggtctagagtg

SEQ ID NO: 35650 - DNA, 15 bp, Homo sapiens
tagtgggtctagagt

SEQ ID NO: 35651 - DNA, 15 bp, Homo sapiens
atagtgggtctagag

SEQ ID NO: 35652 - DNA, 15 bp, Homo sapiens
aatagtgggtctaga

SEQ ID NO: 35653 - DNA, 15 bp, Homo sapiens
aaatagtgggtctag

SEQ ID NO: 35654 - DNA, 15 bp, Homo sapiens
gaaatagtgggtcta

SEQ ID NO: 35655 - DNA, 15 bp, Homo sapiens
tgaaatagtgggtct

SEQ ID NO: 35656 - DNA, 15 bp, Homo sapiens
ctgaaatagtgggtc

SEQ ID NO: 35657 - DNA, 15 bp, Homo sapiens
tctgaaatagtgggt

SEQ ID NO: 35658 - DNA, 15 bp, Homo sapiens
ttctgaaatagtggg

SEQ ID NO: 35659 - DNA, 15 bp, Homo sapiens
attctgaaatagtgg

SEQ ID NO: 35660 - DNA, 15 bp, Homo sapiens
gattctgaaatagtg

SEQ ID NO: 35661 - DNA, 15 bp, Homo sapiens
agattctgaaatagt

SEQ ID NO: 35662 - DNA, 15 bp, Homo sapiens
gagattctgaaatag

SEQ ID NO: 35663 - DNA, 15 bp, Homo sapiens
agagattctgaaata

SEQ ID NO: 35664 - DNA, 15 bp, Homo sapiens
cagagattctgaaat

SEQ ID NO: 35665 - DNA, 15 bp, Homo sapiens
ccagagattctgaaa

SEQ ID NO: 35666 - DNA, 15 bp, Homo sapiens
cccagagattctgaa

SEQ ID NO: 35667 - DNA, 15 bp, Homo sapiens
ccccagagattctga

SEQ ID NO: 35668 - DNA, 15 bp, Homo sapiens
tccccagagattctg

SEQ ID NO: 35669 - DNA, 15 bp, Homo sapiens
gtccccagagattct

SEQ ID NO: 35670 - DNA, 15 bp, Homo sapiens
agtccccagagattc

SEQ ID NO: 35671 - DNA, 15 bp, Homo sapiens
cagtccccagagatt

SEQ ID NO: 35672 - DNA, 15 bp, Homo sapiens
ccagtccccagagat

SEQ ID NO: 35673 - DNA, 15 bp, Homo sapiens
cccagtccccagaga

SEQ ID NO: 35674 - DNA, 15 bp, Homo sapiens
gcccagtccccagag

SEQ ID NO: 35675 - DNA, 15 bp, Homo sapiens
ggcccagtccccaga

SEQ ID NO: 35676 - DNA, 15 bp, Homo sapiens
gggcccagtccccag

SEQ ID NO: 35677 - DNA, 15 bp, Homo sapiens
tgggcccagtcccca

SEQ ID NO: 35678 - DNA, 15 bp, Homo sapiens
ttgggcccagtcccc

SEQ ID NO: 35679 - DNA, 15 bp, Homo sapiens
cttgggcccagtccc

SEQ ID NO: 35680 - DNA, 15 bp, Homo sapiens
tcttgggcccagtcc

SEQ ID NO: 35681 - DNA, 15 bp, Homo sapiens
ttcttgggcccagtc

SEQ ID NO: 35682 - DNA, 15 bp, Homo sapiens
tttcttgggcccagt

SEQ ID NO: 35683 - DNA, 15 bp, Homo sapiens
gtttcttgggcccag

SEQ ID NO: 35684 - DNA, 15 bp, Homo sapiens
agtttcttgggccca

SEQ ID NO: 35685 - DNA, 15 bp, Homo sapiens
cagtttcttgggccc

SEQ ID NO: 35686 - DNA, 15 bp, Homo sapiens
gcagtttcttgggcc

SEQ ID NO: 35687 - DNA, 15 bp, Homo sapiens
tgcagtttcttgggc

SEQ ID NO: 35688 - DNA, 15 bp, Homo sapiens
atgcagtttcttggg

SEQ ID NO: 35689 - DNA, 15 bp, Homo sapiens
aatgcagtttcttgg

SEQ ID NO: 35690 - DNA, 15 bp, Homo sapiens
aaatgcagtttcttg

SEQ ID NO: 35691 - DNA, 15 bp, Homo sapiens
aaaatgcagtttctt

SEQ ID NO: 35692 - DNA, 15 bp, Homo sapiens
gaaaatgcagtttct

SEQ ID NO: 35693 - DNA, 15 bp, Homo sapiens
cgaaaatgcagtttc

SEQ ID NO: 35694 - DNA, 15 bp, Homo sapiens
gcgaaaatgcagttt

SEQ ID NO: 35695 - DNA, 15 bp, Homo sapiens
tgcgaaaatgcagtt

SEQ ID NO: 35696 - DNA, 15 bp, Homo sapiens
atgcgaaaatgcagt

SEQ ID NO: 35697 - DNA, 15 bp, Homo sapiens
catgcgaaaatgcag

SEQ ID NO: 35698 - DNA, 15 bp, Homo sapiens
gcatgcgaaaatgca

SEQ ID NO: 35699 - DNA, 15 bp, Homo sapiens
agcatgcgaaaatgc

SEQ ID NO: 35700 - DNA, 15 bp, Homo sapiens
gagcatgcgaaaatg

SEQ ID NO: 35701 - DNA, 15 bp, Homo sapiens
ggagcatgcgaaaat

SEQ ID NO: 35702 - DNA, 15 bp, Homo sapiens
gggagcatgcgaaaa

SEQ ID NO: 35703 - DNA, 15 bp, Homo sapiens
agggagcatgcgaaa

SEQ ID NO: 35704 - DNA, 15 bp, Homo sapiens
tagggagcatgcgaa

SEQ ID NO: 35705 - DNA, 15 bp, Homo sapiens
ttagggagcatgcga

SEQ ID NO: 35706 - DNA, 15 bp, Homo sapiens
tttagggagcatgcg

SEQ ID NO: 35707 - DNA, 15 bp, Homo sapiens
atttagggagcatgc

SEQ ID NO: 35708 - DNA, 15 bp, Homo sapiens
catttagggagcatg

SEQ ID NO: 35709 - DNA, 15 bp, Homo sapiens
tcatttagggagcat

SEQ ID NO: 35710 - DNA, 15 bp, Homo sapiens
ttcatttagggagca

SEQ ID NO: 35711 - DNA, 15 bp, Homo sapiens
cttcatttagggagc

SEQ ID NO: 35712 - DNA, 15 bp, Homo sapiens
gcttcatttagggag

SEQ ID NO: 35713 - DNA, 15 bp, Homo sapiens
agcttcatttaggga

SEQ ID NO: 35714 - DNA, 15 bp, Homo sapiens
aagcttcatttaggg

SEQ ID NO: 35715 - DNA, 15 bp, Homo sapiens
taagcttcatttagg

SEQ ID NO: 35716 - DNA, 15 bp, Homo sapiens
ctaagcttcatttag

SEQ ID NO: 35717 - DNA, 15 bp, Homo sapiens
cctaagcttcattta

SEQ ID NO: 35718 - DNA, 15 bp, Homo sapiens
acctaagcttcattt

SEQ ID NO: 35719 - DNA, 15 bp, Homo sapiens
cacctaagcttcatt

SEQ ID NO: 35720 - DNA, 15 bp, Homo sapiens
gcacctaagcttcat

SEQ ID NO: 35721 - DNA, 15 bp, Homo sapiens
agcacctaagcttca

SEQ ID NO: 35722 - DNA, 15 bp, Homo sapiens
gagcacctaagcttc

SEQ ID NO: 35723 - DNA, 15 bp, Homo sapiens
agagcacctaagctt

SEQ ID NO: 35724 - DNA, 15 bp, Homo sapiens
cagagcacctaagct

SEQ ID NO: 35725 - DNA, 15 bp, Homo sapiens
tcagagcacctaagc

SEQ ID NO: 35726 - DNA, 15 bp, Homo sapiens
ctcagagcacctaag

SEQ ID NO: 35727 - DNA, 15 bp, Homo sapiens
cctcagagcacctaa

SEQ ID NO: 35728 - DNA, 15 bp, Homo sapiens
acctcagagcaccta

SEQ ID NO: 35729 - DNA, 15 bp, Homo sapiens
aacctcagagcacct

SEQ ID NO: 35730 - DNA, 15 bp, Homo sapiens
aaacctcagagcacc

SEQ ID NO: 35731 - DNA, 15 bp, Homo sapiens
caaacctcagagcac

SEQ ID NO: 35732 - DNA, 15 bp, Homo sapiens
tcaaacctcagagca

SEQ ID NO: 35733 - DNA, 15 bp, Homo sapiens
gtcaaacctcagagc

SEQ ID NO: 35734 - DNA, 15 bp, Homo sapiens
tgtcaaacctcagag

SEQ ID NO: 35735 - DNA, 15 bp, Homo sapiens
ttgtcaaacctcaga

SEQ ID NO: 35736 - DNA, 15 bp, Homo sapiens
gttgtcaaacctcag

SEQ ID NO: 35737 - DNA, 15 bp, Homo sapiens
agttgtcaaacctca

SEQ ID NO: 35738 - DNA, 15 bp, Homo sapiens
cagttgtcaaacctc

SEQ ID NO: 35739 - DNA, 15 bp, Homo sapiens
gcagttgtcaaacct

SEQ ID NO: 35740 - DNA, 15 bp, Homo sapiens
tgcagttgtcaaacc

SEQ ID NO: 35741 - DNA, 15 bp, Homo sapiens
ctgcagttgtcaaac

SEQ ID NO: 35742 - DNA, 15 bp, Homo sapiens
actgcagttgtcaaa

SEQ ID NO: 35743 - DNA, 15 bp, Homo sapiens
tactgcagttgtcaa

SEQ ID NO: 35744 - DNA, 15 bp, Homo sapiens
ctactgcagttgtca

SEQ ID NO: 35745 - DNA, 15 bp, Homo sapiens
tctactgcagttgtc

SEQ ID NO: 35746 - DNA, 15 bp, Homo sapiens
ctctactgcagttgt

SEQ ID NO: 35747 - DNA, 15 bp, Homo sapiens
tctctactgcagttg

SEQ ID NO: 35748 - DNA, 15 bp, Homo sapiens
ctctctactgcagtt

SEQ ID NO: 35749 - DNA, 15 bp, Homo sapiens
gctctctactgcagt

SEQ ID NO: 35750 - DNA, 15 bp, Homo sapiens
ggctctctactgcag

SEQ ID NO: 35751 - DNA, 15 bp, Homo sapiens
aggctctctactgca

SEQ ID NO: 35752 - DNA, 15 bp, Homo sapiens
taggctctctactgc

SEQ ID NO: 35753 - DNA, 15 bp, Homo sapiens
ttaggctctctactg

SEQ ID NO: 35754 - DNA, 15 bp, Homo sapiens
attaggctctctact

SEQ ID NO: 35755 - DNA, 15 bp, Homo sapiens
cattaggctctctac

SEQ ID NO: 35756 - DNA, 15 bp, Homo sapiens
gcattaggctctcta

SEQ ID NO: 35757 - DNA, 15 bp, Homo sapiens
agcattaggctctct

SEQ ID NO: 35758 - DNA, 15 bp, Homo sapiens
tagcattaggctctc

SEQ ID NO: 35759 - DNA, 15 bp, Homo sapiens
ttagcattaggctct

SEQ ID NO: 35760 - DNA, 15 bp, Homo sapiens
gttagcattaggctc

SEQ ID NO: 35761 - DNA, 15 bp, Homo sapiens
tgttagcattaggct

SEQ ID NO: 35762 - DNA, 15 bp, Homo sapiens
ctgttagcattaggc

SEQ ID NO: 35763 - DNA, 15 bp, Homo sapiens
actgttagcattagg

SEQ ID NO: 35764 - DNA, 15 bp, Homo sapiens
cactgttagcattag

SEQ ID NO: 35765 - DNA, 15 bp, Homo sapiens
acactgttagcatta

SEQ ID NO: 35766 - DNA, 15 bp, Homo sapiens
tacactgttagcatt

SEQ ID NO: 35767 - DNA, 15 bp, Homo sapiens
ctacactgttagcat

SEQ ID NO: 35768 - DNA, 15 bp, Homo sapiens
tctacactgttagca

SEQ ID NO: 35769 - DNA, 15 bp, Homo sapiens
ctctacactgttagc

SEQ ID NO: 35770 - DNA, 15 bp, Homo sapiens
actctacactgttag

SEQ ID NO: 35771 - DNA, 15 bp, Homo sapiens
gactctacactgtta

SEQ ID NO: 35772 - DNA, 15 bp, Homo sapiens
tgactctacactgtt

SEQ ID NO: 35773 - DNA, 15 bp, Homo sapiens
gtgactctacactgt

SEQ ID NO: 35774 - DNA, 15 bp, Homo sapiens
tgtgactctacactg

SEQ ID NO: 35775 - DNA, 15 bp, Homo sapiens
atgtgactctacact

SEQ ID NO: 35776 - DNA, 15 bp, Homo sapiens
catgtgactctacac

SEQ ID NO: 35777 - DNA, 15 bp, Homo sapiens
acatgtgactctaca

SEQ ID NO: 35778 - DNA, 15 bp, Homo sapiens
cacatgtgactctac

SEQ ID NO: 35779 - DNA, 15 bp, Homo sapiens
tcacatgtgactcta

SEQ ID NO: 35780 - DNA, 15 bp, Homo sapiens
atcacatgtgactct

SEQ ID NO: 35781 - DNA, 15 bp, Homo sapiens
catcacatgtgactc

SEQ ID NO: 35782 - DNA, 15 bp, Homo sapiens
ccatcacatgtgact

SEQ ID NO: 35783 - DNA, 15 bp, Homo sapiens
cccatcacatgtgac

SEQ ID NO: 35784 - DNA, 15 bp, Homo sapiens
tcccatcacatgtga

SEQ ID NO: 35785 - DNA, 15 bp, Homo sapiens
ttcccatcacatgtg

SEQ ID NO: 35786 - DNA, 15 bp, Homo sapiens
cttcccatcacatgt

SEQ ID NO: 35787 - DNA, 15 bp, Homo sapiens
gcttcccatcacatg

SEQ ID NO: 35788 - DNA, 15 bp, Homo sapiens
tgcttcccatcacat

SEQ ID NO: 35789 - DNA, 15 bp, Homo sapiens
atgcttcccatcaca

SEQ ID NO: 35790 - DNA, 15 bp, Homo sapiens
gatgcttcccatcac

SEQ ID NO: 35791 - DNA, 15 bp, Homo sapiens
tgatgcttcccatca

SEQ ID NO: 35792 - DNA, 15 bp, Homo sapiens
ctgatgcttcccatc

SEQ ID NO: 35793 - DNA, 15 bp, Homo sapiens
cctgatgcttcccat

SEQ ID NO: 35794 - DNA, 15 bp, Homo sapiens
acctgatgcttccca

SEQ ID NO: 35795 - DNA, 15 bp, Homo sapiens
tacctgatgcttccc

SEQ ID NO: 35796 - DNA, 15 bp, Homo sapiens
ctacctgatgcttcc

SEQ ID NO: 35797 - DNA, 15 bp, Homo sapiens
cctacctgatgcttc

SEQ ID NO: 35798 - DNA, 15 bp, Homo sapiens
acctacctgatgctt

SEQ ID NO: 35799 - DNA, 15 bp, Homo sapiens
tacctacctgatgct

SEQ ID NO: 35800 - DNA, 15 bp, Homo sapiens
ctacctacctgatgc

SEQ ID NO: 35801 - DNA, 15 bp, Homo sapiens
gctacctacctgatg

SEQ ID NO: 35802 - DNA, 15 bp, Homo sapiens
tgctacctacctgat

SEQ ID NO: 35803 - DNA, 15 bp, Homo sapiens
ctgctacctacctga

SEQ ID NO: 35804 - DNA, 15 bp, Homo sapiens
actgctacctacctg

SEQ ID NO: 35805 - DNA, 15 bp, Homo sapiens
aactgctacctacct

SEQ ID NO: 35806 - DNA, 15 bp, Homo sapiens
aaactgctacctacc

SEQ ID NO: 35807 - DNA, 15 bp, Homo sapiens
caaactgctacctac

SEQ ID NO: 35808 - DNA, 15 bp, Homo sapiens
gcaaactgctaccta

SEQ ID NO: 35809 - DNA, 15 bp, Homo sapiens
tgcaaactgctacct

SEQ ID NO: 35810 - DNA, 15 bp, Homo sapiens
ctgcaaactgctacc

SEQ ID NO: 35811 - DNA, 15 bp, Homo sapiens
cctgcaaactgctac

SEQ ID NO: 35812 - DNA, 15 bp, Homo sapiens
tcctgcaaactgcta

SEQ ID NO: 35813 - DNA, 15 bp, Homo sapiens
ctcctgcaaactgct

SEQ ID NO: 35814 - DNA, 15 bp, Homo sapiens
gctcctgcaaactgc

SEQ ID NO: 35815 - DNA, 15 bp, Homo sapiens
tgctcctgcaaactg

SEQ ID NO: 35816 - DNA, 15 bp, Homo sapiens
gtgctcctgcaaact

SEQ ID NO: 35817 - DNA, 15 bp, Homo sapiens
agtgctcctgcaaac

SEQ ID NO: 35818 - DNA, 15 bp, Homo sapiens
cagtgctcctgcaaa

SEQ ID NO: 35819 - DNA, 15 bp, Homo sapiens
tcagtgctcctgcaa

SEQ ID NO: 35820 - DNA, 15 bp, Homo sapiens
atcagtgctcctgca

SEQ ID NO: 35821 - DNA, 15 bp, Homo sapiens
aatcagtgctcctgc

SEQ ID NO: 35822 - DNA, 15 bp, Homo sapiens
gaatcagtgctcctg

SEQ ID NO: 35823 - DNA, 15 bp, Homo sapiens
agaatcagtgctcct

SEQ ID NO: 35824 - DNA, 15 bp, Homo sapiens
cagaatcagtgctcc

SEQ ID NO: 35825 - DNA, 15 bp, Homo sapiens
tcagaatcagtgctc

SEQ ID NO: 35826 - DNA, 15 bp, Homo sapiens
ctcagaatcagtgct

SEQ ID NO: 35827 - DNA, 15 bp, Homo sapiens
cctcagaatcagtgc

SEQ ID NO: 35828 - DNA, 15 bp, Homo sapiens
ccctcagaatcagtg

SEQ ID NO: 35829 - DNA, 15 bp, Homo sapiens
tccctcagaatcagt

SEQ ID NO: 35830 - DNA, 15 bp, Homo sapiens
gtccctcagaatcag

SEQ ID NO: 35831 - DNA, 15 bp, Homo sapiens
tgtccctcagaatca

SEQ ID NO: 35832 - DNA, 15 bp, Homo sapiens
gtgtccctcagaatc

SEQ ID NO: 35833 - DNA, 15 bp, Homo sapiens
agtgtccctcagaat

SEQ ID NO: 35834 - DNA, 15 bp, Homo sapiens
tagtgtccctcagaa

SEQ ID NO: 35835 - DNA, 15 bp, Homo sapiens
ttagtgtccctcaga

SEQ ID NO: 35836 - DNA, 15 bp, Homo sapiens
gttagtgtccctcag

SEQ ID NO: 35837 - DNA, 15 bp, Homo sapiens
agttagtgtccctca

SEQ ID NO: 35838 - DNA, 15 bp, Homo sapiens
cagttagtgtccctc

SEQ ID NO: 35839 - DNA, 15 bp, Homo sapiens
ccagttagtgtccct

SEQ ID NO: 35840 - DNA, 15 bp, Homo sapiens
cccagttagtgtccc

SEQ ID NO: 35841 - DNA, 15 bp, Homo sapiens
gcccagttagtgtcc

SEQ ID NO: 35842 - DNA, 15 bp, Homo sapiens
ggcccagttagtgtc

SEQ ID NO: 35843 - DNA, 15 bp, Homo sapiens
aggcccagttagtgt

SEQ ID NO: 35844 - DNA, 15 bp, Homo sapiens
taggcccagttagtg

SEQ ID NO: 35845 - DNA, 15 bp, Homo sapiens
ttaggcccagttagt

SEQ ID NO: 35846 - DNA, 15 bp, Homo sapiens
cttaggcccagttag

SEQ ID NO: 35847 - DNA, 15 bp, Homo sapiens
tcttaggcccagtta

SEQ ID NO: 35848 - DNA, 15 bp, Homo sapiens
ttcttaggcccagtt

SEQ ID NO: 35849 - DNA, 15 bp, Homo sapiens
gttcttaggcccagt

SEQ ID NO: 35850 - DNA, 15 bp, Homo sapiens
tgttcttaggcccag

SEQ ID NO: 35851 - DNA, 15 bp, Homo sapiens
ctgttcttaggccca

SEQ ID NO: 35852 - DNA, 15 bp, Homo sapiens
gctgttcttaggccc

SEQ ID NO: 35853 - DNA, 15 bp, Homo sapiens
agctgttcttaggcc

SEQ ID NO: 35854 - DNA, 15 bp, Homo sapiens
tagctgttcttaggc

SEQ ID NO: 35855 - DNA, 15 bp, Homo sapiens
gtagctgttcttagg

SEQ ID NO: 35856 - DNA, 15 bp, Homo sapiens
agtagctgttcttag

SEQ ID NO: 35857 - DNA, 15 bp, Homo sapiens
cagtagctgttctta

SEQ ID NO: 35858 - DNA, 15 bp, Homo sapiens
ccagtagctgttctt

SEQ ID NO: 35859 - DNA, 15 bp, Homo sapiens
gccagtagctgttct

SEQ ID NO: 35860 - DNA, 15 bp, Homo sapiens
agccagtagctgttc

SEQ ID NO: 35861 - DNA, 15 bp, Homo sapiens
cagccagtagctgtt

SEQ ID NO: 35862 - DNA, 15 bp, Homo sapiens
acagccagtagctgt

SEQ ID NO: 35863 - DNA, 15 bp, Homo sapiens
gacagccagtagctg

SEQ ID NO: 35864 - DNA, 15 bp, Homo sapiens
tgacagccagtagct

SEQ ID NO: 35865 - DNA, 15 bp, Homo sapiens
atgacagccagtagc

SEQ ID NO: 35866 - DNA, 15 bp, Homo sapiens
catgacagccagtag

SEQ ID NO: 35867 - DNA, 15 bp, Homo sapiens
tcatgacagccagta

SEQ ID NO: 35868 - DNA, 15 bp, Homo sapiens
ctcatgacagccagt

SEQ ID NO: 35869 - DNA, 15 bp, Homo sapiens
cctcatgacagccag

SEQ ID NO: 35870 - DNA, 15 bp, Homo sapiens
tcctcatgacagcca

SEQ ID NO: 35871 - DNA, 15 bp, Homo sapiens
ttcctcatgacagcc

SEQ ID NO: 35872 - DNA, 15 bp, Homo sapiens
attcctcatgacagc

SEQ ID NO: 35873 - DNA, 15 bp, Homo sapiens
tattcctcatgacag

SEQ ID NO: 35874 - DNA, 15 bp, Homo sapiens
ttattcctcatgaca

SEQ ID NO: 35875 - DNA, 15 bp, Homo sapiens
gttattcctcatgac

SEQ ID NO: 35876 - DNA, 15 bp, Homo sapiens
agttattcctcatga

SEQ ID NO: 35877 - DNA, 15 bp, Homo sapiens
tagttattcctcatg

SEQ ID NO: 35878 - DNA, 15 bp, Homo sapiens
ctagttattcctcat

SEQ ID NO: 35879 - DNA, 15 bp, Homo sapiens
cctagttattcctca

SEQ ID NO: 35880 - DNA, 15 bp, Homo sapiens
tcctagttattcctc

SEQ ID NO: 35881 - DNA, 15 bp, Homo sapiens
ctcctagttattcct

SEQ ID NO: 35882 - DNA, 15 bp, Homo sapiens
gctcctagttattcc

SEQ ID NO: 35883 - DNA, 15 bp, Homo sapiens
agctcctagttattc

SEQ ID NO: 35884 - DNA, 15 bp, Homo sapiens
tagctcctagttatt

SEQ ID NO: 35885 - DNA, 15 bp, Homo sapiens
ctagctcctagttat

SEQ ID NO: 35886 - DNA, 15 bp, Homo sapiens
gctagctcctagtta

SEQ ID NO: 35887 - DNA, 15 bp, Homo sapiens
ggctagctcctagtt

SEQ ID NO: 35888 - DNA, 15 bp, Homo sapiens
tggctagctcctagt

SEQ ID NO: 35889 - DNA, 15 bp, Homo sapiens
atggctagctcctag

SEQ ID NO: 35890 - DNA, 15 bp, Homo sapiens
tatggctagctccta

SEQ ID NO: 35891 - DNA, 15 bp, Homo sapiens
ctatggctagctcct

SEQ ID NO: 35892 - DNA, 15 bp, Homo sapiens
tctatggctagctcc

SEQ ID NO: 35893 - DNA, 15 bp, Homo sapiens
ctctatggctagctc

SEQ ID NO: 35894 - DNA, 15 bp, Homo sapiens
cctctatggctagct

SEQ ID NO: 35895 - DNA, 15 bp, Homo sapiens
ccctctatggctagc

SEQ ID NO: 35896 - DNA, 15 bp, Homo sapiens
cccctctatggctag

SEQ ID NO: 35897 - DNA, 15 bp, Homo sapiens
acccctctatggcta

SEQ ID NO: 35898 - DNA, 15 bp, Homo sapiens
tacccctctatggct

SEQ ID NO: 35899 - DNA, 15 bp, Homo sapiens
ctacccctctatggc

SEQ ID NO: 35900 - DNA, 15 bp, Homo sapiens
gctacccctctatgg

SEQ ID NO: 35901 - DNA, 15 bp, Homo sapiens
tgctacccctctatg

SEQ ID NO: 35902 - DNA, 15 bp, Homo sapiens
ctgctacccctctat

SEQ ID NO: 35903 - DNA, 15 bp, Homo sapiens
actgctacccctcta

SEQ ID NO: 35904 - DNA, 15 bp, Homo sapiens
cactgctacccctct

SEQ ID NO: 35905 - DNA, 15 bp, Homo sapiens
tcactgctacccctc

SEQ ID NO: 35906 - DNA, 15 bp, Homo sapiens
ttcactgctacccct

SEQ ID NO: 35907 - DNA, 15 bp, Homo sapiens
attcactgctacccc

SEQ ID NO: 35908 - DNA, 15 bp, Homo sapiens
gattcactgctaccc

SEQ ID NO: 35909 - DNA, 15 bp, Homo sapiens
tgattcactgctacc

SEQ ID NO: 35910 - DNA, 15 bp, Homo sapiens
atgattcactgctac

SEQ ID NO: 35911 - DNA, 15 bp, Homo sapiens
aatgattcactgcta

SEQ ID NO: 35912 - DNA, 15 bp, Homo sapiens
aaatgattcactgct

SEQ ID NO: 35913 - DNA, 15 bp, Homo sapiens
gaaatgattcactgc

SEQ ID NO: 35914 - DNA, 15 bp, Homo sapiens
agaaatgattcactg

SEQ ID NO: 35915 - DNA, 15 bp, Homo sapiens
gagaaatgattcact

SEQ ID NO: 35916 - DNA, 15 bp, Homo sapiens
agagaaatgattcac

SEQ ID NO: 35917 - DNA, 15 bp, Homo sapiens
tagagaaatgattca

SEQ ID NO: 35918 - DNA, 15 bp, Homo sapiens
ctagagaaatgattc

SEQ ID NO: 35919 - DNA, 15 bp, Homo sapiens
gctagagaaatgatt

SEQ ID NO: 35920 - DNA, 15 bp, Homo sapiens
cgctagagaaatgat

SEQ ID NO: 35921 - DNA, 15 bp, Homo sapiens
tcgctagagaaatga

SEQ ID NO: 35922 - DNA, 15 bp, Homo sapiens
atcgctagagaaatg

SEQ ID NO: 35923 - DNA, 15 bp, Homo sapiens
catcgctagagaaat

SEQ ID NO: 35924 - DNA, 15 bp, Homo sapiens
acatcgctagagaaa

SEQ ID NO: 35925 - DNA, 15 bp, Homo sapiens
tacatcgctagagaa

SEQ ID NO: 35926 - DNA, 15 bp, Homo sapiens
ttacatcgctagaga

SEQ ID NO: 35927 - DNA, 15 bp, Homo sapiens
tttacatcgctagag

SEQ ID NO: 35928 - DNA, 15 bp, Homo sapiens
atttacatcgctaga

SEQ ID NO: 35929 - DNA, 15 bp, Homo sapiens
gatttacatcgctag

SEQ ID NO: 35930 - DNA, 15 bp, Homo sapiens
agatttacatcgcta

SEQ ID NO: 35931 - DNA, 15 bp, Homo sapiens
aagatttacatcgct

SEQ ID NO: 35932 - DNA, 15 bp, Homo sapiens
caagatttacatcgc

SEQ ID NO: 35933 - DNA, 15 bp, Homo sapiens
gcaagatttacatcg

SEQ ID NO: 35934 - DNA, 15 bp, Homo sapiens
agcaagatttacatc

SEQ ID NO: 35935 - DNA, 15 bp, Homo sapiens
gagcaagatttacat

SEQ ID NO: 35936 - DNA, 15 bp, Homo sapiens
tgagcaagatttaca

SEQ ID NO: 35937 - DNA, 15 bp, Homo sapiens
ttgagcaagatttac

SEQ ID NO: 35938 - DNA, 15 bp, Homo sapiens
attgagcaagattta

SEQ ID NO: 35939 - DNA, 15 bp, Homo sapiens
aattgagcaagattt

SEQ ID NO: 35940 - DNA, 15 bp, Homo sapiens
aaattgagcaagatt

SEQ ID NO: 35941 - DNA, 15 bp, Homo sapiens
taaattgagcaagat

SEQ ID NO: 35942 - DNA, 15 bp, Homo sapiens
ataaattgagcaaga

SEQ ID NO: 35943 - DNA, 15 bp, Homo sapiens
aataaattgagcaag

SEQ ID NO: 35944 - DNA, 15 bp, Homo sapiens
gaataaattgagcaa

SEQ ID NO: 35945 - DNA, 15 bp, Homo sapiens
agaataaattgagca

SEQ ID NO: 35946 - DNA, 15 bp, Homo sapiens
cagaataaattgagc

SEQ ID NO: 35947 - DNA, 15 bp, Homo sapiens
acagaataaattgag

SEQ ID NO: 35948 - DNA, 15 bp, Homo sapiens
gacagaataaattga

SEQ ID NO: 35949 - DNA, 15 bp, Homo sapiens
agacagaataaattg

SEQ ID NO: 35950 - DNA, 15 bp, Homo sapiens
tagacagaataaatt

SEQ ID NO: 35951 - DNA, 15 bp, Homo sapiens
atagacagaataaat

SEQ ID NO: 35952 - DNA, 15 bp, Homo sapiens
tatagacagaataaa

SEQ ID NO: 35953 - DNA, 15 bp, Homo sapiens
atatagacagaataa

SEQ ID NO: 35954 - DNA, 15 bp, Homo sapiens
tatatagacagaata

SEQ ID NO: 35955 - DNA, 15 bp, Homo sapiens
ttatatagacagaat

SEQ ID NO: 35956 - DNA, 15 bp, Homo sapiens
gttatatagacagaa

SEQ ID NO: 35957 - DNA, 15 bp, Homo sapiens
agttatatagacaga

SEQ ID NO: 35958 - DNA, 15 bp, Homo sapiens
gagttatatagacag

SEQ ID NO: 35959 - DNA, 15 bp, Homo sapiens
tgagttatatagaca

SEQ ID NO: 35960 - DNA, 15 bp, Homo sapiens
ttgagttatatagac

SEQ ID NO: 35961 - DNA, 15 bp, Homo sapiens
attgagttatataga

SEQ ID NO: 35962 - DNA, 15 bp, Homo sapiens
tattgagttatatag

SEQ ID NO: 35963 - DNA, 15 bp, Homo sapiens
atattgagttatata

SEQ ID NO: 35964 - DNA, 15 bp, Homo sapiens
aatattgagttatat

SEQ ID NO: 35965 - DNA, 15 bp, Homo sapiens
taatattgagttata

SEQ ID NO: 35966 - DNA, 15 bp, Homo sapiens
gtaatattgagttat

SEQ ID NO: 35967 - DNA, 15 bp, Homo sapiens
agtaatattgagtta

SEQ ID NO: 35968 - DNA, 15 bp, Homo sapiens
cagtaatattgagtt

SEQ ID NO: 35969 - DNA, 15 bp, Homo sapiens
tcagtaatattgagt

SEQ ID NO: 35970 - DNA, 15 bp, Homo sapiens
ttcagtaatattgag

SEQ ID NO: 35971 - DNA, 15 bp, Homo sapiens
cttcagtaatattga

SEQ ID NO: 35972 - DNA, 15 bp, Homo sapiens
acttcagtaatattg

SEQ ID NO: 35973 - DNA, 15 bp, Homo sapiens
aacttcagtaatatt

SEQ ID NO: 35974 - DNA, 15 bp, Homo sapiens
aaacttcagtaatat

SEQ ID NO: 35975 - DNA, 15 bp, Homo sapiens
caaacttcagtaata

SEQ ID NO: 35976 - DNA, 15 bp, Homo sapiens
gcaaacttcagtaat

SEQ ID NO: 35977 - DNA, 15 bp, Homo sapiens
ggcaaacttcagtaa

SEQ ID NO: 35978 - DNA, 15 bp, Homo sapiens
aggcaaacttcagta

SEQ ID NO: 35979 - DNA, 15 bp, Homo sapiens
taggcaaacttcagt

SEQ ID NO: 35980 - DNA, 15 bp, Homo sapiens
ttaggcaaacttcag

SEQ ID NO: 35981 - DNA, 15 bp, Homo sapiens
tttaggcaaacttca

SEQ ID NO: 35982 - DNA, 15 bp, Homo sapiens
ctttaggcaaacttc

SEQ ID NO: 35983 - DNA, 15 bp, Homo sapiens
gctttaggcaaactt

SEQ ID NO: 35984 - DNA, 15 bp, Homo sapiens
tgctttaggcaaact

SEQ ID NO: 35985 - DNA, 15 bp, Homo sapiens
ctgctttaggcaaac

SEQ ID NO: 35986 - DNA, 15 bp, Homo sapiens
tctgctttaggcaaa

SEQ ID NO: 35987 - DNA, 15 bp, Homo sapiens
ttctgctttaggcaa

SEQ ID NO: 35988 - DNA, 15 bp, Homo sapiens
attctgctttaggca

SEQ ID NO: 35989 - DNA, 15 bp, Homo sapiens
tattctgctttaggc

SEQ ID NO: 35990 - DNA, 15 bp, Homo sapiens
gtattctgctttagg

SEQ ID NO: 35991 - DNA, 15 bp, Homo sapiens
tgtattctgctttag

SEQ ID NO: 35992 - DNA, 15 bp, Homo sapiens
gtgtattctgcttta

SEQ ID NO: 35993 - DNA, 15 bp, Homo sapiens
ggtgtattctgcttt

SEQ ID NO: 35994 - DNA, 15 bp, Homo sapiens
aggtgtattctgctt

SEQ ID NO: 35995 - DNA, 15 bp, Homo sapiens
caggtgtattctgct

SEQ ID NO: 35996 - DNA, 15 bp, Homo sapiens
ccaggtgtattctgc

SEQ ID NO: 35997 - DNA, 15 bp, Homo sapiens
tccaggtgtattctg

SEQ ID NO: 35998 - DNA, 15 bp, Homo sapiens
atccaggtgtattct

SEQ ID NO: 35999 - DNA, 15 bp, Homo sapiens
gatccaggtgtattc

SEQ ID NO: 36000 - DNA, 15 bp, Homo sapiens
tgatccaggtgtatt

SEQ ID NO: 36001 - DNA, 15 bp, Homo sapiens
atgatccaggtgtat

SEQ ID NO: 36002 - DNA, 15 bp, Homo sapiens
tatgatccaggtgta

SEQ ID NO: 36003 - DNA, 15 bp, Homo sapiens
gtatgatccaggtgt

SEQ ID NO: 36004 - DNA, 15 bp, Homo sapiens
tgtatgatccaggtg

SEQ ID NO: 36005 - DNA, 15 bp, Homo sapiens
ctgtatgatccaggt

SEQ ID NO: 36006 - DNA, 15 bp, Homo sapiens
gctgtatgatccagg

SEQ ID NO: 36007 - DNA, 15 bp, Homo sapiens
tgctgtatgatccag

SEQ ID NO: 36008 - DNA, 15 bp, Homo sapiens
atgctgtatgatcca

SEQ ID NO: 36009 - DNA, 15 bp, Homo sapiens
aatgctgtatgatcc

SEQ ID NO: 36010 - DNA, 15 bp, Homo sapiens
aaatgctgtatgatc

SEQ ID NO: 36011 - DNA, 15 bp, Homo sapiens
taaatgctgtatgat

SEQ ID NO: 36012 - DNA, 15 bp, Homo sapiens
ataaatgctgtatga

SEQ ID NO: 36013 - DNA, 15 bp, Homo sapiens
cataaatgctgtatg

SEQ ID NO: 36014 - DNA, 15 bp, Homo sapiens
tcataaatgctgtat

SEQ ID NO: 36015 - DNA, 15 bp, Homo sapiens
ctcataaatgctgta

SEQ ID NO: 36016 - DNA, 15 bp, Homo sapiens
tctcataaatgctgt

SEQ ID NO: 36017 - DNA, 15 bp, Homo sapiens
ctctcataaatgctg

SEQ ID NO: 36018 - DNA, 15 bp, Homo sapiens
tctctcataaatgct

SEQ ID NO: 36019 - DNA, 15 bp, Homo sapiens
gtctctcataaatgc

SEQ ID NO: 36020 - DNA, 15 bp, Homo sapiens
agtctctcataaatg

SEQ ID NO: 36021 - DNA, 15 bp, Homo sapiens
cagtctctcataaat

SEQ ID NO: 36022 - DNA, 15 bp, Homo sapiens
ccagtctctcataaa

SEQ ID NO: 36023 - DNA, 15 bp, Homo sapiens
gccagtctctcataa

SEQ ID NO: 36024 - DNA, 15 bp, Homo sapiens
agccagtctctcata

SEQ ID NO: 36025 - DNA, 15 bp, Homo sapiens
cagccagtctctcat

SEQ ID NO: 36026 - DNA, 15 bp, Homo sapiens
ccagccagtctctca

SEQ ID NO: 36027 - DNA, 15 bp, Homo sapiens
cccagccagtctctc

SEQ ID NO: 36028 - DNA, 15 bp, Homo sapiens
gcccagccagtctct

SEQ ID NO: 36029 - DNA, 15 bp, Homo sapiens
agcccagccagtctc

SEQ ID NO: 36030 - DNA, 15 bp, Homo sapiens
cagcccagccagtct

SEQ ID NO: 36031 - DNA, 15 bp, Homo sapiens
acagcccagccagtc

SEQ ID NO: 36032 - DNA, 15 bp, Homo sapiens
gacagcccagccagt

SEQ ID NO: 36033 - DNA, 15 bp, Homo sapiens
tgacagcccagccag

SEQ ID NO: 36034 - DNA, 15 bp, Homo sapiens
ctgacagcccagcca

SEQ ID NO: 36035 - DNA, 15 bp, Homo sapiens
cctgacagcccagcc

SEQ ID NO: 36036 - DNA, 15 bp, Homo sapiens
gcctgacagcccagc

SEQ ID NO: 36037 - DNA, 15 bp, Homo sapiens
ggcctgacagcccag

SEQ ID NO: 36038 - DNA, 15 bp, Homo sapiens
gggcctgacagccca

SEQ ID NO: 36039 - DNA, 15 bp, Homo sapiens
agggcctgacagccc

SEQ ID NO: 36040 - DNA, 15 bp, Homo sapiens
gagggcctgacagcc

SEQ ID NO: 36041 - DNA, 15 bp, Homo sapiens
ggagggcctgacagc

SEQ ID NO: 36042 - DNA, 15 bp, Homo sapiens
aggagggcctgacag

SEQ ID NO: 36043 - DNA, 15 bp, Homo sapiens
caggagggcctgaca

SEQ ID NO: 36044 - DNA, 15 bp, Homo sapiens
acaggagggcctgac

SEQ ID NO: 36045 - DNA, 15 bp, Homo sapiens
aacaggagggcctga

SEQ ID NO: 36046 - DNA, 15 bp, Homo sapiens
taacaggagggcctg

SEQ ID NO: 36047 - DNA, 15 bp, Homo sapiens
gtaacaggagggcct

SEQ ID NO: 36048 - DNA, 15 bp, Homo sapiens
agtaacaggagggcc

SEQ ID NO: 36049 - DNA, 15 bp, Homo sapiens
aagtaacaggagggc

SEQ ID NO: 36050 - DNA, 15 bp, Homo sapiens
aaagtaacaggaggg

SEQ ID NO: 36051 - DNA, 15 bp, Homo sapiens
taaagtaacaggagg

SEQ ID NO: 36052 - DNA, 15 bp, Homo sapiens
ataaagtaacaggag

SEQ ID NO: 36053 - DNA, 15 bp, Homo sapiens
gataaagtaacagga

SEQ ID NO: 36054 - DNA, 15 bp, Homo sapiens
agataaagtaacagg

SEQ ID NO: 36055 - DNA, 15 bp, Homo sapiens
gagataaagtaacag

SEQ ID NO: 36056 - DNA, 15 bp, Homo sapiens
agagataaagtaaca

SEQ ID NO: 36057 - DNA, 15 bp, Homo sapiens
cagagataaagtaac

SEQ ID NO: 36058 - DNA, 15 bp, Homo sapiens
gcagagataaagtaa

SEQ ID NO: 36059 - DNA, 15 bp, Homo sapiens
tgcagagataaagta

SEQ ID NO: 36060 - DNA, 15 bp, Homo sapiens
atgcagagataaagt

SEQ ID NO: 36061 - DNA, 15 bp, Homo sapiens
catgcagagataaag

SEQ ID NO: 36062 - DNA, 15 bp, Homo sapiens
acatgcagagataaa

SEQ ID NO: 36063 - DNA, 15 bp, Homo sapiens
cacatgcagagataa

SEQ ID NO: 36064 - DNA, 15 bp, Homo sapiens
tcacatgcagagata

SEQ ID NO: 36065 - DNA, 15 bp, Homo sapiens
gtcacatgcagagat

SEQ ID NO: 36066 - DNA, 15 bp, Homo sapiens
ggtcacatgcagaga

SEQ ID NO: 36067 - DNA, 15 bp, Homo sapiens
gggtcacatgcagag

SEQ ID NO: 36068 - DNA, 15 bp, Homo sapiens
agggtcacatgcaga

SEQ ID NO: 36069 - DNA, 15 bp, Homo sapiens
gagggtcacatgcag

SEQ ID NO: 36070 - DNA, 15 bp, Homo sapiens
agagggtcacatgca

SEQ ID NO: 36071 - DNA, 15 bp, Homo sapiens
aagagggtcacatgc

SEQ ID NO: 36072 - DNA, 15 bp, Homo sapiens
taagagggtcacatg

SEQ ID NO: 36073 - DNA, 15 bp, Homo sapiens
ctaagagggtcacat

SEQ ID NO: 36074 - DNA, 15 bp, Homo sapiens
gctaagagggtcaca

SEQ ID NO: 36075 - DNA, 15 bp, Homo sapiens
agctaagagggtcac

SEQ ID NO: 36076 - DNA, 15 bp, Homo sapiens
gagctaagagggtca

SEQ ID NO: 36077 - DNA, 15 bp, Homo sapiens
ggagctaagagggtc

SEQ ID NO: 36078 - DNA, 15 bp, Homo sapiens
cggagctaagagggt

SEQ ID NO: 36079 - DNA, 15 bp, Homo sapiens
gcggagctaagaggg

SEQ ID NO: 36080 - DNA, 15 bp, Homo sapiens
cgcggagctaagagg

SEQ ID NO: 36081 - DNA, 15 bp, Homo sapiens
ccgcggagctaagag

SEQ ID NO: 36082 - DNA, 15 bp, Homo sapiens
tccgcggagctaaga

SEQ ID NO: 36083 - DNA, 15 bp, Homo sapiens
atccgcggagctaag

SEQ ID NO: 36084 - DNA, 15 bp, Homo sapiens
aatccgcggagctaa

SEQ ID NO: 36085 - DNA, 15 bp, Homo sapiens
taatccgcggagcta

SEQ ID NO: 36086 - DNA, 15 bp, Homo sapiens
ttaatccgcggagct

SEQ ID NO: 36087 - DNA, 15 bp, Homo sapiens
gttaatccgcggagc

SEQ ID NO: 36088 - DNA, 15 bp, Homo sapiens
agttaatccgcggag

SEQ ID NO: 36089 - DNA, 15 bp, Homo sapiens
gagttaatccgcgga

SEQ ID NO: 36090 - DNA, 15 bp, Homo sapiens
ggagttaatccgcgg

SEQ ID NO: 36091 - DNA, 15 bp, Homo sapiens
aggagttaatccgcg

SEQ ID NO: 36092 - DNA, 15 bp, Homo sapiens
caggagttaatccgc

SEQ ID NO: 36093 - DNA, 15 bp, Homo sapiens
acaggagttaatccg

SEQ ID NO: 36094 - DNA, 15 bp, Homo sapiens
gacaggagttaatcc

SEQ ID NO: 36095 - DNA, 15 bp, Homo sapiens
ggacaggagttaatc

SEQ ID NO: 36096 - DNA, 15 bp, Homo sapiens
aggacaggagttaat

SEQ ID NO: 36097 - DNA, 15 bp, Homo sapiens
gaggacaggagttaa

SEQ ID NO: 36098 - DNA, 15 bp, Homo sapiens
tgaggacaggagtta

SEQ ID NO: 36099 - DNA, 15 bp, Homo sapiens
atgaggacaggagtt

SEQ ID NO: 36100 - DNA, 15 bp, Homo sapiens
aatgaggacaggagt

SEQ ID NO: 36101 - DNA, 15 bp, Homo sapiens
taatgaggacaggag

SEQ ID NO: 36102 - DNA, 15 bp, Homo sapiens
ttaatgaggacagga

SEQ ID NO: 36103 - DNA, 15 bp, Homo sapiens
cttaatgaggacagg

SEQ ID NO: 36104 - DNA, 15 bp, Homo sapiens
gcttaatgaggacag

SEQ ID NO: 36105 - DNA, 15 bp, Homo sapiens
ggcttaatgaggaca

SEQ ID NO: 36106 - DNA, 15 bp, Homo sapiens
aggcttaatgaggac

SEQ ID NO: 36107 - DNA, 15 bp, Homo sapiens
gaggcttaatgagga

SEQ ID NO: 36108 - DNA, 15 bp, Homo sapiens
tgaggcttaatgagg

SEQ ID NO: 36109 - DNA, 15 bp, Homo sapiens
gtgaggcttaatgag

SEQ ID NO: 36110 - DNA, 15 bp, Homo sapiens
tgtgaggcttaatga

SEQ ID NO: 36111 - DNA, 15 bp, Homo sapiens
gtgtgaggcttaatg

SEQ ID NO: 36112 - DNA, 15 bp, Homo sapiens
agtgtgaggcttaat

SEQ ID NO: 36113 - DNA, 15 bp, Homo sapiens
cagtgtgaggcttaa

SEQ ID NO: 36114 - DNA, 15 bp, Homo sapiens
acagtgtgaggctta

SEQ ID NO: 36115 - DNA, 15 bp, Homo sapiens
tacagtgtgaggctt

SEQ ID NO: 36116 - DNA, 15 bp, Homo sapiens
ctacagtgtgaggct

SEQ ID NO: 36117 - DNA, 15 bp, Homo sapiens
gctacagtgtgaggc

SEQ ID NO: 36118 - DNA, 15 bp, Homo sapiens
ggctacagtgtgagg

SEQ ID NO: 36119 - DNA, 15 bp, Homo sapiens
gggctacagtgtgag

SEQ ID NO: 36120 - DNA, 15 bp, Homo sapiens
ggggctacagtgtga

SEQ ID NO: 36121 - DNA, 15 bp, Homo sapiens
tggggctacagtgtg

SEQ ID NO: 36122 - DNA, 15 bp, Homo sapiens
atggggctacagtgt

SEQ ID NO: 36123 - DNA, 15 bp, Homo sapiens
aatggggctacagtg

SEQ ID NO: 36124 - DNA, 15 bp, Homo sapiens
aaatggggctacagt

SEQ ID NO: 36125 - DNA, 15 bp, Homo sapiens
aaaatggggctacag

SEQ ID NO: 36126 - DNA, 15 bp, Homo sapiens
gaaaatggggctaca

SEQ ID NO: 36127 - DNA, 15 bp, Homo sapiens
tgaaaatggggctac

SEQ ID NO: 36128 - DNA, 15 bp, Homo sapiens
ctgaaaatggggcta

SEQ ID NO: 36129 - DNA, 15 bp, Homo sapiens
tctgaaaatggggct

SEQ ID NO: 36130 - DNA, 15 bp, Homo sapiens
atctgaaaatggggc

SEQ ID NO: 36131 - DNA, 15 bp, Homo sapiens
gatctgaaaatgggg

SEQ ID NO: 36132 - DNA, 15 bp, Homo sapiens
tgatctgaaaatggg

SEQ ID NO: 36133 - DNA, 15 bp, Homo sapiens
ttgatctgaaaatgg

SEQ ID NO: 36134 - DNA, 15 bp, Homo sapiens
tttgatctgaaaatg

SEQ ID NO: 36135 - DNA, 15 bp, Homo sapiens
gtttgatctgaaaat

SEQ ID NO: 36136 - DNA, 15 bp, Homo sapiens
ggtttgatctgaaaa

SEQ ID NO: 36137 - DNA, 15 bp, Homo sapiens
aggtttgatctgaaa

SEQ ID NO: 36138 - DNA, 15 bp, Homo sapiens
caggtttgatctgaa

SEQ ID NO: 36139 - DNA, 15 bp, Homo sapiens
acaggtttgatctga

SEQ ID NO: 36140 - DNA, 15 bp, Homo sapiens
aacaggtttgatctg

SEQ ID NO: 36141 - DNA, 15 bp, Homo sapiens
aaacaggtttgatct

SEQ ID NO: 36142 - DNA, 15 bp, Homo sapiens
gaaacaggtttgatc

SEQ ID NO: 36143 - DNA, 15 bp, Homo sapiens
agaaacaggtttgat

SEQ ID NO: 36144 - DNA, 15 bp, Homo sapiens
gagaaacaggtttga

SEQ ID NO: 36145 - DNA, 15 bp, Homo sapiens
agagaaacaggtttg

SEQ ID NO: 36146 - DNA, 15 bp, Homo sapiens
aagagaaacaggttt

SEQ ID NO: 36147 - DNA, 15 bp, Homo sapiens
gaagagaaacaggtt

SEQ ID NO: 36148 - DNA, 15 bp, Homo sapiens
agaagagaaacaggt

SEQ ID NO: 36149 - DNA, 15 bp, Homo sapiens
cagaagagaaacagg

SEQ ID NO: 36150 - DNA, 15 bp, Homo sapiens
ccagaagagaaacag

SEQ ID NO: 36151 - DNA, 15 bp, Homo sapiens
accagaagagaaaca

SEQ ID NO: 36152 - DNA, 15 bp, Homo sapiens
taccagaagagaaac

SEQ ID NO: 36153 - DNA, 15 bp, Homo sapiens
ttaccagaagagaaa

SEQ ID NO: 36154 - DNA, 15 bp, Homo sapiens
tttaccagaagagaa

SEQ ID NO: 36155 - DNA, 15 bp, Homo sapiens
atttaccagaagaga

SEQ ID NO: 36156 - DNA, 15 bp, Homo sapiens
catttaccagaagag

SEQ ID NO: 36157 - DNA, 15 bp, Homo sapiens
tcatttaccagaaga

SEQ ID NO: 36158 - DNA, 15 bp, Homo sapiens
atcatttaccagaag

SEQ ID NO: 36159 - DNA, 15 bp, Homo sapiens
aatcatttaccagaa

SEQ ID NO: 36160 - DNA, 15 bp, Homo sapiens
aaatcatttaccaga

SEQ ID NO: 36161 - DNA, 15 bp, Homo sapiens
gaaatcatttaccag

SEQ ID NO: 36162 - DNA, 15 bp, Homo sapiens
tgaaatcatttacca

SEQ ID NO: 36163 - DNA, 15 bp, Homo sapiens
ctgaaatcatttacc

SEQ ID NO: 36164 - DNA, 15 bp, Homo sapiens
actgaaatcatttac

SEQ ID NO: 36165 - DNA, 15 bp, Homo sapiens
aactgaaatcattta

SEQ ID NO: 36166 - DNA, 15 bp, Homo sapiens
aaactgaaatcattt

SEQ ID NO: 36167 - DNA, 15 bp, Homo sapiens
caaactgaaatcatt

SEQ ID NO: 36168 - DNA, 15 bp, Homo sapiens
gcaaactgaaatcat

SEQ ID NO: 36169 - DNA, 15 bp, Homo sapiens
tgcaaactgaaatca

SEQ ID NO: 36170 - DNA, 15 bp, Homo sapiens
ttgcaaactgaaatc

SEQ ID NO: 36171 - DNA, 15 bp, Homo sapiens
tttgcaaactgaaat

SEQ ID NO: 36172 - DNA, 15 bp, Homo sapiens
ctttgcaaactgaaa

SEQ ID NO: 36173 - DNA, 15 bp, Homo sapiens
actttgcaaactgaa

SEQ ID NO: 36174 - DNA, 15 bp, Homo sapiens
aactttgcaaactga

SEQ ID NO: 36175 - DNA, 15 bp, Homo sapiens
aaactttgcaaactg

SEQ ID NO: 36176 - DNA, 15 bp, Homo sapiens
caaactttgcaaact

SEQ ID NO: 36177 - DNA, 15 bp, Homo sapiens
gcaaactttgcaaac

SEQ ID NO: 36178 - DNA, 15 bp, Homo sapiens
ggcaaactttgcaaa

SEQ ID NO: 36179 - DNA, 15 bp, Homo sapiens
gggcaaactttgcaa

SEQ ID NO: 36180 - DNA, 15 bp, Homo sapiens
agggcaaactttgca

SEQ ID NO: 36181 - DNA, 15 bp, Homo sapiens
gagggcaaactttgc

SEQ ID NO: 36182 - DNA, 15 bp, Homo sapiens
agagggcaaactttg

SEQ ID NO: 36183 - DNA, 15 bp, Homo sapiens
tagagggcaaacttt

SEQ ID NO: 36184 - DNA, 15 bp, Homo sapiens
ctagagggcaaactt

SEQ ID NO: 36185 - DNA, 15 bp, Homo sapiens
tctagagggcaaact

SEQ ID NO: 36186 - DNA, 15 bp, Homo sapiens
ctctagagggcaaac

SEQ ID NO: 36187 - DNA, 15 bp, Homo sapiens
cctctagagggcaaa

SEQ ID NO: 36188 - DNA, 15 bp, Homo sapiens
acctctagagggcaa

SEQ ID NO: 36189 - DNA, 15 bp, Homo sapiens
aacctctagagggca

SEQ ID NO: 36190 - DNA, 15 bp, Homo sapiens
caacctctagagggc

SEQ ID NO: 36191 - DNA, 15 bp, Homo sapiens
gcaacctctagaggg

SEQ ID NO: 36192 - DNA, 15 bp, Homo sapiens
agcaacctctagagg

SEQ ID NO: 36193 - DNA, 15 bp, Homo sapiens
aagcaacctctagag

SEQ ID NO: 36194 - DNA, 15 bp, Homo sapiens
taagcaacctctaga

SEQ ID NO: 36195 - DNA, 15 bp, Homo sapiens
ctaagcaacctctag

SEQ ID NO: 36196 - DNA, 15 bp, Homo sapiens
actaagcaacctcta

SEQ ID NO: 36197 - DNA, 15 bp, Homo sapiens
cactaagcaacctct

SEQ ID NO: 36198 - DNA, 15 bp, Homo sapiens
gcactaagcaacctc

SEQ ID NO: 36199 - DNA, 15 bp, Homo sapiens
ggcactaagcaacct

SEQ ID NO: 36200 - DNA, 15 bp, Homo sapiens
aggcactaagcaacc

SEQ ID NO: 36201 - DNA, 15 bp, Homo sapiens
caggcactaagcaac

SEQ ID NO: 36202 - DNA, 15 bp, Homo sapiens
ccaggcactaagcaa

SEQ ID NO: 36203 - DNA, 15 bp, Homo sapiens
gccaggcactaagca

SEQ ID NO: 36204 - DNA, 15 bp, Homo sapiens
ggccaggcactaagc

SEQ ID NO: 36205 - DNA, 15 bp, Homo sapiens
tggccaggcactaag

SEQ ID NO: 36206 - DNA, 15 bp, Homo sapiens
atggccaggcactaa

SEQ ID NO: 36207 - DNA, 15 bp, Homo sapiens
catggccaggcacta

SEQ ID NO: 36208 - DNA, 15 bp, Homo sapiens
acatggccaggcact

SEQ ID NO: 36209 - DNA, 15 bp, Homo sapiens
cacatggccaggcac

SEQ ID NO: 36210 - DNA, 15 bp, Homo sapiens
ccacatggccaggca

SEQ ID NO: 36211 - DNA, 15 bp, Homo sapiens
cccacatggccaggc

SEQ ID NO: 36212 - DNA, 15 bp, Homo sapiens
gcccacatggccagg

SEQ ID NO: 36213 - DNA, 15 bp, Homo sapiens
agcccacatggccag

SEQ ID NO: 36214 - DNA, 15 bp, Homo sapiens
gagcccacatggcca

SEQ ID NO: 36215 - DNA, 15 bp, Homo sapiens
tgagcccacatggcc

SEQ ID NO: 36216 - DNA, 15 bp, Homo sapiens
ctgagcccacatggc

SEQ ID NO: 36217 - DNA, 15 bp, Homo sapiens
actgagcccacatgg

SEQ ID NO: 36218 - DNA, 15 bp, Homo sapiens
aactgagcccacatg

SEQ ID NO: 36219 - DNA, 15 bp, Homo sapiens
gaactgagcccacat

SEQ ID NO: 36220 - DNA, 15 bp, Homo sapiens
tgaactgagcccaca

SEQ ID NO: 36221 - DNA, 15 bp, Homo sapiens
atgaactgagcccac

SEQ ID NO: 36222 - DNA, 15 bp, Homo sapiens
catgaactgagccca

SEQ ID NO: 36223 - DNA, 15 bp, Homo sapiens
acatgaactgagccc

SEQ ID NO: 36224 - DNA, 15 bp, Homo sapiens
cacatgaactgagcc

SEQ ID NO: 36225 - DNA, 15 bp, Homo sapiens
ccacatgaactgagc

SEQ ID NO: 36226 - DNA, 15 bp, Homo sapiens
accacatgaactgag

SEQ ID NO: 36227 - DNA, 15 bp, Homo sapiens
gaccacatgaactga

SEQ ID NO: 36228 - DNA, 15 bp, Homo sapiens
ggaccacatgaactg

SEQ ID NO: 36229 - DNA, 15 bp, Homo sapiens
aggaccacatgaact

SEQ ID NO: 36230 - DNA, 15 bp, Homo sapiens
caggaccacatgaac

SEQ ID NO: 36231 - DNA, 15 bp, Homo sapiens
tcaggaccacatgaa

SEQ ID NO: 36232 - DNA, 15 bp, Homo sapiens
atcaggaccacatga

SEQ ID NO: 36233 - DNA, 15 bp, Homo sapiens
catcaggaccacatg

SEQ ID NO: 36234 - DNA, 15 bp, Homo sapiens
tcatcaggaccacat

SEQ ID NO: 36235 - DNA, 15 bp, Homo sapiens
ctcatcaggaccaca

SEQ ID NO: 36236 - DNA, 15 bp, Homo sapiens
gctcatcaggaccac

SEQ ID NO: 36237 - DNA, 15 bp, Homo sapiens
agctcatcaggacca

SEQ ID NO: 36238 - DNA, 15 bp, Homo sapiens
cagctcatcaggacc

SEQ ID NO: 36239 - DNA, 15 bp, Homo sapiens
ccagctcatcaggac

SEQ ID NO: 36240 - DNA, 15 bp, Homo sapiens
accagctcatcagga

SEQ ID NO: 36241 - DNA, 15 bp, Homo sapiens
aaccagctcatcagg

SEQ ID NO: 36242 - DNA, 15 bp, Homo sapiens
aaaccagctcatcag

SEQ ID NO: 36243 - DNA, 15 bp, Homo sapiens
aaaaccagctcatca

SEQ ID NO: 36244 - DNA, 15 bp, Homo sapiens
taaaaccagctcatc

SEQ ID NO: 36245 - DNA, 15 bp, Homo sapiens
ataaaaccagctcat

SEQ ID NO: 36246 - DNA, 15 bp, Homo sapiens
gataaaaccagctca

SEQ ID NO: 36247 - DNA, 15 bp, Homo sapiens
agataaaaccagctc

SEQ ID NO: 36248 - DNA, 15 bp, Homo sapiens
aagataaaaccagct

SEQ ID NO: 36249 - DNA, 15 bp, Homo sapiens
aaagataaaaccagc

SEQ ID NO: 36250 - DNA, 15 bp, Homo sapiens
taaagataaaaccag

SEQ ID NO: 36251 - DNA, 15 bp, Homo sapiens
ataaagataaaacca

SEQ ID NO: 36252 - DNA, 15 bp, Homo sapiens
aataaagataaaacc

SEQ ID NO: 36253 - DNA, 15 bp, Homo sapiens
taataaagataaaac

SEQ ID NO: 36254 - DNA, 15 bp, Homo sapiens
gtaataaagataaaa

SEQ ID NO: 36255 - DNA, 15 bp, Homo sapiens
tgtaataaagataaa

SEQ ID NO: 36256 - DNA, 15 bp, Homo sapiens
ttgtaataaagataa

SEQ ID NO: 36257 - DNA, 15 bp, Homo sapiens
tttgtaataaagata

SEQ ID NO: 36258 - DNA, 15 bp, Homo sapiens
ctttgtaataaagat

SEQ ID NO: 36259 - DNA, 15 bp, Homo sapiens
tctttgtaataaaga

SEQ ID NO: 36260 - DNA, 15 bp, Homo sapiens
ttctttgtaataaag

SEQ ID NO: 36261 - DNA, 15 bp, Homo sapiens
cttctttgtaataaa

SEQ ID NO: 36262 - DNA, 15 bp, Homo sapiens
acttctttgtaataa

SEQ ID NO: 36263 - DNA, 15 bp, Homo sapiens
aacttctttgtaata

SEQ ID NO: 36264 - DNA, 15 bp, Homo sapiens
taacttctttgtaat

SEQ ID NO: 36265 - DNA, 15 bp, Homo sapiens
ctaacttctttgtaa

SEQ ID NO: 36266 - DNA, 15 bp, Homo sapiens
cctaacttctttgta

SEQ ID NO: 36267 - DNA, 15 bp, Homo sapiens
gcctaacttctttgt

SEQ ID NO: 36268 - DNA, 15 bp, Homo sapiens
agcctaacttctttg

SEQ ID NO: 36269 - DNA, 15 bp, Homo sapiens
cagcctaacttcttt

SEQ ID NO: 36270 - DNA, 15 bp, Homo sapiens
acagcctaacttctt

SEQ ID NO: 36271 - DNA, 15 bp, Homo sapiens
aacagcctaacttct

SEQ ID NO: 36272 - DNA, 15 bp, Homo sapiens
taacagcctaacttc

SEQ ID NO: 36273 - DNA, 15 bp, Homo sapiens
ctaacagcctaactt

SEQ ID NO: 36274 - DNA, 15 bp, Homo sapiens
cctaacagcctaact

SEQ ID NO: 36275 - DNA, 15 bp, Homo sapiens
tcctaacagcctaac

SEQ ID NO: 36276 - DNA, 15 bp, Homo sapiens
ctcctaacagcctaa

SEQ ID NO: 36277 - DNA, 15 bp, Homo sapiens
tctcctaacagccta

SEQ ID NO: 36278 - DNA, 15 bp, Homo sapiens
ctctcctaacagcct

SEQ ID NO: 36279 - DNA, 15 bp, Homo sapiens
actctcctaacagcc

SEQ ID NO: 36280 - DNA, 15 bp, Homo sapiens
cactctcctaacagc

SEQ ID NO: 36281 - DNA, 15 bp, Homo sapiens
ccactctcctaacag

SEQ ID NO: 36282 - DNA, 15 bp, Homo sapiens
cccactctcctaaca

SEQ ID NO: 36283 - DNA, 15 bp, Homo sapiens
acccactctcctaac

SEQ ID NO: 36284 - DNA, 15 bp, Homo sapiens
aacccactctcctaa

SEQ ID NO: 36285 - DNA, 15 bp, Homo sapiens
caacccactctccta

SEQ ID NO: 36286 - DNA, 15 bp, Homo sapiens
ccaacccactctcct

SEQ ID NO: 36287 - DNA, 15 bp, Homo sapiens
tccaacccactctcc

SEQ ID NO: 36288 - DNA, 15 bp, Homo sapiens
ttccaacccactctc

SEQ ID NO: 36289 - DNA, 15 bp, Homo sapiens
cttccaacccactct

SEQ ID NO: 36290 - DNA, 15 bp, Homo sapiens
ccttccaacccactc

SEQ ID NO: 36291 - DNA, 15 bp, Homo sapiens
tccttccaacccact

SEQ ID NO: 36292 - DNA, 15 bp, Homo sapiens
ctccttccaacccac

SEQ ID NO: 36293 - DNA, 15 bp, Homo sapiens
tctccttccaaccca

SEQ ID NO: 36294 - DNA, 15 bp, Homo sapiens
ttctccttccaaccc

SEQ ID NO: 36295 - DNA, 15 bp, Homo sapiens
cttctccttccaacc

SEQ ID NO: 36296 - DNA, 15 bp, Homo sapiens
tcttctccttccaac

SEQ ID NO: 36297 - DNA, 15 bp, Homo sapiens
ctcttctccttccaa

SEQ ID NO: 36298 - DNA, 15 bp, Homo sapiens
cctcttctccttcca

SEQ ID NO: 36299 - DNA, 15 bp, Homo sapiens
acctcttctccttcc

SEQ ID NO: 36300 - DNA, 15 bp, Homo sapiens
tacctcttctccttc

SEQ ID NO: 36301 - DNA, 15 bp, Homo sapiens
ctacctcttctcctt

SEQ ID NO: 36302 - DNA, 15 bp, Homo sapiens
tctacctcttctcct

SEQ ID NO: 36303 - DNA, 15 bp, Homo sapiens
gtctacctcttctcc

SEQ ID NO: 36304 - DNA, 15 bp, Homo sapiens
tgtctacctcttctc

SEQ ID NO: 36305 - DNA, 15 bp, Homo sapiens
ctgtctacctcttct

SEQ ID NO: 36306 - DNA, 15 bp, Homo sapiens
gctgtctacctcttc

SEQ ID NO: 36307 - DNA, 15 bp, Homo sapiens
ggctgtctacctctt

SEQ ID NO: 36308 - DNA, 15 bp, Homo sapiens
tggctgtctacctct

SEQ ID NO: 36309 - DNA, 15 bp, Homo sapiens
ttggctgtctacctc

SEQ ID NO: 36310 - DNA, 15 bp, Homo sapiens
tttggctgtctacct

SEQ ID NO: 36311 - DNA, 15 bp, Homo sapiens
atttggctgtctacc

SEQ ID NO: 36312 - DNA, 15 bp, Homo sapiens
catttggctgtctac

SEQ ID NO: 36313 - DNA, 15 bp, Homo sapiens
tcatttggctgtcta

SEQ ID NO: 36314 - DNA, 15 bp, Homo sapiens
ctcatttggctgtct

SEQ ID NO: 36315 - DNA, 15 bp, Homo sapiens
tctcatttggctgtc

SEQ ID NO: 36316 - DNA, 15 bp, Homo sapiens
atctcatttggctgt

SEQ ID NO: 36317 - DNA, 15 bp, Homo sapiens
catctcatttggctg

SEQ ID NO: 36318 - DNA, 15 bp, Homo sapiens
tcatctcatttggct

SEQ ID NO: 36319 - DNA, 15 bp, Homo sapiens
ctcatctcatttggc

SEQ ID NO: 36320 - DNA, 15 bp, Homo sapiens
actcatctcatttgg

SEQ ID NO: 36321 - DNA, 15 bp, Homo sapiens
gactcatctcatttg

SEQ ID NO: 36322 - DNA, 15 bp, Homo sapiens
tgactcatctcattt

SEQ ID NO: 36323 - DNA, 15 bp, Homo sapiens
ctgactcatctcatt

SEQ ID NO: 36324 - DNA, 15 bp, Homo sapiens
cctgactcatctcat

SEQ ID NO: 36325 - DNA, 15 bp, Homo sapiens
ccctgactcatctca

SEQ ID NO: 36326 - DNA, 15 bp, Homo sapiens
tccctgactcatctc

SEQ ID NO: 36327 - DNA, 15 bp, Homo sapiens
ttccctgactcatct

SEQ ID NO: 36328 - DNA, 15 bp, Homo sapiens
tttccctgactcatc

SEQ ID NO: 36329 - DNA, 15 bp, Homo sapiens
ttttccctgactcat

SEQ ID NO: 36330 - DNA, 15 bp, Homo sapiens
gttttccctgactca

SEQ ID NO: 36331 - DNA, 15 bp, Homo sapiens
agttttccctgactc

SEQ ID NO: 36332 - DNA, 15 bp, Homo sapiens
tagttttccctgact

SEQ ID NO: 36333 - DNA, 15 bp, Homo sapiens
atagttttccctgac

SEQ ID NO: 36334 - DNA, 15 bp, Homo sapiens
tatagttttccctga

SEQ ID NO: 36335 - DNA, 15 bp, Homo sapiens
gtatagttttccctg

SEQ ID NO: 36336 - DNA, 15 bp, Homo sapiens
agtatagttttccct

SEQ ID NO: 36337 - DNA, 15 bp, Homo sapiens
cagtatagttttccc

SEQ ID NO: 36338 - DNA, 15 bp, Homo sapiens
acagtatagttttcc

SEQ ID NO: 36339 - DNA, 15 bp, Homo sapiens
aacagtatagttttc

SEQ ID NO: 36340 - DNA, 15 bp, Homo sapiens
aaacagtatagtttt

SEQ ID NO: 36341 - DNA, 15 bp, Homo sapiens
gaaacagtatagttt

SEQ ID NO: 36342 - DNA, 15 bp, Homo sapiens
cgaaacagtatagtt

SEQ ID NO: 36343 - DNA, 15 bp, Homo sapiens
ccgaaacagtatagt

SEQ ID NO: 36344 - DNA, 15 bp, Homo sapiens
tccgaaacagtatag

SEQ ID NO: 36345 - DNA, 15 bp, Homo sapiens
ctccgaaacagtata

SEQ ID NO: 36346 - DNA, 15 bp, Homo sapiens
actccgaaacagtat

SEQ ID NO: 36347 - DNA, 15 bp, Homo sapiens
gactccgaaacagta

SEQ ID NO: 36348 - DNA, 15 bp, Homo sapiens
tgactccgaaacagt

SEQ ID NO: 36349 - DNA, 15 bp, Homo sapiens
atgactccgaaacag

SEQ ID NO: 36350 - DNA, 15 bp, Homo sapiens
tatgactccgaaaca

SEQ ID NO: 36351 - DNA, 15 bp, Homo sapiens
ctatgactccgaaac

SEQ ID NO: 36352 - DNA, 15 bp, Homo sapiens
cctatgactccgaaa

SEQ ID NO: 36353 - DNA, 15 bp, Homo sapiens
ccctatgactccgaa

SEQ ID NO: 36354 - DNA, 15 bp, Homo sapiens
gccctatgactccga

SEQ ID NO: 36355 - DNA, 15 bp, Homo sapiens
agccctatgactccg

SEQ ID NO: 36356 - DNA, 15 bp, Homo sapiens
gagccctatgactcc

SEQ ID NO: 36357 - DNA, 15 bp, Homo sapiens
ggagccctatgactc

SEQ ID NO: 36358 - DNA, 15 bp, Homo sapiens
aggagccctatgact

SEQ ID NO: 36359 - DNA, 15 bp, Homo sapiens
taggagccctatgac

SEQ ID NO: 36360 - DNA, 15 bp, Homo sapiens
gtaggagccctatga

SEQ ID NO: 36361 - DNA, 15 bp, Homo sapiens
ggtaggagccctatg

SEQ ID NO: 36362 - DNA, 15 bp, Homo sapiens
tggtaggagccctat

SEQ ID NO: 36363 - DNA, 15 bp, Homo sapiens
ttggtaggagcccta

SEQ ID NO: 36364 - DNA, 15 bp, Homo sapiens
cttggtaggagccct

SEQ ID NO: 36365 - DNA, 15 bp, Homo sapiens
gcttggtaggagccc

SEQ ID NO: 36366 - DNA, 15 bp, Homo sapiens
tgcttggtaggagcc

SEQ ID NO: 36367 - DNA, 15 bp, Homo sapiens
atgcttggtaggagc

SEQ ID NO: 36368 - DNA, 15 bp, Homo sapiens
gatgcttggtaggag

SEQ ID NO: 36369 - DNA, 15 bp, Homo sapiens
agatgcttggtagga

SEQ ID NO: 36370 - DNA, 15 bp, Homo sapiens
cagatgcttggtagg

SEQ ID NO: 36371 - DNA, 15 bp, Homo sapiens
ccagatgcttggtag

SEQ ID NO: 36372 - DNA, 15 bp, Homo sapiens
accagatgcttggta

SEQ ID NO: 36373 - DNA, 15 bp, Homo sapiens
gaccagatgcttggt

SEQ ID NO: 36374 - DNA, 15 bp, Homo sapiens
tgaccagatgcttgg

SEQ ID NO: 36375 - DNA, 15 bp, Homo sapiens
ctgaccagatgcttg

SEQ ID NO: 36376 - DNA, 15 bp, Homo sapiens
tctgaccagatgctt

SEQ ID NO: 36377 - DNA, 15 bp, Homo sapiens
ttctgaccagatgct

SEQ ID NO: 36378 - DNA, 15 bp, Homo sapiens
tttctgaccagatgc

SEQ ID NO: 36379 - DNA, 15 bp, Homo sapiens
gtttctgaccagatg

SEQ ID NO: 36380 - DNA, 15 bp, Homo sapiens
ggtttctgaccagat

SEQ ID NO: 36381 - DNA, 15 bp, Homo sapiens
aggtttctgaccaga

SEQ ID NO: 36382 - DNA, 15 bp, Homo sapiens
gaggtttctgaccag

SEQ ID NO: 36383 - DNA, 15 bp, Homo sapiens
agaggtttctgacca

SEQ ID NO: 36384 - DNA, 15 bp, Homo sapiens
gagaggtttctgacc

SEQ ID NO: 36385 - DNA, 15 bp, Homo sapiens
tgagaggtttctgac

SEQ ID NO: 36386 - DNA, 15 bp, Homo sapiens
atgagaggtttctga

SEQ ID NO: 36387 - DNA, 15 bp, Homo sapiens
aatgagaggtttctg

SEQ ID NO: 36388 - DNA, 15 bp, Homo sapiens
aaatgagaggtttct

SEQ ID NO: 36389 - DNA, 15 bp, Homo sapiens
aaaatgagaggtttc

SEQ ID NO: 36390 - DNA, 15 bp, Homo sapiens
caaaatgagaggttt

SEQ ID NO: 36391 - DNA, 15 bp, Homo sapiens
ccaaaatgagaggtt

SEQ ID NO: 36392 - DNA, 15 bp, Homo sapiens
tccaaaatgagaggt

SEQ ID NO: 36393 - DNA, 15 bp, Homo sapiens
ctccaaaatgagagg

SEQ ID NO: 36394 - DNA, 15 bp, Homo sapiens
tctccaaaatgagag

SEQ ID NO: 36395 - DNA, 15 bp, Homo sapiens
atctccaaaatgaga

SEQ ID NO: 36396 - DNA, 15 bp, Homo sapiens
gatctccaaaatgag

SEQ ID NO: 36397 - DNA, 15 bp, Homo sapiens
tgatctccaaaatga

SEQ ID NO: 36398 - DNA, 15 bp, Homo sapiens
ttgatctccaaaatg

SEQ ID NO: 36399 - DNA, 15 bp, Homo sapiens
cttgatctccaaaat

SEQ ID NO: 36400 - DNA, 15 bp, Homo sapiens
tcttgatctccaaaa

SEQ ID NO: 36401 - DNA, 15 bp, Homo sapiens
ttcttgatctccaaa

SEQ ID NO: 36402 - DNA, 15 bp, Homo sapiens
tttcttgatctccaa

SEQ ID NO: 36403 - DNA, 15 bp, Homo sapiens
atttcttgatctcca

SEQ ID NO: 36404 - DNA, 15 bp, Homo sapiens
aatttcttgatctcc

SEQ ID NO: 36405 - DNA, 15 bp, Homo sapiens
caatttcttgatctc

SEQ ID NO: 36406 - DNA, 15 bp, Homo sapiens
tcaatttcttgatct

SEQ ID NO: 36407 - DNA, 15 bp, Homo sapiens
ctcaatttcttgatc

SEQ ID NO: 36408 - DNA, 15 bp, Homo sapiens
cctcaatttcttgat

SEQ ID NO: 36409 - DNA, 15 bp, Homo sapiens
acctcaatttcttga

SEQ ID NO: 36410 - DNA, 15 bp, Homo sapiens
aacctcaatttcttg

SEQ ID NO: 36411 - DNA, 15 bp, Homo sapiens
gaacctcaatttctt

SEQ ID NO: 36412 - DNA, 15 bp, Homo sapiens
tgaacctcaatttct

SEQ ID NO: 36413 - DNA, 15 bp, Homo sapiens
ctgaacctcaatttc

SEQ ID NO: 36414 - DNA, 15 bp, Homo sapiens
tctgaacctcaattt

SEQ ID NO: 36415 - DNA, 15 bp, Homo sapiens
ttctgaacctcaatt

SEQ ID NO: 36416 - DNA, 15 bp, Homo sapiens
tttctgaacctcaat

SEQ ID NO: 36417 - DNA, 15 bp, Homo sapiens
ctttctgaacctcaa

SEQ ID NO: 36418 - DNA, 15 bp, Homo sapiens
tctttctgaacctca

SEQ ID NO: 36419 - DNA, 15 bp, Homo sapiens
atctttctgaacctc

SEQ ID NO: 36420 - DNA, 15 bp, Homo sapiens
catctttctgaacct

SEQ ID NO: 36421 - DNA, 15 bp, Homo sapiens
tcatctttctgaacc

SEQ ID NO: 36422 - DNA, 15 bp, Homo sapiens
gtcatctttctgaac

SEQ ID NO: 36423 - DNA, 15 bp, Homo sapiens
tgtcatctttctgaa

SEQ ID NO: 36424 - DNA, 15 bp, Homo sapiens
atgtcatctttctga

SEQ ID NO: 36425 - DNA, 15 bp, Homo sapiens
catgtcatctttctg

SEQ ID NO: 36426 - DNA, 15 bp, Homo sapiens
tcatgtcatctttct

SEQ ID NO: 36427 - DNA, 15 bp, Homo sapiens
ctcatgtcatctttc

SEQ ID NO: 36428 - DNA, 15 bp, Homo sapiens
cctcatgtcatcttt

SEQ ID NO: 36429 - DNA, 15 bp, Homo sapiens
acctcatgtcatctt

SEQ ID NO: 36430 - DNA, 15 bp, Homo sapiens
tacctcatgtcatct

SEQ ID NO: 36431 - DNA, 15 bp, Homo sapiens
gtacctcatgtcatc

SEQ ID NO: 36432 - DNA, 15 bp, Homo sapiens
cgtacctcatgtcat

SEQ ID NO: 36433 - DNA, 15 bp, Homo sapiens
gcgtacctcatgtca

SEQ ID NO: 36434 - DNA, 15 bp, Homo sapiens
tgcgtacctcatgtc

SEQ ID NO: 36435 - DNA, 15 bp, Homo sapiens
ctgcgtacctcatgt

SEQ ID NO: 36436 - DNA, 15 bp, Homo sapiens
cctgcgtacctcatg

SEQ ID NO: 36437 - DNA, 15 bp, Homo sapiens
ccctgcgtacctcat

SEQ ID NO: 36438 - DNA, 15 bp, Homo sapiens
tccctgcgtacctca

SEQ ID NO: 36439 - DNA, 15 bp, Homo sapiens
gtccctgcgtacctc

SEQ ID NO: 36440 - DNA, 15 bp, Homo sapiens
cgtccctgcgtacct

SEQ ID NO: 36441 - DNA, 15 bp, Homo sapiens
gcgtccctgcgtacc

SEQ ID NO: 36442 - DNA, 15 bp, Homo sapiens
ggcgtccctgcgtac

SEQ ID NO: 36443 - DNA, 15 bp, Homo sapiens
tggcgtccctgcgta

SEQ ID NO: 36444 - DNA, 15 bp, Homo sapiens
gtggcgtccctgcgt

SEQ ID NO: 36445 - DNA, 15 bp, Homo sapiens
ggtggcgtccctgcg

SEQ ID NO: 36446 - DNA, 15 bp, Homo sapiens
tggtggcgtccctgc

SEQ ID NO: 36447 - DNA, 15 bp, Homo sapiens
ctggtggcgtccctg

SEQ ID NO: 36448 - DNA, 15 bp, Homo sapiens
tctggtggcgtccct

SEQ ID NO: 36449 - DNA, 15 bp, Homo sapiens
gtctggtggcgtccc

SEQ ID NO: 36450 - DNA, 15 bp, Homo sapiens
tgtctggtggcgtcc

SEQ ID NO: 36451 - DNA, 15 bp, Homo sapiens
gtgtctggtggcgtc

SEQ ID NO: 36452 - DNA, 15 bp, Homo sapiens
tgtgtctggtggcgt

SEQ ID NO: 36453 - DNA, 15 bp, Homo sapiens
ctgtgtctggtggcg

SEQ ID NO: 36454 - DNA, 15 bp, Homo sapiens
gctgtgtctggtggc

SEQ ID NO: 36455 - DNA, 15 bp, Homo sapiens
ggctgtgtctggtgg

SEQ ID NO: 36456 - DNA, 15 bp, Homo sapiens
aggctgtgtctggtg

SEQ ID NO: 36457 - DNA, 15 bp, Homo sapiens
gaggctgtgtctggt

SEQ ID NO: 36458 - DNA, 15 bp, Homo sapiens
ggaggctgtgtctgg

SEQ ID NO: 36459 - DNA, 15 bp, Homo sapiens
tggaggctgtgtctg

SEQ ID NO: 36460 - DNA, 15 bp, Homo sapiens
ttggaggctgtgtct

SEQ ID NO: 36461 - DNA, 15 bp, Homo sapiens
gttggaggctgtgtc

SEQ ID NO: 36462 - DNA, 15 bp, Homo sapiens
agttggaggctgtgt

SEQ ID NO: 36463 - DNA, 15 bp, Homo sapiens
gagttggaggctgtg

SEQ ID NO: 36464 - DNA, 15 bp, Homo sapiens
agagttggaggctgt

SEQ ID NO: 36465 - DNA, 15 bp, Homo sapiens
tagagttggaggctg

SEQ ID NO: 36466 - DNA, 15 bp, Homo sapiens
ctagagttggaggct

SEQ ID NO: 36467 - DNA, 15 bp, Homo sapiens
tctagagttggaggc

SEQ ID NO: 36468 - DNA, 15 bp, Homo sapiens
ttctagagttggagg

SEQ ID NO: 36469 - DNA, 15 bp, Homo sapiens
tttctagagttggag

SEQ ID NO: 36470 - DNA, 15 bp, Homo sapiens
gtttctagagttgga

SEQ ID NO: 36471 - DNA, 15 bp, Homo sapiens
agtttctagagttgg

SEQ ID NO: 36472 - DNA, 15 bp, Homo sapiens
tagtttctagagttg

SEQ ID NO: 36473 - DNA, 15 bp, Homo sapiens
ttagtttctagagtt

SEQ ID NO: 36474 - DNA, 15 bp, Homo sapiens
tttagtttctagagt

SEQ ID NO: 36475 - DNA, 15 bp, Homo sapiens
ttttagtttctagag

SEQ ID NO: 36476 - DNA, 15 bp, Homo sapiens
attttagtttctaga

SEQ ID NO: 36477 - DNA, 15 bp, Homo sapiens
aattttagtttctag

SEQ ID NO: 36478 - DNA, 15 bp, Homo sapiens
gaattttagtttcta

SEQ ID NO: 36479 - DNA, 15 bp, Homo sapiens
agaattttagtttct

SEQ ID NO: 36480 - DNA, 15 bp, Homo sapiens
cagaattttagtttc

SEQ ID NO: 36481 - DNA, 15 bp, Homo sapiens
ccagaattttagttt

SEQ ID NO: 36482 - DNA, 15 bp, Homo sapiens
tccagaattttagtt

SEQ ID NO: 36483 - DNA, 15 bp, Homo sapiens
atccagaattttagt

SEQ ID NO: 36484 - DNA, 15 bp, Homo sapiens
aatccagaattttag

SEQ ID NO: 36485 - DNA, 15 bp, Homo sapiens
gaatccagaatttta

SEQ ID NO: 36486 - DNA, 15 bp, Homo sapiens
agaatccagaatttt

SEQ ID NO: 36487 - DNA, 15 bp, Homo sapiens
aagaatccagaattt

SEQ ID NO: 36488 - DNA, 15 bp, Homo sapiens
taagaatccagaatt

SEQ ID NO: 36489 - DNA, 15 bp, Homo sapiens
ctaagaatccagaat

SEQ ID NO: 36490 - DNA, 15 bp, Homo sapiens
actaagaatccagaa

SEQ ID NO: 36491 - DNA, 15 bp, Homo sapiens
cactaagaatccaga

SEQ ID NO: 36492 - DNA, 15 bp, Homo sapiens
gcactaagaatccag

SEQ ID NO: 36493 - DNA, 15 bp, Homo sapiens
agcactaagaatcca

SEQ ID NO: 36494 - DNA, 15 bp, Homo sapiens
cagcactaagaatcc

SEQ ID NO: 36495 - DNA, 15 bp, Homo sapiens
gcagcactaagaatc

SEQ ID NO: 36496 - DNA, 15 bp, Homo sapiens
agcagcactaagaat

SEQ ID NO: 36497 - DNA, 15 bp, Homo sapiens
aagcagcactaagaa

SEQ ID NO: 36498 - DNA, 15 bp, Homo sapiens
aaagcagcactaaga

SEQ ID NO: 36499 - DNA, 15 bp, Homo sapiens
aaaagcagcactaag

SEQ ID NO: 36500 - DNA, 15 bp, Homo sapiens
aaaaagcagcactaa

SEQ ID NO: 36501 - DNA, 15 bp, Homo sapiens
gaaaaagcagcacta

SEQ ID NO: 36502 - DNA, 15 bp, Homo sapiens
agaaaaagcagcact

SEQ ID NO: 36503 - DNA, 15 bp, Homo sapiens
cagaaaaagcagcac

SEQ ID NO: 36504 - DNA, 15 bp, Homo sapiens
acagaaaaagcagca

SEQ ID NO: 36505 - DNA, 15 bp, Homo sapiens
aacagaaaaagcagc

SEQ ID NO: 36506 - DNA, 15 bp, Homo sapiens
aaacagaaaaagcag

SEQ ID NO: 36507 - DNA, 15 bp, Homo sapiens
caaaacagaaaaagc

SEQ ID NO: 36508 - DNA, 15 bp, Homo sapiens
acaaaacagaaaaag

SEQ ID NO: 36509 - DNA, 15 bp, Homo sapiens
aacaaaacagaaaaa

SEQ ID NO: 36510 - DNA, 15 bp, Homo sapiens
caacaaaacagaaaa

SEQ ID NO: 36511 - DNA, 15 bp, Homo sapiens
gcaacaaaacagaaa

SEQ ID NO: 36512 - DNA, 15 bp, Homo sapiens
tgcaacaaaacagaa

SEQ ID NO: 36513 - DNA, 15 bp, Homo sapiens
gtgcaacaaaacaga

SEQ ID NO: 36514 - DNA, 15 bp, Homo sapiens
agtgcaacaaaacag

SEQ ID NO: 36515 - DNA, 15 bp, Homo sapiens
cagtgcaacaaaaca

SEQ ID NO: 36516 - DNA, 15 bp, Homo sapiens
ccagtgcaacaaaac

SEQ ID NO: 36517 - DNA, 15 bp, Homo sapiens
tccagtgcaacaaaa

SEQ ID NO: 36518 - DNA, 15 bp, Homo sapiens
atccagtgcaacaaa

SEQ ID NO: 36519 - DNA, 15 bp, Homo sapiens
aatccagtgcaacaa

SEQ ID NO: 36520 - DNA, 15 bp, Homo sapiens
caatccagtgcaaca

SEQ ID NO: 36521 - DNA, 15 bp, Homo sapiens
tcaatccagtgcaac

SEQ ID NO: 36522 - DNA, 15 bp, Homo sapiens
ttcaatccagtgcaa

SEQ ID NO: 36523 - DNA, 15 bp, Homo sapiens
cttcaatccagtgca

SEQ ID NO: 36524 - DNA, 15 bp, Homo sapiens
gcttcaatccagtgc

SEQ ID NO: 36525 - DNA, 15 bp, Homo sapiens
ggcttcaatccagtg

SEQ ID NO: 36526 - DNA, 15 bp, Homo sapiens
aggcttcaatccagt

SEQ ID NO: 36527 - DNA, 15 bp, Homo sapiens
aaggcttcaatccag

SEQ ID NO: 36528 - DNA, 15 bp, Homo sapiens
aaaggcttcaatcca

SEQ ID NO: 36529 - DNA, 15 bp, Homo sapiens
aaaaggcttcaatcc

SEQ ID NO: 36530 - DNA, 15 bp, Homo sapiens
gaaaaggcttcaatc

SEQ ID NO: 36531 - DNA, 15 bp, Homo sapiens
agaaaaggcttcaat

SEQ ID NO: 36532 - DNA, 15 bp, Homo sapiens
tagaaaaggcttcaa

SEQ ID NO: 36533 - DNA, 15 bp, Homo sapiens
ttagaaaaggcttca

SEQ ID NO: 36534 - DNA, 15 bp, Homo sapiens
gttagaaaaggcttc

SEQ ID NO: 36535 - DNA, 15 bp, Homo sapiens
agttagaaaaggctt

SEQ ID NO: 36536 - DNA, 15 bp, Homo sapiens
cagttagaaaaggct

SEQ ID NO: 36537 - DNA, 15 bp, Homo sapiens
acagttagaaaaggc

SEQ ID NO: 36538 - DNA, 15 bp, Homo sapiens
tacagttagaaaagg

SEQ ID NO: 36539 - DNA, 15 bp, Homo sapiens
gtacagttagaaaag

SEQ ID NO: 36540 - DNA, 15 bp, Homo sapiens
agtacagttagaaaa

SEQ ID NO: 36541 - DNA, 15 bp, Homo sapiens
gagtacagttagaaa

SEQ ID NO: 36542 - DNA, 15 bp, Homo sapiens
tgagtacagttagaa

SEQ ID NO: 36543 - DNA, 15 bp, Homo sapiens
ctgagtacagttaga

SEQ ID NO: 36544 - DNA, 15 bp, Homo sapiens
tctgagtacagttag

SEQ ID NO: 36545 - DNA, 15 bp, Homo sapiens
ctctgagtacagtta

SEQ ID NO: 36546 - DNA, 15 bp, Homo sapiens
cctctgagtacagtt

SEQ ID NO: 36547 - DNA, 15 bp, Homo sapiens
ccctctgagtacagt

SEQ ID NO: 36548 - DNA, 15 bp, Homo sapiens
gccctctgagtacag

SEQ ID NO: 36549 - DNA, 15 bp, Homo sapiens
ggccctctgagtaca

SEQ ID NO: 36550 - DNA, 15 bp, Homo sapiens
aggccctctgagtac

SEQ ID NO: 36551 - DNA, 15 bp, Homo sapiens
taggccctctgagta

SEQ ID NO: 36552 - DNA, 15 bp, Homo sapiens
ataggccctctgagt

SEQ ID NO: 36553 - DNA, 15 bp, Homo sapiens
aataggccctctgag

SEQ ID NO: 36554 - DNA, 15 bp, Homo sapiens
taataggccctctga

SEQ ID NO: 36555 - DNA, 15 bp, Homo sapiens
ataataggccctctg

SEQ ID NO: 36556 - DNA, 15 bp, Homo sapiens
aataataggccctct

SEQ ID NO: 36557 - DNA, 15 bp, Homo sapiens
aaataataggccctc

SEQ ID NO: 36558 - DNA, 15 bp, Homo sapiens
taaataataggccct

SEQ ID NO: 36559 - DNA, 15 bp, Homo sapiens
ctaaataataggccc

SEQ ID NO: 36560 - DNA, 15 bp, Homo sapiens
cctaaataataggcc

SEQ ID NO: 36561 - DNA, 15 bp, Homo sapiens
ccctaaataataggc

SEQ ID NO: 36562 - DNA, 15 bp, Homo sapiens
tccctaaataatagg

SEQ ID NO: 36563 - DNA, 15 bp, Homo sapiens
ctccctaaataatag

SEQ ID NO: 36564 - DNA, 15 bp, Homo sapiens
tctccctaaataata

SEQ ID NO: 36565 - DNA, 15 bp, Homo sapiens
atctccctaaataat

SEQ ID NO: 36566 - DNA, 15 bp, Homo sapiens
aatctccctaaataa

SEQ ID NO: 36567 - DNA, 15 bp, Homo sapiens
gaatctccctaaata

SEQ ID NO: 36568 - DNA, 15 bp, Homo sapiens
ggaatctccctaaat

SEQ ID NO: 36569 - DNA, 15 bp, Homo sapiens
cggaatctccctaaa

SEQ ID NO: 36570 - DNA, 15 bp, Homo sapiens
acggaatctccctaa

SEQ ID NO: 36571 - DNA, 15 bp, Homo sapiens
tacggaatctcccta

SEQ ID NO: 36572 - DNA, 15 bp, Homo sapiens
atacggaatctccct

SEQ ID NO: 36573 - DNA, 15 bp, Homo sapiens
catacggaatctccc

SEQ ID NO: 36574 - DNA, 15 bp, Homo sapiens
tcatacggaatctcc

SEQ ID NO: 36575 - DNA, 15 bp, Homo sapiens
ttcatacggaatctc

SEQ ID NO: 36576 - DNA, 15 bp, Homo sapiens
tttcatacggaatct

SEQ ID NO: 36577 - DNA, 15 bp, Homo sapiens
atttcatacggaatc

SEQ ID NO: 36578 - DNA, 15 bp, Homo sapiens
gatttcatacggaat

SEQ ID NO: 36579 - DNA, 15 bp, Homo sapiens
ggatttcatacggaa

SEQ ID NO: 36580 - DNA, 15 bp, Homo sapiens
aggatttcatacgga

SEQ ID NO: 36581 - DNA, 15 bp, Homo sapiens
aaggatttcatacgg

SEQ ID NO: 36582 - DNA, 15 bp, Homo sapiens
aaaggatttcatacg

SEQ ID NO: 36583 - DNA, 15 bp, Homo sapiens
taaaggatttcatac

SEQ ID NO: 36584 - DNA, 15 bp, Homo sapiens
ctaaaggatttcata

SEQ ID NO: 36585 - DNA, 15 bp, Homo sapiens
gctaaaggatttcat

SEQ ID NO: 36586 - DNA, 15 bp, Homo sapiens
tgctaaaggatttca

SEQ ID NO: 36587 - DNA, 15 bp, Homo sapiens
ttgctaaaggatttc

SEQ ID NO: 36588 - DNA, 15 bp, Homo sapiens
attgctaaaggattt

SEQ ID NO: 36589 - DNA, 15 bp, Homo sapiens
gattgctaaaggatt

SEQ ID NO: 36590 - DNA, 15 bp, Homo sapiens
tgattgctaaaggat

SEQ ID NO: 36591 - DNA, 15 bp, Homo sapiens
ttgattgctaaagga

SEQ ID NO: 36592 - DNA, 15 bp, Homo sapiens
tttgattgctaaagg

SEQ ID NO: 36593 - DNA, 15 bp, Homo sapiens
atttgattgctaaag

SEQ ID NO: 36594 - DNA, 15 bp, Homo sapiens
gatttgattgctaaa

SEQ ID NO: 36595 - DNA, 15 bp, Homo sapiens
tgatttgattgctaa

SEQ ID NO: 36596 - DNA, 15 bp, Homo sapiens
atgatttgattgcta

SEQ ID NO: 36597 - DNA, 15 bp, Homo sapiens
aatgatttgattgct

SEQ ID NO: 36598 - DNA, 15 bp, Homo sapiens
aaatgatttgattgc

SEQ ID NO: 36599 - DNA, 15 bp, Homo sapiens
taaatgatttgattg

SEQ ID NO: 36600 - DNA, 15 bp, Homo sapiens
ttaaatgatttgatt

SEQ ID NO: 36601 - DNA, 15 bp, Homo sapiens
attaaatgatttgat

SEQ ID NO: 36602 - DNA, 15 bp, Homo sapiens
tattaaatgatttga

SEQ ID NO: 36603 - DNA, 15 bp, Homo sapiens
ctattaaatgatttg

SEQ ID NO: 36604 - DNA, 15 bp, Homo sapiens
cctattaaatgattt

SEQ ID NO: 36605 - DNA, 15 bp, Homo sapiens
ccctattaaatgatt

SEQ ID NO: 36606 - DNA, 15 bp, Homo sapiens
gccctattaaatgat

SEQ ID NO: 36607 - DNA, 15 bp, Homo sapiens
agccctattaaatga

SEQ ID NO: 36608 - DNA, 15 bp, Homo sapiens
cagccctattaaatg

SEQ ID NO: 36609 - DNA, 15 bp, Homo sapiens
tcagccctattaaat

SEQ ID NO: 36610 - DNA, 15 bp, Homo sapiens
atcagccctattaaa

SEQ ID NO: 36611 - DNA, 15 bp, Homo sapiens
catcagccctattaa

SEQ ID NO: 36612 - DNA, 15 bp, Homo sapiens
ccatcagccctatta

SEQ ID NO: 36613 - DNA, 15 bp, Homo sapiens
accatcagccctatt

SEQ ID NO: 36614 - DNA, 15 bp, Homo sapiens
aaccatcagccctat

SEQ ID NO: 36615 - DNA, 15 bp, Homo sapiens
aaaccatcagcccta

SEQ ID NO: 36616 - DNA, 15 bp, Homo sapiens
taaaccatcagccct

SEQ ID NO: 36617 - DNA, 15 bp, Homo sapiens
ttaaaccatcagccc

SEQ ID NO: 36618 - DNA, 15 bp, Homo sapiens
tttaaaccatcagcc

SEQ ID NO: 36619 - DNA, 15 bp, Homo sapiens
atttaaaccatcagc

SEQ ID NO: 36620 - DNA, 15 bp, Homo sapiens
tatttaaaccatcag

SEQ ID NO: 36621 - DNA, 15 bp, Homo sapiens
atatttaaaccatca

SEQ ID NO: 36622 - DNA, 15 bp, Homo sapiens
tatatttaaaccatc

SEQ ID NO: 36623 - DNA, 15 bp, Homo sapiens
atatatttaaaccat

SEQ ID NO: 36624 - DNA, 15 bp, Homo sapiens
catatatttaaacca

SEQ ID NO: 36625 - DNA, 15 bp, Homo sapiens
acatatatttaaacc

SEQ ID NO: 36626 - DNA, 15 bp, Homo sapiens
aacatatatttaaac

SEQ ID NO: 36627 - DNA, 15 bp, Homo sapiens
taacatatatttaaa

SEQ ID NO: 36628 - DNA, 15 bp, Homo sapiens
ttaacatatatttaa

SEQ ID NO: 36629 - DNA, 15 bp, Homo sapiens
attaacatatattta

SEQ ID NO: 36630 - DNA, 15 bp, Homo sapiens
cattaacatatattt

SEQ ID NO: 36631 - DNA, 15 bp, Homo sapiens
acattaacatatatt

SEQ ID NO: 36632 - DNA, 15 bp, Homo sapiens
cacattaacatatat

SEQ ID NO: 36633 - DNA, 15 bp, Homo sapiens
acacattaacatata

SEQ ID NO: 36634 - DNA, 15 bp, Homo sapiens
aacacattaacatat

SEQ ID NO: 36635 - DNA, 15 bp, Homo sapiens
aaacacattaacata

SEQ ID NO: 36636 - DNA, 15 bp, Homo sapiens
aaaacacattaacat

SEQ ID NO: 36637 - DNA, 15 bp, Homo sapiens
gaaaacacattaaca

SEQ ID NO: 36638 - DNA, 15 bp, Homo sapiens
ggaaaacacattaac

SEQ ID NO: 36639 - DNA, 15 bp, Homo sapiens
aggaaaacacattaa

SEQ ID NO: 36640 - DNA, 15 bp, Homo sapiens
taggaaaacacatta

SEQ ID NO: 36641 - DNA, 15 bp, Homo sapiens
ttaggaaaacacatt

SEQ ID NO: 36642 - DNA, 15 bp, Homo sapiens
tttaggaaaacacat

SEQ ID NO: 36643 - DNA, 15 bp, Homo sapiens
ctttaggaaaacaca

SEQ ID NO: 36644 - DNA, 15 bp, Homo sapiens
gctttaggaaaacac

SEQ ID NO: 36645 - DNA, 15 bp, Homo sapiens
ggctttaggaaaaca

SEQ ID NO: 36646 - DNA, 15 bp, Homo sapiens
aggctttaggaaaac

SEQ ID NO: 36647 - DNA, 15 bp, Homo sapiens
caggctttaggaaaa

SEQ ID NO: 36648 - DNA, 15 bp, Homo sapiens
ccaggctttaggaaa

SEQ ID NO: 36649 - DNA, 15 bp, Homo sapiens
gccaggctttaggaa

SEQ ID NO: 36650 - DNA, 15 bp, Homo sapiens
tgccaggctttagga

SEQ ID NO: 36651 - DNA, 15 bp, Homo sapiens
ctgccaggctttagg

SEQ ID NO: 36652 - DNA, 15 bp, Homo sapiens
tctgccaggctttag

SEQ ID NO: 36653 - DNA, 15 bp, Homo sapiens
gtctgccaggcttta

SEQ ID NO: 36654 - DNA, 15 bp, Homo sapiens
ggtctgccaggcttt

SEQ ID NO: 36655 - DNA, 15 bp, Homo sapiens
aggtctgccaggctt

SEQ ID NO: 36656 - DNA, 15 bp, Homo sapiens
caggtctgccaggct

SEQ ID NO: 36657 - DNA, 15 bp, Homo sapiens
ccaggtctgccaggc

SEQ ID NO: 36658 - DNA, 15 bp, Homo sapiens
cccaggtctgccagg

SEQ ID NO: 36659 - DNA, 15 bp, Homo sapiens
acccaggtctgccag

SEQ ID NO: 36660 - DNA, 15 bp, Homo sapiens
aacccaggtctgcca

SEQ ID NO: 36661 - DNA, 15 bp, Homo sapiens
aaacccaggtctgcc

SEQ ID NO: 36662 - DNA, 15 bp, Homo sapiens
aaaacccaggtctgc

SEQ ID NO: 36663 - DNA, 15 bp, Homo sapiens
caaaacccaggtctg

SEQ ID NO: 36664 - DNA, 15 bp, Homo sapiens
ccaaaacccaggtct

SEQ ID NO: 36665 - DNA, 15 bp, Homo sapiens
tccaaaacccaggtc

SEQ ID NO: 36666 - DNA, 15 bp, Homo sapiens
ctccaaaacccaggt

SEQ ID NO: 36667 - DNA, 15 bp, Homo sapiens
gctccaaaacccagg

SEQ ID NO: 36668 - DNA, 15 bp, Homo sapiens
agctccaaaacccag

SEQ ID NO: 36669 - DNA, 15 bp, Homo sapiens
aagctccaaaaccca

SEQ ID NO: 36670 - DNA, 15 bp, Homo sapiens
aaagctccaaaaccc

SEQ ID NO: 36671 - DNA, 15 bp, Homo sapiens
caaagctccaaaacc

SEQ ID NO: 36672 - DNA, 15 bp, Homo sapiens
acaaagctccaaaac

SEQ ID NO: 36673 - DNA, 15 bp, Homo sapiens
tacaaagctccaaaa

SEQ ID NO: 36674 - DNA, 15 bp, Homo sapiens
atacaaagctccaaa

SEQ ID NO: 36675 - DNA, 15 bp, Homo sapiens
gatacaaagctccaa

SEQ ID NO: 36676 - DNA, 15 bp, Homo sapiens
tgatacaaagctcca

SEQ ID NO: 36677 - DNA, 15 bp, Homo sapiens
gtgatacaaagctcc

SEQ ID NO: 36678 - DNA, 15 bp, Homo sapiens
tgtgatacaaagctc

SEQ ID NO: 36679 - DNA, 15 bp, Homo sapiens
atgtgatacaaagct

SEQ ID NO: 36680 - DNA, 15 bp, Homo sapiens
catgtgatacaaagc

SEQ ID NO: 36681 - DNA, 15 bp, Homo sapiens
acatgtgatacaaag

SEQ ID NO: 36682 - DNA, 15 bp, Homo sapiens
aacatgtgatacaaa

SEQ ID NO: 36683 - DNA, 15 bp, Homo sapiens
aaacatgtgatacaa

SEQ ID NO: 36684 - DNA, 15 bp, Homo sapiens
aaaacatgtgataca

SEQ ID NO: 36685 - DNA, 15 bp, Homo sapiens
taaaacatgtgatac

SEQ ID NO: 36686 - DNA, 15 bp, Homo sapiens
ataaaacatgtgata

SEQ ID NO: 36687 - DNA, 15 bp, Homo sapiens
cataaaacatgtgat

SEQ ID NO: 36688 - DNA, 15 bp, Homo sapiens
acataaaacatgtga

SEQ ID NO: 36689 - DNA, 15 bp, Homo sapiens
aacataaaacatgtg

SEQ ID NO: 36690 - DNA, 15 bp, Homo sapiens
aaacataaaacatgt

SEQ ID NO: 36691 - DNA, 15 bp, Homo sapiens
caaacataaaacatg

SEQ ID NO: 36692 - DNA, 15 bp, Homo sapiens
ccaaacataaaacat

SEQ ID NO: 36693 - DNA, 15 bp, Homo sapiens
tccaaacataaaaca

SEQ ID NO: 36694 - DNA, 15 bp, Homo sapiens
ttccaaacataaaac

SEQ ID NO: 36695 - DNA, 15 bp, Homo sapiens
attccaaacataaaa

SEQ ID NO: 36696 - DNA, 15 bp, Homo sapiens
cattccaaacataaa

SEQ ID NO: 36697 - DNA, 15 bp, Homo sapiens
tcattccaaacataa

SEQ ID NO: 36698 - DNA, 15 bp, Homo sapiens
ttcattccaaacata

SEQ ID NO: 36699 - DNA, 15 bp, Homo sapiens
tttcattccaaacat

SEQ ID NO: 36700 - DNA, 15 bp, Homo sapiens
ttttcattccaaaca

SEQ ID NO: 36701 - DNA, 15 bp, Homo sapiens
attttcattccaaac

SEQ ID NO: 36702 - DNA, 15 bp, Homo sapiens
cattttcattccaaa

SEQ ID NO: 36703 - DNA, 15 bp, Homo sapiens
tcattttcattccaa

SEQ ID NO: 36704 - DNA, 15 bp, Homo sapiens
ctcattttcattcca

SEQ ID NO: 36705 - DNA, 15 bp, Homo sapiens
tctcattttcattcc

SEQ ID NO: 36706 - DNA, 15 bp, Homo sapiens
gtctcattttcattc

SEQ ID NO: 36707 - DNA, 15 bp, Homo sapiens
ggtctcattttcatt

SEQ ID NO: 36708 - DNA, 15 bp, Homo sapiens
tggtctcattttcat

SEQ ID NO: 36709 - DNA, 15 bp, Homo sapiens
atggtctcattttca

SEQ ID NO: 36710 - DNA, 15 bp, Homo sapiens
catggtctcattttc

SEQ ID NO: 36711 - DNA, 15 bp, Homo sapiens
acatggtctcatttt

SEQ ID NO: 36712 - DNA, 15 bp, Homo sapiens
gacatggtctcattt

SEQ ID NO: 36713 - DNA, 15 bp, Homo sapiens
agacatggtctcatt

SEQ ID NO: 36714 - DNA, 15 bp, Homo sapiens
cagacatggtctcat

SEQ ID NO: 36715 - DNA, 15 bp, Homo sapiens
acagacatggtctca

SEQ ID NO: 36716 - DNA, 15 bp, Homo sapiens
cacagacatggtctc

SEQ ID NO: 36717 - DNA, 15 bp, Homo sapiens
tcacagacatggtct

SEQ ID NO: 36718 - DNA, 15 bp, Homo sapiens
ttcacagacatggtc

SEQ ID NO: 36719 - DNA, 15 bp, Homo sapiens
cttcacagacatggt

SEQ ID NO: 36720 - DNA, 15 bp, Homo sapiens
ccttcacagacatgg

SEQ ID NO: 36721 - DNA, 15 bp, Homo sapiens
gccttcacagacatg

SEQ ID NO: 36722 - DNA, 15 bp, Homo sapiens
tgccttcacagacat

SEQ ID NO: 36723 - DNA, 15 bp, Homo sapiens
gtgccttcacagaca

SEQ ID NO: 36724 - DNA, 15 bp, Homo sapiens
agtgccttcacagac

SEQ ID NO: 36725 - DNA, 15 bp, Homo sapiens
aagtgccttcacaga

SEQ ID NO: 36726 - DNA, 15 bp, Homo sapiens
aaagtgccttcacag

SEQ ID NO: 36727 - DNA, 15 bp, Homo sapiens
caaagtgccttcaca

SEQ ID NO: 36728 - DNA, 15 bp, Homo sapiens
tcaaagtgccttcac

SEQ ID NO: 36729 - DNA, 15 bp, Homo sapiens
atcaaagtgccttca

SEQ ID NO: 36730 - DNA, 15 bp, Homo sapiens
tatcaaagtgccttc

SEQ ID NO: 36731 - DNA, 15 bp, Homo sapiens
atatcaaagtgcctt

SEQ ID NO: 36732 - DNA, 15 bp, Homo sapiens
catatcaaagtgcct

SEQ ID NO: 36733 - DNA, 15 bp, Homo sapiens
gcatatcaaagtgcc

SEQ ID NO: 36734 - DNA, 15 bp, Homo sapiens
cgcatatcaaagtgc

SEQ ID NO: 36735 - DNA, 15 bp, Homo sapiens
acgcatatcaaagtg

SEQ ID NO: 36736 - DNA, 15 bp, Homo sapiens
tacgcatatcaaagt

SEQ ID NO: 36737 - DNA, 15 bp, Homo sapiens
ttacgcatatcaaag

SEQ ID NO: 36738 - DNA, 15 bp, Homo sapiens
attacgcatatcaaa

SEQ ID NO: 36739 - DNA, 15 bp, Homo sapiens
cattacgcatatcaa

SEQ ID NO: 36740 - DNA, 15 bp, Homo sapiens
gcattacgcatatca

SEQ ID NO: 36741 - DNA, 15 bp, Homo sapiens
tgcattacgcatatc

SEQ ID NO: 36742 - DNA, 15 bp, Homo sapiens
gtgcattacgcatat

SEQ ID NO: 36743 - DNA, 15 bp, Homo sapiens
agtgcattacgcata

SEQ ID NO: 36744 - DNA, 15 bp, Homo sapiens
gagtgcattacgcat

SEQ ID NO: 36745 - DNA, 15 bp, Homo sapiens
agagtgcattacgca

SEQ ID NO: 36746 - DNA, 15 bp, Homo sapiens
cagagtgcattacgc

SEQ ID NO: 36747 - DNA, 15 bp, Homo sapiens
gcagagtgcattacg

SEQ ID NO: 36748 - DNA, 15 bp, Homo sapiens
ggcagagtgcattac

SEQ ID NO: 36749 - DNA, 15 bp, Homo sapiens
tggcagagtgcatta

SEQ ID NO: 36750 - DNA, 15 bp, Homo sapiens
ctggcagagtgcatt

SEQ ID NO: 36751 - DNA, 15 bp, Homo sapiens
actggcagagtgcat

SEQ ID NO: 36752 - DNA, 15 bp, Homo sapiens
cactggcagagtgca

SEQ ID NO: 36753 - DNA, 15 bp, Homo sapiens
acactggcagagtgc

SEQ ID NO: 36754 - DNA, 15 bp, Homo sapiens
aacactggcagagtg

SEQ ID NO: 36755 - DNA, 15 bp, Homo sapiens
aaacactggcagagt

SEQ ID NO: 36756 - DNA, 15 bp, Homo sapiens
caaacactggcagag

SEQ ID NO: 36757 - DNA, 15 bp, Homo sapiens
acaaacactggcaga

SEQ ID NO: 36758 - DNA, 15 bp, Homo sapiens
gacaaacactggcag

SEQ ID NO: 36759 - DNA, 15 bp, Homo sapiens
tgacaaacactggca

SEQ ID NO: 36760 - DNA, 15 bp, Homo sapiens
ttgacaaacactggc

SEQ ID NO: 36761 - DNA, 15 bp, Homo sapiens
tttgacaaacactgg

SEQ ID NO: 36762 - DNA, 15 bp, Homo sapiens
ttttgacaaacactg

SEQ ID NO: 36763 - DNA, 15 bp, Homo sapiens
gttttgacaaacact

SEQ ID NO: 36764 - DNA, 15 bp, Homo sapiens
tgttttgacaaacac

SEQ ID NO: 36765 - DNA, 15 bp, Homo sapiens
atgttttgacaaaca

SEQ ID NO: 36766 - DNA, 15 bp, Homo sapiens
catgttttgacaaac

SEQ ID NO: 36767 - DNA, 15 bp, Homo sapiens
ccatgttttgacaaa

SEQ ID NO: 36768 - DNA, 15 bp, Homo sapiens
accatgttttgacaa

SEQ ID NO: 36769 - DNA, 15 bp, Homo sapiens
gaccatgttttgaca

SEQ ID NO: 36770 - DNA, 15 bp, Homo sapiens
ggaccatgttttgac

SEQ ID NO: 36771 - DNA, 15 bp, Homo sapiens
gggaccatgttttga

SEQ ID NO: 36772 - DNA, 15 bp, Homo sapiens
ggggaccatgttttg

SEQ ID NO: 36773 - DNA, 15 bp, Homo sapiens
tggggaccatgtttt

SEQ ID NO: 36774 - DNA, 15 bp, Homo sapiens
ctggggaccatgttt

SEQ ID NO: 36775 - DNA, 15 bp, Homo sapiens
cctggggaccatgtt

SEQ ID NO: 36776 - DNA, 15 bp, Homo sapiens
acctggggaccatgt

SEQ ID NO: 36777 - DNA, 15 bp, Homo sapiens
gacctggggaccatg

SEQ ID NO: 36778 - DNA, 15 bp, Homo sapiens
tgacctggggaccat

SEQ ID NO: 36779 - DNA, 15 bp, Homo sapiens
ctgacctggggacca

SEQ ID NO: 36780 - DNA, 15 bp, Homo sapiens
gctgacctggggacc

SEQ ID NO: 36781 - DNA, 15 bp, Homo sapiens
tgctgacctggggac

SEQ ID NO: 36782 - DNA, 15 bp, Homo sapiens
ctgctgacctgggga

SEQ ID NO: 36783 - DNA, 15 bp, Homo sapiens
gctgctgacctgggg

SEQ ID NO: 36784 - DNA, 15 bp, Homo sapiens
tgctgctgacctggg

SEQ ID NO: 36785 - DNA, 15 bp, Homo sapiens
atgctgctgacctgg

SEQ ID NO: 36786 - DNA, 15 bp, Homo sapiens
gatgctgctgacctg

SEQ ID NO: 36787 - DNA, 15 bp, Homo sapiens
tgatgctgctgacct

SEQ ID NO: 36788 - DNA, 15 bp, Homo sapiens
ctgatgctgctgacc

SEQ ID NO: 36789 - DNA, 15 bp, Homo sapiens
gctgatgctgctgac

SEQ ID NO: 36790 - DNA, 15 bp, Homo sapiens
tgctgatgctgctga

SEQ ID NO: 36791 - DNA, 15 bp, Homo sapiens
atgctgatgctgctg

SEQ ID NO: 36792 - DNA, 15 bp, Homo sapiens
gatgctgatgctgct

SEQ ID NO: 36793 - DNA, 15 bp, Homo sapiens
tgatgctgatgctgc

SEQ ID NO: 36794 - DNA, 15 bp, Homo sapiens
gtgatgctgatgctg

SEQ ID NO: 36795 - DNA, 15 bp, Homo sapiens
ggtgatgctgatgct

SEQ ID NO: 36796 - DNA, 15 bp, Homo sapiens
aggtgatgctgatgc

SEQ ID NO: 36797 - DNA, 15 bp, Homo sapiens
caggtgatgctgatg

SEQ ID NO: 36798 - DNA, 15 bp, Homo sapiens
acaggtgatgctgat

SEQ ID NO: 36799 - DNA, 15 bp, Homo sapiens
tacaggtgatgctga

SEQ ID NO: 36800 - DNA, 15 bp, Homo sapiens
ttacaggtgatgctg

SEQ ID NO: 36801 - DNA, 15 bp, Homo sapiens
cttacaggtgatgct

SEQ ID NO: 36802 - DNA, 15 bp, Homo sapiens
acttacaggtgatgc

SEQ ID NO: 36803 - DNA, 15 bp, Homo sapiens
cacttacaggtgatg

SEQ ID NO: 36804 - DNA, 15 bp, Homo sapiens
tcacttacaggtgat

SEQ ID NO: 36805 - DNA, 15 bp, Homo sapiens
atcacttacaggtga

SEQ ID NO: 36806 - DNA, 15 bp, Homo sapiens
aatcacttacaggtg

SEQ ID NO: 36807 - DNA, 15 bp, Homo sapiens
gaatcacttacaggt

SEQ ID NO: 36808 - DNA, 15 bp, Homo sapiens
agaatcacttacagg

SEQ ID NO: 36809 - DNA, 15 bp, Homo sapiens
gagaatcacttacag

SEQ ID NO: 36810 - DNA, 15 bp, Homo sapiens
ggagaatcacttaca

SEQ ID NO: 36811 - DNA, 15 bp, Homo sapiens
tggagaatcacttac

SEQ ID NO: 36812 - DNA, 15 bp, Homo sapiens
ctggagaatcactta

SEQ ID NO: 36813 - DNA, 15 bp, Homo sapiens
actggagaatcactt

SEQ ID NO: 36814 - DNA, 15 bp, Homo sapiens
gactggagaatcact

SEQ ID NO: 36815 - DNA, 15 bp, Homo sapiens
cgactggagaatcac

SEQ ID NO: 36816 - DNA, 15 bp, Homo sapiens
gcgactggagaatca

SEQ ID NO: 36817 - DNA, 15 bp, Homo sapiens
tgcgactggagaatc

SEQ ID NO: 36818 - DNA, 15 bp, Homo sapiens
atgcgactggagaat

SEQ ID NO: 36819 - DNA, 15 bp, Homo sapiens
gatgcgactggagaa

SEQ ID NO: 36820 - DNA, 15 bp, Homo sapiens
ggatgcgactggaga

SEQ ID NO: 36821 - DNA, 15 bp, Homo sapiens
gggatgcgactggag

SEQ ID NO: 36822 - DNA, 15 bp, Homo sapiens
tgggatgcgactgga

SEQ ID NO: 36823 - DNA, 15 bp, Homo sapiens
ctgggatgcgactgg

SEQ ID NO: 36824 - DNA, 15 bp, Homo sapiens
cctgggatgcgactg

SEQ ID NO: 36825 - DNA, 15 bp, Homo sapiens
ccctgggatgcgact

SEQ ID NO: 36826 - DNA, 15 bp, Homo sapiens
gccctgggatgcgac

SEQ ID NO: 36827 - DNA, 15 bp, Homo sapiens
ggccctgggatgcga

SEQ ID NO: 36828 - DNA, 15 bp, Homo sapiens
cggccctgggatgcg

SEQ ID NO: 36829 - DNA, 15 bp, Homo sapiens
gcggccctgggatgc

SEQ ID NO: 36830 - DNA, 15 bp, Homo sapiens
agcggccctgggatg

SEQ ID NO: 36831 - DNA, 15 bp, Homo sapiens
cagcggccctgggat

SEQ ID NO: 36832 - DNA, 15 bp, Homo sapiens
acagcggccctggga

SEQ ID NO: 36833 - DNA, 15 bp, Homo sapiens
tacagcggccctggg

SEQ ID NO: 36834 - DNA, 15 bp, Homo sapiens
atacagcggccctgg

SEQ ID NO: 36835 - DNA, 15 bp, Homo sapiens
gatacagcggccctg

SEQ ID NO: 36836 - DNA, 15 bp, Homo sapiens
tgatacagcggccct

SEQ ID NO: 36837 - DNA, 15 bp, Homo sapiens
ctgatacagcggccc

SEQ ID NO: 36838 - DNA, 15 bp, Homo sapiens
tctgatacagcggcc

SEQ ID NO: 36839 - DNA, 15 bp, Homo sapiens
ttctgatacagcggc

SEQ ID NO: 36840 - DNA, 15 bp, Homo sapiens
tttctgatacagcgg

SEQ ID NO: 36841 - DNA, 15 bp, Homo sapiens
gtttctgatacagcg

SEQ ID NO: 36842 - DNA, 15 bp, Homo sapiens
agtttctgatacagc

SEQ ID NO: 36843 - DNA, 15 bp, Homo sapiens
gagtttctgatacag

SEQ ID NO: 36844 - DNA, 15 bp, Homo sapiens
agagtttctgataca

SEQ ID NO: 36845 - DNA, 15 bp, Homo sapiens
cagagtttctgatac

SEQ ID NO: 36846 - DNA, 15 bp, Homo sapiens
ccagagtttctgata

SEQ ID NO: 36847 - DNA, 15 bp, Homo sapiens
cccagagtttctgat

SEQ ID NO: 36848 - DNA, 15 bp, Homo sapiens
ccccagagtttctga

SEQ ID NO: 36849 - DNA, 15 bp, Homo sapiens
cccccagagtttctg

SEQ ID NO: 36850 - DNA, 15 bp, Homo sapiens
acccccagagtttct

SEQ ID NO: 36851 - DNA, 15 bp, Homo sapiens
cacccccagagtttc

SEQ ID NO: 36852 - DNA, 15 bp, Homo sapiens
ccacccccagagttt

SEQ ID NO: 36853 - DNA, 15 bp, Homo sapiens
cccacccccagagtt

SEQ ID NO: 36854 - DNA, 15 bp, Homo sapiens
ccccacccccagagt

SEQ ID NO: 36855 - DNA, 15 bp, Homo sapiens
cccccacccccagag

SEQ ID NO: 36856 - DNA, 15 bp, Homo sapiens
acccccacccccaga

SEQ ID NO: 36857 - DNA, 15 bp, Homo sapiens
cacccccacccccag

SEQ ID NO: 36858 - DNA, 15 bp, Homo sapiens
ccacccccaccccca

SEQ ID NO: 36859 - DNA, 15 bp, Homo sapiens
cccacccccaccccc

SEQ ID NO: 36860 - DNA, 15 bp, Homo sapiens
ccccacccccacccc

SEQ ID NO: 36861 - DNA, 15 bp, Homo sapiens
cccccacccccaccc

SEQ ID NO: 36862 - DNA, 15 bp, Homo sapiens
acccccacccccacc

SEQ ID NO: 36863 - DNA, 15 bp, Homo sapiens
cacccccacccccac

SEQ ID NO: 36864 - DNA, 15 bp, Homo sapiens
gcccccacccccacc

SEQ ID NO: 36865 - DNA, 15 bp, Homo sapiens
ggcccccacccccac

SEQ ID NO: 36866 - DNA, 15 bp, Homo sapiens
cggcccccaccccca

SEQ ID NO: 36867 - DNA, 15 bp, Homo sapiens
ccggcccccaccccc

SEQ ID NO: 36868 - DNA, 15 bp, Homo sapiens
gccggcccccacccc

SEQ ID NO: 36869 - DNA, 15 bp, Homo sapiens
ggccggcccccaccc

SEQ ID NO: 36870 - DNA, 15 bp, Homo sapiens
gggccggcccccacc

SEQ ID NO: 36871 - DNA, 15 bp, Homo sapiens
cgggccggcccccac

SEQ ID NO: 36872 - DNA, 15 bp, Homo sapiens
ccgggccggccccca

SEQ ID NO: 36873 - DNA, 15 bp, Homo sapiens
gccgggccggccccc

SEQ ID NO: 36874 - DNA, 15 bp, Homo sapiens
ggccgggccggcccc

SEQ ID NO: 36875 - DNA, 15 bp, Homo sapiens
gggccgggccggccc

SEQ ID NO: 36876 - DNA, 15 bp, Homo sapiens
cgggccgggccggcc

SEQ ID NO: 36877 - DNA, 15 bp, Homo sapiens
ccgggccgggccggc

SEQ ID NO: 36878 - DNA, 15 bp, Homo sapiens
gccgggccgggccgg

SEQ ID NO: 36879 - DNA, 15 bp, Homo sapiens
ggccgggccgggccg

SEQ ID NO: 36880 - DNA, 15 bp, Homo sapiens
gggccgggccgggcc

SEQ ID NO: 36881 - DNA, 15 bp, Homo sapiens
cgggccgggccgggc

SEQ ID NO: 36882 - DNA, 15 bp, Homo sapiens
ccgggccgggccggg

SEQ ID NO: 36883 - DNA, 15 bp, Homo sapiens
tgccgggccgggccg

SEQ ID NO: 36884 - DNA, 15 bp, Homo sapiens
ctgccgggccgggcc

SEQ ID NO: 36885 - DNA, 15 bp, Homo sapiens
actgccgggccgggc

SEQ ID NO: 36886 - DNA, 15 bp, Homo sapiens
gactgccgggccggg

SEQ ID NO: 36887 - DNA, 15 bp, Homo sapiens
agactgccgggccgg

SEQ ID NO: 36888 - DNA, 15 bp, Homo sapiens
cagactgccgggccg

SEQ ID NO: 36889 - DNA, 15 bp, Homo sapiens
gcagactgccgggcc

SEQ ID NO: 36890 - DNA, 15 bp, Homo sapiens
tgcagactgccgggc

SEQ ID NO: 36891 - DNA, 15 bp, Homo sapiens
atgcagactgccggg

SEQ ID NO: 36892 - DNA, 15 bp, Homo sapiens
aatgcagactgccgg

SEQ ID NO: 36893 - DNA, 15 bp, Homo sapiens
aaatgcagactgccg

SEQ ID NO: 36894 - DNA, 15 bp, Homo sapiens
aaaatgcagactgcc

SEQ ID NO: 36895 - DNA, 15 bp, Homo sapiens
taaaatgcagactgc

SEQ ID NO: 36896 - DNA, 15 bp, Homo sapiens
ttaaaatgcagactg

SEQ ID NO: 36897 - DNA, 15 bp, Homo sapiens
gttaaaatgcagact

SEQ ID NO: 36898 - DNA, 15 bp, Homo sapiens
tgttaaaatgcagac

SEQ ID NO: 36899 - DNA, 15 bp, Homo sapiens
ttgttaaaatgcaga

SEQ ID NO: 36900 - DNA, 15 bp, Homo sapiens
cttgttaaaatgcag

SEQ ID NO: 36901 - DNA, 15 bp, Homo sapiens
gcttgttaaaatgca

SEQ ID NO: 36902 - DNA, 15 bp, Homo sapiens
agcttgttaaaatgc

SEQ ID NO: 36903 - DNA, 15 bp, Homo sapiens
gagcttgttaaaatg

SEQ ID NO: 36904 - DNA, 15 bp, Homo sapiens
agagcttgttaaaat

SEQ ID NO: 36905 - DNA, 15 bp, Homo sapiens
gagagcttgttaaaa

SEQ ID NO: 36906 - DNA, 15 bp, Homo sapiens
ggagagcttgttaaa

SEQ ID NO: 36907 - DNA, 15 bp, Homo sapiens
tggagagcttgttaa

SEQ ID NO: 36908 - DNA, 15 bp, Homo sapiens
ctggagagcttgtta

SEQ ID NO: 36909 - DNA, 15 bp, Homo sapiens
cctggagagcttgtt

SEQ ID NO: 36910 - DNA, 15 bp, Homo sapiens
acctggagagcttgt

SEQ ID NO: 36911 - DNA, 15 bp, Homo sapiens
cacctggagagcttg

SEQ ID NO: 36912 - DNA, 15 bp, Homo sapiens
tcacctggagagctt

SEQ ID NO: 36913 - DNA, 15 bp, Homo sapiens
atcacctggagagct

SEQ ID NO: 36914 - DNA, 15 bp, Homo sapiens
aatcacctggagagc

SEQ ID NO: 36915 - DNA, 15 bp, Homo sapiens
gaatcacctggagag

SEQ ID NO: 36916 - DNA, 15 bp, Homo sapiens
agaatcacctggaga

SEQ ID NO: 36917 - DNA, 15 bp, Homo sapiens
cagaatcacctggag

SEQ ID NO: 36918 - DNA, 15 bp, Homo sapiens
tcagaatcacctgga

SEQ ID NO: 36919 - DNA, 15 bp, Homo sapiens
atcagaatcacctgg

SEQ ID NO: 36920 - DNA, 15 bp, Homo sapiens
catcagaatcacctg

SEQ ID NO: 36921 - DNA, 15 bp, Homo sapiens
gcatcagaatcacct

SEQ ID NO: 36922 - DNA, 15 bp, Homo sapiens
tgcatcagaatcacc

SEQ ID NO: 36923 - DNA, 15 bp, Homo sapiens
atgcatcagaatcac

SEQ ID NO: 36924 - DNA, 15 bp, Homo sapiens
tatgcatcagaatca

SEQ ID NO: 36925 - DNA, 15 bp, Homo sapiens
gtatgcatcagaatc

SEQ ID NO: 36926 - DNA, 15 bp, Homo sapiens
agtatgcatcagaat

SEQ ID NO: 36927 - DNA, 15 bp, Homo sapiens
aagtatgcatcagaa

SEQ ID NO: 36928 - DNA, 15 bp, Homo sapiens
taagtatgcatcaga

SEQ ID NO: 36929 - DNA, 15 bp, Homo sapiens
ttaagtatgcatcag

SEQ ID NO: 36930 - DNA, 15 bp, Homo sapiens
cttaagtatgcatca

SEQ ID NO: 36931 - DNA, 15 bp, Homo sapiens
acttaagtatgcatc

SEQ ID NO: 36932 - DNA, 15 bp, Homo sapiens
aacttaagtatgcat

SEQ ID NO: 36933 - DNA, 15 bp, Homo sapiens
aaacttaagtatgca

SEQ ID NO: 36934 - DNA, 15 bp, Homo sapiens
caaacttaagtatgc

SEQ ID NO: 36935 - DNA, 15 bp, Homo sapiens
tcaaacttaagtatg

SEQ ID NO: 36936 - DNA, 15 bp, Homo sapiens
ctcaaacttaagtat

SEQ ID NO: 36937 - DNA, 15 bp, Homo sapiens
tctcaaacttaagta

SEQ ID NO: 36938 - DNA, 15 bp, Homo sapiens
ttctcaaacttaagt

SEQ ID NO: 36939 - DNA, 15 bp, Homo sapiens
gttctcaaacttaag

SEQ ID NO: 36940 - DNA, 15 bp, Homo sapiens
ggttctcaaacttaa

SEQ ID NO: 36941 - DNA, 15 bp, Homo sapiens
tggttctcaaactta

SEQ ID NO: 36942 - DNA, 15 bp, Homo sapiens
atggttctcaaactt

SEQ ID NO: 36943 - DNA, 15 bp, Homo sapiens
aatggttctcaaact

SEQ ID NO: 36944 - DNA, 15 bp, Homo sapiens
caatggttctcaaac

SEQ ID NO: 36945 - DNA, 15 bp, Homo sapiens
gcaatggttctcaaa

SEQ ID NO: 36946 - DNA, 15 bp, Homo sapiens
agcaatggttctcaa

SEQ ID NO: 36947 - DNA, 15 bp, Homo sapiens
aagcaatggttctca

SEQ ID NO: 36948 - DNA, 15 bp, Homo sapiens
caagcaatggttctc

SEQ ID NO: 36949 - DNA, 15 bp, Homo sapiens
acaagcaatggttct

SEQ ID NO: 36950 - DNA, 15 bp, Homo sapiens
aacaagcaatggttc

SEQ ID NO: 36951 - DNA, 15 bp, Homo sapiens
aaacaagcaatggtt

SEQ ID NO: 36952 - DNA, 15 bp, Homo sapiens
aaaacaagcaatggt

SEQ ID NO: 36953 - DNA, 15 bp, Homo sapiens
caaaacaagcaatgg

SEQ ID NO: 36954 - DNA, 15 bp, Homo sapiens
gcaaaacaagcaatg

SEQ ID NO: 36955 - DNA, 15 bp, Homo sapiens
tgcaaaacaagcaat

SEQ ID NO: 36956 - DNA, 15 bp, Homo sapiens
atgcaaaacaagcaa

SEQ ID NO: 36957 - DNA, 15 bp, Homo sapiens
aatgcaaaacaagca

SEQ ID NO: 36958 - DNA, 15 bp, Homo sapiens
taatgcaaaacaagc

SEQ ID NO: 36959 - DNA, 15 bp, Homo sapiens
ttaatgcaaaacaag

SEQ ID NO: 36960 - DNA, 15 bp, Homo sapiens
tttaatgcaaaacaa

SEQ ID NO: 36961 - DNA, 15 bp, Homo sapiens
gtttaatgcaaaaca

SEQ ID NO: 36962 - DNA, 15 bp, Homo sapiens
tgtttaatgcaaaac

SEQ ID NO: 36963 - DNA, 15 bp, Homo sapiens
ctgtttaatgcaaaa

SEQ ID NO: 36964 - DNA, 15 bp, Homo sapiens
cctgtttaatgcaaa

SEQ ID NO: 36965 - DNA, 15 bp, Homo sapiens
tcctgtttaatgcaa

SEQ ID NO: 36966 - DNA, 15 bp, Homo sapiens
ctcctgtttaatgca

SEQ ID NO: 36967 - DNA, 15 bp, Homo sapiens
tctcctgtttaatgc

SEQ ID NO: 36968 - DNA, 15 bp, Homo sapiens
atctcctgtttaatg

SEQ ID NO: 36969 - DNA, 15 bp, Homo sapiens
aatctcctgtttaat

SEQ ID NO: 36970 - DNA, 15 bp, Homo sapiens
taatctcctgtttaa

SEQ ID NO: 36971 - DNA, 15 bp, Homo sapiens
ctaatctcctgttta

SEQ ID NO: 36972 - DNA, 15 bp, Homo sapiens
actaatctcctgttt

SEQ ID NO: 36973 - DNA, 15 bp, Homo sapiens
gactaatctcctgtt

SEQ ID NO: 36974 - DNA, 15 bp, Homo sapiens
agactaatctcctgt

SEQ ID NO: 36975 - DNA, 15 bp, Homo sapiens
gagactaatctcctg

SEQ ID NO: 36976 - DNA, 15 bp, Homo sapiens
agagactaatctcct

SEQ ID NO: 36977 - DNA, 15 bp, Homo sapiens
cagagactaatctcc

SEQ ID NO: 36978 - DNA, 15 bp, Homo sapiens
gcagagactaatctc

SEQ ID NO: 36979 - DNA, 15 bp, Homo sapiens
tgcagagactaatct

SEQ ID NO: 36980 - DNA, 15 bp, Homo sapiens
ctgcagagactaatc

SEQ ID NO: 36981 - DNA, 15 bp, Homo sapiens
gctgcagagactaat

SEQ ID NO: 36982 - DNA, 15 bp, Homo sapiens
agctgcagagactaa

SEQ ID NO: 36983 - DNA, 15 bp, Homo sapiens
aagctgcagagacta

SEQ ID NO: 36984 - DNA, 15 bp, Homo sapiens
caagctgcagagact

SEQ ID NO: 36985 - DNA, 15 bp, Homo sapiens
acaagctgcagagac

SEQ ID NO: 36986 - DNA, 15 bp, Homo sapiens
cacaagctgcagaga

SEQ ID NO: 36987 - DNA, 15 bp, Homo sapiens
ccacaagctgcagag

SEQ ID NO: 36988 - DNA, 15 bp, Homo sapiens
cccacaagctgcaga

SEQ ID NO: 36989 - DNA, 15 bp, Homo sapiens
tcccacaagctgcag

SEQ ID NO: 36990 - DNA, 15 bp, Homo sapiens
ttcccacaagctgca

SEQ ID NO: 36991 - DNA, 15 bp, Homo sapiens
attcccacaagctgc

SEQ ID NO: 36992 - DNA, 15 bp, Homo sapiens
tattcccacaagctg

SEQ ID NO: 36993 - DNA, 15 bp, Homo sapiens
ttattcccacaagct

SEQ ID NO: 36994 - DNA, 15 bp, Homo sapiens
tttattcccacaagc

SEQ ID NO: 36995 - DNA, 15 bp, Homo sapiens
ctttattcccacaag

SEQ ID NO: 36996 - DNA, 15 bp, Homo sapiens
gctttattcccacaa

SEQ ID NO: 36997 - DNA, 15 bp, Homo sapiens
agctttattcccaca

SEQ ID NO: 36998 - DNA, 15 bp, Homo sapiens
aagctttattcccac

SEQ ID NO: 36999 - DNA, 15 bp, Homo sapiens
aaagctttattccca

SEQ ID NO: 37000 - DNA, 15 bp, Homo sapiens
taaagctttattccc

SEQ ID NO: 37001 - DNA, 15 bp, Homo sapiens
ttaaagctttattcc

SEQ ID NO: 37002 - DNA, 15 bp, Homo sapiens
tttaaagctttattc

SEQ ID NO: 37003 - DNA, 15 bp, Homo sapiens
atttaaagctttatt

SEQ ID NO: 37004 - DNA, 15 bp, Homo sapiens
gatttaaagctttat

SEQ ID NO: 37005 - DNA, 15 bp, Homo sapiens
agatttaaagcttta

SEQ ID NO: 37006 - DNA, 15 bp, Homo sapiens
gagatttaaagcttt

SEQ ID NO: 37007 - DNA, 15 bp, Homo sapiens
agagatttaaagctt

SEQ ID NO: 37008 - DNA, 15 bp, Homo sapiens
gagagatttaaagct

SEQ ID NO: 37009 - DNA, 15 bp, Homo sapiens
ggagagatttaaagc

SEQ ID NO: 37010 - DNA, 15 bp, Homo sapiens
tggagagatttaaag

SEQ ID NO: 37011 - DNA, 15 bp, Homo sapiens
ttggagagatttaaa

SEQ ID NO: 37012 - DNA, 15 bp, Homo sapiens
attggagagatttaa

SEQ ID NO: 37013 - DNA, 15 bp, Homo sapiens
aattggagagattta

SEQ ID NO: 37014 - DNA, 15 bp, Homo sapiens
aaattggagagattt

SEQ ID NO: 37015 - DNA, 15 bp, Homo sapiens
aaaattggagagatt

SEQ ID NO: 37016 - DNA, 15 bp, Homo sapiens
taaaattggagagat

SEQ ID NO: 37017 - DNA, 15 bp, Homo sapiens
ctaaaattggagaga

SEQ ID NO: 37018 - DNA, 15 bp, Homo sapiens
gctaaaattggagag

SEQ ID NO: 37019 - DNA, 15 bp, Homo sapiens
agctaaaattggaga

SEQ ID NO: 37020 - DNA, 15 bp, Homo sapiens
gagctaaaattggag

SEQ ID NO: 37021 - DNA, 15 bp, Homo sapiens
agagctaaaattgga

SEQ ID NO: 37022 - DNA, 15 bp, Homo sapiens
cagagctaaaattgg

SEQ ID NO: 37023 - DNA, 15 bp, Homo sapiens
acagagctaaaattg

SEQ ID NO: 37024 - DNA, 15 bp, Homo sapiens
cacagagctaaaatt

SEQ ID NO: 37025 - DNA, 15 bp, Homo sapiens
tcacagagctaaaat

SEQ ID NO: 37026 - DNA, 15 bp, Homo sapiens
ttcacagagctaaaa

SEQ ID NO: 37027 - DNA, 15 bp, Homo sapiens
tttcacagagctaaa

SEQ ID NO: 37028 - DNA, 15 bp, Homo sapiens
ttttcacagagctaa

SEQ ID NO: 37029 - DNA, 15 bp, Homo sapiens
cttttcacagagcta

SEQ ID NO: 37030 - DNA, 15 bp, Homo sapiens
ccttttcacagagct

SEQ ID NO: 37031 - DNA, 15 bp, Homo sapiens
gccttttcacagagc

SEQ ID NO: 37032 - DNA, 15 bp, Homo sapiens
tgccttttcacagag

SEQ ID NO: 37033 - DNA, 15 bp, Homo sapiens
ctgccttttcacaga

SEQ ID NO: 37034 - DNA, 15 bp, Homo sapiens
actgccttttcacag

SEQ ID NO: 37035 - DNA, 15 bp, Homo sapiens
cactgccttttcaca

SEQ ID NO: 37036 - DNA, 15 bp, Homo sapiens
ccactgccttttcac

SEQ ID NO: 37037 - DNA, 15 bp, Homo sapiens
cccactgccttttca

SEQ ID NO: 37038 - DNA, 15 bp, Homo sapiens
ccccactgccttttc

SEQ ID NO: 37039 - DNA, 15 bp, Homo sapiens
tccccactgcctttt

SEQ ID NO: 37040 - DNA, 15 bp, Homo sapiens
ctccccactgccttt

SEQ ID NO: 37041 - DNA, 15 bp, Homo sapiens
tctccccactgcctt

SEQ ID NO: 37042 - DNA, 15 bp, Homo sapiens
gtctccccactgcct

SEQ ID NO: 37043 - DNA, 15 bp, Homo sapiens
tgtctccccactgcc

SEQ ID NO: 37044 - DNA, 15 bp, Homo sapiens
ctgtctccccactgc

SEQ ID NO: 37045 - DNA, 15 bp, Homo sapiens
cctgtctccccactg

SEQ ID NO: 37046 - DNA, 15 bp, Homo sapiens
tcctgtctccccact

SEQ ID NO: 37047 - DNA, 15 bp, Homo sapiens
ttcctgtctccccac

SEQ ID NO: 37048 - DNA, 15 bp, Homo sapiens
attcctgtctcccca

SEQ ID NO: 37049 - DNA, 15 bp, Homo sapiens
cattcctgtctcccc

SEQ ID NO: 37050 - DNA, 15 bp, Homo sapiens
tcattcctgtctccc

SEQ ID NO: 37051 - DNA, 15 bp, Homo sapiens
ttcattcctgtctcc

SEQ ID NO: 37052 - DNA, 15 bp, Homo sapiens
gttcattcctgtctc

SEQ ID NO: 37053 - DNA, 15 bp, Homo sapiens
cgttcattcctgtct

SEQ ID NO: 37054 - DNA, 15 bp, Homo sapiens
ccgttcattcctgtc

SEQ ID NO: 37055 - DNA, 15 bp, Homo sapiens
tccgttcattcctgt

SEQ ID NO: 37056 - DNA, 15 bp, Homo sapiens
gtccgttcattcctg

SEQ ID NO: 37057 - DNA, 15 bp, Homo sapiens
agtccgttcattcct

SEQ ID NO: 37058 - DNA, 15 bp, Homo sapiens
tagtccgttcattcc

SEQ ID NO: 37059 - DNA, 15 bp, Homo sapiens
ctagtccgttcattc

SEQ ID NO: 37060 - DNA, 15 bp, Homo sapiens
actagtccgttcatt

SEQ ID NO: 37061 - DNA, 15 bp, Homo sapiens
cactagtccgttcat

SEQ ID NO: 37062 - DNA, 15 bp, Homo sapiens
gcactagtccgttca

SEQ ID NO: 37063 - DNA, 15 bp, Homo sapiens
ggcactagtccgttc

SEQ ID NO: 37064 - DNA, 15 bp, Homo sapiens
tggcactagtccgtt

SEQ ID NO: 37065 - DNA, 15 bp, Homo sapiens
gtggcactagtccgt

SEQ ID NO: 37066 - DNA, 15 bp, Homo sapiens
tgtggcactagtccg

SEQ ID NO: 37067 - DNA, 15 bp, Homo sapiens
ttgtggcactagtcc

SEQ ID NO: 37068 - DNA, 15 bp, Homo sapiens
tttgtggcactagtc

SEQ ID NO: 37069 - DNA, 15 bp, Homo sapiens
ctttgtggcactagt

SEQ ID NO: 37070 - DNA, 15 bp, Homo sapiens
gctttgtggcactag

SEQ ID NO: 37071 - DNA, 15 bp, Homo sapiens
agctttgtggcacta

SEQ ID NO: 37072 - DNA, 15 bp, Homo sapiens
gagctttgtggcact

SEQ ID NO: 37073 - DNA, 15 bp, Homo sapiens
tgagctttgtggcac

SEQ ID NO: 37074 - DNA, 15 bp, Homo sapiens
ctgagctttgtggca

SEQ ID NO: 37075 - DNA, 15 bp, Homo sapiens
cctgagctttgtggc

SEQ ID NO: 37076 - DNA, 15 bp, Homo sapiens
acctgagctttgtgg

SEQ ID NO: 37077 - DNA, 15 bp, Homo sapiens
cacctgagctttgtg

SEQ ID NO: 37078 - DNA, 15 bp, Homo sapiens
ccacctgagctttgt

SEQ ID NO: 37079 - DNA, 15 bp, Homo sapiens
cccacctgagctttg

SEQ ID NO: 37080 - DNA, 15 bp, Homo sapiens
ccccacctgagcttt

SEQ ID NO: 37081 - DNA, 15 bp, Homo sapiens
accccacctgagctt

SEQ ID NO: 37082 - DNA, 15 bp, Homo sapiens
caccccacctgagct

SEQ ID NO: 37083 - DNA, 15 bp, Homo sapiens
ccaccccacctgagc

SEQ ID NO: 37084 - DNA, 15 bp, Homo sapiens
cccaccccacctgag

SEQ ID NO: 37085 - DNA, 15 bp, Homo sapiens
acccaccccacctga

SEQ ID NO: 37086 - DNA, 15 bp, Homo sapiens
cacccaccccacctg

SEQ ID NO: 37087 - DNA, 15 bp, Homo sapiens
tcacccaccccacct

SEQ ID NO: 37088 - DNA, 15 bp, Homo sapiens
ctcacccaccccacc

SEQ ID NO: 37089 - DNA, 15 bp, Homo sapiens
tctcacccaccccac

SEQ ID NO: 37090 - DNA, 15 bp, Homo sapiens
atctcacccacccca

SEQ ID NO: 37091 - DNA, 15 bp, Homo sapiens
gatctcacccacccc

SEQ ID NO: 37092 - DNA, 15 bp, Homo sapiens
tgatctcacccaccc

SEQ ID NO: 37093 - DNA, 15 bp, Homo sapiens
atgatctcacccacc

SEQ ID NO: 37094 - DNA, 15 bp, Homo sapiens
aatgatctcacccac

SEQ ID NO: 37095 - DNA, 15 bp, Homo sapiens
aaatgatctcaccca

SEQ ID NO: 37096 - DNA, 15 bp, Homo sapiens
taaatgatctcaccc

SEQ ID NO: 37097 - DNA, 15 bp, Homo sapiens
ctaaatgatctcacc

SEQ ID NO: 37098 - DNA, 15 bp, Homo sapiens
tctaaatgatctcac

SEQ ID NO: 37099 - DNA, 15 bp, Homo sapiens
ttctaaatgatctca

SEQ ID NO: 37100 - DNA, 15 bp, Homo sapiens
cttctaaatgatctc

SEQ ID NO: 37101 - DNA, 15 bp, Homo sapiens
tcttctaaatgatct

SEQ ID NO: 37102 - DNA, 15 bp, Homo sapiens
ctcttctaaatgatc

SEQ ID NO: 37103 - DNA, 15 bp, Homo sapiens
tctcttctaaatgat

SEQ ID NO: 37104 - DNA, 15 bp, Homo sapiens
ttctcttctaaatga

SEQ ID NO: 37105 - DNA, 15 bp, Homo sapiens
tttctcttctaaatg

SEQ ID NO: 37106 - DNA, 15 bp, Homo sapiens
ctttctcttctaaat

SEQ ID NO: 37107 - DNA, 15 bp, Homo sapiens
tctttctcttctaaa

SEQ ID NO: 37108 - DNA, 15 bp, Homo sapiens
gtctttctcttctaa

SEQ ID NO: 37109 - DNA, 15 bp, Homo sapiens
ggtctttctcttcta

SEQ ID NO: 37110 - DNA, 15 bp, Homo sapiens
cggtctttctcttct

SEQ ID NO: 37111 - DNA, 15 bp, Homo sapiens
ccggtctttctcttc

SEQ ID NO: 37112 - DNA, 15 bp, Homo sapiens
cccggtctttctctt

SEQ ID NO: 37113 - DNA, 15 bp, Homo sapiens
gcccggtctttctct

SEQ ID NO: 37114 - DNA, 15 bp, Homo sapiens
tgcccggtctttctc

SEQ ID NO: 37115 - DNA, 15 bp, Homo sapiens
atgcccggtctttct

SEQ ID NO: 37116 - DNA, 15 bp, Homo sapiens
catgcccggtctttc

SEQ ID NO: 37117 - DNA, 15 bp, Homo sapiens
ccatgcccggtcttt

SEQ ID NO: 37118 - DNA, 15 bp, Homo sapiens
accatgcccggtctt

SEQ ID NO: 37119 - DNA, 15 bp, Homo sapiens
caccatgcccggtct

SEQ ID NO: 37120 - DNA, 15 bp, Homo sapiens
ccaccatgcccggtc

SEQ ID NO: 37121 - DNA, 15 bp, Homo sapiens
gccaccatgcccggt

SEQ ID NO: 37122 - DNA, 15 bp, Homo sapiens
cgtgagccaccatgc

SEQ ID NO: 37123 - DNA, 15 bp, Homo sapiens
gcgtgagccaccatg

SEQ ID NO: 37124 - DNA, 15 bp, Homo sapiens
ggcgtgagccaccat

SEQ ID NO: 37125 - DNA, 15 bp, Homo sapiens
aggcgtgagccacca

SEQ ID NO: 37126 - DNA, 15 bp, Homo sapiens
gtacaggcgtgagcc

SEQ ID NO: 37127 - DNA, 15 bp, Homo sapiens
agtacaggcgtgagc

SEQ ID NO: 37128 - DNA, 15 bp, Homo sapiens
cagtacaggcgtgag

SEQ ID NO: 37129 - DNA, 15 bp, Homo sapiens
acagtacaggcgtga

SEQ ID NO: 37130 - DNA, 15 bp, Homo sapiens
gacagtacaggcgtg

SEQ ID NO: 37131 - DNA, 15 bp, Homo sapiens
tgacagtacaggcgt

SEQ ID NO: 37132 - DNA, 15 bp, Homo sapiens
ctgacagtacaggcg

SEQ ID NO: 37133 - DNA, 15 bp, Homo sapiens
gctgacagtacaggc

SEQ ID NO: 37134 - DNA, 15 bp, Homo sapiens
tgctgacagtacagg

SEQ ID NO: 37135 - DNA, 15 bp, Homo sapiens
gtgctgacagtacag

SEQ ID NO: 37136 - DNA, 15 bp, Homo sapiens
agtgctgacagtaca

SEQ ID NO: 37137 - DNA, 15 bp, Homo sapiens
aagtgctgacagtac

SEQ ID NO: 37138 - DNA, 15 bp, Homo sapiens
aaagtgctgacagta

SEQ ID NO: 37139 - DNA, 15 bp, Homo sapiens
caaagtgctgacagt

SEQ ID NO: 37140 - DNA, 15 bp, Homo sapiens
ccaaagtgctgacag

SEQ ID NO: 37141 - DNA, 15 bp, Homo sapiens
cccaaagtgctgaca

SEQ ID NO: 37142 - DNA, 15 bp, Homo sapiens
tcccaaagtgctgac

SEQ ID NO: 37143 - DNA, 15 bp, Homo sapiens
ctcccaaagtgctga

SEQ ID NO: 37144 - DNA, 15 bp, Homo sapiens
tgccttggcctccca

SEQ ID NO: 37145 - DNA, 15 bp, Homo sapiens
cctgccttggcctcc

SEQ ID NO: 37146 - DNA, 15 bp, Homo sapiens
acctgccttggcctc

SEQ ID NO: 37147 - DNA, 15 bp, Homo sapiens
aacctgccttggcct

SEQ ID NO: 37148 - DNA, 15 bp, Homo sapiens
caacctgccttggcc

SEQ ID NO: 37149 - DNA, 15 bp, Homo sapiens
ccaacctgccttggc

SEQ ID NO: 37150 - DNA, 15 bp, Homo sapiens
tccaacctgccttgg

SEQ ID NO: 37151 - DNA, 15 bp, Homo sapiens
atccaacctgccttg

SEQ ID NO: 37152 - DNA, 15 bp, Homo sapiens
gatccaacctgcctt

SEQ ID NO: 37153 - DNA, 15 bp, Homo sapiens
tgatccaacctgcct

SEQ ID NO: 37154 - DNA, 15 bp, Homo sapiens
gtgatccaacctgcc

SEQ ID NO: 37155 - DNA, 15 bp, Homo sapiens
tgtgatccaacctgc

SEQ ID NO: 37156 - DNA, 15 bp, Homo sapiens
ttgtgatccaacctg

SEQ ID NO: 37157 - DNA, 15 bp, Homo sapiens
cttgtgatccaacct

SEQ ID NO: 37158 - DNA, 15 bp, Homo sapiens
ccttgtgatccaacc

SEQ ID NO: 37159 - DNA, 15 bp, Homo sapiens
accttgtgatccaac

SEQ ID NO: 37160 - DNA, 15 bp, Homo sapiens
gaccttgtgatccaa

SEQ ID NO: 37161 - DNA, 15 bp, Homo sapiens
tgaccttgtgatcca

SEQ ID NO: 37162 - DNA, 15 bp, Homo sapiens
ctgaccttgtgatcc

SEQ ID NO: 37163 - DNA, 15 bp, Homo sapiens
cctgaccttgtgatc

SEQ ID NO: 37164 - DNA, 15 bp, Homo sapiens
tcctgaccttgtgat

SEQ ID NO: 37165 - DNA, 15 bp, Homo sapiens
ctcctgaccttgtga

SEQ ID NO: 37166 - DNA, 15 bp, Homo sapiens
actcctgaccttgtg

SEQ ID NO: 37167 - DNA, 15 bp, Homo sapiens
aactcctgaccttgt

SEQ ID NO: 37168 - DNA, 15 bp, Homo sapiens
aaactcctgaccttg

SEQ ID NO: 37169 - DNA, 15 bp, Homo sapiens
caaactcctgacctt

SEQ ID NO: 37170 - DNA, 15 bp, Homo sapiens
gcaggctggtctcaa

SEQ ID NO: 37171 - DNA, 15 bp, Homo sapiens
ggcaggctggtctca

SEQ ID NO: 37172 - DNA, 15 bp, Homo sapiens
aggcaggctggtctc

SEQ ID NO: 37173 - DNA, 15 bp, Homo sapiens
taggcaggctggtct

SEQ ID NO: 37174 - DNA, 15 bp, Homo sapiens
ataggcaggctggtc

SEQ ID NO: 37175 - DNA, 15 bp, Homo sapiens
gataggcaggctggt

SEQ ID NO: 37176 - DNA, 15 bp, Homo sapiens
tgataggcaggctgg

SEQ ID NO: 37177 - DNA, 15 bp, Homo sapiens
atgataggcaggctg

SEQ ID NO: 37178 - DNA, 15 bp, Homo sapiens
catgataggcaggct

SEQ ID NO: 37179 - DNA, 15 bp, Homo sapiens
ccatgataggcaggc

SEQ ID NO: 37180 - DNA, 15 bp, Homo sapiens
accatgataggcagg

SEQ ID NO: 37181 - DNA, 15 bp, Homo sapiens
caccatgataggcag

SEQ ID NO: 37182 - DNA, 15 bp, Homo sapiens
tcaccatgataggca

SEQ ID NO: 37183 - DNA, 15 bp, Homo sapiens
ttcaccatgataggc

SEQ ID NO: 37184 - DNA, 15 bp, Homo sapiens
tttcaccatgatagg

SEQ ID NO: 37185 - DNA, 15 bp, Homo sapiens
gtttcaccatgatag

SEQ ID NO: 37186 - DNA, 15 bp, Homo sapiens
ggtttcaccatgata

SEQ ID NO: 37187 - DNA, 15 bp, Homo sapiens
gggtttcaccatgat

SEQ ID NO: 37188 - DNA, 15 bp, Homo sapiens
agggtttcaccatga

SEQ ID NO: 37189 - DNA, 15 bp, Homo sapiens
cagacagggtttcac

SEQ ID NO: 37190 - DNA, 15 bp, Homo sapiens
acagacagggtttca

SEQ ID NO: 37191 - DNA, 15 bp, Homo sapiens
tacagacagggtttc

SEQ ID NO: 37192 - DNA, 15 bp, Homo sapiens
gtacagacagggttt

SEQ ID NO: 37193 - DNA, 15 bp, Homo sapiens
agtacagacagggtt

SEQ ID NO: 37194 - DNA, 15 bp, Homo sapiens
tagtacagacagggt

SEQ ID NO: 37195 - DNA, 15 bp, Homo sapiens
ttagtacagacaggg

SEQ ID NO: 37196 - DNA, 15 bp, Homo sapiens
tttagtacagacagg

SEQ ID NO: 37197 - DNA, 15 bp, Homo sapiens
ctttagtacagacag

SEQ ID NO: 37198 - DNA, 15 bp, Homo sapiens
tctttagtacagaca

SEQ ID NO: 37199 - DNA, 15 bp, Homo sapiens
atctttagtacagac

SEQ ID NO: 37200 - DNA, 15 bp, Homo sapiens
tatctttagtacaga

SEQ ID NO: 37201 - DNA, 15 bp, Homo sapiens
ttatctttagtacag

SEQ ID NO: 37202 - DNA, 15 bp, Homo sapiens
tttatctttagtaca

SEQ ID NO: 37203 - DNA, 15 bp, Homo sapiens
ttttatctttagtac

SEQ ID NO: 37204 - DNA, 15 bp, Homo sapiens
tttttatctttagta

SEQ ID NO: 37205 - DNA, 15 bp, Homo sapiens
ttttttatctttagt

SEQ ID NO: 37206 - DNA, 15 bp, Homo sapiens
tttttttatctttag

SEQ ID NO: 37207 - DNA, 15 bp, Homo sapiens
ttttttttatcttta

SEQ ID NO: 37208 - DNA, 15 bp, Homo sapiens
tttttttttatcttt

SEQ ID NO: 37209 - DNA, 15 bp, Homo sapiens
ttttttttttatctt

SEQ ID NO: 37210 - DNA, 15 bp, Homo sapiens
tttttttttttatct

SEQ ID NO: 37211 - DNA, 15 bp, Homo sapiens
ttttttttttttatc

SEQ ID NO: 37212 - DNA, 15 bp, Homo sapiens
tttttttttttttat

SEQ ID NO: 37213 - DNA, 15 bp, Homo sapiens
attttttttttttta

SEQ ID NO: 37214 - DNA, 15 bp, Homo sapiens
aaatttttttttttt

SEQ ID NO: 37215 - DNA, 15 bp, Homo sapiens
caaattttttttttt

SEQ ID NO: 37216 - DNA, 15 bp, Homo sapiens
gcaaatttttttttt

SEQ ID NO: 37217 - DNA, 15 bp, Homo sapiens
ggcaaattttttttt

SEQ ID NO: 37218 - DNA, 15 bp, Homo sapiens
tggcaaatttttttt

SEQ ID NO: 37219 - DNA, 15 bp, Homo sapiens
ctggcaaattttttt

SEQ ID NO: 37220 - DNA, 15 bp, Homo sapiens
actggcaaatttttt

SEQ ID NO: 37221 - DNA, 15 bp, Homo sapiens
gactggcaaattttt

SEQ ID NO: 37222 - DNA, 15 bp, Homo sapiens
tgactggcaaatttt

SEQ ID NO: 37223 - DNA, 15 bp, Homo sapiens
atgactggcaaattt

SEQ ID NO: 37224 - DNA, 15 bp, Homo sapiens
catgactggcaaatt

SEQ ID NO: 37225 - DNA, 15 bp, Homo sapiens
ccatgactggcaaat

SEQ ID NO: 37226 - DNA, 15 bp, Homo sapiens
accatgactggcaaa

SEQ ID NO: 37227 - DNA, 15 bp, Homo sapiens
caccatgactggcaa

SEQ ID NO: 37228 - DNA, 15 bp, Homo sapiens
tcaccatgactggca

SEQ ID NO: 37229 - DNA, 15 bp, Homo sapiens
atcaccatgactggc

SEQ ID NO: 37230 - DNA, 15 bp, Homo sapiens
catcaccatgactgg

SEQ ID NO: 37231 - DNA, 15 bp, Homo sapiens
gcatcaccatgactg

SEQ ID NO: 37232 - DNA, 15 bp, Homo sapiens
tgcatcaccatgact

SEQ ID NO: 37233 - DNA, 15 bp, Homo sapiens
atgcatcaccatgac

SEQ ID NO: 37234 - DNA, 15 bp, Homo sapiens
tatgcatcaccatga

SEQ ID NO: 37235 - DNA, 15 bp, Homo sapiens
gtatgcatcaccatg

SEQ ID NO: 37236 - DNA, 15 bp, Homo sapiens
ggtatgcatcaccat

SEQ ID NO: 37237 - DNA, 15 bp, Homo sapiens
aggtatgcatcacca

SEQ ID NO: 37238 - DNA, 15 bp, Homo sapiens
caggtatgcatcacc

SEQ ID NO: 37239 - DNA, 15 bp, Homo sapiens
acaggtatgcatcac

SEQ ID NO: 37240 - DNA, 15 bp, Homo sapiens
tacaggtatgcatca

SEQ ID NO: 37241 - DNA, 15 bp, Homo sapiens
ttacaggtatgcatc

SEQ ID NO: 37242 - DNA, 15 bp, Homo sapiens
attacaggtatgcat

SEQ ID NO: 37243 - DNA, 15 bp, Homo sapiens
gattacaggtatgca

SEQ ID NO: 37244 - DNA, 15 bp, Homo sapiens
ggattacaggtatgc

SEQ ID NO: 37245 - DNA, 15 bp, Homo sapiens
gggattacaggtatg

SEQ ID NO: 37246 - DNA, 15 bp, Homo sapiens
tgggattacaggtat

SEQ ID NO: 37247 - DNA, 15 bp, Homo sapiens
ctgggattacaggta

SEQ ID NO: 37248 - DNA, 15 bp, Homo sapiens
cgagtagctgggatt

SEQ ID NO: 37249 - DNA, 15 bp, Homo sapiens
ccgagtagctgggat

SEQ ID NO: 37250 - DNA, 15 bp, Homo sapiens
agattctcctgcctc

SEQ ID NO: 37251 - DNA, 15 bp, Homo sapiens
gagattctcctgcct

SEQ ID NO: 37252 - DNA, 15 bp, Homo sapiens
agagattctcctgcc

SEQ ID NO: 37253 - DNA, 15 bp, Homo sapiens
aagagattctcctgc

SEQ ID NO: 37254 - DNA, 15 bp, Homo sapiens
caagagattctcctg

SEQ ID NO: 37255 - DNA, 15 bp, Homo sapiens
tcaagagattctcct

SEQ ID NO: 37256 - DNA, 15 bp, Homo sapiens
ttcaagagattctcc

SEQ ID NO: 37257 - DNA, 15 bp, Homo sapiens
gttcaagagattctc

SEQ ID NO: 37258 - DNA, 15 bp, Homo sapiens
ggttcaagagattct

SEQ ID NO: 37259 - DNA, 15 bp, Homo sapiens
gggttcaagagattc

SEQ ID NO: 37260 - DNA, 15 bp, Homo sapiens
cgggttcaagagatt

SEQ ID NO: 37261 - DNA, 15 bp, Homo sapiens
ccgggttcaagagat

SEQ ID NO: 37262 - DNA, 15 bp, Homo sapiens
cccgggttcaagaga

SEQ ID NO: 37263 - DNA, 15 bp, Homo sapiens
tcccgggttcaagag

SEQ ID NO: 37264 - DNA, 15 bp, Homo sapiens
ctcccgggttcaaga

SEQ ID NO: 37265 - DNA, 15 bp, Homo sapiens
gcctcccgggttcaa

SEQ ID NO: 37266 - DNA, 15 bp, Homo sapiens
cgcctcccgggttca

SEQ ID NO: 37267 - DNA, 15 bp, Homo sapiens
ccgcctcccgggttc

SEQ ID NO: 37268 - DNA, 15 bp, Homo sapiens
cccgcctcccgggtt

SEQ ID NO: 37269 - DNA, 15 bp, Homo sapiens
ccccgcctcccgggt

SEQ ID NO: 37270 - DNA, 15 bp, Homo sapiens
cccccgcctcccggg

SEQ ID NO: 37271 - DNA, 15 bp, Homo sapiens
acccccgcctcccgg

SEQ ID NO: 37272 - DNA, 15 bp, Homo sapiens
aacccccgcctcccg

SEQ ID NO: 37273 - DNA, 15 bp, Homo sapiens
caacccccgcctccc

SEQ ID NO: 37274 - DNA, 15 bp, Homo sapiens
gcaacccccgcctcc

SEQ ID NO: 37275 - DNA, 15 bp, Homo sapiens
tgcaacccccgcctc

SEQ ID NO: 37276 - DNA, 15 bp, Homo sapiens
ctgcaacccccgcct

SEQ ID NO: 37277 - DNA, 15 bp, Homo sapiens
actgcaacccccgcc

SEQ ID NO: 37278 - DNA, 15 bp, Homo sapiens
cactgcaacccccgc

SEQ ID NO: 37279 - DNA, 15 bp, Homo sapiens
tcactgcaacccccg

SEQ ID NO: 37280 - DNA, 15 bp, Homo sapiens
ctcactgcaaccccc

SEQ ID NO: 37281 - DNA, 15 bp, Homo sapiens
gctcactgcaacccc

SEQ ID NO: 37282 - DNA, 15 bp, Homo sapiens
agctcactgcaaccc

SEQ ID NO: 37283 - DNA, 15 bp, Homo sapiens
aatctcagctcactg

SEQ ID NO: 37284 - DNA, 15 bp, Homo sapiens
gaatctcagctcact

SEQ ID NO: 37285 - DNA, 15 bp, Homo sapiens
ggaatctcagctcac

SEQ ID NO: 37286 - DNA, 15 bp, Homo sapiens
tggaatctcagctca

SEQ ID NO: 37287 - DNA, 15 bp, Homo sapiens
gtggaatctcagctc

SEQ ID NO: 37288 - DNA, 15 bp, Homo sapiens
ggtggaatctcagct

SEQ ID NO: 37289 - DNA, 15 bp, Homo sapiens
tggtggaatctcagc

SEQ ID NO: 37290 - DNA, 15 bp, Homo sapiens
atggtggaatctcag

SEQ ID NO: 37291 - DNA, 15 bp, Homo sapiens
aatggtggaatctca

SEQ ID NO: 37292 - DNA, 15 bp, Homo sapiens
caatggtggaatctc

SEQ ID NO: 37293 - DNA, 15 bp, Homo sapiens
gcaatggtggaatct

SEQ ID NO: 37294 - DNA, 15 bp, Homo sapiens
tgcaatggtggaatc

SEQ ID NO: 37295 - DNA, 15 bp, Homo sapiens
gtgcaatggtggaat

SEQ ID NO: 37296 - DNA, 15 bp, Homo sapiens
agtgcaatggtggaa

SEQ ID NO: 37297 - DNA, 15 bp, Homo sapiens
gagtgcaatggtgga

SEQ ID NO: 37298 - DNA, 15 bp, Homo sapiens
ggagtgcaatggtgg

SEQ ID NO: 37299 - DNA, 15 bp, Homo sapiens
ttggagtgcaatggt

SEQ ID NO: 37300 - DNA, 15 bp, Homo sapiens
gttggagtgcaatgg

SEQ ID NO: 37301 - DNA, 15 bp, Homo sapiens
ggttggagtgcaatg

SEQ ID NO: 37302 - DNA, 15 bp, Homo sapiens
aggttggagtgcaat

SEQ ID NO: 37303 - DNA, 15 bp, Homo sapiens
taggttggagtgcaa

SEQ ID NO: 37304 - DNA, 15 bp, Homo sapiens
ctaggttggagtgca

SEQ ID NO: 37305 - DNA, 15 bp, Homo sapiens
cctaggttggagtgc

SEQ ID NO: 37306 - DNA, 15 bp, Homo sapiens
acctaggttggagtg

SEQ ID NO: 37307 - DNA, 15 bp, Homo sapiens
cacctaggttggagt

SEQ ID NO: 37308 - DNA, 15 bp, Homo sapiens
tcacctaggttggag

SEQ ID NO: 37309 - DNA, 15 bp, Homo sapiens
gtcacctaggttgga

SEQ ID NO: 37310 - DNA, 15 bp, Homo sapiens
tgtcacctaggttgg

SEQ ID NO: 37311 - DNA, 15 bp, Homo sapiens
ctgtcacctaggttg

SEQ ID NO: 37312 - DNA, 15 bp, Homo sapiens
cctgtcacctaggtt

SEQ ID NO: 37313 - DNA, 15 bp, Homo sapiens
ccctgtcacctaggt

SEQ ID NO: 37314 - DNA, 15 bp, Homo sapiens
accctgtcacctagg

SEQ ID NO: 37315 - DNA, 15 bp, Homo sapiens
caccctgtcacctag

SEQ ID NO: 37316 - DNA, 15 bp, Homo sapiens
tcaccctgtcaccta

SEQ ID NO: 37317 - DNA, 15 bp, Homo sapiens
ctcaccctgtcacct

SEQ ID NO: 37318 - DNA, 15 bp, Homo sapiens
tctcaccctgtcacc

SEQ ID NO: 37319 - DNA, 15 bp, Homo sapiens
gtctcaccctgtcac

SEQ ID NO: 37320 - DNA, 15 bp, Homo sapiens
agtctcaccctgtca

SEQ ID NO: 37321 - DNA, 15 bp, Homo sapiens
gagtctcaccctgtc

SEQ ID NO: 37322 - DNA, 15 bp, Homo sapiens
ggagtctcaccctgt

SEQ ID NO: 37323 - DNA, 15 bp, Homo sapiens
cggagtctcaccctg

SEQ ID NO: 37324 - DNA, 15 bp, Homo sapiens
acggagtctcaccct

SEQ ID NO: 37325 - DNA, 15 bp, Homo sapiens
gacggagtctcaccc

SEQ ID NO: 37326 - DNA, 15 bp, Homo sapiens
agacggagtctcacc

SEQ ID NO: 37327 - DNA, 15 bp, Homo sapiens
gagacggagtctcac

SEQ ID NO: 37328 - DNA, 15 bp, Homo sapiens
tgagacggagtctca

SEQ ID NO: 37329 - DNA, 15 bp, Homo sapiens
ttgagacggagtctc

SEQ ID NO: 37330 - DNA, 15 bp, Homo sapiens
tttgagacggagtct

SEQ ID NO: 37331 - DNA, 15 bp, Homo sapiens
ttttgagacggagtc

SEQ ID NO: 37332 - DNA, 15 bp, Homo sapiens
attttgagacggagt

SEQ ID NO: 37333 - DNA, 15 bp, Homo sapiens
tattttgagacggag

SEQ ID NO: 37334 - DNA, 15 bp, Homo sapiens
ttattttgagacgga

SEQ ID NO: 37335 - DNA, 15 bp, Homo sapiens
tttattttgagacgg

SEQ ID NO: 37336 - DNA, 15 bp, Homo sapiens
ttttattttgagacg

SEQ ID NO: 37337 - DNA, 15 bp, Homo sapiens
tttttattttgagac

SEQ ID NO: 37338 - DNA, 15 bp, Homo sapiens
ttttttattttgaga

SEQ ID NO: 37339 - DNA, 15 bp, Homo sapiens
tttttttattttgag

SEQ ID NO: 37340 - DNA, 15 bp, Homo sapiens
ttttttttattttga

SEQ ID NO: 37341 - DNA, 15 bp, Homo sapiens
tttttttttattttg

SEQ ID NO: 37342 - DNA, 15 bp, Homo sapiens
ttttttttttatttt

SEQ ID NO: 37343 - DNA, 15 bp, Homo sapiens
tttttttttttattt

SEQ ID NO: 37344 - DNA, 15 bp, Homo sapiens
ttttttttttttatt

SEQ ID NO: 37345 - DNA, 15 bp, Homo sapiens
ttctttttttttttt

SEQ ID NO: 37346 - DNA, 15 bp, Homo sapiens
tttcttttttttttt

SEQ ID NO: 37347 - DNA, 15 bp, Homo sapiens
ttttctttttttttt

SEQ ID NO: 37348 - DNA, 15 bp, Homo sapiens
tccttttcttttttt

SEQ ID NO: 37349 - DNA, 15 bp, Homo sapiens
ttccttttctttttt

SEQ ID NO: 37350 - DNA, 15 bp, Homo sapiens
tttccttttcttttt

SEQ ID NO: 37351 - DNA, 15 bp, Homo sapiens
ctttccttttctttt

SEQ ID NO: 37352 - DNA, 15 bp, Homo sapiens
cctttccttttcttt

SEQ ID NO: 37353 - DNA, 15 bp, Homo sapiens
gcctttccttttctt

SEQ ID NO: 37354 - DNA, 15 bp, Homo sapiens
agcctttccttttct

SEQ ID NO: 37355 - DNA, 15 bp, Homo sapiens
cagcctttccttttc

SEQ ID NO: 37356 - DNA, 15 bp, Homo sapiens
acagcctttcctttt

SEQ ID NO: 37357 - DNA, 15 bp, Homo sapiens
cacagcctttccttt

SEQ ID NO: 37358 - DNA, 15 bp, Homo sapiens
acacagcctttcctt

SEQ ID NO: 37359 - DNA, 15 bp, Homo sapiens
cacacagcctttcct

SEQ ID NO: 37360 - DNA, 15 bp, Homo sapiens
acacacagcctttcc

SEQ ID NO: 37361 - DNA, 15 bp, Homo sapiens
cacacacagcctttc

SEQ ID NO: 37362 - DNA, 15 bp, Homo sapiens
acacacacagccttt

SEQ ID NO: 37363 - DNA, 15 bp, Homo sapiens
cacacacacagcctt

SEQ ID NO: 37364 - DNA, 15 bp, Homo sapiens
acacacacacagcct

SEQ ID NO: 37365 - DNA, 15 bp, Homo sapiens
cacacacacacagcc

SEQ ID NO: 37366 - DNA, 15 bp, Homo sapiens
acacacacacacagc

SEQ ID NO: 37367 - DNA, 15 bp, Homo sapiens
tacacacacacacag

SEQ ID NO: 37368 - DNA, 15 bp, Homo sapiens
catacacacacacac

SEQ ID NO: 37369 - DNA, 15 bp, Homo sapiens
acatacacacacaca

SEQ ID NO: 37370 - DNA, 15 bp, Homo sapiens
cacatacacacacac

SEQ ID NO: 37371 - DNA, 15 bp, Homo sapiens
acacatacacacaca

SEQ ID NO: 37372 - DNA, 15 bp, Homo sapiens
cacacatacacacac

SEQ ID NO: 37373 - DNA, 15 bp, Homo sapiens
acacacacatacaca

SEQ ID NO: 37374 - DNA, 15 bp, Homo sapiens
cacacacacatacac

SEQ ID NO: 37375 - DNA, 15 bp, Homo sapiens
acacacacacataca

SEQ ID NO: 37376 - DNA, 15 bp, Homo sapiens
cacacacacacatac

SEQ ID NO: 37377 - DNA, 15 bp, Homo sapiens
acacacacacacata

SEQ ID NO: 37378 - DNA, 15 bp, Homo sapiens
ttacacacacacaca

SEQ ID NO: 37379 - DNA, 15 bp, Homo sapiens
gttacacacacacac

SEQ ID NO: 37380 - DNA, 15 bp, Homo sapiens
tgttacacacacaca

SEQ ID NO: 37381 - DNA, 15 bp, Homo sapiens
ctgttacacacacac

SEQ ID NO: 37382 - DNA, 15 bp, Homo sapiens
gctgttacacacaca

SEQ ID NO: 37383 - DNA, 15 bp, Homo sapiens
tgctgttacacacac

SEQ ID NO: 37384 - DNA, 15 bp, Homo sapiens
gtgctgttacacaca

SEQ ID NO: 37385 - DNA, 15 bp, Homo sapiens
ggtgctgttacacac

SEQ ID NO: 37386 - DNA, 15 bp, Homo sapiens
tggtgctgttacaca

SEQ ID NO: 37387 - DNA, 15 bp, Homo sapiens
atggtgctgttacac

SEQ ID NO: 37388 - DNA, 15 bp, Homo sapiens
gatggtgctgttaca

SEQ ID NO: 37389 - DNA, 15 bp, Homo sapiens
tgatggtgctgttac

SEQ ID NO: 37390 - DNA, 15 bp, Homo sapiens
gtgatggtgctgtta

SEQ ID NO: 37391 - DNA, 15 bp, Homo sapiens
tgtgatggtgctgtt

SEQ ID NO: 37392 - DNA, 15 bp, Homo sapiens
gtgtgatggtgctgt

SEQ ID NO: 37393 - DNA, 15 bp, Homo sapiens
agtgtgatggtgctg

SEQ ID NO: 37394 - DNA, 15 bp, Homo sapiens
cagtgtgatggtgct

SEQ ID NO: 37395 - DNA, 15 bp, Homo sapiens
acagtgtgatggtgc

SEQ ID NO: 37396 - DNA, 15 bp, Homo sapiens
aacagtgtgatggtg

SEQ ID NO: 37397 - DNA, 15 bp, Homo sapiens
aaacagtgtgatggt

SEQ ID NO: 37398 - DNA, 15 bp, Homo sapiens
caaacagtgtgatgg

SEQ ID NO: 37399 - DNA, 15 bp, Homo sapiens
tcaaacagtgtgatg

SEQ ID NO: 37400 - DNA, 15 bp, Homo sapiens
ctcaaacagtgtgat

SEQ ID NO: 37401 - DNA, 15 bp, Homo sapiens
actcaaacagtgtga

SEQ ID NO: 37402 - DNA, 15 bp, Homo sapiens
aactcaaacagtgtg

SEQ ID NO: 37403 - DNA, 15 bp, Homo sapiens
caactcaaacagtgt

SEQ ID NO: 37404 - DNA, 15 bp, Homo sapiens
tcaactcaaacagtg

SEQ ID NO: 37405 - DNA, 15 bp, Homo sapiens
ctcaactcaaacagt

SEQ ID NO: 37406 - DNA, 15 bp, Homo sapiens
cctcaactcaaacag

SEQ ID NO: 37407 - DNA, 15 bp, Homo sapiens
tcctcaactcaaaca

SEQ ID NO: 37408 - DNA, 15 bp, Homo sapiens
ctcctcaactcaaac

SEQ ID NO: 37409 - DNA, 15 bp, Homo sapiens
gctcctcaactcaaa

SEQ ID NO: 37410 - DNA, 15 bp, Homo sapiens
tgctcctcaactcaa

SEQ ID NO: 37411 - DNA, 15 bp, Homo sapiens
gtgctcctcaactca

SEQ ID NO: 37412 - DNA, 15 bp, Homo sapiens
tgtgctcctcaactc

SEQ ID NO: 37413 - DNA, 15 bp, Homo sapiens
atgtgctcctcaact

SEQ ID NO: 37414 - DNA, 15 bp, Homo sapiens
catgtgctcctcaac

SEQ ID NO: 37415 - DNA, 15 bp, Homo sapiens
gcatgtgctcctcaa

SEQ ID NO: 37416 - DNA, 15 bp, Homo sapiens
agcatgtgctcctca

SEQ ID NO: 37417 - DNA, 15 bp, Homo sapiens
cagcatgtgctcctc

SEQ ID NO: 37418 - DNA, 15 bp, Homo sapiens
tcagcatgtgctcct

SEQ ID NO: 37419 - DNA, 15 bp, Homo sapiens
ctcagcatgtgctcc

SEQ ID NO: 37420 - DNA, 15 bp, Homo sapiens
actcagcatgtgctc

SEQ ID NO: 37421 - DNA, 15 bp, Homo sapiens
cactcagcatgtgct

SEQ ID NO: 37422 - DNA, 15 bp, Homo sapiens
acactcagcatgtgc

SEQ ID NO: 37423 - DNA, 15 bp, Homo sapiens
cacactcagcatgtg

SEQ ID NO: 37424 - DNA, 15 bp, Homo sapiens
ccacactcagcatgt

SEQ ID NO: 37425 - DNA, 15 bp, Homo sapiens
gccacactcagcatg

SEQ ID NO: 37426 - DNA, 15 bp, Homo sapiens
agccacactcagcat

SEQ ID NO: 37427 - DNA, 15 bp, Homo sapiens
gagccacactcagca

SEQ ID NO: 37428 - DNA, 15 bp, Homo sapiens
tgagccacactcagc

SEQ ID NO: 37429 - DNA, 15 bp, Homo sapiens
ttgagccacactcag

SEQ ID NO: 37430 - DNA, 15 bp, Homo sapiens
gttgagccacactca

SEQ ID NO: 37431 - DNA, 15 bp, Homo sapiens
tgttgagccacactc

SEQ ID NO: 37432 - DNA, 15 bp, Homo sapiens
atgttgagccacact

SEQ ID NO: 37433 - DNA, 15 bp, Homo sapiens
catgttgagccacac

SEQ ID NO: 37434 - DNA, 15 bp, Homo sapiens
acatgttgagccaca

SEQ ID NO: 37435 - DNA, 15 bp, Homo sapiens
aacatgttgagccac

SEQ ID NO: 37436 - DNA, 15 bp, Homo sapiens
taacatgttgagcca

SEQ ID NO: 37437 - DNA, 15 bp, Homo sapiens
gtaacatgttgagcc

SEQ ID NO: 37438 - DNA, 15 bp, Homo sapiens
ggtaacatgttgagc

SEQ ID NO: 37439 - DNA, 15 bp, Homo sapiens
tggtaacatgttgag

SEQ ID NO: 37440 - DNA, 15 bp, Homo sapiens
ctggtaacatgttga

SEQ ID NO: 37441 - DNA, 15 bp, Homo sapiens
tctggtaacatgttg

SEQ ID NO: 37442 - DNA, 15 bp, Homo sapiens
ttctggtaacatgtt

SEQ ID NO: 37443 - DNA, 15 bp, Homo sapiens
tttctggtaacatgt

SEQ ID NO: 37444 - DNA, 15 bp, Homo sapiens
ctttctggtaacatg

SEQ ID NO: 37445 - DNA, 15 bp, Homo sapiens
gctttctggtaacat

SEQ ID NO: 37446 - DNA, 15 bp, Homo sapiens
tgctttctggtaaca

SEQ ID NO: 37447 - DNA, 15 bp, Homo sapiens
ttgctttctggtaac

SEQ ID NO: 37448 - DNA, 15 bp, Homo sapiens
attgctttctggtaa

SEQ ID NO: 37449 - DNA, 15 bp, Homo sapiens
tattgctttctggta

SEQ ID NO: 37450 - DNA, 15 bp, Homo sapiens
atattgctttctggt

SEQ ID NO: 37451 - DNA, 15 bp, Homo sapiens
aatattgctttctgg

SEQ ID NO: 37452 - DNA, 15 bp, Homo sapiens
aaatattgctttctg

SEQ ID NO: 37453 - DNA, 15 bp, Homo sapiens
aaaatattgctttct

SEQ ID NO: 37454 - DNA, 15 bp, Homo sapiens
gaaaatattgctttc

SEQ ID NO: 37455 - DNA, 15 bp, Homo sapiens
tgaaaatattgcttt

SEQ ID NO: 37456 - DNA, 15 bp, Homo sapiens
atgaaaatattgctt

SEQ ID NO: 37457 - DNA, 15 bp, Homo sapiens
catgaaaatattgct

SEQ ID NO: 37458 - DNA, 15 bp, Homo sapiens
gcatgaaaatattgc

SEQ ID NO: 37459 - DNA, 15 bp, Homo sapiens
ggcatgaaaatattg

SEQ ID NO: 37460 - DNA, 15 bp, Homo sapiens
aggcatgaaaatatt

SEQ ID NO: 37461 - DNA, 15 bp, Homo sapiens
gaggcatgaaaatat

SEQ ID NO: 37462 - DNA, 15 bp, Homo sapiens
agaggcatgaaaata

SEQ ID NO: 37463 - DNA, 15 bp, Homo sapiens
gagaggcatgaaaat

SEQ ID NO: 37464 - DNA, 15 bp, Homo sapiens
ggagaggcatgaaaa

SEQ ID NO: 37465 - DNA, 15 bp, Homo sapiens
aggagaggcatgaaa

SEQ ID NO: 37466 - DNA, 15 bp, Homo sapiens
caggagaggcatgaa

SEQ ID NO: 37467 - DNA, 15 bp, Homo sapiens
tcaggagaggcatga

SEQ ID NO: 37468 - DNA, 15 bp, Homo sapiens
atcaggagaggcatg

SEQ ID NO: 37469 - DNA, 15 bp, Homo sapiens
tatcaggagaggcat

SEQ ID NO: 37470 - DNA, 15 bp, Homo sapiens
atatcaggagaggca

SEQ ID NO: 37471 - DNA, 15 bp, Homo sapiens
catatcaggagaggc

SEQ ID NO: 37472 - DNA, 15 bp, Homo sapiens
ccatatcaggagagg

SEQ ID NO: 37473 - DNA, 15 bp, Homo sapiens
gccatatcaggagag

SEQ ID NO: 37474 - DNA, 15 bp, Homo sapiens
cgccatatcaggaga

SEQ ID NO: 37475 - DNA, 15 bp, Homo sapiens
tcgccatatcaggag

SEQ ID NO: 37476 - DNA, 15 bp, Homo sapiens
atcgccatatcagga

SEQ ID NO: 37477 - DNA, 15 bp, Homo sapiens
catcgccatatcagg

SEQ ID NO: 37478 - DNA, 15 bp, Homo sapiens
gcatcgccatatcag

SEQ ID NO: 37479 - DNA, 15 bp, Homo sapiens
agcatcgccatatca

SEQ ID NO: 37480 - DNA, 15 bp, Homo sapiens
gagcatcgccatatc

SEQ ID NO: 37481 - DNA, 15 bp, Homo sapiens
ggagcatcgccatat

SEQ ID NO: 37482 - DNA, 15 bp, Homo sapiens
gggagcatcgccata

SEQ ID NO: 37483 - DNA, 15 bp, Homo sapiens
ggggagcatcgccat

SEQ ID NO: 37484 - DNA, 15 bp, Homo sapiens
aggggagcatcgcca

SEQ ID NO: 37485 - DNA, 15 bp, Homo sapiens
taggggagcatcgcc

SEQ ID NO: 37486 - DNA, 15 bp, Homo sapiens
ataggggagcatcgc

SEQ ID NO: 37487 - DNA, 15 bp, Homo sapiens
gataggggagcatcg

SEQ ID NO: 37488 - DNA, 15 bp, Homo sapiens
agataggggagcatc

SEQ ID NO: 37489 - DNA, 15 bp, Homo sapiens
gagataggggagcat

SEQ ID NO: 37490 - DNA, 15 bp, Homo sapiens
tgagataggggagca

SEQ ID NO: 37491 - DNA, 15 bp, Homo sapiens
atgagataggggagc

SEQ ID NO: 37492 - DNA, 15 bp, Homo sapiens
aatgagataggggag

SEQ ID NO: 37493 - DNA, 15 bp, Homo sapiens
gaatgagatagggga

SEQ ID NO: 37494 - DNA, 15 bp, Homo sapiens
ggaatgagatagggg

SEQ ID NO: 37495 - DNA, 15 bp, Homo sapiens
aggaatgagataggg

SEQ ID NO: 37496 - DNA, 15 bp, Homo sapiens
caggaatgagatagg

SEQ ID NO: 37497 - DNA, 15 bp, Homo sapiens
acaggaatgagatag

SEQ ID NO: 37498 - DNA, 15 bp, Homo sapiens
cacaggaatgagata

SEQ ID NO: 37499 - DNA, 15 bp, Homo sapiens
acacaggaatgagat

SEQ ID NO: 37500 - DNA, 15 bp, Homo sapiens
cacacaggaatgaga

SEQ ID NO: 37501 - DNA, 15 bp, Homo sapiens
acacacaggaatgag

SEQ ID NO: 37502 - DNA, 15 bp, Homo sapiens
cacacacaggaatga

SEQ ID NO: 37503 - DNA, 15 bp, Homo sapiens
acacacacaggaatg

SEQ ID NO: 37504 - DNA, 15 bp, Homo sapiens
aacacacacaggaat

SEQ ID NO: 37505 - DNA, 15 bp, Homo sapiens
aaacacacacaggaa

SEQ ID NO: 37506 - DNA, 15 bp, Homo sapiens
taaacacacacagga

SEQ ID NO: 37507 - DNA, 15 bp, Homo sapiens
ctaaacacacacagg

SEQ ID NO: 37508 - DNA, 15 bp, Homo sapiens
gctaaacacacacag

SEQ ID NO: 37509 - DNA, 15 bp, Homo sapiens
ggctaaacacacaca

SEQ ID NO: 37510 - DNA, 15 bp, Homo sapiens
tggctaaacacacac

SEQ ID NO: 37511 - DNA, 15 bp, Homo sapiens
ctggctaaacacaca

SEQ ID NO: 37512 - DNA, 15 bp, Homo sapiens
cctggctaaacacac

SEQ ID NO: 37513 - DNA, 15 bp, Homo sapiens
gcctggctaaacaca

SEQ ID NO: 37514 - DNA, 15 bp, Homo sapiens
tgcctggctaaacac

SEQ ID NO: 37515 - DNA, 15 bp, Homo sapiens
ttgcctggctaaaca

SEQ ID NO: 37516 - DNA, 15 bp, Homo sapiens
gttgcctggctaaac

SEQ ID NO: 37517 - DNA, 15 bp, Homo sapiens
agttgcctggctaaa

SEQ ID NO: 37518 - DNA, 15 bp, Homo sapiens
cagttgcctggctaa

SEQ ID NO: 37519 - DNA, 15 bp, Homo sapiens
acagttgcctggcta

SEQ ID NO: 37520 - DNA, 15 bp, Homo sapiens
aacagttgcctggct

SEQ ID NO: 37521 - DNA, 15 bp, Homo sapiens
caacagttgcctggc

SEQ ID NO: 37522 - DNA, 15 bp, Homo sapiens
tcaacagttgcctgg

SEQ ID NO: 37523 - DNA, 15 bp, Homo sapiens
atcaacagttgcctg

SEQ ID NO: 37524 - DNA, 15 bp, Homo sapiens
gatcaacagttgcct

SEQ ID NO: 37525 - DNA, 15 bp, Homo sapiens
tgatcaacagttgcc

SEQ ID NO: 37526 - DNA, 15 bp, Homo sapiens
atgatcaacagttgc

SEQ ID NO: 37527 - DNA, 15 bp, Homo sapiens
gatgatcaacagttg

SEQ ID NO: 37528 - DNA, 15 bp, Homo sapiens
tgatgatcaacagtt

SEQ ID NO: 37529 - DNA, 15 bp, Homo sapiens
ttgatgatcaacagt

SEQ ID NO: 37530 - DNA, 15 bp, Homo sapiens
attgatgatcaacag

SEQ ID NO: 37531 - DNA, 15 bp, Homo sapiens
tattgatgatcaaca

SEQ ID NO: 37532 - DNA, 15 bp, Homo sapiens
atattgatgatcaac

SEQ ID NO: 37533 - DNA, 15 bp, Homo sapiens
aatattgatgatcaa

SEQ ID NO: 37534 - DNA, 15 bp, Homo sapiens
taatattgatgatca

SEQ ID NO: 37535 - DNA, 15 bp, Homo sapiens
ataatattgatgatc

SEQ ID NO: 37536 - DNA, 15 bp, Homo sapiens
cataatattgatgat

SEQ ID NO: 37537 - DNA, 15 bp, Homo sapiens
tcataatattgatga

SEQ ID NO: 37538 - DNA, 15 bp, Homo sapiens
atcataatattgatg

SEQ ID NO: 37539 - DNA, 15 bp, Homo sapiens
tatcataatattgat

SEQ ID NO: 37540 - DNA, 15 bp, Homo sapiens
ttatcataatattga

SEQ ID NO: 37541 - DNA, 15 bp, Homo sapiens
gttatcataatattg

SEQ ID NO: 37542 - DNA, 15 bp, Homo sapiens
cgttatcataatatt

SEQ ID NO: 37543 - DNA, 15 bp, Homo sapiens
acgttatcataatat

SEQ ID NO: 37544 - DNA, 15 bp, Homo sapiens
aacgttatcataata

SEQ ID NO: 37545 - DNA, 15 bp, Homo sapiens
aaacgttatcataat

SEQ ID NO: 37546 - DNA, 15 bp, Homo sapiens
gaaacgttatcataa

SEQ ID NO: 37547 - DNA, 15 bp, Homo sapiens
agaaacgttatcata

SEQ ID NO: 37548 - DNA, 15 bp, Homo sapiens
gagaaacgttatcat

SEQ ID NO: 37549 - DNA, 15 bp, Homo sapiens
ggagaaacgttatca

SEQ ID NO: 37550 - DNA, 15 bp, Homo sapiens
tggagaaacgttatc

SEQ ID NO: 37551 - DNA, 15 bp, Homo sapiens
gtggagaaacgttat

SEQ ID NO: 37552 - DNA, 15 bp, Homo sapiens
agtggagaaacgtta

SEQ ID NO: 37553 - DNA, 15 bp, Homo sapiens
cagtggagaaacgtt

SEQ ID NO: 37554 - DNA, 15 bp, Homo sapiens
acagtggagaaacgt

SEQ ID NO: 37555 - DNA, 15 bp, Homo sapiens
gacagtggagaaacg

SEQ ID NO: 37556 - DNA, 15 bp, Homo sapiens
ggacagtggagaaac

SEQ ID NO: 37557 - DNA, 15 bp, Homo sapiens
gggacagtggagaaa

SEQ ID NO: 37558 - DNA, 15 bp, Homo sapiens
tgggacagtggagaa

SEQ ID NO: 37559 - DNA, 15 bp, Homo sapiens
atgggacagtggaga

SEQ ID NO: 37560 - DNA, 15 bp, Homo sapiens
aatgggacagtggag

SEQ ID NO: 37561 - DNA, 15 bp, Homo sapiens
caatgggacagtgga

SEQ ID NO: 37562 - DNA, 15 bp, Homo sapiens
acaatgggacagtgg

SEQ ID NO: 37563 - DNA, 15 bp, Homo sapiens
cacaatgggacagtg

SEQ ID NO: 37564 - DNA, 15 bp, Homo sapiens
gcacaatgggacagt

SEQ ID NO: 37565 - DNA, 15 bp, Homo sapiens
ggcacaatgggacag

SEQ ID NO: 37566 - DNA, 15 bp, Homo sapiens
gggcacaatgggaca

SEQ ID NO: 37567 - DNA, 15 bp, Homo sapiens
tgggcacaatgggac

SEQ ID NO: 37568 - DNA, 15 bp, Homo sapiens
gtgggcacaatggga

SEQ ID NO: 37569 - DNA, 15 bp, Homo sapiens
agtgggcacaatggg

SEQ ID NO: 37570 - DNA, 15 bp, Homo sapiens
aagtgggcacaatgg

SEQ ID NO: 37571 - DNA, 15 bp, Homo sapiens
aaagtgggcacaatg

SEQ ID NO: 37572 - DNA, 15 bp, Homo sapiens
aaaagtgggcacaat

SEQ ID NO: 37573 - DNA, 15 bp, Homo sapiens
aaaaagtgggcacaa

SEQ ID NO: 37574 - DNA, 15 bp, Homo sapiens
aaaaaagtgggcaca

SEQ ID NO: 37575 - DNA, 15 bp, Homo sapiens
aaaaaaagtgggcac

SEQ ID NO: 37576 - DNA, 15 bp, Homo sapiens
aaaaaaaagtgggca

SEQ ID NO: 37577 - DNA, 15 bp, Homo sapiens
aaaaaaaaagtgggc

SEQ ID NO: 37578 - DNA, 15 bp, Homo sapiens
aaaaaaaaaagtggg

SEQ ID NO: 37579 - DNA, 15 bp, Homo sapiens
aaaaaaaaaaagtgg

SEQ ID NO: 37580 - DNA, 15 bp, Homo sapiens
actcaaaaaaaaaaa

SEQ ID NO: 37581 - DNA, 15 bp, Homo sapiens
aactcaaaaaaaaaa

SEQ ID NO: 37582 - DNA, 15 bp, Homo sapiens
taactcaaaaaaaaa

SEQ ID NO: 37583 - DNA, 15 bp, Homo sapiens
gtaactcaaaaaaaa

SEQ ID NO: 37584 - DNA, 15 bp, Homo sapiens
agtaactcaaaaaaa

SEQ ID NO: 37585 - DNA, 15 bp, Homo sapiens
aagtaactcaaaaaa

SEQ ID NO: 37586 - DNA, 15 bp, Homo sapiens
taagtaactcaaaaa

SEQ ID NO: 37587 - DNA, 15 bp, Homo sapiens
gtaagtaactcaaaa

SEQ ID NO: 37588 - DNA, 15 bp, Homo sapiens
agtaagtaactcaaa

SEQ ID NO: 37589 - DNA, 15 bp, Homo sapiens
tagtaagtaactcaa

SEQ ID NO: 37590 - DNA, 15 bp, Homo sapiens
ttagtaagtaactca

SEQ ID NO: 37591 - DNA, 15 bp, Homo sapiens
tttagtaagtaactc

SEQ ID NO: 37592 - DNA, 15 bp, Homo sapiens
atttagtaagtaact

SEQ ID NO: 37593 - DNA, 15 bp, Homo sapiens
tatttagtaagtaac

SEQ ID NO: 37594 - DNA, 15 bp, Homo sapiens
ttatttagtaagtaa

SEQ ID NO: 37595 - DNA, 15 bp, Homo sapiens
tttatttagtaagta

SEQ ID NO: 37596 - DNA, 15 bp, Homo sapiens
ttttatttagtaagt

SEQ ID NO: 37597 - DNA, 15 bp, Homo sapiens
tttttatttagtaag

SEQ ID NO: 37598 - DNA, 15 bp, Homo sapiens
atttttatttagtaa

SEQ ID NO: 37599 - DNA, 15 bp, Homo sapiens
tatttttatttagta

SEQ ID NO: 37600 - DNA, 15 bp, Homo sapiens
ttatttttatttagt

SEQ ID NO: 37601 - DNA, 15 bp, Homo sapiens
tttatttttatttag

SEQ ID NO: 37602 - DNA, 15 bp, Homo sapiens
ttttatttttattta

SEQ ID NO: 37603 - DNA, 15 bp, Homo sapiens
gttttatttttattt

SEQ ID NO: 37604 - DNA, 15 bp, Homo sapiens
tgttttatttttatt

SEQ ID NO: 37605 - DNA, 15 bp, Homo sapiens
gtgttttatttttat

SEQ ID NO: 37606 - DNA, 15 bp, Homo sapiens
agtgttttattttta

SEQ ID NO: 37607 - DNA, 15 bp, Homo sapiens
tagtgttttattttt

SEQ ID NO: 37608 - DNA, 15 bp, Homo sapiens
atagtgttttatttt

SEQ ID NO: 37609 - DNA, 15 bp, Homo sapiens
aatagtgttttattt

SEQ ID NO: 37610 - DNA, 15 bp, Homo sapiens
aaatagtgttttatt

SEQ ID NO: 37611 - DNA, 15 bp, Homo sapiens
gaaatagtgttttat

SEQ ID NO: 37612 - DNA, 15 bp, Homo sapiens
agaaatagtgtttta

SEQ ID NO: 37613 - DNA, 15 bp, Homo sapiens
gagaaatagtgtttt

SEQ ID NO: 37614 - DNA, 15 bp, Homo sapiens
tgagaaatagtgttt

SEQ ID NO: 37615 - DNA, 15 bp, Homo sapiens
ttgagaaatagtgtt

SEQ ID NO: 37616 - DNA, 15 bp, Homo sapiens
attgagaaatagtgt

SEQ ID NO: 37617 - DNA, 15 bp, Homo sapiens
tattgagaaatagtg

SEQ ID NO: 37618 - DNA, 15 bp, Homo sapiens
ctattgagaaatagt

SEQ ID NO: 37619 - DNA, 15 bp, Homo sapiens
tctattgagaaatag

SEQ ID NO: 37620 - DNA, 15 bp, Homo sapiens
gtctattgagaaata

SEQ ID NO: 37621 - DNA, 15 bp, Homo sapiens
agtctattgagaaat

SEQ ID NO: 37622 - DNA, 15 bp, Homo sapiens
aagtctattgagaaa

SEQ ID NO: 37623 - DNA, 15 bp, Homo sapiens
caagtctattgagaa

SEQ ID NO: 37624 - DNA, 15 bp, Homo sapiens
tcaagtctattgaga

SEQ ID NO: 37625 - DNA, 15 bp, Homo sapiens
ttcaagtctattgag

SEQ ID NO: 37626 - DNA, 15 bp, Homo sapiens
cttcaagtctattga

SEQ ID NO: 37627 - DNA, 15 bp, Homo sapiens
gcttcaagtctattg

SEQ ID NO: 37628 - DNA, 15 bp, Homo sapiens
agcttcaagtctatt

SEQ ID NO: 37629 - DNA, 15 bp, Homo sapiens
aagcttcaagtctat

SEQ ID NO: 37630 - DNA, 15 bp, Homo sapiens
gaagcttcaagtcta

SEQ ID NO: 37631 - DNA, 15 bp, Homo sapiens
tgaagcttcaagtct

SEQ ID NO: 37632 - DNA, 15 bp, Homo sapiens
ttgaagcttcaagtc

SEQ ID NO: 37633 - DNA, 15 bp, Homo sapiens
cttgaagcttcaagt

SEQ ID NO: 37634 - DNA, 15 bp, Homo sapiens
tcttgaagcttcaag

SEQ ID NO: 37635 - DNA, 15 bp, Homo sapiens
atcttgaagcttcaa

SEQ ID NO: 37636 - DNA, 15 bp, Homo sapiens
aatcttgaagcttca

SEQ ID NO: 37637 - DNA, 15 bp, Homo sapiens
aaatcttgaagcttc

SEQ ID NO: 37638 - DNA, 15 bp, Homo sapiens
gaaatcttgaagctt

SEQ ID NO: 37639 - DNA, 15 bp, Homo sapiens
ggaaatcttgaagct

SEQ ID NO: 37640 - DNA, 15 bp, Homo sapiens
aggaaatcttgaagc

SEQ ID NO: 37641 - DNA, 15 bp, Homo sapiens
caggaaatcttgaag

SEQ ID NO: 37642 - DNA, 15 bp, Homo sapiens
ccaggaaatcttgaa

SEQ ID NO: 37643 - DNA, 15 bp, Homo sapiens
accaggaaatcttga

SEQ ID NO: 37644 - DNA, 15 bp, Homo sapiens
caccaggaaatcttg

SEQ ID NO: 37645 - DNA, 15 bp, Homo sapiens
ccaccaggaaatctt

SEQ ID NO: 37646 - DNA, 15 bp, Homo sapiens
tccaccaggaaatct

SEQ ID NO: 37647 - DNA, 15 bp, Homo sapiens
gtccaccaggaaatc

SEQ ID NO: 37648 - DNA, 15 bp, Homo sapiens
tgtccaccaggaaat

SEQ ID NO: 37649 - DNA, 15 bp, Homo sapiens
ttgtccaccaggaaa

SEQ ID NO: 37650 - DNA, 15 bp, Homo sapiens
attgtccaccaggaa

SEQ ID NO: 37651 - DNA, 15 bp, Homo sapiens
cattgtccaccagga

SEQ ID NO: 37652 - DNA, 15 bp, Homo sapiens
tcattgtccaccagg

SEQ ID NO: 37653 - DNA, 15 bp, Homo sapiens
ttcattgtccaccag

SEQ ID NO: 37654 - DNA, 15 bp, Homo sapiens
tttcattgtccacca

SEQ ID NO: 37655 - DNA, 15 bp, Homo sapiens
gtttcattgtccacc

SEQ ID NO: 37656 - DNA, 15 bp, Homo sapiens
ggtttcattgtccac

SEQ ID NO: 37657 - DNA, 15 bp, Homo sapiens
aggtttcattgtcca

SEQ ID NO: 37658 - DNA, 15 bp, Homo sapiens
aaggtttcattgtcc

SEQ ID NO: 37659 - DNA, 15 bp, Homo sapiens
gaaggtttcattgtc

SEQ ID NO: 37660 - DNA, 15 bp, Homo sapiens
agaaggtttcattgt

SEQ ID NO: 37661 - DNA, 15 bp, Homo sapiens
gagaaggtttcattg

SEQ ID NO: 37662 - DNA, 15 bp, Homo sapiens
agagaaggtttcatt

SEQ ID NO: 37663 - DNA, 15 bp, Homo sapiens
cagagaaggtttcat

SEQ ID NO: 37664 - DNA, 15 bp, Homo sapiens
ccagagaaggtttca

SEQ ID NO: 37665 - DNA, 15 bp, Homo sapiens
cccagagaaggtttc

SEQ ID NO: 37666 - DNA, 15 bp, Homo sapiens
acccagagaaggttt

SEQ ID NO: 37667 - DNA, 15 bp, Homo sapiens
aacccagagaaggtt

SEQ ID NO: 37668 - DNA, 15 bp, Homo sapiens
gaacccagagaaggt

SEQ ID NO: 37669 - DNA, 15 bp, Homo sapiens
ggaacccagagaagg

SEQ ID NO: 37670 - DNA, 15 bp, Homo sapiens
aggaacccagagaag

SEQ ID NO: 37671 - DNA, 15 bp, Homo sapiens
caggaacccagagaa

SEQ ID NO: 37672 - DNA, 15 bp, Homo sapiens
acaggaacccagaga

SEQ ID NO: 37673 - DNA, 15 bp, Homo sapiens
tacaggaacccagag

SEQ ID NO: 37674 - DNA, 15 bp, Homo sapiens
atacaggaacccaga

SEQ ID NO: 37675 - DNA, 15 bp, Homo sapiens
gatacaggaacccag

SEQ ID NO: 37676 - DNA, 15 bp, Homo sapiens
tgatacaggaaccca

SEQ ID NO: 37677 - DNA, 15 bp, Homo sapiens
gtgatacaggaaccc

SEQ ID NO: 37678 - DNA, 15 bp, Homo sapiens
tgtgatacaggaacc

SEQ ID NO: 37679 - DNA, 15 bp, Homo sapiens
ttgtgatacaggaac

SEQ ID NO: 37680 - DNA, 15 bp, Homo sapiens
gttgtgatacaggaa

SEQ ID NO: 37681 - DNA, 15 bp, Homo sapiens
ggttgtgatacagga

SEQ ID NO: 37682 - DNA, 15 bp, Homo sapiens
aggttgtgatacagg

SEQ ID NO: 37683 - DNA, 15 bp, Homo sapiens
gaggttgtgatacag

SEQ ID NO: 37684 - DNA, 15 bp, Homo sapiens
agaggttgtgataca

SEQ ID NO: 37685 - DNA, 15 bp, Homo sapiens
gagaggttgtgatac

SEQ ID NO: 37686 - DNA, 15 bp, Homo sapiens
agagaggttgtgata

SEQ ID NO: 37687 - DNA, 15 bp, Homo sapiens
gagagaggttgtgat

SEQ ID NO: 37688 - DNA, 15 bp, Homo sapiens
agagagaggttgtga

SEQ ID NO: 37689 - DNA, 15 bp, Homo sapiens
gagagagaggttgtg

SEQ ID NO: 37690 - DNA, 15 bp, Homo sapiens
ggagagagaggttgt

SEQ ID NO: 37691 - DNA, 15 bp, Homo sapiens
gggagagagaggttg

SEQ ID NO: 37692 - DNA, 15 bp, Homo sapiens
tgggagagagaggtt

SEQ ID NO: 37693 - DNA, 15 bp, Homo sapiens
ttgggagagagaggt

SEQ ID NO: 37694 - DNA, 15 bp, Homo sapiens
tttgggagagagagg

SEQ ID NO: 37695 - DNA, 15 bp, Homo sapiens
ctttgggagagagag

SEQ ID NO: 37696 - DNA, 15 bp, Homo sapiens
actttgggagagaga

SEQ ID NO: 37697 - DNA, 15 bp, Homo sapiens
gactttgggagagag

SEQ ID NO: 37698 - DNA, 15 bp, Homo sapiens
agactttgggagaga

SEQ ID NO: 37699 - DNA, 15 bp, Homo sapiens
tagactttgggagag

SEQ ID NO: 37700 - DNA, 15 bp, Homo sapiens
gtagactttgggaga

SEQ ID NO: 37701 - DNA, 15 bp, Homo sapiens
agtagactttgggag

SEQ ID NO: 37702 - DNA, 15 bp, Homo sapiens
cagtagactttggga

SEQ ID NO: 37703 - DNA, 15 bp, Homo sapiens
acagtagactttggg

SEQ ID NO: 37704 - DNA, 15 bp, Homo sapiens
cacagtagactttgg

SEQ ID NO: 37705 - DNA, 15 bp, Homo sapiens
ccacagtagactttg

SEQ ID NO: 37706 - DNA, 15 bp, Homo sapiens
tccacagtagacttt

SEQ ID NO: 37707 - DNA, 15 bp, Homo sapiens
gtccacagtagactt

SEQ ID NO: 37708 - DNA, 15 bp, Homo sapiens
tgtccacagtagact

SEQ ID NO: 37709 - DNA, 15 bp, Homo sapiens
ttgtccacagtagac

SEQ ID NO: 37710 - DNA, 15 bp, Homo sapiens
cttgtccacagtaga

SEQ ID NO: 37711 - DNA, 15 bp, Homo sapiens
tcttgtccacagtag

SEQ ID NO: 37712 - DNA, 15 bp, Homo sapiens
atcttgtccacagta

SEQ ID NO: 37713 - DNA, 15 bp, Homo sapiens
catcttgtccacagt

SEQ ID NO: 37714 - DNA, 15 bp, Homo sapiens
gcatcttgtccacag

SEQ ID NO: 37715 - DNA, 15 bp, Homo sapiens
agcatcttgtccaca

SEQ ID NO: 37716 - DNA, 15 bp, Homo sapiens
cagcatcttgtccac

SEQ ID NO: 37717 - DNA, 15 bp, Homo sapiens
tcagcatcttgtcca

SEQ ID NO: 37718 - DNA, 15 bp, Homo sapiens
ctcagcatcttgtcc

SEQ ID NO: 37719 - DNA, 15 bp, Homo sapiens
cctcagcatcttgtc

SEQ ID NO: 37720 - DNA, 15 bp, Homo sapiens
ccctcagcatcttgt

SEQ ID NO: 37721 - DNA, 15 bp, Homo sapiens
gccctcagcatcttg

SEQ ID NO: 37722 - DNA, 15 bp, Homo sapiens
agccctcagcatctt

SEQ ID NO: 37723 - DNA, 15 bp, Homo sapiens
cagccctcagcatct

SEQ ID NO: 37724 - DNA, 15 bp, Homo sapiens
tcagccctcagcatc

SEQ ID NO: 37725 - DNA, 15 bp, Homo sapiens
atcagccctcagcat

SEQ ID NO: 37726 - DNA, 15 bp, Homo sapiens
catcagccctcagca

SEQ ID NO: 37727 - DNA, 15 bp, Homo sapiens
acatcagccctcagc

SEQ ID NO: 37728 - DNA, 15 bp, Homo sapiens
gacatcagccctcag

SEQ ID NO: 37729 - DNA, 15 bp, Homo sapiens
tgacatcagccctca

SEQ ID NO: 37730 - DNA, 15 bp, Homo sapiens
atgacatcagccctc

SEQ ID NO: 37731 - DNA, 15 bp, Homo sapiens
aatgacatcagccct

SEQ ID NO: 37732 - DNA, 15 bp, Homo sapiens
gaatgacatcagccc

SEQ ID NO: 37733 - DNA, 15 bp, Homo sapiens
agaatgacatcagcc

SEQ ID NO: 37734 - DNA, 15 bp, Homo sapiens
gagaatgacatcagc

SEQ ID NO: 37735 - DNA, 15 bp, Homo sapiens
ggagaatgacatcag

SEQ ID NO: 37736 - DNA, 15 bp, Homo sapiens
tggagaatgacatca

SEQ ID NO: 37737 - DNA, 15 bp, Homo sapiens
gtggagaatgacatc

SEQ ID NO: 37738 - DNA, 15 bp, Homo sapiens
tgtggagaatgacat

SEQ ID NO: 37739 - DNA, 15 bp, Homo sapiens
ttgtggagaatgaca

SEQ ID NO: 37740 - DNA, 15 bp, Homo sapiens
cttgtggagaatgac

SEQ ID NO: 37741 - DNA, 15 bp, Homo sapiens
ccttgtggagaatga

SEQ ID NO: 37742 - DNA, 15 bp, Homo sapiens
accttgtggagaatg

SEQ ID NO: 37743 - DNA, 15 bp, Homo sapiens
taccttgtggagaat

SEQ ID NO: 37744 - DNA, 15 bp, Homo sapiens
ttaccttgtggagaa

SEQ ID NO: 37745 - DNA, 15 bp, Homo sapiens
cttaccttgtggaga

SEQ ID NO: 37746 - DNA, 15 bp, Homo sapiens
gcttaccttgtggag

SEQ ID NO: 37747 - DNA, 15 bp, Homo sapiens
agcttaccttgtgga

SEQ ID NO: 37748 - DNA, 15 bp, Homo sapiens
cagcttaccttgtgg

SEQ ID NO: 37749 - DNA, 15 bp, Homo sapiens
tcagcttaccttgtg

SEQ ID NO: 37750 - DNA, 15 bp, Homo sapiens
atcagcttaccttgt

SEQ ID NO: 37751 - DNA, 15 bp, Homo sapiens
catcagcttaccttg

SEQ ID NO: 37752 - DNA, 15 bp, Homo sapiens
gcatcagcttacctt

SEQ ID NO: 37753 - DNA, 15 bp, Homo sapiens
ggcatcagcttacct

SEQ ID NO: 37754 - DNA, 15 bp, Homo sapiens
aggcatcagcttacc

SEQ ID NO: 37755 - DNA, 15 bp, Homo sapiens
gaggcatcagcttac

SEQ ID NO: 37756 - DNA, 15 bp, Homo sapiens
ggaggcatcagctta

SEQ ID NO: 37757 - DNA, 15 bp, Homo sapiens
tggaggcatcagctt

SEQ ID NO: 37758 - DNA, 15 bp, Homo sapiens
ctggaggcatcagct

SEQ ID NO: 37759 - DNA, 15 bp, Homo sapiens
gctggaggcatcagc

SEQ ID NO: 37760 - DNA, 15 bp, Homo sapiens
agctggaggcatcag

SEQ ID NO: 37761 - DNA, 15 bp, Homo sapiens
aagctggaggcatca

SEQ ID NO: 37762 - DNA, 15 bp, Homo sapiens
gaagctggaggcatc

SEQ ID NO: 37763 - DNA, 15 bp, Homo sapiens
ggaagctggaggcat

SEQ ID NO: 37764 - DNA, 15 bp, Homo sapiens
aggaagctggaggca

SEQ ID NO: 37765 - DNA, 15 bp, Homo sapiens
gaggaagctggaggc

SEQ ID NO: 37766 - DNA, 15 bp, Homo sapiens
tgaggaagctggagg

SEQ ID NO: 37767 - DNA, 15 bp, Homo sapiens
ctgaggaagctggag

SEQ ID NO: 37768 - DNA, 15 bp, Homo sapiens
actgaggaagctgga

SEQ ID NO: 37769 - DNA, 15 bp, Homo sapiens
tactgaggaagctgg

SEQ ID NO: 37770 - DNA, 15 bp, Homo sapiens
ctactgaggaagctg

SEQ ID NO: 37771 - DNA, 15 bp, Homo sapiens
cctactgaggaagct

SEQ ID NO: 37772 - DNA, 15 bp, Homo sapiens
ccctactgaggaagc

SEQ ID NO: 37773 - DNA, 15 bp, Homo sapiens
gccctactgaggaag

SEQ ID NO: 37774 - DNA, 15 bp, Homo sapiens
agccctactgaggaa

SEQ ID NO: 37775 - DNA, 15 bp, Homo sapiens
cagccctactgagga

SEQ ID NO: 37776 - DNA, 15 bp, Homo sapiens
tcagccctactgagg

SEQ ID NO: 37777 - DNA, 15 bp, Homo sapiens
atcagccctactgag

SEQ ID NO: 37778 - DNA, 15 bp, Homo sapiens
catcagccctactga

SEQ ID NO: 37779 - DNA, 15 bp, Homo sapiens
ccatcagccctactg

SEQ ID NO: 37780 - DNA, 15 bp, Homo sapiens
gccatcagccctact

SEQ ID NO: 37781 - DNA, 15 bp, Homo sapiens
tgccatcagccctac

SEQ ID NO: 37782 - DNA, 15 bp, Homo sapiens
ttgccatcagcccta

SEQ ID NO: 37783 - DNA, 15 bp, Homo sapiens
attgccatcagccct

SEQ ID NO: 37784 - DNA, 15 bp, Homo sapiens
aattgccatcagccc

SEQ ID NO: 37785 - DNA, 15 bp, Homo sapiens
taattgccatcagcc

SEQ ID NO: 37786 - DNA, 15 bp, Homo sapiens
gtaattgccatcagc

SEQ ID NO: 37787 - DNA, 15 bp, Homo sapiens
cgtaattgccatcag

SEQ ID NO: 37788 - DNA, 15 bp, Homo sapiens
acgtaattgccatca

SEQ ID NO: 37789 - DNA, 15 bp, Homo sapiens
aacgtaattgccatc

SEQ ID NO: 37790 - DNA, 15 bp, Homo sapiens
caacgtaattgccat

SEQ ID NO: 37791 - DNA, 15 bp, Homo sapiens
acaacgtaattgcca

SEQ ID NO: 37792 - DNA, 15 bp, Homo sapiens
cacaacgtaattgcc

SEQ ID NO: 37793 - DNA, 15 bp, Homo sapiens
gcacaacgtaattgc

SEQ ID NO: 37794 - DNA, 15 bp, Homo sapiens
tgcacaacgtaattg

SEQ ID NO: 37795 - DNA, 15 bp, Homo sapiens
ctgcacaacgtaatt

SEQ ID NO: 37796 - DNA, 15 bp, Homo sapiens
gctgcacaacgtaat

SEQ ID NO: 37797 - DNA, 15 bp, Homo sapiens
agctgcacaacgtaa

SEQ ID NO: 37798 - DNA, 15 bp, Homo sapiens
tagctgcacaacgta

SEQ ID NO: 37799 - DNA, 15 bp, Homo sapiens
gtagctgcacaacgt

SEQ ID NO: 37800 - DNA, 15 bp, Homo sapiens
agtagctgcacaacg

SEQ ID NO: 37801 - DNA, 15 bp, Homo sapiens
cagtagctgcacaac

SEQ ID NO: 37802 - DNA, 15 bp, Homo sapiens
ccagtagctgcacaa

SEQ ID NO: 37803 - DNA, 15 bp, Homo sapiens
tccagtagctgcaca

SEQ ID NO: 37804 - DNA, 15 bp, Homo sapiens
ttccagtagctgcac

SEQ ID NO: 37805 - DNA, 15 bp, Homo sapiens
tttccagtagctgca

SEQ ID NO: 37806 - DNA, 15 bp, Homo sapiens
ctttccagtagctgc

SEQ ID NO: 37807 - DNA, 15 bp, Homo sapiens
tctttccagtagctg

SEQ ID NO: 37808 - DNA, 15 bp, Homo sapiens
ttctttccagtagct

SEQ ID NO: 37809 - DNA, 15 bp, Homo sapiens
tttctttccagtagc

SEQ ID NO: 37810 - DNA, 15 bp, Homo sapiens
atttctttccagtag

SEQ ID NO: 37811 - DNA, 15 bp, Homo sapiens
catttctttccagta

SEQ ID NO: 37812 - DNA, 15 bp, Homo sapiens
tcatttctttccagt

SEQ ID NO: 37813 - DNA, 15 bp, Homo sapiens
ttcatttctttccag

SEQ ID NO: 37814 - DNA, 15 bp, Homo sapiens
attcatttctttcca

SEQ ID NO: 37815 - DNA, 15 bp, Homo sapiens
tattcatttctttcc

SEQ ID NO: 37816 - DNA, 15 bp, Homo sapiens
ttattcatttctttc

SEQ ID NO: 37817 - DNA, 15 bp, Homo sapiens
tttattcatttcttt

SEQ ID NO: 37818 - DNA, 15 bp, Homo sapiens
gtttattcatttctt

SEQ ID NO: 37819 - DNA, 15 bp, Homo sapiens
ggtttattcatttct

SEQ ID NO: 37820 - DNA, 15 bp, Homo sapiens
gggtttattcatttc

SEQ ID NO: 37821 - DNA, 15 bp, Homo sapiens
agggtttattcattt

SEQ ID NO: 37822 - DNA, 15 bp, Homo sapiens
aagggtttattcatt

SEQ ID NO: 37823 - DNA, 15 bp, Homo sapiens
caagggtttattcat

SEQ ID NO: 37824 - DNA, 15 bp, Homo sapiens
acaagggtttattca

SEQ ID NO: 37825 - DNA, 15 bp, Homo sapiens
gacaagggtttattc

SEQ ID NO: 37826 - DNA, 15 bp, Homo sapiens
ggacaagggtttatt

SEQ ID NO: 37827 - DNA, 15 bp, Homo sapiens
aggacaagggtttat

SEQ ID NO: 37828 - DNA, 15 bp, Homo sapiens
aaggacaagggttta

SEQ ID NO: 37829 - DNA, 15 bp, Homo sapiens
caaggacaagggttt

SEQ ID NO: 37830 - DNA, 15 bp, Homo sapiens
acaaggacaagggtt

SEQ ID NO: 37831 - DNA, 15 bp, Homo sapiens
tacaaggacaagggt

SEQ ID NO: 37832 - DNA, 15 bp, Homo sapiens
ttacaaggacaaggg

SEQ ID NO: 37833 - DNA, 15 bp, Homo sapiens
attacaaggacaagg

SEQ ID NO: 37834 - DNA, 15 bp, Homo sapiens
cattacaaggacaag

SEQ ID NO: 37835 - DNA, 15 bp, Homo sapiens
ccattacaaggacaa

SEQ ID NO: 37836 - DNA, 15 bp, Homo sapiens
accattacaaggaca

SEQ ID NO: 37837 - DNA, 15 bp, Homo sapiens
caccattacaaggac

SEQ ID NO: 37838 - DNA, 15 bp, Homo sapiens
ccaccattacaagga

SEQ ID NO: 37839 - DNA, 15 bp, Homo sapiens
accaccattacaagg

SEQ ID NO: 37840 - DNA, 15 bp, Homo sapiens
caccaccattacaag

SEQ ID NO: 37841 - DNA, 15 bp, Homo sapiens
tcaccaccattacaa

SEQ ID NO: 37842 - DNA, 15 bp, Homo sapiens
ttcaccaccattaca

SEQ ID NO: 37843 - DNA, 15 bp, Homo sapiens
cttcaccaccattac

SEQ ID NO: 37844 - DNA, 15 bp, Homo sapiens
ccttcaccaccatta

SEQ ID NO: 37845 - DNA, 15 bp, Homo sapiens
cccttcaccaccatt

SEQ ID NO: 37846 - DNA, 15 bp, Homo sapiens
ccccttcaccaccat

SEQ ID NO: 37847 - DNA, 15 bp, Homo sapiens
tccccttcaccacca

SEQ ID NO: 37848 - DNA, 15 bp, Homo sapiens
ctccccttcaccacc

SEQ ID NO: 37849 - DNA, 15 bp, Homo sapiens
cctccccttcaccac

SEQ ID NO: 37850 - DNA, 15 bp, Homo sapiens
ccctccccttcacca

SEQ ID NO: 37851 - DNA, 15 bp, Homo sapiens
tccctccccttcacc

SEQ ID NO: 37852 - DNA, 15 bp, Homo sapiens
ctccctccccttcac

SEQ ID NO: 37853 - DNA, 15 bp, Homo sapiens
cctccctccccttca

SEQ ID NO: 37854 - DNA, 15 bp, Homo sapiens
acctccctccccttc

SEQ ID NO: 37855 - DNA, 15 bp, Homo sapiens
tacctccctcccctt

SEQ ID NO: 37856 - DNA, 15 bp, Homo sapiens
ctacctccctcccct

SEQ ID NO: 37857 - DNA, 15 bp, Homo sapiens
actacctccctcccc

SEQ ID NO: 37858 - DNA, 15 bp, Homo sapiens
aactacctccctccc

SEQ ID NO: 37859 - DNA, 15 bp, Homo sapiens
aaactacctccctcc

SEQ ID NO: 37860 - DNA, 15 bp, Homo sapiens
caaactacctccctc

SEQ ID NO: 37861 - DNA, 15 bp, Homo sapiens
tcaaactacctccct

SEQ ID NO: 37862 - DNA, 15 bp, Homo sapiens
ttcaaactacctccc

SEQ ID NO: 37863 - DNA, 15 bp, Homo sapiens
attcaaactacctcc

SEQ ID NO: 37864 - DNA, 15 bp, Homo sapiens
tattcaaactacctc

SEQ ID NO: 37865 - DNA, 15 bp, Homo sapiens
gtattcaaactacct

SEQ ID NO: 37866 - DNA, 15 bp, Homo sapiens
tgtattcaaactacc

SEQ ID NO: 37867 - DNA, 15 bp, Homo sapiens
ttgtattcaaactac

SEQ ID NO: 37868 - DNA, 15 bp, Homo sapiens
gttgtattcaaacta

SEQ ID NO: 37869 - DNA, 15 bp, Homo sapiens
agttgtattcaaact

SEQ ID NO: 37870 - DNA, 15 bp, Homo sapiens
aagttgtattcaaac

SEQ ID NO: 37871 - DNA, 15 bp, Homo sapiens
gaagttgtattcaaa

SEQ ID NO: 37872 - DNA, 15 bp, Homo sapiens
tgaagttgtattcaa

SEQ ID NO: 37873 - DNA, 15 bp, Homo sapiens
gtgaagttgtattca

SEQ ID NO: 37874 - DNA, 15 bp, Homo sapiens
agtgaagttgtattc

SEQ ID NO: 37875 - DNA, 15 bp, Homo sapiens
aagtgaagttgtatt

SEQ ID NO: 37876 - DNA, 15 bp, Homo sapiens
taagtgaagttgtat

SEQ ID NO: 37877 - DNA, 15 bp, Homo sapiens
ttaagtgaagttgta

SEQ ID NO: 37878 - DNA, 15 bp, Homo sapiens
attaagtgaagttgt

SEQ ID NO: 37879 - DNA, 15 bp, Homo sapiens
aattaagtgaagttg

SEQ ID NO: 37880 - DNA, 15 bp, Homo sapiens
aaattaagtgaagtt

SEQ ID NO: 37881 - DNA, 15 bp, Homo sapiens
aaaattaagtgaagt

SEQ ID NO: 37882 - DNA, 15 bp, Homo sapiens
taaaattaagtgaag

SEQ ID NO: 37883 - DNA, 15 bp, Homo sapiens
gtaaaattaagtgaa

SEQ ID NO: 37884 - DNA, 15 bp, Homo sapiens
agtaaaattaagtga

SEQ ID NO: 37885 - DNA, 15 bp, Homo sapiens
aagtaaaattaagtg

SEQ ID NO: 37886 - DNA, 15 bp, Homo sapiens
gaagtaaaattaagt

SEQ ID NO: 37887 - DNA, 15 bp, Homo sapiens
ggaagtaaaattaag

SEQ ID NO: 37888 - DNA, 15 bp, Homo sapiens
gggaagtaaaattaa

SEQ ID NO: 37889 - DNA, 15 bp, Homo sapiens
agggaagtaaaatta

SEQ ID NO: 37890 - DNA, 15 bp, Homo sapiens
tagggaagtaaaatt

SEQ ID NO: 37891 - DNA, 15 bp, Homo sapiens
atagggaagtaaaat

SEQ ID NO: 37892 - DNA, 15 bp, Homo sapiens
aatagggaagtaaaa

SEQ ID NO: 37893 - DNA, 15 bp, Homo sapiens
gaatagggaagtaaa

SEQ ID NO: 37894 - DNA, 15 bp, Homo sapiens
tgaatagggaagtaa

SEQ ID NO: 37895 - DNA, 15 bp, Homo sapiens
ctgaatagggaagta

SEQ ID NO: 37896 - DNA, 15 bp, Homo sapiens
cctgaatagggaagt

SEQ ID NO: 37897 - DNA, 15 bp, Homo sapiens
gcctgaatagggaag

SEQ ID NO: 37898 - DNA, 15 bp, Homo sapiens
tgcctgaatagggaa

SEQ ID NO: 37899 - DNA, 15 bp, Homo sapiens
ctgcctgaataggga

SEQ ID NO: 37900 - DNA, 15 bp, Homo sapiens
cctgcctgaataggg

SEQ ID NO: 37901 - DNA, 15 bp, Homo sapiens
tcctgcctgaatagg

SEQ ID NO: 37902 - DNA, 15 bp, Homo sapiens
ttcctgcctgaatag

SEQ ID NO: 37903 - DNA, 15 bp, Homo sapiens
attcctgcctgaata

SEQ ID NO: 37904 - DNA, 15 bp, Homo sapiens
aattcctgcctgaat

SEQ ID NO: 37905 - DNA, 15 bp, Homo sapiens
caattcctgcctgaa

SEQ ID NO: 37906 - DNA, 15 bp, Homo sapiens
gcaattcctgcctga

SEQ ID NO: 37907 - DNA, 15 bp, Homo sapiens
ggcaattcctgcctg

SEQ ID NO: 37908 - DNA, 15 bp, Homo sapiens
tggcaattcctgcct

SEQ ID NO: 37909 - DNA, 15 bp, Homo sapiens
ttggcaattcctgcc

SEQ ID NO: 37910 - DNA, 15 bp, Homo sapiens
tttggcaattcctgc

SEQ ID NO: 37911 - DNA, 15 bp, Homo sapiens
gtttggcaattcctg

SEQ ID NO: 37912 - DNA, 15 bp, Homo sapiens
ggtttggcaattcct

SEQ ID NO: 37913 - DNA, 15 bp, Homo sapiens
tggtttggcaattcc

SEQ ID NO: 37914 - DNA, 15 bp, Homo sapiens
atggtttggcaattc

SEQ ID NO: 37915 - DNA, 15 bp, Homo sapiens
gatggtttggcaatt

SEQ ID NO: 37916 - DNA, 15 bp, Homo sapiens
ggatggtttggcaat

SEQ ID NO: 37917 - DNA, 15 bp, Homo sapiens
tggatggtttggcaa

SEQ ID NO: 37918 - DNA, 15 bp, Homo sapiens
ctggatggtttggca

SEQ ID NO: 37919 - DNA, 15 bp, Homo sapiens
cctggatggtttggc

SEQ ID NO: 37920 - DNA, 15 bp, Homo sapiens
tcctggatggtttgg

SEQ ID NO: 37921 - DNA, 15 bp, Homo sapiens
ctcctggatggtttg

SEQ ID NO: 37922 - DNA, 15 bp, Homo sapiens
actcctggatggttt

SEQ ID NO: 37923 - DNA, 15 bp, Homo sapiens
cactcctggatggtt

SEQ ID NO: 37924 - DNA, 15 bp, Homo sapiens
ccactcctggatggt

SEQ ID NO: 37925 - DNA, 15 bp, Homo sapiens
tccactcctggatgg

SEQ ID NO: 37926 - DNA, 15 bp, Homo sapiens
ttccactcctggatg

SEQ ID NO: 37927 - DNA, 15 bp, Homo sapiens
attccactcctggat

SEQ ID NO: 37928 - DNA, 15 bp, Homo sapiens
tattccactcctgga

SEQ ID NO: 37929 - DNA, 15 bp, Homo sapiens
atattccactcctgg

SEQ ID NO: 37930 - DNA, 15 bp, Homo sapiens
catattccactcctg

SEQ ID NO: 37931 - DNA, 15 bp, Homo sapiens
gcatattccactcct

SEQ ID NO: 37932 - DNA, 15 bp, Homo sapiens
tgcatattccactcc

SEQ ID NO: 37933 - DNA, 15 bp, Homo sapiens
ttgcatattccactc

SEQ ID NO: 37934 - DNA, 15 bp, Homo sapiens
gttgcatattccact

SEQ ID NO: 37935 - DNA, 15 bp, Homo sapiens
ggttgcatattccac

SEQ ID NO: 37936 - DNA, 15 bp, Homo sapiens
aggttgcatattcca

SEQ ID NO: 37937 - DNA, 15 bp, Homo sapiens
caggttgcatattcc

SEQ ID NO: 37938 - DNA, 15 bp, Homo sapiens
ccaggttgcatattc

SEQ ID NO: 37939 - DNA, 15 bp, Homo sapiens
gccaggttgcatatt

SEQ ID NO: 37940 - DNA, 15 bp, Homo sapiens
cgccaggttgcatat

SEQ ID NO: 37941 - DNA, 15 bp, Homo sapiens
acgccaggttgcata

SEQ ID NO: 37942 - DNA, 15 bp, Homo sapiens
gacgccaggttgcat

SEQ ID NO: 37943 - DNA, 15 bp, Homo sapiens
tgacgccaggttgca

SEQ ID NO: 37944 - DNA, 15 bp, Homo sapiens
atgacgccaggttgc

SEQ ID NO: 37945 - DNA, 15 bp, Homo sapiens
catgacgccaggttg

SEQ ID NO: 37946 - DNA, 15 bp, Homo sapiens
ccatgacgccaggtt

SEQ ID NO: 37947 - DNA, 15 bp, Homo sapiens
cccatgacgccaggt

SEQ ID NO: 37948 - DNA, 15 bp, Homo sapiens
gcccatgacgccagg

SEQ ID NO: 37949 - DNA, 15 bp, Homo sapiens
ggcccatgacgccag

SEQ ID NO: 37950 - DNA, 15 bp, Homo sapiens
tggcccatgacgcca

SEQ ID NO: 37951 - DNA, 15 bp, Homo sapiens
ctggcccatgacgcc

SEQ ID NO: 37952 - DNA, 15 bp, Homo sapiens
gctggcccatgacgc

SEQ ID NO: 37953 - DNA, 15 bp, Homo sapiens
agctggcccatgacg

SEQ ID NO: 37954 - DNA, 15 bp, Homo sapiens
cagctggcccatgac

SEQ ID NO: 37955 - DNA, 15 bp, Homo sapiens
ccagctggcccatga

SEQ ID NO: 37956 - DNA, 15 bp, Homo sapiens
accagctggcccatg

SEQ ID NO: 37957 - DNA, 15 bp, Homo sapiens
aaccagctggcccat

SEQ ID NO: 37958 - DNA, 15 bp, Homo sapiens
taaccagctggccca

SEQ ID NO: 37959 - DNA, 15 bp, Homo sapiens
ttaaccagctggccc

SEQ ID NO: 37960 - DNA, 15 bp, Homo sapiens
tttaaccagctggcc

SEQ ID NO: 37961 - DNA, 15 bp, Homo sapiens
ttttaaccagctggc

SEQ ID NO: 37962 - DNA, 15 bp, Homo sapiens
attttaaccagctgg

SEQ ID NO: 37963 - DNA, 15 bp, Homo sapiens
tattttaaccagctg

SEQ ID NO: 37964 - DNA, 15 bp, Homo sapiens
ttattttaaccagct

SEQ ID NO: 37965 - DNA, 15 bp, Homo sapiens
tttattttaaccagc

SEQ ID NO: 37966 - DNA, 15 bp, Homo sapiens
ttttattttaaccag

SEQ ID NO: 37967 - DNA, 15 bp, Homo sapiens
attttattttaacca

SEQ ID NO: 37968 - DNA, 15 bp, Homo sapiens
aattttattttaacc

SEQ ID NO: 37969 - DNA, 15 bp, Homo sapiens
caattttattttaac

SEQ ID NO: 37970 - DNA, 15 bp, Homo sapiens
atcaattttatttta

SEQ ID NO: 37971 - DNA, 15 bp, Homo sapiens
aatcaattttatttt

SEQ ID NO: 37972 - DNA, 15 bp, Homo sapiens
aaatcaattttattt

SEQ ID NO: 37973 - DNA, 15 bp, Homo sapiens
gaaatcaattttatt

SEQ ID NO: 37974 - DNA, 15 bp, Homo sapiens
agaaatcaattttat

SEQ ID NO: 37975 - DNA, 15 bp, Homo sapiens
cagaaatcaatttta

SEQ ID NO: 37976 - DNA, 15 bp, Homo sapiens
ccagaaatcaatttt

SEQ ID NO: 37977 - DNA, 15 bp, Homo sapiens
gccagaaatcaattt

SEQ ID NO: 37978 - DNA, 15 bp, Homo sapiens
agccagaaatcaatt

SEQ ID NO: 37979 - DNA, 15 bp, Homo sapiens
aagccagaaatcaat

SEQ ID NO: 37980 - DNA, 15 bp, Homo sapiens
taagccagaaatcaa

SEQ ID NO: 37981 - DNA, 15 bp, Homo sapiens
ataagccagaaatca

SEQ ID NO: 37982 - DNA, 15 bp, Homo sapiens
gataagccagaaatc

SEQ ID NO: 37983 - DNA, 15 bp, Homo sapiens
tgataagccagaaat

SEQ ID NO: 37984 - DNA, 15 bp, Homo sapiens
gtgataagccagaaa

SEQ ID NO: 37985 - DNA, 15 bp, Homo sapiens
agtgataagccagaa

SEQ ID NO: 37986 - DNA, 15 bp, Homo sapiens
aagtgataagccaga

SEQ ID NO: 37987 - DNA, 15 bp, Homo sapiens
caagtgataagccag

SEQ ID NO: 37988 - DNA, 15 bp, Homo sapiens
ccaagtgataagcca

SEQ ID NO: 37989 - DNA, 15 bp, Homo sapiens
gccaagtgataagcc

SEQ ID NO: 37990 - DNA, 15 bp, Homo sapiens
tgccaagtgataagc

SEQ ID NO: 37991 - DNA, 15 bp, Homo sapiens
atgccaagtgataag

SEQ ID NO: 37992 - DNA, 15 bp, Homo sapiens
aatgccaagtgataa

SEQ ID NO: 37993 - DNA, 15 bp, Homo sapiens
aaatgccaagtgata

SEQ ID NO: 37994 - DNA, 15 bp, Homo sapiens
caaatgccaagtgat

SEQ ID NO: 37995 - DNA, 15 bp, Homo sapiens
acaaatgccaagtga

SEQ ID NO: 37996 - DNA, 15 bp, Homo sapiens
cacaaatgccaagtg

SEQ ID NO: 37997 - DNA, 15 bp, Homo sapiens
tcacaaatgccaagt

SEQ ID NO: 37998 - DNA, 15 bp, Homo sapiens
atcacaaatgccaag

SEQ ID NO: 37999 - DNA, 15 bp, Homo sapiens
catcacaaatgccaa

SEQ ID NO: 38000 - DNA, 15 bp, Homo sapiens
tcatcacaaatgcca

SEQ ID NO: 38001 - DNA, 15 bp, Homo sapiens
atcatcacaaatgcc

SEQ ID NO: 38002 - DNA, 15 bp, Homo sapiens
aatcatcacaaatgc

SEQ ID NO: 38003 - DNA, 15 bp, Homo sapiens
aaatcatcacaaatg

SEQ ID NO: 38004 - DNA, 15 bp, Homo sapiens
gaaatcatcacaaat

SEQ ID NO: 38005 - DNA, 15 bp, Homo sapiens
ggaaatcatcacaaa

SEQ ID NO: 38006 - DNA, 15 bp, Homo sapiens
aggaaatcatcacaa

SEQ ID NO: 38007 - DNA, 15 bp, Homo sapiens
gaggaaatcatcaca

SEQ ID NO: 38008 - DNA, 15 bp, Homo sapiens
ggaggaaatcatcac

SEQ ID NO: 38009 - DNA, 15 bp, Homo sapiens
aggaggaaatcatca

SEQ ID NO: 38010 - DNA, 15 bp, Homo sapiens
taggaggaaatcatc

SEQ ID NO: 38011 - DNA, 15 bp, Homo sapiens
gtaggaggaaatcat

SEQ ID NO: 38012 - DNA, 15 bp, Homo sapiens
tgtaggaggaaatca

SEQ ID NO: 38013 - DNA, 15 bp, Homo sapiens
ttgtaggaggaaatc

SEQ ID NO: 38014 - DNA, 15 bp, Homo sapiens
cttgtaggaggaaat

SEQ ID NO: 38015 - DNA, 15 bp, Homo sapiens
ccttgtaggaggaaa

SEQ ID NO: 38016 - DNA, 15 bp, Homo sapiens
cccttgtaggaggaa

SEQ ID NO: 38017 - DNA, 15 bp, Homo sapiens
tcccttgtaggagga

SEQ ID NO: 38018 - DNA, 15 bp, Homo sapiens
atcccttgtaggagg

SEQ ID NO: 38019 - DNA, 15 bp, Homo sapiens
tatcccttgtaggag

SEQ ID NO: 38020 - DNA, 15 bp, Homo sapiens
gtatcccttgtagga

SEQ ID NO: 38021 - DNA, 15 bp, Homo sapiens
tgtatcccttgtagg

SEQ ID NO: 38022 - DNA, 15 bp, Homo sapiens
atgtatcccttgtag

SEQ ID NO: 38023 - DNA, 15 bp, Homo sapiens
aatgtatcccttgta

SEQ ID NO: 38024 - DNA, 15 bp, Homo sapiens
aaatgtatcccttgt

SEQ ID NO: 38025 - DNA, 15 bp, Homo sapiens
aaaatgtatcccttg

SEQ ID NO: 38026 - DNA, 15 bp, Homo sapiens
taaaatgtatccctt

SEQ ID NO: 38027 - DNA, 15 bp, Homo sapiens
ttaaaatgtatccct

SEQ ID NO: 38028 - DNA, 15 bp, Homo sapiens
cttaaaatgtatccc

SEQ ID NO: 38029 - DNA, 15 bp, Homo sapiens
acttaaaatgtatcc

SEQ ID NO: 38030 - DNA, 15 bp, Homo sapiens
aacttaaaatgtatc

SEQ ID NO: 38031 - DNA, 15 bp, Homo sapiens
caacttaaaatgtat

SEQ ID NO: 38032 - DNA, 15 bp, Homo sapiens
tcaacttaaaatgta

SEQ ID NO: 38033 - DNA, 15 bp, Homo sapiens
ctcaacttaaaatgt

SEQ ID NO: 38034 - DNA, 15 bp, Homo sapiens
actcaacttaaaatg

SEQ ID NO: 38035 - DNA, 15 bp, Homo sapiens
aactcaacttaaaat

SEQ ID NO: 38036 - DNA, 15 bp, Homo sapiens
taactcaacttaaaa

SEQ ID NO: 38037 - DNA, 15 bp, Homo sapiens
ttaactcaacttaaa

SEQ ID NO: 38038 - DNA, 15 bp, Homo sapiens
tttaactcaacttaa

SEQ ID NO: 38039 - DNA, 15 bp, Homo sapiens
gtttaactcaactta

SEQ ID NO: 38040 - DNA, 15 bp, Homo sapiens
agtttaactcaactt

SEQ ID NO: 38041 - DNA, 15 bp, Homo sapiens
aagtttaactcaact

SEQ ID NO: 38042 - DNA, 15 bp, Homo sapiens
taagtttaactcaac

SEQ ID NO: 38043 - DNA, 15 bp, Homo sapiens
ttaagtttaactcaa

SEQ ID NO: 38044 - DNA, 15 bp, Homo sapiens
tttaagtttaactca

SEQ ID NO: 38045 - DNA, 15 bp, Homo sapiens
ttttaagtttaactc

SEQ ID NO: 38046 - DNA, 15 bp, Homo sapiens
tttttaagtttaact

SEQ ID NO: 38047 - DNA, 15 bp, Homo sapiens
ttttttaagtttaac

SEQ ID NO: 38048 - DNA, 15 bp, Homo sapiens
attttttaagtttaa

SEQ ID NO: 38049 - DNA, 15 bp, Homo sapiens
tattttttaagttta

SEQ ID NO: 38050 - DNA, 15 bp, Homo sapiens
atattttttaagttt

SEQ ID NO: 38051 - DNA, 15 bp, Homo sapiens
aatattttttaagtt

SEQ ID NO: 38052 - DNA, 15 bp, Homo sapiens
gaatattttttaagt

SEQ ID NO: 38053 - DNA, 15 bp, Homo sapiens
tgaatattttttaag

SEQ ID NO: 38054 - DNA, 15 bp, Homo sapiens
gtgaatattttttaa

SEQ ID NO: 38055 - DNA, 15 bp, Homo sapiens
tgtgaatatttttta

SEQ ID NO: 38056 - DNA, 15 bp, Homo sapiens
ctgtgaatatttttt

SEQ ID NO: 38057 - DNA, 15 bp, Homo sapiens
actgtgaatattttt

SEQ ID NO: 38058 - DNA, 15 bp, Homo sapiens
aactgtgaatatttt

SEQ ID NO: 38059 - DNA, 15 bp, Homo sapiens
gaactgtgaatattt

SEQ ID NO: 38060 - DNA, 15 bp, Homo sapiens
agaactgtgaatatt

SEQ ID NO: 38061 - DNA, 15 bp, Homo sapiens
cagaactgtgaatat

SEQ ID NO: 38062 - DNA, 15 bp, Homo sapiens
tcagaactgtgaata

SEQ ID NO: 38063 - DNA, 15 bp, Homo sapiens
ctcagaactgtgaat

SEQ ID NO: 38064 - DNA, 15 bp, Homo sapiens
cctcagaactgtgaa

SEQ ID NO: 38065 - DNA, 15 bp, Homo sapiens
gcctcagaactgtga

SEQ ID NO: 38066 - DNA, 15 bp, Homo sapiens
tgcctcagaactgtg

SEQ ID NO: 38067 - DNA, 15 bp, Homo sapiens
ttgcctcagaactgt

SEQ ID NO: 38068 - DNA, 15 bp, Homo sapiens
attgcctcagaactg

SEQ ID NO: 38069 - DNA, 15 bp, Homo sapiens
tattgcctcagaact

SEQ ID NO: 38070 - DNA, 15 bp, Homo sapiens
ttattgcctcagaac

SEQ ID NO: 38071 - DNA, 15 bp, Homo sapiens
gttattgcctcagaa

SEQ ID NO: 38072 - DNA, 15 bp, Homo sapiens
ggttattgcctcaga

SEQ ID NO: 38073 - DNA, 15 bp, Homo sapiens
cggttattgcctcag

SEQ ID NO: 38074 - DNA, 15 bp, Homo sapiens
acggttattgcctca

SEQ ID NO: 38075 - DNA, 15 bp, Homo sapiens
cacggttattgcctc

SEQ ID NO: 38076 - DNA, 15 bp, Homo sapiens
ccacggttattgcct

SEQ ID NO: 38077 - DNA, 15 bp, Homo sapiens
accacggttattgcc

SEQ ID NO: 38078 - DNA, 15 bp, Homo sapiens
aaccacggttattgc

SEQ ID NO: 38079 - DNA, 15 bp, Homo sapiens
taaccacggttattg

SEQ ID NO: 38080 - DNA, 15 bp, Homo sapiens
ttaaccacggttatt

SEQ ID NO: 38081 - DNA, 15 bp, Homo sapiens
cttaaccacggttat

SEQ ID NO: 38082 - DNA, 15 bp, Homo sapiens
ccttaaccacggtta

SEQ ID NO: 38083 - DNA, 15 bp, Homo sapiens
cccttaaccacggtt

SEQ ID NO: 38084 - DNA, 15 bp, Homo sapiens
acccttaaccacggt

SEQ ID NO: 38085 - DNA, 15 bp, Homo sapiens
aacccttaaccacgg

SEQ ID NO: 38086 - DNA, 15 bp, Homo sapiens
taacccttaaccacg

SEQ ID NO: 38087 - DNA, 15 bp, Homo sapiens
ataacccttaaccac

SEQ ID NO: 38088 - DNA, 15 bp, Homo sapiens
aataacccttaacca

SEQ ID NO: 38089 - DNA, 15 bp, Homo sapiens
caataacccttaacc

SEQ ID NO: 38090 - DNA, 15 bp, Homo sapiens
tcaataacccttaac

SEQ ID NO: 38091 - DNA, 15 bp, Homo sapiens
atcaataacccttaa

SEQ ID NO: 38092 - DNA, 15 bp, Homo sapiens
gatcaataaccctta

SEQ ID NO: 38093 - DNA, 15 bp, Homo sapiens
agatcaataaccctt

SEQ ID NO: 38094 - DNA, 15 bp, Homo sapiens
cagatcaataaccct

SEQ ID NO: 38095 - DNA, 15 bp, Homo sapiens
ccagatcaataaccc

SEQ ID NO: 38096 - DNA, 15 bp, Homo sapiens
tccagatcaataacc

SEQ ID NO: 38097 - DNA, 15 bp, Homo sapiens
ctccagatcaataac

SEQ ID NO: 38098 - DNA, 15 bp, Homo sapiens
cctccagatcaataa

SEQ ID NO: 38099 - DNA, 15 bp, Homo sapiens
tcctccagatcaata

SEQ ID NO: 38100 - DNA, 15 bp, Homo sapiens
ctcctccagatcaat

SEQ ID NO: 38101 - DNA, 15 bp, Homo sapiens
gctcctccagatcaa

SEQ ID NO: 38102 - DNA, 15 bp, Homo sapiens
agctcctccagatca

SEQ ID NO: 38103 - DNA, 15 bp, Homo sapiens
gagctcctccagatc

SEQ ID NO: 38104 - DNA, 15 bp, Homo sapiens
agagctcctccagat

SEQ ID NO: 38105 - DNA, 15 bp, Homo sapiens
cagagctcctccaga

SEQ ID NO: 38106 - DNA, 15 bp, Homo sapiens
acagagctcctccag

SEQ ID NO: 38107 - DNA, 15 bp, Homo sapiens
gacagagctcctcca

SEQ ID NO: 38108 - DNA, 15 bp, Homo sapiens
agacagagctcctcc

SEQ ID NO: 38109 - DNA, 15 bp, Homo sapiens
tagacagagctcctc

SEQ ID NO: 38110 - DNA, 15 bp, Homo sapiens
ttagacagagctcct

SEQ ID NO: 38111 - DNA, 15 bp, Homo sapiens
tttagacagagctcc

SEQ ID NO: 38112 - DNA, 15 bp, Homo sapiens
ttttagacagagctc

SEQ ID NO: 38113 - DNA, 15 bp, Homo sapiens
tttttagacagagct

SEQ ID NO: 38114 - DNA, 15 bp, Homo sapiens
ttttttagacagagc

SEQ ID NO: 38115 - DNA, 15 bp, Homo sapiens
attttttagacagag

SEQ ID NO: 38116 - DNA, 15 bp, Homo sapiens
aattttttagacaga

SEQ ID NO: 38117 - DNA, 15 bp, Homo sapiens
caattttttagacag

SEQ ID NO: 38118 - DNA, 15 bp, Homo sapiens
tcaattttttagaca

SEQ ID NO: 38119 - DNA, 15 bp, Homo sapiens
ctcaattttttagac

SEQ ID NO: 38120 - DNA, 15 bp, Homo sapiens
cctcaattttttaga

SEQ ID NO: 38121 - DNA, 15 bp, Homo sapiens
tcctcaattttttag

SEQ ID NO: 38122 - DNA, 15 bp, Homo sapiens
gtcctcaatttttta

SEQ ID NO: 38123 - DNA, 15 bp, Homo sapiens
tgtcctcaatttttt

SEQ ID NO: 38124 - DNA, 15 bp, Homo sapiens
ctgtcctcaattttt

SEQ ID NO: 38125 - DNA, 15 bp, Homo sapiens
cctgtcctcaatttt

SEQ ID NO: 38126 - DNA, 15 bp, Homo sapiens
tcctgtcctcaattt

SEQ ID NO: 38127 - DNA, 15 bp, Homo sapiens
ctcctgtcctcaatt

SEQ ID NO: 38128 - DNA, 15 bp, Homo sapiens
tctcctgtcctcaat

SEQ ID NO: 38129 - DNA, 15 bp, Homo sapiens
gtctcctgtcctcaa

SEQ ID NO: 38130 - DNA, 15 bp, Homo sapiens
agtctcctgtcctca

SEQ ID NO: 38131 - DNA, 15 bp, Homo sapiens
aagtctcctgtcctc

SEQ ID NO: 38132 - DNA, 15 bp, Homo sapiens
aaagtctcctgtcct

SEQ ID NO: 38133 - DNA, 15 bp, Homo sapiens
taaagtctcctgtcc

SEQ ID NO: 38134 - DNA, 15 bp, Homo sapiens
ctaaagtctcctgtc

SEQ ID NO: 38135 - DNA, 15 bp, Homo sapiens
tctaaagtctcctgt

SEQ ID NO: 38136 - DNA, 15 bp, Homo sapiens
gtctaaagtctcctg

SEQ ID NO: 38137 - DNA, 15 bp, Homo sapiens
tgtctaaagtctcct

SEQ ID NO: 38138 - DNA, 15 bp, Homo sapiens
ttgtctaaagtctcc

SEQ ID NO: 38139 - DNA, 15 bp, Homo sapiens
cttgtctaaagtctc

SEQ ID NO: 38140 - DNA, 15 bp, Homo sapiens
ccttgtctaaagtct

SEQ ID NO: 38141 - DNA, 15 bp, Homo sapiens
cccttgtctaaagtc

SEQ ID NO: 38142 - DNA, 15 bp, Homo sapiens
acccttgtctaaagt

SEQ ID NO: 38143 - DNA, 15 bp, Homo sapiens
cacccttgtctaaag

SEQ ID NO: 38144 - DNA, 15 bp, Homo sapiens
acacccttgtctaaa

SEQ ID NO: 38145 - DNA, 15 bp, Homo sapiens
tacacccttgtctaa

SEQ ID NO: 38146 - DNA, 15 bp, Homo sapiens
atacacccttgtcta

SEQ ID NO: 38147 - DNA, 15 bp, Homo sapiens
aatacacccttgtct

SEQ ID NO: 38148 - DNA, 15 bp, Homo sapiens
aaatacacccttgtc

SEQ ID NO: 38149 - DNA, 15 bp, Homo sapiens
caaatacacccttgt

SEQ ID NO: 38150 - DNA, 15 bp, Homo sapiens
ccaaatacacccttg

SEQ ID NO: 38151 - DNA, 15 bp, Homo sapiens
tccaaatacaccctt

SEQ ID NO: 38152 - DNA, 15 bp, Homo sapiens
ctccaaatacaccct

SEQ ID NO: 38153 - DNA, 15 bp, Homo sapiens
tctccaaatacaccc

SEQ ID NO: 38154 - DNA, 15 bp, Homo sapiens
gtctccaaatacacc

SEQ ID NO: 38155 - DNA, 15 bp, Homo sapiens
agtctccaaatacac

SEQ ID NO: 38156 - DNA, 15 bp, Homo sapiens
aagtctccaaataca

SEQ ID NO: 38157 - DNA, 15 bp, Homo sapiens
aaagtctccaaatac

SEQ ID NO: 38158 - DNA, 15 bp, Homo sapiens
aaaagtctccaaata

SEQ ID NO: 38159 - DNA, 15 bp, Homo sapiens
taaaagtctccaaat

SEQ ID NO: 38160 - DNA, 15 bp, Homo sapiens
ttaaaagtctccaaa

SEQ ID NO: 38161 - DNA, 15 bp, Homo sapiens
cttaaaagtctccaa

SEQ ID NO: 38162 - DNA, 15 bp, Homo sapiens
tcttaaaagtctcca

SEQ ID NO: 38163 - DNA, 15 bp, Homo sapiens
ttcttaaaagtctcc

SEQ ID NO: 38164 - DNA, 15 bp, Homo sapiens
attcttaaaagtctc

SEQ ID NO: 38165 - DNA, 15 bp, Homo sapiens
aattcttaaaagtct

SEQ ID NO: 38166 - DNA, 15 bp, Homo sapiens
aaattcttaaaagtc

SEQ ID NO: 38167 - DNA, 15 bp, Homo sapiens
aaaattcttaaaagt

SEQ ID NO: 38168 - DNA, 15 bp, Homo sapiens
taaaattcttaaaag

SEQ ID NO: 38169 - DNA, 15 bp, Homo sapiens
ataaaattcttaaaa

SEQ ID NO: 38170 - DNA, 15 bp, Homo sapiens
tataaaattcttaaa

SEQ ID NO: 38171 - DNA, 15 bp, Homo sapiens
ttataaaattcttaa

SEQ ID NO: 38172 - DNA, 15 bp, Homo sapiens
tttataaaattctta

SEQ ID NO: 38173 - DNA, 15 bp, Homo sapiens
ttttataaaattctt

SEQ ID NO: 38174 - DNA, 15 bp, Homo sapiens
attttataaaattct

SEQ ID NO: 38175 - DNA, 15 bp, Homo sapiens
tattttataaaattc

SEQ ID NO: 38176 - DNA, 15 bp, Homo sapiens
ttattttataaaatt

SEQ ID NO: 38177 - DNA, 15 bp, Homo sapiens
cttattttataaaat

SEQ ID NO: 38178 - DNA, 15 bp, Homo sapiens
ccttattttataaaa

SEQ ID NO: 38179 - DNA, 15 bp, Homo sapiens
cccttattttataaa

SEQ ID NO: 38180 - DNA, 15 bp, Homo sapiens
gcccttattttataa

SEQ ID NO: 38181 - DNA, 15 bp, Homo sapiens
agcccttattttata

SEQ ID NO: 38182 - DNA, 15 bp, Homo sapiens
cagcccttattttat

SEQ ID NO: 38183 - DNA, 15 bp, Homo sapiens
ccagcccttatttta

SEQ ID NO: 38184 - DNA, 15 bp, Homo sapiens
tccagcccttatttt

SEQ ID NO: 38185 - DNA, 15 bp, Homo sapiens
gtccagcccttattt

SEQ ID NO: 38186 - DNA, 15 bp, Homo sapiens
cgtccagcccttatt

SEQ ID NO: 38187 - DNA, 15 bp, Homo sapiens
gcgtccagcccttat

SEQ ID NO: 38188 - DNA, 15 bp, Homo sapiens
tgcgtccagccctta

SEQ ID NO: 38189 - DNA, 15 bp, Homo sapiens
ctgcgtccagccctt

SEQ ID NO: 38190 - DNA, 15 bp, Homo sapiens
actgcgtccagccct

SEQ ID NO: 38191 - DNA, 15 bp, Homo sapiens
cactgcgtccagccc

SEQ ID NO: 38192 - DNA, 15 bp, Homo sapiens
ccactgcgtccagcc

SEQ ID NO: 38193 - DNA, 15 bp, Homo sapiens
gccactgcgtccagc

SEQ ID NO: 38194 - DNA, 15 bp, Homo sapiens
tgccactgcgtccag

SEQ ID NO: 38195 - DNA, 15 bp, Homo sapiens
gtgccactgcgtcca

SEQ ID NO: 38196 - DNA, 15 bp, Homo sapiens
agtgccactgcgtcc

SEQ ID NO: 38197 - DNA, 15 bp, Homo sapiens
cagtgccactgcgtc

SEQ ID NO: 38198 - DNA, 15 bp, Homo sapiens
tcagtgccactgcgt

SEQ ID NO: 38199 - DNA, 15 bp, Homo sapiens
ctcagtgccactgcg

SEQ ID NO: 38200 - DNA, 15 bp, Homo sapiens
actcagtgccactgc

SEQ ID NO: 38201 - DNA, 15 bp, Homo sapiens
aactcagtgccactg

SEQ ID NO: 38202 - DNA, 15 bp, Homo sapiens
caactcagtgccact

SEQ ID NO: 38203 - DNA, 15 bp, Homo sapiens
tcaactcagtgccac

SEQ ID NO: 38204 - DNA, 15 bp, Homo sapiens
ctcaactcagtgcca

SEQ ID NO: 38205 - DNA, 15 bp, Homo sapiens
tctcaactcagtgcc

SEQ ID NO: 38206 - DNA, 15 bp, Homo sapiens
ttctcaactcagtgc

SEQ ID NO: 38207 - DNA, 15 bp, Homo sapiens
gttctcaactcagtg

SEQ ID NO: 38208 - DNA, 15 bp, Homo sapiens
agttctcaactcagt

SEQ ID NO: 38209 - DNA, 15 bp, Homo sapiens
cagttctcaactcag

SEQ ID NO: 38210 - DNA, 15 bp, Homo sapiens
acagttctcaactca

SEQ ID NO: 38211 - DNA, 15 bp, Homo sapiens
aacagttctcaactc

SEQ ID NO: 38212 - DNA, 15 bp, Homo sapiens
caacagttctcaact

SEQ ID NO: 38213 - DNA, 15 bp, Homo sapiens
gcaacagttctcaac

SEQ ID NO: 38214 - DNA, 15 bp, Homo sapiens
agcaacagttctcaa

SEQ ID NO: 38215 - DNA, 15 bp, Homo sapiens
aagcaacagttctca

SEQ ID NO: 38216 - DNA, 15 bp, Homo sapiens
caagcaacagttctc

SEQ ID NO: 38217 - DNA, 15 bp, Homo sapiens
gcaagcaacagttct

SEQ ID NO: 38218 - DNA, 15 bp, Homo sapiens
agcaagcaacagttc

SEQ ID NO: 38219 - DNA, 15 bp, Homo sapiens
aagcaagcaacagtt

SEQ ID NO: 38220 - DNA, 15 bp, Homo sapiens
aaagcaagcaacagt

SEQ ID NO: 38221 - DNA, 15 bp, Homo sapiens
caaagcaagcaacag

SEQ ID NO: 38222 - DNA, 15 bp, Homo sapiens
gcaaagcaagcaaca

SEQ ID NO: 38223 - DNA, 15 bp, Homo sapiens
tgcaaagcaagcaac

SEQ ID NO: 38224 - DNA, 15 bp, Homo sapiens
atgcaaagcaagcaa

SEQ ID NO: 38225 - DNA, 15 bp, Homo sapiens
aatgcaaagcaagca

SEQ ID NO: 38226 - DNA, 15 bp, Homo sapiens
taatgcaaagcaagc

SEQ ID NO: 38227 - DNA, 15 bp, Homo sapiens
ttaatgcaaagcaag

SEQ ID NO: 38228 - DNA, 15 bp, Homo sapiens
tttaatgcaaagcaa

SEQ ID NO: 38229 - DNA, 15 bp, Homo sapiens
atttaatgcaaagca

SEQ ID NO: 38230 - DNA, 15 bp, Homo sapiens
tatttaatgcaaagc

SEQ ID NO: 38231 - DNA, 15 bp, Homo sapiens
ctatttaatgcaaag

SEQ ID NO: 38232 - DNA, 15 bp, Homo sapiens
cctatttaatgcaaa

SEQ ID NO: 38233 - DNA, 15 bp, Homo sapiens
tcctatttaatgcaa

SEQ ID NO: 38234 - DNA, 15 bp, Homo sapiens
ctcctatttaatgca

SEQ ID NO: 38235 - DNA, 15 bp, Homo sapiens
tctcctatttaatgc

SEQ ID NO: 38236 - DNA, 15 bp, Homo sapiens
atctcctatttaatg

SEQ ID NO: 38237 - DNA, 15 bp, Homo sapiens
gatctcctatttaat

SEQ ID NO: 38238 - DNA, 15 bp, Homo sapiens
tgatctcctatttaa

SEQ ID NO: 38239 - DNA, 15 bp, Homo sapiens
ctgatctcctattta

SEQ ID NO: 38240 - DNA, 15 bp, Homo sapiens
actgatctcctattt

SEQ ID NO: 38241 - DNA, 15 bp, Homo sapiens
gactgatctcctatt

SEQ ID NO: 38242 - DNA, 15 bp, Homo sapiens
ggactgatctcctat

SEQ ID NO: 38243 - DNA, 15 bp, Homo sapiens
gggactgatctccta

SEQ ID NO: 38244 - DNA, 15 bp, Homo sapiens
agggactgatctcct

SEQ ID NO: 38245 - DNA, 15 bp, Homo sapiens
cagggactgatctcc

SEQ ID NO: 38246 - DNA, 15 bp, Homo sapiens
gcagggactgatctc

SEQ ID NO: 38247 - DNA, 15 bp, Homo sapiens
tgcagggactgatct

SEQ ID NO: 38248 - DNA, 15 bp, Homo sapiens
ctgcagggactgatc

SEQ ID NO: 38249 - DNA, 15 bp, Homo sapiens
gctgcagggactgat

SEQ ID NO: 38250 - DNA, 15 bp, Homo sapiens
agctgcagggactga

SEQ ID NO: 38251 - DNA, 15 bp, Homo sapiens
acaagctgcagggac

SEQ ID NO: 38252 - DNA, 15 bp, Homo sapiens
cacaagctgcaggga

SEQ ID NO: 38253 - DNA, 15 bp, Homo sapiens
ccacaagctgcaggg

SEQ ID NO: 38254 - DNA, 15 bp, Homo sapiens
cccacaagctgcagg

SEQ ID NO: 38255 - DNA, 15 bp, Homo sapiens
cttattcccacaagc

SEQ ID NO: 38256 - DNA, 15 bp, Homo sapiens
ccttattcccacaag

SEQ ID NO: 38257 - DNA, 15 bp, Homo sapiens
gccttattcccacaa

SEQ ID NO: 38258 - DNA, 15 bp, Homo sapiens
agccttattcccaca

SEQ ID NO: 38259 - DNA, 15 bp, Homo sapiens
aagccttattcccac

SEQ ID NO: 38260 - DNA, 15 bp, Homo sapiens
aaagccttattccca

SEQ ID NO: 38261 - DNA, 15 bp, Homo sapiens
taaagccttattccc

SEQ ID NO: 38262 - DNA, 15 bp, Homo sapiens
ttaaagccttattcc

SEQ ID NO: 38263 - DNA, 15 bp, Homo sapiens
tttaaagccttattc

SEQ ID NO: 38264 - DNA, 15 bp, Homo sapiens
atttaaagccttatt

SEQ ID NO: 38265 - DNA, 15 bp, Homo sapiens
gatttaaagccttat

SEQ ID NO: 38266 - DNA, 15 bp, Homo sapiens
agatttaaagcctta

SEQ ID NO: 38267 - DNA, 15 bp, Homo sapiens
gagatttaaagcctt

SEQ ID NO: 38268 - DNA, 15 bp, Homo sapiens
agagatttaaagcct

SEQ ID NO: 38269 - DNA, 15 bp, Homo sapiens
gagagatttaaagcc

SEQ ID NO: 38270 - DNA, 15 bp, Homo sapiens
ctcacagagctaaaa

SEQ ID NO: 38271 - DNA, 15 bp, Homo sapiens
tctcacagagctaaa

SEQ ID NO: 38272 - DNA, 15 bp, Homo sapiens
atctcacagagctaa

SEQ ID NO: 38273 - DNA, 15 bp, Homo sapiens
catctcacagagcta

SEQ ID NO: 38274 - DNA, 15 bp, Homo sapiens
ccatctcacagagct

SEQ ID NO: 38275 - DNA, 15 bp, Homo sapiens
gccatctcacagagc

SEQ ID NO: 38276 - DNA, 15 bp, Homo sapiens
tgccatctcacagag

SEQ ID NO: 38277 - DNA, 15 bp, Homo sapiens
gtgccatctcacaga

SEQ ID NO: 38278 - DNA, 15 bp, Homo sapiens
agtgccatctcacag

SEQ ID NO: 38279 - DNA, 15 bp, Homo sapiens
cagtgccatctcaca

SEQ ID NO: 38280 - DNA, 15 bp, Homo sapiens
ccagtgccatctcac

SEQ ID NO: 38281 - DNA, 15 bp, Homo sapiens
cccagtgccatctca

SEQ ID NO: 38282 - DNA, 15 bp, Homo sapiens
ccccagtgccatctc

SEQ ID NO: 38283 - DNA, 15 bp, Homo sapiens
tccccagtgccatct

SEQ ID NO: 38284 - DNA, 15 bp, Homo sapiens
ttccccagtgccatc

SEQ ID NO: 38285 - DNA, 15 bp, Homo sapiens
tttccccagtgccat

SEQ ID NO: 38286 - DNA, 15 bp, Homo sapiens
gtttccccagtgcca

SEQ ID NO: 38287 - DNA, 15 bp, Homo sapiens
tgtttccccagtgcc

SEQ ID NO: 38288 - DNA, 15 bp, Homo sapiens
ctgtttccccagtgc

SEQ ID NO: 38289 - DNA, 15 bp, Homo sapiens
tctgtttccccagtg

SEQ ID NO: 38290 - DNA, 15 bp, Homo sapiens
ttctgtttccccagt

SEQ ID NO: 38291 - DNA, 15 bp, Homo sapiens
tttctgtttccccag

SEQ ID NO: 38292 - DNA, 15 bp, Homo sapiens
atttctgtttcccca

SEQ ID NO: 38293 - DNA, 15 bp, Homo sapiens
catttctgtttcccc

SEQ ID NO: 38294 - DNA, 15 bp, Homo sapiens
tcatttctgtttccc

SEQ ID NO: 38295 - DNA, 15 bp, Homo sapiens
ttcatttctgtttcc

SEQ ID NO: 38296 - DNA, 15 bp, Homo sapiens
gttcatttctgtttc

SEQ ID NO: 38297 - DNA, 15 bp, Homo sapiens
cgttcatttctgttt

SEQ ID NO: 38298 - DNA, 15 bp, Homo sapiens
ccgttcatttctgtt

SEQ ID NO: 38299 - DNA, 15 bp, Homo sapiens
tccgttcatttctgt

SEQ ID NO: 38300 - DNA, 15 bp, Homo sapiens
gtccgttcatttctg

SEQ ID NO: 38301 - DNA, 15 bp, Homo sapiens
agtccgttcatttct

SEQ ID NO: 38302 - DNA, 15 bp, Homo sapiens
tagtccgttcatttc

SEQ ID NO: 38303 - DNA, 15 bp, Homo sapiens
ctagtccgttcattt

SEQ ID NO: 38304 - DNA, 15 bp, Homo sapiens
acactagtccgttca

SEQ ID NO: 38305 - DNA, 15 bp, Homo sapiens
gacactagtccgttc

SEQ ID NO: 38306 - DNA, 15 bp, Homo sapiens
tgacactagtccgtt

SEQ ID NO: 38307 - DNA, 15 bp, Homo sapiens
gtgacactagtccgt

SEQ ID NO: 38308 - DNA, 15 bp, Homo sapiens
tgtgacactagtccg

SEQ ID NO: 38309 - DNA, 15 bp, Homo sapiens
ttgtgacactagtcc

SEQ ID NO: 38310 - DNA, 15 bp, Homo sapiens
tttgtgacactagtc

SEQ ID NO: 38311 - DNA, 15 bp, Homo sapiens
ctttgtgacactagt

SEQ ID NO: 38312 - DNA, 15 bp, Homo sapiens
gctttgtgacactag

SEQ ID NO: 38313 - DNA, 15 bp, Homo sapiens
agctttgtgacacta

SEQ ID NO: 38314 - DNA, 15 bp, Homo sapiens
gagctttgtgacact

SEQ ID NO: 38315 - DNA, 15 bp, Homo sapiens
tgagctttgtgacac

SEQ ID NO: 38316 - DNA, 15 bp, Homo sapiens
ctgagctttgtgaca

SEQ ID NO: 38317 - DNA, 15 bp, Homo sapiens
cctgagctttgtgac

SEQ ID NO: 38318 - DNA, 15 bp, Homo sapiens
acctgagctttgtga

SEQ ID NO: 38319 - DNA, 15 bp, Homo sapiens
tcccacctgagcttt

SEQ ID NO: 38320 - DNA, 15 bp, Homo sapiens
atcccacctgagctt

SEQ ID NO: 38321 - DNA, 15 bp, Homo sapiens
catcccacctgagct

SEQ ID NO: 38322 - DNA, 15 bp, Homo sapiens
ccatcccacctgagc

SEQ ID NO: 38323 - DNA, 15 bp, Homo sapiens
tccatcccacctgag

SEQ ID NO: 38324 - DNA, 15 bp, Homo sapiens
gtccatcccacctga

SEQ ID NO: 38325 - DNA, 15 bp, Homo sapiens
cgtccatcccacctg

SEQ ID NO: 38326 - DNA, 15 bp, Homo sapiens
tcgtccatcccacct

SEQ ID NO: 38327 - DNA, 15 bp, Homo sapiens
ctcgtccatcccacc

SEQ ID NO: 38328 - DNA, 15 bp, Homo sapiens
tctcgtccatcccac

SEQ ID NO: 38329 - DNA, 15 bp, Homo sapiens
atctcgtccatccca

SEQ ID NO: 38330 - DNA, 15 bp, Homo sapiens
gatctcgtccatccc

SEQ ID NO: 38331 - DNA, 15 bp, Homo sapiens
tgatctcgtccatcc

SEQ ID NO: 38332 - DNA, 15 bp, Homo sapiens
gtgatctcgtccatc

SEQ ID NO: 38333 - DNA, 15 bp, Homo sapiens
agtgatctcgtccat

SEQ ID NO: 38334 - DNA, 15 bp, Homo sapiens
aagtgatctcgtcca

SEQ ID NO: 38335 - DNA, 15 bp, Homo sapiens
gaagtgatctcgtcc

SEQ ID NO: 38336 - DNA, 15 bp, Homo sapiens
tgaagtgatctcgtc

SEQ ID NO: 38337 - DNA, 15 bp, Homo sapiens
ttgaagtgatctcgt

SEQ ID NO: 38338 - DNA, 15 bp, Homo sapiens
tttgaagtgatctcg

SEQ ID NO: 38339 - DNA, 15 bp, Homo sapiens
ctttgaagtgatctc

SEQ ID NO: 38340 - DNA, 15 bp, Homo sapiens
cctttgaagtgatct

SEQ ID NO: 38341 - DNA, 15 bp, Homo sapiens
acctttgaagtgatc

SEQ ID NO: 38342 - DNA, 15 bp, Homo sapiens
gacctttgaagtgat

SEQ ID NO: 38343 - DNA, 15 bp, Homo sapiens
agacctttgaagtga

SEQ ID NO: 38344 - DNA, 15 bp, Homo sapiens
cagacctttgaagtg

SEQ ID NO: 38345 - DNA, 15 bp, Homo sapiens
acagacctttgaagt

SEQ ID NO: 38346 - DNA, 15 bp, Homo sapiens
tacagacctttgaag

SEQ ID NO: 38347 - DNA, 15 bp, Homo sapiens
ttacagacctttgaa

SEQ ID NO: 38348 - DNA, 15 bp, Homo sapiens
attacagacctttga

SEQ ID NO: 38349 - DNA, 15 bp, Homo sapiens
gattacagacctttg

SEQ ID NO: 38350 - DNA, 15 bp, Homo sapiens
ggattacagaccttt

SEQ ID NO: 38351 - DNA, 15 bp, Homo sapiens
gggattacagacctt

SEQ ID NO: 38352 - DNA, 15 bp, Homo sapiens
tgggattacagacct

SEQ ID NO: 38353 - DNA, 15 bp, Homo sapiens
gtgggattacagacc

SEQ ID NO: 38354 - DNA, 15 bp, Homo sapiens
cgtgggattacagac

SEQ ID NO: 38355 - DNA, 15 bp, Homo sapiens
acgtgggattacaga

SEQ ID NO: 38356 - DNA, 15 bp, Homo sapiens
gacgtgggattacag

SEQ ID NO: 38357 - DNA, 15 bp, Homo sapiens
agacgtgggattaca

SEQ ID NO: 38358 - DNA, 15 bp, Homo sapiens
tagacgtgggattac

SEQ ID NO: 38359 - DNA, 15 bp, Homo sapiens
atagacgtgggatta

SEQ ID NO: 38360 - DNA, 15 bp, Homo sapiens
tatagacgtgggatt

SEQ ID NO: 38361 - DNA, 15 bp, Homo sapiens
ttatagacgtgggat

SEQ ID NO: 38362 - DNA, 15 bp, Homo sapiens
attatagacgtggga

SEQ ID NO: 38363 - DNA, 15 bp, Homo sapiens
gattatagacgtggg

SEQ ID NO: 38364 - DNA, 15 bp, Homo sapiens
ggattatagacgtgg

SEQ ID NO: 38365 - DNA, 15 bp, Homo sapiens
gggattatagacgtg

SEQ ID NO: 38366 - DNA, 15 bp, Homo sapiens
tgggattatagacgt

SEQ ID NO: 38367 - DNA, 15 bp, Homo sapiens
ctgggattatagacg

SEQ ID NO: 38368 - DNA, 15 bp, Homo sapiens
gctgggattatagac

SEQ ID NO: 38369 - DNA, 15 bp, Homo sapiens
tgctgggattataga

SEQ ID NO: 38370 - DNA, 15 bp, Homo sapiens
gtgctgggattatag

SEQ ID NO: 38371 - DNA, 15 bp, Homo sapiens
agtgctgggattata

SEQ ID NO: 38372 - DNA, 15 bp, Homo sapiens
aagtgctgggattat

SEQ ID NO: 38373 - DNA, 15 bp, Homo sapiens
ccgccttggcctccc

SEQ ID NO: 38374 - DNA, 15 bp, Homo sapiens
cccgccttggcctcc

SEQ ID NO: 38375 - DNA, 15 bp, Homo sapiens
tcccgccttggcctc

SEQ ID NO: 38376 - DNA, 15 bp, Homo sapiens
ttcccgccttggcct

SEQ ID NO: 38377 - DNA, 15 bp, Homo sapiens
tttcccgccttggcc

SEQ ID NO: 38378 - DNA, 15 bp, Homo sapiens
ttttcccgccttggc

SEQ ID NO: 38379 - DNA, 15 bp, Homo sapiens
attttcccgccttgg

SEQ ID NO: 38380 - DNA, 15 bp, Homo sapiens
gattttcccgccttg

SEQ ID NO: 38381 - DNA, 15 bp, Homo sapiens
tgattttcccgcctt

SEQ ID NO: 38382 - DNA, 15 bp, Homo sapiens
gtgattttcccgcct

SEQ ID NO: 38383 - DNA, 15 bp, Homo sapiens
agtgattttcccgcc

SEQ ID NO: 38384 - DNA, 15 bp, Homo sapiens
aagtgattttcccgc

SEQ ID NO: 38385 - DNA, 15 bp, Homo sapiens
caagtgattttcccg

SEQ ID NO: 38386 - DNA, 15 bp, Homo sapiens
tcaagtgattttccc

SEQ ID NO: 38387 - DNA, 15 bp, Homo sapiens
ctcaagtgattttcc

SEQ ID NO: 38388 - DNA, 15 bp, Homo sapiens
cctcaagtgattttc

SEQ ID NO: 38389 - DNA, 15 bp, Homo sapiens
acctcaagtgatttt

SEQ ID NO: 38390 - DNA, 15 bp, Homo sapiens
gacctcaagtgattt

SEQ ID NO: 38391 - DNA, 15 bp, Homo sapiens
atggtctcgaactcc

SEQ ID NO: 38392 - DNA, 15 bp, Homo sapiens
gatggtctcgaactc

SEQ ID NO: 38393 - DNA, 15 bp, Homo sapiens
ggatggtctcgaact

SEQ ID NO: 38394 - DNA, 15 bp, Homo sapiens
aggatggtctcgaac

SEQ ID NO: 38395 - DNA, 15 bp, Homo sapiens
caggatggtctcgaa

SEQ ID NO: 38396 - DNA, 15 bp, Homo sapiens
ggccaggatggtctc

SEQ ID NO: 38397 - DNA, 15 bp, Homo sapiens
tggccaggatggtct

SEQ ID NO: 38398 - DNA, 15 bp, Homo sapiens
ttggccaggatggtc

SEQ ID NO: 38399 - DNA, 15 bp, Homo sapiens
gttggccaggatggt

SEQ ID NO: 38400 - DNA, 15 bp, Homo sapiens
tgttggccaggatgg

SEQ ID NO: 38401 - DNA, 15 bp, Homo sapiens
atgttggccaggatg

SEQ ID NO: 38402 - DNA, 15 bp, Homo sapiens
catgttggccaggat

SEQ ID NO: 38403 - DNA, 15 bp, Homo sapiens
ccatgttggccagga

SEQ ID NO: 38404 - DNA, 15 bp, Homo sapiens
tgccatgttggccag

SEQ ID NO: 38405 - DNA, 15 bp, Homo sapiens
ttgccatgttggcca

SEQ ID NO: 38406 - DNA, 15 bp, Homo sapiens
tttgccatgttggcc

SEQ ID NO: 38407 - DNA, 15 bp, Homo sapiens
ctttgccatgttggc

SEQ ID NO: 38408 - DNA, 15 bp, Homo sapiens
gctttgccatgttgg

SEQ ID NO: 38409 - DNA, 15 bp, Homo sapiens
ggctttgccatgttg

SEQ ID NO: 38410 - DNA, 15 bp, Homo sapiens
aggctttgccatgtt

SEQ ID NO: 38411 - DNA, 15 bp, Homo sapiens
caggctttgccatgt

SEQ ID NO: 38412 - DNA, 15 bp, Homo sapiens
acaggctttgccatg

SEQ ID NO: 38413 - DNA, 15 bp, Homo sapiens
gacaggctttgccat

SEQ ID NO: 38414 - DNA, 15 bp, Homo sapiens
agacaggctttgcca

SEQ ID NO: 38415 - DNA, 15 bp, Homo sapiens
gagacaggctttgcc

SEQ ID NO: 38416 - DNA, 15 bp, Homo sapiens
agagacaggctttgc

SEQ ID NO: 38417 - DNA, 15 bp, Homo sapiens
tagagacaggctttg

SEQ ID NO: 38418 - DNA, 15 bp, Homo sapiens
gtagagacaggcttt

SEQ ID NO: 38419 - DNA, 15 bp, Homo sapiens
agtagagacaggctt

SEQ ID NO: 38420 - DNA, 15 bp, Homo sapiens
tagtagagacaggct

SEQ ID NO: 38421 - DNA, 15 bp, Homo sapiens
ttagtagagacaggc

SEQ ID NO: 38422 - DNA, 15 bp, Homo sapiens
tttagtagagacagg

SEQ ID NO: 38423 - DNA, 15 bp, Homo sapiens
ttttagtagagacag

SEQ ID NO: 38424 - DNA, 15 bp, Homo sapiens
tttttagtagagaca

SEQ ID NO: 38425 - DNA, 15 bp, Homo sapiens
atatttttagtagag

SEQ ID NO: 38426 - DNA, 15 bp, Homo sapiens
catatttttagtaga

SEQ ID NO: 38427 - DNA, 15 bp, Homo sapiens
tcatatttttagtag

SEQ ID NO: 38428 - DNA, 15 bp, Homo sapiens
ttcatatttttagta

SEQ ID NO: 38429 - DNA, 15 bp, Homo sapiens
tttcatatttttagt

SEQ ID NO: 38430 - DNA, 15 bp, Homo sapiens
ttttcatatttttag

SEQ ID NO: 38431 - DNA, 15 bp, Homo sapiens
attttcatattttta

SEQ ID NO: 38432 - DNA, 15 bp, Homo sapiens
aattttcatattttt

SEQ ID NO: 38433 - DNA, 15 bp, Homo sapiens
taattttcatatttt

SEQ ID NO: 38434 - DNA, 15 bp, Homo sapiens
ctaattttcatattt

SEQ ID NO: 38435 - DNA, 15 bp, Homo sapiens
gctaattttcatatt

SEQ ID NO: 38436 - DNA, 15 bp, Homo sapiens
agctaattttcatat

SEQ ID NO: 38437 - DNA, 15 bp, Homo sapiens
gagctaattttcata

SEQ ID NO: 38438 - DNA, 15 bp, Homo sapiens
tgagctaattttcat

SEQ ID NO: 38439 - DNA, 15 bp, Homo sapiens
ctgagctaattttca

SEQ ID NO: 38440 - DNA, 15 bp, Homo sapiens
gctgagctaattttc

SEQ ID NO: 38441 - DNA, 15 bp, Homo sapiens
cgctgagctaatttt

SEQ ID NO: 38442 - DNA, 15 bp, Homo sapiens
acgctgagctaattt

SEQ ID NO: 38443 - DNA, 15 bp, Homo sapiens
cacgctgagctaatt

SEQ ID NO: 38444 - DNA, 15 bp, Homo sapiens
ccacgctgagctaat

SEQ ID NO: 38445 - DNA, 15 bp, Homo sapiens
accacgctgagctaa

SEQ ID NO: 38446 - DNA, 15 bp, Homo sapiens
caccacgctgagcta

SEQ ID NO: 38447 - DNA, 15 bp, Homo sapiens
ccaccacgctgagct

SEQ ID NO: 38448 - DNA, 15 bp, Homo sapiens
gccaccacgctgagc

SEQ ID NO: 38449 - DNA, 15 bp, Homo sapiens
tgccaccacgctgag

SEQ ID NO: 38450 - DNA, 15 bp, Homo sapiens
atgccaccacgctga

SEQ ID NO: 38451 - DNA, 15 bp, Homo sapiens
catgccaccacgctg

SEQ ID NO: 38452 - DNA, 15 bp, Homo sapiens
gcatgccaccacgct

SEQ ID NO: 38453 - DNA, 15 bp, Homo sapiens
agcatgccaccacgc

SEQ ID NO: 38454 - DNA, 15 bp, Homo sapiens
gagcatgccaccacg

SEQ ID NO: 38455 - DNA, 15 bp, Homo sapiens
ggagcatgccaccac

SEQ ID NO: 38456 - DNA, 15 bp, Homo sapiens
aggagcatgccacca

SEQ ID NO: 38457 - DNA, 15 bp, Homo sapiens
caggagcatgccacc

SEQ ID NO: 38458 - DNA, 15 bp, Homo sapiens
acaggagcatgccac

SEQ ID NO: 38459 - DNA, 15 bp, Homo sapiens
tacaggagcatgcca

SEQ ID NO: 38460 - DNA, 15 bp, Homo sapiens
ctacaggagcatgcc

SEQ ID NO: 38461 - DNA, 15 bp, Homo sapiens
actacaggagcatgc

SEQ ID NO: 38462 - DNA, 15 bp, Homo sapiens
gactacaggagcatg

SEQ ID NO: 38463 - DNA, 15 bp, Homo sapiens
ggactacaggagcat

SEQ ID NO: 38464 - DNA, 15 bp, Homo sapiens
gggactacaggagca

SEQ ID NO: 38465 - DNA, 15 bp, Homo sapiens
tgggactacaggagc

SEQ ID NO: 38466 - DNA, 15 bp, Homo sapiens
ctgggactacaggag

SEQ ID NO: 38467 - DNA, 15 bp, Homo sapiens
gctgggactacagga

SEQ ID NO: 38468 - DNA, 15 bp, Homo sapiens
acgagtagctgggac

SEQ ID NO: 38469 - DNA, 15 bp, Homo sapiens
cacgagtagctggga

SEQ ID NO: 38470 - DNA, 15 bp, Homo sapiens
tcacgagtagctggg

SEQ ID NO: 38471 - DNA, 15 bp, Homo sapiens
ctcacgagtagctgg

SEQ ID NO: 38472 - DNA, 15 bp, Homo sapiens
cctcacgagtagctg

SEQ ID NO: 38473 - DNA, 15 bp, Homo sapiens
gcctcacgagtagct

SEQ ID NO: 38474 - DNA, 15 bp, Homo sapiens
agcctcacgagtagc

SEQ ID NO: 38475 - DNA, 15 bp, Homo sapiens
cagcctcacgagtag

SEQ ID NO: 38476 - DNA, 15 bp, Homo sapiens
tcagcctcacgagta

SEQ ID NO: 38477 - DNA, 15 bp, Homo sapiens
ctcagcctcacgagt

SEQ ID NO: 38478 - DNA, 15 bp, Homo sapiens
tctcagcctcacgag

SEQ ID NO: 38479 - DNA, 15 bp, Homo sapiens
gtctcagcctcacga

SEQ ID NO: 38480 - DNA, 15 bp, Homo sapiens
tgtctcagcctcacg

SEQ ID NO: 38481 - DNA, 15 bp, Homo sapiens
ctgtctcagcctcac

SEQ ID NO: 38482 - DNA, 15 bp, Homo sapiens
cctgtctcagcctca

SEQ ID NO: 38483 - DNA, 15 bp, Homo sapiens
gattctcctgtctca

SEQ ID NO: 38484 - DNA, 15 bp, Homo sapiens
cgattctcctgtctc

SEQ ID NO: 38485 - DNA, 15 bp, Homo sapiens
acgattctcctgtct

SEQ ID NO: 38486 - DNA, 15 bp, Homo sapiens
aacgattctcctgtc

SEQ ID NO: 38487 - DNA, 15 bp, Homo sapiens
aaacgattctcctgt

SEQ ID NO: 38488 - DNA, 15 bp, Homo sapiens
caaacgattctcctg

SEQ ID NO: 38489 - DNA, 15 bp, Homo sapiens
tcaaacgattctcct

SEQ ID NO: 38490 - DNA, 15 bp, Homo sapiens
ttcaaacgattctcc

SEQ ID NO: 38491 - DNA, 15 bp, Homo sapiens
gttcaaacgattctc

SEQ ID NO: 38492 - DNA, 15 bp, Homo sapiens
ggttcaaacgattct

SEQ ID NO: 38493 - DNA, 15 bp, Homo sapiens
aggttcaaacgattc

SEQ ID NO: 38494 - DNA, 15 bp, Homo sapiens
caggttcaaacgatt

SEQ ID NO: 38495 - DNA, 15 bp, Homo sapiens
ccaggttcaaacgat

SEQ ID NO: 38496 - DNA, 15 bp, Homo sapiens
cccaggttcaaacga

SEQ ID NO: 38497 - DNA, 15 bp, Homo sapiens
tcccaggttcaaacg

SEQ ID NO: 38498 - DNA, 15 bp, Homo sapiens
ctcccaggttcaaac

SEQ ID NO: 38499 - DNA, 15 bp, Homo sapiens
cctcccaggttcaaa

SEQ ID NO: 38500 - DNA, 15 bp, Homo sapiens
ctgcaacctccgcct

SEQ ID NO: 38501 - DNA, 15 bp, Homo sapiens
actgcaacctccgcc

SEQ ID NO: 38502 - DNA, 15 bp, Homo sapiens
cactgcaacctccgc

SEQ ID NO: 38503 - DNA, 15 bp, Homo sapiens
tcactgcaacctccg

SEQ ID NO: 38504 - DNA, 15 bp, Homo sapiens
tggctcactgcaacc

SEQ ID NO: 38505 - DNA, 15 bp, Homo sapiens
attggctcactgcaa

SEQ ID NO: 38506 - DNA, 15 bp, Homo sapiens
tattggctcactgca

SEQ ID NO: 38507 - DNA, 15 bp, Homo sapiens
atattggctcactgc

SEQ ID NO: 38508 - DNA, 15 bp, Homo sapiens
gatattggctcactg

SEQ ID NO: 38509 - DNA, 15 bp, Homo sapiens
tgatattggctcact

SEQ ID NO: 38510 - DNA, 15 bp, Homo sapiens
gtgatattggctcac

SEQ ID NO: 38511 - DNA, 15 bp, Homo sapiens
cgtgatattggctca

SEQ ID NO: 38512 - DNA, 15 bp, Homo sapiens
gcgtgatattggctc

SEQ ID NO: 38513 - DNA, 15 bp, Homo sapiens
ggcgtgatattggct

SEQ ID NO: 38514 - DNA, 15 bp, Homo sapiens
tggcgtgatattggc

SEQ ID NO: 38515 - DNA, 15 bp, Homo sapiens
atggcgtgatattgg

SEQ ID NO: 38516 - DNA, 15 bp, Homo sapiens
aatggcgtgatattg

SEQ ID NO: 38517 - DNA, 15 bp, Homo sapiens
caatggcgtgatatt

SEQ ID NO: 38518 - DNA, 15 bp, Homo sapiens
gcaatggcgtgatat

SEQ ID NO: 38519 - DNA, 15 bp, Homo sapiens
tgcaatggcgtgata

SEQ ID NO: 38520 - DNA, 15 bp, Homo sapiens
gtgcaatggcgtgat

SEQ ID NO: 38521 - DNA, 15 bp, Homo sapiens
agtgcaatggcgtga

SEQ ID NO: 38522 - DNA, 15 bp, Homo sapiens
gagtgcaatggcgtg

SEQ ID NO: 38523 - DNA, 15 bp, Homo sapiens
ggagtgcaatggcgt

SEQ ID NO: 38524 - DNA, 15 bp, Homo sapiens
gccaggctggagtgc

SEQ ID NO: 38525 - DNA, 15 bp, Homo sapiens
agccaggctggagtg

SEQ ID NO: 38526 - DNA, 15 bp, Homo sapiens
cagccaggctggagt

SEQ ID NO: 38527 - DNA, 15 bp, Homo sapiens
tcagccaggctggag

SEQ ID NO: 38528 - DNA, 15 bp, Homo sapiens
gtcagccaggctgga

SEQ ID NO: 38529 - DNA, 15 bp, Homo sapiens
tgtcagccaggctgg

SEQ ID NO: 38530 - DNA, 15 bp, Homo sapiens
ctgtcagccaggctg

SEQ ID NO: 38531 - DNA, 15 bp, Homo sapiens
tctgtcagccaggct

SEQ ID NO: 38532 - DNA, 15 bp, Homo sapiens
ctctgtcagccaggc

SEQ ID NO: 38533 - DNA, 15 bp, Homo sapiens
actctgtcagccagg

SEQ ID NO: 38534 - DNA, 15 bp, Homo sapiens
cactctgtcagccag

SEQ ID NO: 38535 - DNA, 15 bp, Homo sapiens
tcactctgtcagcca

SEQ ID NO: 38536 - DNA, 15 bp, Homo sapiens
ctcactctgtcagcc

SEQ ID NO: 38537 - DNA, 15 bp, Homo sapiens
tctcactctgtcagc

SEQ ID NO: 38538 - DNA, 15 bp, Homo sapiens
gtctcactctgtcag

SEQ ID NO: 38539 - DNA, 15 bp, Homo sapiens
agtctcactctgtca

SEQ ID NO: 38540 - DNA, 15 bp, Homo sapiens
ttttttttttgagat

SEQ ID NO: 38541 - DNA, 15 bp, Homo sapiens
attcttttttttttt

SEQ ID NO: 38542 - DNA, 15 bp, Homo sapiens
aattctttttttttt

SEQ ID NO: 38543 - DNA, 15 bp, Homo sapiens
aaattcttttttttt

SEQ ID NO: 38544 - DNA, 15 bp, Homo sapiens
aaaattctttttttt

SEQ ID NO: 38545 - DNA, 15 bp, Homo sapiens
taaaattcttttttt

SEQ ID NO: 38546 - DNA, 15 bp, Homo sapiens
ataaaattctttttt

SEQ ID NO: 38547 - DNA, 15 bp, Homo sapiens
tataaaattcttttt

SEQ ID NO: 38548 - DNA, 15 bp, Homo sapiens
ttataaaattctttt

SEQ ID NO: 38549 - DNA, 15 bp, Homo sapiens
tttataaaattcttt

SEQ ID NO: 38550 - DNA, 15 bp, Homo sapiens
gattttataaaattc

SEQ ID NO: 38551 - DNA, 15 bp, Homo sapiens
tgattttataaaatt

SEQ ID NO: 38552 - DNA, 15 bp, Homo sapiens
ctgattttataaaat

SEQ ID NO: 38553 - DNA, 15 bp, Homo sapiens
cctgattttataaaa

SEQ ID NO: 38554 - DNA, 15 bp, Homo sapiens
tcctgattttataaa

SEQ ID NO: 38555 - DNA, 15 bp, Homo sapiens
ttcctgattttataa

SEQ ID NO: 38556 - DNA, 15 bp, Homo sapiens
tttcctgattttata

SEQ ID NO: 38557 - DNA, 15 bp, Homo sapiens
atttcctgattttat

SEQ ID NO: 38558 - DNA, 15 bp, Homo sapiens
tatttcctgatttta

SEQ ID NO: 38559 - DNA, 15 bp, Homo sapiens
ttatttcctgatttt

SEQ ID NO: 38560 - DNA, 15 bp, Homo sapiens
attatttcctgattt

SEQ ID NO: 38561 - DNA, 15 bp, Homo sapiens
tattatttcctgatt

SEQ ID NO: 38562 - DNA, 15 bp, Homo sapiens
atattatttcctgat

SEQ ID NO: 38563 - DNA, 15 bp, Homo sapiens
aatattatttcctga

SEQ ID NO: 38564 - DNA, 15 bp, Homo sapiens
taatattatttcctg

SEQ ID NO: 38565 - DNA, 15 bp, Homo sapiens
ctaatattatttcct

SEQ ID NO: 38566 - DNA, 15 bp, Homo sapiens
actaatattatttcc

SEQ ID NO: 38567 - DNA, 15 bp, Homo sapiens
cactaatattatttc

SEQ ID NO: 38568 - DNA, 15 bp, Homo sapiens
acactaatattattt

SEQ ID NO: 38569 - DNA, 15 bp, Homo sapiens
aacactaatattatt

SEQ ID NO: 38570 - DNA, 15 bp, Homo sapiens
aaacactaatattat

SEQ ID NO: 38571 - DNA, 15 bp, Homo sapiens
taaacactaatatta

SEQ ID NO: 38572 - DNA, 15 bp, Homo sapiens
ataaacactaatatt

SEQ ID NO: 38573 - DNA, 15 bp, Homo sapiens
cataaacactaatat

SEQ ID NO: 38574 - DNA, 15 bp, Homo sapiens
acataaacactaata

SEQ ID NO: 38575 - DNA, 15 bp, Homo sapiens
aacataaacactaat

SEQ ID NO: 38576 - DNA, 15 bp, Homo sapiens
caacataaacactaa

SEQ ID NO: 38577 - DNA, 15 bp, Homo sapiens
tcaacataaacacta

SEQ ID NO: 38578 - DNA, 15 bp, Homo sapiens
ttcaacataaacact

SEQ ID NO: 38579 - DNA, 15 bp, Homo sapiens
attcaacataaacac

SEQ ID NO: 38580 - DNA, 15 bp, Homo sapiens
aattcaacataaaca

SEQ ID NO: 38581 - DNA, 15 bp, Homo sapiens
aaattcaacataaac

SEQ ID NO: 38582 - DNA, 15 bp, Homo sapiens
aaaattcaacataaa

SEQ ID NO: 38583 - DNA, 15 bp, Homo sapiens
taaaattcaacataa

SEQ ID NO: 38584 - DNA, 15 bp, Homo sapiens
ttaaaattcaacata

SEQ ID NO: 38585 - DNA, 15 bp, Homo sapiens
gttaaaattcaacat

SEQ ID NO: 38586 - DNA, 15 bp, Homo sapiens
agttaaaattcaaca

SEQ ID NO: 38587 - DNA, 15 bp, Homo sapiens
aagttaaaattcaac

SEQ ID NO: 38588 - DNA, 15 bp, Homo sapiens
aaagttaaaattcaa

SEQ ID NO: 38589 - DNA, 15 bp, Homo sapiens
taaagttaaaattca

SEQ ID NO: 38590 - DNA, 15 bp, Homo sapiens
ctaaagttaaaattc

SEQ ID NO: 38591 - DNA, 15 bp, Homo sapiens
tctaaagttaaaatt

SEQ ID NO: 38592 - DNA, 15 bp, Homo sapiens
ttctaaagttaaaat

SEQ ID NO: 38593 - DNA, 15 bp, Homo sapiens
attctaaagttaaaa

SEQ ID NO: 38594 - DNA, 15 bp, Homo sapiens
gattctaaagttaaa

SEQ ID NO: 38595 - DNA, 15 bp, Homo sapiens
tgattctaaagttaa

SEQ ID NO: 38596 - DNA, 15 bp, Homo sapiens
atgattctaaagtta

SEQ ID NO: 38597 - DNA, 15 bp, Homo sapiens
tatgattctaaagtt

SEQ ID NO: 38598 - DNA, 15 bp, Homo sapiens
ctatgattctaaagt

SEQ ID NO: 38599 - DNA, 15 bp, Homo sapiens
tctatgattctaaag

SEQ ID NO: 38600 - DNA, 15 bp, Homo sapiens
ttctatgattctaaa

SEQ ID NO: 38601 - DNA, 15 bp, Homo sapiens
tttctatgattctaa

SEQ ID NO: 38602 - DNA, 15 bp, Homo sapiens
ttttctatgattcta

SEQ ID NO: 38603 - DNA, 15 bp, Homo sapiens
gttttctatgattct

SEQ ID NO: 38604 - DNA, 15 bp, Homo sapiens
agttttctatgattc

SEQ ID NO: 38605 - DNA, 15 bp, Homo sapiens
aagttttctatgatt

SEQ ID NO: 38606 - DNA, 15 bp, Homo sapiens
gaagttttctatgat

SEQ ID NO: 38607 - DNA, 15 bp, Homo sapiens
ggaagttttctatga

SEQ ID NO: 38608 - DNA, 15 bp, Homo sapiens
aggaagttttctatg

SEQ ID NO: 38609 - DNA, 15 bp, Homo sapiens
gaggaagttttctat

SEQ ID NO: 38610 - DNA, 15 bp, Homo sapiens
agaggaagttttcta

SEQ ID NO: 38611 - DNA, 15 bp, Homo sapiens
cagaggaagttttct

SEQ ID NO: 38612 - DNA, 15 bp, Homo sapiens
ccagaggaagttttc

SEQ ID NO: 38613 - DNA, 15 bp, Homo sapiens
gccagaggaagtttt

SEQ ID NO: 38614 - DNA, 15 bp, Homo sapiens
tgccagaggaagttt

SEQ ID NO: 38615 - DNA, 15 bp, Homo sapiens
atgccagaggaagtt

SEQ ID NO: 38616 - DNA, 15 bp, Homo sapiens
gatgccagaggaagt

SEQ ID NO: 38617 - DNA, 15 bp, Homo sapiens
tgatgccagaggaag

SEQ ID NO: 38618 - DNA, 15 bp, Homo sapiens
atgatgccagaggaa

SEQ ID NO: 38619 - DNA, 15 bp, Homo sapiens
aatgatgccagagga

SEQ ID NO: 38620 - DNA, 15 bp, Homo sapiens
taatgatgccagagg

SEQ ID NO: 38621 - DNA, 15 bp, Homo sapiens
ataatgatgccagag

SEQ ID NO: 38622 - DNA, 15 bp, Homo sapiens
aataatgatgccaga

SEQ ID NO: 38623 - DNA, 15 bp, Homo sapiens
taataatgatgccag

SEQ ID NO: 38624 - DNA, 15 bp, Homo sapiens
ctaataatgatgcca

SEQ ID NO: 38625 - DNA, 15 bp, Homo sapiens
tctaataatgatgcc

SEQ ID NO: 38626 - DNA, 15 bp, Homo sapiens
gtctaataatgatgc

SEQ ID NO: 38627 - DNA, 15 bp, Homo sapiens
tgtctaataatgatg

SEQ ID NO: 38628 - DNA, 15 bp, Homo sapiens
ctgtctaataatgat

SEQ ID NO: 38629 - DNA, 15 bp, Homo sapiens
gctgtctaataatga

SEQ ID NO: 38630 - DNA, 15 bp, Homo sapiens
agctgtctaataatg

SEQ ID NO: 38631 - DNA, 15 bp, Homo sapiens
gagctgtctaataat

SEQ ID NO: 38632 - DNA, 15 bp, Homo sapiens
agagctgtctaataa

SEQ ID NO: 38633 - DNA, 15 bp, Homo sapiens
aagagctgtctaata

SEQ ID NO: 38634 - DNA, 15 bp, Homo sapiens
caagagctgtctaat

SEQ ID NO: 38635 - DNA, 15 bp, Homo sapiens
acaagagctgtctaa

SEQ ID NO: 38636 - DNA, 15 bp, Homo sapiens
cacaagagctgtcta

SEQ ID NO: 38637 - DNA, 15 bp, Homo sapiens
gcacaagagctgtct

SEQ ID NO: 38638 - DNA, 15 bp, Homo sapiens
tgcacaagagctgtc

SEQ ID NO: 38639 - DNA, 15 bp, Homo sapiens
ctgcacaagagctgt

SEQ ID NO: 38640 - DNA, 15 bp, Homo sapiens
actgcacaagagctg

SEQ ID NO: 38641 - DNA, 15 bp, Homo sapiens
cactgcacaagagct

SEQ ID NO: 38642 - DNA, 15 bp, Homo sapiens
ccactgcacaagagc

SEQ ID NO: 38643 - DNA, 15 bp, Homo sapiens
cccactgcacaagag

SEQ ID NO: 38644 - DNA, 15 bp, Homo sapiens
acccactgcacaaga

SEQ ID NO: 38645 - DNA, 15 bp, Homo sapiens
tacccactgcacaag

SEQ ID NO: 38646 - DNA, 15 bp, Homo sapiens
ctacccactgcacaa

SEQ ID NO: 38647 - DNA, 15 bp, Homo sapiens
gctacccactgcaca

SEQ ID NO: 38648 - DNA, 15 bp, Homo sapiens
tgctacccactgcac

SEQ ID NO: 38649 - DNA, 15 bp, Homo sapiens
gtgctacccactgca

SEQ ID NO: 38650 - DNA, 15 bp, Homo sapiens
ggtgctacccactgc

SEQ ID NO: 38651 - DNA, 15 bp, Homo sapiens
tggtgctacccactg

SEQ ID NO: 38652 - DNA, 15 bp, Homo sapiens
ctggtgctacccact

SEQ ID NO: 38653 - DNA, 15 bp, Homo sapiens
tctggtgctacccac

SEQ ID NO: 38654 - DNA, 15 bp, Homo sapiens
gtctggtgctaccca

SEQ ID NO: 38655 - DNA, 15 bp, Homo sapiens
ggtctggtgctaccc

SEQ ID NO: 38656 - DNA, 15 bp, Homo sapiens
gggtctggtgctacc

SEQ ID NO: 38657 - DNA, 15 bp, Homo sapiens
tgggtctggtgctac

SEQ ID NO: 38658 - DNA, 15 bp, Homo sapiens
ctgggtctggtgcta

SEQ ID NO: 38659 - DNA, 15 bp, Homo sapiens
gctgggtctggtgct

SEQ ID NO: 38660 - DNA, 15 bp, Homo sapiens
agctgggtctggtgc

SEQ ID NO: 38661 - DNA, 15 bp, Homo sapiens
aagctgggtctggtg

SEQ ID NO: 38662 - DNA, 15 bp, Homo sapiens
caagctgggtctggt

SEQ ID NO: 38663 - DNA, 15 bp, Homo sapiens
gcaagctgggtctgg

SEQ ID NO: 38664 - DNA, 15 bp, Homo sapiens
tgcaagctgggtctg

SEQ ID NO: 38665 - DNA, 15 bp, Homo sapiens
atgcaagctgggtct

SEQ ID NO: 38666 - DNA, 15 bp, Homo sapiens
catgcaagctgggtc

SEQ ID NO: 38667 - DNA, 15 bp, Homo sapiens
ccatgcaagctgggt

SEQ ID NO: 38668 - DNA, 15 bp, Homo sapiens
accatgcaagctggg

SEQ ID NO: 38669 - DNA, 15 bp, Homo sapiens
aaccatgcaagctgg

SEQ ID NO: 38670 - DNA, 15 bp, Homo sapiens
taaccatgcaagctg

SEQ ID NO: 38671 - DNA, 15 bp, Homo sapiens
ataaccatgcaagct

SEQ ID NO: 38672 - DNA, 15 bp, Homo sapiens
aataaccatgcaagc

SEQ ID NO: 38673 - DNA, 15 bp, Homo sapiens
caataaccatgcaag

SEQ ID NO: 38674 - DNA, 15 bp, Homo sapiens
tcaataaccatgcaa

SEQ ID NO: 38675 - DNA, 15 bp, Homo sapiens
atcaataaccatgca

SEQ ID NO: 38676 - DNA, 15 bp, Homo sapiens
aatcaataaccatgc

SEQ ID NO: 38677 - DNA, 15 bp, Homo sapiens
aaatcaataaccatg

SEQ ID NO: 38678 - DNA, 15 bp, Homo sapiens
aaaatcaataaccat

SEQ ID NO: 38679 - DNA, 15 bp, Homo sapiens
aaaaatcaataacca

SEQ ID NO: 38680 - DNA, 15 bp, Homo sapiens
gaaaaatcaataacc

SEQ ID NO: 38681 - DNA, 15 bp, Homo sapiens
tgaaaaatcaataac

SEQ ID NO: 38682 - DNA, 15 bp, Homo sapiens
ctgaaaaatcaataa

SEQ ID NO: 38683 - DNA, 15 bp, Homo sapiens
tctgaaaaatcaata

SEQ ID NO: 38684 - DNA, 15 bp, Homo sapiens
ctctgaaaaatcaat

SEQ ID NO: 38685 - DNA, 15 bp, Homo sapiens
tctctgaaaaatcaa

SEQ ID NO: 38686 - DNA, 15 bp, Homo sapiens
gtctctgaaaaatca

SEQ ID NO: 38687 - DNA, 15 bp, Homo sapiens
tgtctctgaaaaatc

SEQ ID NO: 38688 - DNA, 15 bp, Homo sapiens
gtgtctctgaaaaat

SEQ ID NO: 38689 - DNA, 15 bp, Homo sapiens
agtgtctctgaaaaa

SEQ ID NO: 38690 - DNA, 15 bp, Homo sapiens
aagtgtctctgaaaa

SEQ ID NO: 38691 - DNA, 15 bp, Homo sapiens
aaagtgtctctgaaa

SEQ ID NO: 38692 - DNA, 15 bp, Homo sapiens
aaaagtgtctctgaa

SEQ ID NO: 38693 - DNA, 15 bp, Homo sapiens
aaaaagtgtctctga

SEQ ID NO: 38694 - DNA, 15 bp, Homo sapiens
caaaaagtgtctctg

SEQ ID NO: 38695 - DNA, 15 bp, Homo sapiens
tcaaaaagtgtctct

SEQ ID NO: 38696 - DNA, 15 bp, Homo sapiens
ctcaaaaagtgtctc

SEQ ID NO: 38697 - DNA, 15 bp, Homo sapiens
gctcaaaaagtgtct

SEQ ID NO: 38698 - DNA, 15 bp, Homo sapiens
agctcaaaaagtgtc

SEQ ID NO: 38699 - DNA, 15 bp, Homo sapiens
aagctcaaaaagtgt

SEQ ID NO: 38700 - DNA, 15 bp, Homo sapiens
taagctcaaaaagtg

SEQ ID NO: 38701 - DNA, 15 bp, Homo sapiens
ataagctcaaaaagt

SEQ ID NO: 38702 - DNA, 15 bp, Homo sapiens
aataagctcaaaaag

SEQ ID NO: 38703 - DNA, 15 bp, Homo sapiens
gaataagctcaaaaa

SEQ ID NO: 38704 - DNA, 15 bp, Homo sapiens
agaataagctcaaaa

SEQ ID NO: 38705 - DNA, 15 bp, Homo sapiens
gagaataagctcaaa

SEQ ID NO: 38706 - DNA, 15 bp, Homo sapiens
agagaataagctcaa

SEQ ID NO: 38707 - DNA, 15 bp, Homo sapiens
cagagaataagctca

SEQ ID NO: 38708 - DNA, 15 bp, Homo sapiens
ccagagaataagctc

SEQ ID NO: 38709 - DNA, 15 bp, Homo sapiens
gccagagaataagct

SEQ ID NO: 38710 - DNA, 15 bp, Homo sapiens
tgccagagaataagc

SEQ ID NO: 38711 - DNA, 15 bp, Homo sapiens
ctgccagagaataag

SEQ ID NO: 38712 - DNA, 15 bp, Homo sapiens
tctgccagagaataa

SEQ ID NO: 38713 - DNA, 15 bp, Homo sapiens
ttctgccagagaata

SEQ ID NO: 38714 - DNA, 15 bp, Homo sapiens
tttctgccagagaat

SEQ ID NO: 38715 - DNA, 15 bp, Homo sapiens
ctttctgccagagaa

SEQ ID NO: 38716 - DNA, 15 bp, Homo sapiens
cctttctgccagaga

SEQ ID NO: 38717 - DNA, 15 bp, Homo sapiens
ccctttctgccagag

SEQ ID NO: 38718 - DNA, 15 bp, Homo sapiens
cccctttctgccaga

SEQ ID NO: 38719 - DNA, 15 bp, Homo sapiens
tcccctttctgccag

SEQ ID NO: 38720 - DNA, 15 bp, Homo sapiens
ttcccctttctgcca

SEQ ID NO: 38721 - DNA, 15 bp, Homo sapiens
gttcccctttctgcc

SEQ ID NO: 38722 - DNA, 15 bp, Homo sapiens
agttcccctttctgc

SEQ ID NO: 38723 - DNA, 15 bp, Homo sapiens
cagttcccctttctg

SEQ ID NO: 38724 - DNA, 15 bp, Homo sapiens
gcagttcccctttct

SEQ ID NO: 38725 - DNA, 15 bp, Homo sapiens
agcagttcccctttc

SEQ ID NO: 38726 - DNA, 15 bp, Homo sapiens
aagcagttccccttt

SEQ ID NO: 38727 - DNA, 15 bp, Homo sapiens
gaagcagttcccctt

SEQ ID NO: 38728 - DNA, 15 bp, Homo sapiens
ggaagcagttcccct

SEQ ID NO: 38729 - DNA, 15 bp, Homo sapiens
aggaagcagttcccc

SEQ ID NO: 38730 - DNA, 15 bp, Homo sapiens
gaggaagcagttccc

SEQ ID NO: 38731 - DNA, 15 bp, Homo sapiens
ggaggaagcagttcc

SEQ ID NO: 38732 - DNA, 15 bp, Homo sapiens
gggaggaagcagttc

SEQ ID NO: 38733 - DNA, 15 bp, Homo sapiens
ggggaggaagcagtt

SEQ ID NO: 38734 - DNA, 15 bp, Homo sapiens
aggggaggaagcagt

SEQ ID NO: 38735 - DNA, 15 bp, Homo sapiens
taggggaggaagcag

SEQ ID NO: 38736 - DNA, 15 bp, Homo sapiens
ataggggaggaagca

SEQ ID NO: 38737 - DNA, 15 bp, Homo sapiens
gataggggaggaagc

SEQ ID NO: 38738 - DNA, 15 bp, Homo sapiens
agataggggaggaag

SEQ ID NO: 38739 - DNA, 15 bp, Homo sapiens
gagataggggaggaa

SEQ ID NO: 38740 - DNA, 15 bp, Homo sapiens
cgagataggggagga

SEQ ID NO: 38741 - DNA, 15 bp, Homo sapiens
acgagataggggagg

SEQ ID NO: 38742 - DNA, 15 bp, Homo sapiens
cacgagataggggag

SEQ ID NO: 38743 - DNA, 15 bp, Homo sapiens
acacgagatagggga

SEQ ID NO: 38744 - DNA, 15 bp, Homo sapiens
gacacgagatagggg

SEQ ID NO: 38745 - DNA, 15 bp, Homo sapiens
agacacgagataggg

SEQ ID NO: 38746 - DNA, 15 bp, Homo sapiens
cagacacgagatagg

SEQ ID NO: 38747 - DNA, 15 bp, Homo sapiens
gcagacacgagatag

SEQ ID NO: 38748 - DNA, 15 bp, Homo sapiens
tgcagacacgagata

SEQ ID NO: 38749 - DNA, 15 bp, Homo sapiens
atgcagacacgagat

SEQ ID NO: 38750 - DNA, 15 bp, Homo sapiens
tatgcagacacgaga

SEQ ID NO: 38751 - DNA, 15 bp, Homo sapiens
gtatgcagacacgag

SEQ ID NO: 38752 - DNA, 15 bp, Homo sapiens
agtatgcagacacga

SEQ ID NO: 38753 - DNA, 15 bp, Homo sapiens
tagtatgcagacacg

SEQ ID NO: 38754 - DNA, 15 bp, Homo sapiens
ctagtatgcagacac

SEQ ID NO: 38755 - DNA, 15 bp, Homo sapiens
gctagtatgcagaca

SEQ ID NO: 38756 - DNA, 15 bp, Homo sapiens
agctagtatgcagac

SEQ ID NO: 38757 - DNA, 15 bp, Homo sapiens
aagctagtatgcaga

SEQ ID NO: 38758 - DNA, 15 bp, Homo sapiens
caagctagtatgcag

SEQ ID NO: 38759 - DNA, 15 bp, Homo sapiens
acaagctagtatgca

SEQ ID NO: 38760 - DNA, 15 bp, Homo sapiens
gacaagctagtatgc

SEQ ID NO: 38761 - DNA, 15 bp, Homo sapiens
agacaagctagtatg

SEQ ID NO: 38762 - DNA, 15 bp, Homo sapiens
aagacaagctagtat

SEQ ID NO: 38763 - DNA, 15 bp, Homo sapiens
aaagacaagctagta

SEQ ID NO: 38764 - DNA, 15 bp, Homo sapiens
taaagacaagctagt

SEQ ID NO: 38765 - DNA, 15 bp, Homo sapiens
gtaaagacaagctag

SEQ ID NO: 38766 - DNA, 15 bp, Homo sapiens
tgtaaagacaagcta

SEQ ID NO: 38767 - DNA, 15 bp, Homo sapiens
ttgtaaagacaagct

SEQ ID NO: 38768 - DNA, 15 bp, Homo sapiens
cttgtaaagacaagc

SEQ ID NO: 38769 - DNA, 15 bp, Homo sapiens
tcttgtaaagacaag

SEQ ID NO: 38770 - DNA, 15 bp, Homo sapiens
ttcttgtaaagacaa

SEQ ID NO: 38771 - DNA, 15 bp, Homo sapiens
cttcttgtaaagaca

SEQ ID NO: 38772 - DNA, 15 bp, Homo sapiens
gcttcttgtaaagac

SEQ ID NO: 38773 - DNA, 15 bp, Homo sapiens
tgcttcttgtaaaga

SEQ ID NO: 38774 - DNA, 15 bp, Homo sapiens
ctgcttcttgtaaag

SEQ ID NO: 38775 - DNA, 15 bp, Homo sapiens
tctgcttcttgtaaa

SEQ ID NO: 38776 - DNA, 15 bp, Homo sapiens
ttctgcttcttgtaa

SEQ ID NO: 38777 - DNA, 15 bp, Homo sapiens
cttctgcttcttgta

SEQ ID NO: 38778 - DNA, 15 bp, Homo sapiens
acttctgcttcttgt

SEQ ID NO: 38779 - DNA, 15 bp, Homo sapiens
tacttctgcttcttg

SEQ ID NO: 38780 - DNA, 15 bp, Homo sapiens
ctacttctgcttctt

SEQ ID NO: 38781 - DNA, 15 bp, Homo sapiens
actacttctgcttct

SEQ ID NO: 38782 - DNA, 15 bp, Homo sapiens
cactacttctgcttc

SEQ ID NO: 38783 - DNA, 15 bp, Homo sapiens
ccactacttctgctt

SEQ ID NO: 38784 - DNA, 15 bp, Homo sapiens
tccactacttctgct

SEQ ID NO: 38785 - DNA, 15 bp, Homo sapiens
ttccactacttctgc

SEQ ID NO: 38786 - DNA, 15 bp, Homo sapiens
tttccactacttctg

SEQ ID NO: 38787 - DNA, 15 bp, Homo sapiens
atttccactacttct

SEQ ID NO: 38788 - DNA, 15 bp, Homo sapiens
catttccactacttc

SEQ ID NO: 38789 - DNA, 15 bp, Homo sapiens
acatttccactactt

SEQ ID NO: 38790 - DNA, 15 bp, Homo sapiens
aacatttccactact

SEQ ID NO: 38791 - DNA, 15 bp, Homo sapiens
aaacatttccactac

SEQ ID NO: 38792 - DNA, 15 bp, Homo sapiens
taaacatttccacta

SEQ ID NO: 38793 - DNA, 15 bp, Homo sapiens
ataaacatttccact

SEQ ID NO: 38794 - DNA, 15 bp, Homo sapiens
aataaacatttccac

SEQ ID NO: 38795 - DNA, 15 bp, Homo sapiens
gaataaacatttcca

SEQ ID NO: 38796 - DNA, 15 bp, Homo sapiens
agaataaacatttcc

SEQ ID NO: 38797 - DNA, 15 bp, Homo sapiens
aagaataaacatttc

SEQ ID NO: 38798 - DNA, 15 bp, Homo sapiens
caagaataaacattt

SEQ ID NO: 38799 - DNA, 15 bp, Homo sapiens
tcaagaataaacatt

SEQ ID NO: 38800 - DNA, 15 bp, Homo sapiens
ttcaagaataaacat

SEQ ID NO: 38801 - DNA, 15 bp, Homo sapiens
tttcaagaataaaca

SEQ ID NO: 38802 - DNA, 15 bp, Homo sapiens
ttttcaagaataaac

SEQ ID NO: 38803 - DNA, 15 bp, Homo sapiens
attttcaagaataaa

SEQ ID NO: 38804 - DNA, 15 bp, Homo sapiens
tattttcaagaataa

SEQ ID NO: 38805 - DNA, 15 bp, Homo sapiens
ttattttcaagaata

SEQ ID NO: 38806 - DNA, 15 bp, Homo sapiens
cttattttcaagaat

SEQ ID NO: 38807 - DNA, 15 bp, Homo sapiens
gcttattttcaagaa

SEQ ID NO: 38808 - DNA, 15 bp, Homo sapiens
agcttattttcaaga

SEQ ID NO: 38809 - DNA, 15 bp, Homo sapiens
aagcttattttcaag

SEQ ID NO: 38810 - DNA, 15 bp, Homo sapiens
aaagcttattttcaa

SEQ ID NO: 38811 - DNA, 15 bp, Homo sapiens
aaaagcttattttca

SEQ ID NO: 38812 - DNA, 15 bp, Homo sapiens
aaaaagcttattttc

SEQ ID NO: 38813 - DNA, 15 bp, Homo sapiens
caaaaagcttatttt

SEQ ID NO: 38814 - DNA, 15 bp, Homo sapiens
gcaaaaagcttattt

SEQ ID NO: 38815 - DNA, 15 bp, Homo sapiens
agcaaaaagcttatt

SEQ ID NO: 38816 - DNA, 15 bp, Homo sapiens
aagcaaaaagcttat

SEQ ID NO: 38817 - DNA, 15 bp, Homo sapiens
gaagcaaaaagctta

SEQ ID NO: 38818 - DNA, 15 bp, Homo sapiens
tgaagcaaaaagctt

SEQ ID NO: 38819 - DNA, 15 bp, Homo sapiens
gtgaagcaaaaagct

SEQ ID NO: 38820 - DNA, 15 bp, Homo sapiens
tgtgaagcaaaaagc

SEQ ID NO: 38821 - DNA, 15 bp, Homo sapiens
atgtgaagcaaaaag

SEQ ID NO: 38822 - DNA, 15 bp, Homo sapiens
catgtgaagcaaaaa

SEQ ID NO: 38823 - DNA, 15 bp, Homo sapiens
tcatgtgaagcaaaa

SEQ ID NO: 38824 - DNA, 15 bp, Homo sapiens
atcatgtgaagcaaa

SEQ ID NO: 38825 - DNA, 15 bp, Homo sapiens
gatcatgtgaagcaa

SEQ ID NO: 38826 - DNA, 15 bp, Homo sapiens
agatcatgtgaagca

SEQ ID NO: 38827 - DNA, 15 bp, Homo sapiens
tagatcatgtgaagc

SEQ ID NO: 38828 - DNA, 15 bp, Homo sapiens
ctagatcatgtgaag

SEQ ID NO: 38829 - DNA, 15 bp, Homo sapiens
tctagatcatgtgaa

SEQ ID NO: 38830 - DNA, 15 bp, Homo sapiens
ttctagatcatgtga

SEQ ID NO: 38831 - DNA, 15 bp, Homo sapiens
attctagatcatgtg

SEQ ID NO: 38832 - DNA, 15 bp, Homo sapiens
aattctagatcatgt

SEQ ID NO: 38833 - DNA, 15 bp, Homo sapiens
aaattctagatcatg

SEQ ID NO: 38834 - DNA, 15 bp, Homo sapiens
aaaattctagatcat

SEQ ID NO: 38835 - DNA, 15 bp, Homo sapiens
aaaaattctagatca

SEQ ID NO: 38836 - DNA, 15 bp, Homo sapiens
taaaaattctagatc

SEQ ID NO: 38837 - DNA, 15 bp, Homo sapiens
ttaaaaattctagat

SEQ ID NO: 38838 - DNA, 15 bp, Homo sapiens
tttaaaaattctaga

SEQ ID NO: 38839 - DNA, 15 bp, Homo sapiens
ttttaaaaattctag

SEQ ID NO: 38840 - DNA, 15 bp, Homo sapiens
attttaaaaattcta

SEQ ID NO: 38841 - DNA, 15 bp, Homo sapiens
aattttaaaaattct

SEQ ID NO: 38842 - DNA, 15 bp, Homo sapiens
taattttaaaaattc

SEQ ID NO: 38843 - DNA, 15 bp, Homo sapiens
ctaattttaaaaatt

SEQ ID NO: 38844 - DNA, 15 bp, Homo sapiens
tctaattttaaaaat

SEQ ID NO: 38845 - DNA, 15 bp, Homo sapiens
ttctaattttaaaaa

SEQ ID NO: 38846 - DNA, 15 bp, Homo sapiens
tttctaattttaaaa

SEQ ID NO: 38847 - DNA, 15 bp, Homo sapiens
ttttctaattttaaa

SEQ ID NO: 38848 - DNA, 15 bp, Homo sapiens
tttttctaattttaa

SEQ ID NO: 38849 - DNA, 15 bp, Homo sapiens
atttttctaatttta

SEQ ID NO: 38850 - DNA, 15 bp, Homo sapiens
catttttctaatttt

SEQ ID NO: 38851 - DNA, 15 bp, Homo sapiens
acatttttctaattt

SEQ ID NO: 38852 - DNA, 15 bp, Homo sapiens
cacatttttctaatt

SEQ ID NO: 38853 - DNA, 15 bp, Homo sapiens
gcacatttttctaat

SEQ ID NO: 38854 - DNA, 15 bp, Homo sapiens
agcacatttttctaa

SEQ ID NO: 38855 - DNA, 15 bp, Homo sapiens
aagcacatttttcta

SEQ ID NO: 38856 - DNA, 15 bp, Homo sapiens
taagcacatttttct

SEQ ID NO: 38857 - DNA, 15 bp, Homo sapiens
gtaagcacatttttc

SEQ ID NO: 38858 - DNA, 15 bp, Homo sapiens
agtaagcacattttt

SEQ ID NO: 38859 - DNA, 15 bp, Homo sapiens
cagtaagcacatttt

SEQ ID NO: 38860 - DNA, 15 bp, Homo sapiens
gcagtaagcacattt

SEQ ID NO: 38861 - DNA, 15 bp, Homo sapiens
cgcagtaagcacatt

SEQ ID NO: 38862 - DNA, 15 bp, Homo sapiens
acgcagtaagcacat

SEQ ID NO: 38863 - DNA, 15 bp, Homo sapiens
cacgcagtaagcaca

SEQ ID NO: 38864 - DNA, 15 bp, Homo sapiens
gcacgcagtaagcac

SEQ ID NO: 38865 - DNA, 15 bp, Homo sapiens
ggcacgcagtaagca

SEQ ID NO: 38866 - DNA, 15 bp, Homo sapiens
gggcacgcagtaagc

SEQ ID NO: 38867 - DNA, 15 bp, Homo sapiens
agggcacgcagtaag

SEQ ID NO: 38868 - DNA, 15 bp, Homo sapiens
aagggcacgcagtaa

SEQ ID NO: 38869 - DNA, 15 bp, Homo sapiens
gaagggcacgcagta

SEQ ID NO: 38870 - DNA, 15 bp, Homo sapiens
agaagggcacgcagt

SEQ ID NO: 38871 - DNA, 15 bp, Homo sapiens
cagaagggcacgcag

SEQ ID NO: 38872 - DNA, 15 bp, Homo sapiens
tcagaagggcacgca

SEQ ID NO: 38873 - DNA, 15 bp, Homo sapiens
ttcagaagggcacgc

SEQ ID NO: 38874 - DNA, 15 bp, Homo sapiens
tttcagaagggcacg

SEQ ID NO: 38875 - DNA, 15 bp, Homo sapiens
gtttcagaagggcac

SEQ ID NO: 38876 - DNA, 15 bp, Homo sapiens
agtttcagaagggca

SEQ ID NO: 38877 - DNA, 15 bp, Homo sapiens
tagtttcagaagggc

SEQ ID NO: 38878 - DNA, 15 bp, Homo sapiens
ctagtttcagaaggg

SEQ ID NO: 38879 - DNA, 15 bp, Homo sapiens
cctagtttcagaagg

SEQ ID NO: 38880 - DNA, 15 bp, Homo sapiens
tcctagtttcagaag

SEQ ID NO: 38881 - DNA, 15 bp, Homo sapiens
ttcctagtttcagaa

SEQ ID NO: 38882 - DNA, 15 bp, Homo sapiens
tttcctagtttcaga

SEQ ID NO: 38883 - DNA, 15 bp, Homo sapiens
ttttcctagtttcag

SEQ ID NO: 38884 - DNA, 15 bp, Homo sapiens
attttcctagtttca

SEQ ID NO: 38885 - DNA, 15 bp, Homo sapiens
tattttcctagtttc

SEQ ID NO: 38886 - DNA, 15 bp, Homo sapiens
atattttcctagttt

SEQ ID NO: 38887 - DNA, 15 bp, Homo sapiens
catattttcctagtt

SEQ ID NO: 38888 - DNA, 15 bp, Homo sapiens
gcatattttcctagt

SEQ ID NO: 38889 - DNA, 15 bp, Homo sapiens
ggcatattttcctag

SEQ ID NO: 38890 - DNA, 15 bp, Homo sapiens
aggcatattttccta

SEQ ID NO: 38891 - DNA, 15 bp, Homo sapiens
aaggcatattttcct

SEQ ID NO: 38892 - DNA, 15 bp, Homo sapiens
caaggcatattttcc

SEQ ID NO: 38893 - DNA, 15 bp, Homo sapiens
acaaggcatattttc

SEQ ID NO: 38894 - DNA, 15 bp, Homo sapiens
cacaaggcatatttt

SEQ ID NO: 38895 - DNA, 15 bp, Homo sapiens
acacaaggcatattt

SEQ ID NO: 38896 - DNA, 15 bp, Homo sapiens
aacacaaggcatatt

SEQ ID NO: 38897 - DNA, 15 bp, Homo sapiens
aaacacaaggcatat

SEQ ID NO: 38898 - DNA, 15 bp, Homo sapiens
taaacacaaggcata

SEQ ID NO: 38899 - DNA, 15 bp, Homo sapiens
gtaaacacaaggcat

SEQ ID NO: 38900 - DNA, 15 bp, Homo sapiens
ggtaaacacaaggca

SEQ ID NO: 38901 - DNA, 15 bp, Homo sapiens
tggtaaacacaaggc

SEQ ID NO: 38902 - DNA, 15 bp, Homo sapiens
ttggtaaacacaagg

SEQ ID NO: 38903 - DNA, 15 bp, Homo sapiens
attggtaaacacaag

SEQ ID NO: 38904 - DNA, 15 bp, Homo sapiens
aattggtaaacacaa

SEQ ID NO: 38905 - DNA, 15 bp, Homo sapiens
caattggtaaacaca

SEQ ID NO: 38906 - DNA, 15 bp, Homo sapiens
acaattggtaaacac

SEQ ID NO: 38907 - DNA, 15 bp, Homo sapiens
cacaattggtaaaca

SEQ ID NO: 38908 - DNA, 15 bp, Homo sapiens
acacaattggtaaac

SEQ ID NO: 38909 - DNA, 15 bp, Homo sapiens
cacacaattggtaaa

SEQ ID NO: 38910 - DNA, 15 bp, Homo sapiens
ccacacaattggtaa

SEQ ID NO: 38911 - DNA, 15 bp, Homo sapiens
accacacaattggta

SEQ ID NO: 38912 - DNA, 15 bp, Homo sapiens
aaccacacaattggt

SEQ ID NO: 38913 - DNA, 15 bp, Homo sapiens
taaccacacaattgg

SEQ ID NO: 38914 - DNA, 15 bp, Homo sapiens
ctaaccacacaattg

SEQ ID NO: 38915 - DNA, 15 bp, Homo sapiens
cctaaccacacaatt

SEQ ID NO: 38916 - DNA, 15 bp, Homo sapiens
tcctaaccacacaat

SEQ ID NO: 38917 - DNA, 15 bp, Homo sapiens
ctcctaaccacacaa

SEQ ID NO: 38918 - DNA, 15 bp, Homo sapiens
tctcctaaccacaca

SEQ ID NO: 38919 - DNA, 15 bp, Homo sapiens
atctcctaaccacac

SEQ ID NO: 38920 - DNA, 15 bp, Homo sapiens
catctcctaaccaca

SEQ ID NO: 38921 - DNA, 15 bp, Homo sapiens
ccatctcctaaccac

SEQ ID NO: 38922 - DNA, 15 bp, Homo sapiens
cccatctcctaacca

SEQ ID NO: 38923 - DNA, 15 bp, Homo sapiens
gcccatctcctaacc

SEQ ID NO: 38924 - DNA, 15 bp, Homo sapiens
ggcccatctcctaac

SEQ ID NO: 38925 - DNA, 15 bp, Homo sapiens
tggcccatctcctaa

SEQ ID NO: 38926 - DNA, 15 bp, Homo sapiens
ttggcccatctccta

SEQ ID NO: 38927 - DNA, 15 bp, Homo sapiens
tttggcccatctcct

SEQ ID NO: 38928 - DNA, 15 bp, Homo sapiens
ctttggcccatctcc

SEQ ID NO: 38929 - DNA, 15 bp, Homo sapiens
cctttggcccatctc

SEQ ID NO: 38930 - DNA, 15 bp, Homo sapiens
gcctttggcccatct

SEQ ID NO: 38931 - DNA, 15 bp, Homo sapiens
tgcctttggcccatc

SEQ ID NO: 38932 - DNA, 15 bp, Homo sapiens
atgcctttggcccat

SEQ ID NO: 38933 - DNA, 15 bp, Homo sapiens
gatgcctttggccca

SEQ ID NO: 38934 - DNA, 15 bp, Homo sapiens
tgatgcctttggccc

SEQ ID NO: 38935 - DNA, 15 bp, Homo sapiens
ctgatgcctttggcc

SEQ ID NO: 38936 - DNA, 15 bp, Homo sapiens
cctgatgcctttggc

SEQ ID NO: 38937 - DNA, 15 bp, Homo sapiens
gcctgatgcctttgg

SEQ ID NO: 38938 - DNA, 15 bp, Homo sapiens
agcctgatgcctttg

SEQ ID NO: 38939 - DNA, 15 bp, Homo sapiens
aagcctgatgccttt

SEQ ID NO: 38940 - DNA, 15 bp, Homo sapiens
aaagcctgatgcctt

SEQ ID NO: 38941 - DNA, 15 bp, Homo sapiens
aaaagcctgatgcct

SEQ ID NO: 38942 - DNA, 15 bp, Homo sapiens
caaaagcctgatgcc

SEQ ID NO: 38943 - DNA, 15 bp, Homo sapiens
tcaaaagcctgatgc

SEQ ID NO: 38944 - DNA, 15 bp, Homo sapiens
ttcaaaagcctgatg

SEQ ID NO: 38945 - DNA, 15 bp, Homo sapiens
tttcaaaagcctgat

SEQ ID NO: 38946 - DNA, 15 bp, Homo sapiens
ctttcaaaagcctga

SEQ ID NO: 38947 - DNA, 15 bp, Homo sapiens
actttcaaaagcctg

SEQ ID NO: 38948 - DNA, 15 bp, Homo sapiens
tactttcaaaagcct

SEQ ID NO: 38949 - DNA, 15 bp, Homo sapiens
ctactttcaaaagcc

SEQ ID NO: 38950 - DNA, 15 bp, Homo sapiens
actactttcaaaagc

SEQ ID NO: 38951 - DNA, 15 bp, Homo sapiens
aactactttcaaaag

SEQ ID NO: 38952 - DNA, 15 bp, Homo sapiens
caactactttcaaaa

SEQ ID NO: 38953 - DNA, 15 bp, Homo sapiens
gcaactactttcaaa

SEQ ID NO: 38954 - DNA, 15 bp, Homo sapiens
tgcaactactttcaa

SEQ ID NO: 38955 - DNA, 15 bp, Homo sapiens
atgcaactactttca

SEQ ID NO: 38956 - DNA, 15 bp, Homo sapiens
aatgcaactactttc

SEQ ID NO: 38957 - DNA, 15 bp, Homo sapiens
aaatgcaactacttt

SEQ ID NO: 38958 - DNA, 15 bp, Homo sapiens
taaatgcaactactt

SEQ ID NO: 38959 - DNA, 15 bp, Homo sapiens
ctaaatgcaactact

SEQ ID NO: 38960 - DNA, 15 bp, Homo sapiens
gctaaatgcaactac

SEQ ID NO: 38961 - DNA, 15 bp, Homo sapiens
tgctaaatgcaacta

SEQ ID NO: 38962 - DNA, 15 bp, Homo sapiens
atgctaaatgcaact

SEQ ID NO: 38963 - DNA, 15 bp, Homo sapiens
tatgctaaatgcaac

SEQ ID NO: 38964 - DNA, 15 bp, Homo sapiens
ttatgctaaatgcaa

SEQ ID NO: 38965 - DNA, 15 bp, Homo sapiens
attatgctaaatgca

SEQ ID NO: 38966 - DNA, 15 bp, Homo sapiens
aattatgctaaatgc

SEQ ID NO: 38967 - DNA, 15 bp, Homo sapiens
aaattatgctaaatg

SEQ ID NO: 38968 - DNA, 15 bp, Homo sapiens
gaaattatgctaaat

SEQ ID NO: 38969 - DNA, 15 bp, Homo sapiens
ggaaattatgctaaa

SEQ ID NO: 38970 - DNA, 15 bp, Homo sapiens
tggaaattatgctaa

SEQ ID NO: 38971 - DNA, 15 bp, Homo sapiens
atggaaattatgcta

SEQ ID NO: 38972 - DNA, 15 bp, Homo sapiens
aatggaaattatgct

SEQ ID NO: 38973 - DNA, 15 bp, Homo sapiens
caatggaaattatgc

SEQ ID NO: 38974 - DNA, 15 bp, Homo sapiens
gcaatggaaattatg

SEQ ID NO: 38975 - DNA, 15 bp, Homo sapiens
ggcaatggaaattat

SEQ ID NO: 38976 - DNA, 15 bp, Homo sapiens
gggcaatggaaatta

SEQ ID NO: 38977 - DNA, 15 bp, Homo sapiens
ggggcaatggaaatt

SEQ ID NO: 38978 - DNA, 15 bp, Homo sapiens
gggggcaatggaaat

SEQ ID NO: 38979 - DNA, 15 bp, Homo sapiens
agggggcaatggaaa

SEQ ID NO: 38980 - DNA, 15 bp, Homo sapiens
cagggggcaatggaa

SEQ ID NO: 38981 - DNA, 15 bp, Homo sapiens
gcagggggcaatgga

SEQ ID NO: 38982 - DNA, 15 bp, Homo sapiens
ggcagggggcaatgg

SEQ ID NO: 38983 - DNA, 15 bp, Homo sapiens
tggcagggggcaatg

SEQ ID NO: 38984 - DNA, 15 bp, Homo sapiens
ttggcagggggcaat

SEQ ID NO: 38985 - DNA, 15 bp, Homo sapiens
attggcagggggcaa

SEQ ID NO: 38986 - DNA, 15 bp, Homo sapiens
aattggcagggggca

SEQ ID NO: 38987 - DNA, 15 bp, Homo sapiens
aaattggcagggggc

SEQ ID NO: 38988 - DNA, 15 bp, Homo sapiens
gaaattggcaggggg

SEQ ID NO: 38989 - DNA, 15 bp, Homo sapiens
tgaaattggcagggg

SEQ ID NO: 38990 - DNA, 15 bp, Homo sapiens
atgaaattggcaggg

SEQ ID NO: 38991 - DNA, 15 bp, Homo sapiens
tatgaaattggcagg

SEQ ID NO: 38992 - DNA, 15 bp, Homo sapiens
atatgaaattggcag

SEQ ID NO: 38993 - DNA, 15 bp, Homo sapiens
gatatgaaattggca

SEQ ID NO: 38994 - DNA, 15 bp, Homo sapiens
agatatgaaattggc

SEQ ID NO: 38995 - DNA, 15 bp, Homo sapiens
cagatatgaaattgg

SEQ ID NO: 38996 - DNA, 15 bp, Homo sapiens
acagatatgaaattg

SEQ ID NO: 38997 - DNA, 15 bp, Homo sapiens
gacagatatgaaatt

SEQ ID NO: 38998 - DNA, 15 bp, Homo sapiens
tgacagatatgaaat

SEQ ID NO: 38999 - DNA, 15 bp, Homo sapiens
gtgacagatatgaaa

SEQ ID NO: 39000 - DNA, 15 bp, Homo sapiens
tgtgacagatatgaa

SEQ ID NO: 39001 - DNA, 15 bp, Homo sapiens
atgtgacagatatga

SEQ ID NO: 39002 - DNA, 15 bp, Homo sapiens
gatgtgacagatatg

SEQ ID NO: 39003 - DNA, 15 bp, Homo sapiens
agatgtgacagatat

SEQ ID NO: 39004 - DNA, 15 bp, Homo sapiens
tagatgtgacagata

SEQ ID NO: 39005 - DNA, 15 bp, Homo sapiens
ttagatgtgacagat

SEQ ID NO: 39006 - DNA, 15 bp, Homo sapiens
attagatgtgacaga

SEQ ID NO: 39007 - DNA, 15 bp, Homo sapiens
gattagatgtgacag

SEQ ID NO: 39008 - DNA, 15 bp, Homo sapiens
tgattagatgtgaca

SEQ ID NO: 39009 - DNA, 15 bp, Homo sapiens
ctgattagatgtgac

SEQ ID NO: 39010 - DNA, 15 bp, Homo sapiens
actgattagatgtga

SEQ ID NO: 39011 - DNA, 15 bp, Homo sapiens
aactgattagatgtg

SEQ ID NO: 39012 - DNA, 15 bp, Homo sapiens
aaactgattagatgt

SEQ ID NO: 39013 - DNA, 15 bp, Homo sapiens
taaactgattagatg

SEQ ID NO: 39014 - DNA, 15 bp, Homo sapiens
ttaaactgattagat

SEQ ID NO: 39015 - DNA, 15 bp, Homo sapiens
tttaaactgattaga

SEQ ID NO: 39016 - DNA, 15 bp, Homo sapiens
ttttaaactgattag

SEQ ID NO: 39017 - DNA, 15 bp, Homo sapiens
attttaaactgatta

SEQ ID NO: 39018 - DNA, 15 bp, Homo sapiens
tattttaaactgatt

SEQ ID NO: 39019 - DNA, 15 bp, Homo sapiens
ttattttaaactgat

SEQ ID NO: 39020 - DNA, 15 bp, Homo sapiens
cttattttaaactga

SEQ ID NO: 39021 - DNA, 15 bp, Homo sapiens
ccttattttaaactg

SEQ ID NO: 39022 - DNA, 15 bp, Homo sapiens
cccttattttaaact

SEQ ID NO: 39023 - DNA, 15 bp, Homo sapiens
ccccttattttaaac

SEQ ID NO: 39024 - DNA, 15 bp, Homo sapiens
gccccttattttaaa

SEQ ID NO: 39025 - DNA, 15 bp, Homo sapiens
tgccccttattttaa

SEQ ID NO: 39026 - DNA, 15 bp, Homo sapiens
atgccccttatttta

SEQ ID NO: 39027 - DNA, 15 bp, Homo sapiens
gatgccccttatttt

SEQ ID NO: 39028 - DNA, 15 bp, Homo sapiens
ggatgccccttattt

SEQ ID NO: 39029 - DNA, 15 bp, Homo sapiens
aggatgccccttatt

SEQ ID NO: 39030 - DNA, 15 bp, Homo sapiens
taggatgccccttat

SEQ ID NO: 39031 - DNA, 15 bp, Homo sapiens
ttaggatgcccctta

SEQ ID NO: 39032 - DNA, 15 bp, Homo sapiens
cttaggatgcccctt

SEQ ID NO: 39033 - DNA, 15 bp, Homo sapiens
gcttaggatgcccct

SEQ ID NO: 39034 - DNA, 15 bp, Homo sapiens
tgcttaggatgcccc

SEQ ID NO: 39035 - DNA, 15 bp, Homo sapiens
atgcttaggatgccc

SEQ ID NO: 39036 - DNA, 15 bp, Homo sapiens
catgcttaggatgcc

SEQ ID NO: 39037 - DNA, 15 bp, Homo sapiens
ccatgcttaggatgc

SEQ ID NO: 39038 - DNA, 15 bp, Homo sapiens
tccatgcttaggatg

SEQ ID NO: 39039 - DNA, 15 bp, Homo sapiens
ctccatgcttaggat

SEQ ID NO: 39040 - DNA, 15 bp, Homo sapiens
tctccatgcttagga

SEQ ID NO: 39041 - DNA, 15 bp, Homo sapiens
atctccatgcttagg

SEQ ID NO: 39042 - DNA, 15 bp, Homo sapiens
catctccatgcttag

SEQ ID NO: 39043 - DNA, 15 bp, Homo sapiens
ccatctccatgctta

SEQ ID NO: 39044 - DNA, 15 bp, Homo sapiens
accatctccatgctt

SEQ ID NO: 39045 - DNA, 15 bp, Homo sapiens
gaccatctccatgct

SEQ ID NO: 39046 - DNA, 15 bp, Homo sapiens
ggaccatctccatgc

SEQ ID NO: 39047 - DNA, 15 bp, Homo sapiens
aggaccatctccatg

SEQ ID NO: 39048 - DNA, 15 bp, Homo sapiens
aaggaccatctccat

SEQ ID NO: 39049 - DNA, 15 bp, Homo sapiens
caaggaccatctcca

SEQ ID NO: 39050 - DNA, 15 bp, Homo sapiens
ccaaggaccatctcc

SEQ ID NO: 39051 - DNA, 15 bp, Homo sapiens
tccaaggaccatctc

SEQ ID NO: 39052 - DNA, 15 bp, Homo sapiens
atccaaggaccatct

SEQ ID NO: 39053 - DNA, 15 bp, Homo sapiens
catccaaggaccatc

SEQ ID NO: 39054 - DNA, 15 bp, Homo sapiens
ccatccaaggaccat

SEQ ID NO: 39055 - DNA, 15 bp, Homo sapiens
accatccaaggacca

SEQ ID NO: 39056 - DNA, 15 bp, Homo sapiens
gaccatccaaggacc

SEQ ID NO: 39057 - DNA, 15 bp, Homo sapiens
ggaccatccaaggac

SEQ ID NO: 39058 - DNA, 15 bp, Homo sapiens
aggaccatccaagga

SEQ ID NO: 39059 - DNA, 15 bp, Homo sapiens
aaggaccatccaagg

SEQ ID NO: 39060 - DNA, 15 bp, Homo sapiens
caaggaccatccaag

SEQ ID NO: 39061 - DNA, 15 bp, Homo sapiens
ccaaggaccatccaa

SEQ ID NO: 39062 - DNA, 15 bp, Homo sapiens
tccaaggaccatcca

SEQ ID NO: 39063 - DNA, 15 bp, Homo sapiens
ctccaaggaccatcc

SEQ ID NO: 39064 - DNA, 15 bp, Homo sapiens
actccaaggaccatc

SEQ ID NO: 39065 - DNA, 15 bp, Homo sapiens
aactccaaggaccat

SEQ ID NO: 39066 - DNA, 15 bp, Homo sapiens
aaactccaaggacca

SEQ ID NO: 39067 - DNA, 15 bp, Homo sapiens
gaaactccaaggacc

SEQ ID NO: 39068 - DNA, 15 bp, Homo sapiens
agaaactccaaggac

SEQ ID NO: 39069 - DNA, 15 bp, Homo sapiens
cagaaactccaagga

SEQ ID NO: 39070 - DNA, 15 bp, Homo sapiens
acagaaactccaagg

SEQ ID NO: 39071 - DNA, 15 bp, Homo sapiens
tacagaaactccaag

SEQ ID NO: 39072 - DNA, 15 bp, Homo sapiens
atacagaaactccaa

SEQ ID NO: 39073 - DNA, 15 bp, Homo sapiens
aatacagaaactcca

SEQ ID NO: 39074 - DNA, 15 bp, Homo sapiens
aaatacagaaactcc

SEQ ID NO: 39075 - DNA, 15 bp, Homo sapiens
aaaatacagaaactc

SEQ ID NO: 39076 - DNA, 15 bp, Homo sapiens
gaaaatacagaaact

SEQ ID NO: 39077 - DNA, 15 bp, Homo sapiens
tgaaaatacagaaac

SEQ ID NO: 39078 - DNA, 15 bp, Homo sapiens
ctgaaaatacagaaa

SEQ ID NO: 39079 - DNA, 15 bp, Homo sapiens
actgaaaatacagaa

SEQ ID NO: 39080 - DNA, 15 bp, Homo sapiens
tactgaaaatacaga

SEQ ID NO: 39081 - DNA, 15 bp, Homo sapiens
atactgaaaatacag

SEQ ID NO: 39082 - DNA, 15 bp, Homo sapiens
aatactgaaaataca

SEQ ID NO: 39083 - DNA, 15 bp, Homo sapiens
gaatactgaaaatac

SEQ ID NO: 39084 - DNA, 15 bp, Homo sapiens
agaatactgaaaata

SEQ ID NO: 39085 - DNA, 15 bp, Homo sapiens
aagaatactgaaaat

SEQ ID NO: 39086 - DNA, 15 bp, Homo sapiens
aaagaatactgaaaa

SEQ ID NO: 39087 - DNA, 15 bp, Homo sapiens
aaaagaatactgaaa

SEQ ID NO: 39088 - DNA, 15 bp, Homo sapiens
aaaaagaatactgaa

SEQ ID NO: 39089 - DNA, 15 bp, Homo sapiens
aaaaaagaatactga

SEQ ID NO: 39090 - DNA, 15 bp, Homo sapiens
aaaaaaagaatactg

SEQ ID NO: 39091 - DNA, 15 bp, Homo sapiens
aaaaaaaagaatact

SEQ ID NO: 39092 - DNA, 15 bp, Homo sapiens
caaaaaaaagaatac

SEQ ID NO: 39093 - DNA, 15 bp, Homo sapiens
tcaaaaaaaagaata

SEQ ID NO: 39094 - DNA, 15 bp, Homo sapiens
ctcaaaaaaaagaat

SEQ ID NO: 39095 - DNA, 15 bp, Homo sapiens
gctcaaaaaaaagaa

SEQ ID NO: 39096 - DNA, 15 bp, Homo sapiens
tgctcaaaaaaaaga

SEQ ID NO: 39097 - DNA, 15 bp, Homo sapiens
atgctcaaaaaaaag

SEQ ID NO: 39098 - DNA, 15 bp, Homo sapiens
tatgctcaaaaaaaa

SEQ ID NO: 39099 - DNA, 15 bp, Homo sapiens
gtatgctcaaaaaaa

SEQ ID NO: 39100 - DNA, 15 bp, Homo sapiens
tgtatgctcaaaaaa

SEQ ID NO: 39101 - DNA, 15 bp, Homo sapiens
ttgtatgctcaaaaa

SEQ ID NO: 39102 - DNA, 15 bp, Homo sapiens
cttgtatgctcaaaa

SEQ ID NO: 39103 - DNA, 15 bp, Homo sapiens
tcttgtatgctcaaa

SEQ ID NO: 39104 - DNA, 15 bp, Homo sapiens
gtcttgtatgctcaa

SEQ ID NO: 39105 - DNA, 15 bp, Homo sapiens
tgtcttgtatgctca

SEQ ID NO: 39106 - DNA, 15 bp, Homo sapiens
atgtcttgtatgctc

SEQ ID NO: 39107 - DNA, 15 bp, Homo sapiens
aatgtcttgtatgct

SEQ ID NO: 39108 - DNA, 15 bp, Homo sapiens
aaatgtcttgtatgc

SEQ ID NO: 39109 - DNA, 15 bp, Homo sapiens
taaatgtcttgtatg

SEQ ID NO: 39110 - DNA, 15 bp, Homo sapiens
ataaatgtcttgtat

SEQ ID NO: 39111 - DNA, 15 bp, Homo sapiens
aataaatgtcttgta

SEQ ID NO: 39112 - DNA, 15 bp, Homo sapiens
caataaatgtcttgt

SEQ ID NO: 39113 - DNA, 15 bp, Homo sapiens
tcaataaatgtcttg

SEQ ID NO: 39114 - DNA, 15 bp, Homo sapiens
ttcaataaatgtctt

SEQ ID NO: 39115 - DNA, 15 bp, Homo sapiens
tttcaataaatgtct

SEQ ID NO: 39116 - DNA, 15 bp, Homo sapiens
ttttcaataaatgtc

SEQ ID NO: 39117 - DNA, 15 bp, Homo sapiens
tttttcaataaatgt

SEQ ID NO: 39118 - DNA, 15 bp, Homo sapiens
atttttcaataaatg

SEQ ID NO: 39119 - DNA, 15 bp, Homo sapiens
aatttttcaataaat

SEQ ID NO: 39120 - DNA, 15 bp, Homo sapiens
gaatttttcaataaa

SEQ ID NO: 39121 - DNA, 15 bp, Homo sapiens
agaatttttcaataa

SEQ ID NO: 39122 - DNA, 15 bp, Homo sapiens
aagaatttttcaata

SEQ ID NO: 39123 - DNA, 15 bp, Homo sapiens
caagaatttttcaat

SEQ ID NO: 39124 - DNA, 15 bp, Homo sapiens
ccaagaatttttcaa

SEQ ID NO: 39125 - DNA, 15 bp, Homo sapiens
cccaagaatttttca

SEQ ID NO: 39126 - DNA, 15 bp, Homo sapiens
tcccaagaatttttc

SEQ ID NO: 39127 - DNA, 15 bp, Homo sapiens
atcccaagaattttt

SEQ ID NO: 39128 - DNA, 15 bp, Homo sapiens
gatcccaagaatttt

SEQ ID NO: 39129 - DNA, 15 bp, Homo sapiens
tgatcccaagaattt

SEQ ID NO: 39130 - DNA, 15 bp, Homo sapiens
ttgatcccaagaatt

SEQ ID NO: 39131 - DNA, 15 bp, Homo sapiens
attgatcccaagaat

SEQ ID NO: 39132 - DNA, 15 bp, Homo sapiens
tattgatcccaagaa

SEQ ID NO: 39133 - DNA, 15 bp, Homo sapiens
gtattgatcccaaga

SEQ ID NO: 39134 - DNA, 15 bp, Homo sapiens
agtattgatcccaag

SEQ ID NO: 39135 - DNA, 15 bp, Homo sapiens
aagtattgatcccaa

SEQ ID NO: 39136 - DNA, 15 bp, Homo sapiens
caagtattgatccca

SEQ ID NO: 39137 - DNA, 15 bp, Homo sapiens
acaagtattgatccc

SEQ ID NO: 39138 - DNA, 15 bp, Homo sapiens
cacaagtattgatcc

SEQ ID NO: 39139 - DNA, 15 bp, Homo sapiens
acacaagtattgatc

SEQ ID NO: 39140 - DNA, 15 bp, Homo sapiens
tacacaagtattgat

SEQ ID NO: 39141 - DNA, 15 bp, Homo sapiens
ttacacaagtattga

SEQ ID NO: 39142 - DNA, 15 bp, Homo sapiens
cttacacaagtattg

SEQ ID NO: 39143 - DNA, 15 bp, Homo sapiens
ccttacacaagtatt

SEQ ID NO: 39144 - DNA, 15 bp, Homo sapiens
tccttacacaagtat

SEQ ID NO: 39145 - DNA, 15 bp, Homo sapiens
ttccttacacaagta

SEQ ID NO: 39146 - DNA, 15 bp, Homo sapiens
tttccttacacaagt

SEQ ID NO: 39147 - DNA, 15 bp, Homo sapiens
ctttccttacacaag

SEQ ID NO: 39148 - DNA, 15 bp, Homo sapiens
cctttccttacacaa

SEQ ID NO: 39149 - DNA, 15 bp, Homo sapiens
tcctttccttacaca

SEQ ID NO: 39150 - DNA, 15 bp, Homo sapiens
ttcctttccttacac

SEQ ID NO: 39151 - DNA, 15 bp, Homo sapiens
tttcctttccttaca

SEQ ID NO: 39152 - DNA, 15 bp, Homo sapiens
ctttcctttccttac

SEQ ID NO: 39153 - DNA, 15 bp, Homo sapiens
cctttcctttcctta

SEQ ID NO: 39154 - DNA, 15 bp, Homo sapiens
ccctttcctttcctt

SEQ ID NO: 39155 - DNA, 15 bp, Homo sapiens
tccctttcctttcct

SEQ ID NO: 39156 - DNA, 15 bp, Homo sapiens
ttccctttcctttcc

SEQ ID NO: 39157 - DNA, 15 bp, Homo sapiens
gttccctttcctttc

SEQ ID NO: 39158 - DNA, 15 bp, Homo sapiens
tgttccctttccttt

SEQ ID NO: 39159 - DNA, 15 bp, Homo sapiens
ttgttccctttcctt

SEQ ID NO: 39160 - DNA, 15 bp, Homo sapiens
tttgttccctttcct

SEQ ID NO: 39161 - DNA, 15 bp, Homo sapiens
ctttgttccctttcc

SEQ ID NO: 39162 - DNA, 15 bp, Homo sapiens
gctttgttccctttc

SEQ ID NO: 39163 - DNA, 15 bp, Homo sapiens
tgctttgttcccttt

SEQ ID NO: 39164 - DNA, 15 bp, Homo sapiens
atgctttgttccctt

SEQ ID NO: 39165 - DNA, 15 bp, Homo sapiens
catgctttgttccct

SEQ ID NO: 39166 - DNA, 15 bp, Homo sapiens
tcatgctttgttccc

SEQ ID NO: 39167 - DNA, 15 bp, Homo sapiens
atcatgctttgttcc

SEQ ID NO: 39168 - DNA, 15 bp, Homo sapiens
aatcatgctttgttc

SEQ ID NO: 39169 - DNA, 15 bp, Homo sapiens
caatcatgctttgtt

SEQ ID NO: 39170 - DNA, 15 bp, Homo sapiens
ccaatcatgctttgt

SEQ ID NO: 39171 - DNA, 15 bp, Homo sapiens
cccaatcatgctttg

SEQ ID NO: 39172 - DNA, 15 bp, Homo sapiens
gcccaatcatgcttt

SEQ ID NO: 39173 - DNA, 15 bp, Homo sapiens
tgcccaatcatgctt

SEQ ID NO: 39174 - DNA, 15 bp, Homo sapiens
ctgcccaatcatgct

SEQ ID NO: 39175 - DNA, 15 bp, Homo sapiens
tctgcccaatcatgc

SEQ ID NO: 39176 - DNA, 15 bp, Homo sapiens
ctctgcccaatcatg

SEQ ID NO: 39177 - DNA, 15 bp, Homo sapiens
cctctgcccaatcat

SEQ ID NO: 39178 - DNA, 15 bp, Homo sapiens
gcctctgcccaatca

SEQ ID NO: 39179 - DNA, 15 bp, Homo sapiens
tgcctctgcccaatc

SEQ ID NO: 39180 - DNA, 15 bp, Homo sapiens
ctgcctctgcccaat

SEQ ID NO: 39181 - DNA, 15 bp, Homo sapiens
tctgcctctgcccaa

SEQ ID NO: 39182 - DNA, 15 bp, Homo sapiens
ttctgcctctgccca

SEQ ID NO: 39183 - DNA, 15 bp, Homo sapiens
cttctgcctctgccc

SEQ ID NO: 39184 - DNA, 15 bp, Homo sapiens
tcttctgcctctgcc

SEQ ID NO: 39185 - DNA, 15 bp, Homo sapiens
atcttctgcctctgc

SEQ ID NO: 39186 - DNA, 15 bp, Homo sapiens
catcttctgcctctg

SEQ ID NO: 39187 - DNA, 15 bp, Homo sapiens
tcatcttctgcctct

SEQ ID NO: 39188 - DNA, 15 bp, Homo sapiens
gtcatcttctgcctc

SEQ ID NO: 39189 - DNA, 15 bp, Homo sapiens
tgtcatcttctgcct

SEQ ID NO: 39190 - DNA, 15 bp, Homo sapiens
atgtcatcttctgcc

SEQ ID NO: 39191 - DNA, 15 bp, Homo sapiens
gatgtcatcttctgc

SEQ ID NO: 39192 - DNA, 15 bp, Homo sapiens
tgatgtcatcttctg

SEQ ID NO: 39193 - DNA, 15 bp, Homo sapiens
ttgatgtcatcttct

SEQ ID NO: 39194 - DNA, 15 bp, Homo sapiens
gttgatgtcatcttc

SEQ ID NO: 39195 - DNA, 15 bp, Homo sapiens
tgttgatgtcatctt

SEQ ID NO: 39196 - DNA, 15 bp, Homo sapiens
ttgttgatgtcatct

SEQ ID NO: 39197 - DNA, 15 bp, Homo sapiens
tttgttgatgtcatc

SEQ ID NO: 39198 - DNA, 15 bp, Homo sapiens
ctttgttgatgtcat

SEQ ID NO: 39199 - DNA, 15 bp, Homo sapiens
cctttgttgatgtca

SEQ ID NO: 39200 - DNA, 15 bp, Homo sapiens
gcctttgttgatgtc

SEQ ID NO: 39201 - DNA, 15 bp, Homo sapiens
ggcctttgttgatgt

SEQ ID NO: 39202 - DNA, 15 bp, Homo sapiens
gggcctttgttgatg

SEQ ID NO: 39203 - DNA, 15 bp, Homo sapiens
agggcctttgttgat

SEQ ID NO: 39204 - DNA, 15 bp, Homo sapiens
gagggcctttgttga

SEQ ID NO: 39205 - DNA, 15 bp, Homo sapiens
ggagggcctttgttg

SEQ ID NO: 39206 - DNA, 15 bp, Homo sapiens
cggagggcctttgtt

SEQ ID NO: 39207 - DNA, 15 bp, Homo sapiens
acggagggcctttgt

SEQ ID NO: 39208 - DNA, 15 bp, Homo sapiens
aacggagggcctttg

SEQ ID NO: 39209 - DNA, 15 bp, Homo sapiens
caacggagggccttt

SEQ ID NO: 39210 - DNA, 15 bp, Homo sapiens
acaacggagggcctt

SEQ ID NO: 39211 - DNA, 15 bp, Homo sapiens
gacaacggagggcct

SEQ ID NO: 39212 - DNA, 15 bp, Homo sapiens
tgacaacggagggcc

SEQ ID NO: 39213 - DNA, 15 bp, Homo sapiens
ctgacaacggagggc

SEQ ID NO: 39214 - DNA, 15 bp, Homo sapiens
actgacaacggaggg

SEQ ID NO: 39215 - DNA, 15 bp, Homo sapiens
tactgacaacggagg

SEQ ID NO: 39216 - DNA, 15 bp, Homo sapiens
atactgacaacggag

SEQ ID NO: 39217 - DNA, 15 bp, Homo sapiens
aatactgacaacgga

SEQ ID NO: 39218 - DNA, 15 bp, Homo sapiens
gaatactgacaacgg

SEQ ID NO: 39219 - DNA, 15 bp, Homo sapiens
agaatactgacaacg

SEQ ID NO: 39220 - DNA, 15 bp, Homo sapiens
aagaatactgacaac

SEQ ID NO: 39221 - DNA, 15 bp, Homo sapiens
aaagaatactgacaa

SEQ ID NO: 39222 - DNA, 15 bp, Homo sapiens
aaaagaatactgaca

SEQ ID NO: 39223 - DNA, 15 bp, Homo sapiens
aaaaagaatactgac

SEQ ID NO: 39224 - DNA, 15 bp, Homo sapiens
aaaaaaaaagaatac

SEQ ID NO: 39225 - DNA, 15 bp, Homo sapiens
aaaaaaaaaagaata

SEQ ID NO: 39226 - DNA, 15 bp, Homo sapiens
caactcaaaaaaaaa

SEQ ID NO: 39227 - DNA, 15 bp, Homo sapiens
ccaactcaaaaaaaa

SEQ ID NO: 39228 - DNA, 15 bp, Homo sapiens
tccaactcaaaaaaa

SEQ ID NO: 39229 - DNA, 15 bp, Homo sapiens
ctccaactcaaaaaa

SEQ ID NO: 39230 - DNA, 15 bp, Homo sapiens
actccaactcaaaaa

SEQ ID NO: 39231 - DNA, 15 bp, Homo sapiens
gactccaactcaaaa

SEQ ID NO: 39232 - DNA, 15 bp, Homo sapiens
agactccaactcaaa

SEQ ID NO: 39233 - DNA, 15 bp, Homo sapiens
gagactccaactcaa

SEQ ID NO: 39234 - DNA, 15 bp, Homo sapiens
cgagactccaactca

SEQ ID NO: 39235 - DNA, 15 bp, Homo sapiens
gcgagactccaactc

SEQ ID NO: 39236 - DNA, 15 bp, Homo sapiens
agcgagactccaact

SEQ ID NO: 39237 - DNA, 15 bp, Homo sapiens
gagcgagactccaac

SEQ ID NO: 39238 - DNA, 15 bp, Homo sapiens
agagcgagactccaa

SEQ ID NO: 39239 - DNA, 15 bp, Homo sapiens
cagagcgagactcca

SEQ ID NO: 39240 - DNA, 15 bp, Homo sapiens
agtgagctgagatca

SEQ ID NO: 39241 - DNA, 15 bp, Homo sapiens
tagtgagctgagatc

SEQ ID NO: 39242 - DNA, 15 bp, Homo sapiens
gtagtgagctgagat

SEQ ID NO: 39243 - DNA, 15 bp, Homo sapiens
tgtagtgagctgaga

SEQ ID NO: 39244 - DNA, 15 bp, Homo sapiens
ttgtagtgagctgag

SEQ ID NO: 39245 - DNA, 15 bp, Homo sapiens
gttgtagtgagctga

SEQ ID NO: 39246 - DNA, 15 bp, Homo sapiens
ggttgtagtgagctg

SEQ ID NO: 39247 - DNA, 15 bp, Homo sapiens
aggttgtagtgagct

SEQ ID NO: 39248 - DNA, 15 bp, Homo sapiens
cagaggttgtagtga

SEQ ID NO: 39249 - DNA, 15 bp, Homo sapiens
gcagaggttgtagtg

SEQ ID NO: 39250 - DNA, 15 bp, Homo sapiens
ggcagaggttgtagt

SEQ ID NO: 39251 - DNA, 15 bp, Homo sapiens
aggcagaggttgtag

SEQ ID NO: 39252 - DNA, 15 bp, Homo sapiens
gaggcagaggttgta

SEQ ID NO: 39253 - DNA, 15 bp, Homo sapiens
ggaggcagaggttgt

SEQ ID NO: 39254 - DNA, 15 bp, Homo sapiens
cctgggaggcagagg

SEQ ID NO: 39255 - DNA, 15 bp, Homo sapiens
acctgggaggcagag

SEQ ID NO: 39256 - DNA, 15 bp, Homo sapiens
tgaacctgggaggca

SEQ ID NO: 39257 - DNA, 15 bp, Homo sapiens
acttgaacctgggag

SEQ ID NO: 39258 - DNA, 15 bp, Homo sapiens
cacttgaacctggga

SEQ ID NO: 39259 - DNA, 15 bp, Homo sapiens
tcacttgaacctggg

SEQ ID NO: 39260 - DNA, 15 bp, Homo sapiens
atcacttgaacctgg

SEQ ID NO: 39261 - DNA, 15 bp, Homo sapiens
aatcacttgaacctg

SEQ ID NO: 39262 - DNA, 15 bp, Homo sapiens
gaatcacttgaacct

SEQ ID NO: 39263 - DNA, 15 bp, Homo sapiens
cagagaatcacttga

SEQ ID NO: 39264 - DNA, 15 bp, Homo sapiens
gcagagaatcacttg

SEQ ID NO: 39265 - DNA, 15 bp, Homo sapiens
agcagagaatcactt

SEQ ID NO: 39266 - DNA, 15 bp, Homo sapiens
aagcagagaatcact

SEQ ID NO: 39267 - DNA, 15 bp, Homo sapiens
gaagcagagaatcac

SEQ ID NO: 39268 - DNA, 15 bp, Homo sapiens
tgaagcagagaatca

SEQ ID NO: 39269 - DNA, 15 bp, Homo sapiens
ctgaagcagagaatc

SEQ ID NO: 39270 - DNA, 15 bp, Homo sapiens
gctgaagcagagaat

SEQ ID NO: 39271 - DNA, 15 bp, Homo sapiens
ggctgaagcagagaa

SEQ ID NO: 39272 - DNA, 15 bp, Homo sapiens
aggctgaagcagaga

SEQ ID NO: 39273 - DNA, 15 bp, Homo sapiens
gaggctgaagcagag

SEQ ID NO: 39274 - DNA, 15 bp, Homo sapiens
ggaggctgaagcaga

SEQ ID NO: 39275 - DNA, 15 bp, Homo sapiens
aggaggctgaagcag

SEQ ID NO: 39276 - DNA, 15 bp, Homo sapiens
caggaggctgaagca

SEQ ID NO: 39277 - DNA, 15 bp, Homo sapiens
tcaggaggctgaagc

SEQ ID NO: 39278 - DNA, 15 bp, Homo sapiens
ctcaggaggctgaag

SEQ ID NO: 39279 - DNA, 15 bp, Homo sapiens
actcaggaggctgaa

SEQ ID NO: 39280 - DNA, 15 bp, Homo sapiens
ggtgcatgcctgtaa

SEQ ID NO: 39281 - DNA, 15 bp, Homo sapiens
tgtggtggtgcatgc

SEQ ID NO: 39282 - DNA, 15 bp, Homo sapiens
gtgtggtggtgcatg

SEQ ID NO: 39283 - DNA, 15 bp, Homo sapiens
ggtgtggtggtgcat

SEQ ID NO: 39284 - DNA, 15 bp, Homo sapiens
aggtgtggtggtgca

SEQ ID NO: 39285 - DNA, 15 bp, Homo sapiens
caggtgtggtggtgc

SEQ ID NO: 39286 - DNA, 15 bp, Homo sapiens
ccaggtgtggtggtg

SEQ ID NO: 39287 - DNA, 15 bp, Homo sapiens
gccaggtgtggtggt

SEQ ID NO: 39288 - DNA, 15 bp, Homo sapiens
caattagccaggtgt

SEQ ID NO: 39289 - DNA, 15 bp, Homo sapiens
acaattagccaggtg

SEQ ID NO: 39290 - DNA, 15 bp, Homo sapiens
aacaattagccaggt

SEQ ID NO: 39291 - DNA, 15 bp, Homo sapiens
caacaattagccagg

SEQ ID NO: 39292 - DNA, 15 bp, Homo sapiens
acaacaattagccag

SEQ ID NO: 39293 - DNA, 15 bp, Homo sapiens
tacaacaattagcca

SEQ ID NO: 39294 - DNA, 15 bp, Homo sapiens
atacaacaattagcc

SEQ ID NO: 39295 - DNA, 15 bp, Homo sapiens
aatacaacaattagc

SEQ ID NO: 39296 - DNA, 15 bp, Homo sapiens
aaatacaacaattag

SEQ ID NO: 39297 - DNA, 15 bp, Homo sapiens
aaaatacaacaatta

SEQ ID NO: 39298 - DNA, 15 bp, Homo sapiens
aaaaatacaacaatt

SEQ ID NO: 39299 - DNA, 15 bp, Homo sapiens
taaaaatacaacaat

SEQ ID NO: 39300 - DNA, 15 bp, Homo sapiens
ctaaaaatacaacaa

SEQ ID NO: 39301 - DNA, 15 bp, Homo sapiens
actaaaaatacaaca

SEQ ID NO: 39302 - DNA, 15 bp, Homo sapiens
tactaaaaatacaac

SEQ ID NO: 39303 - DNA, 15 bp, Homo sapiens
tggtgaaaccccgtc

SEQ ID NO: 39304 - DNA, 15 bp, Homo sapiens
atggtgaaaccccgt

SEQ ID NO: 39305 - DNA, 15 bp, Homo sapiens
catggtgaaaccccg

SEQ ID NO: 39306 - DNA, 15 bp, Homo sapiens
aaccaacatggtgaa

SEQ ID NO: 39307 - DNA, 15 bp, Homo sapiens
caaccaacatggtga

SEQ ID NO: 39308 - DNA, 15 bp, Homo sapiens
ccaaccaacatggtg

SEQ ID NO: 39309 - DNA, 15 bp, Homo sapiens
gccaaccaacatggt

SEQ ID NO: 39310 - DNA, 15 bp, Homo sapiens
ggccaaccaacatgg

SEQ ID NO: 39311 - DNA, 15 bp, Homo sapiens
tggccaaccaacatg

SEQ ID NO: 39312 - DNA, 15 bp, Homo sapiens
ctggccaaccaacat

SEQ ID NO: 39313 - DNA, 15 bp, Homo sapiens
tctggccaaccaaca

SEQ ID NO: 39314 - DNA, 15 bp, Homo sapiens
gtctggccaaccaac

SEQ ID NO: 39315 - DNA, 15 bp, Homo sapiens
agtctggccaaccaa

SEQ ID NO: 39316 - DNA, 15 bp, Homo sapiens
cagtctggccaacca

SEQ ID NO: 39317 - DNA, 15 bp, Homo sapiens
ccagtctggccaacc

SEQ ID NO: 39318 - DNA, 15 bp, Homo sapiens
accagtctggccaac

SEQ ID NO: 39319 - DNA, 15 bp, Homo sapiens
gaccagtctggccaa

SEQ ID NO: 39320 - DNA, 15 bp, Homo sapiens
agaccagtctggcca

SEQ ID NO: 39321 - DNA, 15 bp, Homo sapiens
aagaccagtctggcc

SEQ ID NO: 39322 - DNA, 15 bp, Homo sapiens
caagaccagtctggc

SEQ ID NO: 39323 - DNA, 15 bp, Homo sapiens
tcaagaccagtctgg

SEQ ID NO: 39324 - DNA, 15 bp, Homo sapiens
acggatcacctgagg

SEQ ID NO: 39325 - DNA, 15 bp, Homo sapiens
gacggatcacctgag

SEQ ID NO: 39326 - DNA, 15 bp, Homo sapiens
agacggatcacctga

SEQ ID NO: 39327 - DNA, 15 bp, Homo sapiens
cagacggatcacctg

SEQ ID NO: 39328 - DNA, 15 bp, Homo sapiens
gcagacggatcacct

SEQ ID NO: 39329 - DNA, 15 bp, Homo sapiens
ggcagacggatcacc

SEQ ID NO: 39330 - DNA, 15 bp, Homo sapiens
aggcagacggatcac

SEQ ID NO: 39331 - DNA, 15 bp, Homo sapiens
aaggcagacggatca

SEQ ID NO: 39332 - DNA, 15 bp, Homo sapiens
caaggcagacggatc

SEQ ID NO: 39333 - DNA, 15 bp, Homo sapiens
ccaaggcagacggat

SEQ ID NO: 39334 - DNA, 15 bp, Homo sapiens
gccaaggcagacgga

SEQ ID NO: 39335 - DNA, 15 bp, Homo sapiens
ggccaaggcagacgg

SEQ ID NO: 39336 - DNA, 15 bp, Homo sapiens
aggccaaggcagacg

SEQ ID NO: 39337 - DNA, 15 bp, Homo sapiens
gaggccaaggcagac

SEQ ID NO: 39338 - DNA, 15 bp, Homo sapiens
ggaggccaaggcaga

SEQ ID NO: 39339 - DNA, 15 bp, Homo sapiens
acactttgggaggcc

SEQ ID NO: 39340 - DNA, 15 bp, Homo sapiens
ccaacactttgggag

SEQ ID NO: 39341 - DNA, 15 bp, Homo sapiens
tccaacactttggga

SEQ ID NO: 39342 - DNA, 15 bp, Homo sapiens
ttccaacactttggg

SEQ ID NO: 39343 - DNA, 15 bp, Homo sapiens
attccaacactttgg

SEQ ID NO: 39344 - DNA, 15 bp, Homo sapiens
aattccaacactttg

SEQ ID NO: 39345 - DNA, 15 bp, Homo sapiens
taattccaacacttt

SEQ ID NO: 39346 - DNA, 15 bp, Homo sapiens
gtaattccaacactt

SEQ ID NO: 39347 - DNA, 15 bp, Homo sapiens
tgtaattccaacact

SEQ ID NO: 39348 - DNA, 15 bp, Homo sapiens
ctgtaattccaacac

SEQ ID NO: 39349 - DNA, 15 bp, Homo sapiens
tctgtaattccaaca

SEQ ID NO: 39350 - DNA, 15 bp, Homo sapiens
gtctgtaattccaac

SEQ ID NO: 39351 - DNA, 15 bp, Homo sapiens
tgtctgtaattccaa

SEQ ID NO: 39352 - DNA, 15 bp, Homo sapiens
atgtctgtaattcca

SEQ ID NO: 39353 - DNA, 15 bp, Homo sapiens
catgtctgtaattcc

SEQ ID NO: 39354 - DNA, 15 bp, Homo sapiens
tcatgtctgtaattc

SEQ ID NO: 39355 - DNA, 15 bp, Homo sapiens
gtcatgtctgtaatt

SEQ ID NO: 39356 - DNA, 15 bp, Homo sapiens
ggtcatgtctgtaat

SEQ ID NO: 39357 - DNA, 15 bp, Homo sapiens
gggtcatgtctgtaa

SEQ ID NO: 39358 - DNA, 15 bp, Homo sapiens
tgggtcatgtctgta

SEQ ID NO: 39359 - DNA, 15 bp, Homo sapiens
gtgggtcatgtctgt

SEQ ID NO: 39360 - DNA, 15 bp, Homo sapiens
agtgggtcatgtctg

SEQ ID NO: 39361 - DNA, 15 bp, Homo sapiens
cagtgggtcatgtct

SEQ ID NO: 39362 - DNA, 15 bp, Homo sapiens
gcagtgggtcatgtc

SEQ ID NO: 39363 - DNA, 15 bp, Homo sapiens
tgcagtgggtcatgt

SEQ ID NO: 39364 - DNA, 15 bp, Homo sapiens
gtgcagtgggtcatg

SEQ ID NO: 39365 - DNA, 15 bp, Homo sapiens
ggtgcagtgggtcat

SEQ ID NO: 39366 - DNA, 15 bp, Homo sapiens
gggtgcagtgggtca

SEQ ID NO: 39367 - DNA, 15 bp, Homo sapiens
cgggtgcagtgggtc

SEQ ID NO: 39368 - DNA, 15 bp, Homo sapiens
ccgggtgcagtgggt

SEQ ID NO: 39369 - DNA, 15 bp, Homo sapiens
gccgggtgcagtggg

SEQ ID NO: 39370 - DNA, 15 bp, Homo sapiens
ggccgggtgcagtgg

SEQ ID NO: 39371 - DNA, 15 bp, Homo sapiens
aggccgggtgcagtg

SEQ ID NO: 39372 - DNA, 15 bp, Homo sapiens
caggccgggtgcagt

SEQ ID NO: 39373 - DNA, 15 bp, Homo sapiens
acaggccgggtgcag

SEQ ID NO: 39374 - DNA, 15 bp, Homo sapiens
aacaggccgggtgca

SEQ ID NO: 39375 - DNA, 15 bp, Homo sapiens
caacaggccgggtgc

SEQ ID NO: 39376 - DNA, 15 bp, Homo sapiens
acaacaggccgggtg

SEQ ID NO: 39377 - DNA, 15 bp, Homo sapiens
gacaacaggccgggt

SEQ ID NO: 39378 - DNA, 15 bp, Homo sapiens
tgacaacaggccggg

SEQ ID NO: 39379 - DNA, 15 bp, Homo sapiens
ctgacaacaggccgg

SEQ ID NO: 39380 - DNA, 15 bp, Homo sapiens
actgacaacaggccg

SEQ ID NO: 39381 - DNA, 15 bp, Homo sapiens
tactgacaacaggcc

SEQ ID NO: 39382 - DNA, 15 bp, Homo sapiens
atactgacaacaggc

SEQ ID NO: 39383 - DNA, 15 bp, Homo sapiens
aatactgacaacagg

SEQ ID NO: 39384 - DNA, 15 bp, Homo sapiens
gaatactgacaacag

SEQ ID NO: 39385 - DNA, 15 bp, Homo sapiens
agaatactgacaaca

SEQ ID NO: 39386 - DNA, 15 bp, Homo sapiens
taagaatactgacaa

SEQ ID NO: 39387 - DNA, 15 bp, Homo sapiens
ttaagaatactgaca

SEQ ID NO: 39388 - DNA, 15 bp, Homo sapiens
tttaagaatactgac

SEQ ID NO: 39389 - DNA, 15 bp, Homo sapiens
gtttaagaatactga

SEQ ID NO: 39390 - DNA, 15 bp, Homo sapiens
tgtttaagaatactg

SEQ ID NO: 39391 - DNA, 15 bp, Homo sapiens
atgtttaagaatact

SEQ ID NO: 39392 - DNA, 15 bp, Homo sapiens
tatgtttaagaatac

SEQ ID NO: 39393 - DNA, 15 bp, Homo sapiens
ctatgtttaagaata

SEQ ID NO: 39394 - DNA, 15 bp, Homo sapiens
tctatgtttaagaat

SEQ ID NO: 39395 - DNA, 15 bp, Homo sapiens
gtctatgtttaagaa

SEQ ID NO: 39396 - DNA, 15 bp, Homo sapiens
tgtctatgtttaaga

SEQ ID NO: 39397 - DNA, 15 bp, Homo sapiens
gtgtctatgtttaag

SEQ ID NO: 39398 - DNA, 15 bp, Homo sapiens
agtgtctatgtttaa

SEQ ID NO: 39399 - DNA, 15 bp, Homo sapiens
tagtgtctatgttta

SEQ ID NO: 39400 - DNA, 15 bp, Homo sapiens
ttagtgtctatgttt

SEQ ID NO: 39401 - DNA, 15 bp, Homo sapiens
gttagtgtctatgtt

SEQ ID NO: 39402 - DNA, 15 bp, Homo sapiens
agttagtgtctatgt

SEQ ID NO: 39403 - DNA, 15 bp, Homo sapiens
cagttagtgtctatg

SEQ ID NO: 39404 - DNA, 15 bp, Homo sapiens
acagttagtgtctat

SEQ ID NO: 39405 - DNA, 15 bp, Homo sapiens
tacagttagtgtcta

SEQ ID NO: 39406 - DNA, 15 bp, Homo sapiens
ctacagttagtgtct

SEQ ID NO: 39407 - DNA, 15 bp, Homo sapiens
cctacagttagtgtc

SEQ ID NO: 39408 - DNA, 15 bp, Homo sapiens
gcctacagttagtgt

SEQ ID NO: 39409 - DNA, 15 bp, Homo sapiens
agcctacagttagtg

SEQ ID NO: 39410 - DNA, 15 bp, Homo sapiens
cagcctacagttagt

SEQ ID NO: 39411 - DNA, 15 bp, Homo sapiens
tcagcctacagttag

SEQ ID NO: 39412 - DNA, 15 bp, Homo sapiens
gtcagcctacagtta

SEQ ID NO: 39413 - DNA, 15 bp, Homo sapiens
tgtcagcctacagtt

SEQ ID NO: 39414 - DNA, 15 bp, Homo sapiens
ctgtcagcctacagt

SEQ ID NO: 39415 - DNA, 15 bp, Homo sapiens
gctgtcagcctacag

SEQ ID NO: 39416 - DNA, 15 bp, Homo sapiens
ggctgtcagcctaca

SEQ ID NO: 39417 - DNA, 15 bp, Homo sapiens
aggctgtcagcctac

SEQ ID NO: 39418 - DNA, 15 bp, Homo sapiens
taggctgtcagccta

SEQ ID NO: 39419 - DNA, 15 bp, Homo sapiens
ctaggctgtcagcct

SEQ ID NO: 39420 - DNA, 15 bp, Homo sapiens
gctaggctgtcagcc

SEQ ID NO: 39421 - DNA, 15 bp, Homo sapiens
tgctaggctgtcagc

SEQ ID NO: 39422 - DNA, 15 bp, Homo sapiens
ctgctaggctgtcag

SEQ ID NO: 39423 - DNA, 15 bp, Homo sapiens
gctgctaggctgtca

SEQ ID NO: 39424 - DNA, 15 bp, Homo sapiens
tgctgctaggctgtc

SEQ ID NO: 39425 - DNA, 15 bp, Homo sapiens
ttgctgctaggctgt

SEQ ID NO: 39426 - DNA, 15 bp, Homo sapiens
cttgctgctaggctg

SEQ ID NO: 39427 - DNA, 15 bp, Homo sapiens
ccttgctgctaggct

SEQ ID NO: 39428 - DNA, 15 bp, Homo sapiens
tccttgctgctaggc

SEQ ID NO: 39429 - DNA, 15 bp, Homo sapiens
gtccttgctgctagg

SEQ ID NO: 39430 - DNA, 15 bp, Homo sapiens
ggtccttgctgctag

SEQ ID NO: 39431 - DNA, 15 bp, Homo sapiens
tggtccttgctgcta

SEQ ID NO: 39432 - DNA, 15 bp, Homo sapiens
ctggtccttgctgct

SEQ ID NO: 39433 - DNA, 15 bp, Homo sapiens
actggtccttgctgc

SEQ ID NO: 39434 - DNA, 15 bp, Homo sapiens
aactggtccttgctg

SEQ ID NO: 39435 - DNA, 15 bp, Homo sapiens
taactggtccttgct

SEQ ID NO: 39436 - DNA, 15 bp, Homo sapiens
ttaactggtccttgc

SEQ ID NO: 39437 - DNA, 15 bp, Homo sapiens
tttaactggtccttg

SEQ ID NO: 39438 - DNA, 15 bp, Homo sapiens
ctttaactggtcctt

SEQ ID NO: 39439 - DNA, 15 bp, Homo sapiens
tctttaactggtcct

SEQ ID NO: 39440 - DNA, 15 bp, Homo sapiens
ttctttaactggtcc

SEQ ID NO: 39441 - DNA, 15 bp, Homo sapiens
tttctttaactggtc

SEQ ID NO: 39442 - DNA, 15 bp, Homo sapiens
atttctttaactggt

SEQ ID NO: 39443 - DNA, 15 bp, Homo sapiens
catttctttaactgg

SEQ ID NO: 39444 - DNA, 15 bp, Homo sapiens
tcatttctttaactg

SEQ ID NO: 39445 - DNA, 15 bp, Homo sapiens
ctcatttctttaact

SEQ ID NO: 39446 - DNA, 15 bp, Homo sapiens
actcatttctttaac

SEQ ID NO: 39447 - DNA, 15 bp, Homo sapiens
tactcatttctttaa

SEQ ID NO: 39448 - DNA, 15 bp, Homo sapiens
ctactcatttcttta

SEQ ID NO: 39449 - DNA, 15 bp, Homo sapiens
tctactcatttcttt

SEQ ID NO: 39450 - DNA, 15 bp, Homo sapiens
ttctactcatttctt

SEQ ID NO: 39451 - DNA, 15 bp, Homo sapiens
gttctactcatttct

SEQ ID NO: 39452 - DNA, 15 bp, Homo sapiens
agttctactcatttc

SEQ ID NO: 39453 - DNA, 15 bp, Homo sapiens
cagttctactcattt

SEQ ID NO: 39454 - DNA, 15 bp, Homo sapiens
tcagttctactcatt

SEQ ID NO: 39455 - DNA, 15 bp, Homo sapiens
ttcagttctactcat

SEQ ID NO: 39456 - DNA, 15 bp, Homo sapiens
cttcagttctactca

SEQ ID NO: 39457 - DNA, 15 bp, Homo sapiens
acttcagttctactc

SEQ ID NO: 39458 - DNA, 15 bp, Homo sapiens
cacttcagttctact

SEQ ID NO: 39459 - DNA, 15 bp, Homo sapiens
acacttcagttctac

SEQ ID NO: 39460 - DNA, 15 bp, Homo sapiens
cacacttcagttcta

SEQ ID NO: 39461 - DNA, 15 bp, Homo sapiens
gcacacttcagttct

SEQ ID NO: 39462 - DNA, 15 bp, Homo sapiens
agcacacttcagttc

SEQ ID NO: 39463 - DNA, 15 bp, Homo sapiens
aagcacacttcagtt

SEQ ID NO: 39464 - DNA, 15 bp, Homo sapiens
caagcacacttcagt

SEQ ID NO: 39465 - DNA, 15 bp, Homo sapiens
tcaagcacacttcag

SEQ ID NO: 39466 - DNA, 15 bp, Homo sapiens
ctcaagcacacttca

SEQ ID NO: 39467 - DNA, 15 bp, Homo sapiens
actcaagcacacttc

SEQ ID NO: 39468 - DNA, 15 bp, Homo sapiens
tactcaagcacactt

SEQ ID NO: 39469 - DNA, 15 bp, Homo sapiens
atactcaagcacact

SEQ ID NO: 39470 - DNA, 15 bp, Homo sapiens
gatactcaagcacac

SEQ ID NO: 39471 - DNA, 15 bp, Homo sapiens
agatactcaagcaca

SEQ ID NO: 39472 - DNA, 15 bp, Homo sapiens
gagatactcaagcac

SEQ ID NO: 39473 - DNA, 15 bp, Homo sapiens
agagatactcaagca

SEQ ID NO: 39474 - DNA, 15 bp, Homo sapiens
cagagatactcaagc

SEQ ID NO: 39475 - DNA, 15 bp, Homo sapiens
ccagagatactcaag

SEQ ID NO: 39476 - DNA, 15 bp, Homo sapiens
gccagagatactcaa

SEQ ID NO: 39477 - DNA, 15 bp, Homo sapiens
tgccagagatactca

SEQ ID NO: 39478 - DNA, 15 bp, Homo sapiens
ctgccagagatactc

SEQ ID NO: 39479 - DNA, 15 bp, Homo sapiens
actgccagagatact

SEQ ID NO: 39480 - DNA, 15 bp, Homo sapiens
gactgccagagatac

SEQ ID NO: 39481 - DNA, 15 bp, Homo sapiens
tgactgccagagata

SEQ ID NO: 39482 - DNA, 15 bp, Homo sapiens
ctgactgccagagat

SEQ ID NO: 39483 - DNA, 15 bp, Homo sapiens
gctgactgccagaga

SEQ ID NO: 39484 - DNA, 15 bp, Homo sapiens
tgctgactgccagag

SEQ ID NO: 39485 - DNA, 15 bp, Homo sapiens
ttgctgactgccaga

SEQ ID NO: 39486 - DNA, 15 bp, Homo sapiens
tttgctgactgccag

SEQ ID NO: 39487 - DNA, 15 bp, Homo sapiens
ttttgctgactgcca

SEQ ID NO: 39488 - DNA, 15 bp, Homo sapiens
tttttgctgactgcc

SEQ ID NO: 39489 - DNA, 15 bp, Homo sapiens
gtttttgctgactgc

SEQ ID NO: 39490 - DNA, 15 bp, Homo sapiens
agtttttgctgactg

SEQ ID NO: 39491 - DNA, 15 bp, Homo sapiens
aagtttttgctgact

SEQ ID NO: 39492 - DNA, 15 bp, Homo sapiens
taagtttttgctgac

SEQ ID NO: 39493 - DNA, 15 bp, Homo sapiens
ttaagtttttgctga

SEQ ID NO: 39494 - DNA, 15 bp, Homo sapiens
attaagtttttgctg

SEQ ID NO: 39495 - DNA, 15 bp, Homo sapiens
cattaagtttttgct

SEQ ID NO: 39496 - DNA, 15 bp, Homo sapiens
ccattaagtttttgc

SEQ ID NO: 39497 - DNA, 15 bp, Homo sapiens
cccattaagtttttg

SEQ ID NO: 39498 - DNA, 15 bp, Homo sapiens
tcccattaagttttt

SEQ ID NO: 39499 - DNA, 15 bp, Homo sapiens
ttcccattaagtttt

SEQ ID NO: 39500 - DNA, 15 bp, Homo sapiens
attcccattaagttt

SEQ ID NO: 39501 - DNA, 15 bp, Homo sapiens
gattcccattaagtt

SEQ ID NO: 39502 - DNA, 15 bp, Homo sapiens
tgattcccattaagt

SEQ ID NO: 39503 - DNA, 15 bp, Homo sapiens
atgattcccattaag

SEQ ID NO: 39504 - DNA, 15 bp, Homo sapiens
catgattcccattaa

SEQ ID NO: 39505 - DNA, 15 bp, Homo sapiens
ccatgattcccatta

SEQ ID NO: 39506 - DNA, 15 bp, Homo sapiens
accatgattcccatt

SEQ ID NO: 39507 - DNA, 15 bp, Homo sapiens
taccatgattcccat

SEQ ID NO: 39508 - DNA, 15 bp, Homo sapiens
ctaccatgattccca

SEQ ID NO: 39509 - DNA, 15 bp, Homo sapiens
cctaccatgattccc

SEQ ID NO: 39510 - DNA, 15 bp, Homo sapiens
gcctaccatgattcc

SEQ ID NO: 39511 - DNA, 15 bp, Homo sapiens
ggcctaccatgattc

SEQ ID NO: 39512 - DNA, 15 bp, Homo sapiens
tggcctaccatgatt

SEQ ID NO: 39513 - DNA, 15 bp, Homo sapiens
ttggcctaccatgat

SEQ ID NO: 39514 - DNA, 15 bp, Homo sapiens
tttggcctaccatga

SEQ ID NO: 39515 - DNA, 15 bp, Homo sapiens
atttggcctaccatg

SEQ ID NO: 39516 - DNA, 15 bp, Homo sapiens
catttggcctaccat

SEQ ID NO: 39517 - DNA, 15 bp, Homo sapiens
acatttggcctacca

SEQ ID NO: 39518 - DNA, 15 bp, Homo sapiens
aacatttggcctacc

SEQ ID NO: 39519 - DNA, 15 bp, Homo sapiens
gaacatttggcctac

SEQ ID NO: 39520 - DNA, 15 bp, Homo sapiens
agaacatttggccta

SEQ ID NO: 39521 - DNA, 15 bp, Homo sapiens
cagaacatttggcct

SEQ ID NO: 39522 - DNA, 15 bp, Homo sapiens
gcagaacatttggcc

SEQ ID NO: 39523 - DNA, 15 bp, Homo sapiens
tgcagaacatttggc

SEQ ID NO: 39524 - DNA, 15 bp, Homo sapiens
ctgcagaacatttgg

SEQ ID NO: 39525 - DNA, 15 bp, Homo sapiens
actgcagaacatttg

SEQ ID NO: 39526 - DNA, 15 bp, Homo sapiens
tactgcagaacattt

SEQ ID NO: 39527 - DNA, 15 bp, Homo sapiens
atactgcagaacatt

SEQ ID NO: 39528 - DNA, 15 bp, Homo sapiens
aatactgcagaacat

SEQ ID NO: 39529 - DNA, 15 bp, Homo sapiens
aaatactgcagaaca

SEQ ID NO: 39530 - DNA, 15 bp, Homo sapiens
gaaatactgcagaac

SEQ ID NO: 39531 - DNA, 15 bp, Homo sapiens
tgaaatactgcagaa

SEQ ID NO: 39532 - DNA, 15 bp, Homo sapiens
ttgaaatactgcaga

SEQ ID NO: 39533 - DNA, 15 bp, Homo sapiens
tttgaaatactgcag

SEQ ID NO: 39534 - DNA, 15 bp, Homo sapiens
ttttgaaatactgca

SEQ ID NO: 39535 - DNA, 15 bp, Homo sapiens
cttttgaaatactgc

SEQ ID NO: 39536 - DNA, 15 bp, Homo sapiens
gcttttgaaatactg

SEQ ID NO: 39537 - DNA, 15 bp, Homo sapiens
agcttttgaaatact

SEQ ID NO: 39538 - DNA, 15 bp, Homo sapiens
cagcttttgaaatac

SEQ ID NO: 39539 - DNA, 15 bp, Homo sapiens
gcagcttttgaaata

SEQ ID NO: 39540 - DNA, 15 bp, Homo sapiens
tgcagcttttgaaat

SEQ ID NO: 39541 - DNA, 15 bp, Homo sapiens
atgcagcttttgaaa

SEQ ID NO: 39542 - DNA, 15 bp, Homo sapiens
catgcagcttttgaa

SEQ ID NO: 39543 - DNA, 15 bp, Homo sapiens
ccatgcagcttttga

SEQ ID NO: 39544 - DNA, 15 bp, Homo sapiens
cccatgcagcttttg

SEQ ID NO: 39545 - DNA, 15 bp, Homo sapiens
acccatgcagctttt

SEQ ID NO: 39546 - DNA, 15 bp, Homo sapiens
aacccatgcagcttt

SEQ ID NO: 39547 - DNA, 15 bp, Homo sapiens
aaacccatgcagctt

SEQ ID NO: 39548 - DNA, 15 bp, Homo sapiens
aaaacccatgcagct

SEQ ID NO: 39549 - DNA, 15 bp, Homo sapiens
caaaacccatgcagc

SEQ ID NO: 39550 - DNA, 15 bp, Homo sapiens
tcaaaacccatgcag

SEQ ID NO: 39551 - DNA, 15 bp, Homo sapiens
ctcaaaacccatgca

SEQ ID NO: 39552 - DNA, 15 bp, Homo sapiens
tctcaaaacccatgc

SEQ ID NO: 39553 - DNA, 15 bp, Homo sapiens
ctctcaaaacccatg

SEQ ID NO: 39554 - DNA, 15 bp, Homo sapiens
cctctcaaaacccat

SEQ ID NO: 39555 - DNA, 15 bp, Homo sapiens
gcctctcaaaaccca

SEQ ID NO: 39556 - DNA, 15 bp, Homo sapiens
agcctctcaaaaccc

SEQ ID NO: 39557 - DNA, 15 bp, Homo sapiens
aagcctctcaaaacc

SEQ ID NO: 39558 - DNA, 15 bp, Homo sapiens
aaagcctctcaaaac

SEQ ID NO: 39559 - DNA, 15 bp, Homo sapiens
aaaagcctctcaaaa

SEQ ID NO: 39560 - DNA, 15 bp, Homo sapiens
caaaagcctctcaaa

SEQ ID NO: 39561 - DNA, 15 bp, Homo sapiens
ccaaaagcctctcaa

SEQ ID NO: 39562 - DNA, 15 bp, Homo sapiens
accaaaagcctctca

SEQ ID NO: 39563 - DNA, 15 bp, Homo sapiens
gaccaaaagcctctc

SEQ ID NO: 39564 - DNA, 15 bp, Homo sapiens
ggaccaaaagcctct

SEQ ID NO: 39565 - DNA, 15 bp, Homo sapiens
tggaccaaaagcctc

SEQ ID NO: 39566 - DNA, 15 bp, Homo sapiens
atggaccaaaagcct

SEQ ID NO: 39567 - DNA, 15 bp, Homo sapiens
gatggaccaaaagcc

SEQ ID NO: 39568 - DNA, 15 bp, Homo sapiens
tgatggaccaaaagc

SEQ ID NO: 39569 - DNA, 15 bp, Homo sapiens
gtgatggaccaaaag

SEQ ID NO: 39570 - DNA, 15 bp, Homo sapiens
agtgatggaccaaaa

SEQ ID NO: 39571 - DNA, 15 bp, Homo sapiens
gagtgatggaccaaa

SEQ ID NO: 39572 - DNA, 15 bp, Homo sapiens
tgagtgatggaccaa

SEQ ID NO: 39573 - DNA, 15 bp, Homo sapiens
gtgagtgatggacca

SEQ ID NO: 39574 - DNA, 15 bp, Homo sapiens
ggtgagtgatggacc

SEQ ID NO: 39575 - DNA, 15 bp, Homo sapiens
aggtgagtgatggac

SEQ ID NO: 39576 - DNA, 15 bp, Homo sapiens
aaggtgagtgatgga

SEQ ID NO: 39577 - DNA, 15 bp, Homo sapiens
taaggtgagtgatgg

SEQ ID NO: 39578 - DNA, 15 bp, Homo sapiens
ctaaggtgagtgatg

SEQ ID NO: 39579 - DNA, 15 bp, Homo sapiens
cctaaggtgagtgat

SEQ ID NO: 39580 - DNA, 15 bp, Homo sapiens
acctaaggtgagtga

SEQ ID NO: 39581 - DNA, 15 bp, Homo sapiens
aacctaaggtgagtg

SEQ ID NO: 39582 - DNA, 15 bp, Homo sapiens
caacctaaggtgagt

SEQ ID NO: 39583 - DNA, 15 bp, Homo sapiens
acaacctaaggtgag

SEQ ID NO: 39584 - DNA, 15 bp, Homo sapiens
aacaacctaaggtga

SEQ ID NO: 39585 - DNA, 15 bp, Homo sapiens
gaacaacctaaggtg

SEQ ID NO: 39586 - DNA, 15 bp, Homo sapiens
agaacaacctaaggt

SEQ ID NO: 39587 - DNA, 15 bp, Homo sapiens
tagaacaacctaagg

SEQ ID NO: 39588 - DNA, 15 bp, Homo sapiens
gtagaacaacctaag

SEQ ID NO: 39589 - DNA, 15 bp, Homo sapiens
tgtagaacaacctaa

SEQ ID NO: 39590 - DNA, 15 bp, Homo sapiens
ttgtagaacaaccta

SEQ ID NO: 39591 - DNA, 15 bp, Homo sapiens
cttgtagaacaacct

SEQ ID NO: 39592 - DNA, 15 bp, Homo sapiens
gcttgtagaacaacc

SEQ ID NO: 39593 - DNA, 15 bp, Homo sapiens
tgcttgtagaacaac

SEQ ID NO: 39594 - DNA, 15 bp, Homo sapiens
gtgcttgtagaacaa

SEQ ID NO: 39595 - DNA, 15 bp, Homo sapiens
tgtgcttgtagaaca

SEQ ID NO: 39596 - DNA, 15 bp, Homo sapiens
atgtgcttgtagaac

SEQ ID NO: 39597 - DNA, 15 bp, Homo sapiens
gatgtgcttgtagaa

SEQ ID NO: 39598 - DNA, 15 bp, Homo sapiens
tgatgtgcttgtaga

SEQ ID NO: 39599 - DNA, 15 bp, Homo sapiens
ctgatgtgcttgtag

SEQ ID NO: 39600 - DNA, 15 bp, Homo sapiens
gctgatgtgcttgta

SEQ ID NO: 39601 - DNA, 15 bp, Homo sapiens
ggctgatgtgcttgt

SEQ ID NO: 39602 - DNA, 15 bp, Homo sapiens
aggctgatgtgcttg

SEQ ID NO: 39603 - DNA, 15 bp, Homo sapiens
caggctgatgtgctt

SEQ ID NO: 39604 - DNA, 15 bp, Homo sapiens
gcaggctgatgtgct

SEQ ID NO: 39605 - DNA, 15 bp, Homo sapiens
ggcaggctgatgtgc

SEQ ID NO: 39606 - DNA, 15 bp, Homo sapiens
gggcaggctgatgtg

SEQ ID NO: 39607 - DNA, 15 bp, Homo sapiens
ggggcaggctgatgt

SEQ ID NO: 39608 - DNA, 15 bp, Homo sapiens
tggggcaggctgatg

SEQ ID NO: 39609 - DNA, 15 bp, Homo sapiens
ttggggcaggctgat

SEQ ID NO: 39610 - DNA, 15 bp, Homo sapiens
attggggcaggctga

SEQ ID NO: 39611 - DNA, 15 bp, Homo sapiens
aattggggcaggctg

SEQ ID NO: 39612 - DNA, 15 bp, Homo sapiens
aaattggggcaggct

SEQ ID NO: 39613 - DNA, 15 bp, Homo sapiens
taaattggggcaggc

SEQ ID NO: 39614 - DNA, 15 bp, Homo sapiens
ttaaattggggcagg

SEQ ID NO: 39615 - DNA, 15 bp, Homo sapiens
tttaaattggggcag

SEQ ID NO: 39616 - DNA, 15 bp, Homo sapiens
gtttaaattggggca

SEQ ID NO: 39617 - DNA, 15 bp, Homo sapiens
tgtttaaattggggc

SEQ ID NO: 39618 - DNA, 15 bp, Homo sapiens
ctgtttaaattgggg

SEQ ID NO: 39619 - DNA, 15 bp, Homo sapiens
cctgtttaaattggg

SEQ ID NO: 39620 - DNA, 15 bp, Homo sapiens
ccctgtttaaattgg

SEQ ID NO: 39621 - DNA, 15 bp, Homo sapiens
gccctgtttaaattg

SEQ ID NO: 39622 - DNA, 15 bp, Homo sapiens
tgccctgtttaaatt

SEQ ID NO: 39623 - DNA, 15 bp, Homo sapiens
ctgccctgtttaaat

SEQ ID NO: 39624 - DNA, 15 bp, Homo sapiens
actgccctgtttaaa

SEQ ID NO: 39625 - DNA, 15 bp, Homo sapiens
aactgccctgtttaa

SEQ ID NO: 39626 - DNA, 15 bp, Homo sapiens
taactgccctgttta

SEQ ID NO: 39627 - DNA, 15 bp, Homo sapiens
ctaactgccctgttt

SEQ ID NO: 39628 - DNA, 15 bp, Homo sapiens
actaactgccctgtt

SEQ ID NO: 39629 - DNA, 15 bp, Homo sapiens
tactaactgccctgt

SEQ ID NO: 39630 - DNA, 15 bp, Homo sapiens
ttactaactgccctg

SEQ ID NO: 39631 - DNA, 15 bp, Homo sapiens
attactaactgccct

SEQ ID NO: 39632 - DNA, 15 bp, Homo sapiens
cattactaactgccc

SEQ ID NO: 39633 - DNA, 15 bp, Homo sapiens
ccattactaactgcc

SEQ ID NO: 39634 - DNA, 15 bp, Homo sapiens
accattactaactgc

SEQ ID NO: 39635 - DNA, 15 bp, Homo sapiens
caccattactaactg

SEQ ID NO: 39636 - DNA, 15 bp, Homo sapiens
acaccattactaact

SEQ ID NO: 39637 - DNA, 15 bp, Homo sapiens
tacaccattactaac

SEQ ID NO: 39638 - DNA, 15 bp, Homo sapiens
ttacaccattactaa

SEQ ID NO: 39639 - DNA, 15 bp, Homo sapiens
attacaccattacta

SEQ ID NO: 39640 - DNA, 15 bp, Homo sapiens
tattacaccattact

SEQ ID NO: 39641 - DNA, 15 bp, Homo sapiens
ttattacaccattac

SEQ ID NO: 39642 - DNA, 15 bp, Homo sapiens
tttattacaccatta

SEQ ID NO: 39643 - DNA, 15 bp, Homo sapiens
ctttattacaccatt

SEQ ID NO: 39644 - DNA, 15 bp, Homo sapiens
tctttattacaccat

SEQ ID NO: 39645 - DNA, 15 bp, Homo sapiens
ctctttattacacca

SEQ ID NO: 39646 - DNA, 15 bp, Homo sapiens
actctttattacacc

SEQ ID NO: 39647 - DNA, 15 bp, Homo sapiens
gactctttattacac

SEQ ID NO: 39648 - DNA, 15 bp, Homo sapiens
agactctttattaca

SEQ ID NO: 39649 - DNA, 15 bp, Homo sapiens
cagactctttattac

SEQ ID NO: 39650 - DNA, 15 bp, Homo sapiens
gcagactctttatta

SEQ ID NO: 39651 - DNA, 15 bp, Homo sapiens
tgcagactctttatt

SEQ ID NO: 39652 - DNA, 15 bp, Homo sapiens
atgcagactctttat

SEQ ID NO: 39653 - DNA, 15 bp, Homo sapiens
aatgcagactcttta

SEQ ID NO: 39654 - DNA, 15 bp, Homo sapiens
caatgcagactcttt

SEQ ID NO: 39655 - DNA, 15 bp, Homo sapiens
acaatgcagactctt

SEQ ID NO: 39656 - DNA, 15 bp, Homo sapiens
aacaatgcagactct

SEQ ID NO: 39657 - DNA, 15 bp, Homo sapiens
gaacaatgcagactc

SEQ ID NO: 39658 - DNA, 15 bp, Homo sapiens
tgaacaatgcagact

SEQ ID NO: 39659 - DNA, 15 bp, Homo sapiens
atgaacaatgcagac

SEQ ID NO: 39660 - DNA, 15 bp, Homo sapiens
aatgaacaatgcaga

SEQ ID NO: 39661 - DNA, 15 bp, Homo sapiens
gaatgaacaatgcag

SEQ ID NO: 39662 - DNA, 15 bp, Homo sapiens
ggaatgaacaatgca

SEQ ID NO: 39663 - DNA, 15 bp, Homo sapiens
aggaatgaacaatgc

SEQ ID NO: 39664 - DNA, 15 bp, Homo sapiens
aaggaatgaacaatg

SEQ ID NO: 39665 - DNA, 15 bp, Homo sapiens
gaaggaatgaacaat

SEQ ID NO: 39666 - DNA, 15 bp, Homo sapiens
tgaaggaatgaacaa

SEQ ID NO: 39667 - DNA, 15 bp, Homo sapiens
ttgaaggaatgaaca

SEQ ID NO: 39668 - DNA, 15 bp, Homo sapiens
gttgaaggaatgaac

SEQ ID NO: 39669 - DNA, 15 bp, Homo sapiens
tgttgaaggaatgaa

SEQ ID NO: 39670 - DNA, 15 bp, Homo sapiens
ttgttgaaggaatga

SEQ ID NO: 39671 - DNA, 15 bp, Homo sapiens
tttgttgaaggaatg

SEQ ID NO: 39672 - DNA, 15 bp, Homo sapiens
atttgttgaaggaat

SEQ ID NO: 39673 - DNA, 15 bp, Homo sapiens
tatttgttgaaggaa

SEQ ID NO: 39674 - DNA, 15 bp, Homo sapiens
gtatttgttgaagga

SEQ ID NO: 39675 - DNA, 15 bp, Homo sapiens
agtatttgttgaagg

SEQ ID NO: 39676 - DNA, 15 bp, Homo sapiens
cagtatttgttgaag

SEQ ID NO: 39677 - DNA, 15 bp, Homo sapiens
ccagtatttgttgaa

SEQ ID NO: 39678 - DNA, 15 bp, Homo sapiens
gccagtatttgttga

SEQ ID NO: 39679 - DNA, 15 bp, Homo sapiens
agccagtatttgttg

SEQ ID NO: 39680 - DNA, 15 bp, Homo sapiens
tagccagtatttgtt

SEQ ID NO: 39681 - DNA, 15 bp, Homo sapiens
atagccagtatttgt

SEQ ID NO: 39682 - DNA, 15 bp, Homo sapiens
tatagccagtatttg

SEQ ID NO: 39683 - DNA, 15 bp, Homo sapiens
ttatagccagtattt

SEQ ID NO: 39684 - DNA, 15 bp, Homo sapiens
attatagccagtatt

SEQ ID NO: 39685 - DNA, 15 bp, Homo sapiens
cattatagccagtat

SEQ ID NO: 39686 - DNA, 15 bp, Homo sapiens
acattatagccagta

SEQ ID NO: 39687 - DNA, 15 bp, Homo sapiens
aacattatagccagt

SEQ ID NO: 39688 - DNA, 15 bp, Homo sapiens
aaacattatagccag

SEQ ID NO: 39689 - DNA, 15 bp, Homo sapiens
gaaacattatagcca

SEQ ID NO: 39690 - DNA, 15 bp, Homo sapiens
tgaaacattatagcc

SEQ ID NO: 39691 - DNA, 15 bp, Homo sapiens
ctgaaacattatagc

SEQ ID NO: 39692 - DNA, 15 bp, Homo sapiens
gctgaaacattatag

SEQ ID NO: 39693 - DNA, 15 bp, Homo sapiens
tgctgaaacattata

SEQ ID NO: 39694 - DNA, 15 bp, Homo sapiens
gtgctgaaacattat

SEQ ID NO: 39695 - DNA, 15 bp, Homo sapiens
agtgctgaaacatta

SEQ ID NO: 39696 - DNA, 15 bp, Homo sapiens
cagtgctgaaacatt

SEQ ID NO: 39697 - DNA, 15 bp, Homo sapiens
acagtgctgaaacat

SEQ ID NO: 39698 - DNA, 15 bp, Homo sapiens
cacagtgctgaaaca

SEQ ID NO: 39699 - DNA, 15 bp, Homo sapiens
ccacagtgctgaaac

SEQ ID NO: 39700 - DNA, 15 bp, Homo sapiens
tccacagtgctgaaa

SEQ ID NO: 39701 - DNA, 15 bp, Homo sapiens
atccacagtgctgaa

SEQ ID NO: 39702 - DNA, 15 bp, Homo sapiens
catccacagtgctga

SEQ ID NO: 39703 - DNA, 15 bp, Homo sapiens
gcatccacagtgctg

SEQ ID NO: 39704 - DNA, 15 bp, Homo sapiens
tgcatccacagtgct

SEQ ID NO: 39705 - DNA, 15 bp, Homo sapiens
ttgcatccacagtgc

SEQ ID NO: 39706 - DNA, 15 bp, Homo sapiens
tttgcatccacagtg

SEQ ID NO: 39707 - DNA, 15 bp, Homo sapiens
ctttgcatccacagt

SEQ ID NO: 39708 - DNA, 15 bp, Homo sapiens
actttgcatccacag

SEQ ID NO: 39709 - DNA, 15 bp, Homo sapiens
cactttgcatccaca

SEQ ID NO: 39710 - DNA, 15 bp, Homo sapiens
tcactttgcatccac

SEQ ID NO: 39711 - DNA, 15 bp, Homo sapiens
ctcactttgcatcca

SEQ ID NO: 39712 - DNA, 15 bp, Homo sapiens
gctcactttgcatcc

SEQ ID NO: 39713 - DNA, 15 bp, Homo sapiens
tgctcactttgcatc

SEQ ID NO: 39714 - DNA, 15 bp, Homo sapiens
ctgctcactttgcat

SEQ ID NO: 39715 - DNA, 15 bp, Homo sapiens
cctgctcactttgca

SEQ ID NO: 39716 - DNA, 15 bp, Homo sapiens
tcctgctcactttgc

SEQ ID NO: 39717 - DNA, 15 bp, Homo sapiens
atcctgctcactttg

SEQ ID NO: 39718 - DNA, 15 bp, Homo sapiens
tatcctgctcacttt

SEQ ID NO: 39719 - DNA, 15 bp, Homo sapiens
ttatcctgctcactt

SEQ ID NO: 39720 - DNA, 15 bp, Homo sapiens
tttatcctgctcact

SEQ ID NO: 39721 - DNA, 15 bp, Homo sapiens
gtttatcctgctcac

SEQ ID NO: 39722 - DNA, 15 bp, Homo sapiens
tgtttatcctgctca

SEQ ID NO: 39723 - DNA, 15 bp, Homo sapiens
ctgtttatcctgctc

SEQ ID NO: 39724 - DNA, 15 bp, Homo sapiens
cctgtttatcctgct

SEQ ID NO: 39725 - DNA, 15 bp, Homo sapiens
gcctgtttatcctgc

SEQ ID NO: 39726 - DNA, 15 bp, Homo sapiens
agcctgtttatcctg

SEQ ID NO: 39727 - DNA, 15 bp, Homo sapiens
gagcctgtttatcct

SEQ ID NO: 39728 - DNA, 15 bp, Homo sapiens
agagcctgtttatcc

SEQ ID NO: 39729 - DNA, 15 bp, Homo sapiens
aagagcctgtttatc

SEQ ID NO: 39730 - DNA, 15 bp, Homo sapiens
gaagagcctgtttat

SEQ ID NO: 39731 - DNA, 15 bp, Homo sapiens
agaagagcctgttta

SEQ ID NO: 39732 - DNA, 15 bp, Homo sapiens
aagaagagcctgttt

SEQ ID NO: 39733 - DNA, 15 bp, Homo sapiens
aaagaagagcctgtt

SEQ ID NO: 39734 - DNA, 15 bp, Homo sapiens
gaaagaagagcctgt

SEQ ID NO: 39735 - DNA, 15 bp, Homo sapiens
tgaaagaagagcctg

SEQ ID NO: 39736 - DNA, 15 bp, Homo sapiens
ttgaaagaagagcct

SEQ ID NO: 39737 - DNA, 15 bp, Homo sapiens
tttgaaagaagagcc

SEQ ID NO: 39738 - DNA, 15 bp, Homo sapiens
ctttgaaagaagagc

SEQ ID NO: 39739 - DNA, 15 bp, Homo sapiens
gctttgaaagaagag

SEQ ID NO: 39740 - DNA, 15 bp, Homo sapiens
agctttgaaagaaga

SEQ ID NO: 39741 - DNA, 15 bp, Homo sapiens
aagctttgaaagaag

SEQ ID NO: 39742 - DNA, 15 bp, Homo sapiens
caagctttgaaagaa

SEQ ID NO: 39743 - DNA, 15 bp, Homo sapiens
acaagctttgaaaga

SEQ ID NO: 39744 - DNA, 15 bp, Homo sapiens
cacaagctttgaaag

SEQ ID NO: 39745 - DNA, 15 bp, Homo sapiens
ccacaagctttgaaa

SEQ ID NO: 39746 - DNA, 15 bp, Homo sapiens
accacaagctttgaa

SEQ ID NO: 39747 - DNA, 15 bp, Homo sapiens
gaccacaagctttga

SEQ ID NO: 39748 - DNA, 15 bp, Homo sapiens
ggaccacaagctttg

SEQ ID NO: 39749 - DNA, 15 bp, Homo sapiens
tggaccacaagcttt

SEQ ID NO: 39750 - DNA, 15 bp, Homo sapiens
gtggaccacaagctt

SEQ ID NO: 39751 - DNA, 15 bp, Homo sapiens
agtggaccacaagct

SEQ ID NO: 39752 - DNA, 15 bp, Homo sapiens
cagtggaccacaagc

SEQ ID NO: 39753 - DNA, 15 bp, Homo sapiens
ccagtggaccacaag

SEQ ID NO: 39754 - DNA, 15 bp, Homo sapiens
tccagtggaccacaa

SEQ ID NO: 39755 - DNA, 15 bp, Homo sapiens
gtccagtggaccaca

SEQ ID NO: 39756 - DNA, 15 bp, Homo sapiens
ggtccagtggaccac

SEQ ID NO: 39757 - DNA, 15 bp, Homo sapiens
tggtccagtggacca

SEQ ID NO: 39758 - DNA, 15 bp, Homo sapiens
gtggtccagtggacc

SEQ ID NO: 39759 - DNA, 15 bp, Homo sapiens
cgtggtccagtggac

SEQ ID NO: 39760 - DNA, 15 bp, Homo sapiens
acgtggtccagtgga

SEQ ID NO: 39761 - DNA, 15 bp, Homo sapiens
tacgtggtccagtgg

SEQ ID NO: 39762 - DNA, 15 bp, Homo sapiens
atacgtggtccagtg

SEQ ID NO: 39763 - DNA, 15 bp, Homo sapiens
catacgtggtccagt

SEQ ID NO: 39764 - DNA, 15 bp, Homo sapiens
tcatacgtggtccag

SEQ ID NO: 39765 - DNA, 15 bp, Homo sapiens
ttcatacgtggtcca

SEQ ID NO: 39766 - DNA, 15 bp, Homo sapiens
cttcatacgtggtcc

SEQ ID NO: 39767 - DNA, 15 bp, Homo sapiens
acttcatacgtggtc

SEQ ID NO: 39768 - DNA, 15 bp, Homo sapiens
tacttcatacgtggt

SEQ ID NO: 39769 - DNA, 15 bp, Homo sapiens
ctacttcatacgtgg

SEQ ID NO: 39770 - DNA, 15 bp, Homo sapiens
tctacttcatacgtg

SEQ ID NO: 39771 - DNA, 15 bp, Homo sapiens
ttctacttcatacgt

SEQ ID NO: 39772 - DNA, 15 bp, Homo sapiens
attctacttcatacg

SEQ ID NO: 39773 - DNA, 15 bp, Homo sapiens
tattctacttcatac

SEQ ID NO: 39774 - DNA, 15 bp, Homo sapiens
ctattctacttcata

SEQ ID NO: 39775 - DNA, 15 bp, Homo sapiens
actattctacttcat

SEQ ID NO: 39776 - DNA, 15 bp, Homo sapiens
aactattctacttca

SEQ ID NO: 39777 - DNA, 15 bp, Homo sapiens
aaactattctacttc

SEQ ID NO: 39778 - DNA, 15 bp, Homo sapiens
taaactattctactt

SEQ ID NO: 39779 - DNA, 15 bp, Homo sapiens
ctaaactattctact

SEQ ID NO: 39780 - DNA, 15 bp, Homo sapiens
cctaaactattctac

SEQ ID NO: 39781 - DNA, 15 bp, Homo sapiens
acctaaactattcta

SEQ ID NO: 39782 - DNA, 15 bp, Homo sapiens
gacctaaactattct

SEQ ID NO: 39783 - DNA, 15 bp, Homo sapiens
ggacctaaactattc

SEQ ID NO: 39784 - DNA, 15 bp, Homo sapiens
tggacctaaactatt

SEQ ID NO: 39785 - DNA, 15 bp, Homo sapiens
ctggacctaaactat

SEQ ID NO: 39786 - DNA, 15 bp, Homo sapiens
tctggacctaaacta

SEQ ID NO: 39787 - DNA, 15 bp, Homo sapiens
ttctggacctaaact

SEQ ID NO: 39788 - DNA, 15 bp, Homo sapiens
tttctggacctaaac

SEQ ID NO: 39789 - DNA, 15 bp, Homo sapiens
ctttctggacctaaa

SEQ ID NO: 39790 - DNA, 15 bp, Homo sapiens
cctttctggacctaa

SEQ ID NO: 39791 - DNA, 15 bp, Homo sapiens
gcctttctggaccta

SEQ ID NO: 39792 - DNA, 15 bp, Homo sapiens
tgcctttctggacct

SEQ ID NO: 39793 - DNA, 15 bp, Homo sapiens
ttgcctttctggacc

SEQ ID NO: 39794 - DNA, 15 bp, Homo sapiens
attgcctttctggac

SEQ ID NO: 39795 - DNA, 15 bp, Homo sapiens
aattgcctttctgga

SEQ ID NO: 39796 - DNA, 15 bp, Homo sapiens
taattgcctttctgg

SEQ ID NO: 39797 - DNA, 15 bp, Homo sapiens
ttaattgcctttctg

SEQ ID NO: 39798 - DNA, 15 bp, Homo sapiens
cttaattgcctttct

SEQ ID NO: 39799 - DNA, 15 bp, Homo sapiens
acttaattgcctttc

SEQ ID NO: 39800 - DNA, 15 bp, Homo sapiens
tacttaattgccttt

SEQ ID NO: 39801 - DNA, 15 bp, Homo sapiens
ttacttaattgcctt

SEQ ID NO: 39802 - DNA, 15 bp, Homo sapiens
tttacttaattgcct

SEQ ID NO: 39803 - DNA, 15 bp, Homo sapiens
ttttacttaattgcc

SEQ ID NO: 39804 - DNA, 15 bp, Homo sapiens
attttacttaattgc

SEQ ID NO: 39805 - DNA, 15 bp, Homo sapiens
tattttacttaattg

SEQ ID NO: 39806 - DNA, 15 bp, Homo sapiens
atattttacttaatt

SEQ ID NO: 39807 - DNA, 15 bp, Homo sapiens
catattttacttaat

SEQ ID NO: 39808 - DNA, 15 bp, Homo sapiens
tcatattttacttaa

SEQ ID NO: 39809 - DNA, 15 bp, Homo sapiens
gtcatattttactta

SEQ ID NO: 39810 - DNA, 15 bp, Homo sapiens
ggtcatattttactt

SEQ ID NO: 39811 - DNA, 15 bp, Homo sapiens
tggtcatattttact

SEQ ID NO: 39812 - DNA, 15 bp, Homo sapiens
ttggtcatattttac

SEQ ID NO: 39813 - DNA, 15 bp, Homo sapiens
cttggtcatatttta

SEQ ID NO: 39814 - DNA, 15 bp, Homo sapiens
tcttggtcatatttt

SEQ ID NO: 39815 - DNA, 15 bp, Homo sapiens
ttcttggtcatattt

SEQ ID NO: 39816 - DNA, 15 bp, Homo sapiens
cttcttggtcatatt

SEQ ID NO: 39817 - DNA, 15 bp, Homo sapiens
tcttcttggtcatat

SEQ ID NO: 39818 - DNA, 15 bp, Homo sapiens
ctcttcttggtcata

SEQ ID NO: 39819 - DNA, 15 bp, Homo sapiens
cctcttcttggtcat

SEQ ID NO: 39820 - DNA, 15 bp, Homo sapiens
gcctcttcttggtca

SEQ ID NO: 39821 - DNA, 15 bp, Homo sapiens
agcctcttcttggtc

SEQ ID NO: 39822 - DNA, 15 bp, Homo sapiens
gagcctcttcttggt

SEQ ID NO: 39823 - DNA, 15 bp, Homo sapiens
agagcctcttcttgg

SEQ ID NO: 39824 - DNA, 15 bp, Homo sapiens
gagagcctcttcttg

SEQ ID NO: 39825 - DNA, 15 bp, Homo sapiens
agagagcctcttctt

SEQ ID NO: 39826 - DNA, 15 bp, Homo sapiens
tagagagcctcttct

SEQ ID NO: 39827 - DNA, 15 bp, Homo sapiens
ctagagagcctcttc

SEQ ID NO: 39828 - DNA, 15 bp, Homo sapiens
actagagagcctctt

SEQ ID NO: 39829 - DNA, 15 bp, Homo sapiens
cactagagagcctct

SEQ ID NO: 39830 - DNA, 15 bp, Homo sapiens
ccactagagagcctc

SEQ ID NO: 39831 - DNA, 15 bp, Homo sapiens
cccactagagagcct

SEQ ID NO: 39832 - DNA, 15 bp, Homo sapiens
acccactagagagcc

SEQ ID NO: 39833 - DNA, 15 bp, Homo sapiens
aacccactagagagc

SEQ ID NO: 39834 - DNA, 15 bp, Homo sapiens
aaacccactagagag

SEQ ID NO: 39835 - DNA, 15 bp, Homo sapiens
caaacccactagaga

SEQ ID NO: 39836 - DNA, 15 bp, Homo sapiens
ccaaacccactagag

SEQ ID NO: 39837 - DNA, 15 bp, Homo sapiens
accaaacccactaga

SEQ ID NO: 39838 - DNA, 15 bp, Homo sapiens
taccaaacccactag

SEQ ID NO: 39839 - DNA, 15 bp, Homo sapiens
ataccaaacccacta

SEQ ID NO: 39840 - DNA, 15 bp, Homo sapiens
tataccaaacccact

SEQ ID NO: 39841 - DNA, 15 bp, Homo sapiens
ttataccaaacccac

SEQ ID NO: 39842 - DNA, 15 bp, Homo sapiens
tttataccaaaccca

SEQ ID NO: 39843 - DNA, 15 bp, Homo sapiens
ctttataccaaaccc

SEQ ID NO: 39844 - DNA, 15 bp, Homo sapiens
tctttataccaaacc

SEQ ID NO: 39845 - DNA, 15 bp, Homo sapiens
ttctttataccaaac

SEQ ID NO: 39846 - DNA, 15 bp, Homo sapiens
tttctttataccaaa

SEQ ID NO: 39847 - DNA, 15 bp, Homo sapiens
ttttctttataccaa

SEQ ID NO: 39848 - DNA, 15 bp, Homo sapiens
cttttctttatacca

SEQ ID NO: 39849 - DNA, 15 bp, Homo sapiens
tcttttctttatacc

SEQ ID NO: 39850 - DNA, 15 bp, Homo sapiens
atcttttctttatac

SEQ ID NO: 39851 - DNA, 15 bp, Homo sapiens
tatcttttctttata

SEQ ID NO: 39852 - DNA, 15 bp, Homo sapiens
ttatcttttctttat

SEQ ID NO: 39853 - DNA, 15 bp, Homo sapiens
cttatcttttcttta

SEQ ID NO: 39854 - DNA, 15 bp, Homo sapiens
tcttatcttttcttt

SEQ ID NO: 39855 - DNA, 15 bp, Homo sapiens
ttcttatcttttctt

SEQ ID NO: 39856 - DNA, 15 bp, Homo sapiens
attcttatcttttct

SEQ ID NO: 39857 - DNA, 15 bp, Homo sapiens
cattcttatcttttc

SEQ ID NO: 39858 - DNA, 15 bp, Homo sapiens
tcattcttatctttt

SEQ ID NO: 39859 - DNA, 15 bp, Homo sapiens
atcattcttatcttt

SEQ ID NO: 39860 - DNA, 15 bp, Homo sapiens
aatcattcttatctt

SEQ ID NO: 39861 - DNA, 15 bp, Homo sapiens
aaatcattcttatct

SEQ ID NO: 39862 - DNA, 15 bp, Homo sapiens
taaatcattcttatc

SEQ ID NO: 39863 - DNA, 15 bp, Homo sapiens
ctaaatcattcttat

SEQ ID NO: 39864 - DNA, 15 bp, Homo sapiens
tctaaatcattctta

SEQ ID NO: 39865 - DNA, 15 bp, Homo sapiens
ttctaaatcattctt

SEQ ID NO: 39866 - DNA, 15 bp, Homo sapiens
attctaaatcattct

SEQ ID NO: 39867 - DNA, 15 bp, Homo sapiens
aattctaaatcattc

SEQ ID NO: 39868 - DNA, 15 bp, Homo sapiens
caattctaaatcatt

SEQ ID NO: 39869 - DNA, 15 bp, Homo sapiens
ccaattctaaatcat

SEQ ID NO: 39870 - DNA, 15 bp, Homo sapiens
gccaattctaaatca

SEQ ID NO: 39871 - DNA, 15 bp, Homo sapiens
ggccaattctaaatc

SEQ ID NO: 39872 - DNA, 15 bp, Homo sapiens
aggccaattctaaat

SEQ ID NO: 39873 - DNA, 15 bp, Homo sapiens
taggccaattctaaa

SEQ ID NO: 39874 - DNA, 15 bp, Homo sapiens
ataggccaattctaa

SEQ ID NO: 39875 - DNA, 15 bp, Homo sapiens
gataggccaattcta

SEQ ID NO: 39876 - DNA, 15 bp, Homo sapiens
tgataggccaattct

SEQ ID NO: 39877 - DNA, 15 bp, Homo sapiens
ttgataggccaattc

SEQ ID NO: 39878 - DNA, 15 bp, Homo sapiens
attgataggccaatt

SEQ ID NO: 39879 - DNA, 15 bp, Homo sapiens
cattgataggccaat

SEQ ID NO: 39880 - DNA, 15 bp, Homo sapiens
tcattgataggccaa

SEQ ID NO: 39881 - DNA, 15 bp, Homo sapiens
ctcattgataggcca

SEQ ID NO: 39882 - DNA, 15 bp, Homo sapiens
tctcattgataggcc

SEQ ID NO: 39883 - DNA, 15 bp, Homo sapiens
atctcattgataggc

SEQ ID NO: 39884 - DNA, 15 bp, Homo sapiens
tatctcattgatagg

SEQ ID NO: 39885 - DNA, 15 bp, Homo sapiens
ttatctcattgatag

SEQ ID NO: 39886 - DNA, 15 bp, Homo sapiens
cttatctcattgata

SEQ ID NO: 39887 - DNA, 15 bp, Homo sapiens
tcttatctcattgat

SEQ ID NO: 39888 - DNA, 15 bp, Homo sapiens
ctcttatctcattga

SEQ ID NO: 39889 - DNA, 15 bp, Homo sapiens
cctcttatctcattg

SEQ ID NO: 39890 - DNA, 15 bp, Homo sapiens
gcctcttatctcatt

SEQ ID NO: 39891 - DNA, 15 bp, Homo sapiens
ggcctcttatctcat

SEQ ID NO: 39892 - DNA, 15 bp, Homo sapiens
aggcctcttatctca

SEQ ID NO: 39893 - DNA, 15 bp, Homo sapiens
caggcctcttatctc

SEQ ID NO: 39894 - DNA, 15 bp, Homo sapiens
ccaggcctcttatct

SEQ ID NO: 39895 - DNA, 15 bp, Homo sapiens
gccaggcctcttatc

SEQ ID NO: 39896 - DNA, 15 bp, Homo sapiens
agccaggcctcttat

SEQ ID NO: 39897 - DNA, 15 bp, Homo sapiens
aagccaggcctctta

SEQ ID NO: 39898 - DNA, 15 bp, Homo sapiens
aaagccaggcctctt

SEQ ID NO: 39899 - DNA, 15 bp, Homo sapiens
gaaagccaggcctct

SEQ ID NO: 39900 - DNA, 15 bp, Homo sapiens
agaaagccaggcctc

SEQ ID NO: 39901 - DNA, 15 bp, Homo sapiens
cagaaagccaggcct

SEQ ID NO: 39902 - DNA, 15 bp, Homo sapiens
ccagaaagccaggcc

SEQ ID NO: 39903 - DNA, 15 bp, Homo sapiens
gccagaaagccaggc

SEQ ID NO: 39904 - DNA, 15 bp, Homo sapiens
tgccagaaagccagg

SEQ ID NO: 39905 - DNA, 15 bp, Homo sapiens
gtgccagaaagccag

SEQ ID NO: 39906 - DNA, 15 bp, Homo sapiens
agtgccagaaagcca

SEQ ID NO: 39907 - DNA, 15 bp, Homo sapiens
gagtgccagaaagcc

SEQ ID NO: 39908 - DNA, 15 bp, Homo sapiens
agagtgccagaaagc

SEQ ID NO: 39909 - DNA, 15 bp, Homo sapiens
cagagtgccagaaag

SEQ ID NO: 39910 - DNA, 15 bp, Homo sapiens
gcagagtgccagaaa

SEQ ID NO: 39911 - DNA, 15 bp, Homo sapiens
agcagagtgccagaa

SEQ ID NO: 39912 - DNA, 15 bp, Homo sapiens
gagcagagtgccaga

SEQ ID NO: 39913 - DNA, 15 bp, Homo sapiens
agagcagagtgccag

SEQ ID NO: 39914 - DNA, 15 bp, Homo sapiens
tagagcagagtgcca

SEQ ID NO: 39915 - DNA, 15 bp, Homo sapiens
ctagagcagagtgcc

SEQ ID NO: 39916 - DNA, 15 bp, Homo sapiens
cctagagcagagtgc

SEQ ID NO: 39917 - DNA, 15 bp, Homo sapiens
ccctagagcagagtg

SEQ ID NO: 39918 - DNA, 15 bp, Homo sapiens
gccctagagcagagt

SEQ ID NO: 39919 - DNA, 15 bp, Homo sapiens
tgccctagagcagag

SEQ ID NO: 39920 - DNA, 15 bp, Homo sapiens
ttgccctagagcaga

SEQ ID NO: 39921 - DNA, 15 bp, Homo sapiens
cttgccctagagcag

SEQ ID NO: 39922 - DNA, 15 bp, Homo sapiens
acttgccctagagca

SEQ ID NO: 39923 - DNA, 15 bp, Homo sapiens
tacttgccctagagc

SEQ ID NO: 39924 - DNA, 15 bp, Homo sapiens
ttacttgccctagag

SEQ ID NO: 39925 - DNA, 15 bp, Homo sapiens
tttacttgccctaga

SEQ ID NO: 39926 - DNA, 15 bp, Homo sapiens
ttttacttgccctag

SEQ ID NO: 39927 - DNA, 15 bp, Homo sapiens
attttacttgcccta

SEQ ID NO: 39928 - DNA, 15 bp, Homo sapiens
cattttacttgccct

SEQ ID NO: 39929 - DNA, 15 bp, Homo sapiens
ccattttacttgccc

SEQ ID NO: 39930 - DNA, 15 bp, Homo sapiens
tccattttacttgcc

SEQ ID NO: 39931 - DNA, 15 bp, Homo sapiens
ctccattttacttgc

SEQ ID NO: 39932 - DNA, 15 bp, Homo sapiens
tctccattttacttg

SEQ ID NO: 39933 - DNA, 15 bp, Homo sapiens
ttctccattttactt

SEQ ID NO: 39934 - DNA, 15 bp, Homo sapiens
attctccattttact

SEQ ID NO: 39935 - DNA, 15 bp, Homo sapiens
aattctccattttac

SEQ ID NO: 39936 - DNA, 15 bp, Homo sapiens
gaattctccatttta

SEQ ID NO: 39937 - DNA, 15 bp, Homo sapiens
ggaattctccatttt

SEQ ID NO: 39938 - DNA, 15 bp, Homo sapiens
tggaattctccattt

SEQ ID NO: 39939 - DNA, 15 bp, Homo sapiens
ttggaattctccatt

SEQ ID NO: 39940 - DNA, 15 bp, Homo sapiens
tttggaattctccat

SEQ ID NO: 39941 - DNA, 15 bp, Homo sapiens
atttggaattctcca

SEQ ID NO: 39942 - DNA, 15 bp, Homo sapiens
aatttggaattctcc

SEQ ID NO: 39943 - DNA, 15 bp, Homo sapiens
gaatttggaattctc

SEQ ID NO: 39944 - DNA, 15 bp, Homo sapiens
agaatttggaattct

SEQ ID NO: 39945 - DNA, 15 bp, Homo sapiens
cagaatttggaattc

SEQ ID NO: 39946 - DNA, 15 bp, Homo sapiens
tcagaatttggaatt

SEQ ID NO: 39947 - DNA, 15 bp, Homo sapiens
ttcagaatttggaat

SEQ ID NO: 39948 - DNA, 15 bp, Homo sapiens
tttcagaatttggaa

SEQ ID NO: 39949 - DNA, 15 bp, Homo sapiens
atttcagaatttgga

SEQ ID NO: 39950 - DNA, 15 bp, Homo sapiens
aatttcagaatttgg

SEQ ID NO: 39951 - DNA, 15 bp, Homo sapiens
caatttcagaatttg

SEQ ID NO: 39952 - DNA, 15 bp, Homo sapiens
acaatttcagaattt

SEQ ID NO: 39953 - DNA, 15 bp, Homo sapiens
aacaatttcagaatt

SEQ ID NO: 39954 - DNA, 15 bp, Homo sapiens
taacaatttcagaat

SEQ ID NO: 39955 - DNA, 15 bp, Homo sapiens
ctaacaatttcagaa

SEQ ID NO: 39956 - DNA, 15 bp, Homo sapiens
tctaacaatttcaga

SEQ ID NO: 39957 - DNA, 15 bp, Homo sapiens
ttctaacaatttcag

SEQ ID NO: 39958 - DNA, 15 bp, Homo sapiens
gttctaacaatttca

SEQ ID NO: 39959 - DNA, 15 bp, Homo sapiens
tgttctaacaatttc

SEQ ID NO: 39960 - DNA, 15 bp, Homo sapiens
atgttctaacaattt

SEQ ID NO: 39961 - DNA, 15 bp, Homo sapiens
tatgttctaacaatt

SEQ ID NO: 39962 - DNA, 15 bp, Homo sapiens
ctatgttctaacaat

SEQ ID NO: 39963 - DNA, 15 bp, Homo sapiens
actatgttctaacaa

SEQ ID NO: 39964 - DNA, 15 bp, Homo sapiens
aactatgttctaaca

SEQ ID NO: 39965 - DNA, 15 bp, Homo sapiens
gaactatgttctaac

SEQ ID NO: 39966 - DNA, 15 bp, Homo sapiens
agaactatgttctaa

SEQ ID NO: 39967 - DNA, 15 bp, Homo sapiens
cagaactatgttcta

SEQ ID NO: 39968 - DNA, 15 bp, Homo sapiens
acagaactatgttct

SEQ ID NO: 39969 - DNA, 15 bp, Homo sapiens
cacagaactatgttc

SEQ ID NO: 39970 - DNA, 15 bp, Homo sapiens
acacagaactatgtt

SEQ ID NO: 39971 - DNA, 15 bp, Homo sapiens
gacacagaactatgt

SEQ ID NO: 39972 - DNA, 15 bp, Homo sapiens
agacacagaactatg

SEQ ID NO: 39973 - DNA, 15 bp, Homo sapiens
aagacacagaactat

SEQ ID NO: 39974 - DNA, 15 bp, Homo sapiens
taagacacagaacta

SEQ ID NO: 39975 - DNA, 15 bp, Homo sapiens
ctaagacacagaact

SEQ ID NO: 39976 - DNA, 15 bp, Homo sapiens
actaagacacagaac

SEQ ID NO: 39977 - DNA, 15 bp, Homo sapiens
aactaagacacagaa

SEQ ID NO: 39978 - DNA, 15 bp, Homo sapiens
taactaagacacaga

SEQ ID NO: 39979 - DNA, 15 bp, Homo sapiens
ttaactaagacacag

SEQ ID NO: 39980 - DNA, 15 bp, Homo sapiens
tttaactaagacaca

SEQ ID NO: 39981 - DNA, 15 bp, Homo sapiens
atttaactaagacac

SEQ ID NO: 39982 - DNA, 15 bp, Homo sapiens
tatttaactaagaca

SEQ ID NO: 39983 - DNA, 15 bp, Homo sapiens
atatttaactaagac

SEQ ID NO: 39984 - DNA, 15 bp, Homo sapiens
gatatttaactaaga

SEQ ID NO: 39985 - DNA, 15 bp, Homo sapiens
agatatttaactaag

SEQ ID NO: 39986 - DNA, 15 bp, Homo sapiens
tagatatttaactaa

SEQ ID NO: 39987 - DNA, 15 bp, Homo sapiens
gtagatatttaacta

SEQ ID NO: 39988 - DNA, 15 bp, Homo sapiens
tgtagatatttaact

SEQ ID NO: 39989 - DNA, 15 bp, Homo sapiens
gtgtagatatttaac

SEQ ID NO: 39990 - DNA, 15 bp, Homo sapiens
agtgtagatatttaa

SEQ ID NO: 39991 - DNA, 15 bp, Homo sapiens
aagtgtagatattta

SEQ ID NO: 39992 - DNA, 15 bp, Homo sapiens
taagtgtagatattt

SEQ ID NO: 39993 - DNA, 15 bp, Homo sapiens
gtaagtgtagatatt

SEQ ID NO: 39994 - DNA, 15 bp, Homo sapiens
tgtaagtgtagatat

SEQ ID NO: 39995 - DNA, 15 bp, Homo sapiens
ctgtaagtgtagata

SEQ ID NO: 39996 - DNA, 15 bp, Homo sapiens
tctgtaagtgtagat

SEQ ID NO: 39997 - DNA, 15 bp, Homo sapiens
atctgtaagtgtaga

SEQ ID NO: 39998 - DNA, 15 bp, Homo sapiens
tatctgtaagtgtag

SEQ ID NO: 39999 - DNA, 15 bp, Homo sapiens
ttatctgtaagtgta

SEQ ID NO: 40000 - DNA, 15 bp, Homo sapiens
tttatctgtaagtgt

SEQ ID NO: 40001 - DNA, 15 bp, Homo sapiens
atttatctgtaagtg

SEQ ID NO: 40002 - DNA, 15 bp, Homo sapiens
tatttatctgtaagt

SEQ ID NO: 40003 - DNA, 15 bp, Homo sapiens
ctatttatctgtaag

SEQ ID NO: 40004 - DNA, 15 bp, Homo sapiens
gctatttatctgtaa

SEQ ID NO: 40005 - DNA, 15 bp, Homo sapiens
tgctatttatctgta

SEQ ID NO: 40006 - DNA, 15 bp, Homo sapiens
atgctatttatctgt

SEQ ID NO: 40007 - DNA, 15 bp, Homo sapiens
tatgctatttatctg

SEQ ID NO: 40008 - DNA, 15 bp, Homo sapiens
ttatgctatttatct

SEQ ID NO: 40009 - DNA, 15 bp, Homo sapiens
tttatgctatttatc

SEQ ID NO: 40010 - DNA, 15 bp, Homo sapiens
atttatgctatttat

SEQ ID NO: 40011 - DNA, 15 bp, Homo sapiens
catttatgctattta

SEQ ID NO: 40012 - DNA, 15 bp, Homo sapiens
gcatttatgctattt

SEQ ID NO: 40013 - DNA, 15 bp, Homo sapiens
agcatttatgctatt

SEQ ID NO: 40014 - DNA, 15 bp, Homo sapiens
aagcatttatgctat

SEQ ID NO: 40015 - DNA, 15 bp, Homo sapiens
aaagcatttatgcta

SEQ ID NO: 40016 - DNA, 15 bp, Homo sapiens
gaaagcatttatgct

SEQ ID NO: 40017 - DNA, 15 bp, Homo sapiens
agaaagcatttatgc

SEQ ID NO: 40018 - DNA, 15 bp, Homo sapiens
gagaaagcatttatg

SEQ ID NO: 40019 - DNA, 15 bp, Homo sapiens
ggagaaagcatttat

SEQ ID NO: 40020 - DNA, 15 bp, Homo sapiens
gggagaaagcattta

SEQ ID NO: 40021 - DNA, 15 bp, Homo sapiens
ggggagaaagcattt

SEQ ID NO: 40022 - DNA, 15 bp, Homo sapiens
tggggagaaagcatt

SEQ ID NO: 40023 - DNA, 15 bp, Homo sapiens
atggggagaaagcat

SEQ ID NO: 40024 - DNA, 15 bp, Homo sapiens
tatggggagaaagca

SEQ ID NO: 40025 - DNA, 15 bp, Homo sapiens
atatggggagaaagc

SEQ ID NO: 40026 - DNA, 15 bp, Homo sapiens
aatatggggagaaag

SEQ ID NO: 40027 - DNA, 15 bp, Homo sapiens
aaatatggggagaaa

SEQ ID NO: 40028 - DNA, 15 bp, Homo sapiens
gaaatatggggagaa

SEQ ID NO: 40029 - DNA, 15 bp, Homo sapiens
tgaaatatggggaga

SEQ ID NO: 40030 - DNA, 15 bp, Homo sapiens
ctgaaatatggggag

SEQ ID NO: 40031 - DNA, 15 bp, Homo sapiens
gctgaaatatgggga

SEQ ID NO: 40032 - DNA, 15 bp, Homo sapiens
ggctgaaatatgggg

SEQ ID NO: 40033 - DNA, 15 bp, Homo sapiens
gggctgaaatatggg

SEQ ID NO: 40034 - DNA, 15 bp, Homo sapiens
tgggctgaaatatgg

SEQ ID NO: 40035 - DNA, 15 bp, Homo sapiens
ctgggctgaaatatg

SEQ ID NO: 40036 - DNA, 15 bp, Homo sapiens
actgggctgaaatat

SEQ ID NO: 40037 - DNA, 15 bp, Homo sapiens
gactgggctgaaata

SEQ ID NO: 40038 - DNA, 15 bp, Homo sapiens
ggactgggctgaaat

SEQ ID NO: 40039 - DNA, 15 bp, Homo sapiens
aggactgggctgaaa

SEQ ID NO: 40040 - DNA, 15 bp, Homo sapiens
taggactgggctgaa

SEQ ID NO: 40041 - DNA, 15 bp, Homo sapiens
gtaggactgggctga

SEQ ID NO: 40042 - DNA, 15 bp, Homo sapiens
agtaggactgggctg

SEQ ID NO: 40043 - DNA, 15 bp, Homo sapiens
aagtaggactgggct

SEQ ID NO: 40044 - DNA, 15 bp, Homo sapiens
taagtaggactgggc

SEQ ID NO: 40045 - DNA, 15 bp, Homo sapiens
ttaagtaggactggg

SEQ ID NO: 40046 - DNA, 15 bp, Homo sapiens
tttaagtaggactgg

SEQ ID NO: 40047 - DNA, 15 bp, Homo sapiens
ctttaagtaggactg

SEQ ID NO: 40048 - DNA, 15 bp, Homo sapiens
tctttaagtaggact

SEQ ID NO: 40049 - DNA, 15 bp, Homo sapiens
gtctttaagtaggac

SEQ ID NO: 40050 - DNA, 15 bp, Homo sapiens
tgtctttaagtagga

SEQ ID NO: 40051 - DNA, 15 bp, Homo sapiens
ttgtctttaagtagg

SEQ ID NO: 40052 - DNA, 15 bp, Homo sapiens
gttgtctttaagtag

SEQ ID NO: 40053 - DNA, 15 bp, Homo sapiens
tgttgtctttaagta

SEQ ID NO: 40054 - DNA, 15 bp, Homo sapiens
atgttgtctttaagt

SEQ ID NO: 40055 - DNA, 15 bp, Homo sapiens
tatgttgtctttaag

SEQ ID NO: 40056 - DNA, 15 bp, Homo sapiens
ttatgttgtctttaa

SEQ ID NO: 40057 - DNA, 15 bp, Homo sapiens
tttatgttgtcttta

SEQ ID NO: 40058 - DNA, 15 bp, Homo sapiens
atttatgttgtcttt

SEQ ID NO: 40059 - DNA, 15 bp, Homo sapiens
aatttatgttgtctt

SEQ ID NO: 40060 - DNA, 15 bp, Homo sapiens
caatttatgttgtct

SEQ ID NO: 40061 - DNA, 15 bp, Homo sapiens
gcaatttatgttgtc

SEQ ID NO: 40062 - DNA, 15 bp, Homo sapiens
tgcaatttatgttgt

SEQ ID NO: 40063 - DNA, 15 bp, Homo sapiens
ttgcaatttatgttg

SEQ ID NO: 40064 - DNA, 15 bp, Homo sapiens
tttgcaatttatgtt

SEQ ID NO: 40065 - DNA, 15 bp, Homo sapiens
ttttgcaatttatgt

SEQ ID NO: 40066 - DNA, 15 bp, Homo sapiens
attttgcaatttatg

SEQ ID NO: 40067 - DNA, 15 bp, Homo sapiens
tattttgcaatttat

SEQ ID NO: 40068 - DNA, 15 bp, Homo sapiens
ctattttgcaattta

SEQ ID NO: 40069 - DNA, 15 bp, Homo sapiens
actattttgcaattt

SEQ ID NO: 40070 - DNA, 15 bp, Homo sapiens
cactattttgcaatt

SEQ ID NO: 40071 - DNA, 15 bp, Homo sapiens
tcactattttgcaat

SEQ ID NO: 40072 - DNA, 15 bp, Homo sapiens
ctcactattttgcaa

SEQ ID NO: 40073 - DNA, 15 bp, Homo sapiens
cctcactattttgca

SEQ ID NO: 40074 - DNA, 15 bp, Homo sapiens
tcctcactattttgc

SEQ ID NO: 40075 - DNA, 15 bp, Homo sapiens
atcctcactattttg

SEQ ID NO: 40076 - DNA, 15 bp, Homo sapiens
catcctcactatttt

SEQ ID NO: 40077 - DNA, 15 bp, Homo sapiens
acatcctcactattt

SEQ ID NO: 40078 - DNA, 15 bp, Homo sapiens
aacatcctcactatt

SEQ ID NO: 40079 - DNA, 15 bp, Homo sapiens
caacatcctcactat

SEQ ID NO: 40080 - DNA, 15 bp, Homo sapiens
acaacatcctcacta

SEQ ID NO: 40081 - DNA, 15 bp, Homo sapiens
aacaacatcctcact

SEQ ID NO: 40082 - DNA, 15 bp, Homo sapiens
gaacaacatcctcac

SEQ ID NO: 40083 - DNA, 15 bp, Homo sapiens
tgaacaacatcctca

SEQ ID NO: 40084 - DNA, 15 bp, Homo sapiens
atgaacaacatcctc

SEQ ID NO: 40085 - DNA, 15 bp, Homo sapiens
gatgaacaacatcct

SEQ ID NO: 40086 - DNA, 15 bp, Homo sapiens
agatgaacaacatcc

SEQ ID NO: 40087 - DNA, 15 bp, Homo sapiens
tagatgaacaacatc

SEQ ID NO: 40088 - DNA, 15 bp, Homo sapiens
ttagatgaacaacat

SEQ ID NO: 40089 - DNA, 15 bp, Homo sapiens
attagatgaacaaca

SEQ ID NO: 40090 - DNA, 15 bp, Homo sapiens
tattagatgaacaac

SEQ ID NO: 40091 - DNA, 15 bp, Homo sapiens
ttattagatgaacaa

SEQ ID NO: 40092 - DNA, 15 bp, Homo sapiens
tttattagatgaaca

SEQ ID NO: 40093 - DNA, 15 bp, Homo sapiens
ttttattagatgaac

SEQ ID NO: 40094 - DNA, 15 bp, Homo sapiens
cttttattagatgaa

SEQ ID NO: 40095 - DNA, 15 bp, Homo sapiens
acttttattagatga

SEQ ID NO: 40096 - DNA, 15 bp, Homo sapiens
cacttttattagatg

SEQ ID NO: 40097 - DNA, 15 bp, Homo sapiens
ccacttttattagat

SEQ ID NO: 40098 - DNA, 15 bp, Homo sapiens
accacttttattaga

SEQ ID NO: 40099 - DNA, 15 bp, Homo sapiens
aaccacttttattag

SEQ ID NO: 40100 - DNA, 15 bp, Homo sapiens
gaaccacttttatta

SEQ ID NO: 40101 - DNA, 15 bp, Homo sapiens
ggaaccacttttatt

SEQ ID NO: 40102 - DNA, 15 bp, Homo sapiens
tggaaccacttttat

SEQ ID NO: 40103 - DNA, 15 bp, Homo sapiens
ctggaaccactttta

SEQ ID NO: 40104 - DNA, 15 bp, Homo sapiens
cctggaaccactttt

SEQ ID NO: 40105 - DNA, 15 bp, Homo sapiens
tcctggaaccacttt

SEQ ID NO: 40106 - DNA, 15 bp, Homo sapiens
ttcctggaaccactt

SEQ ID NO: 40107 - DNA, 15 bp, Homo sapiens
attcctggaaccact

SEQ ID NO: 40108 - DNA, 15 bp, Homo sapiens
aattcctggaaccac

SEQ ID NO: 40109 - DNA, 15 bp, Homo sapiens
gaattcctggaacca

SEQ ID NO: 40110 - DNA, 15 bp, Homo sapiens
tgaattcctggaacc

SEQ ID NO: 40111 - DNA, 15 bp, Homo sapiens
ctgaattcctggaac

SEQ ID NO: 40112 - DNA, 15 bp, Homo sapiens
tctgaattcctggaa

SEQ ID NO: 40113 - DNA, 15 bp, Homo sapiens
gtctgaattcctgga

SEQ ID NO: 40114 - DNA, 15 bp, Homo sapiens
agtctgaattcctgg

SEQ ID NO: 40115 - DNA, 15 bp, Homo sapiens
gagtctgaattcctg

SEQ ID NO: 40116 - DNA, 15 bp, Homo sapiens
agagtctgaattcct

SEQ ID NO: 40117 - DNA, 15 bp, Homo sapiens
cagagtctgaattcc

SEQ ID NO: 40118 - DNA, 15 bp, Homo sapiens
ccagagtctgaattc

SEQ ID NO: 40119 - DNA, 15 bp, Homo sapiens
tccagagtctgaatt

SEQ ID NO: 40120 - DNA, 15 bp, Homo sapiens
atccagagtctgaat

SEQ ID NO: 40121 - DNA, 15 bp, Homo sapiens
aatccagagtctgaa

SEQ ID NO: 40122 - DNA, 15 bp, Homo sapiens
gaatccagagtctga

SEQ ID NO: 40123 - DNA, 15 bp, Homo sapiens
ggaatccagagtctg

SEQ ID NO: 40124 - DNA, 15 bp, Homo sapiens
aggaatccagagtct

SEQ ID NO: 40125 - DNA, 15 bp, Homo sapiens
caggaatccagagtc

SEQ ID NO: 40126 - DNA, 15 bp, Homo sapiens
acaggaatccagagt

SEQ ID NO: 40127 - DNA, 15 bp, Homo sapiens
aacaggaatccagag

SEQ ID NO: 40128 - DNA, 15 bp, Homo sapiens
aaacaggaatccaga

SEQ ID NO: 40129 - DNA, 15 bp, Homo sapiens
caaacaggaatccag

SEQ ID NO: 40130 - DNA, 15 bp, Homo sapiens
gcaaacaggaatcca

SEQ ID NO: 40131 - DNA, 15 bp, Homo sapiens
ggcaaacaggaatcc

SEQ ID NO: 40132 - DNA, 15 bp, Homo sapiens
tggcaaacaggaatc

SEQ ID NO: 40133 - DNA, 15 bp, Homo sapiens
ttggcaaacaggaat

SEQ ID NO: 40134 - DNA, 15 bp, Homo sapiens
tttggcaaacaggaa

SEQ ID NO: 40135 - DNA, 15 bp, Homo sapiens
atttggcaaacagga

SEQ ID NO: 40136 - DNA, 15 bp, Homo sapiens
gatttggcaaacagg

SEQ ID NO: 40137 - DNA, 15 bp, Homo sapiens
tgatttggcaaacag

SEQ ID NO: 40138 - DNA, 15 bp, Homo sapiens
atgatttggcaaaca

SEQ ID NO: 40139 - DNA, 15 bp, Homo sapiens
catgatttggcaaac

SEQ ID NO: 40140 - DNA, 15 bp, Homo sapiens
acatgatttggcaaa

SEQ ID NO: 40141 - DNA, 15 bp, Homo sapiens
cacatgatttggcaa

SEQ ID NO: 40142 - DNA, 15 bp, Homo sapiens
acacatgatttggca

SEQ ID NO: 40143 - DNA, 15 bp, Homo sapiens
gacacatgatttggc

SEQ ID NO: 40144 - DNA, 15 bp, Homo sapiens
ggacacatgatttgg

SEQ ID NO: 40145 - DNA, 15 bp, Homo sapiens
gggacacatgatttg

SEQ ID NO: 40146 - DNA, 15 bp, Homo sapiens
tgggacacatgattt

SEQ ID NO: 40147 - DNA, 15 bp, Homo sapiens
gtgggacacatgatt

SEQ ID NO: 40148 - DNA, 15 bp, Homo sapiens
agtgggacacatgat

SEQ ID NO: 40149 - DNA, 15 bp, Homo sapiens
gagtgggacacatga

SEQ ID NO: 40150 - DNA, 15 bp, Homo sapiens
agagtgggacacatg

SEQ ID NO: 40151 - DNA, 15 bp, Homo sapiens
aagagtgggacacat

SEQ ID NO: 40152 - DNA, 15 bp, Homo sapiens
taagagtgggacaca

SEQ ID NO: 40153 - DNA, 15 bp, Homo sapiens
ttaagagtgggacac

SEQ ID NO: 40154 - DNA, 15 bp, Homo sapiens
cttaagagtgggaca

SEQ ID NO: 40155 - DNA, 15 bp, Homo sapiens
tcttaagagtgggac

SEQ ID NO: 40156 - DNA, 15 bp, Homo sapiens
ttcttaagagtggga

SEQ ID NO: 40157 - DNA, 15 bp, Homo sapiens
tttcttaagagtggg

SEQ ID NO: 40158 - DNA, 15 bp, Homo sapiens
ttttcttaagagtgg

SEQ ID NO: 40159 - DNA, 15 bp, Homo sapiens
gttttcttaagagtg

SEQ ID NO: 40160 - DNA, 15 bp, Homo sapiens
cgttttcttaagagt

SEQ ID NO: 40161 - DNA, 15 bp, Homo sapiens
tcgttttcttaagag

SEQ ID NO: 40162 - DNA, 15 bp, Homo sapiens
ctcgttttcttaaga

SEQ ID NO: 40163 - DNA, 15 bp, Homo sapiens
actcgttttcttaag

SEQ ID NO: 40164 - DNA, 15 bp, Homo sapiens
aactcgttttcttaa

SEQ ID NO: 40165 - DNA, 15 bp, Homo sapiens
caactcgttttctta

SEQ ID NO: 40166 - DNA, 15 bp, Homo sapiens
ccaactcgttttctt

SEQ ID NO: 40167 - DNA, 15 bp, Homo sapiens
tccaactcgttttct

SEQ ID NO: 40168 - DNA, 15 bp, Homo sapiens
gtccaactcgttttc

SEQ ID NO: 40169 - DNA, 15 bp, Homo sapiens
agtccaactcgtttt

SEQ ID NO: 40170 - DNA, 15 bp, Homo sapiens
gagtccaactcgttt

SEQ ID NO: 40171 - DNA, 15 bp, Homo sapiens
agagtccaactcgtt

SEQ ID NO: 40172 - DNA, 15 bp, Homo sapiens
cagagtccaactcgt

SEQ ID NO: 40173 - DNA, 15 bp, Homo sapiens
ccagagtccaactcg

SEQ ID NO: 40174 - DNA, 15 bp, Homo sapiens
tccagagtccaactc

SEQ ID NO: 40175 - DNA, 15 bp, Homo sapiens
atccagagtccaact

SEQ ID NO: 40176 - DNA, 15 bp, Homo sapiens
aatccagagtccaac

SEQ ID NO: 40177 - DNA, 15 bp, Homo sapiens
aaatccagagtccaa

SEQ ID NO: 40178 - DNA, 15 bp, Homo sapiens
aaaatccagagtcca

SEQ ID NO: 40179 - DNA, 15 bp, Homo sapiens
aaaaatccagagtcc

SEQ ID NO: 40180 - DNA, 15 bp, Homo sapiens
gaaaaatccagagtc

SEQ ID NO: 40181 - DNA, 15 bp, Homo sapiens
agaaaaatccagagt

SEQ ID NO: 40182 - DNA, 15 bp, Homo sapiens
aagaaaaatccagag

SEQ ID NO: 40183 - DNA, 15 bp, Homo sapiens
aaagaaaaatccaga

SEQ ID NO: 40184 - DNA, 15 bp, Homo sapiens
caaagaaaaatccag

SEQ ID NO: 40185 - DNA, 15 bp, Homo sapiens
gcaaagaaaaatcca

SEQ ID NO: 40186 - DNA, 15 bp, Homo sapiens
tgcaaagaaaaatcc

SEQ ID NO: 40187 - DNA, 15 bp, Homo sapiens
ttgcaaagaaaaatc

SEQ ID NO: 40188 - DNA, 15 bp, Homo sapiens
cttgcaaagaaaaat

SEQ ID NO: 40189 - DNA, 15 bp, Homo sapiens
tcttgcaaagaaaaa

SEQ ID NO: 40190 - DNA, 15 bp, Homo sapiens
ctcttgcaaagaaaa

SEQ ID NO: 40191 - DNA, 15 bp, Homo sapiens
cctcttgcaaagaaa

SEQ ID NO: 40192 - DNA, 15 bp, Homo sapiens
ccctcttgcaaagaa

SEQ ID NO: 40193 - DNA, 15 bp, Homo sapiens
tccctcttgcaaaga

SEQ ID NO: 40194 - DNA, 15 bp, Homo sapiens
gtccctcttgcaaag

SEQ ID NO: 40195 - DNA, 15 bp, Homo sapiens
tgtccctcttgcaaa

SEQ ID NO: 40196 - DNA, 15 bp, Homo sapiens
ttgtccctcttgcaa

SEQ ID NO: 40197 - DNA, 15 bp, Homo sapiens
cttgtccctcttgca

SEQ ID NO: 40198 - DNA, 15 bp, Homo sapiens
tcttgtccctcttgc

SEQ ID NO: 40199 - DNA, 15 bp, Homo sapiens
ctcttgtccctcttg

SEQ ID NO: 40200 - DNA, 15 bp, Homo sapiens
actcttgtccctctt

SEQ ID NO: 40201 - DNA, 15 bp, Homo sapiens
cactcttgtccctct

SEQ ID NO: 40202 - DNA, 15 bp, Homo sapiens
acactcttgtccctc

SEQ ID NO: 40203 - DNA, 15 bp, Homo sapiens
cacactcttgtccct

SEQ ID NO: 40204 - DNA, 15 bp, Homo sapiens
ccacactcttgtccc

SEQ ID NO: 40205 - DNA, 15 bp, Homo sapiens
cccacactcttgtcc

SEQ ID NO: 40206 - DNA, 15 bp, Homo sapiens
tcccacactcttgtc

SEQ ID NO: 40207 - DNA, 15 bp, Homo sapiens
ctcccacactcttgt

SEQ ID NO: 40208 - DNA, 15 bp, Homo sapiens
tctcccacactcttg

SEQ ID NO: 40209 - DNA, 15 bp, Homo sapiens
atctcccacactctt

SEQ ID NO: 40210 - DNA, 15 bp, Homo sapiens
tatctcccacactct

SEQ ID NO: 40211 - DNA, 15 bp, Homo sapiens
gtatctcccacactc

SEQ ID NO: 40212 - DNA, 15 bp, Homo sapiens
agtatctcccacact

SEQ ID NO: 40213 - DNA, 15 bp, Homo sapiens
cagtatctcccacac

SEQ ID NO: 40214 - DNA, 15 bp, Homo sapiens
tcagtatctcccaca

SEQ ID NO: 40215 - DNA, 15 bp, Homo sapiens
ctcagtatctcccac

SEQ ID NO: 40216 - DNA, 15 bp, Homo sapiens
actcagtatctccca

SEQ ID NO: 40217 - DNA, 15 bp, Homo sapiens
aactcagtatctccc

SEQ ID NO: 40218 - DNA, 15 bp, Homo sapiens
taactcagtatctcc

SEQ ID NO: 40219 - DNA, 15 bp, Homo sapiens
ttaactcagtatctc

SEQ ID NO: 40220 - DNA, 15 bp, Homo sapiens
attaactcagtatct

SEQ ID NO: 40221 - DNA, 15 bp, Homo sapiens
cattaactcagtatc

SEQ ID NO: 40222 - DNA, 15 bp, Homo sapiens
gcattaactcagtat

SEQ ID NO: 40223 - DNA, 15 bp, Homo sapiens
tgcattaactcagta

SEQ ID NO: 40224 - DNA, 15 bp, Homo sapiens
ttgcattaactcagt

SEQ ID NO: 40225 - DNA, 15 bp, Homo sapiens
gttgcattaactcag

SEQ ID NO: 40226 - DNA, 15 bp, Homo sapiens
agttgcattaactca

SEQ ID NO: 40227 - DNA, 15 bp, Homo sapiens
aagttgcattaactc

SEQ ID NO: 40228 - DNA, 15 bp, Homo sapiens
caagttgcattaact

SEQ ID NO: 40229 - DNA, 15 bp, Homo sapiens
gcaagttgcattaac

SEQ ID NO: 40230 - DNA, 15 bp, Homo sapiens
tgcaagttgcattaa

SEQ ID NO: 40231 - DNA, 15 bp, Homo sapiens
ctgcaagttgcatta

SEQ ID NO: 40232 - DNA, 15 bp, Homo sapiens
cctgcaagttgcatt

SEQ ID NO: 40233 - DNA, 15 bp, Homo sapiens
acctgcaagttgcat

SEQ ID NO: 40234 - DNA, 15 bp, Homo sapiens
aacctgcaagttgca

SEQ ID NO: 40235 - DNA, 15 bp, Homo sapiens
aaacctgcaagttgc

SEQ ID NO: 40236 - DNA, 15 bp, Homo sapiens
aaaacctgcaagttg

SEQ ID NO: 40237 - DNA, 15 bp, Homo sapiens
taaaacctgcaagtt

SEQ ID NO: 40238 - DNA, 15 bp, Homo sapiens
ttaaaacctgcaagt

SEQ ID NO: 40239 - DNA, 15 bp, Homo sapiens
cttaaaacctgcaag

SEQ ID NO: 40240 - DNA, 15 bp, Homo sapiens
acttaaaacctgcaa

SEQ ID NO: 40241 - DNA, 15 bp, Homo sapiens
cacttaaaacctgca

SEQ ID NO: 40242 - DNA, 15 bp, Homo sapiens
acacttaaaacctgc

SEQ ID NO: 40243 - DNA, 15 bp, Homo sapiens
gacacttaaaacctg

SEQ ID NO: 40244 - DNA, 15 bp, Homo sapiens
ggacacttaaaacct

SEQ ID NO: 40245 - DNA, 15 bp, Homo sapiens
aggacacttaaaacc

SEQ ID NO: 40246 - DNA, 15 bp, Homo sapiens
caggacacttaaaac

SEQ ID NO: 40247 - DNA, 15 bp, Homo sapiens
acaggacacttaaaa

SEQ ID NO: 40248 - DNA, 15 bp, Homo sapiens
gacaggacacttaaa

SEQ ID NO: 40249 - DNA, 15 bp, Homo sapiens
tgacaggacacttaa

SEQ ID NO: 40250 - DNA, 15 bp, Homo sapiens
atgacaggacactta

SEQ ID NO: 40251 - DNA, 15 bp, Homo sapiens
aatgacaggacactt

SEQ ID NO: 40252 - DNA, 15 bp, Homo sapiens
caatgacaggacact

SEQ ID NO: 40253 - DNA, 15 bp, Homo sapiens
acaatgacaggacac

SEQ ID NO: 40254 - DNA, 15 bp, Homo sapiens
cacaatgacaggaca

SEQ ID NO: 40255 - DNA, 15 bp, Homo sapiens
gcacaatgacaggac

SEQ ID NO: 40256 - DNA, 15 bp, Homo sapiens
ggcacaatgacagga

SEQ ID NO: 40257 - DNA, 15 bp, Homo sapiens
aggcacaatgacagg

SEQ ID NO: 40258 - DNA, 15 bp, Homo sapiens
aaggcacaatgacag

SEQ ID NO: 40259 - DNA, 15 bp, Homo sapiens
caaggcacaatgaca

SEQ ID NO: 40260 - DNA, 15 bp, Homo sapiens
acaaggcacaatgac

SEQ ID NO: 40261 - DNA, 15 bp, Homo sapiens
cacaaggcacaatga

SEQ ID NO: 40262 - DNA, 15 bp, Homo sapiens
gcacaaggcacaatg

SEQ ID NO: 40263 - DNA, 15 bp, Homo sapiens
agcacaaggcacaat

SEQ ID NO: 40264 - DNA, 15 bp, Homo sapiens
aagcacaaggcacaa

SEQ ID NO: 40265 - DNA, 15 bp, Homo sapiens
aaagcacaaggcaca

SEQ ID NO: 40266 - DNA, 15 bp, Homo sapiens
caaagcacaaggcac

SEQ ID NO: 40267 - DNA, 15 bp, Homo sapiens
tcaaagcacaaggca

SEQ ID NO: 40268 - DNA, 15 bp, Homo sapiens
atcaaagcacaaggc

SEQ ID NO: 40269 - DNA, 15 bp, Homo sapiens
tatcaaagcacaagg

SEQ ID NO: 40270 - DNA, 15 bp, Homo sapiens
gtatcaaagcacaag

SEQ ID NO: 40271 - DNA, 15 bp, Homo sapiens
tgtatcaaagcacaa

SEQ ID NO: 40272 - DNA, 15 bp, Homo sapiens
atgtatcaaagcaca

SEQ ID NO: 40273 - DNA, 15 bp, Homo sapiens
aatgtatcaaagcac

SEQ ID NO: 40274 - DNA, 15 bp, Homo sapiens
gaatgtatcaaagca

SEQ ID NO: 40275 - DNA, 15 bp, Homo sapiens
agaatgtatcaaagc

SEQ ID NO: 40276 - DNA, 15 bp, Homo sapiens
cagaatgtatcaaag

SEQ ID NO: 40277 - DNA, 15 bp, Homo sapiens
tcagaatgtatcaaa

SEQ ID NO: 40278 - DNA, 15 bp, Homo sapiens
ctcagaatgtatcaa

SEQ ID NO: 40279 - DNA, 15 bp, Homo sapiens
actcagaatgtatca

SEQ ID NO: 40280 - DNA, 15 bp, Homo sapiens
aactcagaatgtatc

SEQ ID NO: 40281 - DNA, 15 bp, Homo sapiens
aaactcagaatgtat

SEQ ID NO: 40282 - DNA, 15 bp, Homo sapiens
gaaactcagaatgta

SEQ ID NO: 40283 - DNA, 15 bp, Homo sapiens
tgaaactcagaatgt

SEQ ID NO: 40284 - DNA, 15 bp, Homo sapiens
ctgaaactcagaatg

SEQ ID NO: 40285 - DNA, 15 bp, Homo sapiens
actgaaactcagaat

SEQ ID NO: 40286 - DNA, 15 bp, Homo sapiens
tactgaaactcagaa

SEQ ID NO: 40287 - DNA, 15 bp, Homo sapiens
ttactgaaactcaga

SEQ ID NO: 40288 - DNA, 15 bp, Homo sapiens
tttactgaaactcag

SEQ ID NO: 40289 - DNA, 15 bp, Homo sapiens
ctttactgaaactca

SEQ ID NO: 40290 - DNA, 15 bp, Homo sapiens
tctttactgaaactc

SEQ ID NO: 40291 - DNA, 15 bp, Homo sapiens
ctctttactgaaact

SEQ ID NO: 40292 - DNA, 15 bp, Homo sapiens
tctctttactgaaac

SEQ ID NO: 40293 - DNA, 15 bp, Homo sapiens
gtctctttactgaaa

SEQ ID NO: 40294 - DNA, 15 bp, Homo sapiens
ggtctctttactgaa

SEQ ID NO: 40295 - DNA, 15 bp, Homo sapiens
aggtctctttactga

SEQ ID NO: 40296 - DNA, 15 bp, Homo sapiens
caggtctctttactg

SEQ ID NO: 40297 - DNA, 15 bp, Homo sapiens
tcaggtctctttact

SEQ ID NO: 40298 - DNA, 15 bp, Homo sapiens
atcaggtctctttac

SEQ ID NO: 40299 - DNA, 15 bp, Homo sapiens
catcaggtctcttta

SEQ ID NO: 40300 - DNA, 15 bp, Homo sapiens
gcatcaggtctcttt

SEQ ID NO: 40301 - DNA, 15 bp, Homo sapiens
tgcatcaggtctctt

SEQ ID NO: 40302 - DNA, 15 bp, Homo sapiens
atgcatcaggtctct

SEQ ID NO: 40303 - DNA, 15 bp, Homo sapiens
aatgcatcaggtctc

SEQ ID NO: 40304 - DNA, 15 bp, Homo sapiens
caatgcatcaggtct

SEQ ID NO: 40305 - DNA, 15 bp, Homo sapiens
ccaatgcatcaggtc

SEQ ID NO: 40306 - DNA, 15 bp, Homo sapiens
tccaatgcatcaggt

SEQ ID NO: 40307 - DNA, 15 bp, Homo sapiens
gtccaatgcatcagg

SEQ ID NO: 40308 - DNA, 15 bp, Homo sapiens
agtccaatgcatcag

SEQ ID NO: 40309 - DNA, 15 bp, Homo sapiens
cagtccaatgcatca

SEQ ID NO: 40310 - DNA, 15 bp, Homo sapiens
acagtccaatgcatc

SEQ ID NO: 40311 - DNA, 15 bp, Homo sapiens
aacagtccaatgcat

SEQ ID NO: 40312 - DNA, 15 bp, Homo sapiens
caacagtccaatgca

SEQ ID NO: 40313 - DNA, 15 bp, Homo sapiens
gcaacagtccaatgc

SEQ ID NO: 40314 - DNA, 15 bp, Homo sapiens
tgcaacagtccaatg

SEQ ID NO: 40315 - DNA, 15 bp, Homo sapiens
ttgcaacagtccaat

SEQ ID NO: 40316 - DNA, 15 bp, Homo sapiens
attgcaacagtccaa

SEQ ID NO: 40317 - DNA, 15 bp, Homo sapiens
cattgcaacagtcca

SEQ ID NO: 40318 - DNA, 15 bp, Homo sapiens
ccattgcaacagtcc

SEQ ID NO: 40319 - DNA, 15 bp, Homo sapiens
tccattgcaacagtc

SEQ ID NO: 40320 - DNA, 15 bp, Homo sapiens
ttccattgcaacagt

SEQ ID NO: 40321 - DNA, 15 bp, Homo sapiens
gttccattgcaacag

SEQ ID NO: 40322 - DNA, 15 bp, Homo sapiens
ggttccattgcaaca

SEQ ID NO: 40323 - DNA, 15 bp, Homo sapiens
aggttccattgcaac

SEQ ID NO: 40324 - DNA, 15 bp, Homo sapiens
caggttccattgcaa

SEQ ID NO: 40325 - DNA, 15 bp, Homo sapiens
acaggttccattgca

SEQ ID NO: 40326 - DNA, 15 bp, Homo sapiens
aacaggttccattgc

SEQ ID NO: 40327 - DNA, 15 bp, Homo sapiens
aaacaggttccattg

SEQ ID NO: 40328 - DNA, 15 bp, Homo sapiens
aaaacaggttccatt

SEQ ID NO: 40329 - DNA, 15 bp, Homo sapiens
taaaacaggttccat

SEQ ID NO: 40330 - DNA, 15 bp, Homo sapiens
ttaaaacaggttcca

SEQ ID NO: 40331 - DNA, 15 bp, Homo sapiens
cttaaaacaggttcc

SEQ ID NO: 40332 - DNA, 15 bp, Homo sapiens
tcttaaaacaggttc

SEQ ID NO: 40333 - DNA, 15 bp, Homo sapiens
atcttaaaacaggtt

SEQ ID NO: 40334 - DNA, 15 bp, Homo sapiens
gatcttaaaacaggt

SEQ ID NO: 40335 - DNA, 15 bp, Homo sapiens
agatcttaaaacagg

SEQ ID NO: 40336 - DNA, 15 bp, Homo sapiens
aagatcttaaaacag

SEQ ID NO: 40337 - DNA, 15 bp, Homo sapiens
gaagatcttaaaaca

SEQ ID NO: 40338 - DNA, 15 bp, Homo sapiens
tgaagatcttaaaac

SEQ ID NO: 40339 - DNA, 15 bp, Homo sapiens
ttgaagatcttaaaa

SEQ ID NO: 40340 - DNA, 15 bp, Homo sapiens
tttgaagatcttaaa

SEQ ID NO: 40341 - DNA, 15 bp, Homo sapiens
ctttgaagatcttaa

SEQ ID NO: 40342 - DNA, 15 bp, Homo sapiens
gctttgaagatctta

SEQ ID NO: 40343 - DNA, 15 bp, Homo sapiens
agctttgaagatctt

SEQ ID NO: 40344 - DNA, 15 bp, Homo sapiens
cagctttgaagatct

SEQ ID NO: 40345 - DNA, 15 bp, Homo sapiens
acagctttgaagatc

SEQ ID NO: 40346 - DNA, 15 bp, Homo sapiens
tacagctttgaagat

SEQ ID NO: 40347 - DNA, 15 bp, Homo sapiens
atacagctttgaaga

SEQ ID NO: 40348 - DNA, 15 bp, Homo sapiens
aatacagctttgaag

SEQ ID NO: 40349 - DNA, 15 bp, Homo sapiens
caatacagctttgaa

SEQ ID NO: 40350 - DNA, 15 bp, Homo sapiens
tcaatacagctttga

SEQ ID NO: 40351 - DNA, 15 bp, Homo sapiens
atcaatacagctttg

SEQ ID NO: 40352 - DNA, 15 bp, Homo sapiens
tatcaatacagcttt

SEQ ID NO: 40353 - DNA, 15 bp, Homo sapiens
atatcaatacagctt

SEQ ID NO: 40354 - DNA, 15 bp, Homo sapiens
catatcaatacagct

SEQ ID NO: 40355 - DNA, 15 bp, Homo sapiens
tcatatcaatacagc

SEQ ID NO: 40356 - DNA, 15 bp, Homo sapiens
ttcatatcaatacag

SEQ ID NO: 40357 - DNA, 15 bp, Homo sapiens
cttcatatcaataca

SEQ ID NO: 40358 - DNA, 15 bp, Homo sapiens
acttcatatcaatac

SEQ ID NO: 40359 - DNA, 15 bp, Homo sapiens
aacttcatatcaata

SEQ ID NO: 40360 - DNA, 15 bp, Homo sapiens
gaacttcatatcaat

SEQ ID NO: 40361 - DNA, 15 bp, Homo sapiens
agaacttcatatcaa

SEQ ID NO: 40362 - DNA, 15 bp, Homo sapiens
gagaacttcatatca

SEQ ID NO: 40363 - DNA, 15 bp, Homo sapiens
ggagaacttcatatc

SEQ ID NO: 40364 - DNA, 15 bp, Homo sapiens
tggagaacttcatat

SEQ ID NO: 40365 - DNA, 15 bp, Homo sapiens
ttggagaacttcata

SEQ ID NO: 40366 - DNA, 15 bp, Homo sapiens
tttggagaacttcat

SEQ ID NO: 40367 - DNA, 15 bp, Homo sapiens
ttttggagaacttca

SEQ ID NO: 40368 - DNA, 15 bp, Homo sapiens
cttttggagaacttc

SEQ ID NO: 40369 - DNA, 15 bp, Homo sapiens
tcttttggagaactt

SEQ ID NO: 40370 - DNA, 15 bp, Homo sapiens
gtcttttggagaact

SEQ ID NO: 40371 - DNA, 15 bp, Homo sapiens
agtcttttggagaac

SEQ ID NO: 40372 - DNA, 15 bp, Homo sapiens
aagtcttttggagaa

SEQ ID NO: 40373 - DNA, 15 bp, Homo sapiens
gaagtcttttggaga

SEQ ID NO: 40374 - DNA, 15 bp, Homo sapiens
tgaagtcttttggag

SEQ ID NO: 40375 - DNA, 15 bp, Homo sapiens
ttgaagtcttttgga

SEQ ID NO: 40376 - DNA, 15 bp, Homo sapiens
cttgaagtcttttgg

SEQ ID NO: 40377 - DNA, 15 bp, Homo sapiens
ccttgaagtcttttg

SEQ ID NO: 40378 - DNA, 15 bp, Homo sapiens
tccttgaagtctttt

SEQ ID NO: 40379 - DNA, 15 bp, Homo sapiens
gtccttgaagtcttt

SEQ ID NO: 40380 - DNA, 15 bp, Homo sapiens
ggtccttgaagtctt

SEQ ID NO: 40381 - DNA, 15 bp, Homo sapiens
gggtccttgaagtct

SEQ ID NO: 40382 - DNA, 15 bp, Homo sapiens
tgggtccttgaagtc

SEQ ID NO: 40383 - DNA, 15 bp, Homo sapiens
ctgggtccttgaagt

SEQ ID NO: 40384 - DNA, 15 bp, Homo sapiens
gctgggtccttgaag

SEQ ID NO: 40385 - DNA, 15 bp, Homo sapiens
agctgggtccttgaa

SEQ ID NO: 40386 - DNA, 15 bp, Homo sapiens
aagctgggtccttga

SEQ ID NO: 40387 - DNA, 15 bp, Homo sapiens
gaagctgggtccttg

SEQ ID NO: 40388 - DNA, 15 bp, Homo sapiens
ggaagctgggtcctt

SEQ ID NO: 40389 - DNA, 15 bp, Homo sapiens
tggaagctgggtcct

SEQ ID NO: 40390 - DNA, 15 bp, Homo sapiens
ttggaagctgggtcc

SEQ ID NO: 40391 - DNA, 15 bp, Homo sapiens
attggaagctgggtc

SEQ ID NO: 40392 - DNA, 15 bp, Homo sapiens
gattggaagctgggt

SEQ ID NO: 40393 - DNA, 15 bp, Homo sapiens
agattggaagctggg

SEQ ID NO: 40394 - DNA, 15 bp, Homo sapiens
aagattggaagctgg

SEQ ID NO: 40395 - DNA, 15 bp, Homo sapiens
gaagattggaagctg

SEQ ID NO: 40396 - DNA, 15 bp, Homo sapiens
tgaagattggaagct

SEQ ID NO: 40397 - DNA, 15 bp, Homo sapiens
atgaagattggaagc

SEQ ID NO: 40398 - DNA, 15 bp, Homo sapiens
tatgaagattggaag

SEQ ID NO: 40399 - DNA, 15 bp, Homo sapiens
ttatgaagattggaa

SEQ ID NO: 40400 - DNA, 15 bp, Homo sapiens
attatgaagattgga

SEQ ID NO: 40401 - DNA, 15 bp, Homo sapiens
gattatgaagattgg

SEQ ID NO: 40402 - DNA, 15 bp, Homo sapiens
ggattatgaagattg

SEQ ID NO: 40403 - DNA, 15 bp, Homo sapiens
aggattatgaagatt

SEQ ID NO: 40404 - DNA, 15 bp, Homo sapiens
gaggattatgaagat

SEQ ID NO: 40405 - DNA, 15 bp, Homo sapiens
agaggattatgaaga

SEQ ID NO: 40406 - DNA, 15 bp, Homo sapiens
aagaggattatgaag

SEQ ID NO: 40407 - DNA, 15 bp, Homo sapiens
caagaggattatgaa

SEQ ID NO: 40408 - DNA, 15 bp, Homo sapiens
acaagaggattatga

SEQ ID NO: 40409 - DNA, 15 bp, Homo sapiens
cacaagaggattatg

SEQ ID NO: 40410 - DNA, 15 bp, Homo sapiens
gcacaagaggattat

SEQ ID NO: 40411 - DNA, 15 bp, Homo sapiens
agcacaagaggatta

SEQ ID NO: 40412 - DNA, 15 bp, Homo sapiens
aagcacaagaggatt

SEQ ID NO: 40413 - DNA, 15 bp, Homo sapiens
caagcacaagaggat

SEQ ID NO: 40414 - DNA, 15 bp, Homo sapiens
acaagcacaagagga

SEQ ID NO: 40415 - DNA, 15 bp, Homo sapiens
gacaagcacaagagg

SEQ ID NO: 40416 - DNA, 15 bp, Homo sapiens
agacaagcacaagag

SEQ ID NO: 40417 - DNA, 15 bp, Homo sapiens
gagacaagcacaaga

SEQ ID NO: 40418 - DNA, 15 bp, Homo sapiens
agagacaagcacaag

SEQ ID NO: 40419 - DNA, 15 bp, Homo sapiens
gagagacaagcacaa

SEQ ID NO: 40420 - DNA, 15 bp, Homo sapiens
agagagacaagcaca

SEQ ID NO: 40421 - DNA, 15 bp, Homo sapiens
aagagagacaagcac

SEQ ID NO: 40422 - DNA, 15 bp, Homo sapiens
aaagagagacaagca

SEQ ID NO: 40423 - DNA, 15 bp, Homo sapiens
caaagagagacaagc

SEQ ID NO: 40424 - DNA, 15 bp, Homo sapiens
gcaaagagagacaag

SEQ ID NO: 40425 - DNA, 15 bp, Homo sapiens
tgcaaagagagacaa

SEQ ID NO: 40426 - DNA, 15 bp, Homo sapiens
atgcaaagagagaca

SEQ ID NO: 40427 - DNA, 15 bp, Homo sapiens
catgcaaagagagac

SEQ ID NO: 40428 - DNA, 15 bp, Homo sapiens
tcatgcaaagagaga

SEQ ID NO: 40429 - DNA, 15 bp, Homo sapiens
ttcatgcaaagagag

SEQ ID NO: 40430 - DNA, 15 bp, Homo sapiens
tttcatgcaaagaga

SEQ ID NO: 40431 - DNA, 15 bp, Homo sapiens
atttcatgcaaagag

SEQ ID NO: 40432 - DNA, 15 bp, Homo sapiens
catttcatgcaaaga

SEQ ID NO: 40433 - DNA, 15 bp, Homo sapiens
gcatttcatgcaaag

SEQ ID NO: 40434 - DNA, 15 bp, Homo sapiens
agcatttcatgcaaa

SEQ ID NO: 40435 - DNA, 15 bp, Homo sapiens
aagcatttcatgcaa

SEQ ID NO: 40436 - DNA, 15 bp, Homo sapiens
gaagcatttcatgca

SEQ ID NO: 40437 - DNA, 15 bp, Homo sapiens
ggaagcatttcatgc

SEQ ID NO: 40438 - DNA, 15 bp, Homo sapiens
tggaagcatttcatg

SEQ ID NO: 40439 - DNA, 15 bp, Homo sapiens
ctggaagcatttcat

SEQ ID NO: 40440 - DNA, 15 bp, Homo sapiens
cctggaagcatttca

SEQ ID NO: 40441 - DNA, 15 bp, Homo sapiens
acctggaagcatttc

SEQ ID NO: 40442 - DNA, 15 bp, Homo sapiens
tacctggaagcattt

SEQ ID NO: 40443 - DNA, 15 bp, Homo sapiens
atacctggaagcatt

SEQ ID NO: 40444 - DNA, 15 bp, Homo sapiens
aatacctggaagcat

SEQ ID NO: 40445 - DNA, 15 bp, Homo sapiens
aaatacctggaagca

SEQ ID NO: 40446 - DNA, 15 bp, Homo sapiens
aaaatacctggaagc

SEQ ID NO: 40447 - DNA, 15 bp, Homo sapiens
aaaaatacctggaag

SEQ ID NO: 40448 - DNA, 15 bp, Homo sapiens
caaaaatacctggaa

SEQ ID NO: 40449 - DNA, 15 bp, Homo sapiens
gcaaaaatacctgga

SEQ ID NO: 40450 - DNA, 15 bp, Homo sapiens
tgcaaaaatacctgg

SEQ ID NO: 40451 - DNA, 15 bp, Homo sapiens
ttgcaaaaatacctg

SEQ ID NO: 40452 - DNA, 15 bp, Homo sapiens
cttgcaaaaatacct

SEQ ID NO: 40453 - DNA, 15 bp, Homo sapiens
ccttgcaaaaatacc

SEQ ID NO: 40454 - DNA, 15 bp, Homo sapiens
gccttgcaaaaatac

SEQ ID NO: 40455 - DNA, 15 bp, Homo sapiens
agccttgcaaaaata

SEQ ID NO: 40456 - DNA, 15 bp, Homo sapiens
tagccttgcaaaaat

SEQ ID NO: 40457 - DNA, 15 bp, Homo sapiens
gtagccttgcaaaaa

SEQ ID NO: 40458 - DNA, 15 bp, Homo sapiens
ggtagccttgcaaaa

SEQ ID NO: 40459 - DNA, 15 bp, Homo sapiens
tggtagccttgcaaa

SEQ ID NO: 40460 - DNA, 15 bp, Homo sapiens
ctggtagccttgcaa

SEQ ID NO: 40461 - DNA, 15 bp, Homo sapiens
actggtagccttgca

SEQ ID NO: 40462 - DNA, 15 bp, Homo sapiens
aactggtagccttgc

SEQ ID NO: 40463 - DNA, 15 bp, Homo sapiens
taactggtagccttg

SEQ ID NO: 40464 - DNA, 15 bp, Homo sapiens
gtaactggtagcctt

SEQ ID NO: 40465 - DNA, 15 bp, Homo sapiens
tgtaactggtagcct

SEQ ID NO: 40466 - DNA, 15 bp, Homo sapiens
atgtaactggtagcc

SEQ ID NO: 40467 - DNA, 15 bp, Homo sapiens
aatgtaactggtagc

SEQ ID NO: 40468 - DNA, 15 bp, Homo sapiens
aaatgtaactggtag

SEQ ID NO: 40469 - DNA, 15 bp, Homo sapiens
caaatgtaactggta

SEQ ID NO: 40470 - DNA, 15 bp, Homo sapiens
tcaaatgtaactggt

SEQ ID NO: 40471 - DNA, 15 bp, Homo sapiens
gtcaaatgtaactgg

SEQ ID NO: 40472 - DNA, 15 bp, Homo sapiens
tgtcaaatgtaactg

SEQ ID NO: 40473 - DNA, 15 bp, Homo sapiens
ttgtcaaatgtaact

SEQ ID NO: 40474 - DNA, 15 bp, Homo sapiens
cttgtcaaatgtaac

SEQ ID NO: 40475 - DNA, 15 bp, Homo sapiens
acttgtcaaatgtaa

SEQ ID NO: 40476 - DNA, 15 bp, Homo sapiens
gacttgtcaaatgta

SEQ ID NO: 40477 - DNA, 15 bp, Homo sapiens
agacttgtcaaatgt

SEQ ID NO: 40478 - DNA, 15 bp, Homo sapiens
cagacttgtcaaatg

SEQ ID NO: 40479 - DNA, 15 bp, Homo sapiens
acagacttgtcaaat

SEQ ID NO: 40480 - DNA, 15 bp, Homo sapiens
cacagacttgtcaaa

SEQ ID NO: 40481 - DNA, 15 bp, Homo sapiens
gcacagacttgtcaa

SEQ ID NO: 40482 - DNA, 15 bp, Homo sapiens
tgcacagacttgtca

SEQ ID NO: 40483 - DNA, 15 bp, Homo sapiens
ttgcacagacttgtc

SEQ ID NO: 40484 - DNA, 15 bp, Homo sapiens
attgcacagacttgt

SEQ ID NO: 40485 - DNA, 15 bp, Homo sapiens
cattgcacagacttg

SEQ ID NO: 40486 - DNA, 15 bp, Homo sapiens
ccattgcacagactt

SEQ ID NO: 40487 - DNA, 15 bp, Homo sapiens
tccattgcacagact

SEQ ID NO: 40488 - DNA, 15 bp, Homo sapiens
atccattgcacagac

SEQ ID NO: 40489 - DNA, 15 bp, Homo sapiens
gatccattgcacaga

SEQ ID NO: 40490 - DNA, 15 bp, Homo sapiens
tgatccattgcacag

SEQ ID NO: 40491 - DNA, 15 bp, Homo sapiens
ttgatccattgcaca

SEQ ID NO: 40492 - DNA, 15 bp, Homo sapiens
tttgatccattgcac

SEQ ID NO: 40493 - DNA, 15 bp, Homo sapiens
ttttgatccattgca

SEQ ID NO: 40494 - DNA, 15 bp, Homo sapiens
attttgatccattgc

SEQ ID NO: 40495 - DNA, 15 bp, Homo sapiens
gattttgatccattg

SEQ ID NO: 40496 - DNA, 15 bp, Homo sapiens
tgattttgatccatt

SEQ ID NO: 40497 - DNA, 15 bp, Homo sapiens
ctgattttgatccat

SEQ ID NO: 40498 - DNA, 15 bp, Homo sapiens
tctgattttgatcca

SEQ ID NO: 40499 - DNA, 15 bp, Homo sapiens
ttctgattttgatcc

SEQ ID NO: 40500 - DNA, 15 bp, Homo sapiens
cttctgattttgatc

SEQ ID NO: 40501 - DNA, 15 bp, Homo sapiens
tcttctgattttgat

SEQ ID NO: 40502 - DNA, 15 bp, Homo sapiens
ctcttctgattttga

SEQ ID NO: 40503 - DNA, 15 bp, Homo sapiens
tctcttctgattttg

SEQ ID NO: 40504 - DNA, 15 bp, Homo sapiens
atctcttctgatttt

SEQ ID NO: 40505 - DNA, 15 bp, Homo sapiens
catctcttctgattt

SEQ ID NO: 40506 - DNA, 15 bp, Homo sapiens
tcatctcttctgatt

SEQ ID NO: 40507 - DNA, 15 bp, Homo sapiens
atcatctcttctgat

SEQ ID NO: 40508 - DNA, 15 bp, Homo sapiens
aatcatctcttctga

SEQ ID NO: 40509 - DNA, 15 bp, Homo sapiens
gaatcatctcttctg

SEQ ID NO: 40510 - DNA, 15 bp, Homo sapiens
tgaatcatctcttct

SEQ ID NO: 40511 - DNA, 15 bp, Homo sapiens
ttgaatcatctcttc

SEQ ID NO: 40512 - DNA, 15 bp, Homo sapiens
gttgaatcatctctt

SEQ ID NO: 40513 - DNA, 15 bp, Homo sapiens
agttgaatcatctct

SEQ ID NO: 40514 - DNA, 15 bp, Homo sapiens
aagttgaatcatctc

SEQ ID NO: 40515 - DNA, 15 bp, Homo sapiens
caagttgaatcatct

SEQ ID NO: 40516 - DNA, 15 bp, Homo sapiens
ccaagttgaatcatc

SEQ ID NO: 40517 - DNA, 15 bp, Homo sapiens
accaagttgaatcat

SEQ ID NO: 40518 - DNA, 15 bp, Homo sapiens
caccaagttgaatca

SEQ ID NO: 40519 - DNA, 15 bp, Homo sapiens
tcaccaagttgaatc

SEQ ID NO: 40520 - DNA, 15 bp, Homo sapiens
gtcaccaagttgaat

SEQ ID NO: 40521 - DNA, 15 bp, Homo sapiens
ggtcaccaagttgaa

SEQ ID NO: 40522 - DNA, 15 bp, Homo sapiens
tggtcaccaagttga

SEQ ID NO: 40523 - DNA, 15 bp, Homo sapiens
ttggtcaccaagttg

SEQ ID NO: 40524 - DNA, 15 bp, Homo sapiens
cttggtcaccaagtt

SEQ ID NO: 40525 - DNA, 15 bp, Homo sapiens
tcttggtcaccaagt

SEQ ID NO: 40526 - DNA, 15 bp, Homo sapiens
ttcttggtcaccaag

SEQ ID NO: 40527 - DNA, 15 bp, Homo sapiens
cttcttggtcaccaa

SEQ ID NO: 40528 - DNA, 15 bp, Homo sapiens
acttcttggtcacca

SEQ ID NO: 40529 - DNA, 15 bp, Homo sapiens
aacttcttggtcacc

SEQ ID NO: 40530 - DNA, 15 bp, Homo sapiens
aaacttcttggtcac

SEQ ID NO: 40531 - DNA, 15 bp, Homo sapiens
gaaacttcttggtca

SEQ ID NO: 40532 - DNA, 15 bp, Homo sapiens
agaaacttcttggtc

SEQ ID NO: 40533 - DNA, 15 bp, Homo sapiens
cagaaacttcttggt

SEQ ID NO: 40534 - DNA, 15 bp, Homo sapiens
tcagaaacttcttgg

SEQ ID NO: 40535 - DNA, 15 bp, Homo sapiens
ctcagaaacttcttg

SEQ ID NO: 40536 - DNA, 15 bp, Homo sapiens
gctcagaaacttctt

SEQ ID NO: 40537 - DNA, 15 bp, Homo sapiens
agctcagaaacttct

SEQ ID NO: 40538 - DNA, 15 bp, Homo sapiens
aagctcagaaacttc

SEQ ID NO: 40539 - DNA, 15 bp, Homo sapiens
aaagctcagaaactt

SEQ ID NO: 40540 - DNA, 15 bp, Homo sapiens
caaagctcagaaact

SEQ ID NO: 40541 - DNA, 15 bp, Homo sapiens
acaaagctcagaaac

SEQ ID NO: 40542 - DNA, 15 bp, Homo sapiens
cacaaagctcagaaa

SEQ ID NO: 40543 - DNA, 15 bp, Homo sapiens
ccacaaagctcagaa

SEQ ID NO: 40544 - DNA, 15 bp, Homo sapiens
gccacaaagctcaga

SEQ ID NO: 40545 - DNA, 15 bp, Homo sapiens
ggccacaaagctcag

SEQ ID NO: 40546 - DNA, 15 bp, Homo sapiens
aggccacaaagctca

SEQ ID NO: 40547 - DNA, 15 bp, Homo sapiens
taggccacaaagctc

SEQ ID NO: 40548 - DNA, 15 bp, Homo sapiens
gtaggccacaaagct

SEQ ID NO: 40549 - DNA, 15 bp, Homo sapiens
ggtaggccacaaagc

SEQ ID NO: 40550 - DNA, 15 bp, Homo sapiens
tggtaggccacaaag

SEQ ID NO: 40551 - DNA, 15 bp, Homo sapiens
ttggtaggccacaaa

SEQ ID NO: 40552 - DNA, 15 bp, Homo sapiens
cttggtaggccacaa

SEQ ID NO: 40553 - DNA, 15 bp, Homo sapiens
ccttggtaggccaca

SEQ ID NO: 40554 - DNA, 15 bp, Homo sapiens
cccttggtaggccac

SEQ ID NO: 40555 - DNA, 15 bp, Homo sapiens
tcccttggtaggcca

SEQ ID NO: 40556 - DNA, 15 bp, Homo sapiens
ctcccttggtaggcc

SEQ ID NO: 40557 - DNA, 15 bp, Homo sapiens
tctcccttggtaggc

SEQ ID NO: 40558 - DNA, 15 bp, Homo sapiens
ttctcccttggtagg

SEQ ID NO: 40559 - DNA, 15 bp, Homo sapiens
tttctcccttggtag

SEQ ID NO: 40560 - DNA, 15 bp, Homo sapiens
gtttctcccttggta

SEQ ID NO: 40561 - DNA, 15 bp, Homo sapiens
agtttctcccttggt

SEQ ID NO: 40562 - DNA, 15 bp, Homo sapiens
cagtttctcccttgg

SEQ ID NO: 40563 - DNA, 15 bp, Homo sapiens
ccagtttctcccttg

SEQ ID NO: 40564 - DNA, 15 bp, Homo sapiens
gccagtttctccctt

SEQ ID NO: 40565 - DNA, 15 bp, Homo sapiens
agccagtttctccct

SEQ ID NO: 40566 - DNA, 15 bp, Homo sapiens
cagccagtttctccc

SEQ ID NO: 40567 - DNA, 15 bp, Homo sapiens
gcagccagtttctcc

SEQ ID NO: 40568 - DNA, 15 bp, Homo sapiens
tgcagccagtttctc

SEQ ID NO: 40569 - DNA, 15 bp, Homo sapiens
ctgcagccagtttct

SEQ ID NO: 40570 - DNA, 15 bp, Homo sapiens
gctgcagccagtttc

SEQ ID NO: 40571 - DNA, 15 bp, Homo sapiens
tgctgcagccagttt

SEQ ID NO: 40572 - DNA, 15 bp, Homo sapiens
ctgctgcagccagtt

SEQ ID NO: 40573 - DNA, 15 bp, Homo sapiens
tctgctgcagccagt

SEQ ID NO: 40574 - DNA, 15 bp, Homo sapiens
ctctgctgcagccag

SEQ ID NO: 40575 - DNA, 15 bp, Homo sapiens
gctctgctgcagcca

SEQ ID NO: 40576 - DNA, 15 bp, Homo sapiens
cgctctgctgcagcc

SEQ ID NO: 40577 - DNA, 15 bp, Homo sapiens
tcgctctgctgcagc

SEQ ID NO: 40578 - DNA, 15 bp, Homo sapiens
ctcgctctgctgcag

SEQ ID NO: 40579 - DNA, 15 bp, Homo sapiens
actcgctctgctgca

SEQ ID NO: 40580 - DNA, 15 bp, Homo sapiens
tactcgctctgctgc

SEQ ID NO: 40581 - DNA, 15 bp, Homo sapiens
gtactcgctctgctg

SEQ ID NO: 40582 - DNA, 15 bp, Homo sapiens
agtactcgctctgct

SEQ ID NO: 40583 - DNA, 15 bp, Homo sapiens
aagtactcgctctgc

SEQ ID NO: 40584 - DNA, 15 bp, Homo sapiens
gaagtactcgctctg

SEQ ID NO: 40585 - DNA, 15 bp, Homo sapiens
cgaagtactcgctct

SEQ ID NO: 40586 - DNA, 15 bp, Homo sapiens
acgaagtactcgctc

SEQ ID NO: 40587 - DNA, 15 bp, Homo sapiens
aacgaagtactcgct

SEQ ID NO: 40588 - DNA, 15 bp, Homo sapiens
gaacgaagtactcgc

SEQ ID NO: 40589 - DNA, 15 bp, Homo sapiens
ggaacgaagtactcg

SEQ ID NO: 40590 - DNA, 15 bp, Homo sapiens
tggaacgaagtactc

SEQ ID NO: 40591 - DNA, 15 bp, Homo sapiens
ttggaacgaagtact

SEQ ID NO: 40592 - DNA, 15 bp, Homo sapiens
gttggaacgaagtac

SEQ ID NO: 40593 - DNA, 15 bp, Homo sapiens
tgttggaacgaagta

SEQ ID NO: 40594 - DNA, 15 bp, Homo sapiens
atgttggaacgaagt

SEQ ID NO: 40595 - DNA, 15 bp, Homo sapiens
catgttggaacgaag

SEQ ID NO: 40596 - DNA, 15 bp, Homo sapiens
ccatgttggaacgaa

SEQ ID NO: 40597 - DNA, 15 bp, Homo sapiens
tccatgttggaacga

SEQ ID NO: 40598 - DNA, 15 bp, Homo sapiens
gtccatgttggaacg

SEQ ID NO: 40599 - DNA, 15 bp, Homo sapiens
tgtccatgttggaac

SEQ ID NO: 40600 - DNA, 15 bp, Homo sapiens
atgtccatgttggaa

SEQ ID NO: 40601 - DNA, 15 bp, Homo sapiens
gatgtccatgttgga

SEQ ID NO: 40602 - DNA, 15 bp, Homo sapiens
ggatgtccatgttgg

SEQ ID NO: 40603 - DNA, 15 bp, Homo sapiens
aggatgtccatgttg

SEQ ID NO: 40604 - DNA, 15 bp, Homo sapiens
caggatgtccatgtt

SEQ ID NO: 40605 - DNA, 15 bp, Homo sapiens
tcaggatgtccatgt

SEQ ID NO: 40606 - DNA, 15 bp, Homo sapiens
ttcaggatgtccatg

SEQ ID NO: 40607 - DNA, 15 bp, Homo sapiens
cttcaggatgtccat

SEQ ID NO: 40608 - DNA, 15 bp, Homo sapiens
gcttcaggatgtcca

SEQ ID NO: 40609 - DNA, 15 bp, Homo sapiens
ggcttcaggatgtcc

SEQ ID NO: 40610 - DNA, 15 bp, Homo sapiens
tggcttcaggatgtc

SEQ ID NO: 40611 - DNA, 15 bp, Homo sapiens
ttggcttcaggatgt

SEQ ID NO: 40612 - DNA, 15 bp, Homo sapiens
attggcttcaggatg

SEQ ID NO: 40613 - DNA, 15 bp, Homo sapiens
gattggcttcaggat

SEQ ID NO: 40614 - DNA, 15 bp, Homo sapiens
ggattggcttcagga

SEQ ID NO: 40615 - DNA, 15 bp, Homo sapiens
aggattggcttcagg

SEQ ID NO: 40616 - DNA, 15 bp, Homo sapiens
caggattggcttcag

SEQ ID NO: 40617 - DNA, 15 bp, Homo sapiens
ccaggattggcttca

SEQ ID NO: 40618 - DNA, 15 bp, Homo sapiens
accaggattggcttc

SEQ ID NO: 40619 - DNA, 15 bp, Homo sapiens
caccaggattggctt

SEQ ID NO: 40620 - DNA, 15 bp, Homo sapiens
tcaccaggattggct

SEQ ID NO: 40621 - DNA, 15 bp, Homo sapiens
ctcaccaggattggc

SEQ ID NO: 40622 - DNA, 15 bp, Homo sapiens
actcaccaggattgg

SEQ ID NO: 40623 - DNA, 15 bp, Homo sapiens
tactcaccaggattg

SEQ ID NO: 40624 - DNA, 15 bp, Homo sapiens
ctactcaccaggatt

SEQ ID NO: 40625 - DNA, 15 bp, Homo sapiens
tctactcaccaggat

SEQ ID NO: 40626 - DNA, 15 bp, Homo sapiens
gtctactcaccagga

SEQ ID NO: 40627 - DNA, 15 bp, Homo sapiens
agtctactcaccagg

SEQ ID NO: 40628 - DNA, 15 bp, Homo sapiens
aagtctactcaccag

SEQ ID NO: 40629 - DNA, 15 bp, Homo sapiens
caagtctactcacca

SEQ ID NO: 40630 - DNA, 15 bp, Homo sapiens
gcaagtctactcacc

SEQ ID NO: 40631 - DNA, 15 bp, Homo sapiens
agcaagtctactcac

SEQ ID NO: 40632 - DNA, 15 bp, Homo sapiens
gagcaagtctactca

SEQ ID NO: 40633 - DNA, 15 bp, Homo sapiens
tgagcaagtctactc

SEQ ID NO: 40634 - DNA, 15 bp, Homo sapiens
gtgagcaagtctact

SEQ ID NO: 40635 - DNA, 15 bp, Homo sapiens
agtgagcaagtctac

SEQ ID NO: 40636 - DNA, 15 bp, Homo sapiens
cagtgagcaagtcta

SEQ ID NO: 40637 - DNA, 15 bp, Homo sapiens
ccagtgagcaagtct

SEQ ID NO: 40638 - DNA, 15 bp, Homo sapiens
tccagtgagcaagtc

SEQ ID NO: 40639 - DNA, 15 bp, Homo sapiens
ctccagtgagcaagt

SEQ ID NO: 40640 - DNA, 15 bp, Homo sapiens
tctccagtgagcaag

SEQ ID NO: 40641 - DNA, 15 bp, Homo sapiens
ttctccagtgagcaa

SEQ ID NO: 40642 - DNA, 15 bp, Homo sapiens
tttctccagtgagca

SEQ ID NO: 40643 - DNA, 15 bp, Homo sapiens
gtttctccagtgagc

SEQ ID NO: 40644 - DNA, 15 bp, Homo sapiens
agtttctccagtgag

SEQ ID NO: 40645 - DNA, 15 bp, Homo sapiens
aagtttctccagtga

SEQ ID NO: 40646 - DNA, 15 bp, Homo sapiens
gaagtttctccagtg

SEQ ID NO: 40647 - DNA, 15 bp, Homo sapiens
tgaagtttctccagt

SEQ ID NO: 40648 - DNA, 15 bp, Homo sapiens
ttgaagtttctccag

SEQ ID NO: 40649 - DNA, 15 bp, Homo sapiens
cttgaagtttctcca

SEQ ID NO: 40650 - DNA, 15 bp, Homo sapiens
gcttgaagtttctcc

SEQ ID NO: 40651 - DNA, 15 bp, Homo sapiens
tgcttgaagtttctc

SEQ ID NO: 40652 - DNA, 15 bp, Homo sapiens
gtgcttgaagtttct

SEQ ID NO: 40653 - DNA, 15 bp, Homo sapiens
agtgcttgaagtttc

SEQ ID NO: 40654 - DNA, 15 bp, Homo sapiens
tagtgcttgaagttt

SEQ ID NO: 40655 - DNA, 15 bp, Homo sapiens
ttagtgcttgaagtt

SEQ ID NO: 40656 - DNA, 15 bp, Homo sapiens
attagtgcttgaagt

SEQ ID NO: 40657 - DNA, 15 bp, Homo sapiens
cattagtgcttgaag

SEQ ID NO: 40658 - DNA, 15 bp, Homo sapiens
gcattagtgcttgaa

SEQ ID NO: 40659 - DNA, 15 bp, Homo sapiens
agcattagtgcttga

SEQ ID NO: 40660 - DNA, 15 bp, Homo sapiens
aagcattagtgcttg

SEQ ID NO: 40661 - DNA, 15 bp, Homo sapiens
aaagcattagtgctt

SEQ ID NO: 40662 - DNA, 15 bp, Homo sapiens
gaaagcattagtgct

SEQ ID NO: 40663 - DNA, 15 bp, Homo sapiens
cgaaagcattagtgc

SEQ ID NO: 40664 - DNA, 15 bp, Homo sapiens
ccgaaagcattagtg

SEQ ID NO: 40665 - DNA, 15 bp, Homo sapiens
tccgaaagcattagt

SEQ ID NO: 40666 - DNA, 15 bp, Homo sapiens
ttccgaaagcattag

SEQ ID NO: 40667 - DNA, 15 bp, Homo sapiens
attccgaaagcatta

SEQ ID NO: 40668 - DNA, 15 bp, Homo sapiens
cattccgaaagcatt

SEQ ID NO: 40669 - DNA, 15 bp, Homo sapiens
acattccgaaagcat

SEQ ID NO: 40670 - DNA, 15 bp, Homo sapiens
cacattccgaaagca

SEQ ID NO: 40671 - DNA, 15 bp, Homo sapiens
tcacattccgaaagc

SEQ ID NO: 40672 - DNA, 15 bp, Homo sapiens
ctcacattccgaaag

SEQ ID NO: 40673 - DNA, 15 bp, Homo sapiens
cctcacattccgaaa

SEQ ID NO: 40674 - DNA, 15 bp, Homo sapiens
gcctcacattccgaa

SEQ ID NO: 40675 - DNA, 15 bp, Homo sapiens
agcctcacattccga

SEQ ID NO: 40676 - DNA, 15 bp, Homo sapiens
aagcctcacattccg

SEQ ID NO: 40677 - DNA, 15 bp, Homo sapiens
aaagcctcacattcc

SEQ ID NO: 40678 - DNA, 15 bp, Homo sapiens
aaaagcctcacattc

SEQ ID NO: 40679 - DNA, 15 bp, Homo sapiens
gaaaagcctcacatt

SEQ ID NO: 40680 - DNA, 15 bp, Homo sapiens
ggaaaagcctcacat

SEQ ID NO: 40681 - DNA, 15 bp, Homo sapiens
aggaaaagcctcaca

SEQ ID NO: 40682 - DNA, 15 bp, Homo sapiens
aaggaaaagcctcac

SEQ ID NO: 40683 - DNA, 15 bp, Homo sapiens
caaggaaaagcctca

SEQ ID NO: 40684 - DNA, 15 bp, Homo sapiens
ccaaggaaaagcctc

SEQ ID NO: 40685 - DNA, 15 bp, Homo sapiens
tccaaggaaaagcct

SEQ ID NO: 40686 - DNA, 15 bp, Homo sapiens
gtccaaggaaaagcc

SEQ ID NO: 40687 - DNA, 15 bp, Homo sapiens
tgtccaaggaaaagc

SEQ ID NO: 40688 - DNA, 15 bp, Homo sapiens
ctgtccaaggaaaag

SEQ ID NO: 40689 - DNA, 15 bp, Homo sapiens
gctgtccaaggaaaa

SEQ ID NO: 40690 - DNA, 15 bp, Homo sapiens
tgctgtccaaggaaa

SEQ ID NO: 40691 - DNA, 15 bp, Homo sapiens
atgctgtccaaggaa

SEQ ID NO: 40692 - DNA, 15 bp, Homo sapiens
catgctgtccaagga

SEQ ID NO: 40693 - DNA, 15 bp, Homo sapiens
tcatgctgtccaagg

SEQ ID NO: 40694 - DNA, 15 bp, Homo sapiens
gtcatgctgtccaag

SEQ ID NO: 40695 - DNA, 15 bp, Homo sapiens
agtcatgctgtccaa

SEQ ID NO: 40696 - DNA, 15 bp, Homo sapiens
aagtcatgctgtcca

SEQ ID NO: 40697 - DNA, 15 bp, Homo sapiens
aaagtcatgctgtcc

SEQ ID NO: 40698 - DNA, 15 bp, Homo sapiens
caaagtcatgctgtc

SEQ ID NO: 40699 - DNA, 15 bp, Homo sapiens
acaaagtcatgctgt

SEQ ID NO: 40700 - DNA, 15 bp, Homo sapiens
aacaaagtcatgctg

SEQ ID NO: 40701 - DNA, 15 bp, Homo sapiens
aaacaaagtcatgct

SEQ ID NO: 40702 - DNA, 15 bp, Homo sapiens
aaaacaaagtcatgc

SEQ ID NO: 40703 - DNA, 15 bp, Homo sapiens
caaaacaaagtcatg

SEQ ID NO: 40704 - DNA, 15 bp, Homo sapiens
acaaaacaaagtcat

SEQ ID NO: 40705 - DNA, 15 bp, Homo sapiens
tacaaaacaaagtca

SEQ ID NO: 40706 - DNA, 15 bp, Homo sapiens
ctacaaaacaaagtc

SEQ ID NO: 40707 - DNA, 15 bp, Homo sapiens
tctacaaaacaaagt

SEQ ID NO: 40708 - DNA, 15 bp, Homo sapiens
ttctacaaaacaaag

SEQ ID NO: 40709 - DNA, 15 bp, Homo sapiens
tttctacaaaacaaa

SEQ ID NO: 40710 - DNA, 15 bp, Homo sapiens
ttttctacaaaacaa

SEQ ID NO: 40711 - DNA, 15 bp, Homo sapiens
cttttctacaaaaca

SEQ ID NO: 40712 - DNA, 15 bp, Homo sapiens
acttttctacaaaac

SEQ ID NO: 40713 - DNA, 15 bp, Homo sapiens
tacttttctacaaaa

SEQ ID NO: 40714 - DNA, 15 bp, Homo sapiens
gtacttttctacaaa

SEQ ID NO: 40715 - DNA, 15 bp, Homo sapiens
cgtacttttctacaa

SEQ ID NO: 40716 - DNA, 15 bp, Homo sapiens
ccgtacttttctaca

SEQ ID NO: 40717 - DNA, 15 bp, Homo sapiens
gccgtacttttctac

SEQ ID NO: 40718 - DNA, 15 bp, Homo sapiens
agccgtacttttcta

SEQ ID NO: 40719 - DNA, 15 bp, Homo sapiens
cagccgtacttttct

SEQ ID NO: 40720 - DNA, 15 bp, Homo sapiens
ccagccgtacttttc

SEQ ID NO: 40721 - DNA, 15 bp, Homo sapiens
gccagccgtactttt

SEQ ID NO: 40722 - DNA, 15 bp, Homo sapiens
agccagccgtacttt

SEQ ID NO: 40723 - DNA, 15 bp, Homo sapiens
cagccagccgtactt

SEQ ID NO: 40724 - DNA, 15 bp, Homo sapiens
ccagccagccgtact

SEQ ID NO: 40725 - DNA, 15 bp, Homo sapiens
cccagccagccgtac

SEQ ID NO: 40726 - DNA, 15 bp, Homo sapiens
tcccagccagccgta

SEQ ID NO: 40727 - DNA, 15 bp, Homo sapiens
ctcccagccagccgt

SEQ ID NO: 40728 - DNA, 15 bp, Homo sapiens
actcccagccagccg

SEQ ID NO: 40729 - DNA, 15 bp, Homo sapiens
aactcccagccagcc

SEQ ID NO: 40730 - DNA, 15 bp, Homo sapiens
aaactcccagccagc

SEQ ID NO: 40731 - DNA, 15 bp, Homo sapiens
caaactcccagccag

SEQ ID NO: 40732 - DNA, 15 bp, Homo sapiens
acaaactcccagcca

SEQ ID NO: 40733 - DNA, 15 bp, Homo sapiens
cacaaactcccagcc

SEQ ID NO: 40734 - DNA, 15 bp, Homo sapiens
tcacaaactcccagc

SEQ ID NO: 40735 - DNA, 15 bp, Homo sapiens
atcacaaactcccag

SEQ ID NO: 40736 - DNA, 15 bp, Homo sapiens
tatcacaaactccca

SEQ ID NO: 40737 - DNA, 15 bp, Homo sapiens
atatcacaaactccc

SEQ ID NO: 40738 - DNA, 15 bp, Homo sapiens
tatatcacaaactcc

SEQ ID NO: 40739 - DNA, 15 bp, Homo sapiens
ttatatcacaaactc

SEQ ID NO: 40740 - DNA, 15 bp, Homo sapiens
attatatcacaaact

SEQ ID NO: 40741 - DNA, 15 bp, Homo sapiens
aattatatcacaaac

SEQ ID NO: 40742 - DNA, 15 bp, Homo sapiens
aaattatatcacaaa

SEQ ID NO: 40743 - DNA, 15 bp, Homo sapiens
taaattatatcacaa

SEQ ID NO: 40744 - DNA, 15 bp, Homo sapiens
ctaaattatatcaca

SEQ ID NO: 40745 - DNA, 15 bp, Homo sapiens
actaaattatatcac

SEQ ID NO: 40746 - DNA, 15 bp, Homo sapiens
aactaaattatatca

SEQ ID NO: 40747 - DNA, 15 bp, Homo sapiens
gaactaaattatatc

SEQ ID NO: 40748 - DNA, 15 bp, Homo sapiens
tgaactaaattatat

SEQ ID NO: 40749 - DNA, 15 bp, Homo sapiens
ctgaactaaattata

SEQ ID NO: 40750 - DNA, 15 bp, Homo sapiens
actgaactaaattat

SEQ ID NO: 40751 - DNA, 15 bp, Homo sapiens
cactgaactaaatta

SEQ ID NO: 40752 - DNA, 15 bp, Homo sapiens
ccactgaactaaatt

SEQ ID NO: 40753 - DNA, 15 bp, Homo sapiens
accactgaactaaat

SEQ ID NO: 40754 - DNA, 15 bp, Homo sapiens
taccactgaactaaa

SEQ ID NO: 40755 - DNA, 15 bp, Homo sapiens
ataccactgaactaa

SEQ ID NO: 40756 - DNA, 15 bp, Homo sapiens
aataccactgaacta

SEQ ID NO: 40757 - DNA, 15 bp, Homo sapiens
gaataccactgaact

SEQ ID NO: 40758 - DNA, 15 bp, Homo sapiens
agaataccactgaac

SEQ ID NO: 40759 - DNA, 15 bp, Homo sapiens
tagaataccactgaa

SEQ ID NO: 40760 - DNA, 15 bp, Homo sapiens
ttagaataccactga

SEQ ID NO: 40761 - DNA, 15 bp, Homo sapiens
cttagaataccactg

SEQ ID NO: 40762 - DNA, 15 bp, Homo sapiens
acttagaataccact

SEQ ID NO: 40763 - DNA, 15 bp, Homo sapiens
cacttagaataccac

SEQ ID NO: 40764 - DNA, 15 bp, Homo sapiens
acacttagaatacca

SEQ ID NO: 40765 - DNA, 15 bp, Homo sapiens
aacacttagaatacc

SEQ ID NO: 40766 - DNA, 15 bp, Homo sapiens
gaacacttagaatac

SEQ ID NO: 40767 - DNA, 15 bp, Homo sapiens
agaacacttagaata

SEQ ID NO: 40768 - DNA, 15 bp, Homo sapiens
aagaacacttagaat

SEQ ID NO: 40769 - DNA, 15 bp, Homo sapiens
taagaacacttagaa

SEQ ID NO: 40770 - DNA, 15 bp, Homo sapiens
ctaagaacacttaga

SEQ ID NO: 40771 - DNA, 15 bp, Homo sapiens
actaagaacacttag

SEQ ID NO: 40772 - DNA, 15 bp, Homo sapiens
cactaagaacactta

SEQ ID NO: 40773 - DNA, 15 bp, Homo sapiens
acactaagaacactt

SEQ ID NO: 40774 - DNA, 15 bp, Homo sapiens
aacactaagaacact

SEQ ID NO: 40775 - DNA, 15 bp, Homo sapiens
gaacactaagaacac

SEQ ID NO: 40776 - DNA, 15 bp, Homo sapiens
agaacactaagaaca

SEQ ID NO: 40777 - DNA, 15 bp, Homo sapiens
aagaacactaagaac

SEQ ID NO: 40778 - DNA, 15 bp, Homo sapiens
aaagaacactaagaa

SEQ ID NO: 40779 - DNA, 15 bp, Homo sapiens
gaaagaacactaaga

SEQ ID NO: 40780 - DNA, 15 bp, Homo sapiens
tgaaagaacactaag

SEQ ID NO: 40781 - DNA, 15 bp, Homo sapiens
ctgaaagaacactaa

SEQ ID NO: 40782 - DNA, 15 bp, Homo sapiens
tctgaaagaacacta

SEQ ID NO: 40783 - DNA, 15 bp, Homo sapiens
gtctgaaagaacact

SEQ ID NO: 40784 - DNA, 15 bp, Homo sapiens
agtctgaaagaacac

SEQ ID NO: 40785 - DNA, 15 bp, Homo sapiens
aagtctgaaagaaca

SEQ ID NO: 40786 - DNA, 15 bp, Homo sapiens
aaagtctgaaagaac

SEQ ID NO: 40787 - DNA, 15 bp, Homo sapiens
aaaagtctgaaagaa

SEQ ID NO: 40788 - DNA, 15 bp, Homo sapiens
caaaagtctgaaaga

SEQ ID NO: 40789 - DNA, 15 bp, Homo sapiens
ccaaaagtctgaaag

SEQ ID NO: 40790 - DNA, 15 bp, Homo sapiens
cccaaaagtctgaaa

SEQ ID NO: 40791 - DNA, 15 bp, Homo sapiens
gcccaaaagtctgaa

SEQ ID NO: 40792 - DNA, 15 bp, Homo sapiens
ggcccaaaagtctga

SEQ ID NO: 40793 - DNA, 15 bp, Homo sapiens
tggcccaaaagtctg

SEQ ID NO: 40794 - DNA, 15 bp, Homo sapiens
atggcccaaaagtct

SEQ ID NO: 40795 - DNA, 15 bp, Homo sapiens
gatggcccaaaagtc

SEQ ID NO: 40796 - DNA, 15 bp, Homo sapiens
agatggcccaaaagt

SEQ ID NO: 40797 - DNA, 15 bp, Homo sapiens
gagatggcccaaaag

SEQ ID NO: 40798 - DNA, 15 bp, Homo sapiens
ggagatggcccaaaa

SEQ ID NO: 40799 - DNA, 15 bp, Homo sapiens
gggagatggcccaaa

SEQ ID NO: 40800 - DNA, 15 bp, Homo sapiens
tgggagatggcccaa

SEQ ID NO: 40801 - DNA, 15 bp, Homo sapiens
ttgggagatggccca

SEQ ID NO: 40802 - DNA, 15 bp, Homo sapiens
tttgggagatggccc

SEQ ID NO: 40803 - DNA, 15 bp, Homo sapiens
ctttgggagatggcc

SEQ ID NO: 40804 - DNA, 15 bp, Homo sapiens
cctttgggagatggc

SEQ ID NO: 40805 - DNA, 15 bp, Homo sapiens
ccctttgggagatgg

SEQ ID NO: 40806 - DNA, 15 bp, Homo sapiens
accctttgggagatg

SEQ ID NO: 40807 - DNA, 15 bp, Homo sapiens
caccctttgggagat

SEQ ID NO: 40808 - DNA, 15 bp, Homo sapiens
tcaccctttgggaga

SEQ ID NO: 40809 - DNA, 15 bp, Homo sapiens
ttcaccctttgggag

SEQ ID NO: 40810 - DNA, 15 bp, Homo sapiens
attcaccctttggga

SEQ ID NO: 40811 - DNA, 15 bp, Homo sapiens
cattcaccctttggg

SEQ ID NO: 40812 - DNA, 15 bp, Homo sapiens
ccattcaccctttgg

SEQ ID NO: 40813 - DNA, 15 bp, Homo sapiens
cccattcaccctttg

SEQ ID NO: 40814 - DNA, 15 bp, Homo sapiens
tcccattcacccttt

SEQ ID NO: 40815 - DNA, 15 bp, Homo sapiens
ttcccattcaccctt

SEQ ID NO: 40816 - DNA, 15 bp, Homo sapiens
cttcccattcaccct

SEQ ID NO: 40817 - DNA, 15 bp, Homo sapiens
tcttcccattcaccc

SEQ ID NO: 40818 - DNA, 15 bp, Homo sapiens
ttcttcccattcacc

SEQ ID NO: 40819 - DNA, 15 bp, Homo sapiens
attcttcccattcac

SEQ ID NO: 40820 - DNA, 15 bp, Homo sapiens
tattcttcccattca

SEQ ID NO: 40821 - DNA, 15 bp, Homo sapiens
ttattcttcccattc

SEQ ID NO: 40822 - DNA, 15 bp, Homo sapiens
cttattcttcccatt

SEQ ID NO: 40823 - DNA, 15 bp, Homo sapiens
gcttattcttcccat

SEQ ID NO: 40824 - DNA, 15 bp, Homo sapiens
agcttattcttccca

SEQ ID NO: 40825 - DNA, 15 bp, Homo sapiens
cagcttattcttccc

SEQ ID NO: 40826 - DNA, 15 bp, Homo sapiens
ccagcttattcttcc

SEQ ID NO: 40827 - DNA, 15 bp, Homo sapiens
cccagcttattcttc

SEQ ID NO: 40828 - DNA, 15 bp, Homo sapiens
acccagcttattctt

SEQ ID NO: 40829 - DNA, 15 bp, Homo sapiens
cacccagcttattct

SEQ ID NO: 40830 - DNA, 15 bp, Homo sapiens
acacccagcttattc

SEQ ID NO: 40831 - DNA, 15 bp, Homo sapiens
cacacccagcttatt

SEQ ID NO: 40832 - DNA, 15 bp, Homo sapiens
ccacacccagcttat

SEQ ID NO: 40833 - DNA, 15 bp, Homo sapiens
gccacacccagctta

SEQ ID NO: 40834 - DNA, 15 bp, Homo sapiens
agccacacccagctt

SEQ ID NO: 40835 - DNA, 15 bp, Homo sapiens
cagccacacccagct

SEQ ID NO: 40836 - DNA, 15 bp, Homo sapiens
tcagccacacccagc

SEQ ID NO: 40837 - DNA, 15 bp, Homo sapiens
ctcagccacacccag

SEQ ID NO: 40838 - DNA, 15 bp, Homo sapiens
actcagccacaccca

SEQ ID NO: 40839 - DNA, 15 bp, Homo sapiens
aactcagccacaccc

SEQ ID NO: 40840 - DNA, 15 bp, Homo sapiens
aaactcagccacacc

SEQ ID NO: 40841 - DNA, 15 bp, Homo sapiens
taaactcagccacac

SEQ ID NO: 40842 - DNA, 15 bp, Homo sapiens
ttaaactcagccaca

SEQ ID NO: 40843 - DNA, 15 bp, Homo sapiens
cttaaactcagccac

SEQ ID NO: 40844 - DNA, 15 bp, Homo sapiens
gcttaaactcagcca

SEQ ID NO: 40845 - DNA, 15 bp, Homo sapiens
ggcttaaactcagcc

SEQ ID NO: 40846 - DNA, 15 bp, Homo sapiens
tggcttaaactcagc

SEQ ID NO: 40847 - DNA, 15 bp, Homo sapiens
ttggcttaaactcag

SEQ ID NO: 40848 - DNA, 15 bp, Homo sapiens
tttggcttaaactca

SEQ ID NO: 40849 - DNA, 15 bp, Homo sapiens
ttttggcttaaactc

SEQ ID NO: 40850 - DNA, 15 bp, Homo sapiens
cttttggcttaaact

SEQ ID NO: 40851 - DNA, 15 bp, Homo sapiens
acttttggcttaaac

SEQ ID NO: 40852 - DNA, 15 bp, Homo sapiens
aacttttggcttaaa

SEQ ID NO: 40853 - DNA, 15 bp, Homo sapiens
aaacttttggcttaa

SEQ ID NO: 40854 - DNA, 15 bp, Homo sapiens
aaaacttttggctta

SEQ ID NO: 40855 - DNA, 15 bp, Homo sapiens
aaaaacttttggctt

SEQ ID NO: 40856 - DNA, 15 bp, Homo sapiens
aaaaaacttttggct

SEQ ID NO: 40857 - DNA, 15 bp, Homo sapiens
caaaaaacttttggc

SEQ ID NO: 40858 - DNA, 15 bp, Homo sapiens
acaaaaaacttttgg

SEQ ID NO: 40859 - DNA, 15 bp, Homo sapiens
cacaaaaaacttttg

SEQ ID NO: 40860 - DNA, 15 bp, Homo sapiens
gcacaaaaaactttt

SEQ ID NO: 40861 - DNA, 15 bp, Homo sapiens
agcacaaaaaacttt

SEQ ID NO: 40862 - DNA, 15 bp, Homo sapiens
aagcacaaaaaactt

SEQ ID NO: 40863 - DNA, 15 bp, Homo sapiens
caagcacaaaaaact

SEQ ID NO: 40864 - DNA, 15 bp, Homo sapiens
acaagcacaaaaaac

SEQ ID NO: 40865 - DNA, 15 bp, Homo sapiens
aacaagcacaaaaaa

SEQ ID NO: 40866 - DNA, 15 bp, Homo sapiens
aaacaagcacaaaaa

SEQ ID NO: 40867 - DNA, 15 bp, Homo sapiens
gaaacaagcacaaaa

SEQ ID NO: 40868 - DNA, 15 bp, Homo sapiens
tgaaacaagcacaaa

SEQ ID NO: 40869 - DNA, 15 bp, Homo sapiens
ttgaaacaagcacaa

SEQ ID NO: 40870 - DNA, 15 bp, Homo sapiens
attgaaacaagcaca

SEQ ID NO: 40871 - DNA, 15 bp, Homo sapiens
gattgaaacaagcac

SEQ ID NO: 40872 - DNA, 15 bp, Homo sapiens
tgattgaaacaagca

SEQ ID NO: 40873 - DNA, 15 bp, Homo sapiens
ctgattgaaacaagc

SEQ ID NO: 40874 - DNA, 15 bp, Homo sapiens
tctgattgaaacaag

SEQ ID NO: 40875 - DNA, 15 bp, Homo sapiens
ctctgattgaaacaa

SEQ ID NO: 40876 - DNA, 15 bp, Homo sapiens
tctctgattgaaaca

SEQ ID NO: 40877 - DNA, 15 bp, Homo sapiens
ttctctgattgaaac

SEQ ID NO: 40878 - DNA, 15 bp, Homo sapiens
cttctctgattgaaa

SEQ ID NO: 40879 - DNA, 15 bp, Homo sapiens
tcttctctgattgaa

SEQ ID NO: 40880 - DNA, 15 bp, Homo sapiens
gtcttctctgattga

SEQ ID NO: 40881 - DNA, 15 bp, Homo sapiens
ggtcttctctgattg

SEQ ID NO: 40882 - DNA, 15 bp, Homo sapiens
aggtcttctctgatt

SEQ ID NO: 40883 - DNA, 15 bp, Homo sapiens
caggtcttctctgat

SEQ ID NO: 40884 - DNA, 15 bp, Homo sapiens
gcaggtcttctctga

SEQ ID NO: 40885 - DNA, 15 bp, Homo sapiens
agcaggtcttctctg

SEQ ID NO: 40886 - DNA, 15 bp, Homo sapiens
aagcaggtcttctct

SEQ ID NO: 40887 - DNA, 15 bp, Homo sapiens
aaagcaggtcttctc

SEQ ID NO: 40888 - DNA, 15 bp, Homo sapiens
aaaagcaggtcttct

SEQ ID NO: 40889 - DNA, 15 bp, Homo sapiens
aaaaagcaggtcttc

SEQ ID NO: 40890 - DNA, 15 bp, Homo sapiens
gaaaaagcaggtctt

SEQ ID NO: 40891 - DNA, 15 bp, Homo sapiens
tgaaaaagcaggtct

SEQ ID NO: 40892 - DNA, 15 bp, Homo sapiens
atgaaaaagcaggtc

SEQ ID NO: 40893 - DNA, 15 bp, Homo sapiens
catgaaaaagcaggt

SEQ ID NO: 40894 - DNA, 15 bp, Homo sapiens
acatgaaaaagcagg

SEQ ID NO: 40895 - DNA, 15 bp, Homo sapiens
aacatgaaaaagcag

SEQ ID NO: 40896 - DNA, 15 bp, Homo sapiens
aaacatgaaaaagca

SEQ ID NO: 40897 - DNA, 15 bp, Homo sapiens
aaaacatgaaaaagc

SEQ ID NO: 40898 - DNA, 15 bp, Homo sapiens
aaaaacatgaaaaag

SEQ ID NO: 40899 - DNA, 15 bp, Homo sapiens
taaaaacatgaaaaa

SEQ ID NO: 40900 - DNA, 15 bp, Homo sapiens
gtaaaaacatgaaaa

SEQ ID NO: 40901 - DNA, 15 bp, Homo sapiens
agtaaaaacatgaaa

SEQ ID NO: 40902 - DNA, 15 bp, Homo sapiens
tagtaaaaacatgaa

SEQ ID NO: 40903 - DNA, 15 bp, Homo sapiens
atagtaaaaacatga

SEQ ID NO: 40904 - DNA, 15 bp, Homo sapiens
aatagtaaaaacatg

SEQ ID NO: 40905 - DNA, 15 bp, Homo sapiens
taatagtaaaaacat

SEQ ID NO: 40906 - DNA, 15 bp, Homo sapiens
ataatagtaaaaaca

SEQ ID NO: 40907 - DNA, 15 bp, Homo sapiens
tataatagtaaaaac

SEQ ID NO: 40908 - DNA, 15 bp, Homo sapiens
ttataatagtaaaaa

SEQ ID NO: 40909 - DNA, 15 bp, Homo sapiens
attataatagtaaaa

SEQ ID NO: 40910 - DNA, 15 bp, Homo sapiens
tattataatagtaaa

SEQ ID NO: 40911 - DNA, 15 bp, Homo sapiens
gtattataatagtaa

SEQ ID NO: 40912 - DNA, 15 bp, Homo sapiens
agtattataatagta

SEQ ID NO: 40913 - DNA, 15 bp, Homo sapiens
tagtattataatagt

SEQ ID NO: 40914 - DNA, 15 bp, Homo sapiens
ttagtattataatag

SEQ ID NO: 40915 - DNA, 15 bp, Homo sapiens
cttagtattataata

SEQ ID NO: 40916 - DNA, 15 bp, Homo sapiens
gcttagtattataat

SEQ ID NO: 40917 - DNA, 15 bp, Homo sapiens
tgcttagtattataa

SEQ ID NO: 40918 - DNA, 15 bp, Homo sapiens
ttgcttagtattata

SEQ ID NO: 40919 - DNA, 15 bp, Homo sapiens
cttgcttagtattat

SEQ ID NO: 40920 - DNA, 15 bp, Homo sapiens
tcttgcttagtatta

SEQ ID NO: 40921 - DNA, 15 bp, Homo sapiens
ctcttgcttagtatt

SEQ ID NO: 40922 - DNA, 15 bp, Homo sapiens
gctcttgcttagtat

SEQ ID NO: 40923 - DNA, 15 bp, Homo sapiens
agctcttgcttagta

SEQ ID NO: 40924 - DNA, 15 bp, Homo sapiens
gagctcttgcttagt

SEQ ID NO: 40925 - DNA, 15 bp, Homo sapiens
tgagctcttgcttag

SEQ ID NO: 40926 - DNA, 15 bp, Homo sapiens
atgagctcttgctta

SEQ ID NO: 40927 - DNA, 15 bp, Homo sapiens
aatgagctcttgctt

SEQ ID NO: 40928 - DNA, 15 bp, Homo sapiens
aaatgagctcttgct

SEQ ID NO: 40929 - DNA, 15 bp, Homo sapiens
caaatgagctcttgc

SEQ ID NO: 40930 - DNA, 15 bp, Homo sapiens
tcaaatgagctcttg

SEQ ID NO: 40931 - DNA, 15 bp, Homo sapiens
ttcaaatgagctctt

SEQ ID NO: 40932 - DNA, 15 bp, Homo sapiens
tttcaaatgagctct

SEQ ID NO: 40933 - DNA, 15 bp, Homo sapiens
ttttcaaatgagctc

SEQ ID NO: 40934 - DNA, 15 bp, Homo sapiens
gttttcaaatgagct

SEQ ID NO: 40935 - DNA, 15 bp, Homo sapiens
tgttttcaaatgagc

SEQ ID NO: 40936 - DNA, 15 bp, Homo sapiens
ctgttttcaaatgag

SEQ ID NO: 40937 - DNA, 15 bp, Homo sapiens
tctgttttcaaatga

SEQ ID NO: 40938 - DNA, 15 bp, Homo sapiens
ctctgttttcaaatg

SEQ ID NO: 40939 - DNA, 15 bp, Homo sapiens
actctgttttcaaat

SEQ ID NO: 40940 - DNA, 15 bp, Homo sapiens
aactctgttttcaaa

SEQ ID NO: 40941 - DNA, 15 bp, Homo sapiens
gaactctgttttcaa

SEQ ID NO: 40942 - DNA, 15 bp, Homo sapiens
agaactctgttttca

SEQ ID NO: 40943 - DNA, 15 bp, Homo sapiens
aagaactctgttttc

SEQ ID NO: 40944 - DNA, 15 bp, Homo sapiens
gaagaactctgtttt

SEQ ID NO: 40945 - DNA, 15 bp, Homo sapiens
tgaagaactctgttt

SEQ ID NO: 40946 - DNA, 15 bp, Homo sapiens
atgaagaactctgtt

SEQ ID NO: 40947 - DNA, 15 bp, Homo sapiens
tatgaagaactctgt

SEQ ID NO: 40948 - DNA, 15 bp, Homo sapiens
atatgaagaactctg

SEQ ID NO: 40949 - DNA, 15 bp, Homo sapiens
aatatgaagaactct

SEQ ID NO: 40950 - DNA, 15 bp, Homo sapiens
aaatatgaagaactc

SEQ ID NO: 40951 - DNA, 15 bp, Homo sapiens
taaatatgaagaact

SEQ ID NO: 40952 - DNA, 15 bp, Homo sapiens
ttaaatatgaagaac

SEQ ID NO: 40953 - DNA, 15 bp, Homo sapiens
tttaaatatgaagaa

SEQ ID NO: 40954 - DNA, 15 bp, Homo sapiens
ttttaaatatgaaga

SEQ ID NO: 40955 - DNA, 15 bp, Homo sapiens
tttttaaatatgaag

SEQ ID NO: 40956 - DNA, 15 bp, Homo sapiens
ttttttttaaatatg

SEQ ID NO: 40957 - DNA, 15 bp, Homo sapiens
tttttttttaaatat

SEQ ID NO: 40958 - DNA, 15 bp, Homo sapiens
ttttttttttaaata

SEQ ID NO: 40959 - DNA, 15 bp, Homo sapiens
tttttttttttaaat

SEQ ID NO: 40960 - DNA, 15 bp, Homo sapiens
ctttttttttttaaa

SEQ ID NO: 40961 - DNA, 15 bp, Homo sapiens
actttttttttttaa

SEQ ID NO: 40962 - DNA, 15 bp, Homo sapiens
gacttttttttttta

SEQ ID NO: 40963 - DNA, 15 bp, Homo sapiens
agacttttttttttt

SEQ ID NO: 40964 - DNA, 15 bp, Homo sapiens
aagactttttttttt

SEQ ID NO: 40965 - DNA, 15 bp, Homo sapiens
caagacttttttttt

SEQ ID NO: 40966 - DNA, 15 bp, Homo sapiens
tcaagactttttttt

SEQ ID NO: 40967 - DNA, 15 bp, Homo sapiens
ttcaagacttttttt

SEQ ID NO: 40968 - DNA, 15 bp, Homo sapiens
tttcaagactttttt

SEQ ID NO: 40969 - DNA, 15 bp, Homo sapiens
gtttcaagacttttt

SEQ ID NO: 40970 - DNA, 15 bp, Homo sapiens
ggtttcaagactttt

SEQ ID NO: 40971 - DNA, 15 bp, Homo sapiens
tggtttcaagacttt

SEQ ID NO: 40972 - DNA, 15 bp, Homo sapiens
atggtttcaagactt

SEQ ID NO: 40973 - DNA, 15 bp, Homo sapiens
aatggtttcaagact

SEQ ID NO: 40974 - DNA, 15 bp, Homo sapiens
caatggtttcaagac

SEQ ID NO: 40975 - DNA, 15 bp, Homo sapiens
tcaatggtttcaaga

SEQ ID NO: 40976 - DNA, 15 bp, Homo sapiens
atcaatggtttcaag

SEQ ID NO: 40977 - DNA, 15 bp, Homo sapiens
catcaatggtttcaa

SEQ ID NO: 40978 - DNA, 15 bp, Homo sapiens
ccatcaatggtttca

SEQ ID NO: 40979 - DNA, 15 bp, Homo sapiens
cccatcaatggtttc

SEQ ID NO: 40980 - DNA, 15 bp, Homo sapiens
tcccatcaatggttt

SEQ ID NO: 40981 - DNA, 15 bp, Homo sapiens
ttcccatcaatggtt

SEQ ID NO: 40982 - DNA, 15 bp, Homo sapiens
cttcccatcaatggt

SEQ ID NO: 40983 - DNA, 15 bp, Homo sapiens
tcttcccatcaatgg

SEQ ID NO: 40984 - DNA, 15 bp, Homo sapiens
atcttcccatcaatg

SEQ ID NO: 40985 - DNA, 15 bp, Homo sapiens
catcttcccatcaat

SEQ ID NO: 40986 - DNA, 15 bp, Homo sapiens
ccatcttcccatcaa

SEQ ID NO: 40987 - DNA, 15 bp, Homo sapiens
tccatcttcccatca

SEQ ID NO: 40988 - DNA, 15 bp, Homo sapiens
atccatcttcccatc

SEQ ID NO: 40989 - DNA, 15 bp, Homo sapiens
tatccatcttcccat

SEQ ID NO: 40990 - DNA, 15 bp, Homo sapiens
atatccatcttccca

SEQ ID NO: 40991 - DNA, 15 bp, Homo sapiens
gatatccatcttccc

SEQ ID NO: 40992 - DNA, 15 bp, Homo sapiens
agatatccatcttcc

SEQ ID NO: 40993 - DNA, 15 bp, Homo sapiens
tagatatccatcttc

SEQ ID NO: 40994 - DNA, 15 bp, Homo sapiens
atagatatccatctt

SEQ ID NO: 40995 - DNA, 15 bp, Homo sapiens
aatagatatccatct

SEQ ID NO: 40996 - DNA, 15 bp, Homo sapiens
aaatagatatccatc

SEQ ID NO: 40997 - DNA, 15 bp, Homo sapiens
taaatagatatccat

SEQ ID NO: 40998 - DNA, 15 bp, Homo sapiens
ataaatagatatcca

SEQ ID NO: 40999 - DNA, 15 bp, Homo sapiens
cataaatagatatcc

SEQ ID NO: 41000 - DNA, 15 bp, Homo sapiens
acataaatagatatc

SEQ ID NO: 41001 - DNA, 15 bp, Homo sapiens
aacataaatagatat

SEQ ID NO: 41002 - DNA, 15 bp, Homo sapiens
aaacataaatagata

SEQ ID NO: 41003 - DNA, 15 bp, Homo sapiens
taaacataaatagat

SEQ ID NO: 41004 - DNA, 15 bp, Homo sapiens
ttaaacataaataga

SEQ ID NO: 41005 - DNA, 15 bp, Homo sapiens
tttaaacataaatag

SEQ ID NO: 41006 - DNA, 15 bp, Homo sapiens
ttttaaacataaata

SEQ ID NO: 41007 - DNA, 15 bp, Homo sapiens
tttttaaacataaat

SEQ ID NO: 41008 - DNA, 15 bp, Homo sapiens
gtttttaaacataaa

SEQ ID NO: 41009 - DNA, 15 bp, Homo sapiens
ggtttttaaacataa

SEQ ID NO: 41010 - DNA, 15 bp, Homo sapiens
gggtttttaaacata

SEQ ID NO: 41011 - DNA, 15 bp, Homo sapiens
tgggtttttaaacat

SEQ ID NO: 41012 - DNA, 15 bp, Homo sapiens
atgggtttttaaaca

SEQ ID NO: 41013 - DNA, 15 bp, Homo sapiens
gatgggtttttaaac

SEQ ID NO: 41014 - DNA, 15 bp, Homo sapiens
tgatgggtttttaaa

SEQ ID NO: 41015 - DNA, 15 bp, Homo sapiens
atgatgggtttttaa

SEQ ID NO: 41016 - DNA, 15 bp, Homo sapiens
tatgatgggttttta

SEQ ID NO: 41017 - DNA, 15 bp, Homo sapiens
ttatgatgggttttt

SEQ ID NO: 41018 - DNA, 15 bp, Homo sapiens
tttatgatgggtttt

SEQ ID NO: 41019 - DNA, 15 bp, Homo sapiens
ctttatgatgggttt

SEQ ID NO: 41020 - DNA, 15 bp, Homo sapiens
tctttatgatgggtt

SEQ ID NO: 41021 - DNA, 15 bp, Homo sapiens
atctttatgatgggt

SEQ ID NO: 41022 - DNA, 15 bp, Homo sapiens
catctttatgatggg

SEQ ID NO: 41023 - DNA, 15 bp, Homo sapiens
tcatctttatgatgg

SEQ ID NO: 41024 - DNA, 15 bp, Homo sapiens
gtcatctttatgatg

SEQ ID NO: 41025 - DNA, 15 bp, Homo sapiens
tgtcatctttatgat

SEQ ID NO: 41026 - DNA, 15 bp, Homo sapiens
atgtcatctttatga

SEQ ID NO: 41027 - DNA, 15 bp, Homo sapiens
aatgtcatctttatg

SEQ ID NO: 41028 - DNA, 15 bp, Homo sapiens
caatgtcatctttat

SEQ ID NO: 41029 - DNA, 15 bp, Homo sapiens
acaatgtcatcttta

SEQ ID NO: 41030 - DNA, 15 bp, Homo sapiens
cacaatgtcatcttt

SEQ ID NO: 41031 - DNA, 15 bp, Homo sapiens
ccacaatgtcatctt

SEQ ID NO: 41032 - DNA, 15 bp, Homo sapiens
cccacaatgtcatct

SEQ ID NO: 41033 - DNA, 15 bp, Homo sapiens
gcccacaatgtcatc

SEQ ID NO: 41034 - DNA, 15 bp, Homo sapiens
agcccacaatgtcat

SEQ ID NO: 41035 - DNA, 15 bp, Homo sapiens
cagcccacaatgtca

SEQ ID NO: 41036 - DNA, 15 bp, Homo sapiens
acagcccacaatgtc

SEQ ID NO: 41037 - DNA, 15 bp, Homo sapiens
gacagcccacaatgt

SEQ ID NO: 41038 - DNA, 15 bp, Homo sapiens
tgacagcccacaatg

SEQ ID NO: 41039 - DNA, 15 bp, Homo sapiens
gtgacagcccacaat

SEQ ID NO: 41040 - DNA, 15 bp, Homo sapiens
tgtgacagcccacaa

SEQ ID NO: 41041 - DNA, 15 bp, Homo sapiens
ctgtgacagcccaca

SEQ ID NO: 41042 - DNA, 15 bp, Homo sapiens
actgtgacagcccac

SEQ ID NO: 41043 - DNA, 15 bp, Homo sapiens
aactgtgacagccca

SEQ ID NO: 41044 - DNA, 15 bp, Homo sapiens
caactgtgacagccc

SEQ ID NO: 41045 - DNA, 15 bp, Homo sapiens
ccaactgtgacagcc

SEQ ID NO: 41046 - DNA, 15 bp, Homo sapiens
tccaactgtgacagc

SEQ ID NO: 41047 - DNA, 15 bp, Homo sapiens
ttccaactgtgacag

SEQ ID NO: 41048 - DNA, 15 bp, Homo sapiens
cttccaactgtgaca

SEQ ID NO: 41049 - DNA, 15 bp, Homo sapiens
ccttccaactgtgac

SEQ ID NO: 41050 - DNA, 15 bp, Homo sapiens
gccttccaactgtga

SEQ ID NO: 41051 - DNA, 15 bp, Homo sapiens
ggccttccaactgtg

SEQ ID NO: 41052 - DNA, 15 bp, Homo sapiens
gggccttccaactgt

SEQ ID NO: 41053 - DNA, 15 bp, Homo sapiens
agggccttccaactg

SEQ ID NO: 41054 - DNA, 15 bp, Homo sapiens
cagggccttccaact

SEQ ID NO: 41055 - DNA, 15 bp, Homo sapiens
ccagggccttccaac

SEQ ID NO: 41056 - DNA, 15 bp, Homo sapiens
tccagggccttccaa

SEQ ID NO: 41057 - DNA, 15 bp, Homo sapiens
ttccagggccttcca

SEQ ID NO: 41058 - DNA, 15 bp, Homo sapiens
attccagggccttcc

SEQ ID NO: 41059 - DNA, 15 bp, Homo sapiens
aattccagggccttc

SEQ ID NO: 41060 - DNA, 15 bp, Homo sapiens
taattccagggcctt

SEQ ID NO: 41061 - DNA, 15 bp, Homo sapiens
ctaattccagggcct

SEQ ID NO: 41062 - DNA, 15 bp, Homo sapiens
tctaattccagggcc

SEQ ID NO: 41063 - DNA, 15 bp, Homo sapiens
atctaattccagggc

SEQ ID NO: 41064 - DNA, 15 bp, Homo sapiens
catctaattccaggg

SEQ ID NO: 41065 - DNA, 15 bp, Homo sapiens
tcatctaattccagg

SEQ ID NO: 41066 - DNA, 15 bp, Homo sapiens
ctcatctaattccag

SEQ ID NO: 41067 - DNA, 15 bp, Homo sapiens
tctcatctaattcca

SEQ ID NO: 41068 - DNA, 15 bp, Homo sapiens
gtctcatctaattcc

SEQ ID NO: 41069 - DNA, 15 bp, Homo sapiens
ggtctcatctaattc

SEQ ID NO: 41070 - DNA, 15 bp, Homo sapiens
tggtctcatctaatt

SEQ ID NO: 41071 - DNA, 15 bp, Homo sapiens
gtggtctcatctaat

SEQ ID NO: 41072 - DNA, 15 bp, Homo sapiens
tgtggtctcatctaa

SEQ ID NO: 41073 - DNA, 15 bp, Homo sapiens
gtgtggtctcatcta

SEQ ID NO: 41074 - DNA, 15 bp, Homo sapiens
agtgtggtctcatct

SEQ ID NO: 41075 - DNA, 15 bp, Homo sapiens
tagtgtggtctcatc

SEQ ID NO: 41076 - DNA, 15 bp, Homo sapiens
atagtgtggtctcat

SEQ ID NO: 41077 - DNA, 15 bp, Homo sapiens
aatagtgtggtctca

SEQ ID NO: 41078 - DNA, 15 bp, Homo sapiens
aaatagtgtggtctc

SEQ ID NO: 41079 - DNA, 15 bp, Homo sapiens
taaatagtgtggtct

SEQ ID NO: 41080 - DNA, 15 bp, Homo sapiens
ctaaatagtgtggtc

SEQ ID NO: 41081 - DNA, 15 bp, Homo sapiens
gctaaatagtgtggt

SEQ ID NO: 41082 - DNA, 15 bp, Homo sapiens
agctaaatagtgtgg

SEQ ID NO: 41083 - DNA, 15 bp, Homo sapiens
aagctaaatagtgtg

SEQ ID NO: 41084 - DNA, 15 bp, Homo sapiens
taagctaaatagtgt

SEQ ID NO: 41085 - DNA, 15 bp, Homo sapiens
gtaagctaaatagtg

SEQ ID NO: 41086 - DNA, 15 bp, Homo sapiens
agtaagctaaatagt

SEQ ID NO: 41087 - DNA, 15 bp, Homo sapiens
aagtaagctaaatag

SEQ ID NO: 41088 - DNA, 15 bp, Homo sapiens
taagtaagctaaata

SEQ ID NO: 41089 - DNA, 15 bp, Homo sapiens
ctaagtaagctaaat

SEQ ID NO: 41090 - DNA, 15 bp, Homo sapiens
actaagtaagctaaa

SEQ ID NO: 41091 - DNA, 15 bp, Homo sapiens
tactaagtaagctaa

SEQ ID NO: 41092 - DNA, 15 bp, Homo sapiens
ttactaagtaagcta

SEQ ID NO: 41093 - DNA, 15 bp, Homo sapiens
attactaagtaagct

SEQ ID NO: 41094 - DNA, 15 bp, Homo sapiens
tattactaagtaagc

SEQ ID NO: 41095 - DNA, 15 bp, Homo sapiens
ttattactaagtaag

SEQ ID NO: 41096 - DNA, 15 bp, Homo sapiens
gttattactaagtaa

SEQ ID NO: 41097 - DNA, 15 bp, Homo sapiens
tgttattactaagta

SEQ ID NO: 41098 - DNA, 15 bp, Homo sapiens
atgttattactaagt

SEQ ID NO: 41099 - DNA, 15 bp, Homo sapiens
aatgttattactaag

SEQ ID NO: 41100 - DNA, 15 bp, Homo sapiens
caatgttattactaa

SEQ ID NO: 41101 - DNA, 15 bp, Homo sapiens
gcaatgttattacta

SEQ ID NO: 41102 - DNA, 15 bp, Homo sapiens
tgcaatgttattact

SEQ ID NO: 41103 - DNA, 15 bp, Homo sapiens
ttgcaatgttattac

SEQ ID NO: 41104 - DNA, 15 bp, Homo sapiens
tttgcaatgttatta

SEQ ID NO: 41105 - DNA, 15 bp, Homo sapiens
ctttgcaatgttatt

SEQ ID NO: 41106 - DNA, 15 bp, Homo sapiens
tctttgcaatgttat

SEQ ID NO: 41107 - DNA, 15 bp, Homo sapiens
ttctttgcaatgtta

SEQ ID NO: 41108 - DNA, 15 bp, Homo sapiens
tttctttgcaatgtt

SEQ ID NO: 41109 - DNA, 15 bp, Homo sapiens
ttttctttgcaatgt

SEQ ID NO: 41110 - DNA, 15 bp, Homo sapiens
tttttctttgcaatg

SEQ ID NO: 41111 - DNA, 15 bp, Homo sapiens
atttttctttgcaat

SEQ ID NO: 41112 - DNA, 15 bp, Homo sapiens
aatttttctttgcaa

SEQ ID NO: 41113 - DNA, 15 bp, Homo sapiens
gaatttttctttgca

SEQ ID NO: 41114 - DNA, 15 bp, Homo sapiens
ggaatttttctttgc

SEQ ID NO: 41115 - DNA, 15 bp, Homo sapiens
cggaatttttctttg

SEQ ID NO: 41116 - DNA, 15 bp, Homo sapiens
tcggaatttttcttt

SEQ ID NO: 41117 - DNA, 15 bp, Homo sapiens
gtcggaatttttctt

SEQ ID NO: 41118 - DNA, 15 bp, Homo sapiens
cgtcggaatttttct

SEQ ID NO: 41119 - DNA, 15 bp, Homo sapiens
tcgtcggaatttttc

SEQ ID NO: 41120 - DNA, 15 bp, Homo sapiens
ttcgtcggaattttt

SEQ ID NO: 41121 - DNA, 15 bp, Homo sapiens
cttcgtcggaatttt

SEQ ID NO: 41122 - DNA, 15 bp, Homo sapiens
acttcgtcggaattt

SEQ ID NO: 41123 - DNA, 15 bp, Homo sapiens
aacttcgtcggaatt

SEQ ID NO: 41124 - DNA, 15 bp, Homo sapiens
aaacttcgtcggaat

SEQ ID NO: 41125 - DNA, 15 bp, Homo sapiens
aaaacttcgtcggaa

SEQ ID NO: 41126 - DNA, 15 bp, Homo sapiens
aaaaacttcgtcgga

SEQ ID NO: 41127 - DNA, 15 bp, Homo sapiens
aaaaaacttcgtcgg

SEQ ID NO: 41128 - DNA, 15 bp, Homo sapiens
gaaaaaacttcgtcg

SEQ ID NO: 41129 - DNA, 15 bp, Homo sapiens
tgaaaaaacttcgtc

SEQ ID NO: 41130 - DNA, 15 bp, Homo sapiens
ctgaaaaaacttcgt

SEQ ID NO: 41131 - DNA, 15 bp, Homo sapiens
gctgaaaaaacttcg

SEQ ID NO: 41132 - DNA, 15 bp, Homo sapiens
ggctgaaaaaacttc

SEQ ID NO: 41133 - DNA, 15 bp, Homo sapiens
aggctgaaaaaactt

SEQ ID NO: 41134 - DNA, 15 bp, Homo sapiens
taggctgaaaaaact

SEQ ID NO: 41135 - DNA, 15 bp, Homo sapiens
ctaggctgaaaaaac

SEQ ID NO: 41136 - DNA, 15 bp, Homo sapiens
cctaggctgaaaaaa

SEQ ID NO: 41137 - DNA, 15 bp, Homo sapiens
tcctaggctgaaaaa

SEQ ID NO: 41138 - DNA, 15 bp, Homo sapiens
ttcctaggctgaaaa

SEQ ID NO: 41139 - DNA, 15 bp, Homo sapiens
attcctaggctgaaa

SEQ ID NO: 41140 - DNA, 15 bp, Homo sapiens
gattcctaggctgaa

SEQ ID NO: 41141 - DNA, 15 bp, Homo sapiens
tgattcctaggctga

SEQ ID NO: 41142 - DNA, 15 bp, Homo sapiens
ttgattcctaggctg

SEQ ID NO: 41143 - DNA, 15 bp, Homo sapiens
attgattcctaggct

SEQ ID NO: 41144 - DNA, 15 bp, Homo sapiens
tattgattcctaggc

SEQ ID NO: 41145 - DNA, 15 bp, Homo sapiens
ctattgattcctagg

SEQ ID NO: 41146 - DNA, 15 bp, Homo sapiens
actattgattcctag

SEQ ID NO: 41147 - DNA, 15 bp, Homo sapiens
aactattgattccta

SEQ ID NO: 41148 - DNA, 15 bp, Homo sapiens
gaactattgattcct

SEQ ID NO: 41149 - DNA, 15 bp, Homo sapiens
tgaactattgattcc

SEQ ID NO: 41150 - DNA, 15 bp, Homo sapiens
ctgaactattgattc

SEQ ID NO: 41151 - DNA, 15 bp, Homo sapiens
tctgaactattgatt

SEQ ID NO: 41152 - DNA, 15 bp, Homo sapiens
ctctgaactattgat

SEQ ID NO: 41153 - DNA, 15 bp, Homo sapiens
tctctgaactattga

SEQ ID NO: 41154 - DNA, 15 bp, Homo sapiens
ttctctgaactattg

SEQ ID NO: 41155 - DNA, 15 bp, Homo sapiens
cttctctgaactatt

SEQ ID NO: 41156 - DNA, 15 bp, Homo sapiens
gcttctctgaactat

SEQ ID NO: 41157 - DNA, 15 bp, Homo sapiens
tgcttctctgaacta

SEQ ID NO: 41158 - DNA, 15 bp, Homo sapiens
gtgcttctctgaact

SEQ ID NO: 41159 - DNA, 15 bp, Homo sapiens
agtgcttctctgaac

SEQ ID NO: 41160 - DNA, 15 bp, Homo sapiens
gagtgcttctctgaa

SEQ ID NO: 41161 - DNA, 15 bp, Homo sapiens
agagtgcttctctga

SEQ ID NO: 41162 - DNA, 15 bp, Homo sapiens
tagagtgcttctctg

SEQ ID NO: 41163 - DNA, 15 bp, Homo sapiens
atagagtgcttctct

SEQ ID NO: 41164 - DNA, 15 bp, Homo sapiens
catagagtgcttctc

SEQ ID NO: 41165 - DNA, 15 bp, Homo sapiens
tcatagagtgcttct

SEQ ID NO: 41166 - DNA, 15 bp, Homo sapiens
ctcatagagtgcttc

SEQ ID NO: 41167 - DNA, 15 bp, Homo sapiens
tctcatagagtgctt

SEQ ID NO: 41168 - DNA, 15 bp, Homo sapiens
ttctcatagagtgct

SEQ ID NO: 41169 - DNA, 15 bp, Homo sapiens
attctcatagagtgc

SEQ ID NO: 41170 - DNA, 15 bp, Homo sapiens
tattctcatagagtg

SEQ ID NO: 41171 - DNA, 15 bp, Homo sapiens
gtattctcatagagt

SEQ ID NO: 41172 - DNA, 15 bp, Homo sapiens
ggtattctcatagag

SEQ ID NO: 41173 - DNA, 15 bp, Homo sapiens
gggtattctcataga

SEQ ID NO: 41174 - DNA, 15 bp, Homo sapiens
tgggtattctcatag

SEQ ID NO: 41175 - DNA, 15 bp, Homo sapiens
atgggtattctcata

SEQ ID NO: 41176 - DNA, 15 bp, Homo sapiens
aatgggtattctcat

SEQ ID NO: 41177 - DNA, 15 bp, Homo sapiens
gaatgggtattctca

SEQ ID NO: 41178 - DNA, 15 bp, Homo sapiens
tgaatgggtattctc

SEQ ID NO: 41179 - DNA, 15 bp, Homo sapiens
atgaatgggtattct

SEQ ID NO: 41180 - DNA, 15 bp, Homo sapiens
aatgaatgggtattc

SEQ ID NO: 41181 - DNA, 15 bp, Homo sapiens
gaatgaatgggtatt

SEQ ID NO: 41182 - DNA, 15 bp, Homo sapiens
agaatgaatgggtat

SEQ ID NO: 41183 - DNA, 15 bp, Homo sapiens
aagaatgaatgggta

SEQ ID NO: 41184 - DNA, 15 bp, Homo sapiens
taagaatgaatgggt

SEQ ID NO: 41185 - DNA, 15 bp, Homo sapiens
ttaagaatgaatggg

SEQ ID NO: 41186 - DNA, 15 bp, Homo sapiens
gttaagaatgaatgg

SEQ ID NO: 41187 - DNA, 15 bp, Homo sapiens
ggttaagaatgaatg

SEQ ID NO: 41188 - DNA, 15 bp, Homo sapiens
tggttaagaatgaat

SEQ ID NO: 41189 - DNA, 15 bp, Homo sapiens
ttggttaagaatgaa

SEQ ID NO: 41190 - DNA, 15 bp, Homo sapiens
tttggttaagaatga

SEQ ID NO: 41191 - DNA, 15 bp, Homo sapiens
ttttggttaagaatg

SEQ ID NO: 41192 - DNA, 15 bp, Homo sapiens
tttttggttaagaat

SEQ ID NO: 41193 - DNA, 15 bp, Homo sapiens
ttttttggttaagaa

SEQ ID NO: 41194 - DNA, 15 bp, Homo sapiens
attttttggttaaga

SEQ ID NO: 41195 - DNA, 15 bp, Homo sapiens
tattttttggttaag

SEQ ID NO: 41196 - DNA, 15 bp, Homo sapiens
gtattttttggttaa

SEQ ID NO: 41197 - DNA, 15 bp, Homo sapiens
agtattttttggtta

SEQ ID NO: 41198 - DNA, 15 bp, Homo sapiens
cagtattttttggtt

SEQ ID NO: 41199 - DNA, 15 bp, Homo sapiens
ccagtattttttggt

SEQ ID NO: 41200 - DNA, 15 bp, Homo sapiens
accagtattttttgg

SEQ ID NO: 41201 - DNA, 15 bp, Homo sapiens
caccagtattttttg

SEQ ID NO: 41202 - DNA, 15 bp, Homo sapiens
tcaccagtatttttt

SEQ ID NO: 41203 - DNA, 15 bp, Homo sapiens
ctcaccagtattttt

SEQ ID NO: 41204 - DNA, 15 bp, Homo sapiens
gctcaccagtatttt

SEQ ID NO: 41205 - DNA, 15 bp, Homo sapiens
ggctcaccagtattt

SEQ ID NO: 41206 - DNA, 15 bp, Homo sapiens
aggctcaccagtatt

SEQ ID NO: 41207 - DNA, 15 bp, Homo sapiens
caggctcaccagtat

SEQ ID NO: 41208 - DNA, 15 bp, Homo sapiens
tcaggctcaccagta

SEQ ID NO: 41209 - DNA, 15 bp, Homo sapiens
ctcaggctcaccagt

SEQ ID NO: 41210 - DNA, 15 bp, Homo sapiens
gctcaggctcaccag

SEQ ID NO: 41211 - DNA, 15 bp, Homo sapiens
tgctcaggctcacca

SEQ ID NO: 41212 - DNA, 15 bp, Homo sapiens
ctgctcaggctcacc

SEQ ID NO: 41213 - DNA, 15 bp, Homo sapiens
actgctcaggctcac

SEQ ID NO: 41214 - DNA, 15 bp, Homo sapiens
aactgctcaggctca

SEQ ID NO: 41215 - DNA, 15 bp, Homo sapiens
aaactgctcaggctc

SEQ ID NO: 41216 - DNA, 15 bp, Homo sapiens
caaactgctcaggct

SEQ ID NO: 41217 - DNA, 15 bp, Homo sapiens
ccaaactgctcaggc

SEQ ID NO: 41218 - DNA, 15 bp, Homo sapiens
accaaactgctcagg

SEQ ID NO: 41219 - DNA, 15 bp, Homo sapiens
gaccaaactgctcag

SEQ ID NO: 41220 - DNA, 15 bp, Homo sapiens
tgaccaaactgctca

SEQ ID NO: 41221 - DNA, 15 bp, Homo sapiens
atgaccaaactgctc

SEQ ID NO: 41222 - DNA, 15 bp, Homo sapiens
gatgaccaaactgct

SEQ ID NO: 41223 - DNA, 15 bp, Homo sapiens
tgatgaccaaactgc

SEQ ID NO: 41224 - DNA, 15 bp, Homo sapiens
ctgatgaccaaactg

SEQ ID NO: 41225 - DNA, 15 bp, Homo sapiens
tctgatgaccaaact

SEQ ID NO: 41226 - DNA, 15 bp, Homo sapiens
ctctgatgaccaaac

SEQ ID NO: 41227 - DNA, 15 bp, Homo sapiens
actctgatgaccaaa

SEQ ID NO: 41228 - DNA, 15 bp, Homo sapiens
cactctgatgaccaa

SEQ ID NO: 41229 - DNA, 15 bp, Homo sapiens
acactctgatgacca

SEQ ID NO: 41230 - DNA, 15 bp, Homo sapiens
aacactctgatgacc

SEQ ID NO: 41231 - DNA, 15 bp, Homo sapiens
aaacactctgatgac

SEQ ID NO: 41232 - DNA, 15 bp, Homo sapiens
aaaacactctgatga

SEQ ID NO: 41233 - DNA, 15 bp, Homo sapiens
taaaacactctgatg

SEQ ID NO: 41234 - DNA, 15 bp, Homo sapiens
ataaaacactctgat

SEQ ID NO: 41235 - DNA, 15 bp, Homo sapiens
tataaaacactctga

SEQ ID NO: 41236 - DNA, 15 bp, Homo sapiens
atataaaacactctg

SEQ ID NO: 41237 - DNA, 15 bp, Homo sapiens
tatataaaacactct

SEQ ID NO: 41238 - DNA, 15 bp, Homo sapiens
ctatataaaacactc

SEQ ID NO: 41239 - DNA, 15 bp, Homo sapiens
actatataaaacact

SEQ ID NO: 41240 - DNA, 15 bp, Homo sapiens
aactatataaaacac

SEQ ID NO: 41241 - DNA, 15 bp, Homo sapiens
gaactatataaaaca

SEQ ID NO: 41242 - DNA, 15 bp, Homo sapiens
ggaactatataaaac

SEQ ID NO: 41243 - DNA, 15 bp, Homo sapiens
tggaactatataaaa

SEQ ID NO: 41244 - DNA, 15 bp, Homo sapiens
ctggaactatataaa

SEQ ID NO: 41245 - DNA, 15 bp, Homo sapiens
tctggaactatataa

SEQ ID NO: 41246 - DNA, 15 bp, Homo sapiens
ttctggaactatata

SEQ ID NO: 41247 - DNA, 15 bp, Homo sapiens
gttctggaactatat

SEQ ID NO: 41248 - DNA, 15 bp, Homo sapiens
tgttctggaactata

SEQ ID NO: 41249 - DNA, 15 bp, Homo sapiens
ttgttctggaactat

SEQ ID NO: 41250 - DNA, 15 bp, Homo sapiens
tttgttctggaacta

SEQ ID NO: 41251 - DNA, 15 bp, Homo sapiens
atttgttctggaact

SEQ ID NO: 41252 - DNA, 15 bp, Homo sapiens
tatttgttctggaac

SEQ ID NO: 41253 - DNA, 15 bp, Homo sapiens
atatttgttctggaa

SEQ ID NO: 41254 - DNA, 15 bp, Homo sapiens
catatttgttctgga

SEQ ID NO: 41255 - DNA, 15 bp, Homo sapiens
acatatttgttctgg

SEQ ID NO: 41256 - DNA, 15 bp, Homo sapiens
gacatatttgttctg

SEQ ID NO: 41257 - DNA, 15 bp, Homo sapiens
agacatatttgttct

SEQ ID NO: 41258 - DNA, 15 bp, Homo sapiens
gagacatatttgttc

SEQ ID NO: 41259 - DNA, 15 bp, Homo sapiens
agagacatatttgtt

SEQ ID NO: 41260 - DNA, 15 bp, Homo sapiens
tagagacatatttgt

SEQ ID NO: 41261 - DNA, 15 bp, Homo sapiens
ctagagacatatttg

SEQ ID NO: 41262 - DNA, 15 bp, Homo sapiens
cctagagacatattt

SEQ ID NO: 41263 - DNA, 15 bp, Homo sapiens
acctagagacatatt

SEQ ID NO: 41264 - DNA, 15 bp, Homo sapiens
cacctagagacatat

SEQ ID NO: 41265 - DNA, 15 bp, Homo sapiens
acacctagagacata

SEQ ID NO: 41266 - DNA, 15 bp, Homo sapiens
aacacctagagacat

SEQ ID NO: 41267 - DNA, 15 bp, Homo sapiens
gaacacctagagaca

SEQ ID NO: 41268 - DNA, 15 bp, Homo sapiens
agaacacctagagac

SEQ ID NO: 41269 - DNA, 15 bp, Homo sapiens
cagaacacctagaga

SEQ ID NO: 41270 - DNA, 15 bp, Homo sapiens
tcagaacacctagag

SEQ ID NO: 41271 - DNA, 15 bp, Homo sapiens
ctcagaacacctaga

SEQ ID NO: 41272 - DNA, 15 bp, Homo sapiens
tctcagaacacctag

SEQ ID NO: 41273 - DNA, 15 bp, Homo sapiens
ctctcagaacaccta

SEQ ID NO: 41274 - DNA, 15 bp, Homo sapiens
gctctcagaacacct

SEQ ID NO: 41275 - DNA, 15 bp, Homo sapiens
agctctcagaacacc

SEQ ID NO: 41276 - DNA, 15 bp, Homo sapiens
gagctctcagaacac

SEQ ID NO: 41277 - DNA, 15 bp, Homo sapiens
agagctctcagaaca

SEQ ID NO: 41278 - DNA, 15 bp, Homo sapiens
cagagctctcagaac

SEQ ID NO: 41279 - DNA, 15 bp, Homo sapiens
ccagagctctcagaa

SEQ ID NO: 41280 - DNA, 15 bp, Homo sapiens
accagagctctcaga

SEQ ID NO: 41281 - DNA, 15 bp, Homo sapiens
caccagagctctcag

SEQ ID NO: 41282 - DNA, 15 bp, Homo sapiens
tcaccagagctctca

SEQ ID NO: 41283 - DNA, 15 bp, Homo sapiens
ttcaccagagctctc

SEQ ID NO: 41284 - DNA, 15 bp, Homo sapiens
tttcaccagagctct

SEQ ID NO: 41285 - DNA, 15 bp, Homo sapiens
atttcaccagagctc

SEQ ID NO: 41286 - DNA, 15 bp, Homo sapiens
aatttcaccagagct

SEQ ID NO: 41287 - DNA, 15 bp, Homo sapiens
gaatttcaccagagc

SEQ ID NO: 41288 - DNA, 15 bp, Homo sapiens
ggaatttcaccagag

SEQ ID NO: 41289 - DNA, 15 bp, Homo sapiens
aggaatttcaccaga

SEQ ID NO: 41290 - DNA, 15 bp, Homo sapiens
gaggaatttcaccag

SEQ ID NO: 41291 - DNA, 15 bp, Homo sapiens
agaggaatttcacca

SEQ ID NO: 41292 - DNA, 15 bp, Homo sapiens
gagaggaatttcacc

SEQ ID NO: 41293 - DNA, 15 bp, Homo sapiens
cgagaggaatttcac

SEQ ID NO: 41294 - DNA, 15 bp, Homo sapiens
gcgagaggaatttca

SEQ ID NO: 41295 - DNA, 15 bp, Homo sapiens
agcgagaggaatttc

SEQ ID NO: 41296 - DNA, 15 bp, Homo sapiens
tagcgagaggaattt

SEQ ID NO: 41297 - DNA, 15 bp, Homo sapiens
gtagcgagaggaatt

SEQ ID NO: 41298 - DNA, 15 bp, Homo sapiens
ggtagcgagaggaat

SEQ ID NO: 41299 - DNA, 15 bp, Homo sapiens
gggtagcgagaggaa

SEQ ID NO: 41300 - DNA, 15 bp, Homo sapiens
ggggtagcgagagga

SEQ ID NO: 41301 - DNA, 15 bp, Homo sapiens
tggggtagcgagagg

SEQ ID NO: 41302 - DNA, 15 bp, Homo sapiens
ttggggtagcgagag

SEQ ID NO: 41303 - DNA, 15 bp, Homo sapiens
tttggggtagcgaga

SEQ ID NO: 41304 - DNA, 15 bp, Homo sapiens
gtttggggtagcgag

SEQ ID NO: 41305 - DNA, 15 bp, Homo sapiens
tgtttggggtagcga

SEQ ID NO: 41306 - DNA, 15 bp, Homo sapiens
atgtttggggtagcg

SEQ ID NO: 41307 - DNA, 15 bp, Homo sapiens
gatgtttggggtagc

SEQ ID NO: 41308 - DNA, 15 bp, Homo sapiens
tgatgtttggggtag

SEQ ID NO: 41309 - DNA, 15 bp, Homo sapiens
atgatgtttggggta

SEQ ID NO: 41310 - DNA, 15 bp, Homo sapiens
gatgatgtttggggt

SEQ ID NO: 41311 - DNA, 15 bp, Homo sapiens
tgatgatgtttgggg

SEQ ID NO: 41312 - DNA, 15 bp, Homo sapiens
atgatgatgtttggg

SEQ ID NO: 41313 - DNA, 15 bp, Homo sapiens
aatgatgatgtttgg

SEQ ID NO: 41314 - DNA, 15 bp, Homo sapiens
aaatgatgatgtttg

SEQ ID NO: 41315 - DNA, 15 bp, Homo sapiens
taaatgatgatgttt

SEQ ID NO: 41316 - DNA, 15 bp, Homo sapiens
ttaaatgatgatgtt

SEQ ID NO: 41317 - DNA, 15 bp, Homo sapiens
attaaatgatgatgt

SEQ ID NO: 41318 - DNA, 15 bp, Homo sapiens
tattaaatgatgatg

SEQ ID NO: 41319 - DNA, 15 bp, Homo sapiens
atattaaatgatgat

SEQ ID NO: 41320 - DNA, 15 bp, Homo sapiens
gatattaaatgatga

SEQ ID NO: 41321 - DNA, 15 bp, Homo sapiens
ggatattaaatgatg

SEQ ID NO: 41322 - DNA, 15 bp, Homo sapiens
tggatattaaatgat

SEQ ID NO: 41323 - DNA, 15 bp, Homo sapiens
ctggatattaaatga

SEQ ID NO: 41324 - DNA, 15 bp, Homo sapiens
cctggatattaaatg

SEQ ID NO: 41325 - DNA, 15 bp, Homo sapiens
tcctggatattaaat

SEQ ID NO: 41326 - DNA, 15 bp, Homo sapiens
atcctggatattaaa

SEQ ID NO: 41327 - DNA, 15 bp, Homo sapiens
aatcctggatattaa

SEQ ID NO: 41328 - DNA, 15 bp, Homo sapiens
gaatcctggatatta

SEQ ID NO: 41329 - DNA, 15 bp, Homo sapiens
agaatcctggatatt

SEQ ID NO: 41330 - DNA, 15 bp, Homo sapiens
cagaatcctggatat

SEQ ID NO: 41331 - DNA, 15 bp, Homo sapiens
ccagaatcctggata

SEQ ID NO: 41332 - DNA, 15 bp, Homo sapiens
accagaatcctggat

SEQ ID NO: 41333 - DNA, 15 bp, Homo sapiens
aaccagaatcctgga

SEQ ID NO: 41334 - DNA, 15 bp, Homo sapiens
aaaccagaatcctgg

SEQ ID NO: 41335 - DNA, 15 bp, Homo sapiens
aaaaccagaatcctg

SEQ ID NO: 41336 - DNA, 15 bp, Homo sapiens
gaaaaccagaatcct

SEQ ID NO: 41337 - DNA, 15 bp, Homo sapiens
agaaaaccagaatcc

SEQ ID NO: 41338 - DNA, 15 bp, Homo sapiens
tagaaaaccagaatc

SEQ ID NO: 41339 - DNA, 15 bp, Homo sapiens
gtagaaaaccagaat

SEQ ID NO: 41340 - DNA, 15 bp, Homo sapiens
agtagaaaaccagaa

SEQ ID NO: 41341 - DNA, 15 bp, Homo sapiens
gagtagaaaaccaga

SEQ ID NO: 41342 - DNA, 15 bp, Homo sapiens
tgagtagaaaaccag

SEQ ID NO: 41343 - DNA, 15 bp, Homo sapiens
gtgagtagaaaacca

SEQ ID NO: 41344 - DNA, 15 bp, Homo sapiens
ggtgagtagaaaacc

SEQ ID NO: 41345 - DNA, 15 bp, Homo sapiens
tggtgagtagaaaac

SEQ ID NO: 41346 - DNA, 15 bp, Homo sapiens
ctggtgagtagaaaa

SEQ ID NO: 41347 - DNA, 15 bp, Homo sapiens
tctggtgagtagaaa

SEQ ID NO: 41348 - DNA, 15 bp, Homo sapiens
atctggtgagtagaa

SEQ ID NO: 41349 - DNA, 15 bp, Homo sapiens
tatctggtgagtaga

SEQ ID NO: 41350 - DNA, 15 bp, Homo sapiens
ctatctggtgagtag

SEQ ID NO: 41351 - DNA, 15 bp, Homo sapiens
tctatctggtgagta

SEQ ID NO: 41352 - DNA, 15 bp, Homo sapiens
atctatctggtgagt

SEQ ID NO: 41353 - DNA, 15 bp, Homo sapiens
aatctatctggtgag

SEQ ID NO: 41354 - DNA, 15 bp, Homo sapiens
gaatctatctggtga

SEQ ID NO: 41355 - DNA, 15 bp, Homo sapiens
agaatctatctggtg

SEQ ID NO: 41356 - DNA, 15 bp, Homo sapiens
gagaatctatctggt

SEQ ID NO: 41357 - DNA, 15 bp, Homo sapiens
agagaatctatctgg

SEQ ID NO: 41358 - DNA, 15 bp, Homo sapiens
aagagaatctatctg

SEQ ID NO: 41359 - DNA, 15 bp, Homo sapiens
taagagaatctatct

SEQ ID NO: 41360 - DNA, 15 bp, Homo sapiens
ttaagagaatctatc

SEQ ID NO: 41361 - DNA, 15 bp, Homo sapiens
tttaagagaatctat

SEQ ID NO: 41362 - DNA, 15 bp, Homo sapiens
ttttaagagaatcta

SEQ ID NO: 41363 - DNA, 15 bp, Homo sapiens
gttttaagagaatct

SEQ ID NO: 41364 - DNA, 15 bp, Homo sapiens
ggttttaagagaatc

SEQ ID NO: 41365 - DNA, 15 bp, Homo sapiens
tggttttaagagaat

SEQ ID NO: 41366 - DNA, 15 bp, Homo sapiens
ctggttttaagagaa

SEQ ID NO: 41367 - DNA, 15 bp, Homo sapiens
cctggttttaagaga

SEQ ID NO: 41368 - DNA, 15 bp, Homo sapiens
ccctggttttaagag

SEQ ID NO: 41369 - DNA, 15 bp, Homo sapiens
tccctggttttaaga

SEQ ID NO: 41370 - DNA, 15 bp, Homo sapiens
ttccctggttttaag

SEQ ID NO: 41371 - DNA, 15 bp, Homo sapiens
tttccctggttttaa

SEQ ID NO: 41372 - DNA, 15 bp, Homo sapiens
ctttccctggtttta

SEQ ID NO: 41373 - DNA, 15 bp, Homo sapiens
tctttccctggtttt

SEQ ID NO: 41374 - DNA, 15 bp, Homo sapiens
atctttccctggttt

SEQ ID NO: 41375 - DNA, 15 bp, Homo sapiens
aatctttccctggtt

SEQ ID NO: 41376 - DNA, 15 bp, Homo sapiens
gaatctttccctggt

SEQ ID NO: 41377 - DNA, 15 bp, Homo sapiens
ggaatctttccctgg

SEQ ID NO: 41378 - DNA, 15 bp, Homo sapiens
aggaatctttccctg

SEQ ID NO: 41379 - DNA, 15 bp, Homo sapiens
caggaatctttccct

SEQ ID NO: 41380 - DNA, 15 bp, Homo sapiens
ccaggaatctttccc

SEQ ID NO: 41381 - DNA, 15 bp, Homo sapiens
tccaggaatctttcc

SEQ ID NO: 41382 - DNA, 15 bp, Homo sapiens
ctccaggaatctttc

SEQ ID NO: 41383 - DNA, 15 bp, Homo sapiens
cctccaggaatcttt

SEQ ID NO: 41384 - DNA, 15 bp, Homo sapiens
tcctccaggaatctt

SEQ ID NO: 41385 - DNA, 15 bp, Homo sapiens
ttcctccaggaatct

SEQ ID NO: 41386 - DNA, 15 bp, Homo sapiens
cttcctccaggaatc

SEQ ID NO: 41387 - DNA, 15 bp, Homo sapiens
ccttcctccaggaat

SEQ ID NO: 41388 - DNA, 15 bp, Homo sapiens
tccttcctccaggaa

SEQ ID NO: 41389 - DNA, 15 bp, Homo sapiens
atccttcctccagga

SEQ ID NO: 41390 - DNA, 15 bp, Homo sapiens
catccttcctccagg

SEQ ID NO: 41391 - DNA, 15 bp, Homo sapiens
acatccttcctccag

SEQ ID NO: 41392 - DNA, 15 bp, Homo sapiens
tacatccttcctcca

SEQ ID NO: 41393 - DNA, 15 bp, Homo sapiens
atacatccttcctcc

SEQ ID NO: 41394 - DNA, 15 bp, Homo sapiens
gatacatccttcctc

SEQ ID NO: 41395 - DNA, 15 bp, Homo sapiens
agatacatccttcct

SEQ ID NO: 41396 - DNA, 15 bp, Homo sapiens
cagatacatccttcc

SEQ ID NO: 41397 - DNA, 15 bp, Homo sapiens
ccagatacatccttc

SEQ ID NO: 41398 - DNA, 15 bp, Homo sapiens
tccagatacatcctt

SEQ ID NO: 41399 - DNA, 15 bp, Homo sapiens
ttccagatacatcct

SEQ ID NO: 41400 - DNA, 15 bp, Homo sapiens
tttccagatacatcc

SEQ ID NO: 41401 - DNA, 15 bp, Homo sapiens
ctttccagatacatc

SEQ ID NO: 41402 - DNA, 15 bp, Homo sapiens
tctttccagatacat

SEQ ID NO: 41403 - DNA, 15 bp, Homo sapiens
ctctttccagataca

SEQ ID NO: 41404 - DNA, 15 bp, Homo sapiens
tctctttccagatac

SEQ ID NO: 41405 - DNA, 15 bp, Homo sapiens
atctctttccagata

SEQ ID NO: 41406 - DNA, 15 bp, Homo sapiens
catctctttccagat

SEQ ID NO: 41407 - DNA, 15 bp, Homo sapiens
acatctctttccaga

SEQ ID NO: 41408 - DNA, 15 bp, Homo sapiens
aacatctctttccag

SEQ ID NO: 41409 - DNA, 15 bp, Homo sapiens
gaacatctctttcca

SEQ ID NO: 41410 - DNA, 15 bp, Homo sapiens
ggaacatctctttcc

SEQ ID NO: 41411 - DNA, 15 bp, Homo sapiens
aggaacatctctttc

SEQ ID NO: 41412 - DNA, 15 bp, Homo sapiens
aaggaacatctcttt

SEQ ID NO: 41413 - DNA, 15 bp, Homo sapiens
taaggaacatctctt

SEQ ID NO: 41414 - DNA, 15 bp, Homo sapiens
ataaggaacatctct

SEQ ID NO: 41415 - DNA, 15 bp, Homo sapiens
aataaggaacatctc

SEQ ID NO: 41416 - DNA, 15 bp, Homo sapiens
taataaggaacatct

SEQ ID NO: 41417 - DNA, 15 bp, Homo sapiens
ataataaggaacatc

SEQ ID NO: 41418 - DNA, 15 bp, Homo sapiens
tataataaggaacat

SEQ ID NO: 41419 - DNA, 15 bp, Homo sapiens
ttataataaggaaca

SEQ ID NO: 41420 - DNA, 15 bp, Homo sapiens
attataataaggaac

SEQ ID NO: 41421 - DNA, 15 bp, Homo sapiens
tattataataaggaa

SEQ ID NO: 41422 - DNA, 15 bp, Homo sapiens
ttattataataagga

SEQ ID NO: 41423 - DNA, 15 bp, Homo sapiens
tttattataataagg

SEQ ID NO: 41424 - DNA, 15 bp, Homo sapiens
ttttattataataag

SEQ ID NO: 41425 - DNA, 15 bp, Homo sapiens
attttattataataa

SEQ ID NO: 41426 - DNA, 15 bp, Homo sapiens
cattttattataata

SEQ ID NO: 41427 - DNA, 15 bp, Homo sapiens
tcattttattataat

SEQ ID NO: 41428 - DNA, 15 bp, Homo sapiens
ttcattttattataa

SEQ ID NO: 41429 - DNA, 15 bp, Homo sapiens
tttcattttattata

SEQ ID NO: 41430 - DNA, 15 bp, Homo sapiens
atttcattttattat

SEQ ID NO: 41431 - DNA, 15 bp, Homo sapiens
aatttcattttatta

SEQ ID NO: 41432 - DNA, 15 bp, Homo sapiens
caatttcattttatt

SEQ ID NO: 41433 - DNA, 15 bp, Homo sapiens
acaatttcattttat

SEQ ID NO: 41434 - DNA, 15 bp, Homo sapiens
tacaatttcatttta

SEQ ID NO: 41435 - DNA, 15 bp, Homo sapiens
ttacaatttcatttt

SEQ ID NO: 41436 - DNA, 15 bp, Homo sapiens
attacaatttcattt

SEQ ID NO: 41437 - DNA, 15 bp, Homo sapiens
tattacaatttcatt

SEQ ID NO: 41438 - DNA, 15 bp, Homo sapiens
gtattacaatttcat

SEQ ID NO: 41439 - DNA, 15 bp, Homo sapiens
agtattacaatttca

SEQ ID NO: 41440 - DNA, 15 bp, Homo sapiens
gagtattacaatttc

SEQ ID NO: 41441 - DNA, 15 bp, Homo sapiens
agagtattacaattt

SEQ ID NO: 41442 - DNA, 15 bp, Homo sapiens
aagagtattacaatt

SEQ ID NO: 41443 - DNA, 15 bp, Homo sapiens
caagagtattacaat

SEQ ID NO: 41444 - DNA, 15 bp, Homo sapiens
ccaagagtattacaa

SEQ ID NO: 41445 - DNA, 15 bp, Homo sapiens
tccaagagtattaca

SEQ ID NO: 41446 - DNA, 15 bp, Homo sapiens
atccaagagtattac

SEQ ID NO: 41447 - DNA, 15 bp, Homo sapiens
aatccaagagtatta

SEQ ID NO: 41448 - DNA, 15 bp, Homo sapiens
aaatccaagagtatt

SEQ ID NO: 41449 - DNA, 15 bp, Homo sapiens
aaaatccaagagtat

SEQ ID NO: 41450 - DNA, 15 bp, Homo sapiens
caaaatccaagagta

SEQ ID NO: 41451 - DNA, 15 bp, Homo sapiens
acaaaatccaagagt

SEQ ID NO: 41452 - DNA, 15 bp, Homo sapiens
cacaaaatccaagag

SEQ ID NO: 41453 - DNA, 15 bp, Homo sapiens
gcacaaaatccaaga

SEQ ID NO: 41454 - DNA, 15 bp, Homo sapiens
tgcacaaaatccaag

SEQ ID NO: 41455 - DNA, 15 bp, Homo sapiens
ctgcacaaaatccaa

SEQ ID NO: 41456 - DNA, 15 bp, Homo sapiens
gctgcacaaaatcca

SEQ ID NO: 41457 - DNA, 15 bp, Homo sapiens
tgctgcacaaaatcc

SEQ ID NO: 41458 - DNA, 15 bp, Homo sapiens
gtgctgcacaaaatc

SEQ ID NO: 41459 - DNA, 15 bp, Homo sapiens
cgtgctgcacaaaat

SEQ ID NO: 41460 - DNA, 15 bp, Homo sapiens
tcgtgctgcacaaaa

SEQ ID NO: 41461 - DNA, 15 bp, Homo sapiens
ttcgtgctgcacaaa

SEQ ID NO: 41462 - DNA, 15 bp, Homo sapiens
attcgtgctgcacaa

SEQ ID NO: 41463 - DNA, 15 bp, Homo sapiens
aattcgtgctgcaca

SEQ ID NO: 41464 - DNA, 15 bp, Homo sapiens
gaattcgtgctgcac

SEQ ID NO: 41465 - DNA, 15 bp, Homo sapiens
agaattcgtgctgca

SEQ ID NO: 41466 - DNA, 15 bp, Homo sapiens
aagaattcgtgctgc

SEQ ID NO: 41467 - DNA, 15 bp, Homo sapiens
aaagaattcgtgctg

SEQ ID NO: 41468 - DNA, 15 bp, Homo sapiens
taaagaattcgtgct

SEQ ID NO: 41469 - DNA, 15 bp, Homo sapiens
ataaagaattcgtgc

SEQ ID NO: 41470 - DNA, 15 bp, Homo sapiens
tataaagaattcgtg

SEQ ID NO: 41471 - DNA, 15 bp, Homo sapiens
ctataaagaattcgt

SEQ ID NO: 41472 - DNA, 15 bp, Homo sapiens
tctataaagaattcg

SEQ ID NO: 41473 - DNA, 15 bp, Homo sapiens
ctctataaagaattc

SEQ ID NO: 41474 - DNA, 15 bp, Homo sapiens
tctctataaagaatt

SEQ ID NO: 41475 - DNA, 15 bp, Homo sapiens
ctctctataaagaat

SEQ ID NO: 41476 - DNA, 15 bp, Homo sapiens
actctctataaagaa

SEQ ID NO: 41477 - DNA, 15 bp, Homo sapiens
aactctctataaaga

SEQ ID NO: 41478 - DNA, 15 bp, Homo sapiens
caactctctataaag

SEQ ID NO: 41479 - DNA, 15 bp, Homo sapiens
ccaactctctataaa

SEQ ID NO: 41480 - DNA, 15 bp, Homo sapiens
accaactctctataa

SEQ ID NO: 41481 - DNA, 15 bp, Homo sapiens
gaccaactctctata

SEQ ID NO: 41482 - DNA, 15 bp, Homo sapiens
ggaccaactctctat

SEQ ID NO: 41483 - DNA, 15 bp, Homo sapiens
aggaccaactctcta

SEQ ID NO: 41484 - DNA, 15 bp, Homo sapiens
gaggaccaactctct

SEQ ID NO: 41485 - DNA, 15 bp, Homo sapiens
ggaggaccaactctc

SEQ ID NO: 41486 - DNA, 15 bp, Homo sapiens
gggaggaccaactct

SEQ ID NO: 41487 - DNA, 15 bp, Homo sapiens
tgggaggaccaactc

SEQ ID NO: 41488 - DNA, 15 bp, Homo sapiens
ctgggaggaccaact

SEQ ID NO: 41489 - DNA, 15 bp, Homo sapiens
tctgggaggaccaac

SEQ ID NO: 41490 - DNA, 15 bp, Homo sapiens
ctctgggaggaccaa

SEQ ID NO: 41491 - DNA, 15 bp, Homo sapiens
tctctgggaggacca

SEQ ID NO: 41492 - DNA, 15 bp, Homo sapiens
ttctctgggaggacc

SEQ ID NO: 41493 - DNA, 15 bp, Homo sapiens
attctctgggaggac

SEQ ID NO: 41494 - DNA, 15 bp, Homo sapiens
aattctctgggagga

SEQ ID NO: 41495 - DNA, 15 bp, Homo sapiens
taattctctgggagg

SEQ ID NO: 41496 - DNA, 15 bp, Homo sapiens
ttaattctctgggag

SEQ ID NO: 41497 - DNA, 15 bp, Homo sapiens
cttaattctctggga

SEQ ID NO: 41498 - DNA, 15 bp, Homo sapiens
tcttaattctctggg

SEQ ID NO: 41499 - DNA, 15 bp, Homo sapiens
ttcttaattctctgg

SEQ ID NO: 41500 - DNA, 15 bp, Homo sapiens
attcttaattctctg

SEQ ID NO: 41501 - DNA, 15 bp, Homo sapiens
tattcttaattctct

SEQ ID NO: 41502 - DNA, 15 bp, Homo sapiens
gtattcttaattctc

SEQ ID NO: 41503 - DNA, 15 bp, Homo sapiens
agtattcttaattct

SEQ ID NO: 41504 - DNA, 15 bp, Homo sapiens
gagtattcttaattc

SEQ ID NO: 41505 - DNA, 15 bp, Homo sapiens
tgagtattcttaatt

SEQ ID NO: 41506 - DNA, 15 bp, Homo sapiens
ctgagtattcttaat

SEQ ID NO: 41507 - DNA, 15 bp, Homo sapiens
actgagtattcttaa

SEQ ID NO: 41508 - DNA, 15 bp, Homo sapiens
aactgagtattctta

SEQ ID NO: 41509 - DNA, 15 bp, Homo sapiens
aaactgagtattctt

SEQ ID NO: 41510 - DNA, 15 bp, Homo sapiens
gaaactgagtattct

SEQ ID NO: 41511 - DNA, 15 bp, Homo sapiens
agaaactgagtattc

SEQ ID NO: 41512 - DNA, 15 bp, Homo sapiens
cagaaactgagtatt

SEQ ID NO: 41513 - DNA, 15 bp, Homo sapiens
ccagaaactgagtat

SEQ ID NO: 41514 - DNA, 15 bp, Homo sapiens
tccagaaactgagta

SEQ ID NO: 41515 - DNA, 15 bp, Homo sapiens
gtccagaaactgagt

SEQ ID NO: 41516 - DNA, 15 bp, Homo sapiens
ggtccagaaactgag

SEQ ID NO: 41517 - DNA, 15 bp, Homo sapiens
gggtccagaaactga

SEQ ID NO: 41518 - DNA, 15 bp, Homo sapiens
agggtccagaaactg

SEQ ID NO: 41519 - DNA, 15 bp, Homo sapiens
cagggtccagaaact

SEQ ID NO: 41520 - DNA, 15 bp, Homo sapiens
acagggtccagaaac

SEQ ID NO: 41521 - DNA, 15 bp, Homo sapiens
aacagggtccagaaa

SEQ ID NO: 41522 - DNA, 15 bp, Homo sapiens
gaacagggtccagaa

SEQ ID NO: 41523 - DNA, 15 bp, Homo sapiens
ggaacagggtccaga

SEQ ID NO: 41524 - DNA, 15 bp, Homo sapiens
gggaacagggtccag

SEQ ID NO: 41525 - DNA, 15 bp, Homo sapiens
tgggaacagggtcca

SEQ ID NO: 41526 - DNA, 15 bp, Homo sapiens
ctgggaacagggtcc

SEQ ID NO: 41527 - DNA, 15 bp, Homo sapiens
tctgggaacagggtc

SEQ ID NO: 41528 - DNA, 15 bp, Homo sapiens
atctgggaacagggt

SEQ ID NO: 41529 - DNA, 15 bp, Homo sapiens
gatctgggaacaggg

SEQ ID NO: 41530 - DNA, 15 bp, Homo sapiens
tgatctgggaacagg

SEQ ID NO: 41531 - DNA, 15 bp, Homo sapiens
atgatctgggaacag

SEQ ID NO: 41532 - DNA, 15 bp, Homo sapiens
tatgatctgggaaca

SEQ ID NO: 41533 - DNA, 15 bp, Homo sapiens
gtatgatctgggaac

SEQ ID NO: 41534 - DNA, 15 bp, Homo sapiens
ggtatgatctgggaa

SEQ ID NO: 41535 - DNA, 15 bp, Homo sapiens
gggtatgatctggga

SEQ ID NO: 41536 - DNA, 15 bp, Homo sapiens
agggtatgatctggg

SEQ ID NO: 41537 - DNA, 15 bp, Homo sapiens
tagggtatgatctgg

SEQ ID NO: 41538 - DNA, 15 bp, Homo sapiens
ctagggtatgatctg

SEQ ID NO: 41539 - DNA, 15 bp, Homo sapiens
tctagggtatgatct

SEQ ID NO: 41540 - DNA, 15 bp, Homo sapiens
ttctagggtatgatc

SEQ ID NO: 41541 - DNA, 15 bp, Homo sapiens
attctagggtatgat

SEQ ID NO: 41542 - DNA, 15 bp, Homo sapiens
cattctagggtatga

SEQ ID NO: 41543 - DNA, 15 bp, Homo sapiens
acattctagggtatg

SEQ ID NO: 41544 - DNA, 15 bp, Homo sapiens
cacattctagggtat

SEQ ID NO: 41545 - DNA, 15 bp, Homo sapiens
tcacattctagggta

SEQ ID NO: 41546 - DNA, 15 bp, Homo sapiens
gtcacattctagggt

SEQ ID NO: 41547 - DNA, 15 bp, Homo sapiens
ggtcacattctaggg

SEQ ID NO: 41548 - DNA, 15 bp, Homo sapiens
aggtcacattctagg

SEQ ID NO: 41549 - DNA, 15 bp, Homo sapiens
aaggtcacattctag

SEQ ID NO: 41550 - DNA, 15 bp, Homo sapiens
taaggtcacattcta

SEQ ID NO: 41551 - DNA, 15 bp, Homo sapiens
ctaaggtcacattct

SEQ ID NO: 41552 - DNA, 15 bp, Homo sapiens
tctaaggtcacattc

SEQ ID NO: 41553 - DNA, 15 bp, Homo sapiens
ttctaaggtcacatt

SEQ ID NO: 41554 - DNA, 15 bp, Homo sapiens
tttctaaggtcacat

SEQ ID NO: 41555 - DNA, 15 bp, Homo sapiens
gtttctaaggtcaca

SEQ ID NO: 41556 - DNA, 15 bp, Homo sapiens
tgtttctaaggtcac

SEQ ID NO: 41557 - DNA, 15 bp, Homo sapiens
gtgtttctaaggtca

SEQ ID NO: 41558 - DNA, 15 bp, Homo sapiens
tgtgtttctaaggtc

SEQ ID NO: 41559 - DNA, 15 bp, Homo sapiens
gtgtgtttctaaggt

SEQ ID NO: 41560 - DNA, 15 bp, Homo sapiens
agtgtgtttctaagg

SEQ ID NO: 41561 - DNA, 15 bp, Homo sapiens
aagtgtgtttctaag

SEQ ID NO: 41562 - DNA, 15 bp, Homo sapiens
gaagtgtgtttctaa

SEQ ID NO: 41563 - DNA, 15 bp, Homo sapiens
tgaagtgtgtttcta

SEQ ID NO: 41564 - DNA, 15 bp, Homo sapiens
ctgaagtgtgtttct

SEQ ID NO: 41565 - DNA, 15 bp, Homo sapiens
cctgaagtgtgtttc

SEQ ID NO: 41566 - DNA, 15 bp, Homo sapiens
tcctgaagtgtgttt

SEQ ID NO: 41567 - DNA, 15 bp, Homo sapiens
atcctgaagtgtgtt

SEQ ID NO: 41568 - DNA, 15 bp, Homo sapiens
aatcctgaagtgtgt

SEQ ID NO: 41569 - DNA, 15 bp, Homo sapiens
gaatcctgaagtgtg

SEQ ID NO: 41570 - DNA, 15 bp, Homo sapiens
tgaatcctgaagtgt

SEQ ID NO: 41571 - DNA, 15 bp, Homo sapiens
atgaatcctgaagtg

SEQ ID NO: 41572 - DNA, 15 bp, Homo sapiens
tatgaatcctgaagt

SEQ ID NO: 41573 - DNA, 15 bp, Homo sapiens
gtatgaatcctgaag

SEQ ID NO: 41574 - DNA, 15 bp, Homo sapiens
ggtatgaatcctgaa

SEQ ID NO: 41575 - DNA, 15 bp, Homo sapiens
aggtatgaatcctga

SEQ ID NO: 41576 - DNA, 15 bp, Homo sapiens
aaggtatgaatcctg

SEQ ID NO: 41577 - DNA, 15 bp, Homo sapiens
aaaggtatgaatcct

SEQ ID NO: 41578 - DNA, 15 bp, Homo sapiens
caaaggtatgaatcc

SEQ ID NO: 41579 - DNA, 15 bp, Homo sapiens
tcaaaggtatgaatc

SEQ ID NO: 41580 - DNA, 15 bp, Homo sapiens
atcaaaggtatgaat

SEQ ID NO: 41581 - DNA, 15 bp, Homo sapiens
aatcaaaggtatgaa

SEQ ID NO: 41582 - DNA, 15 bp, Homo sapiens
caatcaaaggtatga

SEQ ID NO: 41583 - DNA, 15 bp, Homo sapiens
tcaatcaaaggtatg

SEQ ID NO: 41584 - DNA, 15 bp, Homo sapiens
gtcaatcaaaggtat

SEQ ID NO: 41585 - DNA, 15 bp, Homo sapiens
ggtcaatcaaaggta

SEQ ID NO: 41586 - DNA, 15 bp, Homo sapiens
tggtcaatcaaaggt

SEQ ID NO: 41587 - DNA, 15 bp, Homo sapiens
atggtcaatcaaagg

SEQ ID NO: 41588 - DNA, 15 bp, Homo sapiens
gatggtcaatcaaag

SEQ ID NO: 41589 - DNA, 15 bp, Homo sapiens
tgatggtcaatcaaa

SEQ ID NO: 41590 - DNA, 15 bp, Homo sapiens
ttgatggtcaatcaa

SEQ ID NO: 41591 - DNA, 15 bp, Homo sapiens
tttgatggtcaatca

SEQ ID NO: 41592 - DNA, 15 bp, Homo sapiens
ttttgatggtcaatc

SEQ ID NO: 41593 - DNA, 15 bp, Homo sapiens
tttttgatggtcaat

SEQ ID NO: 41594 - DNA, 15 bp, Homo sapiens
ctttttgatggtcaa

SEQ ID NO: 41595 - DNA, 15 bp, Homo sapiens
actttttgatggtca

SEQ ID NO: 41596 - DNA, 15 bp, Homo sapiens
aactttttgatggtc

SEQ ID NO: 41597 - DNA, 15 bp, Homo sapiens
aaactttttgatggt

SEQ ID NO: 41598 - DNA, 15 bp, Homo sapiens
aaaactttttgatgg

SEQ ID NO: 41599 - DNA, 15 bp, Homo sapiens
aaaaactttttgatg

SEQ ID NO: 41600 - DNA, 15 bp, Homo sapiens
caaaaactttttgat

SEQ ID NO: 41601 - DNA, 15 bp, Homo sapiens
acaaaaactttttga

SEQ ID NO: 41602 - DNA, 15 bp, Homo sapiens
tacaaaaactttttg

SEQ ID NO: 41603 - DNA, 15 bp, Homo sapiens
atacaaaaacttttt

SEQ ID NO: 41604 - DNA, 15 bp, Homo sapiens
gatacaaaaactttt

SEQ ID NO: 41605 - DNA, 15 bp, Homo sapiens
cgatacaaaaacttt

SEQ ID NO: 41606 - DNA, 15 bp, Homo sapiens
ccgatacaaaaactt

SEQ ID NO: 41607 - DNA, 15 bp, Homo sapiens
gccgatacaaaaact

SEQ ID NO: 41608 - DNA, 15 bp, Homo sapiens
ggccgatacaaaaac

SEQ ID NO: 41609 - DNA, 15 bp, Homo sapiens
tggccgatacaaaaa

SEQ ID NO: 41610 - DNA, 15 bp, Homo sapiens
ctggccgatacaaaa

SEQ ID NO: 41611 - DNA, 15 bp, Homo sapiens
cctggccgatacaaa

SEQ ID NO: 41612 - DNA, 15 bp, Homo sapiens
acctggccgatacaa

SEQ ID NO: 41613 - DNA, 15 bp, Homo sapiens
cacctggccgataca

SEQ ID NO: 41614 - DNA, 15 bp, Homo sapiens
acacctggccgatac

SEQ ID NO: 41615 - DNA, 15 bp, Homo sapiens
cacacctggccgata

SEQ ID NO: 41616 - DNA, 15 bp, Homo sapiens
ccacacctggccgat

SEQ ID NO: 41617 - DNA, 15 bp, Homo sapiens
accacacctggccga

SEQ ID NO: 41618 - DNA, 15 bp, Homo sapiens
caccacacctggccg

SEQ ID NO: 41619 - DNA, 15 bp, Homo sapiens
ccaccacacctggcc

SEQ ID NO: 41620 - DNA, 15 bp, Homo sapiens
gccaccacacctggc

SEQ ID NO: 41621 - DNA, 15 bp, Homo sapiens
agccaccacacctgg

SEQ ID NO: 41622 - DNA, 15 bp, Homo sapiens
gagccaccacacctg

SEQ ID NO: 41623 - DNA, 15 bp, Homo sapiens
tgagccaccacacct

SEQ ID NO: 41624 - DNA, 15 bp, Homo sapiens
gtgagccaccacacc

SEQ ID NO: 41625 - DNA, 15 bp, Homo sapiens
cgtgagccaccacac

SEQ ID NO: 41626 - DNA, 15 bp, Homo sapiens
gcgtgagccaccaca

SEQ ID NO: 41627 - DNA, 15 bp, Homo sapiens
ggcgtgagccaccac

SEQ ID NO: 41628 - DNA, 15 bp, Homo sapiens
gtgggattacaggcg

SEQ ID NO: 41629 - DNA, 15 bp, Homo sapiens
ggtgggattacaggc

SEQ ID NO: 41630 - DNA, 15 bp, Homo sapiens
tggtgggattacagg

SEQ ID NO: 41631 - DNA, 15 bp, Homo sapiens
gtggtgggattacag

SEQ ID NO: 41632 - DNA, 15 bp, Homo sapiens
agtggtgggattaca

SEQ ID NO: 41633 - DNA, 15 bp, Homo sapiens
aagtggtgggattac

SEQ ID NO: 41634 - DNA, 15 bp, Homo sapiens
aaagtggtgggatta

SEQ ID NO: 41635 - DNA, 15 bp, Homo sapiens
gaaagtggtgggatt

SEQ ID NO: 41636 - DNA, 15 bp, Homo sapiens
cgaaagtggtgggat

SEQ ID NO: 41637 - DNA, 15 bp, Homo sapiens
ccgaaagtggtggga

SEQ ID NO: 41638 - DNA, 15 bp, Homo sapiens
tccgaaagtggtggg

SEQ ID NO: 41639 - DNA, 15 bp, Homo sapiens
atccgaaagtggtgg

SEQ ID NO: 41640 - DNA, 15 bp, Homo sapiens
catccgaaagtggtg

SEQ ID NO: 41641 - DNA, 15 bp, Homo sapiens
gcatccgaaagtggt

SEQ ID NO: 41642 - DNA, 15 bp, Homo sapiens
ggcatccgaaagtgg

SEQ ID NO: 41643 - DNA, 15 bp, Homo sapiens
tggcatccgaaagtg

SEQ ID NO: 41644 - DNA, 15 bp, Homo sapiens
gtggcatccgaaagt

SEQ ID NO: 41645 - DNA, 15 bp, Homo sapiens
cgtggcatccgaaag

SEQ ID NO: 41646 - DNA, 15 bp, Homo sapiens
ccgtggcatccgaaa

SEQ ID NO: 41647 - DNA, 15 bp, Homo sapiens
gccgtggcatccgaa

SEQ ID NO: 41648 - DNA, 15 bp, Homo sapiens
cgccgtggcatccga

SEQ ID NO: 41649 - DNA, 15 bp, Homo sapiens
ccgccgtggcatccg

SEQ ID NO: 41650 - DNA, 15 bp, Homo sapiens
cccgccgtggcatcc

SEQ ID NO: 41651 - DNA, 15 bp, Homo sapiens
gcccgccgtggcatc

SEQ ID NO: 41652 - DNA, 15 bp, Homo sapiens
tgcccgccgtggcat

SEQ ID NO: 41653 - DNA, 15 bp, Homo sapiens
ctgcccgccgtggca

SEQ ID NO: 41654 - DNA, 15 bp, Homo sapiens
tctgcccgccgtggc

SEQ ID NO: 41655 - DNA, 15 bp, Homo sapiens
atctgcccgccgtgg

SEQ ID NO: 41656 - DNA, 15 bp, Homo sapiens
gatctgcccgccgtg

SEQ ID NO: 41657 - DNA, 15 bp, Homo sapiens
tgatctgcccgccgt

SEQ ID NO: 41658 - DNA, 15 bp, Homo sapiens
gtgatctgcccgccg

SEQ ID NO: 41659 - DNA, 15 bp, Homo sapiens
cgtgatctgcccgcc

SEQ ID NO: 41660 - DNA, 15 bp, Homo sapiens
acgtgatctgcccgc

SEQ ID NO: 41661 - DNA, 15 bp, Homo sapiens
cacgtgatctgcccg

SEQ ID NO: 41662 - DNA, 15 bp, Homo sapiens
tcacgtgatctgccc

SEQ ID NO: 41663 - DNA, 15 bp, Homo sapiens
ctcacgtgatctgcc

SEQ ID NO: 41664 - DNA, 15 bp, Homo sapiens
cctcacgtgatctgc

SEQ ID NO: 41665 - DNA, 15 bp, Homo sapiens
acctcacgtgatctg

SEQ ID NO: 41666 - DNA, 15 bp, Homo sapiens
gacctcacgtgatct

SEQ ID NO: 41667 - DNA, 15 bp, Homo sapiens
tgacctcacgtgatc

SEQ ID NO: 41668 - DNA, 15 bp, Homo sapiens
ctgacctcacgtgat

SEQ ID NO: 41669 - DNA, 15 bp, Homo sapiens
gctgacctcacgtga

SEQ ID NO: 41670 - DNA, 15 bp, Homo sapiens
tgctgacctcacgtg

SEQ ID NO: 41671 - DNA, 15 bp, Homo sapiens
ctgctgacctcacgt

SEQ ID NO: 41672 - DNA, 15 bp, Homo sapiens
actgctgacctcacg

SEQ ID NO: 41673 - DNA, 15 bp, Homo sapiens
aactgctgacctcac

SEQ ID NO: 41674 - DNA, 15 bp, Homo sapiens
aaactgctgacctca

SEQ ID NO: 41675 - DNA, 15 bp, Homo sapiens
caaactgctgacctc

SEQ ID NO: 41676 - DNA, 15 bp, Homo sapiens
tcaaactgctgacct

SEQ ID NO: 41677 - DNA, 15 bp, Homo sapiens
ctcaaactgctgacc

SEQ ID NO: 41678 - DNA, 15 bp, Homo sapiens
tctcaaactgctgac

SEQ ID NO: 41679 - DNA, 15 bp, Homo sapiens
gtctcaaactgctga

SEQ ID NO: 41680 - DNA, 15 bp, Homo sapiens
ggtctcaaactgctg

SEQ ID NO: 41681 - DNA, 15 bp, Homo sapiens
tggtctcaaactgct

SEQ ID NO: 41682 - DNA, 15 bp, Homo sapiens
ctggtctcaaactgc

SEQ ID NO: 41683 - DNA, 15 bp, Homo sapiens
gctggtctcaaactg

SEQ ID NO: 41684 - DNA, 15 bp, Homo sapiens
atttttgtagagaca

SEQ ID NO: 41685 - DNA, 15 bp, Homo sapiens
tatttttgtagagac

SEQ ID NO: 41686 - DNA, 15 bp, Homo sapiens
gtatttttgtagaga

SEQ ID NO: 41687 - DNA, 15 bp, Homo sapiens
tgtatttttgtagag

SEQ ID NO: 41688 - DNA, 15 bp, Homo sapiens
ttgtatttttgtaga

SEQ ID NO: 41689 - DNA, 15 bp, Homo sapiens
tttgtatttttgtag

SEQ ID NO: 41690 - DNA, 15 bp, Homo sapiens
ttttgtatttttgta

SEQ ID NO: 41691 - DNA, 15 bp, Homo sapiens
tttttgtatttttgt

SEQ ID NO: 41692 - DNA, 15 bp, Homo sapiens
ttttttgtatttttg

SEQ ID NO: 41693 - DNA, 15 bp, Homo sapiens
tattttttgtatttt

SEQ ID NO: 41694 - DNA, 15 bp, Homo sapiens
ctattttttgtattt

SEQ ID NO: 41695 - DNA, 15 bp, Homo sapiens
gctattttttgtatt

SEQ ID NO: 41696 - DNA, 15 bp, Homo sapiens
ggctattttttgtat

SEQ ID NO: 41697 - DNA, 15 bp, Homo sapiens
cggctattttttgta

SEQ ID NO: 41698 - DNA, 15 bp, Homo sapiens
ccggctattttttgt

SEQ ID NO: 41699 - DNA, 15 bp, Homo sapiens
cccggctattttttg

SEQ ID NO: 41700 - DNA, 15 bp, Homo sapiens
gcccggctatttttt

SEQ ID NO: 41701 - DNA, 15 bp, Homo sapiens
cgcccggctattttt

SEQ ID NO: 41702 - DNA, 15 bp, Homo sapiens
acgcccggctatttt

SEQ ID NO: 41703 - DNA, 15 bp, Homo sapiens
cacgcccggctattt

SEQ ID NO: 41704 - DNA, 15 bp, Homo sapiens
tcacgcccggctatt

SEQ ID NO: 41705 - DNA, 15 bp, Homo sapiens
atcacgcccggctat

SEQ ID NO: 41706 - DNA, 15 bp, Homo sapiens
catcacgcccggcta

SEQ ID NO: 41707 - DNA, 15 bp, Homo sapiens
ccatcacgcccggct

SEQ ID NO: 41708 - DNA, 15 bp, Homo sapiens
accatcacgcccggc

SEQ ID NO: 41709 - DNA, 15 bp, Homo sapiens
caccatcacgcccgg

SEQ ID NO: 41710 - DNA, 15 bp, Homo sapiens
ccaccatcacgcccg

SEQ ID NO: 41711 - DNA, 15 bp, Homo sapiens
cccaccatcacgccc

SEQ ID NO: 41712 - DNA, 15 bp, Homo sapiens
gcccaccatcacgcc

SEQ ID NO: 41713 - DNA, 15 bp, Homo sapiens
tgcccaccatcacgc

SEQ ID NO: 41714 - DNA, 15 bp, Homo sapiens
gtgcccaccatcacg

SEQ ID NO: 41715 - DNA, 15 bp, Homo sapiens
ggtgcccaccatcac

SEQ ID NO: 41716 - DNA, 15 bp, Homo sapiens
aggtgcccaccatca

SEQ ID NO: 41717 - DNA, 15 bp, Homo sapiens
caggtgcccaccatc

SEQ ID NO: 41718 - DNA, 15 bp, Homo sapiens
acaggtgcccaccat

SEQ ID NO: 41719 - DNA, 15 bp, Homo sapiens
aattacaggtgccca

SEQ ID NO: 41720 - DNA, 15 bp, Homo sapiens
gaattacaggtgccc

SEQ ID NO: 41721 - DNA, 15 bp, Homo sapiens
ggaattacaggtgcc

SEQ ID NO: 41722 - DNA, 15 bp, Homo sapiens
tggaattacaggtgc

SEQ ID NO: 41723 - DNA, 15 bp, Homo sapiens
ctggaattacaggtg

SEQ ID NO: 41724 - DNA, 15 bp, Homo sapiens
gctggaattacaggt

SEQ ID NO: 41725 - DNA, 15 bp, Homo sapiens
agctggaattacagg

SEQ ID NO: 41726 - DNA, 15 bp, Homo sapiens
tagctggaattacag

SEQ ID NO: 41727 - DNA, 15 bp, Homo sapiens
gtagctggaattaca

SEQ ID NO: 41728 - DNA, 15 bp, Homo sapiens
agtagctggaattac

SEQ ID NO: 41729 - DNA, 15 bp, Homo sapiens
gagtagctggaatta

SEQ ID NO: 41730 - DNA, 15 bp, Homo sapiens
cgagtagctggaatt

SEQ ID NO: 41731 - DNA, 15 bp, Homo sapiens
ccgagtagctggaat

SEQ ID NO: 41732 - DNA, 15 bp, Homo sapiens
cccgagtagctggaa

SEQ ID NO: 41733 - DNA, 15 bp, Homo sapiens
tcccgagtagctgga

SEQ ID NO: 41734 - DNA, 15 bp, Homo sapiens
cgatcctcctgcctc

SEQ ID NO: 41735 - DNA, 15 bp, Homo sapiens
gcgatcctcctgcct

SEQ ID NO: 41736 - DNA, 15 bp, Homo sapiens
agcgatcctcctgcc

SEQ ID NO: 41737 - DNA, 15 bp, Homo sapiens
aagcgatcctcctgc

SEQ ID NO: 41738 - DNA, 15 bp, Homo sapiens
caagcgatcctcctg

SEQ ID NO: 41739 - DNA, 15 bp, Homo sapiens
tcaagcgatcctcct

SEQ ID NO: 41740 - DNA, 15 bp, Homo sapiens
aggctcaagcgatcc

SEQ ID NO: 41741 - DNA, 15 bp, Homo sapiens
taggctcaagcgatc

SEQ ID NO: 41742 - DNA, 15 bp, Homo sapiens
ctaggctcaagcgat

SEQ ID NO: 41743 - DNA, 15 bp, Homo sapiens
cctaggctcaagcga

SEQ ID NO: 41744 - DNA, 15 bp, Homo sapiens
tcctaggctcaagcg

SEQ ID NO: 41745 - DNA, 15 bp, Homo sapiens
ctcctaggctcaagc

SEQ ID NO: 41746 - DNA, 15 bp, Homo sapiens
cctcctaggctcaag

SEQ ID NO: 41747 - DNA, 15 bp, Homo sapiens
acctcctaggctcaa

SEQ ID NO: 41748 - DNA, 15 bp, Homo sapiens
cacctcctaggctca

SEQ ID NO: 41749 - DNA, 15 bp, Homo sapiens
ccacctcctaggctc

SEQ ID NO: 41750 - DNA, 15 bp, Homo sapiens
tccacctcctaggct

SEQ ID NO: 41751 - DNA, 15 bp, Homo sapiens
ctccacctcctaggc

SEQ ID NO: 41752 - DNA, 15 bp, Homo sapiens
cctccacctcctagg

SEQ ID NO: 41753 - DNA, 15 bp, Homo sapiens
gcctccacctcctag

SEQ ID NO: 41754 - DNA, 15 bp, Homo sapiens
agcctccacctccta

SEQ ID NO: 41755 - DNA, 15 bp, Homo sapiens
cagcctccacctcct

SEQ ID NO: 41756 - DNA, 15 bp, Homo sapiens
gcagcctccacctcc

SEQ ID NO: 41757 - DNA, 15 bp, Homo sapiens
tgcagcctccacctc

SEQ ID NO: 41758 - DNA, 15 bp, Homo sapiens
ctgcagcctccacct

SEQ ID NO: 41759 - DNA, 15 bp, Homo sapiens
actgcagcctccacc

SEQ ID NO: 41760 - DNA, 15 bp, Homo sapiens
cactgcagcctccac

SEQ ID NO: 41761 - DNA, 15 bp, Homo sapiens
tcactgcagcctcca

SEQ ID NO: 41762 - DNA, 15 bp, Homo sapiens
ctcactgcagcctcc

SEQ ID NO: 41763 - DNA, 15 bp, Homo sapiens
cagctcactgcagcc

SEQ ID NO: 41764 - DNA, 15 bp, Homo sapiens
tcagctcactgcagc

SEQ ID NO: 41765 - DNA, 15 bp, Homo sapiens
ctcagctcactgcag

SEQ ID NO: 41766 - DNA, 15 bp, Homo sapiens
agatctcagctcact

SEQ ID NO: 41767 - DNA, 15 bp, Homo sapiens
cagatctcagctcac

SEQ ID NO: 41768 - DNA, 15 bp, Homo sapiens
acagatctcagctca

SEQ ID NO: 41769 - DNA, 15 bp, Homo sapiens
gacagatctcagctc

SEQ ID NO: 41770 - DNA, 15 bp, Homo sapiens
agacagatctcagct

SEQ ID NO: 41771 - DNA, 15 bp, Homo sapiens
gagacagatctcagc

SEQ ID NO: 41772 - DNA, 15 bp, Homo sapiens
tgagacagatctcag

SEQ ID NO: 41773 - DNA, 15 bp, Homo sapiens
gtgagacagatctca

SEQ ID NO: 41774 - DNA, 15 bp, Homo sapiens
agtgagacagatctc

SEQ ID NO: 41775 - DNA, 15 bp, Homo sapiens
gagtgagacagatct

SEQ ID NO: 41776 - DNA, 15 bp, Homo sapiens
agagtgagacagatc

SEQ ID NO: 41777 - DNA, 15 bp, Homo sapiens
cagagtgagacagat

SEQ ID NO: 41778 - DNA, 15 bp, Homo sapiens
acagagtgagacaga

SEQ ID NO: 41779 - DNA, 15 bp, Homo sapiens
aacagagtgagacag

SEQ ID NO: 41780 - DNA, 15 bp, Homo sapiens
caacagagtgagaca

SEQ ID NO: 41781 - DNA, 15 bp, Homo sapiens
cgcgccactgcactc

SEQ ID NO: 41782 - DNA, 15 bp, Homo sapiens
tcgcgccactgcact

SEQ ID NO: 41783 - DNA, 15 bp, Homo sapiens
atcgcgccactgcac

SEQ ID NO: 41784 - DNA, 15 bp, Homo sapiens
gatcgcgccactgca

SEQ ID NO: 41785 - DNA, 15 bp, Homo sapiens
agatcgcgccactgc

SEQ ID NO: 41786 - DNA, 15 bp, Homo sapiens
gagatcgcgccactg

SEQ ID NO: 41787 - DNA, 15 bp, Homo sapiens
cgagatcgcgccact

SEQ ID NO: 41788 - DNA, 15 bp, Homo sapiens
tcgagatcgcgccac

SEQ ID NO: 41789 - DNA, 15 bp, Homo sapiens
gtcgagatcgcgcca

SEQ ID NO: 41790 - DNA, 15 bp, Homo sapiens
agtcgagatcgcgcc

SEQ ID NO: 41791 - DNA, 15 bp, Homo sapiens
gagtcgagatcgcgc

SEQ ID NO: 41792 - DNA, 15 bp, Homo sapiens
tgagtcgagatcgcg

SEQ ID NO: 41793 - DNA, 15 bp, Homo sapiens
gtgagtcgagatcgc

SEQ ID NO: 41794 - DNA, 15 bp, Homo sapiens
agtgagtcgagatcg

SEQ ID NO: 41795 - DNA, 15 bp, Homo sapiens
gcagtgagtcgagat

SEQ ID NO: 41796 - DNA, 15 bp, Homo sapiens
tgcagtgagtcgaga

SEQ ID NO: 41797 - DNA, 15 bp, Homo sapiens
ttgcagtgagtcgag

SEQ ID NO: 41798 - DNA, 15 bp, Homo sapiens
gttgcagtgagtcga

SEQ ID NO: 41799 - DNA, 15 bp, Homo sapiens
ggttgcagtgagtcg

SEQ ID NO: 41800 - DNA, 15 bp, Homo sapiens
aggttgcagtgagtc

SEQ ID NO: 41801 - DNA, 15 bp, Homo sapiens
gaggttgcagtgagt

SEQ ID NO: 41802 - DNA, 15 bp, Homo sapiens
agaggcggaggttgc

SEQ ID NO: 41803 - DNA, 15 bp, Homo sapiens
gagaggcggaggttg

SEQ ID NO: 41804 - DNA, 15 bp, Homo sapiens
tgagaggcggaggtt

SEQ ID NO: 41805 - DNA, 15 bp, Homo sapiens
ctgagaggcggaggt

SEQ ID NO: 41806 - DNA, 15 bp, Homo sapiens
cctgagaggcggagg

SEQ ID NO: 41807 - DNA, 15 bp, Homo sapiens
gcctgagaggcggag

SEQ ID NO: 41808 - DNA, 15 bp, Homo sapiens
agcctgagaggcgga

SEQ ID NO: 41809 - DNA, 15 bp, Homo sapiens
aagcctgagaggcgg

SEQ ID NO: 41810 - DNA, 15 bp, Homo sapiens
taagcctgagaggcg

SEQ ID NO: 41811 - DNA, 15 bp, Homo sapiens
ttaagcctgagaggc

SEQ ID NO: 41812 - DNA, 15 bp, Homo sapiens
cttaagcctgagagg

SEQ ID NO: 41813 - DNA, 15 bp, Homo sapiens
acttaagcctgagag

SEQ ID NO: 41814 - DNA, 15 bp, Homo sapiens
cacttaagcctgaga

SEQ ID NO: 41815 - DNA, 15 bp, Homo sapiens
tcacttaagcctgag

SEQ ID NO: 41816 - DNA, 15 bp, Homo sapiens
atcacttaagcctga

SEQ ID NO: 41817 - DNA, 15 bp, Homo sapiens
aatcacttaagcctg

SEQ ID NO: 41818 - DNA, 15 bp, Homo sapiens
gaatcacttaagcct

SEQ ID NO: 41819 - DNA, 15 bp, Homo sapiens
agaatcacttaagcc

SEQ ID NO: 41820 - DNA, 15 bp, Homo sapiens
gagaatcacttaagc

SEQ ID NO: 41821 - DNA, 15 bp, Homo sapiens
tgagaatcacttaag

SEQ ID NO: 41822 - DNA, 15 bp, Homo sapiens
atgagaatcacttaa

SEQ ID NO: 41823 - DNA, 15 bp, Homo sapiens
catgagaatcactta

SEQ ID NO: 41824 - DNA, 15 bp, Homo sapiens
gcatgagaatcactt

SEQ ID NO: 41825 - DNA, 15 bp, Homo sapiens
ggcatgagaatcact

SEQ ID NO: 41826 - DNA, 15 bp, Homo sapiens
aggcatgagaatcac

SEQ ID NO: 41827 - DNA, 15 bp, Homo sapiens
gaggcatgagaatca

SEQ ID NO: 41828 - DNA, 15 bp, Homo sapiens
tgaggcatgagaatc

SEQ ID NO: 41829 - DNA, 15 bp, Homo sapiens
ctgaggcatgagaat

SEQ ID NO: 41830 - DNA, 15 bp, Homo sapiens
gctgaggcatgagaa

SEQ ID NO: 41831 - DNA, 15 bp, Homo sapiens
ggctgaggcatgaga

SEQ ID NO: 41832 - DNA, 15 bp, Homo sapiens
aggctgaggcatgag

SEQ ID NO: 41833 - DNA, 15 bp, Homo sapiens
cggaggctgaggcat

SEQ ID NO: 41834 - DNA, 15 bp, Homo sapiens
tcggaggctgaggca

SEQ ID NO: 41835 - DNA, 15 bp, Homo sapiens
ctcggaggctgaggc

SEQ ID NO: 41836 - DNA, 15 bp, Homo sapiens
actcggaggctgagg

SEQ ID NO: 41837 - DNA, 15 bp, Homo sapiens
tactcggaggctgag

SEQ ID NO: 41838 - DNA, 15 bp, Homo sapiens
gtactcggaggctga

SEQ ID NO: 41839 - DNA, 15 bp, Homo sapiens
ggtactcggaggctg

SEQ ID NO: 41840 - DNA, 15 bp, Homo sapiens
aggtactcggaggct

SEQ ID NO: 41841 - DNA, 15 bp, Homo sapiens
caggtactcggaggc

SEQ ID NO: 41842 - DNA, 15 bp, Homo sapiens
ccaggtactcggagg

SEQ ID NO: 41843 - DNA, 15 bp, Homo sapiens
cccaggtactcggag

SEQ ID NO: 41844 - DNA, 15 bp, Homo sapiens
tcccaggtactcgga

SEQ ID NO: 41845 - DNA, 15 bp, Homo sapiens
gtcccaggtactcgg

SEQ ID NO: 41846 - DNA, 15 bp, Homo sapiens
agtcccaggtactcg

SEQ ID NO: 41847 - DNA, 15 bp, Homo sapiens
tagtcccaggtactc

SEQ ID NO: 41848 - DNA, 15 bp, Homo sapiens
gtagtcccaggtact

SEQ ID NO: 41849 - DNA, 15 bp, Homo sapiens
tgtagtcccaggtac

SEQ ID NO: 41850 - DNA, 15 bp, Homo sapiens
ctgtagtcccaggta

SEQ ID NO: 41851 - DNA, 15 bp, Homo sapiens
cctgtagtcccaggt

SEQ ID NO: 41852 - DNA, 15 bp, Homo sapiens
gcctgtagtcccagg

SEQ ID NO: 41853 - DNA, 15 bp, Homo sapiens
gtgcctgtagtccca

SEQ ID NO: 41854 - DNA, 15 bp, Homo sapiens
cgtggtggcaggtgc

SEQ ID NO: 41855 - DNA, 15 bp, Homo sapiens
gcgtggtggcaggtg

SEQ ID NO: 41856 - DNA, 15 bp, Homo sapiens
ggcgtggtggcaggt

SEQ ID NO: 41857 - DNA, 15 bp, Homo sapiens
gggcgtggtggcagg

SEQ ID NO: 41858 - DNA, 15 bp, Homo sapiens
tgggcgtggtggcag

SEQ ID NO: 41859 - DNA, 15 bp, Homo sapiens
ctgggcgtggtggca

SEQ ID NO: 41860 - DNA, 15 bp, Homo sapiens
gctgggcgtggtggc

SEQ ID NO: 41861 - DNA, 15 bp, Homo sapiens
atagctgggcgtggt

SEQ ID NO: 41862 - DNA, 15 bp, Homo sapiens
aatagctgggcgtgg

SEQ ID NO: 41863 - DNA, 15 bp, Homo sapiens
aaatagctgggcgtg

SEQ ID NO: 41864 - DNA, 15 bp, Homo sapiens
aaaatagctgggcgt

SEQ ID NO: 41865 - DNA, 15 bp, Homo sapiens
aaaaatagctgggcg

SEQ ID NO: 41866 - DNA, 15 bp, Homo sapiens
caaaaaatagctggg

SEQ ID NO: 41867 - DNA, 15 bp, Homo sapiens
acaaaaaatagctgg

SEQ ID NO: 41868 - DNA, 15 bp, Homo sapiens
tacaaaaaatagctg

SEQ ID NO: 41869 - DNA, 15 bp, Homo sapiens
atacaaaaaatagct

SEQ ID NO: 41870 - DNA, 15 bp, Homo sapiens
aatacaaaaaatagc

SEQ ID NO: 41871 - DNA, 15 bp, Homo sapiens
aaatacaaaaaatag

SEQ ID NO: 41872 - DNA, 15 bp, Homo sapiens
aaaatacaaaaaata

SEQ ID NO: 41873 - DNA, 15 bp, Homo sapiens
atgtctactaaaaat

SEQ ID NO: 41874 - DNA, 15 bp, Homo sapiens
tatgtctactaaaaa

SEQ ID NO: 41875 - DNA, 15 bp, Homo sapiens
ctatgtctactaaaa

SEQ ID NO: 41876 - DNA, 15 bp, Homo sapiens
cctatgtctactaaa

SEQ ID NO: 41877 - DNA, 15 bp, Homo sapiens
ccctatgtctactaa

SEQ ID NO: 41878 - DNA, 15 bp, Homo sapiens
accctatgtctacta

SEQ ID NO: 41879 - DNA, 15 bp, Homo sapiens
aaccctatgtctact

SEQ ID NO: 41880 - DNA, 15 bp, Homo sapiens
aaaccctatgtctac

SEQ ID NO: 41881 - DNA, 15 bp, Homo sapiens
gaaaccctatgtcta

SEQ ID NO: 41882 - DNA, 15 bp, Homo sapiens
tgaaaccctatgtct

SEQ ID NO: 41883 - DNA, 15 bp, Homo sapiens
gtgaaaccctatgtc

SEQ ID NO: 41884 - DNA, 15 bp, Homo sapiens
agtgaaaccctatgt

SEQ ID NO: 41885 - DNA, 15 bp, Homo sapiens
tagtgaaaccctatg

SEQ ID NO: 41886 - DNA, 15 bp, Homo sapiens
atagtgaaaccctat

SEQ ID NO: 41887 - DNA, 15 bp, Homo sapiens
catagtgaaacccta

SEQ ID NO: 41888 - DNA, 15 bp, Homo sapiens
aacatagtgaaaccc

SEQ ID NO: 41889 - DNA, 15 bp, Homo sapiens
caacatagtgaaacc

SEQ ID NO: 41890 - DNA, 15 bp, Homo sapiens
gcaacatagtgaaac

SEQ ID NO: 41891 - DNA, 15 bp, Homo sapiens
ggcaacatagtgaaa

SEQ ID NO: 41892 - DNA, 15 bp, Homo sapiens
gggcaacatagtgaa

SEQ ID NO: 41893 - DNA, 15 bp, Homo sapiens
tgggcaacatagtga

SEQ ID NO: 41894 - DNA, 15 bp, Homo sapiens
ctgggcaacatagtg

SEQ ID NO: 41895 - DNA, 15 bp, Homo sapiens
gctgggcaacatagt

SEQ ID NO: 41896 - DNA, 15 bp, Homo sapiens
agctgggcaacatag

SEQ ID NO: 41897 - DNA, 15 bp, Homo sapiens
cagctgggcaacata

SEQ ID NO: 41898 - DNA, 15 bp, Homo sapiens
ccagctgggcaacat

SEQ ID NO: 41899 - DNA, 15 bp, Homo sapiens
accagctgggcaaca

SEQ ID NO: 41900 - DNA, 15 bp, Homo sapiens
gaccagctgggcaac

SEQ ID NO: 41901 - DNA, 15 bp, Homo sapiens
agaccagctgggcaa

SEQ ID NO: 41902 - DNA, 15 bp, Homo sapiens
gagaccagctgggca

SEQ ID NO: 41903 - DNA, 15 bp, Homo sapiens
cgagaccagctgggc

SEQ ID NO: 41904 - DNA, 15 bp, Homo sapiens
tcgagaccagctggg

SEQ ID NO: 41905 - DNA, 15 bp, Homo sapiens
ttcgagaccagctgg

SEQ ID NO: 41906 - DNA, 15 bp, Homo sapiens
gttcgagaccagctg

SEQ ID NO: 41907 - DNA, 15 bp, Homo sapiens
agttcgagaccagct

SEQ ID NO: 41908 - DNA, 15 bp, Homo sapiens
ctcaggagttcgaga

SEQ ID NO: 41909 - DNA, 15 bp, Homo sapiens
gctcaggagttcgag

SEQ ID NO: 41910 - DNA, 15 bp, Homo sapiens
agctcaggagttcga

SEQ ID NO: 41911 - DNA, 15 bp, Homo sapiens
gagctcaggagttcg

SEQ ID NO: 41912 - DNA, 15 bp, Homo sapiens
tgagctcaggagttc

SEQ ID NO: 41913 - DNA, 15 bp, Homo sapiens
ttgagctcaggagtt

SEQ ID NO: 41914 - DNA, 15 bp, Homo sapiens
cttgagctcaggagt

SEQ ID NO: 41915 - DNA, 15 bp, Homo sapiens
acttgagctcaggag

SEQ ID NO: 41916 - DNA, 15 bp, Homo sapiens
cacttgagctcagga

SEQ ID NO: 41917 - DNA, 15 bp, Homo sapiens
tcacttgagctcagg

SEQ ID NO: 41918 - DNA, 15 bp, Homo sapiens
atcacttgagctcag

SEQ ID NO: 41919 - DNA, 15 bp, Homo sapiens
gatcacttgagctca

SEQ ID NO: 41920 - DNA, 15 bp, Homo sapiens
agatcacttgagctc

SEQ ID NO: 41921 - DNA, 15 bp, Homo sapiens
cagatcacttgagct

SEQ ID NO: 41922 - DNA, 15 bp, Homo sapiens
gcagatcacttgagc

SEQ ID NO: 41923 - DNA, 15 bp, Homo sapiens
cgaggtgggcagatc

SEQ ID NO: 41924 - DNA, 15 bp, Homo sapiens
ccgaggtgggcagat

SEQ ID NO: 41925 - DNA, 15 bp, Homo sapiens
gccgaggtgggcaga

SEQ ID NO: 41926 - DNA, 15 bp, Homo sapiens
ggccgaggtgggcag

SEQ ID NO: 41927 - DNA, 15 bp, Homo sapiens
aggccgaggtgggca

SEQ ID NO: 41928 - DNA, 15 bp, Homo sapiens
cccaacactttggga

SEQ ID NO: 41929 - DNA, 15 bp, Homo sapiens
tcccaacactttggg

SEQ ID NO: 41930 - DNA, 15 bp, Homo sapiens
atcccaacactttgg

SEQ ID NO: 41931 - DNA, 15 bp, Homo sapiens
aatcccaacactttg

SEQ ID NO: 41932 - DNA, 15 bp, Homo sapiens
taatcccaacacttt

SEQ ID NO: 41933 - DNA, 15 bp, Homo sapiens
ttaatcccaacactt

SEQ ID NO: 41934 - DNA, 15 bp, Homo sapiens
tttaatcccaacact

SEQ ID NO: 41935 - DNA, 15 bp, Homo sapiens
ctttaatcccaacac

SEQ ID NO: 41936 - DNA, 15 bp, Homo sapiens
cctttaatcccaaca

SEQ ID NO: 41937 - DNA, 15 bp, Homo sapiens
gcctttaatcccaac

SEQ ID NO: 41938 - DNA, 15 bp, Homo sapiens
tgcctttaatcccaa

SEQ ID NO: 41939 - DNA, 15 bp, Homo sapiens
atgcctttaatccca

SEQ ID NO: 41940 - DNA, 15 bp, Homo sapiens
catgcctttaatccc

SEQ ID NO: 41941 - DNA, 15 bp, Homo sapiens
tcatgcctttaatcc

SEQ ID NO: 41942 - DNA, 15 bp, Homo sapiens
ctcatgcctttaatc

SEQ ID NO: 41943 - DNA, 15 bp, Homo sapiens
actcatgcctttaat

SEQ ID NO: 41944 - DNA, 15 bp, Homo sapiens
gactcatgcctttaa

SEQ ID NO: 41945 - DNA, 15 bp, Homo sapiens
tgactcatgccttta

SEQ ID NO: 41946 - DNA, 15 bp, Homo sapiens
gtgactcatgccttt

SEQ ID NO: 41947 - DNA, 15 bp, Homo sapiens
ggtgactcatgcctt

SEQ ID NO: 41948 - DNA, 15 bp, Homo sapiens
cggtgactcatgcct

SEQ ID NO: 41949 - DNA, 15 bp, Homo sapiens
acggtgactcatgcc

SEQ ID NO: 41950 - DNA, 15 bp, Homo sapiens
cacggtgactcatgc

SEQ ID NO: 41951 - DNA, 15 bp, Homo sapiens
gcacggtgactcatg

SEQ ID NO: 41952 - DNA, 15 bp, Homo sapiens
ggcacggtgactcat

SEQ ID NO: 41953 - DNA, 15 bp, Homo sapiens
aggcacggtgactca

SEQ ID NO: 41954 - DNA, 15 bp, Homo sapiens
caggcacggtgactc

SEQ ID NO: 41955 - DNA, 15 bp, Homo sapiens
ccaggcacggtgact

SEQ ID NO: 41956 - DNA, 15 bp, Homo sapiens
accaggcacggtgac

SEQ ID NO: 41957 - DNA, 15 bp, Homo sapiens
gaccaggcacggtga

SEQ ID NO: 41958 - DNA, 15 bp, Homo sapiens
ggaccaggcacggtg

SEQ ID NO: 41959 - DNA, 15 bp, Homo sapiens
gggaccaggcacggt

SEQ ID NO: 41960 - DNA, 15 bp, Homo sapiens
tgggaccaggcacgg

SEQ ID NO: 41961 - DNA, 15 bp, Homo sapiens
atgggaccaggcacg

SEQ ID NO: 41962 - DNA, 15 bp, Homo sapiens
catgggaccaggcac

SEQ ID NO: 41963 - DNA, 15 bp, Homo sapiens
acatgggaccaggca

SEQ ID NO: 41964 - DNA, 15 bp, Homo sapiens
aacatgggaccaggc

SEQ ID NO: 41965 - DNA, 15 bp, Homo sapiens
taacatgggaccagg

SEQ ID NO: 41966 - DNA, 15 bp, Homo sapiens
ataacatgggaccag

SEQ ID NO: 41967 - DNA, 15 bp, Homo sapiens
tataacatgggacca

SEQ ID NO: 41968 - DNA, 15 bp, Homo sapiens
ttataacatgggacc

SEQ ID NO: 41969 - DNA, 15 bp, Homo sapiens
attataacatgggac

SEQ ID NO: 41970 - DNA, 15 bp, Homo sapiens
aattataacatggga

SEQ ID NO: 41971 - DNA, 15 bp, Homo sapiens
aaattataacatggg

SEQ ID NO: 41972 - DNA, 15 bp, Homo sapiens
aaaattataacatgg

SEQ ID NO: 41973 - DNA, 15 bp, Homo sapiens
taaaattataacatg

SEQ ID NO: 41974 - DNA, 15 bp, Homo sapiens
ttaaaattataacat

SEQ ID NO: 41975 - DNA, 15 bp, Homo sapiens
tttaaaattataaca

SEQ ID NO: 41976 - DNA, 15 bp, Homo sapiens
ctttaaaattataac

SEQ ID NO: 41977 - DNA, 15 bp, Homo sapiens
actttaaaattataa

SEQ ID NO: 41978 - DNA, 15 bp, Homo sapiens
tactttaaaattata

SEQ ID NO: 41979 - DNA, 15 bp, Homo sapiens
ttactttaaaattat

SEQ ID NO: 41980 - DNA, 15 bp, Homo sapiens
cttactttaaaatta

SEQ ID NO: 41981 - DNA, 15 bp, Homo sapiens
ccttactttaaaatt

SEQ ID NO: 41982 - DNA, 15 bp, Homo sapiens
accttactttaaaat

SEQ ID NO: 41983 - DNA, 15 bp, Homo sapiens
taccttactttaaaa

SEQ ID NO: 41984 - DNA, 15 bp, Homo sapiens
ataccttactttaaa

SEQ ID NO: 41985 - DNA, 15 bp, Homo sapiens
tataccttactttaa

SEQ ID NO: 41986 - DNA, 15 bp, Homo sapiens
atataccttacttta

SEQ ID NO: 41987 - DNA, 15 bp, Homo sapiens
aatataccttacttt

SEQ ID NO: 41988 - DNA, 15 bp, Homo sapiens
aaatataccttactt

SEQ ID NO: 41989 - DNA, 15 bp, Homo sapiens
gaaatataccttact

SEQ ID NO: 41990 - DNA, 15 bp, Homo sapiens
agaaatataccttac

SEQ ID NO: 41991 - DNA, 15 bp, Homo sapiens
gagaaatatacctta

SEQ ID NO: 41992 - DNA, 15 bp, Homo sapiens
agagaaatatacctt

SEQ ID NO: 41993 - DNA, 15 bp, Homo sapiens
tagagaaatatacct

SEQ ID NO: 41994 - DNA, 15 bp, Homo sapiens
gtagagaaatatacc

SEQ ID NO: 41995 - DNA, 15 bp, Homo sapiens
tgtagagaaatatac

SEQ ID NO: 41996 - DNA, 15 bp, Homo sapiens
ctgtagagaaatata

SEQ ID NO: 41997 - DNA, 15 bp, Homo sapiens
cctgtagagaaatat

SEQ ID NO: 41998 - DNA, 15 bp, Homo sapiens
ccctgtagagaaata

SEQ ID NO: 41999 - DNA, 15 bp, Homo sapiens
tccctgtagagaaat

SEQ ID NO: 42000 - DNA, 15 bp, Homo sapiens
atccctgtagagaaa

SEQ ID NO: 42001 - DNA, 15 bp, Homo sapiens
gatccctgtagagaa

SEQ ID NO: 42002 - DNA, 15 bp, Homo sapiens
agatccctgtagaga

SEQ ID NO: 42003 - DNA, 15 bp, Homo sapiens
aagatccctgtagag

SEQ ID NO: 42004 - DNA, 15 bp, Homo sapiens
aaagatccctgtaga

SEQ ID NO: 42005 - DNA, 15 bp, Homo sapiens
caaagatccctgtag

SEQ ID NO: 42006 - DNA, 15 bp, Homo sapiens
gcaaagatccctgta

SEQ ID NO: 42007 - DNA, 15 bp, Homo sapiens
tgcaaagatccctgt

SEQ ID NO: 42008 - DNA, 15 bp, Homo sapiens
ttgcaaagatccctg

SEQ ID NO: 42009 - DNA, 15 bp, Homo sapiens
gttgcaaagatccct

SEQ ID NO: 42010 - DNA, 15 bp, Homo sapiens
ggttgcaaagatccc

SEQ ID NO: 42011 - DNA, 15 bp, Homo sapiens
gggttgcaaagatcc

SEQ ID NO: 42012 - DNA, 15 bp, Homo sapiens
agggttgcaaagatc

SEQ ID NO: 42013 - DNA, 15 bp, Homo sapiens
tagggttgcaaagat

SEQ ID NO: 42014 - DNA, 15 bp, Homo sapiens
ttagggttgcaaaga

SEQ ID NO: 42015 - DNA, 15 bp, Homo sapiens
cttagggttgcaaag

SEQ ID NO: 42016 - DNA, 15 bp, Homo sapiens
acttagggttgcaaa

SEQ ID NO: 42017 - DNA, 15 bp, Homo sapiens
tacttagggttgcaa

SEQ ID NO: 42018 - DNA, 15 bp, Homo sapiens
ttacttagggttgca

SEQ ID NO: 42019 - DNA, 15 bp, Homo sapiens
gttacttagggttgc

SEQ ID NO: 42020 - DNA, 15 bp, Homo sapiens
agttacttagggttg

SEQ ID NO: 42021 - DNA, 15 bp, Homo sapiens
cagttacttagggtt

SEQ ID NO: 42022 - DNA, 15 bp, Homo sapiens
ccagttacttagggt

SEQ ID NO: 42023 - DNA, 15 bp, Homo sapiens
gccagttacttaggg

SEQ ID NO: 42024 - DNA, 15 bp, Homo sapiens
ggccagttacttagg

SEQ ID NO: 42025 - DNA, 15 bp, Homo sapiens
aggccagttacttag

SEQ ID NO: 42026 - DNA, 15 bp, Homo sapiens
taggccagttactta

SEQ ID NO: 42027 - DNA, 15 bp, Homo sapiens
ttaggccagttactt

SEQ ID NO: 42028 - DNA, 15 bp, Homo sapiens
tttaggccagttact

SEQ ID NO: 42029 - DNA, 15 bp, Homo sapiens
ttttaggccagttac

SEQ ID NO: 42030 - DNA, 15 bp, Homo sapiens
tttttaggccagtta

SEQ ID NO: 42031 - DNA, 15 bp, Homo sapiens
ctttttaggccagtt

SEQ ID NO: 42032 - DNA, 15 bp, Homo sapiens
actttttaggccagt

SEQ ID NO: 42033 - DNA, 15 bp, Homo sapiens
aactttttaggccag

SEQ ID NO: 42034 - DNA, 15 bp, Homo sapiens
taactttttaggcca

SEQ ID NO: 42035 - DNA, 15 bp, Homo sapiens
ctaactttttaggcc

SEQ ID NO: 42036 - DNA, 15 bp, Homo sapiens
tctaactttttaggc

SEQ ID NO: 42037 - DNA, 15 bp, Homo sapiens
ctctaactttttagg

SEQ ID NO: 42038 - DNA, 15 bp, Homo sapiens
tctctaactttttag

SEQ ID NO: 42039 - DNA, 15 bp, Homo sapiens
ttctctaacttttta

SEQ ID NO: 42040 - DNA, 15 bp, Homo sapiens
cttctctaacttttt

SEQ ID NO: 42041 - DNA, 15 bp, Homo sapiens
gcttctctaactttt

SEQ ID NO: 42042 - DNA, 15 bp, Homo sapiens
agcttctctaacttt

SEQ ID NO: 42043 - DNA, 15 bp, Homo sapiens
cagcttctctaactt

SEQ ID NO: 42044 - DNA, 15 bp, Homo sapiens
tcagcttctctaact

SEQ ID NO: 42045 - DNA, 15 bp, Homo sapiens
gtcagcttctctaac

SEQ ID NO: 42046 - DNA, 15 bp, Homo sapiens
agtcagcttctctaa

SEQ ID NO: 42047 - DNA, 15 bp, Homo sapiens
aagtcagcttctcta

SEQ ID NO: 42048 - DNA, 15 bp, Homo sapiens
caagtcagcttctct

SEQ ID NO: 42049 - DNA, 15 bp, Homo sapiens
acaagtcagcttctc

SEQ ID NO: 42050 - DNA, 15 bp, Homo sapiens
cacaagtcagcttct

SEQ ID NO: 42051 - DNA, 15 bp, Homo sapiens
gcacaagtcagcttc

SEQ ID NO: 42052 - DNA, 15 bp, Homo sapiens
tgcacaagtcagctt

SEQ ID NO: 42053 - DNA, 15 bp, Homo sapiens
ctgcacaagtcagct

SEQ ID NO: 42054 - DNA, 15 bp, Homo sapiens
tctgcacaagtcagc

SEQ ID NO: 42055 - DNA, 15 bp, Homo sapiens
gtctgcacaagtcag

SEQ ID NO: 42056 - DNA, 15 bp, Homo sapiens
tgtctgcacaagtca

SEQ ID NO: 42057 - DNA, 15 bp, Homo sapiens
atgtctgcacaagtc

SEQ ID NO: 42058 - DNA, 15 bp, Homo sapiens
aatgtctgcacaagt

SEQ ID NO: 42059 - DNA, 15 bp, Homo sapiens
aaatgtctgcacaag

SEQ ID NO: 42060 - DNA, 15 bp, Homo sapiens
caaatgtctgcacaa

SEQ ID NO: 42061 - DNA, 15 bp, Homo sapiens
gcaaatgtctgcaca

SEQ ID NO: 42062 - DNA, 15 bp, Homo sapiens
tgcaaatgtctgcac

SEQ ID NO: 42063 - DNA, 15 bp, Homo sapiens
ctgcaaatgtctgca

SEQ ID NO: 42064 - DNA, 15 bp, Homo sapiens
gctgcaaatgtctgc

SEQ ID NO: 42065 - DNA, 15 bp, Homo sapiens
ggctgcaaatgtctg

SEQ ID NO: 42066 - DNA, 15 bp, Homo sapiens
aggctgcaaatgtct

SEQ ID NO: 42067 - DNA, 15 bp, Homo sapiens
caggctgcaaatgtc

SEQ ID NO: 42068 - DNA, 15 bp, Homo sapiens
acaggctgcaaatgt

SEQ ID NO: 42069 - DNA, 15 bp, Homo sapiens
aacaggctgcaaatg

SEQ ID NO: 42070 - DNA, 15 bp, Homo sapiens
caacaggctgcaaat

SEQ ID NO: 42071 - DNA, 15 bp, Homo sapiens
ccaacaggctgcaaa

SEQ ID NO: 42072 - DNA, 15 bp, Homo sapiens
accaacaggctgcaa

SEQ ID NO: 42073 - DNA, 15 bp, Homo sapiens
gaccaacaggctgca

SEQ ID NO: 42074 - DNA, 15 bp, Homo sapiens
agaccaacaggctgc

SEQ ID NO: 42075 - DNA, 15 bp, Homo sapiens
aagaccaacaggctg

SEQ ID NO: 42076 - DNA, 15 bp, Homo sapiens
aaagaccaacaggct

SEQ ID NO: 42077 - DNA, 15 bp, Homo sapiens
aaaagaccaacaggc

SEQ ID NO: 42078 - DNA, 15 bp, Homo sapiens
aaaaagaccaacagg

SEQ ID NO: 42079 - DNA, 15 bp, Homo sapiens
aaaaaagaccaacag

SEQ ID NO: 42080 - DNA, 15 bp, Homo sapiens
caaaaaagaccaaca

SEQ ID NO: 42081 - DNA, 15 bp, Homo sapiens
acaaaaaagaccaac

SEQ ID NO: 42082 - DNA, 15 bp, Homo sapiens
cacaaaaaagaccaa

SEQ ID NO: 42083 - DNA, 15 bp, Homo sapiens
gcacaaaaaagacca

SEQ ID NO: 42084 - DNA, 15 bp, Homo sapiens
agcacaaaaaagacc

SEQ ID NO: 42085 - DNA, 15 bp, Homo sapiens
cagcacaaaaaagac

SEQ ID NO: 42086 - DNA, 15 bp, Homo sapiens
acagcacaaaaaaga

SEQ ID NO: 42087 - DNA, 15 bp, Homo sapiens
cacagcacaaaaaag

SEQ ID NO: 42088 - DNA, 15 bp, Homo sapiens
tcacagcacaaaaaa

SEQ ID NO: 42089 - DNA, 15 bp, Homo sapiens
ttcacagcacaaaaa

SEQ ID NO: 42090 - DNA, 15 bp, Homo sapiens
attcacagcacaaaa

SEQ ID NO: 42091 - DNA, 15 bp, Homo sapiens
gattcacagcacaaa

SEQ ID NO: 42092 - DNA, 15 bp, Homo sapiens
tgattcacagcacaa

SEQ ID NO: 42093 - DNA, 15 bp, Homo sapiens
atgattcacagcaca

SEQ ID NO: 42094 - DNA, 15 bp, Homo sapiens
tatgattcacagcac

SEQ ID NO: 42095 - DNA, 15 bp, Homo sapiens
ctatgattcacagca

SEQ ID NO: 42096 - DNA, 15 bp, Homo sapiens
tctatgattcacagc

SEQ ID NO: 42097 - DNA, 15 bp, Homo sapiens
ctctatgattcacag

SEQ ID NO: 42098 - DNA, 15 bp, Homo sapiens
cctctatgattcaca

SEQ ID NO: 42099 - DNA, 15 bp, Homo sapiens
ccctctatgattcac

SEQ ID NO: 42100 - DNA, 15 bp, Homo sapiens
accctctatgattca

SEQ ID NO: 42101 - DNA, 15 bp, Homo sapiens
caccctctatgattc

SEQ ID NO: 42102 - DNA, 15 bp, Homo sapiens
tcaccctctatgatt

SEQ ID NO: 42103 - DNA, 15 bp, Homo sapiens
ttcaccctctatgat

SEQ ID NO: 42104 - DNA, 15 bp, Homo sapiens
tttcaccctctatga

SEQ ID NO: 42105 - DNA, 15 bp, Homo sapiens
ctttcaccctctatg

SEQ ID NO: 42106 - DNA, 15 bp, Homo sapiens
cctttcaccctctat

SEQ ID NO: 42107 - DNA, 15 bp, Homo sapiens
acctttcaccctcta

SEQ ID NO: 42108 - DNA, 15 bp, Homo sapiens
aacctttcaccctct

SEQ ID NO: 42109 - DNA, 15 bp, Homo sapiens
taacctttcaccctc

SEQ ID NO: 42110 - DNA, 15 bp, Homo sapiens
ataacctttcaccct

SEQ ID NO: 42111 - DNA, 15 bp, Homo sapiens
aataacctttcaccc

SEQ ID NO: 42112 - DNA, 15 bp, Homo sapiens
taataacctttcacc

SEQ ID NO: 42113 - DNA, 15 bp, Homo sapiens
ataataacctttcac

SEQ ID NO: 42114 - DNA, 15 bp, Homo sapiens
cataataacctttca

SEQ ID NO: 42115 - DNA, 15 bp, Homo sapiens
tcataataacctttc

SEQ ID NO: 42116 - DNA, 15 bp, Homo sapiens
ttcataataaccttt

SEQ ID NO: 42117 - DNA, 15 bp, Homo sapiens
attcataataacctt

SEQ ID NO: 42118 - DNA, 15 bp, Homo sapiens
cattcataataacct

SEQ ID NO: 42119 - DNA, 15 bp, Homo sapiens
ccattcataataacc

SEQ ID NO: 42120 - DNA, 15 bp, Homo sapiens
accattcataataac

SEQ ID NO: 42121 - DNA, 15 bp, Homo sapiens
taccattcataataa

SEQ ID NO: 42122 - DNA, 15 bp, Homo sapiens
gtaccattcataata

SEQ ID NO: 42123 - DNA, 15 bp, Homo sapiens
tgtaccattcataat

SEQ ID NO: 42124 - DNA, 15 bp, Homo sapiens
ttgtaccattcataa

SEQ ID NO: 42125 - DNA, 15 bp, Homo sapiens
tttgtaccattcata

SEQ ID NO: 42126 - DNA, 15 bp, Homo sapiens
ttttgtaccattcat

SEQ ID NO: 42127 - DNA, 15 bp, Homo sapiens
gttttgtaccattca

SEQ ID NO: 42128 - DNA, 15 bp, Homo sapiens
agttttgtaccattc

SEQ ID NO: 42129 - DNA, 15 bp, Homo sapiens
aagttttgtaccatt

SEQ ID NO: 42130 - DNA, 15 bp, Homo sapiens
aaagttttgtaccat

SEQ ID NO: 42131 - DNA, 15 bp, Homo sapiens
caaagttttgtacca

SEQ ID NO: 42132 - DNA, 15 bp, Homo sapiens
acaaagttttgtacc

SEQ ID NO: 42133 - DNA, 15 bp, Homo sapiens
aacaaagttttgtac

SEQ ID NO: 42134 - DNA, 15 bp, Homo sapiens
taacaaagttttgta

SEQ ID NO: 42135 - DNA, 15 bp, Homo sapiens
gtaacaaagttttgt

SEQ ID NO: 42136 - DNA, 15 bp, Homo sapiens
tgtaacaaagttttg

SEQ ID NO: 42137 - DNA, 15 bp, Homo sapiens
ttgtaacaaagtttt

SEQ ID NO: 42138 - DNA, 15 bp, Homo sapiens
tttgtaacaaagttt

SEQ ID NO: 42139 - DNA, 15 bp, Homo sapiens
ttttgtaacaaagtt

SEQ ID NO: 42140 - DNA, 15 bp, Homo sapiens
gttttgtaacaaagt

SEQ ID NO: 42141 - DNA, 15 bp, Homo sapiens
ggttttgtaacaaag

SEQ ID NO: 42142 - DNA, 15 bp, Homo sapiens
tggttttgtaacaaa

SEQ ID NO: 42143 - DNA, 15 bp, Homo sapiens
atggttttgtaacaa

SEQ ID NO: 42144 - DNA, 15 bp, Homo sapiens
aatggttttgtaaca

SEQ ID NO: 42145 - DNA, 15 bp, Homo sapiens
aaatggttttgtaac

SEQ ID NO: 42146 - DNA, 15 bp, Homo sapiens
aaaatggttttgtaa

SEQ ID NO: 42147 - DNA, 15 bp, Homo sapiens
gaaaatggttttgta

SEQ ID NO: 42148 - DNA, 15 bp, Homo sapiens
agaaaatggttttgt

SEQ ID NO: 42149 - DNA, 15 bp, Homo sapiens
aagaaaatggttttg

SEQ ID NO: 42150 - DNA, 15 bp, Homo sapiens
caagaaaatggtttt

SEQ ID NO: 42151 - DNA, 15 bp, Homo sapiens
ccaagaaaatggttt

SEQ ID NO: 42152 - DNA, 15 bp, Homo sapiens
tccaagaaaatggtt

SEQ ID NO: 42153 - DNA, 15 bp, Homo sapiens
gtccaagaaaatggt

SEQ ID NO: 42154 - DNA, 15 bp, Homo sapiens
agtccaagaaaatgg

SEQ ID NO: 42155 - DNA, 15 bp, Homo sapiens
cagtccaagaaaatg

SEQ ID NO: 42156 - DNA, 15 bp, Homo sapiens
acagtccaagaaaat

SEQ ID NO: 42157 - DNA, 15 bp, Homo sapiens
aacagtccaagaaaa

SEQ ID NO: 42158 - DNA, 15 bp, Homo sapiens
aaacagtccaagaaa

SEQ ID NO: 42159 - DNA, 15 bp, Homo sapiens
aaaacagtccaagaa

SEQ ID NO: 42160 - DNA, 15 bp, Homo sapiens
caaaacagtccaaga

SEQ ID NO: 42161 - DNA, 15 bp, Homo sapiens
ccaaaacagtccaag

SEQ ID NO: 42162 - DNA, 15 bp, Homo sapiens
cccaaaacagtccaa

SEQ ID NO: 42163 - DNA, 15 bp, Homo sapiens
gcccaaaacagtcca

SEQ ID NO: 42164 - DNA, 15 bp, Homo sapiens
agcccaaaacagtcc

SEQ ID NO: 42165 - DNA, 15 bp, Homo sapiens
cagcccaaaacagtc

SEQ ID NO: 42166 - DNA, 15 bp, Homo sapiens
gcagcccaaaacagt

SEQ ID NO: 42167 - DNA, 15 bp, Homo sapiens
agcagcccaaaacag

SEQ ID NO: 42168 - DNA, 15 bp, Homo sapiens
aagcagcccaaaaca

SEQ ID NO: 42169 - DNA, 15 bp, Homo sapiens
gaagcagcccaaaac

SEQ ID NO: 42170 - DNA, 15 bp, Homo sapiens
tgaagcagcccaaaa

SEQ ID NO: 42171 - DNA, 15 bp, Homo sapiens
gtgaagcagcccaaa

SEQ ID NO: 42172 - DNA, 15 bp, Homo sapiens
agtgaagcagcccaa

SEQ ID NO: 42173 - DNA, 15 bp, Homo sapiens
cagtgaagcagccca

SEQ ID NO: 42174 - DNA, 15 bp, Homo sapiens
gcagtgaagcagccc

SEQ ID NO: 42175 - DNA, 15 bp, Homo sapiens
tgcagtgaagcagcc

SEQ ID NO: 42176 - DNA, 15 bp, Homo sapiens
atgcagtgaagcagc

SEQ ID NO: 42177 - DNA, 15 bp, Homo sapiens
catgcagtgaagcag

SEQ ID NO: 42178 - DNA, 15 bp, Homo sapiens
tcatgcagtgaagca

SEQ ID NO: 42179 - DNA, 15 bp, Homo sapiens
gtcatgcagtgaagc

SEQ ID NO: 42180 - DNA, 15 bp, Homo sapiens
tgtcatgcagtgaag

SEQ ID NO: 42181 - DNA, 15 bp, Homo sapiens
ttgtcatgcagtgaa

SEQ ID NO: 42182 - DNA, 15 bp, Homo sapiens
tttgtcatgcagtga

SEQ ID NO: 42183 - DNA, 15 bp, Homo sapiens
atttgtcatgcagtg

SEQ ID NO: 42184 - DNA, 15 bp, Homo sapiens
catttgtcatgcagt

SEQ ID NO: 42185 - DNA, 15 bp, Homo sapiens
gcatttgtcatgcag

SEQ ID NO: 42186 - DNA, 15 bp, Homo sapiens
agcatttgtcatgca

SEQ ID NO: 42187 - DNA, 15 bp, Homo sapiens
gagcatttgtcatgc

SEQ ID NO: 42188 - DNA, 15 bp, Homo sapiens
tgagcatttgtcatg

SEQ ID NO: 42189 - DNA, 15 bp, Homo sapiens
gtgagcatttgtcat

SEQ ID NO: 42190 - DNA, 15 bp, Homo sapiens
ggtgagcatttgtca

SEQ ID NO: 42191 - DNA, 15 bp, Homo sapiens
gggtgagcatttgtc

SEQ ID NO: 42192 - DNA, 15 bp, Homo sapiens
agggtgagcatttgt

SEQ ID NO: 42193 - DNA, 15 bp, Homo sapiens
aagggtgagcatttg

SEQ ID NO: 42194 - DNA, 15 bp, Homo sapiens
aaagggtgagcattt

SEQ ID NO: 42195 - DNA, 15 bp, Homo sapiens
gaaagggtgagcatt

SEQ ID NO: 42196 - DNA, 15 bp, Homo sapiens
tgaaagggtgagcat

SEQ ID NO: 42197 - DNA, 15 bp, Homo sapiens
ctgaaagggtgagca

SEQ ID NO: 42198 - DNA, 15 bp, Homo sapiens
gctgaaagggtgagc

SEQ ID NO: 42199 - DNA, 15 bp, Homo sapiens
agctgaaagggtgag

SEQ ID NO: 42200 - DNA, 15 bp, Homo sapiens
cagctgaaagggtga

SEQ ID NO: 42201 - DNA, 15 bp, Homo sapiens
ccagctgaaagggtg

SEQ ID NO: 42202 - DNA, 15 bp, Homo sapiens
tccagctgaaagggt

SEQ ID NO: 42203 - DNA, 15 bp, Homo sapiens
ttccagctgaaaggg

SEQ ID NO: 42204 - DNA, 15 bp, Homo sapiens
attccagctgaaagg

SEQ ID NO: 42205 - DNA, 15 bp, Homo sapiens
cattccagctgaaag

SEQ ID NO: 42206 - DNA, 15 bp, Homo sapiens
tcattccagctgaaa

SEQ ID NO: 42207 - DNA, 15 bp, Homo sapiens
atcattccagctgaa

SEQ ID NO: 42208 - DNA, 15 bp, Homo sapiens
aatcattccagctga

SEQ ID NO: 42209 - DNA, 15 bp, Homo sapiens
caatcattccagctg

SEQ ID NO: 42210 - DNA, 15 bp, Homo sapiens
tcaatcattccagct

SEQ ID NO: 42211 - DNA, 15 bp, Homo sapiens
ttcaatcattccagc

SEQ ID NO: 42212 - DNA, 15 bp, Homo sapiens
tttcaatcattccag

SEQ ID NO: 42213 - DNA, 15 bp, Homo sapiens
atttcaatcattcca

SEQ ID NO: 42214 - DNA, 15 bp, Homo sapiens
aatttcaatcattcc

SEQ ID NO: 42215 - DNA, 15 bp, Homo sapiens
aaatttcaatcattc

SEQ ID NO: 42216 - DNA, 15 bp, Homo sapiens
aaaatttcaatcatt

SEQ ID NO: 42217 - DNA, 15 bp, Homo sapiens
caaaatttcaatcat

SEQ ID NO: 42218 - DNA, 15 bp, Homo sapiens
ccaaaatttcaatca

SEQ ID NO: 42219 - DNA, 15 bp, Homo sapiens
tccaaaatttcaatc

SEQ ID NO: 42220 - DNA, 15 bp, Homo sapiens
ttccaaaatttcaat

SEQ ID NO: 42221 - DNA, 15 bp, Homo sapiens
tttccaaaatttcaa

SEQ ID NO: 42222 - DNA, 15 bp, Homo sapiens
ttttccaaaatttca

SEQ ID NO: 42223 - DNA, 15 bp, Homo sapiens
cttttccaaaatttc

SEQ ID NO: 42224 - DNA, 15 bp, Homo sapiens
tcttttccaaaattt

SEQ ID NO: 42225 - DNA, 15 bp, Homo sapiens
atcttttccaaaatt

SEQ ID NO: 42226 - DNA, 15 bp, Homo sapiens
catcttttccaaaat

SEQ ID NO: 42227 - DNA, 15 bp, Homo sapiens
ccatcttttccaaaa

SEQ ID NO: 42228 - DNA, 15 bp, Homo sapiens
cccatcttttccaaa

SEQ ID NO: 42229 - DNA, 15 bp, Homo sapiens
acccatcttttccaa

SEQ ID NO: 42230 - DNA, 15 bp, Homo sapiens
cacccatcttttcca

SEQ ID NO: 42231 - DNA, 15 bp, Homo sapiens
acacccatcttttcc

SEQ ID NO: 42232 - DNA, 15 bp, Homo sapiens
aacacccatcttttc

SEQ ID NO: 42233 - DNA, 15 bp, Homo sapiens
aaacacccatctttt

SEQ ID NO: 42234 - DNA, 15 bp, Homo sapiens
aaaacacccatcttt

SEQ ID NO: 42235 - DNA, 15 bp, Homo sapiens
aaaaacacccatctt

SEQ ID NO: 42236 - DNA, 15 bp, Homo sapiens
taaaaacacccatct

SEQ ID NO: 42237 - DNA, 15 bp, Homo sapiens
ctaaaaacacccatc

SEQ ID NO: 42238 - DNA, 15 bp, Homo sapiens
tctaaaaacacccat

SEQ ID NO: 42239 - DNA, 15 bp, Homo sapiens
ttctaaaaacaccca

SEQ ID NO: 42240 - DNA, 15 bp, Homo sapiens
cttctaaaaacaccc

SEQ ID NO: 42241 - DNA, 15 bp, Homo sapiens
tcttctaaaaacacc

SEQ ID NO: 42242 - DNA, 15 bp, Homo sapiens
gtcttctaaaaacac

SEQ ID NO: 42243 - DNA, 15 bp, Homo sapiens
tgtcttctaaaaaca

SEQ ID NO: 42244 - DNA, 15 bp, Homo sapiens
atgtcttctaaaaac

SEQ ID NO: 42245 - DNA, 15 bp, Homo sapiens
aatgtcttctaaaaa

SEQ ID NO: 42246 - DNA, 15 bp, Homo sapiens
caatgtcttctaaaa

SEQ ID NO: 42247 - DNA, 15 bp, Homo sapiens
acaatgtcttctaaa

SEQ ID NO: 42248 - DNA, 15 bp, Homo sapiens
tacaatgtcttctaa

SEQ ID NO: 42249 - DNA, 15 bp, Homo sapiens
ttacaatgtcttcta

SEQ ID NO: 42250 - DNA, 15 bp, Homo sapiens
attacaatgtcttct

SEQ ID NO: 42251 - DNA, 15 bp, Homo sapiens
aattacaatgtcttc

SEQ ID NO: 42252 - DNA, 15 bp, Homo sapiens
aaattacaatgtctt

SEQ ID NO: 42253 - DNA, 15 bp, Homo sapiens
caaattacaatgtct

SEQ ID NO: 42254 - DNA, 15 bp, Homo sapiens
acaaattacaatgtc

SEQ ID NO: 42255 - DNA, 15 bp, Homo sapiens
aacaaattacaatgt

SEQ ID NO: 42256 - DNA, 15 bp, Homo sapiens
gaacaaattacaatg

SEQ ID NO: 42257 - DNA, 15 bp, Homo sapiens
ggaacaaattacaat

SEQ ID NO: 42258 - DNA, 15 bp, Homo sapiens
cggaacaaattacaa

SEQ ID NO: 42259 - DNA, 15 bp, Homo sapiens
ccggaacaaattaca

SEQ ID NO: 42260 - DNA, 15 bp, Homo sapiens
accggaacaaattac

SEQ ID NO: 42261 - DNA, 15 bp, Homo sapiens
caccggaacaaatta

SEQ ID NO: 42262 - DNA, 15 bp, Homo sapiens
gcaccggaacaaatt

SEQ ID NO: 42263 - DNA, 15 bp, Homo sapiens
agcaccggaacaaat

SEQ ID NO: 42264 - DNA, 15 bp, Homo sapiens
cagcaccggaacaaa

SEQ ID NO: 42265 - DNA, 15 bp, Homo sapiens
acagcaccggaacaa

SEQ ID NO: 42266 - DNA, 15 bp, Homo sapiens
cacagcaccggaaca

SEQ ID NO: 42267 - DNA, 15 bp, Homo sapiens
gcacagcaccggaac

SEQ ID NO: 42268 - DNA, 15 bp, Homo sapiens
ggcacagcaccggaa

SEQ ID NO: 42269 - DNA, 15 bp, Homo sapiens
gggcacagcaccgga

SEQ ID NO: 42270 - DNA, 15 bp, Homo sapiens
tgggcacagcaccgg

SEQ ID NO: 42271 - DNA, 15 bp, Homo sapiens
atgggcacagcaccg

SEQ ID NO: 42272 - DNA, 15 bp, Homo sapiens
aatgggcacagcacc

SEQ ID NO: 42273 - DNA, 15 bp, Homo sapiens
gaatgggcacagcac

SEQ ID NO: 42274 - DNA, 15 bp, Homo sapiens
tgaatgggcacagca

SEQ ID NO: 42275 - DNA, 15 bp, Homo sapiens
atgaatgggcacagc

SEQ ID NO: 42276 - DNA, 15 bp, Homo sapiens
aatgaatgggcacag

SEQ ID NO: 42277 - DNA, 15 bp, Homo sapiens
gaatgaatgggcaca

SEQ ID NO: 42278 - DNA, 15 bp, Homo sapiens
ggaatgaatgggcac

SEQ ID NO: 42279 - DNA, 15 bp, Homo sapiens
tggaatgaatgggca

SEQ ID NO: 42280 - DNA, 15 bp, Homo sapiens
atggaatgaatgggc

SEQ ID NO: 42281 - DNA, 15 bp, Homo sapiens
aatggaatgaatggg

SEQ ID NO: 42282 - DNA, 15 bp, Homo sapiens
aaatggaatgaatgg

SEQ ID NO: 42283 - DNA, 15 bp, Homo sapiens
gaaatggaatgaatg

SEQ ID NO: 42284 - DNA, 15 bp, Homo sapiens
tgaaatggaatgaat

SEQ ID NO: 42285 - DNA, 15 bp, Homo sapiens
gtgaaatggaatgaa

SEQ ID NO: 42286 - DNA, 15 bp, Homo sapiens
agtgaaatggaatga

SEQ ID NO: 42287 - DNA, 15 bp, Homo sapiens
aagtgaaatggaatg

SEQ ID NO: 42288 - DNA, 15 bp, Homo sapiens
gaagtgaaatggaat

SEQ ID NO: 42289 - DNA, 15 bp, Homo sapiens
agaagtgaaatggaa

SEQ ID NO: 42290 - DNA, 15 bp, Homo sapiens
cagaagtgaaatgga

SEQ ID NO: 42291 - DNA, 15 bp, Homo sapiens
acagaagtgaaatgg

SEQ ID NO: 42292 - DNA, 15 bp, Homo sapiens
aacagaagtgaaatg

SEQ ID NO: 42293 - DNA, 15 bp, Homo sapiens
aaacagaagtgaaat

SEQ ID NO: 42294 - DNA, 15 bp, Homo sapiens
taaacagaagtgaaa

SEQ ID NO: 42295 - DNA, 15 bp, Homo sapiens
gtaaacagaagtgaa

SEQ ID NO: 42296 - DNA, 15 bp, Homo sapiens
agtaaacagaagtga

SEQ ID NO: 42297 - DNA, 15 bp, Homo sapiens
gagtaaacagaagtg

SEQ ID NO: 42298 - DNA, 15 bp, Homo sapiens
tgagtaaacagaagt

SEQ ID NO: 42299 - DNA, 15 bp, Homo sapiens
atgagtaaacagaag

SEQ ID NO: 42300 - DNA, 15 bp, Homo sapiens
aatgagtaaacagaa

SEQ ID NO: 42301 - DNA, 15 bp, Homo sapiens
taatgagtaaacaga

SEQ ID NO: 42302 - DNA, 15 bp, Homo sapiens
ttaatgagtaaacag

SEQ ID NO: 42303 - DNA, 15 bp, Homo sapiens
tttaatgagtaaaca

SEQ ID NO: 42304 - DNA, 15 bp, Homo sapiens
gtttaatgagtaaac

SEQ ID NO: 42305 - DNA, 15 bp, Homo sapiens
tgtttaatgagtaaa

SEQ ID NO: 42306 - DNA, 15 bp, Homo sapiens
gtgtttaatgagtaa

SEQ ID NO: 42307 - DNA, 15 bp, Homo sapiens
ggtgtttaatgagta

SEQ ID NO: 42308 - DNA, 15 bp, Homo sapiens
aggtgtttaatgagt

SEQ ID NO: 42309 - DNA, 15 bp, Homo sapiens
taggtgtttaatgag

SEQ ID NO: 42310 - DNA, 15 bp, Homo sapiens
ataggtgtttaatga

SEQ ID NO: 42311 - DNA, 15 bp, Homo sapiens
aataggtgtttaatg

SEQ ID NO: 42312 - DNA, 15 bp, Homo sapiens
caataggtgtttaat

SEQ ID NO: 42313 - DNA, 15 bp, Homo sapiens
acaataggtgtttaa

SEQ ID NO: 42314 - DNA, 15 bp, Homo sapiens
cacaataggtgttta

SEQ ID NO: 42315 - DNA, 15 bp, Homo sapiens
acacaataggtgttt

SEQ ID NO: 42316 - DNA, 15 bp, Homo sapiens
tacacaataggtgtt

SEQ ID NO: 42317 - DNA, 15 bp, Homo sapiens
gtacacaataggtgt

SEQ ID NO: 42318 - DNA, 15 bp, Homo sapiens
tgtacacaataggtg

SEQ ID NO: 42319 - DNA, 15 bp, Homo sapiens
gtgtacacaataggt

SEQ ID NO: 42320 - DNA, 15 bp, Homo sapiens
tgtgtacacaatagg

SEQ ID NO: 42321 - DNA, 15 bp, Homo sapiens
ttgtgtacacaatag

SEQ ID NO: 42322 - DNA, 15 bp, Homo sapiens
gttgtgtacacaata

SEQ ID NO: 42323 - DNA, 15 bp, Homo sapiens
ggttgtgtacacaat

SEQ ID NO: 42324 - DNA, 15 bp, Homo sapiens
gggttgtgtacacaa

SEQ ID NO: 42325 - DNA, 15 bp, Homo sapiens
cgggttgtgtacaca

SEQ ID NO: 42326 - DNA, 15 bp, Homo sapiens
ccgggttgtgtacac

SEQ ID NO: 42327 - DNA, 15 bp, Homo sapiens
accgggttgtgtaca

SEQ ID NO: 42328 - DNA, 15 bp, Homo sapiens
taccgggttgtgtac

SEQ ID NO: 42329 - DNA, 15 bp, Homo sapiens
ttaccgggttgtgta

SEQ ID NO: 42330 - DNA, 15 bp, Homo sapiens
tttaccgggttgtgt

SEQ ID NO: 42331 - DNA, 15 bp, Homo sapiens
ttttaccgggttgtg

SEQ ID NO: 42332 - DNA, 15 bp, Homo sapiens
attttaccgggttgt

SEQ ID NO: 42333 - DNA, 15 bp, Homo sapiens
gattttaccgggttg

SEQ ID NO: 42334 - DNA, 15 bp, Homo sapiens
ggattttaccgggtt

SEQ ID NO: 42335 - DNA, 15 bp, Homo sapiens
gggattttaccgggt

SEQ ID NO: 42336 - DNA, 15 bp, Homo sapiens
agggattttaccggg

SEQ ID NO: 42337 - DNA, 15 bp, Homo sapiens
gagggattttaccgg

SEQ ID NO: 42338 - DNA, 15 bp, Homo sapiens
ggagggattttaccg

SEQ ID NO: 42339 - DNA, 15 bp, Homo sapiens
tggagggattttacc

SEQ ID NO: 42340 - DNA, 15 bp, Homo sapiens
gtggagggattttac

SEQ ID NO: 42341 - DNA, 15 bp, Homo sapiens
agtggagggatttta

SEQ ID NO: 42342 - DNA, 15 bp, Homo sapiens
gagtggagggatttt

SEQ ID NO: 42343 - DNA, 15 bp, Homo sapiens
tgagtggagggattt

SEQ ID NO: 42344 - DNA, 15 bp, Homo sapiens
gtgagtggagggatt

SEQ ID NO: 42345 - DNA, 15 bp, Homo sapiens
tgtgagtggagggat

SEQ ID NO: 42346 - DNA, 15 bp, Homo sapiens
gtgtgagtggaggga

SEQ ID NO: 42347 - DNA, 15 bp, Homo sapiens
tgtgtgagtggaggg

SEQ ID NO: 42348 - DNA, 15 bp, Homo sapiens
ttgtgtgagtggagg

SEQ ID NO: 42349 - DNA, 15 bp, Homo sapiens
attgtgtgagtggag

SEQ ID NO: 42350 - DNA, 15 bp, Homo sapiens
cattgtgtgagtgga

SEQ ID NO: 42351 - DNA, 15 bp, Homo sapiens
gcattgtgtgagtgg

SEQ ID NO: 42352 - DNA, 15 bp, Homo sapiens
ggcattgtgtgagtg

SEQ ID NO: 42353 - DNA, 15 bp, Homo sapiens
aggcattgtgtgagt

SEQ ID NO: 42354 - DNA, 15 bp, Homo sapiens
caggcattgtgtgag

SEQ ID NO: 42355 - DNA, 15 bp, Homo sapiens
tcaggcattgtgtga

SEQ ID NO: 42356 - DNA, 15 bp, Homo sapiens
ttcaggcattgtgtg

SEQ ID NO: 42357 - DNA, 15 bp, Homo sapiens
attcaggcattgtgt

SEQ ID NO: 42358 - DNA, 15 bp, Homo sapiens
aattcaggcattgtg

SEQ ID NO: 42359 - DNA, 15 bp, Homo sapiens
taattcaggcattgt

SEQ ID NO: 42360 - DNA, 15 bp, Homo sapiens
ataattcaggcattg

SEQ ID NO: 42361 - DNA, 15 bp, Homo sapiens
tataattcaggcatt

SEQ ID NO: 42362 - DNA, 15 bp, Homo sapiens
gtataattcaggcat

SEQ ID NO: 42363 - DNA, 15 bp, Homo sapiens
agtataattcaggca

SEQ ID NO: 42364 - DNA, 15 bp, Homo sapiens
gagtataattcaggc

SEQ ID NO: 42365 - DNA, 15 bp, Homo sapiens
tgagtataattcagg

SEQ ID NO: 42366 - DNA, 15 bp, Homo sapiens
atgagtataattcag

SEQ ID NO: 42367 - DNA, 15 bp, Homo sapiens
tatgagtataattca

SEQ ID NO: 42368 - DNA, 15 bp, Homo sapiens
ctatgagtataattc

SEQ ID NO: 42369 - DNA, 15 bp, Homo sapiens
actatgagtataatt

SEQ ID NO: 42370 - DNA, 15 bp, Homo sapiens
tactatgagtataat

SEQ ID NO: 42371 - DNA, 15 bp, Homo sapiens
ctactatgagtataa

SEQ ID NO: 42372 - DNA, 15 bp, Homo sapiens
tctactatgagtata

SEQ ID NO: 42373 - DNA, 15 bp, Homo sapiens
ttctactatgagtat

SEQ ID NO: 42374 - DNA, 15 bp, Homo sapiens
attctactatgagta

SEQ ID NO: 42375 - DNA, 15 bp, Homo sapiens
cattctactatgagt

SEQ ID NO: 42376 - DNA, 15 bp, Homo sapiens
tcattctactatgag

SEQ ID NO: 42377 - DNA, 15 bp, Homo sapiens
gtcattctactatga

SEQ ID NO: 42378 - DNA, 15 bp, Homo sapiens
agtcattctactatg

SEQ ID NO: 42379 - DNA, 15 bp, Homo sapiens
cagtcattctactat

SEQ ID NO: 42380 - DNA, 15 bp, Homo sapiens
acagtcattctacta

SEQ ID NO: 42381 - DNA, 15 bp, Homo sapiens
aacagtcattctact

SEQ ID NO: 42382 - DNA, 15 bp, Homo sapiens
aaacagtcattctac

SEQ ID NO: 42383 - DNA, 15 bp, Homo sapiens
taaacagtcattcta

SEQ ID NO: 42384 - DNA, 15 bp, Homo sapiens
ctaaacagtcattct

SEQ ID NO: 42385 - DNA, 15 bp, Homo sapiens
gctaaacagtcattc

SEQ ID NO: 42386 - DNA, 15 bp, Homo sapiens
ggctaaacagtcatt

SEQ ID NO: 42387 - DNA, 15 bp, Homo sapiens
gggctaaacagtcat

SEQ ID NO: 42388 - DNA, 15 bp, Homo sapiens
agggctaaacagtca

SEQ ID NO: 42389 - DNA, 15 bp, Homo sapiens
gagggctaaacagtc

SEQ ID NO: 42390 - DNA, 15 bp, Homo sapiens
tgagggctaaacagt

SEQ ID NO: 42391 - DNA, 15 bp, Homo sapiens
atgagggctaaacag

SEQ ID NO: 42392 - DNA, 15 bp, Homo sapiens
gatgagggctaaaca

SEQ ID NO: 42393 - DNA, 15 bp, Homo sapiens
tgatgagggctaaac

SEQ ID NO: 42394 - DNA, 15 bp, Homo sapiens
atgatgagggctaaa

SEQ ID NO: 42395 - DNA, 15 bp, Homo sapiens
gatgatgagggctaa

SEQ ID NO: 42396 - DNA, 15 bp, Homo sapiens
agatgatgagggcta

SEQ ID NO: 42397 - DNA, 15 bp, Homo sapiens
cagatgatgagggct

SEQ ID NO: 42398 - DNA, 15 bp, Homo sapiens
tcagatgatgagggc

SEQ ID NO: 42399 - DNA, 15 bp, Homo sapiens
atcagatgatgaggg

SEQ ID NO: 42400 - DNA, 15 bp, Homo sapiens
tatcagatgatgagg

SEQ ID NO: 42401 - DNA, 15 bp, Homo sapiens
ttatcagatgatgag

SEQ ID NO: 42402 - DNA, 15 bp, Homo sapiens
attatcagatgatga

SEQ ID NO: 42403 - DNA, 15 bp, Homo sapiens
aattatcagatgatg

SEQ ID NO: 42404 - DNA, 15 bp, Homo sapiens
taattatcagatgat

SEQ ID NO: 42405 - DNA, 15 bp, Homo sapiens
ttaattatcagatga

SEQ ID NO: 42406 - DNA, 15 bp, Homo sapiens
gttaattatcagatg

SEQ ID NO: 42407 - DNA, 15 bp, Homo sapiens
tgttaattatcagat

SEQ ID NO: 42408 - DNA, 15 bp, Homo sapiens
ctgttaattatcaga

SEQ ID NO: 42409 - DNA, 15 bp, Homo sapiens
gctgttaattatcag

SEQ ID NO: 42410 - DNA, 15 bp, Homo sapiens
agctgttaattatca

SEQ ID NO: 42411 - DNA, 15 bp, Homo sapiens
gagctgttaattatc

SEQ ID NO: 42412 - DNA, 15 bp, Homo sapiens
tgagctgttaattat

SEQ ID NO: 42413 - DNA, 15 bp, Homo sapiens
ctgagctgttaatta

SEQ ID NO: 42414 - DNA, 15 bp, Homo sapiens
cctgagctgttaatt

SEQ ID NO: 42415 - DNA, 15 bp, Homo sapiens
acctgagctgttaat

SEQ ID NO: 42416 - DNA, 15 bp, Homo sapiens
aacctgagctgttaa

SEQ ID NO: 42417 - DNA, 15 bp, Homo sapiens
aaacctgagctgtta

SEQ ID NO: 42418 - DNA, 15 bp, Homo sapiens
gaaacctgagctgtt

SEQ ID NO: 42419 - DNA, 15 bp, Homo sapiens
tgaaacctgagctgt

SEQ ID NO: 42420 - DNA, 15 bp, Homo sapiens
gttgaaacctgagct

SEQ ID NO: 42421 - DNA, 15 bp, Homo sapiens
ggttgaaacctgagc

SEQ ID NO: 42422 - DNA, 15 bp, Homo sapiens
aggttgaaacctgag

SEQ ID NO: 42423 - DNA, 15 bp, Homo sapiens
caggttgaaacctga

SEQ ID NO: 42424 - DNA, 15 bp, Homo sapiens
tcaggttgaaacctg

SEQ ID NO: 42425 - DNA, 15 bp, Homo sapiens
gtcaggttgaaacct

SEQ ID NO: 42426 - DNA, 15 bp, Homo sapiens
tgtcaggttgaaacc

SEQ ID NO: 42427 - DNA, 15 bp, Homo sapiens
ctgtcaggttgaaac

SEQ ID NO: 42428 - DNA, 15 bp, Homo sapiens
actgtcaggttgaaa

SEQ ID NO: 42429 - DNA, 15 bp, Homo sapiens
tactgtcaggttgaa

SEQ ID NO: 42430 - DNA, 15 bp, Homo sapiens
atactgtcaggttga

SEQ ID NO: 42431 - DNA, 15 bp, Homo sapiens
gatactgtcaggttg

SEQ ID NO: 42432 - DNA, 15 bp, Homo sapiens
agatactgtcaggtt

SEQ ID NO: 42433 - DNA, 15 bp, Homo sapiens
gagatactgtcaggt

SEQ ID NO: 42434 - DNA, 15 bp, Homo sapiens
agagatactgtcagg

SEQ ID NO: 42435 - DNA, 15 bp, Homo sapiens
gagagatactgtcag

SEQ ID NO: 42436 - DNA, 15 bp, Homo sapiens
agagagatactgtca

SEQ ID NO: 42437 - DNA, 15 bp, Homo sapiens
cagagagatactgtc

SEQ ID NO: 42438 - DNA, 15 bp, Homo sapiens
ccagagagatactgt

SEQ ID NO: 42439 - DNA, 15 bp, Homo sapiens
cccagagagatactg

SEQ ID NO: 42440 - DNA, 15 bp, Homo sapiens
tcccagagagatact

SEQ ID NO: 42441 - DNA, 15 bp, Homo sapiens
ctcccagagagatac

SEQ ID NO: 42442 - DNA, 15 bp, Homo sapiens
cctcccagagagata

SEQ ID NO: 42443 - DNA, 15 bp, Homo sapiens
tcctcccagagagat

SEQ ID NO: 42444 - DNA, 15 bp, Homo sapiens
atcctcccagagaga

SEQ ID NO: 42445 - DNA, 15 bp, Homo sapiens
aatcctcccagagag

SEQ ID NO: 42446 - DNA, 15 bp, Homo sapiens
taatcctcccagaga

SEQ ID NO: 42447 - DNA, 15 bp, Homo sapiens
ctaatcctcccagag

SEQ ID NO: 42448 - DNA, 15 bp, Homo sapiens
gctaatcctcccaga

SEQ ID NO: 42449 - DNA, 15 bp, Homo sapiens
tgctaatcctcccag

SEQ ID NO: 42450 - DNA, 15 bp, Homo sapiens
ctgctaatcctccca

SEQ ID NO: 42451 - DNA, 15 bp, Homo sapiens
gctgctaatcctccc

SEQ ID NO: 42452 - DNA, 15 bp, Homo sapiens
cgctgctaatcctcc

SEQ ID NO: 42453 - DNA, 15 bp, Homo sapiens
acgctgctaatcctc

SEQ ID NO: 42454 - DNA, 15 bp, Homo sapiens
cacgctgctaatcct

SEQ ID NO: 42455 - DNA, 15 bp, Homo sapiens
tcacgctgctaatcc

SEQ ID NO: 42456 - DNA, 15 bp, Homo sapiens
gtcacgctgctaatc

SEQ ID NO: 42457 - DNA, 15 bp, Homo sapiens
tgtcacgctgctaat

SEQ ID NO: 42458 - DNA, 15 bp, Homo sapiens
ctgtcacgctgctaa

SEQ ID NO: 42459 - DNA, 15 bp, Homo sapiens
tctgtcacgctgcta

SEQ ID NO: 42460 - DNA, 15 bp, Homo sapiens
ctctgtcacgctgct

SEQ ID NO: 42461 - DNA, 15 bp, Homo sapiens
actctgtcacgctgc

SEQ ID NO: 42462 - DNA, 15 bp, Homo sapiens
cactctgtcacgctg

SEQ ID NO: 42463 - DNA, 15 bp, Homo sapiens
gcactctgtcacgct

SEQ ID NO: 42464 - DNA, 15 bp, Homo sapiens
tgcactctgtcacgc

SEQ ID NO: 42465 - DNA, 15 bp, Homo sapiens
ctgcactctgtcacg

SEQ ID NO: 42466 - DNA, 15 bp, Homo sapiens
cctgcactctgtcac

SEQ ID NO: 42467 - DNA, 15 bp, Homo sapiens
ccctgcactctgtca

SEQ ID NO: 42468 - DNA, 15 bp, Homo sapiens
tccctgcactctgtc

SEQ ID NO: 42469 - DNA, 15 bp, Homo sapiens
ttccctgcactctgt

SEQ ID NO: 42470 - DNA, 15 bp, Homo sapiens
tttccctgcactctg

SEQ ID NO: 42471 - DNA, 15 bp, Homo sapiens
atttccctgcactct

SEQ ID NO: 42472 - DNA, 15 bp, Homo sapiens
catttccctgcactc

SEQ ID NO: 42473 - DNA, 15 bp, Homo sapiens
gcatttccctgcact

SEQ ID NO: 42474 - DNA, 15 bp, Homo sapiens
tgcatttccctgcac

SEQ ID NO: 42475 - DNA, 15 bp, Homo sapiens
gtgcatttccctgca

SEQ ID NO: 42476 - DNA, 15 bp, Homo sapiens
ggtgcatttccctgc

SEQ ID NO: 42477 - DNA, 15 bp, Homo sapiens
aggtgcatttccctg

SEQ ID NO: 42478 - DNA, 15 bp, Homo sapiens
aaggtgcatttccct

SEQ ID NO: 42479 - DNA, 15 bp, Homo sapiens
gaaggtgcatttccc

SEQ ID NO: 42480 - DNA, 15 bp, Homo sapiens
tgaaggtgcatttcc

SEQ ID NO: 42481 - DNA, 15 bp, Homo sapiens
ctgaaggtgcatttc

SEQ ID NO: 42482 - DNA, 15 bp, Homo sapiens
tctgaaggtgcattt

SEQ ID NO: 42483 - DNA, 15 bp, Homo sapiens
ttctgaaggtgcatt

SEQ ID NO: 42484 - DNA, 15 bp, Homo sapiens
gttctgaaggtgcat

SEQ ID NO: 42485 - DNA, 15 bp, Homo sapiens
ggttctgaaggtgca

SEQ ID NO: 42486 - DNA, 15 bp, Homo sapiens
cggttctgaaggtgc

SEQ ID NO: 42487 - DNA, 15 bp, Homo sapiens
acggttctgaaggtg

SEQ ID NO: 42488 - DNA, 15 bp, Homo sapiens
gacggttctgaaggt

SEQ ID NO: 42489 - DNA, 15 bp, Homo sapiens
tgacggttctgaagg

SEQ ID NO: 42490 - DNA, 15 bp, Homo sapiens
ctgacggttctgaag

SEQ ID NO: 42491 - DNA, 15 bp, Homo sapiens
gctgacggttctgaa

SEQ ID NO: 42492 - DNA, 15 bp, Homo sapiens
agctgacggttctga

SEQ ID NO: 42493 - DNA, 15 bp, Homo sapiens
tagctgacggttctg

SEQ ID NO: 42494 - DNA, 15 bp, Homo sapiens
gtagctgacggttct

SEQ ID NO: 42495 - DNA, 15 bp, Homo sapiens
tgtagctgacggttc

SEQ ID NO: 42496 - DNA, 15 bp, Homo sapiens
gtgtagctgacggtt

SEQ ID NO: 42497 - DNA, 15 bp, Homo sapiens
agtgtagctgacggt

SEQ ID NO: 42498 - DNA, 15 bp, Homo sapiens
cagtgtagctgacgg

SEQ ID NO: 42499 - DNA, 15 bp, Homo sapiens
acagtgtagctgacg

SEQ ID NO: 42500 - DNA, 15 bp, Homo sapiens
cacagtgtagctgac

SEQ ID NO: 42501 - DNA, 15 bp, Homo sapiens
acacagtgtagctga

SEQ ID NO: 42502 - DNA, 15 bp, Homo sapiens
gacacagtgtagctg

SEQ ID NO: 42503 - DNA, 15 bp, Homo sapiens
ggacacagtgtagct

SEQ ID NO: 42504 - DNA, 15 bp, Homo sapiens
gggacacagtgtagc

SEQ ID NO: 42505 - DNA, 15 bp, Homo sapiens
tgggacacagtgtag

SEQ ID NO: 42506 - DNA, 15 bp, Homo sapiens
atgggacacagtgta

SEQ ID NO: 42507 - DNA, 15 bp, Homo sapiens
gatgggacacagtgt

SEQ ID NO: 42508 - DNA, 15 bp, Homo sapiens
ggatgggacacagtg

SEQ ID NO: 42509 - DNA, 15 bp, Homo sapiens
aggatgggacacagt

SEQ ID NO: 42510 - DNA, 15 bp, Homo sapiens
caggatgggacacag

SEQ ID NO: 42511 - DNA, 15 bp, Homo sapiens
gcaggatgggacaca

SEQ ID NO: 42512 - DNA, 15 bp, Homo sapiens
agcaggatgggacac

SEQ ID NO: 42513 - DNA, 15 bp, Homo sapiens
cagcaggatgggaca

SEQ ID NO: 42514 - DNA, 15 bp, Homo sapiens
acagcaggatgggac

SEQ ID NO: 42515 - DNA, 15 bp, Homo sapiens
cacagcaggatggga

SEQ ID NO: 42516 - DNA, 15 bp, Homo sapiens
acacagcaggatggg

SEQ ID NO: 42517 - DNA, 15 bp, Homo sapiens
aacacagcaggatgg

SEQ ID NO: 42518 - DNA, 15 bp, Homo sapiens
caacacagcaggatg

SEQ ID NO: 42519 - DNA, 15 bp, Homo sapiens
acaacacagcaggat

SEQ ID NO: 42520 - DNA, 15 bp, Homo sapiens
cacaacacagcagga

SEQ ID NO: 42521 - DNA, 15 bp, Homo sapiens
ccacaacacagcagg

SEQ ID NO: 42522 - DNA, 15 bp, Homo sapiens
accacaacacagcag

SEQ ID NO: 42523 - DNA, 15 bp, Homo sapiens
aaccacaacacagca

SEQ ID NO: 42524 - DNA, 15 bp, Homo sapiens
caaccacaacacagc

SEQ ID NO: 42525 - DNA, 15 bp, Homo sapiens
acaaccacaacacag

SEQ ID NO: 42526 - DNA, 15 bp, Homo sapiens
cacaaccacaacaca

SEQ ID NO: 42527 - DNA, 15 bp, Homo sapiens
gcacaaccacaacac

SEQ ID NO: 42528 - DNA, 15 bp, Homo sapiens
ggcacaaccacaaca

SEQ ID NO: 42529 - DNA, 15 bp, Homo sapiens
aggcacaaccacaac

SEQ ID NO: 42530 - DNA, 15 bp, Homo sapiens
aaggcacaaccacaa

SEQ ID NO: 42531 - DNA, 15 bp, Homo sapiens
caaggcacaaccaca

SEQ ID NO: 42532 - DNA, 15 bp, Homo sapiens
acaaggcacaaccac

SEQ ID NO: 42533 - DNA, 15 bp, Homo sapiens
cacaaggcacaacca

SEQ ID NO: 42534 - DNA, 15 bp, Homo sapiens
ccacaaggcacaacc

SEQ ID NO: 42535 - DNA, 15 bp, Homo sapiens
tccacaaggcacaac

SEQ ID NO: 42536 - DNA, 15 bp, Homo sapiens
atccacaaggcacaa

SEQ ID NO: 42537 - DNA, 15 bp, Homo sapiens
catccacaaggcaca

SEQ ID NO: 42538 - DNA, 15 bp, Homo sapiens
gcatccacaaggcac

SEQ ID NO: 42539 - DNA, 15 bp, Homo sapiens
cgcatccacaaggca

SEQ ID NO: 42540 - DNA, 15 bp, Homo sapiens
acgcatccacaaggc

SEQ ID NO: 42541 - DNA, 15 bp, Homo sapiens
aacgcatccacaagg

SEQ ID NO: 42542 - DNA, 15 bp, Homo sapiens
caacgcatccacaag

SEQ ID NO: 42543 - DNA, 15 bp, Homo sapiens
ccaacgcatccacaa

SEQ ID NO: 42544 - DNA, 15 bp, Homo sapiens
accaacgcatccaca

SEQ ID NO: 42545 - DNA, 15 bp, Homo sapiens
aaccaacgcatccac

SEQ ID NO: 42546 - DNA, 15 bp, Homo sapiens
aaaccaacgcatcca

SEQ ID NO: 42547 - DNA, 15 bp, Homo sapiens
taaaccaacgcatcc

SEQ ID NO: 42548 - DNA, 15 bp, Homo sapiens
ataaaccaacgcatc

SEQ ID NO: 42549 - DNA, 15 bp, Homo sapiens
cataaaccaacgcat

SEQ ID NO: 42550 - DNA, 15 bp, Homo sapiens
tcataaaccaacgca

SEQ ID NO: 42551 - DNA, 15 bp, Homo sapiens
gtcataaaccaacgc

SEQ ID NO: 42552 - DNA, 15 bp, Homo sapiens
ggtcataaaccaacg

SEQ ID NO: 42553 - DNA, 15 bp, Homo sapiens
tggtcataaaccaac

SEQ ID NO: 42554 - DNA, 15 bp, Homo sapiens
ctggtcataaaccaa

SEQ ID NO: 42555 - DNA, 15 bp, Homo sapiens
cctggtcataaacca

SEQ ID NO: 42556 - DNA, 15 bp, Homo sapiens
acctggtcataaacc

SEQ ID NO: 42557 - DNA, 15 bp, Homo sapiens
tacctggtcataaac

SEQ ID NO: 42558 - DNA, 15 bp, Homo sapiens
atacctggtcataaa

SEQ ID NO: 42559 - DNA, 15 bp, Homo sapiens
aatacctggtcataa

SEQ ID NO: 42560 - DNA, 15 bp, Homo sapiens
caatacctggtcata

SEQ ID NO: 42561 - DNA, 15 bp, Homo sapiens
tcaatacctggtcat

SEQ ID NO: 42562 - DNA, 15 bp, Homo sapiens
atcaatacctggtca

SEQ ID NO: 42563 - DNA, 15 bp, Homo sapiens
aatcaatacctggtc

SEQ ID NO: 42564 - DNA, 15 bp, Homo sapiens
taatcaatacctggt

SEQ ID NO: 42565 - DNA, 15 bp, Homo sapiens
ttaatcaatacctgg

SEQ ID NO: 42566 - DNA, 15 bp, Homo sapiens
cttaatcaatacctg

SEQ ID NO: 42567 - DNA, 15 bp, Homo sapiens
ccttaatcaatacct

SEQ ID NO: 42568 - DNA, 15 bp, Homo sapiens
accttaatcaatacc

SEQ ID NO: 42569 - DNA, 15 bp, Homo sapiens
caccttaatcaatac

SEQ ID NO: 42570 - DNA, 15 bp, Homo sapiens
ccaccttaatcaata

SEQ ID NO: 42571 - DNA, 15 bp, Homo sapiens
gccaccttaatcaat

SEQ ID NO: 42572 - DNA, 15 bp, Homo sapiens
agccaccttaatcaa

SEQ ID NO: 42573 - DNA, 15 bp, Homo sapiens
tagccaccttaatca

SEQ ID NO: 42574 - DNA, 15 bp, Homo sapiens
gtagccaccttaatc

SEQ ID NO: 42575 - DNA, 15 bp, Homo sapiens
agtagccaccttaat

SEQ ID NO: 42576 - DNA, 15 bp, Homo sapiens
tagtagccaccttaa

SEQ ID NO: 42577 - DNA, 15 bp, Homo sapiens
gtagtagccacctta

SEQ ID NO: 42578 - DNA, 15 bp, Homo sapiens
ggtagtagccacctt

SEQ ID NO: 42579 - DNA, 15 bp, Homo sapiens
tggtagtagccacct

SEQ ID NO: 42580 - DNA, 15 bp, Homo sapiens
ctggtagtagccacc

SEQ ID NO: 42581 - DNA, 15 bp, Homo sapiens
cctggtagtagccac

SEQ ID NO: 42582 - DNA, 15 bp, Homo sapiens
acctggtagtagcca

SEQ ID NO: 42583 - DNA, 15 bp, Homo sapiens
cacctggtagtagcc

SEQ ID NO: 42584 - DNA, 15 bp, Homo sapiens
gcacctggtagtagc

SEQ ID NO: 42585 - DNA, 15 bp, Homo sapiens
agcacctggtagtag

SEQ ID NO: 42586 - DNA, 15 bp, Homo sapiens
aagcacctggtagta

SEQ ID NO: 42587 - DNA, 15 bp, Homo sapiens
aaagcacctggtagt

SEQ ID NO: 42588 - DNA, 15 bp, Homo sapiens
gaaagcacctggtag

SEQ ID NO: 42589 - DNA, 15 bp, Homo sapiens
agaaagcacctggta

SEQ ID NO: 42590 - DNA, 15 bp, Homo sapiens
cagaaagcacctggt

SEQ ID NO: 42591 - DNA, 15 bp, Homo sapiens
gcagaaagcacctgg

SEQ ID NO: 42592 - DNA, 15 bp, Homo sapiens
tgcagaaagcacctg

SEQ ID NO: 42593 - DNA, 15 bp, Homo sapiens
atgcagaaagcacct

SEQ ID NO: 42594 - DNA, 15 bp, Homo sapiens
tatgcagaaagcacc

SEQ ID NO: 42595 - DNA, 15 bp, Homo sapiens
atatgcagaaagcac

SEQ ID NO: 42596 - DNA, 15 bp, Homo sapiens
gatatgcagaaagca

SEQ ID NO: 42597 - DNA, 15 bp, Homo sapiens
agatatgcagaaagc

SEQ ID NO: 42598 - DNA, 15 bp, Homo sapiens
gagatatgcagaaag

SEQ ID NO: 42599 - DNA, 15 bp, Homo sapiens
cgagatatgcagaaa

SEQ ID NO: 42600 - DNA, 15 bp, Homo sapiens
ccgagatatgcagaa

SEQ ID NO: 42601 - DNA, 15 bp, Homo sapiens
cccgagatatgcaga

SEQ ID NO: 42602 - DNA, 15 bp, Homo sapiens
acccgagatatgcag

SEQ ID NO: 42603 - DNA, 15 bp, Homo sapiens
aacccgagatatgca

SEQ ID NO: 42604 - DNA, 15 bp, Homo sapiens
aaacccgagatatgc

SEQ ID NO: 42605 - DNA, 15 bp, Homo sapiens
caaacccgagatatg

SEQ ID NO: 42606 - DNA, 15 bp, Homo sapiens
acaaacccgagatat

SEQ ID NO: 42607 - DNA, 15 bp, Homo sapiens
cacaaacccgagata

SEQ ID NO: 42608 - DNA, 15 bp, Homo sapiens
ccacaaacccgagat

SEQ ID NO: 42609 - DNA, 15 bp, Homo sapiens
tccacaaacccgaga

SEQ ID NO: 42610 - DNA, 15 bp, Homo sapiens
ctccacaaacccgag

SEQ ID NO: 42611 - DNA, 15 bp, Homo sapiens
gctccacaaacccga

SEQ ID NO: 42612 - DNA, 15 bp, Homo sapiens
tgctccacaaacccg

SEQ ID NO: 42613 - DNA, 15 bp, Homo sapiens
gtgctccacaaaccc

SEQ ID NO: 42614 - DNA, 15 bp, Homo sapiens
agtgctccacaaacc

SEQ ID NO: 42615 - DNA, 15 bp, Homo sapiens
gagtgctccacaaac

SEQ ID NO: 42616 - DNA, 15 bp, Homo sapiens
tgagtgctccacaaa

SEQ ID NO: 42617 - DNA, 15 bp, Homo sapiens
ctgagtgctccacaa

SEQ ID NO: 42618 - DNA, 15 bp, Homo sapiens
cctgagtgctccaca

SEQ ID NO: 42619 - DNA, 15 bp, Homo sapiens
acctgagtgctccac

SEQ ID NO: 42620 - DNA, 15 bp, Homo sapiens
aacctgagtgctcca

SEQ ID NO: 42621 - DNA, 15 bp, Homo sapiens
gaacctgagtgctcc

SEQ ID NO: 42622 - DNA, 15 bp, Homo sapiens
agaacctgagtgctc

SEQ ID NO: 42623 - DNA, 15 bp, Homo sapiens
cagaacctgagtgct

SEQ ID NO: 42624 - DNA, 15 bp, Homo sapiens
gcagaacctgagtgc

SEQ ID NO: 42625 - DNA, 15 bp, Homo sapiens
agcagaacctgagtg

SEQ ID NO: 42626 - DNA, 15 bp, Homo sapiens
aagcagaacctgagt

SEQ ID NO: 42627 - DNA, 15 bp, Homo sapiens
gaagcagaacctgag

SEQ ID NO: 42628 - DNA, 15 bp, Homo sapiens
agaagcagaacctga

SEQ ID NO: 42629 - DNA, 15 bp, Homo sapiens
cagaagcagaacctg

SEQ ID NO: 42630 - DNA, 15 bp, Homo sapiens
gcagaagcagaacct

SEQ ID NO: 42631 - DNA, 15 bp, Homo sapiens
ggcagaagcagaacc

SEQ ID NO: 42632 - DNA, 15 bp, Homo sapiens
gggcagaagcagaac

SEQ ID NO: 42633 - DNA, 15 bp, Homo sapiens
ggggcagaagcagaa

SEQ ID NO: 42634 - DNA, 15 bp, Homo sapiens
aggggcagaagcaga

SEQ ID NO: 42635 - DNA, 15 bp, Homo sapiens
gaggggcagaagcag

SEQ ID NO: 42636 - DNA, 15 bp, Homo sapiens
agaggggcagaagca

SEQ ID NO: 42637 - DNA, 15 bp, Homo sapiens
cagaggggcagaagc

SEQ ID NO: 42638 - DNA, 15 bp, Homo sapiens
gcagaggggcagaag

SEQ ID NO: 42639 - DNA, 15 bp, Homo sapiens
agcagaggggcagaa

SEQ ID NO: 42640 - DNA, 15 bp, Homo sapiens
cagcagaggggcaga

SEQ ID NO: 42641 - DNA, 15 bp, Homo sapiens
acagcagaggggcag

SEQ ID NO: 42642 - DNA, 15 bp, Homo sapiens
aacagcagaggggca

SEQ ID NO: 42643 - DNA, 15 bp, Homo sapiens
taacagcagaggggc

SEQ ID NO: 42644 - DNA, 15 bp, Homo sapiens
gtaacagcagagggg

SEQ ID NO: 42645 - DNA, 15 bp, Homo sapiens
ggtaacagcagaggg

SEQ ID NO: 42646 - DNA, 15 bp, Homo sapiens
tggtaacagcagagg

SEQ ID NO: 42647 - DNA, 15 bp, Homo sapiens
ttggtaacagcagag

SEQ ID NO: 42648 - DNA, 15 bp, Homo sapiens
cttggtaacagcaga

SEQ ID NO: 42649 - DNA, 15 bp, Homo sapiens
tcttggtaacagcag

SEQ ID NO: 42650 - DNA, 15 bp, Homo sapiens
ctcttggtaacagca

SEQ ID NO: 42651 - DNA, 15 bp, Homo sapiens
tctcttggtaacagc

SEQ ID NO: 42652 - DNA, 15 bp, Homo sapiens
gtctcttggtaacag

SEQ ID NO: 42653 - DNA, 15 bp, Homo sapiens
ggtctcttggtaaca

SEQ ID NO: 42654 - DNA, 15 bp, Homo sapiens
aggtctcttggtaac

SEQ ID NO: 42655 - DNA, 15 bp, Homo sapiens
gaggtctcttggtaa

SEQ ID NO: 42656 - DNA, 15 bp, Homo sapiens
agaggtctcttggta

SEQ ID NO: 42657 - DNA, 15 bp, Homo sapiens
gagaggtctcttggt

SEQ ID NO: 42658 - DNA, 15 bp, Homo sapiens
agagaggtctcttgg

SEQ ID NO: 42659 - DNA, 15 bp, Homo sapiens
aagagaggtctcttg

SEQ ID NO: 42660 - DNA, 15 bp, Homo sapiens
gaagagaggtctctt

SEQ ID NO: 42661 - DNA, 15 bp, Homo sapiens
tgaagagaggtctct

SEQ ID NO: 42662 - DNA, 15 bp, Homo sapiens
ttgaagagaggtctc

SEQ ID NO: 42663 - DNA, 15 bp, Homo sapiens
tttgaagagaggtct

SEQ ID NO: 42664 - DNA, 15 bp, Homo sapiens
ttttgaagagaggtc

SEQ ID NO: 42665 - DNA, 15 bp, Homo sapiens
attttgaagagaggt

SEQ ID NO: 42666 - DNA, 15 bp, Homo sapiens
cattttgaagagagg

SEQ ID NO: 42667 - DNA, 15 bp, Homo sapiens
ccattttgaagagag

SEQ ID NO: 42668 - DNA, 15 bp, Homo sapiens
cccattttgaagaga

SEQ ID NO: 42669 - DNA, 15 bp, Homo sapiens
ccccattttgaagag

SEQ ID NO: 42670 - DNA, 15 bp, Homo sapiens
gccccattttgaaga

SEQ ID NO: 42671 - DNA, 15 bp, Homo sapiens
agccccattttgaag

SEQ ID NO: 42672 - DNA, 15 bp, Homo sapiens
gagccccattttgaa

SEQ ID NO: 42673 - DNA, 15 bp, Homo sapiens
agagccccattttga

SEQ ID NO: 42674 - DNA, 15 bp, Homo sapiens
aagagccccattttg

SEQ ID NO: 42675 - DNA, 15 bp, Homo sapiens
caagagccccatttt

SEQ ID NO: 42676 - DNA, 15 bp, Homo sapiens
tcaagagccccattt

SEQ ID NO: 42677 - DNA, 15 bp, Homo sapiens
ctcaagagccccatt

SEQ ID NO: 42678 - DNA, 15 bp, Homo sapiens
actcaagagccccat

SEQ ID NO: 42679 - DNA, 15 bp, Homo sapiens
aactcaagagcccca

SEQ ID NO: 42680 - DNA, 15 bp, Homo sapiens
taactcaagagcccc

SEQ ID NO: 42681 - DNA, 15 bp, Homo sapiens
ctaactcaagagccc

SEQ ID NO: 42682 - DNA, 15 bp, Homo sapiens
tctaactcaagagcc

SEQ ID NO: 42683 - DNA, 15 bp, Homo sapiens
ctctaactcaagagc

SEQ ID NO: 42684 - DNA, 15 bp, Homo sapiens
actctaactcaagag

SEQ ID NO: 42685 - DNA, 15 bp, Homo sapiens
tactctaactcaaga

SEQ ID NO: 42686 - DNA, 15 bp, Homo sapiens
ctactctaactcaag

SEQ ID NO: 42687 - DNA, 15 bp, Homo sapiens
tctactctaactcaa

SEQ ID NO: 42688 - DNA, 15 bp, Homo sapiens
ttctactctaactca

SEQ ID NO: 42689 - DNA, 15 bp, Homo sapiens
attctactctaactc

SEQ ID NO: 42690 - DNA, 15 bp, Homo sapiens
cattctactctaact

SEQ ID NO: 42691 - DNA, 15 bp, Homo sapiens
tcattctactctaac

SEQ ID NO: 42692 - DNA, 15 bp, Homo sapiens
ctcattctactctaa

SEQ ID NO: 42693 - DNA, 15 bp, Homo sapiens
actcattctactcta

SEQ ID NO: 42694 - DNA, 15 bp, Homo sapiens
cactcattctactct

SEQ ID NO: 42695 - DNA, 15 bp, Homo sapiens
tcactcattctactc

SEQ ID NO: 42696 - DNA, 15 bp, Homo sapiens
atcactcattctact

SEQ ID NO: 42697 - DNA, 15 bp, Homo sapiens
gatcactcattctac

SEQ ID NO: 42698 - DNA, 15 bp, Homo sapiens
tgatcactcattcta

SEQ ID NO: 42699 - DNA, 15 bp, Homo sapiens
ctgatcactcattct

SEQ ID NO: 42700 - DNA, 15 bp, Homo sapiens
cctgatcactcattc

SEQ ID NO: 42701 - DNA, 15 bp, Homo sapiens
tcctgatcactcatt

SEQ ID NO: 42702 - DNA, 15 bp, Homo sapiens
atcctgatcactcat

SEQ ID NO: 42703 - DNA, 15 bp, Homo sapiens
aatcctgatcactca

SEQ ID NO: 42704 - DNA, 15 bp, Homo sapiens
caatcctgatcactc

SEQ ID NO: 42705 - DNA, 15 bp, Homo sapiens
acaatcctgatcact

SEQ ID NO: 42706 - DNA, 15 bp, Homo sapiens
aacaatcctgatcac

SEQ ID NO: 42707 - DNA, 15 bp, Homo sapiens
aaacaatcctgatca

SEQ ID NO: 42708 - DNA, 15 bp, Homo sapiens
aaaacaatcctgatc

SEQ ID NO: 42709 - DNA, 15 bp, Homo sapiens
caaaacaatcctgat

SEQ ID NO: 42710 - DNA, 15 bp, Homo sapiens
acaaaacaatcctga

SEQ ID NO: 42711 - DNA, 15 bp, Homo sapiens
cacaaaacaatcctg

SEQ ID NO: 42712 - DNA, 15 bp, Homo sapiens
acacaaaacaatcct

SEQ ID NO: 42713 - DNA, 15 bp, Homo sapiens
tacacaaaacaatcc

SEQ ID NO: 42714 - DNA, 15 bp, Homo sapiens
ttacacaaaacaatc

SEQ ID NO: 42715 - DNA, 15 bp, Homo sapiens
tttacacaaaacaat

SEQ ID NO: 42716 - DNA, 15 bp, Homo sapiens
ctttacacaaaacaa

SEQ ID NO: 42717 - DNA, 15 bp, Homo sapiens
tctttacacaaaaca

SEQ ID NO: 42718 - DNA, 15 bp, Homo sapiens
atctttacacaaaac

SEQ ID NO: 42719 - DNA, 15 bp, Homo sapiens
catctttacacaaaa

SEQ ID NO: 42720 - DNA, 15 bp, Homo sapiens
tcatctttacacaaa

SEQ ID NO: 42721 - DNA, 15 bp, Homo sapiens
atcatctttacacaa

SEQ ID NO: 42722 - DNA, 15 bp, Homo sapiens
aatcatctttacaca

SEQ ID NO: 42723 - DNA, 15 bp, Homo sapiens
aaatcatctttacac

SEQ ID NO: 42724 - DNA, 15 bp, Homo sapiens
gaaatcatctttaca

SEQ ID NO: 42725 - DNA, 15 bp, Homo sapiens
agaaatcatctttac

SEQ ID NO: 42726 - DNA, 15 bp, Homo sapiens
cagaaatcatcttta

SEQ ID NO: 42727 - DNA, 15 bp, Homo sapiens
tcagaaatcatcttt

SEQ ID NO: 42728 - DNA, 15 bp, Homo sapiens
ctcagaaatcatctt

SEQ ID NO: 42729 - DNA, 15 bp, Homo sapiens
cctcagaaatcatct

SEQ ID NO: 42730 - DNA, 15 bp, Homo sapiens
tcctcagaaatcatc

SEQ ID NO: 42731 - DNA, 15 bp, Homo sapiens
ttcctcagaaatcat

SEQ ID NO: 42732 - DNA, 15 bp, Homo sapiens
cttcctcagaaatca

SEQ ID NO: 42733 - DNA, 15 bp, Homo sapiens
ccttcctcagaaatc

SEQ ID NO: 42734 - DNA, 15 bp, Homo sapiens
gccttcctcagaaat

SEQ ID NO: 42735 - DNA, 15 bp, Homo sapiens
agccttcctcagaaa

SEQ ID NO: 42736 - DNA, 15 bp, Homo sapiens
aagccttcctcagaa

SEQ ID NO: 42737 - DNA, 15 bp, Homo sapiens
aaagccttcctcaga

SEQ ID NO: 42738 - DNA, 15 bp, Homo sapiens
taaagccttcctcag

SEQ ID NO: 42739 - DNA, 15 bp, Homo sapiens
ctaaagccttcctca

SEQ ID NO: 42740 - DNA, 15 bp, Homo sapiens
cctaaagccttcctc

SEQ ID NO: 42741 - DNA, 15 bp, Homo sapiens
tcctaaagccttcct

SEQ ID NO: 42742 - DNA, 15 bp, Homo sapiens
atcctaaagccttcc

SEQ ID NO: 42743 - DNA, 15 bp, Homo sapiens
catcctaaagccttc

SEQ ID NO: 42744 - DNA, 15 bp, Homo sapiens
tcatcctaaagcctt

SEQ ID NO: 42745 - DNA, 15 bp, Homo sapiens
ttcatcctaaagcct

SEQ ID NO: 42746 - DNA, 15 bp, Homo sapiens
tttcatcctaaagcc

SEQ ID NO: 42747 - DNA, 15 bp, Homo sapiens
atttcatcctaaagc

SEQ ID NO: 42748 - DNA, 15 bp, Homo sapiens
catttcatcctaaag

SEQ ID NO: 42749 - DNA, 15 bp, Homo sapiens
tcatttcatcctaaa

SEQ ID NO: 42750 - DNA, 15 bp, Homo sapiens
gtcatttcatcctaa

SEQ ID NO: 42751 - DNA, 15 bp, Homo sapiens
agtcatttcatccta

SEQ ID NO: 42752 - DNA, 15 bp, Homo sapiens
aagtcatttcatcct

SEQ ID NO: 42753 - DNA, 15 bp, Homo sapiens
gaagtcatttcatcc

SEQ ID NO: 42754 - DNA, 15 bp, Homo sapiens
ggaagtcatttcatc

SEQ ID NO: 42755 - DNA, 15 bp, Homo sapiens
tggaagtcatttcat

SEQ ID NO: 42756 - DNA, 15 bp, Homo sapiens
ttggaagtcatttca

SEQ ID NO: 42757 - DNA, 15 bp, Homo sapiens
tttggaagtcatttc

SEQ ID NO: 42758 - DNA, 15 bp, Homo sapiens
gtttggaagtcattt

SEQ ID NO: 42759 - DNA, 15 bp, Homo sapiens
tgtttggaagtcatt

SEQ ID NO: 42760 - DNA, 15 bp, Homo sapiens
atgtttggaagtcat

SEQ ID NO: 42761 - DNA, 15 bp, Homo sapiens
aatgtttggaagtca

SEQ ID NO: 42762 - DNA, 15 bp, Homo sapiens
aaatgtttggaagtc

SEQ ID NO: 42763 - DNA, 15 bp, Homo sapiens
aaaatgtttggaagt

SEQ ID NO: 42764 - DNA, 15 bp, Homo sapiens
caaaatgtttggaag

SEQ ID NO: 42765 - DNA, 15 bp, Homo sapiens
tcaaaatgtttggaa

SEQ ID NO: 42766 - DNA, 15 bp, Homo sapiens
ttcaaaatgtttgga

SEQ ID NO: 42767 - DNA, 15 bp, Homo sapiens
tttcaaaatgtttgg

SEQ ID NO: 42768 - DNA, 15 bp, Homo sapiens
atttcaaaatgtttg

SEQ ID NO: 42769 - DNA, 15 bp, Homo sapiens
catttcaaaatgttt

SEQ ID NO: 42770 - DNA, 15 bp, Homo sapiens
acatttcaaaatgtt

SEQ ID NO: 42771 - DNA, 15 bp, Homo sapiens
cacatttcaaaatgt

SEQ ID NO: 42772 - DNA, 15 bp, Homo sapiens
tcacatttcaaaatg

SEQ ID NO: 42773 - DNA, 15 bp, Homo sapiens
gtcacatttcaaaat

SEQ ID NO: 42774 - DNA, 15 bp, Homo sapiens
agtcacatttcaaaa

SEQ ID NO: 42775 - DNA, 15 bp, Homo sapiens
gagtcacatttcaaa

SEQ ID NO: 42776 - DNA, 15 bp, Homo sapiens
agagtcacatttcaa

SEQ ID NO: 42777 - DNA, 15 bp, Homo sapiens
aagagtcacatttca

SEQ ID NO: 42778 - DNA, 15 bp, Homo sapiens
taagagtcacatttc

SEQ ID NO: 42779 - DNA, 15 bp, Homo sapiens
gtaagagtcacattt

SEQ ID NO: 42780 - DNA, 15 bp, Homo sapiens
agtaagagtcacatt

SEQ ID NO: 42781 - DNA, 15 bp, Homo sapiens
aagtaagagtcacat

SEQ ID NO: 42782 - DNA, 15 bp, Homo sapiens
taagtaagagtcaca

SEQ ID NO: 42783 - DNA, 15 bp, Homo sapiens
ataagtaagagtcac

SEQ ID NO: 42784 - DNA, 15 bp, Homo sapiens
aataagtaagagtca

SEQ ID NO: 42785 - DNA, 15 bp, Homo sapiens
caataagtaagagtc

SEQ ID NO: 42786 - DNA, 15 bp, Homo sapiens
tcaataagtaagagt

SEQ ID NO: 42787 - DNA, 15 bp, Homo sapiens
ttcaataagtaagag

SEQ ID NO: 42788 - DNA, 15 bp, Homo sapiens
attcaataagtaaga

SEQ ID NO: 42789 - DNA, 15 bp, Homo sapiens
aattcaataagtaag

SEQ ID NO: 42790 - DNA, 15 bp, Homo sapiens
taattcaataagtaa

SEQ ID NO: 42791 - DNA, 15 bp, Homo sapiens
ttaattcaataagta

SEQ ID NO: 42792 - DNA, 15 bp, Homo sapiens
cttaattcaataagt

SEQ ID NO: 42793 - DNA, 15 bp, Homo sapiens
gcttaattcaataag

SEQ ID NO: 42794 - DNA, 15 bp, Homo sapiens
tgcttaattcaataa

SEQ ID NO: 42795 - DNA, 15 bp, Homo sapiens
ctgcttaattcaata

SEQ ID NO: 42796 - DNA, 15 bp, Homo sapiens
cctgcttaattcaat

SEQ ID NO: 42797 - DNA, 15 bp, Homo sapiens
ccctgcttaattcaa

SEQ ID NO: 42798 - DNA, 15 bp, Homo sapiens
gccctgcttaattca

SEQ ID NO: 42799 - DNA, 15 bp, Homo sapiens
ggccctgcttaattc

SEQ ID NO: 42800 - DNA, 15 bp, Homo sapiens
aggccctgcttaatt

SEQ ID NO: 42801 - DNA, 15 bp, Homo sapiens
aaggccctgcttaat

SEQ ID NO: 42802 - DNA, 15 bp, Homo sapiens
taaggccctgcttaa

SEQ ID NO: 42803 - DNA, 15 bp, Homo sapiens
ttaaggccctgctta

SEQ ID NO: 42804 - DNA, 15 bp, Homo sapiens
attaaggccctgctt

SEQ ID NO: 42805 - DNA, 15 bp, Homo sapiens
aattaaggccctgct

SEQ ID NO: 42806 - DNA, 15 bp, Homo sapiens
caattaaggccctgc

SEQ ID NO: 42807 - DNA, 15 bp, Homo sapiens
ccaattaaggccctg

SEQ ID NO: 42808 - DNA, 15 bp, Homo sapiens
tccaattaaggccct

SEQ ID NO: 42809 - DNA, 15 bp, Homo sapiens
ttccaattaaggccc

SEQ ID NO: 42810 - DNA, 15 bp, Homo sapiens
attccaattaaggcc

SEQ ID NO: 42811 - DNA, 15 bp, Homo sapiens
cattccaattaaggc

SEQ ID NO: 42812 - DNA, 15 bp, Homo sapiens
gcattccaattaagg

SEQ ID NO: 42813 - DNA, 15 bp, Homo sapiens
agcattccaattaag

SEQ ID NO: 42814 - DNA, 15 bp, Homo sapiens
cagcattccaattaa

SEQ ID NO: 42815 - DNA, 15 bp, Homo sapiens
ccagcattccaatta

SEQ ID NO: 42816 - DNA, 15 bp, Homo sapiens
cccagcattccaatt

SEQ ID NO: 42817 - DNA, 15 bp, Homo sapiens
tcccagcattccaat

SEQ ID NO: 42818 - DNA, 15 bp, Homo sapiens
gtcccagcattccaa

SEQ ID NO: 42819 - DNA, 15 bp, Homo sapiens
agtcccagcattcca

SEQ ID NO: 42820 - DNA, 15 bp, Homo sapiens
cagtcccagcattcc

SEQ ID NO: 42821 - DNA, 15 bp, Homo sapiens
tcagtcccagcattc

SEQ ID NO: 42822 - DNA, 15 bp, Homo sapiens
atcagtcccagcatt

SEQ ID NO: 42823 - DNA, 15 bp, Homo sapiens
tatcagtcccagcat

SEQ ID NO: 42824 - DNA, 15 bp, Homo sapiens
gtatcagtcccagca

SEQ ID NO: 42825 - DNA, 15 bp, Homo sapiens
agtatcagtcccagc

SEQ ID NO: 42826 - DNA, 15 bp, Homo sapiens
aagtatcagtcccag

SEQ ID NO: 42827 - DNA, 15 bp, Homo sapiens
caagtatcagtccca

SEQ ID NO: 42828 - DNA, 15 bp, Homo sapiens
tcaagtatcagtccc

SEQ ID NO: 42829 - DNA, 15 bp, Homo sapiens
atcaagtatcagtcc

SEQ ID NO: 42830 - DNA, 15 bp, Homo sapiens
aatcaagtatcagtc

SEQ ID NO: 42831 - DNA, 15 bp, Homo sapiens
aaatcaagtatcagt

SEQ ID NO: 42832 - DNA, 15 bp, Homo sapiens
caaatcaagtatcag

SEQ ID NO: 42833 - DNA, 15 bp, Homo sapiens
gcaaatcaagtatca

SEQ ID NO: 42834 - DNA, 15 bp, Homo sapiens
tgcaaatcaagtatc

SEQ ID NO: 42835 - DNA, 15 bp, Homo sapiens
atgcaaatcaagtat

SEQ ID NO: 42836 - DNA, 15 bp, Homo sapiens
aatgcaaatcaagta

SEQ ID NO: 42837 - DNA, 15 bp, Homo sapiens
taatgcaaatcaagt

SEQ ID NO: 42838 - DNA, 15 bp, Homo sapiens
ttaatgcaaatcaag

SEQ ID NO: 42839 - DNA, 15 bp, Homo sapiens
cttaatgcaaatcaa

SEQ ID NO: 42840 - DNA, 15 bp, Homo sapiens
gcttaatgcaaatca

SEQ ID NO: 42841 - DNA, 15 bp, Homo sapiens
tgcttaatgcaaatc

SEQ ID NO: 42842 - DNA, 15 bp, Homo sapiens
ctgcttaatgcaaat

SEQ ID NO: 42843 - DNA, 15 bp, Homo sapiens
gctgcttaatgcaaa

SEQ ID NO: 42844 - DNA, 15 bp, Homo sapiens
ggctgcttaatgcaa

SEQ ID NO: 42845 - DNA, 15 bp, Homo sapiens
aggctgcttaatgca

SEQ ID NO: 42846 - DNA, 15 bp, Homo sapiens
aaggctgcttaatgc

SEQ ID NO: 42847 - DNA, 15 bp, Homo sapiens
aaaggctgcttaatg

SEQ ID NO: 42848 - DNA, 15 bp, Homo sapiens
aaaaggctgcttaat

SEQ ID NO: 42849 - DNA, 15 bp, Homo sapiens
aaaaaggctgcttaa

SEQ ID NO: 42850 - DNA, 15 bp, Homo sapiens
gaaaaaggctgctta

SEQ ID NO: 42851 - DNA, 15 bp, Homo sapiens
agaaaaaggctgctt

SEQ ID NO: 42852 - DNA, 15 bp, Homo sapiens
tagaaaaaggctgct

SEQ ID NO: 42853 - DNA, 15 bp, Homo sapiens
atagaaaaaggctgc

SEQ ID NO: 42854 - DNA, 15 bp, Homo sapiens
aatagaaaaaggctg

SEQ ID NO: 42855 - DNA, 15 bp, Homo sapiens
caatagaaaaaggct

SEQ ID NO: 42856 - DNA, 15 bp, Homo sapiens
gcaatagaaaaaggc

SEQ ID NO: 42857 - DNA, 15 bp, Homo sapiens
agcaatagaaaaagg

SEQ ID NO: 42858 - DNA, 15 bp, Homo sapiens
cagcaatagaaaaag

SEQ ID NO: 42859 - DNA, 15 bp, Homo sapiens
gcagcaatagaaaaa

SEQ ID NO: 42860 - DNA, 15 bp, Homo sapiens
agcagcaatagaaaa

SEQ ID NO: 42861 - DNA, 15 bp, Homo sapiens
aagcagcaatagaaa

SEQ ID NO: 42862 - DNA, 15 bp, Homo sapiens
caagcagcaatagaa

SEQ ID NO: 42863 - DNA, 15 bp, Homo sapiens
ccaagcagcaataga

SEQ ID NO: 42864 - DNA, 15 bp, Homo sapiens
accaagcagcaatag

SEQ ID NO: 42865 - DNA, 15 bp, Homo sapiens
aaccaagcagcaata

SEQ ID NO: 42866 - DNA, 15 bp, Homo sapiens
caaccaagcagcaat

SEQ ID NO: 42867 - DNA, 15 bp, Homo sapiens
tcaaccaagcagcaa

SEQ ID NO: 42868 - DNA, 15 bp, Homo sapiens
ttcaaccaagcagca

SEQ ID NO: 42869 - DNA, 15 bp, Homo sapiens
tttcaaccaagcagc

SEQ ID NO: 42870 - DNA, 15 bp, Homo sapiens
atttcaaccaagcag

SEQ ID NO: 42871 - DNA, 15 bp, Homo sapiens
aatttcaaccaagca

SEQ ID NO: 42872 - DNA, 15 bp, Homo sapiens
aaatttcaaccaagc

SEQ ID NO: 42873 - DNA, 15 bp, Homo sapiens
gaaatttcaaccaag

SEQ ID NO: 42874 - DNA, 15 bp, Homo sapiens
tgaaatttcaaccaa

SEQ ID NO: 42875 - DNA, 15 bp, Homo sapiens
ttgaaatttcaacca

SEQ ID NO: 42876 - DNA, 15 bp, Homo sapiens
gttgaaatttcaacc

SEQ ID NO: 42877 - DNA, 15 bp, Homo sapiens
tgttgaaatttcaac

SEQ ID NO: 42878 - DNA, 15 bp, Homo sapiens
atgttgaaatttcaa

SEQ ID NO: 42879 - DNA, 15 bp, Homo sapiens
aatgttgaaatttca

SEQ ID NO: 42880 - DNA, 15 bp, Homo sapiens
aaatgttgaaatttc

SEQ ID NO: 42881 - DNA, 15 bp, Homo sapiens
caaatgttgaaattt

SEQ ID NO: 42882 - DNA, 15 bp, Homo sapiens
acaaatgttgaaatt

SEQ ID NO: 42883 - DNA, 15 bp, Homo sapiens
cacaaatgttgaaat

SEQ ID NO: 42884 - DNA, 15 bp, Homo sapiens
tcacaaatgttgaaa

SEQ ID NO: 42885 - DNA, 15 bp, Homo sapiens
atcacaaatgttgaa

SEQ ID NO: 42886 - DNA, 15 bp, Homo sapiens
catcacaaatgttga

SEQ ID NO: 42887 - DNA, 15 bp, Homo sapiens
ccatcacaaatgttg

SEQ ID NO: 42888 - DNA, 15 bp, Homo sapiens
accatcacaaatgtt

SEQ ID NO: 42889 - DNA, 15 bp, Homo sapiens
taccatcacaaatgt

SEQ ID NO: 42890 - DNA, 15 bp, Homo sapiens
ctaccatcacaaatg

SEQ ID NO: 42891 - DNA, 15 bp, Homo sapiens
tctaccatcacaaat

SEQ ID NO: 42892 - DNA, 15 bp, Homo sapiens
atctaccatcacaaa

SEQ ID NO: 42893 - DNA, 15 bp, Homo sapiens
catctaccatcacaa

SEQ ID NO: 42894 - DNA, 15 bp, Homo sapiens
ccatctaccatcaca

SEQ ID NO: 42895 - DNA, 15 bp, Homo sapiens
tccatctaccatcac

SEQ ID NO: 42896 - DNA, 15 bp, Homo sapiens
atccatctaccatca

SEQ ID NO: 42897 - DNA, 15 bp, Homo sapiens
catccatctaccatc

SEQ ID NO: 42898 - DNA, 15 bp, Homo sapiens
acatccatctaccat

SEQ ID NO: 42899 - DNA, 15 bp, Homo sapiens
cacatccatctacca

SEQ ID NO: 42900 - DNA, 15 bp, Homo sapiens
tcacatccatctacc

SEQ ID NO: 42901 - DNA, 15 bp, Homo sapiens
gtcacatccatctac

SEQ ID NO: 42902 - DNA, 15 bp, Homo sapiens
tgtcacatccatcta

SEQ ID NO: 42903 - DNA, 15 bp, Homo sapiens
atgtcacatccatct

SEQ ID NO: 42904 - DNA, 15 bp, Homo sapiens
catgtcacatccatc

SEQ ID NO: 42905 - DNA, 15 bp, Homo sapiens
acatgtcacatccat

SEQ ID NO: 42906 - DNA, 15 bp, Homo sapiens
cacatgtcacatcca

SEQ ID NO: 42907 - DNA, 15 bp, Homo sapiens
tcacatgtcacatcc

SEQ ID NO: 42908 - DNA, 15 bp, Homo sapiens
atcacatgtcacatc

SEQ ID NO: 42909 - DNA, 15 bp, Homo sapiens
catcacatgtcacat

SEQ ID NO: 42910 - DNA, 15 bp, Homo sapiens
tcatcacatgtcaca

SEQ ID NO: 42911 - DNA, 15 bp, Homo sapiens
gtcatcacatgtcac

SEQ ID NO: 42912 - DNA, 15 bp, Homo sapiens
tgtcatcacatgtca

SEQ ID NO: 42913 - DNA, 15 bp, Homo sapiens
atgtcatcacatgtc

SEQ ID NO: 42914 - DNA, 15 bp, Homo sapiens
aatgtcatcacatgt

SEQ ID NO: 42915 - DNA, 15 bp, Homo sapiens
caatgtcatcacatg

SEQ ID NO: 42916 - DNA, 15 bp, Homo sapiens
gcaatgtcatcacat

SEQ ID NO: 42917 - DNA, 15 bp, Homo sapiens
tgcaatgtcatcaca

SEQ ID NO: 42918 - DNA, 15 bp, Homo sapiens
gtgcaatgtcatcac

SEQ ID NO: 42919 - DNA, 15 bp, Homo sapiens
tgtgcaatgtcatca

SEQ ID NO: 42920 - DNA, 15 bp, Homo sapiens
atgtgcaatgtcatc

SEQ ID NO: 42921 - DNA, 15 bp, Homo sapiens
catgtgcaatgtcat

SEQ ID NO: 42922 - DNA, 15 bp, Homo sapiens
ccatgtgcaatgtca

SEQ ID NO: 42923 - DNA, 15 bp, Homo sapiens
cccatgtgcaatgtc

SEQ ID NO: 42924 - DNA, 15 bp, Homo sapiens
gcccatgtgcaatgt

SEQ ID NO: 42925 - DNA, 15 bp, Homo sapiens
tgcccatgtgcaatg

SEQ ID NO: 42926 - DNA, 15 bp, Homo sapiens
ctgcccatgtgcaat

SEQ ID NO: 42927 - DNA, 15 bp, Homo sapiens
actgcccatgtgcaa

SEQ ID NO: 42928 - DNA, 15 bp, Homo sapiens
aactgcccatgtgca

SEQ ID NO: 42929 - DNA, 15 bp, Homo sapiens
taactgcccatgtgc

SEQ ID NO: 42930 - DNA, 15 bp, Homo sapiens
ttaactgcccatgtg

SEQ ID NO: 42931 - DNA, 15 bp, Homo sapiens
gttaactgcccatgt

SEQ ID NO: 42932 - DNA, 15 bp, Homo sapiens
agttaactgcccatg

SEQ ID NO: 42933 - DNA, 15 bp, Homo sapiens
cagttaactgcccat

SEQ ID NO: 42934 - DNA, 15 bp, Homo sapiens
acagttaactgccca

SEQ ID NO: 42935 - DNA, 15 bp, Homo sapiens
cacagttaactgccc

SEQ ID NO: 42936 - DNA, 15 bp, Homo sapiens
gcacagttaactgcc

SEQ ID NO: 42937 - DNA, 15 bp, Homo sapiens
ggcacagttaactgc

SEQ ID NO: 42938 - DNA, 15 bp, Homo sapiens
tggcacagttaactg

SEQ ID NO: 42939 - DNA, 15 bp, Homo sapiens
ttggcacagttaact

SEQ ID NO: 42940 - DNA, 15 bp, Homo sapiens
cttggcacagttaac

SEQ ID NO: 42941 - DNA, 15 bp, Homo sapiens
tcttggcacagttaa

SEQ ID NO: 42942 - DNA, 15 bp, Homo sapiens
ttcttggcacagtta

SEQ ID NO: 42943 - DNA, 15 bp, Homo sapiens
cttcttggcacagtt

SEQ ID NO: 42944 - DNA, 15 bp, Homo sapiens
acttcttggcacagt

SEQ ID NO: 42945 - DNA, 15 bp, Homo sapiens
cacttcttggcacag

SEQ ID NO: 42946 - DNA, 15 bp, Homo sapiens
gcacttcttggcaca

SEQ ID NO: 42947 - DNA, 15 bp, Homo sapiens
tgcacttcttggcac

SEQ ID NO: 42948 - DNA, 15 bp, Homo sapiens
ctgcacttcttggca

SEQ ID NO: 42949 - DNA, 15 bp, Homo sapiens
gctgcacttcttggc

SEQ ID NO: 42950 - DNA, 15 bp, Homo sapiens
tgctgcacttcttgg

SEQ ID NO: 42951 - DNA, 15 bp, Homo sapiens
ctgctgcacttcttg

SEQ ID NO: 42952 - DNA, 15 bp, Homo sapiens
actgctgcacttctt

SEQ ID NO: 42953 - DNA, 15 bp, Homo sapiens
tactgctgcacttct

SEQ ID NO: 42954 - DNA, 15 bp, Homo sapiens
ctactgctgcacttc

SEQ ID NO: 42955 - DNA, 15 bp, Homo sapiens
gctactgctgcactt

SEQ ID NO: 42956 - DNA, 15 bp, Homo sapiens
tgctactgctgcact

SEQ ID NO: 42957 - DNA, 15 bp, Homo sapiens
ctgctactgctgcac

SEQ ID NO: 42958 - DNA, 15 bp, Homo sapiens
gctgctactgctgca

SEQ ID NO: 42959 - DNA, 15 bp, Homo sapiens
tgctgctactgctgc

SEQ ID NO: 42960 - DNA, 15 bp, Homo sapiens
ttgctgctactgctg

SEQ ID NO: 42961 - DNA, 15 bp, Homo sapiens
gttgctgctactgct

SEQ ID NO: 42962 - DNA, 15 bp, Homo sapiens
ggttgctgctactgc

SEQ ID NO: 42963 - DNA, 15 bp, Homo sapiens
cggttgctgctactg

SEQ ID NO: 42964 - DNA, 15 bp, Homo sapiens
ccggttgctgctact

SEQ ID NO: 42965 - DNA, 15 bp, Homo sapiens
tccggttgctgctac

SEQ ID NO: 42966 - DNA, 15 bp, Homo sapiens
ctccggttgctgcta

SEQ ID NO: 42967 - DNA, 15 bp, Homo sapiens
tctccggttgctgct

SEQ ID NO: 42968 - DNA, 15 bp, Homo sapiens
atctccggttgctgc

SEQ ID NO: 42969 - DNA, 15 bp, Homo sapiens
catctccggttgctg

SEQ ID NO: 42970 - DNA, 15 bp, Homo sapiens
gcatctccggttgct

SEQ ID NO: 42971 - DNA, 15 bp, Homo sapiens
tgcatctccggttgc

SEQ ID NO: 42972 - DNA, 15 bp, Homo sapiens
ttgcatctccggttg

SEQ ID NO: 42973 - DNA, 15 bp, Homo sapiens
tttgcatctccggtt

SEQ ID NO: 42974 - DNA, 15 bp, Homo sapiens
ctttgcatctccggt

SEQ ID NO: 42975 - DNA, 15 bp, Homo sapiens
gctttgcatctccgg

SEQ ID NO: 42976 - DNA, 15 bp, Homo sapiens
ggctttgcatctccg

SEQ ID NO: 42977 - DNA, 15 bp, Homo sapiens
gggctttgcatctcc

SEQ ID NO: 42978 - DNA, 15 bp, Homo sapiens
tgggctttgcatctc

SEQ ID NO: 42979 - DNA, 15 bp, Homo sapiens
ttgggctttgcatct

SEQ ID NO: 42980 - DNA, 15 bp, Homo sapiens
gttgggctttgcatc

SEQ ID NO: 42981 - DNA, 15 bp, Homo sapiens
tgttgggctttgcat

SEQ ID NO: 42982 - DNA, 15 bp, Homo sapiens
atgttgggctttgca

SEQ ID NO: 42983 - DNA, 15 bp, Homo sapiens
catgttgggctttgc

SEQ ID NO: 42984 - DNA, 15 bp, Homo sapiens
tcatgttgggctttg

SEQ ID NO: 42985 - DNA, 15 bp, Homo sapiens
atcatgttgggcttt

SEQ ID NO: 42986 - DNA, 15 bp, Homo sapiens
catcatgttgggctt

SEQ ID NO: 42987 - DNA, 15 bp, Homo sapiens
ccatcatgttgggct

SEQ ID NO: 42988 - DNA, 15 bp, Homo sapiens
cccatcatgttgggc

SEQ ID NO: 42989 - DNA, 15 bp, Homo sapiens
ccccatcatgttggg

SEQ ID NO: 42990 - DNA, 15 bp, Homo sapiens
tccccatcatgttgg

SEQ ID NO: 42991 - DNA, 15 bp, Homo sapiens
ctccccatcatgttg

SEQ ID NO: 42992 - DNA, 15 bp, Homo sapiens
tctccccatcatgtt

SEQ ID NO: 42993 - DNA, 15 bp, Homo sapiens
ctctccccatcatgt

SEQ ID NO: 42994 - DNA, 15 bp, Homo sapiens
tctctccccatcatg

SEQ ID NO: 42995 - DNA, 15 bp, Homo sapiens
ttctctccccatcat

SEQ ID NO: 42996 - DNA, 15 bp, Homo sapiens
tttctctccccatca

SEQ ID NO: 42997 - DNA, 15 bp, Homo sapiens
gtttctctccccatc

SEQ ID NO: 42998 - DNA, 15 bp, Homo sapiens
agtttctctccccat

SEQ ID NO: 42999 - DNA, 15 bp, Homo sapiens
gagtttctctcccca

SEQ ID NO: 43000 - DNA, 15 bp, Homo sapiens
agagtttctctcccc

SEQ ID NO: 43001 - DNA, 15 bp, Homo sapiens
aagagtttctctccc

SEQ ID NO: 43002 - DNA, 15 bp, Homo sapiens
gaagagtttctctcc

SEQ ID NO: 43003 - DNA, 15 bp, Homo sapiens
agaagagtttctctc

SEQ ID NO: 43004 - DNA, 15 bp, Homo sapiens
aagaagagtttctct

SEQ ID NO: 43005 - DNA, 15 bp, Homo sapiens
aaagaagagtttctc

SEQ ID NO: 43006 - DNA, 15 bp, Homo sapiens
gaaagaagagtttct

SEQ ID NO: 43007 - DNA, 15 bp, Homo sapiens
gctcctagaaaatac

SEQ ID NO: 43008 - DNA, 15 bp, Homo sapiens
agctcctagaaaata

SEQ ID NO: 43009 - DNA, 15 bp, Homo sapiens
cagctcctagaaaat

SEQ ID NO: 43010 - DNA, 15 bp, Homo sapiens
ccagctcctagaaaa

SEQ ID NO: 43011 - DNA, 15 bp, Homo sapiens
tccagctcctagaaa

SEQ ID NO: 43012 - DNA, 15 bp, Homo sapiens
gtccagctcctagaa

SEQ ID NO: 43013 - DNA, 15 bp, Homo sapiens
agtccagctcctaga

SEQ ID NO: 43014 - DNA, 15 bp, Homo sapiens
gagtccagctcctag

SEQ ID NO: 43015 - DNA, 15 bp, Homo sapiens
tgagtccagctccta

SEQ ID NO: 43016 - DNA, 15 bp, Homo sapiens
ttgagtccagctcct

SEQ ID NO: 43017 - DNA, 15 bp, Homo sapiens
gttgagtccagctcc

SEQ ID NO: 43018 - DNA, 15 bp, Homo sapiens
agttgagtccagctc

SEQ ID NO: 43019 - DNA, 15 bp, Homo sapiens
gagttgagtccagct

SEQ ID NO: 43020 - DNA, 15 bp, Homo sapiens
tgagttgagtccagc

SEQ ID NO: 43021 - DNA, 15 bp, Homo sapiens
ttgagttgagtccag

SEQ ID NO: 43022 - DNA, 15 bp, Homo sapiens
tttgagttgagtcca

SEQ ID NO: 43023 - DNA, 15 bp, Homo sapiens
ttttgagttgagtcc

SEQ ID NO: 43024 - DNA, 15 bp, Homo sapiens
cttttgagttgagtc

SEQ ID NO: 43025 - DNA, 15 bp, Homo sapiens
tcttttgagttgagt

SEQ ID NO: 43026 - DNA, 15 bp, Homo sapiens
atcttttgagttgag

SEQ ID NO: 43027 - DNA, 15 bp, Homo sapiens
tatcttttgagttga

SEQ ID NO: 43028 - DNA, 15 bp, Homo sapiens
atatcttttgagttg

SEQ ID NO: 43029 - DNA, 15 bp, Homo sapiens
gatatcttttgagtt

SEQ ID NO: 43030 - DNA, 15 bp, Homo sapiens
ggatatcttttgagt

SEQ ID NO: 43031 - DNA, 15 bp, Homo sapiens
aggatatcttttgag

SEQ ID NO: 43032 - DNA, 15 bp, Homo sapiens
aaggatatcttttga

SEQ ID NO: 43033 - DNA, 15 bp, Homo sapiens
aaaggatatcttttg

SEQ ID NO: 43034 - DNA, 15 bp, Homo sapiens
aaaaggatatctttt

SEQ ID NO: 43035 - DNA, 15 bp, Homo sapiens
caaaaggatatcttt

SEQ ID NO: 43036 - DNA, 15 bp, Homo sapiens
tcaaaaggatatctt

SEQ ID NO: 43037 - DNA, 15 bp, Homo sapiens
atcaaaaggatatct

SEQ ID NO: 43038 - DNA, 15 bp, Homo sapiens
catcaaaaggatatc

SEQ ID NO: 43039 - DNA, 15 bp, Homo sapiens
tcatcaaaaggatat

SEQ ID NO: 43040 - DNA, 15 bp, Homo sapiens
ctcatcaaaaggata

SEQ ID NO: 43041 - DNA, 15 bp, Homo sapiens
tctcatcaaaaggat

SEQ ID NO: 43042 - DNA, 15 bp, Homo sapiens
ttctcatcaaaagga

SEQ ID NO: 43043 - DNA, 15 bp, Homo sapiens
gttctcatcaaaagg

SEQ ID NO: 43044 - DNA, 15 bp, Homo sapiens
tgttctcatcaaaag

SEQ ID NO: 43045 - DNA, 15 bp, Homo sapiens
ttgttctcatcaaaa

SEQ ID NO: 43046 - DNA, 15 bp, Homo sapiens
tttgttctcatcaaa

SEQ ID NO: 43047 - DNA, 15 bp, Homo sapiens
ctttgttctcatcaa

SEQ ID NO: 43048 - DNA, 15 bp, Homo sapiens
cctttgttctcatca

SEQ ID NO: 43049 - DNA, 15 bp, Homo sapiens
acctttgttctcatc

SEQ ID NO: 43050 - DNA, 15 bp, Homo sapiens
cacctttgttctcat

SEQ ID NO: 43051 - DNA, 15 bp, Homo sapiens
ccacctttgttctca

SEQ ID NO: 43052 - DNA, 15 bp, Homo sapiens
cccacctttgttctc

SEQ ID NO: 43053 - DNA, 15 bp, Homo sapiens
acccacctttgttct

SEQ ID NO: 43054 - DNA, 15 bp, Homo sapiens
cacccacctttgttc

SEQ ID NO: 43055 - DNA, 15 bp, Homo sapiens
ccacccacctttgtt

SEQ ID NO: 43056 - DNA, 15 bp, Homo sapiens
tccacccacctttgt

SEQ ID NO: 43057 - DNA, 15 bp, Homo sapiens
atccacccacctttg

SEQ ID NO: 43058 - DNA, 15 bp, Homo sapiens
tatccacccaccttt

SEQ ID NO: 43059 - DNA, 15 bp, Homo sapiens
atatccacccacctt

SEQ ID NO: 43060 - DNA, 15 bp, Homo sapiens
tatatccacccacct

SEQ ID NO: 43061 - DNA, 15 bp, Homo sapiens
atatatccacccacc

SEQ ID NO: 43062 - DNA, 15 bp, Homo sapiens
catatatccacccac

SEQ ID NO: 43063 - DNA, 15 bp, Homo sapiens
tcatatatccaccca

SEQ ID NO: 43064 - DNA, 15 bp, Homo sapiens
ttcatatatccaccc

SEQ ID NO: 43065 - DNA, 15 bp, Homo sapiens
tttcatatatccacc

SEQ ID NO: 43066 - DNA, 15 bp, Homo sapiens
atttcatatatccac

SEQ ID NO: 43067 - DNA, 15 bp, Homo sapiens
tatttcatatatcca

SEQ ID NO: 43068 - DNA, 15 bp, Homo sapiens
atatttcatatatcc

SEQ ID NO: 43069 - DNA, 15 bp, Homo sapiens
aatatttcatatatc

SEQ ID NO: 43070 - DNA, 15 bp, Homo sapiens
taatatttcatatat

SEQ ID NO: 43071 - DNA, 15 bp, Homo sapiens
ataatatttcatata

SEQ ID NO: 43072 - DNA, 15 bp, Homo sapiens
gataatatttcatat

SEQ ID NO: 43073 - DNA, 15 bp, Homo sapiens
agataatatttcata

SEQ ID NO: 43074 - DNA, 15 bp, Homo sapiens
cagataatatttcat

SEQ ID NO: 43075 - DNA, 15 bp, Homo sapiens
acagataatatttca

SEQ ID NO: 43076 - DNA, 15 bp, Homo sapiens
cacagataatatttc

SEQ ID NO: 43077 - DNA, 15 bp, Homo sapiens
ccacagataatattt

SEQ ID NO: 43078 - DNA, 15 bp, Homo sapiens
cccacagataatatt

SEQ ID NO: 43079 - DNA, 15 bp, Homo sapiens
tcccacagataatat

SEQ ID NO: 43080 - DNA, 15 bp, Homo sapiens
atcccacagataata

SEQ ID NO: 43081 - DNA, 15 bp, Homo sapiens
tatcccacagataat

SEQ ID NO: 43082 - DNA, 15 bp, Homo sapiens
ttatcccacagataa

SEQ ID NO: 43083 - DNA, 15 bp, Homo sapiens
tttatcccacagata

SEQ ID NO: 43084 - DNA, 15 bp, Homo sapiens
atttatcccacagat

SEQ ID NO: 43085 - DNA, 15 bp, Homo sapiens
catttatcccacaga

SEQ ID NO: 43086 - DNA, 15 bp, Homo sapiens
gcatttatcccacag

SEQ ID NO: 43087 - DNA, 15 bp, Homo sapiens
tgcatttatcccaca

SEQ ID NO: 43088 - DNA, 15 bp, Homo sapiens
gtgcatttatcccac

SEQ ID NO: 43089 - DNA, 15 bp, Homo sapiens
agtgcatttatccca

SEQ ID NO: 43090 - DNA, 15 bp, Homo sapiens
aagtgcatttatccc

SEQ ID NO: 43091 - DNA, 15 bp, Homo sapiens
taagtgcatttatcc

SEQ ID NO: 43092 - DNA, 15 bp, Homo sapiens
ctaagtgcatttatc

SEQ ID NO: 43093 - DNA, 15 bp, Homo sapiens
actaagtgcatttat

SEQ ID NO: 43094 - DNA, 15 bp, Homo sapiens
gactaagtgcattta

SEQ ID NO: 43095 - DNA, 15 bp, Homo sapiens
tgactaagtgcattt

SEQ ID NO: 43096 - DNA, 15 bp, Homo sapiens
atgactaagtgcatt

SEQ ID NO: 43097 - DNA, 15 bp, Homo sapiens
catgactaagtgcat

SEQ ID NO: 43098 - DNA, 15 bp, Homo sapiens
tcatgactaagtgca

SEQ ID NO: 43099 - DNA, 15 bp, Homo sapiens
ctcatgactaagtgc

SEQ ID NO: 43100 - DNA, 15 bp, Homo sapiens
cctcatgactaagtg

SEQ ID NO: 43101 - DNA, 15 bp, Homo sapiens
ccctcatgactaagt

SEQ ID NO: 43102 - DNA, 15 bp, Homo sapiens
tccctcatgactaag

SEQ ID NO: 43103 - DNA, 15 bp, Homo sapiens
ctccctcatgactaa

SEQ ID NO: 43104 - DNA, 15 bp, Homo sapiens
tctccctcatgacta

SEQ ID NO: 43105 - DNA, 15 bp, Homo sapiens
gtctccctcatgact

SEQ ID NO: 43106 - DNA, 15 bp, Homo sapiens
agtctccctcatgac

SEQ ID NO: 43107 - DNA, 15 bp, Homo sapiens
aagtctccctcatga

SEQ ID NO: 43108 - DNA, 15 bp, Homo sapiens
caagtctccctcatg

SEQ ID NO: 43109 - DNA, 15 bp, Homo sapiens
acaagtctccctcat

SEQ ID NO: 43110 - DNA, 15 bp, Homo sapiens
aacaagtctccctca

SEQ ID NO: 43111 - DNA, 15 bp, Homo sapiens
taacaagtctccctc

SEQ ID NO: 43112 - DNA, 15 bp, Homo sapiens
ataacaagtctccct

SEQ ID NO: 43113 - DNA, 15 bp, Homo sapiens
cataacaagtctccc

SEQ ID NO: 43114 - DNA, 15 bp, Homo sapiens
ccataacaagtctcc

SEQ ID NO: 43115 - DNA, 15 bp, Homo sapiens
tccataacaagtctc

SEQ ID NO: 43116 - DNA, 15 bp, Homo sapiens
ctccataacaagtct

SEQ ID NO: 43117 - DNA, 15 bp, Homo sapiens
actccataacaagtc

SEQ ID NO: 43118 - DNA, 15 bp, Homo sapiens
cactccataacaagt

SEQ ID NO: 43119 - DNA, 15 bp, Homo sapiens
gcactccataacaag

SEQ ID NO: 43120 - DNA, 15 bp, Homo sapiens
cgcactccataacaa

SEQ ID NO: 43121 - DNA, 15 bp, Homo sapiens
gcgcactccataaca

SEQ ID NO: 43122 - DNA, 15 bp, Homo sapiens
agcgcactccataac

SEQ ID NO: 43123 - DNA, 15 bp, Homo sapiens
gagcgcactccataa

SEQ ID NO: 43124 - DNA, 15 bp, Homo sapiens
tgagcgcactccata

SEQ ID NO: 43125 - DNA, 15 bp, Homo sapiens
atgagcgcactccat

SEQ ID NO: 43126 - DNA, 15 bp, Homo sapiens
aatgagcgcactcca

SEQ ID NO: 43127 - DNA, 15 bp, Homo sapiens
caatgagcgcactcc

SEQ ID NO: 43128 - DNA, 15 bp, Homo sapiens
acaatgagcgcactc

SEQ ID NO: 43129 - DNA, 15 bp, Homo sapiens
tacaatgagcgcact

SEQ ID NO: 43130 - DNA, 15 bp, Homo sapiens
atacaatgagcgcac

SEQ ID NO: 43131 - DNA, 15 bp, Homo sapiens
aatacaatgagcgca

SEQ ID NO: 43132 - DNA, 15 bp, Homo sapiens
aaatacaatgagcgc

SEQ ID NO: 43133 - DNA, 15 bp, Homo sapiens
caaatacaatgagcg

SEQ ID NO: 43134 - DNA, 15 bp, Homo sapiens
acaaatacaatgagc

SEQ ID NO: 43135 - DNA, 15 bp, Homo sapiens
tacaaatacaatgag

SEQ ID NO: 43136 - DNA, 15 bp, Homo sapiens
gtacaaatacaatga

SEQ ID NO: 43137 - DNA, 15 bp, Homo sapiens
agtacaaatacaatg

SEQ ID NO: 43138 - DNA, 15 bp, Homo sapiens
cagtacaaatacaat

SEQ ID NO: 43139 - DNA, 15 bp, Homo sapiens
acagtacaaatacaa

SEQ ID NO: 43140 - DNA, 15 bp, Homo sapiens
aacagtacaaataca

SEQ ID NO: 43141 - DNA, 15 bp, Homo sapiens
caacagtacaaatac

SEQ ID NO: 43142 - DNA, 15 bp, Homo sapiens
tcaacagtacaaata

SEQ ID NO: 43143 - DNA, 15 bp, Homo sapiens
ctcaacagtacaaat

SEQ ID NO: 43144 - DNA, 15 bp, Homo sapiens
actcaacagtacaaa

SEQ ID NO: 43145 - DNA, 15 bp, Homo sapiens
aactcaacagtacaa

SEQ ID NO: 43146 - DNA, 15 bp, Homo sapiens
taactcaacagtaca

SEQ ID NO: 43147 - DNA, 15 bp, Homo sapiens
ttaactcaacagtac

SEQ ID NO: 43148 - DNA, 15 bp, Homo sapiens
gttaactcaacagta

SEQ ID NO: 43149 - DNA, 15 bp, Homo sapiens
tgttaactcaacagt

SEQ ID NO: 43150 - DNA, 15 bp, Homo sapiens
ttgttaactcaacag

SEQ ID NO: 43151 - DNA, 15 bp, Homo sapiens
gttgttaactcaaca

SEQ ID NO: 43152 - DNA, 15 bp, Homo sapiens
agttgttaactcaac

SEQ ID NO: 43153 - DNA, 15 bp, Homo sapiens
aagttgttaactcaa

SEQ ID NO: 43154 - DNA, 15 bp, Homo sapiens
gaagttgttaactca

SEQ ID NO: 43155 - DNA, 15 bp, Homo sapiens
agaagttgttaactc

SEQ ID NO: 43156 - DNA, 15 bp, Homo sapiens
tagaagttgttaact

SEQ ID NO: 43157 - DNA, 15 bp, Homo sapiens
ctagaagttgttaac

SEQ ID NO: 43158 - DNA, 15 bp, Homo sapiens
cctagaagttgttaa

SEQ ID NO: 43159 - DNA, 15 bp, Homo sapiens
tcctagaagttgtta

SEQ ID NO: 43160 - DNA, 15 bp, Homo sapiens
ctcctagaagttgtt

SEQ ID NO: 43161 - DNA, 15 bp, Homo sapiens
cctcctagaagttgt

SEQ ID NO: 43162 - DNA, 15 bp, Homo sapiens
tcctcctagaagttg

SEQ ID NO: 43163 - DNA, 15 bp, Homo sapiens
ctcctcctagaagtt

SEQ ID NO: 43164 - DNA, 15 bp, Homo sapiens
gctcctcctagaagt

SEQ ID NO: 43165 - DNA, 15 bp, Homo sapiens
agctcctcctagaag

SEQ ID NO: 43166 - DNA, 15 bp, Homo sapiens
gagctcctcctagaa

SEQ ID NO: 43167 - DNA, 15 bp, Homo sapiens
tgagctcctcctaga

SEQ ID NO: 43168 - DNA, 15 bp, Homo sapiens
ctgagctcctcctag

SEQ ID NO: 43169 - DNA, 15 bp, Homo sapiens
cctgagctcctccta

SEQ ID NO: 43170 - DNA, 15 bp, Homo sapiens
ccctgagctcctcct

SEQ ID NO: 43171 - DNA, 15 bp, Homo sapiens
gccctgagctcctcc

SEQ ID NO: 43172 - DNA, 15 bp, Homo sapiens
ggccctgagctcctc

SEQ ID NO: 43173 - DNA, 15 bp, Homo sapiens
tggccctgagctcct

SEQ ID NO: 43174 - DNA, 15 bp, Homo sapiens
gtggccctgagctcc

SEQ ID NO: 43175 - DNA, 15 bp, Homo sapiens
ggtggccctgagctc

SEQ ID NO: 43176 - DNA, 15 bp, Homo sapiens
aggtggccctgagct

SEQ ID NO: 43177 - DNA, 15 bp, Homo sapiens
caggtggccctgagc

SEQ ID NO: 43178 - DNA, 15 bp, Homo sapiens
ccaggtggccctgag

SEQ ID NO: 43179 - DNA, 15 bp, Homo sapiens
gccaggtggccctga

SEQ ID NO: 43180 - DNA, 15 bp, Homo sapiens
tgccaggtggccctg

SEQ ID NO: 43181 - DNA, 15 bp, Homo sapiens
ctgccaggtggccct

SEQ ID NO: 43182 - DNA, 15 bp, Homo sapiens
cctgccaggtggccc

SEQ ID NO: 43183 - DNA, 15 bp, Homo sapiens
ccctgccaggtggcc

SEQ ID NO: 43184 - DNA, 15 bp, Homo sapiens
cccctgccaggtggc

SEQ ID NO: 43185 - DNA, 15 bp, Homo sapiens
gcccctgccaggtgg

SEQ ID NO: 43186 - DNA, 15 bp, Homo sapiens
agcccctgccaggtg

SEQ ID NO: 43187 - DNA, 15 bp, Homo sapiens
aagcccctgccaggt

SEQ ID NO: 43188 - DNA, 15 bp, Homo sapiens
gaagcccctgccagg

SEQ ID NO: 43189 - DNA, 15 bp, Homo sapiens
agaagcccctgccag

SEQ ID NO: 43190 - DNA, 15 bp, Homo sapiens
aagaagcccctgcca

SEQ ID NO: 43191 - DNA, 15 bp, Homo sapiens
aaagaagcccctgcc

SEQ ID NO: 43192 - DNA, 15 bp, Homo sapiens
aaaagaagcccctgc

SEQ ID NO: 43193 - DNA, 15 bp, Homo sapiens
caaaagaagcccctg

SEQ ID NO: 43194 - DNA, 15 bp, Homo sapiens
acaaaagaagcccct

SEQ ID NO: 43195 - DNA, 15 bp, Homo sapiens
gacaaaagaagcccc

SEQ ID NO: 43196 - DNA, 15 bp, Homo sapiens
agacaaaagaagccc

SEQ ID NO: 43197 - DNA, 15 bp, Homo sapiens
aagacaaaagaagcc

SEQ ID NO: 43198 - DNA, 15 bp, Homo sapiens
caagacaaaagaagc

SEQ ID NO: 43199 - DNA, 15 bp, Homo sapiens
gcaagacaaaagaag

SEQ ID NO: 43200 - DNA, 15 bp, Homo sapiens
agcaagacaaaagaa

SEQ ID NO: 43201 - DNA, 15 bp, Homo sapiens
cagcaagacaaaaga

SEQ ID NO: 43202 - DNA, 15 bp, Homo sapiens
gcagcaagacaaaag

SEQ ID NO: 43203 - DNA, 15 bp, Homo sapiens
agcagcaagacaaaa

SEQ ID NO: 43204 - DNA, 15 bp, Homo sapiens
gagcagcaagacaaa

SEQ ID NO: 43205 - DNA, 15 bp, Homo sapiens
tgagcagcaagacaa

SEQ ID NO: 43206 - DNA, 15 bp, Homo sapiens
ctgagcagcaagaca

SEQ ID NO: 43207 - DNA, 15 bp, Homo sapiens
gctgagcagcaagac

SEQ ID NO: 43208 - DNA, 15 bp, Homo sapiens
tgctgagcagcaaga

SEQ ID NO: 43209 - DNA, 15 bp, Homo sapiens
ttgctgagcagcaag

SEQ ID NO: 43210 - DNA, 15 bp, Homo sapiens
cttgctgagcagcaa

SEQ ID NO: 43211 - DNA, 15 bp, Homo sapiens
ccttgctgagcagca

SEQ ID NO: 43212 - DNA, 15 bp, Homo sapiens
accttgctgagcagc

SEQ ID NO: 43213 - DNA, 15 bp, Homo sapiens
caccttgctgagcag

SEQ ID NO: 43214 - DNA, 15 bp, Homo sapiens
acaccttgctgagca

SEQ ID NO: 43215 - DNA, 15 bp, Homo sapiens
tacaccttgctgagc

SEQ ID NO: 43216 - DNA, 15 bp, Homo sapiens
atacaccttgctgag

SEQ ID NO: 43217 - DNA, 15 bp, Homo sapiens
aatacaccttgctga

SEQ ID NO: 43218 - DNA, 15 bp, Homo sapiens
aaatacaccttgctg

SEQ ID NO: 43219 - DNA, 15 bp, Homo sapiens
aaaatacaccttgct

SEQ ID NO: 43220 - DNA, 15 bp, Homo sapiens
caaaatacaccttgc

SEQ ID NO: 43221 - DNA, 15 bp, Homo sapiens
gcaaaatacaccttg

SEQ ID NO: 43222 - DNA, 15 bp, Homo sapiens
agcaaaatacacctt

SEQ ID NO: 43223 - DNA, 15 bp, Homo sapiens
cagcaaaatacacct

SEQ ID NO: 43224 - DNA, 15 bp, Homo sapiens
acagcaaaatacacc

SEQ ID NO: 43225 - DNA, 15 bp, Homo sapiens
tacagcaaaatacac

SEQ ID NO: 43226 - DNA, 15 bp, Homo sapiens
ctacagcaaaataca

SEQ ID NO: 43227 - DNA, 15 bp, Homo sapiens
tctacagcaaaatac

SEQ ID NO: 43228 - DNA, 15 bp, Homo sapiens
ctctacagcaaaata

SEQ ID NO: 43229 - DNA, 15 bp, Homo sapiens
actctacagcaaaat

SEQ ID NO: 43230 - DNA, 15 bp, Homo sapiens
cactctacagcaaaa

SEQ ID NO: 43231 - DNA, 15 bp, Homo sapiens
acactctacagcaaa

SEQ ID NO: 43232 - DNA, 15 bp, Homo sapiens
cacactctacagcaa

SEQ ID NO: 43233 - DNA, 15 bp, Homo sapiens
gcacactctacagca

SEQ ID NO: 43234 - DNA, 15 bp, Homo sapiens
agcacactctacagc

SEQ ID NO: 43235 - DNA, 15 bp, Homo sapiens
cagcacactctacag

SEQ ID NO: 43236 - DNA, 15 bp, Homo sapiens
ccagcacactctaca

SEQ ID NO: 43237 - DNA, 15 bp, Homo sapiens
cccagcacactctac

SEQ ID NO: 43238 - DNA, 15 bp, Homo sapiens
gcccagcacactcta

SEQ ID NO: 43239 - DNA, 15 bp, Homo sapiens
tgcccagcacactct

SEQ ID NO: 43240 - DNA, 15 bp, Homo sapiens
ctgcccagcacactc

SEQ ID NO: 43241 - DNA, 15 bp, Homo sapiens
cctgcccagcacact

SEQ ID NO: 43242 - DNA, 15 bp, Homo sapiens
acctgcccagcacac

SEQ ID NO: 43243 - DNA, 15 bp, Homo sapiens
cacctgcccagcaca

SEQ ID NO: 43244 - DNA, 15 bp, Homo sapiens
tcacctgcccagcac

SEQ ID NO: 43245 - DNA, 15 bp, Homo sapiens
ttcacctgcccagca

SEQ ID NO: 43246 - DNA, 15 bp, Homo sapiens
gttcacctgcccagc

SEQ ID NO: 43247 - DNA, 15 bp, Homo sapiens
agttcacctgcccag

SEQ ID NO: 43248 - DNA, 15 bp, Homo sapiens
aagttcacctgccca

SEQ ID NO: 43249 - DNA, 15 bp, Homo sapiens
aaagttcacctgccc

SEQ ID NO: 43250 - DNA, 15 bp, Homo sapiens
aaaagttcacctgcc

SEQ ID NO: 43251 - DNA, 15 bp, Homo sapiens
gaaaagttcacctgc

SEQ ID NO: 43252 - DNA, 15 bp, Homo sapiens
agaaaagttcacctg

SEQ ID NO: 43253 - DNA, 15 bp, Homo sapiens
aagaaaagttcacct

SEQ ID NO: 43254 - DNA, 15 bp, Homo sapiens
taagaaaagttcacc

SEQ ID NO: 43255 - DNA, 15 bp, Homo sapiens
ttaagaaaagttcac

SEQ ID NO: 43256 - DNA, 15 bp, Homo sapiens
gttaagaaaagttca

SEQ ID NO: 43257 - DNA, 15 bp, Homo sapiens
agttaagaaaagttc

SEQ ID NO: 43258 - DNA, 15 bp, Homo sapiens
aagttaagaaaagtt

SEQ ID NO: 43259 - DNA, 15 bp, Homo sapiens
aaagttaagaaaagt

SEQ ID NO: 43260 - DNA, 15 bp, Homo sapiens
gaaagttaagaaaag

SEQ ID NO: 43261 - DNA, 15 bp, Homo sapiens
agaaagttaagaaaa

SEQ ID NO: 43262 - DNA, 15 bp, Homo sapiens
gagaaagttaagaaa

SEQ ID NO: 43263 - DNA, 15 bp, Homo sapiens
agagaaagttaagaa

SEQ ID NO: 43264 - DNA, 15 bp, Homo sapiens
aagagaaagttaaga

SEQ ID NO: 43265 - DNA, 15 bp, Homo sapiens
caagagaaagttaag

SEQ ID NO: 43266 - DNA, 15 bp, Homo sapiens
ccaagagaaagttaa

SEQ ID NO: 43267 - DNA, 15 bp, Homo sapiens
cccaagagaaagtta

SEQ ID NO: 43268 - DNA, 15 bp, Homo sapiens
acccaagagaaagtt

SEQ ID NO: 43269 - DNA, 15 bp, Homo sapiens
gacccaagagaaagt

SEQ ID NO: 43270 - DNA, 15 bp, Homo sapiens
ggacccaagagaaag

SEQ ID NO: 43271 - DNA, 15 bp, Homo sapiens
aggacccaagagaaa

SEQ ID NO: 43272 - DNA, 15 bp, Homo sapiens
aaggacccaagagaa

SEQ ID NO: 43273 - DNA, 15 bp, Homo sapiens
gaaggacccaagaga

SEQ ID NO: 43274 - DNA, 15 bp, Homo sapiens
ggaaggacccaagag

SEQ ID NO: 43275 - DNA, 15 bp, Homo sapiens
aggaaggacccaaga

SEQ ID NO: 43276 - DNA, 15 bp, Homo sapiens
taggaaggacccaag

SEQ ID NO: 43277 - DNA, 15 bp, Homo sapiens
ttaggaaggacccaa

SEQ ID NO: 43278 - DNA, 15 bp, Homo sapiens
tttaggaaggaccca

SEQ ID NO: 43279 - DNA, 15 bp, Homo sapiens
ctttaggaaggaccc

SEQ ID NO: 43280 - DNA, 15 bp, Homo sapiens
gctttaggaaggacc

SEQ ID NO: 43281 - DNA, 15 bp, Homo sapiens
tgctttaggaaggac

SEQ ID NO: 43282 - DNA, 15 bp, Homo sapiens
ctgctttaggaagga

SEQ ID NO: 43283 - DNA, 15 bp, Homo sapiens
gctgctttaggaagg

SEQ ID NO: 43284 - DNA, 15 bp, Homo sapiens
tgctgctttaggaag

SEQ ID NO: 43285 - DNA, 15 bp, Homo sapiens
atgctgctttaggaa

SEQ ID NO: 43286 - DNA, 15 bp, Homo sapiens
catgctgctttagga

SEQ ID NO: 43287 - DNA, 15 bp, Homo sapiens
acatgctgctttagg

SEQ ID NO: 43288 - DNA, 15 bp, Homo sapiens
tacatgctgctttag

SEQ ID NO: 43289 - DNA, 15 bp, Homo sapiens
gtacatgctgcttta

SEQ ID NO: 43290 - DNA, 15 bp, Homo sapiens
ggtacatgctgcttt

SEQ ID NO: 43291 - DNA, 15 bp, Homo sapiens
aggtacatgctgctt

SEQ ID NO: 43292 - DNA, 15 bp, Homo sapiens
aaggtacatgctgct

SEQ ID NO: 43293 - DNA, 15 bp, Homo sapiens
aaaggtacatgctgc

SEQ ID NO: 43294 - DNA, 15 bp, Homo sapiens
gaaaggtacatgctg

SEQ ID NO: 43295 - DNA, 15 bp, Homo sapiens
ggaaaggtacatgct

SEQ ID NO: 43296 - DNA, 15 bp, Homo sapiens
gggaaaggtacatgc

SEQ ID NO: 43297 - DNA, 15 bp, Homo sapiens
tgggaaaggtacatg

SEQ ID NO: 43298 - DNA, 15 bp, Homo sapiens
ctgggaaaggtacat

SEQ ID NO: 43299 - DNA, 15 bp, Homo sapiens
tctgggaaaggtaca

SEQ ID NO: 43300 - DNA, 15 bp, Homo sapiens
ctctgggaaaggtac

SEQ ID NO: 43301 - DNA, 15 bp, Homo sapiens
gctctgggaaaggta

SEQ ID NO: 43302 - DNA, 15 bp, Homo sapiens
cgctctgggaaaggt

SEQ ID NO: 43303 - DNA, 15 bp, Homo sapiens
tcgctctgggaaagg

SEQ ID NO: 43304 - DNA, 15 bp, Homo sapiens
ctcgctctgggaaag

SEQ ID NO: 43305 - DNA, 15 bp, Homo sapiens
cctcgctctgggaaa

SEQ ID NO: 43306 - DNA, 15 bp, Homo sapiens
tcctcgctctgggaa

SEQ ID NO: 43307 - DNA, 15 bp, Homo sapiens
ctcctcgctctggga

SEQ ID NO: 43308 - DNA, 15 bp, Homo sapiens
tctcctcgctctggg

SEQ ID NO: 43309 - DNA, 15 bp, Homo sapiens
ctctcctcgctctgg

SEQ ID NO: 43310 - DNA, 15 bp, Homo sapiens
cctctcctcgctctg

SEQ ID NO: 43311 - DNA, 15 bp, Homo sapiens
ccctctcctcgctct

SEQ ID NO: 43312 - DNA, 15 bp, Homo sapiens
gccctctcctcgctc

SEQ ID NO: 43313 - DNA, 15 bp, Homo sapiens
ggccctctcctcgct

SEQ ID NO: 43314 - DNA, 15 bp, Homo sapiens
tggccctctcctcgc

SEQ ID NO: 43315 - DNA, 15 bp, Homo sapiens
gtggccctctcctcg

SEQ ID NO: 43316 - DNA, 15 bp, Homo sapiens
ggtggccctctcctc

SEQ ID NO: 43317 - DNA, 15 bp, Homo sapiens
aggtggccctctcct

SEQ ID NO: 43318 - DNA, 15 bp, Homo sapiens
aaggtggccctctcc

SEQ ID NO: 43319 - DNA, 15 bp, Homo sapiens
gaaggtggccctctc

SEQ ID NO: 43320 - DNA, 15 bp, Homo sapiens
ggaaggtggccctct

SEQ ID NO: 43321 - DNA, 15 bp, Homo sapiens
aggaaggtggccctc

SEQ ID NO: 43322 - DNA, 15 bp, Homo sapiens
caggaaggtggccct

SEQ ID NO: 43323 - DNA, 15 bp, Homo sapiens
acaggaaggtggccc

SEQ ID NO: 43324 - DNA, 15 bp, Homo sapiens
gacaggaaggtggcc

SEQ ID NO: 43325 - DNA, 15 bp, Homo sapiens
agacaggaaggtggc

SEQ ID NO: 43326 - DNA, 15 bp, Homo sapiens
gagacaggaaggtgg

SEQ ID NO: 43327 - DNA, 15 bp, Homo sapiens
tgagacaggaaggtg

SEQ ID NO: 43328 - DNA, 15 bp, Homo sapiens
gtgagacaggaaggt

SEQ ID NO: 43329 - DNA, 15 bp, Homo sapiens
tgtgagacaggaagg

SEQ ID NO: 43330 - DNA, 15 bp, Homo sapiens
ctgtgagacaggaag

SEQ ID NO: 43331 - DNA, 15 bp, Homo sapiens
tctgtgagacaggaa

SEQ ID NO: 43332 - DNA, 15 bp, Homo sapiens
ttctgtgagacagga

SEQ ID NO: 43333 - DNA, 15 bp, Homo sapiens
tttctgtgagacagg

SEQ ID NO: 43334 - DNA, 15 bp, Homo sapiens
gtttctgtgagacag

SEQ ID NO: 43335 - DNA, 15 bp, Homo sapiens
ggtttctgtgagaca

SEQ ID NO: 43336 - DNA, 15 bp, Homo sapiens
aggtttctgtgagac

SEQ ID NO: 43337 - DNA, 15 bp, Homo sapiens
gaggtttctgtgaga

SEQ ID NO: 43338 - DNA, 15 bp, Homo sapiens
ggaggtttctgtgag

SEQ ID NO: 43339 - DNA, 15 bp, Homo sapiens
tggaggtttctgtga

SEQ ID NO: 43340 - DNA, 15 bp, Homo sapiens
ttggaggtttctgtg

SEQ ID NO: 43341 - DNA, 15 bp, Homo sapiens
attggaggtttctgt

SEQ ID NO: 43342 - DNA, 15 bp, Homo sapiens
gattggaggtttctg

SEQ ID NO: 43343 - DNA, 15 bp, Homo sapiens
agattggaggtttct

SEQ ID NO: 43344 - DNA, 15 bp, Homo sapiens
cagattggaggtttc

SEQ ID NO: 43345 - DNA, 15 bp, Homo sapiens
acagattggaggttt

SEQ ID NO: 43346 - DNA, 15 bp, Homo sapiens
aacagattggaggtt

SEQ ID NO: 43347 - DNA, 15 bp, Homo sapiens
aaacagattggaggt

SEQ ID NO: 43348 - DNA, 15 bp, Homo sapiens
aaaacagattggagg

SEQ ID NO: 43349 - DNA, 15 bp, Homo sapiens
caaaacagattggag

SEQ ID NO: 43350 - DNA, 15 bp, Homo sapiens
ccaaaacagattgga

SEQ ID NO: 43351 - DNA, 15 bp, Homo sapiens
tccaaaacagattgg

SEQ ID NO: 43352 - DNA, 15 bp, Homo sapiens
gtccaaaacagattg

SEQ ID NO: 43353 - DNA, 15 bp, Homo sapiens
agtccaaaacagatt

SEQ ID NO: 43354 - DNA, 15 bp, Homo sapiens
cagtccaaaacagat

SEQ ID NO: 43355 - DNA, 15 bp, Homo sapiens
gcagtccaaaacaga

SEQ ID NO: 43356 - DNA, 15 bp, Homo sapiens
tgcagtccaaaacag

SEQ ID NO: 43357 - DNA, 15 bp, Homo sapiens
ctgcagtccaaaaca

SEQ ID NO: 43358 - DNA, 15 bp, Homo sapiens
cctgcagtccaaaac

SEQ ID NO: 43359 - DNA, 15 bp, Homo sapiens
tcctgcagtccaaaa

SEQ ID NO: 43360 - DNA, 15 bp, Homo sapiens
ttcctgcagtccaaa

SEQ ID NO: 43361 - DNA, 15 bp, Homo sapiens
cttcctgcagtccaa

SEQ ID NO: 43362 - DNA, 15 bp, Homo sapiens
ccttcctgcagtcca

SEQ ID NO: 43363 - DNA, 15 bp, Homo sapiens
tccttcctgcagtcc

SEQ ID NO: 43364 - DNA, 15 bp, Homo sapiens
ctccttcctgcagtc

SEQ ID NO: 43365 - DNA, 15 bp, Homo sapiens
gctccttcctgcagt

SEQ ID NO: 43366 - DNA, 15 bp, Homo sapiens
ggctccttcctgcag

SEQ ID NO: 43367 - DNA, 15 bp, Homo sapiens
tggctccttcctgca

SEQ ID NO: 43368 - DNA, 15 bp, Homo sapiens
atggctccttcctgc

SEQ ID NO: 43369 - DNA, 15 bp, Homo sapiens
tatggctccttcctg

SEQ ID NO: 43370 - DNA, 15 bp, Homo sapiens
ctatggctccttcct

SEQ ID NO: 43371 - DNA, 15 bp, Homo sapiens
actatggctccttcc

SEQ ID NO: 43372 - DNA, 15 bp, Homo sapiens
tactatggctccttc

SEQ ID NO: 43373 - DNA, 15 bp, Homo sapiens
ctactatggctcctt

SEQ ID NO: 43374 - DNA, 15 bp, Homo sapiens
actactatggctcct

SEQ ID NO: 43375 - DNA, 15 bp, Homo sapiens
cactactatggctcc

SEQ ID NO: 43376 - DNA, 15 bp, Homo sapiens
ccactactatggctc

SEQ ID NO: 43377 - DNA, 15 bp, Homo sapiens
tccactactatggct

SEQ ID NO: 43378 - DNA, 15 bp, Homo sapiens
gtccactactatggc

SEQ ID NO: 43379 - DNA, 15 bp, Homo sapiens
ggtccactactatgg

SEQ ID NO: 43380 - DNA, 15 bp, Homo sapiens
tggtccactactatg

SEQ ID NO: 43381 - DNA, 15 bp, Homo sapiens
ctggtccactactat

SEQ ID NO: 43382 - DNA, 15 bp, Homo sapiens
gctggtccactacta

SEQ ID NO: 43383 - DNA, 15 bp, Homo sapiens
tgctggtccactact

SEQ ID NO: 43384 - DNA, 15 bp, Homo sapiens
ttgctggtccactac

SEQ ID NO: 43385 - DNA, 15 bp, Homo sapiens
tttgctggtccacta

SEQ ID NO: 43386 - DNA, 15 bp, Homo sapiens
atttgctggtccact

SEQ ID NO: 43387 - DNA, 15 bp, Homo sapiens
aatttgctggtccac

SEQ ID NO: 43388 - DNA, 15 bp, Homo sapiens
aaatttgctggtcca

SEQ ID NO: 43389 - DNA, 15 bp, Homo sapiens
aaaatttgctggtcc

SEQ ID NO: 43390 - DNA, 15 bp, Homo sapiens
caaaatttgctggtc

SEQ ID NO: 43391 - DNA, 15 bp, Homo sapiens
ccaaaatttgctggt

SEQ ID NO: 43392 - DNA, 15 bp, Homo sapiens
gccaaaatttgctgg

SEQ ID NO: 43393 - DNA, 15 bp, Homo sapiens
ggccaaaatttgctg

SEQ ID NO: 43394 - DNA, 15 bp, Homo sapiens
gggccaaaatttgct

SEQ ID NO: 43395 - DNA, 15 bp, Homo sapiens
cgggccaaaatttgc

SEQ ID NO: 43396 - DNA, 15 bp, Homo sapiens
tcgggccaaaatttg

SEQ ID NO: 43397 - DNA, 15 bp, Homo sapiens
ctcgggccaaaattt

SEQ ID NO: 43398 - DNA, 15 bp, Homo sapiens
tctcgggccaaaatt

SEQ ID NO: 43399 - DNA, 15 bp, Homo sapiens
ctctcgggccaaaat

SEQ ID NO: 43400 - DNA, 15 bp, Homo sapiens
tctctcgggccaaaa

SEQ ID NO: 43401 - DNA, 15 bp, Homo sapiens
atctctcgggccaaa

SEQ ID NO: 43402 - DNA, 15 bp, Homo sapiens
aatctctcgggccaa

SEQ ID NO: 43403 - DNA, 15 bp, Homo sapiens
caatctctcgggcca

SEQ ID NO: 43404 - DNA, 15 bp, Homo sapiens
tcaatctctcgggcc

SEQ ID NO: 43405 - DNA, 15 bp, Homo sapiens
atcaatctctcgggc

SEQ ID NO: 43406 - DNA, 15 bp, Homo sapiens
aatcaatctctcggg

SEQ ID NO: 43407 - DNA, 15 bp, Homo sapiens
aaatcaatctctcgg

SEQ ID NO: 43408 - DNA, 15 bp, Homo sapiens
caaatcaatctctcg

SEQ ID NO: 43409 - DNA, 15 bp, Homo sapiens
gcaaatcaatctctc

SEQ ID NO: 43410 - DNA, 15 bp, Homo sapiens
agcaaatcaatctct

SEQ ID NO: 43411 - DNA, 15 bp, Homo sapiens
aagcaaatcaatctc

SEQ ID NO: 43412 - DNA, 15 bp, Homo sapiens
gaagcaaatcaatct

SEQ ID NO: 43413 - DNA, 15 bp, Homo sapiens
ggaagcaaatcaatc

SEQ ID NO: 43414 - DNA, 15 bp, Homo sapiens
cggaagcaaatcaat

SEQ ID NO: 43415 - DNA, 15 bp, Homo sapiens
tcggaagcaaatcaa

SEQ ID NO: 43416 - DNA, 15 bp, Homo sapiens
atcggaagcaaatca

SEQ ID NO: 43417 - DNA, 15 bp, Homo sapiens
aatcggaagcaaatc

SEQ ID NO: 43418 - DNA, 15 bp, Homo sapiens
caatcggaagcaaat

SEQ ID NO: 43419 - DNA, 15 bp, Homo sapiens
acaatcggaagcaaa

SEQ ID NO: 43420 - DNA, 15 bp, Homo sapiens
tacaatcggaagcaa

SEQ ID NO: 43421 - DNA, 15 bp, Homo sapiens
gtacaatcggaagca

SEQ ID NO: 43422 - DNA, 15 bp, Homo sapiens
agtacaatcggaagc

SEQ ID NO: 43423 - DNA, 15 bp, Homo sapiens
aagtacaatcggaag

SEQ ID NO: 43424 - DNA, 15 bp, Homo sapiens
aaagtacaatcggaa

SEQ ID NO: 43425 - DNA, 15 bp, Homo sapiens
aaaagtacaatcgga

SEQ ID NO: 43426 - DNA, 15 bp, Homo sapiens
aaaaagtacaatcgg

SEQ ID NO: 43427 - DNA, 15 bp, Homo sapiens
aaaaaagtacaatcg

SEQ ID NO: 43428 - DNA, 15 bp, Homo sapiens
aaaaaaagtacaatc

SEQ ID NO: 43429 - DNA, 15 bp, Homo sapiens
aaaaaaaagtacaat

SEQ ID NO: 43430 - DNA, 15 bp, Homo sapiens
aaaaaaaaagtacaa

SEQ ID NO: 43431 - DNA, 15 bp, Homo sapiens
aaaaaaaaaagtaca

SEQ ID NO: 43432 - DNA, 15 bp, Homo sapiens
aaaaaaaaaaagtac

SEQ ID NO: 43433 - DNA, 15 bp, Homo sapiens
taaaaaaaaaaagta

SEQ ID NO: 43434 - DNA, 15 bp, Homo sapiens
ataaaaaaaaaaagt

SEQ ID NO: 43435 - DNA, 15 bp, Homo sapiens
aataaaaaaaaaaag

SEQ ID NO: 43436 - DNA, 15 bp, Homo sapiens
caataaaaaaaaaaa

SEQ ID NO: 43437 - DNA, 15 bp, Homo sapiens
gcaataaaaaaaaaa

SEQ ID NO: 43438 - DNA, 15 bp, Homo sapiens
agcaataaaaaaaaa

SEQ ID NO: 43439 - DNA, 15 bp, Homo sapiens
tagcaataaaaaaaa

SEQ ID NO: 43440 - DNA, 15 bp, Homo sapiens
gtagcaataaaaaaa

SEQ ID NO: 43441 - DNA, 15 bp, Homo sapiens
agtagcaataaaaaa

SEQ ID NO: 43442 - DNA, 15 bp, Homo sapiens
tagtagcaataaaaa

SEQ ID NO: 43443 - DNA, 15 bp, Homo sapiens
atagtagcaataaaa

SEQ ID NO: 43444 - DNA, 15 bp, Homo sapiens
tatagtagcaataaa

SEQ ID NO: 43445 - DNA, 15 bp, Homo sapiens
ttatagtagcaataa

SEQ ID NO: 43446 - DNA, 15 bp, Homo sapiens
gttatagtagcaata

SEQ ID NO: 43447 - DNA, 15 bp, Homo sapiens
tgttatagtagcaat

SEQ ID NO: 43448 - DNA, 15 bp, Homo sapiens
ttgttatagtagcaa

SEQ ID NO: 43449 - DNA, 15 bp, Homo sapiens
cttgttatagtagca

SEQ ID NO: 43450 - DNA, 15 bp, Homo sapiens
acttgttatagtagc

SEQ ID NO: 43451 - DNA, 15 bp, Homo sapiens
gacttgttatagtag

SEQ ID NO: 43452 - DNA, 15 bp, Homo sapiens
tgacttgttatagta

SEQ ID NO: 43453 - DNA, 15 bp, Homo sapiens
gtgacttgttatagt

SEQ ID NO: 43454 - DNA, 15 bp, Homo sapiens
ggtgacttgttatag

SEQ ID NO: 43455 - DNA, 15 bp, Homo sapiens
tggtgacttgttata

SEQ ID NO: 43456 - DNA, 15 bp, Homo sapiens
ttggtgacttgttat

SEQ ID NO: 43457 - DNA, 15 bp, Homo sapiens
tttggtgacttgtta

SEQ ID NO: 43458 - DNA, 15 bp, Homo sapiens
atttggtgacttgtt

SEQ ID NO: 43459 - DNA, 15 bp, Homo sapiens
tatttggtgacttgt

SEQ ID NO: 43460 - DNA, 15 bp, Homo sapiens
gtatttggtgacttg

SEQ ID NO: 43461 - DNA, 15 bp, Homo sapiens
agtatttggtgactt

SEQ ID NO: 43462 - DNA, 15 bp, Homo sapiens
aagtatttggtgact

SEQ ID NO: 43463 - DNA, 15 bp, Homo sapiens
taagtatttggtgac

SEQ ID NO: 43464 - DNA, 15 bp, Homo sapiens
ctaagtatttggtga

SEQ ID NO: 43465 - DNA, 15 bp, Homo sapiens
gctaagtatttggtg

SEQ ID NO: 43466 - DNA, 15 bp, Homo sapiens
tgctaagtatttggt

SEQ ID NO: 43467 - DNA, 15 bp, Homo sapiens
ctgctaagtatttgg

SEQ ID NO: 43468 - DNA, 15 bp, Homo sapiens
actgctaagtatttg

SEQ ID NO: 43469 - DNA, 15 bp, Homo sapiens
aactgctaagtattt

SEQ ID NO: 43470 - DNA, 15 bp, Homo sapiens
aaactgctaagtatt

SEQ ID NO: 43471 - DNA, 15 bp, Homo sapiens
taaactgctaagtat

SEQ ID NO: 43472 - DNA, 15 bp, Homo sapiens
ataaactgctaagta

SEQ ID NO: 43473 - DNA, 15 bp, Homo sapiens
tataaactgctaagt

SEQ ID NO: 43474 - DNA, 15 bp, Homo sapiens
ttataaactgctaag

SEQ ID NO: 43475 - DNA, 15 bp, Homo sapiens
gttataaactgctaa

SEQ ID NO: 43476 - DNA, 15 bp, Homo sapiens
ggttataaactgcta

SEQ ID NO: 43477 - DNA, 15 bp, Homo sapiens
tggttataaactgct

SEQ ID NO: 43478 - DNA, 15 bp, Homo sapiens
gtggttataaactgc

SEQ ID NO: 43479 - DNA, 15 bp, Homo sapiens
tgtggttataaactg

SEQ ID NO: 43480 - DNA, 15 bp, Homo sapiens
atgtggttataaact

SEQ ID NO: 43481 - DNA, 15 bp, Homo sapiens
tatgtggttataaac

SEQ ID NO: 43482 - DNA, 15 bp, Homo sapiens
gtatgtggttataaa

SEQ ID NO: 43483 - DNA, 15 bp, Homo sapiens
tgtatgtggttataa

SEQ ID NO: 43484 - DNA, 15 bp, Homo sapiens
atgtatgtggttata

SEQ ID NO: 43485 - DNA, 15 bp, Homo sapiens
aatgtatgtggttat

SEQ ID NO: 43486 - DNA, 15 bp, Homo sapiens
aaatgtatgtggtta

SEQ ID NO: 43487 - DNA, 15 bp, Homo sapiens
taaatgtatgtggtt

SEQ ID NO: 43488 - DNA, 15 bp, Homo sapiens
ataaatgtatgtggt

SEQ ID NO: 43489 - DNA, 15 bp, Homo sapiens
aataaatgtatgtgg

SEQ ID NO: 43490 - DNA, 15 bp, Homo sapiens
taataaatgtatgtg

SEQ ID NO: 43491 - DNA, 15 bp, Homo sapiens
ataataaatgtatgt

SEQ ID NO: 43492 - DNA, 15 bp, Homo sapiens
aataataaatgtatg

SEQ ID NO: 43493 - DNA, 15 bp, Homo sapiens
aaataataaatgtat

SEQ ID NO: 43494 - DNA, 15 bp, Homo sapiens
gaaataataaatgta

SEQ ID NO: 43495 - DNA, 15 bp, Homo sapiens
tgaaataataaatgt

SEQ ID NO: 43496 - DNA, 15 bp, Homo sapiens
atgaaataataaatg

SEQ ID NO: 43497 - DNA, 15 bp, Homo sapiens
tatgaaataataaat

SEQ ID NO: 43498 - DNA, 15 bp, Homo sapiens
ttatgaaataataaa

SEQ ID NO: 43499 - DNA, 15 bp, Homo sapiens
cttatgaaataataa

SEQ ID NO: 43500 - DNA, 15 bp, Homo sapiens
ccttatgaaataata

SEQ ID NO: 43501 - DNA, 15 bp, Homo sapiens
gccttatgaaataat

SEQ ID NO: 43502 - DNA, 15 bp, Homo sapiens
ggccttatgaaataa

SEQ ID NO: 43503 - DNA, 15 bp, Homo sapiens
tggccttatgaaata

SEQ ID NO: 43504 - DNA, 15 bp, Homo sapiens
ctggccttatgaaat

SEQ ID NO: 43505 - DNA, 15 bp, Homo sapiens
tctggccttatgaaa

SEQ ID NO: 43506 - DNA, 15 bp, Homo sapiens
ttctggccttatgaa

SEQ ID NO: 43507 - DNA, 15 bp, Homo sapiens
cttctggccttatga

SEQ ID NO: 43508 - DNA, 15 bp, Homo sapiens
gcttctggccttatg

SEQ ID NO: 43509 - DNA, 15 bp, Homo sapiens
ggcttctggccttat

SEQ ID NO: 43510 - DNA, 15 bp, Homo sapiens
tggcttctggcctta

SEQ ID NO: 43511 - DNA, 15 bp, Homo sapiens
ctggcttctggcctt

SEQ ID NO: 43512 - DNA, 15 bp, Homo sapiens
cctggcttctggcct

SEQ ID NO: 43513 - DNA, 15 bp, Homo sapiens
tcctggcttctggcc

SEQ ID NO: 43514 - DNA, 15 bp, Homo sapiens
atcctggcttctggc

SEQ ID NO: 43515 - DNA, 15 bp, Homo sapiens
tatcctggcttctgg

SEQ ID NO: 43516 - DNA, 15 bp, Homo sapiens
gtatcctggcttctg

SEQ ID NO: 43517 - DNA, 15 bp, Homo sapiens
tgtatcctggcttct

SEQ ID NO: 43518 - DNA, 15 bp, Homo sapiens
ctgtatcctggcttc

SEQ ID NO: 43519 - DNA, 15 bp, Homo sapiens
actgtatcctggctt

SEQ ID NO: 43520 - DNA, 15 bp, Homo sapiens
tactgtatcctggct

SEQ ID NO: 43521 - DNA, 15 bp, Homo sapiens
ctactgtatcctggc

SEQ ID NO: 43522 - DNA, 15 bp, Homo sapiens
tctactgtatcctgg

SEQ ID NO: 43523 - DNA, 15 bp, Homo sapiens
ctctactgtatcctg

SEQ ID NO: 43524 - DNA, 15 bp, Homo sapiens
gctctactgtatcct

SEQ ID NO: 43525 - DNA, 15 bp, Homo sapiens
agctctactgtatcc

SEQ ID NO: 43526 - DNA, 15 bp, Homo sapiens
gagctctactgtatc

SEQ ID NO: 43527 - DNA, 15 bp, Homo sapiens
tgagctctactgtat

SEQ ID NO: 43528 - DNA, 15 bp, Homo sapiens
gtgagctctactgta

SEQ ID NO: 43529 - DNA, 15 bp, Homo sapiens
ggtgagctctactgt

SEQ ID NO: 43530 - DNA, 15 bp, Homo sapiens
aggtgagctctactg

SEQ ID NO: 43531 - DNA, 15 bp, Homo sapiens
taggtgagctctact

SEQ ID NO: 43532 - DNA, 15 bp, Homo sapiens
ctaggtgagctctac

SEQ ID NO: 43533 - DNA, 15 bp, Homo sapiens
cctaggtgagctcta

SEQ ID NO: 43534 - DNA, 15 bp, Homo sapiens
acctaggtgagctct

SEQ ID NO: 43535 - DNA, 15 bp, Homo sapiens
gacctaggtgagctc

SEQ ID NO: 43536 - DNA, 15 bp, Homo sapiens
agacctaggtgagct

SEQ ID NO: 43537 - DNA, 15 bp, Homo sapiens
tagacctaggtgagc

SEQ ID NO: 43538 - DNA, 15 bp, Homo sapiens
gtagacctaggtgag

SEQ ID NO: 43539 - DNA, 15 bp, Homo sapiens
agtagacctaggtga

SEQ ID NO: 43540 - DNA, 15 bp, Homo sapiens
aagtagacctaggtg

SEQ ID NO: 43541 - DNA, 15 bp, Homo sapiens
gaagtagacctaggt

SEQ ID NO: 43542 - DNA, 15 bp, Homo sapiens
agaagtagacctagg

SEQ ID NO: 43543 - DNA, 15 bp, Homo sapiens
aagaagtagacctag

SEQ ID NO: 43544 - DNA, 15 bp, Homo sapiens
taagaagtagaccta

SEQ ID NO: 43545 - DNA, 15 bp, Homo sapiens
ctaagaagtagacct

SEQ ID NO: 43546 - DNA, 15 bp, Homo sapiens
tctaagaagtagacc

SEQ ID NO: 43547 - DNA, 15 bp, Homo sapiens
ctctaagaagtagac

SEQ ID NO: 43548 - DNA, 15 bp, Homo sapiens
cctctaagaagtaga

SEQ ID NO: 43549 - DNA, 15 bp, Homo sapiens
gcctctaagaagtag

SEQ ID NO: 43550 - DNA, 15 bp, Homo sapiens
agcctctaagaagta

SEQ ID NO: 43551 - DNA, 15 bp, Homo sapiens
gagcctctaagaagt

SEQ ID NO: 43552 - DNA, 15 bp, Homo sapiens
tgagcctctaagaag

SEQ ID NO: 43553 - DNA, 15 bp, Homo sapiens
gtgagcctctaagaa

SEQ ID NO: 43554 - DNA, 15 bp, Homo sapiens
tgtgagcctctaaga

SEQ ID NO: 43555 - DNA, 15 bp, Homo sapiens
ctgtgagcctctaag

SEQ ID NO: 43556 - DNA, 15 bp, Homo sapiens
cctgtgagcctctaa

SEQ ID NO: 43557 - DNA, 15 bp, Homo sapiens
ccctgtgagcctcta

SEQ ID NO: 43558 - DNA, 15 bp, Homo sapiens
gccctgtgagcctct

SEQ ID NO: 43559 - DNA, 15 bp, Homo sapiens
agccctgtgagcctc

SEQ ID NO: 43560 - DNA, 15 bp, Homo sapiens
cagccctgtgagcct

SEQ ID NO: 43561 - DNA, 15 bp, Homo sapiens
tcagccctgtgagcc

SEQ ID NO: 43562 - DNA, 15 bp, Homo sapiens
atcagccctgtgagc

SEQ ID NO: 43563 - DNA, 15 bp, Homo sapiens
tatcagccctgtgag

SEQ ID NO: 43564 - DNA, 15 bp, Homo sapiens
atatcagccctgtga

SEQ ID NO: 43565 - DNA, 15 bp, Homo sapiens
gatatcagccctgtg

SEQ ID NO: 43566 - DNA, 15 bp, Homo sapiens
tgatatcagccctgt

SEQ ID NO: 43567 - DNA, 15 bp, Homo sapiens
ttgatatcagccctg

SEQ ID NO: 43568 - DNA, 15 bp, Homo sapiens
cttgatatcagccct

SEQ ID NO: 43569 - DNA, 15 bp, Homo sapiens
ccttgatatcagccc

SEQ ID NO: 43570 - DNA, 15 bp, Homo sapiens
accttgatatcagcc

SEQ ID NO: 43571 - DNA, 15 bp, Homo sapiens
caccttgatatcagc

SEQ ID NO: 43572 - DNA, 15 bp, Homo sapiens
acaccttgatatcag

SEQ ID NO: 43573 - DNA, 15 bp, Homo sapiens
aacaccttgatatca

SEQ ID NO: 43574 - DNA, 15 bp, Homo sapiens
aaacaccttgatatc

SEQ ID NO: 43575 - DNA, 15 bp, Homo sapiens
caaacaccttgatat

SEQ ID NO: 43576 - DNA, 15 bp, Homo sapiens
acaaacaccttgata

SEQ ID NO: 43577 - DNA, 15 bp, Homo sapiens
cacaaacaccttgat

SEQ ID NO: 43578 - DNA, 15 bp, Homo sapiens
ccacaaacaccttga

SEQ ID NO: 43579 - DNA, 15 bp, Homo sapiens
cccacaaacaccttg

SEQ ID NO: 43580 - DNA, 15 bp, Homo sapiens
ccccacaaacacctt

SEQ ID NO: 43581 - DNA, 15 bp, Homo sapiens
gccccacaaacacct

SEQ ID NO: 43582 - DNA, 15 bp, Homo sapiens
agccccacaaacacc

SEQ ID NO: 43583 - DNA, 15 bp, Homo sapiens
cagccccacaaacac

SEQ ID NO: 43584 - DNA, 15 bp, Homo sapiens
acagccccacaaaca

SEQ ID NO: 43585 - DNA, 15 bp, Homo sapiens
cacagccccacaaac

SEQ ID NO: 43586 - DNA, 15 bp, Homo sapiens
acacagccccacaaa

SEQ ID NO: 43587 - DNA, 15 bp, Homo sapiens
aacacagccccacaa

SEQ ID NO: 43588 - DNA, 15 bp, Homo sapiens
aaacacagccccaca

SEQ ID NO: 43589 - DNA, 15 bp, Homo sapiens
aaaacacagccccac

SEQ ID NO: 43590 - DNA, 15 bp, Homo sapiens
aaaaacacagcccca

SEQ ID NO: 43591 - DNA, 15 bp, Homo sapiens
aaaaaacacagcccc

SEQ ID NO: 43592 - DNA, 15 bp, Homo sapiens
aaaaaaacacagccc

SEQ ID NO: 43593 - DNA, 15 bp, Homo sapiens
caaaaaaacacagcc

SEQ ID NO: 43594 - DNA, 15 bp, Homo sapiens
ccaaaaaaacacagc

SEQ ID NO: 43595 - DNA, 15 bp, Homo sapiens
cccaaaaaaacacag

SEQ ID NO: 43596 - DNA, 15 bp, Homo sapiens
ccccaaaaaaacaca

SEQ ID NO: 43597 - DNA, 15 bp, Homo sapiens
cccccaaaaaaacac

SEQ ID NO: 43598 - DNA, 15 bp, Homo sapiens
ccccccaaaaaaaca

SEQ ID NO: 43599 - DNA, 15 bp, Homo sapiens
cccccccaaaaaaac

SEQ ID NO: 43600 - DNA, 15 bp, Homo sapiens
gcccccccaaaaaaa

SEQ ID NO: 43601 - DNA, 15 bp, Homo sapiens
agcccccccaaaaaa

SEQ ID NO: 43602 - DNA, 15 bp, Homo sapiens
gagcccccccaaaaa

SEQ ID NO: 43603 - DNA, 15 bp, Homo sapiens
agagcccccccaaaa

SEQ ID NO: 43604 - DNA, 15 bp, Homo sapiens
cagagcccccccaaa

SEQ ID NO: 43605 - DNA, 15 bp, Homo sapiens
tcagagcccccccaa

SEQ ID NO: 43606 - DNA, 15 bp, Homo sapiens
ttcagagccccccca

SEQ ID NO: 43607 - DNA, 15 bp, Homo sapiens
cttcagagccccccc

SEQ ID NO: 43608 - DNA, 15 bp, Homo sapiens
tcttcagagcccccc

SEQ ID NO: 43609 - DNA, 15 bp, Homo sapiens
atcttcagagccccc

SEQ ID NO: 43610 - DNA, 15 bp, Homo sapiens
catcttcagagcccc

SEQ ID NO: 43611 - DNA, 15 bp, Homo sapiens
tcatcttcagagccc

SEQ ID NO: 43612 - DNA, 15 bp, Homo sapiens
ttcatcttcagagcc

SEQ ID NO: 43613 - DNA, 15 bp, Homo sapiens
attcatcttcagagc

SEQ ID NO: 43614 - DNA, 15 bp, Homo sapiens
gattcatcttcagag

SEQ ID NO: 43615 - DNA, 15 bp, Homo sapiens
agattcatcttcaga

SEQ ID NO: 43616 - DNA, 15 bp, Homo sapiens
cagattcatcttcag

SEQ ID NO: 43617 - DNA, 15 bp, Homo sapiens
gcagattcatcttca

SEQ ID NO: 43618 - DNA, 15 bp, Homo sapiens
agcagattcatcttc

SEQ ID NO: 43619 - DNA, 15 bp, Homo sapiens
aagcagattcatctt

SEQ ID NO: 43620 - DNA, 15 bp, Homo sapiens
aaagcagattcatct

SEQ ID NO: 43621 - DNA, 15 bp, Homo sapiens
caaagcagattcatc

SEQ ID NO: 43622 - DNA, 15 bp, Homo sapiens
ccaaagcagattcat

SEQ ID NO: 43623 - DNA, 15 bp, Homo sapiens
tccaaagcagattca

SEQ ID NO: 43624 - DNA, 15 bp, Homo sapiens
ctccaaagcagattc

SEQ ID NO: 43625 - DNA, 15 bp, Homo sapiens
gctccaaagcagatt

SEQ ID NO: 43626 - DNA, 15 bp, Homo sapiens
agctccaaagcagat

SEQ ID NO: 43627 - DNA, 15 bp, Homo sapiens
gagctccaaagcaga

SEQ ID NO: 43628 - DNA, 15 bp, Homo sapiens
tgagctccaaagcag

SEQ ID NO: 43629 - DNA, 15 bp, Homo sapiens
atgagctccaaagca

SEQ ID NO: 43630 - DNA, 15 bp, Homo sapiens
gatgagctccaaagc

SEQ ID NO: 43631 - DNA, 15 bp, Homo sapiens
ggatgagctccaaag

SEQ ID NO: 43632 - DNA, 15 bp, Homo sapiens
tggatgagctccaaa

SEQ ID NO: 43633 - DNA, 15 bp, Homo sapiens
ctggatgagctccaa

SEQ ID NO: 43634 - DNA, 15 bp, Homo sapiens
cctggatgagctcca

SEQ ID NO: 43635 - DNA, 15 bp, Homo sapiens
tcctggatgagctcc

SEQ ID NO: 43636 - DNA, 15 bp, Homo sapiens
atcctggatgagctc

SEQ ID NO: 43637 - DNA, 15 bp, Homo sapiens
tatcctggatgagct

SEQ ID NO: 43638 - DNA, 15 bp, Homo sapiens
atatcctggatgagc

SEQ ID NO: 43639 - DNA, 15 bp, Homo sapiens
gatatcctggatgag

SEQ ID NO: 43640 - DNA, 15 bp, Homo sapiens
tgatatcctggatga

SEQ ID NO: 43641 - DNA, 15 bp, Homo sapiens
ctgatatcctggatg

SEQ ID NO: 43642 - DNA, 15 bp, Homo sapiens
tctgatatcctggat

SEQ ID NO: 43643 - DNA, 15 bp, Homo sapiens
atctgatatcctgga

SEQ ID NO: 43644 - DNA, 15 bp, Homo sapiens
catctgatatcctgg

SEQ ID NO: 43645 - DNA, 15 bp, Homo sapiens
tcatctgatatcctg

SEQ ID NO: 43646 - DNA, 15 bp, Homo sapiens
ttcatctgatatcct

SEQ ID NO: 43647 - DNA, 15 bp, Homo sapiens
attcatctgatatcc

SEQ ID NO: 43648 - DNA, 15 bp, Homo sapiens
aattcatctgatatc

SEQ ID NO: 43649 - DNA, 15 bp, Homo sapiens
gaattcatctgatat

SEQ ID NO: 43650 - DNA, 15 bp, Homo sapiens
tgaattcatctgata

SEQ ID NO: 43651 - DNA, 15 bp, Homo sapiens
ctgaattcatctgat

SEQ ID NO: 43652 - DNA, 15 bp, Homo sapiens
actgaattcatctga

SEQ ID NO: 43653 - DNA, 15 bp, Homo sapiens
gactgaattcatctg

SEQ ID NO: 43654 - DNA, 15 bp, Homo sapiens
ggactgaattcatct

SEQ ID NO: 43655 - DNA, 15 bp, Homo sapiens
gggactgaattcatc

SEQ ID NO: 43656 - DNA, 15 bp, Homo sapiens
cgggactgaattcat

SEQ ID NO: 43657 - DNA, 15 bp, Homo sapiens
acgggactgaattca

SEQ ID NO: 43658 - DNA, 15 bp, Homo sapiens
cacgggactgaattc

SEQ ID NO: 43659 - DNA, 15 bp, Homo sapiens
gcacgggactgaatt

SEQ ID NO: 43660 - DNA, 15 bp, Homo sapiens
tgcacgggactgaat

SEQ ID NO: 43661 - DNA, 15 bp, Homo sapiens
ctgcacgggactgaa

SEQ ID NO: 43662 - DNA, 15 bp, Homo sapiens
actgcacgggactga

SEQ ID NO: 43663 - DNA, 15 bp, Homo sapiens
aactgcacgggactg

SEQ ID NO: 43664 - DNA, 15 bp, Homo sapiens
caactgcacgggact

SEQ ID NO: 43665 - DNA, 15 bp, Homo sapiens
acaactgcacgggac

SEQ ID NO: 43666 - DNA, 15 bp, Homo sapiens
tacaactgcacggga

SEQ ID NO: 43667 - DNA, 15 bp, Homo sapiens
ctacaactgcacggg

SEQ ID NO: 43668 - DNA, 15 bp, Homo sapiens
cctacaactgcacgg

SEQ ID NO: 43669 - DNA, 15 bp, Homo sapiens
tcctacaactgcacg

SEQ ID NO: 43670 - DNA, 15 bp, Homo sapiens
gtcctacaactgcac

SEQ ID NO: 43671 - DNA, 15 bp, Homo sapiens
agtcctacaactgca

SEQ ID NO: 43672 - DNA, 15 bp, Homo sapiens
cagtcctacaactgc

SEQ ID NO: 43673 - DNA, 15 bp, Homo sapiens
tcagtcctacaactg

SEQ ID NO: 43674 - DNA, 15 bp, Homo sapiens
ttcagtcctacaact

SEQ ID NO: 43675 - DNA, 15 bp, Homo sapiens
cttcagtcctacaac

SEQ ID NO: 43676 - DNA, 15 bp, Homo sapiens
acttcagtcctacaa

SEQ ID NO: 43677 - DNA, 15 bp, Homo sapiens
gacttcagtcctaca

SEQ ID NO: 43678 - DNA, 15 bp, Homo sapiens
ggacttcagtcctac

SEQ ID NO: 43679 - DNA, 15 bp, Homo sapiens
tggacttcagtccta

SEQ ID NO: 43680 - DNA, 15 bp, Homo sapiens
atggacttcagtcct

SEQ ID NO: 43681 - DNA, 15 bp, Homo sapiens
aatggacttcagtcc

SEQ ID NO: 43682 - DNA, 15 bp, Homo sapiens
aaatggacttcagtc

SEQ ID NO: 43683 - DNA, 15 bp, Homo sapiens
gaaatggacttcagt

SEQ ID NO: 43684 - DNA, 15 bp, Homo sapiens
ggaaatggacttcag

SEQ ID NO: 43685 - DNA, 15 bp, Homo sapiens
aggaaatggacttca

SEQ ID NO: 43686 - DNA, 15 bp, Homo sapiens
aaggaaatggacttc

SEQ ID NO: 43687 - DNA, 15 bp, Homo sapiens
caaggaaatggactt

SEQ ID NO: 43688 - DNA, 15 bp, Homo sapiens
gcaaggaaatggact

SEQ ID NO: 43689 - DNA, 15 bp, Homo sapiens
agcaaggaaatggac

SEQ ID NO: 43690 - DNA, 15 bp, Homo sapiens
cagcaaggaaatgga

SEQ ID NO: 43691 - DNA, 15 bp, Homo sapiens
ccagcaaggaaatgg

SEQ ID NO: 43692 - DNA, 15 bp, Homo sapiens
gccagcaaggaaatg

SEQ ID NO: 43693 - DNA, 15 bp, Homo sapiens
agccagcaaggaaat

SEQ ID NO: 43694 - DNA, 15 bp, Homo sapiens
cagccagcaaggaaa

SEQ ID NO: 43695 - DNA, 15 bp, Homo sapiens
acagccagcaaggaa

SEQ ID NO: 43696 - DNA, 15 bp, Homo sapiens
gacagccagcaagga

SEQ ID NO: 43697 - DNA, 15 bp, Homo sapiens
tgacagccagcaagg

SEQ ID NO: 43698 - DNA, 15 bp, Homo sapiens
ctgacagccagcaag

SEQ ID NO: 43699 - DNA, 15 bp, Homo sapiens
gctgacagccagcaa

SEQ ID NO: 43700 - DNA, 15 bp, Homo sapiens
tgctgacagccagca

SEQ ID NO: 43701 - DNA, 15 bp, Homo sapiens
ctgctgacagccagc

SEQ ID NO: 43702 - DNA, 15 bp, Homo sapiens
cctgctgacagccag

SEQ ID NO: 43703 - DNA, 15 bp, Homo sapiens
ccctgctgacagcca

SEQ ID NO: 43704 - DNA, 15 bp, Homo sapiens
cccctgctgacagcc

SEQ ID NO: 43705 - DNA, 15 bp, Homo sapiens
gcccctgctgacagc

SEQ ID NO: 43706 - DNA, 15 bp, Homo sapiens
agcccctgctgacag

SEQ ID NO: 43707 - DNA, 15 bp, Homo sapiens
cagcccctgctgaca

SEQ ID NO: 43708 - DNA, 15 bp, Homo sapiens
ccagcccctgctgac

SEQ ID NO: 43709 - DNA, 15 bp, Homo sapiens
accagcccctgctga

SEQ ID NO: 43710 - DNA, 15 bp, Homo sapiens
aaccagcccctgctg

SEQ ID NO: 43711 - DNA, 15 bp, Homo sapiens
aaaccagcccctgct

SEQ ID NO: 43712 - DNA, 15 bp, Homo sapiens
aaaaccagcccctgc

SEQ ID NO: 43713 - DNA, 15 bp, Homo sapiens
aaaaaccagcccctg

SEQ ID NO: 43714 - DNA, 15 bp, Homo sapiens
caaaaaccagcccct

SEQ ID NO: 43715 - DNA, 15 bp, Homo sapiens
gcaaaaaccagcccc

SEQ ID NO: 43716 - DNA, 15 bp, Homo sapiens
agcaaaaaccagccc

SEQ ID NO: 43717 - DNA, 15 bp, Homo sapiens
gagcaaaaaccagcc

SEQ ID NO: 43718 - DNA, 15 bp, Homo sapiens
ggagcaaaaaccagc

SEQ ID NO: 43719 - DNA, 15 bp, Homo sapiens
aggagcaaaaaccag

SEQ ID NO: 43720 - DNA, 15 bp, Homo sapiens
taggagcaaaaacca

SEQ ID NO: 43721 - DNA, 15 bp, Homo sapiens
ttaggagcaaaaacc

SEQ ID NO: 43722 - DNA, 15 bp, Homo sapiens
tttaggagcaaaaac

SEQ ID NO: 43723 - DNA, 15 bp, Homo sapiens
ctttaggagcaaaaa

SEQ ID NO: 43724 - DNA, 15 bp, Homo sapiens
cctttaggagcaaaa

SEQ ID NO: 43725 - DNA, 15 bp, Homo sapiens
acctttaggagcaaa

SEQ ID NO: 43726 - DNA, 15 bp, Homo sapiens
aacctttaggagcaa

SEQ ID NO: 43727 - DNA, 15 bp, Homo sapiens
caacctttaggagca

SEQ ID NO: 43728 - DNA, 15 bp, Homo sapiens
gcaacctttaggagc

SEQ ID NO: 43729 - DNA, 15 bp, Homo sapiens
ggcaacctttaggag

SEQ ID NO: 43730 - DNA, 15 bp, Homo sapiens
tggcaacctttagga

SEQ ID NO: 43731 - DNA, 15 bp, Homo sapiens
atggcaacctttagg

SEQ ID NO: 43732 - DNA, 15 bp, Homo sapiens
gatggcaacctttag

SEQ ID NO: 43733 - DNA, 15 bp, Homo sapiens
tgatggcaaccttta

SEQ ID NO: 43734 - DNA, 15 bp, Homo sapiens
atgatggcaaccttt

SEQ ID NO: 43735 - DNA, 15 bp, Homo sapiens
aatgatggcaacctt

SEQ ID NO: 43736 - DNA, 15 bp, Homo sapiens
gaatgatggcaacct

SEQ ID NO: 43737 - DNA, 15 bp, Homo sapiens
ggaatgatggcaacc

SEQ ID NO: 43738 - DNA, 15 bp, Homo sapiens
aggaatgatggcaac

SEQ ID NO: 43739 - DNA, 15 bp, Homo sapiens
aaggaatgatggcaa

SEQ ID NO: 43740 - DNA, 15 bp, Homo sapiens
gaaggaatgatggca

SEQ ID NO: 43741 - DNA, 15 bp, Homo sapiens
agaaggaatgatggc

SEQ ID NO: 43742 - DNA, 15 bp, Homo sapiens
aagaaggaatgatgg

SEQ ID NO: 43743 - DNA, 15 bp, Homo sapiens
taagaaggaatgatg

SEQ ID NO: 43744 - DNA, 15 bp, Homo sapiens
ataagaaggaatgat

SEQ ID NO: 43745 - DNA, 15 bp, Homo sapiens
cataagaaggaatga

SEQ ID NO: 43746 - DNA, 15 bp, Homo sapiens
gcataagaaggaatg

SEQ ID NO: 43747 - DNA, 15 bp, Homo sapiens
agcataagaaggaat

SEQ ID NO: 43748 - DNA, 15 bp, Homo sapiens
aagcataagaaggaa

SEQ ID NO: 43749 - DNA, 15 bp, Homo sapiens
aaagcataagaagga

SEQ ID NO: 43750 - DNA, 15 bp, Homo sapiens
aaaagcataagaagg

SEQ ID NO: 43751 - DNA, 15 bp, Homo sapiens
gaaaagcataagaag

SEQ ID NO: 43752 - DNA, 15 bp, Homo sapiens
tgaaaagcataagaa

SEQ ID NO: 43753 - DNA, 15 bp, Homo sapiens
atgaaaagcataaga

SEQ ID NO: 43754 - DNA, 15 bp, Homo sapiens
catgaaaagcataag

SEQ ID NO: 43755 - DNA, 15 bp, Homo sapiens
acatgaaaagcataa

SEQ ID NO: 43756 - DNA, 15 bp, Homo sapiens
cacatgaaaagcata

SEQ ID NO: 43757 - DNA, 15 bp, Homo sapiens
tcacatgaaaagcat

SEQ ID NO: 43758 - DNA, 15 bp, Homo sapiens
gtcacatgaaaagca

SEQ ID NO: 43759 - DNA, 15 bp, Homo sapiens
agtcacatgaaaagc

SEQ ID NO: 43760 - DNA, 15 bp, Homo sapiens
gagtcacatgaaaag

SEQ ID NO: 43761 - DNA, 15 bp, Homo sapiens
ggagtcacatgaaaa

SEQ ID NO: 43762 - DNA, 15 bp, Homo sapiens
aggagtcacatgaaa

SEQ ID NO: 43763 - DNA, 15 bp, Homo sapiens
gaggagtcacatgaa

SEQ ID NO: 43764 - DNA, 15 bp, Homo sapiens
agaggagtcacatga

SEQ ID NO: 43765 - DNA, 15 bp, Homo sapiens
gagaggagtcacatg

SEQ ID NO: 43766 - DNA, 15 bp, Homo sapiens
ggagaggagtcacat

SEQ ID NO: 43767 - DNA, 15 bp, Homo sapiens
gggagaggagtcaca

SEQ ID NO: 43768 - DNA, 15 bp, Homo sapiens
tgggagaggagtcac

SEQ ID NO: 43769 - DNA, 15 bp, Homo sapiens
gtgggagaggagtca

SEQ ID NO: 43770 - DNA, 15 bp, Homo sapiens
tgtgggagaggagtc

SEQ ID NO: 43771 - DNA, 15 bp, Homo sapiens
ttgtgggagaggagt

SEQ ID NO: 43772 - DNA, 15 bp, Homo sapiens
cttgtgggagaggag

SEQ ID NO: 43773 - DNA, 15 bp, Homo sapiens
acttgtgggagagga

SEQ ID NO: 43774 - DNA, 15 bp, Homo sapiens
cacttgtgggagagg

SEQ ID NO: 43775 - DNA, 15 bp, Homo sapiens
ccacttgtgggagag

SEQ ID NO: 43776 - DNA, 15 bp, Homo sapiens
cccacttgtgggaga

SEQ ID NO: 43777 - DNA, 15 bp, Homo sapiens
acccacttgtgggag

SEQ ID NO: 43778 - DNA, 15 bp, Homo sapiens
aacccacttgtggga

SEQ ID NO: 43779 - DNA, 15 bp, Homo sapiens
caacccacttgtggg

SEQ ID NO: 43780 - DNA, 15 bp, Homo sapiens
tcaacccacttgtgg

SEQ ID NO: 43781 - DNA, 15 bp, Homo sapiens
ctcaacccacttgtg

SEQ ID NO: 43782 - DNA, 15 bp, Homo sapiens
actcaacccacttgt

SEQ ID NO: 43783 - DNA, 15 bp, Homo sapiens
tactcaacccacttg

SEQ ID NO: 43784 - DNA, 15 bp, Homo sapiens
atactcaacccactt

SEQ ID NO: 43785 - DNA, 15 bp, Homo sapiens
gatactcaacccact

SEQ ID NO: 43786 - DNA, 15 bp, Homo sapiens
agatactcaacccac

SEQ ID NO: 43787 - DNA, 15 bp, Homo sapiens
gagatactcaaccca

SEQ ID NO: 43788 - DNA, 15 bp, Homo sapiens
agagatactcaaccc

SEQ ID NO: 43789 - DNA, 15 bp, Homo sapiens
gagagatactcaacc

SEQ ID NO: 43790 - DNA, 15 bp, Homo sapiens
tgagagatactcaac

SEQ ID NO: 43791 - DNA, 15 bp, Homo sapiens
gtgagagatactcaa

SEQ ID NO: 43792 - DNA, 15 bp, Homo sapiens
tgtgagagatactca

SEQ ID NO: 43793 - DNA, 15 bp, Homo sapiens
gtgtgagagatactc

SEQ ID NO: 43794 - DNA, 15 bp, Homo sapiens
agtgtgagagatact

SEQ ID NO: 43795 - DNA, 15 bp, Homo sapiens
aagtgtgagagatac

SEQ ID NO: 43796 - DNA, 15 bp, Homo sapiens
aaagtgtgagagata

SEQ ID NO: 43797 - DNA, 15 bp, Homo sapiens
taaagtgtgagagat

SEQ ID NO: 43798 - DNA, 15 bp, Homo sapiens
ttaaagtgtgagaga

SEQ ID NO: 43799 - DNA, 15 bp, Homo sapiens
tttaaagtgtgagag

SEQ ID NO: 43800 - DNA, 15 bp, Homo sapiens
gtttaaagtgtgaga

SEQ ID NO: 43801 - DNA, 15 bp, Homo sapiens
ggtttaaagtgtgag

SEQ ID NO: 43802 - DNA, 15 bp, Homo sapiens
aggtttaaagtgtga

SEQ ID NO: 43803 - DNA, 15 bp, Homo sapiens
gaggtttaaagtgtg

SEQ ID NO: 43804 - DNA, 15 bp, Homo sapiens
agaggtttaaagtgt

SEQ ID NO: 43805 - DNA, 15 bp, Homo sapiens
cagaggtttaaagtg

SEQ ID NO: 43806 - DNA, 15 bp, Homo sapiens
tcagaggtttaaagt

SEQ ID NO: 43807 - DNA, 15 bp, Homo sapiens
gtcagaggtttaaag

SEQ ID NO: 43808 - DNA, 15 bp, Homo sapiens
cgtcagaggtttaaa

SEQ ID NO: 43809 - DNA, 15 bp, Homo sapiens
gcgtcagaggtttaa

SEQ ID NO: 43810 - DNA, 15 bp, Homo sapiens
ggcgtcagaggttta

SEQ ID NO: 43811 - DNA, 15 bp, Homo sapiens
aggcgtcagaggttt

SEQ ID NO: 43812 - DNA, 15 bp, Homo sapiens
gaggcgtcagaggtt

SEQ ID NO: 43813 - DNA, 15 bp, Homo sapiens
ggaggcgtcagaggt

SEQ ID NO: 43814 - DNA, 15 bp, Homo sapiens
aggaggcgtcagagg

SEQ ID NO: 43815 - DNA, 15 bp, Homo sapiens
caggaggcgtcagag

SEQ ID NO: 43816 - DNA, 15 bp, Homo sapiens
acaggaggcgtcaga

SEQ ID NO: 43817 - DNA, 15 bp, Homo sapiens
gacaggaggcgtcag

SEQ ID NO: 43818 - DNA, 15 bp, Homo sapiens
tgacaggaggcgtca

SEQ ID NO: 43819 - DNA, 15 bp, Homo sapiens
gtgacaggaggcgtc

SEQ ID NO: 43820 - DNA, 15 bp, Homo sapiens
tgtgacaggaggcgt

SEQ ID NO: 43821 - DNA, 15 bp, Homo sapiens
atgtgacaggaggcg

SEQ ID NO: 43822 - DNA, 15 bp, Homo sapiens
gatgtgacaggaggc

SEQ ID NO: 43823 - DNA, 15 bp, Homo sapiens
agatgtgacaggagg

SEQ ID NO: 43824 - DNA, 15 bp, Homo sapiens
cagatgtgacaggag

SEQ ID NO: 43825 - DNA, 15 bp, Homo sapiens
acagatgtgacagga

SEQ ID NO: 43826 - DNA, 15 bp, Homo sapiens
gacagatgtgacagg

SEQ ID NO: 43827 - DNA, 15 bp, Homo sapiens
agacagatgtgacag

SEQ ID NO: 43828 - DNA, 15 bp, Homo sapiens
gagacagatgtgaca

SEQ ID NO: 43829 - DNA, 15 bp, Homo sapiens
ggagacagatgtgac

SEQ ID NO: 43830 - DNA, 15 bp, Homo sapiens
tggagacagatgtga

SEQ ID NO: 43831 - DNA, 15 bp, Homo sapiens
ctggagacagatgtg

SEQ ID NO: 43832 - DNA, 15 bp, Homo sapiens
actggagacagatgt

SEQ ID NO: 43833 - DNA, 15 bp, Homo sapiens
gactggagacagatg

SEQ ID NO: 43834 - DNA, 15 bp, Homo sapiens
tgactggagacagat

SEQ ID NO: 43835 - DNA, 15 bp, Homo sapiens
ctgactggagacaga

SEQ ID NO: 43836 - DNA, 15 bp, Homo sapiens
tctgactggagacag

SEQ ID NO: 43837 - DNA, 15 bp, Homo sapiens
ctctgactggagaca

SEQ ID NO: 43838 - DNA, 15 bp, Homo sapiens
tctctgactggagac

SEQ ID NO: 43839 - DNA, 15 bp, Homo sapiens
ttctctgactggaga

SEQ ID NO: 43840 - DNA, 15 bp, Homo sapiens
tttctctgactggag

SEQ ID NO: 43841 - DNA, 15 bp, Homo sapiens
ctttctctgactgga

SEQ ID NO: 43842 - DNA, 15 bp, Homo sapiens
actttctctgactgg

SEQ ID NO: 43843 - DNA, 15 bp, Homo sapiens
aactttctctgactg

SEQ ID NO: 43844 - DNA, 15 bp, Homo sapiens
gaactttctctgact

SEQ ID NO: 43845 - DNA, 15 bp, Homo sapiens
agaactttctctgac

SEQ ID NO: 43846 - DNA, 15 bp, Homo sapiens
aagaactttctctga

SEQ ID NO: 43847 - DNA, 15 bp, Homo sapiens
aaagaactttctctg

SEQ ID NO: 43848 - DNA, 15 bp, Homo sapiens
taaagaactttctct

SEQ ID NO: 43849 - DNA, 15 bp, Homo sapiens
gtaaagaactttctc

SEQ ID NO: 43850 - DNA, 15 bp, Homo sapiens
agtaaagaactttct

SEQ ID NO: 43851 - DNA, 15 bp, Homo sapiens
aagtaaagaactttc

SEQ ID NO: 43852 - DNA, 15 bp, Homo sapiens
aaagtaaagaacttt

SEQ ID NO: 43853 - DNA, 15 bp, Homo sapiens
aaaagtaaagaactt

SEQ ID NO: 43854 - DNA, 15 bp, Homo sapiens
taaaagtaaagaact

SEQ ID NO: 43855 - DNA, 15 bp, Homo sapiens
ttaaaagtaaagaac

SEQ ID NO: 43856 - DNA, 15 bp, Homo sapiens
cttaaaagtaaagaa

SEQ ID NO: 43857 - DNA, 15 bp, Homo sapiens
ccttaaaagtaaaga

SEQ ID NO: 43858 - DNA, 15 bp, Homo sapiens
cccttaaaagtaaag

SEQ ID NO: 43859 - DNA, 15 bp, Homo sapiens
gcccttaaaagtaaa

SEQ ID NO: 43860 - DNA, 15 bp, Homo sapiens
agcccttaaaagtaa

SEQ ID NO: 43861 - DNA, 15 bp, Homo sapiens
gagcccttaaaagta

SEQ ID NO: 43862 - DNA, 15 bp, Homo sapiens
tgagcccttaaaagt

SEQ ID NO: 43863 - DNA, 15 bp, Homo sapiens
ctgagcccttaaaag

SEQ ID NO: 43864 - DNA, 15 bp, Homo sapiens
cctgagcccttaaaa

SEQ ID NO: 43865 - DNA, 15 bp, Homo sapiens
acctgagcccttaaa

SEQ ID NO: 43866 - DNA, 15 bp, Homo sapiens
cacctgagcccttaa

SEQ ID NO: 43867 - DNA, 15 bp, Homo sapiens
acacctgagccctta

SEQ ID NO: 43868 - DNA, 15 bp, Homo sapiens
aacacctgagccctt

SEQ ID NO: 43869 - DNA, 15 bp, Homo sapiens
aaacacctgagccct

SEQ ID NO: 43870 - DNA, 15 bp, Homo sapiens
taaacacctgagccc

SEQ ID NO: 43871 - DNA, 15 bp, Homo sapiens
ctaaacacctgagcc

SEQ ID NO: 43872 - DNA, 15 bp, Homo sapiens
actaaacacctgagc

SEQ ID NO: 43873 - DNA, 15 bp, Homo sapiens
aactaaacacctgag

SEQ ID NO: 43874 - DNA, 15 bp, Homo sapiens
aaactaaacacctga

SEQ ID NO: 43875 - DNA, 15 bp, Homo sapiens
caaactaaacacctg

SEQ ID NO: 43876 - DNA, 15 bp, Homo sapiens
ccaaactaaacacct

SEQ ID NO: 43877 - DNA, 15 bp, Homo sapiens
cccaaactaaacacc

SEQ ID NO: 43878 - DNA, 15 bp, Homo sapiens
gcccaaactaaacac

SEQ ID NO: 43879 - DNA, 15 bp, Homo sapiens
ggcccaaactaaaca

SEQ ID NO: 43880 - DNA, 15 bp, Homo sapiens
gggcccaaactaaac

SEQ ID NO: 43881 - DNA, 15 bp, Homo sapiens
tgggcccaaactaaa

SEQ ID NO: 43882 - DNA, 15 bp, Homo sapiens
atgggcccaaactaa

SEQ ID NO: 43883 - DNA, 15 bp, Homo sapiens
aatgggcccaaacta

SEQ ID NO: 43884 - DNA, 15 bp, Homo sapiens
gaatgggcccaaact

SEQ ID NO: 43885 - DNA, 15 bp, Homo sapiens
tgaatgggcccaaac

SEQ ID NO: 43886 - DNA, 15 bp, Homo sapiens
gtgaatgggcccaaa

SEQ ID NO: 43887 - DNA, 15 bp, Homo sapiens
tgtgaatgggcccaa

SEQ ID NO: 43888 - DNA, 15 bp, Homo sapiens
atgtgaatgggccca

SEQ ID NO: 43889 - DNA, 15 bp, Homo sapiens
tatgtgaatgggccc

SEQ ID NO: 43890 - DNA, 15 bp, Homo sapiens
ttatgtgaatgggcc

SEQ ID NO: 43891 - DNA, 15 bp, Homo sapiens
attatgtgaatgggc

SEQ ID NO: 43892 - DNA, 15 bp, Homo sapiens
gattatgtgaatggg

SEQ ID NO: 43893 - DNA, 15 bp, Homo sapiens
ggattatgtgaatgg

SEQ ID NO: 43894 - DNA, 15 bp, Homo sapiens
tggattatgtgaatg

SEQ ID NO: 43895 - DNA, 15 bp, Homo sapiens
ctggattatgtgaat

SEQ ID NO: 43896 - DNA, 15 bp, Homo sapiens
cctggattatgtgaa

SEQ ID NO: 43897 - DNA, 15 bp, Homo sapiens
tcctggattatgtga

SEQ ID NO: 43898 - DNA, 15 bp, Homo sapiens
atcctggattatgtg

SEQ ID NO: 43899 - DNA, 15 bp, Homo sapiens
tatcctggattatgt

SEQ ID NO: 43900 - DNA, 15 bp, Homo sapiens
ttatcctggattatg

SEQ ID NO: 43901 - DNA, 15 bp, Homo sapiens
attatcctggattat

SEQ ID NO: 43902 - DNA, 15 bp, Homo sapiens
gattatcctggatta

SEQ ID NO: 43903 - DNA, 15 bp, Homo sapiens
agattatcctggatt

SEQ ID NO: 43904 - DNA, 15 bp, Homo sapiens
gagattatcctggat

SEQ ID NO: 43905 - DNA, 15 bp, Homo sapiens
ggagattatcctgga

SEQ ID NO: 43906 - DNA, 15 bp, Homo sapiens
aggagattatcctgg

SEQ ID NO: 43907 - DNA, 15 bp, Homo sapiens
aaggagattatcctg

SEQ ID NO: 43908 - DNA, 15 bp, Homo sapiens
taaggagattatcct

SEQ ID NO: 43909 - DNA, 15 bp, Homo sapiens
ataaggagattatcc

SEQ ID NO: 43910 - DNA, 15 bp, Homo sapiens
aataaggagattatc

SEQ ID NO: 43911 - DNA, 15 bp, Homo sapiens
aaataaggagattat

SEQ ID NO: 43912 - DNA, 15 bp, Homo sapiens
aaaataaggagatta

SEQ ID NO: 43913 - DNA, 15 bp, Homo sapiens
caaaataaggagatt

SEQ ID NO: 43914 - DNA, 15 bp, Homo sapiens
tcaaaataaggagat

SEQ ID NO: 43915 - DNA, 15 bp, Homo sapiens
ctcaaaataaggaga

SEQ ID NO: 43916 - DNA, 15 bp, Homo sapiens
cctcaaaataaggag

SEQ ID NO: 43917 - DNA, 15 bp, Homo sapiens
acctcaaaataagga

SEQ ID NO: 43918 - DNA, 15 bp, Homo sapiens
aacctcaaaataagg

SEQ ID NO: 43919 - DNA, 15 bp, Homo sapiens
gaacctcaaaataag

SEQ ID NO: 43920 - DNA, 15 bp, Homo sapiens
tgaacctcaaaataa

SEQ ID NO: 43921 - DNA, 15 bp, Homo sapiens
atgaacctcaaaata

SEQ ID NO: 43922 - DNA, 15 bp, Homo sapiens
tatgaacctcaaaat

SEQ ID NO: 43923 - DNA, 15 bp, Homo sapiens
ttatgaacctcaaaa

SEQ ID NO: 43924 - DNA, 15 bp, Homo sapiens
gttatgaacctcaaa

SEQ ID NO: 43925 - DNA, 15 bp, Homo sapiens
agttatgaacctcaa

SEQ ID NO: 43926 - DNA, 15 bp, Homo sapiens
aagttatgaacctca

SEQ ID NO: 43927 - DNA, 15 bp, Homo sapiens
aaagttatgaacctc

SEQ ID NO: 43928 - DNA, 15 bp, Homo sapiens
taaagttatgaacct

SEQ ID NO: 43929 - DNA, 15 bp, Homo sapiens
ttaaagttatgaacc

SEQ ID NO: 43930 - DNA, 15 bp, Homo sapiens
attaaagttatgaac

SEQ ID NO: 43931 - DNA, 15 bp, Homo sapiens
aattaaagttatgaa

SEQ ID NO: 43932 - DNA, 15 bp, Homo sapiens
taattaaagttatga

SEQ ID NO: 43933 - DNA, 15 bp, Homo sapiens
gtaattaaagttatg

SEQ ID NO: 43934 - DNA, 15 bp, Homo sapiens
tgtaattaaagttat

SEQ ID NO: 43935 - DNA, 15 bp, Homo sapiens
atgtaattaaagtta

SEQ ID NO: 43936 - DNA, 15 bp, Homo sapiens
gatgtaattaaagtt

SEQ ID NO: 43937 - DNA, 15 bp, Homo sapiens
agatgtaattaaagt

SEQ ID NO: 43938 - DNA, 15 bp, Homo sapiens
tagatgtaattaaag

SEQ ID NO: 43939 - DNA, 15 bp, Homo sapiens
gtagatgtaattaaa

SEQ ID NO: 43940 - DNA, 15 bp, Homo sapiens
tgtagatgtaattaa

SEQ ID NO: 43941 - DNA, 15 bp, Homo sapiens
gtgtagatgtaatta

SEQ ID NO: 43942 - DNA, 15 bp, Homo sapiens
tgtgtagatgtaatt

SEQ ID NO: 43943 - DNA, 15 bp, Homo sapiens
ctgtgtagatgtaat

SEQ ID NO: 43944 - DNA, 15 bp, Homo sapiens
actgtgtagatgtaa

SEQ ID NO: 43945 - DNA, 15 bp, Homo sapiens
cactgtgtagatgta

SEQ ID NO: 43946 - DNA, 15 bp, Homo sapiens
gcactgtgtagatgt

SEQ ID NO: 43947 - DNA, 15 bp, Homo sapiens
tgcactgtgtagatg

SEQ ID NO: 43948 - DNA, 15 bp, Homo sapiens
atgcactgtgtagat

SEQ ID NO: 43949 - DNA, 15 bp, Homo sapiens
aatgcactgtgtaga

SEQ ID NO: 43950 - DNA, 15 bp, Homo sapiens
aaatgcactgtgtag

SEQ ID NO: 43951 - DNA, 15 bp, Homo sapiens
caaatgcactgtgta

SEQ ID NO: 43952 - DNA, 15 bp, Homo sapiens
gcaaatgcactgtgt

SEQ ID NO: 43953 - DNA, 15 bp, Homo sapiens
agcaaatgcactgtg

SEQ ID NO: 43954 - DNA, 15 bp, Homo sapiens
tagcaaatgcactgt

SEQ ID NO: 43955 - DNA, 15 bp, Homo sapiens
atagcaaatgcactg

SEQ ID NO: 43956 - DNA, 15 bp, Homo sapiens
catagcaaatgcact

SEQ ID NO: 43957 - DNA, 15 bp, Homo sapiens
tcatagcaaatgcac

SEQ ID NO: 43958 - DNA, 15 bp, Homo sapiens
ttcatagcaaatgca

SEQ ID NO: 43959 - DNA, 15 bp, Homo sapiens
tttcatagcaaatgc

SEQ ID NO: 43960 - DNA, 15 bp, Homo sapiens
atttcatagcaaatg

SEQ ID NO: 43961 - DNA, 15 bp, Homo sapiens
catttcatagcaaat

SEQ ID NO: 43962 - DNA, 15 bp, Homo sapiens
acatttcatagcaaa

SEQ ID NO: 43963 - DNA, 15 bp, Homo sapiens
cacatttcatagcaa

SEQ ID NO: 43964 - DNA, 15 bp, Homo sapiens
gcacatttcatagca

SEQ ID NO: 43965 - DNA, 15 bp, Homo sapiens
tgcacatttcatagc

SEQ ID NO: 43966 - DNA, 15 bp, Homo sapiens
atgcacatttcatag

SEQ ID NO: 43967 - DNA, 15 bp, Homo sapiens
tatgcacatttcata

SEQ ID NO: 43968 - DNA, 15 bp, Homo sapiens
atatgcacatttcat

SEQ ID NO: 43969 - DNA, 15 bp, Homo sapiens
aatatgcacatttca

SEQ ID NO: 43970 - DNA, 15 bp, Homo sapiens
gaatatgcacatttc

SEQ ID NO: 43971 - DNA, 15 bp, Homo sapiens
tgaatatgcacattt

SEQ ID NO: 43972 - DNA, 15 bp, Homo sapiens
gtgaatatgcacatt

SEQ ID NO: 43973 - DNA, 15 bp, Homo sapiens
tgtgaatatgcacat

SEQ ID NO: 43974 - DNA, 15 bp, Homo sapiens
ctgtgaatatgcaca

SEQ ID NO: 43975 - DNA, 15 bp, Homo sapiens
tctgtgaatatgcac

SEQ ID NO: 43976 - DNA, 15 bp, Homo sapiens
gtctgtgaatatgca

SEQ ID NO: 43977 - DNA, 15 bp, Homo sapiens
agtctgtgaatatgc

SEQ ID NO: 43978 - DNA, 15 bp, Homo sapiens
gagtctgtgaatatg

SEQ ID NO: 43979 - DNA, 15 bp, Homo sapiens
ggagtctgtgaatat

SEQ ID NO: 43980 - DNA, 15 bp, Homo sapiens
tggagtctgtgaata

SEQ ID NO: 43981 - DNA, 15 bp, Homo sapiens
ctggagtctgtgaat

SEQ ID NO: 43982 - DNA, 15 bp, Homo sapiens
cctggagtctgtgaa

SEQ ID NO: 43983 - DNA, 15 bp, Homo sapiens
tcctggagtctgtga

SEQ ID NO: 43984 - DNA, 15 bp, Homo sapiens
ttcctggagtctgtg

SEQ ID NO: 43985 - DNA, 15 bp, Homo sapiens
attcctggagtctgt

SEQ ID NO: 43986 - DNA, 15 bp, Homo sapiens
tattcctggagtctg

SEQ ID NO: 43987 - DNA, 15 bp, Homo sapiens
ctattcctggagtct

SEQ ID NO: 43988 - DNA, 15 bp, Homo sapiens
cctattcctggagtc

SEQ ID NO: 43989 - DNA, 15 bp, Homo sapiens
ccctattcctggagt

SEQ ID NO: 43990 - DNA, 15 bp, Homo sapiens
accctattcctggag

SEQ ID NO: 43991 - DNA, 15 bp, Homo sapiens
caccctattcctgga

SEQ ID NO: 43992 - DNA, 15 bp, Homo sapiens
acaccctattcctgg

SEQ ID NO: 43993 - DNA, 15 bp, Homo sapiens
cacaccctattcctg

SEQ ID NO: 43994 - DNA, 15 bp, Homo sapiens
ccacaccctattcct

SEQ ID NO: 43995 - DNA, 15 bp, Homo sapiens
tccacaccctattcc

SEQ ID NO: 43996 - DNA, 15 bp, Homo sapiens
gtccacaccctattc

SEQ ID NO: 43997 - DNA, 15 bp, Homo sapiens
tgtccacaccctatt

SEQ ID NO: 43998 - DNA, 15 bp, Homo sapiens
atgtccacaccctat

SEQ ID NO: 43999 - DNA, 15 bp, Homo sapiens
gatgtccacacccta

SEQ ID NO: 44000 - DNA, 15 bp, Homo sapiens
agatgtccacaccct

SEQ ID NO: 44001 - DNA, 15 bp, Homo sapiens
aagatgtccacaccc

SEQ ID NO: 44002 - DNA, 15 bp, Homo sapiens
aaagatgtccacacc

SEQ ID NO: 44003 - DNA, 15 bp, Homo sapiens
caaagatgtccacac

SEQ ID NO: 44004 - DNA, 15 bp, Homo sapiens
gcaaagatgtccaca

SEQ ID NO: 44005 - DNA, 15 bp, Homo sapiens
tgcaaagatgtccac

SEQ ID NO: 44006 - DNA, 15 bp, Homo sapiens
ctgcaaagatgtcca

SEQ ID NO: 44007 - DNA, 15 bp, Homo sapiens
cctgcaaagatgtcc

SEQ ID NO: 44008 - DNA, 15 bp, Homo sapiens
ccctgcaaagatgtc

SEQ ID NO: 44009 - DNA, 15 bp, Homo sapiens
cccctgcaaagatgt

SEQ ID NO: 44010 - DNA, 15 bp, Homo sapiens
tcccctgcaaagatg

SEQ ID NO: 44011 - DNA, 15 bp, Homo sapiens
atcccctgcaaagat

SEQ ID NO: 44012 - DNA, 15 bp, Homo sapiens
tatcccctgcaaaga

SEQ ID NO: 44013 - DNA, 15 bp, Homo sapiens
atatcccctgcaaag

SEQ ID NO: 44014 - DNA, 15 bp, Homo sapiens
aatatcccctgcaaa

SEQ ID NO: 44015 - DNA, 15 bp, Homo sapiens
gaatatcccctgcaa

SEQ ID NO: 44016 - DNA, 15 bp, Homo sapiens
tgaatatcccctgca

SEQ ID NO: 44017 - DNA, 15 bp, Homo sapiens
ctgaatatcccctgc

SEQ ID NO: 44018 - DNA, 15 bp, Homo sapiens
actgaatatcccctg

SEQ ID NO: 44019 - DNA, 15 bp, Homo sapiens
gactgaatatcccct

SEQ ID NO: 44020 - DNA, 15 bp, Homo sapiens
agactgaatatcccc

SEQ ID NO: 44021 - DNA, 15 bp, Homo sapiens
cagactgaatatccc

SEQ ID NO: 44022 - DNA, 15 bp, Homo sapiens
gcagactgaatatcc

SEQ ID NO: 44023 - DNA, 15 bp, Homo sapiens
agcagactgaatatc

SEQ ID NO: 44024 - DNA, 15 bp, Homo sapiens
cagcagactgaatat

SEQ ID NO: 44025 - DNA, 15 bp, Homo sapiens
acagcagactgaata

SEQ ID NO: 44026 - DNA, 15 bp, Homo sapiens
tacagcagactgaat

SEQ ID NO: 44027 - DNA, 15 bp, Homo sapiens
ctacagcagactgaa

SEQ ID NO: 44028 - DNA, 15 bp, Homo sapiens
gctacagcagactga

SEQ ID NO: 44029 - DNA, 15 bp, Homo sapiens
agctacagcagactg

SEQ ID NO: 44030 - DNA, 15 bp, Homo sapiens
aagctacagcagact

SEQ ID NO: 44031 - DNA, 15 bp, Homo sapiens
aaagctacagcagac

SEQ ID NO: 44032 - DNA, 15 bp, Homo sapiens
gaaagctacagcaga

SEQ ID NO: 44033 - DNA, 15 bp, Homo sapiens
agaaagctacagcag

SEQ ID NO: 44034 - DNA, 15 bp, Homo sapiens
aagaaagctacagca

SEQ ID NO: 44035 - DNA, 15 bp, Homo sapiens
caagaaagctacagc

SEQ ID NO: 44036 - DNA, 15 bp, Homo sapiens
tcaagaaagctacag

SEQ ID NO: 44037 - DNA, 15 bp, Homo sapiens
atcaagaaagctaca

SEQ ID NO: 44038 - DNA, 15 bp, Homo sapiens
aatcaagaaagctac

SEQ ID NO: 44039 - DNA, 15 bp, Homo sapiens
caatcaagaaagcta

SEQ ID NO: 44040 - DNA, 15 bp, Homo sapiens
ccaatcaagaaagct

SEQ ID NO: 44041 - DNA, 15 bp, Homo sapiens
tccaatcaagaaagc

SEQ ID NO: 44042 - DNA, 15 bp, Homo sapiens
ttccaatcaagaaag

SEQ ID NO: 44043 - DNA, 15 bp, Homo sapiens
cttccaatcaagaaa

SEQ ID NO: 44044 - DNA, 15 bp, Homo sapiens
ccttccaatcaagaa

SEQ ID NO: 44045 - DNA, 15 bp, Homo sapiens
tccttccaatcaaga

SEQ ID NO: 44046 - DNA, 15 bp, Homo sapiens
ttccttccaatcaag

SEQ ID NO: 44047 - DNA, 15 bp, Homo sapiens
attccttccaatcaa

SEQ ID NO: 44048 - DNA, 15 bp, Homo sapiens
tattccttccaatca

SEQ ID NO: 44049 - DNA, 15 bp, Homo sapiens
ctattccttccaatc

SEQ ID NO: 44050 - DNA, 15 bp, Homo sapiens
actattccttccaat

SEQ ID NO: 44051 - DNA, 15 bp, Homo sapiens
aactattccttccaa

SEQ ID NO: 44052 - DNA, 15 bp, Homo sapiens
aaactattccttcca

SEQ ID NO: 44053 - DNA, 15 bp, Homo sapiens
taaactattccttcc

SEQ ID NO: 44054 - DNA, 15 bp, Homo sapiens
ataaactattccttc

SEQ ID NO: 44055 - DNA, 15 bp, Homo sapiens
gataaactattcctt

SEQ ID NO: 44056 - DNA, 15 bp, Homo sapiens
tgataaactattcct

SEQ ID NO: 44057 - DNA, 15 bp, Homo sapiens
atgataaactattcc

SEQ ID NO: 44058 - DNA, 15 bp, Homo sapiens
tatgataaactattc

SEQ ID NO: 44059 - DNA, 15 bp, Homo sapiens
atatgataaactatt

SEQ ID NO: 44060 - DNA, 15 bp, Homo sapiens
tatatgataaactat

SEQ ID NO: 44061 - DNA, 15 bp, Homo sapiens
atatatgataaacta

SEQ ID NO: 44062 - DNA, 15 bp, Homo sapiens
aatatatgataaact

SEQ ID NO: 44063 - DNA, 15 bp, Homo sapiens
aaatatatgataaac

SEQ ID NO: 44064 - DNA, 15 bp, Homo sapiens
caaatatatgataaa

SEQ ID NO: 44065 - DNA, 15 bp, Homo sapiens
tcaaatatatgataa

SEQ ID NO: 44066 - DNA, 15 bp, Homo sapiens
ttcaaatatatgata

SEQ ID NO: 44067 - DNA, 15 bp, Homo sapiens
cttcaaatatatgat

SEQ ID NO: 44068 - DNA, 15 bp, Homo sapiens
acttcaaatatatga

SEQ ID NO: 44069 - DNA, 15 bp, Homo sapiens
cacttcaaatatatg

SEQ ID NO: 44070 - DNA, 15 bp, Homo sapiens
acacttcaaatatat

SEQ ID NO: 44071 - DNA, 15 bp, Homo sapiens
aacacttcaaatata

SEQ ID NO: 44072 - DNA, 15 bp, Homo sapiens
gaacacttcaaatat

SEQ ID NO: 44073 - DNA, 15 bp, Homo sapiens
ggaacacttcaaata

SEQ ID NO: 44074 - DNA, 15 bp, Homo sapiens
gggaacacttcaaat

SEQ ID NO: 44075 - DNA, 15 bp, Homo sapiens
agggaacacttcaaa

SEQ ID NO: 44076 - DNA, 15 bp, Homo sapiens
gagggaacacttcaa

SEQ ID NO: 44077 - DNA, 15 bp, Homo sapiens
tgagggaacacttca

SEQ ID NO: 44078 - DNA, 15 bp, Homo sapiens
ctgagggaacacttc

SEQ ID NO: 44079 - DNA, 15 bp, Homo sapiens
actgagggaacactt

SEQ ID NO: 44080 - DNA, 15 bp, Homo sapiens
cactgagggaacact

SEQ ID NO: 44081 - DNA, 15 bp, Homo sapiens
gcactgagggaacac

SEQ ID NO: 44082 - DNA, 15 bp, Homo sapiens
ggcactgagggaaca

SEQ ID NO: 44083 - DNA, 15 bp, Homo sapiens
aggcactgagggaac

SEQ ID NO: 44084 - DNA, 15 bp, Homo sapiens
aaggcactgagggaa

SEQ ID NO: 44085 - DNA, 15 bp, Homo sapiens
aaaggcactgaggga

SEQ ID NO: 44086 - DNA, 15 bp, Homo sapiens
caaaggcactgaggg

SEQ ID NO: 44087 - DNA, 15 bp, Homo sapiens
ccaaaggcactgagg

SEQ ID NO: 44088 - DNA, 15 bp, Homo sapiens
gccaaaggcactgag

SEQ ID NO: 44089 - DNA, 15 bp, Homo sapiens
agccaaaggcactga

SEQ ID NO: 44090 - DNA, 15 bp, Homo sapiens
aagccaaaggcactg

SEQ ID NO: 44091 - DNA, 15 bp, Homo sapiens
aaagccaaaggcact

SEQ ID NO: 44092 - DNA, 15 bp, Homo sapiens
aaaagccaaaggcac

SEQ ID NO: 44093 - DNA, 15 bp, Homo sapiens
caaaagccaaaggca

SEQ ID NO: 44094 - DNA, 15 bp, Homo sapiens
acaaaagccaaaggc

SEQ ID NO: 44095 - DNA, 15 bp, Homo sapiens
aacaaaagccaaagg

SEQ ID NO: 44096 - DNA, 15 bp, Homo sapiens
caacaaaagccaaag

SEQ ID NO: 44097 - DNA, 15 bp, Homo sapiens
tcaacaaaagccaaa

SEQ ID NO: 44098 - DNA, 15 bp, Homo sapiens
gtcaacaaaagccaa

SEQ ID NO: 44099 - DNA, 15 bp, Homo sapiens
ggtcaacaaaagcca

SEQ ID NO: 44100 - DNA, 15 bp, Homo sapiens
gggtcaacaaaagcc

SEQ ID NO: 44101 - DNA, 15 bp, Homo sapiens
ggggtcaacaaaagc

SEQ ID NO: 44102 - DNA, 15 bp, Homo sapiens
aggggtcaacaaaag

SEQ ID NO: 44103 - DNA, 15 bp, Homo sapiens
gaggggtcaacaaaa

SEQ ID NO: 44104 - DNA, 15 bp, Homo sapiens
agaggggtcaacaaa

SEQ ID NO: 44105 - DNA, 15 bp, Homo sapiens
cagaggggtcaacaa

SEQ ID NO: 44106 - DNA, 15 bp, Homo sapiens
gcagaggggtcaaca

SEQ ID NO: 44107 - DNA, 15 bp, Homo sapiens
tgcagaggggtcaac

SEQ ID NO: 44108 - DNA, 15 bp, Homo sapiens
ctgcagaggggtcaa

SEQ ID NO: 44109 - DNA, 15 bp, Homo sapiens
gctgcagaggggtca

SEQ ID NO: 44110 - DNA, 15 bp, Homo sapiens
agctgcagaggggtc

SEQ ID NO: 44111 - DNA, 15 bp, Homo sapiens
gagctgcagaggggt

SEQ ID NO: 44112 - DNA, 15 bp, Homo sapiens
agagctgcagagggg

SEQ ID NO: 44113 - DNA, 15 bp, Homo sapiens
gagagctgcagaggg

SEQ ID NO: 44114 - DNA, 15 bp, Homo sapiens
agagagctgcagagg

SEQ ID NO: 44115 - DNA, 15 bp, Homo sapiens
cagagagctgcagag

SEQ ID NO: 44116 - DNA, 15 bp, Homo sapiens
gcagagagctgcaga

SEQ ID NO: 44117 - DNA, 15 bp, Homo sapiens
agcagagagctgcag

SEQ ID NO: 44118 - DNA, 15 bp, Homo sapiens
aagcagagagctgca

SEQ ID NO: 44119 - DNA, 15 bp, Homo sapiens
aaagcagagagctgc

SEQ ID NO: 44120 - DNA, 15 bp, Homo sapiens
aaaagcagagagctg

SEQ ID NO: 44121 - DNA, 15 bp, Homo sapiens
aaaaagcagagagct

SEQ ID NO: 44122 - DNA, 15 bp, Homo sapiens
gaaaaagcagagagc

SEQ ID NO: 44123 - DNA, 15 bp, Homo sapiens
agaaaaagcagagag

SEQ ID NO: 44124 - DNA, 15 bp, Homo sapiens
aagaaaaagcagaga

SEQ ID NO: 44125 - DNA, 15 bp, Homo sapiens
caagaaaaagcagag

SEQ ID NO: 44126 - DNA, 15 bp, Homo sapiens
gcaagaaaaagcaga

SEQ ID NO: 44127 - DNA, 15 bp, Homo sapiens
ggcaagaaaaagcag

SEQ ID NO: 44128 - DNA, 15 bp, Homo sapiens
gggcaagaaaaagca

SEQ ID NO: 44129 - DNA, 15 bp, Homo sapiens
tgggcaagaaaaagc

SEQ ID NO: 44130 - DNA, 15 bp, Homo sapiens
atgggcaagaaaaag

SEQ ID NO: 44131 - DNA, 15 bp, Homo sapiens
tatgggcaagaaaaa

SEQ ID NO: 44132 - DNA, 15 bp, Homo sapiens
atatgggcaagaaaa

SEQ ID NO: 44133 - DNA, 15 bp, Homo sapiens
aatatgggcaagaaa

SEQ ID NO: 44134 - DNA, 15 bp, Homo sapiens
aaatatgggcaagaa

SEQ ID NO: 44135 - DNA, 15 bp, Homo sapiens
caaatatgggcaaga

SEQ ID NO: 44136 - DNA, 15 bp, Homo sapiens
ccaaatatgggcaag

SEQ ID NO: 44137 - DNA, 15 bp, Homo sapiens
tccaaatatgggcaa

SEQ ID NO: 44138 - DNA, 15 bp, Homo sapiens
ttccaaatatgggca

SEQ ID NO: 44139 - DNA, 15 bp, Homo sapiens
tttccaaatatgggc

SEQ ID NO: 44140 - DNA, 15 bp, Homo sapiens
ctttccaaatatggg

SEQ ID NO: 44141 - DNA, 15 bp, Homo sapiens
actttccaaatatgg

SEQ ID NO: 44142 - DNA, 15 bp, Homo sapiens
cactttccaaatatg

SEQ ID NO: 44143 - DNA, 15 bp, Homo sapiens
tcactttccaaatat

SEQ ID NO: 44144 - DNA, 15 bp, Homo sapiens
gtcactttccaaata

SEQ ID NO: 44145 - DNA, 15 bp, Homo sapiens
agtcactttccaaat

SEQ ID NO: 44146 - DNA, 15 bp, Homo sapiens
gagtcactttccaaa

SEQ ID NO: 44147 - DNA, 15 bp, Homo sapiens
agagtcactttccaa

SEQ ID NO: 44148 - DNA, 15 bp, Homo sapiens
tagagtcactttcca

SEQ ID NO: 44149 - DNA, 15 bp, Homo sapiens
ttagagtcactttcc

SEQ ID NO: 44150 - DNA, 15 bp, Homo sapiens
tttagagtcactttc

SEQ ID NO: 44151 - DNA, 15 bp, Homo sapiens
ctttagagtcacttt

SEQ ID NO: 44152 - DNA, 15 bp, Homo sapiens
gctttagagtcactt

SEQ ID NO: 44153 - DNA, 15 bp, Homo sapiens
tgctttagagtcact

SEQ ID NO: 44154 - DNA, 15 bp, Homo sapiens
atgctttagagtcac

SEQ ID NO: 44155 - DNA, 15 bp, Homo sapiens
tatgctttagagtca

SEQ ID NO: 44156 - DNA, 15 bp, Homo sapiens
ttatgctttagagtc

SEQ ID NO: 44157 - DNA, 15 bp, Homo sapiens
attatgctttagagt

SEQ ID NO: 44158 - DNA, 15 bp, Homo sapiens
tattatgctttagag

SEQ ID NO: 44159 - DNA, 15 bp, Homo sapiens
ttattatgctttaga

SEQ ID NO: 44160 - DNA, 15 bp, Homo sapiens
cttattatgctttag

SEQ ID NO: 44161 - DNA, 15 bp, Homo sapiens
gcttattatgcttta

SEQ ID NO: 44162 - DNA, 15 bp, Homo sapiens
tgcttattatgcttt

SEQ ID NO: 44163 - DNA, 15 bp, Homo sapiens
atgcttattatgctt

SEQ ID NO: 44164 - DNA, 15 bp, Homo sapiens
gatgcttattatgct

SEQ ID NO: 44165 - DNA, 15 bp, Homo sapiens
tgatgcttattatgc

SEQ ID NO: 44166 - DNA, 15 bp, Homo sapiens
gtgatgcttattatg

SEQ ID NO: 44167 - DNA, 15 bp, Homo sapiens
ggtgatgcttattat

SEQ ID NO: 44168 - DNA, 15 bp, Homo sapiens
aggtgatgcttatta

SEQ ID NO: 44169 - DNA, 15 bp, Homo sapiens
taggtgatgcttatt

SEQ ID NO: 44170 - DNA, 15 bp, Homo sapiens
ataggtgatgcttat

SEQ ID NO: 44171 - DNA, 15 bp, Homo sapiens
aataggtgatgctta

SEQ ID NO: 44172 - DNA, 15 bp, Homo sapiens
taataggtgatgctt

SEQ ID NO: 44173 - DNA, 15 bp, Homo sapiens
ctaataggtgatgct

SEQ ID NO: 44174 - DNA, 15 bp, Homo sapiens
cctaataggtgatgc

SEQ ID NO: 44175 - DNA, 15 bp, Homo sapiens
ccctaataggtgatg

SEQ ID NO: 44176 - DNA, 15 bp, Homo sapiens
accctaataggtgat

SEQ ID NO: 44177 - DNA, 15 bp, Homo sapiens
aaccctaataggtga

SEQ ID NO: 44178 - DNA, 15 bp, Homo sapiens
aaaccctaataggtg

SEQ ID NO: 44179 - DNA, 15 bp, Homo sapiens
aaaaccctaataggt

SEQ ID NO: 44180 - DNA, 15 bp, Homo sapiens
aaaaaccctaatagg

SEQ ID NO: 44181 - DNA, 15 bp, Homo sapiens
taaaaaccctaatag

SEQ ID NO: 44182 - DNA, 15 bp, Homo sapiens
ttaaaaaccctaata

SEQ ID NO: 44183 - DNA, 15 bp, Homo sapiens
attaaaaaccctaat

SEQ ID NO: 44184 - DNA, 15 bp, Homo sapiens
cattaaaaaccctaa

SEQ ID NO: 44185 - DNA, 15 bp, Homo sapiens
acattaaaaacccta

SEQ ID NO: 44186 - DNA, 15 bp, Homo sapiens
tacattaaaaaccct

SEQ ID NO: 44187 - DNA, 15 bp, Homo sapiens
gtacattaaaaaccc

SEQ ID NO: 44188 - DNA, 15 bp, Homo sapiens
tgtacattaaaaacc

SEQ ID NO: 44189 - DNA, 15 bp, Homo sapiens
ttgtacattaaaaac

SEQ ID NO: 44190 - DNA, 15 bp, Homo sapiens
tttgtacattaaaaa

SEQ ID NO: 44191 - DNA, 15 bp, Homo sapiens
gtttgtacattaaaa

SEQ ID NO: 44192 - DNA, 15 bp, Homo sapiens
ggtttgtacattaaa

SEQ ID NO: 44193 - DNA, 15 bp, Homo sapiens
tggtttgtacattaa

SEQ ID NO: 44194 - DNA, 15 bp, Homo sapiens
ttggtttgtacatta

SEQ ID NO: 44195 - DNA, 15 bp, Homo sapiens
tttggtttgtacatt

SEQ ID NO: 44196 - DNA, 15 bp, Homo sapiens
gtttggtttgtacat

SEQ ID NO: 44197 - DNA, 15 bp, Homo sapiens
tgtttggtttgtaca

SEQ ID NO: 44198 - DNA, 15 bp, Homo sapiens
ctgtttggtttgtac

SEQ ID NO: 44199 - DNA, 15 bp, Homo sapiens
tctgtttggtttgta

SEQ ID NO: 44200 - DNA, 15 bp, Homo sapiens
ctctgtttggtttgt

SEQ ID NO: 44201 - DNA, 15 bp, Homo sapiens
cctctgtttggtttg

SEQ ID NO: 44202 - DNA, 15 bp, Homo sapiens
acctctgtttggttt

SEQ ID NO: 44203 - DNA, 15 bp, Homo sapiens
cacctctgtttggtt

SEQ ID NO: 44204 - DNA, 15 bp, Homo sapiens
tcacctctgtttggt

SEQ ID NO: 44205 - DNA, 15 bp, Homo sapiens
gtcacctctgtttgg

SEQ ID NO: 44206 - DNA, 15 bp, Homo sapiens
agtcacctctgtttg

SEQ ID NO: 44207 - DNA, 15 bp, Homo sapiens
aagtcacctctgttt

SEQ ID NO: 44208 - DNA, 15 bp, Homo sapiens
aaagtcacctctgtt

SEQ ID NO: 44209 - DNA, 15 bp, Homo sapiens
caaagtcacctctgt

SEQ ID NO: 44210 - DNA, 15 bp, Homo sapiens
ccaaagtcacctctg

SEQ ID NO: 44211 - DNA, 15 bp, Homo sapiens
cccaaagtcacctct

SEQ ID NO: 44212 - DNA, 15 bp, Homo sapiens
tcccaaagtcacctc

SEQ ID NO: 44213 - DNA, 15 bp, Homo sapiens
ctcccaaagtcacct

SEQ ID NO: 44214 - DNA, 15 bp, Homo sapiens
cctcccaaagtcacc

SEQ ID NO: 44215 - DNA, 15 bp, Homo sapiens
tcctcccaaagtcac

SEQ ID NO: 44216 - DNA, 15 bp, Homo sapiens
ctcctcccaaagtca

SEQ ID NO: 44217 - DNA, 15 bp, Homo sapiens
tctcctcccaaagtc

SEQ ID NO: 44218 - DNA, 15 bp, Homo sapiens
ttctcctcccaaagt

SEQ ID NO: 44219 - DNA, 15 bp, Homo sapiens
gttctcctcccaaag

SEQ ID NO: 44220 - DNA, 15 bp, Homo sapiens
tgttctcctcccaaa

SEQ ID NO: 44221 - DNA, 15 bp, Homo sapiens
atgttctcctcccaa

SEQ ID NO: 44222 - DNA, 15 bp, Homo sapiens
gatgttctcctccca

SEQ ID NO: 44223 - DNA, 15 bp, Homo sapiens
agatgttctcctccc

SEQ ID NO: 44224 - DNA, 15 bp, Homo sapiens
gagatgttctcctcc

SEQ ID NO: 44225 - DNA, 15 bp, Homo sapiens
agagatgttctcctc

SEQ ID NO: 44226 - DNA, 15 bp, Homo sapiens
cagagatgttctcct

SEQ ID NO: 44227 - DNA, 15 bp, Homo sapiens
tcagagatgttctcc

SEQ ID NO: 44228 - DNA, 15 bp, Homo sapiens
ttcagagatgttctc

SEQ ID NO: 44229 - DNA, 15 bp, Homo sapiens
gttcagagatgttct

SEQ ID NO: 44230 - DNA, 15 bp, Homo sapiens
agttcagagatgttc

SEQ ID NO: 44231 - DNA, 15 bp, Homo sapiens
tagttcagagatgtt

SEQ ID NO: 44232 - DNA, 15 bp, Homo sapiens
ctagttcagagatgt

SEQ ID NO: 44233 - DNA, 15 bp, Homo sapiens
cctagttcagagatg

SEQ ID NO: 44234 - DNA, 15 bp, Homo sapiens
acctagttcagagat

SEQ ID NO: 44235 - DNA, 15 bp, Homo sapiens
tacctagttcagaga

SEQ ID NO: 44236 - DNA, 15 bp, Homo sapiens
atacctagttcagag

SEQ ID NO: 44237 - DNA, 15 bp, Homo sapiens
catacctagttcaga

SEQ ID NO: 44238 - DNA, 15 bp, Homo sapiens
tcatacctagttcag

SEQ ID NO: 44239 - DNA, 15 bp, Homo sapiens
ctcatacctagttca

SEQ ID NO: 44240 - DNA, 15 bp, Homo sapiens
tctcatacctagttc

SEQ ID NO: 44241 - DNA, 15 bp, Homo sapiens
gtctcatacctagtt

SEQ ID NO: 44242 - DNA, 15 bp, Homo sapiens
tgtctcatacctagt

SEQ ID NO: 44243 - DNA, 15 bp, Homo sapiens
atgtctcatacctag

SEQ ID NO: 44244 - DNA, 15 bp, Homo sapiens
aatgtctcataccta

SEQ ID NO: 44245 - DNA, 15 bp, Homo sapiens
gaatgtctcatacct

SEQ ID NO: 44246 - DNA, 15 bp, Homo sapiens
tgaatgtctcatacc

SEQ ID NO: 44247 - DNA, 15 bp, Homo sapiens
atgaatgtctcatac

SEQ ID NO: 44248 - DNA, 15 bp, Homo sapiens
gatgaatgtctcata

SEQ ID NO: 44249 - DNA, 15 bp, Homo sapiens
cgatgaatgtctcat

SEQ ID NO: 44250 - DNA, 15 bp, Homo sapiens
tcgatgaatgtctca

SEQ ID NO: 44251 - DNA, 15 bp, Homo sapiens
ttcgatgaatgtctc

SEQ ID NO: 44252 - DNA, 15 bp, Homo sapiens
tttcgatgaatgtct

SEQ ID NO: 44253 - DNA, 15 bp, Homo sapiens
ttttcgatgaatgtc

SEQ ID NO: 44254 - DNA, 15 bp, Homo sapiens
tttttcgatgaatgt

SEQ ID NO: 44255 - DNA, 15 bp, Homo sapiens
ttttttcgatgaatg

SEQ ID NO: 44256 - DNA, 15 bp, Homo sapiens
tttttttcgatgaat

SEQ ID NO: 44257 - DNA, 15 bp, Homo sapiens
atttttttcgatgaa

SEQ ID NO: 44258 - DNA, 15 bp, Homo sapiens
gatttttttcgatga

SEQ ID NO: 44259 - DNA, 15 bp, Homo sapiens
ggatttttttcgatg

SEQ ID NO: 44260 - DNA, 15 bp, Homo sapiens
tggatttttttcgat

SEQ ID NO: 44261 - DNA, 15 bp, Homo sapiens
atggatttttttcga

SEQ ID NO: 44262 - DNA, 15 bp, Homo sapiens
gatggatttttttcg

SEQ ID NO: 44263 - DNA, 15 bp, Homo sapiens
tgatggatttttttc

SEQ ID NO: 44264 - DNA, 15 bp, Homo sapiens
ttgatggattttttt

SEQ ID NO: 44265 - DNA, 15 bp, Homo sapiens
cttgatggatttttt

SEQ ID NO: 44266 - DNA, 15 bp, Homo sapiens
acttgatggattttt

SEQ ID NO: 44267 - DNA, 15 bp, Homo sapiens
cacttgatggatttt

SEQ ID NO: 44268 - DNA, 15 bp, Homo sapiens
acacttgatggattt

SEQ ID NO: 44269 - DNA, 15 bp, Homo sapiens
aacacttgatggatt

SEQ ID NO: 44270 - DNA, 15 bp, Homo sapiens
aaacacttgatggat

SEQ ID NO: 44271 - DNA, 15 bp, Homo sapiens
taaacacttgatgga

SEQ ID NO: 44272 - DNA, 15 bp, Homo sapiens
ataaacacttgatgg

SEQ ID NO: 44273 - DNA, 15 bp, Homo sapiens
aataaacacttgatg

SEQ ID NO: 44274 - DNA, 15 bp, Homo sapiens
caataaacacttgat

SEQ ID NO: 44275 - DNA, 15 bp, Homo sapiens
acaataaacacttga

SEQ ID NO: 44276 - DNA, 15 bp, Homo sapiens
tacaataaacacttg

SEQ ID NO: 44277 - DNA, 15 bp, Homo sapiens
atacaataaacactt

SEQ ID NO: 44278 - DNA, 15 bp, Homo sapiens
catacaataaacact

SEQ ID NO: 44279 - DNA, 15 bp, Homo sapiens
acatacaataaacac

SEQ ID NO: 44280 - DNA, 15 bp, Homo sapiens
gacatacaataaaca

SEQ ID NO: 44281 - DNA, 15 bp, Homo sapiens
agacatacaataaac

SEQ ID NO: 44282 - DNA, 15 bp, Homo sapiens
cagacatacaataaa

SEQ ID NO: 44283 - DNA, 15 bp, Homo sapiens
gcagacatacaataa

SEQ ID NO: 44284 - DNA, 15 bp, Homo sapiens
agcagacatacaata

SEQ ID NO: 44285 - DNA, 15 bp, Homo sapiens
aagcagacatacaat

SEQ ID NO: 44286 - DNA, 15 bp, Homo sapiens
aaagcagacatacaa

SEQ ID NO: 44287 - DNA, 15 bp, Homo sapiens
taaagcagacataca

SEQ ID NO: 44288 - DNA, 15 bp, Homo sapiens
ataaagcagacatac

SEQ ID NO: 44289 - DNA, 15 bp, Homo sapiens
tataaagcagacata

SEQ ID NO: 44290 - DNA, 15 bp, Homo sapiens
gtataaagcagacat

SEQ ID NO: 44291 - DNA, 15 bp, Homo sapiens
ggtataaagcagaca

SEQ ID NO: 44292 - DNA, 15 bp, Homo sapiens
tggtataaagcagac

SEQ ID NO: 44293 - DNA, 15 bp, Homo sapiens
ctggtataaagcaga

SEQ ID NO: 44294 - DNA, 15 bp, Homo sapiens
gctggtataaagcag

SEQ ID NO: 44295 - DNA, 15 bp, Homo sapiens
tgctggtataaagca

SEQ ID NO: 44296 - DNA, 15 bp, Homo sapiens
gtgctggtataaagc

SEQ ID NO: 44297 - DNA, 15 bp, Homo sapiens
agtgctggtataaag

SEQ ID NO: 44298 - DNA, 15 bp, Homo sapiens
cagtgctggtataaa

SEQ ID NO: 44299 - DNA, 15 bp, Homo sapiens
acagtgctggtataa

SEQ ID NO: 44300 - DNA, 15 bp, Homo sapiens
aacagtgctggtata

SEQ ID NO: 44301 - DNA, 15 bp, Homo sapiens
gaacagtgctggtat

SEQ ID NO: 44302 - DNA, 15 bp, Homo sapiens
agaacagtgctggta

SEQ ID NO: 44303 - DNA, 15 bp, Homo sapiens
tagaacagtgctggt

SEQ ID NO: 44304 - DNA, 15 bp, Homo sapiens
ctagaacagtgctgg

SEQ ID NO: 44305 - DNA, 15 bp, Homo sapiens
cctagaacagtgctg

SEQ ID NO: 44306 - DNA, 15 bp, Homo sapiens
gcctagaacagtgct

SEQ ID NO: 44307 - DNA, 15 bp, Homo sapiens
tgcctagaacagtgc

SEQ ID NO: 44308 - DNA, 15 bp, Homo sapiens
gtgcctagaacagtg

SEQ ID NO: 44309 - DNA, 15 bp, Homo sapiens
agtgcctagaacagt

SEQ ID NO: 44310 - DNA, 15 bp, Homo sapiens
cagtgcctagaacag

SEQ ID NO: 44311 - DNA, 15 bp, Homo sapiens
tcagtgcctagaaca

SEQ ID NO: 44312 - DNA, 15 bp, Homo sapiens
ttcagtgcctagaac

SEQ ID NO: 44313 - DNA, 15 bp, Homo sapiens
cttcagtgcctagaa

SEQ ID NO: 44314 - DNA, 15 bp, Homo sapiens
acttcagtgcctaga

SEQ ID NO: 44315 - DNA, 15 bp, Homo sapiens
aacttcagtgcctag

SEQ ID NO: 44316 - DNA, 15 bp, Homo sapiens
gaacttcagtgccta

SEQ ID NO: 44317 - DNA, 15 bp, Homo sapiens
cgaacttcagtgcct

SEQ ID NO: 44318 - DNA, 15 bp, Homo sapiens
tcgaacttcagtgcc

SEQ ID NO: 44319 - DNA, 15 bp, Homo sapiens
gtcgaacttcagtgc

SEQ ID NO: 44320 - DNA, 15 bp, Homo sapiens
ggtcgaacttcagtg

SEQ ID NO: 44321 - DNA, 15 bp, Homo sapiens
tggtcgaacttcagt

SEQ ID NO: 44322 - DNA, 15 bp, Homo sapiens
gtggtcgaacttcag

SEQ ID NO: 44323 - DNA, 15 bp, Homo sapiens
ggtggtcgaacttca

SEQ ID NO: 44324 - DNA, 15 bp, Homo sapiens
tggtggtcgaacttc

SEQ ID NO: 44325 - DNA, 15 bp, Homo sapiens
ttggtggtcgaactt

SEQ ID NO: 44326 - DNA, 15 bp, Homo sapiens
gttggtggtcgaact

SEQ ID NO: 44327 - DNA, 15 bp, Homo sapiens
tgttggtggtcgaac

SEQ ID NO: 44328 - DNA, 15 bp, Homo sapiens
ttgttggtggtcgaa

SEQ ID NO: 44329 - DNA, 15 bp, Homo sapiens
cttgttggtggtcga

SEQ ID NO: 44330 - DNA, 15 bp, Homo sapiens
ccttgttggtggtcg

SEQ ID NO: 44331 - DNA, 15 bp, Homo sapiens
gccttgttggtggtc

SEQ ID NO: 44332 - DNA, 15 bp, Homo sapiens
tgccttgttggtggt

SEQ ID NO: 44333 - DNA, 15 bp, Homo sapiens
ctgccttgttggtgg

SEQ ID NO: 44334 - DNA, 15 bp, Homo sapiens
actgccttgttggtg

SEQ ID NO: 44335 - DNA, 15 bp, Homo sapiens
aactgccttgttggt

SEQ ID NO: 44336 - DNA, 15 bp, Homo sapiens
caactgccttgttgg

SEQ ID NO: 44337 - DNA, 15 bp, Homo sapiens
acaactgccttgttg

SEQ ID NO: 44338 - DNA, 15 bp, Homo sapiens
cacaactgccttgtt

SEQ ID NO: 44339 - DNA, 15 bp, Homo sapiens
tcacaactgccttgt

SEQ ID NO: 44340 - DNA, 15 bp, Homo sapiens
atcacaactgccttg

SEQ ID NO: 44341 - DNA, 15 bp, Homo sapiens
catcacaactgcctt

SEQ ID NO: 44342 - DNA, 15 bp, Homo sapiens
gcatcacaactgcct

SEQ ID NO: 44343 - DNA, 15 bp, Homo sapiens
tgcatcacaactgcc

SEQ ID NO: 44344 - DNA, 15 bp, Homo sapiens
gtgcatcacaactgc

SEQ ID NO: 44345 - DNA, 15 bp, Homo sapiens
agtgcatcacaactg

SEQ ID NO: 44346 - DNA, 15 bp, Homo sapiens
aagtgcatcacaact

SEQ ID NO: 44347 - DNA, 15 bp, Homo sapiens
caagtgcatcacaac

SEQ ID NO: 44348 - DNA, 15 bp, Homo sapiens
ccaagtgcatcacaa

SEQ ID NO: 44349 - DNA, 15 bp, Homo sapiens
tccaagtgcatcaca

SEQ ID NO: 44350 - DNA, 15 bp, Homo sapiens
ctccaagtgcatcac

SEQ ID NO: 44351 - DNA, 15 bp, Homo sapiens
gctccaagtgcatca

SEQ ID NO: 44352 - DNA, 15 bp, Homo sapiens
agctccaagtgcatc

SEQ ID NO: 44353 - DNA, 15 bp, Homo sapiens
aagctccaagtgcat

SEQ ID NO: 44354 - DNA, 15 bp, Homo sapiens
aaagctccaagtgca

SEQ ID NO: 44355 - DNA, 15 bp, Homo sapiens
gaaagctccaagtgc

SEQ ID NO: 44356 - DNA, 15 bp, Homo sapiens
tgaaagctccaagtg

SEQ ID NO: 44357 - DNA, 15 bp, Homo sapiens
atgaaagctccaagt

SEQ ID NO: 44358 - DNA, 15 bp, Homo sapiens
aatgaaagctccaag

SEQ ID NO: 44359 - DNA, 15 bp, Homo sapiens
gaatgaaagctccaa

SEQ ID NO: 44360 - DNA, 15 bp, Homo sapiens
agaatgaaagctcca

SEQ ID NO: 44361 - DNA, 15 bp, Homo sapiens
cagaatgaaagctcc

SEQ ID NO: 44362 - DNA, 15 bp, Homo sapiens
tcagaatgaaagctc

SEQ ID NO: 44363 - DNA, 15 bp, Homo sapiens
atcagaatgaaagct

SEQ ID NO: 44364 - DNA, 15 bp, Homo sapiens
catcagaatgaaagc

SEQ ID NO: 44365 - DNA, 15 bp, Homo sapiens
ccatcagaatgaaag

SEQ ID NO: 44366 - DNA, 15 bp, Homo sapiens
cccatcagaatgaaa

SEQ ID NO: 44367 - DNA, 15 bp, Homo sapiens
gcccatcagaatgaa

SEQ ID NO: 44368 - DNA, 15 bp, Homo sapiens
tgcccatcagaatga

SEQ ID NO: 44369 - DNA, 15 bp, Homo sapiens
atgcccatcagaatg

SEQ ID NO: 44370 - DNA, 15 bp, Homo sapiens
aatgcccatcagaat

SEQ ID NO: 44371 - DNA, 15 bp, Homo sapiens
caatgcccatcagaa

SEQ ID NO: 44372 - DNA, 15 bp, Homo sapiens
tcaatgcccatcaga

SEQ ID NO: 44373 - DNA, 15 bp, Homo sapiens
ctcaatgcccatcag

SEQ ID NO: 44374 - DNA, 15 bp, Homo sapiens
tctcaatgcccatca

SEQ ID NO: 44375 - DNA, 15 bp, Homo sapiens
atctcaatgcccatc

SEQ ID NO: 44376 - DNA, 15 bp, Homo sapiens
gatctcaatgcccat

SEQ ID NO: 44377 - DNA, 15 bp, Homo sapiens
ggatctcaatgccca

SEQ ID NO: 44378 - DNA, 15 bp, Homo sapiens
tggatctcaatgccc

SEQ ID NO: 44379 - DNA, 15 bp, Homo sapiens
ctggatctcaatgcc

SEQ ID NO: 44380 - DNA, 15 bp, Homo sapiens
cctggatctcaatgc

SEQ ID NO: 44381 - DNA, 15 bp, Homo sapiens
gcctggatctcaatg

SEQ ID NO: 44382 - DNA, 15 bp, Homo sapiens
agcctggatctcaat

SEQ ID NO: 44383 - DNA, 15 bp, Homo sapiens
cagcctggatctcaa

SEQ ID NO: 44384 - DNA, 15 bp, Homo sapiens
tcagcctggatctca

SEQ ID NO: 44385 - DNA, 15 bp, Homo sapiens
ttcagcctggatctc

SEQ ID NO: 44386 - DNA, 15 bp, Homo sapiens
cttcagcctggatct

SEQ ID NO: 44387 - DNA, 15 bp, Homo sapiens
ccttcagcctggatc

SEQ ID NO: 44388 - DNA, 15 bp, Homo sapiens
gccttcagcctggat

SEQ ID NO: 44389 - DNA, 15 bp, Homo sapiens
agccttcagcctgga

SEQ ID NO: 44390 - DNA, 15 bp, Homo sapiens
cagccttcagcctgg

SEQ ID NO: 44391 - DNA, 15 bp, Homo sapiens
tcagccttcagcctg

SEQ ID NO: 44392 - DNA, 15 bp, Homo sapiens
ctcagccttcagcct

SEQ ID NO: 44393 - DNA, 15 bp, Homo sapiens
actcagccttcagcc

SEQ ID NO: 44394 - DNA, 15 bp, Homo sapiens
gactcagccttcagc

SEQ ID NO: 44395 - DNA, 15 bp, Homo sapiens
agactcagccttcag

SEQ ID NO: 44396 - DNA, 15 bp, Homo sapiens
cagactcagccttca

SEQ ID NO: 44397 - DNA, 15 bp, Homo sapiens
ccagactcagccttc

SEQ ID NO: 44398 - DNA, 15 bp, Homo sapiens
cccagactcagcctt

SEQ ID NO: 44399 - DNA, 15 bp, Homo sapiens
tcccagactcagcct

SEQ ID NO: 44400 - DNA, 15 bp, Homo sapiens
ttcccagactcagcc

SEQ ID NO: 44401 - DNA, 15 bp, Homo sapiens
attcccagactcagc

SEQ ID NO: 44402 - DNA, 15 bp, Homo sapiens
aattcccagactcag

SEQ ID NO: 44403 - DNA, 15 bp, Homo sapiens
aaattcccagactca

SEQ ID NO: 44404 - DNA, 15 bp, Homo sapiens
caaattcccagactc

SEQ ID NO: 44405 - DNA, 15 bp, Homo sapiens
tcaaattcccagact

SEQ ID NO: 44406 - DNA, 15 bp, Homo sapiens
ctcaaattcccagac

SEQ ID NO: 44407 - DNA, 15 bp, Homo sapiens
cctcaaattcccaga

SEQ ID NO: 44408 - DNA, 15 bp, Homo sapiens
tcctcaaattcccag

SEQ ID NO: 44409 - DNA, 15 bp, Homo sapiens
ttcctcaaattccca

SEQ ID NO: 44410 - DNA, 15 bp, Homo sapiens
attcctcaaattccc

SEQ ID NO: 44411 - DNA, 15 bp, Homo sapiens
aattcctcaaattcc

SEQ ID NO: 44412 - DNA, 15 bp, Homo sapiens
gaattcctcaaattc

SEQ ID NO: 44413 - DNA, 15 bp, Homo sapiens
agaattcctcaaatt

SEQ ID NO: 44414 - DNA, 15 bp, Homo sapiens
aagaattcctcaaat

SEQ ID NO: 44415 - DNA, 15 bp, Homo sapiens
aaagaattcctcaaa

SEQ ID NO: 44416 - DNA, 15 bp, Homo sapiens
caaagaattcctcaa

SEQ ID NO: 44417 - DNA, 15 bp, Homo sapiens
acaaagaattcctca

SEQ ID NO: 44418 - DNA, 15 bp, Homo sapiens
tacaaagaattcctc

SEQ ID NO: 44419 - DNA, 15 bp, Homo sapiens
ctacaaagaattcct

SEQ ID NO: 44420 - DNA, 15 bp, Homo sapiens
cctacaaagaattcc

SEQ ID NO: 44421 - DNA, 15 bp, Homo sapiens
acctacaaagaattc

SEQ ID NO: 44422 - DNA, 15 bp, Homo sapiens
gacctacaaagaatt

SEQ ID NO: 44423 - DNA, 15 bp, Homo sapiens
ggacctacaaagaat

SEQ ID NO: 44424 - DNA, 15 bp, Homo sapiens
aggacctacaaagaa

SEQ ID NO: 44425 - DNA, 15 bp, Homo sapiens
caggacctacaaaga

SEQ ID NO: 44426 - DNA, 15 bp, Homo sapiens
ccaggacctacaaag

SEQ ID NO: 44427 - DNA, 15 bp, Homo sapiens
cccaggacctacaaa

SEQ ID NO: 44428 - DNA, 15 bp, Homo sapiens
acccaggacctacaa

SEQ ID NO: 44429 - DNA, 15 bp, Homo sapiens
gacccaggacctaca

SEQ ID NO: 44430 - DNA, 15 bp, Homo sapiens
agacccaggacctac

SEQ ID NO: 44431 - DNA, 15 bp, Homo sapiens
tagacccaggaccta

SEQ ID NO: 44432 - DNA, 15 bp, Homo sapiens
gtagacccaggacct

SEQ ID NO: 44433 - DNA, 15 bp, Homo sapiens
tgtagacccaggacc

SEQ ID NO: 44434 - DNA, 15 bp, Homo sapiens
ctgtagacccaggac

SEQ ID NO: 44435 - DNA, 15 bp, Homo sapiens
tctgtagacccagga

SEQ ID NO: 44436 - DNA, 15 bp, Homo sapiens
ctctgtagacccagg

SEQ ID NO: 44437 - DNA, 15 bp, Homo sapiens
actctgtagacccag

SEQ ID NO: 44438 - DNA, 15 bp, Homo sapiens
cactctgtagaccca

SEQ ID NO: 44439 - DNA, 15 bp, Homo sapiens
tcactctgtagaccc

SEQ ID NO: 44440 - DNA, 15 bp, Homo sapiens
ctcactctgtagacc

SEQ ID NO: 44441 - DNA, 15 bp, Homo sapiens
tctcactctgtagac

SEQ ID NO: 44442 - DNA, 15 bp, Homo sapiens
ctctcactctgtaga

SEQ ID NO: 44443 - DNA, 15 bp, Homo sapiens
gctctcactctgtag

SEQ ID NO: 44444 - DNA, 15 bp, Homo sapiens
agctctcactctgta

SEQ ID NO: 44445 - DNA, 15 bp, Homo sapiens
cagctctcactctgt

SEQ ID NO: 44446 - DNA, 15 bp, Homo sapiens
acagctctcactctg

SEQ ID NO: 44447 - DNA, 15 bp, Homo sapiens
gacagctctcactct

SEQ ID NO: 44448 - DNA, 15 bp, Homo sapiens
ggacagctctcactc

SEQ ID NO: 44449 - DNA, 15 bp, Homo sapiens
aggacagctctcact

SEQ ID NO: 44450 - DNA, 15 bp, Homo sapiens
gaggacagctctcac

SEQ ID NO: 44451 - DNA, 15 bp, Homo sapiens
cgaggacagctctca

SEQ ID NO: 44452 - DNA, 15 bp, Homo sapiens
acgaggacagctctc

SEQ ID NO: 44453 - DNA, 15 bp, Homo sapiens
aacgaggacagctct

SEQ ID NO: 44454 - DNA, 15 bp, Homo sapiens
gaacgaggacagctc

SEQ ID NO: 44455 - DNA, 15 bp, Homo sapiens
ggaacgaggacagct

SEQ ID NO: 44456 - DNA, 15 bp, Homo sapiens
tggaacgaggacagc

SEQ ID NO: 44457 - DNA, 15 bp, Homo sapiens
ctggaacgaggacag

SEQ ID NO: 44458 - DNA, 15 bp, Homo sapiens
actggaacgaggaca

SEQ ID NO: 44459 - DNA, 15 bp, Homo sapiens
aactggaacgaggac

SEQ ID NO: 44460 - DNA, 15 bp, Homo sapiens
aaactggaacgagga

SEQ ID NO: 44461 - DNA, 15 bp, Homo sapiens
gaaactggaacgagg

SEQ ID NO: 44462 - DNA, 15 bp, Homo sapiens
tgaaactggaacgag

SEQ ID NO: 44463 - DNA, 15 bp, Homo sapiens
gtgaaactggaacga

SEQ ID NO: 44464 - DNA, 15 bp, Homo sapiens
agtgaaactggaacg

SEQ ID NO: 44465 - DNA, 15 bp, Homo sapiens
cagtgaaactggaac

SEQ ID NO: 44466 - DNA, 15 bp, Homo sapiens
tcagtgaaactggaa

SEQ ID NO: 44467 - DNA, 15 bp, Homo sapiens
atcagtgaaactgga

SEQ ID NO: 44468 - DNA, 15 bp, Homo sapiens
catcagtgaaactgg

SEQ ID NO: 44469 - DNA, 15 bp, Homo sapiens
tcatcagtgaaactg

SEQ ID NO: 44470 - DNA, 15 bp, Homo sapiens
gtcatcagtgaaact

SEQ ID NO: 44471 - DNA, 15 bp, Homo sapiens
ggtcatcagtgaaac

SEQ ID NO: 44472 - DNA, 15 bp, Homo sapiens
aggtcatcagtgaaa

SEQ ID NO: 44473 - DNA, 15 bp, Homo sapiens
gaggtcatcagtgaa

SEQ ID NO: 44474 - DNA, 15 bp, Homo sapiens
agaggtcatcagtga

SEQ ID NO: 44475 - DNA, 15 bp, Homo sapiens
gagaggtcatcagtg

SEQ ID NO: 44476 - DNA, 15 bp, Homo sapiens
cgagaggtcatcagt

SEQ ID NO: 44477 - DNA, 15 bp, Homo sapiens
tcgagaggtcatcag

SEQ ID NO: 44478 - DNA, 15 bp, Homo sapiens
gtcgagaggtcatca

SEQ ID NO: 44479 - DNA, 15 bp, Homo sapiens
ggtcgagaggtcatc

SEQ ID NO: 44480 - DNA, 15 bp, Homo sapiens
tggtcgagaggtcat

SEQ ID NO: 44481 - DNA, 15 bp, Homo sapiens
ctggtcgagaggtca

SEQ ID NO: 44482 - DNA, 15 bp, Homo sapiens
gctggtcgagaggtc

SEQ ID NO: 44483 - DNA, 15 bp, Homo sapiens
agctggtcgagaggt

SEQ ID NO: 44484 - DNA, 15 bp, Homo sapiens
gagctggtcgagagg

SEQ ID NO: 44485 - DNA, 15 bp, Homo sapiens
ggagctggtcgagag

SEQ ID NO: 44486 - DNA, 15 bp, Homo sapiens
gggagctggtcgaga

SEQ ID NO: 44487 - DNA, 15 bp, Homo sapiens
agggagctggtcgag

SEQ ID NO: 44488 - DNA, 15 bp, Homo sapiens
gagggagctggtcga

SEQ ID NO: 44489 - DNA, 15 bp, Homo sapiens
tgagggagctggtcg

SEQ ID NO: 44490 - DNA, 15 bp, Homo sapiens
gtgagggagctggtc

SEQ ID NO: 44491 - DNA, 15 bp, Homo sapiens
tgtgagggagctggt

SEQ ID NO: 44492 - DNA, 15 bp, Homo sapiens
ctgtgagggagctgg

SEQ ID NO: 44493 - DNA, 15 bp, Homo sapiens
gctgtgagggagctg

SEQ ID NO: 44494 - DNA, 15 bp, Homo sapiens
tgctgtgagggagct

SEQ ID NO: 44495 - DNA, 15 bp, Homo sapiens
ctgctgtgagggagc

SEQ ID NO: 44496 - DNA, 15 bp, Homo sapiens
actgctgtgagggag

SEQ ID NO: 44497 - DNA, 15 bp, Homo sapiens
gactgctgtgaggga

SEQ ID NO: 44498 - DNA, 15 bp, Homo sapiens
agactgctgtgaggg

SEQ ID NO: 44499 - DNA, 15 bp, Homo sapiens
aagactgctgtgagg

SEQ ID NO: 44500 - DNA, 15 bp, Homo sapiens
aaagactgctgtgag

SEQ ID NO: 44501 - DNA, 15 bp, Homo sapiens
caaagactgctgtga

SEQ ID NO: 44502 - DNA, 15 bp, Homo sapiens
gcaaagactgctgtg

SEQ ID NO: 44503 - DNA, 15 bp, Homo sapiens
ggcaaagactgctgt

SEQ ID NO: 44504 - DNA, 15 bp, Homo sapiens
tggcaaagactgctg

SEQ ID NO: 44505 - DNA, 15 bp, Homo sapiens
ttggcaaagactgct

SEQ ID NO: 44506 - DNA, 15 bp, Homo sapiens
gttggcaaagactgc

SEQ ID NO: 44507 - DNA, 15 bp, Homo sapiens
tgttggcaaagactg

SEQ ID NO: 44508 - DNA, 15 bp, Homo sapiens
gtgttggcaaagact

SEQ ID NO: 44509 - DNA, 15 bp, Homo sapiens
tgtgttggcaaagac

SEQ ID NO: 44510 - DNA, 15 bp, Homo sapiens
ctgtgttggcaaaga

SEQ ID NO: 44511 - DNA, 15 bp, Homo sapiens
tctgtgttggcaaag

SEQ ID NO: 44512 - DNA, 15 bp, Homo sapiens
gtctgtgttggcaaa

SEQ ID NO: 44513 - DNA, 15 bp, Homo sapiens
tgtctgtgttggcaa

SEQ ID NO: 44514 - DNA, 15 bp, Homo sapiens
gtgtctgtgttggca

SEQ ID NO: 44515 - DNA, 15 bp, Homo sapiens
agtgtctgtgttggc

SEQ ID NO: 44516 - DNA, 15 bp, Homo sapiens
cagtgtctgtgttgg

SEQ ID NO: 44517 - DNA, 15 bp, Homo sapiens
acagtgtctgtgttg

SEQ ID NO: 44518 - DNA, 15 bp, Homo sapiens
cacagtgtctgtgtt

SEQ ID NO: 44519 - DNA, 15 bp, Homo sapiens
ccacagtgtctgtgt

SEQ ID NO: 44520 - DNA, 15 bp, Homo sapiens
cccacagtgtctgtg

SEQ ID NO: 44521 - DNA, 15 bp, Homo sapiens
gcccacagtgtctgt

SEQ ID NO: 44522 - DNA, 15 bp, Homo sapiens
agcccacagtgtctg

SEQ ID NO: 44523 - DNA, 15 bp, Homo sapiens
cagcccacagtgtct

SEQ ID NO: 44524 - DNA, 15 bp, Homo sapiens
acagcccacagtgtc

SEQ ID NO: 44525 - DNA, 15 bp, Homo sapiens
tacagcccacagtgt

SEQ ID NO: 44526 - DNA, 15 bp, Homo sapiens
ctacagcccacagtg

SEQ ID NO: 44527 - DNA, 15 bp, Homo sapiens
actacagcccacagt

SEQ ID NO: 44528 - DNA, 15 bp, Homo sapiens
cactacagcccacag

SEQ ID NO: 44529 - DNA, 15 bp, Homo sapiens
ccactacagcccaca

SEQ ID NO: 44530 - DNA, 15 bp, Homo sapiens
cccactacagcccac

SEQ ID NO: 44531 - DNA, 15 bp, Homo sapiens
tcccactacagccca

SEQ ID NO: 44532 - DNA, 15 bp, Homo sapiens
ctcccactacagccc

SEQ ID NO: 44533 - DNA, 15 bp, Homo sapiens
cctcccactacagcc

SEQ ID NO: 44534 - DNA, 15 bp, Homo sapiens
tcctcccactacagc

SEQ ID NO: 44535 - DNA, 15 bp, Homo sapiens
ttcctcccactacag

SEQ ID NO: 44536 - DNA, 15 bp, Homo sapiens
attcctcccactaca

SEQ ID NO: 44537 - DNA, 15 bp, Homo sapiens
cattcctcccactac

SEQ ID NO: 44538 - DNA, 15 bp, Homo sapiens
acattcctcccacta

SEQ ID NO: 44539 - DNA, 15 bp, Homo sapiens
cacattcctcccact

SEQ ID NO: 44540 - DNA, 15 bp, Homo sapiens
ccacattcctcccac

SEQ ID NO: 44541 - DNA, 15 bp, Homo sapiens
cccacattcctccca

SEQ ID NO: 44542 - DNA, 15 bp, Homo sapiens
ccccacattcctccc

SEQ ID NO: 44543 - DNA, 15 bp, Homo sapiens
accccacattcctcc

SEQ ID NO: 44544 - DNA, 15 bp, Homo sapiens
aaccccacattcctc

SEQ ID NO: 44545 - DNA, 15 bp, Homo sapiens
caaccccacattcct

SEQ ID NO: 44546 - DNA, 15 bp, Homo sapiens
tcaaccccacattcc

SEQ ID NO: 44547 - DNA, 15 bp, Homo sapiens
ttcaaccccacattc

SEQ ID NO: 44548 - DNA, 15 bp, Homo sapiens
attcaaccccacatt

SEQ ID NO: 44549 - DNA, 15 bp, Homo sapiens
cattcaaccccacat

SEQ ID NO: 44550 - DNA, 15 bp, Homo sapiens
tcattcaaccccaca

SEQ ID NO: 44551 - DNA, 15 bp, Homo sapiens
ctcattcaaccccac

SEQ ID NO: 44552 - DNA, 15 bp, Homo sapiens
gctcattcaacccca

SEQ ID NO: 44553 - DNA, 15 bp, Homo sapiens
agctcattcaacccc

SEQ ID NO: 44554 - DNA, 15 bp, Homo sapiens
tagctcattcaaccc

SEQ ID NO: 44555 - DNA, 15 bp, Homo sapiens
ctagctcattcaacc

SEQ ID NO: 44556 - DNA, 15 bp, Homo sapiens
cctagctcattcaac

SEQ ID NO: 44557 - DNA, 15 bp, Homo sapiens
acctagctcattcaa

SEQ ID NO: 44558 - DNA, 15 bp, Homo sapiens
aacctagctcattca

SEQ ID NO: 44559 - DNA, 15 bp, Homo sapiens
aaacctagctcattc

SEQ ID NO: 44560 - DNA, 15 bp, Homo sapiens
caaacctagctcatt

SEQ ID NO: 44561 - DNA, 15 bp, Homo sapiens
ccaaacctagctcat

SEQ ID NO: 44562 - DNA, 15 bp, Homo sapiens
cccaaacctagctca

SEQ ID NO: 44563 - DNA, 15 bp, Homo sapiens
gcccaaacctagctc

SEQ ID NO: 44564 - DNA, 15 bp, Homo sapiens
agcccaaacctagct

SEQ ID NO: 44565 - DNA, 15 bp, Homo sapiens
gagcccaaacctagc

SEQ ID NO: 44566 - DNA, 15 bp, Homo sapiens
agagcccaaacctag

SEQ ID NO: 44567 - DNA, 15 bp, Homo sapiens
cagagcccaaaccta

SEQ ID NO: 44568 - DNA, 15 bp, Homo sapiens
acagagcccaaacct

SEQ ID NO: 44569 - DNA, 15 bp, Homo sapiens
gacagagcccaaacc

SEQ ID NO: 44570 - DNA, 15 bp, Homo sapiens
ggacagagcccaaac

SEQ ID NO: 44571 - DNA, 15 bp, Homo sapiens
aggacagagcccaaa

SEQ ID NO: 44572 - DNA, 15 bp, Homo sapiens
aaggacagagcccaa

SEQ ID NO: 44573 - DNA, 15 bp, Homo sapiens
caaggacagagccca

SEQ ID NO: 44574 - DNA, 15 bp, Homo sapiens
tcaaggacagagccc

SEQ ID NO: 44575 - DNA, 15 bp, Homo sapiens
gtcaaggacagagcc

SEQ ID NO: 44576 - DNA, 15 bp, Homo sapiens
agtcaaggacagagc

SEQ ID NO: 44577 - DNA, 15 bp, Homo sapiens
gagtcaaggacagag

SEQ ID NO: 44578 - DNA, 15 bp, Homo sapiens
tgagtcaaggacaga

SEQ ID NO: 44579 - DNA, 15 bp, Homo sapiens
gtgagtcaaggacag

SEQ ID NO: 44580 - DNA, 15 bp, Homo sapiens
ggtgagtcaaggaca

SEQ ID NO: 44581 - DNA, 15 bp, Homo sapiens
tggtgagtcaaggac

SEQ ID NO: 44582 - DNA, 15 bp, Homo sapiens
atggtgagtcaagga

SEQ ID NO: 44583 - DNA, 15 bp, Homo sapiens
aatggtgagtcaagg

SEQ ID NO: 44584 - DNA, 15 bp, Homo sapiens
caatggtgagtcaag

SEQ ID NO: 44585 - DNA, 15 bp, Homo sapiens
gcaatggtgagtcaa

SEQ ID NO: 44586 - DNA, 15 bp, Homo sapiens
ggcaatggtgagtca

SEQ ID NO: 44587 - DNA, 15 bp, Homo sapiens
aggcaatggtgagtc

SEQ ID NO: 44588 - DNA, 15 bp, Homo sapiens
gaggcaatggtgagt

SEQ ID NO: 44589 - DNA, 15 bp, Homo sapiens
tgaggcaatggtgag

SEQ ID NO: 44590 - DNA, 15 bp, Homo sapiens
ctgaggcaatggtga

SEQ ID NO: 44591 - DNA, 15 bp, Homo sapiens
actgaggcaatggtg

SEQ ID NO: 44592 - DNA, 15 bp, Homo sapiens
cactgaggcaatggt

SEQ ID NO: 44593 - DNA, 15 bp, Homo sapiens
tcactgaggcaatgg

SEQ ID NO: 44594 - DNA, 15 bp, Homo sapiens
atcactgaggcaatg

SEQ ID NO: 44595 - DNA, 15 bp, Homo sapiens
catcactgaggcaat

SEQ ID NO: 44596 - DNA, 15 bp, Homo sapiens
acatcactgaggcaa

SEQ ID NO: 44597 - DNA, 15 bp, Homo sapiens
cacatcactgaggca

SEQ ID NO: 44598 - DNA, 15 bp, Homo sapiens
tcacatcactgaggc

SEQ ID NO: 44599 - DNA, 15 bp, Homo sapiens
ttcacatcactgagg

SEQ ID NO: 44600 - DNA, 15 bp, Homo sapiens
tttcacatcactgag

SEQ ID NO: 44601 - DNA, 15 bp, Homo sapiens
ttttcacatcactga

SEQ ID NO: 44602 - DNA, 15 bp, Homo sapiens
attttcacatcactg

SEQ ID NO: 44603 - DNA, 15 bp, Homo sapiens
cattttcacatcact

SEQ ID NO: 44604 - DNA, 15 bp, Homo sapiens
ccattttcacatcac

SEQ ID NO: 44605 - DNA, 15 bp, Homo sapiens
accattttcacatca

SEQ ID NO: 44606 - DNA, 15 bp, Homo sapiens
caccattttcacatc

SEQ ID NO: 44607 - DNA, 15 bp, Homo sapiens
acaccattttcacat

SEQ ID NO: 44608 - DNA, 15 bp, Homo sapiens
gacaccattttcaca

SEQ ID NO: 44609 - DNA, 15 bp, Homo sapiens
agacaccattttcac

SEQ ID NO: 44610 - DNA, 15 bp, Homo sapiens
cagacaccattttca

SEQ ID NO: 44611 - DNA, 15 bp, Homo sapiens
tcagacaccattttc

SEQ ID NO: 44612 - DNA, 15 bp, Homo sapiens
atcagacaccatttt

SEQ ID NO: 44613 - DNA, 15 bp, Homo sapiens
gatcagacaccattt

SEQ ID NO: 44614 - DNA, 15 bp, Homo sapiens
ggatcagacaccatt

SEQ ID NO: 44615 - DNA, 15 bp, Homo sapiens
aggatcagacaccat

SEQ ID NO: 44616 - DNA, 15 bp, Homo sapiens
aaggatcagacacca

SEQ ID NO: 44617 - DNA, 15 bp, Homo sapiens
taaggatcagacacc

SEQ ID NO: 44618 - DNA, 15 bp, Homo sapiens
ttaaggatcagacac

SEQ ID NO: 44619 - DNA, 15 bp, Homo sapiens
cttaaggatcagaca

SEQ ID NO: 44620 - DNA, 15 bp, Homo sapiens
ccttaaggatcagac

SEQ ID NO: 44621 - DNA, 15 bp, Homo sapiens
accttaaggatcaga

SEQ ID NO: 44622 - DNA, 15 bp, Homo sapiens
aaccttaaggatcag

SEQ ID NO: 44623 - DNA, 15 bp, Homo sapiens
caaccttaaggatca

SEQ ID NO: 44624 - DNA, 15 bp, Homo sapiens
ccaaccttaaggatc

SEQ ID NO: 44625 - DNA, 15 bp, Homo sapiens
tccaaccttaaggat

SEQ ID NO: 44626 - DNA, 15 bp, Homo sapiens
ttccaaccttaagga

SEQ ID NO: 44627 - DNA, 15 bp, Homo sapiens
cttccaaccttaagg

SEQ ID NO: 44628 - DNA, 15 bp, Homo sapiens
acttccaaccttaag

SEQ ID NO: 44629 - DNA, 15 bp, Homo sapiens
gacttccaaccttaa

SEQ ID NO: 44630 - DNA, 15 bp, Homo sapiens
ggacttccaacctta

SEQ ID NO: 44631 - DNA, 15 bp, Homo sapiens
tggacttccaacctt

SEQ ID NO: 44632 - DNA, 15 bp, Homo sapiens
ctggacttccaacct

SEQ ID NO: 44633 - DNA, 15 bp, Homo sapiens
cctggacttccaacc

SEQ ID NO: 44634 - DNA, 15 bp, Homo sapiens
gcctggacttccaac

SEQ ID NO: 44635 - DNA, 15 bp, Homo sapiens
tgcctggacttccaa

SEQ ID NO: 44636 - DNA, 15 bp, Homo sapiens
atgcctggacttcca

SEQ ID NO: 44637 - DNA, 15 bp, Homo sapiens
catgcctggacttcc

SEQ ID NO: 44638 - DNA, 15 bp, Homo sapiens
gcatgcctggacttc

SEQ ID NO: 44639 - DNA, 15 bp, Homo sapiens
tgcatgcctggactt

SEQ ID NO: 44640 - DNA, 15 bp, Homo sapiens
ctgcatgcctggact

SEQ ID NO: 44641 - DNA, 15 bp, Homo sapiens
tctgcatgcctggac

SEQ ID NO: 44642 - DNA, 15 bp, Homo sapiens
atctgcatgcctgga

SEQ ID NO: 44643 - DNA, 15 bp, Homo sapiens
aatctgcatgcctgg

SEQ ID NO: 44644 - DNA, 15 bp, Homo sapiens
aaatctgcatgcctg

SEQ ID NO: 44645 - DNA, 15 bp, Homo sapiens
taaatctgcatgcct

SEQ ID NO: 44646 - DNA, 15 bp, Homo sapiens
ataaatctgcatgcc

SEQ ID NO: 44647 - DNA, 15 bp, Homo sapiens
gataaatctgcatgc

SEQ ID NO: 44648 - DNA, 15 bp, Homo sapiens
agataaatctgcatg

SEQ ID NO: 44649 - DNA, 15 bp, Homo sapiens
gagataaatctgcat

SEQ ID NO: 44650 - DNA, 15 bp, Homo sapiens
ggagataaatctgca

SEQ ID NO: 44651 - DNA, 15 bp, Homo sapiens
tggagataaatctgc

SEQ ID NO: 44652 - DNA, 15 bp, Homo sapiens
atggagataaatctg

SEQ ID NO: 44653 - DNA, 15 bp, Homo sapiens
gatggagataaatct

SEQ ID NO: 44654 - DNA, 15 bp, Homo sapiens
agatggagataaatc

SEQ ID NO: 44655 - DNA, 15 bp, Homo sapiens
gagatggagataaat

SEQ ID NO: 44656 - DNA, 15 bp, Homo sapiens
tgagatggagataaa

SEQ ID NO: 44657 - DNA, 15 bp, Homo sapiens
ttgagatggagataa

SEQ ID NO: 44658 - DNA, 15 bp, Homo sapiens
attgagatggagata

SEQ ID NO: 44659 - DNA, 15 bp, Homo sapiens
tattgagatggagat

SEQ ID NO: 44660 - DNA, 15 bp, Homo sapiens
ttattgagatggaga

SEQ ID NO: 44661 - DNA, 15 bp, Homo sapiens
gttattgagatggag

SEQ ID NO: 44662 - DNA, 15 bp, Homo sapiens
cgttattgagatgga

SEQ ID NO: 44663 - DNA, 15 bp, Homo sapiens
acgttattgagatgg

SEQ ID NO: 44664 - DNA, 15 bp, Homo sapiens
cacgttattgagatg

SEQ ID NO: 44665 - DNA, 15 bp, Homo sapiens
ccacgttattgagat

SEQ ID NO: 44666 - DNA, 15 bp, Homo sapiens
cccacgttattgaga

SEQ ID NO: 44667 - DNA, 15 bp, Homo sapiens
ccccacgttattgag

SEQ ID NO: 44668 - DNA, 15 bp, Homo sapiens
tccccacgttattga

SEQ ID NO: 44669 - DNA, 15 bp, Homo sapiens
ttccccacgttattg

SEQ ID NO: 44670 - DNA, 15 bp, Homo sapiens
tttccccacgttatt

SEQ ID NO: 44671 - DNA, 15 bp, Homo sapiens
ttttccccacgttat

SEQ ID NO: 44672 - DNA, 15 bp, Homo sapiens
tttttccccacgtta

SEQ ID NO: 44673 - DNA, 15 bp, Homo sapiens
ttttttccccacgtt

SEQ ID NO: 44674 - DNA, 15 bp, Homo sapiens
tttttttccccacgt

SEQ ID NO: 44675 - DNA, 15 bp, Homo sapiens
ttttttttccccacg

SEQ ID NO: 44676 - DNA, 15 bp, Homo sapiens
cttttttttccccac

SEQ ID NO: 44677 - DNA, 15 bp, Homo sapiens
tcttttttttcccca

SEQ ID NO: 44678 - DNA, 15 bp, Homo sapiens
ttcttttttttcccc

SEQ ID NO: 44679 - DNA, 15 bp, Homo sapiens
cttcttttttttccc

SEQ ID NO: 44680 - DNA, 15 bp, Homo sapiens
acttcttttttttcc

SEQ ID NO: 44681 - DNA, 15 bp, Homo sapiens
cacttcttttttttc

SEQ ID NO: 44682 - DNA, 15 bp, Homo sapiens
ccacttctttttttt

SEQ ID NO: 44683 - DNA, 15 bp, Homo sapiens
accacttcttttttt

SEQ ID NO: 44684 - DNA, 15 bp, Homo sapiens
aaccacttctttttt

SEQ ID NO: 44685 - DNA, 15 bp, Homo sapiens
aaaccacttcttttt

SEQ ID NO: 44686 - DNA, 15 bp, Homo sapiens
aaaaccacttctttt

SEQ ID NO: 44687 - DNA, 15 bp, Homo sapiens
aaaaaccacttcttt

SEQ ID NO: 44688 - DNA, 15 bp, Homo sapiens
caaaaaccacttctt

SEQ ID NO: 44689 - DNA, 15 bp, Homo sapiens
acaaaaaccacttct

SEQ ID NO: 44690 - DNA, 15 bp, Homo sapiens
cacaaaaaccacttc

SEQ ID NO: 44691 - DNA, 15 bp, Homo sapiens
ccacaaaaaccactt

SEQ ID NO: 44692 - DNA, 15 bp, Homo sapiens
tccacaaaaaccact

SEQ ID NO: 44693 - DNA, 15 bp, Homo sapiens
ttccacaaaaaccac

SEQ ID NO: 44694 - DNA, 15 bp, Homo sapiens
gttccacaaaaacca

SEQ ID NO: 44695 - DNA, 15 bp, Homo sapiens
ggttccacaaaaacc

SEQ ID NO: 44696 - DNA, 15 bp, Homo sapiens
tggttccacaaaaac

SEQ ID NO: 44697 - DNA, 15 bp, Homo sapiens
ctggttccacaaaaa

SEQ ID NO: 44698 - DNA, 15 bp, Homo sapiens
actggttccacaaaa

SEQ ID NO: 44699 - DNA, 15 bp, Homo sapiens
cactggttccacaaa

SEQ ID NO: 44700 - DNA, 15 bp, Homo sapiens
ccactggttccacaa

SEQ ID NO: 44701 - DNA, 15 bp, Homo sapiens
accactggttccaca

SEQ ID NO: 44702 - DNA, 15 bp, Homo sapiens
aaccactggttccac

SEQ ID NO: 44703 - DNA, 15 bp, Homo sapiens
gaaccactggttcca

SEQ ID NO: 44704 - DNA, 15 bp, Homo sapiens
ggaaccactggttcc

SEQ ID NO: 44705 - DNA, 15 bp, Homo sapiens
tggaaccactggttc

SEQ ID NO: 44706 - DNA, 15 bp, Homo sapiens
gtggaaccactggtt

SEQ ID NO: 44707 - DNA, 15 bp, Homo sapiens
agtggaaccactggt

SEQ ID NO: 44708 - DNA, 15 bp, Homo sapiens
cagtggaaccactgg

SEQ ID NO: 44709 - DNA, 15 bp, Homo sapiens
acagtggaaccactg

SEQ ID NO: 44710 - DNA, 15 bp, Homo sapiens
gacagtggaaccact

SEQ ID NO: 44711 - DNA, 15 bp, Homo sapiens
ggacagtggaaccac

SEQ ID NO: 44712 - DNA, 15 bp, Homo sapiens
tggacagtggaacca

SEQ ID NO: 44713 - DNA, 15 bp, Homo sapiens
gtggacagtggaacc

SEQ ID NO: 44714 - DNA, 15 bp, Homo sapiens
cgtggacagtggaac

SEQ ID NO: 44715 - DNA, 15 bp, Homo sapiens
acgtggacagtggaa

SEQ ID NO: 44716 - DNA, 15 bp, Homo sapiens
cacgtggacagtgga

SEQ ID NO: 44717 - DNA, 15 bp, Homo sapiens
acacgtggacagtgg

SEQ ID NO: 44718 - DNA, 15 bp, Homo sapiens
gacacgtggacagtg

SEQ ID NO: 44719 - DNA, 15 bp, Homo sapiens
agacacgtggacagt

SEQ ID NO: 44720 - DNA, 15 bp, Homo sapiens
aagacacgtggacag

SEQ ID NO: 44721 - DNA, 15 bp, Homo sapiens
gaagacacgtggaca

SEQ ID NO: 44722 - DNA, 15 bp, Homo sapiens
ggaagacacgtggac

SEQ ID NO: 44723 - DNA, 15 bp, Homo sapiens
tggaagacacgtgga

SEQ ID NO: 44724 - DNA, 15 bp, Homo sapiens
ctggaagacacgtgg

SEQ ID NO: 44725 - DNA, 15 bp, Homo sapiens
actggaagacacgtg

SEQ ID NO: 44726 - DNA, 15 bp, Homo sapiens
cactggaagacacgt

SEQ ID NO: 44727 - DNA, 15 bp, Homo sapiens
acactggaagacacg

SEQ ID NO: 44728 - DNA, 15 bp, Homo sapiens
cacactggaagacac

SEQ ID NO: 44729 - DNA, 15 bp, Homo sapiens
gcacactggaagaca

SEQ ID NO: 44730 - DNA, 15 bp, Homo sapiens
ggcacactggaagac

SEQ ID NO: 44731 - DNA, 15 bp, Homo sapiens
aggcacactggaaga

SEQ ID NO: 44732 - DNA, 15 bp, Homo sapiens
taggcacactggaag

SEQ ID NO: 44733 - DNA, 15 bp, Homo sapiens
ctaggcacactggaa

SEQ ID NO: 44734 - DNA, 15 bp, Homo sapiens
gctaggcacactgga

SEQ ID NO: 44735 - DNA, 15 bp, Homo sapiens
tgctaggcacactgg

SEQ ID NO: 44736 - DNA, 15 bp, Homo sapiens
gtgctaggcacactg

SEQ ID NO: 44737 - DNA, 15 bp, Homo sapiens
tgtgctaggcacact

SEQ ID NO: 44738 - DNA, 15 bp, Homo sapiens
atgtgctaggcacac

SEQ ID NO: 44739 - DNA, 15 bp, Homo sapiens
aatgtgctaggcaca

SEQ ID NO: 44740 - DNA, 15 bp, Homo sapiens
gaatgtgctaggcac

SEQ ID NO: 44741 - DNA, 15 bp, Homo sapiens
ggaatgtgctaggca

SEQ ID NO: 44742 - DNA, 15 bp, Homo sapiens
gggaatgtgctaggc

SEQ ID NO: 44743 - DNA, 15 bp, Homo sapiens
tgggaatgtgctagg

SEQ ID NO: 44744 - DNA, 15 bp, Homo sapiens
gtgggaatgtgctag

SEQ ID NO: 44745 - DNA, 15 bp, Homo sapiens
ggtgggaatgtgcta

SEQ ID NO: 44746 - DNA, 15 bp, Homo sapiens
tggtgggaatgtgct

SEQ ID NO: 44747 - DNA, 15 bp, Homo sapiens
ttggtgggaatgtgc

SEQ ID NO: 44748 - DNA, 15 bp, Homo sapiens
cttggtgggaatgtg

SEQ ID NO: 44749 - DNA, 15 bp, Homo sapiens
acttggtgggaatgt

SEQ ID NO: 44750 - DNA, 15 bp, Homo sapiens
cacttggtgggaatg

SEQ ID NO: 44751 - DNA, 15 bp, Homo sapiens
ccacttggtgggaat

SEQ ID NO: 44752 - DNA, 15 bp, Homo sapiens
tccacttggtgggaa

SEQ ID NO: 44753 - DNA, 15 bp, Homo sapiens
atccacttggtggga

SEQ ID NO: 44754 - DNA, 15 bp, Homo sapiens
gatccacttggtggg

SEQ ID NO: 44755 - DNA, 15 bp, Homo sapiens
agatccacttggtgg

SEQ ID NO: 44756 - DNA, 15 bp, Homo sapiens
aagatccacttggtg

SEQ ID NO: 44757 - DNA, 15 bp, Homo sapiens
caagatccacttggt

SEQ ID NO: 44758 - DNA, 15 bp, Homo sapiens
ccaagatccacttgg

SEQ ID NO: 44759 - DNA, 15 bp, Homo sapiens
accaagatccacttg

SEQ ID NO: 44760 - DNA, 15 bp, Homo sapiens
aaccaagatccactt

SEQ ID NO: 44761 - DNA, 15 bp, Homo sapiens
gaaccaagatccact

SEQ ID NO: 44762 - DNA, 15 bp, Homo sapiens
tgaaccaagatccac

SEQ ID NO: 44763 - DNA, 15 bp, Homo sapiens
atgaaccaagatcca

SEQ ID NO: 44764 - DNA, 15 bp, Homo sapiens
catgaaccaagatcc

SEQ ID NO: 44765 - DNA, 15 bp, Homo sapiens
tcatgaaccaagatc

SEQ ID NO: 44766 - DNA, 15 bp, Homo sapiens
ctcatgaaccaagat

SEQ ID NO: 44767 - DNA, 15 bp, Homo sapiens
cctcatgaaccaaga

SEQ ID NO: 44768 - DNA, 15 bp, Homo sapiens
ccctcatgaaccaag

SEQ ID NO: 44769 - DNA, 15 bp, Homo sapiens
tccctcatgaaccaa

SEQ ID NO: 44770 - DNA, 15 bp, Homo sapiens
ttccctcatgaacca

SEQ ID NO: 44771 - DNA, 15 bp, Homo sapiens
tttccctcatgaacc

SEQ ID NO: 44772 - DNA, 15 bp, Homo sapiens
ctttccctcatgaac

SEQ ID NO: 44773 - DNA, 15 bp, Homo sapiens
tctttccctcatgaa

SEQ ID NO: 44774 - DNA, 15 bp, Homo sapiens
ttctttccctcatga

SEQ ID NO: 44775 - DNA, 15 bp, Homo sapiens
cttctttccctcatg

SEQ ID NO: 44776 - DNA, 15 bp, Homo sapiens
ccttctttccctcat

SEQ ID NO: 44777 - DNA, 15 bp, Homo sapiens
cccttctttccctca

SEQ ID NO: 44778 - DNA, 15 bp, Homo sapiens
tcccttctttccctc

SEQ ID NO: 44779 - DNA, 15 bp, Homo sapiens
ttcccttctttccct

SEQ ID NO: 44780 - DNA, 15 bp, Homo sapiens
tttcccttctttccc

SEQ ID NO: 44781 - DNA, 15 bp, Homo sapiens
ctttcccttctttcc

SEQ ID NO: 44782 - DNA, 15 bp, Homo sapiens
actttcccttctttc

SEQ ID NO: 44783 - DNA, 15 bp, Homo sapiens
cactttcccttcttt

SEQ ID NO: 44784 - DNA, 15 bp, Homo sapiens
tcactttcccttctt

SEQ ID NO: 44785 - DNA, 15 bp, Homo sapiens
ctcactttcccttct

SEQ ID NO: 44786 - DNA, 15 bp, Homo sapiens
cctcactttcccttc

SEQ ID NO: 44787 - DNA, 15 bp, Homo sapiens
ccctcactttccctt

SEQ ID NO: 44788 - DNA, 15 bp, Homo sapiens
accctcactttccct

SEQ ID NO: 44789 - DNA, 15 bp, Homo sapiens
caccctcactttccc

SEQ ID NO: 44790 - DNA, 15 bp, Homo sapiens
gcaccctcactttcc

SEQ ID NO: 44791 - DNA, 15 bp, Homo sapiens
ggcaccctcactttc

SEQ ID NO: 44792 - DNA, 15 bp, Homo sapiens
gggcaccctcacttt

SEQ ID NO: 44793 - DNA, 15 bp, Homo sapiens
ggggcaccctcactt

SEQ ID NO: 44794 - DNA, 15 bp, Homo sapiens
cggggcaccctcact

SEQ ID NO: 44795 - DNA, 15 bp, Homo sapiens
tcggggcaccctcac

SEQ ID NO: 44796 - DNA, 15 bp, Homo sapiens
ctcggggcaccctca

SEQ ID NO: 44797 - DNA, 15 bp, Homo sapiens
cctcggggcaccctc

SEQ ID NO: 44798 - DNA, 15 bp, Homo sapiens
gcctcggggcaccct

SEQ ID NO: 44799 - DNA, 15 bp, Homo sapiens
agcctcggggcaccc

SEQ ID NO: 44800 - DNA, 15 bp, Homo sapiens
gagcctcggggcacc

SEQ ID NO: 44801 - DNA, 15 bp, Homo sapiens
ggagcctcggggcac

SEQ ID NO: 44802 - DNA, 15 bp, Homo sapiens
gggagcctcggggca

SEQ ID NO: 44803 - DNA, 15 bp, Homo sapiens
tgggagcctcggggc

SEQ ID NO: 44804 - DNA, 15 bp, Homo sapiens
ctgggagcctcgggg

SEQ ID NO: 44805 - DNA, 15 bp, Homo sapiens
tctgggagcctcggg

SEQ ID NO: 44806 - DNA, 15 bp, Homo sapiens
ttctgggagcctcgg

SEQ ID NO: 44807 - DNA, 15 bp, Homo sapiens
cttctgggagcctcg

SEQ ID NO: 44808 - DNA, 15 bp, Homo sapiens
tcttctgggagcctc

SEQ ID NO: 44809 - DNA, 15 bp, Homo sapiens
gtcttctgggagcct

SEQ ID NO: 44810 - DNA, 15 bp, Homo sapiens
tgtcttctgggagcc

SEQ ID NO: 44811 - DNA, 15 bp, Homo sapiens
ttgtcttctgggagc

SEQ ID NO: 44812 - DNA, 15 bp, Homo sapiens
cttgtcttctgggag

SEQ ID NO: 44813 - DNA, 15 bp, Homo sapiens
acttgtcttctggga

SEQ ID NO: 44814 - DNA, 15 bp, Homo sapiens
tacttgtcttctggg

SEQ ID NO: 44815 - DNA, 15 bp, Homo sapiens
ttacttgtcttctgg

SEQ ID NO: 44816 - DNA, 15 bp, Homo sapiens
attacttgtcttctg

SEQ ID NO: 44817 - DNA, 15 bp, Homo sapiens
cattacttgtcttct

SEQ ID NO: 44818 - DNA, 15 bp, Homo sapiens
acattacttgtcttc

SEQ ID NO: 44819 - DNA, 15 bp, Homo sapiens
gacattacttgtctt

SEQ ID NO: 44820 - DNA, 15 bp, Homo sapiens
tgacattacttgtct

SEQ ID NO: 44821 - DNA, 15 bp, Homo sapiens
gtgacattacttgtc

SEQ ID NO: 44822 - DNA, 15 bp, Homo sapiens
tgtgacattacttgt

SEQ ID NO: 44823 - DNA, 15 bp, Homo sapiens
ctgtgacattacttg

SEQ ID NO: 44824 - DNA, 15 bp, Homo sapiens
gctgtgacattactt

SEQ ID NO: 44825 - DNA, 15 bp, Homo sapiens
agctgtgacattact

SEQ ID NO: 44826 - DNA, 15 bp, Homo sapiens
cagctgtgacattac

SEQ ID NO: 44827 - DNA, 15 bp, Homo sapiens
tcagctgtgacatta

SEQ ID NO: 44828 - DNA, 15 bp, Homo sapiens
ctcagctgtgacatt

SEQ ID NO: 44829 - DNA, 15 bp, Homo sapiens
gctcagctgtgacat

SEQ ID NO: 44830 - DNA, 15 bp, Homo sapiens
agctcagctgtgaca

SEQ ID NO: 44831 - DNA, 15 bp, Homo sapiens
cagctcagctgtgac

SEQ ID NO: 44832 - DNA, 15 bp, Homo sapiens
acagctcagctgtga

SEQ ID NO: 44833 - DNA, 15 bp, Homo sapiens
cacagctcagctgtg

SEQ ID NO: 44834 - DNA, 15 bp, Homo sapiens
acacagctcagctgt

SEQ ID NO: 44835 - DNA, 15 bp, Homo sapiens
tacacagctcagctg

SEQ ID NO: 44836 - DNA, 15 bp, Homo sapiens
gtacacagctcagct

SEQ ID NO: 44837 - DNA, 15 bp, Homo sapiens
tgtacacagctcagc

SEQ ID NO: 44838 - DNA, 15 bp, Homo sapiens
ctgtacacagctcag

SEQ ID NO: 44839 - DNA, 15 bp, Homo sapiens
tctgtacacagctca

SEQ ID NO: 44840 - DNA, 15 bp, Homo sapiens
atctgtacacagctc

SEQ ID NO: 44841 - DNA, 15 bp, Homo sapiens
gatctgtacacagct

SEQ ID NO: 44842 - DNA, 15 bp, Homo sapiens
cgatctgtacacagc

SEQ ID NO: 44843 - DNA, 15 bp, Homo sapiens
tcgatctgtacacag

SEQ ID NO: 44844 - DNA, 15 bp, Homo sapiens
ttcgatctgtacaca

SEQ ID NO: 44845 - DNA, 15 bp, Homo sapiens
cttcgatctgtacac

SEQ ID NO: 44846 - DNA, 15 bp, Homo sapiens
tcttcgatctgtaca

SEQ ID NO: 44847 - DNA, 15 bp, Homo sapiens
ttcttcgatctgtac

SEQ ID NO: 44848 - DNA, 15 bp, Homo sapiens
cttcttcgatctgta

SEQ ID NO: 44849 - DNA, 15 bp, Homo sapiens
gcttcttcgatctgt

SEQ ID NO: 44850 - DNA, 15 bp, Homo sapiens
tgcttcttcgatctg

SEQ ID NO: 44851 - DNA, 15 bp, Homo sapiens
ctgcttcttcgatct

SEQ ID NO: 44852 - DNA, 15 bp, Homo sapiens
tctgcttcttcgatc

SEQ ID NO: 44853 - DNA, 15 bp, Homo sapiens
atctgcttcttcgat

SEQ ID NO: 44854 - DNA, 15 bp, Homo sapiens
catctgcttcttcga

SEQ ID NO: 44855 - DNA, 15 bp, Homo sapiens
ccatctgcttcttcg

SEQ ID NO: 44856 - DNA, 15 bp, Homo sapiens
tccatctgcttcttc

SEQ ID NO: 44857 - DNA, 15 bp, Homo sapiens
atccatctgcttctt

SEQ ID NO: 44858 - DNA, 15 bp, Homo sapiens
tatccatctgcttct

SEQ ID NO: 44859 - DNA, 15 bp, Homo sapiens
ttatccatctgcttc

SEQ ID NO: 44860 - DNA, 15 bp, Homo sapiens
cttatccatctgctt

SEQ ID NO: 44861 - DNA, 15 bp, Homo sapiens
ccttatccatctgct

SEQ ID NO: 44862 - DNA, 15 bp, Homo sapiens
tccttatccatctgc

SEQ ID NO: 44863 - DNA, 15 bp, Homo sapiens
ctccttatccatctg

SEQ ID NO: 44864 - DNA, 15 bp, Homo sapiens
actccttatccatct

SEQ ID NO: 44865 - DNA, 15 bp, Homo sapiens
cactccttatccatc

SEQ ID NO: 44866 - DNA, 15 bp, Homo sapiens
tcactccttatccat

SEQ ID NO: 44867 - DNA, 15 bp, Homo sapiens
ttcactccttatcca

SEQ ID NO: 44868 - DNA, 15 bp, Homo sapiens
gttcactccttatcc

SEQ ID NO: 44869 - DNA, 15 bp, Homo sapiens
tgttcactccttatc

SEQ ID NO: 44870 - DNA, 15 bp, Homo sapiens
ttgttcactccttat

SEQ ID NO: 44871 - DNA, 15 bp, Homo sapiens
tttgttcactcctta

SEQ ID NO: 44872 - DNA, 15 bp, Homo sapiens
ctttgttcactcctt

SEQ ID NO: 44873 - DNA, 15 bp, Homo sapiens
actttgttcactcct

SEQ ID NO: 44874 - DNA, 15 bp, Homo sapiens
gactttgttcactcc

SEQ ID NO: 44875 - DNA, 15 bp, Homo sapiens
tgactttgttcactc

SEQ ID NO: 44876 - DNA, 15 bp, Homo sapiens
atgactttgttcact

SEQ ID NO: 44877 - DNA, 15 bp, Homo sapiens
gatgactttgttcac

SEQ ID NO: 44878 - DNA, 15 bp, Homo sapiens
ggatgactttgttca

SEQ ID NO: 44879 - DNA, 15 bp, Homo sapiens
aggatgactttgttc

SEQ ID NO: 44880 - DNA, 15 bp, Homo sapiens
aaggatgactttgtt

SEQ ID NO: 44881 - DNA, 15 bp, Homo sapiens
caaggatgactttgt

SEQ ID NO: 44882 - DNA, 15 bp, Homo sapiens
acaaggatgactttg

SEQ ID NO: 44883 - DNA, 15 bp, Homo sapiens
gacaaggatgacttt

SEQ ID NO: 44884 - DNA, 15 bp, Homo sapiens
agacaaggatgactt

SEQ ID NO: 44885 - DNA, 15 bp, Homo sapiens
aagacaaggatgact

SEQ ID NO: 44886 - DNA, 15 bp, Homo sapiens
caagacaaggatgac

SEQ ID NO: 44887 - DNA, 15 bp, Homo sapiens
tcaagacaaggatga

SEQ ID NO: 44888 - DNA, 15 bp, Homo sapiens
ctcaagacaaggatg

SEQ ID NO: 44889 - DNA, 15 bp, Homo sapiens
cctcaagacaaggat

SEQ ID NO: 44890 - DNA, 15 bp, Homo sapiens
ccctcaagacaagga

SEQ ID NO: 44891 - DNA, 15 bp, Homo sapiens
cccctcaagacaagg

SEQ ID NO: 44892 - DNA, 15 bp, Homo sapiens
acccctcaagacaag

SEQ ID NO: 44893 - DNA, 15 bp, Homo sapiens
gacccctcaagacaa

SEQ ID NO: 44894 - DNA, 15 bp, Homo sapiens
agacccctcaagaca

SEQ ID NO: 44895 - DNA, 15 bp, Homo sapiens
aagacccctcaagac

SEQ ID NO: 44896 - DNA, 15 bp, Homo sapiens
aaagacccctcaaga

SEQ ID NO: 44897 - DNA, 15 bp, Homo sapiens
taaagacccctcaag

SEQ ID NO: 44898 - DNA, 15 bp, Homo sapiens
ataaagacccctcaa

SEQ ID NO: 44899 - DNA, 15 bp, Homo sapiens
aataaagacccctca

SEQ ID NO: 44900 - DNA, 15 bp, Homo sapiens
aaataaagacccctc

SEQ ID NO: 44901 - DNA, 15 bp, Homo sapiens
taaataaagacccct

SEQ ID NO: 44902 - DNA, 15 bp, Homo sapiens
ctaaataaagacccc

SEQ ID NO: 44903 - DNA, 15 bp, Homo sapiens
gctaaataaagaccc

SEQ ID NO: 44904 - DNA, 15 bp, Homo sapiens
agctaaataaagacc

SEQ ID NO: 44905 - DNA, 15 bp, Homo sapiens
aagctaaataaagac

SEQ ID NO: 44906 - DNA, 15 bp, Homo sapiens
gaagctaaataaaga

SEQ ID NO: 44907 - DNA, 15 bp, Homo sapiens
agaagctaaataaag

SEQ ID NO: 44908 - DNA, 15 bp, Homo sapiens
aagaagctaaataaa

SEQ ID NO: 44909 - DNA, 15 bp, Homo sapiens
gaagaagctaaataa

SEQ ID NO: 44910 - DNA, 15 bp, Homo sapiens
agaagaagctaaata

SEQ ID NO: 44911 - DNA, 15 bp, Homo sapiens
aagaagaagctaaat

SEQ ID NO: 44912 - DNA, 15 bp, Homo sapiens
caagaagaagctaaa

SEQ ID NO: 44913 - DNA, 15 bp, Homo sapiens
tcaagaagaagctaa

SEQ ID NO: 44914 - DNA, 15 bp, Homo sapiens
gtcaagaagaagcta

SEQ ID NO: 44915 - DNA, 15 bp, Homo sapiens
agtcaagaagaagct

SEQ ID NO: 44916 - DNA, 15 bp, Homo sapiens
gagtcaagaagaagc

SEQ ID NO: 44917 - DNA, 15 bp, Homo sapiens
agagtcaagaagaag

SEQ ID NO: 44918 - DNA, 15 bp, Homo sapiens
aagagtcaagaagaa

SEQ ID NO: 44919 - DNA, 15 bp, Homo sapiens
taagagtcaagaaga

SEQ ID NO: 44920 - DNA, 15 bp, Homo sapiens
ctaagagtcaagaag

SEQ ID NO: 44921 - DNA, 15 bp, Homo sapiens
tctaagagtcaagaa

SEQ ID NO: 44922 - DNA, 15 bp, Homo sapiens
gtctaagagtcaaga

SEQ ID NO: 44923 - DNA, 15 bp, Homo sapiens
tgtctaagagtcaag

SEQ ID NO: 44924 - DNA, 15 bp, Homo sapiens
ttgtctaagagtcaa

SEQ ID NO: 44925 - DNA, 15 bp, Homo sapiens
cttgtctaagagtca

SEQ ID NO: 44926 - DNA, 15 bp, Homo sapiens
ccttgtctaagagtc

SEQ ID NO: 44927 - DNA, 15 bp, Homo sapiens
tccttgtctaagagt

SEQ ID NO: 44928 - DNA, 15 bp, Homo sapiens
gtccttgtctaagag

SEQ ID NO: 44929 - DNA, 15 bp, Homo sapiens
ggtccttgtctaaga

SEQ ID NO: 44930 - DNA, 15 bp, Homo sapiens
gggtccttgtctaag

SEQ ID NO: 44931 - DNA, 15 bp, Homo sapiens
tgggtccttgtctaa

SEQ ID NO: 44932 - DNA, 15 bp, Homo sapiens
ctgggtccttgtcta

SEQ ID NO: 44933 - DNA, 15 bp, Homo sapiens
tctgggtccttgtct

SEQ ID NO: 44934 - DNA, 15 bp, Homo sapiens
ttctgggtccttgtc

SEQ ID NO: 44935 - DNA, 15 bp, Homo sapiens
attctgggtccttgt

SEQ ID NO: 44936 - DNA, 15 bp, Homo sapiens
tattctgggtccttg

SEQ ID NO: 44937 - DNA, 15 bp, Homo sapiens
gtattctgggtcctt

SEQ ID NO: 44938 - DNA, 15 bp, Homo sapiens
tgtattctgggtcct

SEQ ID NO: 44939 - DNA, 15 bp, Homo sapiens
ctgtattctgggtcc

SEQ ID NO: 44940 - DNA, 15 bp, Homo sapiens
tctgtattctgggtc

SEQ ID NO: 44941 - DNA, 15 bp, Homo sapiens
atctgtattctgggt

SEQ ID NO: 44942 - DNA, 15 bp, Homo sapiens
catctgtattctggg

SEQ ID NO: 44943 - DNA, 15 bp, Homo sapiens
ccatctgtattctgg

SEQ ID NO: 44944 - DNA, 15 bp, Homo sapiens
cccatctgtattctg

SEQ ID NO: 44945 - DNA, 15 bp, Homo sapiens
ccccatctgtattct

SEQ ID NO: 44946 - DNA, 15 bp, Homo sapiens
gccccatctgtattc

SEQ ID NO: 44947 - DNA, 15 bp, Homo sapiens
agccccatctgtatt

SEQ ID NO: 44948 - DNA, 15 bp, Homo sapiens
aagccccatctgtat

SEQ ID NO: 44949 - DNA, 15 bp, Homo sapiens
caagccccatctgta

SEQ ID NO: 44950 - DNA, 15 bp, Homo sapiens
acaagccccatctgt

SEQ ID NO: 44951 - DNA, 15 bp, Homo sapiens
aacaagccccatctg

SEQ ID NO: 44952 - DNA, 15 bp, Homo sapiens
caacaagccccatct

SEQ ID NO: 44953 - DNA, 15 bp, Homo sapiens
acaacaagccccatc

SEQ ID NO: 44954 - DNA, 15 bp, Homo sapiens
aacaacaagccccat

SEQ ID NO: 44955 - DNA, 15 bp, Homo sapiens
taacaacaagcccca

SEQ ID NO: 44956 - DNA, 15 bp, Homo sapiens
gtaacaacaagcccc

SEQ ID NO: 44957 - DNA, 15 bp, Homo sapiens
ggtaacaacaagccc

SEQ ID NO: 44958 - DNA, 15 bp, Homo sapiens
aggtaacaacaagcc

SEQ ID NO: 44959 - DNA, 15 bp, Homo sapiens
aaggtaacaacaagc

SEQ ID NO: 44960 - DNA, 15 bp, Homo sapiens
gaaggtaacaacaag

SEQ ID NO: 44961 - DNA, 15 bp, Homo sapiens
tgaaggtaacaacaa

SEQ ID NO: 44962 - DNA, 15 bp, Homo sapiens
ctgaaggtaacaaca

SEQ ID NO: 44963 - DNA, 15 bp, Homo sapiens
gctgaaggtaacaac

SEQ ID NO: 44964 - DNA, 15 bp, Homo sapiens
ggctgaaggtaacaa

SEQ ID NO: 44965 - DNA, 15 bp, Homo sapiens
aggctgaaggtaaca

SEQ ID NO: 44966 - DNA, 15 bp, Homo sapiens
gaggctgaaggtaac

SEQ ID NO: 44967 - DNA, 15 bp, Homo sapiens
tgaggctgaaggtaa

SEQ ID NO: 44968 - DNA, 15 bp, Homo sapiens
atgaggctgaaggta

SEQ ID NO: 44969 - DNA, 15 bp, Homo sapiens
catgaggctgaaggt

SEQ ID NO: 44970 - DNA, 15 bp, Homo sapiens
ccatgaggctgaagg

SEQ ID NO: 44971 - DNA, 15 bp, Homo sapiens
gccatgaggctgaag

SEQ ID NO: 44972 - DNA, 15 bp, Homo sapiens
agccatgaggctgaa

SEQ ID NO: 44973 - DNA, 15 bp, Homo sapiens
aagccatgaggctga

SEQ ID NO: 44974 - DNA, 15 bp, Homo sapiens
aaagccatgaggctg

SEQ ID NO: 44975 - DNA, 15 bp, Homo sapiens
aaaagccatgaggct

SEQ ID NO: 44976 - DNA, 15 bp, Homo sapiens
aaaaagccatgaggc

SEQ ID NO: 44977 - DNA, 15 bp, Homo sapiens
taaaaagccatgagg

SEQ ID NO: 44978 - DNA, 15 bp, Homo sapiens
ctaaaaagccatgag

SEQ ID NO: 44979 - DNA, 15 bp, Homo sapiens
cctaaaaagccatga

SEQ ID NO: 44980 - DNA, 15 bp, Homo sapiens
ccctaaaaagccatg

SEQ ID NO: 44981 - DNA, 15 bp, Homo sapiens
gccctaaaaagccat

SEQ ID NO: 44982 - DNA, 15 bp, Homo sapiens
agccctaaaaagcca

SEQ ID NO: 44983 - DNA, 15 bp, Homo sapiens
tagccctaaaaagcc

SEQ ID NO: 44984 - DNA, 15 bp, Homo sapiens
ctagccctaaaaagc

SEQ ID NO: 44985 - DNA, 15 bp, Homo sapiens
tctagccctaaaaag

SEQ ID NO: 44986 - DNA, 15 bp, Homo sapiens
atctagccctaaaaa

SEQ ID NO: 44987 - DNA, 15 bp, Homo sapiens
tatctagccctaaaa

SEQ ID NO: 44988 - DNA, 15 bp, Homo sapiens
gtatctagccctaaa

SEQ ID NO: 44989 - DNA, 15 bp, Homo sapiens
agtatctagccctaa

SEQ ID NO: 44990 - DNA, 15 bp, Homo sapiens
aagtatctagcccta

SEQ ID NO: 44991 - DNA, 15 bp, Homo sapiens
gaagtatctagccct

SEQ ID NO: 44992 - DNA, 15 bp, Homo sapiens
tgaagtatctagccc

SEQ ID NO: 44993 - DNA, 15 bp, Homo sapiens
ctgaagtatctagcc

SEQ ID NO: 44994 - DNA, 15 bp, Homo sapiens
gctgaagtatctagc

SEQ ID NO: 44995 - DNA, 15 bp, Homo sapiens
agctgaagtatctag

SEQ ID NO: 44996 - DNA, 15 bp, Homo sapiens
aagctgaagtatcta

SEQ ID NO: 44997 - DNA, 15 bp, Homo sapiens
caagctgaagtatct

SEQ ID NO: 44998 - DNA, 15 bp, Homo sapiens
acaagctgaagtatc

SEQ ID NO: 44999 - DNA, 15 bp, Homo sapiens
aacaagctgaagtat

SEQ ID NO: 45000 - DNA, 15 bp, Homo sapiens
taacaagctgaagta

SEQ ID NO: 45001 - DNA, 15 bp, Homo sapiens
gtaacaagctgaagt

SEQ ID NO: 45002 - DNA, 15 bp, Homo sapiens
tgtaacaagctgaag

SEQ ID NO: 45003 - DNA, 15 bp, Homo sapiens
atgtaacaagctgaa

SEQ ID NO: 45004 - DNA, 15 bp, Homo sapiens
catgtaacaagctga

SEQ ID NO: 45005 - DNA, 15 bp, Homo sapiens
gcatgtaacaagctg

SEQ ID NO: 45006 - DNA, 15 bp, Homo sapiens
tgcatgtaacaagct

SEQ ID NO: 45007 - DNA, 15 bp, Homo sapiens
ctgcatgtaacaagc

SEQ ID NO: 45008 - DNA, 15 bp, Homo sapiens
actgcatgtaacaag

SEQ ID NO: 45009 - DNA, 15 bp, Homo sapiens
gactgcatgtaacaa

SEQ ID NO: 45010 - DNA, 15 bp, Homo sapiens
ggactgcatgtaaca

SEQ ID NO: 45011 - DNA, 15 bp, Homo sapiens
aggactgcatgtaac

SEQ ID NO: 45012 - DNA, 15 bp, Homo sapiens
aaggactgcatgtaa

SEQ ID NO: 45013 - DNA, 15 bp, Homo sapiens
taaggactgcatgta

SEQ ID NO: 45014 - DNA, 15 bp, Homo sapiens
ttaaggactgcatgt

SEQ ID NO: 45015 - DNA, 15 bp, Homo sapiens
tttaaggactgcatg

SEQ ID NO: 45016 - DNA, 15 bp, Homo sapiens
ctttaaggactgcat

SEQ ID NO: 45017 - DNA, 15 bp, Homo sapiens
gctttaaggactgca

SEQ ID NO: 45018 - DNA, 15 bp, Homo sapiens
cgctttaaggactgc

SEQ ID NO: 45019 - DNA, 15 bp, Homo sapiens
acgctttaaggactg

SEQ ID NO: 45020 - DNA, 15 bp, Homo sapiens
gacgctttaaggact

SEQ ID NO: 45021 - DNA, 15 bp, Homo sapiens
agacgctttaaggac

SEQ ID NO: 45022 - DNA, 15 bp, Homo sapiens
cagacgctttaagga

SEQ ID NO: 45023 - DNA, 15 bp, Homo sapiens
acagacgctttaagg

SEQ ID NO: 45024 - DNA, 15 bp, Homo sapiens
cacagacgctttaag

SEQ ID NO: 45025 - DNA, 15 bp, Homo sapiens
acacagacgctttaa

SEQ ID NO: 45026 - DNA, 15 bp, Homo sapiens
cacacagacgcttta

SEQ ID NO: 45027 - DNA, 15 bp, Homo sapiens
ccacacagacgcttt

SEQ ID NO: 45028 - DNA, 15 bp, Homo sapiens
cccacacagacgctt

SEQ ID NO: 45029 - DNA, 15 bp, Homo sapiens
acccacacagacgct

SEQ ID NO: 45030 - DNA, 15 bp, Homo sapiens
aacccacacagacgc

SEQ ID NO: 45031 - DNA, 15 bp, Homo sapiens
aaacccacacagacg

SEQ ID NO: 45032 - DNA, 15 bp, Homo sapiens
aaaacccacacagac

SEQ ID NO: 45033 - DNA, 15 bp, Homo sapiens
aaaaacccacacaga

SEQ ID NO: 45034 - DNA, 15 bp, Homo sapiens
caaaaacccacacag

SEQ ID NO: 45035 - DNA, 15 bp, Homo sapiens
gcaaaaacccacaca

SEQ ID NO: 45036 - DNA, 15 bp, Homo sapiens
tgcaaaaacccacac

SEQ ID NO: 45037 - DNA, 15 bp, Homo sapiens
ctgcaaaaacccaca

SEQ ID NO: 45038 - DNA, 15 bp, Homo sapiens
cctgcaaaaacccac

SEQ ID NO: 45039 - DNA, 15 bp, Homo sapiens
tcctgcaaaaaccca

SEQ ID NO: 45040 - DNA, 15 bp, Homo sapiens
ctcctgcaaaaaccc

SEQ ID NO: 45041 - DNA, 15 bp, Homo sapiens
tctcctgcaaaaacc

SEQ ID NO: 45042 - DNA, 15 bp, Homo sapiens
ctctcctgcaaaaac

SEQ ID NO: 45043 - DNA, 15 bp, Homo sapiens
tctctcctgcaaaaa

SEQ ID NO: 45044 - DNA, 15 bp, Homo sapiens
ttctctcctgcaaaa

SEQ ID NO: 45045 - DNA, 15 bp, Homo sapiens
gttctctcctgcaaa

SEQ ID NO: 45046 - DNA, 15 bp, Homo sapiens
tgttctctcctgcaa

SEQ ID NO: 45047 - DNA, 15 bp, Homo sapiens
gtgttctctcctgca

SEQ ID NO: 45048 - DNA, 15 bp, Homo sapiens
agtgttctctcctgc

SEQ ID NO: 45049 - DNA, 15 bp, Homo sapiens
aagtgttctctcctg

SEQ ID NO: 45050 - DNA, 15 bp, Homo sapiens
caagtgttctctcct

SEQ ID NO: 45051 - DNA, 15 bp, Homo sapiens
gcaagtgttctctcc

SEQ ID NO: 45052 - DNA, 15 bp, Homo sapiens
agcaagtgttctctc

SEQ ID NO: 45053 - DNA, 15 bp, Homo sapiens
gagcaagtgttctct

SEQ ID NO: 45054 - DNA, 15 bp, Homo sapiens
cgagcaagtgttctc

SEQ ID NO: 45055 - DNA, 15 bp, Homo sapiens
acgagcaagtgttct

SEQ ID NO: 45056 - DNA, 15 bp, Homo sapiens
cacgagcaagtgttc

SEQ ID NO: 45057 - DNA, 15 bp, Homo sapiens
acacgagcaagtgtt

SEQ ID NO: 45058 - DNA, 15 bp, Homo sapiens
aacacgagcaagtgt

SEQ ID NO: 45059 - DNA, 15 bp, Homo sapiens
gaacacgagcaagtg

SEQ ID NO: 45060 - DNA, 15 bp, Homo sapiens
agaacacgagcaagt

SEQ ID NO: 45061 - DNA, 15 bp, Homo sapiens
gagaacacgagcaag

SEQ ID NO: 45062 - DNA, 15 bp, Homo sapiens
ggagaacacgagcaa

SEQ ID NO: 45063 - DNA, 15 bp, Homo sapiens
aggagaacacgagca

SEQ ID NO: 45064 - DNA, 15 bp, Homo sapiens
caggagaacacgagc

SEQ ID NO: 45065 - DNA, 15 bp, Homo sapiens
acaggagaacacgag

SEQ ID NO: 45066 - DNA, 15 bp, Homo sapiens
gacaggagaacacga

SEQ ID NO: 45067 - DNA, 15 bp, Homo sapiens
agacaggagaacacg

SEQ ID NO: 45068 - DNA, 15 bp, Homo sapiens
cagacaggagaacac

SEQ ID NO: 45069 - DNA, 15 bp, Homo sapiens
ccagacaggagaaca

SEQ ID NO: 45070 - DNA, 15 bp, Homo sapiens
tccagacaggagaac

SEQ ID NO: 45071 - DNA, 15 bp, Homo sapiens
ttccagacaggagaa

SEQ ID NO: 45072 - DNA, 15 bp, Homo sapiens
gttccagacaggaga

SEQ ID NO: 45073 - DNA, 15 bp, Homo sapiens
ggttccagacaggag

SEQ ID NO: 45074 - DNA, 15 bp, Homo sapiens
gggttccagacagga

SEQ ID NO: 45075 - DNA, 15 bp, Homo sapiens
cgggttccagacagg

SEQ ID NO: 45076 - DNA, 15 bp, Homo sapiens
ccgggttccagacag

SEQ ID NO: 45077 - DNA, 15 bp, Homo sapiens
tccgggttccagaca

SEQ ID NO: 45078 - DNA, 15 bp, Homo sapiens
gtccgggttccagac

SEQ ID NO: 45079 - DNA, 15 bp, Homo sapiens
tgtccgggttccaga

SEQ ID NO: 45080 - DNA, 15 bp, Homo sapiens
atgtccgggttccag

SEQ ID NO: 45081 - DNA, 15 bp, Homo sapiens
aatgtccgggttcca

SEQ ID NO: 45082 - DNA, 15 bp, Homo sapiens
caatgtccgggttcc

SEQ ID NO: 45083 - DNA, 15 bp, Homo sapiens
acaatgtccgggttc

SEQ ID NO: 45084 - DNA, 15 bp, Homo sapiens
aacaatgtccgggtt

SEQ ID NO: 45085 - DNA, 15 bp, Homo sapiens
caacaatgtccgggt

SEQ ID NO: 45086 - DNA, 15 bp, Homo sapiens
ccaacaatgtccggg

SEQ ID NO: 45087 - DNA, 15 bp, Homo sapiens
tccaacaatgtccgg

SEQ ID NO: 45088 - DNA, 15 bp, Homo sapiens
ttccaacaatgtccg

SEQ ID NO: 45089 - DNA, 15 bp, Homo sapiens
tttccaacaatgtcc

SEQ ID NO: 45090 - DNA, 15 bp, Homo sapiens
ctttccaacaatgtc

SEQ ID NO: 45091 - DNA, 15 bp, Homo sapiens
actttccaacaatgt

SEQ ID NO: 45092 - DNA, 15 bp, Homo sapiens
tactttccaacaatg

SEQ ID NO: 45093 - DNA, 15 bp, Homo sapiens
atactttccaacaat

SEQ ID NO: 45094 - DNA, 15 bp, Homo sapiens
gatactttccaacaa

SEQ ID NO: 45095 - DNA, 15 bp, Homo sapiens
tgatactttccaaca

SEQ ID NO: 45096 - DNA, 15 bp, Homo sapiens
ctgatactttccaac

SEQ ID NO: 45097 - DNA, 15 bp, Homo sapiens
tctgatactttccaa

SEQ ID NO: 45098 - DNA, 15 bp, Homo sapiens
atctgatactttcca

SEQ ID NO: 45099 - DNA, 15 bp, Homo sapiens
aatctgatactttcc

SEQ ID NO: 45100 - DNA, 15 bp, Homo sapiens
aaatctgatactttc

SEQ ID NO: 45101 - DNA, 15 bp, Homo sapiens
aaaatctgatacttt

SEQ ID NO: 45102 - DNA, 15 bp, Homo sapiens
caaaatctgatactt

SEQ ID NO: 45103 - DNA, 15 bp, Homo sapiens
acaaaatctgatact

SEQ ID NO: 45104 - DNA, 15 bp, Homo sapiens
aacaaaatctgatac

SEQ ID NO: 45105 - DNA, 15 bp, Homo sapiens
aaacaaaatctgata

SEQ ID NO: 45106 - DNA, 15 bp, Homo sapiens
caaacaaaatctgat

SEQ ID NO: 45107 - DNA, 15 bp, Homo sapiens
ccaaacaaaatctga

SEQ ID NO: 45108 - DNA, 15 bp, Homo sapiens
gccaaacaaaatctg

SEQ ID NO: 45109 - DNA, 15 bp, Homo sapiens
agccaaacaaaatct

SEQ ID NO: 45110 - DNA, 15 bp, Homo sapiens
aagccaaacaaaatc

SEQ ID NO: 45111 - DNA, 15 bp, Homo sapiens
aaagccaaacaaaat

SEQ ID NO: 45112 - DNA, 15 bp, Homo sapiens
caaagccaaacaaaa

SEQ ID NO: 45113 - DNA, 15 bp, Homo sapiens
acaaagccaaacaaa

SEQ ID NO: 45114 - DNA, 15 bp, Homo sapiens
cacaaagccaaacaa

SEQ ID NO: 45115 - DNA, 15 bp, Homo sapiens
acacaaagccaaaca

SEQ ID NO: 45116 - DNA, 15 bp, Homo sapiens
cacacaaagccaaac

SEQ ID NO: 45117 - DNA, 15 bp, Homo sapiens
tcacacaaagccaaa

SEQ ID NO: 45118 - DNA, 15 bp, Homo sapiens
atcacacaaagccaa

SEQ ID NO: 45119 - DNA, 15 bp, Homo sapiens
aatcacacaaagcca

SEQ ID NO: 45120 - DNA, 15 bp, Homo sapiens
aaatcacacaaagcc

SEQ ID NO: 45121 - DNA, 15 bp, Homo sapiens
caaatcacacaaagc

SEQ ID NO: 45122 - DNA, 15 bp, Homo sapiens
tcaaatcacacaaag

SEQ ID NO: 45123 - DNA, 15 bp, Homo sapiens
gtcaaatcacacaaa

SEQ ID NO: 45124 - DNA, 15 bp, Homo sapiens
agtcaaatcacacaa

SEQ ID NO: 45125 - DNA, 15 bp, Homo sapiens
cagtcaaatcacaca

SEQ ID NO: 45126 - DNA, 15 bp, Homo sapiens
gcagtcaaatcacac

SEQ ID NO: 45127 - DNA, 15 bp, Homo sapiens
ggcagtcaaatcaca

SEQ ID NO: 45128 - DNA, 15 bp, Homo sapiens
gggcagtcaaatcac

SEQ ID NO: 45129 - DNA, 15 bp, Homo sapiens
tgggcagtcaaatca

SEQ ID NO: 45130 - DNA, 15 bp, Homo sapiens
gtgggcagtcaaatc

SEQ ID NO: 45131 - DNA, 15 bp, Homo sapiens
ggtgggcagtcaaat

SEQ ID NO: 45132 - DNA, 15 bp, Homo sapiens
aggtgggcagtcaaa

SEQ ID NO: 45133 - DNA, 15 bp, Homo sapiens
caggtgggcagtcaa

SEQ ID NO: 45134 - DNA, 15 bp, Homo sapiens
acaggtgggcagtca

SEQ ID NO: 45135 - DNA, 15 bp, Homo sapiens
aacaggtgggcagtc

SEQ ID NO: 45136 - DNA, 15 bp, Homo sapiens
aaacaggtgggcagt

SEQ ID NO: 45137 - DNA, 15 bp, Homo sapiens
taaacaggtgggcag

SEQ ID NO: 45138 - DNA, 15 bp, Homo sapiens
gtaaacaggtgggca

SEQ ID NO: 45139 - DNA, 15 bp, Homo sapiens
agtaaacaggtgggc

SEQ ID NO: 45140 - DNA, 15 bp, Homo sapiens
aagtaaacaggtggg

SEQ ID NO: 45141 - DNA, 15 bp, Homo sapiens
caagtaaacaggtgg

SEQ ID NO: 45142 - DNA, 15 bp, Homo sapiens
gcaagtaaacaggtg

SEQ ID NO: 45143 - DNA, 15 bp, Homo sapiens
agcaagtaaacaggt

SEQ ID NO: 45144 - DNA, 15 bp, Homo sapiens
aagcaagtaaacagg

SEQ ID NO: 45145 - DNA, 15 bp, Homo sapiens
aaagcaagtaaacag

SEQ ID NO: 45146 - DNA, 15 bp, Homo sapiens
gaaagcaagtaaaca

SEQ ID NO: 45147 - DNA, 15 bp, Homo sapiens
agaaagcaagtaaac

SEQ ID NO: 45148 - DNA, 15 bp, Homo sapiens
gagaaagcaagtaaa

SEQ ID NO: 45149 - DNA, 15 bp, Homo sapiens
ggagaaagcaagtaa

SEQ ID NO: 45150 - DNA, 15 bp, Homo sapiens
gggagaaagcaagta

SEQ ID NO: 45151 - DNA, 15 bp, Homo sapiens
tgggagaaagcaagt

SEQ ID NO: 45152 - DNA, 15 bp, Homo sapiens
ctgggagaaagcaag

SEQ ID NO: 45153 - DNA, 15 bp, Homo sapiens
gctgggagaaagcaa

SEQ ID NO: 45154 - DNA, 15 bp, Homo sapiens
tgctgggagaaagca

SEQ ID NO: 45155 - DNA, 15 bp, Homo sapiens
ttgctgggagaaagc

SEQ ID NO: 45156 - DNA, 15 bp, Homo sapiens
cttgctgggagaaag

SEQ ID NO: 45157 - DNA, 15 bp, Homo sapiens
gcttgctgggagaaa

SEQ ID NO: 45158 - DNA, 15 bp, Homo sapiens
tgcttgctgggagaa

SEQ ID NO: 45159 - DNA, 15 bp, Homo sapiens
ctgcttgctgggaga

SEQ ID NO: 45160 - DNA, 15 bp, Homo sapiens
gctgcttgctgggag

SEQ ID NO: 45161 - DNA, 15 bp, Homo sapiens
ggctgcttgctggga

SEQ ID NO: 45162 - DNA, 15 bp, Homo sapiens
cggctgcttgctggg

SEQ ID NO: 45163 - DNA, 15 bp, Homo sapiens
gcggctgcttgctgg

SEQ ID NO: 45164 - DNA, 15 bp, Homo sapiens
tgcggctgcttgctg

SEQ ID NO: 45165 - DNA, 15 bp, Homo sapiens
ttgcggctgcttgct

SEQ ID NO: 45166 - DNA, 15 bp, Homo sapiens
attgcggctgcttgc

SEQ ID NO: 45167 - DNA, 15 bp, Homo sapiens
gattgcggctgcttg

SEQ ID NO: 45168 - DNA, 15 bp, Homo sapiens
ggattgcggctgctt

SEQ ID NO: 45169 - DNA, 15 bp, Homo sapiens
gggattgcggctgct

SEQ ID NO: 45170 - DNA, 15 bp, Homo sapiens
ggggattgcggctgc

SEQ ID NO: 45171 - DNA, 15 bp, Homo sapiens
tggggattgcggctg

SEQ ID NO: 45172 - DNA, 15 bp, Homo sapiens
atggggattgcggct

SEQ ID NO: 45173 - DNA, 15 bp, Homo sapiens
catggggattgcggc

SEQ ID NO: 45174 - DNA, 15 bp, Homo sapiens
ccatggggattgcgg

SEQ ID NO: 45175 - DNA, 15 bp, Homo sapiens
cccatggggattgcg

SEQ ID NO: 45176 - DNA, 15 bp, Homo sapiens
acccatggggattgc

SEQ ID NO: 45177 - DNA, 15 bp, Homo sapiens
aacccatggggattg

SEQ ID NO: 45178 - DNA, 15 bp, Homo sapiens
caacccatggggatt

SEQ ID NO: 45179 - DNA, 15 bp, Homo sapiens
ccaacccatggggat

SEQ ID NO: 45180 - DNA, 15 bp, Homo sapiens
accaacccatgggga

SEQ ID NO: 45181 - DNA, 15 bp, Homo sapiens
taccaacccatgggg

SEQ ID NO: 45182 - DNA, 15 bp, Homo sapiens
ttaccaacccatggg

SEQ ID NO: 45183 - DNA, 15 bp, Homo sapiens
attaccaacccatgg

SEQ ID NO: 45184 - DNA, 15 bp, Homo sapiens
cattaccaacccatg

SEQ ID NO: 45185 - DNA, 15 bp, Homo sapiens
ccattaccaacccat

SEQ ID NO: 45186 - DNA, 15 bp, Homo sapiens
cccattaccaaccca

SEQ ID NO: 45187 - DNA, 15 bp, Homo sapiens
acccattaccaaccc

SEQ ID NO: 45188 - DNA, 15 bp, Homo sapiens
cacccattaccaacc

SEQ ID NO: 45189 - DNA, 15 bp, Homo sapiens
ccacccattaccaac

SEQ ID NO: 45190 - DNA, 15 bp, Homo sapiens
tccacccattaccaa

SEQ ID NO: 45191 - DNA, 15 bp, Homo sapiens
ttccacccattacca

SEQ ID NO: 45192 - DNA, 15 bp, Homo sapiens
attccacccattacc

SEQ ID NO: 45193 - DNA, 15 bp, Homo sapiens
cattccacccattac

SEQ ID NO: 45194 - DNA, 15 bp, Homo sapiens
tcattccacccatta

SEQ ID NO: 45195 - DNA, 15 bp, Homo sapiens
gtcattccacccatt

SEQ ID NO: 45196 - DNA, 15 bp, Homo sapiens
tgtcattccacccat

SEQ ID NO: 45197 - DNA, 15 bp, Homo sapiens
gtgtcattccaccca

SEQ ID NO: 45198 - DNA, 15 bp, Homo sapiens
tgtgtcattccaccc

SEQ ID NO: 45199 - DNA, 15 bp, Homo sapiens
gtgtgtcattccacc

SEQ ID NO: 45200 - DNA, 15 bp, Homo sapiens
agtgtgtcattccac

SEQ ID NO: 45201 - DNA, 15 bp, Homo sapiens
cagtgtgtcattcca

SEQ ID NO: 45202 - DNA, 15 bp, Homo sapiens
acagtgtgtcattcc

SEQ ID NO: 45203 - DNA, 15 bp, Homo sapiens
cacagtgtgtcattc

SEQ ID NO: 45204 - DNA, 15 bp, Homo sapiens
acacagtgtgtcatt

SEQ ID NO: 45205 - DNA, 15 bp, Homo sapiens
tacacagtgtgtcat

SEQ ID NO: 45206 - DNA, 15 bp, Homo sapiens
ctacacagtgtgtca

SEQ ID NO: 45207 - DNA, 15 bp, Homo sapiens
tctacacagtgtgtc

SEQ ID NO: 45208 - DNA, 15 bp, Homo sapiens
atctacacagtgtgt

SEQ ID NO: 45209 - DNA, 15 bp, Homo sapiens
aatctacacagtgtg

SEQ ID NO: 45210 - DNA, 15 bp, Homo sapiens
aaatctacacagtgt

SEQ ID NO: 45211 - DNA, 15 bp, Homo sapiens
taaatctacacagtg

SEQ ID NO: 45212 - DNA, 15 bp, Homo sapiens
gtaaatctacacagt

SEQ ID NO: 45213 - DNA, 15 bp, Homo sapiens
agtaaatctacacag

SEQ ID NO: 45214 - DNA, 15 bp, Homo sapiens
gagtaaatctacaca

SEQ ID NO: 45215 - DNA, 15 bp, Homo sapiens
agagtaaatctacac

SEQ ID NO: 45216 - DNA, 15 bp, Homo sapiens
aagagtaaatctaca

SEQ ID NO: 45217 - DNA, 15 bp, Homo sapiens
gaagagtaaatctac

SEQ ID NO: 45218 - DNA, 15 bp, Homo sapiens
tgaagagtaaatcta

SEQ ID NO: 45219 - DNA, 15 bp, Homo sapiens
ctgaagagtaaatct

SEQ ID NO: 45220 - DNA, 15 bp, Homo sapiens
tctgaagagtaaatc

SEQ ID NO: 45221 - DNA, 15 bp, Homo sapiens
gtctgaagagtaaat

SEQ ID NO: 45222 - DNA, 15 bp, Homo sapiens
agtctgaagagtaaa

SEQ ID NO: 45223 - DNA, 15 bp, Homo sapiens
gagtctgaagagtaa

SEQ ID NO: 45224 - DNA, 15 bp, Homo sapiens
agagtctgaagagta

SEQ ID NO: 45225 - DNA, 15 bp, Homo sapiens
tagagtctgaagagt

SEQ ID NO: 45226 - DNA, 15 bp, Homo sapiens
atagagtctgaagag

SEQ ID NO: 45227 - DNA, 15 bp, Homo sapiens
catagagtctgaaga

SEQ ID NO: 45228 - DNA, 15 bp, Homo sapiens
acatagagtctgaag

SEQ ID NO: 45229 - DNA, 15 bp, Homo sapiens
aacatagagtctgaa

SEQ ID NO: 45230 - DNA, 15 bp, Homo sapiens
gaacatagagtctga

SEQ ID NO: 45231 - DNA, 15 bp, Homo sapiens
tgaacatagagtctg

SEQ ID NO: 45232 - DNA, 15 bp, Homo sapiens
gtgaacatagagtct

SEQ ID NO: 45233 - DNA, 15 bp, Homo sapiens
ggtgaacatagagtc

SEQ ID NO: 45234 - DNA, 15 bp, Homo sapiens
aggtgaacatagagt

SEQ ID NO: 45235 - DNA, 15 bp, Homo sapiens
gaggtgaacatagag

SEQ ID NO: 45236 - DNA, 15 bp, Homo sapiens
tgaggtgaacataga

SEQ ID NO: 45237 - DNA, 15 bp, Homo sapiens
atgaggtgaacatag

SEQ ID NO: 45238 - DNA, 15 bp, Homo sapiens
aatgaggtgaacata

SEQ ID NO: 45239 - DNA, 15 bp, Homo sapiens
gaatgaggtgaacat

SEQ ID NO: 45240 - DNA, 15 bp, Homo sapiens
agaatgaggtgaaca

SEQ ID NO: 45241 - DNA, 15 bp, Homo sapiens
aagaatgaggtgaac

SEQ ID NO: 45242 - DNA, 15 bp, Homo sapiens
taagaatgaggtgaa

SEQ ID NO: 45243 - DNA, 15 bp, Homo sapiens
ataagaatgaggtga

SEQ ID NO: 45244 - DNA, 15 bp, Homo sapiens
cataagaatgaggtg

SEQ ID NO: 45245 - DNA, 15 bp, Homo sapiens
ccataagaatgaggt

SEQ ID NO: 45246 - DNA, 15 bp, Homo sapiens
cccataagaatgagg

SEQ ID NO: 45247 - DNA, 15 bp, Homo sapiens
tcccataagaatgag

SEQ ID NO: 45248 - DNA, 15 bp, Homo sapiens
ttcccataagaatga

SEQ ID NO: 45249 - DNA, 15 bp, Homo sapiens
tttcccataagaatg

SEQ ID NO: 45250 - DNA, 15 bp, Homo sapiens
ttttcccataagaat

SEQ ID NO: 45251 - DNA, 15 bp, Homo sapiens
cttttcccataagaa

SEQ ID NO: 45252 - DNA, 15 bp, Homo sapiens
tcttttcccataaga

SEQ ID NO: 45253 - DNA, 15 bp, Homo sapiens
ttcttttcccataag

SEQ ID NO: 45254 - DNA, 15 bp, Homo sapiens
cttcttttcccataa

SEQ ID NO: 45255 - DNA, 15 bp, Homo sapiens
tcttcttttcccata

SEQ ID NO: 45256 - DNA, 15 bp, Homo sapiens
ctcttcttttcccat

SEQ ID NO: 45257 - DNA, 15 bp, Homo sapiens
gctcttcttttccca

SEQ ID NO: 45258 - DNA, 15 bp, Homo sapiens
tgctcttcttttccc

SEQ ID NO: 45259 - DNA, 15 bp, Homo sapiens
gtgctcttcttttcc

SEQ ID NO: 45260 - DNA, 15 bp, Homo sapiens
agtgctcttcttttc

SEQ ID NO: 45261 - DNA, 15 bp, Homo sapiens
tagtgctcttctttt

SEQ ID NO: 45262 - DNA, 15 bp, Homo sapiens
ctagtgctcttcttt

SEQ ID NO: 45263 - DNA, 15 bp, Homo sapiens
gctagtgctcttctt

SEQ ID NO: 45264 - DNA, 15 bp, Homo sapiens
agctagtgctcttct

SEQ ID NO: 45265 - DNA, 15 bp, Homo sapiens
cagctagtgctcttc

SEQ ID NO: 45266 - DNA, 15 bp, Homo sapiens
ccagctagtgctctt

SEQ ID NO: 45267 - DNA, 15 bp, Homo sapiens
accagctagtgctct

SEQ ID NO: 45268 - DNA, 15 bp, Homo sapiens
taccagctagtgctc

SEQ ID NO: 45269 - DNA, 15 bp, Homo sapiens
ctaccagctagtgct

SEQ ID NO: 45270 - DNA, 15 bp, Homo sapiens
tctaccagctagtgc

SEQ ID NO: 45271 - DNA, 15 bp, Homo sapiens
atctaccagctagtg

SEQ ID NO: 45272 - DNA, 15 bp, Homo sapiens
tatctaccagctagt

SEQ ID NO: 45273 - DNA, 15 bp, Homo sapiens
atatctaccagctag

SEQ ID NO: 45274 - DNA, 15 bp, Homo sapiens
tatatctaccagcta

SEQ ID NO: 45275 - DNA, 15 bp, Homo sapiens
ctatatctaccagct

SEQ ID NO: 45276 - DNA, 15 bp, Homo sapiens
gctatatctaccagc

SEQ ID NO: 45277 - DNA, 15 bp, Homo sapiens
tgctatatctaccag

SEQ ID NO: 45278 - DNA, 15 bp, Homo sapiens
ctgctatatctacca

SEQ ID NO: 45279 - DNA, 15 bp, Homo sapiens
actgctatatctacc

SEQ ID NO: 45280 - DNA, 15 bp, Homo sapiens
cactgctatatctac

SEQ ID NO: 45281 - DNA, 15 bp, Homo sapiens
acactgctatatcta

SEQ ID NO: 45282 - DNA, 15 bp, Homo sapiens
cacactgctatatct

SEQ ID NO: 45283 - DNA, 15 bp, Homo sapiens
acacactgctatatc

SEQ ID NO: 45284 - DNA, 15 bp, Homo sapiens
aacacactgctatat

SEQ ID NO: 45285 - DNA, 15 bp, Homo sapiens
taacacactgctata

SEQ ID NO: 45286 - DNA, 15 bp, Homo sapiens
ttaacacactgctat

SEQ ID NO: 45287 - DNA, 15 bp, Homo sapiens
attaacacactgcta

SEQ ID NO: 45288 - DNA, 15 bp, Homo sapiens
tattaacacactgct

SEQ ID NO: 45289 - DNA, 15 bp, Homo sapiens
atattaacacactgc

SEQ ID NO: 45290 - DNA, 15 bp, Homo sapiens
catattaacacactg

SEQ ID NO: 45291 - DNA, 15 bp, Homo sapiens
tcatattaacacact

SEQ ID NO: 45292 - DNA, 15 bp, Homo sapiens
gtcatattaacacac

SEQ ID NO: 45293 - DNA, 15 bp, Homo sapiens
agtcatattaacaca

SEQ ID NO: 45294 - DNA, 15 bp, Homo sapiens
cagtcatattaacac

SEQ ID NO: 45295 - DNA, 15 bp, Homo sapiens
gcagtcatattaaca

SEQ ID NO: 45296 - DNA, 15 bp, Homo sapiens
agcagtcatattaac

SEQ ID NO: 45297 - DNA, 15 bp, Homo sapiens
gagcagtcatattaa

SEQ ID NO: 45298 - DNA, 15 bp, Homo sapiens
tgagcagtcatatta

SEQ ID NO: 45299 - DNA, 15 bp, Homo sapiens
ttgagcagtcatatt

SEQ ID NO: 45300 - DNA, 15 bp, Homo sapiens
gttgagcagtcatat

SEQ ID NO: 45301 - DNA, 15 bp, Homo sapiens
agttgagcagtcata

SEQ ID NO: 45302 - DNA, 15 bp, Homo sapiens
gagttgagcagtcat

SEQ ID NO: 45303 - DNA, 15 bp, Homo sapiens
ggagttgagcagtca

SEQ ID NO: 45304 - DNA, 15 bp, Homo sapiens
tggagttgagcagtc

SEQ ID NO: 45305 - DNA, 15 bp, Homo sapiens
atggagttgagcagt

SEQ ID NO: 45306 - DNA, 15 bp, Homo sapiens
aatggagttgagcag

SEQ ID NO: 45307 - DNA, 15 bp, Homo sapiens
aaatggagttgagca

SEQ ID NO: 45308 - DNA, 15 bp, Homo sapiens
taaatggagttgagc

SEQ ID NO: 45309 - DNA, 15 bp, Homo sapiens
gtaaatggagttgag

SEQ ID NO: 45310 - DNA, 15 bp, Homo sapiens
tgtaaatggagttga

SEQ ID NO: 45311 - DNA, 15 bp, Homo sapiens
gtgtaaatggagttg

SEQ ID NO: 45312 - DNA, 15 bp, Homo sapiens
tgtgtaaatggagtt

SEQ ID NO: 45313 - DNA, 15 bp, Homo sapiens
ctgtgtaaatggagt

SEQ ID NO: 45314 - DNA, 15 bp, Homo sapiens
tctgtgtaaatggag

SEQ ID NO: 45315 - DNA, 15 bp, Homo sapiens
gtctgtgtaaatgga

SEQ ID NO: 45316 - DNA, 15 bp, Homo sapiens
tgtctgtgtaaatgg

SEQ ID NO: 45317 - DNA, 15 bp, Homo sapiens
atgtctgtgtaaatg

SEQ ID NO: 45318 - DNA, 15 bp, Homo sapiens
aatgtctgtgtaaat

SEQ ID NO: 45319 - DNA, 15 bp, Homo sapiens
aaatgtctgtgtaaa

SEQ ID NO: 45320 - DNA, 15 bp, Homo sapiens
aaaatgtctgtgtaa

SEQ ID NO: 45321 - DNA, 15 bp, Homo sapiens
gaaaatgtctgtgta

SEQ ID NO: 45322 - DNA, 15 bp, Homo sapiens
tgaaaatgtctgtgt

SEQ ID NO: 45323 - DNA, 15 bp, Homo sapiens
gtgaaaatgtctgtg

SEQ ID NO: 45324 - DNA, 15 bp, Homo sapiens
ggtgaaaatgtctgt

SEQ ID NO: 45325 - DNA, 15 bp, Homo sapiens
aggtgaaaatgtctg

SEQ ID NO: 45326 - DNA, 15 bp, Homo sapiens
aaggtgaaaatgtct

SEQ ID NO: 45327 - DNA, 15 bp, Homo sapiens
taaggtgaaaatgtc

SEQ ID NO: 45328 - DNA, 15 bp, Homo sapiens
ctaaggtgaaaatgt

SEQ ID NO: 45329 - DNA, 15 bp, Homo sapiens
actaaggtgaaaatg

SEQ ID NO: 45330 - DNA, 15 bp, Homo sapiens
aactaaggtgaaaat

SEQ ID NO: 45331 - DNA, 15 bp, Homo sapiens
taactaaggtgaaaa

SEQ ID NO: 45332 - DNA, 15 bp, Homo sapiens
ataactaaggtgaaa

SEQ ID NO: 45333 - DNA, 15 bp, Homo sapiens
tataactaaggtgaa

SEQ ID NO: 45334 - DNA, 15 bp, Homo sapiens
gtataactaaggtga

SEQ ID NO: 45335 - DNA, 15 bp, Homo sapiens
agtataactaaggtg

SEQ ID NO: 45336 - DNA, 15 bp, Homo sapiens
tagtataactaaggt

SEQ ID NO: 45337 - DNA, 15 bp, Homo sapiens
atagtataactaagg

SEQ ID NO: 45338 - DNA, 15 bp, Homo sapiens
aatagtataactaag

SEQ ID NO: 45339 - DNA, 15 bp, Homo sapiens
aaatagtataactaa

SEQ ID NO: 45340 - DNA, 15 bp, Homo sapiens
gaaatagtataacta

SEQ ID NO: 45341 - DNA, 15 bp, Homo sapiens
agaaatagtataact

SEQ ID NO: 45342 - DNA, 15 bp, Homo sapiens
aagaaatagtataac

SEQ ID NO: 45343 - DNA, 15 bp, Homo sapiens
gaagaaatagtataa

SEQ ID NO: 45344 - DNA, 15 bp, Homo sapiens
tgaagaaatagtata

SEQ ID NO: 45345 - DNA, 15 bp, Homo sapiens
atgaagaaatagtat

SEQ ID NO: 45346 - DNA, 15 bp, Homo sapiens
aatgaagaaatagta

SEQ ID NO: 45347 - DNA, 15 bp, Homo sapiens
taatgaagaaatagt

SEQ ID NO: 45348 - DNA, 15 bp, Homo sapiens
ttaatgaagaaatag

SEQ ID NO: 45349 - DNA, 15 bp, Homo sapiens
tttaatgaagaaata

SEQ ID NO: 45350 - DNA, 15 bp, Homo sapiens
atttaatgaagaaat

SEQ ID NO: 45351 - DNA, 15 bp, Homo sapiens
tatttaatgaagaaa

SEQ ID NO: 45352 - DNA, 15 bp, Homo sapiens
atatttaatgaagaa

SEQ ID NO: 45353 - DNA, 15 bp, Homo sapiens
aatatttaatgaaga

SEQ ID NO: 45354 - DNA, 15 bp, Homo sapiens
caatatttaatgaag

SEQ ID NO: 45355 - DNA, 15 bp, Homo sapiens
acaatatttaatgaa

SEQ ID NO: 45356 - DNA, 15 bp, Homo sapiens
aacaatatttaatga

SEQ ID NO: 45357 - DNA, 15 bp, Homo sapiens
caacaatatttaatg

SEQ ID NO: 45358 - DNA, 15 bp, Homo sapiens
gcaacaatatttaat

SEQ ID NO: 45359 - DNA, 15 bp, Homo sapiens
ggcaacaatatttaa

SEQ ID NO: 45360 - DNA, 15 bp, Homo sapiens
tggcaacaatattta

SEQ ID NO: 45361 - DNA, 15 bp, Homo sapiens
ctggcaacaatattt

SEQ ID NO: 45362 - DNA, 15 bp, Homo sapiens
tctggcaacaatatt

SEQ ID NO: 45363 - DNA, 15 bp, Homo sapiens
atctggcaacaatat

SEQ ID NO: 45364 - DNA, 15 bp, Homo sapiens
gatctggcaacaata

SEQ ID NO: 45365 - DNA, 15 bp, Homo sapiens
agatctggcaacaat

SEQ ID NO: 45366 - DNA, 15 bp, Homo sapiens
tagatctggcaacaa

SEQ ID NO: 45367 - DNA, 15 bp, Homo sapiens
ttagatctggcaaca

SEQ ID NO: 45368 - DNA, 15 bp, Homo sapiens
cttagatctggcaac

SEQ ID NO: 45369 - DNA, 15 bp, Homo sapiens
tcttagatctggcaa

SEQ ID NO: 45370 - DNA, 15 bp, Homo sapiens
atcttagatctggca

SEQ ID NO: 45371 - DNA, 15 bp, Homo sapiens
tatcttagatctggc

SEQ ID NO: 45372 - DNA, 15 bp, Homo sapiens
gtatcttagatctgg

SEQ ID NO: 45373 - DNA, 15 bp, Homo sapiens
tgtatcttagatctg

SEQ ID NO: 45374 - DNA, 15 bp, Homo sapiens
ctgtatcttagatct

SEQ ID NO: 45375 - DNA, 15 bp, Homo sapiens
cctgtatcttagatc

SEQ ID NO: 45376 - DNA, 15 bp, Homo sapiens
acctgtatcttagat

SEQ ID NO: 45377 - DNA, 15 bp, Homo sapiens
aacctgtatcttaga

SEQ ID NO: 45378 - DNA, 15 bp, Homo sapiens
aaacctgtatcttag

SEQ ID NO: 45379 - DNA, 15 bp, Homo sapiens
taaacctgtatctta

SEQ ID NO: 45380 - DNA, 15 bp, Homo sapiens
ttaaacctgtatctt

SEQ ID NO: 45381 - DNA, 15 bp, Homo sapiens
attaaacctgtatct

SEQ ID NO: 45382 - DNA, 15 bp, Homo sapiens
aattaaacctgtatc

SEQ ID NO: 45383 - DNA, 15 bp, Homo sapiens
aaattaaacctgtat

SEQ ID NO: 45384 - DNA, 15 bp, Homo sapiens
aaaattaaacctgta

SEQ ID NO: 45385 - DNA, 15 bp, Homo sapiens
aaaaattaaacctgt

SEQ ID NO: 45386 - DNA, 15 bp, Homo sapiens
aaaaaattaaacctg

SEQ ID NO: 45387 - DNA, 15 bp, Homo sapiens
gaaaaaattaaacct

SEQ ID NO: 45388 - DNA, 15 bp, Homo sapiens
ggaaaaaattaaacc

SEQ ID NO: 45389 - DNA, 15 bp, Homo sapiens
aggaaaaaattaaac

SEQ ID NO: 45390 - DNA, 15 bp, Homo sapiens
gaggaaaaaattaaa

SEQ ID NO: 45391 - DNA, 15 bp, Homo sapiens
agaggaaaaaattaa

SEQ ID NO: 45392 - DNA, 15 bp, Homo sapiens
cagaggaaaaaatta

SEQ ID NO: 45393 - DNA, 15 bp, Homo sapiens
tcagaggaaaaaatt

SEQ ID NO: 45394 - DNA, 15 bp, Homo sapiens
ttcagaggaaaaaat

SEQ ID NO: 45395 - DNA, 15 bp, Homo sapiens
attcagaggaaaaaa

SEQ ID NO: 45396 - DNA, 15 bp, Homo sapiens
aattcagaggaaaaa

SEQ ID NO: 45397 - DNA, 15 bp, Homo sapiens
taattcagaggaaaa

SEQ ID NO: 45398 - DNA, 15 bp, Homo sapiens
ataattcagaggaaa

SEQ ID NO: 45399 - DNA, 15 bp, Homo sapiens
cataattcagaggaa

SEQ ID NO: 45400 - DNA, 15 bp, Homo sapiens
acataattcagagga

SEQ ID NO: 45401 - DNA, 15 bp, Homo sapiens
cacataattcagagg

SEQ ID NO: 45402 - DNA, 15 bp, Homo sapiens
ccacataattcagag

SEQ ID NO: 45403 - DNA, 15 bp, Homo sapiens
accacataattcaga

SEQ ID NO: 45404 - DNA, 15 bp, Homo sapiens
taccacataattcag

SEQ ID NO: 45405 - DNA, 15 bp, Homo sapiens
ctaccacataattca

SEQ ID NO: 45406 - DNA, 15 bp, Homo sapiens
actaccacataattc

SEQ ID NO: 45407 - DNA, 15 bp, Homo sapiens
tactaccacataatt

SEQ ID NO: 45408 - DNA, 15 bp, Homo sapiens
ctactaccacataat

SEQ ID NO: 45409 - DNA, 15 bp, Homo sapiens
tctactaccacataa

SEQ ID NO: 45410 - DNA, 15 bp, Homo sapiens
atctactaccacata

SEQ ID NO: 45411 - DNA, 15 bp, Homo sapiens
catctactaccacat

SEQ ID NO: 45412 - DNA, 15 bp, Homo sapiens
acatctactaccaca

SEQ ID NO: 45413 - DNA, 15 bp, Homo sapiens
tacatctactaccac

SEQ ID NO: 45414 - DNA, 15 bp, Homo sapiens
atacatctactacca

SEQ ID NO: 45415 - DNA, 15 bp, Homo sapiens
aatacatctactacc

SEQ ID NO: 45416 - DNA, 15 bp, Homo sapiens
aaatacatctactac

SEQ ID NO: 45417 - DNA, 15 bp, Homo sapiens
taaatacatctacta

SEQ ID NO: 45418 - DNA, 15 bp, Homo sapiens
ttaaatacatctact

SEQ ID NO: 45419 - DNA, 15 bp, Homo sapiens
gttaaatacatctac

SEQ ID NO: 45420 - DNA, 15 bp, Homo sapiens
agttaaatacatcta

SEQ ID NO: 45421 - DNA, 15 bp, Homo sapiens
tagttaaatacatct

SEQ ID NO: 45422 - DNA, 15 bp, Homo sapiens
atagttaaatacatc

SEQ ID NO: 45423 - DNA, 15 bp, Homo sapiens
catagttaaatacat

SEQ ID NO: 45424 - DNA, 15 bp, Homo sapiens
acatagttaaataca

SEQ ID NO: 45425 - DNA, 15 bp, Homo sapiens
aacatagttaaatac

SEQ ID NO: 45426 - DNA, 15 bp, Homo sapiens
aaacatagttaaata

SEQ ID NO: 45427 - DNA, 15 bp, Homo sapiens
taaacatagttaaat

SEQ ID NO: 45428 - DNA, 15 bp, Homo sapiens
ctaaacatagttaaa

SEQ ID NO: 45429 - DNA, 15 bp, Homo sapiens
tctaaacatagttaa

SEQ ID NO: 45430 - DNA, 15 bp, Homo sapiens
ttctaaacatagtta

SEQ ID NO: 45431 - DNA, 15 bp, Homo sapiens
tttctaaacatagtt

SEQ ID NO: 45432 - DNA, 15 bp, Homo sapiens
gtttctaaacatagt

SEQ ID NO: 45433 - DNA, 15 bp, Homo sapiens
tgtttctaaacatag

SEQ ID NO: 45434 - DNA, 15 bp, Homo sapiens
ctgtttctaaacata

SEQ ID NO: 45435 - DNA, 15 bp, Homo sapiens
gctgtttctaaacat

SEQ ID NO: 45436 - DNA, 15 bp, Homo sapiens
tgctgtttctaaaca

SEQ ID NO: 45437 - DNA, 15 bp, Homo sapiens
ttgctgtttctaaac

SEQ ID NO: 45438 - DNA, 15 bp, Homo sapiens
tttgctgtttctaaa

SEQ ID NO: 45439 - DNA, 15 bp, Homo sapiens
ttttgctgtttctaa

SEQ ID NO: 45440 - DNA, 15 bp, Homo sapiens
tttttgctgtttcta

SEQ ID NO: 45441 - DNA, 15 bp, Homo sapiens
ttttttgctgtttct

SEQ ID NO: 45442 - DNA, 15 bp, Homo sapiens
attttttgctgtttc

SEQ ID NO: 45443 - DNA, 15 bp, Homo sapiens
cattttttgctgttt

SEQ ID NO: 45444 - DNA, 15 bp, Homo sapiens
tcattttttgctgtt

SEQ ID NO: 45445 - DNA, 15 bp, Homo sapiens
ttcattttttgctgt

SEQ ID NO: 45446 - DNA, 15 bp, Homo sapiens
cttcattttttgctg

SEQ ID NO: 45447 - DNA, 15 bp, Homo sapiens
gcttcattttttgct

SEQ ID NO: 45448 - DNA, 15 bp, Homo sapiens
cgcttcattttttgc

SEQ ID NO: 45449 - DNA, 15 bp, Homo sapiens
acgcttcattttttg

SEQ ID NO: 45450 - DNA, 15 bp, Homo sapiens
aacgcttcatttttt

SEQ ID NO: 45451 - DNA, 15 bp, Homo sapiens
aaacgcttcattttt

SEQ ID NO: 45452 - DNA, 15 bp, Homo sapiens
caaacgcttcatttt

SEQ ID NO: 45453 - DNA, 15 bp, Homo sapiens
tcaaacgcttcattt

SEQ ID NO: 45454 - DNA, 15 bp, Homo sapiens
ttcaaacgcttcatt

SEQ ID NO: 45455 - DNA, 15 bp, Homo sapiens
attcaaacgcttcat

SEQ ID NO: 45456 - DNA, 15 bp, Homo sapiens
cattcaaacgcttca

SEQ ID NO: 45457 - DNA, 15 bp, Homo sapiens
gcattcaaacgcttc

SEQ ID NO: 45458 - DNA, 15 bp, Homo sapiens
cgcattcaaacgctt

SEQ ID NO: 45459 - DNA, 15 bp, Homo sapiens
acgcattcaaacgct

SEQ ID NO: 45460 - DNA, 15 bp, Homo sapiens
aacgcattcaaacgc

SEQ ID NO: 45461 - DNA, 15 bp, Homo sapiens
taacgcattcaaacg

SEQ ID NO: 45462 - DNA, 15 bp, Homo sapiens
ttaacgcattcaaac

SEQ ID NO: 45463 - DNA, 15 bp, Homo sapiens
tttaacgcattcaaa

SEQ ID NO: 45464 - DNA, 15 bp, Homo sapiens
gtttaacgcattcaa

SEQ ID NO: 45465 - DNA, 15 bp, Homo sapiens
tgtttaacgcattca

SEQ ID NO: 45466 - DNA, 15 bp, Homo sapiens
gtgtttaacgcattc

SEQ ID NO: 45467 - DNA, 15 bp, Homo sapiens
tgtgtttaacgcatt

SEQ ID NO: 45468 - DNA, 15 bp, Homo sapiens
atgtgtttaacgcat

SEQ ID NO: 45469 - DNA, 15 bp, Homo sapiens
gatgtgtttaacgca

SEQ ID NO: 45470 - DNA, 15 bp, Homo sapiens
agatgtgtttaacgc

SEQ ID NO: 45471 - DNA, 15 bp, Homo sapiens
tagatgtgtttaacg

SEQ ID NO: 45472 - DNA, 15 bp, Homo sapiens
ttagatgtgtttaac

SEQ ID NO: 45473 - DNA, 15 bp, Homo sapiens
attagatgtgtttaa

SEQ ID NO: 45474 - DNA, 15 bp, Homo sapiens
aattagatgtgttta

SEQ ID NO: 45475 - DNA, 15 bp, Homo sapiens
aaattagatgtgttt

SEQ ID NO: 45476 - DNA, 15 bp, Homo sapiens
caaattagatgtgtt

SEQ ID NO: 45477 - DNA, 15 bp, Homo sapiens
tcaaattagatgtgt

SEQ ID NO: 45478 - DNA, 15 bp, Homo sapiens
ttcaaattagatgtg

SEQ ID NO: 45479 - DNA, 15 bp, Homo sapiens
tttcaaattagatgt

SEQ ID NO: 45480 - DNA, 15 bp, Homo sapiens
ctttcaaattagatg

SEQ ID NO: 45481 - DNA, 15 bp, Homo sapiens
actttcaaattagat

SEQ ID NO: 45482 - DNA, 15 bp, Homo sapiens
aactttcaaattaga

SEQ ID NO: 45483 - DNA, 15 bp, Homo sapiens
taactttcaaattag

SEQ ID NO: 45484 - DNA, 15 bp, Homo sapiens
ttaactttcaaatta

SEQ ID NO: 45485 - DNA, 15 bp, Homo sapiens
attaactttcaaatt

SEQ ID NO: 45486 - DNA, 15 bp, Homo sapiens
tattaactttcaaat

SEQ ID NO: 45487 - DNA, 15 bp, Homo sapiens
atattaactttcaaa

SEQ ID NO: 45488 - DNA, 15 bp, Homo sapiens
aatattaactttcaa

SEQ ID NO: 45489 - DNA, 15 bp, Homo sapiens
aaatattaactttca

SEQ ID NO: 45490 - DNA, 15 bp, Homo sapiens
taaatattaactttc

SEQ ID NO: 45491 - DNA, 15 bp, Homo sapiens
ctaaatattaacttt

SEQ ID NO: 45492 - DNA, 15 bp, Homo sapiens
cctaaatattaactt

SEQ ID NO: 45493 - DNA, 15 bp, Homo sapiens
acctaaatattaact

SEQ ID NO: 45494 - DNA, 15 bp, Homo sapiens
aacctaaatattaac

SEQ ID NO: 45495 - DNA, 15 bp, Homo sapiens
caacctaaatattaa

SEQ ID NO: 45496 - DNA, 15 bp, Homo sapiens
acaacctaaatatta

SEQ ID NO: 45497 - DNA, 15 bp, Homo sapiens
aacaacctaaatatt

SEQ ID NO: 45498 - DNA, 15 bp, Homo sapiens
caacaacctaaatat

SEQ ID NO: 45499 - DNA, 15 bp, Homo sapiens
tcaacaacctaaata

SEQ ID NO: 45500 - DNA, 15 bp, Homo sapiens
atcaacaacctaaat

SEQ ID NO: 45501 - DNA, 15 bp, Homo sapiens
aatcaacaacctaaa

SEQ ID NO: 45502 - DNA, 15 bp, Homo sapiens
aaatcaacaacctaa

SEQ ID NO: 45503 - DNA, 15 bp, Homo sapiens
taaatcaacaaccta

SEQ ID NO: 45504 - DNA, 15 bp, Homo sapiens
ataaatcaacaacct

SEQ ID NO: 45505 - DNA, 15 bp, Homo sapiens
aataaatcaacaacc

SEQ ID NO: 45506 - DNA, 15 bp, Homo sapiens
aaataaatcaacaac

SEQ ID NO: 45507 - DNA, 15 bp, Homo sapiens
aaaataaatcaacaa

SEQ ID NO: 45508 - DNA, 15 bp, Homo sapiens
aaaaataaatcaaca

SEQ ID NO: 45509 - DNA, 15 bp, Homo sapiens
aaaaaataaatcaac

SEQ ID NO: 45510 - DNA, 15 bp, Homo sapiens
taaaaaataaatcaa

SEQ ID NO: 45511 - DNA, 15 bp, Homo sapiens
ttaaaaaataaatca

SEQ ID NO: 45512 - DNA, 15 bp, Homo sapiens
tttaaaaaataaatc

SEQ ID NO: 45513 - DNA, 15 bp, Homo sapiens
ttttaaaaaataaat

SEQ ID NO: 45514 - DNA, 15 bp, Homo sapiens
cttttaaaaaataaa

SEQ ID NO: 45515 - DNA, 15 bp, Homo sapiens
tcttttaaaaaataa

SEQ ID NO: 45516 - DNA, 15 bp, Homo sapiens
atcttttaaaaaata

SEQ ID NO: 45517 - DNA, 15 bp, Homo sapiens
aatcttttaaaaaat

SEQ ID NO: 45518 - DNA, 15 bp, Homo sapiens
taatcttttaaaaaa

SEQ ID NO: 45519 - DNA, 15 bp, Homo sapiens
ctaatcttttaaaaa

SEQ ID NO: 45520 - DNA, 15 bp, Homo sapiens
tctaatcttttaaaa

SEQ ID NO: 45521 - DNA, 15 bp, Homo sapiens
ttctaatcttttaaa

SEQ ID NO: 45522 - DNA, 15 bp, Homo sapiens
attctaatcttttaa

SEQ ID NO: 45523 - DNA, 15 bp, Homo sapiens
tattctaatctttta

SEQ ID NO: 45524 - DNA, 15 bp, Homo sapiens
atattctaatctttt

SEQ ID NO: 45525 - DNA, 15 bp, Homo sapiens
aatattctaatcttt

SEQ ID NO: 45526 - DNA, 15 bp, Homo sapiens
gaatattctaatctt

SEQ ID NO: 45527 - DNA, 15 bp, Homo sapiens
ggaatattctaatct

SEQ ID NO: 45528 - DNA, 15 bp, Homo sapiens
aggaatattctaatc

SEQ ID NO: 45529 - DNA, 15 bp, Homo sapiens
aaggaatattctaat

SEQ ID NO: 45530 - DNA, 15 bp, Homo sapiens
taaggaatattctaa

SEQ ID NO: 45531 - DNA, 15 bp, Homo sapiens
ctaaggaatattcta

SEQ ID NO: 45532 - DNA, 15 bp, Homo sapiens
tctaaggaatattct

SEQ ID NO: 45533 - DNA, 15 bp, Homo sapiens
ttctaaggaatattc

SEQ ID NO: 45534 - DNA, 15 bp, Homo sapiens
tttctaaggaatatt

SEQ ID NO: 45535 - DNA, 15 bp, Homo sapiens
atttctaaggaatat

SEQ ID NO: 45536 - DNA, 15 bp, Homo sapiens
catttctaaggaata

SEQ ID NO: 45537 - DNA, 15 bp, Homo sapiens
acatttctaaggaat

SEQ ID NO: 45538 - DNA, 15 bp, Homo sapiens
tacatttctaaggaa

SEQ ID NO: 45539 - DNA, 15 bp, Homo sapiens
ctacatttctaagga

SEQ ID NO: 45540 - DNA, 15 bp, Homo sapiens
actacatttctaagg

SEQ ID NO: 45541 - DNA, 15 bp, Homo sapiens
gactacatttctaag

SEQ ID NO: 45542 - DNA, 15 bp, Homo sapiens
agactacatttctaa

SEQ ID NO: 45543 - DNA, 15 bp, Homo sapiens
aagactacatttcta

SEQ ID NO: 45544 - DNA, 15 bp, Homo sapiens
taagactacatttct

SEQ ID NO: 45545 - DNA, 15 bp, Homo sapiens
ataagactacatttc

SEQ ID NO: 45546 - DNA, 15 bp, Homo sapiens
tataagactacattt

SEQ ID NO: 45547 - DNA, 15 bp, Homo sapiens
ttataagactacatt

SEQ ID NO: 45548 - DNA, 15 bp, Homo sapiens
attataagactacat

SEQ ID NO: 45549 - DNA, 15 bp, Homo sapiens
aattataagactaca

SEQ ID NO: 45550 - DNA, 15 bp, Homo sapiens
aaattataagactac

SEQ ID NO: 45551 - DNA, 15 bp, Homo sapiens
gaaattataagacta

SEQ ID NO: 45552 - DNA, 15 bp, Homo sapiens
cgaaattataagact

SEQ ID NO: 45553 - DNA, 15 bp, Homo sapiens
acgaaattataagac

SEQ ID NO: 45554 - DNA, 15 bp, Homo sapiens
tacgaaattataaga

SEQ ID NO: 45555 - DNA, 15 bp, Homo sapiens
atacgaaattataag

SEQ ID NO: 45556 - DNA, 15 bp, Homo sapiens
aatacgaaattataa

SEQ ID NO: 45557 - DNA, 15 bp, Homo sapiens
aaatacgaaattata

SEQ ID NO: 45558 - DNA, 15 bp, Homo sapiens
gaaatacgaaattat

SEQ ID NO: 45559 - DNA, 15 bp, Homo sapiens
tgaaatacgaaatta

SEQ ID NO: 45560 - DNA, 15 bp, Homo sapiens
ttgaaatacgaaatt

SEQ ID NO: 45561 - DNA, 15 bp, Homo sapiens
attgaaatacgaaat

SEQ ID NO: 45562 - DNA, 15 bp, Homo sapiens
tattgaaatacgaaa

SEQ ID NO: 45563 - DNA, 15 bp, Homo sapiens
ttattgaaatacgaa

SEQ ID NO: 45564 - DNA, 15 bp, Homo sapiens
tttattgaaatacga

SEQ ID NO: 45565 - DNA, 15 bp, Homo sapiens
ttttattgaaatacg

SEQ ID NO: 45566 - DNA, 15 bp, Homo sapiens
tttttattgaaatac

SEQ ID NO: 45567 - DNA, 15 bp, Homo sapiens
ttttttattgaaata

SEQ ID NO: 45568 - DNA, 15 bp, Homo sapiens
attttttattgaaat

SEQ ID NO: 45569 - DNA, 15 bp, Homo sapiens
tattttttattgaaa

SEQ ID NO: 45570 - DNA, 15 bp, Homo sapiens
atattttttattgaa

SEQ ID NO: 45571 - DNA, 15 bp, Homo sapiens
aatattttttattga

SEQ ID NO: 45572 - DNA, 15 bp, Homo sapiens
taatattttttattg

SEQ ID NO: 45573 - DNA, 15 bp, Homo sapiens
ttaatattttttatt

SEQ ID NO: 45574 - DNA, 15 bp, Homo sapiens
tttaatattttttat

SEQ ID NO: 45575 - DNA, 15 bp, Homo sapiens
ttttaatatttttta

SEQ ID NO: 45576 - DNA, 15 bp, Homo sapiens
attttaatatttttt

SEQ ID NO: 45577 - DNA, 15 bp, Homo sapiens
cattttaatattttt

SEQ ID NO: 45578 - DNA, 15 bp, Homo sapiens
acattttaatatttt

SEQ ID NO: 45579 - DNA, 15 bp, Homo sapiens
aacattttaatattt

SEQ ID NO: 45580 - DNA, 15 bp, Homo sapiens
aaacattttaatatt

SEQ ID NO: 45581 - DNA, 15 bp, Homo sapiens
gaaacattttaatat

SEQ ID NO: 45582 - DNA, 15 bp, Homo sapiens
ggaaacattttaata

SEQ ID NO: 45583 - DNA, 15 bp, Homo sapiens
gggaaacattttaat

SEQ ID NO: 45584 - DNA, 15 bp, Homo sapiens
tgggaaacattttaa

SEQ ID NO: 45585 - DNA, 15 bp, Homo sapiens
ctgggaaacatttta

SEQ ID NO: 45586 - DNA, 15 bp, Homo sapiens
tctgggaaacatttt

SEQ ID NO: 45587 - DNA, 15 bp, Homo sapiens
ctctgggaaacattt

SEQ ID NO: 45588 - DNA, 15 bp, Homo sapiens
cctctgggaaacatt

SEQ ID NO: 45589 - DNA, 15 bp, Homo sapiens
tcctctgggaaacat

SEQ ID NO: 45590 - DNA, 15 bp, Homo sapiens
ttcctctgggaaaca

SEQ ID NO: 45591 - DNA, 15 bp, Homo sapiens
tttcctctgggaaac

SEQ ID NO: 45592 - DNA, 15 bp, Homo sapiens
atttcctctgggaaa

SEQ ID NO: 45593 - DNA, 15 bp, Homo sapiens
gatttcctctgggaa

SEQ ID NO: 45594 - DNA, 15 bp, Homo sapiens
agatttcctctggga

SEQ ID NO: 45595 - DNA, 15 bp, Homo sapiens
aagatttcctctggg

SEQ ID NO: 45596 - DNA, 15 bp, Homo sapiens
aaagatttcctctgg

SEQ ID NO: 45597 - DNA, 15 bp, Homo sapiens
taaagatttcctctg

SEQ ID NO: 45598 - DNA, 15 bp, Homo sapiens
gtaaagatttcctct

SEQ ID NO: 45599 - DNA, 15 bp, Homo sapiens
agtaaagatttcctc

SEQ ID NO: 45600 - DNA, 15 bp, Homo sapiens
cagtaaagatttcct

SEQ ID NO: 45601 - DNA, 15 bp, Homo sapiens
acagtaaagatttcc

SEQ ID NO: 45602 - DNA, 15 bp, Homo sapiens
gacagtaaagatttc

SEQ ID NO: 45603 - DNA, 15 bp, Homo sapiens
tgacagtaaagattt

SEQ ID NO: 45604 - DNA, 15 bp, Homo sapiens
atgacagtaaagatt

SEQ ID NO: 45605 - DNA, 15 bp, Homo sapiens
tatgacagtaaagat

SEQ ID NO: 45606 - DNA, 15 bp, Homo sapiens
ctatgacagtaaaga

SEQ ID NO: 45607 - DNA, 15 bp, Homo sapiens
tctatgacagtaaag

SEQ ID NO: 45608 - DNA, 15 bp, Homo sapiens
ttctatgacagtaaa

SEQ ID NO: 45609 - DNA, 15 bp, Homo sapiens
tttctatgacagtaa

SEQ ID NO: 45610 - DNA, 15 bp, Homo sapiens
atttctatgacagta

SEQ ID NO: 45611 - DNA, 15 bp, Homo sapiens
gatttctatgacagt

SEQ ID NO: 45612 - DNA, 15 bp, Homo sapiens
tgatttctatgacag

SEQ ID NO: 45613 - DNA, 15 bp, Homo sapiens
gtgatttctatgaca

SEQ ID NO: 45614 - DNA, 15 bp, Homo sapiens
ggtgatttctatgac

SEQ ID NO: 45615 - DNA, 15 bp, Homo sapiens
tggtgatttctatga

SEQ ID NO: 45616 - DNA, 15 bp, Homo sapiens
ctggtgatttctatg

SEQ ID NO: 45617 - DNA, 15 bp, Homo sapiens
tctggtgatttctat

SEQ ID NO: 45618 - DNA, 15 bp, Homo sapiens
ttctggtgatttcta

SEQ ID NO: 45619 - DNA, 15 bp, Homo sapiens
tttctggtgatttct

SEQ ID NO: 45620 - DNA, 15 bp, Homo sapiens
ctttctggtgatttc

SEQ ID NO: 45621 - DNA, 15 bp, Homo sapiens
tctttctggtgattt

SEQ ID NO: 45622 - DNA, 15 bp, Homo sapiens
ctctttctggtgatt

SEQ ID NO: 45623 - DNA, 15 bp, Homo sapiens
tctctttctggtgat

SEQ ID NO: 45624 - DNA, 15 bp, Homo sapiens
atctctttctggtga

SEQ ID NO: 45625 - DNA, 15 bp, Homo sapiens
tatctctttctggtg

SEQ ID NO: 45626 - DNA, 15 bp, Homo sapiens
ctatctctttctggt

SEQ ID NO: 45627 - DNA, 15 bp, Homo sapiens
gctatctctttctgg

SEQ ID NO: 45628 - DNA, 15 bp, Homo sapiens
tgctatctctttctg

SEQ ID NO: 45629 - DNA, 15 bp, Homo sapiens
ttgctatctctttct

SEQ ID NO: 45630 - DNA, 15 bp, Homo sapiens
attgctatctctttc

SEQ ID NO: 45631 - DNA, 15 bp, Homo sapiens
aattgctatctcttt

SEQ ID NO: 45632 - DNA, 15 bp, Homo sapiens
taattgctatctctt

SEQ ID NO: 45633 - DNA, 15 bp, Homo sapiens
gtaattgctatctct

SEQ ID NO: 45634 - DNA, 15 bp, Homo sapiens
agtaattgctatctc

SEQ ID NO: 45635 - DNA, 15 bp, Homo sapiens
gagtaattgctatct

SEQ ID NO: 45636 - DNA, 15 bp, Homo sapiens
ggagtaattgctatc

SEQ ID NO: 45637 - DNA, 15 bp, Homo sapiens
aggagtaattgctat

SEQ ID NO: 45638 - DNA, 15 bp, Homo sapiens
caggagtaattgcta

SEQ ID NO: 45639 - DNA, 15 bp, Homo sapiens
ccaggagtaattgct

SEQ ID NO: 45640 - DNA, 15 bp, Homo sapiens
cccaggagtaattgc

SEQ ID NO: 45641 - DNA, 15 bp, Homo sapiens
acccaggagtaattg

SEQ ID NO: 45642 - DNA, 15 bp, Homo sapiens
cacccaggagtaatt

SEQ ID NO: 45643 - DNA, 15 bp, Homo sapiens
ccacccaggagtaat

SEQ ID NO: 45644 - DNA, 15 bp, Homo sapiens
accacccaggagtaa

SEQ ID NO: 45645 - DNA, 15 bp, Homo sapiens
caccacccaggagta

SEQ ID NO: 45646 - DNA, 15 bp, Homo sapiens
tcaccacccaggagt

SEQ ID NO: 45647 - DNA, 15 bp, Homo sapiens
atcaccacccaggag

SEQ ID NO: 45648 - DNA, 15 bp, Homo sapiens
tatcaccacccagga

SEQ ID NO: 45649 - DNA, 15 bp, Homo sapiens
ctatcaccacccagg

SEQ ID NO: 45650 - DNA, 15 bp, Homo sapiens
actatcaccacccag

SEQ ID NO: 45651 - DNA, 15 bp, Homo sapiens
gactatcaccaccca

SEQ ID NO: 45652 - DNA, 15 bp, Homo sapiens
agactatcaccaccc

SEQ ID NO: 45653 - DNA, 15 bp, Homo sapiens
aagactatcaccacc

SEQ ID NO: 45654 - DNA, 15 bp, Homo sapiens
aaagactatcaccac

SEQ ID NO: 45655 - DNA, 15 bp, Homo sapiens
caaagactatcacca

SEQ ID NO: 45656 - DNA, 15 bp, Homo sapiens
tcaaagactatcacc

SEQ ID NO: 45657 - DNA, 15 bp, Homo sapiens
atcaaagactatcac

SEQ ID NO: 45658 - DNA, 15 bp, Homo sapiens
aatcaaagactatca

SEQ ID NO: 45659 - DNA, 15 bp, Homo sapiens
aaatcaaagactatc

SEQ ID NO: 45660 - DNA, 15 bp, Homo sapiens
caaatcaaagactat

SEQ ID NO: 45661 - DNA, 15 bp, Homo sapiens
acaaatcaaagacta

SEQ ID NO: 45662 - DNA, 15 bp, Homo sapiens
cacaaatcaaagact

SEQ ID NO: 45663 - DNA, 15 bp, Homo sapiens
ccacaaatcaaagac

SEQ ID NO: 45664 - DNA, 15 bp, Homo sapiens
accacaaatcaaaga

SEQ ID NO: 45665 - DNA, 15 bp, Homo sapiens
aaccacaaatcaaag

SEQ ID NO: 45666 - DNA, 15 bp, Homo sapiens
aaaccacaaatcaaa

SEQ ID NO: 45667 - DNA, 15 bp, Homo sapiens
taaaccacaaatcaa

SEQ ID NO: 45668 - DNA, 15 bp, Homo sapiens
gtaaaccacaaatca

SEQ ID NO: 45669 - DNA, 15 bp, Homo sapiens
agtaaaccacaaatc

SEQ ID NO: 45670 - DNA, 15 bp, Homo sapiens
aagtaaaccacaaat

SEQ ID NO: 45671 - DNA, 15 bp, Homo sapiens
caagtaaaccacaaa

SEQ ID NO: 45672 - DNA, 15 bp, Homo sapiens
acaagtaaaccacaa

SEQ ID NO: 45673 - DNA, 15 bp, Homo sapiens
aacaagtaaaccaca

SEQ ID NO: 45674 - DNA, 15 bp, Homo sapiens
aaacaagtaaaccac

SEQ ID NO: 45675 - DNA, 15 bp, Homo sapiens
aaaacaagtaaacca

SEQ ID NO: 45676 - DNA, 15 bp, Homo sapiens
gaaaacaagtaaacc

SEQ ID NO: 45677 - DNA, 15 bp, Homo sapiens
tgaaaacaagtaaac

SEQ ID NO: 45678 - DNA, 15 bp, Homo sapiens
ctgaaaacaagtaaa

SEQ ID NO: 45679 - DNA, 15 bp, Homo sapiens
actgaaaacaagtaa

SEQ ID NO: 45680 - DNA, 15 bp, Homo sapiens
aactgaaaacaagta

SEQ ID NO: 45681 - DNA, 15 bp, Homo sapiens
aaactgaaaacaagt

SEQ ID NO: 45682 - DNA, 15 bp, Homo sapiens
caaactgaaaacaag

SEQ ID NO: 45683 - DNA, 15 bp, Homo sapiens
tcaaactgaaaacaa

SEQ ID NO: 45684 - DNA, 15 bp, Homo sapiens
ttcaaactgaaaaca

SEQ ID NO: 45685 - DNA, 15 bp, Homo sapiens
gttcaaactgaaaac

SEQ ID NO: 45686 - DNA, 15 bp, Homo sapiens
agttcaaactgaaaa

SEQ ID NO: 45687 - DNA, 15 bp, Homo sapiens
tagttcaaactgaaa

SEQ ID NO: 45688 - DNA, 15 bp, Homo sapiens
ttagttcaaactgaa

SEQ ID NO: 45689 - DNA, 15 bp, Homo sapiens
tttagttcaaactga

SEQ ID NO: 45690 - DNA, 15 bp, Homo sapiens
ttttagttcaaactg

SEQ ID NO: 45691 - DNA, 15 bp, Homo sapiens
gttttagttcaaact

SEQ ID NO: 45692 - DNA, 15 bp, Homo sapiens
tgttttagttcaaac

SEQ ID NO: 45693 - DNA, 15 bp, Homo sapiens
atgttttagttcaaa

SEQ ID NO: 45694 - DNA, 15 bp, Homo sapiens
tatgttttagttcaa

SEQ ID NO: 45695 - DNA, 15 bp, Homo sapiens
gtatgttttagttca

SEQ ID NO: 45696 - DNA, 15 bp, Homo sapiens
agtatgttttagttc

SEQ ID NO: 45697 - DNA, 15 bp, Homo sapiens
tagtatgttttagtt

SEQ ID NO: 45698 - DNA, 15 bp, Homo sapiens
ttagtatgttttagt

SEQ ID NO: 45699 - DNA, 15 bp, Homo sapiens
attagtatgttttag

SEQ ID NO: 45700 - DNA, 15 bp, Homo sapiens
gattagtatgtttta

SEQ ID NO: 45701 - DNA, 15 bp, Homo sapiens
ggattagtatgtttt

SEQ ID NO: 45702 - DNA, 15 bp, Homo sapiens
gggattagtatgttt

SEQ ID NO: 45703 - DNA, 15 bp, Homo sapiens
tgggattagtatgtt

SEQ ID NO: 45704 - DNA, 15 bp, Homo sapiens
ctgggattagtatgt

SEQ ID NO: 45705 - DNA, 15 bp, Homo sapiens
gctgggattagtatg

SEQ ID NO: 45706 - DNA, 15 bp, Homo sapiens
ggctgggattagtat

SEQ ID NO: 45707 - DNA, 15 bp, Homo sapiens
aggctgggattagta

SEQ ID NO: 45708 - DNA, 15 bp, Homo sapiens
caggctgggattagt

SEQ ID NO: 45709 - DNA, 15 bp, Homo sapiens
tcaggctgggattag

SEQ ID NO: 45710 - DNA, 15 bp, Homo sapiens
ctcaggctgggatta

SEQ ID NO: 45711 - DNA, 15 bp, Homo sapiens
actcaggctgggatt

SEQ ID NO: 45712 - DNA, 15 bp, Homo sapiens
aactcaggctgggat

SEQ ID NO: 45713 - DNA, 15 bp, Homo sapiens
caactcaggctggga

SEQ ID NO: 45714 - DNA, 15 bp, Homo sapiens
ccaactcaggctggg

SEQ ID NO: 45715 - DNA, 15 bp, Homo sapiens
tccaactcaggctgg

SEQ ID NO: 45716 - DNA, 15 bp, Homo sapiens
atccaactcaggctg

SEQ ID NO: 45717 - DNA, 15 bp, Homo sapiens
aatccaactcaggct

SEQ ID NO: 45718 - DNA, 15 bp, Homo sapiens
aaatccaactcaggc

SEQ ID NO: 45719 - DNA, 15 bp, Homo sapiens
aaaatccaactcagg

SEQ ID NO: 45720 - DNA, 15 bp, Homo sapiens
caaaatccaactcag

SEQ ID NO: 45721 - DNA, 15 bp, Homo sapiens
gcaaaatccaactca

SEQ ID NO: 45722 - DNA, 15 bp, Homo sapiens
tgcaaaatccaactc

SEQ ID NO: 45723 - DNA, 15 bp, Homo sapiens
atgcaaaatccaact

SEQ ID NO: 45724 - DNA, 15 bp, Homo sapiens
tatgcaaaatccaac

SEQ ID NO: 45725 - DNA, 15 bp, Homo sapiens
atatgcaaaatccaa

SEQ ID NO: 45726 - DNA, 15 bp, Homo sapiens
catatgcaaaatcca

SEQ ID NO: 45727 - DNA, 15 bp, Homo sapiens
ccatatgcaaaatcc

SEQ ID NO: 45728 - DNA, 15 bp, Homo sapiens
accatatgcaaaatc

SEQ ID NO: 45729 - DNA, 15 bp, Homo sapiens
gaccatatgcaaaat

SEQ ID NO: 45730 - DNA, 15 bp, Homo sapiens
tgaccatatgcaaaa

SEQ ID NO: 45731 - DNA, 15 bp, Homo sapiens
ttgaccatatgcaaa

SEQ ID NO: 45732 - DNA, 15 bp, Homo sapiens
tttgaccatatgcaa

SEQ ID NO: 45733 - DNA, 15 bp, Homo sapiens
ctttgaccatatgca

SEQ ID NO: 45734 - DNA, 15 bp, Homo sapiens
actttgaccatatgc

SEQ ID NO: 45735 - DNA, 15 bp, Homo sapiens
cactttgaccatatg

SEQ ID NO: 45736 - DNA, 15 bp, Homo sapiens
tcactttgaccatat

SEQ ID NO: 45737 - DNA, 15 bp, Homo sapiens
ttcactttgaccata

SEQ ID NO: 45738 - DNA, 15 bp, Homo sapiens
cttcactttgaccat

SEQ ID NO: 45739 - DNA, 15 bp, Homo sapiens
acttcactttgacca

SEQ ID NO: 45740 - DNA, 15 bp, Homo sapiens
tacttcactttgacc

SEQ ID NO: 45741 - DNA, 15 bp, Homo sapiens
ctacttcactttgac

SEQ ID NO: 45742 - DNA, 15 bp, Homo sapiens
tctacttcactttga

SEQ ID NO: 45743 - DNA, 15 bp, Homo sapiens
ctctacttcactttg

SEQ ID NO: 45744 - DNA, 15 bp, Homo sapiens
tctctacttcacttt

SEQ ID NO: 45745 - DNA, 15 bp, Homo sapiens
atctctacttcactt

SEQ ID NO: 45746 - DNA, 15 bp, Homo sapiens
aatctctacttcact

SEQ ID NO: 45747 - DNA, 15 bp, Homo sapiens
aaatctctacttcac

SEQ ID NO: 45748 - DNA, 15 bp, Homo sapiens
aaaatctctacttca

SEQ ID NO: 45749 - DNA, 15 bp, Homo sapiens
aaaaatctctacttc

SEQ ID NO: 45750 - DNA, 15 bp, Homo sapiens
caaaaatctctactt

SEQ ID NO: 45751 - DNA, 15 bp, Homo sapiens
acaaaaatctctact

SEQ ID NO: 45752 - DNA, 15 bp, Homo sapiens
gacaaaaatctctac

SEQ ID NO: 45753 - DNA, 15 bp, Homo sapiens
agacaaaaatctcta

SEQ ID NO: 45754 - DNA, 15 bp, Homo sapiens
tagacaaaaatctct

SEQ ID NO: 45755 - DNA, 15 bp, Homo sapiens
gtagacaaaaatctc

SEQ ID NO: 45756 - DNA, 15 bp, Homo sapiens
agtagacaaaaatct

SEQ ID NO: 45757 - DNA, 15 bp, Homo sapiens
aagtagacaaaaatc

SEQ ID NO: 45758 - DNA, 15 bp, Homo sapiens
aaagtagacaaaaat

SEQ ID NO: 45759 - DNA, 15 bp, Homo sapiens
taaagtagacaaaaa

SEQ ID NO: 45760 - DNA, 15 bp, Homo sapiens
ataaagtagacaaaa

SEQ ID NO: 45761 - DNA, 15 bp, Homo sapiens
cataaagtagacaaa

SEQ ID NO: 45762 - DNA, 15 bp, Homo sapiens
tcataaagtagacaa

SEQ ID NO: 45763 - DNA, 15 bp, Homo sapiens
ttcataaagtagaca

SEQ ID NO: 45764 - DNA, 15 bp, Homo sapiens
cttcataaagtagac

SEQ ID NO: 45765 - DNA, 15 bp, Homo sapiens
tcttcataaagtaga

SEQ ID NO: 45766 - DNA, 15 bp, Homo sapiens
atcttcataaagtag

SEQ ID NO: 45767 - DNA, 15 bp, Homo sapiens
tatcttcataaagta

SEQ ID NO: 45768 - DNA, 15 bp, Homo sapiens
atatcttcataaagt

SEQ ID NO: 45769 - DNA, 15 bp, Homo sapiens
aatatcttcataaag

SEQ ID NO: 45770 - DNA, 15 bp, Homo sapiens
aaatatcttcataaa

SEQ ID NO: 45771 - DNA, 15 bp, Homo sapiens
taaatatcttcataa

SEQ ID NO: 45772 - DNA, 15 bp, Homo sapiens
ttaaatatcttcata

SEQ ID NO: 45773 - DNA, 15 bp, Homo sapiens
tttaaatatcttcat

SEQ ID NO: 45774 - DNA, 15 bp, Homo sapiens
ctttaaatatcttca

SEQ ID NO: 45775 - DNA, 15 bp, Homo sapiens
cctttaaatatcttc

SEQ ID NO: 45776 - DNA, 15 bp, Homo sapiens
tcctttaaatatctt

SEQ ID NO: 45777 - DNA, 15 bp, Homo sapiens
gtcctttaaatatct

SEQ ID NO: 45778 - DNA, 15 bp, Homo sapiens
tgtcctttaaatatc

SEQ ID NO: 45779 - DNA, 15 bp, Homo sapiens
atgtcctttaaatat

SEQ ID NO: 45780 - DNA, 15 bp, Homo sapiens
aatgtcctttaaata

SEQ ID NO: 45781 - DNA, 15 bp, Homo sapiens
aaatgtcctttaaat

SEQ ID NO: 45782 - DNA, 15 bp, Homo sapiens
caaatgtcctttaaa

SEQ ID NO: 45783 - DNA, 15 bp, Homo sapiens
tcaaatgtcctttaa

SEQ ID NO: 45784 - DNA, 15 bp, Homo sapiens
ttcaaatgtccttta

SEQ ID NO: 45785 - DNA, 15 bp, Homo sapiens
tttcaaatgtccttt

SEQ ID NO: 45786 - DNA, 15 bp, Homo sapiens
atttcaaatgtcctt

SEQ ID NO: 45787 - DNA, 15 bp, Homo sapiens
catttcaaatgtcct

SEQ ID NO: 45788 - DNA, 15 bp, Homo sapiens
acatttcaaatgtcc

SEQ ID NO: 45789 - DNA, 15 bp, Homo sapiens
aacatttcaaatgtc

SEQ ID NO: 45790 - DNA, 15 bp, Homo sapiens
aaacatttcaaatgt

SEQ ID NO: 45791 - DNA, 15 bp, Homo sapiens
gaaacatttcaaatg

SEQ ID NO: 45792 - DNA, 15 bp, Homo sapiens
tgaaacatttcaaat

SEQ ID NO: 45793 - DNA, 15 bp, Homo sapiens
ttgaaacatttcaaa

SEQ ID NO: 45794 - DNA, 15 bp, Homo sapiens
attgaaacatttcaa

SEQ ID NO: 45795 - DNA, 15 bp, Homo sapiens
cattgaaacatttca

SEQ ID NO: 45796 - DNA, 15 bp, Homo sapiens
tcattgaaacatttc

SEQ ID NO: 45797 - DNA, 15 bp, Homo sapiens
ttcattgaaacattt

SEQ ID NO: 45798 - DNA, 15 bp, Homo sapiens
gttcattgaaacatt

SEQ ID NO: 45799 - DNA, 15 bp, Homo sapiens
tgttcattgaaacat

SEQ ID NO: 45800 - DNA, 15 bp, Homo sapiens
gtgttcattgaaaca

SEQ ID NO: 45801 - DNA, 15 bp, Homo sapiens
tgtgttcattgaaac

SEQ ID NO: 45802 - DNA, 15 bp, Homo sapiens
atgtgttcattgaaa

SEQ ID NO: 45803 - DNA, 15 bp, Homo sapiens
aatgtgttcattgaa

SEQ ID NO: 45804 - DNA, 15 bp, Homo sapiens
caatgtgttcattga

SEQ ID NO: 45805 - DNA, 15 bp, Homo sapiens
acaatgtgttcattg

SEQ ID NO: 45806 - DNA, 15 bp, Homo sapiens
tacaatgtgttcatt

SEQ ID NO: 45807 - DNA, 15 bp, Homo sapiens
ttacaatgtgttcat

SEQ ID NO: 45808 - DNA, 15 bp, Homo sapiens
gttacaatgtgttca

SEQ ID NO: 45809 - DNA, 15 bp, Homo sapiens
tgttacaatgtgttc

SEQ ID NO: 45810 - DNA, 15 bp, Homo sapiens
atgttacaatgtgtt

SEQ ID NO: 45811 - DNA, 15 bp, Homo sapiens
catgttacaatgtgt

SEQ ID NO: 45812 - DNA, 15 bp, Homo sapiens
gcatgttacaatgtg

SEQ ID NO: 45813 - DNA, 15 bp, Homo sapiens
tgcatgttacaatgt

SEQ ID NO: 45814 - DNA, 15 bp, Homo sapiens
atgcatgttacaatg

SEQ ID NO: 45815 - DNA, 15 bp, Homo sapiens
aatgcatgttacaat

SEQ ID NO: 45816 - DNA, 15 bp, Homo sapiens
gaatgcatgttacaa

SEQ ID NO: 45817 - DNA, 15 bp, Homo sapiens
ggaatgcatgttaca

SEQ ID NO: 45818 - DNA, 15 bp, Homo sapiens
gggaatgcatgttac

SEQ ID NO: 45819 - DNA, 15 bp, Homo sapiens
tgggaatgcatgtta

SEQ ID NO: 45820 - DNA, 15 bp, Homo sapiens
ctgggaatgcatgtt

SEQ ID NO: 45821 - DNA, 15 bp, Homo sapiens
cctgggaatgcatgt

SEQ ID NO: 45822 - DNA, 15 bp, Homo sapiens
tcctgggaatgcatg

SEQ ID NO: 45823 - DNA, 15 bp, Homo sapiens
ctcctgggaatgcat

SEQ ID NO: 45824 - DNA, 15 bp, Homo sapiens
cctcctgggaatgca

SEQ ID NO: 45825 - DNA, 15 bp, Homo sapiens
tcctcctgggaatgc

SEQ ID NO: 45826 - DNA, 15 bp, Homo sapiens
ttcctcctgggaatg

SEQ ID NO: 45827 - DNA, 15 bp, Homo sapiens
tttcctcctgggaat

SEQ ID NO: 45828 - DNA, 15 bp, Homo sapiens
ttttcctcctgggaa

SEQ ID NO: 45829 - DNA, 15 bp, Homo sapiens
gttttcctcctggga

SEQ ID NO: 45830 - DNA, 15 bp, Homo sapiens
tgttttcctcctggg

SEQ ID NO: 45831 - DNA, 15 bp, Homo sapiens
ttgttttcctcctgg

SEQ ID NO: 45832 - DNA, 15 bp, Homo sapiens
tttgttttcctcctg

SEQ ID NO: 45833 - DNA, 15 bp, Homo sapiens
ttttgttttcctcct

SEQ ID NO: 45834 - DNA, 15 bp, Homo sapiens
attttgttttcctcc

SEQ ID NO: 45835 - DNA, 15 bp, Homo sapiens
aattttgttttcctc

SEQ ID NO: 45836 - DNA, 15 bp, Homo sapiens
caattttgttttcct

SEQ ID NO: 45837 - DNA, 15 bp, Homo sapiens
acaattttgttttcc

SEQ ID NO: 45838 - DNA, 15 bp, Homo sapiens
cacaattttgttttc

SEQ ID NO: 45839 - DNA, 15 bp, Homo sapiens
acacaattttgtttt

SEQ ID NO: 45840 - DNA, 15 bp, Homo sapiens
tacacaattttgttt

SEQ ID NO: 45841 - DNA, 15 bp, Homo sapiens
atacacaattttgtt

SEQ ID NO: 45842 - DNA, 15 bp, Homo sapiens
aatacacaattttgt

SEQ ID NO: 45843 - DNA, 15 bp, Homo sapiens
caatacacaattttg

SEQ ID NO: 45844 - DNA, 15 bp, Homo sapiens
acaatacacaatttt

SEQ ID NO: 45845 - DNA, 15 bp, Homo sapiens
cacaatacacaattt

SEQ ID NO: 45846 - DNA, 15 bp, Homo sapiens
acacaatacacaatt

SEQ ID NO: 45847 - DNA, 15 bp, Homo sapiens
aacacaatacacaat

SEQ ID NO: 45848 - DNA, 15 bp, Homo sapiens
caacacaatacacaa

SEQ ID NO: 45849 - DNA, 15 bp, Homo sapiens
tcaacacaatacaca

SEQ ID NO: 45850 - DNA, 15 bp, Homo sapiens
ttcaacacaatacac

SEQ ID NO: 45851 - DNA, 15 bp, Homo sapiens
tttcaacacaataca

SEQ ID NO: 45852 - DNA, 15 bp, Homo sapiens
ttttcaacacaatac

SEQ ID NO: 45853 - DNA, 15 bp, Homo sapiens
attttcaacacaata

SEQ ID NO: 45854 - DNA, 15 bp, Homo sapiens
tattttcaacacaat

SEQ ID NO: 45855 - DNA, 15 bp, Homo sapiens
gtattttcaacacaa

SEQ ID NO: 45856 - DNA, 15 bp, Homo sapiens
agtattttcaacaca

SEQ ID NO: 45857 - DNA, 15 bp, Homo sapiens
tagtattttcaacac

SEQ ID NO: 45858 - DNA, 15 bp, Homo sapiens
atagtattttcaaca

SEQ ID NO: 45859 - DNA, 15 bp, Homo sapiens
aatagtattttcaac

SEQ ID NO: 45860 - DNA, 15 bp, Homo sapiens
gaatagtattttcaa

SEQ ID NO: 45861 - DNA, 15 bp, Homo sapiens
ggaatagtattttca

SEQ ID NO: 45862 - DNA, 15 bp, Homo sapiens
tggaatagtattttc

SEQ ID NO: 45863 - DNA, 15 bp, Homo sapiens
ttggaatagtatttt

SEQ ID NO: 45864 - DNA, 15 bp, Homo sapiens
attggaatagtattt

SEQ ID NO: 45865 - DNA, 15 bp, Homo sapiens
tattggaatagtatt

SEQ ID NO: 45866 - DNA, 15 bp, Homo sapiens
atattggaatagtat

SEQ ID NO: 45867 - DNA, 15 bp, Homo sapiens
tatattggaatagta

SEQ ID NO: 45868 - DNA, 15 bp, Homo sapiens
atatattggaatagt

SEQ ID NO: 45869 - DNA, 15 bp, Homo sapiens
catatattggaatag

SEQ ID NO: 45870 - DNA, 15 bp, Homo sapiens
acatatattggaata

SEQ ID NO: 45871 - DNA, 15 bp, Homo sapiens
tacatatattggaat

SEQ ID NO: 45872 - DNA, 15 bp, Homo sapiens
atacatatattggaa

SEQ ID NO: 45873 - DNA, 15 bp, Homo sapiens
tatacatatattgga

SEQ ID NO: 45874 - DNA, 15 bp, Homo sapiens
gtatacatatattgg

SEQ ID NO: 45875 - DNA, 15 bp, Homo sapiens
ggtatacatatattg

SEQ ID NO: 45876 - DNA, 15 bp, Homo sapiens
gggtatacatatatt

SEQ ID NO: 45877 - DNA, 15 bp, Homo sapiens
tgggtatacatatat

SEQ ID NO: 45878 - DNA, 15 bp, Homo sapiens
gtgggtatacatata

SEQ ID NO: 45879 - DNA, 15 bp, Homo sapiens
cgtgggtatacatat

SEQ ID NO: 45880 - DNA, 15 bp, Homo sapiens
acgtgggtatacata

SEQ ID NO: 45881 - DNA, 15 bp, Homo sapiens
gacgtgggtatacat

SEQ ID NO: 45882 - DNA, 15 bp, Homo sapiens
agacgtgggtataca

SEQ ID NO: 45883 - DNA, 15 bp, Homo sapiens
gagacgtgggtatac

SEQ ID NO: 45884 - DNA, 15 bp, Homo sapiens
tgagacgtgggtata

SEQ ID NO: 45885 - DNA, 15 bp, Homo sapiens
atgagacgtgggtat

SEQ ID NO: 45886 - DNA, 15 bp, Homo sapiens
aatgagacgtgggta

SEQ ID NO: 45887 - DNA, 15 bp, Homo sapiens
aaatgagacgtgggt

SEQ ID NO: 45888 - DNA, 15 bp, Homo sapiens
aaaatgagacgtggg

SEQ ID NO: 45889 - DNA, 15 bp, Homo sapiens
caaaatgagacgtgg

SEQ ID NO: 45890 - DNA, 15 bp, Homo sapiens
acaaaatgagacgtg

SEQ ID NO: 45891 - DNA, 15 bp, Homo sapiens
gacaaaatgagacgt

SEQ ID NO: 45892 - DNA, 15 bp, Homo sapiens
tgacaaaatgagacg

SEQ ID NO: 45893 - DNA, 15 bp, Homo sapiens
atgacaaaatgagac

SEQ ID NO: 45894 - DNA, 15 bp, Homo sapiens
tatgacaaaatgaga

SEQ ID NO: 45895 - DNA, 15 bp, Homo sapiens
ctatgacaaaatgag

SEQ ID NO: 45896 - DNA, 15 bp, Homo sapiens
tctatgacaaaatga

SEQ ID NO: 45897 - DNA, 15 bp, Homo sapiens
ttctatgacaaaatg

SEQ ID NO: 45898 - DNA, 15 bp, Homo sapiens
attctatgacaaaat

SEQ ID NO: 45899 - DNA, 15 bp, Homo sapiens
aattctatgacaaaa

SEQ ID NO: 45900 - DNA, 15 bp, Homo sapiens
gaattctatgacaaa

SEQ ID NO: 45901 - DNA, 15 bp, Homo sapiens
ggaattctatgacaa

SEQ ID NO: 45902 - DNA, 15 bp, Homo sapiens
aggaattctatgaca

SEQ ID NO: 45903 - DNA, 15 bp, Homo sapiens
caggaattctatgac

SEQ ID NO: 45904 - DNA, 15 bp, Homo sapiens
tcaggaattctatga

SEQ ID NO: 45905 - DNA, 15 bp, Homo sapiens
ttcaggaattctatg

SEQ ID NO: 45906 - DNA, 15 bp, Homo sapiens
tttcaggaattctat

SEQ ID NO: 45907 - DNA, 15 bp, Homo sapiens
ttttcaggaattcta

SEQ ID NO: 45908 - DNA, 15 bp, Homo sapiens
tttttcaggaattct

SEQ ID NO: 45909 - DNA, 15 bp, Homo sapiens
atttttcaggaattc

SEQ ID NO: 45910 - DNA, 15 bp, Homo sapiens
aatttttcaggaatt

SEQ ID NO: 45911 - DNA, 15 bp, Homo sapiens
aaatttttcaggaat

SEQ ID NO: 45912 - DNA, 15 bp, Homo sapiens
taaatttttcaggaa

SEQ ID NO: 45913 - DNA, 15 bp, Homo sapiens
ctaaatttttcagga

SEQ ID NO: 45914 - DNA, 15 bp, Homo sapiens
tctaaatttttcagg

SEQ ID NO: 45915 - DNA, 15 bp, Homo sapiens
atctaaatttttcag

SEQ ID NO: 45916 - DNA, 15 bp, Homo sapiens
catctaaatttttca

SEQ ID NO: 45917 - DNA, 15 bp, Homo sapiens
acatctaaatttttc

SEQ ID NO: 45918 - DNA, 15 bp, Homo sapiens
tacatctaaattttt

SEQ ID NO: 45919 - DNA, 15 bp, Homo sapiens
ctacatctaaatttt

SEQ ID NO: 45920 - DNA, 15 bp, Homo sapiens
tctacatctaaattt

SEQ ID NO: 45921 - DNA, 15 bp, Homo sapiens
atctacatctaaatt

SEQ ID NO: 45922 - DNA, 15 bp, Homo sapiens
catctacatctaaat

SEQ ID NO: 45923 - DNA, 15 bp, Homo sapiens
tcatctacatctaaa

SEQ ID NO: 45924 - DNA, 15 bp, Homo sapiens
ctcatctacatctaa

SEQ ID NO: 45925 - DNA, 15 bp, Homo sapiens
tctcatctacatcta

SEQ ID NO: 45926 - DNA, 15 bp, Homo sapiens
atctcatctacatct

SEQ ID NO: 45927 - DNA, 15 bp, Homo sapiens
aatctcatctacatc

SEQ ID NO: 45928 - DNA, 15 bp, Homo sapiens
aaatctcatctacat

SEQ ID NO: 45929 - DNA, 15 bp, Homo sapiens
aaaatctcatctaca

SEQ ID NO: 45930 - DNA, 15 bp, Homo sapiens
aaaaatctcatctac

SEQ ID NO: 45931 - DNA, 15 bp, Homo sapiens
taaaaatctcatcta

SEQ ID NO: 45932 - DNA, 15 bp, Homo sapiens
ataaaaatctcatct

SEQ ID NO: 45933 - DNA, 15 bp, Homo sapiens
tataaaaatctcatc

SEQ ID NO: 45934 - DNA, 15 bp, Homo sapiens
ttataaaaatctcat

SEQ ID NO: 45935 - DNA, 15 bp, Homo sapiens
cttataaaaatctca

SEQ ID NO: 45936 - DNA, 15 bp, Homo sapiens
acttataaaaatctc

SEQ ID NO: 45937 - DNA, 15 bp, Homo sapiens
aacttataaaaatct

SEQ ID NO: 45938 - DNA, 15 bp, Homo sapiens
caacttataaaaatc

SEQ ID NO: 45939 - DNA, 15 bp, Homo sapiens
tcaacttataaaaat

SEQ ID NO: 45940 - DNA, 15 bp, Homo sapiens
ttcaacttataaaaa

SEQ ID NO: 45941 - DNA, 15 bp, Homo sapiens
tttcaacttataaaa

SEQ ID NO: 45942 - DNA, 15 bp, Homo sapiens
ttttcaacttataaa

SEQ ID NO: 45943 - DNA, 15 bp, Homo sapiens
attttcaacttataa

SEQ ID NO: 45944 - DNA, 15 bp, Homo sapiens
tattttcaacttata

SEQ ID NO: 45945 - DNA, 15 bp, Homo sapiens
atattttcaacttat

SEQ ID NO: 45946 - DNA, 15 bp, Homo sapiens
aatattttcaactta

SEQ ID NO: 45947 - DNA, 15 bp, Homo sapiens
aaatattttcaactt

SEQ ID NO: 45948 - DNA, 15 bp, Homo sapiens
aaaatattttcaact

SEQ ID NO: 45949 - DNA, 15 bp, Homo sapiens
gaaaatattttcaac

SEQ ID NO: 45950 - DNA, 15 bp, Homo sapiens
tgaaaatattttcaa

SEQ ID NO: 45951 - DNA, 15 bp, Homo sapiens
ctgaaaatattttca

SEQ ID NO: 45952 - DNA, 15 bp, Homo sapiens
actgaaaatattttc

SEQ ID NO: 45953 - DNA, 15 bp, Homo sapiens
aactgaaaatatttt

SEQ ID NO: 45954 - DNA, 15 bp, Homo sapiens
caactgaaaatattt

SEQ ID NO: 45955 - DNA, 15 bp, Homo sapiens
gcaactgaaaatatt

SEQ ID NO: 45956 - DNA, 15 bp, Homo sapiens
tgcaactgaaaatat

SEQ ID NO: 45957 - DNA, 15 bp, Homo sapiens
atgcaactgaaaata

SEQ ID NO: 45958 - DNA, 15 bp, Homo sapiens
aatgcaactgaaaat

SEQ ID NO: 45959 - DNA, 15 bp, Homo sapiens
aaatgcaactgaaaa

SEQ ID NO: 45960 - DNA, 15 bp, Homo sapiens
aaaatgcaactgaaa

SEQ ID NO: 45961 - DNA, 15 bp, Homo sapiens
taaaatgcaactgaa

SEQ ID NO: 45962 - DNA, 15 bp, Homo sapiens
ttaaaatgcaactga

SEQ ID NO: 45963 - DNA, 15 bp, Homo sapiens
attaaaatgcaactg

SEQ ID NO: 45964 - DNA, 15 bp, Homo sapiens
aattaaaatgcaact

SEQ ID NO: 45965 - DNA, 15 bp, Homo sapiens
caattaaaatgcaac

SEQ ID NO: 45966 - DNA, 15 bp, Homo sapiens
gcaattaaaatgcaa

SEQ ID NO: 45967 - DNA, 15 bp, Homo sapiens
tgcaattaaaatgca

SEQ ID NO: 45968 - DNA, 15 bp, Homo sapiens
gtgcaattaaaatgc

SEQ ID NO: 45969 - DNA, 15 bp, Homo sapiens
tgtgcaattaaaatg

SEQ ID NO: 45970 - DNA, 15 bp, Homo sapiens
ctgtgcaattaaaat

SEQ ID NO: 45971 - DNA, 15 bp, Homo sapiens
tctgtgcaattaaaa

SEQ ID NO: 45972 - DNA, 15 bp, Homo sapiens
atctgtgcaattaaa

SEQ ID NO: 45973 - DNA, 15 bp, Homo sapiens
catctgtgcaattaa

SEQ ID NO: 45974 - DNA, 15 bp, Homo sapiens
acatctgtgcaatta

SEQ ID NO: 45975 - DNA, 15 bp, Homo sapiens
cacatctgtgcaatt

SEQ ID NO: 45976 - DNA, 15 bp, Homo sapiens
acacatctgtgcaat

SEQ ID NO: 45977 - DNA, 15 bp, Homo sapiens
aacacatctgtgcaa

SEQ ID NO: 45978 - DNA, 15 bp, Homo sapiens
aaacacatctgtgca

SEQ ID NO: 45979 - DNA, 15 bp, Homo sapiens
aaaacacatctgtgc

SEQ ID NO: 45980 - DNA, 15 bp, Homo sapiens
gaaaacacatctgtg

SEQ ID NO: 45981 - DNA, 15 bp, Homo sapiens
agaaaacacatctgt

SEQ ID NO: 45982 - DNA, 15 bp, Homo sapiens
tagaaaacacatctg

SEQ ID NO: 45983 - DNA, 15 bp, Homo sapiens
gtagaaaacacatct

SEQ ID NO: 45984 - DNA, 15 bp, Homo sapiens
agtagaaaacacatc

SEQ ID NO: 45985 - DNA, 15 bp, Homo sapiens
aagtagaaaacacat

SEQ ID NO: 45986 - DNA, 15 bp, Homo sapiens
gaagtagaaaacaca

SEQ ID NO: 45987 - DNA, 15 bp, Homo sapiens
agaagtagaaaacac

SEQ ID NO: 45988 - DNA, 15 bp, Homo sapiens
tagaagtagaaaaca

SEQ ID NO: 45989 - DNA, 15 bp, Homo sapiens
atagaagtagaaaac

SEQ ID NO: 45990 - DNA, 15 bp, Homo sapiens
aatagaagtagaaaa

SEQ ID NO: 45991 - DNA, 15 bp, Homo sapiens
aaatagaagtagaaa

SEQ ID NO: 45992 - DNA, 15 bp, Homo sapiens
caaatagaagtagaa

SEQ ID NO: 45993 - DNA, 15 bp, Homo sapiens
ccaaatagaagtaga

SEQ ID NO: 45994 - DNA, 15 bp, Homo sapiens
gccaaatagaagtag

SEQ ID NO: 45995 - DNA, 15 bp, Homo sapiens
agccaaatagaagta

SEQ ID NO: 45996 - DNA, 15 bp, Homo sapiens
cagccaaatagaagt

SEQ ID NO: 45997 - DNA, 15 bp, Homo sapiens
acagccaaatagaag

SEQ ID NO: 45998 - DNA, 15 bp, Homo sapiens
cacagccaaatagaa

SEQ ID NO: 45999 - DNA, 15 bp, Homo sapiens
tcacagccaaataga

SEQ ID NO: 46000 - DNA, 15 bp, Homo sapiens
gtcacagccaaatag

SEQ ID NO: 46001 - DNA, 15 bp, Homo sapiens
agtcacagccaaata

SEQ ID NO: 46002 - DNA, 15 bp, Homo sapiens
gagtcacagccaaat

SEQ ID NO: 46003 - DNA, 15 bp, Homo sapiens
ggagtcacagccaaa

SEQ ID NO: 46004 - DNA, 15 bp, Homo sapiens
aggagtcacagccaa

SEQ ID NO: 46005 - DNA, 15 bp, Homo sapiens
taggagtcacagcca

SEQ ID NO: 46006 - DNA, 15 bp, Homo sapiens
ttaggagtcacagcc

SEQ ID NO: 46007 - DNA, 15 bp, Homo sapiens
attaggagtcacagc

SEQ ID NO: 46008 - DNA, 15 bp, Homo sapiens
cattaggagtcacag

SEQ ID NO: 46009 - DNA, 15 bp, Homo sapiens
gcattaggagtcaca

SEQ ID NO: 46010 - DNA, 15 bp, Homo sapiens
tgcattaggagtcac

SEQ ID NO: 46011 - DNA, 15 bp, Homo sapiens
atgcattaggagtca

SEQ ID NO: 46012 - DNA, 15 bp, Homo sapiens
aatgcattaggagtc

SEQ ID NO: 46013 - DNA, 15 bp, Homo sapiens
caatgcattaggagt

SEQ ID NO: 46014 - DNA, 15 bp, Homo sapiens
acaatgcattaggag

SEQ ID NO: 46015 - DNA, 15 bp, Homo sapiens
tacaatgcattagga

SEQ ID NO: 46016 - DNA, 15 bp, Homo sapiens
ttacaatgcattagg

SEQ ID NO: 46017 - DNA, 15 bp, Homo sapiens
attacaatgcattag

SEQ ID NO: 46018 - DNA, 15 bp, Homo sapiens
tattacaatgcatta

SEQ ID NO: 46019 - DNA, 15 bp, Homo sapiens
atattacaatgcatt

SEQ ID NO: 46020 - DNA, 15 bp, Homo sapiens
aatattacaatgcat

SEQ ID NO: 46021 - DNA, 15 bp, Homo sapiens
taatattacaatgca

SEQ ID NO: 46022 - DNA, 15 bp, Homo sapiens
ataatattacaatgc

SEQ ID NO: 46023 - DNA, 15 bp, Homo sapiens
gataatattacaatg

SEQ ID NO: 46024 - DNA, 15 bp, Homo sapiens
agataatattacaat

SEQ ID NO: 46025 - DNA, 15 bp, Homo sapiens
aagataatattacaa

SEQ ID NO: 46026 - DNA, 15 bp, Homo sapiens
gaagataatattaca

SEQ ID NO: 46027 - DNA, 15 bp, Homo sapiens
ggaagataatattac

SEQ ID NO: 46028 - DNA, 15 bp, Homo sapiens
tggaagataatatta

SEQ ID NO: 46029 - DNA, 15 bp, Homo sapiens
ctggaagataatatt

SEQ ID NO: 46030 - DNA, 15 bp, Homo sapiens
actggaagataatat

SEQ ID NO: 46031 - DNA, 15 bp, Homo sapiens
cactggaagataata

SEQ ID NO: 46032 - DNA, 15 bp, Homo sapiens
acactggaagataat

SEQ ID NO: 46033 - DNA, 15 bp, Homo sapiens
aacactggaagataa

SEQ ID NO: 46034 - DNA, 15 bp, Homo sapiens
gaacactggaagata

SEQ ID NO: 46035 - DNA, 15 bp, Homo sapiens
tgaacactggaagat

SEQ ID NO: 46036 - DNA, 15 bp, Homo sapiens
atgaacactggaaga

SEQ ID NO: 46037 - DNA, 15 bp, Homo sapiens
aatgaacactggaag

SEQ ID NO: 46038 - DNA, 15 bp, Homo sapiens
aaatgaacactggaa

SEQ ID NO: 46039 - DNA, 15 bp, Homo sapiens
gaaatgaacactgga

SEQ ID NO: 46040 - DNA, 15 bp, Homo sapiens
cgaaatgaacactgg

SEQ ID NO: 46041 - DNA, 15 bp, Homo sapiens
acgaaatgaacactg

SEQ ID NO: 46042 - DNA, 15 bp, Homo sapiens
cacgaaatgaacact

SEQ ID NO: 46043 - DNA, 15 bp, Homo sapiens
acacgaaatgaacac

SEQ ID NO: 46044 - DNA, 15 bp, Homo sapiens
tacacgaaatgaaca

SEQ ID NO: 46045 - DNA, 15 bp, Homo sapiens
ctacacgaaatgaac

SEQ ID NO: 46046 - DNA, 15 bp, Homo sapiens
actacacgaaatgaa

SEQ ID NO: 46047 - DNA, 15 bp, Homo sapiens
cactacacgaaatga

SEQ ID NO: 46048 - DNA, 15 bp, Homo sapiens
tcactacacgaaatg

SEQ ID NO: 46049 - DNA, 15 bp, Homo sapiens
atcactacacgaaat

SEQ ID NO: 46050 - DNA, 15 bp, Homo sapiens
tatcactacacgaaa

SEQ ID NO: 46051 - DNA, 15 bp, Homo sapiens
ttatcactacacgaa

SEQ ID NO: 46052 - DNA, 15 bp, Homo sapiens
attatcactacacga

SEQ ID NO: 46053 - DNA, 15 bp, Homo sapiens
cattatcactacacg

SEQ ID NO: 46054 - DNA, 15 bp, Homo sapiens
ccattatcactacac

SEQ ID NO: 46055 - DNA, 15 bp, Homo sapiens
tccattatcactaca

SEQ ID NO: 46056 - DNA, 15 bp, Homo sapiens
atccattatcactac

SEQ ID NO: 46057 - DNA, 15 bp, Homo sapiens
aatccattatcacta

SEQ ID NO: 46058 - DNA, 15 bp, Homo sapiens
taatccattatcact

SEQ ID NO: 46059 - DNA, 15 bp, Homo sapiens
ttaatccattatcac

SEQ ID NO: 46060 - DNA, 15 bp, Homo sapiens
gttaatccattatca

SEQ ID NO: 46061 - DNA, 15 bp, Homo sapiens
tgttaatccattatc

SEQ ID NO: 46062 - DNA, 15 bp, Homo sapiens
ttgttaatccattat

SEQ ID NO: 46063 - DNA, 15 bp, Homo sapiens
tttgttaatccatta

SEQ ID NO: 46064 - DNA, 15 bp, Homo sapiens
atttgttaatccatt

SEQ ID NO: 46065 - DNA, 15 bp, Homo sapiens
catttgttaatccat

SEQ ID NO: 46066 - DNA, 15 bp, Homo sapiens
gcatttgttaatcca

SEQ ID NO: 46067 - DNA, 15 bp, Homo sapiens
tgcatttgttaatcc

SEQ ID NO: 46068 - DNA, 15 bp, Homo sapiens
atgcatttgttaatc

SEQ ID NO: 46069 - DNA, 15 bp, Homo sapiens
aatgcatttgttaat

SEQ ID NO: 46070 - DNA, 15 bp, Homo sapiens
gaatgcatttgttaa

SEQ ID NO: 46071 - DNA, 15 bp, Homo sapiens
tgaatgcatttgtta

SEQ ID NO: 46072 - DNA, 15 bp, Homo sapiens
atgaatgcatttgtt

SEQ ID NO: 46073 - DNA, 15 bp, Homo sapiens
aatgaatgcatttgt

SEQ ID NO: 46074 - DNA, 15 bp, Homo sapiens
gaatgaatgcatttg

SEQ ID NO: 46075 - DNA, 15 bp, Homo sapiens
tgaatgaatgcattt

SEQ ID NO: 46076 - DNA, 15 bp, Homo sapiens
atgaatgaatgcatt

SEQ ID NO: 46077 - DNA, 15 bp, Homo sapiens
aatgaatgaatgcat

SEQ ID NO: 46078 - DNA, 15 bp, Homo sapiens
aaatgaatgaatgca

SEQ ID NO: 46079 - DNA, 15 bp, Homo sapiens
taaatgaatgaatgc

SEQ ID NO: 46080 - DNA, 15 bp, Homo sapiens
ctaaatgaatgaatg

SEQ ID NO: 46081 - DNA, 15 bp, Homo sapiens
actaaatgaatgaat

SEQ ID NO: 46082 - DNA, 15 bp, Homo sapiens
tactaaatgaatgaa

SEQ ID NO: 46083 - DNA, 15 bp, Homo sapiens
ttactaaatgaatga

SEQ ID NO: 46084 - DNA, 15 bp, Homo sapiens
tttactaaatgaatg

SEQ ID NO: 46085 - DNA, 15 bp, Homo sapiens
gtttactaaatgaat

SEQ ID NO: 46086 - DNA, 15 bp, Homo sapiens
tgtttactaaatgaa

SEQ ID NO: 46087 - DNA, 15 bp, Homo sapiens
atgtttactaaatga

SEQ ID NO: 46088 - DNA, 15 bp, Homo sapiens
aatgtttactaaatg

SEQ ID NO: 46089 - DNA, 15 bp, Homo sapiens
aaatgtttactaaat

SEQ ID NO: 46090 - DNA, 15 bp, Homo sapiens
taaatgtttactaaa

SEQ ID NO: 46091 - DNA, 15 bp, Homo sapiens
gtaaatgtttactaa

SEQ ID NO: 46092 - DNA, 15 bp, Homo sapiens
agtaaatgtttacta

SEQ ID NO: 46093 - DNA, 15 bp, Homo sapiens
cagtaaatgtttact

SEQ ID NO: 46094 - DNA, 15 bp, Homo sapiens
tcagtaaatgtttac

SEQ ID NO: 46095 - DNA, 15 bp, Homo sapiens
ctcagtaaatgttta

SEQ ID NO: 46096 - DNA, 15 bp, Homo sapiens
gctcagtaaatgttt

SEQ ID NO: 46097 - DNA, 15 bp, Homo sapiens
ggctcagtaaatgtt

SEQ ID NO: 46098 - DNA, 15 bp, Homo sapiens
gggctcagtaaatgt

SEQ ID NO: 46099 - DNA, 15 bp, Homo sapiens
agggctcagtaaatg

SEQ ID NO: 46100 - DNA, 15 bp, Homo sapiens
tagggctcagtaaat

SEQ ID NO: 46101 - DNA, 15 bp, Homo sapiens
ttagggctcagtaaa

SEQ ID NO: 46102 - DNA, 15 bp, Homo sapiens
attagggctcagtaa

SEQ ID NO: 46103 - DNA, 15 bp, Homo sapiens
gattagggctcagta

SEQ ID NO: 46104 - DNA, 15 bp, Homo sapiens
tgattagggctcagt

SEQ ID NO: 46105 - DNA, 15 bp, Homo sapiens
ctgattagggctcag

SEQ ID NO: 46106 - DNA, 15 bp, Homo sapiens
actgattagggctca

SEQ ID NO: 46107 - DNA, 15 bp, Homo sapiens
cactgattagggctc

SEQ ID NO: 46108 - DNA, 15 bp, Homo sapiens
gcactgattagggct

SEQ ID NO: 46109 - DNA, 15 bp, Homo sapiens
ggcactgattagggc

SEQ ID NO: 46110 - DNA, 15 bp, Homo sapiens
tggcactgattaggg

SEQ ID NO: 46111 - DNA, 15 bp, Homo sapiens
atggcactgattagg

SEQ ID NO: 46112 - DNA, 15 bp, Homo sapiens
catggcactgattag

SEQ ID NO: 46113 - DNA, 15 bp, Homo sapiens
gcatggcactgatta

SEQ ID NO: 46114 - DNA, 15 bp, Homo sapiens
agcatggcactgatt

SEQ ID NO: 46115 - DNA, 15 bp, Homo sapiens
gagcatggcactgat

SEQ ID NO: 46116 - DNA, 15 bp, Homo sapiens
agagcatggcactga

SEQ ID NO: 46117 - DNA, 15 bp, Homo sapiens
cagagcatggcactg

SEQ ID NO: 46118 - DNA, 15 bp, Homo sapiens
ccagagcatggcact

SEQ ID NO: 46119 - DNA, 15 bp, Homo sapiens
gccagagcatggcac

SEQ ID NO: 46120 - DNA, 15 bp, Homo sapiens
ggccagagcatggca

SEQ ID NO: 46121 - DNA, 15 bp, Homo sapiens
gggccagagcatggc

SEQ ID NO: 46122 - DNA, 15 bp, Homo sapiens
tgggccagagcatgg

SEQ ID NO: 46123 - DNA, 15 bp, Homo sapiens
ctgggccagagcatg

SEQ ID NO: 46124 - DNA, 15 bp, Homo sapiens
cctgggccagagcat

SEQ ID NO: 46125 - DNA, 15 bp, Homo sapiens
ccctgggccagagca

SEQ ID NO: 46126 - DNA, 15 bp, Homo sapiens
tccctgggccagagc

SEQ ID NO: 46127 - DNA, 15 bp, Homo sapiens
ctccctgggccagag

SEQ ID NO: 46128 - DNA, 15 bp, Homo sapiens
cctccctgggccaga

SEQ ID NO: 46129 - DNA, 15 bp, Homo sapiens
acctccctgggccag

SEQ ID NO: 46130 - DNA, 15 bp, Homo sapiens
tacctccctgggcca

SEQ ID NO: 46131 - DNA, 15 bp, Homo sapiens
ctacctccctgggcc

SEQ ID NO: 46132 - DNA, 15 bp, Homo sapiens
actacctccctgggc

SEQ ID NO: 46133 - DNA, 15 bp, Homo sapiens
gactacctccctggg

SEQ ID NO: 46134 - DNA, 15 bp, Homo sapiens
tgactacctccctgg

SEQ ID NO: 46135 - DNA, 15 bp, Homo sapiens
atgactacctccctg

SEQ ID NO: 46136 - DNA, 15 bp, Homo sapiens
catgactacctccct

SEQ ID NO: 46137 - DNA, 15 bp, Homo sapiens
acatgactacctccc

SEQ ID NO: 46138 - DNA, 15 bp, Homo sapiens
cacatgactacctcc

SEQ ID NO: 46139 - DNA, 15 bp, Homo sapiens
gcacatgactacctc

SEQ ID NO: 46140 - DNA, 15 bp, Homo sapiens
tgcacatgactacct

SEQ ID NO: 46141 - DNA, 15 bp, Homo sapiens
ttgcacatgactacc

SEQ ID NO: 46142 - DNA, 15 bp, Homo sapiens
cttgcacatgactac

SEQ ID NO: 46143 - DNA, 15 bp, Homo sapiens
ccttgcacatgacta

SEQ ID NO: 46144 - DNA, 15 bp, Homo sapiens
accttgcacatgact

SEQ ID NO: 46145 - DNA, 15 bp, Homo sapiens
gaccttgcacatgac

SEQ ID NO: 46146 - DNA, 15 bp, Homo sapiens
ggaccttgcacatga

SEQ ID NO: 46147 - DNA, 15 bp, Homo sapiens
tggaccttgcacatg

SEQ ID NO: 46148 - DNA, 15 bp, Homo sapiens
ctggaccttgcacat

SEQ ID NO: 46149 - DNA, 15 bp, Homo sapiens
gctggaccttgcaca

SEQ ID NO: 46150 - DNA, 15 bp, Homo sapiens
ggctggaccttgcac

SEQ ID NO: 46151 - DNA, 15 bp, Homo sapiens
gggctggaccttgca

SEQ ID NO: 46152 - DNA, 15 bp, Homo sapiens
agggctggaccttgc

SEQ ID NO: 46153 - DNA, 15 bp, Homo sapiens
gagggctggaccttg

SEQ ID NO: 46154 - DNA, 15 bp, Homo sapiens
agagggctggacctt

SEQ ID NO: 46155 - DNA, 15 bp, Homo sapiens
gagagggctggacct

SEQ ID NO: 46156 - DNA, 15 bp, Homo sapiens
agagagggctggacc

SEQ ID NO: 46157 - DNA, 15 bp, Homo sapiens
cagagagggctggac

SEQ ID NO: 46158 - DNA, 15 bp, Homo sapiens
acagagagggctgga

SEQ ID NO: 46159 - DNA, 15 bp, Homo sapiens
aacagagagggctgg

SEQ ID NO: 46160 - DNA, 15 bp, Homo sapiens
aaacagagagggctg

SEQ ID NO: 46161 - DNA, 15 bp, Homo sapiens
gaaacagagagggct

SEQ ID NO: 46162 - DNA, 15 bp, Homo sapiens
tgaaacagagagggc

SEQ ID NO: 46163 - DNA, 15 bp, Homo sapiens
atgaaacagagaggg

SEQ ID NO: 46164 - DNA, 15 bp, Homo sapiens
aatgaaacagagagg

SEQ ID NO: 46165 - DNA, 15 bp, Homo sapiens
gaatgaaacagagag

SEQ ID NO: 46166 - DNA, 15 bp, Homo sapiens
ggaatgaaacagaga

SEQ ID NO: 46167 - DNA, 15 bp, Homo sapiens
aggaatgaaacagag

SEQ ID NO: 46168 - DNA, 15 bp, Homo sapiens
caggaatgaaacaga

SEQ ID NO: 46169 - DNA, 15 bp, Homo sapiens
ccaggaatgaaacag

SEQ ID NO: 46170 - DNA, 15 bp, Homo sapiens
accaggaatgaaaca

SEQ ID NO: 46171 - DNA, 15 bp, Homo sapiens
aaccaggaatgaaac

SEQ ID NO: 46172 - DNA, 15 bp, Homo sapiens
caaccaggaatgaaa

SEQ ID NO: 46173 - DNA, 15 bp, Homo sapiens
ccaaccaggaatgaa

SEQ ID NO: 46174 - DNA, 15 bp, Homo sapiens
cccaaccaggaatga

SEQ ID NO: 46175 - DNA, 15 bp, Homo sapiens
ccccaaccaggaatg

SEQ ID NO: 46176 - DNA, 15 bp, Homo sapiens
tccccaaccaggaat

SEQ ID NO: 46177 - DNA, 15 bp, Homo sapiens
ttccccaaccaggaa

SEQ ID NO: 46178 - DNA, 15 bp, Homo sapiens
attccccaaccagga

SEQ ID NO: 46179 - DNA, 15 bp, Homo sapiens
cattccccaaccagg

SEQ ID NO: 46180 - DNA, 15 bp, Homo sapiens
ccattccccaaccag

SEQ ID NO: 46181 - DNA, 15 bp, Homo sapiens
cccattccccaacca

SEQ ID NO: 46182 - DNA, 15 bp, Homo sapiens
acccattccccaacc

SEQ ID NO: 46183 - DNA, 15 bp, Homo sapiens
cacccattccccaac

SEQ ID NO: 46184 - DNA, 15 bp, Homo sapiens
ccacccattccccaa

SEQ ID NO: 46185 - DNA, 15 bp, Homo sapiens
cccacccattcccca

SEQ ID NO: 46186 - DNA, 15 bp, Homo sapiens
tcccacccattcccc

SEQ ID NO: 46187 - DNA, 15 bp, Homo sapiens
gtcccacccattccc

SEQ ID NO: 46188 - DNA, 15 bp, Homo sapiens
tgtcccacccattcc

SEQ ID NO: 46189 - DNA, 15 bp, Homo sapiens
ctgtcccacccattc

SEQ ID NO: 46190 - DNA, 15 bp, Homo sapiens
tctgtcccacccatt

SEQ ID NO: 46191 - DNA, 15 bp, Homo sapiens
gtctgtcccacccat

SEQ ID NO: 46192 - DNA, 15 bp, Homo sapiens
ggtctgtcccaccca

SEQ ID NO: 46193 - DNA, 15 bp, Homo sapiens
tggtctgtcccaccc

SEQ ID NO: 46194 - DNA, 15 bp, Homo sapiens
ctggtctgtcccacc

SEQ ID NO: 46195 - DNA, 15 bp, Homo sapiens
cctggtctgtcccac

SEQ ID NO: 46196 - DNA, 15 bp, Homo sapiens
tcctggtctgtccca

SEQ ID NO: 46197 - DNA, 15 bp, Homo sapiens
ttcctggtctgtccc

SEQ ID NO: 46198 - DNA, 15 bp, Homo sapiens
tttcctggtctgtcc

SEQ ID NO: 46199 - DNA, 15 bp, Homo sapiens
ctttcctggtctgtc

SEQ ID NO: 46200 - DNA, 15 bp, Homo sapiens
cctttcctggtctgt

SEQ ID NO: 46201 - DNA, 15 bp, Homo sapiens
tcctttcctggtctg

SEQ ID NO: 46202 - DNA, 15 bp, Homo sapiens
ctcctttcctggtct

SEQ ID NO: 46203 - DNA, 15 bp, Homo sapiens
gctcctttcctggtc

SEQ ID NO: 46204 - DNA, 15 bp, Homo sapiens
tgctcctttcctggt

SEQ ID NO: 46205 - DNA, 15 bp, Homo sapiens
ctgctcctttcctgg

SEQ ID NO: 46206 - DNA, 15 bp, Homo sapiens
gctgctcctttcctg

SEQ ID NO: 46207 - DNA, 15 bp, Homo sapiens
agctgctcctttcct

SEQ ID NO: 46208 - DNA, 15 bp, Homo sapiens
cagctgctcctttcc

SEQ ID NO: 46209 - DNA, 15 bp, Homo sapiens
gcagctgctcctttc

SEQ ID NO: 46210 - DNA, 15 bp, Homo sapiens
ggcagctgctccttt

SEQ ID NO: 46211 - DNA, 15 bp, Homo sapiens
cggcagctgctcctt

SEQ ID NO: 46212 - DNA, 15 bp, Homo sapiens
acggcagctgctcct

SEQ ID NO: 46213 - DNA, 15 bp, Homo sapiens
tacggcagctgctcc

SEQ ID NO: 46214 - DNA, 15 bp, Homo sapiens
atacggcagctgctc

SEQ ID NO: 46215 - DNA, 15 bp, Homo sapiens
tatacggcagctgct

SEQ ID NO: 46216 - DNA, 15 bp, Homo sapiens
ctatacggcagctgc

SEQ ID NO: 46217 - DNA, 15 bp, Homo sapiens
tctatacggcagctg

SEQ ID NO: 46218 - DNA, 15 bp, Homo sapiens
ctctatacggcagct

SEQ ID NO: 46219 - DNA, 15 bp, Homo sapiens
gctctatacggcagc

SEQ ID NO: 46220 - DNA, 15 bp, Homo sapiens
tgctctatacggcag

SEQ ID NO: 46221 - DNA, 15 bp, Homo sapiens
ctgctctatacggca

SEQ ID NO: 46222 - DNA, 15 bp, Homo sapiens
cctgctctatacggc

SEQ ID NO: 46223 - DNA, 15 bp, Homo sapiens
tcctgctctatacgg

SEQ ID NO: 46224 - DNA, 15 bp, Homo sapiens
ctcctgctctatacg

SEQ ID NO: 46225 - DNA, 15 bp, Homo sapiens
tctcctgctctatac

SEQ ID NO: 46226 - DNA, 15 bp, Homo sapiens
gtctcctgctctata

SEQ ID NO: 46227 - DNA, 15 bp, Homo sapiens
cgtctcctgctctat

SEQ ID NO: 46228 - DNA, 15 bp, Homo sapiens
gcgtctcctgctcta

SEQ ID NO: 46229 - DNA, 15 bp, Homo sapiens
agcgtctcctgctct

SEQ ID NO: 46230 - DNA, 15 bp, Homo sapiens
gagcgtctcctgctc

SEQ ID NO: 46231 - DNA, 15 bp, Homo sapiens
agagcgtctcctgct

SEQ ID NO: 46232 - DNA, 15 bp, Homo sapiens
cagagcgtctcctgc

SEQ ID NO: 46233 - DNA, 15 bp, Homo sapiens
gcagagcgtctcctg

SEQ ID NO: 46234 - DNA, 15 bp, Homo sapiens
agcagagcgtctcct

SEQ ID NO: 46235 - DNA, 15 bp, Homo sapiens
cagcagagcgtctcc

SEQ ID NO: 46236 - DNA, 15 bp, Homo sapiens
ccagcagagcgtctc

SEQ ID NO: 46237 - DNA, 15 bp, Homo sapiens
cccagcagagcgtct

SEQ ID NO: 46238 - DNA, 15 bp, Homo sapiens
acccagcagagcgtc

SEQ ID NO: 46239 - DNA, 15 bp, Homo sapiens
cacccagcagagcgt

SEQ ID NO: 46240 - DNA, 15 bp, Homo sapiens
acacccagcagagcg

SEQ ID NO: 46241 - DNA, 15 bp, Homo sapiens
cacacccagcagagc

SEQ ID NO: 46242 - DNA, 15 bp, Homo sapiens
tcacacccagcagag

SEQ ID NO: 46243 - DNA, 15 bp, Homo sapiens
atcacacccagcaga

SEQ ID NO: 46244 - DNA, 15 bp, Homo sapiens
tatcacacccagcag

SEQ ID NO: 46245 - DNA, 15 bp, Homo sapiens
gtatcacacccagca

SEQ ID NO: 46246 - DNA, 15 bp, Homo sapiens
tgtatcacacccagc

SEQ ID NO: 46247 - DNA, 15 bp, Homo sapiens
ctgtatcacacccag

SEQ ID NO: 46248 - DNA, 15 bp, Homo sapiens
actgtatcacaccca

SEQ ID NO: 46249 - DNA, 15 bp, Homo sapiens
gactgtatcacaccc

SEQ ID NO: 46250 - DNA, 15 bp, Homo sapiens
ggactgtatcacacc

SEQ ID NO: 46251 - DNA, 15 bp, Homo sapiens
gggactgtatcacac

SEQ ID NO: 46252 - DNA, 15 bp, Homo sapiens
agggactgtatcaca

SEQ ID NO: 46253 - DNA, 15 bp, Homo sapiens
cagggactgtatcac

SEQ ID NO: 46254 - DNA, 15 bp, Homo sapiens
tcagggactgtatca

SEQ ID NO: 46255 - DNA, 15 bp, Homo sapiens
atcagggactgtatc

SEQ ID NO: 46256 - DNA, 15 bp, Homo sapiens
catcagggactgtat

SEQ ID NO: 46257 - DNA, 15 bp, Homo sapiens
ccatcagggactgta

SEQ ID NO: 46258 - DNA, 15 bp, Homo sapiens
cccatcagggactgt

SEQ ID NO: 46259 - DNA, 15 bp, Homo sapiens
ccccatcagggactg

SEQ ID NO: 46260 - DNA, 15 bp, Homo sapiens
gccccatcagggact

SEQ ID NO: 46261 - DNA, 15 bp, Homo sapiens
ggccccatcagggac

SEQ ID NO: 46262 - DNA, 15 bp, Homo sapiens
aggccccatcaggga

SEQ ID NO: 46263 - DNA, 15 bp, Homo sapiens
gaggccccatcaggg

SEQ ID NO: 46264 - DNA, 15 bp, Homo sapiens
ggaggccccatcagg

SEQ ID NO: 46265 - DNA, 15 bp, Homo sapiens
aggaggccccatcag

SEQ ID NO: 46266 - DNA, 15 bp, Homo sapiens
taggaggccccatca

SEQ ID NO: 46267 - DNA, 15 bp, Homo sapiens
gtaggaggccccatc

SEQ ID NO: 46268 - DNA, 15 bp, Homo sapiens
agtaggaggccccat

SEQ ID NO: 46269 - DNA, 15 bp, Homo sapiens
cagtaggaggcccca

SEQ ID NO: 46270 - DNA, 15 bp, Homo sapiens
gcagtaggaggcccc

SEQ ID NO: 46271 - DNA, 15 bp, Homo sapiens
tgcagtaggaggccc

SEQ ID NO: 46272 - DNA, 15 bp, Homo sapiens
ctgcagtaggaggcc

SEQ ID NO: 46273 - DNA, 15 bp, Homo sapiens
actgcagtaggaggc

SEQ ID NO: 46274 - DNA, 15 bp, Homo sapiens
gactgcagtaggagg

SEQ ID NO: 46275 - DNA, 15 bp, Homo sapiens
agactgcagtaggag

SEQ ID NO: 46276 - DNA, 15 bp, Homo sapiens
aagactgcagtagga

SEQ ID NO: 46277 - DNA, 15 bp, Homo sapiens
aaagactgcagtagg

SEQ ID NO: 46278 - DNA, 15 bp, Homo sapiens
gaaagactgcagtag

SEQ ID NO: 46279 - DNA, 15 bp, Homo sapiens
ggaaagactgcagta

SEQ ID NO: 46280 - DNA, 15 bp, Homo sapiens
tggaaagactgcagt

SEQ ID NO: 46281 - DNA, 15 bp, Homo sapiens
ctggaaagactgcag

SEQ ID NO: 46282 - DNA, 15 bp, Homo sapiens
actggaaagactgca

SEQ ID NO: 46283 - DNA, 15 bp, Homo sapiens
gactggaaagactgc

SEQ ID NO: 46284 - DNA, 15 bp, Homo sapiens
tgactggaaagactg

SEQ ID NO: 46285 - DNA, 15 bp, Homo sapiens
ctgactggaaagact

SEQ ID NO: 46286 - DNA, 15 bp, Homo sapiens
cctgactggaaagac

SEQ ID NO: 46287 - DNA, 15 bp, Homo sapiens
tcctgactggaaaga

SEQ ID NO: 46288 - DNA, 15 bp, Homo sapiens
ttcctgactggaaag

SEQ ID NO: 46289 - DNA, 15 bp, Homo sapiens
cttcctgactggaaa

SEQ ID NO: 46290 - DNA, 15 bp, Homo sapiens
ccttcctgactggaa

SEQ ID NO: 46291 - DNA, 15 bp, Homo sapiens
tccttcctgactgga

SEQ ID NO: 46292 - DNA, 15 bp, Homo sapiens
ttccttcctgactgg

SEQ ID NO: 46293 - DNA, 15 bp, Homo sapiens
tttccttcctgactg

SEQ ID NO: 46294 - DNA, 15 bp, Homo sapiens
gtttccttcctgact

SEQ ID NO: 46295 - DNA, 15 bp, Homo sapiens
tgtttccttcctgac

SEQ ID NO: 46296 - DNA, 15 bp, Homo sapiens
atgtttccttcctga

SEQ ID NO: 46297 - DNA, 15 bp, Homo sapiens
gatgtttccttcctg

SEQ ID NO: 46298 - DNA, 15 bp, Homo sapiens
ggatgtttccttcct

SEQ ID NO: 46299 - DNA, 15 bp, Homo sapiens
aggatgtttccttcc

SEQ ID NO: 46300 - DNA, 15 bp, Homo sapiens
gaggatgtttccttc

SEQ ID NO: 46301 - DNA, 15 bp, Homo sapiens
agaggatgtttcctt

SEQ ID NO: 46302 - DNA, 15 bp, Homo sapiens
tagaggatgtttcct

SEQ ID NO: 46303 - DNA, 15 bp, Homo sapiens
ttagaggatgtttcc

SEQ ID NO: 46304 - DNA, 15 bp, Homo sapiens
cttagaggatgtttc

SEQ ID NO: 46305 - DNA, 15 bp, Homo sapiens
acttagaggatgttt

SEQ ID NO: 46306 - DNA, 15 bp, Homo sapiens
cacttagaggatgtt

SEQ ID NO: 46307 - DNA, 15 bp, Homo sapiens
ccacttagaggatgt

SEQ ID NO: 46308 - DNA, 15 bp, Homo sapiens
cccacttagaggatg

SEQ ID NO: 46309 - DNA, 15 bp, Homo sapiens
ccccacttagaggat

SEQ ID NO: 46310 - DNA, 15 bp, Homo sapiens
tccccacttagagga

SEQ ID NO: 46311 - DNA, 15 bp, Homo sapiens
gtccccacttagagg

SEQ ID NO: 46312 - DNA, 15 bp, Homo sapiens
ggtccccacttagag

SEQ ID NO: 46313 - DNA, 15 bp, Homo sapiens
aggtccccacttaga

SEQ ID NO: 46314 - DNA, 15 bp, Homo sapiens
taggtccccacttag

SEQ ID NO: 46315 - DNA, 15 bp, Homo sapiens
ttaggtccccactta

SEQ ID NO: 46316 - DNA, 15 bp, Homo sapiens
tttaggtccccactt

SEQ ID NO: 46317 - DNA, 15 bp, Homo sapiens
ctttaggtccccact

SEQ ID NO: 46318 - DNA, 15 bp, Homo sapiens
tctttaggtccccac

SEQ ID NO: 46319 - DNA, 15 bp, Homo sapiens
ttctttaggtcccca

SEQ ID NO: 46320 - DNA, 15 bp, Homo sapiens
attctttaggtcccc

SEQ ID NO: 46321 - DNA, 15 bp, Homo sapiens
cattctttaggtccc

SEQ ID NO: 46322 - DNA, 15 bp, Homo sapiens
ccattctttaggtcc

SEQ ID NO: 46323 - DNA, 15 bp, Homo sapiens
tccattctttaggtc

SEQ ID NO: 46324 - DNA, 15 bp, Homo sapiens
atccattctttaggt

SEQ ID NO: 46325 - DNA, 15 bp, Homo sapiens
catccattctttagg

SEQ ID NO: 46326 - DNA, 15 bp, Homo sapiens
acatccattctttag

SEQ ID NO: 46327 - DNA, 15 bp, Homo sapiens
gacatccattcttta

SEQ ID NO: 46328 - DNA, 15 bp, Homo sapiens
tgacatccattcttt

SEQ ID NO: 46329 - DNA, 15 bp, Homo sapiens
ctgacatccattctt

SEQ ID NO: 46330 - DNA, 15 bp, Homo sapiens
gctgacatccattct

SEQ ID NO: 46331 - DNA, 15 bp, Homo sapiens
ggctgacatccattc

SEQ ID NO: 46332 - DNA, 15 bp, Homo sapiens
tggctgacatccatt

SEQ ID NO: 46333 - DNA, 15 bp, Homo sapiens
ctggctgacatccat

SEQ ID NO: 46334 - DNA, 15 bp, Homo sapiens
cctggctgacatcca

SEQ ID NO: 46335 - DNA, 15 bp, Homo sapiens
acctggctgacatcc

SEQ ID NO: 46336 - DNA, 15 bp, Homo sapiens
tacctggctgacatc

SEQ ID NO: 46337 - DNA, 15 bp, Homo sapiens
ttacctggctgacat

SEQ ID NO: 46338 - DNA, 15 bp, Homo sapiens
tttacctggctgaca

SEQ ID NO: 46339 - DNA, 15 bp, Homo sapiens
ctttacctggctgac

SEQ ID NO: 46340 - DNA, 15 bp, Homo sapiens
tctttacctggctga

SEQ ID NO: 46341 - DNA, 15 bp, Homo sapiens
ttctttacctggctg

SEQ ID NO: 46342 - DNA, 15 bp, Homo sapiens
gttctttacctggct

SEQ ID NO: 46343 - DNA, 15 bp, Homo sapiens
tgttctttacctggc

SEQ ID NO: 46344 - DNA, 15 bp, Homo sapiens
ctgttctttacctgg

SEQ ID NO: 46345 - DNA, 15 bp, Homo sapiens
cctgttctttacctg

SEQ ID NO: 46346 - DNA, 15 bp, Homo sapiens
ccctgttctttacct

SEQ ID NO: 46347 - DNA, 15 bp, Homo sapiens
tccctgttctttacc

SEQ ID NO: 46348 - DNA, 15 bp, Homo sapiens
ctccctgttctttac

SEQ ID NO: 46349 - DNA, 15 bp, Homo sapiens
actccctgttcttta

SEQ ID NO: 46350 - DNA, 15 bp, Homo sapiens
tactccctgttcttt

SEQ ID NO: 46351 - DNA, 15 bp, Homo sapiens
ctactccctgttctt

SEQ ID NO: 46352 - DNA, 15 bp, Homo sapiens
tctactccctgttct

SEQ ID NO: 46353 - DNA, 15 bp, Homo sapiens
ttctactccctgttc

SEQ ID NO: 46354 - DNA, 15 bp, Homo sapiens
attctactccctgtt

SEQ ID NO: 46355 - DNA, 15 bp, Homo sapiens
cattctactccctgt

SEQ ID NO: 46356 - DNA, 15 bp, Homo sapiens
acattctactccctg

SEQ ID NO: 46357 - DNA, 15 bp, Homo sapiens
aacattctactccct

SEQ ID NO: 46358 - DNA, 15 bp, Homo sapiens
gaacattctactccc

SEQ ID NO: 46359 - DNA, 15 bp, Homo sapiens
ggaacattctactcc

SEQ ID NO: 46360 - DNA, 15 bp, Homo sapiens
tggaacattctactc

SEQ ID NO: 46361 - DNA, 15 bp, Homo sapiens
ctggaacattctact

SEQ ID NO: 46362 - DNA, 15 bp, Homo sapiens
cctggaacattctac

SEQ ID NO: 46363 - DNA, 15 bp, Homo sapiens
acctggaacattcta

SEQ ID NO: 46364 - DNA, 15 bp, Homo sapiens
tacctggaacattct

SEQ ID NO: 46365 - DNA, 15 bp, Homo sapiens
ctacctggaacattc

SEQ ID NO: 46366 - DNA, 15 bp, Homo sapiens
tctacctggaacatt

SEQ ID NO: 46367 - DNA, 15 bp, Homo sapiens
ctctacctggaacat

SEQ ID NO: 46368 - DNA, 15 bp, Homo sapiens
cctctacctggaaca

SEQ ID NO: 46369 - DNA, 15 bp, Homo sapiens
tcctctacctggaac

SEQ ID NO: 46370 - DNA, 15 bp, Homo sapiens
gtcctctacctggaa

SEQ ID NO: 46371 - DNA, 15 bp, Homo sapiens
tgtcctctacctgga

SEQ ID NO: 46372 - DNA, 15 bp, Homo sapiens
atgtcctctacctgg

SEQ ID NO: 46373 - DNA, 15 bp, Homo sapiens
tatgtcctctacctg

SEQ ID NO: 46374 - DNA, 15 bp, Homo sapiens
ctatgtcctctacct

SEQ ID NO: 46375 - DNA, 15 bp, Homo sapiens
actatgtcctctacc

SEQ ID NO: 46376 - DNA, 15 bp, Homo sapiens
tactatgtcctctac

SEQ ID NO: 46377 - DNA, 15 bp, Homo sapiens
atactatgtcctcta

SEQ ID NO: 46378 - DNA, 15 bp, Homo sapiens
tatactatgtcctct

SEQ ID NO: 46379 - DNA, 15 bp, Homo sapiens
atatactatgtcctc

SEQ ID NO: 46380 - DNA, 15 bp, Homo sapiens
catatactatgtcct

SEQ ID NO: 46381 - DNA, 15 bp, Homo sapiens
gcatatactatgtcc

SEQ ID NO: 46382 - DNA, 15 bp, Homo sapiens
tgcatatactatgtc

SEQ ID NO: 46383 - DNA, 15 bp, Homo sapiens
atgcatatactatgt

SEQ ID NO: 46384 - DNA, 15 bp, Homo sapiens
aatgcatatactatg

SEQ ID NO: 46385 - DNA, 15 bp, Homo sapiens
caatgcatatactat

SEQ ID NO: 46386 - DNA, 15 bp, Homo sapiens
ccaatgcatatacta

SEQ ID NO: 46387 - DNA, 15 bp, Homo sapiens
accaatgcatatact

SEQ ID NO: 46388 - DNA, 15 bp, Homo sapiens
gaccaatgcatatac

SEQ ID NO: 46389 - DNA, 15 bp, Homo sapiens
ggaccaatgcatata

SEQ ID NO: 46390 - DNA, 15 bp, Homo sapiens
tggaccaatgcatat

SEQ ID NO: 46391 - DNA, 15 bp, Homo sapiens
ctggaccaatgcata

SEQ ID NO: 46392 - DNA, 15 bp, Homo sapiens
tctggaccaatgcat

SEQ ID NO: 46393 - DNA, 15 bp, Homo sapiens
ctctggaccaatgca

SEQ ID NO: 46394 - DNA, 15 bp, Homo sapiens
tctctggaccaatgc

SEQ ID NO: 46395 - DNA, 15 bp, Homo sapiens
ctctctggaccaatg

SEQ ID NO: 46396 - DNA, 15 bp, Homo sapiens
cctctctggaccaat

SEQ ID NO: 46397 - DNA, 15 bp, Homo sapiens
tcctctctggaccaa

SEQ ID NO: 46398 - DNA, 15 bp, Homo sapiens
ctcctctctggacca

SEQ ID NO: 46399 - DNA, 15 bp, Homo sapiens
tctcctctctggacc

SEQ ID NO: 46400 - DNA, 15 bp, Homo sapiens
ctctcctctctggac

SEQ ID NO: 46401 - DNA, 15 bp, Homo sapiens
cctctcctctctgga

SEQ ID NO: 46402 - DNA, 15 bp, Homo sapiens
ccctctcctctctgg

SEQ ID NO: 46403 - DNA, 15 bp, Homo sapiens
tccctctcctctctg

SEQ ID NO: 46404 - DNA, 15 bp, Homo sapiens
ttccctctcctctct

SEQ ID NO: 46405 - DNA, 15 bp, Homo sapiens
cttccctctcctctc

SEQ ID NO: 46406 - DNA, 15 bp, Homo sapiens
tcttccctctcctct

SEQ ID NO: 46407 - DNA, 15 bp, Homo sapiens
ttctcttccctctcc

SEQ ID NO: 46408 - DNA, 15 bp, Homo sapiens
cttctcttccctctc

SEQ ID NO: 46409 - DNA, 15 bp, Homo sapiens
ccttctcttccctct

SEQ ID NO: 46410 - DNA, 15 bp, Homo sapiens
accttctcttccctc

SEQ ID NO: 46411 - DNA, 15 bp, Homo sapiens
caccttctcttccct

SEQ ID NO: 46412 - DNA, 15 bp, Homo sapiens
ccaccttctcttccc

SEQ ID NO: 46413 - DNA, 15 bp, Homo sapiens
gccaccttctcttcc

SEQ ID NO: 46414 - DNA, 15 bp, Homo sapiens
tgccaccttctcttc

SEQ ID NO: 46415 - DNA, 15 bp, Homo sapiens
atgccaccttctctt

SEQ ID NO: 46416 - DNA, 15 bp, Homo sapiens
aatgccaccttctct

SEQ ID NO: 46417 - DNA, 15 bp, Homo sapiens
aaatgccaccttctc

SEQ ID NO: 46418 - DNA, 15 bp, Homo sapiens
taaatgccaccttct

SEQ ID NO: 46419 - DNA, 15 bp, Homo sapiens
ctaaatgccaccttc

SEQ ID NO: 46420 - DNA, 15 bp, Homo sapiens
cctaaatgccacctt

SEQ ID NO: 46421 - DNA, 15 bp, Homo sapiens
ccctaaatgccacct

SEQ ID NO: 46422 - DNA, 15 bp, Homo sapiens
cccctaaatgccacc

SEQ ID NO: 46423 - DNA, 15 bp, Homo sapiens
tcccctaaatgccac

SEQ ID NO: 46424 - DNA, 15 bp, Homo sapiens
ttcccctaaatgcca

SEQ ID NO: 46425 - DNA, 15 bp, Homo sapiens
gttcccctaaatgcc

SEQ ID NO: 46426 - DNA, 15 bp, Homo sapiens
agttcccctaaatgc

SEQ ID NO: 46427 - DNA, 15 bp, Homo sapiens
cagttcccctaaatg

SEQ ID NO: 46428 - DNA, 15 bp, Homo sapiens
acagttcccctaaat

SEQ ID NO: 46429 - DNA, 15 bp, Homo sapiens
tacagttcccctaaa

SEQ ID NO: 46430 - DNA, 15 bp, Homo sapiens
gtacagttcccctaa

SEQ ID NO: 46431 - DNA, 15 bp, Homo sapiens
ggtacagttccccta

SEQ ID NO: 46432 - DNA, 15 bp, Homo sapiens
aggtacagttcccct

SEQ ID NO: 46433 - DNA, 15 bp, Homo sapiens
caggtacagttcccc

SEQ ID NO: 46434 - DNA, 15 bp, Homo sapiens
tcaggtacagttccc

SEQ ID NO: 46435 - DNA, 15 bp, Homo sapiens
atcaggtacagttcc

SEQ ID NO: 46436 - DNA, 15 bp, Homo sapiens
aatcaggtacagttc

SEQ ID NO: 46437 - DNA, 15 bp, Homo sapiens
caatcaggtacagtt

SEQ ID NO: 46438 - DNA, 15 bp, Homo sapiens
tcaatcaggtacagt

SEQ ID NO: 46439 - DNA, 15 bp, Homo sapiens
ctcaatcaggtacag

SEQ ID NO: 46440 - DNA, 15 bp, Homo sapiens
tctcaatcaggtaca

SEQ ID NO: 46441 - DNA, 15 bp, Homo sapiens
atctcaatcaggtac

SEQ ID NO: 46442 - DNA, 15 bp, Homo sapiens
tatctcaatcaggta

SEQ ID NO: 46443 - DNA, 15 bp, Homo sapiens
ctatctcaatcaggt

SEQ ID NO: 46444 - DNA, 15 bp, Homo sapiens
actatctcaatcagg

SEQ ID NO: 46445 - DNA, 15 bp, Homo sapiens
aactatctcaatcag

SEQ ID NO: 46446 - DNA, 15 bp, Homo sapiens
gaactatctcaatca

SEQ ID NO: 46447 - DNA, 15 bp, Homo sapiens
tgaactatctcaatc

SEQ ID NO: 46448 - DNA, 15 bp, Homo sapiens
ctgaactatctcaat

SEQ ID NO: 46449 - DNA, 15 bp, Homo sapiens
gctgaactatctcaa

SEQ ID NO: 46450 - DNA, 15 bp, Homo sapiens
tgctgaactatctca

SEQ ID NO: 46451 - DNA, 15 bp, Homo sapiens
atgctgaactatctc

SEQ ID NO: 46452 - DNA, 15 bp, Homo sapiens
catgctgaactatct

SEQ ID NO: 46453 - DNA, 15 bp, Homo sapiens
ccatgctgaactatc

SEQ ID NO: 46454 - DNA, 15 bp, Homo sapiens
tccatgctgaactat

SEQ ID NO: 46455 - DNA, 15 bp, Homo sapiens
ctccatgctgaacta

SEQ ID NO: 46456 - DNA, 15 bp, Homo sapiens
gctccatgctgaact

SEQ ID NO: 46457 - DNA, 15 bp, Homo sapiens
tgctccatgctgaac

SEQ ID NO: 46458 - DNA, 15 bp, Homo sapiens
ctgctccatgctgaa

SEQ ID NO: 46459 - DNA, 15 bp, Homo sapiens
tctgctccatgctga

SEQ ID NO: 46460 - DNA, 15 bp, Homo sapiens
atctgctccatgctg

SEQ ID NO: 46461 - DNA, 15 bp, Homo sapiens
tatctgctccatgct

SEQ ID NO: 46462 - DNA, 15 bp, Homo sapiens
atatctgctccatgc

SEQ ID NO: 46463 - DNA, 15 bp, Homo sapiens
tatatctgctccatg

SEQ ID NO: 46464 - DNA, 15 bp, Homo sapiens
ctatatctgctccat

SEQ ID NO: 46465 - DNA, 15 bp, Homo sapiens
gctatatctgctcca

SEQ ID NO: 46466 - DNA, 15 bp, Homo sapiens
agctatatctgctcc

SEQ ID NO: 46467 - DNA, 15 bp, Homo sapiens
cagctatatctgctc

SEQ ID NO: 46468 - DNA, 15 bp, Homo sapiens
acagctatatctgct

SEQ ID NO: 46469 - DNA, 15 bp, Homo sapiens
cacagctatatctgc

SEQ ID NO: 46470 - DNA, 15 bp, Homo sapiens
ccacagctatatctg

SEQ ID NO: 46471 - DNA, 15 bp, Homo sapiens
cccacagctatatct

SEQ ID NO: 46472 - DNA, 15 bp, Homo sapiens
ccccacagctatatc

SEQ ID NO: 46473 - DNA, 15 bp, Homo sapiens
tccccacagctatat

SEQ ID NO: 46474 - DNA, 15 bp, Homo sapiens
ctccccacagctata

SEQ ID NO: 46475 - DNA, 15 bp, Homo sapiens
actccccacagctat

SEQ ID NO: 46476 - DNA, 15 bp, Homo sapiens
aactccccacagcta

SEQ ID NO: 46477 - DNA, 15 bp, Homo sapiens
aaactccccacagct

SEQ ID NO: 46478 - DNA, 15 bp, Homo sapiens
caaactccccacagc

SEQ ID NO: 46479 - DNA, 15 bp, Homo sapiens
tcaaactccccacag

SEQ ID NO: 46480 - DNA, 15 bp, Homo sapiens
atcaaactccccaca

SEQ ID NO: 46481 - DNA, 15 bp, Homo sapiens
catcaaactccccac

SEQ ID NO: 46482 - DNA, 15 bp, Homo sapiens
ccatcaaactcccca

SEQ ID NO: 46483 - DNA, 15 bp, Homo sapiens
cccatcaaactcccc

SEQ ID NO: 46484 - DNA, 15 bp, Homo sapiens
tcccatcaaactccc

SEQ ID NO: 46485 - DNA, 15 bp, Homo sapiens
ctcccatcaaactcc

SEQ ID NO: 46486 - DNA, 15 bp, Homo sapiens
tctcccatcaaactc

SEQ ID NO: 46487 - DNA, 15 bp, Homo sapiens
ttctcccatcaaact

SEQ ID NO: 46488 - DNA, 15 bp, Homo sapiens
cttctcccatcaaac

SEQ ID NO: 46489 - DNA, 15 bp, Homo sapiens
ccttctcccatcaaa

SEQ ID NO: 46490 - DNA, 15 bp, Homo sapiens
tccttctcccatcaa

SEQ ID NO: 46491 - DNA, 15 bp, Homo sapiens
ttccttctcccatca

SEQ ID NO: 46492 - DNA, 15 bp, Homo sapiens
gttccttctcccatc

SEQ ID NO: 46493 - DNA, 15 bp, Homo sapiens
cgttccttctcccat

SEQ ID NO: 46494 - DNA, 15 bp, Homo sapiens
tcgttccttctccca

SEQ ID NO: 46495 - DNA, 15 bp, Homo sapiens
atcgttccttctccc

SEQ ID NO: 46496 - DNA, 15 bp, Homo sapiens
catcgttccttctcc

SEQ ID NO: 46497 - DNA, 15 bp, Homo sapiens
tcatcgttccttctc

SEQ ID NO: 46498 - DNA, 15 bp, Homo sapiens
ctcatcgttccttct

SEQ ID NO: 46499 - DNA, 15 bp, Homo sapiens
tctcatcgttccttc

SEQ ID NO: 46500 - DNA, 15 bp, Homo sapiens
gtctcatcgttcctt

SEQ ID NO: 46501 - DNA, 15 bp, Homo sapiens
cgtctcatcgttcct

SEQ ID NO: 46502 - DNA, 15 bp, Homo sapiens
acgtctcatcgttcc

SEQ ID NO: 46503 - DNA, 15 bp, Homo sapiens
cacgtctcatcgttc

SEQ ID NO: 46504 - DNA, 15 bp, Homo sapiens
tcacgtctcatcgtt

SEQ ID NO: 46505 - DNA, 15 bp, Homo sapiens
atcacgtctcatcgt

SEQ ID NO: 46506 - DNA, 15 bp, Homo sapiens
catcacgtctcatcg

SEQ ID NO: 46507 - DNA, 15 bp, Homo sapiens
gcatcacgtctcatc

SEQ ID NO: 46508 - DNA, 15 bp, Homo sapiens
ggcatcacgtctcat

SEQ ID NO: 46509 - DNA, 15 bp, Homo sapiens
aggcatcacgtctca

SEQ ID NO: 46510 - DNA, 15 bp, Homo sapiens
caggcatcacgtctc

SEQ ID NO: 46511 - DNA, 15 bp, Homo sapiens
gcaggcatcacgtct

SEQ ID NO: 46512 - DNA, 15 bp, Homo sapiens
tgcaggcatcacgtc

SEQ ID NO: 46513 - DNA, 15 bp, Homo sapiens
ctgcaggcatcacgt

SEQ ID NO: 46514 - DNA, 15 bp, Homo sapiens
tctgcaggcatcacg

SEQ ID NO: 46515 - DNA, 15 bp, Homo sapiens
ctctgcaggcatcac

SEQ ID NO: 46516 - DNA, 15 bp, Homo sapiens
cctctgcaggcatca

SEQ ID NO: 46517 - DNA, 15 bp, Homo sapiens
acctctgcaggcatc

SEQ ID NO: 46518 - DNA, 15 bp, Homo sapiens
cacctctgcaggcat

SEQ ID NO: 46519 - DNA, 15 bp, Homo sapiens
ccacctctgcaggca

SEQ ID NO: 46520 - DNA, 15 bp, Homo sapiens
cccacctctgcaggc

SEQ ID NO: 46521 - DNA, 15 bp, Homo sapiens
gcccacctctgcagg

SEQ ID NO: 46522 - DNA, 15 bp, Homo sapiens
tgcccacctctgcag

SEQ ID NO: 46523 - DNA, 15 bp, Homo sapiens
ttgcccacctctgca

SEQ ID NO: 46524 - DNA, 15 bp, Homo sapiens
tttgcccacctctgc

SEQ ID NO: 46525 - DNA, 15 bp, Homo sapiens
ctttgcccacctctg

SEQ ID NO: 46526 - DNA, 15 bp, Homo sapiens
cctttgcccacctct

SEQ ID NO: 46527 - DNA, 15 bp, Homo sapiens
acctttgcccacctc

SEQ ID NO: 46528 - DNA, 15 bp, Homo sapiens
gacctttgcccacct

SEQ ID NO: 46529 - DNA, 15 bp, Homo sapiens
cgacctttgcccacc

SEQ ID NO: 46530 - DNA, 15 bp, Homo sapiens
ccgacctttgcccac

SEQ ID NO: 46531 - DNA, 15 bp, Homo sapiens
gccgacctttgccca

SEQ ID NO: 46532 - DNA, 15 bp, Homo sapiens
agccgacctttgccc

SEQ ID NO: 46533 - DNA, 15 bp, Homo sapiens
cagccgacctttgcc

SEQ ID NO: 46534 - DNA, 15 bp, Homo sapiens
tcagccgacctttgc

SEQ ID NO: 46535 - DNA, 15 bp, Homo sapiens
ctcagccgacctttg

SEQ ID NO: 46536 - DNA, 15 bp, Homo sapiens
cctcagccgaccttt

SEQ ID NO: 46537 - DNA, 15 bp, Homo sapiens
gcctcagccgacctt

SEQ ID NO: 46538 - DNA, 15 bp, Homo sapiens
tgcctcagccgacct

SEQ ID NO: 46539 - DNA, 15 bp, Homo sapiens
ctgcctcagccgacc

SEQ ID NO: 46540 - DNA, 15 bp, Homo sapiens
cctgcctcagccgac

SEQ ID NO: 46541 - DNA, 15 bp, Homo sapiens
acctgcctcagccga

SEQ ID NO: 46542 - DNA, 15 bp, Homo sapiens
gacctgcctcagccg

SEQ ID NO: 46543 - DNA, 15 bp, Homo sapiens
agacctgcctcagcc

SEQ ID NO: 46544 - DNA, 15 bp, Homo sapiens
aagacctgcctcagc

SEQ ID NO: 46545 - DNA, 15 bp, Homo sapiens
aaagacctgcctcag

SEQ ID NO: 46546 - DNA, 15 bp, Homo sapiens
gaaagacctgcctca

SEQ ID NO: 46547 - DNA, 15 bp, Homo sapiens
agaaagacctgcctc

SEQ ID NO: 46548 - DNA, 15 bp, Homo sapiens
aagaaagacctgcct

SEQ ID NO: 46549 - DNA, 15 bp, Homo sapiens
gaagaaagacctgcc

SEQ ID NO: 46550 - DNA, 15 bp, Homo sapiens
tgaagaaagacctgc

SEQ ID NO: 46551 - DNA, 15 bp, Homo sapiens
gtgaagaaagacctg

SEQ ID NO: 46552 - DNA, 15 bp, Homo sapiens
cgtgaagaaagacct

SEQ ID NO: 46553 - DNA, 15 bp, Homo sapiens
tcgtgaagaaagacc

SEQ ID NO: 46554 - DNA, 15 bp, Homo sapiens
ctcgtgaagaaagac

SEQ ID NO: 46555 - DNA, 15 bp, Homo sapiens
gctcgtgaagaaaga

SEQ ID NO: 46556 - DNA, 15 bp, Homo sapiens
ggctcgtgaagaaag

SEQ ID NO: 46557 - DNA, 15 bp, Homo sapiens
tggctcgtgaagaaa

SEQ ID NO: 46558 - DNA, 15 bp, Homo sapiens
atggctcgtgaagaa

SEQ ID NO: 46559 - DNA, 15 bp, Homo sapiens
catggctcgtgaaga

SEQ ID NO: 46560 - DNA, 15 bp, Homo sapiens
acatggctcgtgaag

SEQ ID NO: 46561 - DNA, 15 bp, Homo sapiens
cacatggctcgtgaa

SEQ ID NO: 46562 - DNA, 15 bp, Homo sapiens
tcacatggctcgtga

SEQ ID NO: 46563 - DNA, 15 bp, Homo sapiens
ctcacatggctcgtg

SEQ ID NO: 46564 - DNA, 15 bp, Homo sapiens
cctcacatggctcgt

SEQ ID NO: 46565 - DNA, 15 bp, Homo sapiens
tcctcacatggctcg

SEQ ID NO: 46566 - DNA, 15 bp, Homo sapiens
atcctcacatggctc

SEQ ID NO: 46567 - DNA, 15 bp, Homo sapiens
tatcctcacatggct

SEQ ID NO: 46568 - DNA, 15 bp, Homo sapiens
atatcctcacatggc

SEQ ID NO: 46569 - DNA, 15 bp, Homo sapiens
tatatcctcacatgg

SEQ ID NO: 46570 - DNA, 15 bp, Homo sapiens
ctatatcctcacatg

SEQ ID NO: 46571 - DNA, 15 bp, Homo sapiens
cctatatcctcacat

SEQ ID NO: 46572 - DNA, 15 bp, Homo sapiens
ccctatatcctcaca

SEQ ID NO: 46573 - DNA, 15 bp, Homo sapiens
gccctatatcctcac

SEQ ID NO: 46574 - DNA, 15 bp, Homo sapiens
ggccctatatcctca

SEQ ID NO: 46575 - DNA, 15 bp, Homo sapiens
aggccctatatcctc

SEQ ID NO: 46576 - DNA, 15 bp, Homo sapiens
aaggccctatatcct

SEQ ID NO: 46577 - DNA, 15 bp, Homo sapiens
taaggccctatatcc

SEQ ID NO: 46578 - DNA, 15 bp, Homo sapiens
ataaggccctatatc

SEQ ID NO: 46579 - DNA, 15 bp, Homo sapiens
gataaggccctatat

SEQ ID NO: 46580 - DNA, 15 bp, Homo sapiens
ggataaggccctata

SEQ ID NO: 46581 - DNA, 15 bp, Homo sapiens
aggataaggccctat

SEQ ID NO: 46582 - DNA, 15 bp, Homo sapiens
gaggataaggcccta

SEQ ID NO: 46583 - DNA, 15 bp, Homo sapiens
tgaggataaggccct

SEQ ID NO: 46584 - DNA, 15 bp, Homo sapiens
ctgaggataaggccc

SEQ ID NO: 46585 - DNA, 15 bp, Homo sapiens
tctgaggataaggcc

SEQ ID NO: 46586 - DNA, 15 bp, Homo sapiens
ctctgaggataaggc

SEQ ID NO: 46587 - DNA, 15 bp, Homo sapiens
actctgaggataagg

SEQ ID NO: 46588 - DNA, 15 bp, Homo sapiens
tactctgaggataag

SEQ ID NO: 46589 - DNA, 15 bp, Homo sapiens
ttactctgaggataa

SEQ ID NO: 46590 - DNA, 15 bp, Homo sapiens
tttactctgaggata

SEQ ID NO: 46591 - DNA, 15 bp, Homo sapiens
ctttactctgaggat

SEQ ID NO: 46592 - DNA, 15 bp, Homo sapiens
cctttactctgagga

SEQ ID NO: 46593 - DNA, 15 bp, Homo sapiens
ccctttactctgagg

SEQ ID NO: 46594 - DNA, 15 bp, Homo sapiens
tccctttactctgag

SEQ ID NO: 46595 - DNA, 15 bp, Homo sapiens
ctccctttactctga

SEQ ID NO: 46596 - DNA, 15 bp, Homo sapiens
gctccctttactctg

SEQ ID NO: 46597 - DNA, 15 bp, Homo sapiens
ggctccctttactct

SEQ ID NO: 46598 - DNA, 15 bp, Homo sapiens
tggctccctttactc

SEQ ID NO: 46599 - DNA, 15 bp, Homo sapiens
atggctccctttact

SEQ ID NO: 46600 - DNA, 15 bp, Homo sapiens
aatggctccctttac

SEQ ID NO: 46601 - DNA, 15 bp, Homo sapiens
taatggctcccttta

SEQ ID NO: 46602 - DNA, 15 bp, Homo sapiens
ttaatggctcccttt

SEQ ID NO: 46603 - DNA, 15 bp, Homo sapiens
tttaatggctccctt

SEQ ID NO: 46604 - DNA, 15 bp, Homo sapiens
ctttaatggctccct

SEQ ID NO: 46605 - DNA, 15 bp, Homo sapiens
cctttaatggctccc

SEQ ID NO: 46606 - DNA, 15 bp, Homo sapiens
gcctttaatggctcc

SEQ ID NO: 46607 - DNA, 15 bp, Homo sapiens
agcctttaatggctc

SEQ ID NO: 46608 - DNA, 15 bp, Homo sapiens
gagcctttaatggct

SEQ ID NO: 46609 - DNA, 15 bp, Homo sapiens
ggagcctttaatggc

SEQ ID NO: 46610 - DNA, 15 bp, Homo sapiens
tggagcctttaatgg

SEQ ID NO: 46611 - DNA, 15 bp, Homo sapiens
gtggagcctttaatg

SEQ ID NO: 46612 - DNA, 15 bp, Homo sapiens
tgtggagcctttaat

SEQ ID NO: 46613 - DNA, 15 bp, Homo sapiens
ctgtggagcctttaa

SEQ ID NO: 46614 - DNA, 15 bp, Homo sapiens
cctgtggagccttta

SEQ ID NO: 46615 - DNA, 15 bp, Homo sapiens
gcctgtggagccttt

SEQ ID NO: 46616 - DNA, 15 bp, Homo sapiens
agcctgtggagcctt

SEQ ID NO: 46617 - DNA, 15 bp, Homo sapiens
cagcctgtggagcct

SEQ ID NO: 46618 - DNA, 15 bp, Homo sapiens
tcagcctgtggagcc

SEQ ID NO: 46619 - DNA, 15 bp, Homo sapiens
ctcagcctgtggagc

SEQ ID NO: 46620 - DNA, 15 bp, Homo sapiens
actcagcctgtggag

SEQ ID NO: 46621 - DNA, 15 bp, Homo sapiens
cactcagcctgtgga

SEQ ID NO: 46622 - DNA, 15 bp, Homo sapiens
tcactcagcctgtgg

SEQ ID NO: 46623 - DNA, 15 bp, Homo sapiens
gtcactcagcctgtg

SEQ ID NO: 46624 - DNA, 15 bp, Homo sapiens
agtcactcagcctgt

SEQ ID NO: 46625 - DNA, 15 bp, Homo sapiens
aagtcactcagcctg

SEQ ID NO: 46626 - DNA, 15 bp, Homo sapiens
caagtcactcagcct

SEQ ID NO: 46627 - DNA, 15 bp, Homo sapiens
tcaagtcactcagcc

SEQ ID NO: 46628 - DNA, 15 bp, Homo sapiens
atcaagtcactcagc

SEQ ID NO: 46629 - DNA, 15 bp, Homo sapiens
catcaagtcactcag

SEQ ID NO: 46630 - DNA, 15 bp, Homo sapiens
tcatcaagtcactca

SEQ ID NO: 46631 - DNA, 15 bp, Homo sapiens
ctcatcaagtcactc

SEQ ID NO: 46632 - DNA, 15 bp, Homo sapiens
cctcatcaagtcact

SEQ ID NO: 46633 - DNA, 15 bp, Homo sapiens
acctcatcaagtcac

SEQ ID NO: 46634 - DNA, 15 bp, Homo sapiens
cacctcatcaagtca

SEQ ID NO: 46635 - DNA, 15 bp, Homo sapiens
tcacctcatcaagtc

SEQ ID NO: 46636 - DNA, 15 bp, Homo sapiens
ttcacctcatcaagt

SEQ ID NO: 46637 - DNA, 15 bp, Homo sapiens
attcacctcatcaag

SEQ ID NO: 46638 - DNA, 15 bp, Homo sapiens
tattcacctcatcaa

SEQ ID NO: 46639 - DNA, 15 bp, Homo sapiens
gtattcacctcatca

SEQ ID NO: 46640 - DNA, 15 bp, Homo sapiens
cgtattcacctcatc

SEQ ID NO: 46641 - DNA, 15 bp, Homo sapiens
tcgtattcacctcat

SEQ ID NO: 46642 - DNA, 15 bp, Homo sapiens
ttcgtattcacctca

SEQ ID NO: 46643 - DNA, 15 bp, Homo sapiens
tttcgtattcacctc

SEQ ID NO: 46644 - DNA, 15 bp, Homo sapiens
gtttcgtattcacct

SEQ ID NO: 46645 - DNA, 15 bp, Homo sapiens
tgtttcgtattcacc

SEQ ID NO: 46646 - DNA, 15 bp, Homo sapiens
ctgtttcgtattcac

SEQ ID NO: 46647 - DNA, 15 bp, Homo sapiens
tctgtttcgtattca

SEQ ID NO: 46648 - DNA, 15 bp, Homo sapiens
ctctgtttcgtattc

SEQ ID NO: 46649 - DNA, 15 bp, Homo sapiens
gctctgtttcgtatt

SEQ ID NO: 46650 - DNA, 15 bp, Homo sapiens
tgctctgtttcgtat

SEQ ID NO: 46651 - DNA, 15 bp, Homo sapiens
atgctctgtttcgta

SEQ ID NO: 46652 - DNA, 15 bp, Homo sapiens
aatgctctgtttcgt

SEQ ID NO: 46653 - DNA, 15 bp, Homo sapiens
aaatgctctgtttcg

SEQ ID NO: 46654 - DNA, 15 bp, Homo sapiens
gaaatgctctgtttc

SEQ ID NO: 46655 - DNA, 15 bp, Homo sapiens
agaaatgctctgttt

SEQ ID NO: 46656 - DNA, 15 bp, Homo sapiens
cagaaatgctctgtt

SEQ ID NO: 46657 - DNA, 15 bp, Homo sapiens
acagaaatgctctgt

SEQ ID NO: 46658 - DNA, 15 bp, Homo sapiens
cacagaaatgctctg

SEQ ID NO: 46659 - DNA, 15 bp, Homo sapiens
tcacagaaatgctct

SEQ ID NO: 46660 - DNA, 15 bp, Homo sapiens
ttcacagaaatgctc

SEQ ID NO: 46661 - DNA, 15 bp, Homo sapiens
attcacagaaatgct

SEQ ID NO: 46662 - DNA, 15 bp, Homo sapiens
cattcacagaaatgc

SEQ ID NO: 46663 - DNA, 15 bp, Homo sapiens
acattcacagaaatg

SEQ ID NO: 46664 - DNA, 15 bp, Homo sapiens
cacattcacagaaat

SEQ ID NO: 46665 - DNA, 15 bp, Homo sapiens
tcacattcacagaaa

SEQ ID NO: 46666 - DNA, 15 bp, Homo sapiens
ttcacattcacagaa

SEQ ID NO: 46667 - DNA, 15 bp, Homo sapiens
attcacattcacaga

SEQ ID NO: 46668 - DNA, 15 bp, Homo sapiens
cattcacattcacag

SEQ ID NO: 46669 - DNA, 15 bp, Homo sapiens
ccattcacattcaca

SEQ ID NO: 46670 - DNA, 15 bp, Homo sapiens
gccattcacattcac

SEQ ID NO: 46671 - DNA, 15 bp, Homo sapiens
ggccattcacattca

SEQ ID NO: 46672 - DNA, 15 bp, Homo sapiens
aggccattcacattc

SEQ ID NO: 46673 - DNA, 15 bp, Homo sapiens
aaggccattcacatt

SEQ ID NO: 46674 - DNA, 15 bp, Homo sapiens
aaaggccattcacat

SEQ ID NO: 46675 - DNA, 15 bp, Homo sapiens
caaaggccattcaca

SEQ ID NO: 46676 - DNA, 15 bp, Homo sapiens
ccaaaggccattcac

SEQ ID NO: 46677 - DNA, 15 bp, Homo sapiens
tccaaaggccattca

SEQ ID NO: 46678 - DNA, 15 bp, Homo sapiens
ctccaaaggccattc

SEQ ID NO: 46679 - DNA, 15 bp, Homo sapiens
gctccaaaggccatt

SEQ ID NO: 46680 - DNA, 15 bp, Homo sapiens
tgctccaaaggccat

SEQ ID NO: 46681 - DNA, 15 bp, Homo sapiens
ctgctccaaaggcca

SEQ ID NO: 46682 - DNA, 15 bp, Homo sapiens
tctgctccaaaggcc

SEQ ID NO: 46683 - DNA, 15 bp, Homo sapiens
ttctgctccaaaggc

SEQ ID NO: 46684 - DNA, 15 bp, Homo sapiens
gttctgctccaaagg

SEQ ID NO: 46685 - DNA, 15 bp, Homo sapiens
agttctgctccaaag

SEQ ID NO: 46686 - DNA, 15 bp, Homo sapiens
tagttctgctccaaa

SEQ ID NO: 46687 - DNA, 15 bp, Homo sapiens
ttagttctgctccaa

SEQ ID NO: 46688 - DNA, 15 bp, Homo sapiens
cttagttctgctcca

SEQ ID NO: 46689 - DNA, 15 bp, Homo sapiens
acttagttctgctcc

SEQ ID NO: 46690 - DNA, 15 bp, Homo sapiens
aacttagttctgctc

SEQ ID NO: 46691 - DNA, 15 bp, Homo sapiens
gaacttagttctgct

SEQ ID NO: 46692 - DNA, 15 bp, Homo sapiens
tgaacttagttctgc

SEQ ID NO: 46693 - DNA, 15 bp, Homo sapiens
atgaacttagttctg

SEQ ID NO: 46694 - DNA, 15 bp, Homo sapiens
catgaacttagttct

SEQ ID NO: 46695 - DNA, 15 bp, Homo sapiens
tcatgaacttagttc

SEQ ID NO: 46696 - DNA, 15 bp, Homo sapiens
ctcatgaacttagtt

SEQ ID NO: 46697 - DNA, 15 bp, Homo sapiens
cctcatgaacttagt

SEQ ID NO: 46698 - DNA, 15 bp, Homo sapiens
tcctcatgaacttag

SEQ ID NO: 46699 - DNA, 15 bp, Homo sapiens
atcctcatgaactta

SEQ ID NO: 46700 - DNA, 15 bp, Homo sapiens
catcctcatgaactt

SEQ ID NO: 46701 - DNA, 15 bp, Homo sapiens
ccatcctcatgaact

SEQ ID NO: 46702 - DNA, 15 bp, Homo sapiens
tccatcctcatgaac

SEQ ID NO: 46703 - DNA, 15 bp, Homo sapiens
ttccatcctcatgaa

SEQ ID NO: 46704 - DNA, 15 bp, Homo sapiens
tttccatcctcatga

SEQ ID NO: 46705 - DNA, 15 bp, Homo sapiens
ctttccatcctcatg

SEQ ID NO: 46706 - DNA, 15 bp, Homo sapiens
tctttccatcctcat

SEQ ID NO: 46707 - DNA, 15 bp, Homo sapiens
ttctttccatcctca

SEQ ID NO: 46708 - DNA, 15 bp, Homo sapiens
attctttccatcctc

SEQ ID NO: 46709 - DNA, 15 bp, Homo sapiens
tattctttccatcct

SEQ ID NO: 46710 - DNA, 15 bp, Homo sapiens
atattctttccatcc

SEQ ID NO: 46711 - DNA, 15 bp, Homo sapiens
tatattctttccatc

SEQ ID NO: 46712 - DNA, 15 bp, Homo sapiens
ttatattctttccat

SEQ ID NO: 46713 - DNA, 15 bp, Homo sapiens
attatattctttcca

SEQ ID NO: 46714 - DNA, 15 bp, Homo sapiens
cattatattctttcc

SEQ ID NO: 46715 - DNA, 15 bp, Homo sapiens
tcattatattctttc

SEQ ID NO: 46716 - DNA, 15 bp, Homo sapiens
ttcattatattcttt

SEQ ID NO: 46717 - DNA, 15 bp, Homo sapiens
cttcattatattctt

SEQ ID NO: 46718 - DNA, 15 bp, Homo sapiens
gcttcattatattct

SEQ ID NO: 46719 - DNA, 15 bp, Homo sapiens
ggcttcattatattc

SEQ ID NO: 46720 - DNA, 15 bp, Homo sapiens
tggcttcattatatt

SEQ ID NO: 46721 - DNA, 15 bp, Homo sapiens
atggcttcattatat

SEQ ID NO: 46722 - DNA, 15 bp, Homo sapiens
gatggcttcattata

SEQ ID NO: 46723 - DNA, 15 bp, Homo sapiens
agatggcttcattat

SEQ ID NO: 46724 - DNA, 15 bp, Homo sapiens
gagatggcttcatta

SEQ ID NO: 46725 - DNA, 15 bp, Homo sapiens
agagatggcttcatt

SEQ ID NO: 46726 - DNA, 15 bp, Homo sapiens
aagagatggcttcat

SEQ ID NO: 46727 - DNA, 15 bp, Homo sapiens
taagagatggcttca

SEQ ID NO: 46728 - DNA, 15 bp, Homo sapiens
ctaagagatggcttc

SEQ ID NO: 46729 - DNA, 15 bp, Homo sapiens
tctaagagatggctt

SEQ ID NO: 46730 - DNA, 15 bp, Homo sapiens
gtctaagagatggct

SEQ ID NO: 46731 - DNA, 15 bp, Homo sapiens
ggtctaagagatggc

SEQ ID NO: 46732 - DNA, 15 bp, Homo sapiens
gggtctaagagatgg

SEQ ID NO: 46733 - DNA, 15 bp, Homo sapiens
tgggtctaagagatg

SEQ ID NO: 46734 - DNA, 15 bp, Homo sapiens
ctgggtctaagagat

SEQ ID NO: 46735 - DNA, 15 bp, Homo sapiens
tctgggtctaagaga

SEQ ID NO: 46736 - DNA, 15 bp, Homo sapiens
ttctgggtctaagag

SEQ ID NO: 46737 - DNA, 15 bp, Homo sapiens
tttctgggtctaaga

SEQ ID NO: 46738 - DNA, 15 bp, Homo sapiens
ctttctgggtctaag

SEQ ID NO: 46739 - DNA, 15 bp, Homo sapiens
tctttctgggtctaa

SEQ ID NO: 46740 - DNA, 15 bp, Homo sapiens
ttctttctgggtcta

SEQ ID NO: 46741 - DNA, 15 bp, Homo sapiens
attctttctgggtct

SEQ ID NO: 46742 - DNA, 15 bp, Homo sapiens
cattctttctgggtc

SEQ ID NO: 46743 - DNA, 15 bp, Homo sapiens
ccattctttctgggt

SEQ ID NO: 46744 - DNA, 15 bp, Homo sapiens
cccattctttctggg

SEQ ID NO: 46745 - DNA, 15 bp, Homo sapiens
ccccattctttctgg

SEQ ID NO: 46746 - DNA, 15 bp, Homo sapiens
gccccattctttctg

SEQ ID NO: 46747 - DNA, 15 bp, Homo sapiens
tgccccattctttct

SEQ ID NO: 46748 - DNA, 15 bp, Homo sapiens
gtgccccattctttc

SEQ ID NO: 46749 - DNA, 15 bp, Homo sapiens
tgtgccccattcttt

SEQ ID NO: 46750 - DNA, 15 bp, Homo sapiens
ttgtgccccattctt

SEQ ID NO: 46751 - DNA, 15 bp, Homo sapiens
gttgtgccccattct

SEQ ID NO: 46752 - DNA, 15 bp, Homo sapiens
tgttgtgccccattc

SEQ ID NO: 46753 - DNA, 15 bp, Homo sapiens
ctgttgtgccccatt

SEQ ID NO: 46754 - DNA, 15 bp, Homo sapiens
gctgttgtgccccat

SEQ ID NO: 46755 - DNA, 15 bp, Homo sapiens
ggctgttgtgcccca

SEQ ID NO: 46756 - DNA, 15 bp, Homo sapiens
aggctgttgtgcccc

SEQ ID NO: 46757 - DNA, 15 bp, Homo sapiens
aaggctgttgtgccc

SEQ ID NO: 46758 - DNA, 15 bp, Homo sapiens
aaaggctgttgtgcc

SEQ ID NO: 46759 - DNA, 15 bp, Homo sapiens
taaaggctgttgtgc

SEQ ID NO: 46760 - DNA, 15 bp, Homo sapiens
ataaaggctgttgtg

SEQ ID NO: 46761 - DNA, 15 bp, Homo sapiens
gataaaggctgttgt

SEQ ID NO: 46762 - DNA, 15 bp, Homo sapiens
agataaaggctgttg

SEQ ID NO: 46763 - DNA, 15 bp, Homo sapiens
aagataaaggctgtt

SEQ ID NO: 46764 - DNA, 15 bp, Homo sapiens
aaagataaaggctgt

SEQ ID NO: 46765 - DNA, 15 bp, Homo sapiens
gaaagataaaggctg

SEQ ID NO: 46766 - DNA, 15 bp, Homo sapiens
agaaagataaaggct

SEQ ID NO: 46767 - DNA, 15 bp, Homo sapiens
cagaaagataaaggc

SEQ ID NO: 46768 - DNA, 15 bp, Homo sapiens
ccagaaagataaagg

SEQ ID NO: 46769 - DNA, 15 bp, Homo sapiens
cccagaaagataaag

SEQ ID NO: 46770 - DNA, 15 bp, Homo sapiens
ccccagaaagataaa

SEQ ID NO: 46771 - DNA, 15 bp, Homo sapiens
gccccagaaagataa

SEQ ID NO: 46772 - DNA, 15 bp, Homo sapiens
ggccccagaaagata

SEQ ID NO: 46773 - DNA, 15 bp, Homo sapiens
tggccccagaaagat

SEQ ID NO: 46774 - DNA, 15 bp, Homo sapiens
ttggccccagaaaga

SEQ ID NO: 46775 - DNA, 15 bp, Homo sapiens
attggccccagaaag

SEQ ID NO: 46776 - DNA, 15 bp, Homo sapiens
cattggccccagaaa

SEQ ID NO: 46777 - DNA, 15 bp, Homo sapiens
acattggccccagaa

SEQ ID NO: 46778 - DNA, 15 bp, Homo sapiens
gacattggccccaga

SEQ ID NO: 46779 - DNA, 15 bp, Homo sapiens
tgacattggccccag

SEQ ID NO: 46780 - DNA, 15 bp, Homo sapiens
gtgacattggcccca

SEQ ID NO: 46781 - DNA, 15 bp, Homo sapiens
tgtgacattggcccc

SEQ ID NO: 46782 - DNA, 15 bp, Homo sapiens
ctgtgacattggccc

SEQ ID NO: 46783 - DNA, 15 bp, Homo sapiens
tctgtgacattggcc

SEQ ID NO: 46784 - DNA, 15 bp, Homo sapiens
ttctgtgacattggc

SEQ ID NO: 46785 - DNA, 15 bp, Homo sapiens
attctgtgacattgg

SEQ ID NO: 46786 - DNA, 15 bp, Homo sapiens
cattctgtgacattg

SEQ ID NO: 46787 - DNA, 15 bp, Homo sapiens
gcattctgtgacatt

SEQ ID NO: 46788 - DNA, 15 bp, Homo sapiens
ggcattctgtgacat

SEQ ID NO: 46789 - DNA, 15 bp, Homo sapiens
tggcattctgtgaca

SEQ ID NO: 46790 - DNA, 15 bp, Homo sapiens
atggcattctgtgac

SEQ ID NO: 46791 - DNA, 15 bp, Homo sapiens
catggcattctgtga

SEQ ID NO: 46792 - DNA, 15 bp, Homo sapiens
gcatggcattctgtg

SEQ ID NO: 46793 - DNA, 15 bp, Homo sapiens
agcatggcattctgt

SEQ ID NO: 46794 - DNA, 15 bp, Homo sapiens
aagcatggcattctg

SEQ ID NO: 46795 - DNA, 15 bp, Homo sapiens
aaagcatggcattct

SEQ ID NO: 46796 - DNA, 15 bp, Homo sapiens
aaaagcatggcattc

SEQ ID NO: 46797 - DNA, 15 bp, Homo sapiens
taaaagcatggcatt

SEQ ID NO: 46798 - DNA, 15 bp, Homo sapiens
ctaaaagcatggcat

SEQ ID NO: 46799 - DNA, 15 bp, Homo sapiens
cctaaaagcatggca

SEQ ID NO: 46800 - DNA, 15 bp, Homo sapiens
tcctaaaagcatggc

SEQ ID NO: 46801 - DNA, 15 bp, Homo sapiens
ttcctaaaagcatgg

SEQ ID NO: 46802 - DNA, 15 bp, Homo sapiens
tttcctaaaagcatg

SEQ ID NO: 46803 - DNA, 15 bp, Homo sapiens
gtttcctaaaagcat

SEQ ID NO: 46804 - DNA, 15 bp, Homo sapiens
tgtttcctaaaagca

SEQ ID NO: 46805 - DNA, 15 bp, Homo sapiens
atgtttcctaaaagc

SEQ ID NO: 46806 - DNA, 15 bp, Homo sapiens
catgtttcctaaaag

SEQ ID NO: 46807 - DNA, 15 bp, Homo sapiens
ccatgtttcctaaaa

SEQ ID NO: 46808 - DNA, 15 bp, Homo sapiens
accatgtttcctaaa

SEQ ID NO: 46809 - DNA, 15 bp, Homo sapiens
taccatgtttcctaa

SEQ ID NO: 46810 - DNA, 15 bp, Homo sapiens
ataccatgtttccta

SEQ ID NO: 46811 - DNA, 15 bp, Homo sapiens
cataccatgtttcct

SEQ ID NO: 46812 - DNA, 15 bp, Homo sapiens
acataccatgtttcc

SEQ ID NO: 46813 - DNA, 15 bp, Homo sapiens
aacataccatgtttc

SEQ ID NO: 46814 - DNA, 15 bp, Homo sapiens
caacataccatgttt

SEQ ID NO: 46815 - DNA, 15 bp, Homo sapiens
acaacataccatgtt

SEQ ID NO: 46816 - DNA, 15 bp, Homo sapiens
cacaacataccatgt

SEQ ID NO: 46817 - DNA, 15 bp, Homo sapiens
tcacaacataccatg

SEQ ID NO: 46818 - DNA, 15 bp, Homo sapiens
atcacaacataccat

SEQ ID NO: 46819 - DNA, 15 bp, Homo sapiens
aatcacaacatacca

SEQ ID NO: 46820 - DNA, 15 bp, Homo sapiens
taatcacaacatacc

SEQ ID NO: 46821 - DNA, 15 bp, Homo sapiens
ttaatcacaacatac

SEQ ID NO: 46822 - DNA, 15 bp, Homo sapiens
gttaatcacaacata

SEQ ID NO: 46823 - DNA, 15 bp, Homo sapiens
tgttaatcacaacat

SEQ ID NO: 46824 - DNA, 15 bp, Homo sapiens
gtgttaatcacaaca

SEQ ID NO: 46825 - DNA, 15 bp, Homo sapiens
tgtgttaatcacaac

SEQ ID NO: 46826 - DNA, 15 bp, Homo sapiens
atgtgttaatcacaa

SEQ ID NO: 46827 - DNA, 15 bp, Homo sapiens
aatgtgttaatcaca

SEQ ID NO: 46828 - DNA, 15 bp, Homo sapiens
aaatgtgttaatcac

SEQ ID NO: 46829 - DNA, 15 bp, Homo sapiens
aaaatgtgttaatca

SEQ ID NO: 46830 - DNA, 15 bp, Homo sapiens
caaaatgtgttaatc

SEQ ID NO: 46831 - DNA, 15 bp, Homo sapiens
gcaaaatgtgttaat

SEQ ID NO: 46832 - DNA, 15 bp, Homo sapiens
tgcaaaatgtgttaa

SEQ ID NO: 46833 - DNA, 15 bp, Homo sapiens
ctgcaaaatgtgtta

SEQ ID NO: 46834 - DNA, 15 bp, Homo sapiens
tctgcaaaatgtgtt

SEQ ID NO: 46835 - DNA, 15 bp, Homo sapiens
ttctgcaaaatgtgt

SEQ ID NO: 46836 - DNA, 15 bp, Homo sapiens
cttctgcaaaatgtg

SEQ ID NO: 46837 - DNA, 15 bp, Homo sapiens
acttctgcaaaatgt

SEQ ID NO: 46838 - DNA, 15 bp, Homo sapiens
cacttctgcaaaatg

SEQ ID NO: 46839 - DNA, 15 bp, Homo sapiens
ccacttctgcaaaat

SEQ ID NO: 46840 - DNA, 15 bp, Homo sapiens
cccacttctgcaaaa

SEQ ID NO: 46841 - DNA, 15 bp, Homo sapiens
acccacttctgcaaa

SEQ ID NO: 46842 - DNA, 15 bp, Homo sapiens
cacccacttctgcaa

SEQ ID NO: 46843 - DNA, 15 bp, Homo sapiens
ccacccacttctgca

SEQ ID NO: 46844 - DNA, 15 bp, Homo sapiens
cccacccacttctgc

SEQ ID NO: 46845 - DNA, 15 bp, Homo sapiens
tcccacccacttctg

SEQ ID NO: 46846 - DNA, 15 bp, Homo sapiens
ctcccacccacttct

SEQ ID NO: 46847 - DNA, 15 bp, Homo sapiens
gctcccacccacttc

SEQ ID NO: 46848 - DNA, 15 bp, Homo sapiens
agctcccacccactt

SEQ ID NO: 46849 - DNA, 15 bp, Homo sapiens
aagctcccacccact

SEQ ID NO: 46850 - DNA, 15 bp, Homo sapiens
aaagctcccacccac

SEQ ID NO: 46851 - DNA, 15 bp, Homo sapiens
aaaagctcccaccca

SEQ ID NO: 46852 - DNA, 15 bp, Homo sapiens
caaaagctcccaccc

SEQ ID NO: 46853 - DNA, 15 bp, Homo sapiens
tcaaaagctcccacc

SEQ ID NO: 46854 - DNA, 15 bp, Homo sapiens
ttcaaaagctcccac

SEQ ID NO: 46855 - DNA, 15 bp, Homo sapiens
attcaaaagctccca

SEQ ID NO: 46856 - DNA, 15 bp, Homo sapiens
tattcaaaagctccc

SEQ ID NO: 46857 - DNA, 15 bp, Homo sapiens
ttattcaaaagctcc

SEQ ID NO: 46858 - DNA, 15 bp, Homo sapiens
attattcaaaagctc

SEQ ID NO: 46859 - DNA, 15 bp, Homo sapiens
tattattcaaaagct

SEQ ID NO: 46860 - DNA, 15 bp, Homo sapiens
ttattattcaaaagc

SEQ ID NO: 46861 - DNA, 15 bp, Homo sapiens
gttattattcaaaag

SEQ ID NO: 46862 - DNA, 15 bp, Homo sapiens
tgttattattcaaaa

SEQ ID NO: 46863 - DNA, 15 bp, Homo sapiens
ctgttattattcaaa

SEQ ID NO: 46864 - DNA, 15 bp, Homo sapiens
actgttattattcaa

SEQ ID NO: 46865 - DNA, 15 bp, Homo sapiens
tactgttattattca

SEQ ID NO: 46866 - DNA, 15 bp, Homo sapiens
ttactgttattattc

SEQ ID NO: 46867 - DNA, 15 bp, Homo sapiens
cttactgttattatt

SEQ ID NO: 46868 - DNA, 15 bp, Homo sapiens
gcttactgttattat

SEQ ID NO: 46869 - DNA, 15 bp, Homo sapiens
tgcttactgttatta

SEQ ID NO: 46870 - DNA, 15 bp, Homo sapiens
atgcttactgttatt

SEQ ID NO: 46871 - DNA, 15 bp, Homo sapiens
aatgcttactgttat

SEQ ID NO: 46872 - DNA, 15 bp, Homo sapiens
aaatgcttactgtta

SEQ ID NO: 46873 - DNA, 15 bp, Homo sapiens
caaatgcttactgtt

SEQ ID NO: 46874 - DNA, 15 bp, Homo sapiens
acaaatgcttactgt

SEQ ID NO: 46875 - DNA, 15 bp, Homo sapiens
cacaaatgcttactg

SEQ ID NO: 46876 - DNA, 15 bp, Homo sapiens
gcacaaatgcttact

SEQ ID NO: 46877 - DNA, 15 bp, Homo sapiens
tgcacaaatgcttac

SEQ ID NO: 46878 - DNA, 15 bp, Homo sapiens
atgcacaaatgctta

SEQ ID NO: 46879 - DNA, 15 bp, Homo sapiens
aatgcacaaatgctt

SEQ ID NO: 46880 - DNA, 15 bp, Homo sapiens
gaatgcacaaatgct

SEQ ID NO: 46881 - DNA, 15 bp, Homo sapiens
agaatgcacaaatgc

SEQ ID NO: 46882 - DNA, 15 bp, Homo sapiens
aagaatgcacaaatg

SEQ ID NO: 46883 - DNA, 15 bp, Homo sapiens
gaagaatgcacaaat

SEQ ID NO: 46884 - DNA, 15 bp, Homo sapiens
ggaagaatgcacaaa

SEQ ID NO: 46885 - DNA, 15 bp, Homo sapiens
aggaagaatgcacaa

SEQ ID NO: 46886 - DNA, 15 bp, Homo sapiens
caggaagaatgcaca

SEQ ID NO: 46887 - DNA, 15 bp, Homo sapiens
acaggaagaatgcac

SEQ ID NO: 46888 - DNA, 15 bp, Homo sapiens
tacaggaagaatgca

SEQ ID NO: 46889 - DNA, 15 bp, Homo sapiens
ttacaggaagaatgc

SEQ ID NO: 46890 - DNA, 15 bp, Homo sapiens
attacaggaagaatg

SEQ ID NO: 46891 - DNA, 15 bp, Homo sapiens
cattacaggaagaat

SEQ ID NO: 46892 - DNA, 15 bp, Homo sapiens
tcattacaggaagaa

SEQ ID NO: 46893 - DNA, 15 bp, Homo sapiens
gtcattacaggaaga

SEQ ID NO: 46894 - DNA, 15 bp, Homo sapiens
tgtcattacaggaag

SEQ ID NO: 46895 - DNA, 15 bp, Homo sapiens
atgtcattacaggaa

SEQ ID NO: 46896 - DNA, 15 bp, Homo sapiens
aatgtcattacagga

SEQ ID NO: 46897 - DNA, 15 bp, Homo sapiens
taatgtcattacagg

SEQ ID NO: 46898 - DNA, 15 bp, Homo sapiens
gtaatgtcattacag

SEQ ID NO: 46899 - DNA, 15 bp, Homo sapiens
tgtaatgtcattaca

SEQ ID NO: 46900 - DNA, 15 bp, Homo sapiens
ctgtaatgtcattac

SEQ ID NO: 46901 - DNA, 15 bp, Homo sapiens
actgtaatgtcatta

SEQ ID NO: 46902 - DNA, 15 bp, Homo sapiens
aactgtaatgtcatt

SEQ ID NO: 46903 - DNA, 15 bp, Homo sapiens
taactgtaatgtcat

SEQ ID NO: 46904 - DNA, 15 bp, Homo sapiens
ataactgtaatgtca

SEQ ID NO: 46905 - DNA, 15 bp, Homo sapiens
cataactgtaatgtc

SEQ ID NO: 46906 - DNA, 15 bp, Homo sapiens
tcataactgtaatgt

SEQ ID NO: 46907 - DNA, 15 bp, Homo sapiens
atcataactgtaatg

SEQ ID NO: 46908 - DNA, 15 bp, Homo sapiens
gatcataactgtaat

SEQ ID NO: 46909 - DNA, 15 bp, Homo sapiens
agatcataactgtaa

SEQ ID NO: 46910 - DNA, 15 bp, Homo sapiens
cagatcataactgta

SEQ ID NO: 46911 - DNA, 15 bp, Homo sapiens
tcagatcataactgt

SEQ ID NO: 46912 - DNA, 15 bp, Homo sapiens
ttcagatcataactg

SEQ ID NO: 46913 - DNA, 15 bp, Homo sapiens
tttcagatcataact

SEQ ID NO: 46914 - DNA, 15 bp, Homo sapiens
ttttcagatcataac

SEQ ID NO: 46915 - DNA, 15 bp, Homo sapiens
attttcagatcataa

SEQ ID NO: 46916 - DNA, 15 bp, Homo sapiens
tattttcagatcata

SEQ ID NO: 46917 - DNA, 15 bp, Homo sapiens
atattttcagatcat

SEQ ID NO: 46918 - DNA, 15 bp, Homo sapiens
aatattttcagatca

SEQ ID NO: 46919 - DNA, 15 bp, Homo sapiens
caatattttcagatc

SEQ ID NO: 46920 - DNA, 15 bp, Homo sapiens
tcaatattttcagat

SEQ ID NO: 46921 - DNA, 15 bp, Homo sapiens
ctcaatattttcaga

SEQ ID NO: 46922 - DNA, 15 bp, Homo sapiens
actcaatattttcag

SEQ ID NO: 46923 - DNA, 15 bp, Homo sapiens
gactcaatattttca

SEQ ID NO: 46924 - DNA, 15 bp, Homo sapiens
tgactcaatattttc

SEQ ID NO: 46925 - DNA, 15 bp, Homo sapiens
atgactcaatatttt

SEQ ID NO: 46926 - DNA, 15 bp, Homo sapiens
tatgactcaatattt

SEQ ID NO: 46927 - DNA, 15 bp, Homo sapiens
gtatgactcaatatt

SEQ ID NO: 46928 - DNA, 15 bp, Homo sapiens
tgtatgactcaatat

SEQ ID NO: 46929 - DNA, 15 bp, Homo sapiens
atgtatgactcaata

SEQ ID NO: 46930 - DNA, 15 bp, Homo sapiens
catgtatgactcaat

SEQ ID NO: 46931 - DNA, 15 bp, Homo sapiens
tcatgtatgactcaa

SEQ ID NO: 46932 - DNA, 15 bp, Homo sapiens
ttcatgtatgactca

SEQ ID NO: 46933 - DNA, 15 bp, Homo sapiens
attcatgtatgactc

SEQ ID NO: 46934 - DNA, 15 bp, Homo sapiens
aattcatgtatgact

SEQ ID NO: 46935 - DNA, 15 bp, Homo sapiens
gaattcatgtatgac

SEQ ID NO: 46936 - DNA, 15 bp, Homo sapiens
ggaattcatgtatga

SEQ ID NO: 46937 - DNA, 15 bp, Homo sapiens
aggaattcatgtatg

SEQ ID NO: 46938 - DNA, 15 bp, Homo sapiens
caggaattcatgtat

SEQ ID NO: 46939 - DNA, 15 bp, Homo sapiens
acaggaattcatgta

SEQ ID NO: 46940 - DNA, 15 bp, Homo sapiens
aacaggaattcatgt

SEQ ID NO: 46941 - DNA, 15 bp, Homo sapiens
taacaggaattcatg

SEQ ID NO: 46942 - DNA, 15 bp, Homo sapiens
ataacaggaattcat

SEQ ID NO: 46943 - DNA, 15 bp, Homo sapiens
gataacaggaattca

SEQ ID NO: 46944 - DNA, 15 bp, Homo sapiens
agataacaggaattc

SEQ ID NO: 46945 - DNA, 15 bp, Homo sapiens
aagataacaggaatt

SEQ ID NO: 46946 - DNA, 15 bp, Homo sapiens
taagataacaggaat

SEQ ID NO: 46947 - DNA, 15 bp, Homo sapiens
ttaagataacaggaa

SEQ ID NO: 46948 - DNA, 15 bp, Homo sapiens
gttaagataacagga

SEQ ID NO: 46949 - DNA, 15 bp, Homo sapiens
agttaagataacagg

SEQ ID NO: 46950 - DNA, 15 bp, Homo sapiens
gagttaagataacag

SEQ ID NO: 46951 - DNA, 15 bp, Homo sapiens
tgagttaagataaca

SEQ ID NO: 46952 - DNA, 15 bp, Homo sapiens
ctgagttaagataac

SEQ ID NO: 46953 - DNA, 15 bp, Homo sapiens
tctgagttaagataa

SEQ ID NO: 46954 - DNA, 15 bp, Homo sapiens
ttctgagttaagata

SEQ ID NO: 46955 - DNA, 15 bp, Homo sapiens
tttctgagttaagat

SEQ ID NO: 46956 - DNA, 15 bp, Homo sapiens
ttttctgagttaaga

SEQ ID NO: 46957 - DNA, 15 bp, Homo sapiens
attttctgagttaag

SEQ ID NO: 46958 - DNA, 15 bp, Homo sapiens
tattttctgagttaa

SEQ ID NO: 46959 - DNA, 15 bp, Homo sapiens
atattttctgagtta

SEQ ID NO: 46960 - DNA, 15 bp, Homo sapiens
tatattttctgagtt

SEQ ID NO: 46961 - DNA, 15 bp, Homo sapiens
ctatattttctgagt

SEQ ID NO: 46962 - DNA, 15 bp, Homo sapiens
actatattttctgag

SEQ ID NO: 46963 - DNA, 15 bp, Homo sapiens
gactatattttctga

SEQ ID NO: 46964 - DNA, 15 bp, Homo sapiens
ggactatattttctg

SEQ ID NO: 46965 - DNA, 15 bp, Homo sapiens
gggactatattttct

SEQ ID NO: 46966 - DNA, 15 bp, Homo sapiens
agggactatattttc

SEQ ID NO: 46967 - DNA, 15 bp, Homo sapiens
gagggactatatttt

SEQ ID NO: 46968 - DNA, 15 bp, Homo sapiens
tgagggactatattt

SEQ ID NO: 46969 - DNA, 15 bp, Homo sapiens
gtgagggactatatt

SEQ ID NO: 46970 - DNA, 15 bp, Homo sapiens
agtgagggactatat

SEQ ID NO: 46971 - DNA, 15 bp, Homo sapiens
tagtgagggactata

SEQ ID NO: 46972 - DNA, 15 bp, Homo sapiens
ttagtgagggactat

SEQ ID NO: 46973 - DNA, 15 bp, Homo sapiens
tttagtgagggacta

SEQ ID NO: 46974 - DNA, 15 bp, Homo sapiens
ctttagtgagggact

SEQ ID NO: 46975 - DNA, 15 bp, Homo sapiens
cctttagtgagggac

SEQ ID NO: 46976 - DNA, 15 bp, Homo sapiens
acctttagtgaggga

SEQ ID NO: 46977 - DNA, 15 bp, Homo sapiens
aacctttagtgaggg

SEQ ID NO: 46978 - DNA, 15 bp, Homo sapiens
aaacctttagtgagg

SEQ ID NO: 46979 - DNA, 15 bp, Homo sapiens
aaaacctttagtgag

SEQ ID NO: 46980 - DNA, 15 bp, Homo sapiens
taaaacctttagtga

SEQ ID NO: 46981 - DNA, 15 bp, Homo sapiens
ataaaacctttagtg

SEQ ID NO: 46982 - DNA, 15 bp, Homo sapiens
aataaaacctttagt

SEQ ID NO: 46983 - DNA, 15 bp, Homo sapiens
aaataaaacctttag

SEQ ID NO: 46984 - DNA, 15 bp, Homo sapiens
aaaataaaaccttta

SEQ ID NO: 46985 - DNA, 15 bp, Homo sapiens
gaaaataaaaccttt

SEQ ID NO: 46986 - DNA, 15 bp, Homo sapiens
ggaaaataaaacctt

SEQ ID NO: 46987 - DNA, 15 bp, Homo sapiens
aggaaaataaaacct

SEQ ID NO: 46988 - DNA, 15 bp, Homo sapiens
aaggaaaataaaacc

SEQ ID NO: 46989 - DNA, 15 bp, Homo sapiens
gaaggaaaataaaac

SEQ ID NO: 46990 - DNA, 15 bp, Homo sapiens
agaaggaaaataaaa

SEQ ID NO: 46991 - DNA, 15 bp, Homo sapiens
aagaaggaaaataaa

SEQ ID NO: 46992 - DNA, 15 bp, Homo sapiens
aaagaaggaaaataa

SEQ ID NO: 46993 - DNA, 15 bp, Homo sapiens
aaaagaaggaaaata

SEQ ID NO: 46994 - DNA, 15 bp, Homo sapiens
aaaaagaaggaaaat

SEQ ID NO: 46995 - DNA, 15 bp, Homo sapiens
gaaaaagaaggaaaa

SEQ ID NO: 46996 - DNA, 15 bp, Homo sapiens
ggaaaaagaaggaaa

SEQ ID NO: 46997 - DNA, 15 bp, Homo sapiens
gggaaaaagaaggaa

SEQ ID NO: 46998 - DNA, 15 bp, Homo sapiens
tgggaaaaagaagga

SEQ ID NO: 46999 - DNA, 15 bp, Homo sapiens
atgggaaaaagaagg

SEQ ID NO: 47000 - DNA, 15 bp, Homo sapiens
aatgggaaaaagaag

SEQ ID NO: 47001 - DNA, 15 bp, Homo sapiens
aaatgggaaaaagaa

SEQ ID NO: 47002 - DNA, 15 bp, Homo sapiens
gaaatgggaaaaaga

SEQ ID NO: 47003 - DNA, 15 bp, Homo sapiens
ggaaatgggaaaaag

SEQ ID NO: 47004 - DNA, 15 bp, Homo sapiens
aggaaatgggaaaaa

SEQ ID NO: 47005 - DNA, 15 bp, Homo sapiens
aaggaaatgggaaaa

SEQ ID NO: 47006 - DNA, 15 bp, Homo sapiens
aaaggaaatgggaaa

SEQ ID NO: 47007 - DNA, 15 bp, Homo sapiens
taaaggaaatgggaa

SEQ ID NO: 47008 - DNA, 15 bp, Homo sapiens
gtaaaggaaatggga

SEQ ID NO: 47009 - DNA, 15 bp, Homo sapiens
agtaaaggaaatggg

SEQ ID NO: 47010 - DNA, 15 bp, Homo sapiens
aagtaaaggaaatgg

SEQ ID NO: 47011 - DNA, 15 bp, Homo sapiens
gaagtaaaggaaatg

SEQ ID NO: 47012 - DNA, 15 bp, Homo sapiens
cgaagtaaaggaaat

SEQ ID NO: 47013 - DNA, 15 bp, Homo sapiens
acgaagtaaaggaaa

SEQ ID NO: 47014 - DNA, 15 bp, Homo sapiens
tacgaagtaaaggaa

SEQ ID NO: 47015 - DNA, 15 bp, Homo sapiens
atacgaagtaaagga

SEQ ID NO: 47016 - DNA, 15 bp, Homo sapiens
tatacgaagtaaagg

SEQ ID NO: 47017 - DNA, 15 bp, Homo sapiens
ttatacgaagtaaag

SEQ ID NO: 47018 - DNA, 15 bp, Homo sapiens
cttatacgaagtaaa

SEQ ID NO: 47019 - DNA, 15 bp, Homo sapiens
tcttatacgaagtaa

SEQ ID NO: 47020 - DNA, 15 bp, Homo sapiens
ttcttatacgaagta

SEQ ID NO: 47021 - DNA, 15 bp, Homo sapiens
tttcttatacgaagt

SEQ ID NO: 47022 - DNA, 15 bp, Homo sapiens
ctttcttatacgaag

SEQ ID NO: 47023 - DNA, 15 bp, Homo sapiens
actttcttatacgaa

SEQ ID NO: 47024 - DNA, 15 bp, Homo sapiens
gactttcttatacga

SEQ ID NO: 47025 - DNA, 15 bp, Homo sapiens
tgactttcttatacg

SEQ ID NO: 47026 - DNA, 15 bp, Homo sapiens
gtgactttcttatac

SEQ ID NO: 47027 - DNA, 15 bp, Homo sapiens
agtgactttcttata

SEQ ID NO: 47028 - DNA, 15 bp, Homo sapiens
aagtgactttcttat

SEQ ID NO: 47029 - DNA, 15 bp, Homo sapiens
caagtgactttctta

SEQ ID NO: 47030 - DNA, 15 bp, Homo sapiens
acaagtgactttctt

SEQ ID NO: 47031 - DNA, 15 bp, Homo sapiens
gacaagtgactttct

SEQ ID NO: 47032 - DNA, 15 bp, Homo sapiens
agacaagtgactttc

SEQ ID NO: 47033 - DNA, 15 bp, Homo sapiens
gagacaagtgacttt

SEQ ID NO: 47034 - DNA, 15 bp, Homo sapiens
ggagacaagtgactt

SEQ ID NO: 47035 - DNA, 15 bp, Homo sapiens
aggagacaagtgact

SEQ ID NO: 47036 - DNA, 15 bp, Homo sapiens
caggagacaagtgac

SEQ ID NO: 47037 - DNA, 15 bp, Homo sapiens
ccaggagacaagtga

SEQ ID NO: 47038 - DNA, 15 bp, Homo sapiens
cccaggagacaagtg

SEQ ID NO: 47039 - DNA, 15 bp, Homo sapiens
acccaggagacaagt

SEQ ID NO: 47040 - DNA, 15 bp, Homo sapiens
cacccaggagacaag

SEQ ID NO: 47041 - DNA, 15 bp, Homo sapiens
gcacccaggagacaa

SEQ ID NO: 47042 - DNA, 15 bp, Homo sapiens
tgcacccaggagaca

SEQ ID NO: 47043 - DNA, 15 bp, Homo sapiens
ttgcacccaggagac

SEQ ID NO: 47044 - DNA, 15 bp, Homo sapiens
attgcacccaggaga

SEQ ID NO: 47045 - DNA, 15 bp, Homo sapiens
cattgcacccaggag

SEQ ID NO: 47046 - DNA, 15 bp, Homo sapiens
ccattgcacccagga

SEQ ID NO: 47047 - DNA, 15 bp, Homo sapiens
tccattgcacccagg

SEQ ID NO: 47048 - DNA, 15 bp, Homo sapiens
ctccattgcacccag

SEQ ID NO: 47049 - DNA, 15 bp, Homo sapiens
tctccattgcaccca

SEQ ID NO: 47050 - DNA, 15 bp, Homo sapiens
gtctccattgcaccc

SEQ ID NO: 47051 - DNA, 15 bp, Homo sapiens
ggtctccattgcacc

SEQ ID NO: 47052 - DNA, 15 bp, Homo sapiens
aggtctccattgcac

SEQ ID NO: 47053 - DNA, 15 bp, Homo sapiens
taggtctccattgca

SEQ ID NO: 47054 - DNA, 15 bp, Homo sapiens
ataggtctccattgc

SEQ ID NO: 47055 - DNA, 15 bp, Homo sapiens
cataggtctccattg

SEQ ID NO: 47056 - DNA, 15 bp, Homo sapiens
acataggtctccatt

SEQ ID NO: 47057 - DNA, 15 bp, Homo sapiens
cacataggtctccat

SEQ ID NO: 47058 - DNA, 15 bp, Homo sapiens
tcacataggtctcca

SEQ ID NO: 47059 - DNA, 15 bp, Homo sapiens
ctcacataggtctcc

SEQ ID NO: 47060 - DNA, 15 bp, Homo sapiens
actcacataggtctc

SEQ ID NO: 47061 - DNA, 15 bp, Homo sapiens
aactcacataggtct

SEQ ID NO: 47062 - DNA, 15 bp, Homo sapiens
gaactcacataggtc

SEQ ID NO: 47063 - DNA, 15 bp, Homo sapiens
tgaactcacataggt

SEQ ID NO: 47064 - DNA, 15 bp, Homo sapiens
atgaactcacatagg

SEQ ID NO: 47065 - DNA, 15 bp, Homo sapiens
tatgaactcacatag

SEQ ID NO: 47066 - DNA, 15 bp, Homo sapiens
ctatgaactcacata

SEQ ID NO: 47067 - DNA, 15 bp, Homo sapiens
gctatgaactcacat

SEQ ID NO: 47068 - DNA, 15 bp, Homo sapiens
ggctatgaactcaca

SEQ ID NO: 47069 - DNA, 15 bp, Homo sapiens
tggctatgaactcac

SEQ ID NO: 47070 - DNA, 15 bp, Homo sapiens
ttggctatgaactca

SEQ ID NO: 47071 - DNA, 15 bp, Homo sapiens
cttggctatgaactc

SEQ ID NO: 47072 - DNA, 15 bp, Homo sapiens
tcttggctatgaact

SEQ ID NO: 47073 - DNA, 15 bp, Homo sapiens
ctcttggctatgaac

SEQ ID NO: 47074 - DNA, 15 bp, Homo sapiens
tctcttggctatgaa

SEQ ID NO: 47075 - DNA, 15 bp, Homo sapiens
ttctcttggctatga

SEQ ID NO: 47076 - DNA, 15 bp, Homo sapiens
attctcttggctatg

SEQ ID NO: 47077 - DNA, 15 bp, Homo sapiens
cattctcttggctat

SEQ ID NO: 47078 - DNA, 15 bp, Homo sapiens
acattctcttggcta

SEQ ID NO: 47079 - DNA, 15 bp, Homo sapiens
aacattctcttggct

SEQ ID NO: 47080 - DNA, 15 bp, Homo sapiens
aaacattctcttggc

SEQ ID NO: 47081 - DNA, 15 bp, Homo sapiens
aaaacattctcttgg

SEQ ID NO: 47082 - DNA, 15 bp, Homo sapiens
aaaaacattctcttg

SEQ ID NO: 47083 - DNA, 15 bp, Homo sapiens
caaaaacattctctt

SEQ ID NO: 47084 - DNA, 15 bp, Homo sapiens
ccaaaaacattctct

SEQ ID NO: 47085 - DNA, 15 bp, Homo sapiens
accaaaaacattctc

SEQ ID NO: 47086 - DNA, 15 bp, Homo sapiens
aaccaaaaacattct

SEQ ID NO: 47087 - DNA, 15 bp, Homo sapiens
taaccaaaaacattc

SEQ ID NO: 47088 - DNA, 15 bp, Homo sapiens
ctaaccaaaaacatt

SEQ ID NO: 47089 - DNA, 15 bp, Homo sapiens
tctaaccaaaaacat

SEQ ID NO: 47090 - DNA, 15 bp, Homo sapiens
ttctaaccaaaaaca

SEQ ID NO: 47091 - DNA, 15 bp, Homo sapiens
tttctaaccaaaaac

SEQ ID NO: 47092 - DNA, 15 bp, Homo sapiens
ttttctaaccaaaaa

SEQ ID NO: 47093 - DNA, 15 bp, Homo sapiens
tttttctaaccaaaa

SEQ ID NO: 47094 - DNA, 15 bp, Homo sapiens
atttttctaaccaaa

SEQ ID NO: 47095 - DNA, 15 bp, Homo sapiens
tatttttctaaccaa

SEQ ID NO: 47096 - DNA, 15 bp, Homo sapiens
ttatttttctaacca

SEQ ID NO: 47097 - DNA, 15 bp, Homo sapiens
attatttttctaacc

SEQ ID NO: 47098 - DNA, 15 bp, Homo sapiens
tattatttttctaac

SEQ ID NO: 47099 - DNA, 15 bp, Homo sapiens
ctattatttttctaa

SEQ ID NO: 47100 - DNA, 15 bp, Homo sapiens
actattatttttcta

SEQ ID NO: 47101 - DNA, 15 bp, Homo sapiens
tactattatttttct

SEQ ID NO: 47102 - DNA, 15 bp, Homo sapiens
ctactattatttttc

SEQ ID NO: 47103 - DNA, 15 bp, Homo sapiens
cctactattattttt

SEQ ID NO: 47104 - DNA, 15 bp, Homo sapiens
tcctactattatttt

SEQ ID NO: 47105 - DNA, 15 bp, Homo sapiens
ttcctactattattt

SEQ ID NO: 47106 - DNA, 15 bp, Homo sapiens
attcctactattatt

SEQ ID NO: 47107 - DNA, 15 bp, Homo sapiens
aattcctactattat

SEQ ID NO: 47108 - DNA, 15 bp, Homo sapiens
gaattcctactatta

SEQ ID NO: 47109 - DNA, 15 bp, Homo sapiens
ggaattcctactatt

SEQ ID NO: 47110 - DNA, 15 bp, Homo sapiens
tggaattcctactat

SEQ ID NO: 47111 - DNA, 15 bp, Homo sapiens
ttggaattcctacta

SEQ ID NO: 47112 - DNA, 15 bp, Homo sapiens
cttggaattcctact

SEQ ID NO: 47113 - DNA, 15 bp, Homo sapiens
gcttggaattcctac

SEQ ID NO: 47114 - DNA, 15 bp, Homo sapiens
agcttggaattccta

SEQ ID NO: 47115 - DNA, 15 bp, Homo sapiens
cagcttggaattcct

SEQ ID NO: 47116 - DNA, 15 bp, Homo sapiens
acagcttggaattcc

SEQ ID NO: 47117 - DNA, 15 bp, Homo sapiens
cacagcttggaattc

SEQ ID NO: 47118 - DNA, 15 bp, Homo sapiens
tcacagcttggaatt

SEQ ID NO: 47119 - DNA, 15 bp, Homo sapiens
ttcacagcttggaat

SEQ ID NO: 47120 - DNA, 15 bp, Homo sapiens
attcacagcttggaa

SEQ ID NO: 47121 - DNA, 15 bp, Homo sapiens
aattcacagcttgga

SEQ ID NO: 47122 - DNA, 15 bp, Homo sapiens
aaattcacagcttgg

SEQ ID NO: 47123 - DNA, 15 bp, Homo sapiens
aaaattcacagcttg

SEQ ID NO: 47124 - DNA, 15 bp, Homo sapiens
aaaaattcacagctt

SEQ ID NO: 47125 - DNA, 15 bp, Homo sapiens
aaaaaattcacagct

SEQ ID NO: 47126 - DNA, 15 bp, Homo sapiens
taaaaaattcacagc

SEQ ID NO: 47127 - DNA, 15 bp, Homo sapiens
gtaaaaaattcacag

SEQ ID NO: 47128 - DNA, 15 bp, Homo sapiens
agtaaaaaattcaca

SEQ ID NO: 47129 - DNA, 15 bp, Homo sapiens
cagtaaaaaattcac

SEQ ID NO: 47130 - DNA, 15 bp, Homo sapiens
tcagtaaaaaattca

SEQ ID NO: 47131 - DNA, 15 bp, Homo sapiens
ttcagtaaaaaattc

SEQ ID NO: 47132 - DNA, 15 bp, Homo sapiens
cttcagtaaaaaatt

SEQ ID NO: 47133 - DNA, 15 bp, Homo sapiens
gcttcagtaaaaaat

SEQ ID NO: 47134 - DNA, 15 bp, Homo sapiens
agcttcagtaaaaaa

SEQ ID NO: 47135 - DNA, 15 bp, Homo sapiens
gagcttcagtaaaaa

SEQ ID NO: 47136 - DNA, 15 bp, Homo sapiens
agagcttcagtaaaa

SEQ ID NO: 47137 - DNA, 15 bp, Homo sapiens
aagagcttcagtaaa

SEQ ID NO: 47138 - DNA, 15 bp, Homo sapiens
aaagagcttcagtaa

SEQ ID NO: 47139 - DNA, 15 bp, Homo sapiens
caaagagcttcagta

SEQ ID NO: 47140 - DNA, 15 bp, Homo sapiens
ccaaagagcttcagt

SEQ ID NO: 47141 - DNA, 15 bp, Homo sapiens
tccaaagagcttcag

SEQ ID NO: 47142 - DNA, 15 bp, Homo sapiens
ttccaaagagcttca

SEQ ID NO: 47143 - DNA, 15 bp, Homo sapiens
tttccaaagagcttc

SEQ ID NO: 47144 - DNA, 15 bp, Homo sapiens
atttccaaagagctt

SEQ ID NO: 47145 - DNA, 15 bp, Homo sapiens
tatttccaaagagct

SEQ ID NO: 47146 - DNA, 15 bp, Homo sapiens
ctatttccaaagagc

SEQ ID NO: 47147 - DNA, 15 bp, Homo sapiens
cctatttccaaagag

SEQ ID NO: 47148 - DNA, 15 bp, Homo sapiens
tcctatttccaaaga

SEQ ID NO: 47149 - DNA, 15 bp, Homo sapiens
atcctatttccaaag

SEQ ID NO: 47150 - DNA, 15 bp, Homo sapiens
aatcctatttccaaa

SEQ ID NO: 47151 - DNA, 15 bp, Homo sapiens
aaatcctatttccaa

SEQ ID NO: 47152 - DNA, 15 bp, Homo sapiens
caaatcctatttcca

SEQ ID NO: 47153 - DNA, 15 bp, Homo sapiens
ccaaatcctatttcc

SEQ ID NO: 47154 - DNA, 15 bp, Homo sapiens
gccaaatcctatttc

SEQ ID NO: 47155 - DNA, 15 bp, Homo sapiens
tgccaaatcctattt

SEQ ID NO: 47156 - DNA, 15 bp, Homo sapiens
ttgccaaatcctatt

SEQ ID NO: 47157 - DNA, 15 bp, Homo sapiens
cttgccaaatcctat

SEQ ID NO: 47158 - DNA, 15 bp, Homo sapiens
acttgccaaatccta

SEQ ID NO: 47159 - DNA, 15 bp, Homo sapiens
aacttgccaaatcct

SEQ ID NO: 47160 - DNA, 15 bp, Homo sapiens
aaacttgccaaatcc

SEQ ID NO: 47161 - DNA, 15 bp, Homo sapiens
aaaacttgccaaatc

SEQ ID NO: 47162 - DNA, 15 bp, Homo sapiens
caaaacttgccaaat

SEQ ID NO: 47163 - DNA, 15 bp, Homo sapiens
acaaaacttgccaaa

SEQ ID NO: 47164 - DNA, 15 bp, Homo sapiens
gacaaaacttgccaa

SEQ ID NO: 47165 - DNA, 15 bp, Homo sapiens
agacaaaacttgcca

SEQ ID NO: 47166 - DNA, 15 bp, Homo sapiens
cagacaaaacttgcc

SEQ ID NO: 47167 - DNA, 15 bp, Homo sapiens
gcagacaaaacttgc

SEQ ID NO: 47168 - DNA, 15 bp, Homo sapiens
ggcagacaaaacttg

SEQ ID NO: 47169 - DNA, 15 bp, Homo sapiens
aggcagacaaaactt

SEQ ID NO: 47170 - DNA, 15 bp, Homo sapiens
aaggcagacaaaact

SEQ ID NO: 47171 - DNA, 15 bp, Homo sapiens
gaaggcagacaaaac

SEQ ID NO: 47172 - DNA, 15 bp, Homo sapiens
cgaaggcagacaaaa

SEQ ID NO: 47173 - DNA, 15 bp, Homo sapiens
acgaaggcagacaaa

SEQ ID NO: 47174 - DNA, 15 bp, Homo sapiens
gacgaaggcagacaa

SEQ ID NO: 47175 - DNA, 15 bp, Homo sapiens
tgacgaaggcagaca

SEQ ID NO: 47176 - DNA, 15 bp, Homo sapiens
ttgacgaaggcagac

SEQ ID NO: 47177 - DNA, 15 bp, Homo sapiens
cttgacgaaggcaga

SEQ ID NO: 47178 - DNA, 15 bp, Homo sapiens
acttgacgaaggcag

SEQ ID NO: 47179 - DNA, 15 bp, Homo sapiens
tacttgacgaaggca

SEQ ID NO: 47180 - DNA, 15 bp, Homo sapiens
ttacttgacgaaggc

SEQ ID NO: 47181 - DNA, 15 bp, Homo sapiens
cttacttgacgaagg

SEQ ID NO: 47182 - DNA, 15 bp, Homo sapiens
gcttacttgacgaag

SEQ ID NO: 47183 - DNA, 15 bp, Homo sapiens
tgcttacttgacgaa

SEQ ID NO: 47184 - DNA, 15 bp, Homo sapiens
atgcttacttgacga

SEQ ID NO: 47185 - DNA, 15 bp, Homo sapiens
catgcttacttgacg

SEQ ID NO: 47186 - DNA, 15 bp, Homo sapiens
tcatgcttacttgac

SEQ ID NO: 47187 - DNA, 15 bp, Homo sapiens
ctcatgcttacttga

SEQ ID NO: 47188 - DNA, 15 bp, Homo sapiens
gctcatgcttacttg

SEQ ID NO: 47189 - DNA, 15 bp, Homo sapiens
tgctcatgcttactt

SEQ ID NO: 47190 - DNA, 15 bp, Homo sapiens
ctgctcatgcttact

SEQ ID NO: 47191 - DNA, 15 bp, Homo sapiens
cctgctcatgcttac

SEQ ID NO: 47192 - DNA, 15 bp, Homo sapiens
tcctgctcatgctta

SEQ ID NO: 47193 - DNA, 15 bp, Homo sapiens
ctcctgctcatgctt

SEQ ID NO: 47194 - DNA, 15 bp, Homo sapiens
tctcctgctcatgct

SEQ ID NO: 47195 - DNA, 15 bp, Homo sapiens
ctctcctgctcatgc

SEQ ID NO: 47196 - DNA, 15 bp, Homo sapiens
gctctcctgctcatg

SEQ ID NO: 47197 - DNA, 15 bp, Homo sapiens
tgctctcctgctcat

SEQ ID NO: 47198 - DNA, 15 bp, Homo sapiens
gtgctctcctgctca

SEQ ID NO: 47199 - DNA, 15 bp, Homo sapiens
tgtgctctcctgctc

SEQ ID NO: 47200 - DNA, 15 bp, Homo sapiens
ctgtgctctcctgct

SEQ ID NO: 47201 - DNA, 15 bp, Homo sapiens
actgtgctctcctgc

SEQ ID NO: 47202 - DNA, 15 bp, Homo sapiens
aactgtgctctcctg

SEQ ID NO: 47203 - DNA, 15 bp, Homo sapiens
taactgtgctctcct

SEQ ID NO: 47204 - DNA, 15 bp, Homo sapiens
ttaactgtgctctcc

SEQ ID NO: 47205 - DNA, 15 bp, Homo sapiens
attaactgtgctctc

SEQ ID NO: 47206 - DNA, 15 bp, Homo sapiens
tattaactgtgctct

SEQ ID NO: 47207 - DNA, 15 bp, Homo sapiens
ctattaactgtgctc

SEQ ID NO: 47208 - DNA, 15 bp, Homo sapiens
gctattaactgtgct

SEQ ID NO: 47209 - DNA, 15 bp, Homo sapiens
tgctattaactgtgc

SEQ ID NO: 47210 - DNA, 15 bp, Homo sapiens
ctgctattaactgtg

SEQ ID NO: 47211 - DNA, 15 bp, Homo sapiens
cctgctattaactgt

SEQ ID NO: 47212 - DNA, 15 bp, Homo sapiens
acctgctattaactg

SEQ ID NO: 47213 - DNA, 15 bp, Homo sapiens
cacctgctattaact

SEQ ID NO: 47214 - DNA, 15 bp, Homo sapiens
gcacctgctattaac

SEQ ID NO: 47215 - DNA, 15 bp, Homo sapiens
tgcacctgctattaa

SEQ ID NO: 47216 - DNA, 15 bp, Homo sapiens
ctgcacctgctatta

SEQ ID NO: 47217 - DNA, 15 bp, Homo sapiens
tctgcacctgctatt

SEQ ID NO: 47218 - DNA, 15 bp, Homo sapiens
gtctgcacctgctat

SEQ ID NO: 47219 - DNA, 15 bp, Homo sapiens
tgtctgcacctgcta

SEQ ID NO: 47220 - DNA, 15 bp, Homo sapiens
gtgtctgcacctgct

SEQ ID NO: 47221 - DNA, 15 bp, Homo sapiens
tgtgtctgcacctgc

SEQ ID NO: 47222 - DNA, 15 bp, Homo sapiens
atgtgtctgcacctg

SEQ ID NO: 47223 - DNA, 15 bp, Homo sapiens
catgtgtctgcacct

SEQ ID NO: 47224 - DNA, 15 bp, Homo sapiens
tcatgtgtctgcacc

SEQ ID NO: 47225 - DNA, 15 bp, Homo sapiens
atcatgtgtctgcac

SEQ ID NO: 47226 - DNA, 15 bp, Homo sapiens
aatcatgtgtctgca

SEQ ID NO: 47227 - DNA, 15 bp, Homo sapiens
gaatcatgtgtctgc

SEQ ID NO: 47228 - DNA, 15 bp, Homo sapiens
agaatcatgtgtctg

SEQ ID NO: 47229 - DNA, 15 bp, Homo sapiens
gagaatcatgtgtct

SEQ ID NO: 47230 - DNA, 15 bp, Homo sapiens
tgagaatcatgtgtc

SEQ ID NO: 47231 - DNA, 15 bp, Homo sapiens
ctgagaatcatgtgt

SEQ ID NO: 47232 - DNA, 15 bp, Homo sapiens
tctgagaatcatgtg

SEQ ID NO: 47233 - DNA, 15 bp, Homo sapiens
gtctgagaatcatgt

SEQ ID NO: 47234 - DNA, 15 bp, Homo sapiens
ggtctgagaatcatg

SEQ ID NO: 47235 - DNA, 15 bp, Homo sapiens
cggtctgagaatcat

SEQ ID NO: 47236 - DNA, 15 bp, Homo sapiens
acggtctgagaatca

SEQ ID NO: 47237 - DNA, 15 bp, Homo sapiens
tacggtctgagaatc

SEQ ID NO: 47238 - DNA, 15 bp, Homo sapiens
atacggtctgagaat

SEQ ID NO: 47239 - DNA, 15 bp, Homo sapiens
aatacggtctgagaa

SEQ ID NO: 47240 - DNA, 15 bp, Homo sapiens
aaatacggtctgaga

SEQ ID NO: 47241 - DNA, 15 bp, Homo sapiens
aaaatacggtctgag

SEQ ID NO: 47242 - DNA, 15 bp, Homo sapiens
caaaatacggtctga

SEQ ID NO: 47243 - DNA, 15 bp, Homo sapiens
acaaaatacggtctg

SEQ ID NO: 47244 - DNA, 15 bp, Homo sapiens
cacaaaatacggtct

SEQ ID NO: 47245 - DNA, 15 bp, Homo sapiens
acacaaaatacggtc

SEQ ID NO: 47246 - DNA, 15 bp, Homo sapiens
aacacaaaatacggt

SEQ ID NO: 47247 - DNA, 15 bp, Homo sapiens
gaacacaaaatacgg

SEQ ID NO: 47248 - DNA, 15 bp, Homo sapiens
agaacacaaaatacg

SEQ ID NO: 47249 - DNA, 15 bp, Homo sapiens
tagaacacaaaatac

SEQ ID NO: 47250 - DNA, 15 bp, Homo sapiens
ctagaacacaaaata

SEQ ID NO: 47251 - DNA, 15 bp, Homo sapiens
actagaacacaaaat

SEQ ID NO: 47252 - DNA, 15 bp, Homo sapiens
aactagaacacaaaa

SEQ ID NO: 47253 - DNA, 15 bp, Homo sapiens
aaactagaacacaaa

SEQ ID NO: 47254 - DNA, 15 bp, Homo sapiens
gaaactagaacacaa

SEQ ID NO: 47255 - DNA, 15 bp, Homo sapiens
tgaaactagaacaca

SEQ ID NO: 47256 - DNA, 15 bp, Homo sapiens
ttgaaactagaacac

SEQ ID NO: 47257 - DNA, 15 bp, Homo sapiens
cttgaaactagaaca

SEQ ID NO: 47258 - DNA, 15 bp, Homo sapiens
ccttgaaactagaac

SEQ ID NO: 47259 - DNA, 15 bp, Homo sapiens
gccttgaaactagaa

SEQ ID NO: 47260 - DNA, 15 bp, Homo sapiens
tgccttgaaactaga

SEQ ID NO: 47261 - DNA, 15 bp, Homo sapiens
atgccttgaaactag

SEQ ID NO: 47262 - DNA, 15 bp, Homo sapiens
catgccttgaaacta

SEQ ID NO: 47263 - DNA, 15 bp, Homo sapiens
tcatgccttgaaact

SEQ ID NO: 47264 - DNA, 15 bp, Homo sapiens
ttcatgccttgaaac

SEQ ID NO: 47265 - DNA, 15 bp, Homo sapiens
attcatgccttgaaa

SEQ ID NO: 47266 - DNA, 15 bp, Homo sapiens
aattcatgccttgaa

SEQ ID NO: 47267 - DNA, 15 bp, Homo sapiens
gaattcatgccttga

SEQ ID NO: 47268 - DNA, 15 bp, Homo sapiens
agaattcatgccttg

SEQ ID NO: 47269 - DNA, 15 bp, Homo sapiens
aagaattcatgcctt

SEQ ID NO: 47270 - DNA, 15 bp, Homo sapiens
aaagaattcatgcct

SEQ ID NO: 47271 - DNA, 15 bp, Homo sapiens
gaaagaattcatgcc

SEQ ID NO: 47272 - DNA, 15 bp, Homo sapiens
ggaaagaattcatgc

SEQ ID NO: 47273 - DNA, 15 bp, Homo sapiens
aggaaagaattcatg

SEQ ID NO: 47274 - DNA, 15 bp, Homo sapiens
caggaaagaattcat

SEQ ID NO: 47275 - DNA, 15 bp, Homo sapiens
ccaggaaagaattca

SEQ ID NO: 47276 - DNA, 15 bp, Homo sapiens
cccaggaaagaattc

SEQ ID NO: 47277 - DNA, 15 bp, Homo sapiens
ccccaggaaagaatt

SEQ ID NO: 47278 - DNA, 15 bp, Homo sapiens
accccaggaaagaat

SEQ ID NO: 47279 - DNA, 15 bp, Homo sapiens
aaccccaggaaagaa

SEQ ID NO: 47280 - DNA, 15 bp, Homo sapiens
taaccccaggaaaga

SEQ ID NO: 47281 - DNA, 15 bp, Homo sapiens
ttaaccccaggaaag

SEQ ID NO: 47282 - DNA, 15 bp, Homo sapiens
attaaccccaggaaa

SEQ ID NO: 47283 - DNA, 15 bp, Homo sapiens
aattaaccccaggaa

SEQ ID NO: 47284 - DNA, 15 bp, Homo sapiens
aaattaaccccagga

SEQ ID NO: 47285 - DNA, 15 bp, Homo sapiens
aaaattaaccccagg

SEQ ID NO: 47286 - DNA, 15 bp, Homo sapiens
taaaattaaccccag

SEQ ID NO: 47287 - DNA, 15 bp, Homo sapiens
ataaaattaacccca

SEQ ID NO: 47288 - DNA, 15 bp, Homo sapiens
aataaaattaacccc

SEQ ID NO: 47289 - DNA, 15 bp, Homo sapiens
gaataaaattaaccc

SEQ ID NO: 47290 - DNA, 15 bp, Homo sapiens
tgaataaaattaacc

SEQ ID NO: 47291 - DNA, 15 bp, Homo sapiens
ttgaataaaattaac

SEQ ID NO: 47292 - DNA, 15 bp, Homo sapiens
cttgaataaaattaa

SEQ ID NO: 47293 - DNA, 15 bp, Homo sapiens
ccttgaataaaatta

SEQ ID NO: 47294 - DNA, 15 bp, Homo sapiens
tccttgaataaaatt

SEQ ID NO: 47295 - DNA, 15 bp, Homo sapiens
ttccttgaataaaat

SEQ ID NO: 47296 - DNA, 15 bp, Homo sapiens
cttccttgaataaaa

SEQ ID NO: 47297 - DNA, 15 bp, Homo sapiens
acttccttgaataaa

SEQ ID NO: 47298 - DNA, 15 bp, Homo sapiens
aacttccttgaataa

SEQ ID NO: 47299 - DNA, 15 bp, Homo sapiens
taacttccttgaata

SEQ ID NO: 47300 - DNA, 15 bp, Homo sapiens
ataacttccttgaat

SEQ ID NO: 47301 - DNA, 15 bp, Homo sapiens
gataacttccttgaa

SEQ ID NO: 47302 - DNA, 15 bp, Homo sapiens
agataacttccttga

SEQ ID NO: 47303 - DNA, 15 bp, Homo sapiens
cagataacttccttg

SEQ ID NO: 47304 - DNA, 15 bp, Homo sapiens
acagataacttcctt

SEQ ID NO: 47305 - DNA, 15 bp, Homo sapiens
gacagataacttcct

SEQ ID NO: 47306 - DNA, 15 bp, Homo sapiens
agacagataacttcc

SEQ ID NO: 47307 - DNA, 15 bp, Homo sapiens
cagacagataacttc

SEQ ID NO: 47308 - DNA, 15 bp, Homo sapiens
acagacagataactt

SEQ ID NO: 47309 - DNA, 15 bp, Homo sapiens
aacagacagataact

SEQ ID NO: 47310 - DNA, 15 bp, Homo sapiens
taacagacagataac

SEQ ID NO: 47311 - DNA, 15 bp, Homo sapiens
ctaacagacagataa

SEQ ID NO: 47312 - DNA, 15 bp, Homo sapiens
tctaacagacagata

SEQ ID NO: 47313 - DNA, 15 bp, Homo sapiens
atctaacagacagat

SEQ ID NO: 47314 - DNA, 15 bp, Homo sapiens
gatctaacagacaga

SEQ ID NO: 47315 - DNA, 15 bp, Homo sapiens
agatctaacagacag

SEQ ID NO: 47316 - DNA, 15 bp, Homo sapiens
cagatctaacagaca

SEQ ID NO: 47317 - DNA, 15 bp, Homo sapiens
tcagatctaacagac

SEQ ID NO: 47318 - DNA, 15 bp, Homo sapiens
atcagatctaacaga

SEQ ID NO: 47319 - DNA, 15 bp, Homo sapiens
tatcagatctaacag

SEQ ID NO: 47320 - DNA, 15 bp, Homo sapiens
atatcagatctaaca

SEQ ID NO: 47321 - DNA, 15 bp, Homo sapiens
catatcagatctaac

SEQ ID NO: 47322 - DNA, 15 bp, Homo sapiens
acatatcagatctaa

SEQ ID NO: 47323 - DNA, 15 bp, Homo sapiens
cacatatcagatcta

SEQ ID NO: 47324 - DNA, 15 bp, Homo sapiens
gcacatatcagatct

SEQ ID NO: 47325 - DNA, 15 bp, Homo sapiens
agcacatatcagatc

SEQ ID NO: 47326 - DNA, 15 bp, Homo sapiens
gagcacatatcagat

SEQ ID NO: 47327 - DNA, 15 bp, Homo sapiens
tgagcacatatcaga

SEQ ID NO: 47328 - DNA, 15 bp, Homo sapiens
ctgagcacatatcag

SEQ ID NO: 47329 - DNA, 15 bp, Homo sapiens
cctgagcacatatca

SEQ ID NO: 47330 - DNA, 15 bp, Homo sapiens
gcctgagcacatatc

SEQ ID NO: 47331 - DNA, 15 bp, Homo sapiens
ggcctgagcacatat

SEQ ID NO: 47332 - DNA, 15 bp, Homo sapiens
tggcctgagcacata

SEQ ID NO: 47333 - DNA, 15 bp, Homo sapiens
ttggcctgagcacat

SEQ ID NO: 47334 - DNA, 15 bp, Homo sapiens
gttggcctgagcaca

SEQ ID NO: 47335 - DNA, 15 bp, Homo sapiens
tgttggcctgagcac

SEQ ID NO: 47336 - DNA, 15 bp, Homo sapiens
atgttggcctgagca

SEQ ID NO: 47337 - DNA, 15 bp, Homo sapiens
tatgttggcctgagc

SEQ ID NO: 47338 - DNA, 15 bp, Homo sapiens
ctatgttggcctgag

SEQ ID NO: 47339 - DNA, 15 bp, Homo sapiens
tctatgttggcctga

SEQ ID NO: 47340 - DNA, 15 bp, Homo sapiens
atctatgttggcctg

SEQ ID NO: 47341 - DNA, 15 bp, Homo sapiens
aatctatgttggcct

SEQ ID NO: 47342 - DNA, 15 bp, Homo sapiens
gaatctatgttggcc

SEQ ID NO: 47343 - DNA, 15 bp, Homo sapiens
agaatctatgttggc

SEQ ID NO: 47344 - DNA, 15 bp, Homo sapiens
aagaatctatgttgg

SEQ ID NO: 47345 - DNA, 15 bp, Homo sapiens
aaagaatctatgttg

SEQ ID NO: 47346 - DNA, 15 bp, Homo sapiens
taaagaatctatgtt

SEQ ID NO: 47347 - DNA, 15 bp, Homo sapiens
gtaaagaatctatgt

SEQ ID NO: 47348 - DNA, 15 bp, Homo sapiens
ggtaaagaatctatg

SEQ ID NO: 47349 - DNA, 15 bp, Homo sapiens
gggtaaagaatctat

SEQ ID NO: 47350 - DNA, 15 bp, Homo sapiens
agggtaaagaatcta

SEQ ID NO: 47351 - DNA, 15 bp, Homo sapiens
aagggtaaagaatct

SEQ ID NO: 47352 - DNA, 15 bp, Homo sapiens
gaagggtaaagaatc

SEQ ID NO: 47353 - DNA, 15 bp, Homo sapiens
ggaagggtaaagaat

SEQ ID NO: 47354 - DNA, 15 bp, Homo sapiens
aggaagggtaaagaa

SEQ ID NO: 47355 - DNA, 15 bp, Homo sapiens
aaggaagggtaaaga

SEQ ID NO: 47356 - DNA, 15 bp, Homo sapiens
aaaggaagggtaaag

SEQ ID NO: 47357 - DNA, 15 bp, Homo sapiens
gaaaggaagggtaaa

SEQ ID NO: 47358 - DNA, 15 bp, Homo sapiens
agaaaggaagggtaa

SEQ ID NO: 47359 - DNA, 15 bp, Homo sapiens
aagaaaggaagggta

SEQ ID NO: 47360 - DNA, 15 bp, Homo sapiens
gaagaaaggaagggt

SEQ ID NO: 47361 - DNA, 15 bp, Homo sapiens
ggaagaaaggaaggg

SEQ ID NO: 47362 - DNA, 15 bp, Homo sapiens
aggaagaaaggaagg

SEQ ID NO: 47363 - DNA, 15 bp, Homo sapiens
caggaagaaaggaag

SEQ ID NO: 47364 - DNA, 15 bp, Homo sapiens
gcaggaagaaaggaa

SEQ ID NO: 47365 - DNA, 15 bp, Homo sapiens
gagcaggaagaaagg

SEQ ID NO: 47366 - DNA, 15 bp, Homo sapiens
tgagcaggaagaaag

SEQ ID NO: 47367 - DNA, 15 bp, Homo sapiens
gtgagcaggaagaaa

SEQ ID NO: 47368 - DNA, 15 bp, Homo sapiens
ggtgagcaggaagaa

SEQ ID NO: 47369 - DNA, 15 bp, Homo sapiens
aggtgagcaggaaga

SEQ ID NO: 47370 - DNA, 15 bp, Homo sapiens
caggtgagcaggaag

SEQ ID NO: 47371 - DNA, 15 bp, Homo sapiens
acaggtgagcaggaa

SEQ ID NO: 47372 - DNA, 15 bp, Homo sapiens
gacaggtgagcagga

SEQ ID NO: 47373 - DNA, 15 bp, Homo sapiens
ggacaggtgagcagg

SEQ ID NO: 47374 - DNA, 15 bp, Homo sapiens
aggacaggtgagcag

SEQ ID NO: 47375 - DNA, 15 bp, Homo sapiens
aaggacaggtgagca

SEQ ID NO: 47376 - DNA, 15 bp, Homo sapiens
gaaggacaggtgagc

SEQ ID NO: 47377 - DNA, 15 bp, Homo sapiens
ggaaggacaggtgag

SEQ ID NO: 47378 - DNA, 15 bp, Homo sapiens
aggaaggacaggtga

SEQ ID NO: 47379 - DNA, 15 bp, Homo sapiens
gaggaaggacaggtg

SEQ ID NO: 47380 - DNA, 15 bp, Homo sapiens
agaggaaggacaggt

SEQ ID NO: 47381 - DNA, 15 bp, Homo sapiens
aagaggaaggacagg

SEQ ID NO: 47382 - DNA, 15 bp, Homo sapiens
aaagaggaaggacag

SEQ ID NO: 47383 - DNA, 15 bp, Homo sapiens
aaaagaggaaggaca

SEQ ID NO: 47384 - DNA, 15 bp, Homo sapiens
taaaagaggaaggac

SEQ ID NO: 47385 - DNA, 15 bp, Homo sapiens
ataaaagaggaagga

SEQ ID NO: 47386 - DNA, 15 bp, Homo sapiens
gataaaagaggaagg

SEQ ID NO: 47387 - DNA, 15 bp, Homo sapiens
agataaaagaggaag

SEQ ID NO: 47388 - DNA, 15 bp, Homo sapiens
aagataaaagaggaa

SEQ ID NO: 47389 - DNA, 15 bp, Homo sapiens
aaagataaaagagga

SEQ ID NO: 47390 - DNA, 15 bp, Homo sapiens
aaaagataaaagagg

SEQ ID NO: 47391 - DNA, 15 bp, Homo sapiens
gaaaagataaaagag

SEQ ID NO: 47392 - DNA, 15 bp, Homo sapiens
tgaaaagataaaaga

SEQ ID NO: 47393 - DNA, 15 bp, Homo sapiens
atgaaaagataaaag

SEQ ID NO: 47394 - DNA, 15 bp, Homo sapiens
aatgaaaagataaaa

SEQ ID NO: 47395 - DNA, 15 bp, Homo sapiens
caatgaaaagataaa

SEQ ID NO: 47396 - DNA, 15 bp, Homo sapiens
tcaatgaaaagataa

SEQ ID NO: 47397 - DNA, 15 bp, Homo sapiens
ttcaatgaaaagata

SEQ ID NO: 47398 - DNA, 15 bp, Homo sapiens
attcaatgaaaagat

SEQ ID NO: 47399 - DNA, 15 bp, Homo sapiens
aattcaatgaaaaga

SEQ ID NO: 47400 - DNA, 15 bp, Homo sapiens
taattcaatgaaaag

SEQ ID NO: 47401 - DNA, 15 bp, Homo sapiens
ttaattcaatgaaaa

SEQ ID NO: 47402 - DNA, 15 bp, Homo sapiens
tttaattcaatgaaa

SEQ ID NO: 47403 - DNA, 15 bp, Homo sapiens
ttttaattcaatgaa

SEQ ID NO: 47404 - DNA, 15 bp, Homo sapiens
tttttaattcaatga

SEQ ID NO: 47405 - DNA, 15 bp, Homo sapiens
ctttttaattcaatg

SEQ ID NO: 47406 - DNA, 15 bp, Homo sapiens
tctttttaattcaat

SEQ ID NO: 47407 - DNA, 15 bp, Homo sapiens
ttctttttaattcaa

SEQ ID NO: 47408 - DNA, 15 bp, Homo sapiens
tttctttttaattca

SEQ ID NO: 47409 - DNA, 15 bp, Homo sapiens
ttttctttttaattc

SEQ ID NO: 47410 - DNA, 15 bp, Homo sapiens
attttctttttaatt

SEQ ID NO: 47411 - DNA, 15 bp, Homo sapiens
aattttctttttaat

SEQ ID NO: 47412 - DNA, 15 bp, Homo sapiens
taattttctttttaa

SEQ ID NO: 47413 - DNA, 15 bp, Homo sapiens
ataattttcttttta

SEQ ID NO: 47414 - DNA, 15 bp, Homo sapiens
cataattttcttttt

SEQ ID NO: 47415 - DNA, 15 bp, Homo sapiens
tcataattttctttt

SEQ ID NO: 47416 - DNA, 15 bp, Homo sapiens
ttcataattttcttt

SEQ ID NO: 47417 - DNA, 15 bp, Homo sapiens
tttcataattttctt

SEQ ID NO: 47418 - DNA, 15 bp, Homo sapiens
atttcataattttct

SEQ ID NO: 47419 - DNA, 15 bp, Homo sapiens
tatttcataattttc

SEQ ID NO: 47420 - DNA, 15 bp, Homo sapiens
ctatttcataatttt

SEQ ID NO: 47421 - DNA, 15 bp, Homo sapiens
actatttcataattt

SEQ ID NO: 47422 - DNA, 15 bp, Homo sapiens
aactatttcataatt

SEQ ID NO: 47423 - DNA, 15 bp, Homo sapiens
aaactatttcataat

SEQ ID NO: 47424 - DNA, 15 bp, Homo sapiens
gaaactatttcataa

SEQ ID NO: 47425 - DNA, 15 bp, Homo sapiens
tgaaactatttcata

SEQ ID NO: 47426 - DNA, 15 bp, Homo sapiens
ttgaaactatttcat

SEQ ID NO: 47427 - DNA, 15 bp, Homo sapiens
gttgaaactatttca

SEQ ID NO: 47428 - DNA, 15 bp, Homo sapiens
tgttgaaactatttc

SEQ ID NO: 47429 - DNA, 15 bp, Homo sapiens
atgttgaaactattt

SEQ ID NO: 47430 - DNA, 15 bp, Homo sapiens
catgttgaaactatt

SEQ ID NO: 47431 - DNA, 15 bp, Homo sapiens
tcatgttgaaactat

SEQ ID NO: 47432 - DNA, 15 bp, Homo sapiens
ttcatgttgaaacta

SEQ ID NO: 47433 - DNA, 15 bp, Homo sapiens
tttcatgttgaaact

SEQ ID NO: 47434 - DNA, 15 bp, Homo sapiens
ttttcatgttgaaac

SEQ ID NO: 47435 - DNA, 15 bp, Homo sapiens
tttttcatgttgaaa

SEQ ID NO: 47436 - DNA, 15 bp, Homo sapiens
ttttttcatgttgaa

SEQ ID NO: 47437 - DNA, 15 bp, Homo sapiens
cttttttcatgttga

SEQ ID NO: 47438 - DNA, 15 bp, Homo sapiens
ccttttttcatgttg

SEQ ID NO: 47439 - DNA, 15 bp, Homo sapiens
accttttttcatgtt

SEQ ID NO: 47440 - DNA, 15 bp, Homo sapiens
taccttttttcatgt

SEQ ID NO: 47441 - DNA, 15 bp, Homo sapiens
gtaccttttttcatg

SEQ ID NO: 47442 - DNA, 15 bp, Homo sapiens
tgtaccttttttcat

SEQ ID NO: 47443 - DNA, 15 bp, Homo sapiens
ctgtaccttttttca

SEQ ID NO: 47444 - DNA, 15 bp, Homo sapiens
tctgtaccttttttc

SEQ ID NO: 47445 - DNA, 15 bp, Homo sapiens
ctctgtacctttttt

SEQ ID NO: 47446 - DNA, 15 bp, Homo sapiens
tctctgtaccttttt

SEQ ID NO: 47447 - DNA, 15 bp, Homo sapiens
ttctctgtacctttt

SEQ ID NO: 47448 - DNA, 15 bp, Homo sapiens
attctctgtaccttt

SEQ ID NO: 47449 - DNA, 15 bp, Homo sapiens
tattctctgtacctt

SEQ ID NO: 47450 - DNA, 15 bp, Homo sapiens
ttattctctgtacct

SEQ ID NO: 47451 - DNA, 15 bp, Homo sapiens
gttattctctgtacc

SEQ ID NO: 47452 - DNA, 15 bp, Homo sapiens
tgttattctctgtac

SEQ ID NO: 47453 - DNA, 15 bp, Homo sapiens
atgttattctctgta

SEQ ID NO: 47454 - DNA, 15 bp, Homo sapiens
tatgttattctctgt

SEQ ID NO: 47455 - DNA, 15 bp, Homo sapiens
ttatgttattctctg

SEQ ID NO: 47456 - DNA, 15 bp, Homo sapiens
tttatgttattctct

SEQ ID NO: 47457 - DNA, 15 bp, Homo sapiens
ctttatgttattctc

SEQ ID NO: 47458 - DNA, 15 bp, Homo sapiens
tctttatgttattct

SEQ ID NO: 47459 - DNA, 15 bp, Homo sapiens
ttctttatgttattc

SEQ ID NO: 47460 - DNA, 15 bp, Homo sapiens
gttctttatgttatt

SEQ ID NO: 47461 - DNA, 15 bp, Homo sapiens
tgttctttatgttat

SEQ ID NO: 47462 - DNA, 15 bp, Homo sapiens
gtgttctttatgtta

SEQ ID NO: 47463 - DNA, 15 bp, Homo sapiens
agtgttctttatgtt

SEQ ID NO: 47464 - DNA, 15 bp, Homo sapiens
gagtgttctttatgt

SEQ ID NO: 47465 - DNA, 15 bp, Homo sapiens
ggagtgttctttatg

SEQ ID NO: 47466 - DNA, 15 bp, Homo sapiens
aggagtgttctttat

SEQ ID NO: 47467 - DNA, 15 bp, Homo sapiens
caggagtgttcttta

SEQ ID NO: 47468 - DNA, 15 bp, Homo sapiens
ccaggagtgttcttt

SEQ ID NO: 47469 - DNA, 15 bp, Homo sapiens
gccaggagtgttctt

SEQ ID NO: 47470 - DNA, 15 bp, Homo sapiens
agccaggagtgttct

SEQ ID NO: 47471 - DNA, 15 bp, Homo sapiens
cagccaggagtgttc

SEQ ID NO: 47472 - DNA, 15 bp, Homo sapiens
ccagccaggagtgtt

SEQ ID NO: 47473 - DNA, 15 bp, Homo sapiens
cccagccaggagtgt

SEQ ID NO: 47474 - DNA, 15 bp, Homo sapiens
acccagccaggagtg

SEQ ID NO: 47475 - DNA, 15 bp, Homo sapiens
cacccagccaggagt

SEQ ID NO: 47476 - DNA, 15 bp, Homo sapiens
acacccagccaggag

SEQ ID NO: 47477 - DNA, 15 bp, Homo sapiens
cacacccagccagga

SEQ ID NO: 47478 - DNA, 15 bp, Homo sapiens
ccacacccagccagg

SEQ ID NO: 47479 - DNA, 15 bp, Homo sapiens
accacacccagccag

SEQ ID NO: 47480 - DNA, 15 bp, Homo sapiens
caccacacccagcca

SEQ ID NO: 47481 - DNA, 15 bp, Homo sapiens
ccaccacacccagcc

SEQ ID NO: 47482 - DNA, 15 bp, Homo sapiens
gccaccacacccagc

SEQ ID NO: 47483 - DNA, 15 bp, Homo sapiens
agccaccacacccag

SEQ ID NO: 47484 - DNA, 15 bp, Homo sapiens
gagccaccacaccca

SEQ ID NO: 47485 - DNA, 15 bp, Homo sapiens
tgagccaccacaccc

SEQ ID NO: 47486 - DNA, 15 bp, Homo sapiens
gcaggcgtgagccac

SEQ ID NO: 47487 - DNA, 15 bp, Homo sapiens
tgcaggcgtgagcca

SEQ ID NO: 47488 - DNA, 15 bp, Homo sapiens
ttgcaggcgtgagcc

SEQ ID NO: 47489 - DNA, 15 bp, Homo sapiens
attgcaggcgtgagc

SEQ ID NO: 47490 - DNA, 15 bp, Homo sapiens
gattgcaggcgtgag

SEQ ID NO: 47491 - DNA, 15 bp, Homo sapiens
ggattgcaggcgtga

SEQ ID NO: 47492 - DNA, 15 bp, Homo sapiens
gggattgcaggcgtg

SEQ ID NO: 47493 - DNA, 15 bp, Homo sapiens
tgggattgcaggcgt

SEQ ID NO: 47494 - DNA, 15 bp, Homo sapiens
ctgggattgcaggcg

SEQ ID NO: 47495 - DNA, 15 bp, Homo sapiens
actcccaaagtgctg

SEQ ID NO: 47496 - DNA, 15 bp, Homo sapiens
gactcccaaagtgct

SEQ ID NO: 47497 - DNA, 15 bp, Homo sapiens
agactcccaaagtgc

SEQ ID NO: 47498 - DNA, 15 bp, Homo sapiens
cagactcccaaagtg

SEQ ID NO: 47499 - DNA, 15 bp, Homo sapiens
tcagactcccaaagt

SEQ ID NO: 47500 - DNA, 15 bp, Homo sapiens
ctcagactcccaaag

SEQ ID NO: 47501 - DNA, 15 bp, Homo sapiens
cctcagactcccaaa

SEQ ID NO: 47502 - DNA, 15 bp, Homo sapiens
gcctcagactcccaa

SEQ ID NO: 47503 - DNA, 15 bp, Homo sapiens
tgcctcagactccca

SEQ ID NO: 47504 - DNA, 15 bp, Homo sapiens
ctgcctcagactccc

SEQ ID NO: 47505 - DNA, 15 bp, Homo sapiens
gctgcctcagactcc

SEQ ID NO: 47506 - DNA, 15 bp, Homo sapiens
ggctgcctcagactc

SEQ ID NO: 47507 - DNA, 15 bp, Homo sapiens
tggctgcctcagact

SEQ ID NO: 47508 - DNA, 15 bp, Homo sapiens
ctggctgcctcagac

SEQ ID NO: 47509 - DNA, 15 bp, Homo sapiens
tctggctgcctcaga

SEQ ID NO: 47510 - DNA, 15 bp, Homo sapiens
atctggctgcctcag

SEQ ID NO: 47511 - DNA, 15 bp, Homo sapiens
gatctggctgcctca

SEQ ID NO: 47512 - DNA, 15 bp, Homo sapiens
tgatctggctgcctc

SEQ ID NO: 47513 - DNA, 15 bp, Homo sapiens
gtgatctggctgcct

SEQ ID NO: 47514 - DNA, 15 bp, Homo sapiens
agtgatctggctgcc

SEQ ID NO: 47515 - DNA, 15 bp, Homo sapiens
cagtgatctggctgc

SEQ ID NO: 47516 - DNA, 15 bp, Homo sapiens
ccagtgatctggctg

SEQ ID NO: 47517 - DNA, 15 bp, Homo sapiens
tccagtgatctggct

SEQ ID NO: 47518 - DNA, 15 bp, Homo sapiens
ctccagtgatctggc

SEQ ID NO: 47519 - DNA, 15 bp, Homo sapiens
cctccagtgatctgg

SEQ ID NO: 47520 - DNA, 15 bp, Homo sapiens
acctccagtgatctg

SEQ ID NO: 47521 - DNA, 15 bp, Homo sapiens
gacctccagtgatct

SEQ ID NO: 47522 - DNA, 15 bp, Homo sapiens
tgacctccagtgatc

SEQ ID NO: 47523 - DNA, 15 bp, Homo sapiens
ctgacctccagtgat

SEQ ID NO: 47524 - DNA, 15 bp, Homo sapiens
cctgacctccagtga

SEQ ID NO: 47525 - DNA, 15 bp, Homo sapiens
tcctgacctccagtg

SEQ ID NO: 47526 - DNA, 15 bp, Homo sapiens
ctcctgacctccagt

SEQ ID NO: 47527 - DNA, 15 bp, Homo sapiens
actcctgacctccag

SEQ ID NO: 47528 - DNA, 15 bp, Homo sapiens
aactcctgacctcca

SEQ ID NO: 47529 - DNA, 15 bp, Homo sapiens
caactcctgacctcc

SEQ ID NO: 47530 - DNA, 15 bp, Homo sapiens
ccaactcctgacctc

SEQ ID NO: 47531 - DNA, 15 bp, Homo sapiens
tccaactcctgacct

SEQ ID NO: 47532 - DNA, 15 bp, Homo sapiens
ctccaactcctgacc

SEQ ID NO: 47533 - DNA, 15 bp, Homo sapiens
tctccaactcctgac

SEQ ID NO: 47534 - DNA, 15 bp, Homo sapiens
gtctccaactcctga

SEQ ID NO: 47535 - DNA, 15 bp, Homo sapiens
ggtctccaactcctg

SEQ ID NO: 47536 - DNA, 15 bp, Homo sapiens
tggtctccaactcct

SEQ ID NO: 47537 - DNA, 15 bp, Homo sapiens
ctggtctccaactcc

SEQ ID NO: 47538 - DNA, 15 bp, Homo sapiens
gctggtctccaactc

SEQ ID NO: 47539 - DNA, 15 bp, Homo sapiens
agctggtctccaact

SEQ ID NO: 47540 - DNA, 15 bp, Homo sapiens
aagctggtctccaac

SEQ ID NO: 47541 - DNA, 15 bp, Homo sapiens
caagctggtctccaa

SEQ ID NO: 47542 - DNA, 15 bp, Homo sapiens
ccaagctggtctcca

SEQ ID NO: 47543 - DNA, 15 bp, Homo sapiens
gccaagctggtctcc

SEQ ID NO: 47544 - DNA, 15 bp, Homo sapiens
ggccaagctggtctc

SEQ ID NO: 47545 - DNA, 15 bp, Homo sapiens
tggccaagctggtct

SEQ ID NO: 47546 - DNA, 15 bp, Homo sapiens
ttggccaagctggtc

SEQ ID NO: 47547 - DNA, 15 bp, Homo sapiens
gttggccaagctggt

SEQ ID NO: 47548 - DNA, 15 bp, Homo sapiens
tgttggccaagctgg

SEQ ID NO: 47549 - DNA, 15 bp, Homo sapiens
atgttggccaagctg

SEQ ID NO: 47550 - DNA, 15 bp, Homo sapiens
catgttggccaagct

SEQ ID NO: 47551 - DNA, 15 bp, Homo sapiens
ccatgttggccaagc

SEQ ID NO: 47552 - DNA, 15 bp, Homo sapiens
accatgttggccaag

SEQ ID NO: 47553 - DNA, 15 bp, Homo sapiens
caccatgttggccaa

SEQ ID NO: 47554 - DNA, 15 bp, Homo sapiens
tgtttcaccatgttg

SEQ ID NO: 47555 - DNA, 15 bp, Homo sapiens
gtgtttcaccatgtt

SEQ ID NO: 47556 - DNA, 15 bp, Homo sapiens
agtgtttcaccatgt

SEQ ID NO: 47557 - DNA, 15 bp, Homo sapiens
cagtgtttcaccatg

SEQ ID NO: 47558 - DNA, 15 bp, Homo sapiens
gcagtgtttcaccat

SEQ ID NO: 47559 - DNA, 15 bp, Homo sapiens
ggcagtgtttcacca

SEQ ID NO: 47560 - DNA, 15 bp, Homo sapiens
aggcagtgtttcacc

SEQ ID NO: 47561 - DNA, 15 bp, Homo sapiens
gaggcagtgtttcac

SEQ ID NO: 47562 - DNA, 15 bp, Homo sapiens
agaggcagtgtttca

SEQ ID NO: 47563 - DNA, 15 bp, Homo sapiens
tagaggcagtgtttc

SEQ ID NO: 47564 - DNA, 15 bp, Homo sapiens
gtagaggcagtgttt

SEQ ID NO: 47565 - DNA, 15 bp, Homo sapiens
agtagaggcagtgtt

SEQ ID NO: 47566 - DNA, 15 bp, Homo sapiens
cagtagaggcagtgt

SEQ ID NO: 47567 - DNA, 15 bp, Homo sapiens
tcagtagaggcagtg

SEQ ID NO: 47568 - DNA, 15 bp, Homo sapiens
ttcagtagaggcagt

SEQ ID NO: 47569 - DNA, 15 bp, Homo sapiens
tttcagtagaggcag

SEQ ID NO: 47570 - DNA, 15 bp, Homo sapiens
ttttcagtagaggca

SEQ ID NO: 47571 - DNA, 15 bp, Homo sapiens
attttcagtagaggc

SEQ ID NO: 47572 - DNA, 15 bp, Homo sapiens
tattttcagtagagg

SEQ ID NO: 47573 - DNA, 15 bp, Homo sapiens
gtattttcagtagag

SEQ ID NO: 47574 - DNA, 15 bp, Homo sapiens
tgtattttcagtaga

SEQ ID NO: 47575 - DNA, 15 bp, Homo sapiens
ttgtattttcagtag

SEQ ID NO: 47576 - DNA, 15 bp, Homo sapiens
cttgtattttcagta

SEQ ID NO: 47577 - DNA, 15 bp, Homo sapiens
tcttgtattttcagt

SEQ ID NO: 47578 - DNA, 15 bp, Homo sapiens
ttcttgtattttcag

SEQ ID NO: 47579 - DNA, 15 bp, Homo sapiens
attcttgtattttca

SEQ ID NO: 47580 - DNA, 15 bp, Homo sapiens
aattcttgtattttc

SEQ ID NO: 47581 - DNA, 15 bp, Homo sapiens
taattcttgtatttt

SEQ ID NO: 47582 - DNA, 15 bp, Homo sapiens
ctaattcttgtattt

SEQ ID NO: 47583 - DNA, 15 bp, Homo sapiens
gctaattcttgtatt

SEQ ID NO: 47584 - DNA, 15 bp, Homo sapiens
ggctaattcttgtat

SEQ ID NO: 47585 - DNA, 15 bp, Homo sapiens
tggctaattcttgta

SEQ ID NO: 47586 - DNA, 15 bp, Homo sapiens
ctggctaattcttgt

SEQ ID NO: 47587 - DNA, 15 bp, Homo sapiens
cctggctaattcttg

SEQ ID NO: 47588 - DNA, 15 bp, Homo sapiens
gcctggctaattctt

SEQ ID NO: 47589 - DNA, 15 bp, Homo sapiens
tgcctggctaattct

SEQ ID NO: 47590 - DNA, 15 bp, Homo sapiens
atgcctggctaattc

SEQ ID NO: 47591 - DNA, 15 bp, Homo sapiens
catgcctggctaatt

SEQ ID NO: 47592 - DNA, 15 bp, Homo sapiens
ccatgcctggctaat

SEQ ID NO: 47593 - DNA, 15 bp, Homo sapiens
accatgcctggctaa

SEQ ID NO: 47594 - DNA, 15 bp, Homo sapiens
caccatgcctggcta

SEQ ID NO: 47595 - DNA, 15 bp, Homo sapiens
ccaccatgcctggct

SEQ ID NO: 47596 - DNA, 15 bp, Homo sapiens
gccaccatgcctggc

SEQ ID NO: 47597 - DNA, 15 bp, Homo sapiens
cgccaccatgcctgg

SEQ ID NO: 47598 - DNA, 15 bp, Homo sapiens
acgccaccatgcctg

SEQ ID NO: 47599 - DNA, 15 bp, Homo sapiens
cacgccaccatgcct

SEQ ID NO: 47600 - DNA, 15 bp, Homo sapiens
gcacgccaccatgcc

SEQ ID NO: 47601 - DNA, 15 bp, Homo sapiens
tgcacgccaccatgc

SEQ ID NO: 47602 - DNA, 15 bp, Homo sapiens
gtgcacgccaccatg

SEQ ID NO: 47603 - DNA, 15 bp, Homo sapiens
agtgcacgccaccat

SEQ ID NO: 47604 - DNA, 15 bp, Homo sapiens
aagtgcacgccacca

SEQ ID NO: 47605 - DNA, 15 bp, Homo sapiens
caagtgcacgccacc

SEQ ID NO: 47606 - DNA, 15 bp, Homo sapiens
acaagtgcacgccac

SEQ ID NO: 47607 - DNA, 15 bp, Homo sapiens
tacaagtgcacgcca

SEQ ID NO: 47608 - DNA, 15 bp, Homo sapiens
ttacaagtgcacgcc

SEQ ID NO: 47609 - DNA, 15 bp, Homo sapiens
attacaagtgcacgc

SEQ ID NO: 47610 - DNA, 15 bp, Homo sapiens
gattacaagtgcacg

SEQ ID NO: 47611 - DNA, 15 bp, Homo sapiens
ggattacaagtgcac

SEQ ID NO: 47612 - DNA, 15 bp, Homo sapiens
gggattacaagtgca

SEQ ID NO: 47613 - DNA, 15 bp, Homo sapiens
tgggattacaagtgc

SEQ ID NO: 47614 - DNA, 15 bp, Homo sapiens
ctgggattacaagtg

SEQ ID NO: 47615 - DNA, 15 bp, Homo sapiens
gctgggattacaagt

SEQ ID NO: 47616 - DNA, 15 bp, Homo sapiens
cgtagctgggattac

SEQ ID NO: 47617 - DNA, 15 bp, Homo sapiens
acgtagctgggatta

SEQ ID NO: 47618 - DNA, 15 bp, Homo sapiens
cacgtagctgggatt

SEQ ID NO: 47619 - DNA, 15 bp, Homo sapiens
tcacgtagctgggat

SEQ ID NO: 47620 - DNA, 15 bp, Homo sapiens
ctcacgtagctggga

SEQ ID NO: 47621 - DNA, 15 bp, Homo sapiens
tctcacgtagctggg

SEQ ID NO: 47622 - DNA, 15 bp, Homo sapiens
ctctcacgtagctgg

SEQ ID NO: 47623 - DNA, 15 bp, Homo sapiens
tctctcacgtagctg

SEQ ID NO: 47624 - DNA, 15 bp, Homo sapiens
gtctctcacgtagct

SEQ ID NO: 47625 - DNA, 15 bp, Homo sapiens
agtctctcacgtagc

SEQ ID NO: 47626 - DNA, 15 bp, Homo sapiens
cagtctctcacgtag

SEQ ID NO: 47627 - DNA, 15 bp, Homo sapiens
tcagtctctcacgta

SEQ ID NO: 47628 - DNA, 15 bp, Homo sapiens
ctcagtctctcacgt

SEQ ID NO: 47629 - DNA, 15 bp, Homo sapiens
cctcagtctctcacg

SEQ ID NO: 47630 - DNA, 15 bp, Homo sapiens
gcctcagtctctcac

SEQ ID NO: 47631 - DNA, 15 bp, Homo sapiens
tgcctcagtctctca

SEQ ID NO: 47632 - DNA, 15 bp, Homo sapiens
ctgcctcagtctctc

SEQ ID NO: 47633 - DNA, 15 bp, Homo sapiens
cctgcctcagtctct

SEQ ID NO: 47634 - DNA, 15 bp, Homo sapiens
tcctgcctcagtctc

SEQ ID NO: 47635 - DNA, 15 bp, Homo sapiens
ctcctgcctcagtct

SEQ ID NO: 47636 - DNA, 15 bp, Homo sapiens
tctcctgcctcagtc

SEQ ID NO: 47637 - DNA, 15 bp, Homo sapiens
ttctcctgcctcagt

SEQ ID NO: 47638 - DNA, 15 bp, Homo sapiens
ccctcctgggttcaa

SEQ ID NO: 47639 - DNA, 15 bp, Homo sapiens
cccctcctgggttca

SEQ ID NO: 47640 - DNA, 15 bp, Homo sapiens
ccccctcctgggttc

SEQ ID NO: 47641 - DNA, 15 bp, Homo sapiens
tccccctcctgggtt

SEQ ID NO: 47642 - DNA, 15 bp, Homo sapiens
ctccccctcctgggt

SEQ ID NO: 47643 - DNA, 15 bp, Homo sapiens
cctccccctcctggg

SEQ ID NO: 47644 - DNA, 15 bp, Homo sapiens
acctccccctcctgg

SEQ ID NO: 47645 - DNA, 15 bp, Homo sapiens
agagtgcagtggtgt

SEQ ID NO: 47646 - DNA, 15 bp, Homo sapiens
tagagtgcagtggtg

SEQ ID NO: 47647 - DNA, 15 bp, Homo sapiens
ctagagtgcagtggt

SEQ ID NO: 47648 - DNA, 15 bp, Homo sapiens
gctagagtgcagtgg

SEQ ID NO: 47649 - DNA, 15 bp, Homo sapiens
ggctagagtgcagtg

SEQ ID NO: 47650 - DNA, 15 bp, Homo sapiens
aggctagagtgcagt

SEQ ID NO: 47651 - DNA, 15 bp, Homo sapiens
caggctagagtgcag

SEQ ID NO: 47652 - DNA, 15 bp, Homo sapiens
ccaggctagagtgca

SEQ ID NO: 47653 - DNA, 15 bp, Homo sapiens
cccaggctagagtgc

SEQ ID NO: 47654 - DNA, 15 bp, Homo sapiens
acccaggctagagtg

SEQ ID NO: 47655 - DNA, 15 bp, Homo sapiens
cacccaggctagagt

SEQ ID NO: 47656 - DNA, 15 bp, Homo sapiens
tcacccaggctagag

SEQ ID NO: 47657 - DNA, 15 bp, Homo sapiens
gtcacccaggctaga

SEQ ID NO: 47658 - DNA, 15 bp, Homo sapiens
tgtcacccaggctag

SEQ ID NO: 47659 - DNA, 15 bp, Homo sapiens
ctgtcacccaggcta

SEQ ID NO: 47660 - DNA, 15 bp, Homo sapiens
actctgtcacccagg

SEQ ID NO: 47661 - DNA, 15 bp, Homo sapiens
cactctgtcacccag

SEQ ID NO: 47662 - DNA, 15 bp, Homo sapiens
tcactctgtcaccca

SEQ ID NO: 47663 - DNA, 15 bp, Homo sapiens
ctcactctgtcaccc

SEQ ID NO: 47664 - DNA, 15 bp, Homo sapiens
tctcactctgtcacc

SEQ ID NO: 47665 - DNA, 15 bp, Homo sapiens
gaagacggagtctca

SEQ ID NO: 47666 - DNA, 15 bp, Homo sapiens
tgaagacggagtctc

SEQ ID NO: 47667 - DNA, 15 bp, Homo sapiens
ttgaagacggagtct

SEQ ID NO: 47668 - DNA, 15 bp, Homo sapiens
tttgaagacggagtc

SEQ ID NO: 47669 - DNA, 15 bp, Homo sapiens
gtttgaagacggagt

SEQ ID NO: 47670 - DNA, 15 bp, Homo sapiens
tgtttgaagacggag

SEQ ID NO: 47671 - DNA, 15 bp, Homo sapiens
ttgtttgaagacgga

SEQ ID NO: 47672 - DNA, 15 bp, Homo sapiens
tttgtttgaagacgg

SEQ ID NO: 47673 - DNA, 15 bp, Homo sapiens
gtttgtttgaagacg

SEQ ID NO: 47674 - DNA, 15 bp, Homo sapiens
tgtttgtttgaagac

SEQ ID NO: 47675 - DNA, 15 bp, Homo sapiens
ttgtttgtttgaaga

SEQ ID NO: 47676 - DNA, 15 bp, Homo sapiens
tttgtttgtttgaag

SEQ ID NO: 47677 - DNA, 15 bp, Homo sapiens
gtttgtttgtttgaa

SEQ ID NO: 47678 - DNA, 15 bp, Homo sapiens
tgtttgtttgtttga

SEQ ID NO: 47679 - DNA, 15 bp, Homo sapiens
ttctttttgtttgtt

SEQ ID NO: 47680 - DNA, 15 bp, Homo sapiens
gttctttttgtttgt

SEQ ID NO: 47681 - DNA, 15 bp, Homo sapiens
tgttctttttgtttg

SEQ ID NO: 47682 - DNA, 15 bp, Homo sapiens
gtgttctttttgttt

SEQ ID NO: 47683 - DNA, 15 bp, Homo sapiens
agtgttctttttgtt

SEQ ID NO: 47684 - DNA, 15 bp, Homo sapiens
gagtgttctttttgt

SEQ ID NO: 47685 - DNA, 15 bp, Homo sapiens
ggagtgttctttttg

SEQ ID NO: 47686 - DNA, 15 bp, Homo sapiens
aggagtgttcttttt

SEQ ID NO: 47687 - DNA, 15 bp, Homo sapiens
caggagtgttctttt

SEQ ID NO: 47688 - DNA, 15 bp, Homo sapiens
acaggagtgttcttt

SEQ ID NO: 47689 - DNA, 15 bp, Homo sapiens
tacaggagtgttctt

SEQ ID NO: 47690 - DNA, 15 bp, Homo sapiens
gtacaggagtgttct

SEQ ID NO: 47691 - DNA, 15 bp, Homo sapiens
ggtacaggagtgttc

SEQ ID NO: 47692 - DNA, 15 bp, Homo sapiens
tggtacaggagtgtt

SEQ ID NO: 47693 - DNA, 15 bp, Homo sapiens
atggtacaggagtgt

SEQ ID NO: 47694 - DNA, 15 bp, Homo sapiens
gatggtacaggagtg

SEQ ID NO: 47695 - DNA, 15 bp, Homo sapiens
tgatggtacaggagt

SEQ ID NO: 47696 - DNA, 15 bp, Homo sapiens
atgatggtacaggag

SEQ ID NO: 47697 - DNA, 15 bp, Homo sapiens
gatgatggtacagga

SEQ ID NO: 47698 - DNA, 15 bp, Homo sapiens
ggatgatggtacagg

SEQ ID NO: 47699 - DNA, 15 bp, Homo sapiens
tggatgatggtacag

SEQ ID NO: 47700 - DNA, 15 bp, Homo sapiens
atggatgatggtaca

SEQ ID NO: 47701 - DNA, 15 bp, Homo sapiens
gatggatgatggtac

SEQ ID NO: 47702 - DNA, 15 bp, Homo sapiens
tgatggatgatggta

SEQ ID NO: 47703 - DNA, 15 bp, Homo sapiens
atgatggatgatggt

SEQ ID NO: 47704 - DNA, 15 bp, Homo sapiens
aatgatggatgatgg

SEQ ID NO: 47705 - DNA, 15 bp, Homo sapiens
aaatgatggatgatg

SEQ ID NO: 47706 - DNA, 15 bp, Homo sapiens
aaaatgatggatgat

SEQ ID NO: 47707 - DNA, 15 bp, Homo sapiens
caaaatgatggatga

SEQ ID NO: 47708 - DNA, 15 bp, Homo sapiens
gcaaaatgatggatg

SEQ ID NO: 47709 - DNA, 15 bp, Homo sapiens
ggcaaaatgatggat

SEQ ID NO: 47710 - DNA, 15 bp, Homo sapiens
cggcaaaatgatgga

SEQ ID NO: 47711 - DNA, 15 bp, Homo sapiens
acggcaaaatgatgg

SEQ ID NO: 47712 - DNA, 15 bp, Homo sapiens
cacggcaaaatgatg

SEQ ID NO: 47713 - DNA, 15 bp, Homo sapiens
gcacggcaaaatgat

SEQ ID NO: 47714 - DNA, 15 bp, Homo sapiens
agcacggcaaaatga

SEQ ID NO: 47715 - DNA, 15 bp, Homo sapiens
cagcacggcaaaatg

SEQ ID NO: 47716 - DNA, 15 bp, Homo sapiens
tcagcacggcaaaat

SEQ ID NO: 47717 - DNA, 15 bp, Homo sapiens
gtcagcacggcaaaa

SEQ ID NO: 47718 - DNA, 15 bp, Homo sapiens
agtcagcacggcaaa

SEQ ID NO: 47719 - DNA, 15 bp, Homo sapiens
gagtcagcacggcaa

SEQ ID NO: 47720 - DNA, 15 bp, Homo sapiens
ggagtcagcacggca

SEQ ID NO: 47721 - DNA, 15 bp, Homo sapiens
tggagtcagcacggc

SEQ ID NO: 47722 - DNA, 15 bp, Homo sapiens
ctggagtcagcacgg

SEQ ID NO: 47723 - DNA, 15 bp, Homo sapiens
cctggagtcagcacg

SEQ ID NO: 47724 - DNA, 15 bp, Homo sapiens
acctggagtcagcac

SEQ ID NO: 47725 - DNA, 15 bp, Homo sapiens
aacctggagtcagca

SEQ ID NO: 47726 - DNA, 15 bp, Homo sapiens
gaacctggagtcagc

SEQ ID NO: 47727 - DNA, 15 bp, Homo sapiens
agaacctggagtcag

SEQ ID NO: 47728 - DNA, 15 bp, Homo sapiens
tagaacctggagtca

SEQ ID NO: 47729 - DNA, 15 bp, Homo sapiens
atagaacctggagtc

SEQ ID NO: 47730 - DNA, 15 bp, Homo sapiens
aatagaacctggagt

SEQ ID NO: 47731 - DNA, 15 bp, Homo sapiens
aaatagaacctggag

SEQ ID NO: 47732 - DNA, 15 bp, Homo sapiens
taaatagaacctgga

SEQ ID NO: 47733 - DNA, 15 bp, Homo sapiens
ttaaatagaacctgg

SEQ ID NO: 47734 - DNA, 15 bp, Homo sapiens
cttaaatagaacctg

SEQ ID NO: 47735 - DNA, 15 bp, Homo sapiens
tcttaaatagaacct

SEQ ID NO: 47736 - DNA, 15 bp, Homo sapiens
ttcttaaatagaacc

SEQ ID NO: 47737 - DNA, 15 bp, Homo sapiens
tttcttaaatagaac

SEQ ID NO: 47738 - DNA, 15 bp, Homo sapiens
atttcttaaatagaa

SEQ ID NO: 47739 - DNA, 15 bp, Homo sapiens
tatttcttaaataga

SEQ ID NO: 47740 - DNA, 15 bp, Homo sapiens
ttatttcttaaatag

SEQ ID NO: 47741 - DNA, 15 bp, Homo sapiens
tttatttcttaaata

SEQ ID NO: 47742 - DNA, 15 bp, Homo sapiens
ttttatttcttaaat

SEQ ID NO: 47743 - DNA, 15 bp, Homo sapiens
gttttatttcttaaa

SEQ ID NO: 47744 - DNA, 15 bp, Homo sapiens
tgttttatttcttaa

SEQ ID NO: 47745 - DNA, 15 bp, Homo sapiens
atgttttatttctta

SEQ ID NO: 47746 - DNA, 15 bp, Homo sapiens
aatgttttatttctt

SEQ ID NO: 47747 - DNA, 15 bp, Homo sapiens
taatgttttatttct

SEQ ID NO: 47748 - DNA, 15 bp, Homo sapiens
gtaatgttttatttc

SEQ ID NO: 47749 - DNA, 15 bp, Homo sapiens
tgtaatgttttattt

SEQ ID NO: 47750 - DNA, 15 bp, Homo sapiens
ctgtaatgttttatt

SEQ ID NO: 47751 - DNA, 15 bp, Homo sapiens
cctgtaatgttttat

SEQ ID NO: 47752 - DNA, 15 bp, Homo sapiens
acctgtaatgtttta

SEQ ID NO: 47753 - DNA, 15 bp, Homo sapiens
tacctgtaatgtttt

SEQ ID NO: 47754 - DNA, 15 bp, Homo sapiens
gtacctgtaatgttt

SEQ ID NO: 47755 - DNA, 15 bp, Homo sapiens
tgtacctgtaatgtt

SEQ ID NO: 47756 - DNA, 15 bp, Homo sapiens
ctgtacctgtaatgt

SEQ ID NO: 47757 - DNA, 15 bp, Homo sapiens
gctgtacctgtaatg

SEQ ID NO: 47758 - DNA, 15 bp, Homo sapiens
agctgtacctgtaat

SEQ ID NO: 47759 - DNA, 15 bp, Homo sapiens
cagctgtacctgtaa

SEQ ID NO: 47760 - DNA, 15 bp, Homo sapiens
tcagctgtacctgta

SEQ ID NO: 47761 - DNA, 15 bp, Homo sapiens
atcagctgtacctgt

SEQ ID NO: 47762 - DNA, 15 bp, Homo sapiens
catcagctgtacctg

SEQ ID NO: 47763 - DNA, 15 bp, Homo sapiens
gcatcagctgtacct

SEQ ID NO: 47764 - DNA, 15 bp, Homo sapiens
ggcatcagctgtacc

SEQ ID NO: 47765 - DNA, 15 bp, Homo sapiens
tggcatcagctgtac

SEQ ID NO: 47766 - DNA, 15 bp, Homo sapiens
gtggcatcagctgta

SEQ ID NO: 47767 - DNA, 15 bp, Homo sapiens
ggtggcatcagctgt

SEQ ID NO: 47768 - DNA, 15 bp, Homo sapiens
aggtggcatcagctg

SEQ ID NO: 47769 - DNA, 15 bp, Homo sapiens
gaggtggcatcagct

SEQ ID NO: 47770 - DNA, 15 bp, Homo sapiens
agaggtggcatcagc

SEQ ID NO: 47771 - DNA, 15 bp, Homo sapiens
cagaggtggcatcag

SEQ ID NO: 47772 - DNA, 15 bp, Homo sapiens
acagaggtggcatca

SEQ ID NO: 47773 - DNA, 15 bp, Homo sapiens
aacagaggtggcatc

SEQ ID NO: 47774 - DNA, 15 bp, Homo sapiens
aaacagaggtggcat

SEQ ID NO: 47775 - DNA, 15 bp, Homo sapiens
gaaacagaggtggca

SEQ ID NO: 47776 - DNA, 15 bp, Homo sapiens
ggaaacagaggtggc

SEQ ID NO: 47777 - DNA, 15 bp, Homo sapiens
gggaaacagaggtgg

SEQ ID NO: 47778 - DNA, 15 bp, Homo sapiens
agggaaacagaggtg

SEQ ID NO: 47779 - DNA, 15 bp, Homo sapiens
tagggaaacagaggt

SEQ ID NO: 47780 - DNA, 15 bp, Homo sapiens
ctagggaaacagagg

SEQ ID NO: 47781 - DNA, 15 bp, Homo sapiens
gctagggaaacagag

SEQ ID NO: 47782 - DNA, 15 bp, Homo sapiens
agctagggaaacaga

SEQ ID NO: 47783 - DNA, 15 bp, Homo sapiens
gagctagggaaacag

SEQ ID NO: 47784 - DNA, 15 bp, Homo sapiens
tgagctagggaaaca

SEQ ID NO: 47785 - DNA, 15 bp, Homo sapiens
atgagctagggaaac

SEQ ID NO: 47786 - DNA, 15 bp, Homo sapiens
aatgagctagggaaa

SEQ ID NO: 47787 - DNA, 15 bp, Homo sapiens
gaatgagctagggaa

SEQ ID NO: 47788 - DNA, 15 bp, Homo sapiens
agaatgagctaggga

SEQ ID NO: 47789 - DNA, 15 bp, Homo sapiens
aagaatgagctaggg

SEQ ID NO: 47790 - DNA, 15 bp, Homo sapiens
gaagaatgagctagg

SEQ ID NO: 47791 - DNA, 15 bp, Homo sapiens
tgaagaatgagctag

SEQ ID NO: 47792 - DNA, 15 bp, Homo sapiens
ctgaagaatgagcta

SEQ ID NO: 47793 - DNA, 15 bp, Homo sapiens
tctgaagaatgagct

SEQ ID NO: 47794 - DNA, 15 bp, Homo sapiens
ctctgaagaatgagc

SEQ ID NO: 47795 - DNA, 15 bp, Homo sapiens
tctctgaagaatgag

SEQ ID NO: 47796 - DNA, 15 bp, Homo sapiens
atctctgaagaatga

SEQ ID NO: 47797 - DNA, 15 bp, Homo sapiens
tatctctgaagaatg

SEQ ID NO: 47798 - DNA, 15 bp, Homo sapiens
ttatctctgaagaat

SEQ ID NO: 47799 - DNA, 15 bp, Homo sapiens
gttatctctgaagaa

SEQ ID NO: 47800 - DNA, 15 bp, Homo sapiens
agttatctctgaaga

SEQ ID NO: 47801 - DNA, 15 bp, Homo sapiens
gagttatctctgaag

SEQ ID NO: 47802 - DNA, 15 bp, Homo sapiens
agagttatctctgaa

SEQ ID NO: 47803 - DNA, 15 bp, Homo sapiens
aagagttatctctga

SEQ ID NO: 47804 - DNA, 15 bp, Homo sapiens
caagagttatctctg

SEQ ID NO: 47805 - DNA, 15 bp, Homo sapiens
acaagagttatctct

SEQ ID NO: 47806 - DNA, 15 bp, Homo sapiens
gacaagagttatctc

SEQ ID NO: 47807 - DNA, 15 bp, Homo sapiens
agacaagagttatct

SEQ ID NO: 47808 - DNA, 15 bp, Homo sapiens
aagacaagagttatc

SEQ ID NO: 47809 - DNA, 15 bp, Homo sapiens
caagacaagagttat

SEQ ID NO: 47810 - DNA, 15 bp, Homo sapiens
gcaagacaagagtta

SEQ ID NO: 47811 - DNA, 15 bp, Homo sapiens
tgcaagacaagagtt

SEQ ID NO: 47812 - DNA, 15 bp, Homo sapiens
ctgcaagacaagagt

SEQ ID NO: 47813 - DNA, 15 bp, Homo sapiens
actgcaagacaagag

SEQ ID NO: 47814 - DNA, 15 bp, Homo sapiens
aactgcaagacaaga

SEQ ID NO: 47815 - DNA, 15 bp, Homo sapiens
caactgcaagacaag

SEQ ID NO: 47816 - DNA, 15 bp, Homo sapiens
ccaactgcaagacaa

SEQ ID NO: 47817 - DNA, 15 bp, Homo sapiens
tccaactgcaagaca

SEQ ID NO: 47818 - DNA, 15 bp, Homo sapiens
atccaactgcaagac

SEQ ID NO: 47819 - DNA, 15 bp, Homo sapiens
catccaactgcaaga

SEQ ID NO: 47820 - DNA, 15 bp, Homo sapiens
acatccaactgcaag

SEQ ID NO: 47821 - DNA, 15 bp, Homo sapiens
aacatccaactgcaa

SEQ ID NO: 47822 - DNA, 15 bp, Homo sapiens
aaacatccaactgca

SEQ ID NO: 47823 - DNA, 15 bp, Homo sapiens
aaaacatccaactgc

SEQ ID NO: 47824 - DNA, 15 bp, Homo sapiens
taaaacatccaactg

SEQ ID NO: 47825 - DNA, 15 bp, Homo sapiens
ttaaaacatccaact

SEQ ID NO: 47826 - DNA, 15 bp, Homo sapiens
attaaaacatccaac

SEQ ID NO: 47827 - DNA, 15 bp, Homo sapiens
gattaaaacatccaa

SEQ ID NO: 47828 - DNA, 15 bp, Homo sapiens
ggattaaaacatcca

SEQ ID NO: 47829 - DNA, 15 bp, Homo sapiens
aggattaaaacatcc

SEQ ID NO: 47830 - DNA, 15 bp, Homo sapiens
gaggattaaaacatc

SEQ ID NO: 47831 - DNA, 15 bp, Homo sapiens
agaggattaaaacat

SEQ ID NO: 47832 - DNA, 15 bp, Homo sapiens
tagaggattaaaaca

SEQ ID NO: 47833 - DNA, 15 bp, Homo sapiens
atagaggattaaaac

SEQ ID NO: 47834 - DNA, 15 bp, Homo sapiens
tatagaggattaaaa

SEQ ID NO: 47835 - DNA, 15 bp, Homo sapiens
atatagaggattaaa

SEQ ID NO: 47836 - DNA, 15 bp, Homo sapiens
gatatagaggattaa

SEQ ID NO: 47837 - DNA, 15 bp, Homo sapiens
tgatatagaggatta

SEQ ID NO: 47838 - DNA, 15 bp, Homo sapiens
atgatatagaggatt

SEQ ID NO: 47839 - DNA, 15 bp, Homo sapiens
catgatatagaggat

SEQ ID NO: 47840 - DNA, 15 bp, Homo sapiens
acatgatatagagga

SEQ ID NO: 47841 - DNA, 15 bp, Homo sapiens
tacatgatatagagg

SEQ ID NO: 47842 - DNA, 15 bp, Homo sapiens
atacatgatatagag

SEQ ID NO: 47843 - DNA, 15 bp, Homo sapiens
tatacatgatataga

SEQ ID NO: 47844 - DNA, 15 bp, Homo sapiens
gtatacatgatatag

SEQ ID NO: 47845 - DNA, 15 bp, Homo sapiens
agtatacatgatata

SEQ ID NO: 47846 - DNA, 15 bp, Homo sapiens
aagtatacatgatat

SEQ ID NO: 47847 - DNA, 15 bp, Homo sapiens
taagtatacatgata

SEQ ID NO: 47848 - DNA, 15 bp, Homo sapiens
gtaagtatacatgat

SEQ ID NO: 47849 - DNA, 15 bp, Homo sapiens
tgtaagtatacatga

SEQ ID NO: 47850 - DNA, 15 bp, Homo sapiens
atgtaagtatacatg

SEQ ID NO: 47851 - DNA, 15 bp, Homo sapiens
aatgtaagtatacat

SEQ ID NO: 47852 - DNA, 15 bp, Homo sapiens
gaatgtaagtataca

SEQ ID NO: 47853 - DNA, 15 bp, Homo sapiens
agaatgtaagtatac

SEQ ID NO: 47854 - DNA, 15 bp, Homo sapiens
tagaatgtaagtata

SEQ ID NO: 47855 - DNA, 15 bp, Homo sapiens
atagaatgtaagtat

SEQ ID NO: 47856 - DNA, 15 bp, Homo sapiens
catagaatgtaagta

SEQ ID NO: 47857 - DNA, 15 bp, Homo sapiens
acatagaatgtaagt

SEQ ID NO: 47858 - DNA, 15 bp, Homo sapiens
tacatagaatgtaag

SEQ ID NO: 47859 - DNA, 15 bp, Homo sapiens
atacatagaatgtaa

SEQ ID NO: 47860 - DNA, 15 bp, Homo sapiens
tatacatagaatgta

SEQ ID NO: 47861 - DNA, 15 bp, Homo sapiens
ttatacatagaatgt

SEQ ID NO: 47862 - DNA, 15 bp, Homo sapiens
gttatacatagaatg

SEQ ID NO: 47863 - DNA, 15 bp, Homo sapiens
tgttatacatagaat

SEQ ID NO: 47864 - DNA, 15 bp, Homo sapiens
ttgttatacatagaa

SEQ ID NO: 47865 - DNA, 15 bp, Homo sapiens
attgttatacataga

SEQ ID NO: 47866 - DNA, 15 bp, Homo sapiens
tattgttatacatag

SEQ ID NO: 47867 - DNA, 15 bp, Homo sapiens
atattgttatacata

SEQ ID NO: 47868 - DNA, 15 bp, Homo sapiens
aatattgttatacat

SEQ ID NO: 47869 - DNA, 15 bp, Homo sapiens
aaatattgttataca

SEQ ID NO: 47870 - DNA, 15 bp, Homo sapiens
caaatattgttatac

SEQ ID NO: 47871 - DNA, 15 bp, Homo sapiens
ccaaatattgttata

SEQ ID NO: 47872 - DNA, 15 bp, Homo sapiens
accaaatattgttat

SEQ ID NO: 47873 - DNA, 15 bp, Homo sapiens
taccaaatattgtta

SEQ ID NO: 47874 - DNA, 15 bp, Homo sapiens
gtaccaaatattgtt

SEQ ID NO: 47875 - DNA, 15 bp, Homo sapiens
agtaccaaatattgt

SEQ ID NO: 47876 - DNA, 15 bp, Homo sapiens
cagtaccaaatattg

SEQ ID NO: 47877 - DNA, 15 bp, Homo sapiens
ccagtaccaaatatt

SEQ ID NO: 47878 - DNA, 15 bp, Homo sapiens
gccagtaccaaatat

SEQ ID NO: 47879 - DNA, 15 bp, Homo sapiens
ggccagtaccaaata

SEQ ID NO: 47880 - DNA, 15 bp, Homo sapiens
aggccagtaccaaat

SEQ ID NO: 47881 - DNA, 15 bp, Homo sapiens
taggccagtaccaaa

SEQ ID NO: 47882 - DNA, 15 bp, Homo sapiens
ttaggccagtaccaa

SEQ ID NO: 47883 - DNA, 15 bp, Homo sapiens
tttaggccagtacca

SEQ ID NO: 47884 - DNA, 15 bp, Homo sapiens
atttaggccagtacc

SEQ ID NO: 47885 - DNA, 15 bp, Homo sapiens
catttaggccagtac

SEQ ID NO: 47886 - DNA, 15 bp, Homo sapiens
acatttaggccagta

SEQ ID NO: 47887 - DNA, 15 bp, Homo sapiens
cacatttaggccagt

SEQ ID NO: 47888 - DNA, 15 bp, Homo sapiens
acacatttaggccag

SEQ ID NO: 47889 - DNA, 15 bp, Homo sapiens
aacacatttaggcca

SEQ ID NO: 47890 - DNA, 15 bp, Homo sapiens
gaacacatttaggcc

SEQ ID NO: 47891 - DNA, 15 bp, Homo sapiens
tgaacacatttaggc

SEQ ID NO: 47892 - DNA, 15 bp, Homo sapiens
gtgaacacatttagg

SEQ ID NO: 47893 - DNA, 15 bp, Homo sapiens
tgtgaacacatttag

SEQ ID NO: 47894 - DNA, 15 bp, Homo sapiens
atgtgaacacattta

SEQ ID NO: 47895 - DNA, 15 bp, Homo sapiens
aatgtgaacacattt

SEQ ID NO: 47896 - DNA, 15 bp, Homo sapiens
caatgtgaacacatt

SEQ ID NO: 47897 - DNA, 15 bp, Homo sapiens
acaatgtgaacacat

SEQ ID NO: 47898 - DNA, 15 bp, Homo sapiens
tacaatgtgaacaca

SEQ ID NO: 47899 - DNA, 15 bp, Homo sapiens
atacaatgtgaacac

SEQ ID NO: 47900 - DNA, 15 bp, Homo sapiens
tatacaatgtgaaca

SEQ ID NO: 47901 - DNA, 15 bp, Homo sapiens
ttatacaatgtgaac

SEQ ID NO: 47902 - DNA, 15 bp, Homo sapiens
cttatacaatgtgaa

SEQ ID NO: 47903 - DNA, 15 bp, Homo sapiens
acttatacaatgtga

SEQ ID NO: 47904 - DNA, 15 bp, Homo sapiens
cacttatacaatgtg

SEQ ID NO: 47905 - DNA, 15 bp, Homo sapiens
acacttatacaatgt

SEQ ID NO: 47906 - DNA, 15 bp, Homo sapiens
cacacttatacaatg

SEQ ID NO: 47907 - DNA, 15 bp, Homo sapiens
gcacacttatacaat

SEQ ID NO: 47908 - DNA, 15 bp, Homo sapiens
tgcacacttatacaa

SEQ ID NO: 47909 - DNA, 15 bp, Homo sapiens
atgcacacttataca

SEQ ID NO: 47910 - DNA, 15 bp, Homo sapiens
tatgcacacttatac

SEQ ID NO: 47911 - DNA, 15 bp, Homo sapiens
atatgcacacttata

SEQ ID NO: 47912 - DNA, 15 bp, Homo sapiens
aatatgcacacttat

SEQ ID NO: 47913 - DNA, 15 bp, Homo sapiens
caatatgcacactta

SEQ ID NO: 47914 - DNA, 15 bp, Homo sapiens
ccaatatgcacactt

SEQ ID NO: 47915 - DNA, 15 bp, Homo sapiens
gccaatatgcacact

SEQ ID NO: 47916 - DNA, 15 bp, Homo sapiens
ggccaatatgcacac

SEQ ID NO: 47917 - DNA, 15 bp, Homo sapiens
aggccaatatgcaca

SEQ ID NO: 47918 - DNA, 15 bp, Homo sapiens
caggccaatatgcac

SEQ ID NO: 47919 - DNA, 15 bp, Homo sapiens
gcaggccaatatgca

SEQ ID NO: 47920 - DNA, 15 bp, Homo sapiens
ggcaggccaatatgc

SEQ ID NO: 47921 - DNA, 15 bp, Homo sapiens
tggcaggccaatatg

SEQ ID NO: 47922 - DNA, 15 bp, Homo sapiens
gtggcaggccaatat

SEQ ID NO: 47923 - DNA, 15 bp, Homo sapiens
agtggcaggccaata

SEQ ID NO: 47924 - DNA, 15 bp, Homo sapiens
aagtggcaggccaat

SEQ ID NO: 47925 - DNA, 15 bp, Homo sapiens
gaagtggcaggccaa

SEQ ID NO: 47926 - DNA, 15 bp, Homo sapiens
tgaagtggcaggcca

SEQ ID NO: 47927 - DNA, 15 bp, Homo sapiens
atgaagtggcaggcc

SEQ ID NO: 47928 - DNA, 15 bp, Homo sapiens
aatgaagtggcaggc

SEQ ID NO: 47929 - DNA, 15 bp, Homo sapiens
aaatgaagtggcagg

SEQ ID NO: 47930 - DNA, 15 bp, Homo sapiens
caaatgaagtggcag

SEQ ID NO: 47931 - DNA, 15 bp, Homo sapiens
ccaaatgaagtggca

SEQ ID NO: 47932 - DNA, 15 bp, Homo sapiens
tccaaatgaagtggc

SEQ ID NO: 47933 - DNA, 15 bp, Homo sapiens
ttccaaatgaagtgg

SEQ ID NO: 47934 - DNA, 15 bp, Homo sapiens
attccaaatgaagtg

SEQ ID NO: 47935 - DNA, 15 bp, Homo sapiens
aattccaaatgaagt

SEQ ID NO: 47936 - DNA, 15 bp, Homo sapiens
taattccaaatgaag

SEQ ID NO: 47937 - DNA, 15 bp, Homo sapiens
ataattccaaatgaa

SEQ ID NO: 47938 - DNA, 15 bp, Homo sapiens
cataattccaaatga

SEQ ID NO: 47939 - DNA, 15 bp, Homo sapiens
acataattccaaatg

SEQ ID NO: 47940 - DNA, 15 bp, Homo sapiens
aacataattccaaat

SEQ ID NO: 47941 - DNA, 15 bp, Homo sapiens
gaacataattccaaa

SEQ ID NO: 47942 - DNA, 15 bp, Homo sapiens
agaacataattccaa

SEQ ID NO: 47943 - DNA, 15 bp, Homo sapiens
aagaacataattcca

SEQ ID NO: 47944 - DNA, 15 bp, Homo sapiens
caagaacataattcc

SEQ ID NO: 47945 - DNA, 15 bp, Homo sapiens
tcaagaacataattc

SEQ ID NO: 47946 - DNA, 15 bp, Homo sapiens
ctcaagaacataatt

SEQ ID NO: 47947 - DNA, 15 bp, Homo sapiens
tctcaagaacataat

SEQ ID NO: 47948 - DNA, 15 bp, Homo sapiens
atctcaagaacataa

SEQ ID NO: 47949 - DNA, 15 bp, Homo sapiens
aatctcaagaacata

SEQ ID NO: 47950 - DNA, 15 bp, Homo sapiens
aaatctcaagaacat

SEQ ID NO: 47951 - DNA, 15 bp, Homo sapiens
taaatctcaagaaca

SEQ ID NO: 47952 - DNA, 15 bp, Homo sapiens
ataaatctcaagaac

SEQ ID NO: 47953 - DNA, 15 bp, Homo sapiens
gataaatctcaagaa

SEQ ID NO: 47954 - DNA, 15 bp, Homo sapiens
tgataaatctcaaga

SEQ ID NO: 47955 - DNA, 15 bp, Homo sapiens
ttgataaatctcaag

SEQ ID NO: 47956 - DNA, 15 bp, Homo sapiens
attgataaatctcaa

SEQ ID NO: 47957 - DNA, 15 bp, Homo sapiens
cattgataaatctca

SEQ ID NO: 47958 - DNA, 15 bp, Homo sapiens
acattgataaatctc

SEQ ID NO: 47959 - DNA, 15 bp, Homo sapiens
aacattgataaatct

SEQ ID NO: 47960 - DNA, 15 bp, Homo sapiens
caacattgataaatc

SEQ ID NO: 47961 - DNA, 15 bp, Homo sapiens
tcaacattgataaat

SEQ ID NO: 47962 - DNA, 15 bp, Homo sapiens
atcaacattgataaa

SEQ ID NO: 47963 - DNA, 15 bp, Homo sapiens
tatcaacattgataa

SEQ ID NO: 47964 - DNA, 15 bp, Homo sapiens
gtatcaacattgata

SEQ ID NO: 47965 - DNA, 15 bp, Homo sapiens
tgtatcaacattgat

SEQ ID NO: 47966 - DNA, 15 bp, Homo sapiens
atgtatcaacattga

SEQ ID NO: 47967 - DNA, 15 bp, Homo sapiens
catgtatcaacattg

SEQ ID NO: 47968 - DNA, 15 bp, Homo sapiens
acatgtatcaacatt

SEQ ID NO: 47969 - DNA, 15 bp, Homo sapiens
cacatgtatcaacat

SEQ ID NO: 47970 - DNA, 15 bp, Homo sapiens
ccacatgtatcaaca

SEQ ID NO: 47971 - DNA, 15 bp, Homo sapiens
tccacatgtatcaac

SEQ ID NO: 47972 - DNA, 15 bp, Homo sapiens
ttccacatgtatcaa

SEQ ID NO: 47973 - DNA, 15 bp, Homo sapiens
attccacatgtatca

SEQ ID NO: 47974 - DNA, 15 bp, Homo sapiens
gattccacatgtatc

SEQ ID NO: 47975 - DNA, 15 bp, Homo sapiens
agattccacatgtat

SEQ ID NO: 47976 - DNA, 15 bp, Homo sapiens
cagattccacatgta

SEQ ID NO: 47977 - DNA, 15 bp, Homo sapiens
ccagattccacatgt

SEQ ID NO: 47978 - DNA, 15 bp, Homo sapiens
accagattccacatg

SEQ ID NO: 47979 - DNA, 15 bp, Homo sapiens
aaccagattccacat

SEQ ID NO: 47980 - DNA, 15 bp, Homo sapiens
taaccagattccaca

SEQ ID NO: 47981 - DNA, 15 bp, Homo sapiens
ttaaccagattccac

SEQ ID NO: 47982 - DNA, 15 bp, Homo sapiens
attaaccagattcca

SEQ ID NO: 47983 - DNA, 15 bp, Homo sapiens
aattaaccagattcc

SEQ ID NO: 47984 - DNA, 15 bp, Homo sapiens
aaattaaccagattc

SEQ ID NO: 47985 - DNA, 15 bp, Homo sapiens
aaaattaaccagatt

SEQ ID NO: 47986 - DNA, 15 bp, Homo sapiens
aaaaattaaccagat

SEQ ID NO: 47987 - DNA, 15 bp, Homo sapiens
caaaaattaaccaga

SEQ ID NO: 47988 - DNA, 15 bp, Homo sapiens
gcaaaaattaaccag

SEQ ID NO: 47989 - DNA, 15 bp, Homo sapiens
ggcaaaaattaacca

SEQ ID NO: 47990 - DNA, 15 bp, Homo sapiens
tggcaaaaattaacc

SEQ ID NO: 47991 - DNA, 15 bp, Homo sapiens
atggcaaaaattaac

SEQ ID NO: 47992 - DNA, 15 bp, Homo sapiens
tatggcaaaaattaa

SEQ ID NO: 47993 - DNA, 15 bp, Homo sapiens
ctatggcaaaaatta

SEQ ID NO: 47994 - DNA, 15 bp, Homo sapiens
actatggcaaaaatt

SEQ ID NO: 47995 - DNA, 15 bp, Homo sapiens
tactatggcaaaaat

SEQ ID NO: 47996 - DNA, 15 bp, Homo sapiens
atactatggcaaaaa

SEQ ID NO: 47997 - DNA, 15 bp, Homo sapiens
aatactatggcaaaa

SEQ ID NO: 47998 - DNA, 15 bp, Homo sapiens
gaatactatggcaaa

SEQ ID NO: 47999 - DNA, 15 bp, Homo sapiens
agaatactatggcaa

SEQ ID NO: 48000 - DNA, 15 bp, Homo sapiens
tagaatactatggca

SEQ ID NO: 48001 - DNA, 15 bp, Homo sapiens
atagaatactatggc

SEQ ID NO: 48002 - DNA, 15 bp, Homo sapiens
aatagaatactatgg

SEQ ID NO: 48003 - DNA, 15 bp, Homo sapiens
aaatagaatactatg

SEQ ID NO: 48004 - DNA, 15 bp, Homo sapiens
aaaatagaatactat

SEQ ID NO: 48005 - DNA, 15 bp, Homo sapiens
aaaaatagaatacta

SEQ ID NO: 48006 - DNA, 15 bp, Homo sapiens
taaaaatagaatact

SEQ ID NO: 48007 - DNA, 15 bp, Homo sapiens
ataaaaatagaatac

SEQ ID NO: 48008 - DNA, 15 bp, Homo sapiens
tataaaaatagaata

SEQ ID NO: 48009 - DNA, 15 bp, Homo sapiens
gtataaaaatagaat

SEQ ID NO: 48010 - DNA, 15 bp, Homo sapiens
agtataaaaatagaa

SEQ ID NO: 48011 - DNA, 15 bp, Homo sapiens
tagtataaaaataga

SEQ ID NO: 48012 - DNA, 15 bp, Homo sapiens
ttagtataaaaatag

SEQ ID NO: 48013 - DNA, 15 bp, Homo sapiens
tttagtataaaaata

SEQ ID NO: 48014 - DNA, 15 bp, Homo sapiens
gtttagtataaaaat

SEQ ID NO: 48015 - DNA, 15 bp, Homo sapiens
agtttagtataaaaa

SEQ ID NO: 48016 - DNA, 15 bp, Homo sapiens
aagtttagtataaaa

SEQ ID NO: 48017 - DNA, 15 bp, Homo sapiens
aaagtttagtataaa

SEQ ID NO: 48018 - DNA, 15 bp, Homo sapiens
aaaagtttagtataa

SEQ ID NO: 48019 - DNA, 15 bp, Homo sapiens
taaaagtttagtata

SEQ ID NO: 48020 - DNA, 15 bp, Homo sapiens
ttaaaagtttagtat

SEQ ID NO: 48021 - DNA, 15 bp, Homo sapiens
tttaaaagtttagta

SEQ ID NO: 48022 - DNA, 15 bp, Homo sapiens
ttttaaaagtttagt

SEQ ID NO: 48023 - DNA, 15 bp, Homo sapiens
tttttaaaagtttag

SEQ ID NO: 48024 - DNA, 15 bp, Homo sapiens
atttttaaaagttta

SEQ ID NO: 48025 - DNA, 15 bp, Homo sapiens
gatttttaaaagttt

SEQ ID NO: 48026 - DNA, 15 bp, Homo sapiens
ggatttttaaaagtt

SEQ ID NO: 48027 - DNA, 15 bp, Homo sapiens
tggatttttaaaagt

SEQ ID NO: 48028 - DNA, 15 bp, Homo sapiens
atggatttttaaaag

SEQ ID NO: 48029 - DNA, 15 bp, Homo sapiens
catggatttttaaaa

SEQ ID NO: 48030 - DNA, 15 bp, Homo sapiens
gcatggatttttaaa

SEQ ID NO: 48031 - DNA, 15 bp, Homo sapiens
agcatggatttttaa

SEQ ID NO: 48032 - DNA, 15 bp, Homo sapiens
aagcatggattttta

SEQ ID NO: 48033 - DNA, 15 bp, Homo sapiens
gaagcatggattttt

SEQ ID NO: 48034 - DNA, 15 bp, Homo sapiens
agaagcatggatttt

SEQ ID NO: 48035 - DNA, 15 bp, Homo sapiens
tagaagcatggattt

SEQ ID NO: 48036 - DNA, 15 bp, Homo sapiens
ctagaagcatggatt

SEQ ID NO: 48037 - DNA, 15 bp, Homo sapiens
actagaagcatggat

SEQ ID NO: 48038 - DNA, 15 bp, Homo sapiens
gactagaagcatgga

SEQ ID NO: 48039 - DNA, 15 bp, Homo sapiens
agactagaagcatgg

SEQ ID NO: 48040 - DNA, 15 bp, Homo sapiens
aagactagaagcatg

SEQ ID NO: 48041 - DNA, 15 bp, Homo sapiens
aaagactagaagcat

SEQ ID NO: 48042 - DNA, 15 bp, Homo sapiens
caaagactagaagca

SEQ ID NO: 48043 - DNA, 15 bp, Homo sapiens
ccaaagactagaagc

SEQ ID NO: 48044 - DNA, 15 bp, Homo sapiens
gccaaagactagaag

SEQ ID NO: 48045 - DNA, 15 bp, Homo sapiens
agccaaagactagaa

SEQ ID NO: 48046 - DNA, 15 bp, Homo sapiens
aagccaaagactaga

SEQ ID NO: 48047 - DNA, 15 bp, Homo sapiens
taagccaaagactag

SEQ ID NO: 48048 - DNA, 15 bp, Homo sapiens
ataagccaaagacta

SEQ ID NO: 48049 - DNA, 15 bp, Homo sapiens
aataagccaaagact

SEQ ID NO: 48050 - DNA, 15 bp, Homo sapiens
aaataagccaaagac

SEQ ID NO: 48051 - DNA, 15 bp, Homo sapiens
aaaataagccaaaga

SEQ ID NO: 48052 - DNA, 15 bp, Homo sapiens
aaaaataagccaaag

SEQ ID NO: 48053 - DNA, 15 bp, Homo sapiens
aaaaaataagccaaa

SEQ ID NO: 48054 - DNA, 15 bp, Homo sapiens
gaaaaaataagccaa

SEQ ID NO: 48055 - DNA, 15 bp, Homo sapiens
tgaaaaaataagcca

SEQ ID NO: 48056 - DNA, 15 bp, Homo sapiens
ctgaaaaaataagcc

SEQ ID NO: 48057 - DNA, 15 bp, Homo sapiens
cctgaaaaaataagc

SEQ ID NO: 48058 - DNA, 15 bp, Homo sapiens
acctgaaaaaataag

SEQ ID NO: 48059 - DNA, 15 bp, Homo sapiens
aacctgaaaaaataa

SEQ ID NO: 48060 - DNA, 15 bp, Homo sapiens
taacctgaaaaaata

SEQ ID NO: 48061 - DNA, 15 bp, Homo sapiens
ataacctgaaaaaat

SEQ ID NO: 48062 - DNA, 15 bp, Homo sapiens
cataacctgaaaaaa

SEQ ID NO: 48063 - DNA, 15 bp, Homo sapiens
ccataacctgaaaaa

SEQ ID NO: 48064 - DNA, 15 bp, Homo sapiens
accataacctgaaaa

SEQ ID NO: 48065 - DNA, 15 bp, Homo sapiens
taccataacctgaaa

SEQ ID NO: 48066 - DNA, 15 bp, Homo sapiens
ataccataacctgaa

SEQ ID NO: 48067 - DNA, 15 bp, Homo sapiens
cataccataacctga

SEQ ID NO: 48068 - DNA, 15 bp, Homo sapiens
acataccataacctg

SEQ ID NO: 48069 - DNA, 15 bp, Homo sapiens
aacataccataacct

SEQ ID NO: 48070 - DNA, 15 bp, Homo sapiens
aaacataccataacc

SEQ ID NO: 48071 - DNA, 15 bp, Homo sapiens
aaaacataccataac

SEQ ID NO: 48072 - DNA, 15 bp, Homo sapiens
caaaacataccataa

SEQ ID NO: 48073 - DNA, 15 bp, Homo sapiens
ccaaaacataccata

SEQ ID NO: 48074 - DNA, 15 bp, Homo sapiens
tccaaaacataccat

SEQ ID NO: 48075 - DNA, 15 bp, Homo sapiens
atccaaaacatacca

SEQ ID NO: 48076 - DNA, 15 bp, Homo sapiens
catccaaaacatacc

SEQ ID NO: 48077 - DNA, 15 bp, Homo sapiens
gcatccaaaacatac

SEQ ID NO: 48078 - DNA, 15 bp, Homo sapiens
tgcatccaaaacata

SEQ ID NO: 48079 - DNA, 15 bp, Homo sapiens
gtgcatccaaaacat

SEQ ID NO: 48080 - DNA, 15 bp, Homo sapiens
tgtgcatccaaaaca

SEQ ID NO: 48081 - DNA, 15 bp, Homo sapiens
ctgtgcatccaaaac

SEQ ID NO: 48082 - DNA, 15 bp, Homo sapiens
tctgtgcatccaaaa

SEQ ID NO: 48083 - DNA, 15 bp, Homo sapiens
ttctgtgcatccaaa

SEQ ID NO: 48084 - DNA, 15 bp, Homo sapiens
tttctgtgcatccaa

SEQ ID NO: 48085 - DNA, 15 bp, Homo sapiens
ttttctgtgcatcca

SEQ ID NO: 48086 - DNA, 15 bp, Homo sapiens
cttttctgtgcatcc

SEQ ID NO: 48087 - DNA, 15 bp, Homo sapiens
acttttctgtgcatc

SEQ ID NO: 48088 - DNA, 15 bp, Homo sapiens
tacttttctgtgcat

SEQ ID NO: 48089 - DNA, 15 bp, Homo sapiens
ttacttttctgtgca

SEQ ID NO: 48090 - DNA, 15 bp, Homo sapiens
tttacttttctgtgc

SEQ ID NO: 48091 - DNA, 15 bp, Homo sapiens
ttttacttttctgtg

SEQ ID NO: 48092 - DNA, 15 bp, Homo sapiens
attttacttttctgt

SEQ ID NO: 48093 - DNA, 15 bp, Homo sapiens
aattttacttttctg

SEQ ID NO: 48094 - DNA, 15 bp, Homo sapiens
taattttacttttct

SEQ ID NO: 48095 - DNA, 15 bp, Homo sapiens
ttaattttacttttc

SEQ ID NO: 48096 - DNA, 15 bp, Homo sapiens
cttaattttactttt

SEQ ID NO: 48097 - DNA, 15 bp, Homo sapiens
acttaattttacttt

SEQ ID NO: 48098 - DNA, 15 bp, Homo sapiens
gacttaattttactt

SEQ ID NO: 48099 - DNA, 15 bp, Homo sapiens
tgacttaattttact

SEQ ID NO: 48100 - DNA, 15 bp, Homo sapiens
atgacttaattttac

SEQ ID NO: 48101 - DNA, 15 bp, Homo sapiens
catgacttaatttta

SEQ ID NO: 48102 - DNA, 15 bp, Homo sapiens
tcatgacttaatttt

SEQ ID NO: 48103 - DNA, 15 bp, Homo sapiens
ctcatgacttaattt

SEQ ID NO: 48104 - DNA, 15 bp, Homo sapiens
gctcatgacttaatt

SEQ ID NO: 48105 - DNA, 15 bp, Homo sapiens
tgctcatgacttaat

SEQ ID NO: 48106 - DNA, 15 bp, Homo sapiens
ttgctcatgacttaa

SEQ ID NO: 48107 - DNA, 15 bp, Homo sapiens
tttgctcatgactta

SEQ ID NO: 48108 - DNA, 15 bp, Homo sapiens
ttttgctcatgactt

SEQ ID NO: 48109 - DNA, 15 bp, Homo sapiens
attttgctcatgact

SEQ ID NO: 48110 - DNA, 15 bp, Homo sapiens
tattttgctcatgac

SEQ ID NO: 48111 - DNA, 15 bp, Homo sapiens
atattttgctcatga

SEQ ID NO: 48112 - DNA, 15 bp, Homo sapiens
gatattttgctcatg

SEQ ID NO: 48113 - DNA, 15 bp, Homo sapiens
agatattttgctcat

SEQ ID NO: 48114 - DNA, 15 bp, Homo sapiens
cagatattttgctca

SEQ ID NO: 48115 - DNA, 15 bp, Homo sapiens
ccagatattttgctc

SEQ ID NO: 48116 - DNA, 15 bp, Homo sapiens
tccagatattttgct

SEQ ID NO: 48117 - DNA, 15 bp, Homo sapiens
atccagatattttgc

SEQ ID NO: 48118 - DNA, 15 bp, Homo sapiens
tatccagatattttg

SEQ ID NO: 48119 - DNA, 15 bp, Homo sapiens
ttatccagatatttt

SEQ ID NO: 48120 - DNA, 15 bp, Homo sapiens
attatccagatattt

SEQ ID NO: 48121 - DNA, 15 bp, Homo sapiens
gattatccagatatt

SEQ ID NO: 48122 - DNA, 15 bp, Homo sapiens
ggattatccagatat

SEQ ID NO: 48123 - DNA, 15 bp, Homo sapiens
tggattatccagata

SEQ ID NO: 48124 - DNA, 15 bp, Homo sapiens
ttggattatccagat

SEQ ID NO: 48125 - DNA, 15 bp, Homo sapiens
cttggattatccaga

SEQ ID NO: 48126 - DNA, 15 bp, Homo sapiens
gcttggattatccag

SEQ ID NO: 48127 - DNA, 15 bp, Homo sapiens
agcttggattatcca

SEQ ID NO: 48128 - DNA, 15 bp, Homo sapiens
aagcttggattatcc

SEQ ID NO: 48129 - DNA, 15 bp, Homo sapiens
aaagcttggattatc

SEQ ID NO: 48130 - DNA, 15 bp, Homo sapiens
taaagcttggattat

SEQ ID NO: 48131 - DNA, 15 bp, Homo sapiens
ttaaagcttggatta

SEQ ID NO: 48132 - DNA, 15 bp, Homo sapiens
tttaaagcttggatt

SEQ ID NO: 48133 - DNA, 15 bp, Homo sapiens
gtttaaagcttggat

SEQ ID NO: 48134 - DNA, 15 bp, Homo sapiens
agtttaaagcttgga

SEQ ID NO: 48135 - DNA, 15 bp, Homo sapiens
aagtttaaagcttgg

SEQ ID NO: 48136 - DNA, 15 bp, Homo sapiens
caagtttaaagcttg

SEQ ID NO: 48137 - DNA, 15 bp, Homo sapiens
tcaagtttaaagctt

SEQ ID NO: 48138 - DNA, 15 bp, Homo sapiens
atcaagtttaaagct

SEQ ID NO: 48139 - DNA, 15 bp, Homo sapiens
catcaagtttaaagc

SEQ ID NO: 48140 - DNA, 15 bp, Homo sapiens
acatcaagtttaaag

SEQ ID NO: 48141 - DNA, 15 bp, Homo sapiens
tacatcaagtttaaa

SEQ ID NO: 48142 - DNA, 15 bp, Homo sapiens
ctacatcaagtttaa

SEQ ID NO: 48143 - DNA, 15 bp, Homo sapiens
tctacatcaagttta

SEQ ID NO: 48144 - DNA, 15 bp, Homo sapiens
ttctacatcaagttt

SEQ ID NO: 48145 - DNA, 15 bp, Homo sapiens
attctacatcaagtt

SEQ ID NO: 48146 - DNA, 15 bp, Homo sapiens
aattctacatcaagt

SEQ ID NO: 48147 - DNA, 15 bp, Homo sapiens
aaattctacatcaag

SEQ ID NO: 48148 - DNA, 15 bp, Homo sapiens
caaattctacatcaa

SEQ ID NO: 48149 - DNA, 15 bp, Homo sapiens
tcaaattctacatca

SEQ ID NO: 48150 - DNA, 15 bp, Homo sapiens
ttcaaattctacatc

SEQ ID NO: 48151 - DNA, 15 bp, Homo sapiens
attcaaattctacat

SEQ ID NO: 48152 - DNA, 15 bp, Homo sapiens
gattcaaattctaca

SEQ ID NO: 48153 - DNA, 15 bp, Homo sapiens
tgattcaaattctac

SEQ ID NO: 48154 - DNA, 15 bp, Homo sapiens
atgattcaaattcta

SEQ ID NO: 48155 - DNA, 15 bp, Homo sapiens
catgattcaaattct

SEQ ID NO: 48156 - DNA, 15 bp, Homo sapiens
acatgattcaaattc

SEQ ID NO: 48157 - DNA, 15 bp, Homo sapiens
cacatgattcaaatt

SEQ ID NO: 48158 - DNA, 15 bp, Homo sapiens
acacatgattcaaat

SEQ ID NO: 48159 - DNA, 15 bp, Homo sapiens
cacacatgattcaaa

SEQ ID NO: 48160 - DNA, 15 bp, Homo sapiens
acacacatgattcaa

SEQ ID NO: 48161 - DNA, 15 bp, Homo sapiens
aacacacatgattca

SEQ ID NO: 48162 - DNA, 15 bp, Homo sapiens
aaacacacatgattc

SEQ ID NO: 48163 - DNA, 15 bp, Homo sapiens
aaaacacacatgatt

SEQ ID NO: 48164 - DNA, 15 bp, Homo sapiens
caaaacacacatgat

SEQ ID NO: 48165 - DNA, 15 bp, Homo sapiens
acaaaacacacatga

SEQ ID NO: 48166 - DNA, 15 bp, Homo sapiens
aacaaaacacacatg

SEQ ID NO: 48167 - DNA, 15 bp, Homo sapiens
taacaaaacacacat

SEQ ID NO: 48168 - DNA, 15 bp, Homo sapiens
ttaacaaaacacaca

SEQ ID NO: 48169 - DNA, 15 bp, Homo sapiens
gttaacaaaacacac

SEQ ID NO: 48170 - DNA, 15 bp, Homo sapiens
ggttaacaaaacaca

SEQ ID NO: 48171 - DNA, 15 bp, Homo sapiens
gggttaacaaaacac

SEQ ID NO: 48172 - DNA, 15 bp, Homo sapiens
agggttaacaaaaca

SEQ ID NO: 48173 - DNA, 15 bp, Homo sapiens
cagggttaacaaaac

SEQ ID NO: 48174 - DNA, 15 bp, Homo sapiens
acagggttaacaaaa

SEQ ID NO: 48175 - DNA, 15 bp, Homo sapiens
cacagggttaacaaa

SEQ ID NO: 48176 - DNA, 15 bp, Homo sapiens
tcacagggttaacaa

SEQ ID NO: 48177 - DNA, 15 bp, Homo sapiens
atcacagggttaaca

SEQ ID NO: 48178 - DNA, 15 bp, Homo sapiens
catcacagggttaac

SEQ ID NO: 48179 - DNA, 15 bp, Homo sapiens
acatcacagggttaa

SEQ ID NO: 48180 - DNA, 15 bp, Homo sapiens
gacatcacagggtta

SEQ ID NO: 48181 - DNA, 15 bp, Homo sapiens
tgacatcacagggtt

SEQ ID NO: 48182 - DNA, 15 bp, Homo sapiens
ttgacatcacagggt

SEQ ID NO: 48183 - DNA, 15 bp, Homo sapiens
attgacatcacaggg

SEQ ID NO: 48184 - DNA, 15 bp, Homo sapiens
gattgacatcacagg

SEQ ID NO: 48185 - DNA, 15 bp, Homo sapiens
ggattgacatcacag

SEQ ID NO: 48186 - DNA, 15 bp, Homo sapiens
tggattgacatcaca

SEQ ID NO: 48187 - DNA, 15 bp, Homo sapiens
atggattgacatcac

SEQ ID NO: 48188 - DNA, 15 bp, Homo sapiens
catggattgacatca

SEQ ID NO: 48189 - DNA, 15 bp, Homo sapiens
gcatggattgacatc

SEQ ID NO: 48190 - DNA, 15 bp, Homo sapiens
ggcatggattgacat

SEQ ID NO: 48191 - DNA, 15 bp, Homo sapiens
aggcatggattgaca

SEQ ID NO: 48192 - DNA, 15 bp, Homo sapiens
caggcatggattgac

SEQ ID NO: 48193 - DNA, 15 bp, Homo sapiens
tcaggcatggattga

SEQ ID NO: 48194 - DNA, 15 bp, Homo sapiens
atcaggcatggattg

SEQ ID NO: 48195 - DNA, 15 bp, Homo sapiens
aatcaggcatggatt

SEQ ID NO: 48196 - DNA, 15 bp, Homo sapiens
caatcaggcatggat

SEQ ID NO: 48197 - DNA, 15 bp, Homo sapiens
acaatcaggcatgga

SEQ ID NO: 48198 - DNA, 15 bp, Homo sapiens
cacaatcaggcatgg

SEQ ID NO: 48199 - DNA, 15 bp, Homo sapiens
acacaatcaggcatg

SEQ ID NO: 48200 - DNA, 15 bp, Homo sapiens
tacacaatcaggcat

SEQ ID NO: 48201 - DNA, 15 bp, Homo sapiens
ttacacaatcaggca

SEQ ID NO: 48202 - DNA, 15 bp, Homo sapiens
gttacacaatcaggc

SEQ ID NO: 48203 - DNA, 15 bp, Homo sapiens
agttacacaatcagg

SEQ ID NO: 48204 - DNA, 15 bp, Homo sapiens
gagttacacaatcag

SEQ ID NO: 48205 - DNA, 15 bp, Homo sapiens
ggagttacacaatca

SEQ ID NO: 48206 - DNA, 15 bp, Homo sapiens
tggagttacacaatc

SEQ ID NO: 48207 - DNA, 15 bp, Homo sapiens
ttggagttacacaat

SEQ ID NO: 48208 - DNA, 15 bp, Homo sapiens
gttggagttacacaa

SEQ ID NO: 48209 - DNA, 15 bp, Homo sapiens
ggttggagttacaca

SEQ ID NO: 48210 - DNA, 15 bp, Homo sapiens
tggttggagttacac

SEQ ID NO: 48211 - DNA, 15 bp, Homo sapiens
ttggttggagttaca

SEQ ID NO: 48212 - DNA, 15 bp, Homo sapiens
attggttggagttac

SEQ ID NO: 48213 - DNA, 15 bp, Homo sapiens
tattggttggagtta

SEQ ID NO: 48214 - DNA, 15 bp, Homo sapiens
atattggttggagtt

SEQ ID NO: 48215 - DNA, 15 bp, Homo sapiens
aatattggttggagt

SEQ ID NO: 48216 - DNA, 15 bp, Homo sapiens
gaatattggttggag

SEQ ID NO: 48217 - DNA, 15 bp, Homo sapiens
ggaatattggttgga

SEQ ID NO: 48218 - DNA, 15 bp, Homo sapiens
aggaatattggttgg

SEQ ID NO: 48219 - DNA, 15 bp, Homo sapiens
aaggaatattggttg

SEQ ID NO: 48220 - DNA, 15 bp, Homo sapiens
aaaggaatattggtt

SEQ ID NO: 48221 - DNA, 15 bp, Homo sapiens
caaaggaatattggt

SEQ ID NO: 48222 - DNA, 15 bp, Homo sapiens
tcaaaggaatattgg

SEQ ID NO: 48223 - DNA, 15 bp, Homo sapiens
ttcaaaggaatattg

SEQ ID NO: 48224 - DNA, 15 bp, Homo sapiens
tttcaaaggaatatt

SEQ ID NO: 48225 - DNA, 15 bp, Homo sapiens
ttttcaaaggaatat

SEQ ID NO: 48226 - DNA, 15 bp, Homo sapiens
attttcaaaggaata

SEQ ID NO: 48227 - DNA, 15 bp, Homo sapiens
cattttcaaaggaat

SEQ ID NO: 48228 - DNA, 15 bp, Homo sapiens
ccattttcaaaggaa

SEQ ID NO: 48229 - DNA, 15 bp, Homo sapiens
tccattttcaaagga

SEQ ID NO: 48230 - DNA, 15 bp, Homo sapiens
ttccattttcaaagg

SEQ ID NO: 48231 - DNA, 15 bp, Homo sapiens
tttccattttcaaag

SEQ ID NO: 48232 - DNA, 15 bp, Homo sapiens
atttccattttcaaa

SEQ ID NO: 48233 - DNA, 15 bp, Homo sapiens
aatttccattttcaa

SEQ ID NO: 48234 - DNA, 15 bp, Homo sapiens
aaatttccattttca

SEQ ID NO: 48235 - DNA, 15 bp, Homo sapiens
caaatttccattttc

SEQ ID NO: 48236 - DNA, 15 bp, Homo sapiens
acaaatttccatttt

SEQ ID NO: 48237 - DNA, 15 bp, Homo sapiens
aacaaatttccattt

SEQ ID NO: 48238 - DNA, 15 bp, Homo sapiens
aaacaaatttccatt

SEQ ID NO: 48239 - DNA, 15 bp, Homo sapiens
taaacaaatttccat

SEQ ID NO: 48240 - DNA, 15 bp, Homo sapiens
ataaacaaatttcca

SEQ ID NO: 48241 - DNA, 15 bp, Homo sapiens
tataaacaaatttcc

SEQ ID NO: 48242 - DNA, 15 bp, Homo sapiens
atataaacaaatttc

SEQ ID NO: 48243 - DNA, 15 bp, Homo sapiens
aatataaacaaattt

SEQ ID NO: 48244 - DNA, 15 bp, Homo sapiens
caatataaacaaatt

SEQ ID NO: 48245 - DNA, 15 bp, Homo sapiens
tcaatataaacaaat

SEQ ID NO: 48246 - DNA, 15 bp, Homo sapiens
gtcaatataaacaaa

SEQ ID NO: 48247 - DNA, 15 bp, Homo sapiens
agtcaatataaacaa

SEQ ID NO: 48248 - DNA, 15 bp, Homo sapiens
tagtcaatataaaca

SEQ ID NO: 48249 - DNA, 15 bp, Homo sapiens
gtagtcaatataaac

SEQ ID NO: 48250 - DNA, 15 bp, Homo sapiens
tgtagtcaatataaa

SEQ ID NO: 48251 - DNA, 15 bp, Homo sapiens
ctgtagtcaatataa

SEQ ID NO: 48252 - DNA, 15 bp, Homo sapiens
tctgtagtcaatata

SEQ ID NO: 48253 - DNA, 15 bp, Homo sapiens
atctgtagtcaatat

SEQ ID NO: 48254 - DNA, 15 bp, Homo sapiens
aatctgtagtcaata

SEQ ID NO: 48255 - DNA, 15 bp, Homo sapiens
caatctgtagtcaat

SEQ ID NO: 48256 - DNA, 15 bp, Homo sapiens
gcaatctgtagtcaa

SEQ ID NO: 48257 - DNA, 15 bp, Homo sapiens
ggcaatctgtagtca

SEQ ID NO: 48258 - DNA, 15 bp, Homo sapiens
tggcaatctgtagtc

SEQ ID NO: 48259 - DNA, 15 bp, Homo sapiens
ttggcaatctgtagt

SEQ ID NO: 48260 - DNA, 15 bp, Homo sapiens
attggcaatctgtag

SEQ ID NO: 48261 - DNA, 15 bp, Homo sapiens
tattggcaatctgta

SEQ ID NO: 48262 - DNA, 15 bp, Homo sapiens
atattggcaatctgt

SEQ ID NO: 48263 - DNA, 15 bp, Homo sapiens
aatattggcaatctg

SEQ ID NO: 48264 - DNA, 15 bp, Homo sapiens
taatattggcaatct

SEQ ID NO: 48265 - DNA, 15 bp, Homo sapiens
ataatattggcaatc

SEQ ID NO: 48266 - DNA, 15 bp, Homo sapiens
aataatattggcaat

SEQ ID NO: 48267 - DNA, 15 bp, Homo sapiens
taataatattggcaa

SEQ ID NO: 48268 - DNA, 15 bp, Homo sapiens
ctaataatattggca

SEQ ID NO: 48269 - DNA, 15 bp, Homo sapiens
actaataatattggc

SEQ ID NO: 48270 - DNA, 15 bp, Homo sapiens
tactaataatattgg

SEQ ID NO: 48271 - DNA, 15 bp, Homo sapiens
ttactaataatattg

SEQ ID NO: 48272 - DNA, 15 bp, Homo sapiens
tttactaataatatt

SEQ ID NO: 48273 - DNA, 15 bp, Homo sapiens
atttactaataatat

SEQ ID NO: 48274 - DNA, 15 bp, Homo sapiens
catttactaataata

SEQ ID NO: 48275 - DNA, 15 bp, Homo sapiens
gcatttactaataat

SEQ ID NO: 48276 - DNA, 15 bp, Homo sapiens
agcatttactaataa

SEQ ID NO: 48277 - DNA, 15 bp, Homo sapiens
cagcatttactaata

SEQ ID NO: 48278 - DNA, 15 bp, Homo sapiens
tcagcatttactaat

SEQ ID NO: 48279 - DNA, 15 bp, Homo sapiens
ctcagcatttactaa

SEQ ID NO: 48280 - DNA, 15 bp, Homo sapiens
gctcagcatttacta

SEQ ID NO: 48281 - DNA, 15 bp, Homo sapiens
tgctcagcatttact

SEQ ID NO: 48282 - DNA, 15 bp, Homo sapiens
gtgctcagcatttac

SEQ ID NO: 48283 - DNA, 15 bp, Homo sapiens
agtgctcagcattta

SEQ ID NO: 48284 - DNA, 15 bp, Homo sapiens
aagtgctcagcattt

SEQ ID NO: 48285 - DNA, 15 bp, Homo sapiens
taagtgctcagcatt

SEQ ID NO: 48286 - DNA, 15 bp, Homo sapiens
ttaagtgctcagcat

SEQ ID NO: 48287 - DNA, 15 bp, Homo sapiens
attaagtgctcagca

SEQ ID NO: 48288 - DNA, 15 bp, Homo sapiens
gattaagtgctcagc

SEQ ID NO: 48289 - DNA, 15 bp, Homo sapiens
agattaagtgctcag

SEQ ID NO: 48290 - DNA, 15 bp, Homo sapiens
gagattaagtgctca

SEQ ID NO: 48291 - DNA, 15 bp, Homo sapiens
cgagattaagtgctc

SEQ ID NO: 48292 - DNA, 15 bp, Homo sapiens
tcgagattaagtgct

SEQ ID NO: 48293 - DNA, 15 bp, Homo sapiens
ttcgagattaagtgc

SEQ ID NO: 48294 - DNA, 15 bp, Homo sapiens
attcgagattaagtg

SEQ ID NO: 48295 - DNA, 15 bp, Homo sapiens
tattcgagattaagt

SEQ ID NO: 48296 - DNA, 15 bp, Homo sapiens
ttattcgagattaag

SEQ ID NO: 48297 - DNA, 15 bp, Homo sapiens
tttattcgagattaa

SEQ ID NO: 48298 - DNA, 15 bp, Homo sapiens
ctttattcgagatta

SEQ ID NO: 48299 - DNA, 15 bp, Homo sapiens
tctttattcgagatt

SEQ ID NO: 48300 - DNA, 15 bp, Homo sapiens
ttctttattcgagat

SEQ ID NO: 48301 - DNA, 15 bp, Homo sapiens
gttctttattcgaga

SEQ ID NO: 48302 - DNA, 15 bp, Homo sapiens
agttctttattcgag

SEQ ID NO: 48303 - DNA, 15 bp, Homo sapiens
tagttctttattcga

SEQ ID NO: 48304 - DNA, 15 bp, Homo sapiens
ctagttctttattcg

SEQ ID NO: 48305 - DNA, 15 bp, Homo sapiens
actagttctttattc

SEQ ID NO: 48306 - DNA, 15 bp, Homo sapiens
aactagttctttatt

SEQ ID NO: 48307 - DNA, 15 bp, Homo sapiens
aaactagttctttat

SEQ ID NO: 48308 - DNA, 15 bp, Homo sapiens
taaactagttcttta

SEQ ID NO: 48309 - DNA, 15 bp, Homo sapiens
ttaaactagttcttt

SEQ ID NO: 48310 - DNA, 15 bp, Homo sapiens
tttaaactagttctt

SEQ ID NO: 48311 - DNA, 15 bp, Homo sapiens
ttttaaactagttct

SEQ ID NO: 48312 - DNA, 15 bp, Homo sapiens
tttttaaactagttc

SEQ ID NO: 48313 - DNA, 15 bp, Homo sapiens
atttttaaactagtt

SEQ ID NO: 48314 - DNA, 15 bp, Homo sapiens
catttttaaactagt

SEQ ID NO: 48315 - DNA, 15 bp, Homo sapiens
tcatttttaaactag

SEQ ID NO: 48316 - DNA, 15 bp, Homo sapiens
atcatttttaaacta

SEQ ID NO: 48317 - DNA, 15 bp, Homo sapiens
aatcatttttaaact

SEQ ID NO: 48318 - DNA, 15 bp, Homo sapiens
gaatcatttttaaac

SEQ ID NO: 48319 - DNA, 15 bp, Homo sapiens
agaatcatttttaaa

SEQ ID NO: 48320 - DNA, 15 bp, Homo sapiens
tagaatcatttttaa

SEQ ID NO: 48321 - DNA, 15 bp, Homo sapiens
ttagaatcattttta

SEQ ID NO: 48322 - DNA, 15 bp, Homo sapiens
gttagaatcattttt

SEQ ID NO: 48323 - DNA, 15 bp, Homo sapiens
tgttagaatcatttt

SEQ ID NO: 48324 - DNA, 15 bp, Homo sapiens
ttgttagaatcattt

SEQ ID NO: 48325 - DNA, 15 bp, Homo sapiens
attgttagaatcatt

SEQ ID NO: 48326 - DNA, 15 bp, Homo sapiens
cattgttagaatcat

SEQ ID NO: 48327 - DNA, 15 bp, Homo sapiens
ccattgttagaatca

SEQ ID NO: 48328 - DNA, 15 bp, Homo sapiens
gccattgttagaatc

SEQ ID NO: 48329 - DNA, 15 bp, Homo sapiens
tgccattgttagaat

SEQ ID NO: 48330 - DNA, 15 bp, Homo sapiens
atgccattgttagaa

SEQ ID NO: 48331 - DNA, 15 bp, Homo sapiens
aatgccattgttaga

SEQ ID NO: 48332 - DNA, 15 bp, Homo sapiens
caatgccattgttag

SEQ ID NO: 48333 - DNA, 15 bp, Homo sapiens
tcaatgccattgtta

SEQ ID NO: 48334 - DNA, 15 bp, Homo sapiens
gtcaatgccattgtt

SEQ ID NO: 48335 - DNA, 15 bp, Homo sapiens
agtcaatgccattgt

SEQ ID NO: 48336 - DNA, 15 bp, Homo sapiens
cagtcaatgccattg

SEQ ID NO: 48337 - DNA, 15 bp, Homo sapiens
acagtcaatgccatt

SEQ ID NO: 48338 - DNA, 15 bp, Homo sapiens
aacagtcaatgccat

SEQ ID NO: 48339 - DNA, 15 bp, Homo sapiens
gaacagtcaatgcca

SEQ ID NO: 48340 - DNA, 15 bp, Homo sapiens
agaacagtcaatgcc

SEQ ID NO: 48341 - DNA, 15 bp, Homo sapiens
tagaacagtcaatgc

SEQ ID NO: 48342 - DNA, 15 bp, Homo sapiens
gtagaacagtcaatg

SEQ ID NO: 48343 - DNA, 15 bp, Homo sapiens
ggtagaacagtcaat

SEQ ID NO: 48344 - DNA, 15 bp, Homo sapiens
aggtagaacagtcaa

SEQ ID NO: 48345 - DNA, 15 bp, Homo sapiens
aaggtagaacagtca

SEQ ID NO: 48346 - DNA, 15 bp, Homo sapiens
taaggtagaacagtc

SEQ ID NO: 48347 - DNA, 15 bp, Homo sapiens
ataaggtagaacagt

SEQ ID NO: 48348 - DNA, 15 bp, Homo sapiens
aataaggtagaacag

SEQ ID NO: 48349 - DNA, 15 bp, Homo sapiens
taataaggtagaaca

SEQ ID NO: 48350 - DNA, 15 bp, Homo sapiens
gtaataaggtagaac

SEQ ID NO: 48351 - DNA, 15 bp, Homo sapiens
agtaataaggtagaa

SEQ ID NO: 48352 - DNA, 15 bp, Homo sapiens
gagtaataaggtaga

SEQ ID NO: 48353 - DNA, 15 bp, Homo sapiens
tgagtaataaggtag

SEQ ID NO: 48354 - DNA, 15 bp, Homo sapiens
atgagtaataaggta

SEQ ID NO: 48355 - DNA, 15 bp, Homo sapiens
catgagtaataaggt

SEQ ID NO: 48356 - DNA, 15 bp, Homo sapiens
ccatgagtaataagg

SEQ ID NO: 48357 - DNA, 15 bp, Homo sapiens
cccatgagtaataag

SEQ ID NO: 48358 - DNA, 15 bp, Homo sapiens
acccatgagtaataa

SEQ ID NO: 48359 - DNA, 15 bp, Homo sapiens
cacccatgagtaata

SEQ ID NO: 48360 - DNA, 15 bp, Homo sapiens
ccacccatgagtaat

SEQ ID NO: 48361 - DNA, 15 bp, Homo sapiens
cccacccatgagtaa

SEQ ID NO: 48362 - DNA, 15 bp, Homo sapiens
acccacccatgagta

SEQ ID NO: 48363 - DNA, 15 bp, Homo sapiens
aacccacccatgagt

SEQ ID NO: 48364 - DNA, 15 bp, Homo sapiens
gaacccacccatgag

SEQ ID NO: 48365 - DNA, 15 bp, Homo sapiens
tgaacccacccatga

SEQ ID NO: 48366 - DNA, 15 bp, Homo sapiens
ctgaacccacccatg

SEQ ID NO: 48367 - DNA, 15 bp, Homo sapiens
gctgaacccacccat

SEQ ID NO: 48368 - DNA, 15 bp, Homo sapiens
ggctgaacccaccca

SEQ ID NO: 48369 - DNA, 15 bp, Homo sapiens
tggctgaacccaccc

SEQ ID NO: 48370 - DNA, 15 bp, Homo sapiens
ttggctgaacccacc

SEQ ID NO: 48371 - DNA, 15 bp, Homo sapiens
attggctgaacccac

SEQ ID NO: 48372 - DNA, 15 bp, Homo sapiens
cattggctgaaccca

SEQ ID NO: 48373 - DNA, 15 bp, Homo sapiens
acattggctgaaccc

SEQ ID NO: 48374 - DNA, 15 bp, Homo sapiens
aacattggctgaacc

SEQ ID NO: 48375 - DNA, 15 bp, Homo sapiens
aaacattggctgaac

SEQ ID NO: 48376 - DNA, 15 bp, Homo sapiens
gaaacattggctgaa

SEQ ID NO: 48377 - DNA, 15 bp, Homo sapiens
agaaacattggctga

SEQ ID NO: 48378 - DNA, 15 bp, Homo sapiens
cagaaacattggctg

SEQ ID NO: 48379 - DNA, 15 bp, Homo sapiens
acagaaacattggct

SEQ ID NO: 48380 - DNA, 15 bp, Homo sapiens
aacagaaacattggc

SEQ ID NO: 48381 - DNA, 15 bp, Homo sapiens
caacagaaacattgg

SEQ ID NO: 48382 - DNA, 15 bp, Homo sapiens
ccaacagaaacattg

SEQ ID NO: 48383 - DNA, 15 bp, Homo sapiens
tccaacagaaacatt

SEQ ID NO: 48384 - DNA, 15 bp, Homo sapiens
ctccaacagaaacat

SEQ ID NO: 48385 - DNA, 15 bp, Homo sapiens
tctccaacagaaaca

SEQ ID NO: 48386 - DNA, 15 bp, Homo sapiens
gtctccaacagaaac

SEQ ID NO: 48387 - DNA, 15 bp, Homo sapiens
ggtctccaacagaaa

SEQ ID NO: 48388 - DNA, 15 bp, Homo sapiens
tggtctccaacagaa

SEQ ID NO: 48389 - DNA, 15 bp, Homo sapiens
ttggtctccaacaga

SEQ ID NO: 48390 - DNA, 15 bp, Homo sapiens
tttggtctccaacag

SEQ ID NO: 48391 - DNA, 15 bp, Homo sapiens
ttttggtctccaaca

SEQ ID NO: 48392 - DNA, 15 bp, Homo sapiens
gttttggtctccaac

SEQ ID NO: 48393 - DNA, 15 bp, Homo sapiens
ggttttggtctccaa

SEQ ID NO: 48394 - DNA, 15 bp, Homo sapiens
tggttttggtctcca

SEQ ID NO: 48395 - DNA, 15 bp, Homo sapiens
ttggttttggtctcc

SEQ ID NO: 48396 - DNA, 15 bp, Homo sapiens
tttggttttggtctc

SEQ ID NO: 48397 - DNA, 15 bp, Homo sapiens
ttttggttttggtct

SEQ ID NO: 48398 - DNA, 15 bp, Homo sapiens
tttttggttttggtc

SEQ ID NO: 48399 - DNA, 15 bp, Homo sapiens
gtttttggttttggt

SEQ ID NO: 48400 - DNA, 15 bp, Homo sapiens
tgtttttggttttgg

SEQ ID NO: 48401 - DNA, 15 bp, Homo sapiens
ctgtttttggttttg

SEQ ID NO: 48402 - DNA, 15 bp, Homo sapiens
actgtttttggtttt

SEQ ID NO: 48403 - DNA, 15 bp, Homo sapiens
gactgtttttggttt

SEQ ID NO: 48404 - DNA, 15 bp, Homo sapiens
tgactgtttttggtt

SEQ ID NO: 48405 - DNA, 15 bp, Homo sapiens
accactccccaatca

SEQ ID NO: 48406 - DNA, 15 bp, Homo sapiens
caccactccccaatc

SEQ ID NO: 48407 - DNA, 15 bp, Homo sapiens
ccaccactccccaat

SEQ ID NO: 48408 - DNA, 15 bp, Homo sapiens
cccaccactccccaa

SEQ ID NO: 48409 - DNA, 15 bp, Homo sapiens
acccaccactcccca

SEQ ID NO: 48410 - DNA, 15 bp, Homo sapiens
aacccaccactcccc

SEQ ID NO: 48411 - DNA, 15 bp, Homo sapiens
caacccaccactccc

SEQ ID NO: 48412 - DNA, 15 bp, Homo sapiens
ccaacccaccactcc

SEQ ID NO: 48413 - DNA, 15 bp, Homo sapiens
accaacccaccactc

SEQ ID NO: 48414 - DNA, 15 bp, Homo sapiens
caccaacccaccact

SEQ ID NO: 48415 - DNA, 15 bp, Homo sapiens
ccaccaacccaccac

SEQ ID NO: 48416 - DNA, 15 bp, Homo sapiens
accaccaacccacca

SEQ ID NO: 48417 - DNA, 15 bp, Homo sapiens
caccaccaacccacc

SEQ ID NO: 48418 - DNA, 15 bp, Homo sapiens
tcaccaccaacccac

SEQ ID NO: 48419 - DNA, 15 bp, Homo sapiens
ctcaccaccaaccca

SEQ ID NO: 48420 - DNA, 15 bp, Homo sapiens
cctcaccaccaaccc

SEQ ID NO: 48421 - DNA, 15 bp, Homo sapiens
gcctcaccaccaacc

SEQ ID NO: 48422 - DNA, 15 bp, Homo sapiens
agcctcaccaccaac

SEQ ID NO: 48423 - DNA, 15 bp, Homo sapiens
cagcctcaccaccaa

SEQ ID NO: 48424 - DNA, 15 bp, Homo sapiens
gcagcctcaccacca

SEQ ID NO: 48425 - DNA, 15 bp, Homo sapiens
ggcagcctcaccacc

SEQ ID NO: 48426 - DNA, 15 bp, Homo sapiens
aggcagcctcaccac

SEQ ID NO: 48427 - DNA, 15 bp, Homo sapiens
caggcagcctcacca

SEQ ID NO: 48428 - DNA, 15 bp, Homo sapiens
acaggcagcctcacc

SEQ ID NO: 48429 - DNA, 15 bp, Homo sapiens
cacaggcagcctcac

SEQ ID NO: 48430 - DNA, 15 bp, Homo sapiens
ccacaggcagcctca

SEQ ID NO: 48431 - DNA, 15 bp, Homo sapiens
tccacaggcagcctc

SEQ ID NO: 48432 - DNA, 15 bp, Homo sapiens
ttccacaggcagcct

SEQ ID NO: 48433 - DNA, 15 bp, Homo sapiens
tttccacaggcagcc

SEQ ID NO: 48434 - DNA, 15 bp, Homo sapiens
ctttccacaggcagc

SEQ ID NO: 48435 - DNA, 15 bp, Homo sapiens
tctttccacaggcag

SEQ ID NO: 48436 - DNA, 15 bp, Homo sapiens
ctctttccacaggca

SEQ ID NO: 48437 - DNA, 15 bp, Homo sapiens
tctctttccacaggc

SEQ ID NO: 48438 - DNA, 15 bp, Homo sapiens
ttctctttccacagg

SEQ ID NO: 48439 - DNA, 15 bp, Homo sapiens
cttctctttccacag

SEQ ID NO: 48440 - DNA, 15 bp, Homo sapiens
acttctctttccaca

SEQ ID NO: 48441 - DNA, 15 bp, Homo sapiens
cacttctctttccac

SEQ ID NO: 48442 - DNA, 15 bp, Homo sapiens
tcacttctctttcca

SEQ ID NO: 48443 - DNA, 15 bp, Homo sapiens
ctcacttctctttcc

SEQ ID NO: 48444 - DNA, 15 bp, Homo sapiens
actcacttctctttc

SEQ ID NO: 48445 - DNA, 15 bp, Homo sapiens
cactcacttctcttt

SEQ ID NO: 48446 - DNA, 15 bp, Homo sapiens
acactcacttctctt

SEQ ID NO: 48447 - DNA, 15 bp, Homo sapiens
aacactcacttctct

SEQ ID NO: 48448 - DNA, 15 bp, Homo sapiens
aaacactcacttctc

SEQ ID NO: 48449 - DNA, 15 bp, Homo sapiens
aaaacactcacttct

SEQ ID NO: 48450 - DNA, 15 bp, Homo sapiens
caaaacactcacttc

SEQ ID NO: 48451 - DNA, 15 bp, Homo sapiens
tcaaaacactcactt

SEQ ID NO: 48452 - DNA, 15 bp, Homo sapiens
gtcaaaacactcact

SEQ ID NO: 48453 - DNA, 15 bp, Homo sapiens
agtcaaaacactcac

SEQ ID NO: 48454 - DNA, 15 bp, Homo sapiens
gagtcaaaacactca

SEQ ID NO: 48455 - DNA, 15 bp, Homo sapiens
tgagtcaaaacactc

SEQ ID NO: 48456 - DNA, 15 bp, Homo sapiens
gtgagtcaaaacact

SEQ ID NO: 48457 - DNA, 15 bp, Homo sapiens
agtgagtcaaaacac

SEQ ID NO: 48458 - DNA, 15 bp, Homo sapiens
cagtgagtcaaaaca

SEQ ID NO: 48459 - DNA, 15 bp, Homo sapiens
acagtgagtcaaaac

SEQ ID NO: 48460 - DNA, 15 bp, Homo sapiens
aacagtgagtcaaaa

SEQ ID NO: 48461 - DNA, 15 bp, Homo sapiens
taacagtgagtcaaa

SEQ ID NO: 48462 - DNA, 15 bp, Homo sapiens
ataacagtgagtcaa

SEQ ID NO: 48463 - DNA, 15 bp, Homo sapiens
aataacagtgagtca

SEQ ID NO: 48464 - DNA, 15 bp, Homo sapiens
aaataacagtgagtc

SEQ ID NO: 48465 - DNA, 15 bp, Homo sapiens
taaataacagtgagt

SEQ ID NO: 48466 - DNA, 15 bp, Homo sapiens
ttaaataacagtgag

SEQ ID NO: 48467 - DNA, 15 bp, Homo sapiens
tttaaataacagtga

SEQ ID NO: 48468 - DNA, 15 bp, Homo sapiens
ttttaaataacagtg

SEQ ID NO: 48469 - DNA, 15 bp, Homo sapiens
tttttaaataacagt

SEQ ID NO: 48470 - DNA, 15 bp, Homo sapiens
atttttaaataacag

SEQ ID NO: 48471 - DNA, 15 bp, Homo sapiens
gatttttaaataaca

SEQ ID NO: 48472 - DNA, 15 bp, Homo sapiens
agatttttaaataac

SEQ ID NO: 48473 - DNA, 15 bp, Homo sapiens
gagatttttaaataa

SEQ ID NO: 48474 - DNA, 15 bp, Homo sapiens
agagatttttaaata

SEQ ID NO: 48475 - DNA, 15 bp, Homo sapiens
tagagatttttaaat

SEQ ID NO: 48476 - DNA, 15 bp, Homo sapiens
ctagagatttttaaa

SEQ ID NO: 48477 - DNA, 15 bp, Homo sapiens
cctagagatttttaa

SEQ ID NO: 48478 - DNA, 15 bp, Homo sapiens
ccctagagattttta

SEQ ID NO: 48479 - DNA, 15 bp, Homo sapiens
gccctagagattttt

SEQ ID NO: 48480 - DNA, 15 bp, Homo sapiens
agccctagagatttt

SEQ ID NO: 48481 - DNA, 15 bp, Homo sapiens
cagccctagagattt

SEQ ID NO: 48482 - DNA, 15 bp, Homo sapiens
acagccctagagatt

SEQ ID NO: 48483 - DNA, 15 bp, Homo sapiens
aacagccctagagat

SEQ ID NO: 48484 - DNA, 15 bp, Homo sapiens
gaacagccctagaga

SEQ ID NO: 48485 - DNA, 15 bp, Homo sapiens
ggaacagccctagag

SEQ ID NO: 48486 - DNA, 15 bp, Homo sapiens
tggaacagccctaga

SEQ ID NO: 48487 - DNA, 15 bp, Homo sapiens
ttggaacagccctag

SEQ ID NO: 48488 - DNA, 15 bp, Homo sapiens
attggaacagcccta

SEQ ID NO: 48489 - DNA, 15 bp, Homo sapiens
tattggaacagccct

SEQ ID NO: 48490 - DNA, 15 bp, Homo sapiens
ttattggaacagccc

SEQ ID NO: 48491 - DNA, 15 bp, Homo sapiens
cttattggaacagcc

SEQ ID NO: 48492 - DNA, 15 bp, Homo sapiens
gcttattggaacagc

SEQ ID NO: 48493 - DNA, 15 bp, Homo sapiens
tgcttattggaacag

SEQ ID NO: 48494 - DNA, 15 bp, Homo sapiens
ttgcttattggaaca

SEQ ID NO: 48495 - DNA, 15 bp, Homo sapiens
gttgcttattggaac

SEQ ID NO: 48496 - DNA, 15 bp, Homo sapiens
tgttgcttattggaa

SEQ ID NO: 48497 - DNA, 15 bp, Homo sapiens
ttgttgcttattgga

SEQ ID NO: 48498 - DNA, 15 bp, Homo sapiens
tttgttgcttattgg

SEQ ID NO: 48499 - DNA, 15 bp, Homo sapiens
ttttgttgcttattg

SEQ ID NO: 48500 - DNA, 15 bp, Homo sapiens
cttttgttgcttatt

SEQ ID NO: 48501 - DNA, 15 bp, Homo sapiens
ccttttgttgcttat

SEQ ID NO: 48502 - DNA, 15 bp, Homo sapiens
gccttttgttgctta

SEQ ID NO: 48503 - DNA, 15 bp, Homo sapiens
tgccttttgttgctt

SEQ ID NO: 48504 - DNA, 15 bp, Homo sapiens
ttgccttttgttgct

SEQ ID NO: 48505 - DNA, 15 bp, Homo sapiens
tttgccttttgttgc

SEQ ID NO: 48506 - DNA, 15 bp, Homo sapiens
ttttgccttttgttg

SEQ ID NO: 48507 - DNA, 15 bp, Homo sapiens
attttgccttttgtt

SEQ ID NO: 48508 - DNA, 15 bp, Homo sapiens
cattttgccttttgt

SEQ ID NO: 48509 - DNA, 15 bp, Homo sapiens
ccattttgccttttg

SEQ ID NO: 48510 - DNA, 15 bp, Homo sapiens
gccattttgcctttt

SEQ ID NO: 48511 - DNA, 15 bp, Homo sapiens
ggccattttgccttt

SEQ ID NO: 48512 - DNA, 15 bp, Homo sapiens
aggccattttgcctt

SEQ ID NO: 48513 - DNA, 15 bp, Homo sapiens
caggccattttgcct

SEQ ID NO: 48514 - DNA, 15 bp, Homo sapiens
ccaggccattttgcc

SEQ ID NO: 48515 - DNA, 15 bp, Homo sapiens
accaggccattttgc

SEQ ID NO: 48516 - DNA, 15 bp, Homo sapiens
aaccaggccattttg

SEQ ID NO: 48517 - DNA, 15 bp, Homo sapiens
gaaccaggccatttt

SEQ ID NO: 48518 - DNA, 15 bp, Homo sapiens
agaaccaggccattt

SEQ ID NO: 48519 - DNA, 15 bp, Homo sapiens
gagaaccaggccatt

SEQ ID NO: 48520 - DNA, 15 bp, Homo sapiens
agagaaccaggccat

SEQ ID NO: 48521 - DNA, 15 bp, Homo sapiens
cagagaaccaggcca

SEQ ID NO: 48522 - DNA, 15 bp, Homo sapiens
acagagaaccaggcc

SEQ ID NO: 48523 - DNA, 15 bp, Homo sapiens
gacagagaaccaggc

SEQ ID NO: 48524 - DNA, 15 bp, Homo sapiens
ggacagagaaccagg

SEQ ID NO: 48525 - DNA, 15 bp, Homo sapiens
gggacagagaaccag

SEQ ID NO: 48526 - DNA, 15 bp, Homo sapiens
ggggacagagaacca

SEQ ID NO: 48527 - DNA, 15 bp, Homo sapiens
aggggacagagaacc

SEQ ID NO: 48528 - DNA, 15 bp, Homo sapiens
aaggggacagagaac

SEQ ID NO: 48529 - DNA, 15 bp, Homo sapiens
aaaggggacagagaa

SEQ ID NO: 48530 - DNA, 15 bp, Homo sapiens
gaaaggggacagaga

SEQ ID NO: 48531 - DNA, 15 bp, Homo sapiens
agaaaggggacagag

SEQ ID NO: 48532 - DNA, 15 bp, Homo sapiens
cagaaaggggacaga

SEQ ID NO: 48533 - DNA, 15 bp, Homo sapiens
acagaaaggggacag

SEQ ID NO: 48534 - DNA, 15 bp, Homo sapiens
gacagaaaggggaca

SEQ ID NO: 48535 - DNA, 15 bp, Homo sapiens
agacagaaaggggac

SEQ ID NO: 48536 - DNA, 15 bp, Homo sapiens
cagacagaaagggga

SEQ ID NO: 48537 - DNA, 15 bp, Homo sapiens
acagacagaaagggg

SEQ ID NO: 48538 - DNA, 15 bp, Homo sapiens
tacagacagaaaggg

SEQ ID NO: 48539 - DNA, 15 bp, Homo sapiens
atacagacagaaagg

SEQ ID NO: 48540 - DNA, 15 bp, Homo sapiens
catacagacagaaag

SEQ ID NO: 48541 - DNA, 15 bp, Homo sapiens
gcatacagacagaaa

SEQ ID NO: 48542 - DNA, 15 bp, Homo sapiens
ggcatacagacagaa

SEQ ID NO: 48543 - DNA, 15 bp, Homo sapiens
aggcatacagacaga

SEQ ID NO: 48544 - DNA, 15 bp, Homo sapiens
gaggcatacagacag

SEQ ID NO: 48545 - DNA, 15 bp, Homo sapiens
cgaggcatacagaca

SEQ ID NO: 48546 - DNA, 15 bp, Homo sapiens
acgaggcatacagac

SEQ ID NO: 48547 - DNA, 15 bp, Homo sapiens
tacgaggcatacaga

SEQ ID NO: 48548 - DNA, 15 bp, Homo sapiens
gtacgaggcatacag

SEQ ID NO: 48549 - DNA, 15 bp, Homo sapiens
tgtacgaggcataca

SEQ ID NO: 48550 - DNA, 15 bp, Homo sapiens
ctgtacgaggcatac

SEQ ID NO: 48551 - DNA, 15 bp, Homo sapiens
cctgtacgaggcata

SEQ ID NO: 48552 - DNA, 15 bp, Homo sapiens
acctgtacgaggcat

SEQ ID NO: 48553 - DNA, 15 bp, Homo sapiens
aacctgtacgaggca

SEQ ID NO: 48554 - DNA, 15 bp, Homo sapiens
taacctgtacgaggc

SEQ ID NO: 48555 - DNA, 15 bp, Homo sapiens
ataacctgtacgagg

SEQ ID NO: 48556 - DNA, 15 bp, Homo sapiens
cataacctgtacgag

SEQ ID NO: 48557 - DNA, 15 bp, Homo sapiens
tcataacctgtacga

SEQ ID NO: 48558 - DNA, 15 bp, Homo sapiens
ttcataacctgtacg

SEQ ID NO: 48559 - DNA, 15 bp, Homo sapiens
tttcataacctgtac

SEQ ID NO: 48560 - DNA, 15 bp, Homo sapiens
ttttcataacctgta

SEQ ID NO: 48561 - DNA, 15 bp, Homo sapiens
cttttcataacctgt

SEQ ID NO: 48562 - DNA, 15 bp, Homo sapiens
tcttttcataacctg

SEQ ID NO: 48563 - DNA, 15 bp, Homo sapiens
ttcttttcataacct

SEQ ID NO: 48564 - DNA, 15 bp, Homo sapiens
tttcttttcataacc

SEQ ID NO: 48565 - DNA, 15 bp, Homo sapiens
ttttcttttcataac

SEQ ID NO: 48566 - DNA, 15 bp, Homo sapiens
tttttcttttcataa

SEQ ID NO: 48567 - DNA, 15 bp, Homo sapiens
ctttttcttttcata

SEQ ID NO: 48568 - DNA, 15 bp, Homo sapiens
actttttcttttcat

SEQ ID NO: 48569 - DNA, 15 bp, Homo sapiens
aactttttcttttca

SEQ ID NO: 48570 - DNA, 15 bp, Homo sapiens
caactttttcttttc

SEQ ID NO: 48571 - DNA, 15 bp, Homo sapiens
ccaactttttctttt

SEQ ID NO: 48572 - DNA, 15 bp, Homo sapiens
cccaactttttcttt

SEQ ID NO: 48573 - DNA, 15 bp, Homo sapiens
tcccaactttttctt

SEQ ID NO: 48574 - DNA, 15 bp, Homo sapiens
ttcccaactttttct

SEQ ID NO: 48575 - DNA, 15 bp, Homo sapiens
tttcccaactttttc

SEQ ID NO: 48576 - DNA, 15 bp, Homo sapiens
ttttcccaacttttt

SEQ ID NO: 48577 - DNA, 15 bp, Homo sapiens
cttttcccaactttt

SEQ ID NO: 48578 - DNA, 15 bp, Homo sapiens
gcttttcccaacttt

SEQ ID NO: 48579 - DNA, 15 bp, Homo sapiens
agcttttcccaactt

SEQ ID NO: 48580 - DNA, 15 bp, Homo sapiens
cagcttttcccaact

SEQ ID NO: 48581 - DNA, 15 bp, Homo sapiens
acagcttttcccaac

SEQ ID NO: 48582 - DNA, 15 bp, Homo sapiens
gacagcttttcccaa

SEQ ID NO: 48583 - DNA, 15 bp, Homo sapiens
ggacagcttttccca

SEQ ID NO: 48584 - DNA, 15 bp, Homo sapiens
tggacagcttttccc

SEQ ID NO: 48585 - DNA, 15 bp, Homo sapiens
gtggacagcttttcc

SEQ ID NO: 48586 - DNA, 15 bp, Homo sapiens
ggtggacagcttttc

SEQ ID NO: 48587 - DNA, 15 bp, Homo sapiens
aggtggacagctttt

SEQ ID NO: 48588 - DNA, 15 bp, Homo sapiens
gaggtggacagcttt

SEQ ID NO: 48589 - DNA, 15 bp, Homo sapiens
tgaggtggacagctt

SEQ ID NO: 48590 - DNA, 15 bp, Homo sapiens
gtgaggtggacagct

SEQ ID NO: 48591 - DNA, 15 bp, Homo sapiens
ggtgaggtggacagc

SEQ ID NO: 48592 - DNA, 15 bp, Homo sapiens
aggtgaggtggacag

SEQ ID NO: 48593 - DNA, 15 bp, Homo sapiens
taggtgaggtggaca

SEQ ID NO: 48594 - DNA, 15 bp, Homo sapiens
ttaggtgaggtggac

SEQ ID NO: 48595 - DNA, 15 bp, Homo sapiens
attaggtgaggtgga

SEQ ID NO: 48596 - DNA, 15 bp, Homo sapiens
aattaggtgaggtgg

SEQ ID NO: 48597 - DNA, 15 bp, Homo sapiens
caattaggtgaggtg

SEQ ID NO: 48598 - DNA, 15 bp, Homo sapiens
acaattaggtgaggt

SEQ ID NO: 48599 - DNA, 15 bp, Homo sapiens
cacaattaggtgagg

SEQ ID NO: 48600 - DNA, 15 bp, Homo sapiens
acacaattaggtgag

SEQ ID NO: 48601 - DNA, 15 bp, Homo sapiens
aacacaattaggtga

SEQ ID NO: 48602 - DNA, 15 bp, Homo sapiens
gaacacaattaggtg

SEQ ID NO: 48603 - DNA, 15 bp, Homo sapiens
agaacacaattaggt

SEQ ID NO: 48604 - DNA, 15 bp, Homo sapiens
aagaacacaattagg

SEQ ID NO: 48605 - DNA, 15 bp, Homo sapiens
caagaacacaattag

SEQ ID NO: 48606 - DNA, 15 bp, Homo sapiens
acaagaacacaatta

SEQ ID NO: 48607 - DNA, 15 bp, Homo sapiens
cacaagaacacaatt

SEQ ID NO: 48608 - DNA, 15 bp, Homo sapiens
ccacaagaacacaat

SEQ ID NO: 48609 - DNA, 15 bp, Homo sapiens
tccacaagaacacaa

SEQ ID NO: 48610 - DNA, 15 bp, Homo sapiens
ctccacaagaacaca

SEQ ID NO: 48611 - DNA, 15 bp, Homo sapiens
actccacaagaacac

SEQ ID NO: 48612 - DNA, 15 bp, Homo sapiens
cactccacaagaaca

SEQ ID NO: 48613 - DNA, 15 bp, Homo sapiens
acactccacaagaac

SEQ ID NO: 48614 - DNA, 15 bp, Homo sapiens
cacactccacaagaa

SEQ ID NO: 48615 - DNA, 15 bp, Homo sapiens
gcacactccacaaga

SEQ ID NO: 48616 - DNA, 15 bp, Homo sapiens
agcacactccacaag

SEQ ID NO: 48617 - DNA, 15 bp, Homo sapiens
tagcacactccacaa

SEQ ID NO: 48618 - DNA, 15 bp, Homo sapiens
ctagcacactccaca

SEQ ID NO: 48619 - DNA, 15 bp, Homo sapiens
tctagcacactccac

SEQ ID NO: 48620 - DNA, 15 bp, Homo sapiens
atctagcacactcca

SEQ ID NO: 48621 - DNA, 15 bp, Homo sapiens
catctagcacactcc

SEQ ID NO: 48622 - DNA, 15 bp, Homo sapiens
gcatctagcacactc

SEQ ID NO: 48623 - DNA, 15 bp, Homo sapiens
ggcatctagcacact

SEQ ID NO: 48624 - DNA, 15 bp, Homo sapiens
gggcatctagcacac

SEQ ID NO: 48625 - DNA, 15 bp, Homo sapiens
ggggcatctagcaca

SEQ ID NO: 48626 - DNA, 15 bp, Homo sapiens
gggggcatctagcac

SEQ ID NO: 48627 - DNA, 15 bp, Homo sapiens
agggggcatctagca

SEQ ID NO: 48628 - DNA, 15 bp, Homo sapiens
gagggggcatctagc

SEQ ID NO: 48629 - DNA, 15 bp, Homo sapiens
agagggggcatctag

SEQ ID NO: 48630 - DNA, 15 bp, Homo sapiens
gagagggggcatcta

SEQ ID NO: 48631 - DNA, 15 bp, Homo sapiens
agagagggggcatct

SEQ ID NO: 48632 - DNA, 15 bp, Homo sapiens
cagagagggggcatc

SEQ ID NO: 48633 - DNA, 15 bp, Homo sapiens
ccagagagggggcat

SEQ ID NO: 48634 - DNA, 15 bp, Homo sapiens
tccagagagggggca

SEQ ID NO: 48635 - DNA, 15 bp, Homo sapiens
ctccagagagggggc

SEQ ID NO: 48636 - DNA, 15 bp, Homo sapiens
tctccagagaggggg

SEQ ID NO: 48637 - DNA, 15 bp, Homo sapiens
ttctccagagagggg

SEQ ID NO: 48638 - DNA, 15 bp, Homo sapiens
tttctccagagaggg

SEQ ID NO: 48639 - DNA, 15 bp, Homo sapiens
ttttctccagagagg

SEQ ID NO: 48640 - DNA, 15 bp, Homo sapiens
tttttctccagagag

SEQ ID NO: 48641 - DNA, 15 bp, Homo sapiens
ttttttctccagaga

SEQ ID NO: 48642 - DNA, 15 bp, Homo sapiens
tttttttctccagag

SEQ ID NO: 48643 - DNA, 15 bp, Homo sapiens
ttttttttctccaga

SEQ ID NO: 48644 - DNA, 15 bp, Homo sapiens
attttttttctccag

SEQ ID NO: 48645 - DNA, 15 bp, Homo sapiens
gattttttttctcca

SEQ ID NO: 48646 - DNA, 15 bp, Homo sapiens
ggattttttttctcc

SEQ ID NO: 48647 - DNA, 15 bp, Homo sapiens
aggattttttttctc

SEQ ID NO: 48648 - DNA, 15 bp, Homo sapiens
aaggattttttttct

SEQ ID NO: 48649 - DNA, 15 bp, Homo sapiens
caaggattttttttc

SEQ ID NO: 48650 - DNA, 15 bp, Homo sapiens
acaaggatttttttt

SEQ ID NO: 48651 - DNA, 15 bp, Homo sapiens
cacaaggattttttt

SEQ ID NO: 48652 - DNA, 15 bp, Homo sapiens
ccacaaggatttttt

SEQ ID NO: 48653 - DNA, 15 bp, Homo sapiens
gccacaaggattttt

SEQ ID NO: 48654 - DNA, 15 bp, Homo sapiens
ggccacaaggatttt

SEQ ID NO: 48655 - DNA, 15 bp, Homo sapiens
aggccacaaggattt

SEQ ID NO: 48656 - DNA, 15 bp, Homo sapiens
gaggccacaaggatt

SEQ ID NO: 48657 - DNA, 15 bp, Homo sapiens
agaggccacaaggat

SEQ ID NO: 48658 - DNA, 15 bp, Homo sapiens
cagaggccacaagga

SEQ ID NO: 48659 - DNA, 15 bp, Homo sapiens
tcagaggccacaagg

SEQ ID NO: 48660 - DNA, 15 bp, Homo sapiens
gtcagaggccacaag

SEQ ID NO: 48661 - DNA, 15 bp, Homo sapiens
ggtcagaggccacaa

SEQ ID NO: 48662 - DNA, 15 bp, Homo sapiens
gggtcagaggccaca

SEQ ID NO: 48663 - DNA, 15 bp, Homo sapiens
tgggtcagaggccac

SEQ ID NO: 48664 - DNA, 15 bp, Homo sapiens
gtgggtcagaggcca

SEQ ID NO: 48665 - DNA, 15 bp, Homo sapiens
ggtgggtcagaggcc

SEQ ID NO: 48666 - DNA, 15 bp, Homo sapiens
aggtgggtcagaggc

SEQ ID NO: 48667 - DNA, 15 bp, Homo sapiens
gaggtgggtcagagg

SEQ ID NO: 48668 - DNA, 15 bp, Homo sapiens
agaggtgggtcagag

SEQ ID NO: 48669 - DNA, 15 bp, Homo sapiens
cagaggtgggtcaga

SEQ ID NO: 48670 - DNA, 15 bp, Homo sapiens
ccagaggtgggtcag

SEQ ID NO: 48671 - DNA, 15 bp, Homo sapiens
tccagaggtgggtca

SEQ ID NO: 48672 - DNA, 15 bp, Homo sapiens
ctccagaggtgggtc

SEQ ID NO: 48673 - DNA, 15 bp, Homo sapiens
tctccagaggtgggt

SEQ ID NO: 48674 - DNA, 15 bp, Homo sapiens
ctctccagaggtggg

SEQ ID NO: 48675 - DNA, 15 bp, Homo sapiens
gctctccagaggtgg

SEQ ID NO: 48676 - DNA, 15 bp, Homo sapiens
ggctctccagaggtg

SEQ ID NO: 48677 - DNA, 15 bp, Homo sapiens
aggctctccagaggt

SEQ ID NO: 48678 - DNA, 15 bp, Homo sapiens
taggctctccagagg

SEQ ID NO: 48679 - DNA, 15 bp, Homo sapiens
ctaggctctccagag

SEQ ID NO: 48680 - DNA, 15 bp, Homo sapiens
actaggctctccaga

SEQ ID NO: 48681 - DNA, 15 bp, Homo sapiens
aactaggctctccag

SEQ ID NO: 48682 - DNA, 15 bp, Homo sapiens
gaactaggctctcca

SEQ ID NO: 48683 - DNA, 15 bp, Homo sapiens
ggaactaggctctcc

SEQ ID NO: 48684 - DNA, 15 bp, Homo sapiens
gggaactaggctctc

SEQ ID NO: 48685 - DNA, 15 bp, Homo sapiens
agggaactaggctct

SEQ ID NO: 48686 - DNA, 15 bp, Homo sapiens
aagggaactaggctc

SEQ ID NO: 48687 - DNA, 15 bp, Homo sapiens
gaagggaactaggct

SEQ ID NO: 48688 - DNA, 15 bp, Homo sapiens
agaagggaactaggc

SEQ ID NO: 48689 - DNA, 15 bp, Homo sapiens
cagaagggaactagg

SEQ ID NO: 48690 - DNA, 15 bp, Homo sapiens
ccagaagggaactag

SEQ ID NO: 48691 - DNA, 15 bp, Homo sapiens
tccagaagggaacta

SEQ ID NO: 48692 - DNA, 15 bp, Homo sapiens
ctccagaagggaact

SEQ ID NO: 48693 - DNA, 15 bp, Homo sapiens
cctccagaagggaac

SEQ ID NO: 48694 - DNA, 15 bp, Homo sapiens
gcctccagaagggaa

SEQ ID NO: 48695 - DNA, 15 bp, Homo sapiens
tgcctccagaaggga

SEQ ID NO: 48696 - DNA, 15 bp, Homo sapiens
ctgcctccagaaggg

SEQ ID NO: 48697 - DNA, 15 bp, Homo sapiens
tctgcctccagaagg

SEQ ID NO: 48698 - DNA, 15 bp, Homo sapiens
ttctgcctccagaag

SEQ ID NO: 48699 - DNA, 15 bp, Homo sapiens
cttctgcctccagaa

SEQ ID NO: 48700 - DNA, 15 bp, Homo sapiens
ccttctgcctccaga

SEQ ID NO: 48701 - DNA, 15 bp, Homo sapiens
gccttctgcctccag

SEQ ID NO: 48702 - DNA, 15 bp, Homo sapiens
tgccttctgcctcca

SEQ ID NO: 48703 - DNA, 15 bp, Homo sapiens
ttgccttctgcctcc

SEQ ID NO: 48704 - DNA, 15 bp, Homo sapiens
tttgccttctgcctc

SEQ ID NO: 48705 - DNA, 15 bp, Homo sapiens
ctttgccttctgcct

SEQ ID NO: 48706 - DNA, 15 bp, Homo sapiens
gctttgccttctgcc

SEQ ID NO: 48707 - DNA, 15 bp, Homo sapiens
agctttgccttctgc

SEQ ID NO: 48708 - DNA, 15 bp, Homo sapiens
aagctttgccttctg

SEQ ID NO: 48709 - DNA, 15 bp, Homo sapiens
taagctttgccttct

SEQ ID NO: 48710 - DNA, 15 bp, Homo sapiens
ctaagctttgccttc

SEQ ID NO: 48711 - DNA, 15 bp, Homo sapiens
cctaagctttgcctt

SEQ ID NO: 48712 - DNA, 15 bp, Homo sapiens
tcctaagctttgcct

SEQ ID NO: 48713 - DNA, 15 bp, Homo sapiens
gtcctaagctttgcc

SEQ ID NO: 48714 - DNA, 15 bp, Homo sapiens
ggtcctaagctttgc

SEQ ID NO: 48715 - DNA, 15 bp, Homo sapiens
aggtcctaagctttg

SEQ ID NO: 48716 - DNA, 15 bp, Homo sapiens
taggtcctaagcttt

SEQ ID NO: 48717 - DNA, 15 bp, Homo sapiens
ctaggtcctaagctt

SEQ ID NO: 48718 - DNA, 15 bp, Homo sapiens
tctaggtcctaagct

SEQ ID NO: 48719 - DNA, 15 bp, Homo sapiens
ctctaggtcctaagc

SEQ ID NO: 48720 - DNA, 15 bp, Homo sapiens
tctctaggtcctaag

SEQ ID NO: 48721 - DNA, 15 bp, Homo sapiens
ctctctaggtcctaa

SEQ ID NO: 48722 - DNA, 15 bp, Homo sapiens
actctctaggtccta

SEQ ID NO: 48723 - DNA, 15 bp, Homo sapiens
cactctctaggtcct

SEQ ID NO: 48724 - DNA, 15 bp, Homo sapiens
gcactctctaggtcc

SEQ ID NO: 48725 - DNA, 15 bp, Homo sapiens
agcactctctaggtc

SEQ ID NO: 48726 - DNA, 15 bp, Homo sapiens
cagcactctctaggt

SEQ ID NO: 48727 - DNA, 15 bp, Homo sapiens
ccagcactctctagg

SEQ ID NO: 48728 - DNA, 15 bp, Homo sapiens
tccagcactctctag

SEQ ID NO: 48729 - DNA, 15 bp, Homo sapiens
gtccagcactctcta

SEQ ID NO: 48730 - DNA, 15 bp, Homo sapiens
ggtccagcactctct

SEQ ID NO: 48731 - DNA, 15 bp, Homo sapiens
tggtccagcactctc

SEQ ID NO: 48732 - DNA, 15 bp, Homo sapiens
gtggtccagcactct

SEQ ID NO: 48733 - DNA, 15 bp, Homo sapiens
cgtggtccagcactc

SEQ ID NO: 48734 - DNA, 15 bp, Homo sapiens
gcgtggtccagcact

SEQ ID NO: 48735 - DNA, 15 bp, Homo sapiens
ggcgtggtccagcac

SEQ ID NO: 48736 - DNA, 15 bp, Homo sapiens
tggcgtggtccagca

SEQ ID NO: 48737 - DNA, 15 bp, Homo sapiens
gtggcgtggtccagc

SEQ ID NO: 48738 - DNA, 15 bp, Homo sapiens
agtggcgtggtccag

SEQ ID NO: 48739 - DNA, 15 bp, Homo sapiens
gagtggcgtggtcca

SEQ ID NO: 48740 - DNA, 15 bp, Homo sapiens
tgagtggcgtggtcc

SEQ ID NO: 48741 - DNA, 15 bp, Homo sapiens
gtgagtggcgtggtc

SEQ ID NO: 48742 - DNA, 15 bp, Homo sapiens
tgtgagtggcgtggt

SEQ ID NO: 48743 - DNA, 15 bp, Homo sapiens
ctgtgagtggcgtgg

SEQ ID NO: 48744 - DNA, 15 bp, Homo sapiens
cctgtgagtggcgtg

SEQ ID NO: 48745 - DNA, 15 bp, Homo sapiens
tcctgtgagtggcgt

SEQ ID NO: 48746 - DNA, 15 bp, Homo sapiens
ttcctgtgagtggcg

SEQ ID NO: 48747 - DNA, 15 bp, Homo sapiens
gttcctgtgagtggc

SEQ ID NO: 48748 - DNA, 15 bp, Homo sapiens
ggttcctgtgagtgg

SEQ ID NO: 48749 - DNA, 15 bp, Homo sapiens
tggttcctgtgagtg

SEQ ID NO: 48750 - DNA, 15 bp, Homo sapiens
ctggttcctgtgagt

SEQ ID NO: 48751 - DNA, 15 bp, Homo sapiens
gctggttcctgtgag

SEQ ID NO: 48752 - DNA, 15 bp, Homo sapiens
tgctggttcctgtga

SEQ ID NO: 48753 - DNA, 15 bp, Homo sapiens
ctgctggttcctgtg

SEQ ID NO: 48754 - DNA, 15 bp, Homo sapiens
cctgctggttcctgt

SEQ ID NO: 48755 - DNA, 15 bp, Homo sapiens
gcctgctggttcctg

SEQ ID NO: 48756 - DNA, 15 bp, Homo sapiens
agcctgctggttcct

SEQ ID NO: 48757 - DNA, 15 bp, Homo sapiens
cagcctgctggttcc

SEQ ID NO: 48758 - DNA, 15 bp, Homo sapiens
acagcctgctggttc

SEQ ID NO: 48759 - DNA, 15 bp, Homo sapiens
cacagcctgctggtt

SEQ ID NO: 48760 - DNA, 15 bp, Homo sapiens
tcacagcctgctggt

SEQ ID NO: 48761 - DNA, 15 bp, Homo sapiens
ctcacagcctgctgg

SEQ ID NO: 48762 - DNA, 15 bp, Homo sapiens
cctcacagcctgctg

SEQ ID NO: 48763 - DNA, 15 bp, Homo sapiens
acctcacagcctgct

SEQ ID NO: 48764 - DNA, 15 bp, Homo sapiens
aacctcacagcctgc

SEQ ID NO: 48765 - DNA, 15 bp, Homo sapiens
caacctcacagcctg

SEQ ID NO: 48766 - DNA, 15 bp, Homo sapiens
tcaacctcacagcct

SEQ ID NO: 48767 - DNA, 15 bp, Homo sapiens
ttcaacctcacagcc

SEQ ID NO: 48768 - DNA, 15 bp, Homo sapiens
tttcaacctcacagc

SEQ ID NO: 48769 - DNA, 15 bp, Homo sapiens
ctttcaacctcacag

SEQ ID NO: 48770 - DNA, 15 bp, Homo sapiens
gctttcaacctcaca

SEQ ID NO: 48771 - DNA, 15 bp, Homo sapiens
agctttcaacctcac

SEQ ID NO: 48772 - DNA, 15 bp, Homo sapiens
tagctttcaacctca

SEQ ID NO: 48773 - DNA, 15 bp, Homo sapiens
ctagctttcaacctc

SEQ ID NO: 48774 - DNA, 15 bp, Homo sapiens
cctagctttcaacct

SEQ ID NO: 48775 - DNA, 15 bp, Homo sapiens
gcctagctttcaacc

SEQ ID NO: 48776 - DNA, 15 bp, Homo sapiens
tgcctagctttcaac

SEQ ID NO: 48777 - DNA, 15 bp, Homo sapiens
atgcctagctttcaa

SEQ ID NO: 48778 - DNA, 15 bp, Homo sapiens
tatgcctagctttca

SEQ ID NO: 48779 - DNA, 15 bp, Homo sapiens
atatgcctagctttc

SEQ ID NO: 48780 - DNA, 15 bp, Homo sapiens
catatgcctagcttt

SEQ ID NO: 48781 - DNA, 15 bp, Homo sapiens
ccatatgcctagctt

SEQ ID NO: 48782 - DNA, 15 bp, Homo sapiens
tccatatgcctagct

SEQ ID NO: 48783 - DNA, 15 bp, Homo sapiens
ctccatatgcctagc

SEQ ID NO: 48784 - DNA, 15 bp, Homo sapiens
gctccatatgcctag

SEQ ID NO: 48785 - DNA, 15 bp, Homo sapiens
agctccatatgccta

SEQ ID NO: 48786 - DNA, 15 bp, Homo sapiens
aagctccatatgcct

SEQ ID NO: 48787 - DNA, 15 bp, Homo sapiens
aaagctccatatgcc

SEQ ID NO: 48788 - DNA, 15 bp, Homo sapiens
gaaagctccatatgc

SEQ ID NO: 48789 - DNA, 15 bp, Homo sapiens
ggaaagctccatatg

SEQ ID NO: 48790 - DNA, 15 bp, Homo sapiens
tggaaagctccatat

SEQ ID NO: 48791 - DNA, 15 bp, Homo sapiens
ctggaaagctccata

SEQ ID NO: 48792 - DNA, 15 bp, Homo sapiens
cctggaaagctccat

SEQ ID NO: 48793 - DNA, 15 bp, Homo sapiens
gcctggaaagctcca

SEQ ID NO: 48794 - DNA, 15 bp, Homo sapiens
agcctggaaagctcc

SEQ ID NO: 48795 - DNA, 15 bp, Homo sapiens
cagcctggaaagctc

SEQ ID NO: 48796 - DNA, 15 bp, Homo sapiens
ccagcctggaaagct

SEQ ID NO: 48797 - DNA, 15 bp, Homo sapiens
cccagcctggaaagc

SEQ ID NO: 48798 - DNA, 15 bp, Homo sapiens
acccagcctggaaag

SEQ ID NO: 48799 - DNA, 15 bp, Homo sapiens
cacccagcctggaaa

SEQ ID NO: 48800 - DNA, 15 bp, Homo sapiens
gcacccagcctggaa

SEQ ID NO: 48801 - DNA, 15 bp, Homo sapiens
tgcacccagcctgga

SEQ ID NO: 48802 - DNA, 15 bp, Homo sapiens
ctgcacccagcctgg

SEQ ID NO: 48803 - DNA, 15 bp, Homo sapiens
cctgcacccagcctg

SEQ ID NO: 48804 - DNA, 15 bp, Homo sapiens
ccctgcacccagcct

SEQ ID NO: 48805 - DNA, 15 bp, Homo sapiens
gccctgcacccagcc

SEQ ID NO: 48806 - DNA, 15 bp, Homo sapiens
ggccctgcacccagc

SEQ ID NO: 48807 - DNA, 15 bp, Homo sapiens
aggccctgcacccag

SEQ ID NO: 48808 - DNA, 15 bp, Homo sapiens
gaggccctgcaccca

SEQ ID NO: 48809 - DNA, 15 bp, Homo sapiens
cgaggccctgcaccc

SEQ ID NO: 48810 - DNA, 15 bp, Homo sapiens
acgaggccctgcacc

SEQ ID NO: 48811 - DNA, 15 bp, Homo sapiens
cacgaggccctgcac

SEQ ID NO: 48812 - DNA, 15 bp, Homo sapiens
ccacgaggccctgca

SEQ ID NO: 48813 - DNA, 15 bp, Homo sapiens
gccacgaggccctgc

SEQ ID NO: 48814 - DNA, 15 bp, Homo sapiens
ggccacgaggccctg

SEQ ID NO: 48815 - DNA, 15 bp, Homo sapiens
gggccacgaggccct

SEQ ID NO: 48816 - DNA, 15 bp, Homo sapiens
agggccacgaggccc

SEQ ID NO: 48817 - DNA, 15 bp, Homo sapiens
aagggccacgaggcc

SEQ ID NO: 48818 - DNA, 15 bp, Homo sapiens
gaagggccacgaggc

SEQ ID NO: 48819 - DNA, 15 bp, Homo sapiens
ggaagggccacgagg

SEQ ID NO: 48820 - DNA, 15 bp, Homo sapiens
gggaagggccacgag

SEQ ID NO: 48821 - DNA, 15 bp, Homo sapiens
ggggaagggccacga

SEQ ID NO: 48822 - DNA, 15 bp, Homo sapiens
aggggaagggccacg

SEQ ID NO: 48823 - DNA, 15 bp, Homo sapiens
gaggggaagggccac

SEQ ID NO: 48824 - DNA, 15 bp, Homo sapiens
ggaggggaagggcca

SEQ ID NO: 48825 - DNA, 15 bp, Homo sapiens
gggaggggaagggcc

SEQ ID NO: 48826 - DNA, 15 bp, Homo sapiens
ggggaggggaagggc

SEQ ID NO: 48827 - DNA, 15 bp, Homo sapiens
aggggaggggaaggg

SEQ ID NO: 48828 - DNA, 15 bp, Homo sapiens
gaggggaggggaagg

SEQ ID NO: 48829 - DNA, 15 bp, Homo sapiens
agaggggaggggaag

SEQ ID NO: 48830 - DNA, 15 bp, Homo sapiens
cagaggggaggggaa

SEQ ID NO: 48831 - DNA, 15 bp, Homo sapiens
acagaggggagggga

SEQ ID NO: 48832 - DNA, 15 bp, Homo sapiens
cacagaggggagggg

SEQ ID NO: 48833 - DNA, 15 bp, Homo sapiens
gcacagaggggaggg

SEQ ID NO: 48834 - DNA, 15 bp, Homo sapiens
agcacagaggggagg

SEQ ID NO: 48835 - DNA, 15 bp, Homo sapiens
gagcacagaggggag

SEQ ID NO: 48836 - DNA, 15 bp, Homo sapiens
agagcacagagggga

SEQ ID NO: 48837 - DNA, 15 bp, Homo sapiens
tagagcacagagggg

SEQ ID NO: 48838 - DNA, 15 bp, Homo sapiens
atagagcacagaggg

SEQ ID NO: 48839 - DNA, 15 bp, Homo sapiens
tatagagcacagagg

SEQ ID NO: 48840 - DNA, 15 bp, Homo sapiens
ctatagagcacagag

SEQ ID NO: 48841 - DNA, 15 bp, Homo sapiens
gctatagagcacaga

SEQ ID NO: 48842 - DNA, 15 bp, Homo sapiens
agctatagagcacag

SEQ ID NO: 48843 - DNA, 15 bp, Homo sapiens
gagctatagagcaca

SEQ ID NO: 48844 - DNA, 15 bp, Homo sapiens
tgagctatagagcac

SEQ ID NO: 48845 - DNA, 15 bp, Homo sapiens
ctgagctatagagca

SEQ ID NO: 48846 - DNA, 15 bp, Homo sapiens
actgagctatagagc

SEQ ID NO: 48847 - DNA, 15 bp, Homo sapiens
gactgagctatagag

SEQ ID NO: 48848 - DNA, 15 bp, Homo sapiens
agactgagctataga

SEQ ID NO: 48849 - DNA, 15 bp, Homo sapiens
aagactgagctatag

SEQ ID NO: 48850 - DNA, 15 bp, Homo sapiens
gaagactgagctata

SEQ ID NO: 48851 - DNA, 15 bp, Homo sapiens
ggaagactgagctat

SEQ ID NO: 48852 - DNA, 15 bp, Homo sapiens
gggaagactgagcta

SEQ ID NO: 48853 - DNA, 15 bp, Homo sapiens
tgggaagactgagct

SEQ ID NO: 48854 - DNA, 15 bp, Homo sapiens
ctgggaagactgagc

SEQ ID NO: 48855 - DNA, 15 bp, Homo sapiens
cctgggaagactgag

SEQ ID NO: 48856 - DNA, 15 bp, Homo sapiens
gcctgggaagactga

SEQ ID NO: 48857 - DNA, 15 bp, Homo sapiens
cgcctgggaagactg

SEQ ID NO: 48858 - DNA, 15 bp, Homo sapiens
ccgcctgggaagact

SEQ ID NO: 48859 - DNA, 15 bp, Homo sapiens
accgcctgggaagac

SEQ ID NO: 48860 - DNA, 15 bp, Homo sapiens
caccgcctgggaaga

SEQ ID NO: 48861 - DNA, 15 bp, Homo sapiens
acaccgcctgggaag

SEQ ID NO: 48862 - DNA, 15 bp, Homo sapiens
cacaccgcctgggaa

SEQ ID NO: 48863 - DNA, 15 bp, Homo sapiens
tcacaccgcctggga

SEQ ID NO: 48864 - DNA, 15 bp, Homo sapiens
ttcacaccgcctggg

SEQ ID NO: 48865 - DNA, 15 bp, Homo sapiens
gttcacaccgcctgg

SEQ ID NO: 48866 - DNA, 15 bp, Homo sapiens
tgttcacaccgcctg

SEQ ID NO: 48867 - DNA, 15 bp, Homo sapiens
gtgttcacaccgcct

SEQ ID NO: 48868 - DNA, 15 bp, Homo sapiens
cgtgttcacaccgcc

SEQ ID NO: 48869 - DNA, 15 bp, Homo sapiens
gcgtgttcacaccgc

SEQ ID NO: 48870 - DNA, 15 bp, Homo sapiens
tgcgtgttcacaccg

SEQ ID NO: 48871 - DNA, 15 bp, Homo sapiens
ctgcgtgttcacacc

SEQ ID NO: 48872 - DNA, 15 bp, Homo sapiens
actgcgtgttcacac

SEQ ID NO: 48873 - DNA, 15 bp, Homo sapiens
cactgcgtgttcaca

SEQ ID NO: 48874 - DNA, 15 bp, Homo sapiens
tcactgcgtgttcac

SEQ ID NO: 48875 - DNA, 15 bp, Homo sapiens
gtcactgcgtgttca

SEQ ID NO: 48876 - DNA, 15 bp, Homo sapiens
tgtcactgcgtgttc

SEQ ID NO: 48877 - DNA, 15 bp, Homo sapiens
atgtcactgcgtgtt

SEQ ID NO: 48878 - DNA, 15 bp, Homo sapiens
aatgtcactgcgtgt

SEQ ID NO: 48879 - DNA, 15 bp, Homo sapiens
aaatgtcactgcgtg

SEQ ID NO: 48880 - DNA, 15 bp, Homo sapiens
gaaatgtcactgcgt

SEQ ID NO: 48881 - DNA, 15 bp, Homo sapiens
ggaaatgtcactgcg

SEQ ID NO: 48882 - DNA, 15 bp, Homo sapiens
tggaaatgtcactgc

SEQ ID NO: 48883 - DNA, 15 bp, Homo sapiens
ctggaaatgtcactg

SEQ ID NO: 48884 - DNA, 15 bp, Homo sapiens
cctggaaatgtcact

SEQ ID NO: 48885 - DNA, 15 bp, Homo sapiens
tcctggaaatgtcac

SEQ ID NO: 48886 - DNA, 15 bp, Homo sapiens
ttcctggaaatgtca

SEQ ID NO: 48887 - DNA, 15 bp, Homo sapiens
attcctggaaatgtc

SEQ ID NO: 48888 - DNA, 15 bp, Homo sapiens
tattcctggaaatgt

SEQ ID NO: 48889 - DNA, 15 bp, Homo sapiens
gtattcctggaaatg

SEQ ID NO: 48890 - DNA, 15 bp, Homo sapiens
tgtattcctggaaat

SEQ ID NO: 48891 - DNA, 15 bp, Homo sapiens
ctgtattcctggaaa

SEQ ID NO: 48892 - DNA, 15 bp, Homo sapiens
cctgtattcctggaa

SEQ ID NO: 48893 - DNA, 15 bp, Homo sapiens
ccctgtattcctgga

SEQ ID NO: 48894 - DNA, 15 bp, Homo sapiens
tccctgtattcctgg

SEQ ID NO: 48895 - DNA, 15 bp, Homo sapiens
atccctgtattcctg

SEQ ID NO: 48896 - DNA, 15 bp, Homo sapiens
aatccctgtattcct

SEQ ID NO: 48897 - DNA, 15 bp, Homo sapiens
aaatccctgtattcc

SEQ ID NO: 48898 - DNA, 15 bp, Homo sapiens
taaatccctgtattc

SEQ ID NO: 48899 - DNA, 15 bp, Homo sapiens
ataaatccctgtatt

SEQ ID NO: 48900 - DNA, 15 bp, Homo sapiens
aataaatccctgtat

SEQ ID NO: 48901 - DNA, 15 bp, Homo sapiens
taataaatccctgta

SEQ ID NO: 48902 - DNA, 15 bp, Homo sapiens
ttaataaatccctgt

SEQ ID NO: 48903 - DNA, 15 bp, Homo sapiens
attaataaatccctg

SEQ ID NO: 48904 - DNA, 15 bp, Homo sapiens
cattaataaatccct

SEQ ID NO: 48905 - DNA, 15 bp, Homo sapiens
tcattaataaatccc

SEQ ID NO: 48906 - DNA, 15 bp, Homo sapiens
atcattaataaatcc

SEQ ID NO: 48907 - DNA, 15 bp, Homo sapiens
aatcattaataaatc

SEQ ID NO: 48908 - DNA, 15 bp, Homo sapiens
aaatcattaataaat

SEQ ID NO: 48909 - DNA, 15 bp, Homo sapiens
gaaatcattaataaa

SEQ ID NO: 48910 - DNA, 15 bp, Homo sapiens
agaaatcattaataa

SEQ ID NO: 48911 - DNA, 15 bp, Homo sapiens
aagaaatcattaata

SEQ ID NO: 48912 - DNA, 15 bp, Homo sapiens
caagaaatcattaat

SEQ ID NO: 48913 - DNA, 15 bp, Homo sapiens
acaagaaatcattaa

SEQ ID NO: 48914 - DNA, 15 bp, Homo sapiens
cacaagaaatcatta

SEQ ID NO: 48915 - DNA, 15 bp, Homo sapiens
tcacaagaaatcatt

SEQ ID NO: 48916 - DNA, 15 bp, Homo sapiens
ttcacaagaaatcat

SEQ ID NO: 48917 - DNA, 15 bp, Homo sapiens
tttcacaagaaatca

SEQ ID NO: 48918 - DNA, 15 bp, Homo sapiens
atttcacaagaaatc

SEQ ID NO: 48919 - DNA, 15 bp, Homo sapiens
catttcacaagaaat

SEQ ID NO: 48920 - DNA, 15 bp, Homo sapiens
acatttcacaagaaa

SEQ ID NO: 48921 - DNA, 15 bp, Homo sapiens
aacatttcacaagaa

SEQ ID NO: 48922 - DNA, 15 bp, Homo sapiens
aaacatttcacaaga

SEQ ID NO: 48923 - DNA, 15 bp, Homo sapiens
caaacatttcacaag

SEQ ID NO: 48924 - DNA, 15 bp, Homo sapiens
ccaaacatttcacaa

SEQ ID NO: 48925 - DNA, 15 bp, Homo sapiens
tccaaacatttcaca

SEQ ID NO: 48926 - DNA, 15 bp, Homo sapiens
ttccaaacatttcac

SEQ ID NO: 48927 - DNA, 15 bp, Homo sapiens
tttccaaacatttca

SEQ ID NO: 48928 - DNA, 15 bp, Homo sapiens
atttccaaacatttc

SEQ ID NO: 48929 - DNA, 15 bp, Homo sapiens
tatttccaaacattt

SEQ ID NO: 48930 - DNA, 15 bp, Homo sapiens
gtatttccaaacatt

SEQ ID NO: 48931 - DNA, 15 bp, Homo sapiens
tgtatttccaaacat

SEQ ID NO: 48932 - DNA, 15 bp, Homo sapiens
ttgtatttccaaaca

SEQ ID NO: 48933 - DNA, 15 bp, Homo sapiens
tttgtatttccaaac

SEQ ID NO: 48934 - DNA, 15 bp, Homo sapiens
ctttgtatttccaaa

SEQ ID NO: 48935 - DNA, 15 bp, Homo sapiens
actttgtatttccaa

SEQ ID NO: 48936 - DNA, 15 bp, Homo sapiens
tactttgtatttcca

SEQ ID NO: 48937 - DNA, 15 bp, Homo sapiens
gtactttgtatttcc

SEQ ID NO: 48938 - DNA, 15 bp, Homo sapiens
agtactttgtatttc

SEQ ID NO: 48939 - DNA, 15 bp, Homo sapiens
gagtactttgtattt

SEQ ID NO: 48940 - DNA, 15 bp, Homo sapiens
agagtactttgtatt

SEQ ID NO: 48941 - DNA, 15 bp, Homo sapiens
tagagtactttgtat

SEQ ID NO: 48942 - DNA, 15 bp, Homo sapiens
atagagtactttgta

SEQ ID NO: 48943 - DNA, 15 bp, Homo sapiens
tatagagtactttgt

SEQ ID NO: 48944 - DNA, 15 bp, Homo sapiens
ttatagagtactttg

SEQ ID NO: 48945 - DNA, 15 bp, Homo sapiens
tttatagagtacttt

SEQ ID NO: 48946 - DNA, 15 bp, Homo sapiens
atttatagagtactt

SEQ ID NO: 48947 - DNA, 15 bp, Homo sapiens
tatttatagagtact

SEQ ID NO: 48948 - DNA, 15 bp, Homo sapiens
atatttatagagtac

SEQ ID NO: 48949 - DNA, 15 bp, Homo sapiens
aatatttatagagta

SEQ ID NO: 48950 - DNA, 15 bp, Homo sapiens
aaatatttatagagt

SEQ ID NO: 48951 - DNA, 15 bp, Homo sapiens
gaaatatttatagag

SEQ ID NO: 48952 - DNA, 15 bp, Homo sapiens
tgaaatatttataga

SEQ ID NO: 48953 - DNA, 15 bp, Homo sapiens
atgaaatatttatag

SEQ ID NO: 48954 - DNA, 15 bp, Homo sapiens
tatgaaatatttata

SEQ ID NO: 48955 - DNA, 15 bp, Homo sapiens
ttatgaaatatttat

SEQ ID NO: 48956 - DNA, 15 bp, Homo sapiens
attatgaaatattta

SEQ ID NO: 48957 - DNA, 15 bp, Homo sapiens
tattatgaaatattt

SEQ ID NO: 48958 - DNA, 15 bp, Homo sapiens
ctattatgaaatatt

SEQ ID NO: 48959 - DNA, 15 bp, Homo sapiens
gctattatgaaatat

SEQ ID NO: 48960 - DNA, 15 bp, Homo sapiens
tgctattatgaaata

SEQ ID NO: 48961 - DNA, 15 bp, Homo sapiens
atgctattatgaaat

SEQ ID NO: 48962 - DNA, 15 bp, Homo sapiens
aatgctattatgaaa

SEQ ID NO: 48963 - DNA, 15 bp, Homo sapiens
caatgctattatgaa

SEQ ID NO: 48964 - DNA, 15 bp, Homo sapiens
ccaatgctattatga

SEQ ID NO: 48965 - DNA, 15 bp, Homo sapiens
cccaatgctattatg

SEQ ID NO: 48966 - DNA, 15 bp, Homo sapiens
ccccaatgctattat

SEQ ID NO: 48967 - DNA, 15 bp, Homo sapiens
gccccaatgctatta

SEQ ID NO: 48968 - DNA, 15 bp, Homo sapiens
agccccaatgctatt

SEQ ID NO: 48969 - DNA, 15 bp, Homo sapiens
cagccccaatgctat

SEQ ID NO: 48970 - DNA, 15 bp, Homo sapiens
tcagccccaatgcta

SEQ ID NO: 48971 - DNA, 15 bp, Homo sapiens
ctcagccccaatgct

SEQ ID NO: 48972 - DNA, 15 bp, Homo sapiens
tctcagccccaatgc

SEQ ID NO: 48973 - DNA, 15 bp, Homo sapiens
ttctcagccccaatg

SEQ ID NO: 48974 - DNA, 15 bp, Homo sapiens
gttctcagccccaat

SEQ ID NO: 48975 - DNA, 15 bp, Homo sapiens
agttctcagccccaa

SEQ ID NO: 48976 - DNA, 15 bp, Homo sapiens
gagttctcagcccca

SEQ ID NO: 48977 - DNA, 15 bp, Homo sapiens
ggagttctcagcccc

SEQ ID NO: 48978 - DNA, 15 bp, Homo sapiens
tggagttctcagccc

SEQ ID NO: 48979 - DNA, 15 bp, Homo sapiens
gtggagttctcagcc

SEQ ID NO: 48980 - DNA, 15 bp, Homo sapiens
tgtggagttctcagc

SEQ ID NO: 48981 - DNA, 15 bp, Homo sapiens
ttgtggagttctcag

SEQ ID NO: 48982 - DNA, 15 bp, Homo sapiens
tttgtggagttctca

SEQ ID NO: 48983 - DNA, 15 bp, Homo sapiens
ctttgtggagttctc

SEQ ID NO: 48984 - DNA, 15 bp, Homo sapiens
actttgtggagttct

SEQ ID NO: 48985 - DNA, 15 bp, Homo sapiens
cactttgtggagttc

SEQ ID NO: 48986 - DNA, 15 bp, Homo sapiens
gcactttgtggagtt

SEQ ID NO: 48987 - DNA, 15 bp, Homo sapiens
ggcactttgtggagt

SEQ ID NO: 48988 - DNA, 15 bp, Homo sapiens
cggcactttgtggag

SEQ ID NO: 48989 - DNA, 15 bp, Homo sapiens
ccggcactttgtgga

SEQ ID NO: 48990 - DNA, 15 bp, Homo sapiens
tccggcactttgtgg

SEQ ID NO: 48991 - DNA, 15 bp, Homo sapiens
ttccggcactttgtg

SEQ ID NO: 48992 - DNA, 15 bp, Homo sapiens
attccggcactttgt

SEQ ID NO: 48993 - DNA, 15 bp, Homo sapiens
tattccggcactttg

SEQ ID NO: 48994 - DNA, 15 bp, Homo sapiens
gtattccggcacttt

SEQ ID NO: 48995 - DNA, 15 bp, Homo sapiens
tgtattccggcactt

SEQ ID NO: 48996 - DNA, 15 bp, Homo sapiens
atgtattccggcact

SEQ ID NO: 48997 - DNA, 15 bp, Homo sapiens
aatgtattccggcac

SEQ ID NO: 48998 - DNA, 15 bp, Homo sapiens
aaatgtattccggca

SEQ ID NO: 48999 - DNA, 15 bp, Homo sapiens
caaatgtattccggc

SEQ ID NO: 49000 - DNA, 15 bp, Homo sapiens
gcaaatgtattccgg

SEQ ID NO: 49001 - DNA, 15 bp, Homo sapiens
tgcaaatgtattccg

SEQ ID NO: 49002 - DNA, 15 bp, Homo sapiens
atgcaaatgtattcc

SEQ ID NO: 49003 - DNA, 15 bp, Homo sapiens
catgcaaatgtattc

SEQ ID NO: 49004 - DNA, 15 bp, Homo sapiens
acatgcaaatgtatt

SEQ ID NO: 49005 - DNA, 15 bp, Homo sapiens
tacatgcaaatgtat

SEQ ID NO: 49006 - DNA, 15 bp, Homo sapiens
ttacatgcaaatgta

SEQ ID NO: 49007 - DNA, 15 bp, Homo sapiens
cttacatgcaaatgt

SEQ ID NO: 49008 - DNA, 15 bp, Homo sapiens
tcttacatgcaaatg

SEQ ID NO: 49009 - DNA, 15 bp, Homo sapiens
gtcttacatgcaaat

SEQ ID NO: 49010 - DNA, 15 bp, Homo sapiens
tgtcttacatgcaaa

SEQ ID NO: 49011 - DNA, 15 bp, Homo sapiens
ctgtcttacatgcaa

SEQ ID NO: 49012 - DNA, 15 bp, Homo sapiens
tctgtcttacatgca

SEQ ID NO: 49013 - DNA, 15 bp, Homo sapiens
ttctgtcttacatgc

SEQ ID NO: 49014 - DNA, 15 bp, Homo sapiens
gttctgtcttacatg

SEQ ID NO: 49015 - DNA, 15 bp, Homo sapiens
cgttctgtcttacat

SEQ ID NO: 49016 - DNA, 15 bp, Homo sapiens
gcgttctgtcttaca

SEQ ID NO: 49017 - DNA, 15 bp, Homo sapiens
agcgttctgtcttac

SEQ ID NO: 49018 - DNA, 15 bp, Homo sapiens
cagcgttctgtctta

SEQ ID NO: 49019 - DNA, 15 bp, Homo sapiens
gcagcgttctgtctt

SEQ ID NO: 49020 - DNA, 15 bp, Homo sapiens
ggcagcgttctgtct

SEQ ID NO: 49021 - DNA, 15 bp, Homo sapiens
aggcagcgttctgtc

SEQ ID NO: 49022 - DNA, 15 bp, Homo sapiens
caggcagcgttctgt

SEQ ID NO: 49023 - DNA, 15 bp, Homo sapiens
ccaggcagcgttctg

SEQ ID NO: 49024 - DNA, 15 bp, Homo sapiens
cccaggcagcgttct

SEQ ID NO: 49025 - DNA, 15 bp, Homo sapiens
acccaggcagcgttc

SEQ ID NO: 49026 - DNA, 15 bp, Homo sapiens
gacccaggcagcgtt

SEQ ID NO: 49027 - DNA, 15 bp, Homo sapiens
tgacccaggcagcgt

SEQ ID NO: 49028 - DNA, 15 bp, Homo sapiens
atgacccaggcagcg

SEQ ID NO: 49029 - DNA, 15 bp, Homo sapiens
aatgacccaggcagc

SEQ ID NO: 49030 - DNA, 15 bp, Homo sapiens
caatgacccaggcag

SEQ ID NO: 49031 - DNA, 15 bp, Homo sapiens
tcaatgacccaggca

SEQ ID NO: 49032 - DNA, 15 bp, Homo sapiens
atcaatgacccaggc

SEQ ID NO: 49033 - DNA, 15 bp, Homo sapiens
catcaatgacccagg

SEQ ID NO: 49034 - DNA, 15 bp, Homo sapiens
gcatcaatgacccag

SEQ ID NO: 49035 - DNA, 15 bp, Homo sapiens
ggcatcaatgaccca

SEQ ID NO: 49036 - DNA, 15 bp, Homo sapiens
aggcatcaatgaccc

SEQ ID NO: 49037 - DNA, 15 bp, Homo sapiens
caggcatcaatgacc

SEQ ID NO: 49038 - DNA, 15 bp, Homo sapiens
acaggcatcaatgac

SEQ ID NO: 49039 - DNA, 15 bp, Homo sapiens
aacaggcatcaatga

SEQ ID NO: 49040 - DNA, 15 bp, Homo sapiens
caacaggcatcaatg

SEQ ID NO: 49041 - DNA, 15 bp, Homo sapiens
tcaacaggcatcaat

SEQ ID NO: 49042 - DNA, 15 bp, Homo sapiens
ctcaacaggcatcaa

SEQ ID NO: 49043 - DNA, 15 bp, Homo sapiens
actcaacaggcatca

SEQ ID NO: 49044 - DNA, 15 bp, Homo sapiens
cactcaacaggcatc

SEQ ID NO: 49045 - DNA, 15 bp, Homo sapiens
ccactcaacaggcat

SEQ ID NO: 49046 - DNA, 15 bp, Homo sapiens
gccactcaacaggca

SEQ ID NO: 49047 - DNA, 15 bp, Homo sapiens
tgccactcaacaggc

SEQ ID NO: 49048 - DNA, 15 bp, Homo sapiens
ctgccactcaacagg

SEQ ID NO: 49049 - DNA, 15 bp, Homo sapiens
actgccactcaacag

SEQ ID NO: 49050 - DNA, 15 bp, Homo sapiens
gactgccactcaaca

SEQ ID NO: 49051 - DNA, 15 bp, Homo sapiens
tgactgccactcaac

SEQ ID NO: 49052 - DNA, 15 bp, Homo sapiens
gtgactgccactcaa

SEQ ID NO: 49053 - DNA, 15 bp, Homo sapiens
tgtgactgccactca

SEQ ID NO: 49054 - DNA, 15 bp, Homo sapiens
ctgtgactgccactc

SEQ ID NO: 49055 - DNA, 15 bp, Homo sapiens
tctgtgactgccact

SEQ ID NO: 49056 - DNA, 15 bp, Homo sapiens
gtctgtgactgccac

SEQ ID NO: 49057 - DNA, 15 bp, Homo sapiens
tgtctgtgactgcca

SEQ ID NO: 49058 - DNA, 15 bp, Homo sapiens
gtgtctgtgactgcc

SEQ ID NO: 49059 - DNA, 15 bp, Homo sapiens
agtgtctgtgactgc

SEQ ID NO: 49060 - DNA, 15 bp, Homo sapiens
cagtgtctgtgactg

SEQ ID NO: 49061 - DNA, 15 bp, Homo sapiens
gcagtgtctgtgact

SEQ ID NO: 49062 - DNA, 15 bp, Homo sapiens
ggcagtgtctgtgac

SEQ ID NO: 49063 - DNA, 15 bp, Homo sapiens
aggcagtgtctgtga

SEQ ID NO: 49064 - DNA, 15 bp, Homo sapiens
taggcagtgtctgtg

SEQ ID NO: 49065 - DNA, 15 bp, Homo sapiens
ctaggcagtgtctgt

SEQ ID NO: 49066 - DNA, 15 bp, Homo sapiens
cctaggcagtgtctg

SEQ ID NO: 49067 - DNA, 15 bp, Homo sapiens
ccctaggcagtgtct

SEQ ID NO: 49068 - DNA, 15 bp, Homo sapiens
accctaggcagtgtc

SEQ ID NO: 49069 - DNA, 15 bp, Homo sapiens
aaccctaggcagtgt

SEQ ID NO: 49070 - DNA, 15 bp, Homo sapiens
aaaccctaggcagtg

SEQ ID NO: 49071 - DNA, 15 bp, Homo sapiens
gaaaccctaggcagt

SEQ ID NO: 49072 - DNA, 15 bp, Homo sapiens
agaaaccctaggcag

SEQ ID NO: 49073 - DNA, 15 bp, Homo sapiens
cagaaaccctaggca

SEQ ID NO: 49074 - DNA, 15 bp, Homo sapiens
tcagaaaccctaggc

SEQ ID NO: 49075 - DNA, 15 bp, Homo sapiens
gtcagaaaccctagg

SEQ ID NO: 49076 - DNA, 15 bp, Homo sapiens
agtcagaaaccctag

SEQ ID NO: 49077 - DNA, 15 bp, Homo sapiens
gagtcagaaacccta

SEQ ID NO: 49078 - DNA, 15 bp, Homo sapiens
tgagtcagaaaccct

SEQ ID NO: 49079 - DNA, 15 bp, Homo sapiens
gtgagtcagaaaccc

SEQ ID NO: 49080 - DNA, 15 bp, Homo sapiens
cgtgagtcagaaacc

SEQ ID NO: 49081 - DNA, 15 bp, Homo sapiens
gcgtgagtcagaaac

SEQ ID NO: 49082 - DNA, 15 bp, Homo sapiens
agcgtgagtcagaaa

SEQ ID NO: 49083 - DNA, 15 bp, Homo sapiens
cagcgtgagtcagaa

SEQ ID NO: 49084 - DNA, 15 bp, Homo sapiens
acagcgtgagtcaga

SEQ ID NO: 49085 - DNA, 15 bp, Homo sapiens
aacagcgtgagtcag

SEQ ID NO: 49086 - DNA, 15 bp, Homo sapiens
caacagcgtgagtca

SEQ ID NO: 49087 - DNA, 15 bp, Homo sapiens
ccaacagcgtgagtc

SEQ ID NO: 49088 - DNA, 15 bp, Homo sapiens
cccaacagcgtgagt

SEQ ID NO: 49089 - DNA, 15 bp, Homo sapiens
tcccaacagcgtgag

SEQ ID NO: 49090 - DNA, 15 bp, Homo sapiens
gtcccaacagcgtga

SEQ ID NO: 49091 - DNA, 15 bp, Homo sapiens
agtcccaacagcgtg

SEQ ID NO: 49092 - DNA, 15 bp, Homo sapiens
cagtcccaacagcgt

SEQ ID NO: 49093 - DNA, 15 bp, Homo sapiens
acagtcccaacagcg

SEQ ID NO: 49094 - DNA, 15 bp, Homo sapiens
aacagtcccaacagc

SEQ ID NO: 49095 - DNA, 15 bp, Homo sapiens
gaacagtcccaacag

SEQ ID NO: 49096 - DNA, 15 bp, Homo sapiens
agaacagtcccaaca

SEQ ID NO: 49097 - DNA, 15 bp, Homo sapiens
tagaacagtcccaac

SEQ ID NO: 49098 - DNA, 15 bp, Homo sapiens
atagaacagtcccaa

SEQ ID NO: 49099 - DNA, 15 bp, Homo sapiens
catagaacagtccca

SEQ ID NO: 49100 - DNA, 15 bp, Homo sapiens
gcatagaacagtccc

SEQ ID NO: 49101 - DNA, 15 bp, Homo sapiens
tgcatagaacagtcc

SEQ ID NO: 49102 - DNA, 15 bp, Homo sapiens
ctgcatagaacagtc

SEQ ID NO: 49103 - DNA, 15 bp, Homo sapiens
cctgcatagaacagt

SEQ ID NO: 49104 - DNA, 15 bp, Homo sapiens
ccctgcatagaacag

SEQ ID NO: 49105 - DNA, 15 bp, Homo sapiens
gccctgcatagaaca

SEQ ID NO: 49106 - DNA, 15 bp, Homo sapiens
tgccctgcatagaac

SEQ ID NO: 49107 - DNA, 15 bp, Homo sapiens
gtgccctgcatagaa

SEQ ID NO: 49108 - DNA, 15 bp, Homo sapiens
ggtgccctgcataga

SEQ ID NO: 49109 - DNA, 15 bp, Homo sapiens
gggtgccctgcatag

SEQ ID NO: 49110 - DNA, 15 bp, Homo sapiens
agggtgccctgcata

SEQ ID NO: 49111 - DNA, 15 bp, Homo sapiens
gagggtgccctgcat

SEQ ID NO: 49112 - DNA, 15 bp, Homo sapiens
agagggtgccctgca

SEQ ID NO: 49113 - DNA, 15 bp, Homo sapiens
aagagggtgccctgc

SEQ ID NO: 49114 - DNA, 15 bp, Homo sapiens
caagagggtgccctg

SEQ ID NO: 49115 - DNA, 15 bp, Homo sapiens
acaagagggtgccct

SEQ ID NO: 49116 - DNA, 15 bp, Homo sapiens
cacaagagggtgccc

SEQ ID NO: 49117 - DNA, 15 bp, Homo sapiens
acacaagagggtgcc

SEQ ID NO: 49118 - DNA, 15 bp, Homo sapiens
cacacaagagggtgc

SEQ ID NO: 49119 - DNA, 15 bp, Homo sapiens
ccacacaagagggtg

SEQ ID NO: 49120 - DNA, 15 bp, Homo sapiens
gccacacaagagggt

SEQ ID NO: 49121 - DNA, 15 bp, Homo sapiens
tgccacacaagaggg

SEQ ID NO: 49122 - DNA, 15 bp, Homo sapiens
atgccacacaagagg

SEQ ID NO: 49123 - DNA, 15 bp, Homo sapiens
tatgccacacaagag

SEQ ID NO: 49124 - DNA, 15 bp, Homo sapiens
ctatgccacacaaga

SEQ ID NO: 49125 - DNA, 15 bp, Homo sapiens
cctatgccacacaag

SEQ ID NO: 49126 - DNA, 15 bp, Homo sapiens
tcctatgccacacaa

SEQ ID NO: 49127 - DNA, 15 bp, Homo sapiens
atcctatgccacaca

SEQ ID NO: 49128 - DNA, 15 bp, Homo sapiens
aatcctatgccacac

SEQ ID NO: 49129 - DNA, 15 bp, Homo sapiens
aaatcctatgccaca

SEQ ID NO: 49130 - DNA, 15 bp, Homo sapiens
caaatcctatgccac

SEQ ID NO: 49131 - DNA, 15 bp, Homo sapiens
acaaatcctatgcca

SEQ ID NO: 49132 - DNA, 15 bp, Homo sapiens
cacaaatcctatgcc

SEQ ID NO: 49133 - DNA, 15 bp, Homo sapiens
gcacaaatcctatgc

SEQ ID NO: 49134 - DNA, 15 bp, Homo sapiens
ggcacaaatcctatg

SEQ ID NO: 49135 - DNA, 15 bp, Homo sapiens
aggcacaaatcctat

SEQ ID NO: 49136 - DNA, 15 bp, Homo sapiens
gaggcacaaatccta

SEQ ID NO: 49137 - DNA, 15 bp, Homo sapiens
tgaggcacaaatcct

SEQ ID NO: 49138 - DNA, 15 bp, Homo sapiens
gtgaggcacaaatcc

SEQ ID NO: 49139 - DNA, 15 bp, Homo sapiens
ggtgaggcacaaatc

SEQ ID NO: 49140 - DNA, 15 bp, Homo sapiens
tggtgaggcacaaat

SEQ ID NO: 49141 - DNA, 15 bp, Homo sapiens
gtggtgaggcacaaa

SEQ ID NO: 49142 - DNA, 15 bp, Homo sapiens
tgtggtgaggcacaa

SEQ ID NO: 49143 - DNA, 15 bp, Homo sapiens
gtgtggtgaggcaca

SEQ ID NO: 49144 - DNA, 15 bp, Homo sapiens
tgtgtggtgaggcac

SEQ ID NO: 49145 - DNA, 15 bp, Homo sapiens
gtgtgtggtgaggca

SEQ ID NO: 49146 - DNA, 15 bp, Homo sapiens
agtgtgtggtgaggc

SEQ ID NO: 49147 - DNA, 15 bp, Homo sapiens
cagtgtgtggtgagg

SEQ ID NO: 49148 - DNA, 15 bp, Homo sapiens
acagtgtgtggtgag

SEQ ID NO: 49149 - DNA, 15 bp, Homo sapiens
aacagtgtgtggtga

SEQ ID NO: 49150 - DNA, 15 bp, Homo sapiens
caacagtgtgtggtg

SEQ ID NO: 49151 - DNA, 15 bp, Homo sapiens
acaacagtgtgtggt

SEQ ID NO: 49152 - DNA, 15 bp, Homo sapiens
tacaacagtgtgtgg

SEQ ID NO: 49153 - DNA, 15 bp, Homo sapiens
ctacaacagtgtgtg

SEQ ID NO: 49154 - DNA, 15 bp, Homo sapiens
gctacaacagtgtgt

SEQ ID NO: 49155 - DNA, 15 bp, Homo sapiens
agctacaacagtgtg

SEQ ID NO: 49156 - DNA, 15 bp, Homo sapiens
aagctacaacagtgt

SEQ ID NO: 49157 - DNA, 15 bp, Homo sapiens
aaagctacaacagtg

SEQ ID NO: 49158 - DNA, 15 bp, Homo sapiens
caaagctacaacagt

SEQ ID NO: 49159 - DNA, 15 bp, Homo sapiens
gcaaagctacaacag

SEQ ID NO: 49160 - DNA, 15 bp, Homo sapiens
agcaaagctacaaca

SEQ ID NO: 49161 - DNA, 15 bp, Homo sapiens
cagcaaagctacaac

SEQ ID NO: 49162 - DNA, 15 bp, Homo sapiens
acagcaaagctacaa

SEQ ID NO: 49163 - DNA, 15 bp, Homo sapiens
gacagcaaagctaca

SEQ ID NO: 49164 - DNA, 15 bp, Homo sapiens
agacagcaaagctac

SEQ ID NO: 49165 - DNA, 15 bp, Homo sapiens
aagacagcaaagcta

SEQ ID NO: 49166 - DNA, 15 bp, Homo sapiens
caagacagcaaagct

SEQ ID NO: 49167 - DNA, 15 bp, Homo sapiens
tcaagacagcaaagc

SEQ ID NO: 49168 - DNA, 15 bp, Homo sapiens
atcaagacagcaaag

SEQ ID NO: 49169 - DNA, 15 bp, Homo sapiens
catcaagacagcaaa

SEQ ID NO: 49170 - DNA, 15 bp, Homo sapiens
tcatcaagacagcaa

SEQ ID NO: 49171 - DNA, 15 bp, Homo sapiens
atcatcaagacagca

SEQ ID NO: 49172 - DNA, 15 bp, Homo sapiens
catcatcaagacagc

SEQ ID NO: 49173 - DNA, 15 bp, Homo sapiens
tcatcatcaagacag

SEQ ID NO: 49174 - DNA, 15 bp, Homo sapiens
ctcatcatcaagaca

SEQ ID NO: 49175 - DNA, 15 bp, Homo sapiens
actcatcatcaagac

SEQ ID NO: 49176 - DNA, 15 bp, Homo sapiens
tactcatcatcaaga

SEQ ID NO: 49177 - DNA, 15 bp, Homo sapiens
ctactcatcatcaag

SEQ ID NO: 49178 - DNA, 15 bp, Homo sapiens
tctactcatcatcaa

SEQ ID NO: 49179 - DNA, 15 bp, Homo sapiens
ctctactcatcatca

SEQ ID NO: 49180 - DNA, 15 bp, Homo sapiens
cctctactcatcatc

SEQ ID NO: 49181 - DNA, 15 bp, Homo sapiens
ccctctactcatcat

SEQ ID NO: 49182 - DNA, 15 bp, Homo sapiens
gccctctactcatca

SEQ ID NO: 49183 - DNA, 15 bp, Homo sapiens
tgccctctactcatc

SEQ ID NO: 49184 - DNA, 15 bp, Homo sapiens
ctgccctctactcat

SEQ ID NO: 49185 - DNA, 15 bp, Homo sapiens
actgccctctactca

SEQ ID NO: 49186 - DNA, 15 bp, Homo sapiens
cactgccctctactc

SEQ ID NO: 49187 - DNA, 15 bp, Homo sapiens
acactgccctctact

SEQ ID NO: 49188 - DNA, 15 bp, Homo sapiens
gacactgccctctac

SEQ ID NO: 49189 - DNA, 15 bp, Homo sapiens
ggacactgccctcta

SEQ ID NO: 49190 - DNA, 15 bp, Homo sapiens
tggacactgccctct

SEQ ID NO: 49191 - DNA, 15 bp, Homo sapiens
ctggacactgccctc

SEQ ID NO: 49192 - DNA, 15 bp, Homo sapiens
cctggacactgccct

SEQ ID NO: 49193 - DNA, 15 bp, Homo sapiens
gcctggacactgccc

SEQ ID NO: 49194 - DNA, 15 bp, Homo sapiens
ggcctggacactgcc

SEQ ID NO: 49195 - DNA, 15 bp, Homo sapiens
tggcctggacactgc

SEQ ID NO: 49196 - DNA, 15 bp, Homo sapiens
atggcctggacactg

SEQ ID NO: 49197 - DNA, 15 bp, Homo sapiens
catggcctggacact

SEQ ID NO: 49198 - DNA, 15 bp, Homo sapiens
ccatggcctggacac

SEQ ID NO: 49199 - DNA, 15 bp, Homo sapiens
accatggcctggaca

SEQ ID NO: 49200 - DNA, 15 bp, Homo sapiens
taccatggcctggac

SEQ ID NO: 49201 - DNA, 15 bp, Homo sapiens
ataccatggcctgga

SEQ ID NO: 49202 - DNA, 15 bp, Homo sapiens
tataccatggcctgg

SEQ ID NO: 49203 - DNA, 15 bp, Homo sapiens
ttataccatggcctg

SEQ ID NO: 49204 - DNA, 15 bp, Homo sapiens
cttataccatggcct

SEQ ID NO: 49205 - DNA, 15 bp, Homo sapiens
gcttataccatggcc

SEQ ID NO: 49206 - DNA, 15 bp, Homo sapiens
tgcttataccatggc

SEQ ID NO: 49207 - DNA, 15 bp, Homo sapiens
atgcttataccatgg

SEQ ID NO: 49208 - DNA, 15 bp, Homo sapiens
gatgcttataccatg

SEQ ID NO: 49209 - DNA, 15 bp, Homo sapiens
agatgcttataccat

SEQ ID NO: 49210 - DNA, 15 bp, Homo sapiens
tagatgcttatacca

SEQ ID NO: 49211 - DNA, 15 bp, Homo sapiens
gtagatgcttatacc

SEQ ID NO: 49212 - DNA, 15 bp, Homo sapiens
agtagatgcttatac

SEQ ID NO: 49213 - DNA, 15 bp, Homo sapiens
cagtagatgcttata

SEQ ID NO: 49214 - DNA, 15 bp, Homo sapiens
gcagtagatgcttat

SEQ ID NO: 49215 - DNA, 15 bp, Homo sapiens
ggcagtagatgctta

SEQ ID NO: 49216 - DNA, 15 bp, Homo sapiens
gggcagtagatgctt

SEQ ID NO: 49217 - DNA, 15 bp, Homo sapiens
ggggcagtagatgct

SEQ ID NO: 49218 - DNA, 15 bp, Homo sapiens
gggggcagtagatgc

SEQ ID NO: 49219 - DNA, 15 bp, Homo sapiens
ggggggcagtagatg

SEQ ID NO: 49220 - DNA, 15 bp, Homo sapiens
tggggggcagtagat

SEQ ID NO: 49221 - DNA, 15 bp, Homo sapiens
ctggggggcagtaga

SEQ ID NO: 49222 - DNA, 15 bp, Homo sapiens
cctggggggcagtag

SEQ ID NO: 49223 - DNA, 15 bp, Homo sapiens
ccctggggggcagta

SEQ ID NO: 49224 - DNA, 15 bp, Homo sapiens
accctggggggcagt

SEQ ID NO: 49225 - DNA, 15 bp, Homo sapiens
aaccctggggggcag

SEQ ID NO: 49226 - DNA, 15 bp, Homo sapiens
taaccctggggggca

SEQ ID NO: 49227 - DNA, 15 bp, Homo sapiens
gtaaccctggggggc

SEQ ID NO: 49228 - DNA, 15 bp, Homo sapiens
ggtaaccctgggggg

SEQ ID NO: 49229 - DNA, 15 bp, Homo sapiens
tggtaaccctggggg

SEQ ID NO: 49230 - DNA, 15 bp, Homo sapiens
ttggtaaccctgggg

SEQ ID NO: 49231 - DNA, 15 bp, Homo sapiens
tttggtaaccctggg

SEQ ID NO: 49232 - DNA, 15 bp, Homo sapiens
ttttggtaaccctgg

SEQ ID NO: 49233 - DNA, 15 bp, Homo sapiens
gttttggtaaccctg

SEQ ID NO: 49234 - DNA, 15 bp, Homo sapiens
ggttttggtaaccct

SEQ ID NO: 49235 - DNA, 15 bp, Homo sapiens
tggttttggtaaccc

SEQ ID NO: 49236 - DNA, 15 bp, Homo sapiens
ttggttttggtaacc

SEQ ID NO: 49237 - DNA, 15 bp, Homo sapiens
cttggttttggtaac

SEQ ID NO: 49238 - DNA, 15 bp, Homo sapiens
gcttggttttggtaa

SEQ ID NO: 49239 - DNA, 15 bp, Homo sapiens
ggcttggttttggta

SEQ ID NO: 49240 - DNA, 15 bp, Homo sapiens
tggcttggttttggt

SEQ ID NO: 49241 - DNA, 15 bp, Homo sapiens
ttggcttggttttgg

SEQ ID NO: 49242 - DNA, 15 bp, Homo sapiens
cttggcttggttttg

SEQ ID NO: 49243 - DNA, 15 bp, Homo sapiens
acttggcttggtttt

SEQ ID NO: 49244 - DNA, 15 bp, Homo sapiens
aacttggcttggttt

SEQ ID NO: 49245 - DNA, 15 bp, Homo sapiens
caacttggcttggtt

SEQ ID NO: 49246 - DNA, 15 bp, Homo sapiens
acaacttggcttggt

SEQ ID NO: 49247 - DNA, 15 bp, Homo sapiens
cacaacttggcttgg

SEQ ID NO: 49248 - DNA, 15 bp, Homo sapiens
acacaacttggcttg

SEQ ID NO: 49249 - DNA, 15 bp, Homo sapiens
gacacaacttggctt

SEQ ID NO: 49250 - DNA, 15 bp, Homo sapiens
agacacaacttggct

SEQ ID NO: 49251 - DNA, 15 bp, Homo sapiens
gagacacaacttggc

SEQ ID NO: 49252 - DNA, 15 bp, Homo sapiens
tgagacacaacttgg

SEQ ID NO: 49253 - DNA, 15 bp, Homo sapiens
ctgagacacaacttg

SEQ ID NO: 49254 - DNA, 15 bp, Homo sapiens
gctgagacacaactt

SEQ ID NO: 49255 - DNA, 15 bp, Homo sapiens
cgctgagacacaact

SEQ ID NO: 49256 - DNA, 15 bp, Homo sapiens
tcgctgagacacaac

SEQ ID NO: 49257 - DNA, 15 bp, Homo sapiens
ctcgctgagacacaa

SEQ ID NO: 49258 - DNA, 15 bp, Homo sapiens
gctcgctgagacaca

SEQ ID NO: 49259 - DNA, 15 bp, Homo sapiens
agctcgctgagacac

SEQ ID NO: 49260 - DNA, 15 bp, Homo sapiens
gagctcgctgagaca

SEQ ID NO: 49261 - DNA, 15 bp, Homo sapiens
ggagctcgctgagac

SEQ ID NO: 49262 - DNA, 15 bp, Homo sapiens
cggagctcgctgaga

SEQ ID NO: 49263 - DNA, 15 bp, Homo sapiens
acggagctcgctgag

SEQ ID NO: 49264 - DNA, 15 bp, Homo sapiens
cacggagctcgctga

SEQ ID NO: 49265 - DNA, 15 bp, Homo sapiens
tcacggagctcgctg

SEQ ID NO: 49266 - DNA, 15 bp, Homo sapiens
ttcacggagctcgct

SEQ ID NO: 49267 - DNA, 15 bp, Homo sapiens
cttcacggagctcgc

SEQ ID NO: 49268 - DNA, 15 bp, Homo sapiens
gcttcacggagctcg

SEQ ID NO: 49269 - DNA, 15 bp, Homo sapiens
tgcttcacggagctc

SEQ ID NO: 49270 - DNA, 15 bp, Homo sapiens
atgcttcacggagct

SEQ ID NO: 49271 - DNA, 15 bp, Homo sapiens
catgcttcacggagc

SEQ ID NO: 49272 - DNA, 15 bp, Homo sapiens
ccatgcttcacggag

SEQ ID NO: 49273 - DNA, 15 bp, Homo sapiens
tccatgcttcacgga

SEQ ID NO: 49274 - DNA, 15 bp, Homo sapiens
ctccatgcttcacgg

SEQ ID NO: 49275 - DNA, 15 bp, Homo sapiens
tctccatgcttcacg

SEQ ID NO: 49276 - DNA, 15 bp, Homo sapiens
ttctccatgcttcac

SEQ ID NO: 49277 - DNA, 15 bp, Homo sapiens
cttctccatgcttca

SEQ ID NO: 49278 - DNA, 15 bp, Homo sapiens
acttctccatgcttc

SEQ ID NO: 49279 - DNA, 15 bp, Homo sapiens
aacttctccatgctt

SEQ ID NO: 49280 - DNA, 15 bp, Homo sapiens
caacttctccatgct

SEQ ID NO: 49281 - DNA, 15 bp, Homo sapiens
tcaacttctccatgc

SEQ ID NO: 49282 - DNA, 15 bp, Homo sapiens
ctcaacttctccatg

SEQ ID NO: 49283 - DNA, 15 bp, Homo sapiens
actcaacttctccat

SEQ ID NO: 49284 - DNA, 15 bp, Homo sapiens
tactcaacttctcca

SEQ ID NO: 49285 - DNA, 15 bp, Homo sapiens
gtactcaacttctcc

SEQ ID NO: 49286 - DNA, 15 bp, Homo sapiens
agtactcaacttctc

SEQ ID NO: 49287 - DNA, 15 bp, Homo sapiens
gagtactcaacttct

SEQ ID NO: 49288 - DNA, 15 bp, Homo sapiens
tgagtactcaacttc

SEQ ID NO: 49289 - DNA, 15 bp, Homo sapiens
ctgagtactcaactt

SEQ ID NO: 49290 - DNA, 15 bp, Homo sapiens
tctgagtactcaact

SEQ ID NO: 49291 - DNA, 15 bp, Homo sapiens
ctctgagtactcaac

SEQ ID NO: 49292 - DNA, 15 bp, Homo sapiens
tctctgagtactcaa

SEQ ID NO: 49293 - DNA, 15 bp, Homo sapiens
gtctctgagtactca

SEQ ID NO: 49294 - DNA, 15 bp, Homo sapiens
tgtctctgagtactc

SEQ ID NO: 49295 - DNA, 15 bp, Homo sapiens
atgtctctgagtact

SEQ ID NO: 49296 - DNA, 15 bp, Homo sapiens
catgtctctgagtac

SEQ ID NO: 49297 - DNA, 15 bp, Homo sapiens
tcatgtctctgagta

SEQ ID NO: 49298 - DNA, 15 bp, Homo sapiens
gtcatgtctctgagt

SEQ ID NO: 49299 - DNA, 15 bp, Homo sapiens
cgtcatgtctctgag

SEQ ID NO: 49300 - DNA, 15 bp, Homo sapiens
acgtcatgtctctga

SEQ ID NO: 49301 - DNA, 15 bp, Homo sapiens
cacgtcatgtctctg

SEQ ID NO: 49302 - DNA, 15 bp, Homo sapiens
tcacgtcatgtctct

SEQ ID NO: 49303 - DNA, 15 bp, Homo sapiens
gtcacgtcatgtctc

SEQ ID NO: 49304 - DNA, 15 bp, Homo sapiens
agtcacgtcatgtct

SEQ ID NO: 49305 - DNA, 15 bp, Homo sapiens
aagtcacgtcatgtc

SEQ ID NO: 49306 - DNA, 15 bp, Homo sapiens
aaagtcacgtcatgt

SEQ ID NO: 49307 - DNA, 15 bp, Homo sapiens
aaaagtcacgtcatg

SEQ ID NO: 49308 - DNA, 15 bp, Homo sapiens
gaaaagtcacgtcat

SEQ ID NO: 49309 - DNA, 15 bp, Homo sapiens
tgaaaagtcacgtca

SEQ ID NO: 49310 - DNA, 15 bp, Homo sapiens
ttgaaaagtcacgtc

SEQ ID NO: 49311 - DNA, 15 bp, Homo sapiens
tttgaaaagtcacgt

SEQ ID NO: 49312 - DNA, 15 bp, Homo sapiens
ctttgaaaagtcacg

SEQ ID NO: 49313 - DNA, 15 bp, Homo sapiens
cctttgaaaagtcac

SEQ ID NO: 49314 - DNA, 15 bp, Homo sapiens
gcctttgaaaagtca

SEQ ID NO: 49315 - DNA, 15 bp, Homo sapiens
agcctttgaaaagtc

SEQ ID NO: 49316 - DNA, 15 bp, Homo sapiens
cagcctttgaaaagt

SEQ ID NO: 49317 - DNA, 15 bp, Homo sapiens
acagcctttgaaaag

SEQ ID NO: 49318 - DNA, 15 bp, Homo sapiens
tacagcctttgaaaa

SEQ ID NO: 49319 - DNA, 15 bp, Homo sapiens
ttacagcctttgaaa

SEQ ID NO: 49320 - DNA, 15 bp, Homo sapiens
cttacagcctttgaa

SEQ ID NO: 49321 - DNA, 15 bp, Homo sapiens
gcttacagcctttga

SEQ ID NO: 49322 - DNA, 15 bp, Homo sapiens
agcttacagcctttg

SEQ ID NO: 49323 - DNA, 15 bp, Homo sapiens
cagcttacagccttt

SEQ ID NO: 49324 - DNA, 15 bp, Homo sapiens
tcagcttacagcctt

SEQ ID NO: 49325 - DNA, 15 bp, Homo sapiens
gtcagcttacagcct

SEQ ID NO: 49326 - DNA, 15 bp, Homo sapiens
cgtcagcttacagcc

SEQ ID NO: 49327 - DNA, 15 bp, Homo sapiens
tcgtcagcttacagc

SEQ ID NO: 49328 - DNA, 15 bp, Homo sapiens
ctcgtcagcttacag

SEQ ID NO: 49329 - DNA, 15 bp, Homo sapiens
cctcgtcagcttaca

SEQ ID NO: 49330 - DNA, 15 bp, Homo sapiens
ccctcgtcagcttac

SEQ ID NO: 49331 - DNA, 15 bp, Homo sapiens
tccctcgtcagctta

SEQ ID NO: 49332 - DNA, 15 bp, Homo sapiens
gtccctcgtcagctt

SEQ ID NO: 49333 - DNA, 15 bp, Homo sapiens
tgtccctcgtcagct

SEQ ID NO: 49334 - DNA, 15 bp, Homo sapiens
atgtccctcgtcagc

SEQ ID NO: 49335 - DNA, 15 bp, Homo sapiens
tatgtccctcgtcag

SEQ ID NO: 49336 - DNA, 15 bp, Homo sapiens
ctatgtccctcgtca

SEQ ID NO: 49337 - DNA, 15 bp, Homo sapiens
gctatgtccctcgtc

SEQ ID NO: 49338 - DNA, 15 bp, Homo sapiens
agctatgtccctcgt

SEQ ID NO: 49339 - DNA, 15 bp, Homo sapiens
tagctatgtccctcg

SEQ ID NO: 49340 - DNA, 15 bp, Homo sapiens
ctagctatgtccctc

SEQ ID NO: 49341 - DNA, 15 bp, Homo sapiens
cctagctatgtccct

SEQ ID NO: 49342 - DNA, 15 bp, Homo sapiens
ccctagctatgtccc

SEQ ID NO: 49343 - DNA, 15 bp, Homo sapiens
accctagctatgtcc

SEQ ID NO: 49344 - DNA, 15 bp, Homo sapiens
aaccctagctatgtc

SEQ ID NO: 49345 - DNA, 15 bp, Homo sapiens
gaaccctagctatgt

SEQ ID NO: 49346 - DNA, 15 bp, Homo sapiens
tgaaccctagctatg

SEQ ID NO: 49347 - DNA, 15 bp, Homo sapiens
ctgaaccctagctat

SEQ ID NO: 49348 - DNA, 15 bp, Homo sapiens
tctgaaccctagcta

SEQ ID NO: 49349 - DNA, 15 bp, Homo sapiens
gtctgaaccctagct

SEQ ID NO: 49350 - DNA, 15 bp, Homo sapiens
agtctgaaccctagc

SEQ ID NO: 49351 - DNA, 15 bp, Homo sapiens
aagtctgaaccctag

SEQ ID NO: 49352 - DNA, 15 bp, Homo sapiens
caagtctgaacccta

SEQ ID NO: 49353 - DNA, 15 bp, Homo sapiens
tcaagtctgaaccct

SEQ ID NO: 49354 - DNA, 15 bp, Homo sapiens
ctcaagtctgaaccc

SEQ ID NO: 49355 - DNA, 15 bp, Homo sapiens
actcaagtctgaacc

SEQ ID NO: 49356 - DNA, 15 bp, Homo sapiens
aactcaagtctgaac

SEQ ID NO: 49357 - DNA, 15 bp, Homo sapiens
aaactcaagtctgaa

SEQ ID NO: 49358 - DNA, 15 bp, Homo sapiens
aaaactcaagtctga

SEQ ID NO: 49359 - DNA, 15 bp, Homo sapiens
aaaaactcaagtctg

SEQ ID NO: 49360 - DNA, 15 bp, Homo sapiens
gaaaaactcaagtct

SEQ ID NO: 49361 - DNA, 15 bp, Homo sapiens
agaaaaactcaagtc

SEQ ID NO: 49362 - DNA, 15 bp, Homo sapiens
aagaaaaactcaagt

SEQ ID NO: 49363 - DNA, 15 bp, Homo sapiens
aaagaaaaactcaag

SEQ ID NO: 49364 - DNA, 15 bp, Homo sapiens
aaaagaaaaactcaa

SEQ ID NO: 49365 - DNA, 15 bp, Homo sapiens
aaaaagaaaaactca

SEQ ID NO: 49366 - DNA, 15 bp, Homo sapiens
gaaaaagaaaaactc

SEQ ID NO: 49367 - DNA, 15 bp, Homo sapiens
agaaaaagaaaaact

SEQ ID NO: 49368 - DNA, 15 bp, Homo sapiens
aagaaaaagaaaaac

SEQ ID NO: 49369 - DNA, 15 bp, Homo sapiens
gaaaaagaaaaagaa

SEQ ID NO: 49370 - DNA, 15 bp, Homo sapiens
agaaaaagaaaaaga

SEQ ID NO: 49371 - DNA, 15 bp, Homo sapiens
aagaaaaagaaaaag

SEQ ID NO: 49372 - DNA, 15 bp, Homo sapiens
cttaaaaaaaaaaga

SEQ ID NO: 49373 - DNA, 15 bp, Homo sapiens
tcttaaaaaaaaaag

SEQ ID NO: 49374 - DNA, 15 bp, Homo sapiens
agtcttaaaaaaaaa

SEQ ID NO: 49375 - DNA, 15 bp, Homo sapiens
cagtcttaaaaaaaa

SEQ ID NO: 49376 - DNA, 15 bp, Homo sapiens
tcagtcttaaaaaaa

SEQ ID NO: 49377 - DNA, 15 bp, Homo sapiens
ctcagtcttaaaaaa

SEQ ID NO: 49378 - DNA, 15 bp, Homo sapiens
actcagtcttaaaaa

SEQ ID NO: 49379 - DNA, 15 bp, Homo sapiens
gactcagtcttaaaa

SEQ ID NO: 49380 - DNA, 15 bp, Homo sapiens
agactcagtcttaaa

SEQ ID NO: 49381 - DNA, 15 bp, Homo sapiens
aagactcagtcttaa

SEQ ID NO: 49382 - DNA, 15 bp, Homo sapiens
caagactcagtctta

SEQ ID NO: 49383 - DNA, 15 bp, Homo sapiens
gcaagactcagtctt

SEQ ID NO: 49384 - DNA, 15 bp, Homo sapiens
aagcaagactcagtc

SEQ ID NO: 49385 - DNA, 15 bp, Homo sapiens
aaagcaagactcagt

SEQ ID NO: 49386 - DNA, 15 bp, Homo sapiens
aaaagcaagactcag

SEQ ID NO: 49387 - DNA, 15 bp, Homo sapiens
caaaagcaagactca

SEQ ID NO: 49388 - DNA, 15 bp, Homo sapiens
acaaaagcaagactc

SEQ ID NO: 49389 - DNA, 15 bp, Homo sapiens
gacaaaagcaagact

SEQ ID NO: 49390 - DNA, 15 bp, Homo sapiens
cgacaaaagcaagac

SEQ ID NO: 49391 - DNA, 15 bp, Homo sapiens
gcgacaaaagcaaga

SEQ ID NO: 49392 - DNA, 15 bp, Homo sapiens
ggcgacaaaagcaag

SEQ ID NO: 49393 - DNA, 15 bp, Homo sapiens
gggcgacaaaagcaa

SEQ ID NO: 49394 - DNA, 15 bp, Homo sapiens
tgggcgacaaaagca

SEQ ID NO: 49395 - DNA, 15 bp, Homo sapiens
ctgggcgacaaaagc

SEQ ID NO: 49396 - DNA, 15 bp, Homo sapiens
cctgggcgacaaaag

SEQ ID NO: 49397 - DNA, 15 bp, Homo sapiens
gcctgggcgacaaaa

SEQ ID NO: 49398 - DNA, 15 bp, Homo sapiens
agcctgggcgacaaa

SEQ ID NO: 49399 - DNA, 15 bp, Homo sapiens
atccagcctgggcga

SEQ ID NO: 49400 - DNA, 15 bp, Homo sapiens
aatccagcctgggcg

SEQ ID NO: 49401 - DNA, 15 bp, Homo sapiens
ctgcaatccagcctg

SEQ ID NO: 49402 - DNA, 15 bp, Homo sapiens
actgcaatccagcct

SEQ ID NO: 49403 - DNA, 15 bp, Homo sapiens
cactgcaatccagcc

SEQ ID NO: 49404 - DNA, 15 bp, Homo sapiens
ccactgcaatccagc

SEQ ID NO: 49405 - DNA, 15 bp, Homo sapiens
accactgcaatccag

SEQ ID NO: 49406 - DNA, 15 bp, Homo sapiens
caccactgcaatcca

SEQ ID NO: 49407 - DNA, 15 bp, Homo sapiens
gcaccactgcaatcc

SEQ ID NO: 49408 - DNA, 15 bp, Homo sapiens
agcaccactgcaatc

SEQ ID NO: 49409 - DNA, 15 bp, Homo sapiens
aagcaccactgcaat

SEQ ID NO: 49410 - DNA, 15 bp, Homo sapiens
caagcaccactgcaa

SEQ ID NO: 49411 - DNA, 15 bp, Homo sapiens
ccaagcaccactgca

SEQ ID NO: 49412 - DNA, 15 bp, Homo sapiens
gccaagcaccactgc

SEQ ID NO: 49413 - DNA, 15 bp, Homo sapiens
agccaagcaccactg

SEQ ID NO: 49414 - DNA, 15 bp, Homo sapiens
gagccaagcaccact

SEQ ID NO: 49415 - DNA, 15 bp, Homo sapiens
tgagccaagcaccac

SEQ ID NO: 49416 - DNA, 15 bp, Homo sapiens
gtgagccaagcacca

SEQ ID NO: 49417 - DNA, 15 bp, Homo sapiens
agtgagccaagcacc

SEQ ID NO: 49418 - DNA, 15 bp, Homo sapiens
cagtgagccaagcac

SEQ ID NO: 49419 - DNA, 15 bp, Homo sapiens
gcagtgagccaagca

SEQ ID NO: 49420 - DNA, 15 bp, Homo sapiens
tgcagtgagccaagc

SEQ ID NO: 49421 - DNA, 15 bp, Homo sapiens
tgcttgaacccggga

SEQ ID NO: 49422 - DNA, 15 bp, Homo sapiens
ttgcttgaacccggg

SEQ ID NO: 49423 - DNA, 15 bp, Homo sapiens
attgcttgaacccgg

SEQ ID NO: 49424 - DNA, 15 bp, Homo sapiens
aattgcttgaacccg

SEQ ID NO: 49425 - DNA, 15 bp, Homo sapiens
gaattgcttgaaccc

SEQ ID NO: 49426 - DNA, 15 bp, Homo sapiens
atcccagctactggg

SEQ ID NO: 49427 - DNA, 15 bp, Homo sapiens
aatcccagctactgg

SEQ ID NO: 49428 - DNA, 15 bp, Homo sapiens
taatcccagctactg

SEQ ID NO: 49429 - DNA, 15 bp, Homo sapiens
aggtgcctgtaatcc

SEQ ID NO: 49430 - DNA, 15 bp, Homo sapiens
caggtgcctgtaatc

SEQ ID NO: 49431 - DNA, 15 bp, Homo sapiens
gcaggtgcctgtaat

SEQ ID NO: 49432 - DNA, 15 bp, Homo sapiens
ggcaggtgcctgtaa

SEQ ID NO: 49433 - DNA, 15 bp, Homo sapiens
atggtggcaggtgcc

SEQ ID NO: 49434 - DNA, 15 bp, Homo sapiens
catggtggcaggtgc

SEQ ID NO: 49435 - DNA, 15 bp, Homo sapiens
gcatggtggcaggtg

SEQ ID NO: 49436 - DNA, 15 bp, Homo sapiens
ggcatggtggcaggt

SEQ ID NO: 49437 - DNA, 15 bp, Homo sapiens
aggcatggtggcagg

SEQ ID NO: 49438 - DNA, 15 bp, Homo sapiens
caggcatggtggcag

SEQ ID NO: 49439 - DNA, 15 bp, Homo sapiens
tggccaggcatggtg

SEQ ID NO: 49440 - DNA, 15 bp, Homo sapiens
ttggccaggcatggt

SEQ ID NO: 49441 - DNA, 15 bp, Homo sapiens
gttggccaggcatgg

SEQ ID NO: 49442 - DNA, 15 bp, Homo sapiens
tgttggccaggcatg

SEQ ID NO: 49443 - DNA, 15 bp, Homo sapiens
atgttggccaggcat

SEQ ID NO: 49444 - DNA, 15 bp, Homo sapiens
aatgttggccaggca

SEQ ID NO: 49445 - DNA, 15 bp, Homo sapiens
aaatgttggccaggc

SEQ ID NO: 49446 - DNA, 15 bp, Homo sapiens
aaaatgttggccagg

SEQ ID NO: 49447 - DNA, 15 bp, Homo sapiens
aaaaatgttggccag

SEQ ID NO: 49448 - DNA, 15 bp, Homo sapiens
caaaaatgttggcca

SEQ ID NO: 49449 - DNA, 15 bp, Homo sapiens
acaaaaatgttggcc

SEQ ID NO: 49450 - DNA, 15 bp, Homo sapiens
tacaaaaatgttggc

SEQ ID NO: 49451 - DNA, 15 bp, Homo sapiens
atacaaaaatgttgg

SEQ ID NO: 49452 - DNA, 15 bp, Homo sapiens
aatacaaaaatgttg

SEQ ID NO: 49453 - DNA, 15 bp, Homo sapiens
aaatacaaaaatgtt

SEQ ID NO: 49454 - DNA, 15 bp, Homo sapiens
aaaatacaaaaatgt

SEQ ID NO: 49455 - DNA, 15 bp, Homo sapiens
aaaaatacaaaaatg

SEQ ID NO: 49456 - DNA, 15 bp, Homo sapiens
ctaaaaaaatacaaa

SEQ ID NO: 49457 - DNA, 15 bp, Homo sapiens
actaaaaaaatacaa

SEQ ID NO: 49458 - DNA, 15 bp, Homo sapiens
tactaaaaaaataca

SEQ ID NO: 49459 - DNA, 15 bp, Homo sapiens
ctactaaaaaaatac

SEQ ID NO: 49460 - DNA, 15 bp, Homo sapiens
tctactaaaaaaata

SEQ ID NO: 49461 - DNA, 15 bp, Homo sapiens
ctctactaaaaaaat

SEQ ID NO: 49462 - DNA, 15 bp, Homo sapiens
tctctactaaaaaaa

SEQ ID NO: 49463 - DNA, 15 bp, Homo sapiens
atctctactaaaaaa

SEQ ID NO: 49464 - DNA, 15 bp, Homo sapiens
cgggtggatcacctg

SEQ ID NO: 49465 - DNA, 15 bp, Homo sapiens
gcgggtggatcacct

SEQ ID NO: 49466 - DNA, 15 bp, Homo sapiens
ggcgggtggatcacc

SEQ ID NO: 49467 - DNA, 15 bp, Homo sapiens
tcgaggcgggtggat

SEQ ID NO: 49468 - DNA, 15 bp, Homo sapiens
gtcgaggcgggtgga

SEQ ID NO: 49469 - DNA, 15 bp, Homo sapiens
ggtcgaggcgggtgg

SEQ ID NO: 49470 - DNA, 15 bp, Homo sapiens
aggtcgaggcgggtg

SEQ ID NO: 49471 - DNA, 15 bp, Homo sapiens
gaggtcgaggcgggt

SEQ ID NO: 49472 - DNA, 15 bp, Homo sapiens
ggaggtcgaggcggg

SEQ ID NO: 49473 - DNA, 15 bp, Homo sapiens
gggaggtcgaggcgg

SEQ ID NO: 49474 - DNA, 15 bp, Homo sapiens
tgggaggtcgaggcg

SEQ ID NO: 49475 - DNA, 15 bp, Homo sapiens
ttgggaggtcgaggc

SEQ ID NO: 49476 - DNA, 15 bp, Homo sapiens
tttgggaggtcgagg

SEQ ID NO: 49477 - DNA, 15 bp, Homo sapiens
ctttgggaggtcgag

SEQ ID NO: 49478 - DNA, 15 bp, Homo sapiens
actttgggaggtcga

SEQ ID NO: 49479 - DNA, 15 bp, Homo sapiens
tactttgggaggtcg

SEQ ID NO: 49480 - DNA, 15 bp, Homo sapiens
gtactttgggaggtc

SEQ ID NO: 49481 - DNA, 15 bp, Homo sapiens
agtactttgggaggt

SEQ ID NO: 49482 - DNA, 15 bp, Homo sapiens
cagtactttgggagg

SEQ ID NO: 49483 - DNA, 15 bp, Homo sapiens
ccagtactttgggag

SEQ ID NO: 49484 - DNA, 15 bp, Homo sapiens
cccagtactttggga

SEQ ID NO: 49485 - DNA, 15 bp, Homo sapiens
tcccagtactttggg

SEQ ID NO: 49486 - DNA, 15 bp, Homo sapiens
atcccagtactttgg

SEQ ID NO: 49487 - DNA, 15 bp, Homo sapiens
aatcccagtactttg

SEQ ID NO: 49488 - DNA, 15 bp, Homo sapiens
taatcccagtacttt

SEQ ID NO: 49489 - DNA, 15 bp, Homo sapiens
gtaatcccagtactt

SEQ ID NO: 49490 - DNA, 15 bp, Homo sapiens
tgtaatcccagtact

SEQ ID NO: 49491 - DNA, 15 bp, Homo sapiens
ctgtaatcccagtac

SEQ ID NO: 49492 - DNA, 15 bp, Homo sapiens
cctgtaatcccagta

SEQ ID NO: 49493 - DNA, 15 bp, Homo sapiens
acctgtaatcccagt

SEQ ID NO: 49494 - DNA, 15 bp, Homo sapiens
agtggctcacacctg

SEQ ID NO: 49495 - DNA, 15 bp, Homo sapiens
cagtggctcacacct

SEQ ID NO: 49496 - DNA, 15 bp, Homo sapiens
tgcagtggctcacac

SEQ ID NO: 49497 - DNA, 15 bp, Homo sapiens
gtgcagtggctcaca

SEQ ID NO: 49498 - DNA, 15 bp, Homo sapiens
ggtgcagtggctcac

SEQ ID NO: 49499 - DNA, 15 bp, Homo sapiens
cgggtgcagtggctc

SEQ ID NO: 49500 - DNA, 15 bp, Homo sapiens
ccgggtgcagtggct

SEQ ID NO: 49501 - DNA, 15 bp, Homo sapiens
gccgggtgcagtggc

SEQ ID NO: 49502 - DNA, 15 bp, Homo sapiens
gggccgggtgcagtg

SEQ ID NO: 49503 - DNA, 15 bp, Homo sapiens
tgggccgggtgcagt

SEQ ID NO: 49504 - DNA, 15 bp, Homo sapiens
ctgggccgggtgcag

SEQ ID NO: 49505 - DNA, 15 bp, Homo sapiens
tctgggccgggtgca

SEQ ID NO: 49506 - DNA, 15 bp, Homo sapiens
gtctgggccgggtgc

SEQ ID NO: 49507 - DNA, 15 bp, Homo sapiens
agtctgggccgggtg

SEQ ID NO: 49508 - DNA, 15 bp, Homo sapiens
gagtctgggccgggt

SEQ ID NO: 49509 - DNA, 15 bp, Homo sapiens
cgagtctgggccggg

SEQ ID NO: 49510 - DNA, 15 bp, Homo sapiens
tcgagtctgggccgg

SEQ ID NO: 49511 - DNA, 15 bp, Homo sapiens
ctcgagtctgggccg

SEQ ID NO: 49512 - DNA, 15 bp, Homo sapiens
actcgagtctgggcc

SEQ ID NO: 49513 - DNA, 15 bp, Homo sapiens
aactcgagtctgggc

SEQ ID NO: 49514 - DNA, 15 bp, Homo sapiens
aaactcgagtctggg

SEQ ID NO: 49515 - DNA, 15 bp, Homo sapiens
aaaactcgagtctgg

SEQ ID NO: 49516 - DNA, 15 bp, Homo sapiens
aaaaactcgagtctg

SEQ ID NO: 49517 - DNA, 15 bp, Homo sapiens
gaaaaactcgagtct

SEQ ID NO: 49518 - DNA, 15 bp, Homo sapiens
tgaaaaactcgagtc

SEQ ID NO: 49519 - DNA, 15 bp, Homo sapiens
atgaaaaactcgagt

SEQ ID NO: 49520 - DNA, 15 bp, Homo sapiens
gatgaaaaactcgag

SEQ ID NO: 49521 - DNA, 15 bp, Homo sapiens
agatgaaaaactcga

SEQ ID NO: 49522 - DNA, 15 bp, Homo sapiens
aagatgaaaaactcg

SEQ ID NO: 49523 - DNA, 15 bp, Homo sapiens
taagatgaaaaactc

SEQ ID NO: 49524 - DNA, 15 bp, Homo sapiens
ttaagatgaaaaact

SEQ ID NO: 49525 - DNA, 15 bp, Homo sapiens
attaagatgaaaaac

SEQ ID NO: 49526 - DNA, 15 bp, Homo sapiens
cattaagatgaaaaa

SEQ ID NO: 49527 - DNA, 15 bp, Homo sapiens
gcattaagatgaaaa

SEQ ID NO: 49528 - DNA, 15 bp, Homo sapiens
agcattaagatgaaa

SEQ ID NO: 49529 - DNA, 15 bp, Homo sapiens
aagcattaagatgaa

SEQ ID NO: 49530 - DNA, 15 bp, Homo sapiens
aaagcattaagatga

SEQ ID NO: 49531 - DNA, 15 bp, Homo sapiens
aaaagcattaagatg

SEQ ID NO: 49532 - DNA, 15 bp, Homo sapiens
aaaaagcattaagat

SEQ ID NO: 49533 - DNA, 15 bp, Homo sapiens
gaaaaagcattaaga

SEQ ID NO: 49534 - DNA, 15 bp, Homo sapiens
tgaaaaagcattaag

SEQ ID NO: 49535 - DNA, 15 bp, Homo sapiens
atgaaaaagcattaa

SEQ ID NO: 49536 - DNA, 15 bp, Homo sapiens
aatgaaaaagcatta

SEQ ID NO: 49537 - DNA, 15 bp, Homo sapiens
caatgaaaaagcatt

SEQ ID NO: 49538 - DNA, 15 bp, Homo sapiens
gcaatgaaaaagcat

SEQ ID NO: 49539 - DNA, 15 bp, Homo sapiens
ggcaatgaaaaagca

SEQ ID NO: 49540 - DNA, 15 bp, Homo sapiens
aggcaatgaaaaagc

SEQ ID NO: 49541 - DNA, 15 bp, Homo sapiens
caggcaatgaaaaag

SEQ ID NO: 49542 - DNA, 15 bp, Homo sapiens
tcaggcaatgaaaaa

SEQ ID NO: 49543 - DNA, 15 bp, Homo sapiens
gtcaggcaatgaaaa

SEQ ID NO: 49544 - DNA, 15 bp, Homo sapiens
tgtcaggcaatgaaa

SEQ ID NO: 49545 - DNA, 15 bp, Homo sapiens
gtgtcaggcaatgaa

SEQ ID NO: 49546 - DNA, 15 bp, Homo sapiens
agtgtcaggcaatga

SEQ ID NO: 49547 - DNA, 15 bp, Homo sapiens
aagtgtcaggcaatg

SEQ ID NO: 49548 - DNA, 15 bp, Homo sapiens
aaagtgtcaggcaat

SEQ ID NO: 49549 - DNA, 15 bp, Homo sapiens
taaagtgtcaggcaa

SEQ ID NO: 49550 - DNA, 15 bp, Homo sapiens
gtaaagtgtcaggca

SEQ ID NO: 49551 - DNA, 15 bp, Homo sapiens
agtaaagtgtcaggc

SEQ ID NO: 49552 - DNA, 15 bp, Homo sapiens
cagtaaagtgtcagg

SEQ ID NO: 49553 - DNA, 15 bp, Homo sapiens
tcagtaaagtgtcag

SEQ ID NO: 49554 - DNA, 15 bp, Homo sapiens
ctcagtaaagtgtca

SEQ ID NO: 49555 - DNA, 15 bp, Homo sapiens
tctcagtaaagtgtc

SEQ ID NO: 49556 - DNA, 15 bp, Homo sapiens
gtctcagtaaagtgt

SEQ ID NO: 49557 - DNA, 15 bp, Homo sapiens
ggtctcagtaaagtg

SEQ ID NO: 49558 - DNA, 15 bp, Homo sapiens
tggtctcagtaaagt

SEQ ID NO: 49559 - DNA, 15 bp, Homo sapiens
ttggtctcagtaaag

SEQ ID NO: 49560 - DNA, 15 bp, Homo sapiens
cttggtctcagtaaa

SEQ ID NO: 49561 - DNA, 15 bp, Homo sapiens
tcttggtctcagtaa

SEQ ID NO: 49562 - DNA, 15 bp, Homo sapiens
atcttggtctcagta

SEQ ID NO: 49563 - DNA, 15 bp, Homo sapiens
tatcttggtctcagt

SEQ ID NO: 49564 - DNA, 15 bp, Homo sapiens
ctatcttggtctcag

SEQ ID NO: 49565 - DNA, 15 bp, Homo sapiens
cctatcttggtctca

SEQ ID NO: 49566 - DNA, 15 bp, Homo sapiens
ccctatcttggtctc

SEQ ID NO: 49567 - DNA, 15 bp, Homo sapiens
tccctatcttggtct

SEQ ID NO: 49568 - DNA, 15 bp, Homo sapiens
ttccctatcttggtc

SEQ ID NO: 49569 - DNA, 15 bp, Homo sapiens
gttccctatcttggt

SEQ ID NO: 49570 - DNA, 15 bp, Homo sapiens
agttccctatcttgg

SEQ ID NO: 49571 - DNA, 15 bp, Homo sapiens
aagttccctatcttg

SEQ ID NO: 49572 - DNA, 15 bp, Homo sapiens
gaagttccctatctt

SEQ ID NO: 49573 - DNA, 15 bp, Homo sapiens
tgaagttccctatct

SEQ ID NO: 49574 - DNA, 15 bp, Homo sapiens
gtgaagttccctatc

SEQ ID NO: 49575 - DNA, 15 bp, Homo sapiens
tgtgaagttccctat

SEQ ID NO: 49576 - DNA, 15 bp, Homo sapiens
atgtgaagttcccta

SEQ ID NO: 49577 - DNA, 15 bp, Homo sapiens
tatgtgaagttccct

SEQ ID NO: 49578 - DNA, 15 bp, Homo sapiens
gtatgtgaagttccc

SEQ ID NO: 49579 - DNA, 15 bp, Homo sapiens
tgtatgtgaagttcc

SEQ ID NO: 49580 - DNA, 15 bp, Homo sapiens
ctgtatgtgaagttc

SEQ ID NO: 49581 - DNA, 15 bp, Homo sapiens
actgtatgtgaagtt

SEQ ID NO: 49582 - DNA, 15 bp, Homo sapiens
tactgtatgtgaagt

SEQ ID NO: 49583 - DNA, 15 bp, Homo sapiens
gtactgtatgtgaag

SEQ ID NO: 49584 - DNA, 15 bp, Homo sapiens
ggtactgtatgtgaa

SEQ ID NO: 49585 - DNA, 15 bp, Homo sapiens
aggtactgtatgtga

SEQ ID NO: 49586 - DNA, 15 bp, Homo sapiens
aaggtactgtatgtg

SEQ ID NO: 49587 - DNA, 15 bp, Homo sapiens
aaaggtactgtatgt

SEQ ID NO: 49588 - DNA, 15 bp, Homo sapiens
aaaaggtactgtatg

SEQ ID NO: 49589 - DNA, 15 bp, Homo sapiens
gaaaaggtactgtat

SEQ ID NO: 49590 - DNA, 15 bp, Homo sapiens
agaaaaggtactgta

SEQ ID NO: 49591 - DNA, 15 bp, Homo sapiens
gagaaaaggtactgt

SEQ ID NO: 49592 - DNA, 15 bp, Homo sapiens
ggagaaaaggtactg

SEQ ID NO: 49593 - DNA, 15 bp, Homo sapiens
gggagaaaaggtact

SEQ ID NO: 49594 - DNA, 15 bp, Homo sapiens
tgggagaaaaggtac

SEQ ID NO: 49595 - DNA, 15 bp, Homo sapiens
ttgggagaaaaggta

SEQ ID NO: 49596 - DNA, 15 bp, Homo sapiens
cttgggagaaaaggt

SEQ ID NO: 49597 - DNA, 15 bp, Homo sapiens
ccttgggagaaaagg

SEQ ID NO: 49598 - DNA, 15 bp, Homo sapiens
gccttgggagaaaag

SEQ ID NO: 49599 - DNA, 15 bp, Homo sapiens
cgccttgggagaaaa

SEQ ID NO: 49600 - DNA, 15 bp, Homo sapiens
ccgccttgggagaaa

SEQ ID NO: 49601 - DNA, 15 bp, Homo sapiens
tccgccttgggagaa

SEQ ID NO: 49602 - DNA, 15 bp, Homo sapiens
ttccgccttgggaga

SEQ ID NO: 49603 - DNA, 15 bp, Homo sapiens
cttccgccttgggag

SEQ ID NO: 49604 - DNA, 15 bp, Homo sapiens
tcttccgccttggga

SEQ ID NO: 49605 - DNA, 15 bp, Homo sapiens
ctcttccgccttggg

SEQ ID NO: 49606 - DNA, 15 bp, Homo sapiens
cctcttccgccttgg

SEQ ID NO: 49607 - DNA, 15 bp, Homo sapiens
ccctcttccgccttg

SEQ ID NO: 49608 - DNA, 15 bp, Homo sapiens
gccctcttccgcctt

SEQ ID NO: 49609 - DNA, 15 bp, Homo sapiens
agccctcttccgcct

SEQ ID NO: 49610 - DNA, 15 bp, Homo sapiens
cagccctcttccgcc

SEQ ID NO: 49611 - DNA, 15 bp, Homo sapiens
acagccctcttccgc

SEQ ID NO: 49612 - DNA, 15 bp, Homo sapiens
aacagccctcttccg

SEQ ID NO: 49613 - DNA, 15 bp, Homo sapiens
gaacagccctcttcc

SEQ ID NO: 49614 - DNA, 15 bp, Homo sapiens
tgaacagccctcttc

SEQ ID NO: 49615 - DNA, 15 bp, Homo sapiens
ttgaacagccctctt

SEQ ID NO: 49616 - DNA, 15 bp, Homo sapiens
attgaacagccctct

SEQ ID NO: 49617 - DNA, 15 bp, Homo sapiens
aattgaacagccctc

SEQ ID NO: 49618 - DNA, 15 bp, Homo sapiens
aaattgaacagccct

SEQ ID NO: 49619 - DNA, 15 bp, Homo sapiens
gaaattgaacagccc

SEQ ID NO: 49620 - DNA, 15 bp, Homo sapiens
agaaattgaacagcc

SEQ ID NO: 49621 - DNA, 15 bp, Homo sapiens
tagaaattgaacagc

SEQ ID NO: 49622 - DNA, 15 bp, Homo sapiens
gtagaaattgaacag

SEQ ID NO: 49623 - DNA, 15 bp, Homo sapiens
tgtagaaattgaaca

SEQ ID NO: 49624 - DNA, 15 bp, Homo sapiens
gtgtagaaattgaac

SEQ ID NO: 49625 - DNA, 15 bp, Homo sapiens
agtgtagaaattgaa

SEQ ID NO: 49626 - DNA, 15 bp, Homo sapiens
tagtgtagaaattga

SEQ ID NO: 49627 - DNA, 15 bp, Homo sapiens
ctagtgtagaaattg

SEQ ID NO: 49628 - DNA, 15 bp, Homo sapiens
tctagtgtagaaatt

SEQ ID NO: 49629 - DNA, 15 bp, Homo sapiens
ctctagtgtagaaat

SEQ ID NO: 49630 - DNA, 15 bp, Homo sapiens
actctagtgtagaaa

SEQ ID NO: 49631 - DNA, 15 bp, Homo sapiens
aactctagtgtagaa

SEQ ID NO: 49632 - DNA, 15 bp, Homo sapiens
gaactctagtgtaga

SEQ ID NO: 49633 - DNA, 15 bp, Homo sapiens
cgaactctagtgtag

SEQ ID NO: 49634 - DNA, 15 bp, Homo sapiens
ccgaactctagtgta

SEQ ID NO: 49635 - DNA, 15 bp, Homo sapiens
cccgaactctagtgt

SEQ ID NO: 49636 - DNA, 15 bp, Homo sapiens
ccccgaactctagtg

SEQ ID NO: 49637 - DNA, 15 bp, Homo sapiens
tccccgaactctagt

SEQ ID NO: 49638 - DNA, 15 bp, Homo sapiens
ctccccgaactctag

SEQ ID NO: 49639 - DNA, 15 bp, Homo sapiens
actccccgaactcta

SEQ ID NO: 49640 - DNA, 15 bp, Homo sapiens
aactccccgaactct

SEQ ID NO: 49641 - DNA, 15 bp, Homo sapiens
aaactccccgaactc

SEQ ID NO: 49642 - DNA, 15 bp, Homo sapiens
aaaactccccgaact

SEQ ID NO: 49643 - DNA, 15 bp, Homo sapiens
taaaactccccgaac

SEQ ID NO: 49644 - DNA, 15 bp, Homo sapiens
ctaaaactccccgaa

SEQ ID NO: 49645 - DNA, 15 bp, Homo sapiens
tctaaaactccccga

SEQ ID NO: 49646 - DNA, 15 bp, Homo sapiens
ttctaaaactccccg

SEQ ID NO: 49647 - DNA, 15 bp, Homo sapiens
tttctaaaactcccc

SEQ ID NO: 49648 - DNA, 15 bp, Homo sapiens
atttctaaaactccc

SEQ ID NO: 49649 - DNA, 15 bp, Homo sapiens
catttctaaaactcc

SEQ ID NO: 49650 - DNA, 15 bp, Homo sapiens
tcatttctaaaactc

SEQ ID NO: 49651 - DNA, 15 bp, Homo sapiens
ctcatttctaaaact

SEQ ID NO: 49652 - DNA, 15 bp, Homo sapiens
actcatttctaaaac

SEQ ID NO: 49653 - DNA, 15 bp, Homo sapiens
gactcatttctaaaa

SEQ ID NO: 49654 - DNA, 15 bp, Homo sapiens
tgactcatttctaaa

SEQ ID NO: 49655 - DNA, 15 bp, Homo sapiens
ctgactcatttctaa

SEQ ID NO: 49656 - DNA, 15 bp, Homo sapiens
actgactcatttcta

SEQ ID NO: 49657 - DNA, 15 bp, Homo sapiens
aactgactcatttct

SEQ ID NO: 49658 - DNA, 15 bp, Homo sapiens
taactgactcatttc

SEQ ID NO: 49659 - DNA, 15 bp, Homo sapiens
ataactgactcattt

SEQ ID NO: 49660 - DNA, 15 bp, Homo sapiens
gataactgactcatt

SEQ ID NO: 49661 - DNA, 15 bp, Homo sapiens
cgataactgactcat

SEQ ID NO: 49662 - DNA, 15 bp, Homo sapiens
tcgataactgactca

SEQ ID NO: 49663 - DNA, 15 bp, Homo sapiens
ctcgataactgactc

SEQ ID NO: 49664 - DNA, 15 bp, Homo sapiens
cctcgataactgact

SEQ ID NO: 49665 - DNA, 15 bp, Homo sapiens
tcctcgataactgac

SEQ ID NO: 49666 - DNA, 15 bp, Homo sapiens
atcctcgataactga

SEQ ID NO: 49667 - DNA, 15 bp, Homo sapiens
catcctcgataactg

SEQ ID NO: 49668 - DNA, 15 bp, Homo sapiens
tcatcctcgataact

SEQ ID NO: 49669 - DNA, 15 bp, Homo sapiens
ctcatcctcgataac

SEQ ID NO: 49670 - DNA, 15 bp, Homo sapiens
tctcatcctcgataa

SEQ ID NO: 49671 - DNA, 15 bp, Homo sapiens
ctctcatcctcgata

SEQ ID NO: 49672 - DNA, 15 bp, Homo sapiens
gctctcatcctcgat

SEQ ID NO: 49673 - DNA, 15 bp, Homo sapiens
tgctctcatcctcga

SEQ ID NO: 49674 - DNA, 15 bp, Homo sapiens
ctgctctcatcctcg

SEQ ID NO: 49675 - DNA, 15 bp, Homo sapiens
actgctctcatcctc

SEQ ID NO: 49676 - DNA, 15 bp, Homo sapiens
aactgctctcatcct

SEQ ID NO: 49677 - DNA, 15 bp, Homo sapiens
gaactgctctcatcc

SEQ ID NO: 49678 - DNA, 15 bp, Homo sapiens
ggaactgctctcatc

SEQ ID NO: 49679 - DNA, 15 bp, Homo sapiens
aggaactgctctcat

SEQ ID NO: 49680 - DNA, 15 bp, Homo sapiens
caggaactgctctca

SEQ ID NO: 49681 - DNA, 15 bp, Homo sapiens
tcaggaactgctctc

SEQ ID NO: 49682 - DNA, 15 bp, Homo sapiens
atcaggaactgctct

SEQ ID NO: 49683 - DNA, 15 bp, Homo sapiens
tatcaggaactgctc

SEQ ID NO: 49684 - DNA, 15 bp, Homo sapiens
ctatcaggaactgct

SEQ ID NO: 49685 - DNA, 15 bp, Homo sapiens
cctatcaggaactgc

SEQ ID NO: 49686 - DNA, 15 bp, Homo sapiens
gcctatcaggaactg

SEQ ID NO: 49687 - DNA, 15 bp, Homo sapiens
agcctatcaggaact

SEQ ID NO: 49688 - DNA, 15 bp, Homo sapiens
gagcctatcaggaac

SEQ ID NO: 49689 - DNA, 15 bp, Homo sapiens
tgagcctatcaggaa

SEQ ID NO: 49690 - DNA, 15 bp, Homo sapiens
ttgagcctatcagga

SEQ ID NO: 49691 - DNA, 15 bp, Homo sapiens
gttgagcctatcagg

SEQ ID NO: 49692 - DNA, 15 bp, Homo sapiens
ggttgagcctatcag

SEQ ID NO: 49693 - DNA, 15 bp, Homo sapiens
tggttgagcctatca

SEQ ID NO: 49694 - DNA, 15 bp, Homo sapiens
gtggttgagcctatc

SEQ ID NO: 49695 - DNA, 15 bp, Homo sapiens
tgtggttgagcctat

SEQ ID NO: 49696 - DNA, 15 bp, Homo sapiens
ttgtggttgagccta

SEQ ID NO: 49697 - DNA, 15 bp, Homo sapiens
attgtggttgagcct

SEQ ID NO: 49698 - DNA, 15 bp, Homo sapiens
cattgtggttgagcc

SEQ ID NO: 49699 - DNA, 15 bp, Homo sapiens
tcattgtggttgagc

SEQ ID NO: 49700 - DNA, 15 bp, Homo sapiens
ctcattgtggttgag

SEQ ID NO: 49701 - DNA, 15 bp, Homo sapiens
tctcattgtggttga

SEQ ID NO: 49702 - DNA, 15 bp, Homo sapiens
atctcattgtggttg

SEQ ID NO: 49703 - DNA, 15 bp, Homo sapiens
catctcattgtggtt

SEQ ID NO: 49704 - DNA, 15 bp, Homo sapiens
acatctcattgtggt

SEQ ID NO: 49705 - DNA, 15 bp, Homo sapiens
tacatctcattgtgg

SEQ ID NO: 49706 - DNA, 15 bp, Homo sapiens
ctacatctcattgtg

SEQ ID NO: 49707 - DNA, 15 bp, Homo sapiens
gctacatctcattgt

SEQ ID NO: 49708 - DNA, 15 bp, Homo sapiens
agctacatctcattg

SEQ ID NO: 49709 - DNA, 15 bp, Homo sapiens
cagctacatctcatt

SEQ ID NO: 49710 - DNA, 15 bp, Homo sapiens
acagctacatctcat

SEQ ID NO: 49711 - DNA, 15 bp, Homo sapiens
aacagctacatctca

SEQ ID NO: 49712 - DNA, 15 bp, Homo sapiens
gaacagctacatctc

SEQ ID NO: 49713 - DNA, 15 bp, Homo sapiens
tgaacagctacatct

SEQ ID NO: 49714 - DNA, 15 bp, Homo sapiens
ctgaacagctacatc

SEQ ID NO: 49715 - DNA, 15 bp, Homo sapiens
tctgaacagctacat

SEQ ID NO: 49716 - DNA, 15 bp, Homo sapiens
ctctgaacagctaca

SEQ ID NO: 49717 - DNA, 15 bp, Homo sapiens
tctctgaacagctac

SEQ ID NO: 49718 - DNA, 15 bp, Homo sapiens
ttctctgaacagcta

SEQ ID NO: 49719 - DNA, 15 bp, Homo sapiens
tttctctgaacagct

SEQ ID NO: 49720 - DNA, 15 bp, Homo sapiens
ctttctctgaacagc

SEQ ID NO: 49721 - DNA, 15 bp, Homo sapiens
gctttctctgaacag

SEQ ID NO: 49722 - DNA, 15 bp, Homo sapiens
tgctttctctgaaca

SEQ ID NO: 49723 - DNA, 15 bp, Homo sapiens
atgctttctctgaac

SEQ ID NO: 49724 - DNA, 15 bp, Homo sapiens
aatgctttctctgaa

SEQ ID NO: 49725 - DNA, 15 bp, Homo sapiens
gaatgctttctctga

SEQ ID NO: 49726 - DNA, 15 bp, Homo sapiens
agaatgctttctctg

SEQ ID NO: 49727 - DNA, 15 bp, Homo sapiens
aagaatgctttctct

SEQ ID NO: 49728 - DNA, 15 bp, Homo sapiens
aaagaatgctttctc

SEQ ID NO: 49729 - DNA, 15 bp, Homo sapiens
aaaagaatgctttct

SEQ ID NO: 49730 - DNA, 15 bp, Homo sapiens
taaaagaatgctttc

SEQ ID NO: 49731 - DNA, 15 bp, Homo sapiens
ataaaagaatgcttt

SEQ ID NO: 49732 - DNA, 15 bp, Homo sapiens
gataaaagaatgctt

SEQ ID NO: 49733 - DNA, 15 bp, Homo sapiens
agataaaagaatgct

SEQ ID NO: 49734 - DNA, 15 bp, Homo sapiens
tagataaaagaatgc

SEQ ID NO: 49735 - DNA, 15 bp, Homo sapiens
atagataaaagaatg

SEQ ID NO: 49736 - DNA, 15 bp, Homo sapiens
tatagataaaagaat

SEQ ID NO: 49737 - DNA, 15 bp, Homo sapiens
ttatagataaaagaa

SEQ ID NO: 49738 - DNA, 15 bp, Homo sapiens
tttatagataaaaga

SEQ ID NO: 49739 - DNA, 15 bp, Homo sapiens
gtttatagataaaag

SEQ ID NO: 49740 - DNA, 15 bp, Homo sapiens
agtttatagataaaa

SEQ ID NO: 49741 - DNA, 15 bp, Homo sapiens
cagtttatagataaa

SEQ ID NO: 49742 - DNA, 15 bp, Homo sapiens
ccagtttatagataa

SEQ ID NO: 49743 - DNA, 15 bp, Homo sapiens
tccagtttatagata

SEQ ID NO: 49744 - DNA, 15 bp, Homo sapiens
ttccagtttatagat

SEQ ID NO: 49745 - DNA, 15 bp, Homo sapiens
cttccagtttataga

SEQ ID NO: 49746 - DNA, 15 bp, Homo sapiens
tcttccagtttatag

SEQ ID NO: 49747 - DNA, 15 bp, Homo sapiens
atcttccagtttata

SEQ ID NO: 49748 - DNA, 15 bp, Homo sapiens
tatcttccagtttat

SEQ ID NO: 49749 - DNA, 15 bp, Homo sapiens
ttatcttccagttta

SEQ ID NO: 49750 - DNA, 15 bp, Homo sapiens
attatcttccagttt

SEQ ID NO: 49751 - DNA, 15 bp, Homo sapiens
gattatcttccagtt

SEQ ID NO: 49752 - DNA, 15 bp, Homo sapiens
ggattatcttccagt

SEQ ID NO: 49753 - DNA, 15 bp, Homo sapiens
gggattatcttccag

SEQ ID NO: 49754 - DNA, 15 bp, Homo sapiens
cgggattatcttcca

SEQ ID NO: 49755 - DNA, 15 bp, Homo sapiens
ccgggattatcttcc

SEQ ID NO: 49756 - DNA, 15 bp, Homo sapiens
accgggattatcttc

SEQ ID NO: 49757 - DNA, 15 bp, Homo sapiens
caccgggattatctt

SEQ ID NO: 49758 - DNA, 15 bp, Homo sapiens
tcaccgggattatct

SEQ ID NO: 49759 - DNA, 15 bp, Homo sapiens
ttcaccgggattatc

SEQ ID NO: 49760 - DNA, 15 bp, Homo sapiens
tttcaccgggattat

SEQ ID NO: 49761 - DNA, 15 bp, Homo sapiens
gtttcaccgggatta

SEQ ID NO: 49762 - DNA, 15 bp, Homo sapiens
cgtttcaccgggatt

SEQ ID NO: 49763 - DNA, 15 bp, Homo sapiens
tcgtttcaccgggat

SEQ ID NO: 49764 - DNA, 15 bp, Homo sapiens
ttcgtttcaccggga

SEQ ID NO: 49765 - DNA, 15 bp, Homo sapiens
cttcgtttcaccggg

SEQ ID NO: 49766 - DNA, 15 bp, Homo sapiens
gcttcgtttcaccgg

SEQ ID NO: 49767 - DNA, 15 bp, Homo sapiens
ggcttcgtttcaccg

SEQ ID NO: 49768 - DNA, 15 bp, Homo sapiens
gggcttcgtttcacc

SEQ ID NO: 49769 - DNA, 15 bp, Homo sapiens
tgggcttcgtttcac

SEQ ID NO: 49770 - DNA, 15 bp, Homo sapiens
ctgggcttcgtttca

SEQ ID NO: 49771 - DNA, 15 bp, Homo sapiens
gctgggcttcgtttc

SEQ ID NO: 49772 - DNA, 15 bp, Homo sapiens
ggctgggcttcgttt

SEQ ID NO: 49773 - DNA, 15 bp, Homo sapiens
gggctgggcttcgtt

SEQ ID NO: 49774 - DNA, 15 bp, Homo sapiens
ggggctgggcttcgt

SEQ ID NO: 49775 - DNA, 15 bp, Homo sapiens
tggggctgggcttcg

SEQ ID NO: 49776 - DNA, 15 bp, Homo sapiens
ctggggctgggcttc

SEQ ID NO: 49777 - DNA, 15 bp, Homo sapiens
cctggggctgggctt

SEQ ID NO: 49778 - DNA, 15 bp, Homo sapiens
ccctggggctgggct

SEQ ID NO: 49779 - DNA, 15 bp, Homo sapiens
cccctggggctgggc

SEQ ID NO: 49780 - DNA, 15 bp, Homo sapiens
gcccctggggctggg

SEQ ID NO: 49781 - DNA, 15 bp, Homo sapiens
agcccctggggctgg

SEQ ID NO: 49782 - DNA, 15 bp, Homo sapiens
aagcccctggggctg

SEQ ID NO: 49783 - DNA, 15 bp, Homo sapiens
gaagcccctggggct

SEQ ID NO: 49784 - DNA, 15 bp, Homo sapiens
tgaagcccctggggc

SEQ ID NO: 49785 - DNA, 15 bp, Homo sapiens
gtgaagcccctgggg

SEQ ID NO: 49786 - DNA, 15 bp, Homo sapiens
agtgaagcccctggg

SEQ ID NO: 49787 - DNA, 15 bp, Homo sapiens
tagtgaagcccctgg

SEQ ID NO: 49788 - DNA, 15 bp, Homo sapiens
ttagtgaagcccctg

SEQ ID NO: 49789 - DNA, 15 bp, Homo sapiens
gttagtgaagcccct

SEQ ID NO: 49790 - DNA, 15 bp, Homo sapiens
agttagtgaagcccc

SEQ ID NO: 49791 - DNA, 15 bp, Homo sapiens
gagttagtgaagccc

SEQ ID NO: 49792 - DNA, 15 bp, Homo sapiens
ggagttagtgaagcc

SEQ ID NO: 49793 - DNA, 15 bp, Homo sapiens
tggagttagtgaagc

SEQ ID NO: 49794 - DNA, 15 bp, Homo sapiens
ctggagttagtgaag

SEQ ID NO: 49795 - DNA, 15 bp, Homo sapiens
cctggagttagtgaa

SEQ ID NO: 49796 - DNA, 15 bp, Homo sapiens
gcctggagttagtga

SEQ ID NO: 49797 - DNA, 15 bp, Homo sapiens
agcctggagttagtg

SEQ ID NO: 49798 - DNA, 15 bp, Homo sapiens
cagcctggagttagt

SEQ ID NO: 49799 - DNA, 15 bp, Homo sapiens
acagcctggagttag

SEQ ID NO: 49800 - DNA, 15 bp, Homo sapiens
cacagcctggagtta

SEQ ID NO: 49801 - DNA, 15 bp, Homo sapiens
gcacagcctggagtt

SEQ ID NO: 49802 - DNA, 15 bp, Homo sapiens
agcacagcctggagt

SEQ ID NO: 49803 - DNA, 15 bp, Homo sapiens
aagcacagcctggag

SEQ ID NO: 49804 - DNA, 15 bp, Homo sapiens
gaagcacagcctgga

SEQ ID NO: 49805 - DNA, 15 bp, Homo sapiens
agaagcacagcctgg

SEQ ID NO: 49806 - DNA, 15 bp, Homo sapiens
gagaagcacagcctg

SEQ ID NO: 49807 - DNA, 15 bp, Homo sapiens
tgagaagcacagcct

SEQ ID NO: 49808 - DNA, 15 bp, Homo sapiens
ttgagaagcacagcc

SEQ ID NO: 49809 - DNA, 15 bp, Homo sapiens
tttgagaagcacagc

SEQ ID NO: 49810 - DNA, 15 bp, Homo sapiens
gtttgagaagcacag

SEQ ID NO: 49811 - DNA, 15 bp, Homo sapiens
agtttgagaagcaca

SEQ ID NO: 49812 - DNA, 15 bp, Homo sapiens
aagtttgagaagcac

SEQ ID NO: 49813 - DNA, 15 bp, Homo sapiens
aaagtttgagaagca

SEQ ID NO: 49814 - DNA, 15 bp, Homo sapiens
taaagtttgagaagc

SEQ ID NO: 49815 - DNA, 15 bp, Homo sapiens
ctaaagtttgagaag

SEQ ID NO: 49816 - DNA, 15 bp, Homo sapiens
actaaagtttgagaa

SEQ ID NO: 49817 - DNA, 15 bp, Homo sapiens
cactaaagtttgaga

SEQ ID NO: 49818 - DNA, 15 bp, Homo sapiens
tcactaaagtttgag

SEQ ID NO: 49819 - DNA, 15 bp, Homo sapiens
ctcactaaagtttga

SEQ ID NO: 49820 - DNA, 15 bp, Homo sapiens
gctcactaaagtttg

SEQ ID NO: 49821 - DNA, 15 bp, Homo sapiens
tgctcactaaagttt

SEQ ID NO: 49822 - DNA, 15 bp, Homo sapiens
atgctcactaaagtt

SEQ ID NO: 49823 - DNA, 15 bp, Homo sapiens
tatgctcactaaagt

SEQ ID NO: 49824 - DNA, 15 bp, Homo sapiens
ctatgctcactaaag

SEQ ID NO: 49825 - DNA, 15 bp, Homo sapiens
cctatgctcactaaa

SEQ ID NO: 49826 - DNA, 15 bp, Homo sapiens
tcctatgctcactaa

SEQ ID NO: 49827 - DNA, 15 bp, Homo sapiens
ttcctatgctcacta

SEQ ID NO: 49828 - DNA, 15 bp, Homo sapiens
attcctatgctcact

SEQ ID NO: 49829 - DNA, 15 bp, Homo sapiens
gattcctatgctcac

SEQ ID NO: 49830 - DNA, 15 bp, Homo sapiens
tgattcctatgctca

SEQ ID NO: 49831 - DNA, 15 bp, Homo sapiens
gtgattcctatgctc

SEQ ID NO: 49832 - DNA, 15 bp, Homo sapiens
ggtgattcctatgct

SEQ ID NO: 49833 - DNA, 15 bp, Homo sapiens
aggtgattcctatgc

SEQ ID NO: 49834 - DNA, 15 bp, Homo sapiens
caggtgattcctatg

SEQ ID NO: 49835 - DNA, 15 bp, Homo sapiens
ccaggtgattcctat

SEQ ID NO: 49836 - DNA, 15 bp, Homo sapiens
cccaggtgattccta

SEQ ID NO: 49837 - DNA, 15 bp, Homo sapiens
gcccaggtgattcct

SEQ ID NO: 49838 - DNA, 15 bp, Homo sapiens
tgcccaggtgattcc

SEQ ID NO: 49839 - DNA, 15 bp, Homo sapiens
atgcccaggtgattc

SEQ ID NO: 49840 - DNA, 15 bp, Homo sapiens
gatgcccaggtgatt

SEQ ID NO: 49841 - DNA, 15 bp, Homo sapiens
agatgcccaggtgat

SEQ ID NO: 49842 - DNA, 15 bp, Homo sapiens
aagatgcccaggtga

SEQ ID NO: 49843 - DNA, 15 bp, Homo sapiens
caagatgcccaggtg

SEQ ID NO: 49844 - DNA, 15 bp, Homo sapiens
acaagatgcccaggt

SEQ ID NO: 49845 - DNA, 15 bp, Homo sapiens
cacaagatgcccagg

SEQ ID NO: 49846 - DNA, 15 bp, Homo sapiens
tcacaagatgcccag

SEQ ID NO: 49847 - DNA, 15 bp, Homo sapiens
ttcacaagatgccca

SEQ ID NO: 49848 - DNA, 15 bp, Homo sapiens
cttcacaagatgccc

SEQ ID NO: 49849 - DNA, 15 bp, Homo sapiens
gcttcacaagatgcc

SEQ ID NO: 49850 - DNA, 15 bp, Homo sapiens
agcttcacaagatgc

SEQ ID NO: 49851 - DNA, 15 bp, Homo sapiens
cagcttcacaagatg

SEQ ID NO: 49852 - DNA, 15 bp, Homo sapiens
acagcttcacaagat

SEQ ID NO: 49853 - DNA, 15 bp, Homo sapiens
tacagcttcacaaga

SEQ ID NO: 49854 - DNA, 15 bp, Homo sapiens
ctacagcttcacaag

SEQ ID NO: 49855 - DNA, 15 bp, Homo sapiens
tctacagcttcacaa

SEQ ID NO: 49856 - DNA, 15 bp, Homo sapiens
atctacagcttcaca

SEQ ID NO: 49857 - DNA, 15 bp, Homo sapiens
aatctacagcttcac

SEQ ID NO: 49858 - DNA, 15 bp, Homo sapiens
aaatctacagcttca

SEQ ID NO: 49859 - DNA, 15 bp, Homo sapiens
caaatctacagcttc

SEQ ID NO: 49860 - DNA, 15 bp, Homo sapiens
tcaaatctacagctt

SEQ ID NO: 49861 - DNA, 15 bp, Homo sapiens
ttcaaatctacagct

SEQ ID NO: 49862 - DNA, 15 bp, Homo sapiens
attcaaatctacagc

SEQ ID NO: 49863 - DNA, 15 bp, Homo sapiens
aattcaaatctacag

SEQ ID NO: 49864 - DNA, 15 bp, Homo sapiens
gaattcaaatctaca

SEQ ID NO: 49865 - DNA, 15 bp, Homo sapiens
agaattcaaatctac

SEQ ID NO: 49866 - DNA, 15 bp, Homo sapiens
cagaattcaaatcta

SEQ ID NO: 49867 - DNA, 15 bp, Homo sapiens
gcagaattcaaatct

SEQ ID NO: 49868 - DNA, 15 bp, Homo sapiens
tgcagaattcaaatc

SEQ ID NO: 49869 - DNA, 15 bp, Homo sapiens
ctgcagaattcaaat

SEQ ID NO: 49870 - DNA, 15 bp, Homo sapiens
cctgcagaattcaaa

SEQ ID NO: 49871 - DNA, 15 bp, Homo sapiens
acctgcagaattcaa

SEQ ID NO: 49872 - DNA, 15 bp, Homo sapiens
gacctgcagaattca

SEQ ID NO: 49873 - DNA, 15 bp, Homo sapiens
cgacctgcagaattc

SEQ ID NO: 49874 - DNA, 15 bp, Homo sapiens
ccgacctgcagaatt

SEQ ID NO: 49875 - DNA, 15 bp, Homo sapiens
gccgacctgcagaat

SEQ ID NO: 49876 - DNA, 15 bp, Homo sapiens
tgccgacctgcagaa

SEQ ID NO: 49877 - DNA, 15 bp, Homo sapiens
ctgccgacctgcaga

SEQ ID NO: 49878 - DNA, 15 bp, Homo sapiens
tctgccgacctgcag

SEQ ID NO: 49879 - DNA, 15 bp, Homo sapiens
ctctgccgacctgca

SEQ ID NO: 49880 - DNA, 15 bp, Homo sapiens
cctctgccgacctgc

SEQ ID NO: 49881 - DNA, 15 bp, Homo sapiens
ccctctgccgacctg

SEQ ID NO: 49882 - DNA, 15 bp, Homo sapiens
cccctctgccgacct

SEQ ID NO: 49883 - DNA, 15 bp, Homo sapiens
acccctctgccgacc

SEQ ID NO: 49884 - DNA, 15 bp, Homo sapiens
gacccctctgccgac

SEQ ID NO: 49885 - DNA, 15 bp, Homo sapiens
agacccctctgccga

SEQ ID NO: 49886 - DNA, 15 bp, Homo sapiens
gagacccctctgccg

SEQ ID NO: 49887 - DNA, 15 bp, Homo sapiens
tgagacccctctgcc

SEQ ID NO: 49888 - DNA, 15 bp, Homo sapiens
ctgagacccctctgc

SEQ ID NO: 49889 - DNA, 15 bp, Homo sapiens
tctgagacccctctg

SEQ ID NO: 49890 - DNA, 15 bp, Homo sapiens
ttctgagacccctct

SEQ ID NO: 49891 - DNA, 15 bp, Homo sapiens
attctgagacccctc

SEQ ID NO: 49892 - DNA, 15 bp, Homo sapiens
gattctgagacccct

SEQ ID NO: 49893 - DNA, 15 bp, Homo sapiens
ggattctgagacccc

SEQ ID NO: 49894 - DNA, 15 bp, Homo sapiens
cggattctgagaccc

SEQ ID NO: 49895 - DNA, 15 bp, Homo sapiens
gcggattctgagacc

SEQ ID NO: 49896 - DNA, 15 bp, Homo sapiens
tgcggattctgagac

SEQ ID NO: 49897 - DNA, 15 bp, Homo sapiens
atgcggattctgaga

SEQ ID NO: 49898 - DNA, 15 bp, Homo sapiens
aatgcggattctgag

SEQ ID NO: 49899 - DNA, 15 bp, Homo sapiens
aaatgcggattctga

SEQ ID NO: 49900 - DNA, 15 bp, Homo sapiens
gaaatgcggattctg

SEQ ID NO: 49901 - DNA, 15 bp, Homo sapiens
ggaaatgcggattct

SEQ ID NO: 49902 - DNA, 15 bp, Homo sapiens
tggaaatgcggattc

SEQ ID NO: 49903 - DNA, 15 bp, Homo sapiens
ttggaaatgcggatt

SEQ ID NO: 49904 - DNA, 15 bp, Homo sapiens
gttggaaatgcggat

SEQ ID NO: 49905 - DNA, 15 bp, Homo sapiens
tgttggaaatgcgga

SEQ ID NO: 49906 - DNA, 15 bp, Homo sapiens
ttgttggaaatgcgg

SEQ ID NO: 49907 - DNA, 15 bp, Homo sapiens
attgttggaaatgcg

SEQ ID NO: 49908 - DNA, 15 bp, Homo sapiens
cattgttggaaatgc

SEQ ID NO: 49909 - DNA, 15 bp, Homo sapiens
acattgttggaaatg

SEQ ID NO: 49910 - DNA, 15 bp, Homo sapiens
gacattgttggaaat

SEQ ID NO: 49911 - DNA, 15 bp, Homo sapiens
agacattgttggaaa

SEQ ID NO: 49912 - DNA, 15 bp, Homo sapiens
gagacattgttggaa

SEQ ID NO: 49913 - DNA, 15 bp, Homo sapiens
ggagacattgttgga

SEQ ID NO: 49914 - DNA, 15 bp, Homo sapiens
tggagacattgttgg

SEQ ID NO: 49915 - DNA, 15 bp, Homo sapiens
ctggagacattgttg

SEQ ID NO: 49916 - DNA, 15 bp, Homo sapiens
actggagacattgtt

SEQ ID NO: 49917 - DNA, 15 bp, Homo sapiens
tactggagacattgt

SEQ ID NO: 49918 - DNA, 15 bp, Homo sapiens
ttactggagacattg

SEQ ID NO: 49919 - DNA, 15 bp, Homo sapiens
attactggagacatt

SEQ ID NO: 49920 - DNA, 15 bp, Homo sapiens
cattactggagacat

SEQ ID NO: 49921 - DNA, 15 bp, Homo sapiens
gcattactggagaca

SEQ ID NO: 49922 - DNA, 15 bp, Homo sapiens
agcattactggagac

SEQ ID NO: 49923 - DNA, 15 bp, Homo sapiens
cagcattactggaga

SEQ ID NO: 49924 - DNA, 15 bp, Homo sapiens
tcagcattactggag

SEQ ID NO: 49925 - DNA, 15 bp, Homo sapiens
atcagcattactgga

SEQ ID NO: 49926 - DNA, 15 bp, Homo sapiens
catcagcattactgg

SEQ ID NO: 49927 - DNA, 15 bp, Homo sapiens
gcatcagcattactg

SEQ ID NO: 49928 - DNA, 15 bp, Homo sapiens
agcatcagcattact

SEQ ID NO: 49929 - DNA, 15 bp, Homo sapiens
cagcatcagcattac

SEQ ID NO: 49930 - DNA, 15 bp, Homo sapiens
gcagcatcagcatta

SEQ ID NO: 49931 - DNA, 15 bp, Homo sapiens
agcagcatcagcatt

SEQ ID NO: 49932 - DNA, 15 bp, Homo sapiens
gagcagcatcagcat

SEQ ID NO: 49933 - DNA, 15 bp, Homo sapiens
cgagcagcatcagca

SEQ ID NO: 49934 - DNA, 15 bp, Homo sapiens
acgagcagcatcagc

SEQ ID NO: 49935 - DNA, 15 bp, Homo sapiens
gacgagcagcatcag

SEQ ID NO: 49936 - DNA, 15 bp, Homo sapiens
ggacgagcagcatca

SEQ ID NO: 49937 - DNA, 15 bp, Homo sapiens
gggacgagcagcatc

SEQ ID NO: 49938 - DNA, 15 bp, Homo sapiens
agggacgagcagcat

SEQ ID NO: 49939 - DNA, 15 bp, Homo sapiens
cagggacgagcagca

SEQ ID NO: 49940 - DNA, 15 bp, Homo sapiens
ccagggacgagcagc

SEQ ID NO: 49941 - DNA, 15 bp, Homo sapiens
tccagggacgagcag

SEQ ID NO: 49942 - DNA, 15 bp, Homo sapiens
gtccagggacgagca

SEQ ID NO: 49943 - DNA, 15 bp, Homo sapiens
ggtccagggacgagc

SEQ ID NO: 49944 - DNA, 15 bp, Homo sapiens
tggtccagggacgag

SEQ ID NO: 49945 - DNA, 15 bp, Homo sapiens
gtggtccagggacga

SEQ ID NO: 49946 - DNA, 15 bp, Homo sapiens
tgtggtccagggacg

SEQ ID NO: 49947 - DNA, 15 bp, Homo sapiens
ctgtggtccagggac

SEQ ID NO: 49948 - DNA, 15 bp, Homo sapiens
tctgtggtccaggga

SEQ ID NO: 49949 - DNA, 15 bp, Homo sapiens
atctgtggtccaggg

SEQ ID NO: 49950 - DNA, 15 bp, Homo sapiens
aatctgtggtccagg

SEQ ID NO: 49951 - DNA, 15 bp, Homo sapiens
caatctgtggtccag

SEQ ID NO: 49952 - DNA, 15 bp, Homo sapiens
ccaatctgtggtcca

SEQ ID NO: 49953 - DNA, 15 bp, Homo sapiens
cccaatctgtggtcc

SEQ ID NO: 49954 - DNA, 15 bp, Homo sapiens
acccaatctgtggtc

SEQ ID NO: 49955 - DNA, 15 bp, Homo sapiens
tacccaatctgtggt

SEQ ID NO: 49956 - DNA, 15 bp, Homo sapiens
ctacccaatctgtgg

SEQ ID NO: 49957 - DNA, 15 bp, Homo sapiens
gctacccaatctgtg

SEQ ID NO: 49958 - DNA, 15 bp, Homo sapiens
ggctacccaatctgt

SEQ ID NO: 49959 - DNA, 15 bp, Homo sapiens
tggctacccaatctg

SEQ ID NO: 49960 - DNA, 15 bp, Homo sapiens
ctggctacccaatct

SEQ ID NO: 49961 - DNA, 15 bp, Homo sapiens
cctggctacccaatc

SEQ ID NO: 49962 - DNA, 15 bp, Homo sapiens
acctggctacccaat

SEQ ID NO: 49963 - DNA, 15 bp, Homo sapiens
aacctggctacccaa

SEQ ID NO: 49964 - DNA, 15 bp, Homo sapiens
gaacctggctaccca

SEQ ID NO: 49965 - DNA, 15 bp, Homo sapiens
agaacctggctaccc

SEQ ID NO: 49966 - DNA, 15 bp, Homo sapiens
cagaacctggctacc

SEQ ID NO: 49967 - DNA, 15 bp, Homo sapiens
ccagaacctggctac

SEQ ID NO: 49968 - DNA, 15 bp, Homo sapiens
gccagaacctggcta

SEQ ID NO: 49969 - DNA, 15 bp, Homo sapiens
tgccagaacctggct

SEQ ID NO: 49970 - DNA, 15 bp, Homo sapiens
ttgccagaacctggc

SEQ ID NO: 49971 - DNA, 15 bp, Homo sapiens
cttgccagaacctgg

SEQ ID NO: 49972 - DNA, 15 bp, Homo sapiens
gcttgccagaacctg

SEQ ID NO: 49973 - DNA, 15 bp, Homo sapiens
agcttgccagaacct

SEQ ID NO: 49974 - DNA, 15 bp, Homo sapiens
gagcttgccagaacc

SEQ ID NO: 49975 - DNA, 15 bp, Homo sapiens
tgagcttgccagaac

SEQ ID NO: 49976 - DNA, 15 bp, Homo sapiens
atgagcttgccagaa

SEQ ID NO: 49977 - DNA, 15 bp, Homo sapiens
gatgagcttgccaga

SEQ ID NO: 49978 - DNA, 15 bp, Homo sapiens
ggatgagcttgccag

SEQ ID NO: 49979 - DNA, 15 bp, Homo sapiens
gggatgagcttgcca

SEQ ID NO: 49980 - DNA, 15 bp, Homo sapiens
tgggatgagcttgcc

SEQ ID NO: 49981 - DNA, 15 bp, Homo sapiens
ttgggatgagcttgc

SEQ ID NO: 49982 - DNA, 15 bp, Homo sapiens
cttgggatgagcttg

SEQ ID NO: 49983 - DNA, 15 bp, Homo sapiens
ccttgggatgagctt

SEQ ID NO: 49984 - DNA, 15 bp, Homo sapiens
gccttgggatgagct

SEQ ID NO: 49985 - DNA, 15 bp, Homo sapiens
agccttgggatgagc

SEQ ID NO: 49986 - DNA, 15 bp, Homo sapiens
aagccttgggatgag

SEQ ID NO: 49987 - DNA, 15 bp, Homo sapiens
aaagccttgggatga

SEQ ID NO: 49988 - DNA, 15 bp, Homo sapiens
caaagccttgggatg

SEQ ID NO: 49989 - DNA, 15 bp, Homo sapiens
tcaaagccttgggat

SEQ ID NO: 49990 - DNA, 15 bp, Homo sapiens
ctcaaagccttggga

SEQ ID NO: 49991 - DNA, 15 bp, Homo sapiens
tctcaaagccttggg

SEQ ID NO: 49992 - DNA, 15 bp, Homo sapiens
atctcaaagccttgg

SEQ ID NO: 49993 - DNA, 15 bp, Homo sapiens
catctcaaagccttg

SEQ ID NO: 49994 - DNA, 15 bp, Homo sapiens
tcatctcaaagcctt

SEQ ID NO: 49995 - DNA, 15 bp, Homo sapiens
gtcatctcaaagcct

SEQ ID NO: 49996 - DNA, 15 bp, Homo sapiens
tgtcatctcaaagcc

SEQ ID NO: 49997 - DNA, 15 bp, Homo sapiens
atgtcatctcaaagc

SEQ ID NO: 49998 - DNA, 15 bp, Homo sapiens
gatgtcatctcaaag

SEQ ID NO: 49999 - DNA, 15 bp, Homo sapiens
tgatgtcatctcaaa

SEQ ID NO: 50000 - DNA, 15 bp, Homo sapiens
ctgatgtcatctcaa

SEQ ID NO: 50001 - DNA, 15 bp, Homo sapiens
tctgatgtcatctca

SEQ ID NO: 50002 - DNA, 15 bp, Homo sapiens
gtctgatgtcatctc

SEQ ID NO: 50003 - DNA, 15 bp, Homo sapiens
tgtctgatgtcatct

SEQ ID NO: 50004 - DNA, 15 bp, Homo sapiens
ttgtctgatgtcatc

SEQ ID NO: 50005 - DNA, 15 bp, Homo sapiens
tttgtctgatgtcat

SEQ ID NO: 50006 - DNA, 15 bp, Homo sapiens
ttttgtctgatgtca

SEQ ID NO: 50007 - DNA, 15 bp, Homo sapiens
attttgtctgatgtc

SEQ ID NO: 50008 - DNA, 15 bp, Homo sapiens
tattttgtctgatgt

SEQ ID NO: 50009 - DNA, 15 bp, Homo sapiens
atattttgtctgatg

SEQ ID NO: 50010 - DNA, 15 bp, Homo sapiens
catattttgtctgat

SEQ ID NO: 50011 - DNA, 15 bp, Homo sapiens
acatattttgtctga

SEQ ID NO: 50012 - DNA, 15 bp, Homo sapiens
aacatattttgtctg

SEQ ID NO: 50013 - DNA, 15 bp, Homo sapiens
gaacatattttgtct

SEQ ID NO: 50014 - DNA, 15 bp, Homo sapiens
agaacatattttgtc

SEQ ID NO: 50015 - DNA, 15 bp, Homo sapiens
cagaacatattttgt

SEQ ID NO: 50016 - DNA, 15 bp, Homo sapiens
ccagaacatattttg

SEQ ID NO: 50017 - DNA, 15 bp, Homo sapiens
cccagaacatatttt

SEQ ID NO: 50018 - DNA, 15 bp, Homo sapiens
tcccagaacatattt

SEQ ID NO: 50019 - DNA, 15 bp, Homo sapiens
gtcccagaacatatt

SEQ ID NO: 50020 - DNA, 15 bp, Homo sapiens
tgtcccagaacatat

SEQ ID NO: 50021 - DNA, 15 bp, Homo sapiens
atgtcccagaacata

SEQ ID NO: 50022 - DNA, 15 bp, Homo sapiens
catgtcccagaacat

SEQ ID NO: 50023 - DNA, 15 bp, Homo sapiens
ccatgtcccagaaca

SEQ ID NO: 50024 - DNA, 15 bp, Homo sapiens
gccatgtcccagaac

SEQ ID NO: 50025 - DNA, 15 bp, Homo sapiens
agccatgtcccagaa

SEQ ID NO: 50026 - DNA, 15 bp, Homo sapiens
aagccatgtcccaga

SEQ ID NO: 50027 - DNA, 15 bp, Homo sapiens
aaagccatgtcccag

SEQ ID NO: 50028 - DNA, 15 bp, Homo sapiens
aaaagccatgtccca

SEQ ID NO: 50029 - DNA, 15 bp, Homo sapiens
caaaagccatgtccc

SEQ ID NO: 50030 - DNA, 15 bp, Homo sapiens
tcaaaagccatgtcc

SEQ ID NO: 50031 - DNA, 15 bp, Homo sapiens
ctcaaaagccatgtc

SEQ ID NO: 50032 - DNA, 15 bp, Homo sapiens
tctcaaaagccatgt

SEQ ID NO: 50033 - DNA, 15 bp, Homo sapiens
ctctcaaaagccatg

SEQ ID NO: 50034 - DNA, 15 bp, Homo sapiens
cctctcaaaagccat

SEQ ID NO: 50035 - DNA, 15 bp, Homo sapiens
acctctcaaaagcca

SEQ ID NO: 50036 - DNA, 15 bp, Homo sapiens
gacctctcaaaagcc

SEQ ID NO: 50037 - DNA, 15 bp, Homo sapiens
tgacctctcaaaagc

SEQ ID NO: 50038 - DNA, 15 bp, Homo sapiens
ttgacctctcaaaag

SEQ ID NO: 50039 - DNA, 15 bp, Homo sapiens
cttgacctctcaaaa

SEQ ID NO: 50040 - DNA, 15 bp, Homo sapiens
tcttgacctctcaaa

SEQ ID NO: 50041 - DNA, 15 bp, Homo sapiens
ttcttgacctctcaa

SEQ ID NO: 50042 - DNA, 15 bp, Homo sapiens
tttcttgacctctca

SEQ ID NO: 50043 - DNA, 15 bp, Homo sapiens
ttttcttgacctctc

SEQ ID NO: 50044 - DNA, 15 bp, Homo sapiens
attttcttgacctct

SEQ ID NO: 50045 - DNA, 15 bp, Homo sapiens
tattttcttgacctc

SEQ ID NO: 50046 - DNA, 15 bp, Homo sapiens
ttattttcttgacct

SEQ ID NO: 50047 - DNA, 15 bp, Homo sapiens
cttattttcttgacc

SEQ ID NO: 50048 - DNA, 15 bp, Homo sapiens
tcttattttcttgac

SEQ ID NO: 50049 - DNA, 15 bp, Homo sapiens
atcttattttcttga

SEQ ID NO: 50050 - DNA, 15 bp, Homo sapiens
catcttattttcttg

SEQ ID NO: 50051 - DNA, 15 bp, Homo sapiens
acatcttattttctt

SEQ ID NO: 50052 - DNA, 15 bp, Homo sapiens
aacatcttattttct

SEQ ID NO: 50053 - DNA, 15 bp, Homo sapiens
aaacatcttattttc

SEQ ID NO: 50054 - DNA, 15 bp, Homo sapiens
gaaacatcttatttt

SEQ ID NO: 50055 - DNA, 15 bp, Homo sapiens
agaaacatcttattt

SEQ ID NO: 50056 - DNA, 15 bp, Homo sapiens
aagaaacatcttatt

SEQ ID NO: 50057 - DNA, 15 bp, Homo sapiens
aaagaaacatcttat

SEQ ID NO: 50058 - DNA, 15 bp, Homo sapiens
gaaagaaacatctta

SEQ ID NO: 50059 - DNA, 15 bp, Homo sapiens
agaaagaaacatctt

SEQ ID NO: 50060 - DNA, 15 bp, Homo sapiens
gagaaagaaacatct

SEQ ID NO: 50061 - DNA, 15 bp, Homo sapiens
agagaaagaaacatc

SEQ ID NO: 50062 - DNA, 15 bp, Homo sapiens
aagagaaagaaacat

SEQ ID NO: 50063 - DNA, 15 bp, Homo sapiens
gaagagaaagaaaca

SEQ ID NO: 50064 - DNA, 15 bp, Homo sapiens
agaagagaaagaaac

SEQ ID NO: 50065 - DNA, 15 bp, Homo sapiens
gagaagagaaagaaa

SEQ ID NO: 50066 - DNA, 15 bp, Homo sapiens
tgagaagagaaagaa

SEQ ID NO: 50067 - DNA, 15 bp, Homo sapiens
atgagaagagaaaga

SEQ ID NO: 50068 - DNA, 15 bp, Homo sapiens
gatgagaagagaaag

SEQ ID NO: 50069 - DNA, 15 bp, Homo sapiens
ggatgagaagagaaa

SEQ ID NO: 50070 - DNA, 15 bp, Homo sapiens
gggatgagaagagaa

SEQ ID NO: 50071 - DNA, 15 bp, Homo sapiens
ggggatgagaagaga

SEQ ID NO: 50072 - DNA, 15 bp, Homo sapiens
tggggatgagaagag

SEQ ID NO: 50073 - DNA, 15 bp, Homo sapiens
ttggggatgagaaga

SEQ ID NO: 50074 - DNA, 15 bp, Homo sapiens
gttggggatgagaag

SEQ ID NO: 50075 - DNA, 15 bp, Homo sapiens
ggttggggatgagaa

SEQ ID NO: 50076 - DNA, 15 bp, Homo sapiens
gggttggggatgaga

SEQ ID NO: 50077 - DNA, 15 bp, Homo sapiens
agggttggggatgag

SEQ ID NO: 50078 - DNA, 15 bp, Homo sapiens
aagggttggggatga

SEQ ID NO: 50079 - DNA, 15 bp, Homo sapiens
caagggttggggatg

SEQ ID NO: 50080 - DNA, 15 bp, Homo sapiens
gcaagggttggggat

SEQ ID NO: 50081 - DNA, 15 bp, Homo sapiens
tgcaagggttgggga

SEQ ID NO: 50082 - DNA, 15 bp, Homo sapiens
gtgcaagggttgggg

SEQ ID NO: 50083 - DNA, 15 bp, Homo sapiens
agtgcaagggttggg

SEQ ID NO: 50084 - DNA, 15 bp, Homo sapiens
cagtgcaagggttgg

SEQ ID NO: 50085 - DNA, 15 bp, Homo sapiens
gcagtgcaagggttg

SEQ ID NO: 50086 - DNA, 15 bp, Homo sapiens
ggcagtgcaagggtt

SEQ ID NO: 50087 - DNA, 15 bp, Homo sapiens
gggcagtgcaagggt

SEQ ID NO: 50088 - DNA, 15 bp, Homo sapiens
agggcagtgcaaggg

SEQ ID NO: 50089 - DNA, 15 bp, Homo sapiens
aagggcagtgcaagg

SEQ ID NO: 50090 - DNA, 15 bp, Homo sapiens
aaagggcagtgcaag

SEQ ID NO: 50091 - DNA, 15 bp, Homo sapiens
aaaagggcagtgcaa

SEQ ID NO: 50092 - DNA, 15 bp, Homo sapiens
gaaaagggcagtgca

SEQ ID NO: 50093 - DNA, 15 bp, Homo sapiens
agaaaagggcagtgc

SEQ ID NO: 50094 - DNA, 15 bp, Homo sapiens
gagaaaagggcagtg

SEQ ID NO: 50095 - DNA, 15 bp, Homo sapiens
ggagaaaagggcagt

SEQ ID NO: 50096 - DNA, 15 bp, Homo sapiens
gggagaaaagggcag

SEQ ID NO: 50097 - DNA, 15 bp, Homo sapiens
agggagaaaagggca

SEQ ID NO: 50098 - DNA, 15 bp, Homo sapiens
aagggagaaaagggc

SEQ ID NO: 50099 - DNA, 15 bp, Homo sapiens
gaagggagaaaaggg

SEQ ID NO: 50100 - DNA, 15 bp, Homo sapiens
ggaagggagaaaagg

SEQ ID NO: 50101 - DNA, 15 bp, Homo sapiens
gggaagggagaaaag

SEQ ID NO: 50102 - DNA, 15 bp, Homo sapiens
ggggaagggagaaaa

SEQ ID NO: 50103 - DNA, 15 bp, Homo sapiens
aggggaagggagaaa

SEQ ID NO: 50104 - DNA, 15 bp, Homo sapiens
taggggaagggagaa

SEQ ID NO: 50105 - DNA, 15 bp, Homo sapiens
gtaggggaagggaga

SEQ ID NO: 50106 - DNA, 15 bp, Homo sapiens
ggtaggggaagggag

SEQ ID NO: 50107 - DNA, 15 bp, Homo sapiens
gggtaggggaaggga

SEQ ID NO: 50108 - DNA, 15 bp, Homo sapiens
agggtaggggaaggg

SEQ ID NO: 50109 - DNA, 15 bp, Homo sapiens
gagggtaggggaagg

SEQ ID NO: 50110 - DNA, 15 bp, Homo sapiens
ggagggtaggggaag

SEQ ID NO: 50111 - DNA, 15 bp, Homo sapiens
aggagggtaggggaa

SEQ ID NO: 50112 - DNA, 15 bp, Homo sapiens
aaggagggtagggga

SEQ ID NO: 50113 - DNA, 15 bp, Homo sapiens
aaaggagggtagggg

SEQ ID NO: 50114 - DNA, 15 bp, Homo sapiens
gaaaggagggtaggg

SEQ ID NO: 50115 - DNA, 15 bp, Homo sapiens
agaaaggagggtagg

SEQ ID NO: 50116 - DNA, 15 bp, Homo sapiens
cagaaaggagggtag

SEQ ID NO: 50117 - DNA, 15 bp, Homo sapiens
acagaaaggagggta

SEQ ID NO: 50118 - DNA, 15 bp, Homo sapiens
gacagaaaggagggt

SEQ ID NO: 50119 - DNA, 15 bp, Homo sapiens
ggacagaaaggaggg

SEQ ID NO: 50120 - DNA, 15 bp, Homo sapiens
gggacagaaaggagg

SEQ ID NO: 50121 - DNA, 15 bp, Homo sapiens
ggggacagaaaggag

SEQ ID NO: 50122 - DNA, 15 bp, Homo sapiens
tggggacagaaagga

SEQ ID NO: 50123 - DNA, 15 bp, Homo sapiens
atggggacagaaagg

SEQ ID NO: 50124 - DNA, 15 bp, Homo sapiens
gatggggacagaaag

SEQ ID NO: 50125 - DNA, 15 bp, Homo sapiens
ggatggggacagaaa

SEQ ID NO: 50126 - DNA, 15 bp, Homo sapiens
gggatggggacagaa

SEQ ID NO: 50127 - DNA, 15 bp, Homo sapiens
agggatggggacaga

SEQ ID NO: 50128 - DNA, 15 bp, Homo sapiens
cagggatggggacag

SEQ ID NO: 50129 - DNA, 15 bp, Homo sapiens
tcagggatggggaca

SEQ ID NO: 50130 - DNA, 15 bp, Homo sapiens
gtcagggatggggac

SEQ ID NO: 50131 - DNA, 15 bp, Homo sapiens
cgtcagggatgggga

SEQ ID NO: 50132 - DNA, 15 bp, Homo sapiens
gcgtcagggatgggg

SEQ ID NO: 50133 - DNA, 15 bp, Homo sapiens
ggcgtcagggatggg

SEQ ID NO: 50134 - DNA, 15 bp, Homo sapiens
tggcgtcagggatgg

SEQ ID NO: 50135 - DNA, 15 bp, Homo sapiens
ctggcgtcagggatg

SEQ ID NO: 50136 - DNA, 15 bp, Homo sapiens
gctggcgtcagggat

SEQ ID NO: 50137 - DNA, 15 bp, Homo sapiens
agctggcgtcaggga

SEQ ID NO: 50138 - DNA, 15 bp, Homo sapiens
cagctggcgtcaggg

SEQ ID NO: 50139 - DNA, 15 bp, Homo sapiens
acagctggcgtcagg

SEQ ID NO: 50140 - DNA, 15 bp, Homo sapiens
aacagctggcgtcag

SEQ ID NO: 50141 - DNA, 15 bp, Homo sapiens
gaacagctggcgtca

SEQ ID NO: 50142 - DNA, 15 bp, Homo sapiens
tgaacagctggcgtc

SEQ ID NO: 50143 - DNA, 15 bp, Homo sapiens
ctgaacagctggcgt

SEQ ID NO: 50144 - DNA, 15 bp, Homo sapiens
gctgaacagctggcg

SEQ ID NO: 50145 - DNA, 15 bp, Homo sapiens
tgctgaacagctggc

SEQ ID NO: 50146 - DNA, 15 bp, Homo sapiens
atgctgaacagctgg

SEQ ID NO: 50147 - DNA, 15 bp, Homo sapiens
catgctgaacagctg

SEQ ID NO: 50148 - DNA, 15 bp, Homo sapiens
tcatgctgaacagct

SEQ ID NO: 50149 - DNA, 15 bp, Homo sapiens
ctcatgctgaacagc

SEQ ID NO: 50150 - DNA, 15 bp, Homo sapiens
tctcatgctgaacag

SEQ ID NO: 50151 - DNA, 15 bp, Homo sapiens
ttctcatgctgaaca

SEQ ID NO: 50152 - DNA, 15 bp, Homo sapiens
cttctcatgctgaac

SEQ ID NO: 50153 - DNA, 15 bp, Homo sapiens
gcttctcatgctgaa

SEQ ID NO: 50154 - DNA, 15 bp, Homo sapiens
agcttctcatgctga

SEQ ID NO: 50155 - DNA, 15 bp, Homo sapiens
cagcttctcatgctg

SEQ ID NO: 50156 - DNA, 15 bp, Homo sapiens
ccagcttctcatgct

SEQ ID NO: 50157 - DNA, 15 bp, Homo sapiens
tccagcttctcatgc

SEQ ID NO: 50158 - DNA, 15 bp, Homo sapiens
ctccagcttctcatg

SEQ ID NO: 50159 - DNA, 15 bp, Homo sapiens
actccagcttctcat

SEQ ID NO: 50160 - DNA, 15 bp, Homo sapiens
cactccagcttctca

SEQ ID NO: 50161 - DNA, 15 bp, Homo sapiens
tcactccagcttctc

SEQ ID NO: 50162 - DNA, 15 bp, Homo sapiens
gtcactccagcttct

SEQ ID NO: 50163 - DNA, 15 bp, Homo sapiens
tgtcactccagcttc

SEQ ID NO: 50164 - DNA, 15 bp, Homo sapiens
atgtcactccagctt

SEQ ID NO: 50165 - DNA, 15 bp, Homo sapiens
catgtcactccagct

SEQ ID NO: 50166 - DNA, 15 bp, Homo sapiens
gcatgtcactccagc

SEQ ID NO: 50167 - DNA, 15 bp, Homo sapiens
cgcatgtcactccag

SEQ ID NO: 50168 - DNA, 15 bp, Homo sapiens
tcgcatgtcactcca

SEQ ID NO: 50169 - DNA, 15 bp, Homo sapiens
gtcgcatgtcactcc

SEQ ID NO: 50170 - DNA, 15 bp, Homo sapiens
tgtcgcatgtcactc

SEQ ID NO: 50171 - DNA, 15 bp, Homo sapiens
ctgtcgcatgtcact

SEQ ID NO: 50172 - DNA, 15 bp, Homo sapiens
cctgtcgcatgtcac

SEQ ID NO: 50173 - DNA, 15 bp, Homo sapiens
tcctgtcgcatgtca

SEQ ID NO: 50174 - DNA, 15 bp, Homo sapiens
ctcctgtcgcatgtc

SEQ ID NO: 50175 - DNA, 15 bp, Homo sapiens
cctcctgtcgcatgt

SEQ ID NO: 50176 - DNA, 15 bp, Homo sapiens
acctcctgtcgcatg

SEQ ID NO: 50177 - DNA, 15 bp, Homo sapiens
cacctcctgtcgcat

SEQ ID NO: 50178 - DNA, 15 bp, Homo sapiens
tcacctcctgtcgca

SEQ ID NO: 50179 - DNA, 15 bp, Homo sapiens
atcacctcctgtcgc

SEQ ID NO: 50180 - DNA, 15 bp, Homo sapiens
catcacctcctgtcg

SEQ ID NO: 50181 - DNA, 15 bp, Homo sapiens
acatcacctcctgtc

SEQ ID NO: 50182 - DNA, 15 bp, Homo sapiens
aacatcacctcctgt

SEQ ID NO: 50183 - DNA, 15 bp, Homo sapiens
aaacatcacctcctg

SEQ ID NO: 50184 - DNA, 15 bp, Homo sapiens
gaaacatcacctcct

SEQ ID NO: 50185 - DNA, 15 bp, Homo sapiens
agaaacatcacctcc

SEQ ID NO: 50186 - DNA, 15 bp, Homo sapiens
cagaaacatcacctc

SEQ ID NO: 50187 - DNA, 15 bp, Homo sapiens
tcagaaacatcacct

SEQ ID NO: 50188 - DNA, 15 bp, Homo sapiens
gtcagaaacatcacc

SEQ ID NO: 50189 - DNA, 15 bp, Homo sapiens
ggtcagaaacatcac

SEQ ID NO: 50190 - DNA, 15 bp, Homo sapiens
tggtcagaaacatca

SEQ ID NO: 50191 - DNA, 15 bp, Homo sapiens
ttggtcagaaacatc

SEQ ID NO: 50192 - DNA, 15 bp, Homo sapiens
attggtcagaaacat

SEQ ID NO: 50193 - DNA, 15 bp, Homo sapiens
cattggtcagaaaca

SEQ ID NO: 50194 - DNA, 15 bp, Homo sapiens
acattggtcagaaac

SEQ ID NO: 50195 - DNA, 15 bp, Homo sapiens
cacattggtcagaaa

SEQ ID NO: 50196 - DNA, 15 bp, Homo sapiens
tcacattggtcagaa

SEQ ID NO: 50197 - DNA, 15 bp, Homo sapiens
ttcacattggtcaga

SEQ ID NO: 50198 - DNA, 15 bp, Homo sapiens
gttcacattggtcag

SEQ ID NO: 50199 - DNA, 15 bp, Homo sapiens
tgttcacattggtca

SEQ ID NO: 50200 - DNA, 15 bp, Homo sapiens
ctgttcacattggtc

SEQ ID NO: 50201 - DNA, 15 bp, Homo sapiens
gctgttcacattggt

SEQ ID NO: 50202 - DNA, 15 bp, Homo sapiens
agctgttcacattgg

SEQ ID NO: 50203 - DNA, 15 bp, Homo sapiens
gagctgttcacattg

SEQ ID NO: 50204 - DNA, 15 bp, Homo sapiens
ggagctgttcacatt

SEQ ID NO: 50205 - DNA, 15 bp, Homo sapiens
tggagctgttcacat

SEQ ID NO: 50206 - DNA, 15 bp, Homo sapiens
ctggagctgttcaca

SEQ ID NO: 50207 - DNA, 15 bp, Homo sapiens
gctggagctgttcac

SEQ ID NO: 50208 - DNA, 15 bp, Homo sapiens
agctggagctgttca

SEQ ID NO: 50209 - DNA, 15 bp, Homo sapiens
gagctggagctgttc

SEQ ID NO: 50210 - DNA, 15 bp, Homo sapiens
ggagctggagctgtt

SEQ ID NO: 50211 - DNA, 15 bp, Homo sapiens
aggagctggagctgt

SEQ ID NO: 50212 - DNA, 15 bp, Homo sapiens
gaggagctggagctg

SEQ ID NO: 50213 - DNA, 15 bp, Homo sapiens
ggaggagctggagct

SEQ ID NO: 50214 - DNA, 15 bp, Homo sapiens
tggaggagctggagc

SEQ ID NO: 50215 - DNA, 15 bp, Homo sapiens
gtggaggagctggag

SEQ ID NO: 50216 - DNA, 15 bp, Homo sapiens
ggtggaggagctgga

SEQ ID NO: 50217 - DNA, 15 bp, Homo sapiens
gggtggaggagctgg

SEQ ID NO: 50218 - DNA, 15 bp, Homo sapiens
tgggtggaggagctg

SEQ ID NO: 50219 - DNA, 15 bp, Homo sapiens
ttgggtggaggagct

SEQ ID NO: 50220 - DNA, 15 bp, Homo sapiens
tttgggtggaggagc

SEQ ID NO: 50221 - DNA, 15 bp, Homo sapiens
atttgggtggaggag

SEQ ID NO: 50222 - DNA, 15 bp, Homo sapiens
gatttgggtggagga

SEQ ID NO: 50223 - DNA, 15 bp, Homo sapiens
agatttgggtggagg

SEQ ID NO: 50224 - DNA, 15 bp, Homo sapiens
tagatttgggtggag

SEQ ID NO: 50225 - DNA, 15 bp, Homo sapiens
gtagatttgggtgga

SEQ ID NO: 50226 - DNA, 15 bp, Homo sapiens
ggtagatttgggtgg

SEQ ID NO: 50227 - DNA, 15 bp, Homo sapiens
tggtagatttgggtg

SEQ ID NO: 50228 - DNA, 15 bp, Homo sapiens
ctggtagatttgggt

SEQ ID NO: 50229 - DNA, 15 bp, Homo sapiens
cctggtagatttggg

SEQ ID NO: 50230 - DNA, 15 bp, Homo sapiens
gcctggtagatttgg

SEQ ID NO: 50231 - DNA, 15 bp, Homo sapiens
agcctggtagatttg

SEQ ID NO: 50232 - DNA, 15 bp, Homo sapiens
cagcctggtagattt

SEQ ID NO: 50233 - DNA, 15 bp, Homo sapiens
acagcctggtagatt

SEQ ID NO: 50234 - DNA, 15 bp, Homo sapiens
cacagcctggtagat

SEQ ID NO: 50235 - DNA, 15 bp, Homo sapiens
acacagcctggtaga

SEQ ID NO: 50236 - DNA, 15 bp, Homo sapiens
gacacagcctggtag

SEQ ID NO: 50237 - DNA, 15 bp, Homo sapiens
agacacagcctggta

SEQ ID NO: 50238 - DNA, 15 bp, Homo sapiens
gagacacagcctggt

SEQ ID NO: 50239 - DNA, 15 bp, Homo sapiens
cgagacacagcctgg

SEQ ID NO: 50240 - DNA, 15 bp, Homo sapiens
acgagacacagcctg

SEQ ID NO: 50241 - DNA, 15 bp, Homo sapiens
tacgagacacagcct

SEQ ID NO: 50242 - DNA, 15 bp, Homo sapiens
atacgagacacagcc

SEQ ID NO: 50243 - DNA, 15 bp, Homo sapiens
aatacgagacacagc

SEQ ID NO: 50244 - DNA, 15 bp, Homo sapiens
caatacgagacacag

SEQ ID NO: 50245 - DNA, 15 bp, Homo sapiens
acaatacgagacaca

SEQ ID NO: 50246 - DNA, 15 bp, Homo sapiens
gacaatacgagacac

SEQ ID NO: 50247 - DNA, 15 bp, Homo sapiens
agacaatacgagaca

SEQ ID NO: 50248 - DNA, 15 bp, Homo sapiens
cagacaatacgagac

SEQ ID NO: 50249 - DNA, 15 bp, Homo sapiens
gcagacaatacgaga

SEQ ID NO: 50250 - DNA, 15 bp, Homo sapiens
cgcagacaatacgag

SEQ ID NO: 50251 - DNA, 15 bp, Homo sapiens
ccgcagacaatacga

SEQ ID NO: 50252 - DNA, 15 bp, Homo sapiens
cccgcagacaatacg

SEQ ID NO: 50253 - DNA, 15 bp, Homo sapiens
gcccgcagacaatac

SEQ ID NO: 50254 - DNA, 15 bp, Homo sapiens
tgcccgcagacaata

SEQ ID NO: 50255 - DNA, 15 bp, Homo sapiens
atgcccgcagacaat

SEQ ID NO: 50256 - DNA, 15 bp, Homo sapiens
gatgcccgcagacaa

SEQ ID NO: 50257 - DNA, 15 bp, Homo sapiens
ggatgcccgcagaca

SEQ ID NO: 50258 - DNA, 15 bp, Homo sapiens
gggatgcccgcagac

SEQ ID NO: 50259 - DNA, 15 bp, Homo sapiens
cgggatgcccgcaga

SEQ ID NO: 50260 - DNA, 15 bp, Homo sapiens
tcgggatgcccgcag

SEQ ID NO: 50261 - DNA, 15 bp, Homo sapiens
ctcgggatgcccgca

SEQ ID NO: 50262 - DNA, 15 bp, Homo sapiens
cctcgggatgcccgc

SEQ ID NO: 50263 - DNA, 15 bp, Homo sapiens
ccctcgggatgcccg

SEQ ID NO: 50264 - DNA, 15 bp, Homo sapiens
tccctcgggatgccc

SEQ ID NO: 50265 - DNA, 15 bp, Homo sapiens
ctccctcgggatgcc

SEQ ID NO: 50266 - DNA, 15 bp, Homo sapiens
cctccctcgggatgc

SEQ ID NO: 50267 - DNA, 15 bp, Homo sapiens
ccctccctcgggatg

SEQ ID NO: 50268 - DNA, 15 bp, Homo sapiens
cccctccctcgggat

SEQ ID NO: 50269 - DNA, 15 bp, Homo sapiens
ccccctccctcggga

SEQ ID NO: 50270 - DNA, 15 bp, Homo sapiens
cccccctccctcggg

SEQ ID NO: 50271 - DNA, 15 bp, Homo sapiens
gcccccctccctcgg

SEQ ID NO: 50272 - DNA, 15 bp, Homo sapiens
agcccccctccctcg

SEQ ID NO: 50273 - DNA, 15 bp, Homo sapiens
cagcccccctccctc

SEQ ID NO: 50274 - DNA, 15 bp, Homo sapiens
tcagcccccctccct

SEQ ID NO: 50275 - DNA, 15 bp, Homo sapiens
ttcagcccccctccc

SEQ ID NO: 50276 - DNA, 15 bp, Homo sapiens
cttcagcccccctcc

SEQ ID NO: 50277 - DNA, 15 bp, Homo sapiens
tcttcagcccccctc

SEQ ID NO: 50278 - DNA, 15 bp, Homo sapiens
atcttcagcccccct

SEQ ID NO: 50279 - DNA, 15 bp, Homo sapiens
gatcttcagcccccc

SEQ ID NO: 50280 - DNA, 15 bp, Homo sapiens
tgatcttcagccccc

SEQ ID NO: 50281 - DNA, 15 bp, Homo sapiens
ttgatcttcagcccc

SEQ ID NO: 50282 - DNA, 15 bp, Homo sapiens
cttgatcttcagccc

SEQ ID NO: 50283 - DNA, 15 bp, Homo sapiens
acttgatcttcagcc

SEQ ID NO: 50284 - DNA, 15 bp, Homo sapiens
gacttgatcttcagc

SEQ ID NO: 50285 - DNA, 15 bp, Homo sapiens
agacttgatcttcag

SEQ ID NO: 50286 - DNA, 15 bp, Homo sapiens
gagacttgatcttca

SEQ ID NO: 50287 - DNA, 15 bp, Homo sapiens
agagacttgatcttc

SEQ ID NO: 50288 - DNA, 15 bp, Homo sapiens
gagagacttgatctt

SEQ ID NO: 50289 - DNA, 15 bp, Homo sapiens
tgagagacttgatct

SEQ ID NO: 50290 - DNA, 15 bp, Homo sapiens
ttgagagacttgatc

SEQ ID NO: 50291 - DNA, 15 bp, Homo sapiens
gttgagagacttgat

SEQ ID NO: 50292 - DNA, 15 bp, Homo sapiens
agttgagagacttga

SEQ ID NO: 50293 - DNA, 15 bp, Homo sapiens
cagttgagagacttg

SEQ ID NO: 50294 - DNA, 15 bp, Homo sapiens
ccagttgagagactt

SEQ ID NO: 50295 - DNA, 15 bp, Homo sapiens
accagttgagagact

SEQ ID NO: 50296 - DNA, 15 bp, Homo sapiens
taccagttgagagac

SEQ ID NO: 50297 - DNA, 15 bp, Homo sapiens
ataccagttgagaga

SEQ ID NO: 50298 - DNA, 15 bp, Homo sapiens
cataccagttgagag

SEQ ID NO: 50299 - DNA, 15 bp, Homo sapiens
tcataccagttgaga

SEQ ID NO: 50300 - DNA, 15 bp, Homo sapiens
ctcataccagttgag

SEQ ID NO: 50301 - DNA, 15 bp, Homo sapiens
cctcataccagttga

SEQ ID NO: 50302 - DNA, 15 bp, Homo sapiens
tcctcataccagttg

SEQ ID NO: 50303 - DNA, 15 bp, Homo sapiens
gtcctcataccagtt

SEQ ID NO: 50304 - DNA, 15 bp, Homo sapiens
tgtcctcataccagt

SEQ ID NO: 50305 - DNA, 15 bp, Homo sapiens
ttgtcctcataccag

SEQ ID NO: 50306 - DNA, 15 bp, Homo sapiens
gttgtcctcatacca

SEQ ID NO: 50307 - DNA, 15 bp, Homo sapiens
tgttgtcctcatacc

SEQ ID NO: 50308 - DNA, 15 bp, Homo sapiens
ttgttgtcctcatac

SEQ ID NO: 50309 - DNA, 15 bp, Homo sapiens
gttgttgtcctcata

SEQ ID NO: 50310 - DNA, 15 bp, Homo sapiens
agttgttgtcctcat

SEQ ID NO: 50311 - DNA, 15 bp, Homo sapiens
tagttgttgtcctca

SEQ ID NO: 50312 - DNA, 15 bp, Homo sapiens
gtagttgttgtcctc

SEQ ID NO: 50313 - DNA, 15 bp, Homo sapiens
tgtagttgttgtcct

SEQ ID NO: 50314 - DNA, 15 bp, Homo sapiens
ttgtagttgttgtcc

SEQ ID NO: 50315 - DNA, 15 bp, Homo sapiens
tttgtagttgttgtc

SEQ ID NO: 50316 - DNA, 15 bp, Homo sapiens
ctttgtagttgttgt

SEQ ID NO: 50317 - DNA, 15 bp, Homo sapiens
gctttgtagttgttg

SEQ ID NO: 50318 - DNA, 15 bp, Homo sapiens
ggctttgtagttgtt

SEQ ID NO: 50319 - DNA, 15 bp, Homo sapiens
gggctttgtagttgt

SEQ ID NO: 50320 - DNA, 15 bp, Homo sapiens
agggctttgtagttg

SEQ ID NO: 50321 - DNA, 15 bp, Homo sapiens
gagggctttgtagtt

SEQ ID NO: 50322 - DNA, 15 bp, Homo sapiens
agagggctttgtagt

SEQ ID NO: 50323 - DNA, 15 bp, Homo sapiens
aagagggctttgtag

SEQ ID NO: 50324 - DNA, 15 bp, Homo sapiens
aaagagggctttgta

SEQ ID NO: 50325 - DNA, 15 bp, Homo sapiens
caaagagggctttgt

SEQ ID NO: 50326 - DNA, 15 bp, Homo sapiens
ccaaagagggctttg

SEQ ID NO: 50327 - DNA, 15 bp, Homo sapiens
tccaaagagggcttt

SEQ ID NO: 50328 - DNA, 15 bp, Homo sapiens
ctccaaagagggctt

SEQ ID NO: 50329 - DNA, 15 bp, Homo sapiens
cctccaaagagggct

SEQ ID NO: 50330 - DNA, 15 bp, Homo sapiens
gcctccaaagagggc

SEQ ID NO: 50331 - DNA, 15 bp, Homo sapiens
tgcctccaaagaggg

SEQ ID NO: 50332 - DNA, 15 bp, Homo sapiens
ttgcctccaaagagg

SEQ ID NO: 50333 - DNA, 15 bp, Homo sapiens
attgcctccaaagag

SEQ ID NO: 50334 - DNA, 15 bp, Homo sapiens
cattgcctccaaaga

SEQ ID NO: 50335 - DNA, 15 bp, Homo sapiens
ccattgcctccaaag

SEQ ID NO: 50336 - DNA, 15 bp, Homo sapiens
gccattgcctccaaa

SEQ ID NO: 50337 - DNA, 15 bp, Homo sapiens
tgccattgcctccaa

SEQ ID NO: 50338 - DNA, 15 bp, Homo sapiens
gtgccattgcctcca

SEQ ID NO: 50339 - DNA, 15 bp, Homo sapiens
agtgccattgcctcc

SEQ ID NO: 50340 - DNA, 15 bp, Homo sapiens
cagtgccattgcctc

SEQ ID NO: 50341 - DNA, 15 bp, Homo sapiens
tcagtgccattgcct

SEQ ID NO: 50342 - DNA, 15 bp, Homo sapiens
ctcagtgccattgcc

SEQ ID NO: 50343 - DNA, 15 bp, Homo sapiens
cctcagtgccattgc

SEQ ID NO: 50344 - DNA, 15 bp, Homo sapiens
tcctcagtgccattg

SEQ ID NO: 50345 - DNA, 15 bp, Homo sapiens
ttcctcagtgccatt

SEQ ID NO: 50346 - DNA, 15 bp, Homo sapiens
cttcctcagtgccat

SEQ ID NO: 50347 - DNA, 15 bp, Homo sapiens
tcttcctcagtgcca

SEQ ID NO: 50348 - DNA, 15 bp, Homo sapiens
atcttcctcagtgcc

SEQ ID NO: 50349 - DNA, 15 bp, Homo sapiens
catcttcctcagtgc

SEQ ID NO: 50350 - DNA, 15 bp, Homo sapiens
gcatcttcctcagtg

SEQ ID NO: 50351 - DNA, 15 bp, Homo sapiens
agcatcttcctcagt

SEQ ID NO: 50352 - DNA, 15 bp, Homo sapiens
cagcatcttcctcag

SEQ ID NO: 50353 - DNA, 15 bp, Homo sapiens
tcagcatcttcctca

SEQ ID NO: 50354 - DNA, 15 bp, Homo sapiens
ttcagcatcttcctc

SEQ ID NO: 50355 - DNA, 15 bp, Homo sapiens
tttcagcatcttcct

SEQ ID NO: 50356 - DNA, 15 bp, Homo sapiens
gtttcagcatcttcc

SEQ ID NO: 50357 - DNA, 15 bp, Homo sapiens
ggtttcagcatcttc

SEQ ID NO: 50358 - DNA, 15 bp, Homo sapiens
aggtttcagcatctt

SEQ ID NO: 50359 - DNA, 15 bp, Homo sapiens
aaggtttcagcatct

SEQ ID NO: 50360 - DNA, 15 bp, Homo sapiens
gaaggtttcagcatc

SEQ ID NO: 50361 - DNA, 15 bp, Homo sapiens
agaaggtttcagcat

SEQ ID NO: 50362 - DNA, 15 bp, Homo sapiens
tagaaggtttcagca

SEQ ID NO: 50363 - DNA, 15 bp, Homo sapiens
atagaaggtttcagc

SEQ ID NO: 50364 - DNA, 15 bp, Homo sapiens
catagaaggtttcag

SEQ ID NO: 50365 - DNA, 15 bp, Homo sapiens
tcatagaaggtttca

SEQ ID NO: 50366 - DNA, 15 bp, Homo sapiens
gtcatagaaggtttc

SEQ ID NO: 50367 - DNA, 15 bp, Homo sapiens
tgtcatagaaggttt

SEQ ID NO: 50368 - DNA, 15 bp, Homo sapiens
ttgtcatagaaggtt

SEQ ID NO: 50369 - DNA, 15 bp, Homo sapiens
gttgtcatagaaggt

SEQ ID NO: 50370 - DNA, 15 bp, Homo sapiens
agttgtcatagaagg

SEQ ID NO: 50371 - DNA, 15 bp, Homo sapiens
gagttgtcatagaag

SEQ ID NO: 50372 - DNA, 15 bp, Homo sapiens
agagttgtcatagaa

SEQ ID NO: 50373 - DNA, 15 bp, Homo sapiens
tagagttgtcataga

SEQ ID NO: 50374 - DNA, 15 bp, Homo sapiens
gtagagttgtcatag

SEQ ID NO: 50375 - DNA, 15 bp, Homo sapiens
tgtagagttgtcata

SEQ ID NO: 50376 - DNA, 15 bp, Homo sapiens
ttgtagagttgtcat

SEQ ID NO: 50377 - DNA, 15 bp, Homo sapiens
cttgtagagttgtca

SEQ ID NO: 50378 - DNA, 15 bp, Homo sapiens
acttgtagagttgtc

SEQ ID NO: 50379 - DNA, 15 bp, Homo sapiens
cacttgtagagttgt

SEQ ID NO: 50380 - DNA, 15 bp, Homo sapiens
tcacttgtagagttg

SEQ ID NO: 50381 - DNA, 15 bp, Homo sapiens
ctcacttgtagagtt

SEQ ID NO: 50382 - DNA, 15 bp, Homo sapiens
actcacttgtagagt

SEQ ID NO: 50383 - DNA, 15 bp, Homo sapiens
cactcacttgtagag

SEQ ID NO: 50384 - DNA, 15 bp, Homo sapiens
acactcacttgtaga

SEQ ID NO: 50385 - DNA, 15 bp, Homo sapiens
gacactcacttgtag

SEQ ID NO: 50386 - DNA, 15 bp, Homo sapiens
ggacactcacttgta

SEQ ID NO: 50387 - DNA, 15 bp, Homo sapiens
tggacactcacttgt

SEQ ID NO: 50388 - DNA, 15 bp, Homo sapiens
atggacactcacttg

SEQ ID NO: 50389 - DNA, 15 bp, Homo sapiens
catggacactcactt

SEQ ID NO: 50390 - DNA, 15 bp, Homo sapiens
gcatggacactcact

SEQ ID NO: 50391 - DNA, 15 bp, Homo sapiens
tgcatggacactcac

SEQ ID NO: 50392 - DNA, 15 bp, Homo sapiens
ctgcatggacactca

SEQ ID NO: 50393 - DNA, 15 bp, Homo sapiens
tctgcatggacactc

SEQ ID NO: 50394 - DNA, 15 bp, Homo sapiens
gtctgcatggacact

SEQ ID NO: 50395 - DNA, 15 bp, Homo sapiens
ggtctgcatggacac

SEQ ID NO: 50396 - DNA, 15 bp, Homo sapiens
gggtctgcatggaca

SEQ ID NO: 50397 - DNA, 15 bp, Homo sapiens
ggggtctgcatggac

SEQ ID NO: 50398 - DNA, 15 bp, Homo sapiens
tggggtctgcatgga

SEQ ID NO: 50399 - DNA, 15 bp, Homo sapiens
ctggggtctgcatgg

SEQ ID NO: 50400 - DNA, 15 bp, Homo sapiens
gctggggtctgcatg

SEQ ID NO: 50401 - DNA, 15 bp, Homo sapiens
ggctggggtctgcat

SEQ ID NO: 50402 - DNA, 15 bp, Homo sapiens
gggctggggtctgca

SEQ ID NO: 50403 - DNA, 15 bp, Homo sapiens
agggctggggtctgc

SEQ ID NO: 50404 - DNA, 15 bp, Homo sapiens
cagggctggggtctg

SEQ ID NO: 50405 - DNA, 15 bp, Homo sapiens
acagggctggggtct

SEQ ID NO: 50406 - DNA, 15 bp, Homo sapiens
gacagggctggggtc

SEQ ID NO: 50407 - DNA, 15 bp, Homo sapiens
ggacagggctggggt

SEQ ID NO: 50408 - DNA, 15 bp, Homo sapiens
gggacagggctgggg

SEQ ID NO: 50409 - DNA, 15 bp, Homo sapiens
ggggacagggctggg

SEQ ID NO: 50410 - DNA, 15 bp, Homo sapiens
tggggacagggctgg

SEQ ID NO: 50411 - DNA, 15 bp, Homo sapiens
ttggggacagggctg

SEQ ID NO: 50412 - DNA, 15 bp, Homo sapiens
gttggggacagggct

SEQ ID NO: 50413 - DNA, 15 bp, Homo sapiens
ggttggggacagggc

SEQ ID NO: 50414 - DNA, 15 bp, Homo sapiens
gggttggggacaggg

SEQ ID NO: 50415 - DNA, 15 bp, Homo sapiens
ggggttggggacagg

SEQ ID NO: 50416 - DNA, 15 bp, Homo sapiens
tggggttggggacag

SEQ ID NO: 50417 - DNA, 15 bp, Homo sapiens
atggggttggggaca

SEQ ID NO: 50418 - DNA, 15 bp, Homo sapiens
gatggggttggggac

SEQ ID NO: 50419 - DNA, 15 bp, Homo sapiens
ggatggggttgggga

SEQ ID NO: 50420 - DNA, 15 bp, Homo sapiens
gggatggggttgggg

SEQ ID NO: 50421 - DNA, 15 bp, Homo sapiens
agggatggggttggg

SEQ ID NO: 50422 - DNA, 15 bp, Homo sapiens
gagggatggggttgg

SEQ ID NO: 50423 - DNA, 15 bp, Homo sapiens
ggagggatggggttg

SEQ ID NO: 50424 - DNA, 15 bp, Homo sapiens
gggagggatggggtt

SEQ ID NO: 50425 - DNA, 15 bp, Homo sapiens
agggagggatggggt

SEQ ID NO: 50426 - DNA, 15 bp, Homo sapiens
aagggagggatgggg

SEQ ID NO: 50427 - DNA, 15 bp, Homo sapiens
taagggagggatggg

SEQ ID NO: 50428 - DNA, 15 bp, Homo sapiens
ctaagggagggatgg

SEQ ID NO: 50429 - DNA, 15 bp, Homo sapiens
actaagggagggatg

SEQ ID NO: 50430 - DNA, 15 bp, Homo sapiens
aactaagggagggat

SEQ ID NO: 50431 - DNA, 15 bp, Homo sapiens
gaactaagggaggga

SEQ ID NO: 50432 - DNA, 15 bp, Homo sapiens
agaactaagggaggg

SEQ ID NO: 50433 - DNA, 15 bp, Homo sapiens
cagaactaagggagg

SEQ ID NO: 50434 - DNA, 15 bp, Homo sapiens
ccagaactaagggag

SEQ ID NO: 50435 - DNA, 15 bp, Homo sapiens
gccagaactaaggga

SEQ ID NO: 50436 - DNA, 15 bp, Homo sapiens
ggccagaactaaggg

SEQ ID NO: 50437 - DNA, 15 bp, Homo sapiens
aggccagaactaagg

SEQ ID NO: 50438 - DNA, 15 bp, Homo sapiens
aaggccagaactaag

SEQ ID NO: 50439 - DNA, 15 bp, Homo sapiens
caaggccagaactaa

SEQ ID NO: 50440 - DNA, 15 bp, Homo sapiens
ccaaggccagaacta

SEQ ID NO: 50441 - DNA, 15 bp, Homo sapiens
gccaaggccagaact

SEQ ID NO: 50442 - DNA, 15 bp, Homo sapiens
ggccaaggccagaac

SEQ ID NO: 50443 - DNA, 15 bp, Homo sapiens
aggccaaggccagaa

SEQ ID NO: 50444 - DNA, 15 bp, Homo sapiens
caggccaaggccaga

SEQ ID NO: 50445 - DNA, 15 bp, Homo sapiens
acaggccaaggccag

SEQ ID NO: 50446 - DNA, 15 bp, Homo sapiens
cacaggccaaggcca

SEQ ID NO: 50447 - DNA, 15 bp, Homo sapiens
acacaggccaaggcc

SEQ ID NO: 50448 - DNA, 15 bp, Homo sapiens
gacacaggccaaggc

SEQ ID NO: 50449 - DNA, 15 bp, Homo sapiens
tgacacaggccaagg

SEQ ID NO: 50450 - DNA, 15 bp, Homo sapiens
atgacacaggccaag

SEQ ID NO: 50451 - DNA, 15 bp, Homo sapiens
gatgacacaggccaa

SEQ ID NO: 50452 - DNA, 15 bp, Homo sapiens
agatgacacaggcca

SEQ ID NO: 50453 - DNA, 15 bp, Homo sapiens
gagatgacacaggcc

SEQ ID NO: 50454 - DNA, 15 bp, Homo sapiens
ggagatgacacaggc

SEQ ID NO: 50455 - DNA, 15 bp, Homo sapiens
aggagatgacacagg

SEQ ID NO: 50456 - DNA, 15 bp, Homo sapiens
gaggagatgacacag

SEQ ID NO: 50457 - DNA, 15 bp, Homo sapiens
ggaggagatgacaca

SEQ ID NO: 50458 - DNA, 15 bp, Homo sapiens
gggaggagatgacac

SEQ ID NO: 50459 - DNA, 15 bp, Homo sapiens
agggaggagatgaca

SEQ ID NO: 50460 - DNA, 15 bp, Homo sapiens
gagggaggagatgac

SEQ ID NO: 50461 - DNA, 15 bp, Homo sapiens
agagggaggagatga

SEQ ID NO: 50462 - DNA, 15 bp, Homo sapiens
cagagggaggagatg

SEQ ID NO: 50463 - DNA, 15 bp, Homo sapiens
acagagggaggagat

SEQ ID NO: 50464 - DNA, 15 bp, Homo sapiens
tacagagggaggaga

SEQ ID NO: 50465 - DNA, 15 bp, Homo sapiens
ctacagagggaggag

SEQ ID NO: 50466 - DNA, 15 bp, Homo sapiens
gctacagagggagga

SEQ ID NO: 50467 - DNA, 15 bp, Homo sapiens
tgctacagagggagg

SEQ ID NO: 50468 - DNA, 15 bp, Homo sapiens
ctgctacagagggag

SEQ ID NO: 50469 - DNA, 15 bp, Homo sapiens
gctgctacagaggga

SEQ ID NO: 50470 - DNA, 15 bp, Homo sapiens
cgctgctacagaggg

SEQ ID NO: 50471 - DNA, 15 bp, Homo sapiens
acgctgctacagagg

SEQ ID NO: 50472 - DNA, 15 bp, Homo sapiens
aacgctgctacagag

SEQ ID NO: 50473 - DNA, 15 bp, Homo sapiens
taacgctgctacaga

SEQ ID NO: 50474 - DNA, 15 bp, Homo sapiens
ctaacgctgctacag

SEQ ID NO: 50475 - DNA, 15 bp, Homo sapiens
tctaacgctgctaca

SEQ ID NO: 50476 - DNA, 15 bp, Homo sapiens
atctaacgctgctac

SEQ ID NO: 50477 - DNA, 15 bp, Homo sapiens
catctaacgctgcta

SEQ ID NO: 50478 - DNA, 15 bp, Homo sapiens
acatctaacgctgct

SEQ ID NO: 50479 - DNA, 15 bp, Homo sapiens
gacatctaacgctgc

SEQ ID NO: 50480 - DNA, 15 bp, Homo sapiens
agacatctaacgctg

SEQ ID NO: 50481 - DNA, 15 bp, Homo sapiens
tagacatctaacgct

SEQ ID NO: 50482 - DNA, 15 bp, Homo sapiens
gtagacatctaacgc

SEQ ID NO: 50483 - DNA, 15 bp, Homo sapiens
tgtagacatctaacg

SEQ ID NO: 50484 - DNA, 15 bp, Homo sapiens
atgtagacatctaac

SEQ ID NO: 50485 - DNA, 15 bp, Homo sapiens
catgtagacatctaa

SEQ ID NO: 50486 - DNA, 15 bp, Homo sapiens
gcatgtagacatcta

SEQ ID NO: 50487 - DNA, 15 bp, Homo sapiens
ggcatgtagacatct

SEQ ID NO: 50488 - DNA, 15 bp, Homo sapiens
gggcatgtagacatc

SEQ ID NO: 50489 - DNA, 15 bp, Homo sapiens
tgggcatgtagacat

SEQ ID NO: 50490 - DNA, 15 bp, Homo sapiens
atgggcatgtagaca

SEQ ID NO: 50491 - DNA, 15 bp, Homo sapiens
aatgggcatgtagac

SEQ ID NO: 50492 - DNA, 15 bp, Homo sapiens
aaatgggcatgtaga

SEQ ID NO: 50493 - DNA, 15 bp, Homo sapiens
caaatgggcatgtag

SEQ ID NO: 50494 - DNA, 15 bp, Homo sapiens
gcaaatgggcatgta

SEQ ID NO: 50495 - DNA, 15 bp, Homo sapiens
ggcaaatgggcatgt

SEQ ID NO: 50496 - DNA, 15 bp, Homo sapiens
gggcaaatgggcatg

SEQ ID NO: 50497 - DNA, 15 bp, Homo sapiens
tgggcaaatgggcat

SEQ ID NO: 50498 - DNA, 15 bp, Homo sapiens
gtgggcaaatgggca

SEQ ID NO: 50499 - DNA, 15 bp, Homo sapiens
ggtgggcaaatgggc

SEQ ID NO: 50500 - DNA, 15 bp, Homo sapiens
tggtgggcaaatggg

SEQ ID NO: 50501 - DNA, 15 bp, Homo sapiens
ctggtgggcaaatgg

SEQ ID NO: 50502 - DNA, 15 bp, Homo sapiens
tctggtgggcaaatg

SEQ ID NO: 50503 - DNA, 15 bp, Homo sapiens
gtctggtgggcaaat

SEQ ID NO: 50504 - DNA, 15 bp, Homo sapiens
agtctggtgggcaaa

SEQ ID NO: 50505 - DNA, 15 bp, Homo sapiens
cagtctggtgggcaa

SEQ ID NO: 50506 - DNA, 15 bp, Homo sapiens
tcagtctggtgggca

SEQ ID NO: 50507 - DNA, 15 bp, Homo sapiens
ctcagtctggtgggc

SEQ ID NO: 50508 - DNA, 15 bp, Homo sapiens
gctcagtctggtggg

SEQ ID NO: 50509 - DNA, 15 bp, Homo sapiens
agctcagtctggtgg

SEQ ID NO: 50510 - DNA, 15 bp, Homo sapiens
gagctcagtctggtg

SEQ ID NO: 50511 - DNA, 15 bp, Homo sapiens
agagctcagtctggt

SEQ ID NO: 50512 - DNA, 15 bp, Homo sapiens
aagagctcagtctgg

SEQ ID NO: 50513 - DNA, 15 bp, Homo sapiens
gaagagctcagtctg

SEQ ID NO: 50514 - DNA, 15 bp, Homo sapiens
ggaagagctcagtct

SEQ ID NO: 50515 - DNA, 15 bp, Homo sapiens
aggaagagctcagtc

SEQ ID NO: 50516 - DNA, 15 bp, Homo sapiens
taggaagagctcagt

SEQ ID NO: 50517 - DNA, 15 bp, Homo sapiens
ctaggaagagctcag

SEQ ID NO: 50518 - DNA, 15 bp, Homo sapiens
tctaggaagagctca

SEQ ID NO: 50519 - DNA, 15 bp, Homo sapiens
ctctaggaagagctc

SEQ ID NO: 50520 - DNA, 15 bp, Homo sapiens
cctctaggaagagct

SEQ ID NO: 50521 - DNA, 15 bp, Homo sapiens
tcctctaggaagagc

SEQ ID NO: 50522 - DNA, 15 bp, Homo sapiens
ctcctctaggaagag

SEQ ID NO: 50523 - DNA, 15 bp, Homo sapiens
tctcctctaggaaga

SEQ ID NO: 50524 - DNA, 15 bp, Homo sapiens
ctctcctctaggaag

SEQ ID NO: 50525 - DNA, 15 bp, Homo sapiens
tctctcctctaggaa

SEQ ID NO: 50526 - DNA, 15 bp, Homo sapiens
ctctctcctctagga

SEQ ID NO: 50527 - DNA, 15 bp, Homo sapiens
cctctctcctctagg

SEQ ID NO: 50528 - DNA, 15 bp, Homo sapiens
gcctctctcctctag

SEQ ID NO: 50529 - DNA, 15 bp, Homo sapiens
agcctctctcctcta

SEQ ID NO: 50530 - DNA, 15 bp, Homo sapiens
aagcctctctcctct

SEQ ID NO: 50531 - DNA, 15 bp, Homo sapiens
gaagcctctctcctc

SEQ ID NO: 50532 - DNA, 15 bp, Homo sapiens
agaagcctctctcct

SEQ ID NO: 50533 - DNA, 15 bp, Homo sapiens
gagaagcctctctcc

SEQ ID NO: 50534 - DNA, 15 bp, Homo sapiens
agagaagcctctctc

SEQ ID NO: 50535 - DNA, 15 bp, Homo sapiens
aagagaagcctctct

SEQ ID NO: 50536 - DNA, 15 bp, Homo sapiens
caagagaagcctctc

SEQ ID NO: 50537 - DNA, 15 bp, Homo sapiens
tcaagagaagcctct

SEQ ID NO: 50538 - DNA, 15 bp, Homo sapiens
ttcaagagaagcctc

SEQ ID NO: 50539 - DNA, 15 bp, Homo sapiens
attcaagagaagcct

SEQ ID NO: 50540 - DNA, 15 bp, Homo sapiens
tattcaagagaagcc

SEQ ID NO: 50541 - DNA, 15 bp, Homo sapiens
ctattcaagagaagc

SEQ ID NO: 50542 - DNA, 15 bp, Homo sapiens
gctattcaagagaag

SEQ ID NO: 50543 - DNA, 15 bp, Homo sapiens
agctattcaagagaa

SEQ ID NO: 50544 - DNA, 15 bp, Homo sapiens
tagctattcaagaga

SEQ ID NO: 50545 - DNA, 15 bp, Homo sapiens
gtagctattcaagag

SEQ ID NO: 50546 - DNA, 15 bp, Homo sapiens
ggtagctattcaaga

SEQ ID NO: 50547 - DNA, 15 bp, Homo sapiens
aggtagctattcaag

SEQ ID NO: 50548 - DNA, 15 bp, Homo sapiens
caggtagctattcaa

SEQ ID NO: 50549 - DNA, 15 bp, Homo sapiens
acaggtagctattca

SEQ ID NO: 50550 - DNA, 15 bp, Homo sapiens
gacaggtagctattc

SEQ ID NO: 50551 - DNA, 15 bp, Homo sapiens
ggacaggtagctatt

SEQ ID NO: 50552 - DNA, 15 bp, Homo sapiens
gggacaggtagctat

SEQ ID NO: 50553 - DNA, 15 bp, Homo sapiens
ggggacaggtagcta

SEQ ID NO: 50554 - DNA, 15 bp, Homo sapiens
tggggacaggtagct

SEQ ID NO: 50555 - DNA, 15 bp, Homo sapiens
ctggggacaggtagc

SEQ ID NO: 50556 - DNA, 15 bp, Homo sapiens
actggggacaggtag

SEQ ID NO: 50557 - DNA, 15 bp, Homo sapiens
aactggggacaggta

SEQ ID NO: 50558 - DNA, 15 bp, Homo sapiens
gaactggggacaggt

SEQ ID NO: 50559 - DNA, 15 bp, Homo sapiens
agaactggggacagg

SEQ ID NO: 50560 - DNA, 15 bp, Homo sapiens
gagaactggggacag

SEQ ID NO: 50561 - DNA, 15 bp, Homo sapiens
agagaactggggaca

SEQ ID NO: 50562 - DNA, 15 bp, Homo sapiens
cagagaactggggac

SEQ ID NO: 50563 - DNA, 15 bp, Homo sapiens
tcagagaactgggga

SEQ ID NO: 50564 - DNA, 15 bp, Homo sapiens
ttcagagaactgggg

SEQ ID NO: 50565 - DNA, 15 bp, Homo sapiens
attcagagaactggg

SEQ ID NO: 50566 - DNA, 15 bp, Homo sapiens
cattcagagaactgg

SEQ ID NO: 50567 - DNA, 15 bp, Homo sapiens
gcattcagagaactg

SEQ ID NO: 50568 - DNA, 15 bp, Homo sapiens
tgcattcagagaact

SEQ ID NO: 50569 - DNA, 15 bp, Homo sapiens
ctgcattcagagaac

SEQ ID NO: 50570 - DNA, 15 bp, Homo sapiens
gctgcattcagagaa

SEQ ID NO: 50571 - DNA, 15 bp, Homo sapiens
ggctgcattcagaga

SEQ ID NO: 50572 - DNA, 15 bp, Homo sapiens
aggctgcattcagag

SEQ ID NO: 50573 - DNA, 15 bp, Homo sapiens
caggctgcattcaga

SEQ ID NO: 50574 - DNA, 15 bp, Homo sapiens
ccaggctgcattcag

SEQ ID NO: 50575 - DNA, 15 bp, Homo sapiens
gccaggctgcattca

SEQ ID NO: 50576 - DNA, 15 bp, Homo sapiens
tgccaggctgcattc

SEQ ID NO: 50577 - DNA, 15 bp, Homo sapiens
gtgccaggctgcatt

SEQ ID NO: 50578 - DNA, 15 bp, Homo sapiens
tgtgccaggctgcat

SEQ ID NO: 50579 - DNA, 15 bp, Homo sapiens
atgtgccaggctgca

SEQ ID NO: 50580 - DNA, 15 bp, Homo sapiens
gatgtgccaggctgc

SEQ ID NO: 50581 - DNA, 15 bp, Homo sapiens
agatgtgccaggctg

SEQ ID NO: 50582 - DNA, 15 bp, Homo sapiens
gagatgtgccaggct

SEQ ID NO: 50583 - DNA, 15 bp, Homo sapiens
tgagatgtgccaggc

SEQ ID NO: 50584 - DNA, 15 bp, Homo sapiens
ctgagatgtgccagg

SEQ ID NO: 50585 - DNA, 15 bp, Homo sapiens
cctgagatgtgccag

SEQ ID NO: 50586 - DNA, 15 bp, Homo sapiens
acctgagatgtgcca

SEQ ID NO: 50587 - DNA, 15 bp, Homo sapiens
cacctgagatgtgcc

SEQ ID NO: 50588 - DNA, 15 bp, Homo sapiens
gcacctgagatgtgc

SEQ ID NO: 50589 - DNA, 15 bp, Homo sapiens
tgcacctgagatgtg

SEQ ID NO: 50590 - DNA, 15 bp, Homo sapiens
gtgcacctgagatgt

SEQ ID NO: 50591 - DNA, 15 bp, Homo sapiens
tgtgcacctgagatg

SEQ ID NO: 50592 - DNA, 15 bp, Homo sapiens
ctgtgcacctgagat

SEQ ID NO: 50593 - DNA, 15 bp, Homo sapiens
actgtgcacctgaga

SEQ ID NO: 50594 - DNA, 15 bp, Homo sapiens
tactgtgcacctgag

SEQ ID NO: 50595 - DNA, 15 bp, Homo sapiens
ctactgtgcacctga

SEQ ID NO: 50596 - DNA, 15 bp, Homo sapiens
actactgtgcacctg

SEQ ID NO: 50597 - DNA, 15 bp, Homo sapiens
cactactgtgcacct

SEQ ID NO: 50598 - DNA, 15 bp, Homo sapiens
acactactgtgcacc

SEQ ID NO: 50599 - DNA, 15 bp, Homo sapiens
aacactactgtgcac

SEQ ID NO: 50600 - DNA, 15 bp, Homo sapiens
aaacactactgtgca

SEQ ID NO: 50601 - DNA, 15 bp, Homo sapiens
taaacactactgtgc

SEQ ID NO: 50602 - DNA, 15 bp, Homo sapiens
ataaacactactgtg

SEQ ID NO: 50603 - DNA, 15 bp, Homo sapiens
gataaacactactgt

SEQ ID NO: 50604 - DNA, 15 bp, Homo sapiens
tgataaacactactg

SEQ ID NO: 50605 - DNA, 15 bp, Homo sapiens
ttgataaacactact

SEQ ID NO: 50606 - DNA, 15 bp, Homo sapiens
attgataaacactac

SEQ ID NO: 50607 - DNA, 15 bp, Homo sapiens
cattgataaacacta

SEQ ID NO: 50608 - DNA, 15 bp, Homo sapiens
ccattgataaacact

SEQ ID NO: 50609 - DNA, 15 bp, Homo sapiens
tccattgataaacac

SEQ ID NO: 50610 - DNA, 15 bp, Homo sapiens
ttccattgataaaca

SEQ ID NO: 50611 - DNA, 15 bp, Homo sapiens
attccattgataaac

SEQ ID NO: 50612 - DNA, 15 bp, Homo sapiens
cattccattgataaa

SEQ ID NO: 50613 - DNA, 15 bp, Homo sapiens
tcattccattgataa

SEQ ID NO: 50614 - DNA, 15 bp, Homo sapiens
ttcattccattgata

SEQ ID NO: 50615 - DNA, 15 bp, Homo sapiens
attcattccattgat

SEQ ID NO: 50616 - DNA, 15 bp, Homo sapiens
cattcattccattga

SEQ ID NO: 50617 - DNA, 15 bp, Homo sapiens
tcattcattccattg

SEQ ID NO: 50618 - DNA, 15 bp, Homo sapiens
atcattcattccatt

SEQ ID NO: 50619 - DNA, 15 bp, Homo sapiens
aatcattcattccat

SEQ ID NO: 50620 - DNA, 15 bp, Homo sapiens
caatcattcattcca

SEQ ID NO: 50621 - DNA, 15 bp, Homo sapiens
tcaatcattcattcc

SEQ ID NO: 50622 - DNA, 15 bp, Homo sapiens
gtcaatcattcattc

SEQ ID NO: 50623 - DNA, 15 bp, Homo sapiens
tgtcaatcattcatt

SEQ ID NO: 50624 - DNA, 15 bp, Homo sapiens
ctgtcaatcattcat

SEQ ID NO: 50625 - DNA, 15 bp, Homo sapiens
gctgtcaatcattca

SEQ ID NO: 50626 - DNA, 15 bp, Homo sapiens
ggctgtcaatcattc

SEQ ID NO: 50627 - DNA, 15 bp, Homo sapiens
tggctgtcaatcatt

SEQ ID NO: 50628 - DNA, 15 bp, Homo sapiens
ttggctgtcaatcat

SEQ ID NO: 50629 - DNA, 15 bp, Homo sapiens
gttggctgtcaatca

SEQ ID NO: 50630 - DNA, 15 bp, Homo sapiens
ggttggctgtcaatc

SEQ ID NO: 50631 - DNA, 15 bp, Homo sapiens
aggttggctgtcaat

SEQ ID NO: 50632 - DNA, 15 bp, Homo sapiens
aaggttggctgtcaa

SEQ ID NO: 50633 - DNA, 15 bp, Homo sapiens
gaaggttggctgtca

SEQ ID NO: 50634 - DNA, 15 bp, Homo sapiens
agaaggttggctgtc

SEQ ID NO: 50635 - DNA, 15 bp, Homo sapiens
cagaaggttggctgt

SEQ ID NO: 50636 - DNA, 15 bp, Homo sapiens
ccagaaggttggctg

SEQ ID NO: 50637 - DNA, 15 bp, Homo sapiens
accagaaggttggct

SEQ ID NO: 50638 - DNA, 15 bp, Homo sapiens
aaccagaaggttggc

SEQ ID NO: 50639 - DNA, 15 bp, Homo sapiens
aaaccagaaggttgg

SEQ ID NO: 50640 - DNA, 15 bp, Homo sapiens
aaaaccagaaggttg

SEQ ID NO: 50641 - DNA, 15 bp, Homo sapiens
gaaaaccagaaggtt

SEQ ID NO: 50642 - DNA, 15 bp, Homo sapiens
agaaaaccagaaggt

SEQ ID NO: 50643 - DNA, 15 bp, Homo sapiens
cagaaaaccagaagg

SEQ ID NO: 50644 - DNA, 15 bp, Homo sapiens
ccagaaaaccagaag

SEQ ID NO: 50645 - DNA, 15 bp, Homo sapiens
cccagaaaaccagaa

SEQ ID NO: 50646 - DNA, 15 bp, Homo sapiens
ccccagaaaaccaga

SEQ ID NO: 50647 - DNA, 15 bp, Homo sapiens
cccccagaaaaccag

SEQ ID NO: 50648 - DNA, 15 bp, Homo sapiens
tcccccagaaaacca

SEQ ID NO: 50649 - DNA, 15 bp, Homo sapiens
atcccccagaaaacc

SEQ ID NO: 50650 - DNA, 15 bp, Homo sapiens
catcccccagaaaac

SEQ ID NO: 50651 - DNA, 15 bp, Homo sapiens
acatcccccagaaaa

SEQ ID NO: 50652 - DNA, 15 bp, Homo sapiens
cacatcccccagaaa

SEQ ID NO: 50653 - DNA, 15 bp, Homo sapiens
ccacatcccccagaa

SEQ ID NO: 50654 - DNA, 15 bp, Homo sapiens
tccacatcccccaga

SEQ ID NO: 50655 - DNA, 15 bp, Homo sapiens
ttccacatcccccag

SEQ ID NO: 50656 - DNA, 15 bp, Homo sapiens
cttccacatccccca

SEQ ID NO: 50657 - DNA, 15 bp, Homo sapiens
ccttccacatccccc

SEQ ID NO: 50658 - DNA, 15 bp, Homo sapiens
cccttccacatcccc

SEQ ID NO: 50659 - DNA, 15 bp, Homo sapiens
acccttccacatccc

SEQ ID NO: 50660 - DNA, 15 bp, Homo sapiens
cacccttccacatcc

SEQ ID NO: 50661 - DNA, 15 bp, Homo sapiens
ccacccttccacatc

SEQ ID NO: 50662 - DNA, 15 bp, Homo sapiens
gccacccttccacat

SEQ ID NO: 50663 - DNA, 15 bp, Homo sapiens
agccacccttccaca

SEQ ID NO: 50664 - DNA, 15 bp, Homo sapiens
aagccacccttccac

SEQ ID NO: 50665 - DNA, 15 bp, Homo sapiens
gaagccacccttcca

SEQ ID NO: 50666 - DNA, 15 bp, Homo sapiens
ggaagccacccttcc

SEQ ID NO: 50667 - DNA, 15 bp, Homo sapiens
tggaagccacccttc

SEQ ID NO: 50668 - DNA, 15 bp, Homo sapiens
ctggaagccaccctt

SEQ ID NO: 50669 - DNA, 15 bp, Homo sapiens
cctggaagccaccct

SEQ ID NO: 50670 - DNA, 15 bp, Homo sapiens
ccctggaagccaccc

SEQ ID NO: 50671 - DNA, 15 bp, Homo sapiens
accctggaagccacc

SEQ ID NO: 50672 - DNA, 15 bp, Homo sapiens
caccctggaagccac

SEQ ID NO: 50673 - DNA, 15 bp, Homo sapiens
tcaccctggaagcca

SEQ ID NO: 50674 - DNA, 15 bp, Homo sapiens
atcaccctggaagcc

SEQ ID NO: 50675 - DNA, 15 bp, Homo sapiens
gatcaccctggaagc

SEQ ID NO: 50676 - DNA, 15 bp, Homo sapiens
tgatcaccctggaag

SEQ ID NO: 50677 - DNA, 15 bp, Homo sapiens
ttgatcaccctggaa

SEQ ID NO: 50678 - DNA, 15 bp, Homo sapiens
cttgatcaccctgga

SEQ ID NO: 50679 - DNA, 15 bp, Homo sapiens
tcttgatcaccctgg

SEQ ID NO: 50680 - DNA, 15 bp, Homo sapiens
ttcttgatcaccctg

SEQ ID NO: 50681 - DNA, 15 bp, Homo sapiens
attcttgatcaccct

SEQ ID NO: 50682 - DNA, 15 bp, Homo sapiens
cattcttgatcaccc

SEQ ID NO: 50683 - DNA, 15 bp, Homo sapiens
tcattcttgatcacc

SEQ ID NO: 50684 - DNA, 15 bp, Homo sapiens
ctcattcttgatcac

SEQ ID NO: 50685 - DNA, 15 bp, Homo sapiens
tctcattcttgatca

SEQ ID NO: 50686 - DNA, 15 bp, Homo sapiens
atctcattcttgatc

SEQ ID NO: 50687 - DNA, 15 bp, Homo sapiens
tatctcattcttgat

SEQ ID NO: 50688 - DNA, 15 bp, Homo sapiens
ttatctcattcttga

SEQ ID NO: 50689 - DNA, 15 bp, Homo sapiens
attatctcattcttg

SEQ ID NO: 50690 - DNA, 15 bp, Homo sapiens
cattatctcattctt

SEQ ID NO: 50691 - DNA, 15 bp, Homo sapiens
ccattatctcattct

SEQ ID NO: 50692 - DNA, 15 bp, Homo sapiens
gccattatctcattc

SEQ ID NO: 50693 - DNA, 15 bp, Homo sapiens
tgccattatctcatt

SEQ ID NO: 50694 - DNA, 15 bp, Homo sapiens
ctgccattatctcat

SEQ ID NO: 50695 - DNA, 15 bp, Homo sapiens
tctgccattatctca

SEQ ID NO: 50696 - DNA, 15 bp, Homo sapiens
ttctgccattatctc

SEQ ID NO: 50697 - DNA, 15 bp, Homo sapiens
cttctgccattatct

SEQ ID NO: 50698 - DNA, 15 bp, Homo sapiens
ccttctgccattatc

SEQ ID NO: 50699 - DNA, 15 bp, Homo sapiens
tccttctgccattat

SEQ ID NO: 50700 - DNA, 15 bp, Homo sapiens
gtccttctgccatta

SEQ ID NO: 50701 - DNA, 15 bp, Homo sapiens
tgtccttctgccatt

SEQ ID NO: 50702 - DNA, 15 bp, Homo sapiens
ttgtccttctgccat

SEQ ID NO: 50703 - DNA, 15 bp, Homo sapiens
tttgtccttctgcca

SEQ ID NO: 50704 - DNA, 15 bp, Homo sapiens
atttgtccttctgcc

SEQ ID NO: 50705 - DNA, 15 bp, Homo sapiens
gatttgtccttctgc

SEQ ID NO: 50706 - DNA, 15 bp, Homo sapiens
ggatttgtccttctg

SEQ ID NO: 50707 - DNA, 15 bp, Homo sapiens
aggatttgtccttct

SEQ ID NO: 50708 - DNA, 15 bp, Homo sapiens
caggatttgtccttc

SEQ ID NO: 50709 - DNA, 15 bp, Homo sapiens
gcaggatttgtcctt

SEQ ID NO: 50710 - DNA, 15 bp, Homo sapiens
tgcaggatttgtcct

SEQ ID NO: 50711 - DNA, 15 bp, Homo sapiens
ttgcaggatttgtcc

SEQ ID NO: 50712 - DNA, 15 bp, Homo sapiens
cttgcaggatttgtc

SEQ ID NO: 50713 - DNA, 15 bp, Homo sapiens
tcttgcaggatttgt

SEQ ID NO: 50714 - DNA, 15 bp, Homo sapiens
atcttgcaggatttg

SEQ ID NO: 50715 - DNA, 15 bp, Homo sapiens
gatcttgcaggattt

SEQ ID NO: 50716 - DNA, 15 bp, Homo sapiens
agatcttgcaggatt

SEQ ID NO: 50717 - DNA, 15 bp, Homo sapiens
gagatcttgcaggat

SEQ ID NO: 50718 - DNA, 15 bp, Homo sapiens
tgagatcttgcagga

SEQ ID NO: 50719 - DNA, 15 bp, Homo sapiens
gtgagatcttgcagg

SEQ ID NO: 50720 - DNA, 15 bp, Homo sapiens
agtgagatcttgcag

SEQ ID NO: 50721 - DNA, 15 bp, Homo sapiens
aagtgagatcttgca

SEQ ID NO: 50722 - DNA, 15 bp, Homo sapiens
taagtgagatcttgc

SEQ ID NO: 50723 - DNA, 15 bp, Homo sapiens
ataagtgagatcttg

SEQ ID NO: 50724 - DNA, 15 bp, Homo sapiens
tataagtgagatctt

SEQ ID NO: 50725 - DNA, 15 bp, Homo sapiens
atataagtgagatct

SEQ ID NO: 50726 - DNA, 15 bp, Homo sapiens
tatataagtgagatc

SEQ ID NO: 50727 - DNA, 15 bp, Homo sapiens
atatataagtgagat

SEQ ID NO: 50728 - DNA, 15 bp, Homo sapiens
catatataagtgaga

SEQ ID NO: 50729 - DNA, 15 bp, Homo sapiens
ccatatataagtgag

SEQ ID NO: 50730 - DNA, 15 bp, Homo sapiens
tccatatataagtga

SEQ ID NO: 50731 - DNA, 15 bp, Homo sapiens
ttccatatataagtg

SEQ ID NO: 50732 - DNA, 15 bp, Homo sapiens
attccatatataagt

SEQ ID NO: 50733 - DNA, 15 bp, Homo sapiens
tattccatatataag

SEQ ID NO: 50734 - DNA, 15 bp, Homo sapiens
atattccatatataa

SEQ ID NO: 50735 - DNA, 15 bp, Homo sapiens
tatattccatatata

SEQ ID NO: 50736 - DNA, 15 bp, Homo sapiens
atatattccatatat

SEQ ID NO: 50737 - DNA, 15 bp, Homo sapiens
catatattccatata

SEQ ID NO: 50738 - DNA, 15 bp, Homo sapiens
acatatattccatat

SEQ ID NO: 50739 - DNA, 15 bp, Homo sapiens
tacatatattccata

SEQ ID NO: 50740 - DNA, 15 bp, Homo sapiens
ttacatatattccat

SEQ ID NO: 50741 - DNA, 15 bp, Homo sapiens
cttacatatattcca

SEQ ID NO: 50742 - DNA, 15 bp, Homo sapiens
ccttacatatattcc

SEQ ID NO: 50743 - DNA, 15 bp, Homo sapiens
accttacatatattc

SEQ ID NO: 50744 - DNA, 15 bp, Homo sapiens
taccttacatatatt

SEQ ID NO: 50745 - DNA, 15 bp, Homo sapiens
ctaccttacatatat

SEQ ID NO: 50746 - DNA, 15 bp, Homo sapiens
tctaccttacatata

SEQ ID NO: 50747 - DNA, 15 bp, Homo sapiens
ttctaccttacatat

SEQ ID NO: 50748 - DNA, 15 bp, Homo sapiens
tttctaccttacata

SEQ ID NO: 50749 - DNA, 15 bp, Homo sapiens
ctttctaccttacat

SEQ ID NO: 50750 - DNA, 15 bp, Homo sapiens
actttctaccttaca

SEQ ID NO: 50751 - DNA, 15 bp, Homo sapiens
cactttctaccttac

SEQ ID NO: 50752 - DNA, 15 bp, Homo sapiens
acactttctacctta

SEQ ID NO: 50753 - DNA, 15 bp, Homo sapiens
gacactttctacctt

SEQ ID NO: 50754 - DNA, 15 bp, Homo sapiens
tgacactttctacct

SEQ ID NO: 50755 - DNA, 15 bp, Homo sapiens
ctgacactttctacc

SEQ ID NO: 50756 - DNA, 15 bp, Homo sapiens
actgacactttctac

SEQ ID NO: 50757 - DNA, 15 bp, Homo sapiens
aactgacactttcta

SEQ ID NO: 50758 - DNA, 15 bp, Homo sapiens
aaactgacactttct

SEQ ID NO: 50759 - DNA, 15 bp, Homo sapiens
gaaactgacactttc

SEQ ID NO: 50760 - DNA, 15 bp, Homo sapiens
tgaaactgacacttt

SEQ ID NO: 50761 - DNA, 15 bp, Homo sapiens
gtgaaactgacactt

SEQ ID NO: 50762 - DNA, 15 bp, Homo sapiens
tgtgaaactgacact

SEQ ID NO: 50763 - DNA, 15 bp, Homo sapiens
atgtgaaactgacac

SEQ ID NO: 50764 - DNA, 15 bp, Homo sapiens
catgtgaaactgaca

SEQ ID NO: 50765 - DNA, 15 bp, Homo sapiens
tcatgtgaaactgac

SEQ ID NO: 50766 - DNA, 15 bp, Homo sapiens
atcatgtgaaactga

SEQ ID NO: 50767 - DNA, 15 bp, Homo sapiens
catcatgtgaaactg

SEQ ID NO: 50768 - DNA, 15 bp, Homo sapiens
tcatcatgtgaaact

SEQ ID NO: 50769 - DNA, 15 bp, Homo sapiens
ttcatcatgtgaaac

SEQ ID NO: 50770 - DNA, 15 bp, Homo sapiens
attcatcatgtgaaa

SEQ ID NO: 50771 - DNA, 15 bp, Homo sapiens
tattcatcatgtgaa

SEQ ID NO: 50772 - DNA, 15 bp, Homo sapiens
ttattcatcatgtga

SEQ ID NO: 50773 - DNA, 15 bp, Homo sapiens
cttattcatcatgtg

SEQ ID NO: 50774 - DNA, 15 bp, Homo sapiens
acttattcatcatgt

SEQ ID NO: 50775 - DNA, 15 bp, Homo sapiens
aacttattcatcatg

SEQ ID NO: 50776 - DNA, 15 bp, Homo sapiens
gaacttattcatcat

SEQ ID NO: 50777 - DNA, 15 bp, Homo sapiens
ggaacttattcatca

SEQ ID NO: 50778 - DNA, 15 bp, Homo sapiens
aggaacttattcatc

SEQ ID NO: 50779 - DNA, 15 bp, Homo sapiens
caggaacttattcat

SEQ ID NO: 50780 - DNA, 15 bp, Homo sapiens
ccaggaacttattca

SEQ ID NO: 50781 - DNA, 15 bp, Homo sapiens
cccaggaacttattc

SEQ ID NO: 50782 - DNA, 15 bp, Homo sapiens
tcccaggaacttatt

SEQ ID NO: 50783 - DNA, 15 bp, Homo sapiens
atcccaggaacttat

SEQ ID NO: 50784 - DNA, 15 bp, Homo sapiens
gatcccaggaactta

SEQ ID NO: 50785 - DNA, 15 bp, Homo sapiens
agatcccaggaactt

SEQ ID NO: 50786 - DNA, 15 bp, Homo sapiens
aagatcccaggaact

SEQ ID NO: 50787 - DNA, 15 bp, Homo sapiens
caagatcccaggaac

SEQ ID NO: 50788 - DNA, 15 bp, Homo sapiens
tcaagatcccaggaa

SEQ ID NO: 50789 - DNA, 15 bp, Homo sapiens
atcaagatcccagga

SEQ ID NO: 50790 - DNA, 15 bp, Homo sapiens
catcaagatcccagg

SEQ ID NO: 50791 - DNA, 15 bp, Homo sapiens
acatcaagatcccag

SEQ ID NO: 50792 - DNA, 15 bp, Homo sapiens
tacatcaagatccca

SEQ ID NO: 50793 - DNA, 15 bp, Homo sapiens
gtacatcaagatccc

SEQ ID NO: 50794 - DNA, 15 bp, Homo sapiens
tgtacatcaagatcc

SEQ ID NO: 50795 - DNA, 15 bp, Homo sapiens
atgtacatcaagatc

SEQ ID NO: 50796 - DNA, 15 bp, Homo sapiens
gatgtacatcaagat

SEQ ID NO: 50797 - DNA, 15 bp, Homo sapiens
cgatgtacatcaaga

SEQ ID NO: 50798 - DNA, 15 bp, Homo sapiens
acgatgtacatcaag

SEQ ID NO: 50799 - DNA, 15 bp, Homo sapiens
cacgatgtacatcaa

SEQ ID NO: 50800 - DNA, 15 bp, Homo sapiens
tcacgatgtacatca

SEQ ID NO: 50801 - DNA, 15 bp, Homo sapiens
atcacgatgtacatc

SEQ ID NO: 50802 - DNA, 15 bp, Homo sapiens
catcacgatgtacat

SEQ ID NO: 50803 - DNA, 15 bp, Homo sapiens
tcatcacgatgtaca

SEQ ID NO: 50804 - DNA, 15 bp, Homo sapiens
gtcatcacgatgtac

SEQ ID NO: 50805 - DNA, 15 bp, Homo sapiens
agtcatcacgatgta

SEQ ID NO: 50806 - DNA, 15 bp, Homo sapiens
tagtcatcacgatgt

SEQ ID NO: 50807 - DNA, 15 bp, Homo sapiens
atagtcatcacgatg

SEQ ID NO: 50808 - DNA, 15 bp, Homo sapiens
tatagtcatcacgat

SEQ ID NO: 50809 - DNA, 15 bp, Homo sapiens
ctatagtcatcacga

SEQ ID NO: 50810 - DNA, 15 bp, Homo sapiens
actatagtcatcacg

SEQ ID NO: 50811 - DNA, 15 bp, Homo sapiens
aactatagtcatcac

SEQ ID NO: 50812 - DNA, 15 bp, Homo sapiens
taactatagtcatca

SEQ ID NO: 50813 - DNA, 15 bp, Homo sapiens
ctaactatagtcatc

SEQ ID NO: 50814 - DNA, 15 bp, Homo sapiens
actaactatagtcat

SEQ ID NO: 50815 - DNA, 15 bp, Homo sapiens
tactaactatagtca

SEQ ID NO: 50816 - DNA, 15 bp, Homo sapiens
ttactaactatagtc

SEQ ID NO: 50817 - DNA, 15 bp, Homo sapiens
gttactaactatagt

SEQ ID NO: 50818 - DNA, 15 bp, Homo sapiens
tgttactaactatag

SEQ ID NO: 50819 - DNA, 15 bp, Homo sapiens
gtgttactaactata

SEQ ID NO: 50820 - DNA, 15 bp, Homo sapiens
agtgttactaactat

SEQ ID NO: 50821 - DNA, 15 bp, Homo sapiens
cagtgttactaacta

SEQ ID NO: 50822 - DNA, 15 bp, Homo sapiens
acagtgttactaact

SEQ ID NO: 50823 - DNA, 15 bp, Homo sapiens
tacagtgttactaac

SEQ ID NO: 50824 - DNA, 15 bp, Homo sapiens
atacagtgttactaa

SEQ ID NO: 50825 - DNA, 15 bp, Homo sapiens
tatacagtgttacta

SEQ ID NO: 50826 - DNA, 15 bp, Homo sapiens
ctatacagtgttact

SEQ ID NO: 50827 - DNA, 15 bp, Homo sapiens
actatacagtgttac

SEQ ID NO: 50828 - DNA, 15 bp, Homo sapiens
tactatacagtgtta

SEQ ID NO: 50829 - DNA, 15 bp, Homo sapiens
atactatacagtgtt

SEQ ID NO: 50830 - DNA, 15 bp, Homo sapiens
tatactatacagtgt

SEQ ID NO: 50831 - DNA, 15 bp, Homo sapiens
gtatactatacagtg

SEQ ID NO: 50832 - DNA, 15 bp, Homo sapiens
agtatactatacagt

SEQ ID NO: 50833 - DNA, 15 bp, Homo sapiens
aagtatactatacag

SEQ ID NO: 50834 - DNA, 15 bp, Homo sapiens
caagtatactataca

SEQ ID NO: 50835 - DNA, 15 bp, Homo sapiens
tcaagtatactatac

SEQ ID NO: 50836 - DNA, 15 bp, Homo sapiens
ttcaagtatactata

SEQ ID NO: 50837 - DNA, 15 bp, Homo sapiens
tttcaagtatactat

SEQ ID NO: 50838 - DNA, 15 bp, Homo sapiens
atttcaagtatacta

SEQ ID NO: 50839 - DNA, 15 bp, Homo sapiens
aatttcaagtatact

SEQ ID NO: 50840 - DNA, 15 bp, Homo sapiens
aaatttcaagtatac

SEQ ID NO: 50841 - DNA, 15 bp, Homo sapiens
caaatttcaagtata

SEQ ID NO: 50842 - DNA, 15 bp, Homo sapiens
gcaaatttcaagtat

SEQ ID NO: 50843 - DNA, 15 bp, Homo sapiens
agcaaatttcaagta

SEQ ID NO: 50844 - DNA, 15 bp, Homo sapiens
tagcaaatttcaagt

SEQ ID NO: 50845 - DNA, 15 bp, Homo sapiens
ttagcaaatttcaag

SEQ ID NO: 50846 - DNA, 15 bp, Homo sapiens
cttagcaaatttcaa

SEQ ID NO: 50847 - DNA, 15 bp, Homo sapiens
tcttagcaaatttca

SEQ ID NO: 50848 - DNA, 15 bp, Homo sapiens
ctcttagcaaatttc

SEQ ID NO: 50849 - DNA, 15 bp, Homo sapiens
tctcttagcaaattt

SEQ ID NO: 50850 - DNA, 15 bp, Homo sapiens
ctctcttagcaaatt

SEQ ID NO: 50851 - DNA, 15 bp, Homo sapiens
actctcttagcaaat

SEQ ID NO: 50852 - DNA, 15 bp, Homo sapiens
tactctcttagcaaa

SEQ ID NO: 50853 - DNA, 15 bp, Homo sapiens
ctactctcttagcaa

SEQ ID NO: 50854 - DNA, 15 bp, Homo sapiens
tctactctcttagca

SEQ ID NO: 50855 - DNA, 15 bp, Homo sapiens
atctactctcttagc

SEQ ID NO: 50856 - DNA, 15 bp, Homo sapiens
gatctactctcttag

SEQ ID NO: 50857 - DNA, 15 bp, Homo sapiens
ggatctactctctta

SEQ ID NO: 50858 - DNA, 15 bp, Homo sapiens
cggatctactctctt

SEQ ID NO: 50859 - DNA, 15 bp, Homo sapiens
tcggatctactctct

SEQ ID NO: 50860 - DNA, 15 bp, Homo sapiens
ttcggatctactctc

SEQ ID NO: 50861 - DNA, 15 bp, Homo sapiens
cttcggatctactct

SEQ ID NO: 50862 - DNA, 15 bp, Homo sapiens
acttcggatctactc

SEQ ID NO: 50863 - DNA, 15 bp, Homo sapiens
cacttcggatctact

SEQ ID NO: 50864 - DNA, 15 bp, Homo sapiens
acacttcggatctac

SEQ ID NO: 50865 - DNA, 15 bp, Homo sapiens
aacacttcggatcta

SEQ ID NO: 50866 - DNA, 15 bp, Homo sapiens
gaacacttcggatct

SEQ ID NO: 50867 - DNA, 15 bp, Homo sapiens
tgaacacttcggatc

SEQ ID NO: 50868 - DNA, 15 bp, Homo sapiens
gtgaacacttcggat

SEQ ID NO: 50869 - DNA, 15 bp, Homo sapiens
tgtgaacacttcgga

SEQ ID NO: 50870 - DNA, 15 bp, Homo sapiens
gtgtgaacacttcgg

SEQ ID NO: 50871 - DNA, 15 bp, Homo sapiens
agtgtgaacacttcg

SEQ ID NO: 50872 - DNA, 15 bp, Homo sapiens
tagtgtgaacacttc

SEQ ID NO: 50873 - DNA, 15 bp, Homo sapiens
gtagtgtgaacactt

SEQ ID NO: 50874 - DNA, 15 bp, Homo sapiens
tgtagtgtgaacact

SEQ ID NO: 50875 - DNA, 15 bp, Homo sapiens
gtgtagtgtgaacac

SEQ ID NO: 50876 - DNA, 15 bp, Homo sapiens
tgtgtagtgtgaaca

SEQ ID NO: 50877 - DNA, 15 bp, Homo sapiens
ttgtgtagtgtgaac

SEQ ID NO: 50878 - DNA, 15 bp, Homo sapiens
tttgtgtagtgtgaa

SEQ ID NO: 50879 - DNA, 15 bp, Homo sapiens
ttttgtgtagtgtga

SEQ ID NO: 50880 - DNA, 15 bp, Homo sapiens
tttttgtgtagtgtg

SEQ ID NO: 50881 - DNA, 15 bp, Homo sapiens
ttttttgtgtagtgt

SEQ ID NO: 50882 - DNA, 15 bp, Homo sapiens
cttttttgtgtagtg

SEQ ID NO: 50883 - DNA, 15 bp, Homo sapiens
ccttttttgtgtagt

SEQ ID NO: 50884 - DNA, 15 bp, Homo sapiens
gccttttttgtgtag

SEQ ID NO: 50885 - DNA, 15 bp, Homo sapiens
tgccttttttgtgta

SEQ ID NO: 50886 - DNA, 15 bp, Homo sapiens
ttgccttttttgtgt

SEQ ID NO: 50887 - DNA, 15 bp, Homo sapiens
gttgccttttttgtg

SEQ ID NO: 50888 - DNA, 15 bp, Homo sapiens
agttgccttttttgt

SEQ ID NO: 50889 - DNA, 15 bp, Homo sapiens
tagttgccttttttg

SEQ ID NO: 50890 - DNA, 15 bp, Homo sapiens
atagttgcctttttt

SEQ ID NO: 50891 - DNA, 15 bp, Homo sapiens
catagttgccttttt

SEQ ID NO: 50892 - DNA, 15 bp, Homo sapiens
tcatagttgcctttt

SEQ ID NO: 50893 - DNA, 15 bp, Homo sapiens
ctcatagttgccttt

SEQ ID NO: 50894 - DNA, 15 bp, Homo sapiens
cctcatagttgcctt

SEQ ID NO: 50895 - DNA, 15 bp, Homo sapiens
acctcatagttgcct

SEQ ID NO: 50896 - DNA, 15 bp, Homo sapiens
cacctcatagttgcc

SEQ ID NO: 50897 - DNA, 15 bp, Homo sapiens
tcacctcatagttgc

SEQ ID NO: 50898 - DNA, 15 bp, Homo sapiens
atcacctcatagttg

SEQ ID NO: 50899 - DNA, 15 bp, Homo sapiens
catcacctcatagtt

SEQ ID NO: 50900 - DNA, 15 bp, Homo sapiens
ccatcacctcatagt

SEQ ID NO: 50901 - DNA, 15 bp, Homo sapiens
tccatcacctcatag

SEQ ID NO: 50902 - DNA, 15 bp, Homo sapiens
atccatcacctcata

SEQ ID NO: 50903 - DNA, 15 bp, Homo sapiens
aatccatcacctcat

SEQ ID NO: 50904 - DNA, 15 bp, Homo sapiens
aaatccatcacctca

SEQ ID NO: 50905 - DNA, 15 bp, Homo sapiens
taaatccatcacctc

SEQ ID NO: 50906 - DNA, 15 bp, Homo sapiens
ataaatccatcacct

SEQ ID NO: 50907 - DNA, 15 bp, Homo sapiens
aataaatccatcacc

SEQ ID NO: 50908 - DNA, 15 bp, Homo sapiens
taataaatccatcac

SEQ ID NO: 50909 - DNA, 15 bp, Homo sapiens
ttaataaatccatca

SEQ ID NO: 50910 - DNA, 15 bp, Homo sapiens
gttaataaatccatc

SEQ ID NO: 50911 - DNA, 15 bp, Homo sapiens
tgttaataaatccat

SEQ ID NO: 50912 - DNA, 15 bp, Homo sapiens
ctgttaataaatcca

SEQ ID NO: 50913 - DNA, 15 bp, Homo sapiens
gctgttaataaatcc

SEQ ID NO: 50914 - DNA, 15 bp, Homo sapiens
agctgttaataaatc

SEQ ID NO: 50915 - DNA, 15 bp, Homo sapiens
aagctgttaataaat

SEQ ID NO: 50916 - DNA, 15 bp, Homo sapiens
caagctgttaataaa

SEQ ID NO: 50917 - DNA, 15 bp, Homo sapiens
tcaagctgttaataa

SEQ ID NO: 50918 - DNA, 15 bp, Homo sapiens
atcaagctgttaata

SEQ ID NO: 50919 - DNA, 15 bp, Homo sapiens
aatcaagctgttaat

SEQ ID NO: 50920 - DNA, 15 bp, Homo sapiens
caatcaagctgttaa

SEQ ID NO: 50921 - DNA, 15 bp, Homo sapiens
acaatcaagctgtta

SEQ ID NO: 50922 - DNA, 15 bp, Homo sapiens
cacaatcaagctgtt

SEQ ID NO: 50923 - DNA, 15 bp, Homo sapiens
ccacaatcaagctgt

SEQ ID NO: 50924 - DNA, 15 bp, Homo sapiens
accacaatcaagctg

SEQ ID NO: 50925 - DNA, 15 bp, Homo sapiens
caccacaatcaagct

SEQ ID NO: 50926 - DNA, 15 bp, Homo sapiens
tcaccacaatcaagc

SEQ ID NO: 50927 - DNA, 15 bp, Homo sapiens
atcaccacaatcaag

SEQ ID NO: 50928 - DNA, 15 bp, Homo sapiens
gatcaccacaatcaa

SEQ ID NO: 50929 - DNA, 15 bp, Homo sapiens
ggatcaccacaatca

SEQ ID NO: 50930 - DNA, 15 bp, Homo sapiens
aggatcaccacaatc

SEQ ID NO: 50931 - DNA, 15 bp, Homo sapiens
aaggatcaccacaat

SEQ ID NO: 50932 - DNA, 15 bp, Homo sapiens
aaaggatcaccacaa

SEQ ID NO: 50933 - DNA, 15 bp, Homo sapiens
aaaaggatcaccaca

SEQ ID NO: 50934 - DNA, 15 bp, Homo sapiens
taaaaggatcaccac

SEQ ID NO: 50935 - DNA, 15 bp, Homo sapiens
gtaaaaggatcacca

SEQ ID NO: 50936 - DNA, 15 bp, Homo sapiens
tgtaaaaggatcacc

SEQ ID NO: 50937 - DNA, 15 bp, Homo sapiens
ttgtaaaaggatcac

SEQ ID NO: 50938 - DNA, 15 bp, Homo sapiens
tttgtaaaaggatca

SEQ ID NO: 50939 - DNA, 15 bp, Homo sapiens
ctttgtaaaaggatc

SEQ ID NO: 50940 - DNA, 15 bp, Homo sapiens
actttgtaaaaggat

SEQ ID NO: 50941 - DNA, 15 bp, Homo sapiens
tactttgtaaaagga

SEQ ID NO: 50942 - DNA, 15 bp, Homo sapiens
atactttgtaaaagg

SEQ ID NO: 50943 - DNA, 15 bp, Homo sapiens
tatactttgtaaaag

SEQ ID NO: 50944 - DNA, 15 bp, Homo sapiens
gtatactttgtaaaa

SEQ ID NO: 50945 - DNA, 15 bp, Homo sapiens
tgtatactttgtaaa

SEQ ID NO: 50946 - DNA, 15 bp, Homo sapiens
atgtatactttgtaa

SEQ ID NO: 50947 - DNA, 15 bp, Homo sapiens
tatgtatactttgta

SEQ ID NO: 50948 - DNA, 15 bp, Homo sapiens
atatgtatactttgt

SEQ ID NO: 50949 - DNA, 15 bp, Homo sapiens
tatatgtatactttg

SEQ ID NO: 50950 - DNA, 15 bp, Homo sapiens
atatatgtatacttt

SEQ ID NO: 50951 - DNA, 15 bp, Homo sapiens
aatatatgtatactt

SEQ ID NO: 50952 - DNA, 15 bp, Homo sapiens
taatatatgtatact

SEQ ID NO: 50953 - DNA, 15 bp, Homo sapiens
ttaatatatgtatac

SEQ ID NO: 50954 - DNA, 15 bp, Homo sapiens
tttaatatatgtata

SEQ ID NO: 50955 - DNA, 15 bp, Homo sapiens
ttttaatatatgtat

SEQ ID NO: 50956 - DNA, 15 bp, Homo sapiens
gttttaatatatgta

SEQ ID NO: 50957 - DNA, 15 bp, Homo sapiens
tgttttaatatatgt

SEQ ID NO: 50958 - DNA, 15 bp, Homo sapiens
atgttttaatatatg

SEQ ID NO: 50959 - DNA, 15 bp, Homo sapiens
gatgttttaatatat

SEQ ID NO: 50960 - DNA, 15 bp, Homo sapiens
tgatgttttaatata

SEQ ID NO: 50961 - DNA, 15 bp, Homo sapiens
gtgatgttttaatat

SEQ ID NO: 50962 - DNA, 15 bp, Homo sapiens
tgtgatgttttaata

SEQ ID NO: 50963 - DNA, 15 bp, Homo sapiens
atgtgatgttttaat

SEQ ID NO: 50964 - DNA, 15 bp, Homo sapiens
aatgtgatgttttaa

SEQ ID NO: 50965 - DNA, 15 bp, Homo sapiens
caatgtgatgtttta

SEQ ID NO: 50966 - DNA, 15 bp, Homo sapiens
acaatgtgatgtttt

SEQ ID NO: 50967 - DNA, 15 bp, Homo sapiens
tacaatgtgatgttt

SEQ ID NO: 50968 - DNA, 15 bp, Homo sapiens
atacaatgtgatgtt

SEQ ID NO: 50969 - DNA, 15 bp, Homo sapiens
tatacaatgtgatgt

SEQ ID NO: 50970 - DNA, 15 bp, Homo sapiens
gtatacaatgtgatg

SEQ ID NO: 50971 - DNA, 15 bp, Homo sapiens
ggtatacaatgtgat

SEQ ID NO: 50972 - DNA, 15 bp, Homo sapiens
aggtatacaatgtga

SEQ ID NO: 50973 - DNA, 15 bp, Homo sapiens
aaggtatacaatgtg

SEQ ID NO: 50974 - DNA, 15 bp, Homo sapiens
taaggtatacaatgt

SEQ ID NO: 50975 - DNA, 15 bp, Homo sapiens
ttaaggtatacaatg

SEQ ID NO: 50976 - DNA, 15 bp, Homo sapiens
tttaaggtatacaat

SEQ ID NO: 50977 - DNA, 15 bp, Homo sapiens
atttaaggtatacaa

SEQ ID NO: 50978 - DNA, 15 bp, Homo sapiens
tatttaaggtataca

SEQ ID NO: 50979 - DNA, 15 bp, Homo sapiens
atatttaaggtatac

SEQ ID NO: 50980 - DNA, 15 bp, Homo sapiens
tatatttaaggtata

SEQ ID NO: 50981 - DNA, 15 bp, Homo sapiens
atatatttaaggtat

SEQ ID NO: 50982 - DNA, 15 bp, Homo sapiens
tatatatttaaggta

SEQ ID NO: 50983 - DNA, 15 bp, Homo sapiens
gtatatatttaaggt

SEQ ID NO: 50984 - DNA, 15 bp, Homo sapiens
tgtatatatttaagg

SEQ ID NO: 50985 - DNA, 15 bp, Homo sapiens
ttgtatatatttaag

SEQ ID NO: 50986 - DNA, 15 bp, Homo sapiens
attgtatatatttaa

SEQ ID NO: 50987 - DNA, 15 bp, Homo sapiens
aattgtatatattta

SEQ ID NO: 50988 - DNA, 15 bp, Homo sapiens
aaattgtatatattt

SEQ ID NO: 50989 - DNA, 15 bp, Homo sapiens
aaaattgtatatatt

SEQ ID NO: 50990 - DNA, 15 bp, Homo sapiens
aaaaattgtatatat

SEQ ID NO: 50991 - DNA, 15 bp, Homo sapiens
taaaaattgtatata

SEQ ID NO: 50992 - DNA, 15 bp, Homo sapiens
ataaaaattgtatat

SEQ ID NO: 50993 - DNA, 15 bp, Homo sapiens
aataaaaattgtata

SEQ ID NO: 50994 - DNA, 15 bp, Homo sapiens
aaataaaaattgtat

SEQ ID NO: 50995 - DNA, 15 bp, Homo sapiens
caaataaaaattgta

SEQ ID NO: 50996 - DNA, 15 bp, Homo sapiens
acaaataaaaattgt

SEQ ID NO: 50997 - DNA, 15 bp, Homo sapiens
gacaaataaaaattg

SEQ ID NO: 50998 - DNA, 15 bp, Homo sapiens
tgacaaataaaaatt

SEQ ID NO: 50999 - DNA, 15 bp, Homo sapiens
ctgacaaataaaaat

SEQ ID NO: 51000 - DNA, 15 bp, Homo sapiens
actgacaaataaaaa

SEQ ID NO: 51001 - DNA, 15 bp, Homo sapiens
aactgacaaataaaa

SEQ ID NO: 51002 - DNA, 15 bp, Homo sapiens
caactgacaaataaa

SEQ ID NO: 51003 - DNA, 15 bp, Homo sapiens
acaactgacaaataa

SEQ ID NO: 51004 - DNA, 15 bp, Homo sapiens
tacaactgacaaata

SEQ ID NO: 51005 - DNA, 15 bp, Homo sapiens
ttacaactgacaaat

SEQ ID NO: 51006 - DNA, 15 bp, Homo sapiens
gttacaactgacaaa

SEQ ID NO: 51007 - DNA, 15 bp, Homo sapiens
agttacaactgacaa

SEQ ID NO: 51008 - DNA, 15 bp, Homo sapiens
gagttacaactgaca

SEQ ID NO: 51009 - DNA, 15 bp, Homo sapiens
tgagttacaactgac

SEQ ID NO: 51010 - DNA, 15 bp, Homo sapiens
ttgagttacaactga

SEQ ID NO: 51011 - DNA, 15 bp, Homo sapiens
tttgagttacaactg

SEQ ID NO: 51012 - DNA, 15 bp, Homo sapiens
ttttgagttacaact

SEQ ID NO: 51013 - DNA, 15 bp, Homo sapiens
tttttgagttacaac

SEQ ID NO: 51014 - DNA, 15 bp, Homo sapiens
ttttttgagttacaa

SEQ ID NO: 51015 - DNA, 15 bp, Homo sapiens
cttttttgagttaca

SEQ ID NO: 51016 - DNA, 15 bp, Homo sapiens
gcttttttgagttac

SEQ ID NO: 51017 - DNA, 15 bp, Homo sapiens
agcttttttgagtta

SEQ ID NO: 51018 - DNA, 15 bp, Homo sapiens
tagcttttttgagtt

SEQ ID NO: 51019 - DNA, 15 bp, Homo sapiens
ctagcttttttgagt

SEQ ID NO: 51020 - DNA, 15 bp, Homo sapiens
tctagcttttttgag

SEQ ID NO: 51021 - DNA, 15 bp, Homo sapiens
ttctagcttttttga

SEQ ID NO: 51022 - DNA, 15 bp, Homo sapiens
tttctagcttttttg

SEQ ID NO: 51023 - DNA, 15 bp, Homo sapiens
ttttctagctttttt

SEQ ID NO: 51024 - DNA, 15 bp, Homo sapiens
cttttctagcttttt

SEQ ID NO: 51025 - DNA, 15 bp, Homo sapiens
gcttttctagctttt

SEQ ID NO: 51026 - DNA, 15 bp, Homo sapiens
tgcttttctagcttt

SEQ ID NO: 51027 - DNA, 15 bp, Homo sapiens
atgcttttctagctt

SEQ ID NO: 51028 - DNA, 15 bp, Homo sapiens
aatgcttttctagct

SEQ ID NO: 51029 - DNA, 15 bp, Homo sapiens
aaatgcttttctagc

SEQ ID NO: 51030 - DNA, 15 bp, Homo sapiens
aaaatgcttttctag

SEQ ID NO: 51031 - DNA, 15 bp, Homo sapiens
aaaaatgcttttcta

SEQ ID NO: 51032 - DNA, 15 bp, Homo sapiens
taaaaatgcttttct

SEQ ID NO: 51033 - DNA, 15 bp, Homo sapiens
ttaaaaatgcttttc

SEQ ID NO: 51034 - DNA, 15 bp, Homo sapiens
tttaaaaatgctttt

SEQ ID NO: 51035 - DNA, 15 bp, Homo sapiens
ttttaaaaatgcttt

SEQ ID NO: 51036 - DNA, 15 bp, Homo sapiens
tttttaaaaatgctt

SEQ ID NO: 51037 - DNA, 15 bp, Homo sapiens
ctttttaaaaatgct

SEQ ID NO: 51038 - DNA, 15 bp, Homo sapiens
cctttttaaaaatgc

SEQ ID NO: 51039 - DNA, 15 bp, Homo sapiens
tcctttttaaaaatg

SEQ ID NO: 51040 - DNA, 15 bp, Homo sapiens
atcctttttaaaaat

SEQ ID NO: 51041 - DNA, 15 bp, Homo sapiens
catcctttttaaaaa

SEQ ID NO: 51042 - DNA, 15 bp, Homo sapiens
tcatcctttttaaaa

SEQ ID NO: 51043 - DNA, 15 bp, Homo sapiens
atcatcctttttaaa

SEQ ID NO: 51044 - DNA, 15 bp, Homo sapiens
catcatcctttttaa

SEQ ID NO: 51045 - DNA, 15 bp, Homo sapiens
acatcatccttttta

SEQ ID NO: 51046 - DNA, 15 bp, Homo sapiens
tacatcatccttttt

SEQ ID NO: 51047 - DNA, 15 bp, Homo sapiens
gtacatcatcctttt

SEQ ID NO: 51048 - DNA, 15 bp, Homo sapiens
agtacatcatccttt

SEQ ID NO: 51049 - DNA, 15 bp, Homo sapiens
cagtacatcatcctt

SEQ ID NO: 51050 - DNA, 15 bp, Homo sapiens
ccagtacatcatcct

SEQ ID NO: 51051 - DNA, 15 bp, Homo sapiens
accagtacatcatcc

SEQ ID NO: 51052 - DNA, 15 bp, Homo sapiens
gaccagtacatcatc

SEQ ID NO: 51053 - DNA, 15 bp, Homo sapiens
agaccagtacatcat

SEQ ID NO: 51054 - DNA, 15 bp, Homo sapiens
aagaccagtacatca

SEQ ID NO: 51055 - DNA, 15 bp, Homo sapiens
taagaccagtacatc

SEQ ID NO: 51056 - DNA, 15 bp, Homo sapiens
ttaagaccagtacat

SEQ ID NO: 51057 - DNA, 15 bp, Homo sapiens
attaagaccagtaca

SEQ ID NO: 51058 - DNA, 15 bp, Homo sapiens
tattaagaccagtac

SEQ ID NO: 51059 - DNA, 15 bp, Homo sapiens
atattaagaccagta

SEQ ID NO: 51060 - DNA, 15 bp, Homo sapiens
aatattaagaccagt

SEQ ID NO: 51061 - DNA, 15 bp, Homo sapiens
taatattaagaccag

SEQ ID NO: 51062 - DNA, 15 bp, Homo sapiens
gtaatattaagacca

SEQ ID NO: 51063 - DNA, 15 bp, Homo sapiens
ggtaatattaagacc

SEQ ID NO: 51064 - DNA, 15 bp, Homo sapiens
tggtaatattaagac

SEQ ID NO: 51065 - DNA, 15 bp, Homo sapiens
atggtaatattaaga

SEQ ID NO: 51066 - DNA, 15 bp, Homo sapiens
aatggtaatattaag

SEQ ID NO: 51067 - DNA, 15 bp, Homo sapiens
caatggtaatattaa

SEQ ID NO: 51068 - DNA, 15 bp, Homo sapiens
tcaatggtaatatta

SEQ ID NO: 51069 - DNA, 15 bp, Homo sapiens
ctcaatggtaatatt

SEQ ID NO: 51070 - DNA, 15 bp, Homo sapiens
tctcaatggtaatat

SEQ ID NO: 51071 - DNA, 15 bp, Homo sapiens
atctcaatggtaata

SEQ ID NO: 51072 - DNA, 15 bp, Homo sapiens
tatctcaatggtaat

SEQ ID NO: 51073 - DNA, 15 bp, Homo sapiens
ttatctcaatggtaa

SEQ ID NO: 51074 - DNA, 15 bp, Homo sapiens
cttatctcaatggta

SEQ ID NO: 51075 - DNA, 15 bp, Homo sapiens
gcttatctcaatggt

SEQ ID NO: 51076 - DNA, 15 bp, Homo sapiens
agcttatctcaatgg

SEQ ID NO: 51077 - DNA, 15 bp, Homo sapiens
aagcttatctcaatg

SEQ ID NO: 51078 - DNA, 15 bp, Homo sapiens
aaagcttatctcaat

SEQ ID NO: 51079 - DNA, 15 bp, Homo sapiens
taaagcttatctcaa

SEQ ID NO: 51080 - DNA, 15 bp, Homo sapiens
ataaagcttatctca

SEQ ID NO: 51081 - DNA, 15 bp, Homo sapiens
tataaagcttatctc

SEQ ID NO: 51082 - DNA, 15 bp, Homo sapiens
ttataaagcttatct

SEQ ID NO: 51083 - DNA, 15 bp, Homo sapiens
attataaagcttatc

SEQ ID NO: 51084 - DNA, 15 bp, Homo sapiens
tattataaagcttat

SEQ ID NO: 51085 - DNA, 15 bp, Homo sapiens
ttattataaagctta

SEQ ID NO: 51086 - DNA, 15 bp, Homo sapiens
gttattataaagctt

SEQ ID NO: 51087 - DNA, 15 bp, Homo sapiens
tgttattataaagct

SEQ ID NO: 51088 - DNA, 15 bp, Homo sapiens
atgttattataaagc

SEQ ID NO: 51089 - DNA, 15 bp, Homo sapiens
tatgttattataaag

SEQ ID NO: 51090 - DNA, 15 bp, Homo sapiens
ttatgttattataaa

SEQ ID NO: 51091 - DNA, 15 bp, Homo sapiens
tttatgttattataa

SEQ ID NO: 51092 - DNA, 15 bp, Homo sapiens
ttttatgttattata

SEQ ID NO: 51093 - DNA, 15 bp, Homo sapiens
tttttatgttattat

SEQ ID NO: 51094 - DNA, 15 bp, Homo sapiens
ctttttatgttatta

SEQ ID NO: 51095 - DNA, 15 bp, Homo sapiens
tctttttatgttatt

SEQ ID NO: 51096 - DNA, 15 bp, Homo sapiens
ttctttttatgttat

SEQ ID NO: 51097 - DNA, 15 bp, Homo sapiens
tttctttttatgtta

SEQ ID NO: 51098 - DNA, 15 bp, Homo sapiens
atttctttttatgtt

SEQ ID NO: 51099 - DNA, 15 bp, Homo sapiens
tatttctttttatgt

SEQ ID NO: 51100 - DNA, 15 bp, Homo sapiens
ttatttctttttatg

SEQ ID NO: 51101 - DNA, 15 bp, Homo sapiens
gttatttctttttat

SEQ ID NO: 51102 - DNA, 15 bp, Homo sapiens
tgttatttcttttta

SEQ ID NO: 51103 - DNA, 15 bp, Homo sapiens
ctgttatttcttttt

SEQ ID NO: 51104 - DNA, 15 bp, Homo sapiens
actgttatttctttt

SEQ ID NO: 51105 - DNA, 15 bp, Homo sapiens
tactgttatttcttt

SEQ ID NO: 51106 - DNA, 15 bp, Homo sapiens
ttactgttatttctt

SEQ ID NO: 51107 - DNA, 15 bp, Homo sapiens
attactgttatttct

SEQ ID NO: 51108 - DNA, 15 bp, Homo sapiens
cattactgttatttc

SEQ ID NO: 51109 - DNA, 15 bp, Homo sapiens
tcattactgttattt

SEQ ID NO: 51110 - DNA, 15 bp, Homo sapiens
atcattactgttatt

SEQ ID NO: 51111 - DNA, 15 bp, Homo sapiens
tatcattactgttat

SEQ ID NO: 51112 - DNA, 15 bp, Homo sapiens
ttatcattactgtta

SEQ ID NO: 51113 - DNA, 15 bp, Homo sapiens
attatcattactgtt

SEQ ID NO: 51114 - DNA, 15 bp, Homo sapiens
tattatcattactgt

SEQ ID NO: 51115 - DNA, 15 bp, Homo sapiens
ctattatcattactg

SEQ ID NO: 51116 - DNA, 15 bp, Homo sapiens
gctattatcattact

SEQ ID NO: 51117 - DNA, 15 bp, Homo sapiens
tgctattatcattac

SEQ ID NO: 51118 - DNA, 15 bp, Homo sapiens
ttgctattatcatta

SEQ ID NO: 51119 - DNA, 15 bp, Homo sapiens
gttgctattatcatt

SEQ ID NO: 51120 - DNA, 15 bp, Homo sapiens
tgttgctattatcat

SEQ ID NO: 51121 - DNA, 15 bp, Homo sapiens
ttgttgctattatca

SEQ ID NO: 51122 - DNA, 15 bp, Homo sapiens
gttgttgctattatc

SEQ ID NO: 51123 - DNA, 15 bp, Homo sapiens
tgttgttgctattat

SEQ ID NO: 51124 - DNA, 15 bp, Homo sapiens
ttgttgttgctatta

SEQ ID NO: 51125 - DNA, 15 bp, Homo sapiens
gttgttgttgctatt

SEQ ID NO: 51126 - DNA, 15 bp, Homo sapiens
tgttgttgttgctat

SEQ ID NO: 51127 - DNA, 15 bp, Homo sapiens
ttgttgttgttgcta

SEQ ID NO: 51128 - DNA, 15 bp, Homo sapiens
gttgttgttgttgct

SEQ ID NO: 51129 - DNA, 15 bp, Homo sapiens
tgttgttgttgttgc

SEQ ID NO: 51130 - DNA, 15 bp, Homo sapiens
ttgttgttgttgttg

SEQ ID NO: 51131 - DNA, 15 bp, Homo sapiens
gttgttgttgttgtt

SEQ ID NO: 51132 - DNA, 15 bp, Homo sapiens
tgttgttgttgttgt

SEQ ID NO: 51133 - DNA, 15 bp, Homo sapiens
tttgttgttgttgtt

SEQ ID NO: 51134 - DNA, 15 bp, Homo sapiens
ctttgttgttgttgt

SEQ ID NO: 51135 - DNA, 15 bp, Homo sapiens
tctttgttgttgttg

SEQ ID NO: 51136 - DNA, 15 bp, Homo sapiens
ttctttgttgttgtt

SEQ ID NO: 51137 - DNA, 15 bp, Homo sapiens
gttctttgttgttgt

SEQ ID NO: 51138 - DNA, 15 bp, Homo sapiens
agttctttgttgttg

SEQ ID NO: 51139 - DNA, 15 bp, Homo sapiens
tagttctttgttgtt

SEQ ID NO: 51140 - DNA, 15 bp, Homo sapiens
ttagttctttgttgt

SEQ ID NO: 51141 - DNA, 15 bp, Homo sapiens
gttagttctttgttg

SEQ ID NO: 51142 - DNA, 15 bp, Homo sapiens
tgttagttctttgtt

SEQ ID NO: 51143 - DNA, 15 bp, Homo sapiens
atgttagttctttgt

SEQ ID NO: 51144 - DNA, 15 bp, Homo sapiens
aatgttagttctttg

SEQ ID NO: 51145 - DNA, 15 bp, Homo sapiens
aaatgttagttcttt

SEQ ID NO: 51146 - DNA, 15 bp, Homo sapiens
taaatgttagttctt

SEQ ID NO: 51147 - DNA, 15 bp, Homo sapiens
ttaaatgttagttct

SEQ ID NO: 51148 - DNA, 15 bp, Homo sapiens
cttaaatgttagttc

SEQ ID NO: 51149 - DNA, 15 bp, Homo sapiens
acttaaatgttagtt

SEQ ID NO: 51150 - DNA, 15 bp, Homo sapiens
tacttaaatgttagt

SEQ ID NO: 51151 - DNA, 15 bp, Homo sapiens
ctacttaaatgttag

SEQ ID NO: 51152 - DNA, 15 bp, Homo sapiens
tctacttaaatgtta

SEQ ID NO: 51153 - DNA, 15 bp, Homo sapiens
ttctacttaaatgtt

SEQ ID NO: 51154 - DNA, 15 bp, Homo sapiens
attctacttaaatgt

SEQ ID NO: 51155 - DNA, 15 bp, Homo sapiens
aattctacttaaatg

SEQ ID NO: 51156 - DNA, 15 bp, Homo sapiens
aaattctacttaaat

SEQ ID NO: 51157 - DNA, 15 bp, Homo sapiens
gaaattctacttaaa

SEQ ID NO: 51158 - DNA, 15 bp, Homo sapiens
agaaattctacttaa

SEQ ID NO: 51159 - DNA, 15 bp, Homo sapiens
aagaaattctactta

SEQ ID NO: 51160 - DNA, 15 bp, Homo sapiens
caagaaattctactt

SEQ ID NO: 51161 - DNA, 15 bp, Homo sapiens
acaagaaattctact

SEQ ID NO: 51162 - DNA, 15 bp, Homo sapiens
cacaagaaattctac

SEQ ID NO: 51163 - DNA, 15 bp, Homo sapiens
gcacaagaaattcta

SEQ ID NO: 51164 - DNA, 15 bp, Homo sapiens
tgcacaagaaattct

SEQ ID NO: 51165 - DNA, 15 bp, Homo sapiens
gtgcacaagaaattc

SEQ ID NO: 51166 - DNA, 15 bp, Homo sapiens
agtgcacaagaaatt

SEQ ID NO: 51167 - DNA, 15 bp, Homo sapiens
cagtgcacaagaaat

SEQ ID NO: 51168 - DNA, 15 bp, Homo sapiens
acagtgcacaagaaa

SEQ ID NO: 51169 - DNA, 15 bp, Homo sapiens
cacagtgcacaagaa

SEQ ID NO: 51170 - DNA, 15 bp, Homo sapiens
gcacagtgcacaaga

SEQ ID NO: 51171 - DNA, 15 bp, Homo sapiens
tgcacagtgcacaag

SEQ ID NO: 51172 - DNA, 15 bp, Homo sapiens
atgcacagtgcacaa

SEQ ID NO: 51173 - DNA, 15 bp, Homo sapiens
aatgcacagtgcaca

SEQ ID NO: 51174 - DNA, 15 bp, Homo sapiens
gaatgcacagtgcac

SEQ ID NO: 51175 - DNA, 15 bp, Homo sapiens
agaatgcacagtgca

SEQ ID NO: 51176 - DNA, 15 bp, Homo sapiens
cagaatgcacagtgc

SEQ ID NO: 51177 - DNA, 15 bp, Homo sapiens
acagaatgcacagtg

SEQ ID NO: 51178 - DNA, 15 bp, Homo sapiens
aacagaatgcacagt

SEQ ID NO: 51179 - DNA, 15 bp, Homo sapiens
aaacagaatgcacag

SEQ ID NO: 51180 - DNA, 15 bp, Homo sapiens
taaacagaatgcaca

SEQ ID NO: 51181 - DNA, 15 bp, Homo sapiens
ttaaacagaatgcac

SEQ ID NO: 51182 - DNA, 15 bp, Homo sapiens
cttaaacagaatgca

SEQ ID NO: 51183 - DNA, 15 bp, Homo sapiens
acttaaacagaatgc

SEQ ID NO: 51184 - DNA, 15 bp, Homo sapiens
aacttaaacagaatg

SEQ ID NO: 51185 - DNA, 15 bp, Homo sapiens
taacttaaacagaat

SEQ ID NO: 51186 - DNA, 15 bp, Homo sapiens
ataacttaaacagaa

SEQ ID NO: 51187 - DNA, 15 bp, Homo sapiens
gataacttaaacaga

SEQ ID NO: 51188 - DNA, 15 bp, Homo sapiens
agataacttaaacag

SEQ ID NO: 51189 - DNA, 15 bp, Homo sapiens
gagataacttaaaca

SEQ ID NO: 51190 - DNA, 15 bp, Homo sapiens
tgagataacttaaac

SEQ ID NO: 51191 - DNA, 15 bp, Homo sapiens
atgagataacttaaa

SEQ ID NO: 51192 - DNA, 15 bp, Homo sapiens
aatgagataacttaa

SEQ ID NO: 51193 - DNA, 15 bp, Homo sapiens
aaatgagataactta

SEQ ID NO: 51194 - DNA, 15 bp, Homo sapiens
aaaatgagataactt

SEQ ID NO: 51195 - DNA, 15 bp, Homo sapiens
taaaatgagataact

SEQ ID NO: 51196 - DNA, 15 bp, Homo sapiens
gtaaaatgagataac

SEQ ID NO: 51197 - DNA, 15 bp, Homo sapiens
ggtaaaatgagataa

SEQ ID NO: 51198 - DNA, 15 bp, Homo sapiens
gggtaaaatgagata

SEQ ID NO: 51199 - DNA, 15 bp, Homo sapiens
agggtaaaatgagat

SEQ ID NO: 51200 - DNA, 15 bp, Homo sapiens
gagggtaaaatgaga

SEQ ID NO: 51201 - DNA, 15 bp, Homo sapiens
tgagggtaaaatgag

SEQ ID NO: 51202 - DNA, 15 bp, Homo sapiens
atgagggtaaaatga

SEQ ID NO: 51203 - DNA, 15 bp, Homo sapiens
catgagggtaaaatg

SEQ ID NO: 51204 - DNA, 15 bp, Homo sapiens
tcatgagggtaaaat

SEQ ID NO: 51205 - DNA, 15 bp, Homo sapiens
atcatgagggtaaaa

SEQ ID NO: 51206 - DNA, 15 bp, Homo sapiens
tatcatgagggtaaa

SEQ ID NO: 51207 - DNA, 15 bp, Homo sapiens
ttatcatgagggtaa

SEQ ID NO: 51208 - DNA, 15 bp, Homo sapiens
gttatcatgagggta

SEQ ID NO: 51209 - DNA, 15 bp, Homo sapiens
ggttatcatgagggt

SEQ ID NO: 51210 - DNA, 15 bp, Homo sapiens
gggttatcatgaggg

SEQ ID NO: 51211 - DNA, 15 bp, Homo sapiens
agggttatcatgagg

SEQ ID NO: 51212 - DNA, 15 bp, Homo sapiens
cagggttatcatgag

SEQ ID NO: 51213 - DNA, 15 bp, Homo sapiens
gcagggttatcatga

SEQ ID NO: 51214 - DNA, 15 bp, Homo sapiens
tgcagggttatcatg

SEQ ID NO: 51215 - DNA, 15 bp, Homo sapiens
ctgcagggttatcat

SEQ ID NO: 51216 - DNA, 15 bp, Homo sapiens
cctgcagggttatca

SEQ ID NO: 51217 - DNA, 15 bp, Homo sapiens
ccctgcagggttatc

SEQ ID NO: 51218 - DNA, 15 bp, Homo sapiens
tccctgcagggttat

SEQ ID NO: 51219 - DNA, 15 bp, Homo sapiens
ttccctgcagggtta

SEQ ID NO: 51220 - DNA, 15 bp, Homo sapiens
cttccctgcagggtt

SEQ ID NO: 51221 - DNA, 15 bp, Homo sapiens
tcttccctgcagggt

SEQ ID NO: 51222 - DNA, 15 bp, Homo sapiens
atcttccctgcaggg

SEQ ID NO: 51223 - DNA, 15 bp, Homo sapiens
aatcttccctgcagg

SEQ ID NO: 51224 - DNA, 15 bp, Homo sapiens
gaatcttccctgcag

SEQ ID NO: 51225 - DNA, 15 bp, Homo sapiens
agaatcttccctgca

SEQ ID NO: 51226 - DNA, 15 bp, Homo sapiens
aagaatcttccctgc

SEQ ID NO: 51227 - DNA, 15 bp, Homo sapiens
aaagaatcttccctg

SEQ ID NO: 51228 - DNA, 15 bp, Homo sapiens
taaagaatcttccct

SEQ ID NO: 51229 - DNA, 15 bp, Homo sapiens
ttaaagaatcttccc

SEQ ID NO: 51230 - DNA, 15 bp, Homo sapiens
gttaaagaatcttcc

SEQ ID NO: 51231 - DNA, 15 bp, Homo sapiens
ggttaaagaatcttc

SEQ ID NO: 51232 - DNA, 15 bp, Homo sapiens
gggttaaagaatctt

SEQ ID NO: 51233 - DNA, 15 bp, Homo sapiens
ggggttaaagaatct

SEQ ID NO: 51234 - DNA, 15 bp, Homo sapiens
tggggttaaagaatc

SEQ ID NO: 51235 - DNA, 15 bp, Homo sapiens
gtggggttaaagaat

SEQ ID NO: 51236 - DNA, 15 bp, Homo sapiens
tgtggggttaaagaa

SEQ ID NO: 51237 - DNA, 15 bp, Homo sapiens
atgtggggttaaaga

SEQ ID NO: 51238 - DNA, 15 bp, Homo sapiens
aatgtggggttaaag

SEQ ID NO: 51239 - DNA, 15 bp, Homo sapiens
aaatgtggggttaaa

SEQ ID NO: 51240 - DNA, 15 bp, Homo sapiens
gaaatgtggggttaa

SEQ ID NO: 51241 - DNA, 15 bp, Homo sapiens
tgaaatgtggggtta

SEQ ID NO: 51242 - DNA, 15 bp, Homo sapiens
atgaaatgtggggtt

SEQ ID NO: 51243 - DNA, 15 bp, Homo sapiens
tatgaaatgtggggt

SEQ ID NO: 51244 - DNA, 15 bp, Homo sapiens
ctatgaaatgtgggg

SEQ ID NO: 51245 - DNA, 15 bp, Homo sapiens
cctatgaaatgtggg

SEQ ID NO: 51246 - DNA, 15 bp, Homo sapiens
gcctatgaaatgtgg

SEQ ID NO: 51247 - DNA, 15 bp, Homo sapiens
agcctatgaaatgtg

SEQ ID NO: 51248 - DNA, 15 bp, Homo sapiens
gagcctatgaaatgt

SEQ ID NO: 51249 - DNA, 15 bp, Homo sapiens
tgagcctatgaaatg

SEQ ID NO: 51250 - DNA, 15 bp, Homo sapiens
ctgagcctatgaaat

SEQ ID NO: 51251 - DNA, 15 bp, Homo sapiens
tctgagcctatgaaa

SEQ ID NO: 51252 - DNA, 15 bp, Homo sapiens
ctctgagcctatgaa

SEQ ID NO: 51253 - DNA, 15 bp, Homo sapiens
tctctgagcctatga

SEQ ID NO: 51254 - DNA, 15 bp, Homo sapiens
ctctctgagcctatg

SEQ ID NO: 51255 - DNA, 15 bp, Homo sapiens
cctctctgagcctat

SEQ ID NO: 51256 - DNA, 15 bp, Homo sapiens
acctctctgagccta

SEQ ID NO: 51257 - DNA, 15 bp, Homo sapiens
aacctctctgagcct

SEQ ID NO: 51258 - DNA, 15 bp, Homo sapiens
taacctctctgagcc

SEQ ID NO: 51259 - DNA, 15 bp, Homo sapiens
ttaacctctctgagc

SEQ ID NO: 51260 - DNA, 15 bp, Homo sapiens
cacttaacctctctg

SEQ ID NO: 51261 - DNA, 15 bp, Homo sapiens
gcacttaacctctct

SEQ ID NO: 51262 - DNA, 15 bp, Homo sapiens
ggcacttaacctctc

SEQ ID NO: 51263 - DNA, 15 bp, Homo sapiens
aggcacttaacctct

SEQ ID NO: 51264 - DNA, 15 bp, Homo sapiens
aaggcacttaacctc

SEQ ID NO: 51265 - DNA, 15 bp, Homo sapiens
caaggcacttaacct

SEQ ID NO: 51266 - DNA, 15 bp, Homo sapiens
ccaaggcacttaacc

SEQ ID NO: 51267 - DNA, 15 bp, Homo sapiens
accaaggcacttaac

SEQ ID NO: 51268 - DNA, 15 bp, Homo sapiens
aaccaaggcacttaa

SEQ ID NO: 51269 - DNA, 15 bp, Homo sapiens
taaccaaggcactta

SEQ ID NO: 51270 - DNA, 15 bp, Homo sapiens
ctaaccaaggcactt

SEQ ID NO: 51271 - DNA, 15 bp, Homo sapiens
tctaaccaaggcact

SEQ ID NO: 51272 - DNA, 15 bp, Homo sapiens
ctctaaccaaggcac

SEQ ID NO: 51273 - DNA, 15 bp, Homo sapiens
gctctaaccaaggca

SEQ ID NO: 51274 - DNA, 15 bp, Homo sapiens
ggctctaaccaaggc

SEQ ID NO: 51275 - DNA, 15 bp, Homo sapiens
tggctctaaccaagg

SEQ ID NO: 51276 - DNA, 15 bp, Homo sapiens
gtggctctaaccaag

SEQ ID NO: 51277 - DNA, 15 bp, Homo sapiens
tgtggctctaaccaa

SEQ ID NO: 51278 - DNA, 15 bp, Homo sapiens
atgtggctctaacca

SEQ ID NO: 51279 - DNA, 15 bp, Homo sapiens
gatgtggctctaacc

SEQ ID NO: 51280 - DNA, 15 bp, Homo sapiens
tgatgtggctctaac

SEQ ID NO: 51281 - DNA, 15 bp, Homo sapiens
ctgatgtggctctaa

SEQ ID NO: 51282 - DNA, 15 bp, Homo sapiens
tctgatgtggctcta

SEQ ID NO: 51283 - DNA, 15 bp, Homo sapiens
ctctgatgtggctct

SEQ ID NO: 51284 - DNA, 15 bp, Homo sapiens
actctgatgtggctc

SEQ ID NO: 51285 - DNA, 15 bp, Homo sapiens
aactctgatgtggct

SEQ ID NO: 51286 - DNA, 15 bp, Homo sapiens
taactctgatgtggc

SEQ ID NO: 51287 - DNA, 15 bp, Homo sapiens
ttaactctgatgtgg

SEQ ID NO: 51288 - DNA, 15 bp, Homo sapiens
attaactctgatgtg

SEQ ID NO: 51289 - DNA, 15 bp, Homo sapiens
gattaactctgatgt

SEQ ID NO: 51290 - DNA, 15 bp, Homo sapiens
ggattaactctgatg

SEQ ID NO: 51291 - DNA, 15 bp, Homo sapiens
tggattaactctgat

SEQ ID NO: 51292 - DNA, 15 bp, Homo sapiens
gtggattaactctga

SEQ ID NO: 51293 - DNA, 15 bp, Homo sapiens
tgtggattaactctg

SEQ ID NO: 51294 - DNA, 15 bp, Homo sapiens
ttgtggattaactct

SEQ ID NO: 51295 - DNA, 15 bp, Homo sapiens
cttgtggattaactc

SEQ ID NO: 51296 - DNA, 15 bp, Homo sapiens
tcttgtggattaact

SEQ ID NO: 51297 - DNA, 15 bp, Homo sapiens
ctcttgtggattaac

SEQ ID NO: 51298 - DNA, 15 bp, Homo sapiens
gctcttgtggattaa

SEQ ID NO: 51299 - DNA, 15 bp, Homo sapiens
ggctcttgtggatta

SEQ ID NO: 51300 - DNA, 15 bp, Homo sapiens
tggctcttgtggatt

SEQ ID NO: 51301 - DNA, 15 bp, Homo sapiens
ctggctcttgtggat

SEQ ID NO: 51302 - DNA, 15 bp, Homo sapiens
cctggctcttgtgga

SEQ ID NO: 51303 - DNA, 15 bp, Homo sapiens
tcctggctcttgtgg

SEQ ID NO: 51304 - DNA, 15 bp, Homo sapiens
atcctggctcttgtg

SEQ ID NO: 51305 - DNA, 15 bp, Homo sapiens
aatcctggctcttgt

SEQ ID NO: 51306 - DNA, 15 bp, Homo sapiens
gaatcctggctcttg

SEQ ID NO: 51307 - DNA, 15 bp, Homo sapiens
tgaatcctggctctt

SEQ ID NO: 51308 - DNA, 15 bp, Homo sapiens
ttgaatcctggctct

SEQ ID NO: 51309 - DNA, 15 bp, Homo sapiens
cttgaatcctggctc

SEQ ID NO: 51310 - DNA, 15 bp, Homo sapiens
gcttgaatcctggct

SEQ ID NO: 51311 - DNA, 15 bp, Homo sapiens
ggcttgaatcctggc

SEQ ID NO: 51312 - DNA, 15 bp, Homo sapiens
gggcttgaatcctgg

SEQ ID NO: 51313 - DNA, 15 bp, Homo sapiens
tgggcttgaatcctg

SEQ ID NO: 51314 - DNA, 15 bp, Homo sapiens
ttgggcttgaatcct

SEQ ID NO: 51315 - DNA, 15 bp, Homo sapiens
tttgggcttgaatcc

SEQ ID NO: 51316 - DNA, 15 bp, Homo sapiens
atttgggcttgaatc

SEQ ID NO: 51317 - DNA, 15 bp, Homo sapiens
gatttgggcttgaat

SEQ ID NO: 51318 - DNA, 15 bp, Homo sapiens
agatttgggcttgaa

SEQ ID NO: 51319 - DNA, 15 bp, Homo sapiens
cagatttgggcttga

SEQ ID NO: 51320 - DNA, 15 bp, Homo sapiens
gcagatttgggcttg

SEQ ID NO: 51321 - DNA, 15 bp, Homo sapiens
ggcagatttgggctt

SEQ ID NO: 51322 - DNA, 15 bp, Homo sapiens
aggcagatttgggct

SEQ ID NO: 51323 - DNA, 15 bp, Homo sapiens
caggcagatttgggc

SEQ ID NO: 51324 - DNA, 15 bp, Homo sapiens
ccaggcagatttggg

SEQ ID NO: 51325 - DNA, 15 bp, Homo sapiens
tccaggcagatttgg

SEQ ID NO: 51326 - DNA, 15 bp, Homo sapiens
atccaggcagatttg

SEQ ID NO: 51327 - DNA, 15 bp, Homo sapiens
gatccaggcagattt

SEQ ID NO: 51328 - DNA, 15 bp, Homo sapiens
agatccaggcagatt

SEQ ID NO: 51329 - DNA, 15 bp, Homo sapiens
cagatccaggcagat

SEQ ID NO: 51330 - DNA, 15 bp, Homo sapiens
acagatccaggcaga

SEQ ID NO: 51331 - DNA, 15 bp, Homo sapiens
cacagatccaggcag

SEQ ID NO: 51332 - DNA, 15 bp, Homo sapiens
gcacagatccaggca

SEQ ID NO: 51333 - DNA, 15 bp, Homo sapiens
agcacagatccaggc

SEQ ID NO: 51334 - DNA, 15 bp, Homo sapiens
gagcacagatccagg

SEQ ID NO: 51335 - DNA, 15 bp, Homo sapiens
agagcacagatccag

SEQ ID NO: 51336 - DNA, 15 bp, Homo sapiens
gagagcacagatcca

SEQ ID NO: 51337 - DNA, 15 bp, Homo sapiens
agagagcacagatcc

SEQ ID NO: 51338 - DNA, 15 bp, Homo sapiens
tagagagcacagatc

SEQ ID NO: 51339 - DNA, 15 bp, Homo sapiens
ttagagagcacagat

SEQ ID NO: 51340 - DNA, 15 bp, Homo sapiens
cttagagagcacaga

SEQ ID NO: 51341 - DNA, 15 bp, Homo sapiens
tcttagagagcacag

SEQ ID NO: 51342 - DNA, 15 bp, Homo sapiens
atcttagagagcaca

SEQ ID NO: 51343 - DNA, 15 bp, Homo sapiens
tatcttagagagcac

SEQ ID NO: 51344 - DNA, 15 bp, Homo sapiens
ttatcttagagagca

SEQ ID NO: 51345 - DNA, 15 bp, Homo sapiens
gttatcttagagagc

SEQ ID NO: 51346 - DNA, 15 bp, Homo sapiens
agttatcttagagag

SEQ ID NO: 51347 - DNA, 15 bp, Homo sapiens
cagttatcttagaga

SEQ ID NO: 51348 - DNA, 15 bp, Homo sapiens
acagttatcttagag

SEQ ID NO: 51349 - DNA, 15 bp, Homo sapiens
aacagttatcttaga

SEQ ID NO: 51350 - DNA, 15 bp, Homo sapiens
taacagttatcttag

SEQ ID NO: 51351 - DNA, 15 bp, Homo sapiens
ctaacagttatctta

SEQ ID NO: 51352 - DNA, 15 bp, Homo sapiens
actaacagttatctt

SEQ ID NO: 51353 - DNA, 15 bp, Homo sapiens
cactaacagttatct

SEQ ID NO: 51354 - DNA, 15 bp, Homo sapiens
ccactaacagttatc

SEQ ID NO: 51355 - DNA, 15 bp, Homo sapiens
accactaacagttat

SEQ ID NO: 51356 - DNA, 15 bp, Homo sapiens
caccactaacagtta

SEQ ID NO: 51357 - DNA, 15 bp, Homo sapiens
ccaccactaacagtt

SEQ ID NO: 51358 - DNA, 15 bp, Homo sapiens
gccaccactaacagt

SEQ ID NO: 51359 - DNA, 15 bp, Homo sapiens
cgccaccactaacag

SEQ ID NO: 51360 - DNA, 15 bp, Homo sapiens
acgccaccactaaca

SEQ ID NO: 51361 - DNA, 15 bp, Homo sapiens
cacgccaccactaac

SEQ ID NO: 51362 - DNA, 15 bp, Homo sapiens
acacgccaccactaa

SEQ ID NO: 51363 - DNA, 15 bp, Homo sapiens
cacacgccaccacta

SEQ ID NO: 51364 - DNA, 15 bp, Homo sapiens
acacacgccaccact

SEQ ID NO: 51365 - DNA, 15 bp, Homo sapiens
cacacacgccaccac

SEQ ID NO: 51366 - DNA, 15 bp, Homo sapiens
acacacacgccacca

SEQ ID NO: 51367 - DNA, 15 bp, Homo sapiens
aacacacacgccacc

SEQ ID NO: 51368 - DNA, 15 bp, Homo sapiens
gaacacacacgccac

SEQ ID NO: 51369 - DNA, 15 bp, Homo sapiens
agaacacacacgcca

SEQ ID NO: 51370 - DNA, 15 bp, Homo sapiens
gagaacacacacgcc

SEQ ID NO: 51371 - DNA, 15 bp, Homo sapiens
tgagaacacacacgc

SEQ ID NO: 51372 - DNA, 15 bp, Homo sapiens
gtgagaacacacacg

SEQ ID NO: 51373 - DNA, 15 bp, Homo sapiens
tgtgagaacacacac

SEQ ID NO: 51374 - DNA, 15 bp, Homo sapiens
gtgtgagaacacaca

SEQ ID NO: 51375 - DNA, 15 bp, Homo sapiens
agtgtgagaacacac

SEQ ID NO: 51376 - DNA, 15 bp, Homo sapiens
gagtgtgagaacaca

SEQ ID NO: 51377 - DNA, 15 bp, Homo sapiens
tgagtgtgagaacac

SEQ ID NO: 51378 - DNA, 15 bp, Homo sapiens
ctgagtgtgagaaca

SEQ ID NO: 51379 - DNA, 15 bp, Homo sapiens
tctgagtgtgagaac

SEQ ID NO: 51380 - DNA, 15 bp, Homo sapiens
gtctgagtgtgagaa

SEQ ID NO: 51381 - DNA, 15 bp, Homo sapiens
tgtctgagtgtgaga

SEQ ID NO: 51382 - DNA, 15 bp, Homo sapiens
atgtctgagtgtgag

SEQ ID NO: 51383 - DNA, 15 bp, Homo sapiens
aatgtctgagtgtga

SEQ ID NO: 51384 - DNA, 15 bp, Homo sapiens
aaatgtctgagtgtg

SEQ ID NO: 51385 - DNA, 15 bp, Homo sapiens
caaatgtctgagtgt

SEQ ID NO: 51386 - DNA, 15 bp, Homo sapiens
tcaaatgtctgagtg

SEQ ID NO: 51387 - DNA, 15 bp, Homo sapiens
atcaaatgtctgagt

SEQ ID NO: 51388 - DNA, 15 bp, Homo sapiens
gatcaaatgtctgag

SEQ ID NO: 51389 - DNA, 15 bp, Homo sapiens
agatcaaatgtctga

SEQ ID NO: 51390 - DNA, 15 bp, Homo sapiens
cagatcaaatgtctg

SEQ ID NO: 51391 - DNA, 15 bp, Homo sapiens
gcagatcaaatgtct

SEQ ID NO: 51392 - DNA, 15 bp, Homo sapiens
ggcagatcaaatgtc

SEQ ID NO: 51393 - DNA, 15 bp, Homo sapiens
gggcagatcaaatgt

SEQ ID NO: 51394 - DNA, 15 bp, Homo sapiens
agggcagatcaaatg

SEQ ID NO: 51395 - DNA, 15 bp, Homo sapiens
aagggcagatcaaat

SEQ ID NO: 51396 - DNA, 15 bp, Homo sapiens
aaagggcagatcaaa

SEQ ID NO: 51397 - DNA, 15 bp, Homo sapiens
caaagggcagatcaa

SEQ ID NO: 51398 - DNA, 15 bp, Homo sapiens
acaaagggcagatca

SEQ ID NO: 51399 - DNA, 15 bp, Homo sapiens
aacaaagggcagatc

SEQ ID NO: 51400 - DNA, 15 bp, Homo sapiens
aaacaaagggcagat

SEQ ID NO: 51401 - DNA, 15 bp, Homo sapiens
gaaacaaagggcaga

SEQ ID NO: 51402 - DNA, 15 bp, Homo sapiens
ggaaacaaagggcag

SEQ ID NO: 51403 - DNA, 15 bp, Homo sapiens
gggaaacaaagggca

SEQ ID NO: 51404 - DNA, 15 bp, Homo sapiens
tgggaaacaaagggc

SEQ ID NO: 51405 - DNA, 15 bp, Homo sapiens
atgggaaacaaaggg

SEQ ID NO: 51406 - DNA, 15 bp, Homo sapiens
aatgggaaacaaagg

SEQ ID NO: 51407 - DNA, 15 bp, Homo sapiens
gaatgggaaacaaag

SEQ ID NO: 51408 - DNA, 15 bp, Homo sapiens
agaatgggaaacaaa

SEQ ID NO: 51409 - DNA, 15 bp, Homo sapiens
aagaatgggaaacaa

SEQ ID NO: 51410 - DNA, 15 bp, Homo sapiens
taagaatgggaaaca

SEQ ID NO: 51411 - DNA, 15 bp, Homo sapiens
ctaagaatgggaaac

SEQ ID NO: 51412 - DNA, 15 bp, Homo sapiens
gctaagaatgggaaa

SEQ ID NO: 51413 - DNA, 15 bp, Homo sapiens
agctaagaatgggaa

SEQ ID NO: 51414 - DNA, 15 bp, Homo sapiens
cagctaagaatggga

SEQ ID NO: 51415 - DNA, 15 bp, Homo sapiens
gcagctaagaatggg

SEQ ID NO: 51416 - DNA, 15 bp, Homo sapiens
tgcagctaagaatgg

SEQ ID NO: 51417 - DNA, 15 bp, Homo sapiens
ttgcagctaagaatg

SEQ ID NO: 51418 - DNA, 15 bp, Homo sapiens
cttgcagctaagaat

SEQ ID NO: 51419 - DNA, 15 bp, Homo sapiens
ccttgcagctaagaa

SEQ ID NO: 51420 - DNA, 15 bp, Homo sapiens
gccttgcagctaaga

SEQ ID NO: 51421 - DNA, 15 bp, Homo sapiens
tgccttgcagctaag

SEQ ID NO: 51422 - DNA, 15 bp, Homo sapiens
ctgccttgcagctaa

SEQ ID NO: 51423 - DNA, 15 bp, Homo sapiens
actgccttgcagcta

SEQ ID NO: 51424 - DNA, 15 bp, Homo sapiens
cactgccttgcagct

SEQ ID NO: 51425 - DNA, 15 bp, Homo sapiens
acactgccttgcagc

SEQ ID NO: 51426 - DNA, 15 bp, Homo sapiens
aacactgccttgcag

SEQ ID NO: 51427 - DNA, 15 bp, Homo sapiens
taacactgccttgca

SEQ ID NO: 51428 - DNA, 15 bp, Homo sapiens
ttaacactgccttgc

SEQ ID NO: 51429 - DNA, 15 bp, Homo sapiens
tttaacactgccttg

SEQ ID NO: 51430 - DNA, 15 bp, Homo sapiens
ctttaacactgcctt

SEQ ID NO: 51431 - DNA, 15 bp, Homo sapiens
tctttaacactgcct

SEQ ID NO: 51432 - DNA, 15 bp, Homo sapiens
ttctttaacactgcc

SEQ ID NO: 51433 - DNA, 15 bp, Homo sapiens
gttctttaacactgc

SEQ ID NO: 51434 - DNA, 15 bp, Homo sapiens
ggttctttaacactg

SEQ ID NO: 51435 - DNA, 15 bp, Homo sapiens
gggttctttaacact

SEQ ID NO: 51436 - DNA, 15 bp, Homo sapiens
agggttctttaacac

SEQ ID NO: 51437 - DNA, 15 bp, Homo sapiens
cagggttctttaaca

SEQ ID NO: 51438 - DNA, 15 bp, Homo sapiens
acagggttctttaac

SEQ ID NO: 51439 - DNA, 15 bp, Homo sapiens
cacagggttctttaa

SEQ ID NO: 51440 - DNA, 15 bp, Homo sapiens
acacagggttcttta

SEQ ID NO: 51441 - DNA, 15 bp, Homo sapiens
gacacagggttcttt

SEQ ID NO: 51442 - DNA, 15 bp, Homo sapiens
agacacagggttctt

SEQ ID NO: 51443 - DNA, 15 bp, Homo sapiens
gagacacagggttct

SEQ ID NO: 51444 - DNA, 15 bp, Homo sapiens
ggagacacagggttc

SEQ ID NO: 51445 - DNA, 15 bp, Homo sapiens
tggagacacagggtt

SEQ ID NO: 51446 - DNA, 15 bp, Homo sapiens
atggagacacagggt

SEQ ID NO: 51447 - DNA, 15 bp, Homo sapiens
tatggagacacaggg

SEQ ID NO: 51448 - DNA, 15 bp, Homo sapiens
atatggagacacagg

SEQ ID NO: 51449 - DNA, 15 bp, Homo sapiens
gatatggagacacag

SEQ ID NO: 51450 - DNA, 15 bp, Homo sapiens
ggatatggagacaca

SEQ ID NO: 51451 - DNA, 15 bp, Homo sapiens
tggatatggagacac

SEQ ID NO: 51452 - DNA, 15 bp, Homo sapiens
gtggatatggagaca

SEQ ID NO: 51453 - DNA, 15 bp, Homo sapiens
agtggatatggagac

SEQ ID NO: 51454 - DNA, 15 bp, Homo sapiens
gagtggatatggaga

SEQ ID NO: 51455 - DNA, 15 bp, Homo sapiens
ggagtggatatggag

SEQ ID NO: 51456 - DNA, 15 bp, Homo sapiens
gggagtggatatgga

SEQ ID NO: 51457 - DNA, 15 bp, Homo sapiens
ggggagtggatatgg

SEQ ID NO: 51458 - DNA, 15 bp, Homo sapiens
tggggagtggatatg

SEQ ID NO: 51459 - DNA, 15 bp, Homo sapiens
gtggggagtggatat

SEQ ID NO: 51460 - DNA, 15 bp, Homo sapiens
tgtggggagtggata

SEQ ID NO: 51461 - DNA, 15 bp, Homo sapiens
gtgtggggagtggat

SEQ ID NO: 51462 - DNA, 15 bp, Homo sapiens
agtgtggggagtgga

SEQ ID NO: 51463 - DNA, 15 bp, Homo sapiens
aagtgtggggagtgg

SEQ ID NO: 51464 - DNA, 15 bp, Homo sapiens
taagtgtggggagtg

SEQ ID NO: 51465 - DNA, 15 bp, Homo sapiens
ttaagtgtggggagt

SEQ ID NO: 51466 - DNA, 15 bp, Homo sapiens
cttaagtgtggggag

SEQ ID NO: 51467 - DNA, 15 bp, Homo sapiens
gcttaagtgtgggga

SEQ ID NO: 51468 - DNA, 15 bp, Homo sapiens
tgcttaagtgtgggg

SEQ ID NO: 51469 - DNA, 15 bp, Homo sapiens
gtgcttaagtgtggg

SEQ ID NO: 51470 - DNA, 15 bp, Homo sapiens
agtgcttaagtgtgg

SEQ ID NO: 51471 - DNA, 15 bp, Homo sapiens
aagtgcttaagtgtg

SEQ ID NO: 51472 - DNA, 15 bp, Homo sapiens
aaagtgcttaagtgt

SEQ ID NO: 51473 - DNA, 15 bp, Homo sapiens
aaaagtgcttaagtg

SEQ ID NO: 51474 - DNA, 15 bp, Homo sapiens
caaaagtgcttaagt

SEQ ID NO: 51475 - DNA, 15 bp, Homo sapiens
acaaaagtgcttaag

SEQ ID NO: 51476 - DNA, 15 bp, Homo sapiens
cacaaaagtgcttaa

SEQ ID NO: 51477 - DNA, 15 bp, Homo sapiens
ccacaaaagtgctta

SEQ ID NO: 51478 - DNA, 15 bp, Homo sapiens
cccacaaaagtgctt

SEQ ID NO: 51479 - DNA, 15 bp, Homo sapiens
gcccacaaaagtgct

SEQ ID NO: 51480 - DNA, 15 bp, Homo sapiens
ggcccacaaaagtgc

SEQ ID NO: 51481 - DNA, 15 bp, Homo sapiens
gggcccacaaaagtg

SEQ ID NO: 51482 - DNA, 15 bp, Homo sapiens
cgggcccacaaaagt

SEQ ID NO: 51483 - DNA, 15 bp, Homo sapiens
acgggcccacaaaag

SEQ ID NO: 51484 - DNA, 15 bp, Homo sapiens
cacgggcccacaaaa

SEQ ID NO: 51485 - DNA, 15 bp, Homo sapiens
acacgggcccacaaa

SEQ ID NO: 51486 - DNA, 15 bp, Homo sapiens
cacacgggcccacaa

SEQ ID NO: 51487 - DNA, 15 bp, Homo sapiens
gcacacgggcccaca

SEQ ID NO: 51488 - DNA, 15 bp, Homo sapiens
ggcacacgggcccac

SEQ ID NO: 51489 - DNA, 15 bp, Homo sapiens
cggcacacgggccca

SEQ ID NO: 51490 - DNA, 15 bp, Homo sapiens
acggcacacgggccc

SEQ ID NO: 51491 - DNA, 15 bp, Homo sapiens
tacggcacacgggcc

SEQ ID NO: 51492 - DNA, 15 bp, Homo sapiens
atacggcacacgggc

SEQ ID NO: 51493 - DNA, 15 bp, Homo sapiens
catacggcacacggg

SEQ ID NO: 51494 - DNA, 15 bp, Homo sapiens
gcatacggcacacgg

SEQ ID NO: 51495 - DNA, 15 bp, Homo sapiens
ggcatacggcacacg

SEQ ID NO: 51496 - DNA, 15 bp, Homo sapiens
aggcatacggcacac

SEQ ID NO: 51497 - DNA, 15 bp, Homo sapiens
gaggcatacggcaca

SEQ ID NO: 51498 - DNA, 15 bp, Homo sapiens
cgaggcatacggcac

SEQ ID NO: 51499 - DNA, 15 bp, Homo sapiens
acgaggcatacggca

SEQ ID NO: 51500 - DNA, 15 bp, Homo sapiens
cacgaggcatacggc

SEQ ID NO: 51501 - DNA, 15 bp, Homo sapiens
ccacgaggcatacgg

SEQ ID NO: 51502 - DNA, 15 bp, Homo sapiens
gccacgaggcatacg

SEQ ID NO: 51503 - DNA, 15 bp, Homo sapiens
tgccacgaggcatac

SEQ ID NO: 51504 - DNA, 15 bp, Homo sapiens
ctgccacgaggcata

SEQ ID NO: 51505 - DNA, 15 bp, Homo sapiens
gctgccacgaggcat

SEQ ID NO: 51506 - DNA, 15 bp, Homo sapiens
tgctgccacgaggca

SEQ ID NO: 51507 - DNA, 15 bp, Homo sapiens
ctgctgccacgaggc

SEQ ID NO: 51508 - DNA, 15 bp, Homo sapiens
cctgctgccacgagg

SEQ ID NO: 51509 - DNA, 15 bp, Homo sapiens
ccctgctgccacgag

SEQ ID NO: 51510 - DNA, 15 bp, Homo sapiens
tccctgctgccacga

SEQ ID NO: 51511 - DNA, 15 bp, Homo sapiens
atccctgctgccacg

SEQ ID NO: 51512 - DNA, 15 bp, Homo sapiens
gatccctgctgccac

SEQ ID NO: 51513 - DNA, 15 bp, Homo sapiens
ggatccctgctgcca

SEQ ID NO: 51514 - DNA, 15 bp, Homo sapiens
tggatccctgctgcc

SEQ ID NO: 51515 - DNA, 15 bp, Homo sapiens
ttggatccctgctgc

SEQ ID NO: 51516 - DNA, 15 bp, Homo sapiens
attggatccctgctg

SEQ ID NO: 51517 - DNA, 15 bp, Homo sapiens
cattggatccctgct

SEQ ID NO: 51518 - DNA, 15 bp, Homo sapiens
acattggatccctgc

SEQ ID NO: 51519 - DNA, 15 bp, Homo sapiens
gacattggatccctg

SEQ ID NO: 51520 - DNA, 15 bp, Homo sapiens
tgacattggatccct

SEQ ID NO: 51521 - DNA, 15 bp, Homo sapiens
gtgacattggatccc

SEQ ID NO: 51522 - DNA, 15 bp, Homo sapiens
tgtgacattggatcc

SEQ ID NO: 51523 - DNA, 15 bp, Homo sapiens
ctgtgacattggatc

SEQ ID NO: 51524 - DNA, 15 bp, Homo sapiens
actgtgacattggat

SEQ ID NO: 51525 - DNA, 15 bp, Homo sapiens
aactgtgacattgga

SEQ ID NO: 51526 - DNA, 15 bp, Homo sapiens
aaactgtgacattgg

SEQ ID NO: 51527 - DNA, 15 bp, Homo sapiens
aaaactgtgacattg

SEQ ID NO: 51528 - DNA, 15 bp, Homo sapiens
taaaactgtgacatt

SEQ ID NO: 51529 - DNA, 15 bp, Homo sapiens
ctaaaactgtgacat

SEQ ID NO: 51530 - DNA, 15 bp, Homo sapiens
cctaaaactgtgaca

SEQ ID NO: 51531 - DNA, 15 bp, Homo sapiens
gcctaaaactgtgac

SEQ ID NO: 51532 - DNA, 15 bp, Homo sapiens
tgcctaaaactgtga

SEQ ID NO: 51533 - DNA, 15 bp, Homo sapiens
ctgcctaaaactgtg

SEQ ID NO: 51534 - DNA, 15 bp, Homo sapiens
actgcctaaaactgt

SEQ ID NO: 51535 - DNA, 15 bp, Homo sapiens
cactgcctaaaactg

SEQ ID NO: 51536 - DNA, 15 bp, Homo sapiens
ccactgcctaaaact

SEQ ID NO: 51537 - DNA, 15 bp, Homo sapiens
gccactgcctaaaac

SEQ ID NO: 51538 - DNA, 15 bp, Homo sapiens
tgccactgcctaaaa

SEQ ID NO: 51539 - DNA, 15 bp, Homo sapiens
atgccactgcctaaa

SEQ ID NO: 51540 - DNA, 15 bp, Homo sapiens
gatgccactgcctaa

SEQ ID NO: 51541 - DNA, 15 bp, Homo sapiens
ggatgccactgccta

SEQ ID NO: 51542 - DNA, 15 bp, Homo sapiens
aggatgccactgcct

SEQ ID NO: 51543 - DNA, 15 bp, Homo sapiens
aaggatgccactgcc

SEQ ID NO: 51544 - DNA, 15 bp, Homo sapiens
aaaggatgccactgc

SEQ ID NO: 51545 - DNA, 15 bp, Homo sapiens
aaaaggatgccactg

SEQ ID NO: 51546 - DNA, 15 bp, Homo sapiens
gaaaaggatgccact

SEQ ID NO: 51547 - DNA, 15 bp, Homo sapiens
ggaaaaggatgccac

SEQ ID NO: 51548 - DNA, 15 bp, Homo sapiens
aggaaaaggatgcca

SEQ ID NO: 51549 - DNA, 15 bp, Homo sapiens
aaggaaaaggatgcc

SEQ ID NO: 51550 - DNA, 15 bp, Homo sapiens
caaggaaaaggatgc

SEQ ID NO: 51551 - DNA, 15 bp, Homo sapiens
tcaaggaaaaggatg

SEQ ID NO: 51552 - DNA, 15 bp, Homo sapiens
ttcaaggaaaaggat

SEQ ID NO: 51553 - DNA, 15 bp, Homo sapiens
tttcaaggaaaagga

SEQ ID NO: 51554 - DNA, 15 bp, Homo sapiens
ttttcaaggaaaagg

SEQ ID NO: 51555 - DNA, 15 bp, Homo sapiens
gttttcaaggaaaag

SEQ ID NO: 51556 - DNA, 15 bp, Homo sapiens
agttttcaaggaaaa

SEQ ID NO: 51557 - DNA, 15 bp, Homo sapiens
aagttttcaaggaaa

SEQ ID NO: 51558 - DNA, 15 bp, Homo sapiens
caagttttcaaggaa

SEQ ID NO: 51559 - DNA, 15 bp, Homo sapiens
tcaagttttcaagga

SEQ ID NO: 51560 - DNA, 15 bp, Homo sapiens
atcaagttttcaagg

SEQ ID NO: 51561 - DNA, 15 bp, Homo sapiens
catcaagttttcaag

SEQ ID NO: 51562 - DNA, 15 bp, Homo sapiens
gcatcaagttttcaa

SEQ ID NO: 51563 - DNA, 15 bp, Homo sapiens
tgcatcaagttttca

SEQ ID NO: 51564 - DNA, 15 bp, Homo sapiens
ctgcatcaagttttc

SEQ ID NO: 51565 - DNA, 15 bp, Homo sapiens
cctgcatcaagtttt

SEQ ID NO: 51566 - DNA, 15 bp, Homo sapiens
ccctgcatcaagttt

SEQ ID NO: 51567 - DNA, 15 bp, Homo sapiens
cccctgcatcaagtt

SEQ ID NO: 51568 - DNA, 15 bp, Homo sapiens
tcccctgcatcaagt

SEQ ID NO: 51569 - DNA, 15 bp, Homo sapiens
ttcccctgcatcaag

SEQ ID NO: 51570 - DNA, 15 bp, Homo sapiens
gttcccctgcatcaa

SEQ ID NO: 51571 - DNA, 15 bp, Homo sapiens
ggttcccctgcatca

SEQ ID NO: 51572 - DNA, 15 bp, Homo sapiens
aggttcccctgcatc

SEQ ID NO: 51573 - DNA, 15 bp, Homo sapiens
aaggttcccctgcat

SEQ ID NO: 51574 - DNA, 15 bp, Homo sapiens
aaaggttcccctgca

SEQ ID NO: 51575 - DNA, 15 bp, Homo sapiens
gaaaggttcccctgc

SEQ ID NO: 51576 - DNA, 15 bp, Homo sapiens
agaaaggttcccctg

SEQ ID NO: 51577 - DNA, 15 bp, Homo sapiens
gagaaaggttcccct

SEQ ID NO: 51578 - DNA, 15 bp, Homo sapiens
ggagaaaggttcccc

SEQ ID NO: 51579 - DNA, 15 bp, Homo sapiens
tggagaaaggttccc

SEQ ID NO: 51580 - DNA, 15 bp, Homo sapiens
atggagaaaggttcc

SEQ ID NO: 51581 - DNA, 15 bp, Homo sapiens
aatggagaaaggttc

SEQ ID NO: 51582 - DNA, 15 bp, Homo sapiens
aaatggagaaaggtt

SEQ ID NO: 51583 - DNA, 15 bp, Homo sapiens
gaaatggagaaaggt

SEQ ID NO: 51584 - DNA, 15 bp, Homo sapiens
ggaaatggagaaagg

SEQ ID NO: 51585 - DNA, 15 bp, Homo sapiens
tggaaatggagaaag

SEQ ID NO: 51586 - DNA, 15 bp, Homo sapiens
ttggaaatggagaaa

SEQ ID NO: 51587 - DNA, 15 bp, Homo sapiens
gttggaaatggagaa

SEQ ID NO: 51588 - DNA, 15 bp, Homo sapiens
ggttggaaatggaga

SEQ ID NO: 51589 - DNA, 15 bp, Homo sapiens
tggttggaaatggag

SEQ ID NO: 51590 - DNA, 15 bp, Homo sapiens
gtggttggaaatgga

SEQ ID NO: 51591 - DNA, 15 bp, Homo sapiens
tgtggttggaaatgg

SEQ ID NO: 51592 - DNA, 15 bp, Homo sapiens
ctgtggttggaaatg

SEQ ID NO: 51593 - DNA, 15 bp, Homo sapiens
cctgtggttggaaat

SEQ ID NO: 51594 - DNA, 15 bp, Homo sapiens
acctgtggttggaaa

SEQ ID NO: 51595 - DNA, 15 bp, Homo sapiens
cacctgtggttggaa

SEQ ID NO: 51596 - DNA, 15 bp, Homo sapiens
acacctgtggttgga

SEQ ID NO: 51597 - DNA, 15 bp, Homo sapiens
cacacctgtggttgg

SEQ ID NO: 51598 - DNA, 15 bp, Homo sapiens
acacacctgtggttg

SEQ ID NO: 51599 - DNA, 15 bp, Homo sapiens
gacacacctgtggtt

SEQ ID NO: 51600 - DNA, 15 bp, Homo sapiens
agacacacctgtggt

SEQ ID NO: 51601 - DNA, 15 bp, Homo sapiens
aagacacacctgtgg

SEQ ID NO: 51602 - DNA, 15 bp, Homo sapiens
aaagacacacctgtg

SEQ ID NO: 51603 - DNA, 15 bp, Homo sapiens
gaaagacacacctgt

SEQ ID NO: 51604 - DNA, 15 bp, Homo sapiens
tgaaagacacacctg

SEQ ID NO: 51605 - DNA, 15 bp, Homo sapiens
ctgaaagacacacct

SEQ ID NO: 51606 - DNA, 15 bp, Homo sapiens
tctgaaagacacacc

SEQ ID NO: 51607 - DNA, 15 bp, Homo sapiens
gtctgaaagacacac

SEQ ID NO: 51608 - DNA, 15 bp, Homo sapiens
tgtctgaaagacaca

SEQ ID NO: 51609 - DNA, 15 bp, Homo sapiens
gtgtctgaaagacac

SEQ ID NO: 51610 - DNA, 15 bp, Homo sapiens
agtgtctgaaagaca

SEQ ID NO: 51611 - DNA, 15 bp, Homo sapiens
cagtgtctgaaagac

SEQ ID NO: 51612 - DNA, 15 bp, Homo sapiens
tcagtgtctgaaaga

SEQ ID NO: 51613 - DNA, 15 bp, Homo sapiens
ctcagtgtctgaaag

SEQ ID NO: 51614 - DNA, 15 bp, Homo sapiens
actcagtgtctgaaa

SEQ ID NO: 51615 - DNA, 15 bp, Homo sapiens
cactcagtgtctgaa

SEQ ID NO: 51616 - DNA, 15 bp, Homo sapiens
tcactcagtgtctga

SEQ ID NO: 51617 - DNA, 15 bp, Homo sapiens
ctcactcagtgtctg

SEQ ID NO: 51618 - DNA, 15 bp, Homo sapiens
cctcactcagtgtct

SEQ ID NO: 51619 - DNA, 15 bp, Homo sapiens
gcctcactcagtgtc

SEQ ID NO: 51620 - DNA, 15 bp, Homo sapiens
tgcctcactcagtgt

SEQ ID NO: 51621 - DNA, 15 bp, Homo sapiens
ctgcctcactcagtg

SEQ ID NO: 51622 - DNA, 15 bp, Homo sapiens
cctgcctcactcagt

SEQ ID NO: 51623 - DNA, 15 bp, Homo sapiens
acctgcctcactcag

SEQ ID NO: 51624 - DNA, 15 bp, Homo sapiens
aacctgcctcactca

SEQ ID NO: 51625 - DNA, 15 bp, Homo sapiens
aaacctgcctcactc

SEQ ID NO: 51626 - DNA, 15 bp, Homo sapiens
aaaacctgcctcact

SEQ ID NO: 51627 - DNA, 15 bp, Homo sapiens
caaaacctgcctcac

SEQ ID NO: 51628 - DNA, 15 bp, Homo sapiens
acaaaacctgcctca

SEQ ID NO: 51629 - DNA, 15 bp, Homo sapiens
tacaaaacctgcctc

SEQ ID NO: 51630 - DNA, 15 bp, Homo sapiens
gtacaaaacctgcct

SEQ ID NO: 51631 - DNA, 15 bp, Homo sapiens
agtacaaaacctgcc

SEQ ID NO: 51632 - DNA, 15 bp, Homo sapiens
aagtacaaaacctgc

SEQ ID NO: 51633 - DNA, 15 bp, Homo sapiens
aaagtacaaaacctg

SEQ ID NO: 51634 - DNA, 15 bp, Homo sapiens
taaagtacaaaacct

SEQ ID NO: 51635 - DNA, 15 bp, Homo sapiens
ataaagtacaaaacc

SEQ ID NO: 51636 - DNA, 15 bp, Homo sapiens
aataaagtacaaaac

SEQ ID NO: 51637 - DNA, 15 bp, Homo sapiens
caataaagtacaaaa

SEQ ID NO: 51638 - DNA, 15 bp, Homo sapiens
acaataaagtacaaa

SEQ ID NO: 51639 - DNA, 15 bp, Homo sapiens
tacaataaagtacaa

SEQ ID NO: 51640 - DNA, 15 bp, Homo sapiens
ttacaataaagtaca

SEQ ID NO: 51641 - DNA, 15 bp, Homo sapiens
gttacaataaagtac

SEQ ID NO: 51642 - DNA, 15 bp, Homo sapiens
tgttacaataaagta

SEQ ID NO: 51643 - DNA, 15 bp, Homo sapiens
gtgttacaataaagt

SEQ ID NO: 51644 - DNA, 15 bp, Homo sapiens
tgtgttacaataaag

SEQ ID NO: 51645 - DNA, 15 bp, Homo sapiens
ttgtgttacaataaa

SEQ ID NO: 51646 - DNA, 15 bp, Homo sapiens
cttgtgttacaataa

SEQ ID NO: 51647 - DNA, 15 bp, Homo sapiens
tcttgtgttacaata

SEQ ID NO: 51648 - DNA, 15 bp, Homo sapiens
ttcttgtgttacaat

SEQ ID NO: 51649 - DNA, 15 bp, Homo sapiens
gttcttgtgttacaa

SEQ ID NO: 51650 - DNA, 15 bp, Homo sapiens
ggttcttgtgttaca

SEQ ID NO: 51651 - DNA, 15 bp, Homo sapiens
aggttcttgtgttac

SEQ ID NO: 51652 - DNA, 15 bp, Homo sapiens
aaggttcttgtgtta

SEQ ID NO: 51653 - DNA, 15 bp, Homo sapiens
aaaggttcttgtgtt

SEQ ID NO: 51654 - DNA, 15 bp, Homo sapiens
aaaaggttcttgtgt

SEQ ID NO: 51655 - DNA, 15 bp, Homo sapiens
gaaaaggttcttgtg

SEQ ID NO: 51656 - DNA, 15 bp, Homo sapiens
agaaaaggttcttgt

SEQ ID NO: 51657 - DNA, 15 bp, Homo sapiens
aagaaaaggttcttg

SEQ ID NO: 51658 - DNA, 15 bp, Homo sapiens
gaagaaaaggttctt

SEQ ID NO: 51659 - DNA, 15 bp, Homo sapiens
agaagaaaaggttct

SEQ ID NO: 51660 - DNA, 15 bp, Homo sapiens
gagaagaaaaggttc

SEQ ID NO: 51661 - DNA, 15 bp, Homo sapiens
agagaagaaaaggtt

SEQ ID NO: 51662 - DNA, 15 bp, Homo sapiens
cagagaagaaaaggt

SEQ ID NO: 51663 - DNA, 15 bp, Homo sapiens
ccagagaagaaaagg

SEQ ID NO: 51664 - DNA, 15 bp, Homo sapiens
tccagagaagaaaag

SEQ ID NO: 51665 - DNA, 15 bp, Homo sapiens
ctccagagaagaaaa

SEQ ID NO: 51666 - DNA, 15 bp, Homo sapiens
actccagagaagaaa

SEQ ID NO: 51667 - DNA, 15 bp, Homo sapiens
tactccagagaagaa

SEQ ID NO: 51668 - DNA, 15 bp, Homo sapiens
ttactccagagaaga

SEQ ID NO: 51669 - DNA, 15 bp, Homo sapiens
tttactccagagaag

SEQ ID NO: 51670 - DNA, 15 bp, Homo sapiens
ctttactccagagaa

SEQ ID NO: 51671 - DNA, 15 bp, Homo sapiens
gctttactccagaga

SEQ ID NO: 51672 - DNA, 15 bp, Homo sapiens
tgctttactccagag

SEQ ID NO: 51673 - DNA, 15 bp, Homo sapiens
gtgctttactccaga

SEQ ID NO: 51674 - DNA, 15 bp, Homo sapiens
agtgctttactccag

SEQ ID NO: 51675 - DNA, 15 bp, Homo sapiens
gagtgctttactcca

SEQ ID NO: 51676 - DNA, 15 bp, Homo sapiens
ggagtgctttactcc

SEQ ID NO: 51677 - DNA, 15 bp, Homo sapiens
tggagtgctttactc

SEQ ID NO: 51678 - DNA, 15 bp, Homo sapiens
ctggagtgctttact

SEQ ID NO: 51679 - DNA, 15 bp, Homo sapiens
tctggagtgctttac

SEQ ID NO: 51680 - DNA, 15 bp, Homo sapiens
gtctggagtgcttta

SEQ ID NO: 51681 - DNA, 15 bp, Homo sapiens
tgtctggagtgcttt

SEQ ID NO: 51682 - DNA, 15 bp, Homo sapiens
atgtctggagtgctt

SEQ ID NO: 51683 - DNA, 15 bp, Homo sapiens
aatgtctggagtgct

SEQ ID NO: 51684 - DNA, 15 bp, Homo sapiens
gaatgtctggagtgc

SEQ ID NO: 51685 - DNA, 15 bp, Homo sapiens
cgaatgtctggagtg

SEQ ID NO: 51686 - DNA, 15 bp, Homo sapiens
gcgaatgtctggagt

SEQ ID NO: 51687 - DNA, 15 bp, Homo sapiens
tgcgaatgtctggag

SEQ ID NO: 51688 - DNA, 15 bp, Homo sapiens
ttgcgaatgtctgga

SEQ ID NO: 51689 - DNA, 15 bp, Homo sapiens
cttgcgaatgtctgg

SEQ ID NO: 51690 - DNA, 15 bp, Homo sapiens
acttgcgaatgtctg

SEQ ID NO: 51691 - DNA, 15 bp, Homo sapiens
aacttgcgaatgtct

SEQ ID NO: 51692 - DNA, 15 bp, Homo sapiens
caacttgcgaatgtc

SEQ ID NO: 51693 - DNA, 15 bp, Homo sapiens
gcaacttgcgaatgt

SEQ ID NO: 51694 - DNA, 15 bp, Homo sapiens
agcaacttgcgaatg

SEQ ID NO: 51695 - DNA, 15 bp, Homo sapiens
aagcaacttgcgaat

SEQ ID NO: 51696 - DNA, 15 bp, Homo sapiens
aaagcaacttgcgaa

SEQ ID NO: 51697 - DNA, 15 bp, Homo sapiens
taaagcaacttgcga

SEQ ID NO: 51698 - DNA, 15 bp, Homo sapiens
gtaaagcaacttgcg

SEQ ID NO: 51699 - DNA, 15 bp, Homo sapiens
tgtaaagcaacttgc

SEQ ID NO: 51700 - DNA, 15 bp, Homo sapiens
ttgtaaagcaacttg

SEQ ID NO: 51701 - DNA, 15 bp, Homo sapiens
cttgtaaagcaactt

SEQ ID NO: 51702 - DNA, 15 bp, Homo sapiens
gcttgtaaagcaact

SEQ ID NO: 51703 - DNA, 15 bp, Homo sapiens
ggcttgtaaagcaac

SEQ ID NO: 51704 - DNA, 15 bp, Homo sapiens
aggcttgtaaagcaa

SEQ ID NO: 51705 - DNA, 15 bp, Homo sapiens
aaggcttgtaaagca

SEQ ID NO: 51706 - DNA, 15 bp, Homo sapiens
taaggcttgtaaagc

SEQ ID NO: 51707 - DNA, 15 bp, Homo sapiens
ttaaggcttgtaaag

SEQ ID NO: 51708 - DNA, 15 bp, Homo sapiens
tttaaggcttgtaaa

SEQ ID NO: 51709 - DNA, 15 bp, Homo sapiens
ttttaaggcttgtaa

SEQ ID NO: 51710 - DNA, 15 bp, Homo sapiens
cttttaaggcttgta

SEQ ID NO: 51711 - DNA, 15 bp, Homo sapiens
ccttttaaggcttgt

SEQ ID NO: 51712 - DNA, 15 bp, Homo sapiens
tccttttaaggcttg

SEQ ID NO: 51713 - DNA, 15 bp, Homo sapiens
atccttttaaggctt

SEQ ID NO: 51714 - DNA, 15 bp, Homo sapiens
catccttttaaggct

SEQ ID NO: 51715 - DNA, 15 bp, Homo sapiens
ccatccttttaaggc

SEQ ID NO: 51716 - DNA, 15 bp, Homo sapiens
accatccttttaagg

SEQ ID NO: 51717 - DNA, 15 bp, Homo sapiens
taccatccttttaag

SEQ ID NO: 51718 - DNA, 15 bp, Homo sapiens
ataccatccttttaa

SEQ ID NO: 51719 - DNA, 15 bp, Homo sapiens
aataccatcctttta

SEQ ID NO: 51720 - DNA, 15 bp, Homo sapiens
caataccatcctttt

SEQ ID NO: 51721 - DNA, 15 bp, Homo sapiens
acaataccatccttt

SEQ ID NO: 51722 - DNA, 15 bp, Homo sapiens
tacaataccatcctt

SEQ ID NO: 51723 - DNA, 15 bp, Homo sapiens
ctacaataccatcct

SEQ ID NO: 51724 - DNA, 15 bp, Homo sapiens
cctacaataccatcc

SEQ ID NO: 51725 - DNA, 15 bp, Homo sapiens
gcctacaataccatc

SEQ ID NO: 51726 - DNA, 15 bp, Homo sapiens
tgcctacaataccat

SEQ ID NO: 51727 - DNA, 15 bp, Homo sapiens
ttgcctacaatacca

SEQ ID NO: 51728 - DNA, 15 bp, Homo sapiens
gttgcctacaatacc

SEQ ID NO: 51729 - DNA, 15 bp, Homo sapiens
agttgcctacaatac

SEQ ID NO: 51730 - DNA, 15 bp, Homo sapiens
aagttgcctacaata

SEQ ID NO: 51731 - DNA, 15 bp, Homo sapiens
aaagttgcctacaat

SEQ ID NO: 51732 - DNA, 15 bp, Homo sapiens
taaagttgcctacaa

SEQ ID NO: 51733 - DNA, 15 bp, Homo sapiens
ttaaagttgcctaca

SEQ ID NO: 51734 - DNA, 15 bp, Homo sapiens
attaaagttgcctac

SEQ ID NO: 51735 - DNA, 15 bp, Homo sapiens
aattaaagttgccta

SEQ ID NO: 51736 - DNA, 15 bp, Homo sapiens
taattaaagttgcct

SEQ ID NO: 51737 - DNA, 15 bp, Homo sapiens
ttaattaaagttgcc

SEQ ID NO: 51738 - DNA, 15 bp, Homo sapiens
tttaattaaagttgc

SEQ ID NO: 51739 - DNA, 15 bp, Homo sapiens
atttaattaaagttg

SEQ ID NO: 51740 - DNA, 15 bp, Homo sapiens
gatttaattaaagtt

SEQ ID NO: 51741 - DNA, 15 bp, Homo sapiens
ggatttaattaaagt

SEQ ID NO: 51742 - DNA, 15 bp, Homo sapiens
gggatttaattaaag

SEQ ID NO: 51743 - DNA, 15 bp, Homo sapiens
tgggatttaattaaa

SEQ ID NO: 51744 - DNA, 15 bp, Homo sapiens
atgggatttaattaa

SEQ ID NO: 51745 - DNA, 15 bp, Homo sapiens
gatgggatttaatta

SEQ ID NO: 51746 - DNA, 15 bp, Homo sapiens
agatgggatttaatt

SEQ ID NO: 51747 - DNA, 15 bp, Homo sapiens
gagatgggatttaat

SEQ ID NO: 51748 - DNA, 15 bp, Homo sapiens
ggagatgggatttaa

SEQ ID NO: 51749 - DNA, 15 bp, Homo sapiens
aggagatgggattta

SEQ ID NO: 51750 - DNA, 15 bp, Homo sapiens
gaggagatgggattt

SEQ ID NO: 51751 - DNA, 15 bp, Homo sapiens
ggaggagatgggatt

SEQ ID NO: 51752 - DNA, 15 bp, Homo sapiens
aggaggagatgggat

SEQ ID NO: 51753 - DNA, 15 bp, Homo sapiens
gaggaggagatggga

SEQ ID NO: 51754 - DNA, 15 bp, Homo sapiens
agaggaggagatggg

SEQ ID NO: 51755 - DNA, 15 bp, Homo sapiens
gagaggaggagatgg

SEQ ID NO: 51756 - DNA, 15 bp, Homo sapiens
ggagaggaggagatg

SEQ ID NO: 51757 - DNA, 15 bp, Homo sapiens
gggagaggaggagat

SEQ ID NO: 51758 - DNA, 15 bp, Homo sapiens
ggggagaggaggaga

SEQ ID NO: 51759 - DNA, 15 bp, Homo sapiens
gggggagaggaggag

SEQ ID NO: 51760 - DNA, 15 bp, Homo sapiens
tgggggagaggagga

SEQ ID NO: 51761 - DNA, 15 bp, Homo sapiens
ctgggggagaggagg

SEQ ID NO: 51762 - DNA, 15 bp, Homo sapiens
gctgggggagaggag

SEQ ID NO: 51763 - DNA, 15 bp, Homo sapiens
agctgggggagagga

SEQ ID NO: 51764 - DNA, 15 bp, Homo sapiens
aagctgggggagagg

SEQ ID NO: 51765 - DNA, 15 bp, Homo sapiens
caagctgggggagag

SEQ ID NO: 51766 - DNA, 15 bp, Homo sapiens
gcaagctgggggaga

SEQ ID NO: 51767 - DNA, 15 bp, Homo sapiens
tgcaagctgggggag

SEQ ID NO: 51768 - DNA, 15 bp, Homo sapiens
ttgcaagctggggga

SEQ ID NO: 51769 - DNA, 15 bp, Homo sapiens
cttgcaagctggggg

SEQ ID NO: 51770 - DNA, 15 bp, Homo sapiens
acttgcaagctgggg

SEQ ID NO: 51771 - DNA, 15 bp, Homo sapiens
aacttgcaagctggg

SEQ ID NO: 51772 - DNA, 15 bp, Homo sapiens
caacttgcaagctgg

SEQ ID NO: 51773 - DNA, 15 bp, Homo sapiens
tcaacttgcaagctg

SEQ ID NO: 51774 - DNA, 15 bp, Homo sapiens
gtcaacttgcaagct

SEQ ID NO: 51775 - DNA, 15 bp, Homo sapiens
ggtcaacttgcaagc

SEQ ID NO: 51776 - DNA, 15 bp, Homo sapiens
gggtcaacttgcaag

SEQ ID NO: 51777 - DNA, 15 bp, Homo sapiens
tgggtcaacttgcaa

SEQ ID NO: 51778 - DNA, 15 bp, Homo sapiens
ttgggtcaacttgca

SEQ ID NO: 51779 - DNA, 15 bp, Homo sapiens
cttgggtcaacttgc

SEQ ID NO: 51780 - DNA, 15 bp, Homo sapiens
ccttgggtcaacttg

SEQ ID NO: 51781 - DNA, 15 bp, Homo sapiens
tccttgggtcaactt

SEQ ID NO: 51782 - DNA, 15 bp, Homo sapiens
ttccttgggtcaact

SEQ ID NO: 51783 - DNA, 15 bp, Homo sapiens
cttccttgggtcaac

SEQ ID NO: 51784 - DNA, 15 bp, Homo sapiens
gcttccttgggtcaa

SEQ ID NO: 51785 - DNA, 15 bp, Homo sapiens
ggcttccttgggtca

SEQ ID NO: 51786 - DNA, 15 bp, Homo sapiens
aggcttccttgggtc

SEQ ID NO: 51787 - DNA, 15 bp, Homo sapiens
aaggcttccttgggt

SEQ ID NO: 51788 - DNA, 15 bp, Homo sapiens
gaaggcttccttggg

SEQ ID NO: 51789 - DNA, 15 bp, Homo sapiens
tgaaggcttccttgg

SEQ ID NO: 51790 - DNA, 15 bp, Homo sapiens
atgaaggcttccttg

SEQ ID NO: 51791 - DNA, 15 bp, Homo sapiens
aatgaaggcttcctt

SEQ ID NO: 51792 - DNA, 15 bp, Homo sapiens
aaatgaaggcttcct

SEQ ID NO: 51793 - DNA, 15 bp, Homo sapiens
gaaatgaaggcttcc

SEQ ID NO: 51794 - DNA, 15 bp, Homo sapiens
ggaaatgaaggcttc

SEQ ID NO: 51795 - DNA, 15 bp, Homo sapiens
tggaaatgaaggctt

SEQ ID NO: 51796 - DNA, 15 bp, Homo sapiens
atggaaatgaaggct

SEQ ID NO: 51797 - DNA, 15 bp, Homo sapiens
catggaaatgaaggc

SEQ ID NO: 51798 - DNA, 15 bp, Homo sapiens
tcatggaaatgaagg

SEQ ID NO: 51799 - DNA, 15 bp, Homo sapiens
gtcatggaaatgaag

SEQ ID NO: 51800 - DNA, 15 bp, Homo sapiens
tgtcatggaaatgaa

SEQ ID NO: 51801 - DNA, 15 bp, Homo sapiens
ctgtcatggaaatga

SEQ ID NO: 51802 - DNA, 15 bp, Homo sapiens
tctgtcatggaaatg

SEQ ID NO: 51803 - DNA, 15 bp, Homo sapiens
gtctgtcatggaaat

SEQ ID NO: 51804 - DNA, 15 bp, Homo sapiens
agtctgtcatggaaa

SEQ ID NO: 51805 - DNA, 15 bp, Homo sapiens
aagtctgtcatggaa

SEQ ID NO: 51806 - DNA, 15 bp, Homo sapiens
taagtctgtcatgga

SEQ ID NO: 51807 - DNA, 15 bp, Homo sapiens
ttaagtctgtcatgg

SEQ ID NO: 51808 - DNA, 15 bp, Homo sapiens
attaagtctgtcatg

SEQ ID NO: 51809 - DNA, 15 bp, Homo sapiens
aattaagtctgtcat

SEQ ID NO: 51810 - DNA, 15 bp, Homo sapiens
caattaagtctgtca

SEQ ID NO: 51811 - DNA, 15 bp, Homo sapiens
acaattaagtctgtc

SEQ ID NO: 51812 - DNA, 15 bp, Homo sapiens
cacaattaagtctgt

SEQ ID NO: 51813 - DNA, 15 bp, Homo sapiens
tcacaattaagtctg

SEQ ID NO: 51814 - DNA, 15 bp, Homo sapiens
ctcacaattaagtct

SEQ ID NO: 51815 - DNA, 15 bp, Homo sapiens
cctcacaattaagtc

SEQ ID NO: 51816 - DNA, 15 bp, Homo sapiens
ccctcacaattaagt

SEQ ID NO: 51817 - DNA, 15 bp, Homo sapiens
gccctcacaattaag

SEQ ID NO: 51818 - DNA, 15 bp, Homo sapiens
tgccctcacaattaa

SEQ ID NO: 51819 - DNA, 15 bp, Homo sapiens
atgccctcacaatta

SEQ ID NO: 51820 - DNA, 15 bp, Homo sapiens
gatgccctcacaatt

SEQ ID NO: 51821 - DNA, 15 bp, Homo sapiens
ggatgccctcacaat

SEQ ID NO: 51822 - DNA, 15 bp, Homo sapiens
aggatgccctcacaa

SEQ ID NO: 51823 - DNA, 15 bp, Homo sapiens
gaggatgccctcaca

SEQ ID NO: 51824 - DNA, 15 bp, Homo sapiens
tgaggatgccctcac

SEQ ID NO: 51825 - DNA, 15 bp, Homo sapiens
atgaggatgccctca

SEQ ID NO: 51826 - DNA, 15 bp, Homo sapiens
aatgaggatgccctc

SEQ ID NO: 51827 - DNA, 15 bp, Homo sapiens
taatgaggatgccct

SEQ ID NO: 51828 - DNA, 15 bp, Homo sapiens
ttaatgaggatgccc

SEQ ID NO: 51829 - DNA, 15 bp, Homo sapiens
tttaatgaggatgcc

SEQ ID NO: 51830 - DNA, 15 bp, Homo sapiens
ttttaatgaggatgc

SEQ ID NO: 51831 - DNA, 15 bp, Homo sapiens
tttttaatgaggatg

SEQ ID NO: 51832 - DNA, 15 bp, Homo sapiens
ttttttaatgaggat

SEQ ID NO: 51833 - DNA, 15 bp, Homo sapiens
tttttttaatgagga

SEQ ID NO: 51834 - DNA, 15 bp, Homo sapiens
ttttttttaatgagg

SEQ ID NO: 51835 - DNA, 15 bp, Homo sapiens
tttttttttaatgag

SEQ ID NO: 51836 - DNA, 15 bp, Homo sapiens
ttttttttttaatga

SEQ ID NO: 51837 - DNA, 15 bp, Homo sapiens
tagaatttttttttt

SEQ ID NO: 51838 - DNA, 15 bp, Homo sapiens
atagaattttttttt

SEQ ID NO: 51839 - DNA, 15 bp, Homo sapiens
aatagaatttttttt

SEQ ID NO: 51840 - DNA, 15 bp, Homo sapiens
taatagaattttttt

SEQ ID NO: 51841 - DNA, 15 bp, Homo sapiens
ataatagaatttttt

SEQ ID NO: 51842 - DNA, 15 bp, Homo sapiens
gataatagaattttt

SEQ ID NO: 51843 - DNA, 15 bp, Homo sapiens
agataatagaatttt

SEQ ID NO: 51844 - DNA, 15 bp, Homo sapiens
aagataatagaattt

SEQ ID NO: 51845 - DNA, 15 bp, Homo sapiens
aaagataatagaatt

SEQ ID NO: 51846 - DNA, 15 bp, Homo sapiens
gaaagataatagaat

SEQ ID NO: 51847 - DNA, 15 bp, Homo sapiens
ggaaagataatagaa

SEQ ID NO: 51848 - DNA, 15 bp, Homo sapiens
tggaaagataataga

SEQ ID NO: 51849 - DNA, 15 bp, Homo sapiens
ctggaaagataatag

SEQ ID NO: 51850 - DNA, 15 bp, Homo sapiens
gctggaaagataata

SEQ ID NO: 51851 - DNA, 15 bp, Homo sapiens
tgctggaaagataat

SEQ ID NO: 51852 - DNA, 15 bp, Homo sapiens
atgctggaaagataa

SEQ ID NO: 51853 - DNA, 15 bp, Homo sapiens
tatgctggaaagata

SEQ ID NO: 51854 - DNA, 15 bp, Homo sapiens
atatgctggaaagat

SEQ ID NO: 51855 - DNA, 15 bp, Homo sapiens
tatatgctggaaaga

SEQ ID NO: 51856 - DNA, 15 bp, Homo sapiens
ctatatgctggaaag

SEQ ID NO: 51857 - DNA, 15 bp, Homo sapiens
tctatatgctggaaa

SEQ ID NO: 51858 - DNA, 15 bp, Homo sapiens
ttctatatgctggaa

SEQ ID NO: 51859 - DNA, 15 bp, Homo sapiens
cttctatatgctgga

SEQ ID NO: 51860 - DNA, 15 bp, Homo sapiens
tcttctatatgctgg

SEQ ID NO: 51861 - DNA, 15 bp, Homo sapiens
atcttctatatgctg

SEQ ID NO: 51862 - DNA, 15 bp, Homo sapiens
tatcttctatatgct

SEQ ID NO: 51863 - DNA, 15 bp, Homo sapiens
gtatcttctatatgc

SEQ ID NO: 51864 - DNA, 15 bp, Homo sapiens
agtatcttctatatg

SEQ ID NO: 51865 - DNA, 15 bp, Homo sapiens
aagtatcttctatat

SEQ ID NO: 51866 - DNA, 15 bp, Homo sapiens
caagtatcttctata

SEQ ID NO: 51867 - DNA, 15 bp, Homo sapiens
ccaagtatcttctat

SEQ ID NO: 51868 - DNA, 15 bp, Homo sapiens
accaagtatcttcta

SEQ ID NO: 51869 - DNA, 15 bp, Homo sapiens
taccaagtatcttct

SEQ ID NO: 51870 - DNA, 15 bp, Homo sapiens
ataccaagtatcttc

SEQ ID NO: 51871 - DNA, 15 bp, Homo sapiens
gataccaagtatctt

SEQ ID NO: 51872 - DNA, 15 bp, Homo sapiens
agataccaagtatct

SEQ ID NO: 51873 - DNA, 15 bp, Homo sapiens
tagataccaagtatc

SEQ ID NO: 51874 - DNA, 15 bp, Homo sapiens
ttagataccaagtat

SEQ ID NO: 51875 - DNA, 15 bp, Homo sapiens
tttagataccaagta

SEQ ID NO: 51876 - DNA, 15 bp, Homo sapiens
ttttagataccaagt

SEQ ID NO: 51877 - DNA, 15 bp, Homo sapiens
tttttagataccaag

SEQ ID NO: 51878 - DNA, 15 bp, Homo sapiens
atttttagataccaa

SEQ ID NO: 51879 - DNA, 15 bp, Homo sapiens
gatttttagatacca

SEQ ID NO: 51880 - DNA, 15 bp, Homo sapiens
ggatttttagatacc

SEQ ID NO: 51881 - DNA, 15 bp, Homo sapiens
gggatttttagatac

SEQ ID NO: 51882 - DNA, 15 bp, Homo sapiens
agggatttttagata

SEQ ID NO: 51883 - DNA, 15 bp, Homo sapiens
cagggatttttagat

SEQ ID NO: 51884 - DNA, 15 bp, Homo sapiens
tcagggatttttaga

SEQ ID NO: 51885 - DNA, 15 bp, Homo sapiens
ttcagggatttttag

SEQ ID NO: 51886 - DNA, 15 bp, Homo sapiens
tttcagggattttta

SEQ ID NO: 51887 - DNA, 15 bp, Homo sapiens
ttttcagggattttt

SEQ ID NO: 51888 - DNA, 15 bp, Homo sapiens
tttttcagggatttt

SEQ ID NO: 51889 - DNA, 15 bp, Homo sapiens
gtttttcagggattt

SEQ ID NO: 51890 - DNA, 15 bp, Homo sapiens
agtttttcagggatt

SEQ ID NO: 51891 - DNA, 15 bp, Homo sapiens
aagtttttcagggat

SEQ ID NO: 51892 - DNA, 15 bp, Homo sapiens
taagtttttcaggga

SEQ ID NO: 51893 - DNA, 15 bp, Homo sapiens
ctaagtttttcaggg

SEQ ID NO: 51894 - DNA, 15 bp, Homo sapiens
tctaagtttttcagg

SEQ ID NO: 51895 - DNA, 15 bp, Homo sapiens
ttctaagtttttcag

SEQ ID NO: 51896 - DNA, 15 bp, Homo sapiens
attctaagtttttca

SEQ ID NO: 51897 - DNA, 15 bp, Homo sapiens
cattctaagtttttc

SEQ ID NO: 51898 - DNA, 15 bp, Homo sapiens
tcattctaagttttt

SEQ ID NO: 51899 - DNA, 15 bp, Homo sapiens
ttcattctaagtttt

SEQ ID NO: 51900 - DNA, 15 bp, Homo sapiens
attcattctaagttt

SEQ ID NO: 51901 - DNA, 15 bp, Homo sapiens
aattcattctaagtt

SEQ ID NO: 51902 - DNA, 15 bp, Homo sapiens
aaattcattctaagt

SEQ ID NO: 51903 - DNA, 15 bp, Homo sapiens
aaaattcattctaag

SEQ ID NO: 51904 - DNA, 15 bp, Homo sapiens
aaaaattcattctaa

SEQ ID NO: 51905 - DNA, 15 bp, Homo sapiens
taaaaattcattcta

SEQ ID NO: 51906 - DNA, 15 bp, Homo sapiens
ttaaaaattcattct

SEQ ID NO: 51907 - DNA, 15 bp, Homo sapiens
tttaaaaattcattc

SEQ ID NO: 51908 - DNA, 15 bp, Homo sapiens
ttttaaaaattcatt

SEQ ID NO: 51909 - DNA, 15 bp, Homo sapiens
tttttaaaaattcat

SEQ ID NO: 51910 - DNA, 15 bp, Homo sapiens
atttttaaaaattca

SEQ ID NO: 51911 - DNA, 15 bp, Homo sapiens
gatttttaaaaattc

SEQ ID NO: 51912 - DNA, 15 bp, Homo sapiens
tgatttttaaaaatt

SEQ ID NO: 51913 - DNA, 15 bp, Homo sapiens
ctgatttttaaaaat

SEQ ID NO: 51914 - DNA, 15 bp, Homo sapiens
cctgatttttaaaaa

SEQ ID NO: 51915 - DNA, 15 bp, Homo sapiens
ccctgatttttaaaa

SEQ ID NO: 51916 - DNA, 15 bp, Homo sapiens
tccctgatttttaaa

SEQ ID NO: 51917 - DNA, 15 bp, Homo sapiens
atccctgatttttaa

SEQ ID NO: 51918 - DNA, 15 bp, Homo sapiens
gatccctgattttta

SEQ ID NO: 51919 - DNA, 15 bp, Homo sapiens
ggatccctgattttt

SEQ ID NO: 51920 - DNA, 15 bp, Homo sapiens
aggatccctgatttt

SEQ ID NO: 51921 - DNA, 15 bp, Homo sapiens
caggatccctgattt

SEQ ID NO: 51922 - DNA, 15 bp, Homo sapiens
gcaggatccctgatt

SEQ ID NO: 51923 - DNA, 15 bp, Homo sapiens
agcaggatccctgat

SEQ ID NO: 51924 - DNA, 15 bp, Homo sapiens
cagcaggatccctga

SEQ ID NO: 51925 - DNA, 15 bp, Homo sapiens
ccagcaggatccctg

SEQ ID NO: 51926 - DNA, 15 bp, Homo sapiens
tccagcaggatccct

SEQ ID NO: 51927 - DNA, 15 bp, Homo sapiens
atccagcaggatccc

SEQ ID NO: 51928 - DNA, 15 bp, Homo sapiens
tatccagcaggatcc

SEQ ID NO: 51929 - DNA, 15 bp, Homo sapiens
ttatccagcaggatc

SEQ ID NO: 51930 - DNA, 15 bp, Homo sapiens
gttatccagcaggat

SEQ ID NO: 51931 - DNA, 15 bp, Homo sapiens
ggttatccagcagga

SEQ ID NO: 51932 - DNA, 15 bp, Homo sapiens
tggttatccagcagg

SEQ ID NO: 51933 - DNA, 15 bp, Homo sapiens
ttggttatccagcag

SEQ ID NO: 51934 - DNA, 15 bp, Homo sapiens
tttggttatccagca

SEQ ID NO: 51935 - DNA, 15 bp, Homo sapiens
gtttggttatccagc

SEQ ID NO: 51936 - DNA, 15 bp, Homo sapiens
ggtttggttatccag

SEQ ID NO: 51937 - DNA, 15 bp, Homo sapiens
gggtttggttatcca

SEQ ID NO: 51938 - DNA, 15 bp, Homo sapiens
tgggtttggttatcc

SEQ ID NO: 51939 - DNA, 15 bp, Homo sapiens
atgggtttggttatc

SEQ ID NO: 51940 - DNA, 15 bp, Homo sapiens
aatgggtttggttat

SEQ ID NO: 51941 - DNA, 15 bp, Homo sapiens
aaatgggtttggtta

SEQ ID NO: 51942 - DNA, 15 bp, Homo sapiens
caaatgggtttggtt

SEQ ID NO: 51943 - DNA, 15 bp, Homo sapiens
acaaatgggtttggt

SEQ ID NO: 51944 - DNA, 15 bp, Homo sapiens
gacaaatgggtttgg

SEQ ID NO: 51945 - DNA, 15 bp, Homo sapiens
agacaaatgggtttg

SEQ ID NO: 51946 - DNA, 15 bp, Homo sapiens
cagacaaatgggttt

SEQ ID NO: 51947 - DNA, 15 bp, Homo sapiens
acagacaaatgggtt

SEQ ID NO: 51948 - DNA, 15 bp, Homo sapiens
aacagacaaatgggt

SEQ ID NO: 51949 - DNA, 15 bp, Homo sapiens
taacagacaaatggg

SEQ ID NO: 51950 - DNA, 15 bp, Homo sapiens
gtaacagacaaatgg

SEQ ID NO: 51951 - DNA, 15 bp, Homo sapiens
tgtaacagacaaatg

SEQ ID NO: 51952 - DNA, 15 bp, Homo sapiens
ttgtaacagacaaat

SEQ ID NO: 51953 - DNA, 15 bp, Homo sapiens
gttgtaacagacaaa

SEQ ID NO: 51954 - DNA, 15 bp, Homo sapiens
agttgtaacagacaa

SEQ ID NO: 51955 - DNA, 15 bp, Homo sapiens
aagttgtaacagaca

SEQ ID NO: 51956 - DNA, 15 bp, Homo sapiens
aaagttgtaacagac

SEQ ID NO: 51957 - DNA, 15 bp, Homo sapiens
aaaagttgtaacaga

SEQ ID NO: 51958 - DNA, 15 bp, Homo sapiens
caaaagttgtaacag

SEQ ID NO: 51959 - DNA, 15 bp, Homo sapiens
acaaaagttgtaaca

SEQ ID NO: 51960 - DNA, 15 bp, Homo sapiens
tacaaaagttgtaac

SEQ ID NO: 51961 - DNA, 15 bp, Homo sapiens
atacaaaagttgtaa

SEQ ID NO: 51962 - DNA, 15 bp, Homo sapiens
aatacaaaagttgta

SEQ ID NO: 51963 - DNA, 15 bp, Homo sapiens
aaatacaaaagttgt

SEQ ID NO: 51964 - DNA, 15 bp, Homo sapiens
caaatacaaaagttg

SEQ ID NO: 51965 - DNA, 15 bp, Homo sapiens
ccaaatacaaaagtt

SEQ ID NO: 51966 - DNA, 15 bp, Homo sapiens
cccaaatacaaaagt

SEQ ID NO: 51967 - DNA, 15 bp, Homo sapiens
acccaaatacaaaag

SEQ ID NO: 51968 - DNA, 15 bp, Homo sapiens
aacccaaatacaaaa

SEQ ID NO: 51969 - DNA, 15 bp, Homo sapiens
aaacccaaatacaaa

SEQ ID NO: 51970 - DNA, 15 bp, Homo sapiens
aaaacccaaatacaa

SEQ ID NO: 51971 - DNA, 15 bp, Homo sapiens
aaaaacccaaataca

SEQ ID NO: 51972 - DNA, 15 bp, Homo sapiens
caaaaacccaaatac

SEQ ID NO: 51973 - DNA, 15 bp, Homo sapiens
acaaaaacccaaata

SEQ ID NO: 51974 - DNA, 15 bp, Homo sapiens
aacaaaaacccaaat

SEQ ID NO: 51975 - DNA, 15 bp, Homo sapiens
taacaaaaacccaaa

SEQ ID NO: 51976 - DNA, 15 bp, Homo sapiens
ttaacaaaaacccaa

SEQ ID NO: 51977 - DNA, 15 bp, Homo sapiens
cttaacaaaaaccca

SEQ ID NO: 51978 - DNA, 15 bp, Homo sapiens
acttaacaaaaaccc

SEQ ID NO: 51979 - DNA, 15 bp, Homo sapiens
cacttaacaaaaacc

SEQ ID NO: 51980 - DNA, 15 bp, Homo sapiens
acacttaacaaaaac

SEQ ID NO: 51981 - DNA, 15 bp, Homo sapiens
tacacttaacaaaaa

SEQ ID NO: 51982 - DNA, 15 bp, Homo sapiens
gtacacttaacaaaa

SEQ ID NO: 51983 - DNA, 15 bp, Homo sapiens
tgtacacttaacaaa

SEQ ID NO: 51984 - DNA, 15 bp, Homo sapiens
atgtacacttaacaa

SEQ ID NO: 51985 - DNA, 15 bp, Homo sapiens
tatgtacacttaaca

SEQ ID NO: 51986 - DNA, 15 bp, Homo sapiens
atatgtacacttaac

SEQ ID NO: 51987 - DNA, 15 bp, Homo sapiens
tatatgtacacttaa

SEQ ID NO: 51988 - DNA, 15 bp, Homo sapiens
gtatatgtacactta

SEQ ID NO: 51989 - DNA, 15 bp, Homo sapiens
agtatatgtacactt

SEQ ID NO: 51990 - DNA, 15 bp, Homo sapiens
tagtatatgtacact

SEQ ID NO: 51991 - DNA, 15 bp, Homo sapiens
ctagtatatgtacac

SEQ ID NO: 51992 - DNA, 15 bp, Homo sapiens
actagtatatgtaca

SEQ ID NO: 51993 - DNA, 15 bp, Homo sapiens
aactagtatatgtac

SEQ ID NO: 51994 - DNA, 15 bp, Homo sapiens
aaactagtatatgta

SEQ ID NO: 51995 - DNA, 15 bp, Homo sapiens
caaactagtatatgt

SEQ ID NO: 51996 - DNA, 15 bp, Homo sapiens
acaaactagtatatg

SEQ ID NO: 51997 - DNA, 15 bp, Homo sapiens
cacaaactagtatat

SEQ ID NO: 51998 - DNA, 15 bp, Homo sapiens
acacaaactagtata

SEQ ID NO: 51999 - DNA, 15 bp, Homo sapiens
aacacaaactagtat

SEQ ID NO: 52000 - DNA, 15 bp, Homo sapiens
taacacaaactagta

SEQ ID NO: 52001 - DNA, 15 bp, Homo sapiens
ttaacacaaactagt

SEQ ID NO: 52002 - DNA, 15 bp, Homo sapiens
attaacacaaactag

SEQ ID NO: 52003 - DNA, 15 bp, Homo sapiens
aattaacacaaacta

SEQ ID NO: 52004 - DNA, 15 bp, Homo sapiens
taattaacacaaact

SEQ ID NO: 52005 - DNA, 15 bp, Homo sapiens
ttaattaacacaaac

SEQ ID NO: 52006 - DNA, 15 bp, Homo sapiens
tttaattaacacaaa

SEQ ID NO: 52007 - DNA, 15 bp, Homo sapiens
ctttaattaacacaa

SEQ ID NO: 52008 - DNA, 15 bp, Homo sapiens
tctttaattaacaca

SEQ ID NO: 52009 - DNA, 15 bp, Homo sapiens
ctctttaattaacac

SEQ ID NO: 52010 - DNA, 15 bp, Homo sapiens
tctctttaattaaca

SEQ ID NO: 52011 - DNA, 15 bp, Homo sapiens
ttctctttaattaac

SEQ ID NO: 52012 - DNA, 15 bp, Homo sapiens
attctctttaattaa

SEQ ID NO: 52013 - DNA, 15 bp, Homo sapiens
aattctctttaatta

SEQ ID NO: 52014 - DNA, 15 bp, Homo sapiens
aaattctctttaatt

SEQ ID NO: 52015 - DNA, 15 bp, Homo sapiens
aaaattctctttaat

SEQ ID NO: 52016 - DNA, 15 bp, Homo sapiens
aaaaattctctttaa

SEQ ID NO: 52017 - DNA, 15 bp, Homo sapiens
aaaaaattctcttta

SEQ ID NO: 52018 - DNA, 15 bp, Homo sapiens
aaaaaaattctcttt

SEQ ID NO: 52019 - DNA, 15 bp, Homo sapiens
aaaaaaaattctctt

SEQ ID NO: 52020 - DNA, 15 bp, Homo sapiens
aaaaaaaaattctct

SEQ ID NO: 52021 - DNA, 15 bp, Homo sapiens
aaaaaaaaaattctc

SEQ ID NO: 52022 - DNA, 15 bp, Homo sapiens
ctctcaaaaaaaaaa

SEQ ID NO: 52023 - DNA, 15 bp, Homo sapiens
cctctcaaaaaaaaa

SEQ ID NO: 52024 - DNA, 15 bp, Homo sapiens
ccctctcaaaaaaaa

SEQ ID NO: 52025 - DNA, 15 bp, Homo sapiens
tccctctcaaaaaaa

SEQ ID NO: 52026 - DNA, 15 bp, Homo sapiens
ctccctctcaaaaaa

SEQ ID NO: 52027 - DNA, 15 bp, Homo sapiens
actccctctcaaaaa

SEQ ID NO: 52028 - DNA, 15 bp, Homo sapiens
gactccctctcaaaa

SEQ ID NO: 52029 - DNA, 15 bp, Homo sapiens
agactccctctcaaa

SEQ ID NO: 52030 - DNA, 15 bp, Homo sapiens
gagactccctctcaa

SEQ ID NO: 52031 - DNA, 15 bp, Homo sapiens
cgagactccctctca

SEQ ID NO: 52032 - DNA, 15 bp, Homo sapiens
gcgagactccctctc

SEQ ID NO: 52033 - DNA, 15 bp, Homo sapiens
agcgagactccctct

SEQ ID NO: 52034 - DNA, 15 bp, Homo sapiens
gagcgagactccctc

SEQ ID NO: 52035 - DNA, 15 bp, Homo sapiens
ggagcgagactccct

SEQ ID NO: 52036 - DNA, 15 bp, Homo sapiens
cggagcgagactccc

SEQ ID NO: 52037 - DNA, 15 bp, Homo sapiens
acggagcgagactcc

SEQ ID NO: 52038 - DNA, 15 bp, Homo sapiens
aacggagcgagactc

SEQ ID NO: 52039 - DNA, 15 bp, Homo sapiens
caacggagcgagact

SEQ ID NO: 52040 - DNA, 15 bp, Homo sapiens
gcaacggagcgagac

SEQ ID NO: 52041 - DNA, 15 bp, Homo sapiens
ggcaacggagcgaga

SEQ ID NO: 52042 - DNA, 15 bp, Homo sapiens
gggcaacggagcgag

SEQ ID NO: 52043 - DNA, 15 bp, Homo sapiens
tgggcaacggagcga

SEQ ID NO: 52044 - DNA, 15 bp, Homo sapiens
ctgggcaacggagcg

SEQ ID NO: 52045 - DNA, 15 bp, Homo sapiens
cctgggcaacggagc

SEQ ID NO: 52046 - DNA, 15 bp, Homo sapiens
gcctgggcaacggag

SEQ ID NO: 52047 - DNA, 15 bp, Homo sapiens
agcctgggcaacgga

SEQ ID NO: 52048 - DNA, 15 bp, Homo sapiens
cagcctgggcaacgg

SEQ ID NO: 52049 - DNA, 15 bp, Homo sapiens
ggcgccactgcactc

SEQ ID NO: 52050 - DNA, 15 bp, Homo sapiens
tggcgccactgcact

SEQ ID NO: 52051 - DNA, 15 bp, Homo sapiens
atggcgccactgcac

SEQ ID NO: 52052 - DNA, 15 bp, Homo sapiens
gatggcgccactgca

SEQ ID NO: 52053 - DNA, 15 bp, Homo sapiens
agatggcgccactgc

SEQ ID NO: 52054 - DNA, 15 bp, Homo sapiens
gagatggcgccactg

SEQ ID NO: 52055 - DNA, 15 bp, Homo sapiens
cgagatggcgccact

SEQ ID NO: 52056 - DNA, 15 bp, Homo sapiens
ccgagatggcgccac

SEQ ID NO: 52057 - DNA, 15 bp, Homo sapiens
gccgagatggcgcca

SEQ ID NO: 52058 - DNA, 15 bp, Homo sapiens
agccgagatggcgcc

SEQ ID NO: 52059 - DNA, 15 bp, Homo sapiens
gagccgagatggcgc

SEQ ID NO: 52060 - DNA, 15 bp, Homo sapiens
tgagccgagatggcg

SEQ ID NO: 52061 - DNA, 15 bp, Homo sapiens
gtgagccgagatggc

SEQ ID NO: 52062 - DNA, 15 bp, Homo sapiens
agtgagccgagatgg

SEQ ID NO: 52063 - DNA, 15 bp, Homo sapiens
cagtgagccgagatg

SEQ ID NO: 52064 - DNA, 15 bp, Homo sapiens
tccagctactcagga

SEQ ID NO: 52065 - DNA, 15 bp, Homo sapiens
ttccagctactcagg

SEQ ID NO: 52066 - DNA, 15 bp, Homo sapiens
gttccagctactcag

SEQ ID NO: 52067 - DNA, 15 bp, Homo sapiens
agttccagctactca

SEQ ID NO: 52068 - DNA, 15 bp, Homo sapiens
cagttccagctactc

SEQ ID NO: 52069 - DNA, 15 bp, Homo sapiens
gcagttccagctact

SEQ ID NO: 52070 - DNA, 15 bp, Homo sapiens
tgcagttccagctac

SEQ ID NO: 52071 - DNA, 15 bp, Homo sapiens
ctgcagttccagcta

SEQ ID NO: 52072 - DNA, 15 bp, Homo sapiens
cctgcagttccagct

SEQ ID NO: 52073 - DNA, 15 bp, Homo sapiens
acctgcagttccagc

SEQ ID NO: 52074 - DNA, 15 bp, Homo sapiens
cacctgcagttccag

SEQ ID NO: 52075 - DNA, 15 bp, Homo sapiens
gcacctgcagttcca

SEQ ID NO: 52076 - DNA, 15 bp, Homo sapiens
ggcacctgcagttcc

SEQ ID NO: 52077 - DNA, 15 bp, Homo sapiens
gggcacctgcagttc

SEQ ID NO: 52078 - DNA, 15 bp, Homo sapiens
cgggcacctgcagtt

SEQ ID NO: 52079 - DNA, 15 bp, Homo sapiens
gcgggcacctgcagt

SEQ ID NO: 52080 - DNA, 15 bp, Homo sapiens
ggcgggcacctgcag

SEQ ID NO: 52081 - DNA, 15 bp, Homo sapiens
tggcgggcacctgca

SEQ ID NO: 52082 - DNA, 15 bp, Homo sapiens
gtggcgggcacctgc

SEQ ID NO: 52083 - DNA, 15 bp, Homo sapiens
ggtggcgggcacctg

SEQ ID NO: 52084 - DNA, 15 bp, Homo sapiens
tggtggcgggcacct

SEQ ID NO: 52085 - DNA, 15 bp, Homo sapiens
atggtggcgggcacc

SEQ ID NO: 52086 - DNA, 15 bp, Homo sapiens
catggtggcgggcac

SEQ ID NO: 52087 - DNA, 15 bp, Homo sapiens
gcatggtggcgggca

SEQ ID NO: 52088 - DNA, 15 bp, Homo sapiens
ggcatggtggcgggc

SEQ ID NO: 52089 - DNA, 15 bp, Homo sapiens
aaaaaaaattagctg

SEQ ID NO: 52090 - DNA, 15 bp, Homo sapiens
aaaaaaaaattagct

SEQ ID NO: 52091 - DNA, 15 bp, Homo sapiens
aaaaaaaaaattagc

SEQ ID NO: 52092 - DNA, 15 bp, Homo sapiens
aaaaaaaaaaattag

SEQ ID NO: 52093 - DNA, 15 bp, Homo sapiens
aaaaaaaaaaaatta

SEQ ID NO: 52094 - DNA, 15 bp, Homo sapiens
tacaaaaaaaaaaaa

SEQ ID NO: 52095 - DNA, 15 bp, Homo sapiens
atacaaaaaaaaaaa

SEQ ID NO: 52096 - DNA, 15 bp, Homo sapiens
aatacaaaaaaaaaa

SEQ ID NO: 52097 - DNA, 15 bp, Homo sapiens
aaatacaaaaaaaaa

SEQ ID NO: 52098 - DNA, 15 bp, Homo sapiens
aaaatacaaaaaaaa

SEQ ID NO: 52099 - DNA, 15 bp, Homo sapiens
caaaatacaaaaaaa

SEQ ID NO: 52100 - DNA, 15 bp, Homo sapiens
tcaaaatacaaaaaa

SEQ ID NO: 52101 - DNA, 15 bp, Homo sapiens
ctcaaaatacaaaaa

SEQ ID NO: 52102 - DNA, 15 bp, Homo sapiens
actcaaaatacaaaa

SEQ ID NO: 52103 - DNA, 15 bp, Homo sapiens
tactcaaaatacaaa

SEQ ID NO: 52104 - DNA, 15 bp, Homo sapiens
ctactcaaaatacaa

SEQ ID NO: 52105 - DNA, 15 bp, Homo sapiens
tctactcaaaataca

SEQ ID NO: 52106 - DNA, 15 bp, Homo sapiens
ctctactcaaaatac

SEQ ID NO: 52107 - DNA, 15 bp, Homo sapiens
tctctactcaaaata

SEQ ID NO: 52108 - DNA, 15 bp, Homo sapiens
gtctctactcaaaat

SEQ ID NO: 52109 - DNA, 15 bp, Homo sapiens
cgtctctactcaaaa

SEQ ID NO: 52110 - DNA, 15 bp, Homo sapiens
ccgtctctactcaaa

SEQ ID NO: 52111 - DNA, 15 bp, Homo sapiens
cccgtctctactcaa

SEQ ID NO: 52112 - DNA, 15 bp, Homo sapiens
ccccgtctctactca

SEQ ID NO: 52113 - DNA, 15 bp, Homo sapiens
accccgtctctactc

SEQ ID NO: 52114 - DNA, 15 bp, Homo sapiens
agtgaaaccccgtct

SEQ ID NO: 52115 - DNA, 15 bp, Homo sapiens
cagtgaaaccccgtc

SEQ ID NO: 52116 - DNA, 15 bp, Homo sapiens
acagtgaaaccccgt

SEQ ID NO: 52117 - DNA, 15 bp, Homo sapiens
cacagtgaaaccccg

SEQ ID NO: 52118 - DNA, 15 bp, Homo sapiens
acacagtgaaacccc

SEQ ID NO: 52119 - DNA, 15 bp, Homo sapiens
aacacagtgaaaccc

SEQ ID NO: 52120 - DNA, 15 bp, Homo sapiens
taacacagtgaaacc

SEQ ID NO: 52121 - DNA, 15 bp, Homo sapiens
ctaacacagtgaaac

SEQ ID NO: 52122 - DNA, 15 bp, Homo sapiens
gctaacacagtgaaa

SEQ ID NO: 52123 - DNA, 15 bp, Homo sapiens
ggctaacacagtgaa

SEQ ID NO: 52124 - DNA, 15 bp, Homo sapiens
tggctaacacagtga

SEQ ID NO: 52125 - DNA, 15 bp, Homo sapiens
ctggctaacacagtg

SEQ ID NO: 52126 - DNA, 15 bp, Homo sapiens
cctggctaacacagt

SEQ ID NO: 52127 - DNA, 15 bp, Homo sapiens
tcctggctaacacag

SEQ ID NO: 52128 - DNA, 15 bp, Homo sapiens
atcctggctaacaca

SEQ ID NO: 52129 - DNA, 15 bp, Homo sapiens
catcctggctaacac

SEQ ID NO: 52130 - DNA, 15 bp, Homo sapiens
acaggcggatcacga

SEQ ID NO: 52131 - DNA, 15 bp, Homo sapiens
gacaggcggatcacg

SEQ ID NO: 52132 - DNA, 15 bp, Homo sapiens
agacaggcggatcac

SEQ ID NO: 52133 - DNA, 15 bp, Homo sapiens
gagacaggcggatca

SEQ ID NO: 52134 - DNA, 15 bp, Homo sapiens
cgagacaggcggatc

SEQ ID NO: 52135 - DNA, 15 bp, Homo sapiens
ccgagacaggcggat

SEQ ID NO: 52136 - DNA, 15 bp, Homo sapiens
gccgagacaggcgga

SEQ ID NO: 52137 - DNA, 15 bp, Homo sapiens
ggccgagacaggcgg

SEQ ID NO: 52138 - DNA, 15 bp, Homo sapiens
aggccgagacaggcg

SEQ ID NO: 52139 - DNA, 15 bp, Homo sapiens
gaggccgagacaggc

SEQ ID NO: 52140 - DNA, 15 bp, Homo sapiens
ggaggccgagacagg

SEQ ID NO: 52141 - DNA, 15 bp, Homo sapiens
gggaggccgagacag

SEQ ID NO: 52142 - DNA, 15 bp, Homo sapiens
tgggaggccgagaca

SEQ ID NO: 52143 - DNA, 15 bp, Homo sapiens
ttgggaggccgagac

SEQ ID NO: 52144 - DNA, 15 bp, Homo sapiens
tttgggaggccgaga

SEQ ID NO: 52145 - DNA, 15 bp, Homo sapiens
ttcacgcctgtaatc

SEQ ID NO: 52146 - DNA, 15 bp, Homo sapiens
gttcacgcctgtaat

SEQ ID NO: 52147 - DNA, 15 bp, Homo sapiens
ggttcacgcctgtaa

SEQ ID NO: 52148 - DNA, 15 bp, Homo sapiens
tggttcacgcctgta

SEQ ID NO: 52149 - DNA, 15 bp, Homo sapiens
gtggttcacgcctgt

SEQ ID NO: 52150 - DNA, 15 bp, Homo sapiens
agtggttcacgcctg

SEQ ID NO: 52151 - DNA, 15 bp, Homo sapiens
cagtggttcacgcct

SEQ ID NO: 52152 - DNA, 15 bp, Homo sapiens
gcagtggttcacgcc

SEQ ID NO: 52153 - DNA, 15 bp, Homo sapiens
cgcagtggttcacgc

SEQ ID NO: 52154 - DNA, 15 bp, Homo sapiens
gcgcagtggttcacg

SEQ ID NO: 52155 - DNA, 15 bp, Homo sapiens
ggcgcagtggttcac

SEQ ID NO: 52156 - DNA, 15 bp, Homo sapiens
gggcgcagtggttca

SEQ ID NO: 52157 - DNA, 15 bp, Homo sapiens
agggcgcagtggttc

SEQ ID NO: 52158 - DNA, 15 bp, Homo sapiens
cagggcgcagtggtt

SEQ ID NO: 52159 - DNA, 15 bp, Homo sapiens
acagggcgcagtggt

SEQ ID NO: 52160 - DNA, 15 bp, Homo sapiens
aacagggcgcagtgg

SEQ ID NO: 52161 - DNA, 15 bp, Homo sapiens
caacagggcgcagtg

SEQ ID NO: 52162 - DNA, 15 bp, Homo sapiens
tcaacagggcgcagt

SEQ ID NO: 52163 - DNA, 15 bp, Homo sapiens
ctcaacagggcgcag

SEQ ID NO: 52164 - DNA, 15 bp, Homo sapiens
tctcaacagggcgca

SEQ ID NO: 52165 - DNA, 15 bp, Homo sapiens
ttctcaacagggcgc

SEQ ID NO: 52166 - DNA, 15 bp, Homo sapiens
attctcaacagggcg

SEQ ID NO: 52167 - DNA, 15 bp, Homo sapiens
aattctcaacagggc

SEQ ID NO: 52168 - DNA, 15 bp, Homo sapiens
aaattctcaacaggg

SEQ ID NO: 52169 - DNA, 15 bp, Homo sapiens
aaaattctcaacagg

SEQ ID NO: 52170 - DNA, 15 bp, Homo sapiens
aaaaattctcaacag

SEQ ID NO: 52171 - DNA, 15 bp, Homo sapiens
aaaaaattctcaaca

SEQ ID NO: 52172 - DNA, 15 bp, Homo sapiens
aaaaaaattctcaac

SEQ ID NO: 52173 - DNA, 15 bp, Homo sapiens
aaaaaaaattctcaa

SEQ ID NO: 52174 - DNA, 15 bp, Homo sapiens
aaaaaaaaattctca

SEQ ID NO: 52175 - DNA, 15 bp, Homo sapiens
ccaaaaaaaaaaaaa

SEQ ID NO: 52176 - DNA, 15 bp, Homo sapiens
cccaaaaaaaaaaaa

SEQ ID NO: 52177 - DNA, 15 bp, Homo sapiens
tcccaaaaaaaaaaa

SEQ ID NO: 52178 - DNA, 15 bp, Homo sapiens
ctcccaaaaaaaaaa

SEQ ID NO: 52179 - DNA, 15 bp, Homo sapiens
tctcccaaaaaaaaa

SEQ ID NO: 52180 - DNA, 15 bp, Homo sapiens
gtctcccaaaaaaaa

SEQ ID NO: 52181 - DNA, 15 bp, Homo sapiens
tgtctcccaaaaaaa

SEQ ID NO: 52182 - DNA, 15 bp, Homo sapiens
ctgtctcccaaaaaa

SEQ ID NO: 52183 - DNA, 15 bp, Homo sapiens
tctgtctcccaaaaa

SEQ ID NO: 52184 - DNA, 15 bp, Homo sapiens
ctctgtctcccaaaa

SEQ ID NO: 52185 - DNA, 15 bp, Homo sapiens
actctgtctcccaaa

SEQ ID NO: 52186 - DNA, 15 bp, Homo sapiens
aactctgtctcccaa

SEQ ID NO: 52187 - DNA, 15 bp, Homo sapiens
aaactctgtctccca

SEQ ID NO: 52188 - DNA, 15 bp, Homo sapiens
gaaactctgtctccc

SEQ ID NO: 52189 - DNA, 15 bp, Homo sapiens
cgaaactctgtctcc

SEQ ID NO: 52190 - DNA, 15 bp, Homo sapiens
gcgaaactctgtctc

SEQ ID NO: 52191 - DNA, 15 bp, Homo sapiens
agcgaaactctgtct

SEQ ID NO: 52192 - DNA, 15 bp, Homo sapiens
gagcgaaactctgtc

SEQ ID NO: 52193 - DNA, 15 bp, Homo sapiens
agagcgaaactctgt

SEQ ID NO: 52194 - DNA, 15 bp, Homo sapiens
aagagcgaaactctg

SEQ ID NO: 52195 - DNA, 15 bp, Homo sapiens
caagagcgaaactct

SEQ ID NO: 52196 - DNA, 15 bp, Homo sapiens
aacaagagcgaaact

SEQ ID NO: 52197 - DNA, 15 bp, Homo sapiens
cgggcaacaagagcg

SEQ ID NO: 52198 - DNA, 15 bp, Homo sapiens
ccgggcaacaagagc

SEQ ID NO: 52199 - DNA, 15 bp, Homo sapiens
cccgggcaacaagag

SEQ ID NO: 52200 - DNA, 15 bp, Homo sapiens
gcccgggcaacaaga

SEQ ID NO: 52201 - DNA, 15 bp, Homo sapiens
agcccgggcaacaag

SEQ ID NO: 52202 - DNA, 15 bp, Homo sapiens
tagcccgggcaacaa

SEQ ID NO: 52203 - DNA, 15 bp, Homo sapiens
ctagcccgggcaaca

SEQ ID NO: 52204 - DNA, 15 bp, Homo sapiens
tctagcccgggcaac

SEQ ID NO: 52205 - DNA, 15 bp, Homo sapiens
ctctagcccgggcaa

SEQ ID NO: 52206 - DNA, 15 bp, Homo sapiens
actctagcccgggca

SEQ ID NO: 52207 - DNA, 15 bp, Homo sapiens
cactctagcccgggc

SEQ ID NO: 52208 - DNA, 15 bp, Homo sapiens
gcactctagcccggg

SEQ ID NO: 52209 - DNA, 15 bp, Homo sapiens
tgcactctagcccgg

SEQ ID NO: 52210 - DNA, 15 bp, Homo sapiens
ctgcactctagcccg

SEQ ID NO: 52211 - DNA, 15 bp, Homo sapiens
actgcactctagccc

SEQ ID NO: 52212 - DNA, 15 bp, Homo sapiens
tcactgcactctagc

SEQ ID NO: 52213 - DNA, 15 bp, Homo sapiens
gtcactgcactctag

SEQ ID NO: 52214 - DNA, 15 bp, Homo sapiens
tgtcactgcactcta

SEQ ID NO: 52215 - DNA, 15 bp, Homo sapiens
gtgtcactgcactct

SEQ ID NO: 52216 - DNA, 15 bp, Homo sapiens
tgtgtcactgcactc

SEQ ID NO: 52217 - DNA, 15 bp, Homo sapiens
ttgtgtcactgcact

SEQ ID NO: 52218 - DNA, 15 bp, Homo sapiens
attgtgtcactgcac

SEQ ID NO: 52219 - DNA, 15 bp, Homo sapiens
gattgtgtcactgca

SEQ ID NO: 52220 - DNA, 15 bp, Homo sapiens
agattgtgtcactgc

SEQ ID NO: 52221 - DNA, 15 bp, Homo sapiens
gagattgtgtcactg

SEQ ID NO: 52222 - DNA, 15 bp, Homo sapiens
cgagattgtgtcact

SEQ ID NO: 52223 - DNA, 15 bp, Homo sapiens
ccgagattgtgtcac

SEQ ID NO: 52224 - DNA, 15 bp, Homo sapiens
gccgagattgtgtca

SEQ ID NO: 52225 - DNA, 15 bp, Homo sapiens
agccgagattgtgtc

SEQ ID NO: 52226 - DNA, 15 bp, Homo sapiens
gagccgagattgtgt

SEQ ID NO: 52227 - DNA, 15 bp, Homo sapiens
gtgagccgagattgt

SEQ ID NO: 52228 - DNA, 15 bp, Homo sapiens
tgaggctgaggcagg

SEQ ID NO: 52229 - DNA, 15 bp, Homo sapiens
atgaggctgaggcag

SEQ ID NO: 52230 - DNA, 15 bp, Homo sapiens
catgaggctgaggca

SEQ ID NO: 52231 - DNA, 15 bp, Homo sapiens
gcatgaggctgaggc

SEQ ID NO: 52232 - DNA, 15 bp, Homo sapiens
cgcatgaggctgagg

SEQ ID NO: 52233 - DNA, 15 bp, Homo sapiens
acgcatgaggctgag

SEQ ID NO: 52234 - DNA, 15 bp, Homo sapiens
gacgcatgaggctga

SEQ ID NO: 52235 - DNA, 15 bp, Homo sapiens
tgacgcatgaggctg

SEQ ID NO: 52236 - DNA, 15 bp, Homo sapiens
gtgacgcatgaggct

SEQ ID NO: 52237 - DNA, 15 bp, Homo sapiens
ggtgacgcatgaggc

SEQ ID NO: 52238 - DNA, 15 bp, Homo sapiens
tggtgacgcatgagg

SEQ ID NO: 52239 - DNA, 15 bp, Homo sapiens
gtggtgacgcatgag

SEQ ID NO: 52240 - DNA, 15 bp, Homo sapiens
cgtggtgacgcatga

SEQ ID NO: 52241 - DNA, 15 bp, Homo sapiens
gcgtggtgacgcatg

SEQ ID NO: 52242 - DNA, 15 bp, Homo sapiens
ggcgtggtgacgcat

SEQ ID NO: 52243 - DNA, 15 bp, Homo sapiens
gggcgtggtgacgca

SEQ ID NO: 52244 - DNA, 15 bp, Homo sapiens
tgggcgtggtgacgc

SEQ ID NO: 52245 - DNA, 15 bp, Homo sapiens
ctgggcgtggtgacg

SEQ ID NO: 52246 - DNA, 15 bp, Homo sapiens
gctgggcgtggtgac

SEQ ID NO: 52247 - DNA, 15 bp, Homo sapiens
agctgggcgtggtga

SEQ ID NO: 52248 - DNA, 15 bp, Homo sapiens
caaaattagctgggc

SEQ ID NO: 52249 - DNA, 15 bp, Homo sapiens
acaaaattagctggg

SEQ ID NO: 52250 - DNA, 15 bp, Homo sapiens
tacaaaattagctgg

SEQ ID NO: 52251 - DNA, 15 bp, Homo sapiens
atacaaaattagctg

SEQ ID NO: 52252 - DNA, 15 bp, Homo sapiens
aatacaaaattagct

SEQ ID NO: 52253 - DNA, 15 bp, Homo sapiens
gggagttcgagacca

SEQ ID NO: 52254 - DNA, 15 bp, Homo sapiens
tgggagttcgagacc

SEQ ID NO: 52255 - DNA, 15 bp, Homo sapiens
ttgggagttcgagac

SEQ ID NO: 52256 - DNA, 15 bp, Homo sapiens
gttgggagttcgaga

SEQ ID NO: 52257 - DNA, 15 bp, Homo sapiens
ggttgggagttcgag

SEQ ID NO: 52258 - DNA, 15 bp, Homo sapiens
aggttgggagttcga

SEQ ID NO: 52259 - DNA, 15 bp, Homo sapiens
gaggttgggagttcg

SEQ ID NO: 52260 - DNA, 15 bp, Homo sapiens
tgaggttgggagttc

SEQ ID NO: 52261 - DNA, 15 bp, Homo sapiens
ctgaggttgggagtt

SEQ ID NO: 52262 - DNA, 15 bp, Homo sapiens
cctgaggttgggagt

SEQ ID NO: 52263 - DNA, 15 bp, Homo sapiens
acctgaggttgggag

SEQ ID NO: 52264 - DNA, 15 bp, Homo sapiens
cacctgaggttggga

SEQ ID NO: 52265 - DNA, 15 bp, Homo sapiens
ccacctgaggttggg

SEQ ID NO: 52266 - DNA, 15 bp, Homo sapiens
accacctgaggttgg

SEQ ID NO: 52267 - DNA, 15 bp, Homo sapiens
aaccacctgaggttg

SEQ ID NO: 52268 - DNA, 15 bp, Homo sapiens
gaaccacctgaggtt

SEQ ID NO: 52269 - DNA, 15 bp, Homo sapiens
cgaaccacctgaggt

SEQ ID NO: 52270 - DNA, 15 bp, Homo sapiens
gcgaaccacctgagg

SEQ ID NO: 52271 - DNA, 15 bp, Homo sapiens
ggcgaaccacctgag

SEQ ID NO: 52272 - DNA, 15 bp, Homo sapiens
gggcgaaccacctga

SEQ ID NO: 52273 - DNA, 15 bp, Homo sapiens
cgggcgaaccacctg

SEQ ID NO: 52274 - DNA, 15 bp, Homo sapiens
gcgggcgaaccacct

SEQ ID NO: 52275 - DNA, 15 bp, Homo sapiens
ggcgggcgaaccacc

SEQ ID NO: 52276 - DNA, 15 bp, Homo sapiens
aggcgggcgaaccac

SEQ ID NO: 52277 - DNA, 15 bp, Homo sapiens
aaggcgggcgaacca

SEQ ID NO: 52278 - DNA, 15 bp, Homo sapiens
caaggcgggcgaacc

SEQ ID NO: 52279 - DNA, 15 bp, Homo sapiens
ccaaggcgggcgaac

SEQ ID NO: 52280 - DNA, 15 bp, Homo sapiens
gccaaggcgggcgaa

SEQ ID NO: 52281 - DNA, 15 bp, Homo sapiens
ggccaaggcgggcga

SEQ ID NO: 52282 - DNA, 15 bp, Homo sapiens
aggccaaggcgggcg

SEQ ID NO: 52283 - DNA, 15 bp, Homo sapiens
tgcctgcaatcccag

SEQ ID NO: 52284 - DNA, 15 bp, Homo sapiens
atgcctgcaatccca

SEQ ID NO: 52285 - DNA, 15 bp, Homo sapiens
catgcctgcaatccc

SEQ ID NO: 52286 - DNA, 15 bp, Homo sapiens
tcatgcctgcaatcc

SEQ ID NO: 52287 - DNA, 15 bp, Homo sapiens
ctcatgcctgcaatc

SEQ ID NO: 52288 - DNA, 15 bp, Homo sapiens
gctcatgcctgcaat

SEQ ID NO: 52289 - DNA, 15 bp, Homo sapiens
ggctcatgcctgcaa

SEQ ID NO: 52290 - DNA, 15 bp, Homo sapiens
tggctcatgcctgca

SEQ ID NO: 52291 - DNA, 15 bp, Homo sapiens
gtggctcatgcctgc

SEQ ID NO: 52292 - DNA, 15 bp, Homo sapiens
ggctgggcgcagtgg

SEQ ID NO: 52293 - DNA, 15 bp, Homo sapiens
ttggggctgggcgca

SEQ ID NO: 52294 - DNA, 15 bp, Homo sapiens
tttggggctgggcgc

SEQ ID NO: 52295 - DNA, 15 bp, Homo sapiens
atttggggctgggcg

SEQ ID NO: 52296 - DNA, 15 bp, Homo sapiens
aatttggggctgggc

SEQ ID NO: 52297 - DNA, 15 bp, Homo sapiens
aaatttggggctggg

SEQ ID NO: 52298 - DNA, 15 bp, Homo sapiens
aaaatttggggctgg

SEQ ID NO: 52299 - DNA, 15 bp, Homo sapiens
caaaatttggggctg

SEQ ID NO: 52300 - DNA, 15 bp, Homo sapiens
ccaaaatttggggct

SEQ ID NO: 52301 - DNA, 15 bp, Homo sapiens
accaaaatttggggc

SEQ ID NO: 52302 - DNA, 15 bp, Homo sapiens
aaccaaaatttgggg

SEQ ID NO: 52303 - DNA, 15 bp, Homo sapiens
aaaccaaaatttggg

SEQ ID NO: 52304 - DNA, 15 bp, Homo sapiens
aaaaccaaaatttgg

SEQ ID NO: 52305 - DNA, 15 bp, Homo sapiens
aaaaaccaaaatttg

SEQ ID NO: 52306 - DNA, 15 bp, Homo sapiens
caaaaaccaaaattt

SEQ ID NO: 52307 - DNA, 15 bp, Homo sapiens
gcaaaaaccaaaatt

SEQ ID NO: 52308 - DNA, 15 bp, Homo sapiens
agcaaaaaccaaaat

SEQ ID NO: 52309 - DNA, 15 bp, Homo sapiens
aagcaaaaaccaaaa

SEQ ID NO: 52310 - DNA, 15 bp, Homo sapiens
caagcaaaaaccaaa

SEQ ID NO: 52311 - DNA, 15 bp, Homo sapiens
tcaagcaaaaaccaa

SEQ ID NO: 52312 - DNA, 15 bp, Homo sapiens
ttcaagcaaaaacca

SEQ ID NO: 52313 - DNA, 15 bp, Homo sapiens
tttcaagcaaaaacc

SEQ ID NO: 52314 - DNA, 15 bp, Homo sapiens
ttttcaagcaaaaac

SEQ ID NO: 52315 - DNA, 15 bp, Homo sapiens
gttttcaagcaaaaa

SEQ ID NO: 52316 - DNA, 15 bp, Homo sapiens
agttttcaagcaaaa

SEQ ID NO: 52317 - DNA, 15 bp, Homo sapiens
cagttttcaagcaaa

SEQ ID NO: 52318 - DNA, 15 bp, Homo sapiens
tcagttttcaagcaa

SEQ ID NO: 52319 - DNA, 15 bp, Homo sapiens
ctcagttttcaagca

SEQ ID NO: 52320 - DNA, 15 bp, Homo sapiens
cctcagttttcaagc

SEQ ID NO: 52321 - DNA, 15 bp, Homo sapiens
acctcagttttcaag

SEQ ID NO: 52322 - DNA, 15 bp, Homo sapiens
gacctcagttttcaa

SEQ ID NO: 52323 - DNA, 15 bp, Homo sapiens
agacctcagttttca

SEQ ID NO: 52324 - DNA, 15 bp, Homo sapiens
cagacctcagttttc

SEQ ID NO: 52325 - DNA, 15 bp, Homo sapiens
tcagacctcagtttt

SEQ ID NO: 52326 - DNA, 15 bp, Homo sapiens
ttcagacctcagttt

SEQ ID NO: 52327 - DNA, 15 bp, Homo sapiens
attcagacctcagtt

SEQ ID NO: 52328 - DNA, 15 bp, Homo sapiens
aattcagacctcagt

SEQ ID NO: 52329 - DNA, 15 bp, Homo sapiens
gaattcagacctcag

SEQ ID NO: 52330 - DNA, 15 bp, Homo sapiens
tgaattcagacctca

SEQ ID NO: 52331 - DNA, 15 bp, Homo sapiens
ctgaattcagacctc

SEQ ID NO: 52332 - DNA, 15 bp, Homo sapiens
gctgaattcagacct

SEQ ID NO: 52333 - DNA, 15 bp, Homo sapiens
ggctgaattcagacc

SEQ ID NO: 52334 - DNA, 15 bp, Homo sapiens
aggctgaattcagac

SEQ ID NO: 52335 - DNA, 15 bp, Homo sapiens
aaggctgaattcaga

SEQ ID NO: 52336 - DNA, 15 bp, Homo sapiens
gaaggctgaattcag

SEQ ID NO: 52337 - DNA, 15 bp, Homo sapiens
agaaggctgaattca

SEQ ID NO: 52338 - DNA, 15 bp, Homo sapiens
cagaaggctgaattc

SEQ ID NO: 52339 - DNA, 15 bp, Homo sapiens
ccagaaggctgaatt

SEQ ID NO: 52340 - DNA, 15 bp, Homo sapiens
accagaaggctgaat

SEQ ID NO: 52341 - DNA, 15 bp, Homo sapiens
aaccagaaggctgaa

SEQ ID NO: 52342 - DNA, 15 bp, Homo sapiens
caaccagaaggctga

SEQ ID NO: 52343 - DNA, 15 bp, Homo sapiens
gcaaccagaaggctg

SEQ ID NO: 52344 - DNA, 15 bp, Homo sapiens
ggcaaccagaaggct

SEQ ID NO: 52345 - DNA, 15 bp, Homo sapiens
gggcaaccagaaggc

SEQ ID NO: 52346 - DNA, 15 bp, Homo sapiens
ggggcaaccagaagg

SEQ ID NO: 52347 - DNA, 15 bp, Homo sapiens
aggggcaaccagaag

SEQ ID NO: 52348 - DNA, 15 bp, Homo sapiens
gaggggcaaccagaa

SEQ ID NO: 52349 - DNA, 15 bp, Homo sapiens
tgaggggcaaccaga

SEQ ID NO: 52350 - DNA, 15 bp, Homo sapiens
ttgaggggcaaccag

SEQ ID NO: 52351 - DNA, 15 bp, Homo sapiens
cttgaggggcaacca

SEQ ID NO: 52352 - DNA, 15 bp, Homo sapiens
tcttgaggggcaacc

SEQ ID NO: 52353 - DNA, 15 bp, Homo sapiens
ctcttgaggggcaac

SEQ ID NO: 52354 - DNA, 15 bp, Homo sapiens
actcttgaggggcaa

SEQ ID NO: 52355 - DNA, 15 bp, Homo sapiens
gactcttgaggggca

SEQ ID NO: 52356 - DNA, 15 bp, Homo sapiens
tgactcttgaggggc

SEQ ID NO: 52357 - DNA, 15 bp, Homo sapiens
ctgactcttgagggg

SEQ ID NO: 52358 - DNA, 15 bp, Homo sapiens
actgactcttgaggg

SEQ ID NO: 52359 - DNA, 15 bp, Homo sapiens
aactgactcttgagg

SEQ ID NO: 52360 - DNA, 15 bp, Homo sapiens
aaactgactcttgag

SEQ ID NO: 52361 - DNA, 15 bp, Homo sapiens
taaactgactcttga

SEQ ID NO: 52362 - DNA, 15 bp, Homo sapiens
ttaaactgactcttg

SEQ ID NO: 52363 - DNA, 15 bp, Homo sapiens
tttaaactgactctt

SEQ ID NO: 52364 - DNA, 15 bp, Homo sapiens
atttaaactgactct

SEQ ID NO: 52365 - DNA, 15 bp, Homo sapiens
catttaaactgactc

SEQ ID NO: 52366 - DNA, 15 bp, Homo sapiens
acatttaaactgact

SEQ ID NO: 52367 - DNA, 15 bp, Homo sapiens
aacatttaaactgac

SEQ ID NO: 52368 - DNA, 15 bp, Homo sapiens
caacatttaaactga

SEQ ID NO: 52369 - DNA, 15 bp, Homo sapiens
ccaacatttaaactg

SEQ ID NO: 52370 - DNA, 15 bp, Homo sapiens
accaacatttaaact

SEQ ID NO: 52371 - DNA, 15 bp, Homo sapiens
gaccaacatttaaac

SEQ ID NO: 52372 - DNA, 15 bp, Homo sapiens
tgaccaacatttaaa

SEQ ID NO: 52373 - DNA, 15 bp, Homo sapiens
atgaccaacatttaa

SEQ ID NO: 52374 - DNA, 15 bp, Homo sapiens
catgaccaacattta

SEQ ID NO: 52375 - DNA, 15 bp, Homo sapiens
acatgaccaacattt

SEQ ID NO: 52376 - DNA, 15 bp, Homo sapiens
aacatgaccaacatt

SEQ ID NO: 52377 - DNA, 15 bp, Homo sapiens
taacatgaccaacat

SEQ ID NO: 52378 - DNA, 15 bp, Homo sapiens
ctaacatgaccaaca

SEQ ID NO: 52379 - DNA, 15 bp, Homo sapiens
actaacatgaccaac

SEQ ID NO: 52380 - DNA, 15 bp, Homo sapiens
aactaacatgaccaa

SEQ ID NO: 52381 - DNA, 15 bp, Homo sapiens
caactaacatgacca

SEQ ID NO: 52382 - DNA, 15 bp, Homo sapiens
acaactaacatgacc

SEQ ID NO: 52383 - DNA, 15 bp, Homo sapiens
gacaactaacatgac

SEQ ID NO: 52384 - DNA, 15 bp, Homo sapiens
tgacaactaacatga

SEQ ID NO: 52385 - DNA, 15 bp, Homo sapiens
ctgacaactaacatg

SEQ ID NO: 52386 - DNA, 15 bp, Homo sapiens
actgacaactaacat

SEQ ID NO: 52387 - DNA, 15 bp, Homo sapiens
cactgacaactaaca

SEQ ID NO: 52388 - DNA, 15 bp, Homo sapiens
tcactgacaactaac

SEQ ID NO: 52389 - DNA, 15 bp, Homo sapiens
ttcactgacaactaa

SEQ ID NO: 52390 - DNA, 15 bp, Homo sapiens
tttcactgacaacta

SEQ ID NO: 52391 - DNA, 15 bp, Homo sapiens
ttttcactgacaact

SEQ ID NO: 52392 - DNA, 15 bp, Homo sapiens
gttttcactgacaac

SEQ ID NO: 52393 - DNA, 15 bp, Homo sapiens
tgttttcactgacaa

SEQ ID NO: 52394 - DNA, 15 bp, Homo sapiens
ttgttttcactgaca

SEQ ID NO: 52395 - DNA, 15 bp, Homo sapiens
attgttttcactgac

SEQ ID NO: 52396 - DNA, 15 bp, Homo sapiens
cattgttttcactga

SEQ ID NO: 52397 - DNA, 15 bp, Homo sapiens
ccattgttttcactg

SEQ ID NO: 52398 - DNA, 15 bp, Homo sapiens
accattgttttcact

SEQ ID NO: 52399 - DNA, 15 bp, Homo sapiens
caccattgttttcac

SEQ ID NO: 52400 - DNA, 15 bp, Homo sapiens
tcaccattgttttca

SEQ ID NO: 52401 - DNA, 15 bp, Homo sapiens
ctcaccattgttttc

SEQ ID NO: 52402 - DNA, 15 bp, Homo sapiens
cctcaccattgtttt

SEQ ID NO: 52403 - DNA, 15 bp, Homo sapiens
gcctcaccattgttt

SEQ ID NO: 52404 - DNA, 15 bp, Homo sapiens
agcctcaccattgtt

SEQ ID NO: 52405 - DNA, 15 bp, Homo sapiens
cagcctcaccattgt

SEQ ID NO: 52406 - DNA, 15 bp, Homo sapiens
ccagcctcaccattg

SEQ ID NO: 52407 - DNA, 15 bp, Homo sapiens
gccagcctcaccatt

SEQ ID NO: 52408 - DNA, 15 bp, Homo sapiens
tgccagcctcaccat

SEQ ID NO: 52409 - DNA, 15 bp, Homo sapiens
atgccagcctcacca

SEQ ID NO: 52410 - DNA, 15 bp, Homo sapiens
catgccagcctcacc

SEQ ID NO: 52411 - DNA, 15 bp, Homo sapiens
tcatgccagcctcac

SEQ ID NO: 52412 - DNA, 15 bp, Homo sapiens
ctcatgccagcctca

SEQ ID NO: 52413 - DNA, 15 bp, Homo sapiens
tctcatgccagcctc

SEQ ID NO: 52414 - DNA, 15 bp, Homo sapiens
tgagcctcagttggc

SEQ ID NO: 52415 - DNA, 15 bp, Homo sapiens
ctgagcctcagttgg

SEQ ID NO: 52416 - DNA, 15 bp, Homo sapiens
tctgagcctcagttg

SEQ ID NO: 52417 - DNA, 15 bp, Homo sapiens
atctgagcctcagtt

SEQ ID NO: 52418 - DNA, 15 bp, Homo sapiens
tatctgagcctcagt

SEQ ID NO: 52419 - DNA, 15 bp, Homo sapiens
ttatctgagcctcag

SEQ ID NO: 52420 - DNA, 15 bp, Homo sapiens
cttatctgagcctca

SEQ ID NO: 52421 - DNA, 15 bp, Homo sapiens
acttatctgagcctc

SEQ ID NO: 52422 - DNA, 15 bp, Homo sapiens
aacttatctgagcct

SEQ ID NO: 52423 - DNA, 15 bp, Homo sapiens
taacttatctgagcc

SEQ ID NO: 52424 - DNA, 15 bp, Homo sapiens
gtaacttatctgagc

SEQ ID NO: 52425 - DNA, 15 bp, Homo sapiens
agtaacttatctgag

SEQ ID NO: 52426 - DNA, 15 bp, Homo sapiens
aagtaacttatctga

SEQ ID NO: 52427 - DNA, 15 bp, Homo sapiens
taagtaacttatctg

SEQ ID NO: 52428 - DNA, 15 bp, Homo sapiens
ataagtaacttatct

SEQ ID NO: 52429 - DNA, 15 bp, Homo sapiens
aataagtaacttatc

SEQ ID NO: 52430 - DNA, 15 bp, Homo sapiens
taataagtaacttat

SEQ ID NO: 52431 - DNA, 15 bp, Homo sapiens
ataataagtaactta

SEQ ID NO: 52432 - DNA, 15 bp, Homo sapiens
tataataagtaactt

SEQ ID NO: 52433 - DNA, 15 bp, Homo sapiens
atataataagtaact

SEQ ID NO: 52434 - DNA, 15 bp, Homo sapiens
catataataagtaac

SEQ ID NO: 52435 - DNA, 15 bp, Homo sapiens
tcatataataagtaa

SEQ ID NO: 52436 - DNA, 15 bp, Homo sapiens
gtcatataataagta

SEQ ID NO: 52437 - DNA, 15 bp, Homo sapiens
agtcatataataagt

SEQ ID NO: 52438 - DNA, 15 bp, Homo sapiens
tagtcatataataag

SEQ ID NO: 52439 - DNA, 15 bp, Homo sapiens
ctagtcatataataa

SEQ ID NO: 52440 - DNA, 15 bp, Homo sapiens
actagtcatataata

SEQ ID NO: 52441 - DNA, 15 bp, Homo sapiens
tactagtcatataat

SEQ ID NO: 52442 - DNA, 15 bp, Homo sapiens
ctactagtcatataa

SEQ ID NO: 52443 - DNA, 15 bp, Homo sapiens
actactagtcatata

SEQ ID NO: 52444 - DNA, 15 bp, Homo sapiens
cactactagtcatat

SEQ ID NO: 52445 - DNA, 15 bp, Homo sapiens
ccactactagtcata

SEQ ID NO: 52446 - DNA, 15 bp, Homo sapiens
accactactagtcat

SEQ ID NO: 52447 - DNA, 15 bp, Homo sapiens
taccactactagtca

SEQ ID NO: 52448 - DNA, 15 bp, Homo sapiens
ctaccactactagtc

SEQ ID NO: 52449 - DNA, 15 bp, Homo sapiens
tctaccactactagt

SEQ ID NO: 52450 - DNA, 15 bp, Homo sapiens
ctctaccactactag

SEQ ID NO: 52451 - DNA, 15 bp, Homo sapiens
gctctaccactacta

SEQ ID NO: 52452 - DNA, 15 bp, Homo sapiens
agctctaccactact

SEQ ID NO: 52453 - DNA, 15 bp, Homo sapiens
cagctctaccactac

SEQ ID NO: 52454 - DNA, 15 bp, Homo sapiens
ccagctctaccacta

SEQ ID NO: 52455 - DNA, 15 bp, Homo sapiens
cccagctctaccact

SEQ ID NO: 52456 - DNA, 15 bp, Homo sapiens
ccccagctctaccac

SEQ ID NO: 52457 - DNA, 15 bp, Homo sapiens
accccagctctacca

SEQ ID NO: 52458 - DNA, 15 bp, Homo sapiens
aaccccagctctacc

SEQ ID NO: 52459 - DNA, 15 bp, Homo sapiens
aaaccccagctctac

SEQ ID NO: 52460 - DNA, 15 bp, Homo sapiens
gaaaccccagctcta

SEQ ID NO: 52461 - DNA, 15 bp, Homo sapiens
tgaaaccccagctct

SEQ ID NO: 52462 - DNA, 15 bp, Homo sapiens
ttgaaaccccagctc

SEQ ID NO: 52463 - DNA, 15 bp, Homo sapiens
gttgaaaccccagct

SEQ ID NO: 52464 - DNA, 15 bp, Homo sapiens
agttgaaaccccagc

SEQ ID NO: 52465 - DNA, 15 bp, Homo sapiens
tagttgaaaccccag

SEQ ID NO: 52466 - DNA, 15 bp, Homo sapiens
ttagttgaaacccca

SEQ ID NO: 52467 - DNA, 15 bp, Homo sapiens
cttagttgaaacccc

SEQ ID NO: 52468 - DNA, 15 bp, Homo sapiens
tcttagttgaaaccc

SEQ ID NO: 52469 - DNA, 15 bp, Homo sapiens
ttcttagttgaaacc

SEQ ID NO: 52470 - DNA, 15 bp, Homo sapiens
gttcttagttgaaac

SEQ ID NO: 52471 - DNA, 15 bp, Homo sapiens
agttcttagttgaaa

SEQ ID NO: 52472 - DNA, 15 bp, Homo sapiens
gagttcttagttgaa

SEQ ID NO: 52473 - DNA, 15 bp, Homo sapiens
agagttcttagttga

SEQ ID NO: 52474 - DNA, 15 bp, Homo sapiens
gagagttcttagttg

SEQ ID NO: 52475 - DNA, 15 bp, Homo sapiens
agagagttcttagtt

SEQ ID NO: 52476 - DNA, 15 bp, Homo sapiens
cagagagttcttagt

SEQ ID NO: 52477 - DNA, 15 bp, Homo sapiens
ccagagagttcttag

SEQ ID NO: 52478 - DNA, 15 bp, Homo sapiens
gccagagagttctta

SEQ ID NO: 52479 - DNA, 15 bp, Homo sapiens
agccagagagttctt

SEQ ID NO: 52480 - DNA, 15 bp, Homo sapiens
gagccagagagttct

SEQ ID NO: 52481 - DNA, 15 bp, Homo sapiens
ggagccagagagttc

SEQ ID NO: 52482 - DNA, 15 bp, Homo sapiens
tggagccagagagtt

SEQ ID NO: 52483 - DNA, 15 bp, Homo sapiens
ttggagccagagagt

SEQ ID NO: 52484 - DNA, 15 bp, Homo sapiens
tttggagccagagag

SEQ ID NO: 52485 - DNA, 15 bp, Homo sapiens
ctttggagccagaga

SEQ ID NO: 52486 - DNA, 15 bp, Homo sapiens
gctttggagccagag

SEQ ID NO: 52487 - DNA, 15 bp, Homo sapiens
ggctttggagccaga

SEQ ID NO: 52488 - DNA, 15 bp, Homo sapiens
gggctttggagccag

SEQ ID NO: 52489 - DNA, 15 bp, Homo sapiens
agggctttggagcca

SEQ ID NO: 52490 - DNA, 15 bp, Homo sapiens
aagggctttggagcc

SEQ ID NO: 52491 - DNA, 15 bp, Homo sapiens
caagggctttggagc

SEQ ID NO: 52492 - DNA, 15 bp, Homo sapiens
acaagggctttggag

SEQ ID NO: 52493 - DNA, 15 bp, Homo sapiens
tacaagggctttgga

SEQ ID NO: 52494 - DNA, 15 bp, Homo sapiens
ttacaagggctttgg

SEQ ID NO: 52495 - DNA, 15 bp, Homo sapiens
cttacaagggctttg

SEQ ID NO: 52496 - DNA, 15 bp, Homo sapiens
acttacaagggcttt

SEQ ID NO: 52497 - DNA, 15 bp, Homo sapiens
aacttacaagggctt

SEQ ID NO: 52498 - DNA, 15 bp, Homo sapiens
aaacttacaagggct

SEQ ID NO: 52499 - DNA, 15 bp, Homo sapiens
gaaacttacaagggc

SEQ ID NO: 52500 - DNA, 15 bp, Homo sapiens
agaaacttacaaggg

SEQ ID NO: 52501 - DNA, 15 bp, Homo sapiens
tagaaacttacaagg

SEQ ID NO: 52502 - DNA, 15 bp, Homo sapiens
atagaaacttacaag

SEQ ID NO: 52503 - DNA, 15 bp, Homo sapiens
gatagaaacttacaa

SEQ ID NO: 52504 - DNA, 15 bp, Homo sapiens
tgatagaaacttaca

SEQ ID NO: 52505 - DNA, 15 bp, Homo sapiens
ctgatagaaacttac

SEQ ID NO: 52506 - DNA, 15 bp, Homo sapiens
actgatagaaactta

SEQ ID NO: 52507 - DNA, 15 bp, Homo sapiens
tactgatagaaactt

SEQ ID NO: 52508 - DNA, 15 bp, Homo sapiens
atactgatagaaact

SEQ ID NO: 52509 - DNA, 15 bp, Homo sapiens
tatactgatagaaac

SEQ ID NO: 52510 - DNA, 15 bp, Homo sapiens
atatactgatagaaa

SEQ ID NO: 52511 - DNA, 15 bp, Homo sapiens
catatactgatagaa

SEQ ID NO: 52512 - DNA, 15 bp, Homo sapiens
tcatatactgataga

SEQ ID NO: 52513 - DNA, 15 bp, Homo sapiens
gtcatatactgatag

SEQ ID NO: 52514 - DNA, 15 bp, Homo sapiens
ggtcatatactgata

SEQ ID NO: 52515 - DNA, 15 bp, Homo sapiens
tggtcatatactgat

SEQ ID NO: 52516 - DNA, 15 bp, Homo sapiens
atggtcatatactga

SEQ ID NO: 52517 - DNA, 15 bp, Homo sapiens
catggtcatatactg

SEQ ID NO: 52518 - DNA, 15 bp, Homo sapiens
gcatggtcatatact

SEQ ID NO: 52519 - DNA, 15 bp, Homo sapiens
tgcatggtcatatac

SEQ ID NO: 52520 - DNA, 15 bp, Homo sapiens
atgcatggtcatata

SEQ ID NO: 52521 - DNA, 15 bp, Homo sapiens
tatgcatggtcatat

SEQ ID NO: 52522 - DNA, 15 bp, Homo sapiens
atatgcatggtcata

SEQ ID NO: 52523 - DNA, 15 bp, Homo sapiens
catatgcatggtcat

SEQ ID NO: 52524 - DNA, 15 bp, Homo sapiens
tcatatgcatggtca

SEQ ID NO: 52525 - DNA, 15 bp, Homo sapiens
ctcatatgcatggtc

SEQ ID NO: 52526 - DNA, 15 bp, Homo sapiens
gctcatatgcatggt

SEQ ID NO: 52527 - DNA, 15 bp, Homo sapiens
tgctcatatgcatgg

SEQ ID NO: 52528 - DNA, 15 bp, Homo sapiens
atgctcatatgcatg

SEQ ID NO: 52529 - DNA, 15 bp, Homo sapiens
aatgctcatatgcat

SEQ ID NO: 52530 - DNA, 15 bp, Homo sapiens
aaatgctcatatgca

SEQ ID NO: 52531 - DNA, 15 bp, Homo sapiens
caaatgctcatatgc

SEQ ID NO: 52532 - DNA, 15 bp, Homo sapiens
acaaatgctcatatg

SEQ ID NO: 52533 - DNA, 15 bp, Homo sapiens
gacaaatgctcatat

SEQ ID NO: 52534 - DNA, 15 bp, Homo sapiens
agacaaatgctcata

SEQ ID NO: 52535 - DNA, 15 bp, Homo sapiens
gagacaaatgctcat

SEQ ID NO: 52536 - DNA, 15 bp, Homo sapiens
agagacaaatgctca

SEQ ID NO: 52537 - DNA, 15 bp, Homo sapiens
gagagacaaatgctc

SEQ ID NO: 52538 - DNA, 15 bp, Homo sapiens
ggagagacaaatgct

SEQ ID NO: 52539 - DNA, 15 bp, Homo sapiens
aggagagacaaatgc

SEQ ID NO: 52540 - DNA, 15 bp, Homo sapiens
gaggagagacaaatg

SEQ ID NO: 52541 - DNA, 15 bp, Homo sapiens
agaggagagacaaat

SEQ ID NO: 52542 - DNA, 15 bp, Homo sapiens
aagaggagagacaaa

SEQ ID NO: 52543 - DNA, 15 bp, Homo sapiens
gaagaggagagacaa

SEQ ID NO: 52544 - DNA, 15 bp, Homo sapiens
agaagaggagagaca

SEQ ID NO: 52545 - DNA, 15 bp, Homo sapiens
aagaagaggagagac

SEQ ID NO: 52546 - DNA, 15 bp, Homo sapiens
gaagaagaggagaga

SEQ ID NO: 52547 - DNA, 15 bp, Homo sapiens
tgaagaagaggagag

SEQ ID NO: 52548 - DNA, 15 bp, Homo sapiens
atgaagaagaggaga

SEQ ID NO: 52549 - DNA, 15 bp, Homo sapiens
tatgaagaagaggag

SEQ ID NO: 52550 - DNA, 15 bp, Homo sapiens
ctatgaagaagagga

SEQ ID NO: 52551 - DNA, 15 bp, Homo sapiens
gctatgaagaagagg

SEQ ID NO: 52552 - DNA, 15 bp, Homo sapiens
agctatgaagaagag

SEQ ID NO: 52553 - DNA, 15 bp, Homo sapiens
gagctatgaagaaga

SEQ ID NO: 52554 - DNA, 15 bp, Homo sapiens
ggagctatgaagaag

SEQ ID NO: 52555 - DNA, 15 bp, Homo sapiens
aggagctatgaagaa

SEQ ID NO: 52556 - DNA, 15 bp, Homo sapiens
aaggagctatgaaga

SEQ ID NO: 52557 - DNA, 15 bp, Homo sapiens
taaggagctatgaag

SEQ ID NO: 52558 - DNA, 15 bp, Homo sapiens
gtaaggagctatgaa

SEQ ID NO: 52559 - DNA, 15 bp, Homo sapiens
agtaaggagctatga

SEQ ID NO: 52560 - DNA, 15 bp, Homo sapiens
cagtaaggagctatg

SEQ ID NO: 52561 - DNA, 15 bp, Homo sapiens
gcagtaaggagctat

SEQ ID NO: 52562 - DNA, 15 bp, Homo sapiens
tgcagtaaggagcta

SEQ ID NO: 52563 - DNA, 15 bp, Homo sapiens
ttgcagtaaggagct

SEQ ID NO: 52564 - DNA, 15 bp, Homo sapiens
attgcagtaaggagc

SEQ ID NO: 52565 - DNA, 15 bp, Homo sapiens
cattgcagtaaggag

SEQ ID NO: 52566 - DNA, 15 bp, Homo sapiens
tcattgcagtaagga

SEQ ID NO: 52567 - DNA, 15 bp, Homo sapiens
atcattgcagtaagg

SEQ ID NO: 52568 - DNA, 15 bp, Homo sapiens
aatcattgcagtaag

SEQ ID NO: 52569 - DNA, 15 bp, Homo sapiens
aaatcattgcagtaa

SEQ ID NO: 52570 - DNA, 15 bp, Homo sapiens
caaatcattgcagta

SEQ ID NO: 52571 - DNA, 15 bp, Homo sapiens
tcaaatcattgcagt

SEQ ID NO: 52572 - DNA, 15 bp, Homo sapiens
atcaaatcattgcag

SEQ ID NO: 52573 - DNA, 15 bp, Homo sapiens
catcaaatcattgca

SEQ ID NO: 52574 - DNA, 15 bp, Homo sapiens
tcatcaaatcattgc

SEQ ID NO: 52575 - DNA, 15 bp, Homo sapiens
ttcatcaaatcattg

SEQ ID NO: 52576 - DNA, 15 bp, Homo sapiens
cttcatcaaatcatt

SEQ ID NO: 52577 - DNA, 15 bp, Homo sapiens
tcttcatcaaatcat

SEQ ID NO: 52578 - DNA, 15 bp, Homo sapiens
ttcttcatcaaatca

SEQ ID NO: 52579 - DNA, 15 bp, Homo sapiens
attcttcatcaaatc

SEQ ID NO: 52580 - DNA, 15 bp, Homo sapiens
aattcttcatcaaat

SEQ ID NO: 52581 - DNA, 15 bp, Homo sapiens
aaattcttcatcaaa

SEQ ID NO: 52582 - DNA, 15 bp, Homo sapiens
caaattcttcatcaa

SEQ ID NO: 52583 - DNA, 15 bp, Homo sapiens
ccaaattcttcatca

SEQ ID NO: 52584 - DNA, 15 bp, Homo sapiens
tccaaattcttcatc

SEQ ID NO: 52585 - DNA, 15 bp, Homo sapiens
ctccaaattcttcat

SEQ ID NO: 52586 - DNA, 15 bp, Homo sapiens
actccaaattcttca

SEQ ID NO: 52587 - DNA, 15 bp, Homo sapiens
gactccaaattcttc

SEQ ID NO: 52588 - DNA, 15 bp, Homo sapiens
agactccaaattctt

SEQ ID NO: 52589 - DNA, 15 bp, Homo sapiens
tagactccaaattct

SEQ ID NO: 52590 - DNA, 15 bp, Homo sapiens
ctagactccaaattc

SEQ ID NO: 52591 - DNA, 15 bp, Homo sapiens
actagactccaaatt

SEQ ID NO: 52592 - DNA, 15 bp, Homo sapiens
gactagactccaaat

SEQ ID NO: 52593 - DNA, 15 bp, Homo sapiens
ggactagactccaaa

SEQ ID NO: 52594 - DNA, 15 bp, Homo sapiens
aggactagactccaa

SEQ ID NO: 52595 - DNA, 15 bp, Homo sapiens
gaggactagactcca

SEQ ID NO: 52596 - DNA, 15 bp, Homo sapiens
agaggactagactcc

SEQ ID NO: 52597 - DNA, 15 bp, Homo sapiens
aagaggactagactc

SEQ ID NO: 52598 - DNA, 15 bp, Homo sapiens
aaagaggactagact

SEQ ID NO: 52599 - DNA, 15 bp, Homo sapiens
gaaagaggactagac

SEQ ID NO: 52600 - DNA, 15 bp, Homo sapiens
ggaaagaggactaga

SEQ ID NO: 52601 - DNA, 15 bp, Homo sapiens
gggaaagaggactag

SEQ ID NO: 52602 - DNA, 15 bp, Homo sapiens
cgggaaagaggacta

SEQ ID NO: 52603 - DNA, 15 bp, Homo sapiens
gcgggaaagaggact

SEQ ID NO: 52604 - DNA, 15 bp, Homo sapiens
tgcgggaaagaggac

SEQ ID NO: 52605 - DNA, 15 bp, Homo sapiens
atgcgggaaagagga

SEQ ID NO: 52606 - DNA, 15 bp, Homo sapiens
aatgcgggaaagagg

SEQ ID NO: 52607 - DNA, 15 bp, Homo sapiens
taatgcgggaaagag

SEQ ID NO: 52608 - DNA, 15 bp, Homo sapiens
ataatgcgggaaaga

SEQ ID NO: 52609 - DNA, 15 bp, Homo sapiens
gataatgcgggaaag

SEQ ID NO: 52610 - DNA, 15 bp, Homo sapiens
agataatgcgggaaa

SEQ ID NO: 52611 - DNA, 15 bp, Homo sapiens
cagataatgcgggaa

SEQ ID NO: 52612 - DNA, 15 bp, Homo sapiens
ccagataatgcggga

SEQ ID NO: 52613 - DNA, 15 bp, Homo sapiens
tccagataatgcggg

SEQ ID NO: 52614 - DNA, 15 bp, Homo sapiens
ttccagataatgcgg

SEQ ID NO: 52615 - DNA, 15 bp, Homo sapiens
tttccagataatgcg

SEQ ID NO: 52616 - DNA, 15 bp, Homo sapiens
ctttccagataatgc

SEQ ID NO: 52617 - DNA, 15 bp, Homo sapiens
gctttccagataatg

SEQ ID NO: 52618 - DNA, 15 bp, Homo sapiens
agctttccagataat

SEQ ID NO: 52619 - DNA, 15 bp, Homo sapiens
gagctttccagataa

SEQ ID NO: 52620 - DNA, 15 bp, Homo sapiens
agagctttccagata

SEQ ID NO: 52621 - DNA, 15 bp, Homo sapiens
cagagctttccagat

SEQ ID NO: 52622 - DNA, 15 bp, Homo sapiens
tcagagctttccaga

SEQ ID NO: 52623 - DNA, 15 bp, Homo sapiens
ttcagagctttccag

SEQ ID NO: 52624 - DNA, 15 bp, Homo sapiens
cttcagagctttcca

SEQ ID NO: 52625 - DNA, 15 bp, Homo sapiens
gcttcagagctttcc

SEQ ID NO: 52626 - DNA, 15 bp, Homo sapiens
ggcttcagagctttc

SEQ ID NO: 52627 - DNA, 15 bp, Homo sapiens
cggcttcagagcttt

SEQ ID NO: 52628 - DNA, 15 bp, Homo sapiens
gcggcttcagagctt

SEQ ID NO: 52629 - DNA, 15 bp, Homo sapiens
agcggcttcagagct

SEQ ID NO: 52630 - DNA, 15 bp, Homo sapiens
cagcggcttcagagc

SEQ ID NO: 52631 - DNA, 15 bp, Homo sapiens
gcagcggcttcagag

SEQ ID NO: 52632 - DNA, 15 bp, Homo sapiens
agcagcggcttcaga

SEQ ID NO: 52633 - DNA, 15 bp, Homo sapiens
gagcagcggcttcag

SEQ ID NO: 52634 - DNA, 15 bp, Homo sapiens
cgagcagcggcttca

SEQ ID NO: 52635 - DNA, 15 bp, Homo sapiens
acgagcagcggcttc

SEQ ID NO: 52636 - DNA, 15 bp, Homo sapiens
aacgagcagcggctt

SEQ ID NO: 52637 - DNA, 15 bp, Homo sapiens
caacgagcagcggct

SEQ ID NO: 52638 - DNA, 15 bp, Homo sapiens
ccaacgagcagcggc

SEQ ID NO: 52639 - DNA, 15 bp, Homo sapiens
cccaacgagcagcgg

SEQ ID NO: 52640 - DNA, 15 bp, Homo sapiens
tcccaacgagcagcg

SEQ ID NO: 52641 - DNA, 15 bp, Homo sapiens
ttcccaacgagcagc

SEQ ID NO: 52642 - DNA, 15 bp, Homo sapiens
cttcccaacgagcag

SEQ ID NO: 52643 - DNA, 15 bp, Homo sapiens
tcttcccaacgagca

SEQ ID NO: 52644 - DNA, 15 bp, Homo sapiens
atcttcccaacgagc

SEQ ID NO: 52645 - DNA, 15 bp, Homo sapiens
gatcttcccaacgag

SEQ ID NO: 52646 - DNA, 15 bp, Homo sapiens
ggatcttcccaacga

SEQ ID NO: 52647 - DNA, 15 bp, Homo sapiens
aggatcttcccaacg

SEQ ID NO: 52648 - DNA, 15 bp, Homo sapiens
caggatcttcccaac

SEQ ID NO: 52649 - DNA, 15 bp, Homo sapiens
acaggatcttcccaa

SEQ ID NO: 52650 - DNA, 15 bp, Homo sapiens
tacaggatcttccca

SEQ ID NO: 52651 - DNA, 15 bp, Homo sapiens
atacaggatcttccc

SEQ ID NO: 52652 - DNA, 15 bp, Homo sapiens
tatacaggatcttcc

SEQ ID NO: 52653 - DNA, 15 bp, Homo sapiens
gtatacaggatcttc

SEQ ID NO: 52654 - DNA, 15 bp, Homo sapiens
tgtatacaggatctt

SEQ ID NO: 52655 - DNA, 15 bp, Homo sapiens
gtgtatacaggatct

SEQ ID NO: 52656 - DNA, 15 bp, Homo sapiens
ggtgtatacaggatc

SEQ ID NO: 52657 - DNA, 15 bp, Homo sapiens
aggtgtatacaggat

SEQ ID NO: 52658 - DNA, 15 bp, Homo sapiens
caggtgtatacagga

SEQ ID NO: 52659 - DNA, 15 bp, Homo sapiens
tcaggtgtatacagg

SEQ ID NO: 52660 - DNA, 15 bp, Homo sapiens
gtcaggtgtatacag

SEQ ID NO: 52661 - DNA, 15 bp, Homo sapiens
tgtcaggtgtataca

SEQ ID NO: 52662 - DNA, 15 bp, Homo sapiens
gtgtcaggtgtatac

SEQ ID NO: 52663 - DNA, 15 bp, Homo sapiens
agtgtcaggtgtata

SEQ ID NO: 52664 - DNA, 15 bp, Homo sapiens
gagtgtcaggtgtat

SEQ ID NO: 52665 - DNA, 15 bp, Homo sapiens
ggagtgtcaggtgta

SEQ ID NO: 52666 - DNA, 15 bp, Homo sapiens
tggagtgtcaggtgt

SEQ ID NO: 52667 - DNA, 15 bp, Homo sapiens
ctggagtgtcaggtg

SEQ ID NO: 52668 - DNA, 15 bp, Homo sapiens
gctggagtgtcaggt

SEQ ID NO: 52669 - DNA, 15 bp, Homo sapiens
ggctggagtgtcagg

SEQ ID NO: 52670 - DNA, 15 bp, Homo sapiens
tggctggagtgtcag

SEQ ID NO: 52671 - DNA, 15 bp, Homo sapiens
gtggctggagtgtca

SEQ ID NO: 52672 - DNA, 15 bp, Homo sapiens
tgtggctggagtgtc

SEQ ID NO: 52673 - DNA, 15 bp, Homo sapiens
ttgtggctggagtgt

SEQ ID NO: 52674 - DNA, 15 bp, Homo sapiens
cttgtggctggagtg

SEQ ID NO: 52675 - DNA, 15 bp, Homo sapiens
ccttgtggctggagt

SEQ ID NO: 52676 - DNA, 15 bp, Homo sapiens
gccttgtggctggag

SEQ ID NO: 52677 - DNA, 15 bp, Homo sapiens
tgccttgtggctgga

SEQ ID NO: 52678 - DNA, 15 bp, Homo sapiens
ctgccttgtggctgg

SEQ ID NO: 52679 - DNA, 15 bp, Homo sapiens
cctgccttgtggctg

SEQ ID NO: 52680 - DNA, 15 bp, Homo sapiens
acctgccttgtggct

SEQ ID NO: 52681 - DNA, 15 bp, Homo sapiens
gacctgccttgtggc

SEQ ID NO: 52682 - DNA, 15 bp, Homo sapiens
tgacctgccttgtgg

SEQ ID NO: 52683 - DNA, 15 bp, Homo sapiens
atgacctgccttgtg

SEQ ID NO: 52684 - DNA, 15 bp, Homo sapiens
catgacctgccttgt

SEQ ID NO: 52685 - DNA, 15 bp, Homo sapiens
ccatgacctgccttg

SEQ ID NO: 52686 - DNA, 15 bp, Homo sapiens
gccatgacctgcctt

SEQ ID NO: 52687 - DNA, 15 bp, Homo sapiens
agccatgacctgcct

SEQ ID NO: 52688 - DNA, 15 bp, Homo sapiens
cagccatgacctgcc

SEQ ID NO: 52689 - DNA, 15 bp, Homo sapiens
tcagccatgacctgc

SEQ ID NO: 52690 - DNA, 15 bp, Homo sapiens
ctcagccatgacctg

SEQ ID NO: 52691 - DNA, 15 bp, Homo sapiens
cctcagccatgacct

SEQ ID NO: 52692 - DNA, 15 bp, Homo sapiens
acctcagccatgacc

SEQ ID NO: 52693 - DNA, 15 bp, Homo sapiens
tacctcagccatgac

SEQ ID NO: 52694 - DNA, 15 bp, Homo sapiens
ttacctcagccatga

SEQ ID NO: 52695 - DNA, 15 bp, Homo sapiens
cttacctcagccatg

SEQ ID NO: 52696 - DNA, 15 bp, Homo sapiens
gcttacctcagccat

SEQ ID NO: 52697 - DNA, 15 bp, Homo sapiens
agcttacctcagcca

SEQ ID NO: 52698 - DNA, 15 bp, Homo sapiens
cagcttacctcagcc

SEQ ID NO: 52699 - DNA, 15 bp, Homo sapiens
gcagcttacctcagc

SEQ ID NO: 52700 - DNA, 15 bp, Homo sapiens
ggcagcttacctcag

SEQ ID NO: 52701 - DNA, 15 bp, Homo sapiens
gggcagcttacctca

SEQ ID NO: 52702 - DNA, 15 bp, Homo sapiens
ggggcagcttacctc

SEQ ID NO: 52703 - DNA, 15 bp, Homo sapiens
gggggcagcttacct

SEQ ID NO: 52704 - DNA, 15 bp, Homo sapiens
tgggggcagcttacc

SEQ ID NO: 52705 - DNA, 15 bp, Homo sapiens
ctgggggcagcttac

SEQ ID NO: 52706 - DNA, 15 bp, Homo sapiens
gctgggggcagctta

SEQ ID NO: 52707 - DNA, 15 bp, Homo sapiens
ggctgggggcagctt

SEQ ID NO: 52708 - DNA, 15 bp, Homo sapiens
gggctgggggcagct

SEQ ID NO: 52709 - DNA, 15 bp, Homo sapiens
tgggctgggggcagc

SEQ ID NO: 52710 - DNA, 15 bp, Homo sapiens
ttgggctgggggcag

SEQ ID NO: 52711 - DNA, 15 bp, Homo sapiens
cttgggctgggggca

SEQ ID NO: 52712 - DNA, 15 bp, Homo sapiens
tcttgggctgggggc

SEQ ID NO: 52713 - DNA, 15 bp, Homo sapiens
gtcttgggctggggg

SEQ ID NO: 52714 - DNA, 15 bp, Homo sapiens
agtcttgggctgggg

SEQ ID NO: 52715 - DNA, 15 bp, Homo sapiens
gagtcttgggctggg

SEQ ID NO: 52716 - DNA, 15 bp, Homo sapiens
ggagtcttgggctgg

SEQ ID NO: 52717 - DNA, 15 bp, Homo sapiens
gggagtcttgggctg

SEQ ID NO: 52718 - DNA, 15 bp, Homo sapiens
agggagtcttgggct

SEQ ID NO: 52719 - DNA, 15 bp, Homo sapiens
gagggagtcttgggc

SEQ ID NO: 52720 - DNA, 15 bp, Homo sapiens
ggagggagtcttggg

SEQ ID NO: 52721 - DNA, 15 bp, Homo sapiens
gggagggagtcttgg

SEQ ID NO: 52722 - DNA, 15 bp, Homo sapiens
ggggagggagtcttg

SEQ ID NO: 52723 - DNA, 15 bp, Homo sapiens
tggggagggagtctt

SEQ ID NO: 52724 - DNA, 15 bp, Homo sapiens
ctggggagggagtct

SEQ ID NO: 52725 - DNA, 15 bp, Homo sapiens
tctggggagggagtc

SEQ ID NO: 52726 - DNA, 15 bp, Homo sapiens
ttctggggagggagt

SEQ ID NO: 52727 - DNA, 15 bp, Homo sapiens
attctggggagggag

SEQ ID NO: 52728 - DNA, 15 bp, Homo sapiens
gattctggggaggga

SEQ ID NO: 52729 - DNA, 15 bp, Homo sapiens
agattctggggaggg

SEQ ID NO: 52730 - DNA, 15 bp, Homo sapiens
gagattctggggagg

SEQ ID NO: 52731 - DNA, 15 bp, Homo sapiens
ggagattctggggag

SEQ ID NO: 52732 - DNA, 15 bp, Homo sapiens
gggagattctgggga

SEQ ID NO: 52733 - DNA, 15 bp, Homo sapiens
ggggagattctgggg

SEQ ID NO: 52734 - DNA, 15 bp, Homo sapiens
tggggagattctggg

SEQ ID NO: 52735 - DNA, 15 bp, Homo sapiens
ctggggagattctgg

SEQ ID NO: 52736 - DNA, 15 bp, Homo sapiens
tctggggagattctg

SEQ ID NO: 52737 - DNA, 15 bp, Homo sapiens
ttctggggagattct

SEQ ID NO: 52738 - DNA, 15 bp, Homo sapiens
gttctggggagattc

SEQ ID NO: 52739 - DNA, 15 bp, Homo sapiens
agttctggggagatt

SEQ ID NO: 52740 - DNA, 15 bp, Homo sapiens
cagttctggggagat

SEQ ID NO: 52741 - DNA, 15 bp, Homo sapiens
ccagttctggggaga

SEQ ID NO: 52742 - DNA, 15 bp, Homo sapiens
cccagttctggggag

SEQ ID NO: 52743 - DNA, 15 bp, Homo sapiens
ccccagttctgggga

SEQ ID NO: 52744 - DNA, 15 bp, Homo sapiens
cccccagttctgggg

SEQ ID NO: 52745 - DNA, 15 bp, Homo sapiens
gcccccagttctggg

SEQ ID NO: 52746 - DNA, 15 bp, Homo sapiens
tgcccccagttctgg

SEQ ID NO: 52747 - DNA, 15 bp, Homo sapiens
ttgcccccagttctg

SEQ ID NO: 52748 - DNA, 15 bp, Homo sapiens
tttgcccccagttct

SEQ ID NO: 52749 - DNA, 15 bp, Homo sapiens
ttttgcccccagttc

SEQ ID NO: 52750 - DNA, 15 bp, Homo sapiens
tttttgcccccagtt

SEQ ID NO: 52751 - DNA, 15 bp, Homo sapiens
ttttttgcccccagt

SEQ ID NO: 52752 - DNA, 15 bp, Homo sapiens
gttttttgcccccag

SEQ ID NO: 52753 - DNA, 15 bp, Homo sapiens
agttttttgccccca

SEQ ID NO: 52754 - DNA, 15 bp, Homo sapiens
gagttttttgccccc

SEQ ID NO: 52755 - DNA, 15 bp, Homo sapiens
tgagttttttgcccc

SEQ ID NO: 52756 - DNA, 15 bp, Homo sapiens
ttgagttttttgccc

SEQ ID NO: 52757 - DNA, 15 bp, Homo sapiens
cttgagttttttgcc

SEQ ID NO: 52758 - DNA, 15 bp, Homo sapiens
ccttgagttttttgc

SEQ ID NO: 52759 - DNA, 15 bp, Homo sapiens
accttgagttttttg

SEQ ID NO: 52760 - DNA, 15 bp, Homo sapiens
taccttgagtttttt

SEQ ID NO: 52761 - DNA, 15 bp, Homo sapiens
ctaccttgagttttt

SEQ ID NO: 52762 - DNA, 15 bp, Homo sapiens
gctaccttgagtttt

SEQ ID NO: 52763 - DNA, 15 bp, Homo sapiens
agctaccttgagttt

SEQ ID NO: 52764 - DNA, 15 bp, Homo sapiens
aagctaccttgagtt

SEQ ID NO: 52765 - DNA, 15 bp, Homo sapiens
gaagctaccttgagt

SEQ ID NO: 52766 - DNA, 15 bp, Homo sapiens
tgaagctaccttgag

SEQ ID NO: 52767 - DNA, 15 bp, Homo sapiens
ctgaagctaccttga

SEQ ID NO: 52768 - DNA, 15 bp, Homo sapiens
tctgaagctaccttg

SEQ ID NO: 52769 - DNA, 15 bp, Homo sapiens
ctctgaagctacctt

SEQ ID NO: 52770 - DNA, 15 bp, Homo sapiens
cctctgaagctacct

SEQ ID NO: 52771 - DNA, 15 bp, Homo sapiens
acctctgaagctacc

SEQ ID NO: 52772 - DNA, 15 bp, Homo sapiens
cacctctgaagctac

SEQ ID NO: 52773 - DNA, 15 bp, Homo sapiens
acacctctgaagcta

SEQ ID NO: 52774 - DNA, 15 bp, Homo sapiens
cacacctctgaagct

SEQ ID NO: 52775 - DNA, 15 bp, Homo sapiens
gcacacctctgaagc

SEQ ID NO: 52776 - DNA, 15 bp, Homo sapiens
cgcacacctctgaag

SEQ ID NO: 52777 - DNA, 15 bp, Homo sapiens
gcgcacacctctgaa

SEQ ID NO: 52778 - DNA, 15 bp, Homo sapiens
agcgcacacctctga

SEQ ID NO: 52779 - DNA, 15 bp, Homo sapiens
tagcgcacacctctg

SEQ ID NO: 52780 - DNA, 15 bp, Homo sapiens
ttagcgcacacctct

SEQ ID NO: 52781 - DNA, 15 bp, Homo sapiens
cttagcgcacacctc

SEQ ID NO: 52782 - DNA, 15 bp, Homo sapiens
acttagcgcacacct

SEQ ID NO: 52783 - DNA, 15 bp, Homo sapiens
tacttagcgcacacc

SEQ ID NO: 52784 - DNA, 15 bp, Homo sapiens
atacttagcgcacac

SEQ ID NO: 52785 - DNA, 15 bp, Homo sapiens
tatacttagcgcaca

SEQ ID NO: 52786 - DNA, 15 bp, Homo sapiens
gtatacttagcgcac

SEQ ID NO: 52787 - DNA, 15 bp, Homo sapiens
agtatacttagcgca

SEQ ID NO: 52788 - DNA, 15 bp, Homo sapiens
gagtatacttagcgc

SEQ ID NO: 52789 - DNA, 15 bp, Homo sapiens
tgagtatacttagcg

SEQ ID NO: 52790 - DNA, 15 bp, Homo sapiens
gtgagtatacttagc

SEQ ID NO: 52791 - DNA, 15 bp, Homo sapiens
cgtgagtatacttag

SEQ ID NO: 52792 - DNA, 15 bp, Homo sapiens
ccgtgagtatactta

SEQ ID NO: 52793 - DNA, 15 bp, Homo sapiens
gccgtgagtatactt

SEQ ID NO: 52794 - DNA, 15 bp, Homo sapiens
agccgtgagtatact

SEQ ID NO: 52795 - DNA, 15 bp, Homo sapiens
gagccgtgagtatac

SEQ ID NO: 52796 - DNA, 15 bp, Homo sapiens
agagccgtgagtata

SEQ ID NO: 52797 - DNA, 15 bp, Homo sapiens
aagagccgtgagtat

SEQ ID NO: 52798 - DNA, 15 bp, Homo sapiens
gaagagccgtgagta

SEQ ID NO: 52799 - DNA, 15 bp, Homo sapiens
agaagagccgtgagt

SEQ ID NO: 52800 - DNA, 15 bp, Homo sapiens
cagaagagccgtgag

SEQ ID NO: 52801 - DNA, 15 bp, Homo sapiens
ccagaagagccgtga

SEQ ID NO: 52802 - DNA, 15 bp, Homo sapiens
tccagaagagccgtg

SEQ ID NO: 52803 - DNA, 15 bp, Homo sapiens
ttccagaagagccgt

SEQ ID NO: 52804 - DNA, 15 bp, Homo sapiens
attccagaagagccg

SEQ ID NO: 52805 - DNA, 15 bp, Homo sapiens
aattccagaagagcc

SEQ ID NO: 52806 - DNA, 15 bp, Homo sapiens
gaattccagaagagc

SEQ ID NO: 52807 - DNA, 15 bp, Homo sapiens
ggaattccagaagag

SEQ ID NO: 52808 - DNA, 15 bp, Homo sapiens
gggaattccagaaga

SEQ ID NO: 52809 - DNA, 15 bp, Homo sapiens
tgggaattccagaag

SEQ ID NO: 52810 - DNA, 15 bp, Homo sapiens
ctgggaattccagaa

SEQ ID NO: 52811 - DNA, 15 bp, Homo sapiens
tctgggaattccaga

SEQ ID NO: 52812 - DNA, 15 bp, Homo sapiens
ctctgggaattccag

SEQ ID NO: 52813 - DNA, 15 bp, Homo sapiens
actctgggaattcca

SEQ ID NO: 52814 - DNA, 15 bp, Homo sapiens
cactctgggaattcc

SEQ ID NO: 52815 - DNA, 15 bp, Homo sapiens
tcactctgggaattc

SEQ ID NO: 52816 - DNA, 15 bp, Homo sapiens
ttcactctgggaatt

SEQ ID NO: 52817 - DNA, 15 bp, Homo sapiens
tttcactctgggaat

SEQ ID NO: 52818 - DNA, 15 bp, Homo sapiens
ttttcactctgggaa

SEQ ID NO: 52819 - DNA, 15 bp, Homo sapiens
gttttcactctggga

SEQ ID NO: 52820 - DNA, 15 bp, Homo sapiens
ggttttcactctggg

SEQ ID NO: 52821 - DNA, 15 bp, Homo sapiens
aggttttcactctgg

SEQ ID NO: 52822 - DNA, 15 bp, Homo sapiens
gaggttttcactctg

SEQ ID NO: 52823 - DNA, 15 bp, Homo sapiens
tgaggttttcactct

SEQ ID NO: 52824 - DNA, 15 bp, Homo sapiens
ttgaggttttcactc

SEQ ID NO: 52825 - DNA, 15 bp, Homo sapiens
cttgaggttttcact

SEQ ID NO: 52826 - DNA, 15 bp, Homo sapiens
acttgaggttttcac

SEQ ID NO: 52827 - DNA, 15 bp, Homo sapiens
gacttgaggttttca

SEQ ID NO: 52828 - DNA, 15 bp, Homo sapiens
agacttgaggttttc

SEQ ID NO: 52829 - DNA, 15 bp, Homo sapiens
cagacttgaggtttt

SEQ ID NO: 52830 - DNA, 15 bp, Homo sapiens
tcagacttgaggttt

SEQ ID NO: 52831 - DNA, 15 bp, Homo sapiens
atcagacttgaggtt

SEQ ID NO: 52832 - DNA, 15 bp, Homo sapiens
catcagacttgaggt

SEQ ID NO: 52833 - DNA, 15 bp, Homo sapiens
gcatcagacttgagg

SEQ ID NO: 52834 - DNA, 15 bp, Homo sapiens
tgcatcagacttgag

SEQ ID NO: 52835 - DNA, 15 bp, Homo sapiens
ctgcatcagacttga

SEQ ID NO: 52836 - DNA, 15 bp, Homo sapiens
tctgcatcagacttg

SEQ ID NO: 52837 - DNA, 15 bp, Homo sapiens
gtctgcatcagactt

SEQ ID NO: 52838 - DNA, 15 bp, Homo sapiens
ggtctgcatcagact

SEQ ID NO: 52839 - DNA, 15 bp, Homo sapiens
tggtctgcatcagac

SEQ ID NO: 52840 - DNA, 15 bp, Homo sapiens
ctggtctgcatcaga

SEQ ID NO: 52841 - DNA, 15 bp, Homo sapiens
tctggtctgcatcag

SEQ ID NO: 52842 - DNA, 15 bp, Homo sapiens
ctctggtctgcatca

SEQ ID NO: 52843 - DNA, 15 bp, Homo sapiens
gctctggtctgcatc

SEQ ID NO: 52844 - DNA, 15 bp, Homo sapiens
agctctggtctgcat

SEQ ID NO: 52845 - DNA, 15 bp, Homo sapiens
cagctctggtctgca

SEQ ID NO: 52846 - DNA, 15 bp, Homo sapiens
ccagctctggtctgc

SEQ ID NO: 52847 - DNA, 15 bp, Homo sapiens
cccagctctggtctg

SEQ ID NO: 52848 - DNA, 15 bp, Homo sapiens
gcccagctctggtct

SEQ ID NO: 52849 - DNA, 15 bp, Homo sapiens
ggcccagctctggtc

SEQ ID NO: 52850 - DNA, 15 bp, Homo sapiens
tggcccagctctggt

SEQ ID NO: 52851 - DNA, 15 bp, Homo sapiens
ctggcccagctctgg

SEQ ID NO: 52852 - DNA, 15 bp, Homo sapiens
gctggcccagctctg

SEQ ID NO: 52853 - DNA, 15 bp, Homo sapiens
agctggcccagctct

SEQ ID NO: 52854 - DNA, 15 bp, Homo sapiens
gagctggcccagctc

SEQ ID NO: 52855 - DNA, 15 bp, Homo sapiens
ggagctggcccagct

SEQ ID NO: 52856 - DNA, 15 bp, Homo sapiens
gggagctggcccagc

SEQ ID NO: 52857 - DNA, 15 bp, Homo sapiens
ggggagctggcccag

SEQ ID NO: 52858 - DNA, 15 bp, Homo sapiens
tggggagctggccca

SEQ ID NO: 52859 - DNA, 15 bp, Homo sapiens
ctggggagctggccc

SEQ ID NO: 52860 - DNA, 15 bp, Homo sapiens
actggggagctggcc

SEQ ID NO: 52861 - DNA, 15 bp, Homo sapiens
gactggggagctggc

SEQ ID NO: 52862 - DNA, 15 bp, Homo sapiens
cgactggggagctgg

SEQ ID NO: 52863 - DNA, 15 bp, Homo sapiens
acgactggggagctg

SEQ ID NO: 52864 - DNA, 15 bp, Homo sapiens
cacgactggggagct

SEQ ID NO: 52865 - DNA, 15 bp, Homo sapiens
ccacgactggggagc

SEQ ID NO: 52866 - DNA, 15 bp, Homo sapiens
cccacgactggggag

SEQ ID NO: 52867 - DNA, 15 bp, Homo sapiens
acccacgactgggga

SEQ ID NO: 52868 - DNA, 15 bp, Homo sapiens
tacccacgactgggg

SEQ ID NO: 52869 - DNA, 15 bp, Homo sapiens
atacccacgactggg

SEQ ID NO: 52870 - DNA, 15 bp, Homo sapiens
tatacccacgactgg

SEQ ID NO: 52871 - DNA, 15 bp, Homo sapiens
ctatacccacgactg

SEQ ID NO: 52872 - DNA, 15 bp, Homo sapiens
tctatacccacgact

SEQ ID NO: 52873 - DNA, 15 bp, Homo sapiens
ttctatacccacgac

SEQ ID NO: 52874 - DNA, 15 bp, Homo sapiens
attctatacccacga

SEQ ID NO: 52875 - DNA, 15 bp, Homo sapiens
gattctatacccacg

SEQ ID NO: 52876 - DNA, 15 bp, Homo sapiens
tgattctatacccac

SEQ ID NO: 52877 - DNA, 15 bp, Homo sapiens
atgattctataccca

SEQ ID NO: 52878 - DNA, 15 bp, Homo sapiens
tatgattctataccc

SEQ ID NO: 52879 - DNA, 15 bp, Homo sapiens
ctatgattctatacc

SEQ ID NO: 52880 - DNA, 15 bp, Homo sapiens
actatgattctatac

SEQ ID NO: 52881 - DNA, 15 bp, Homo sapiens
aactatgattctata

SEQ ID NO: 52882 - DNA, 15 bp, Homo sapiens
taactatgattctat

SEQ ID NO: 52883 - DNA, 15 bp, Homo sapiens
gtaactatgattcta

SEQ ID NO: 52884 - DNA, 15 bp, Homo sapiens
tgtaactatgattct

SEQ ID NO: 52885 - DNA, 15 bp, Homo sapiens
ttgtaactatgattc

SEQ ID NO: 52886 - DNA, 15 bp, Homo sapiens
cttgtaactatgatt

SEQ ID NO: 52887 - DNA, 15 bp, Homo sapiens
gcttgtaactatgat

SEQ ID NO: 52888 - DNA, 15 bp, Homo sapiens
tgcttgtaactatga

SEQ ID NO: 52889 - DNA, 15 bp, Homo sapiens
ctgcttgtaactatg

SEQ ID NO: 52890 - DNA, 15 bp, Homo sapiens
cctgcttgtaactat

SEQ ID NO: 52891 - DNA, 15 bp, Homo sapiens
gcctgcttgtaacta

SEQ ID NO: 52892 - DNA, 15 bp, Homo sapiens
tgcctgcttgtaact

SEQ ID NO: 52893 - DNA, 15 bp, Homo sapiens
atgcctgcttgtaac

SEQ ID NO: 52894 - DNA, 15 bp, Homo sapiens
aatgcctgcttgtaa

SEQ ID NO: 52895 - DNA, 15 bp, Homo sapiens
aaatgcctgcttgta

SEQ ID NO: 52896 - DNA, 15 bp, Homo sapiens
gaaatgcctgcttgt

SEQ ID NO: 52897 - DNA, 15 bp, Homo sapiens
agaaatgcctgcttg

SEQ ID NO: 52898 - DNA, 15 bp, Homo sapiens
aagaaatgcctgctt

SEQ ID NO: 52899 - DNA, 15 bp, Homo sapiens
caagaaatgcctgct

SEQ ID NO: 52900 - DNA, 15 bp, Homo sapiens
ccaagaaatgcctgc

SEQ ID NO: 52901 - DNA, 15 bp, Homo sapiens
cccaagaaatgcctg

SEQ ID NO: 52902 - DNA, 15 bp, Homo sapiens
ccccaagaaatgcct

SEQ ID NO: 52903 - DNA, 15 bp, Homo sapiens
tccccaagaaatgcc

SEQ ID NO: 52904 - DNA, 15 bp, Homo sapiens
atccccaagaaatgc

SEQ ID NO: 52905 - DNA, 15 bp, Homo sapiens
catccccaagaaatg

SEQ ID NO: 52906 - DNA, 15 bp, Homo sapiens
ccatccccaagaaat

SEQ ID NO: 52907 - DNA, 15 bp, Homo sapiens
cccatccccaagaaa

SEQ ID NO: 52908 - DNA, 15 bp, Homo sapiens
ccccatccccaagaa

SEQ ID NO: 52909 - DNA, 15 bp, Homo sapiens
tccccatccccaaga

SEQ ID NO: 52910 - DNA, 15 bp, Homo sapiens
ctccccatccccaag

SEQ ID NO: 52911 - DNA, 15 bp, Homo sapiens
cctccccatccccaa

SEQ ID NO: 52912 - DNA, 15 bp, Homo sapiens
tcctccccatcccca

SEQ ID NO: 52913 - DNA, 15 bp, Homo sapiens
gtcctccccatcccc

SEQ ID NO: 52914 - DNA, 15 bp, Homo sapiens
agtcctccccatccc

SEQ ID NO: 52915 - DNA, 15 bp, Homo sapiens
cagtcctccccatcc

SEQ ID NO: 52916 - DNA, 15 bp, Homo sapiens
ccagtcctccccatc

SEQ ID NO: 52917 - DNA, 15 bp, Homo sapiens
gccagtcctccccat

SEQ ID NO: 52918 - DNA, 15 bp, Homo sapiens
tgccagtcctcccca

SEQ ID NO: 52919 - DNA, 15 bp, Homo sapiens
gtgccagtcctcccc

SEQ ID NO: 52920 - DNA, 15 bp, Homo sapiens
tgtgccagtcctccc

SEQ ID NO: 52921 - DNA, 15 bp, Homo sapiens
ctgtgccagtcctcc

SEQ ID NO: 52922 - DNA, 15 bp, Homo sapiens
cctgtgccagtcctc

SEQ ID NO: 52923 - DNA, 15 bp, Homo sapiens
ccctgtgccagtcct

SEQ ID NO: 52924 - DNA, 15 bp, Homo sapiens
gccctgtgccagtcc

SEQ ID NO: 52925 - DNA, 15 bp, Homo sapiens
agccctgtgccagtc

SEQ ID NO: 52926 - DNA, 15 bp, Homo sapiens
cagccctgtgccagt

SEQ ID NO: 52927 - DNA, 15 bp, Homo sapiens
gcagccctgtgccag

SEQ ID NO: 52928 - DNA, 15 bp, Homo sapiens
agcagccctgtgcca

SEQ ID NO: 52929 - DNA, 15 bp, Homo sapiens
cagcagccctgtgcc

SEQ ID NO: 52930 - DNA, 15 bp, Homo sapiens
acagcagccctgtgc

SEQ ID NO: 52931 - DNA, 15 bp, Homo sapiens
cacagcagccctgtg

SEQ ID NO: 52932 - DNA, 15 bp, Homo sapiens
tcacagcagccctgt

SEQ ID NO: 52933 - DNA, 15 bp, Homo sapiens
atcacagcagccctg

SEQ ID NO: 52934 - DNA, 15 bp, Homo sapiens
catcacagcagccct

SEQ ID NO: 52935 - DNA, 15 bp, Homo sapiens
ccatcacagcagccc

SEQ ID NO: 52936 - DNA, 15 bp, Homo sapiens
cccatcacagcagcc

SEQ ID NO: 52937 - DNA, 15 bp, Homo sapiens
ccccatcacagcagc

SEQ ID NO: 52938 - DNA, 15 bp, Homo sapiens
accccatcacagcag

SEQ ID NO: 52939 - DNA, 15 bp, Homo sapiens
taccccatcacagca

SEQ ID NO: 52940 - DNA, 15 bp, Homo sapiens
ataccccatcacagc

SEQ ID NO: 52941 - DNA, 15 bp, Homo sapiens
gataccccatcacag

SEQ ID NO: 52942 - DNA, 15 bp, Homo sapiens
agataccccatcaca

SEQ ID NO: 52943 - DNA, 15 bp, Homo sapiens
aagataccccatcac

SEQ ID NO: 52944 - DNA, 15 bp, Homo sapiens
aaagataccccatca

SEQ ID NO: 52945 - DNA, 15 bp, Homo sapiens
aaaagataccccatc

SEQ ID NO: 52946 - DNA, 15 bp, Homo sapiens
gaaaagataccccat

SEQ ID NO: 52947 - DNA, 15 bp, Homo sapiens
tgaaaagatacccca

SEQ ID NO: 52948 - DNA, 15 bp, Homo sapiens
ctgaaaagatacccc

SEQ ID NO: 52949 - DNA, 15 bp, Homo sapiens
cctgaaaagataccc

SEQ ID NO: 52950 - DNA, 15 bp, Homo sapiens
ccctgaaaagatacc

SEQ ID NO: 52951 - DNA, 15 bp, Homo sapiens
tccctgaaaagatac

SEQ ID NO: 52952 - DNA, 15 bp, Homo sapiens
ctccctgaaaagata

SEQ ID NO: 52953 - DNA, 15 bp, Homo sapiens
cctccctgaaaagat

SEQ ID NO: 52954 - DNA, 15 bp, Homo sapiens
tcctccctgaaaaga

SEQ ID NO: 52955 - DNA, 15 bp, Homo sapiens
ctcctccctgaaaag

SEQ ID NO: 52956 - DNA, 15 bp, Homo sapiens
gctcctccctgaaaa

SEQ ID NO: 52957 - DNA, 15 bp, Homo sapiens
ggctcctccctgaaa

SEQ ID NO: 52958 - DNA, 15 bp, Homo sapiens
tggctcctccctgaa

SEQ ID NO: 52959 - DNA, 15 bp, Homo sapiens
ttggctcctccctga

SEQ ID NO: 52960 - DNA, 15 bp, Homo sapiens
tttggctcctccctg

SEQ ID NO: 52961 - DNA, 15 bp, Homo sapiens
gtttggctcctccct

SEQ ID NO: 52962 - DNA, 15 bp, Homo sapiens
cgtttggctcctccc

SEQ ID NO: 52963 - DNA, 15 bp, Homo sapiens
gcgtttggctcctcc

SEQ ID NO: 52964 - DNA, 15 bp, Homo sapiens
agcgtttggctcctc

SEQ ID NO: 52965 - DNA, 15 bp, Homo sapiens
gagcgtttggctcct

SEQ ID NO: 52966 - DNA, 15 bp, Homo sapiens
tgagcgtttggctcc

SEQ ID NO: 52967 - DNA, 15 bp, Homo sapiens
atgagcgtttggctc

SEQ ID NO: 52968 - DNA, 15 bp, Homo sapiens
aatgagcgtttggct

SEQ ID NO: 52969 - DNA, 15 bp, Homo sapiens
caatgagcgtttggc

SEQ ID NO: 52970 - DNA, 15 bp, Homo sapiens
acaatgagcgtttgg

SEQ ID NO: 52971 - DNA, 15 bp, Homo sapiens
gacaatgagcgtttg

SEQ ID NO: 52972 - DNA, 15 bp, Homo sapiens
agacaatgagcgttt

SEQ ID NO: 52973 - DNA, 15 bp, Homo sapiens
cagacaatgagcgtt

SEQ ID NO: 52974 - DNA, 15 bp, Homo sapiens
acagacaatgagcgt

SEQ ID NO: 52975 - DNA, 15 bp, Homo sapiens
cacagacaatgagcg

SEQ ID NO: 52976 - DNA, 15 bp, Homo sapiens
gcacagacaatgagc

SEQ ID NO: 52977 - DNA, 15 bp, Homo sapiens
agcacagacaatgag

SEQ ID NO: 52978 - DNA, 15 bp, Homo sapiens
aagcacagacaatga

SEQ ID NO: 52979 - DNA, 15 bp, Homo sapiens
gaagcacagacaatg

SEQ ID NO: 52980 - DNA, 15 bp, Homo sapiens
agaagcacagacaat

SEQ ID NO: 52981 - DNA, 15 bp, Homo sapiens
gagaagcacagacaa

SEQ ID NO: 52982 - DNA, 15 bp, Homo sapiens
ggagaagcacagaca

SEQ ID NO: 52983 - DNA, 15 bp, Homo sapiens
aggagaagcacagac

SEQ ID NO: 52984 - DNA, 15 bp, Homo sapiens
gaggagaagcacaga

SEQ ID NO: 52985 - DNA, 15 bp, Homo sapiens
ggaggagaagcacag

SEQ ID NO: 52986 - DNA, 15 bp, Homo sapiens
aggaggagaagcaca

SEQ ID NO: 52987 - DNA, 15 bp, Homo sapiens
aaggaggagaagcac

SEQ ID NO: 52988 - DNA, 15 bp, Homo sapiens
aaaggaggagaagca

SEQ ID NO: 52989 - DNA, 15 bp, Homo sapiens
aaaaggaggagaagc

SEQ ID NO: 52990 - DNA, 15 bp, Homo sapiens
aaaaaggaggagaag

SEQ ID NO: 52991 - DNA, 15 bp, Homo sapiens
gaaaaaggaggagaa

SEQ ID NO: 52992 - DNA, 15 bp, Homo sapiens
agaaaaaggaggaga

SEQ ID NO: 52993 - DNA, 15 bp, Homo sapiens
cagaaaaaggaggag

SEQ ID NO: 52994 - DNA, 15 bp, Homo sapiens
gcagaaaaaggagga

SEQ ID NO: 52995 - DNA, 15 bp, Homo sapiens
cgcagaaaaaggagg

SEQ ID NO: 52996 - DNA, 15 bp, Homo sapiens
ccgcagaaaaaggag

SEQ ID NO: 52997 - DNA, 15 bp, Homo sapiens
accgcagaaaaagga

SEQ ID NO: 52998 - DNA, 15 bp, Homo sapiens
gaccgcagaaaaagg

SEQ ID NO: 52999 - DNA, 15 bp, Homo sapiens
ggaccgcagaaaaag

SEQ ID NO: 53000 - DNA, 15 bp, Homo sapiens
gggaccgcagaaaaa

SEQ ID NO: 53001 - DNA, 15 bp, Homo sapiens
agggaccgcagaaaa

SEQ ID NO: 53002 - DNA, 15 bp, Homo sapiens
cagggaccgcagaaa

SEQ ID NO: 53003 - DNA, 15 bp, Homo sapiens
ccagggaccgcagaa

SEQ ID NO: 53004 - DNA, 15 bp, Homo sapiens
gccagggaccgcaga

SEQ ID NO: 53005 - DNA, 15 bp, Homo sapiens
agccagggaccgcag

SEQ ID NO: 53006 - DNA, 15 bp, Homo sapiens
gagccagggaccgca

SEQ ID NO: 53007 - DNA, 15 bp, Homo sapiens
ggagccagggaccgc

SEQ ID NO: 53008 - DNA, 15 bp, Homo sapiens
gggagccagggaccg

SEQ ID NO: 53009 - DNA, 15 bp, Homo sapiens
ggggagccagggacc

SEQ ID NO: 53010 - DNA, 15 bp, Homo sapiens
tggggagccagggac

SEQ ID NO: 53011 - DNA, 15 bp, Homo sapiens
gtggggagccaggga

SEQ ID NO: 53012 - DNA, 15 bp, Homo sapiens
ggtggggagccaggg

SEQ ID NO: 53013 - DNA, 15 bp, Homo sapiens
aggtggggagccagg

SEQ ID NO: 53014 - DNA, 15 bp, Homo sapiens
caggtggggagccag

SEQ ID NO: 53015 - DNA, 15 bp, Homo sapiens
tcaggtggggagcca

SEQ ID NO: 53016 - DNA, 15 bp, Homo sapiens
gtcaggtggggagcc

SEQ ID NO: 53017 - DNA, 15 bp, Homo sapiens
agtcaggtggggagc

SEQ ID NO: 53018 - DNA, 15 bp, Homo sapiens
gagtcaggtggggag

SEQ ID NO: 53019 - DNA, 15 bp, Homo sapiens
ggagtcaggtgggga

SEQ ID NO: 53020 - DNA, 15 bp, Homo sapiens
tggagtcaggtgggg

SEQ ID NO: 53021 - DNA, 15 bp, Homo sapiens
ctggagtcaggtggg

SEQ ID NO: 53022 - DNA, 15 bp, Homo sapiens
cctggagtcaggtgg

SEQ ID NO: 53023 - DNA, 15 bp, Homo sapiens
acctggagtcaggtg

SEQ ID NO: 53024 - DNA, 15 bp, Homo sapiens
cacctggagtcaggt

SEQ ID NO: 53025 - DNA, 15 bp, Homo sapiens
tcacctggagtcagg

SEQ ID NO: 53026 - DNA, 15 bp, Homo sapiens
ttcacctggagtcag

SEQ ID NO: 53027 - DNA, 15 bp, Homo sapiens
gttcacctggagtca

SEQ ID NO: 53028 - DNA, 15 bp, Homo sapiens
tgttcacctggagtc

SEQ ID NO: 53029 - DNA, 15 bp, Homo sapiens
ttgttcacctggagt

SEQ ID NO: 53030 - DNA, 15 bp, Homo sapiens
cttgttcacctggag

SEQ ID NO: 53031 - DNA, 15 bp, Homo sapiens
tcttgttcacctgga

SEQ ID NO: 53032 - DNA, 15 bp, Homo sapiens
gtcttgttcacctgg

SEQ ID NO: 53033 - DNA, 15 bp, Homo sapiens
ggtcttgttcacctg

SEQ ID NO: 53034 - DNA, 15 bp, Homo sapiens
aggtcttgttcacct

SEQ ID NO: 53035 - DNA, 15 bp, Homo sapiens
aaggtcttgttcacc

SEQ ID NO: 53036 - DNA, 15 bp, Homo sapiens
gaaggtcttgttcac

SEQ ID NO: 53037 - DNA, 15 bp, Homo sapiens
ggaaggtcttgttca

SEQ ID NO: 53038 - DNA, 15 bp, Homo sapiens
tggaaggtcttgttc

SEQ ID NO: 53039 - DNA, 15 bp, Homo sapiens
ctggaaggtcttgtt

SEQ ID NO: 53040 - DNA, 15 bp, Homo sapiens
cctggaaggtcttgt

SEQ ID NO: 53041 - DNA, 15 bp, Homo sapiens
tcctggaaggtcttg

SEQ ID NO: 53042 - DNA, 15 bp, Homo sapiens
ttcctggaaggtctt

SEQ ID NO: 53043 - DNA, 15 bp, Homo sapiens
gttcctggaaggtct

SEQ ID NO: 53044 - DNA, 15 bp, Homo sapiens
agttcctggaaggtc

SEQ ID NO: 53045 - DNA, 15 bp, Homo sapiens
cagttcctggaaggt

SEQ ID NO: 53046 - DNA, 15 bp, Homo sapiens
ccagttcctggaagg

SEQ ID NO: 53047 - DNA, 15 bp, Homo sapiens
gccagttcctggaag

SEQ ID NO: 53048 - DNA, 15 bp, Homo sapiens
agccagttcctggaa

SEQ ID NO: 53049 - DNA, 15 bp, Homo sapiens
cagccagttcctgga

SEQ ID NO: 53050 - DNA, 15 bp, Homo sapiens
acagccagttcctgg

SEQ ID NO: 53051 - DNA, 15 bp, Homo sapiens
cacagccagttcctg

SEQ ID NO: 53052 - DNA, 15 bp, Homo sapiens
acacagccagttcct

SEQ ID NO: 53053 - DNA, 15 bp, Homo sapiens
aacacagccagttcc

SEQ ID NO: 53054 - DNA, 15 bp, Homo sapiens
gaacacagccagttc

SEQ ID NO: 53055 - DNA, 15 bp, Homo sapiens
ggaacacagccagtt

SEQ ID NO: 53056 - DNA, 15 bp, Homo sapiens
tggaacacagccagt

SEQ ID NO: 53057 - DNA, 15 bp, Homo sapiens
atggaacacagccag

SEQ ID NO: 53058 - DNA, 15 bp, Homo sapiens
catggaacacagcca

SEQ ID NO: 53059 - DNA, 15 bp, Homo sapiens
tcatggaacacagcc

SEQ ID NO: 53060 - DNA, 15 bp, Homo sapiens
atcatggaacacagc

SEQ ID NO: 53061 - DNA, 15 bp, Homo sapiens
gatcatggaacacag

SEQ ID NO: 53062 - DNA, 15 bp, Homo sapiens
agatcatggaacaca

SEQ ID NO: 53063 - DNA, 15 bp, Homo sapiens
cagatcatggaacac

SEQ ID NO: 53064 - DNA, 15 bp, Homo sapiens
ccagatcatggaaca

SEQ ID NO: 53065 - DNA, 15 bp, Homo sapiens
tccagatcatggaac

SEQ ID NO: 53066 - DNA, 15 bp, Homo sapiens
ttccagatcatggaa

SEQ ID NO: 53067 - DNA, 15 bp, Homo sapiens
cttccagatcatgga

SEQ ID NO: 53068 - DNA, 15 bp, Homo sapiens
ccttccagatcatgg

SEQ ID NO: 53069 - DNA, 15 bp, Homo sapiens
gccttccagatcatg

SEQ ID NO: 53070 - DNA, 15 bp, Homo sapiens
tgccttccagatcat

SEQ ID NO: 53071 - DNA, 15 bp, Homo sapiens
atgccttccagatca

SEQ ID NO: 53072 - DNA, 15 bp, Homo sapiens
catgccttccagatc

SEQ ID NO: 53073 - DNA, 15 bp, Homo sapiens
acatgccttccagat

SEQ ID NO: 53074 - DNA, 15 bp, Homo sapiens
cacatgccttccaga

SEQ ID NO: 53075 - DNA, 15 bp, Homo sapiens
ccacatgccttccag

SEQ ID NO: 53076 - DNA, 15 bp, Homo sapiens
cccacatgccttcca

SEQ ID NO: 53077 - DNA, 15 bp, Homo sapiens
tcccacatgccttcc

SEQ ID NO: 53078 - DNA, 15 bp, Homo sapiens
ctcccacatgccttc

SEQ ID NO: 53079 - DNA, 15 bp, Homo sapiens
cctcccacatgcctt

SEQ ID NO: 53080 - DNA, 15 bp, Homo sapiens
tcctcccacatgcct

SEQ ID NO: 53081 - DNA, 15 bp, Homo sapiens
ttcctcccacatgcc

SEQ ID NO: 53082 - DNA, 15 bp, Homo sapiens
gttcctcccacatgc

SEQ ID NO: 53083 - DNA, 15 bp, Homo sapiens
agttcctcccacatg

SEQ ID NO: 53084 - DNA, 15 bp, Homo sapiens
gagttcctcccacat

SEQ ID NO: 53085 - DNA, 15 bp, Homo sapiens
tgagttcctcccaca

SEQ ID NO: 53086 - DNA, 15 bp, Homo sapiens
ctgagttcctcccac

SEQ ID NO: 53087 - DNA, 15 bp, Homo sapiens
gctgagttcctccca

SEQ ID NO: 53088 - DNA, 15 bp, Homo sapiens
ggctgagttcctccc

SEQ ID NO: 53089 - DNA, 15 bp, Homo sapiens
gggctgagttcctcc

SEQ ID NO: 53090 - DNA, 15 bp, Homo sapiens
ggggctgagttcctc

SEQ ID NO: 53091 - DNA, 15 bp, Homo sapiens
tggggctgagttcct

SEQ ID NO: 53092 - DNA, 15 bp, Homo sapiens
ttggggctgagttcc

SEQ ID NO: 53093 - DNA, 15 bp, Homo sapiens
cttggggctgagttc

SEQ ID NO: 53094 - DNA, 15 bp, Homo sapiens
tcttggggctgagtt

SEQ ID NO: 53095 - DNA, 15 bp, Homo sapiens
atcttggggctgagt

SEQ ID NO: 53096 - DNA, 15 bp, Homo sapiens
gatcttggggctgag

SEQ ID NO: 53097 - DNA, 15 bp, Homo sapiens
agatcttggggctga

SEQ ID NO: 53098 - DNA, 15 bp, Homo sapiens
cagatcttggggctg

SEQ ID NO: 53099 - DNA, 15 bp, Homo sapiens
ccagatcttggggct

SEQ ID NO: 53100 - DNA, 15 bp, Homo sapiens
tccagatcttggggc

SEQ ID NO: 53101 - DNA, 15 bp, Homo sapiens
gtccagatcttgggg

SEQ ID NO: 53102 - DNA, 15 bp, Homo sapiens
ggtccagatcttggg

SEQ ID NO: 53103 - DNA, 15 bp, Homo sapiens
aggtccagatcttgg

SEQ ID NO: 53104 - DNA, 15 bp, Homo sapiens
aaggtccagatcttg

SEQ ID NO: 53105 - DNA, 15 bp, Homo sapiens
gaaggtccagatctt

SEQ ID NO: 53106 - DNA, 15 bp, Homo sapiens
tgaaggtccagatct

SEQ ID NO: 53107 - DNA, 15 bp, Homo sapiens
atgaaggtccagatc

SEQ ID NO: 53108 - DNA, 15 bp, Homo sapiens
catgaaggtccagat

SEQ ID NO: 53109 - DNA, 15 bp, Homo sapiens
ccatgaaggtccaga

SEQ ID NO: 53110 - DNA, 15 bp, Homo sapiens
tccatgaaggtccag

SEQ ID NO: 53111 - DNA, 15 bp, Homo sapiens
ctccatgaaggtcca

SEQ ID NO: 53112 - DNA, 15 bp, Homo sapiens
tctccatgaaggtcc

SEQ ID NO: 53113 - DNA, 15 bp, Homo sapiens
ttctccatgaaggtc

SEQ ID NO: 53114 - DNA, 15 bp, Homo sapiens
gttctccatgaaggt

SEQ ID NO: 53115 - DNA, 15 bp, Homo sapiens
tgttctccatgaagg

SEQ ID NO: 53116 - DNA, 15 bp, Homo sapiens
ctgttctccatgaag

SEQ ID NO: 53117 - DNA, 15 bp, Homo sapiens
gctgttctccatgaa

SEQ ID NO: 53118 - DNA, 15 bp, Homo sapiens
ggctgttctccatga

SEQ ID NO: 53119 - DNA, 15 bp, Homo sapiens
tggctgttctccatg

SEQ ID NO: 53120 - DNA, 15 bp, Homo sapiens
ttggctgttctccat

SEQ ID NO: 53121 - DNA, 15 bp, Homo sapiens
cttggctgttctcca

SEQ ID NO: 53122 - DNA, 15 bp, Homo sapiens
tcttggctgttctcc

SEQ ID NO: 53123 - DNA, 15 bp, Homo sapiens
ttcttggctgttctc

SEQ ID NO: 53124 - DNA, 15 bp, Homo sapiens
tttcttggctgttct

SEQ ID NO: 53125 - DNA, 15 bp, Homo sapiens
atttcttggctgttc

SEQ ID NO: 53126 - DNA, 15 bp, Homo sapiens
catttcttggctgtt

SEQ ID NO: 53127 - DNA, 15 bp, Homo sapiens
ccatttcttggctgt

SEQ ID NO: 53128 - DNA, 15 bp, Homo sapiens
tccatttcttggctg

SEQ ID NO: 53129 - DNA, 15 bp, Homo sapiens
gtccatttcttggct

SEQ ID NO: 53130 - DNA, 15 bp, Homo sapiens
ggtccatttcttggc

SEQ ID NO: 53131 - DNA, 15 bp, Homo sapiens
aggtccatttcttgg

SEQ ID NO: 53132 - DNA, 15 bp, Homo sapiens
aaggtccatttcttg

SEQ ID NO: 53133 - DNA, 15 bp, Homo sapiens
caaggtccatttctt

SEQ ID NO: 53134 - DNA, 15 bp, Homo sapiens
acaaggtccatttct

SEQ ID NO: 53135 - DNA, 15 bp, Homo sapiens
gacaaggtccatttc

SEQ ID NO: 53136 - DNA, 15 bp, Homo sapiens
ggacaaggtccattt

SEQ ID NO: 53137 - DNA, 15 bp, Homo sapiens
cggacaaggtccatt

SEQ ID NO: 53138 - DNA, 15 bp, Homo sapiens
ccggacaaggtccat

SEQ ID NO: 53139 - DNA, 15 bp, Homo sapiens
cccggacaaggtcca

SEQ ID NO: 53140 - DNA, 15 bp, Homo sapiens
acccggacaaggtcc

SEQ ID NO: 53141 - DNA, 15 bp, Homo sapiens
cacccggacaaggtc

SEQ ID NO: 53142 - DNA, 15 bp, Homo sapiens
tcacccggacaaggt

SEQ ID NO: 53143 - DNA, 15 bp, Homo sapiens
ctcacccggacaagg

SEQ ID NO: 53144 - DNA, 15 bp, Homo sapiens
actcacccggacaag

SEQ ID NO: 53145 - DNA, 15 bp, Homo sapiens
cactcacccggacaa

SEQ ID NO: 53146 - DNA, 15 bp, Homo sapiens
acactcacccggaca

SEQ ID NO: 53147 - DNA, 15 bp, Homo sapiens
gacactcacccggac

SEQ ID NO: 53148 - DNA, 15 bp, Homo sapiens
ggacactcacccgga

SEQ ID NO: 53149 - DNA, 15 bp, Homo sapiens
gggacactcacccgg

SEQ ID NO: 53150 - DNA, 15 bp, Homo sapiens
agggacactcacccg

SEQ ID NO: 53151 - DNA, 15 bp, Homo sapiens
gagggacactcaccc

SEQ ID NO: 53152 - DNA, 15 bp, Homo sapiens
ggagggacactcacc

SEQ ID NO: 53153 - DNA, 15 bp, Homo sapiens
gggagggacactcac

SEQ ID NO: 53154 - DNA, 15 bp, Homo sapiens
tgggagggacactca

SEQ ID NO: 53155 - DNA, 15 bp, Homo sapiens
atgggagggacactc

SEQ ID NO: 53156 - DNA, 15 bp, Homo sapiens
aatgggagggacact

SEQ ID NO: 53157 - DNA, 15 bp, Homo sapiens
taatgggagggacac

SEQ ID NO: 53158 - DNA, 15 bp, Homo sapiens
ataatgggagggaca

SEQ ID NO: 53159 - DNA, 15 bp, Homo sapiens
aataatgggagggac

SEQ ID NO: 53160 - DNA, 15 bp, Homo sapiens
taataatgggaggga

SEQ ID NO: 53161 - DNA, 15 bp, Homo sapiens
gtaataatgggaggg

SEQ ID NO: 53162 - DNA, 15 bp, Homo sapiens
ggtaataatgggagg

SEQ ID NO: 53163 - DNA, 15 bp, Homo sapiens
tggtaataatgggag

SEQ ID NO: 53164 - DNA, 15 bp, Homo sapiens
atggtaataatggga

SEQ ID NO: 53165 - DNA, 15 bp, Homo sapiens
catggtaataatggg

SEQ ID NO: 53166 - DNA, 15 bp, Homo sapiens
acatggtaataatgg

SEQ ID NO: 53167 - DNA, 15 bp, Homo sapiens
cacatggtaataatg

SEQ ID NO: 53168 - DNA, 15 bp, Homo sapiens
gcacatggtaataat

SEQ ID NO: 53169 - DNA, 15 bp, Homo sapiens
ggcacatggtaataa

SEQ ID NO: 53170 - DNA, 15 bp, Homo sapiens
aggcacatggtaata

SEQ ID NO: 53171 - DNA, 15 bp, Homo sapiens
caggcacatggtaat

SEQ ID NO: 53172 - DNA, 15 bp, Homo sapiens
gcaggcacatggtaa

SEQ ID NO: 53173 - DNA, 15 bp, Homo sapiens
agcaggcacatggta

SEQ ID NO: 53174 - DNA, 15 bp, Homo sapiens
aagcaggcacatggt

SEQ ID NO: 53175 - DNA, 15 bp, Homo sapiens
caagcaggcacatgg

SEQ ID NO: 53176 - DNA, 15 bp, Homo sapiens
tcaagcaggcacatg

SEQ ID NO: 53177 - DNA, 15 bp, Homo sapiens
atcaagcaggcacat

SEQ ID NO: 53178 - DNA, 15 bp, Homo sapiens
tatcaagcaggcaca

SEQ ID NO: 53179 - DNA, 15 bp, Homo sapiens
gtatcaagcaggcac

SEQ ID NO: 53180 - DNA, 15 bp, Homo sapiens
agtatcaagcaggca

SEQ ID NO: 53181 - DNA, 15 bp, Homo sapiens
cagtatcaagcaggc

SEQ ID NO: 53182 - DNA, 15 bp, Homo sapiens
ccagtatcaagcagg

SEQ ID NO: 53183 - DNA, 15 bp, Homo sapiens
tccagtatcaagcag

SEQ ID NO: 53184 - DNA, 15 bp, Homo sapiens
ctccagtatcaagca

SEQ ID NO: 53185 - DNA, 15 bp, Homo sapiens
tctccagtatcaagc

SEQ ID NO: 53186 - DNA, 15 bp, Homo sapiens
ctctccagtatcaag

SEQ ID NO: 53187 - DNA, 15 bp, Homo sapiens
cctctccagtatcaa

SEQ ID NO: 53188 - DNA, 15 bp, Homo sapiens
acctctccagtatca

SEQ ID NO: 53189 - DNA, 15 bp, Homo sapiens
cacctctccagtatc

SEQ ID NO: 53190 - DNA, 15 bp, Homo sapiens
tcacctctccagtat

SEQ ID NO: 53191 - DNA, 15 bp, Homo sapiens
ctcacctctccagta

SEQ ID NO: 53192 - DNA, 15 bp, Homo sapiens
actcacctctccagt

SEQ ID NO: 53193 - DNA, 15 bp, Homo sapiens
aactcacctctccag

SEQ ID NO: 53194 - DNA, 15 bp, Homo sapiens
aaactcacctctcca

SEQ ID NO: 53195 - DNA, 15 bp, Homo sapiens
gaaactcacctctcc

SEQ ID NO: 53196 - DNA, 15 bp, Homo sapiens
agaaactcacctctc

SEQ ID NO: 53197 - DNA, 15 bp, Homo sapiens
cagaaactcacctct

SEQ ID NO: 53198 - DNA, 15 bp, Homo sapiens
ccagaaactcacctc

SEQ ID NO: 53199 - DNA, 15 bp, Homo sapiens
accagaaactcacct

SEQ ID NO: 53200 - DNA, 15 bp, Homo sapiens
gaccagaaactcacc

SEQ ID NO: 53201 - DNA, 15 bp, Homo sapiens
tgaccagaaactcac

SEQ ID NO: 53202 - DNA, 15 bp, Homo sapiens
gtgaccagaaactca

SEQ ID NO: 53203 - DNA, 15 bp, Homo sapiens
agtgaccagaaactc

SEQ ID NO: 53204 - DNA, 15 bp, Homo sapiens
aagtgaccagaaact

SEQ ID NO: 53205 - DNA, 15 bp, Homo sapiens
aaagtgaccagaaac

SEQ ID NO: 53206 - DNA, 15 bp, Homo sapiens
gaaagtgaccagaaa

SEQ ID NO: 53207 - DNA, 15 bp, Homo sapiens
ggaaagtgaccagaa

SEQ ID NO: 53208 - DNA, 15 bp, Homo sapiens
gggaaagtgaccaga

SEQ ID NO: 53209 - DNA, 15 bp, Homo sapiens
tgggaaagtgaccag

SEQ ID NO: 53210 - DNA, 15 bp, Homo sapiens
ctgggaaagtgacca

SEQ ID NO: 53211 - DNA, 15 bp, Homo sapiens
cctgggaaagtgacc

SEQ ID NO: 53212 - DNA, 15 bp, Homo sapiens
acctgggaaagtgac

SEQ ID NO: 53213 - DNA, 15 bp, Homo sapiens
cacctgggaaagtga

SEQ ID NO: 53214 - DNA, 15 bp, Homo sapiens
acacctgggaaagtg

SEQ ID NO: 53215 - DNA, 15 bp, Homo sapiens
cacacctgggaaagt

SEQ ID NO: 53216 - DNA, 15 bp, Homo sapiens
tcacacctgggaaag

SEQ ID NO: 53217 - DNA, 15 bp, Homo sapiens
ctcacacctgggaaa

SEQ ID NO: 53218 - DNA, 15 bp, Homo sapiens
actcacacctgggaa

SEQ ID NO: 53219 - DNA, 15 bp, Homo sapiens
cactcacacctggga

SEQ ID NO: 53220 - DNA, 15 bp, Homo sapiens
tcactcacacctggg

SEQ ID NO: 53221 - DNA, 15 bp, Homo sapiens
ctcactcacacctgg

SEQ ID NO: 53222 - DNA, 15 bp, Homo sapiens
cctcactcacacctg

SEQ ID NO: 53223 - DNA, 15 bp, Homo sapiens
acctcactcacacct

SEQ ID NO: 53224 - DNA, 15 bp, Homo sapiens
cacctcactcacacc

SEQ ID NO: 53225 - DNA, 15 bp, Homo sapiens
tcacctcactcacac

SEQ ID NO: 53226 - DNA, 15 bp, Homo sapiens
ctcacctcactcaca

SEQ ID NO: 53227 - DNA, 15 bp, Homo sapiens
tctcacctcactcac

SEQ ID NO: 53228 - DNA, 15 bp, Homo sapiens
ttctcacctcactca

SEQ ID NO: 53229 - DNA, 15 bp, Homo sapiens
attctcacctcactc

SEQ ID NO: 53230 - DNA, 15 bp, Homo sapiens
aattctcacctcact

SEQ ID NO: 53231 - DNA, 15 bp, Homo sapiens
gaattctcacctcac

SEQ ID NO: 53232 - DNA, 15 bp, Homo sapiens
agaattctcacctca

SEQ ID NO: 53233 - DNA, 15 bp, Homo sapiens
aagaattctcacctc

SEQ ID NO: 53234 - DNA, 15 bp, Homo sapiens
aaagaattctcacct

SEQ ID NO: 53235 - DNA, 15 bp, Homo sapiens
gaaagaattctcacc

SEQ ID NO: 53236 - DNA, 15 bp, Homo sapiens
tgaaagaattctcac

SEQ ID NO: 53237 - DNA, 15 bp, Homo sapiens
ctgaaagaattctca

SEQ ID NO: 53238 - DNA, 15 bp, Homo sapiens
actgaaagaattctc

SEQ ID NO: 53239 - DNA, 15 bp, Homo sapiens
aactgaaagaattct

SEQ ID NO: 53240 - DNA, 15 bp, Homo sapiens
aaactgaaagaattc

SEQ ID NO: 53241 - DNA, 15 bp, Homo sapiens
taaactgaaagaatt

SEQ ID NO: 53242 - DNA, 15 bp, Homo sapiens
ataaactgaaagaat

SEQ ID NO: 53243 - DNA, 15 bp, Homo sapiens
gataaactgaaagaa

SEQ ID NO: 53244 - DNA, 15 bp, Homo sapiens
agataaactgaaaga

SEQ ID NO: 53245 - DNA, 15 bp, Homo sapiens
tagataaactgaaag

SEQ ID NO: 53246 - DNA, 15 bp, Homo sapiens
ctagataaactgaaa

SEQ ID NO: 53247 - DNA, 15 bp, Homo sapiens
gctagataaactgaa

SEQ ID NO: 53248 - DNA, 15 bp, Homo sapiens
agctagataaactga

SEQ ID NO: 53249 - DNA, 15 bp, Homo sapiens
cagctagataaactg

SEQ ID NO: 53250 - DNA, 15 bp, Homo sapiens
ccagctagataaact

SEQ ID NO: 53251 - DNA, 15 bp, Homo sapiens
cccagctagataaac

SEQ ID NO: 53252 - DNA, 15 bp, Homo sapiens
ccccagctagataaa

SEQ ID NO: 53253 - DNA, 15 bp, Homo sapiens
cccccagctagataa

SEQ ID NO: 53254 - DNA, 15 bp, Homo sapiens
tcccccagctagata

SEQ ID NO: 53255 - DNA, 15 bp, Homo sapiens
ttcccccagctagat

SEQ ID NO: 53256 - DNA, 15 bp, Homo sapiens
attcccccagctaga

SEQ ID NO: 53257 - DNA, 15 bp, Homo sapiens
cattcccccagctag

SEQ ID NO: 53258 - DNA, 15 bp, Homo sapiens
acattcccccagcta

SEQ ID NO: 53259 - DNA, 15 bp, Homo sapiens
tacattcccccagct

SEQ ID NO: 53260 - DNA, 15 bp, Homo sapiens
ctacattcccccagc

SEQ ID NO: 53261 - DNA, 15 bp, Homo sapiens
actacattcccccag

SEQ ID NO: 53262 - DNA, 15 bp, Homo sapiens
cactacattccccca

SEQ ID NO: 53263 - DNA, 15 bp, Homo sapiens
tcactacattccccc

SEQ ID NO: 53264 - DNA, 15 bp, Homo sapiens
ctcactacattcccc

SEQ ID NO: 53265 - DNA, 15 bp, Homo sapiens
gctcactacattccc

SEQ ID NO: 53266 - DNA, 15 bp, Homo sapiens
tgctcactacattcc

SEQ ID NO: 53267 - DNA, 15 bp, Homo sapiens
atgctcactacattc

SEQ ID NO: 53268 - DNA, 15 bp, Homo sapiens
tatgctcactacatt

SEQ ID NO: 53269 - DNA, 15 bp, Homo sapiens
ctatgctcactacat

SEQ ID NO: 53270 - DNA, 15 bp, Homo sapiens
gctatgctcactaca

SEQ ID NO: 53271 - DNA, 15 bp, Homo sapiens
agctatgctcactac

SEQ ID NO: 53272 - DNA, 15 bp, Homo sapiens
tagctatgctcacta

SEQ ID NO: 53273 - DNA, 15 bp, Homo sapiens
ttagctatgctcact

SEQ ID NO: 53274 - DNA, 15 bp, Homo sapiens
tttagctatgctcac

SEQ ID NO: 53275 - DNA, 15 bp, Homo sapiens
ctttagctatgctca

SEQ ID NO: 53276 - DNA, 15 bp, Homo sapiens
actttagctatgctc

SEQ ID NO: 53277 - DNA, 15 bp, Homo sapiens
gactttagctatgct

SEQ ID NO: 53278 - DNA, 15 bp, Homo sapiens
tgactttagctatgc

SEQ ID NO: 53279 - DNA, 15 bp, Homo sapiens
gtgactttagctatg

SEQ ID NO: 53280 - DNA, 15 bp, Homo sapiens
tgtgactttagctat

SEQ ID NO: 53281 - DNA, 15 bp, Homo sapiens
ctgtgactttagcta

SEQ ID NO: 53282 - DNA, 15 bp, Homo sapiens
cctgtgactttagct

SEQ ID NO: 53283 - DNA, 15 bp, Homo sapiens
ccctgtgactttagc

SEQ ID NO: 53284 - DNA, 15 bp, Homo sapiens
gccctgtgactttag

SEQ ID NO: 53285 - DNA, 15 bp, Homo sapiens
tgccctgtgacttta

SEQ ID NO: 53286 - DNA, 15 bp, Homo sapiens
gtgccctgtgacttt

SEQ ID NO: 53287 - DNA, 15 bp, Homo sapiens
ggtgccctgtgactt

SEQ ID NO: 53288 - DNA, 15 bp, Homo sapiens
tggtgccctgtgact

SEQ ID NO: 53289 - DNA, 15 bp, Homo sapiens
gtggtgccctgtgac

SEQ ID NO: 53290 - DNA, 15 bp, Homo sapiens
ggtggtgccctgtga

SEQ ID NO: 53291 - DNA, 15 bp, Homo sapiens
aggtggtgccctgtg

SEQ ID NO: 53292 - DNA, 15 bp, Homo sapiens
gaggtggtgccctgt

SEQ ID NO: 53293 - DNA, 15 bp, Homo sapiens
agaggtggtgccctg

SEQ ID NO: 53294 - DNA, 15 bp, Homo sapiens
gagaggtggtgccct

SEQ ID NO: 53295 - DNA, 15 bp, Homo sapiens
ggagaggtggtgccc

SEQ ID NO: 53296 - DNA, 15 bp, Homo sapiens
tggagaggtggtgcc

SEQ ID NO: 53297 - DNA, 15 bp, Homo sapiens
ctggagaggtggtgc

SEQ ID NO: 53298 - DNA, 15 bp, Homo sapiens
tctggagaggtggtg

SEQ ID NO: 53299 - DNA, 15 bp, Homo sapiens
ttctggagaggtggt

SEQ ID NO: 53300 - DNA, 15 bp, Homo sapiens
cttctggagaggtgg

SEQ ID NO: 53301 - DNA, 15 bp, Homo sapiens
acttctggagaggtg

SEQ ID NO: 53302 - DNA, 15 bp, Homo sapiens
tacttctggagaggt

SEQ ID NO: 53303 - DNA, 15 bp, Homo sapiens
gtacttctggagagg

SEQ ID NO: 53304 - DNA, 15 bp, Homo sapiens
tgtacttctggagag

SEQ ID NO: 53305 - DNA, 15 bp, Homo sapiens
ctgtacttctggaga

SEQ ID NO: 53306 - DNA, 15 bp, Homo sapiens
cctgtacttctggag

SEQ ID NO: 53307 - DNA, 15 bp, Homo sapiens
gcctgtacttctgga

SEQ ID NO: 53308 - DNA, 15 bp, Homo sapiens
ggcctgtacttctgg

SEQ ID NO: 53309 - DNA, 15 bp, Homo sapiens
tggcctgtacttctg

SEQ ID NO: 53310 - DNA, 15 bp, Homo sapiens
atggcctgtacttct

SEQ ID NO: 53311 - DNA, 15 bp, Homo sapiens
catggcctgtacttc

SEQ ID NO: 53312 - DNA, 15 bp, Homo sapiens
ccatggcctgtactt

SEQ ID NO: 53313 - DNA, 15 bp, Homo sapiens
accatggcctgtact

SEQ ID NO: 53314 - DNA, 15 bp, Homo sapiens
caccatggcctgtac

SEQ ID NO: 53315 - DNA, 15 bp, Homo sapiens
gcaccatggcctgta

SEQ ID NO: 53316 - DNA, 15 bp, Homo sapiens
tgcaccatggcctgt

SEQ ID NO: 53317 - DNA, 15 bp, Homo sapiens
ctgcaccatggcctg

SEQ ID NO: 53318 - DNA, 15 bp, Homo sapiens
tctgcaccatggcct

SEQ ID NO: 53319 - DNA, 15 bp, Homo sapiens
ctctgcaccatggcc

SEQ ID NO: 53320 - DNA, 15 bp, Homo sapiens
tctctgcaccatggc

SEQ ID NO: 53321 - DNA, 15 bp, Homo sapiens
atctctgcaccatgg

SEQ ID NO: 53322 - DNA, 15 bp, Homo sapiens
tatctctgcaccatg

SEQ ID NO: 53323 - DNA, 15 bp, Homo sapiens
ttatctctgcaccat

SEQ ID NO: 53324 - DNA, 15 bp, Homo sapiens
gttatctctgcacca

SEQ ID NO: 53325 - DNA, 15 bp, Homo sapiens
cgttatctctgcacc

SEQ ID NO: 53326 - DNA, 15 bp, Homo sapiens
gcgttatctctgcac

SEQ ID NO: 53327 - DNA, 15 bp, Homo sapiens
agcgttatctctgca

SEQ ID NO: 53328 - DNA, 15 bp, Homo sapiens
cagcgttatctctgc

SEQ ID NO: 53329 - DNA, 15 bp, Homo sapiens
acagcgttatctctg

SEQ ID NO: 53330 - DNA, 15 bp, Homo sapiens
cacagcgttatctct

SEQ ID NO: 53331 - DNA, 15 bp, Homo sapiens
gcacagcgttatctc

SEQ ID NO: 53332 - DNA, 15 bp, Homo sapiens
tgcacagcgttatct

SEQ ID NO: 53333 - DNA, 15 bp, Homo sapiens
atgcacagcgttatc

SEQ ID NO: 53334 - DNA, 15 bp, Homo sapiens
tatgcacagcgttat

SEQ ID NO: 53335 - DNA, 15 bp, Homo sapiens
atatgcacagcgtta

SEQ ID NO: 53336 - DNA, 15 bp, Homo sapiens
gatatgcacagcgtt

SEQ ID NO: 53337 - DNA, 15 bp, Homo sapiens
tgatatgcacagcgt

SEQ ID NO: 53338 - DNA, 15 bp, Homo sapiens
ctgatatgcacagcg

SEQ ID NO: 53339 - DNA, 15 bp, Homo sapiens
gctgatatgcacagc

SEQ ID NO: 53340 - DNA, 15 bp, Homo sapiens
tgctgatatgcacag

SEQ ID NO: 53341 - DNA, 15 bp, Homo sapiens
atgctgatatgcaca

SEQ ID NO: 53342 - DNA, 15 bp, Homo sapiens
gatgctgatatgcac

SEQ ID NO: 53343 - DNA, 15 bp, Homo sapiens
ggatgctgatatgca

SEQ ID NO: 53344 - DNA, 15 bp, Homo sapiens
tggatgctgatatgc

SEQ ID NO: 53345 - DNA, 15 bp, Homo sapiens
atggatgctgatatg

SEQ ID NO: 53346 - DNA, 15 bp, Homo sapiens
catggatgctgatat

SEQ ID NO: 53347 - DNA, 15 bp, Homo sapiens
gcatggatgctgata

SEQ ID NO: 53348 - DNA, 15 bp, Homo sapiens
ggcatggatgctgat

SEQ ID NO: 53349 - DNA, 15 bp, Homo sapiens
tggcatggatgctga

SEQ ID NO: 53350 - DNA, 15 bp, Homo sapiens
gtggcatggatgctg

SEQ ID NO: 53351 - DNA, 15 bp, Homo sapiens
agtggcatggatgct

SEQ ID NO: 53352 - DNA, 15 bp, Homo sapiens
gagtggcatggatgc

SEQ ID NO: 53353 - DNA, 15 bp, Homo sapiens
tgagtggcatggatg

SEQ ID NO: 53354 - DNA, 15 bp, Homo sapiens
gtgagtggcatggat

SEQ ID NO: 53355 - DNA, 15 bp, Homo sapiens
cgtgagtggcatgga

SEQ ID NO: 53356 - DNA, 15 bp, Homo sapiens
ccgtgagtggcatgg

SEQ ID NO: 53357 - DNA, 15 bp, Homo sapiens
accgtgagtggcatg

SEQ ID NO: 53358 - DNA, 15 bp, Homo sapiens
gaccgtgagtggcat

SEQ ID NO: 53359 - DNA, 15 bp, Homo sapiens
tgaccgtgagtggca

SEQ ID NO: 53360 - DNA, 15 bp, Homo sapiens
ttgaccgtgagtggc

SEQ ID NO: 53361 - DNA, 15 bp, Homo sapiens
tttgaccgtgagtgg

SEQ ID NO: 53362 - DNA, 15 bp, Homo sapiens
atttgaccgtgagtg

SEQ ID NO: 53363 - DNA, 15 bp, Homo sapiens
tatttgaccgtgagt

SEQ ID NO: 53364 - DNA, 15 bp, Homo sapiens
ctatttgaccgtgag

SEQ ID NO: 53365 - DNA, 15 bp, Homo sapiens
gctatttgaccgtga

SEQ ID NO: 53366 - DNA, 15 bp, Homo sapiens
tgctatttgaccgtg

SEQ ID NO: 53367 - DNA, 15 bp, Homo sapiens
ctgctatttgaccgt

SEQ ID NO: 53368 - DNA, 15 bp, Homo sapiens
actgctatttgaccg

SEQ ID NO: 53369 - DNA, 15 bp, Homo sapiens
aactgctatttgacc

SEQ ID NO: 53370 - DNA, 15 bp, Homo sapiens
aaactgctatttgac

SEQ ID NO: 53371 - DNA, 15 bp, Homo sapiens
aaaactgctatttga

SEQ ID NO: 53372 - DNA, 15 bp, Homo sapiens
gaaaactgctatttg

SEQ ID NO: 53373 - DNA, 15 bp, Homo sapiens
agaaaactgctattt

SEQ ID NO: 53374 - DNA, 15 bp, Homo sapiens
cagaaaactgctatt

SEQ ID NO: 53375 - DNA, 15 bp, Homo sapiens
gcagaaaactgctat

SEQ ID NO: 53376 - DNA, 15 bp, Homo sapiens
tgcagaaaactgcta

SEQ ID NO: 53377 - DNA, 15 bp, Homo sapiens
ttgcagaaaactgct

SEQ ID NO: 53378 - DNA, 15 bp, Homo sapiens
tttgcagaaaactgc

SEQ ID NO: 53379 - DNA, 15 bp, Homo sapiens
ttttgcagaaaactg

SEQ ID NO: 53380 - DNA, 15 bp, Homo sapiens
gttttgcagaaaact

SEQ ID NO: 53381 - DNA, 15 bp, Homo sapiens
agttttgcagaaaac

SEQ ID NO: 53382 - DNA, 15 bp, Homo sapiens
aagttttgcagaaaa

SEQ ID NO: 53383 - DNA, 15 bp, Homo sapiens
taagttttgcagaaa

SEQ ID NO: 53384 - DNA, 15 bp, Homo sapiens
ctaagttttgcagaa

SEQ ID NO: 53385 - DNA, 15 bp, Homo sapiens
actaagttttgcaga

SEQ ID NO: 53386 - DNA, 15 bp, Homo sapiens
cactaagttttgcag

SEQ ID NO: 53387 - DNA, 15 bp, Homo sapiens
tcactaagttttgca

SEQ ID NO: 53388 - DNA, 15 bp, Homo sapiens
ctcactaagttttgc

SEQ ID NO: 53389 - DNA, 15 bp, Homo sapiens
cctcactaagttttg

SEQ ID NO: 53390 - DNA, 15 bp, Homo sapiens
ccctcactaagtttt

SEQ ID NO: 53391 - DNA, 15 bp, Homo sapiens
gccctcactaagttt

SEQ ID NO: 53392 - DNA, 15 bp, Homo sapiens
agccctcactaagtt

SEQ ID NO: 53393 - DNA, 15 bp, Homo sapiens
cagccctcactaagt

SEQ ID NO: 53394 - DNA, 15 bp, Homo sapiens
ccagccctcactaag

SEQ ID NO: 53395 - DNA, 15 bp, Homo sapiens
accagccctcactaa

SEQ ID NO: 53396 - DNA, 15 bp, Homo sapiens
caccagccctcacta

SEQ ID NO: 53397 - DNA, 15 bp, Homo sapiens
acaccagccctcact

SEQ ID NO: 53398 - DNA, 15 bp, Homo sapiens
aacaccagccctcac

SEQ ID NO: 53399 - DNA, 15 bp, Homo sapiens
aaacaccagccctca

SEQ ID NO: 53400 - DNA, 15 bp, Homo sapiens
caaacaccagccctc

SEQ ID NO: 53401 - DNA, 15 bp, Homo sapiens
ccaaacaccagccct

SEQ ID NO: 53402 - DNA, 15 bp, Homo sapiens
tccaaacaccagccc

SEQ ID NO: 53403 - DNA, 15 bp, Homo sapiens
ttccaaacaccagcc

SEQ ID NO: 53404 - DNA, 15 bp, Homo sapiens
cttccaaacaccagc

SEQ ID NO: 53405 - DNA, 15 bp, Homo sapiens
acttccaaacaccag

SEQ ID NO: 53406 - DNA, 15 bp, Homo sapiens
cacttccaaacacca

SEQ ID NO: 53407 - DNA, 15 bp, Homo sapiens
ccacttccaaacacc

SEQ ID NO: 53408 - DNA, 15 bp, Homo sapiens
tccacttccaaacac

SEQ ID NO: 53409 - DNA, 15 bp, Homo sapiens
ctccacttccaaaca

SEQ ID NO: 53410 - DNA, 15 bp, Homo sapiens
actccacttccaaac

SEQ ID NO: 53411 - DNA, 15 bp, Homo sapiens
aactccacttccaaa

SEQ ID NO: 53412 - DNA, 15 bp, Homo sapiens
caactccacttccaa

SEQ ID NO: 53413 - DNA, 15 bp, Homo sapiens
tcaactccacttcca

SEQ ID NO: 53414 - DNA, 15 bp, Homo sapiens
ctcaactccacttcc

SEQ ID NO: 53415 - DNA, 15 bp, Homo sapiens
actcaactccacttc

SEQ ID NO: 53416 - DNA, 15 bp, Homo sapiens
tactcaactccactt

SEQ ID NO: 53417 - DNA, 15 bp, Homo sapiens
ttactcaactccact

SEQ ID NO: 53418 - DNA, 15 bp, Homo sapiens
attactcaactccac

SEQ ID NO: 53419 - DNA, 15 bp, Homo sapiens
aattactcaactcca

SEQ ID NO: 53420 - DNA, 15 bp, Homo sapiens
caattactcaactcc

SEQ ID NO: 53421 - DNA, 15 bp, Homo sapiens
gcaattactcaactc

SEQ ID NO: 53422 - DNA, 15 bp, Homo sapiens
tgcaattactcaact

SEQ ID NO: 53423 - DNA, 15 bp, Homo sapiens
ctgcaattactcaac

SEQ ID NO: 53424 - DNA, 15 bp, Homo sapiens
actgcaattactcaa

SEQ ID NO: 53425 - DNA, 15 bp, Homo sapiens
tactgcaattactca

SEQ ID NO: 53426 - DNA, 15 bp, Homo sapiens
gtactgcaattactc

SEQ ID NO: 53427 - DNA, 15 bp, Homo sapiens
ggtactgcaattact

SEQ ID NO: 53428 - DNA, 15 bp, Homo sapiens
gggtactgcaattac

SEQ ID NO: 53429 - DNA, 15 bp, Homo sapiens
agggtactgcaatta

SEQ ID NO: 53430 - DNA, 15 bp, Homo sapiens
tagggtactgcaatt

SEQ ID NO: 53431 - DNA, 15 bp, Homo sapiens
atagggtactgcaat

SEQ ID NO: 53432 - DNA, 15 bp, Homo sapiens
aatagggtactgcaa

SEQ ID NO: 53433 - DNA, 15 bp, Homo sapiens
aaatagggtactgca

SEQ ID NO: 53434 - DNA, 15 bp, Homo sapiens
aaaatagggtactgc

SEQ ID NO: 53435 - DNA, 15 bp, Homo sapiens
gaaaatagggtactg

SEQ ID NO: 53436 - DNA, 15 bp, Homo sapiens
ggaaaatagggtact

SEQ ID NO: 53437 - DNA, 15 bp, Homo sapiens
aggaaaatagggtac

SEQ ID NO: 53438 - DNA, 15 bp, Homo sapiens
aaggaaaatagggta

SEQ ID NO: 53439 - DNA, 15 bp, Homo sapiens
aaaggaaaatagggt

SEQ ID NO: 53440 - DNA, 15 bp, Homo sapiens
aaaaggaaaataggg

SEQ ID NO: 53441 - DNA, 15 bp, Homo sapiens
aaaaaggaaaatagg

SEQ ID NO: 53442 - DNA, 15 bp, Homo sapiens
caaaaaggaaaatag

SEQ ID NO: 53443 - DNA, 15 bp, Homo sapiens
ccaaaaaggaaaata

SEQ ID NO: 53444 - DNA, 15 bp, Homo sapiens
gccaaaaaggaaaat

SEQ ID NO: 53445 - DNA, 15 bp, Homo sapiens
agccaaaaaggaaaa

SEQ ID NO: 53446 - DNA, 15 bp, Homo sapiens
cagccaaaaaggaaa

SEQ ID NO: 53447 - DNA, 15 bp, Homo sapiens
gcagccaaaaaggaa

SEQ ID NO: 53448 - DNA, 15 bp, Homo sapiens
tgcagccaaaaagga

SEQ ID NO: 53449 - DNA, 15 bp, Homo sapiens
ctgcagccaaaaagg

SEQ ID NO: 53450 - DNA, 15 bp, Homo sapiens
gctgcagccaaaaag

SEQ ID NO: 53451 - DNA, 15 bp, Homo sapiens
ggctgcagccaaaaa

SEQ ID NO: 53452 - DNA, 15 bp, Homo sapiens
aggctgcagccaaaa

SEQ ID NO: 53453 - DNA, 15 bp, Homo sapiens
gaggctgcagccaaa

SEQ ID NO: 53454 - DNA, 15 bp, Homo sapiens
agaggctgcagccaa

SEQ ID NO: 53455 - DNA, 15 bp, Homo sapiens
gagaggctgcagcca

SEQ ID NO: 53456 - DNA, 15 bp, Homo sapiens
tgagaggctgcagcc

SEQ ID NO: 53457 - DNA, 15 bp, Homo sapiens
ctgagaggctgcagc

SEQ ID NO: 53458 - DNA, 15 bp, Homo sapiens
gctgagaggctgcag

SEQ ID NO: 53459 - DNA, 15 bp, Homo sapiens
ggctgagaggctgca

SEQ ID NO: 53460 - DNA, 15 bp, Homo sapiens
tggctgagaggctgc

SEQ ID NO: 53461 - DNA, 15 bp, Homo sapiens
ctggctgagaggctg

SEQ ID NO: 53462 - DNA, 15 bp, Homo sapiens
gctggctgagaggct

SEQ ID NO: 53463 - DNA, 15 bp, Homo sapiens
ggctggctgagaggc

SEQ ID NO: 53464 - DNA, 15 bp, Homo sapiens
tggctggctgagagg

SEQ ID NO: 53465 - DNA, 15 bp, Homo sapiens
gtggctggctgagag

SEQ ID NO: 53466 - DNA, 15 bp, Homo sapiens
tgtggctggctgaga

SEQ ID NO: 53467 - DNA, 15 bp, Homo sapiens
ctgtggctggctgag

SEQ ID NO: 53468 - DNA, 15 bp, Homo sapiens
gctgtggctggctga

SEQ ID NO: 53469 - DNA, 15 bp, Homo sapiens
tgctgtggctggctg

SEQ ID NO: 53470 - DNA, 15 bp, Homo sapiens
atgctgtggctggct

SEQ ID NO: 53471 - DNA, 15 bp, Homo sapiens
gatgctgtggctggc

SEQ ID NO: 53472 - DNA, 15 bp, Homo sapiens
agatgctgtggctgg

SEQ ID NO: 53473 - DNA, 15 bp, Homo sapiens
gagatgctgtggctg

SEQ ID NO: 53474 - DNA, 15 bp, Homo sapiens
ggagatgctgtggct

SEQ ID NO: 53475 - DNA, 15 bp, Homo sapiens
gggagatgctgtggc

SEQ ID NO: 53476 - DNA, 15 bp, Homo sapiens
agggagatgctgtgg

SEQ ID NO: 53477 - DNA, 15 bp, Homo sapiens
cagggagatgctgtg

SEQ ID NO: 53478 - DNA, 15 bp, Homo sapiens
acagggagatgctgt

SEQ ID NO: 53479 - DNA, 15 bp, Homo sapiens
cacagggagatgctg

SEQ ID NO: 53480 - DNA, 15 bp, Homo sapiens
acacagggagatgct

SEQ ID NO: 53481 - DNA, 15 bp, Homo sapiens
gacacagggagatgc

SEQ ID NO: 53482 - DNA, 15 bp, Homo sapiens
agacacagggagatg

SEQ ID NO: 53483 - DNA, 15 bp, Homo sapiens
aagacacagggagat

SEQ ID NO: 53484 - DNA, 15 bp, Homo sapiens
caagacacagggaga

SEQ ID NO: 53485 - DNA, 15 bp, Homo sapiens
ccaagacacagggag

SEQ ID NO: 53486 - DNA, 15 bp, Homo sapiens
accaagacacaggga

SEQ ID NO: 53487 - DNA, 15 bp, Homo sapiens
taccaagacacaggg

SEQ ID NO: 53488 - DNA, 15 bp, Homo sapiens
ctaccaagacacagg

SEQ ID NO: 53489 - DNA, 15 bp, Homo sapiens
cctaccaagacacag

SEQ ID NO: 53490 - DNA, 15 bp, Homo sapiens
acctaccaagacaca

SEQ ID NO: 53491 - DNA, 15 bp, Homo sapiens
aacctaccaagacac

SEQ ID NO: 53492 - DNA, 15 bp, Homo sapiens
aaacctaccaagaca

SEQ ID NO: 53493 - DNA, 15 bp, Homo sapiens
aaaacctaccaagac

SEQ ID NO: 53494 - DNA, 15 bp, Homo sapiens
caaaacctaccaaga

SEQ ID NO: 53495 - DNA, 15 bp, Homo sapiens
ccaaaacctaccaag

SEQ ID NO: 53496 - DNA, 15 bp, Homo sapiens
tccaaaacctaccaa

SEQ ID NO: 53497 - DNA, 15 bp, Homo sapiens
ttccaaaacctacca

SEQ ID NO: 53498 - DNA, 15 bp, Homo sapiens
tttccaaaacctacc

SEQ ID NO: 53499 - DNA, 15 bp, Homo sapiens
ctttccaaaacctac

SEQ ID NO: 53500 - DNA, 15 bp, Homo sapiens
tctttccaaaaccta

SEQ ID NO: 53501 - DNA, 15 bp, Homo sapiens
ttctttccaaaacct

SEQ ID NO: 53502 - DNA, 15 bp, Homo sapiens
cttctttccaaaacc

SEQ ID NO: 53503 - DNA, 15 bp, Homo sapiens
acttctttccaaaac

SEQ ID NO: 53504 - DNA, 15 bp, Homo sapiens
cacttctttccaaaa

SEQ ID NO: 53505 - DNA, 15 bp, Homo sapiens
acacttctttccaaa

SEQ ID NO: 53506 - DNA, 15 bp, Homo sapiens
cacacttctttccaa

SEQ ID NO: 53507 - DNA, 15 bp, Homo sapiens
ccacacttctttcca

SEQ ID NO: 53508 - DNA, 15 bp, Homo sapiens
cccacacttctttcc

SEQ ID NO: 53509 - DNA, 15 bp, Homo sapiens
tcccacacttctttc

SEQ ID NO: 53510 - DNA, 15 bp, Homo sapiens
ctcccacacttcttt

SEQ ID NO: 53511 - DNA, 15 bp, Homo sapiens
gctcccacacttctt

SEQ ID NO: 53512 - DNA, 15 bp, Homo sapiens
tgctcccacacttct

SEQ ID NO: 53513 - DNA, 15 bp, Homo sapiens
ttgctcccacacttc

SEQ ID NO: 53514 - DNA, 15 bp, Homo sapiens
tttgctcccacactt

SEQ ID NO: 53515 - DNA, 15 bp, Homo sapiens
ttttgctcccacact

SEQ ID NO: 53516 - DNA, 15 bp, Homo sapiens
cttttgctcccacac

SEQ ID NO: 53517 - DNA, 15 bp, Homo sapiens
gcttttgctcccaca

SEQ ID NO: 53518 - DNA, 15 bp, Homo sapiens
tgcttttgctcccac

SEQ ID NO: 53519 - DNA, 15 bp, Homo sapiens
atgcttttgctccca

SEQ ID NO: 53520 - DNA, 15 bp, Homo sapiens
catgcttttgctccc

SEQ ID NO: 53521 - DNA, 15 bp, Homo sapiens
tcatgcttttgctcc

SEQ ID NO: 53522 - DNA, 15 bp, Homo sapiens
atcatgcttttgctc

SEQ ID NO: 53523 - DNA, 15 bp, Homo sapiens
catcatgcttttgct

SEQ ID NO: 53524 - DNA, 15 bp, Homo sapiens
acatcatgcttttgc

SEQ ID NO: 53525 - DNA, 15 bp, Homo sapiens
aacatcatgcttttg

SEQ ID NO: 53526 - DNA, 15 bp, Homo sapiens
taacatcatgctttt

SEQ ID NO: 53527 - DNA, 15 bp, Homo sapiens
gtaacatcatgcttt

SEQ ID NO: 53528 - DNA, 15 bp, Homo sapiens
tgtaacatcatgctt

SEQ ID NO: 53529 - DNA, 15 bp, Homo sapiens
atgtaacatcatgct

SEQ ID NO: 53530 - DNA, 15 bp, Homo sapiens
catgtaacatcatgc

SEQ ID NO: 53531 - DNA, 15 bp, Homo sapiens
acatgtaacatcatg

SEQ ID NO: 53532 - DNA, 15 bp, Homo sapiens
tacatgtaacatcat

SEQ ID NO: 53533 - DNA, 15 bp, Homo sapiens
ctacatgtaacatca

SEQ ID NO: 53534 - DNA, 15 bp, Homo sapiens
tctacatgtaacatc

SEQ ID NO: 53535 - DNA, 15 bp, Homo sapiens
gtctacatgtaacat

SEQ ID NO: 53536 - DNA, 15 bp, Homo sapiens
agtctacatgtaaca

SEQ ID NO: 53537 - DNA, 15 bp, Homo sapiens
cagtctacatgtaac

SEQ ID NO: 53538 - DNA, 15 bp, Homo sapiens
ccagtctacatgtaa

SEQ ID NO: 53539 - DNA, 15 bp, Homo sapiens
gccagtctacatgta

SEQ ID NO: 53540 - DNA, 15 bp, Homo sapiens
ggccagtctacatgt

SEQ ID NO: 53541 - DNA, 15 bp, Homo sapiens
aggccagtctacatg

SEQ ID NO: 53542 - DNA, 15 bp, Homo sapiens
caggccagtctacat

SEQ ID NO: 53543 - DNA, 15 bp, Homo sapiens
tcaggccagtctaca

SEQ ID NO: 53544 - DNA, 15 bp, Homo sapiens
ctcaggccagtctac

SEQ ID NO: 53545 - DNA, 15 bp, Homo sapiens
tctcaggccagtcta

SEQ ID NO: 53546 - DNA, 15 bp, Homo sapiens
atctcaggccagtct

SEQ ID NO: 53547 - DNA, 15 bp, Homo sapiens
tatctcaggccagtc

SEQ ID NO: 53548 - DNA, 15 bp, Homo sapiens
gtatctcaggccagt

SEQ ID NO: 53549 - DNA, 15 bp, Homo sapiens
agtatctcaggccag

SEQ ID NO: 53550 - DNA, 15 bp, Homo sapiens
gagtatctcaggcca

SEQ ID NO: 53551 - DNA, 15 bp, Homo sapiens
tgagtatctcaggcc

SEQ ID NO: 53552 - DNA, 15 bp, Homo sapiens
atgagtatctcaggc

SEQ ID NO: 53553 - DNA, 15 bp, Homo sapiens
aatgagtatctcagg

SEQ ID NO: 53554 - DNA, 15 bp, Homo sapiens
gaatgagtatctcag

SEQ ID NO: 53555 - DNA, 15 bp, Homo sapiens
agaatgagtatctca

SEQ ID NO: 53556 - DNA, 15 bp, Homo sapiens
gagaatgagtatctc

SEQ ID NO: 53557 - DNA, 15 bp, Homo sapiens
tgagaatgagtatct

SEQ ID NO: 53558 - DNA, 15 bp, Homo sapiens
ctgagaatgagtatc

SEQ ID NO: 53559 - DNA, 15 bp, Homo sapiens
cctgagaatgagtat

SEQ ID NO: 53560 - DNA, 15 bp, Homo sapiens
ccctgagaatgagta

SEQ ID NO: 53561 - DNA, 15 bp, Homo sapiens
gccctgagaatgagt

SEQ ID NO: 53562 - DNA, 15 bp, Homo sapiens
tgccctgagaatgag

SEQ ID NO: 53563 - DNA, 15 bp, Homo sapiens
gtgccctgagaatga

SEQ ID NO: 53564 - DNA, 15 bp, Homo sapiens
agtgccctgagaatg

SEQ ID NO: 53565 - DNA, 15 bp, Homo sapiens
cagtgccctgagaat

SEQ ID NO: 53566 - DNA, 15 bp, Homo sapiens
acagtgccctgagaa

SEQ ID NO: 53567 - DNA, 15 bp, Homo sapiens
cacagtgccctgaga

SEQ ID NO: 53568 - DNA, 15 bp, Homo sapiens
acacagtgccctgag

SEQ ID NO: 53569 - DNA, 15 bp, Homo sapiens
cacacagtgccctga

SEQ ID NO: 53570 - DNA, 15 bp, Homo sapiens
tcacacagtgccctg

SEQ ID NO: 53571 - DNA, 15 bp, Homo sapiens
ttcacacagtgccct

SEQ ID NO: 53572 - DNA, 15 bp, Homo sapiens
attcacacagtgccc

SEQ ID NO: 53573 - DNA, 15 bp, Homo sapiens
cattcacacagtgcc

SEQ ID NO: 53574 - DNA, 15 bp, Homo sapiens
tcattcacacagtgc

SEQ ID NO: 53575 - DNA, 15 bp, Homo sapiens
atcattcacacagtg

SEQ ID NO: 53576 - DNA, 15 bp, Homo sapiens
catcattcacacagt

SEQ ID NO: 53577 - DNA, 15 bp, Homo sapiens
tcatcattcacacag

SEQ ID NO: 53578 - DNA, 15 bp, Homo sapiens
ctcatcattcacaca

SEQ ID NO: 53579 - DNA, 15 bp, Homo sapiens
gctcatcattcacac

SEQ ID NO: 53580 - DNA, 15 bp, Homo sapiens
agctcatcattcaca

SEQ ID NO: 53581 - DNA, 15 bp, Homo sapiens
cagctcatcattcac

SEQ ID NO: 53582 - DNA, 15 bp, Homo sapiens
gcagctcatcattca

SEQ ID NO: 53583 - DNA, 15 bp, Homo sapiens
agcagctcatcattc

SEQ ID NO: 53584 - DNA, 15 bp, Homo sapiens
cagcagctcatcatt

SEQ ID NO: 53585 - DNA, 15 bp, Homo sapiens
acagcagctcatcat

SEQ ID NO: 53586 - DNA, 15 bp, Homo sapiens
aacagcagctcatca

SEQ ID NO: 53587 - DNA, 15 bp, Homo sapiens
taacagcagctcatc

SEQ ID NO: 53588 - DNA, 15 bp, Homo sapiens
gtaacagcagctcat

SEQ ID NO: 53589 - DNA, 15 bp, Homo sapiens
agtaacagcagctca

SEQ ID NO: 53590 - DNA, 15 bp, Homo sapiens
cagtaacagcagctc

SEQ ID NO: 53591 - DNA, 15 bp, Homo sapiens
acagtaacagcagct

SEQ ID NO: 53592 - DNA, 15 bp, Homo sapiens
cacagtaacagcagc

SEQ ID NO: 53593 - DNA, 15 bp, Homo sapiens
acacagtaacagcag

SEQ ID NO: 53594 - DNA, 15 bp, Homo sapiens
cacacagtaacagca

SEQ ID NO: 53595 - DNA, 15 bp, Homo sapiens
ccacacagtaacagc

SEQ ID NO: 53596 - DNA, 15 bp, Homo sapiens
tccacacagtaacag

SEQ ID NO: 53597 - DNA, 15 bp, Homo sapiens
ctccacacagtaaca

SEQ ID NO: 53598 - DNA, 15 bp, Homo sapiens
cctccacacagtaac

SEQ ID NO: 53599 - DNA, 15 bp, Homo sapiens
ccctccacacagtaa

SEQ ID NO: 53600 - DNA, 15 bp, Homo sapiens
cccctccacacagta

SEQ ID NO: 53601 - DNA, 15 bp, Homo sapiens
tcccctccacacagt

SEQ ID NO: 53602 - DNA, 15 bp, Homo sapiens
ttcccctccacacag

SEQ ID NO: 53603 - DNA, 15 bp, Homo sapiens
tttcccctccacaca

SEQ ID NO: 53604 - DNA, 15 bp, Homo sapiens
atttcccctccacac

SEQ ID NO: 53605 - DNA, 15 bp, Homo sapiens
catttcccctccaca

SEQ ID NO: 53606 - DNA, 15 bp, Homo sapiens
gcatttcccctccac

SEQ ID NO: 53607 - DNA, 15 bp, Homo sapiens
tgcatttcccctcca

SEQ ID NO: 53608 - DNA, 15 bp, Homo sapiens
gtgcatttcccctcc

SEQ ID NO: 53609 - DNA, 15 bp, Homo sapiens
agtgcatttcccctc

SEQ ID NO: 53610 - DNA, 15 bp, Homo sapiens
aagtgcatttcccct

SEQ ID NO: 53611 - DNA, 15 bp, Homo sapiens
taagtgcatttcccc

SEQ ID NO: 53612 - DNA, 15 bp, Homo sapiens
ctaagtgcatttccc

SEQ ID NO: 53613 - DNA, 15 bp, Homo sapiens
actaagtgcatttcc

SEQ ID NO: 53614 - DNA, 15 bp, Homo sapiens
cactaagtgcatttc

SEQ ID NO: 53615 - DNA, 15 bp, Homo sapiens
gcactaagtgcattt

SEQ ID NO: 53616 - DNA, 15 bp, Homo sapiens
agcactaagtgcatt

SEQ ID NO: 53617 - DNA, 15 bp, Homo sapiens
aagcactaagtgcat

SEQ ID NO: 53618 - DNA, 15 bp, Homo sapiens
gaagcactaagtgca

SEQ ID NO: 53619 - DNA, 15 bp, Homo sapiens
tgaagcactaagtgc

SEQ ID NO: 53620 - DNA, 15 bp, Homo sapiens
ctgaagcactaagtg

SEQ ID NO: 53621 - DNA, 15 bp, Homo sapiens
tctgaagcactaagt

SEQ ID NO: 53622 - DNA, 15 bp, Homo sapiens
ctctgaagcactaag

SEQ ID NO: 53623 - DNA, 15 bp, Homo sapiens
gctctgaagcactaa

SEQ ID NO: 53624 - DNA, 15 bp, Homo sapiens
ggctctgaagcacta

SEQ ID NO: 53625 - DNA, 15 bp, Homo sapiens
tggctctgaagcact

SEQ ID NO: 53626 - DNA, 15 bp, Homo sapiens
gtggctctgaagcac

SEQ ID NO: 53627 - DNA, 15 bp, Homo sapiens
agtggctctgaagca

SEQ ID NO: 53628 - DNA, 15 bp, Homo sapiens
aagtggctctgaagc

SEQ ID NO: 53629 - DNA, 15 bp, Homo sapiens
caagtggctctgaag

SEQ ID NO: 53630 - DNA, 15 bp, Homo sapiens
tcaagtggctctgaa

SEQ ID NO: 53631 - DNA, 15 bp, Homo sapiens
ttcaagtggctctga

SEQ ID NO: 53632 - DNA, 15 bp, Homo sapiens
tttcaagtggctctg

SEQ ID NO: 53633 - DNA, 15 bp, Homo sapiens
ctttcaagtggctct

SEQ ID NO: 53634 - DNA, 15 bp, Homo sapiens
cctttcaagtggctc

SEQ ID NO: 53635 - DNA, 15 bp, Homo sapiens
ccctttcaagtggct

SEQ ID NO: 53636 - DNA, 15 bp, Homo sapiens
tccctttcaagtggc

SEQ ID NO: 53637 - DNA, 15 bp, Homo sapiens
atccctttcaagtgg

SEQ ID NO: 53638 - DNA, 15 bp, Homo sapiens
tatccctttcaagtg

SEQ ID NO: 53639 - DNA, 15 bp, Homo sapiens
ttatccctttcaagt

SEQ ID NO: 53640 - DNA, 15 bp, Homo sapiens
cttatccctttcaag

SEQ ID NO: 53641 - DNA, 15 bp, Homo sapiens
acttatccctttcaa

SEQ ID NO: 53642 - DNA, 15 bp, Homo sapiens
cacttatccctttca

SEQ ID NO: 53643 - DNA, 15 bp, Homo sapiens
gcacttatccctttc

SEQ ID NO: 53644 - DNA, 15 bp, Homo sapiens
agcacttatcccttt

SEQ ID NO: 53645 - DNA, 15 bp, Homo sapiens
gagcacttatccctt

SEQ ID NO: 53646 - DNA, 15 bp, Homo sapiens
agagcacttatccct

SEQ ID NO: 53647 - DNA, 15 bp, Homo sapiens
tagagcacttatccc

SEQ ID NO: 53648 - DNA, 15 bp, Homo sapiens
ctagagcacttatcc

SEQ ID NO: 53649 - DNA, 15 bp, Homo sapiens
tctagagcacttatc

SEQ ID NO: 53650 - DNA, 15 bp, Homo sapiens
ctctagagcacttat

SEQ ID NO: 53651 - DNA, 15 bp, Homo sapiens
tctctagagcactta

SEQ ID NO: 53652 - DNA, 15 bp, Homo sapiens
gtctctagagcactt

SEQ ID NO: 53653 - DNA, 15 bp, Homo sapiens
tgtctctagagcact

SEQ ID NO: 53654 - DNA, 15 bp, Homo sapiens
ttgtctctagagcac

SEQ ID NO: 53655 - DNA, 15 bp, Homo sapiens
attgtctctagagca

SEQ ID NO: 53656 - DNA, 15 bp, Homo sapiens
aattgtctctagagc

SEQ ID NO: 53657 - DNA, 15 bp, Homo sapiens
caattgtctctagag

SEQ ID NO: 53658 - DNA, 15 bp, Homo sapiens
ccaattgtctctaga

SEQ ID NO: 53659 - DNA, 15 bp, Homo sapiens
cccaattgtctctag

SEQ ID NO: 53660 - DNA, 15 bp, Homo sapiens
acccaattgtctcta

SEQ ID NO: 53661 - DNA, 15 bp, Homo sapiens
aacccaattgtctct

SEQ ID NO: 53662 - DNA, 15 bp, Homo sapiens
gaacccaattgtctc

SEQ ID NO: 53663 - DNA, 15 bp, Homo sapiens
tgaacccaattgtct

SEQ ID NO: 53664 - DNA, 15 bp, Homo sapiens
ttgaacccaattgtc

SEQ ID NO: 53665 - DNA, 15 bp, Homo sapiens
tttgaacccaattgt

SEQ ID NO: 53666 - DNA, 15 bp, Homo sapiens
atttgaacccaattg

SEQ ID NO: 53667 - DNA, 15 bp, Homo sapiens
catttgaacccaatt

SEQ ID NO: 53668 - DNA, 15 bp, Homo sapiens
acatttgaacccaat

SEQ ID NO: 53669 - DNA, 15 bp, Homo sapiens
cacatttgaacccaa

SEQ ID NO: 53670 - DNA, 15 bp, Homo sapiens
ccacatttgaaccca

SEQ ID NO: 53671 - DNA, 15 bp, Homo sapiens
tccacatttgaaccc

SEQ ID NO: 53672 - DNA, 15 bp, Homo sapiens
ctccacatttgaacc

SEQ ID NO: 53673 - DNA, 15 bp, Homo sapiens
gctccacatttgaac

SEQ ID NO: 53674 - DNA, 15 bp, Homo sapiens
tgctccacatttgaa

SEQ ID NO: 53675 - DNA, 15 bp, Homo sapiens
ctgctccacatttga

SEQ ID NO: 53676 - DNA, 15 bp, Homo sapiens
cctgctccacatttg

SEQ ID NO: 53677 - DNA, 15 bp, Homo sapiens
gcctgctccacattt

SEQ ID NO: 53678 - DNA, 15 bp, Homo sapiens
agcctgctccacatt

SEQ ID NO: 53679 - DNA, 15 bp, Homo sapiens
cagcctgctccacat

SEQ ID NO: 53680 - DNA, 15 bp, Homo sapiens
tcagcctgctccaca

SEQ ID NO: 53681 - DNA, 15 bp, Homo sapiens
ctcagcctgctccac

SEQ ID NO: 53682 - DNA, 15 bp, Homo sapiens
gctcagcctgctcca

SEQ ID NO: 53683 - DNA, 15 bp, Homo sapiens
tgctcagcctgctcc

SEQ ID NO: 53684 - DNA, 15 bp, Homo sapiens
ttgctcagcctgctc

SEQ ID NO: 53685 - DNA, 15 bp, Homo sapiens
cttgctcagcctgct

SEQ ID NO: 53686 - DNA, 15 bp, Homo sapiens
tcttgctcagcctgc

SEQ ID NO: 53687 - DNA, 15 bp, Homo sapiens
ttcttgctcagcctg

SEQ ID NO: 53688 - DNA, 15 bp, Homo sapiens
gttcttgctcagcct

SEQ ID NO: 53689 - DNA, 15 bp, Homo sapiens
tgttcttgctcagcc

SEQ ID NO: 53690 - DNA, 15 bp, Homo sapiens
ctgttcttgctcagc

SEQ ID NO: 53691 - DNA, 15 bp, Homo sapiens
tctgttcttgctcag

SEQ ID NO: 53692 - DNA, 15 bp, Homo sapiens
ttctgttcttgctca

SEQ ID NO: 53693 - DNA, 15 bp, Homo sapiens
attctgttcttgctc

SEQ ID NO: 53694 - DNA, 15 bp, Homo sapiens
cattctgttcttgct

SEQ ID NO: 53695 - DNA, 15 bp, Homo sapiens
acattctgttcttgc

SEQ ID NO: 53696 - DNA, 15 bp, Homo sapiens
gacattctgttcttg

SEQ ID NO: 53697 - DNA, 15 bp, Homo sapiens
agacattctgttctt

SEQ ID NO: 53698 - DNA, 15 bp, Homo sapiens
gagacattctgttct

SEQ ID NO: 53699 - DNA, 15 bp, Homo sapiens
ggagacattctgttc

SEQ ID NO: 53700 - DNA, 15 bp, Homo sapiens
aggagacattctgtt

SEQ ID NO: 53701 - DNA, 15 bp, Homo sapiens
aaggagacattctgt

SEQ ID NO: 53702 - DNA, 15 bp, Homo sapiens
aaaggagacattctg

SEQ ID NO: 53703 - DNA, 15 bp, Homo sapiens
caaaggagacattct

SEQ ID NO: 53704 - DNA, 15 bp, Homo sapiens
gcaaaggagacattc

SEQ ID NO: 53705 - DNA, 15 bp, Homo sapiens
ggcaaaggagacatt

SEQ ID NO: 53706 - DNA, 15 bp, Homo sapiens
aggcaaaggagacat

SEQ ID NO: 53707 - DNA, 15 bp, Homo sapiens
caggcaaaggagaca

SEQ ID NO: 53708 - DNA, 15 bp, Homo sapiens
tcaggcaaaggagac

SEQ ID NO: 53709 - DNA, 15 bp, Homo sapiens
ctcaggcaaaggaga

SEQ ID NO: 53710 - DNA, 15 bp, Homo sapiens
gctcaggcaaaggag

SEQ ID NO: 53711 - DNA, 15 bp, Homo sapiens
ggctcaggcaaagga

SEQ ID NO: 53712 - DNA, 15 bp, Homo sapiens
aggctcaggcaaagg

SEQ ID NO: 53713 - DNA, 15 bp, Homo sapiens
caggctcaggcaaag

SEQ ID NO: 53714 - DNA, 15 bp, Homo sapiens
tcaggctcaggcaaa

SEQ ID NO: 53715 - DNA, 15 bp, Homo sapiens
ctcaggctcaggcaa

SEQ ID NO: 53716 - DNA, 15 bp, Homo sapiens
actcaggctcaggca

SEQ ID NO: 53717 - DNA, 15 bp, Homo sapiens
cactcaggctcaggc

SEQ ID NO: 53718 - DNA, 15 bp, Homo sapiens
gcactcaggctcagg

SEQ ID NO: 53719 - DNA, 15 bp, Homo sapiens
agcactcaggctcag

SEQ ID NO: 53720 - DNA, 15 bp, Homo sapiens
cagcactcaggctca

SEQ ID NO: 53721 - DNA, 15 bp, Homo sapiens
acagcactcaggctc

SEQ ID NO: 53722 - DNA, 15 bp, Homo sapiens
aacagcactcaggct

SEQ ID NO: 53723 - DNA, 15 bp, Homo sapiens
taacagcactcaggc

SEQ ID NO: 53724 - DNA, 15 bp, Homo sapiens
ttaacagcactcagg

SEQ ID NO: 53725 - DNA, 15 bp, Homo sapiens
attaacagcactcag

SEQ ID NO: 53726 - DNA, 15 bp, Homo sapiens
gattaacagcactca

SEQ ID NO: 53727 - DNA, 15 bp, Homo sapiens
tgattaacagcactc

SEQ ID NO: 53728 - DNA, 15 bp, Homo sapiens
gtgattaacagcact

SEQ ID NO: 53729 - DNA, 15 bp, Homo sapiens
tgtgattaacagcac

SEQ ID NO: 53730 - DNA, 15 bp, Homo sapiens
atgtgattaacagca

SEQ ID NO: 53731 - DNA, 15 bp, Homo sapiens
gatgtgattaacagc

SEQ ID NO: 53732 - DNA, 15 bp, Homo sapiens
agatgtgattaacag

SEQ ID NO: 53733 - DNA, 15 bp, Homo sapiens
aagatgtgattaaca

SEQ ID NO: 53734 - DNA, 15 bp, Homo sapiens
gaagatgtgattaac

SEQ ID NO: 53735 - DNA, 15 bp, Homo sapiens
ggaagatgtgattaa

SEQ ID NO: 53736 - DNA, 15 bp, Homo sapiens
aggaagatgtgatta

SEQ ID NO: 53737 - DNA, 15 bp, Homo sapiens
caggaagatgtgatt

SEQ ID NO: 53738 - DNA, 15 bp, Homo sapiens
gcaggaagatgtgat

SEQ ID NO: 53739 - DNA, 15 bp, Homo sapiens
ggcaggaagatgtga

SEQ ID NO: 53740 - DNA, 15 bp, Homo sapiens
aggcaggaagatgtg

SEQ ID NO: 53741 - DNA, 15 bp, Homo sapiens
aaggcaggaagatgt

SEQ ID NO: 53742 - DNA, 15 bp, Homo sapiens
caaggcaggaagatg

SEQ ID NO: 53743 - DNA, 15 bp, Homo sapiens
ccaaggcaggaagat

SEQ ID NO: 53744 - DNA, 15 bp, Homo sapiens
cccaaggcaggaaga

SEQ ID NO: 53745 - DNA, 15 bp, Homo sapiens
gcccaaggcaggaag

SEQ ID NO: 53746 - DNA, 15 bp, Homo sapiens
agcccaaggcaggaa

SEQ ID NO: 53747 - DNA, 15 bp, Homo sapiens
cagcccaaggcagga

SEQ ID NO: 53748 - DNA, 15 bp, Homo sapiens
tcagcccaaggcagg

SEQ ID NO: 53749 - DNA, 15 bp, Homo sapiens
ctcagcccaaggcag

SEQ ID NO: 53750 - DNA, 15 bp, Homo sapiens
actcagcccaaggca

SEQ ID NO: 53751 - DNA, 15 bp, Homo sapiens
aactcagcccaaggc

SEQ ID NO: 53752 - DNA, 15 bp, Homo sapiens
taactcagcccaagg

SEQ ID NO: 53753 - DNA, 15 bp, Homo sapiens
ctaactcagcccaag

SEQ ID NO: 53754 - DNA, 15 bp, Homo sapiens
tctaactcagcccaa

SEQ ID NO: 53755 - DNA, 15 bp, Homo sapiens
ctctaactcagccca

SEQ ID NO: 53756 - DNA, 15 bp, Homo sapiens
tctctaactcagccc

SEQ ID NO: 53757 - DNA, 15 bp, Homo sapiens
ttctctaactcagcc

SEQ ID NO: 53758 - DNA, 15 bp, Homo sapiens
attctctaactcagc

SEQ ID NO: 53759 - DNA, 15 bp, Homo sapiens
gattctctaactcag

SEQ ID NO: 53760 - DNA, 15 bp, Homo sapiens
tgattctctaactca

SEQ ID NO: 53761 - DNA, 15 bp, Homo sapiens
atgattctctaactc

SEQ ID NO: 53762 - DNA, 15 bp, Homo sapiens
aatgattctctaact

SEQ ID NO: 53763 - DNA, 15 bp, Homo sapiens
taatgattctctaac

SEQ ID NO: 53764 - DNA, 15 bp, Homo sapiens
ctaatgattctctaa

SEQ ID NO: 53765 - DNA, 15 bp, Homo sapiens
tctaatgattctcta

SEQ ID NO: 53766 - DNA, 15 bp, Homo sapiens
gtctaatgattctct

SEQ ID NO: 53767 - DNA, 15 bp, Homo sapiens
agtctaatgattctc

SEQ ID NO: 53768 - DNA, 15 bp, Homo sapiens
tagtctaatgattct

SEQ ID NO: 53769 - DNA, 15 bp, Homo sapiens
atagtctaatgattc

SEQ ID NO: 53770 - DNA, 15 bp, Homo sapiens
aatagtctaatgatt

SEQ ID NO: 53771 - DNA, 15 bp, Homo sapiens
aaatagtctaatgat

SEQ ID NO: 53772 - DNA, 15 bp, Homo sapiens
gaaatagtctaatga

SEQ ID NO: 53773 - DNA, 15 bp, Homo sapiens
ggaaatagtctaatg

SEQ ID NO: 53774 - DNA, 15 bp, Homo sapiens
aggaaatagtctaat

SEQ ID NO: 53775 - DNA, 15 bp, Homo sapiens
caggaaatagtctaa

SEQ ID NO: 53776 - DNA, 15 bp, Homo sapiens
acaggaaatagtcta

SEQ ID NO: 53777 - DNA, 15 bp, Homo sapiens
aacaggaaatagtct

SEQ ID NO: 53778 - DNA, 15 bp, Homo sapiens
aaacaggaaatagtc

SEQ ID NO: 53779 - DNA, 15 bp, Homo sapiens
gaaacaggaaatagt

SEQ ID NO: 53780 - DNA, 15 bp, Homo sapiens
ggaaacaggaaatag

SEQ ID NO: 53781 - DNA, 15 bp, Homo sapiens
tggaaacaggaaata

SEQ ID NO: 53782 - DNA, 15 bp, Homo sapiens
atggaaacaggaaat

SEQ ID NO: 53783 - DNA, 15 bp, Homo sapiens
catggaaacaggaaa

SEQ ID NO: 53784 - DNA, 15 bp, Homo sapiens
ccatggaaacaggaa

SEQ ID NO: 53785 - DNA, 15 bp, Homo sapiens
accatggaaacagga

SEQ ID NO: 53786 - DNA, 15 bp, Homo sapiens
caccatggaaacagg

SEQ ID NO: 53787 - DNA, 15 bp, Homo sapiens
tcaccatggaaacag

SEQ ID NO: 53788 - DNA, 15 bp, Homo sapiens
ctcaccatggaaaca

SEQ ID NO: 53789 - DNA, 15 bp, Homo sapiens
cctcaccatggaaac

SEQ ID NO: 53790 - DNA, 15 bp, Homo sapiens
ccctcaccatggaaa

SEQ ID NO: 53791 - DNA, 15 bp, Homo sapiens
tccctcaccatggaa

SEQ ID NO: 53792 - DNA, 15 bp, Homo sapiens
ctccctcaccatgga

SEQ ID NO: 53793 - DNA, 15 bp, Homo sapiens
cctccctcaccatgg

SEQ ID NO: 53794 - DNA, 15 bp, Homo sapiens
gcctccctcaccatg

SEQ ID NO: 53795 - DNA, 15 bp, Homo sapiens
ggcctccctcaccat

SEQ ID NO: 53796 - DNA, 15 bp, Homo sapiens
aggcctccctcacca

SEQ ID NO: 53797 - DNA, 15 bp, Homo sapiens
gaggcctccctcacc

SEQ ID NO: 53798 - DNA, 15 bp, Homo sapiens
agaggcctccctcac

SEQ ID NO: 53799 - DNA, 15 bp, Homo sapiens
aagaggcctccctca

SEQ ID NO: 53800 - DNA, 15 bp, Homo sapiens
gaagaggcctccctc

SEQ ID NO: 53801 - DNA, 15 bp, Homo sapiens
ggaagaggcctccct

SEQ ID NO: 53802 - DNA, 15 bp, Homo sapiens
aggaagaggcctccc

SEQ ID NO: 53803 - DNA, 15 bp, Homo sapiens
aaggaagaggcctcc

SEQ ID NO: 53804 - DNA, 15 bp, Homo sapiens
aaaggaagaggcctc

SEQ ID NO: 53805 - DNA, 15 bp, Homo sapiens
aaaaggaagaggcct

SEQ ID NO: 53806 - DNA, 15 bp, Homo sapiens
caaaaggaagaggcc

SEQ ID NO: 53807 - DNA, 15 bp, Homo sapiens
acaaaaggaagaggc

SEQ ID NO: 53808 - DNA, 15 bp, Homo sapiens
gacaaaaggaagagg

SEQ ID NO: 53809 - DNA, 15 bp, Homo sapiens
agacaaaaggaagag

SEQ ID NO: 53810 - DNA, 15 bp, Homo sapiens
gagacaaaaggaaga

SEQ ID NO: 53811 - DNA, 15 bp, Homo sapiens
agagacaaaaggaag

SEQ ID NO: 53812 - DNA, 15 bp, Homo sapiens
cagagacaaaaggaa

SEQ ID NO: 53813 - DNA, 15 bp, Homo sapiens
gcagagacaaaagga

SEQ ID NO: 53814 - DNA, 15 bp, Homo sapiens
agcagagacaaaagg

SEQ ID NO: 53815 - DNA, 15 bp, Homo sapiens
gagcagagacaaaag

SEQ ID NO: 53816 - DNA, 15 bp, Homo sapiens
ggagcagagacaaaa

SEQ ID NO: 53817 - DNA, 15 bp, Homo sapiens
gggagcagagacaaa

SEQ ID NO: 53818 - DNA, 15 bp, Homo sapiens
ggggagcagagacaa

SEQ ID NO: 53819 - DNA, 15 bp, Homo sapiens
aggggagcagagaca

SEQ ID NO: 53820 - DNA, 15 bp, Homo sapiens
aaggggagcagagac

SEQ ID NO: 53821 - DNA, 15 bp, Homo sapiens
taaggggagcagaga

SEQ ID NO: 53822 - DNA, 15 bp, Homo sapiens
ttaaggggagcagag

SEQ ID NO: 53823 - DNA, 15 bp, Homo sapiens
cttaaggggagcaga

SEQ ID NO: 53824 - DNA, 15 bp, Homo sapiens
tcttaaggggagcag

SEQ ID NO: 53825 - DNA, 15 bp, Homo sapiens
ttcttaaggggagca

SEQ ID NO: 53826 - DNA, 15 bp, Homo sapiens
cttcttaaggggagc

SEQ ID NO: 53827 - DNA, 15 bp, Homo sapiens
gcttcttaaggggag

SEQ ID NO: 53828 - DNA, 15 bp, Homo sapiens
tgcttcttaagggga

SEQ ID NO: 53829 - DNA, 15 bp, Homo sapiens
ctgcttcttaagggg

SEQ ID NO: 53830 - DNA, 15 bp, Homo sapiens
cctgcttcttaaggg

SEQ ID NO: 53831 - DNA, 15 bp, Homo sapiens
acctgcttcttaagg

SEQ ID NO: 53832 - DNA, 15 bp, Homo sapiens
cacctgcttcttaag

SEQ ID NO: 53833 - DNA, 15 bp, Homo sapiens
tcacctgcttcttaa

SEQ ID NO: 53834 - DNA, 15 bp, Homo sapiens
ctcacctgcttctta

SEQ ID NO: 53835 - DNA, 15 bp, Homo sapiens
cctcacctgcttctt

SEQ ID NO: 53836 - DNA, 15 bp, Homo sapiens
tcctcacctgcttct

SEQ ID NO: 53837 - DNA, 15 bp, Homo sapiens
atcctcacctgcttc

SEQ ID NO: 53838 - DNA, 15 bp, Homo sapiens
aatcctcacctgctt

SEQ ID NO: 53839 - DNA, 15 bp, Homo sapiens
aaatcctcacctgct

SEQ ID NO: 53840 - DNA, 15 bp, Homo sapiens
aaaatcctcacctgc

SEQ ID NO: 53841 - DNA, 15 bp, Homo sapiens
caaaatcctcacctg

SEQ ID NO: 53842 - DNA, 15 bp, Homo sapiens
gcaaaatcctcacct

SEQ ID NO: 53843 - DNA, 15 bp, Homo sapiens
ggcaaaatcctcacc

SEQ ID NO: 53844 - DNA, 15 bp, Homo sapiens
tggcaaaatcctcac

SEQ ID NO: 53845 - DNA, 15 bp, Homo sapiens
ctggcaaaatcctca

SEQ ID NO: 53846 - DNA, 15 bp, Homo sapiens
cctggcaaaatcctc

SEQ ID NO: 53847 - DNA, 15 bp, Homo sapiens
acctggcaaaatcct

SEQ ID NO: 53848 - DNA, 15 bp, Homo sapiens
aacctggcaaaatcc

SEQ ID NO: 53849 - DNA, 15 bp, Homo sapiens
aaacctggcaaaatc

SEQ ID NO: 53850 - DNA, 15 bp, Homo sapiens
gaaacctggcaaaat

SEQ ID NO: 53851 - DNA, 15 bp, Homo sapiens
agaaacctggcaaaa

SEQ ID NO: 53852 - DNA, 15 bp, Homo sapiens
aagaaacctggcaaa

SEQ ID NO: 53853 - DNA, 15 bp, Homo sapiens
caagaaacctggcaa

SEQ ID NO: 53854 - DNA, 15 bp, Homo sapiens
acaagaaacctggca

SEQ ID NO: 53855 - DNA, 15 bp, Homo sapiens
aacaagaaacctggc

SEQ ID NO: 53856 - DNA, 15 bp, Homo sapiens
aaacaagaaacctgg

SEQ ID NO: 53857 - DNA, 15 bp, Homo sapiens
aaaacaagaaacctg

SEQ ID NO: 53858 - DNA, 15 bp, Homo sapiens
caaaacaagaaacct

SEQ ID NO: 53859 - DNA, 15 bp, Homo sapiens
tcaaaacaagaaacc

SEQ ID NO: 53860 - DNA, 15 bp, Homo sapiens
ttcaaaacaagaaac

SEQ ID NO: 53861 - DNA, 15 bp, Homo sapiens
gttcaaaacaagaaa

SEQ ID NO: 53862 - DNA, 15 bp, Homo sapiens
ggttcaaaacaagaa

SEQ ID NO: 53863 - DNA, 15 bp, Homo sapiens
aggttcaaaacaaga

SEQ ID NO: 53864 - DNA, 15 bp, Homo sapiens
aaggttcaaaacaag

SEQ ID NO: 53865 - DNA, 15 bp, Homo sapiens
taaggttcaaaacaa

SEQ ID NO: 53866 - DNA, 15 bp, Homo sapiens
ataaggttcaaaaca

SEQ ID NO: 53867 - DNA, 15 bp, Homo sapiens
aataaggttcaaaac

SEQ ID NO: 53868 - DNA, 15 bp, Homo sapiens
caataaggttcaaaa

SEQ ID NO: 53869 - DNA, 15 bp, Homo sapiens
tcaataaggttcaaa

SEQ ID NO: 53870 - DNA, 15 bp, Homo sapiens
gtcaataaggttcaa

SEQ ID NO: 53871 - DNA, 15 bp, Homo sapiens
agtcaataaggttca

SEQ ID NO: 53872 - DNA, 15 bp, Homo sapiens
aagtcaataaggttc

SEQ ID NO: 53873 - DNA, 15 bp, Homo sapiens
aaagtcaataaggtt

SEQ ID NO: 53874 - DNA, 15 bp, Homo sapiens
taaagtcaataaggt

SEQ ID NO: 53875 - DNA, 15 bp, Homo sapiens
ttaaagtcaataagg

SEQ ID NO: 53876 - DNA, 15 bp, Homo sapiens
cttaaagtcaataag

SEQ ID NO: 53877 - DNA, 15 bp, Homo sapiens
ccttaaagtcaataa

SEQ ID NO: 53878 - DNA, 15 bp, Homo sapiens
cccttaaagtcaata

SEQ ID NO: 53879 - DNA, 15 bp, Homo sapiens
gcccttaaagtcaat

SEQ ID NO: 53880 - DNA, 15 bp, Homo sapiens
cgcccttaaagtcaa

SEQ ID NO: 53881 - DNA, 15 bp, Homo sapiens
ccgcccttaaagtca

SEQ ID NO: 53882 - DNA, 15 bp, Homo sapiens
gccgcccttaaagtc

SEQ ID NO: 53883 - DNA, 15 bp, Homo sapiens
agccgcccttaaagt

SEQ ID NO: 53884 - DNA, 15 bp, Homo sapiens
cagccgcccttaaag

SEQ ID NO: 53885 - DNA, 15 bp, Homo sapiens
ccagccgcccttaaa

SEQ ID NO: 53886 - DNA, 15 bp, Homo sapiens
cccagccgcccttaa

SEQ ID NO: 53887 - DNA, 15 bp, Homo sapiens
acccagccgccctta

SEQ ID NO: 53888 - DNA, 15 bp, Homo sapiens
aacccagccgccctt

SEQ ID NO: 53889 - DNA, 15 bp, Homo sapiens
aaacccagccgccct

SEQ ID NO: 53890 - DNA, 15 bp, Homo sapiens
aaaacccagccgccc

SEQ ID NO: 53891 - DNA, 15 bp, Homo sapiens
taaaacccagccgcc

SEQ ID NO: 53892 - DNA, 15 bp, Homo sapiens
ctaaaacccagccgc

SEQ ID NO: 53893 - DNA, 15 bp, Homo sapiens
tctaaaacccagccg

SEQ ID NO: 53894 - DNA, 15 bp, Homo sapiens
ctctaaaacccagcc

SEQ ID NO: 53895 - DNA, 15 bp, Homo sapiens
tctctaaaacccagc

SEQ ID NO: 53896 - DNA, 15 bp, Homo sapiens
gtctctaaaacccag

SEQ ID NO: 53897 - DNA, 15 bp, Homo sapiens
agtctctaaaaccca

SEQ ID NO: 53898 - DNA, 15 bp, Homo sapiens
cagtctctaaaaccc

SEQ ID NO: 53899 - DNA, 15 bp, Homo sapiens
acagtctctaaaacc

SEQ ID NO: 53900 - DNA, 15 bp, Homo sapiens
tacagtctctaaaac

SEQ ID NO: 53901 - DNA, 15 bp, Homo sapiens
gtacagtctctaaaa

SEQ ID NO: 53902 - DNA, 15 bp, Homo sapiens
ggtacagtctctaaa

SEQ ID NO: 53903 - DNA, 15 bp, Homo sapiens
aggtacagtctctaa

SEQ ID NO: 53904 - DNA, 15 bp, Homo sapiens
taggtacagtctcta

SEQ ID NO: 53905 - DNA, 15 bp, Homo sapiens
gtaggtacagtctct

SEQ ID NO: 53906 - DNA, 15 bp, Homo sapiens
ggtaggtacagtctc

SEQ ID NO: 53907 - DNA, 15 bp, Homo sapiens
aggtaggtacagtct

SEQ ID NO: 53908 - DNA, 15 bp, Homo sapiens
taggtaggtacagtc

SEQ ID NO: 53909 - DNA, 15 bp, Homo sapiens
ctaggtaggtacagt

SEQ ID NO: 53910 - DNA, 15 bp, Homo sapiens
cctaggtaggtacag

SEQ ID NO: 53911 - DNA, 15 bp, Homo sapiens
ccctaggtaggtaca

SEQ ID NO: 53912 - DNA, 15 bp, Homo sapiens
cccctaggtaggtac

SEQ ID NO: 53913 - DNA, 15 bp, Homo sapiens
ccccctaggtaggta

SEQ ID NO: 53914 - DNA, 15 bp, Homo sapiens
tccccctaggtaggt

SEQ ID NO: 53915 - DNA, 15 bp, Homo sapiens
ttccccctaggtagg

SEQ ID NO: 53916 - DNA, 15 bp, Homo sapiens
gttccccctaggtag

SEQ ID NO: 53917 - DNA, 15 bp, Homo sapiens
tgttccccctaggta

SEQ ID NO: 53918 - DNA, 15 bp, Homo sapiens
gtgttccccctaggt

SEQ ID NO: 53919 - DNA, 15 bp, Homo sapiens
agtgttccccctagg

SEQ ID NO: 53920 - DNA, 15 bp, Homo sapiens
aagtgttccccctag

SEQ ID NO: 53921 - DNA, 15 bp, Homo sapiens
gaagtgttcccccta

SEQ ID NO: 53922 - DNA, 15 bp, Homo sapiens
ggaagtgttccccct

SEQ ID NO: 53923 - DNA, 15 bp, Homo sapiens
cggaagtgttccccc

SEQ ID NO: 53924 - DNA, 15 bp, Homo sapiens
tcggaagtgttcccc

SEQ ID NO: 53925 - DNA, 15 bp, Homo sapiens
ttcggaagtgttccc

SEQ ID NO: 53926 - DNA, 15 bp, Homo sapiens
cttcggaagtgttcc

SEQ ID NO: 53927 - DNA, 15 bp, Homo sapiens
acttcggaagtgttc

SEQ ID NO: 53928 - DNA, 15 bp, Homo sapiens
aacttcggaagtgtt

SEQ ID NO: 53929 - DNA, 15 bp, Homo sapiens
aaacttcggaagtgt

SEQ ID NO: 53930 - DNA, 15 bp, Homo sapiens
taaacttcggaagtg

SEQ ID NO: 53931 - DNA, 15 bp, Homo sapiens
ctaaacttcggaagt

SEQ ID NO: 53932 - DNA, 15 bp, Homo sapiens
cctaaacttcggaag

SEQ ID NO: 53933 - DNA, 15 bp, Homo sapiens
tcctaaacttcggaa

SEQ ID NO: 53934 - DNA, 15 bp, Homo sapiens
gtcctaaacttcgga

SEQ ID NO: 53935 - DNA, 15 bp, Homo sapiens
agtcctaaacttcgg

SEQ ID NO: 53936 - DNA, 15 bp, Homo sapiens
tagtcctaaacttcg

SEQ ID NO: 53937 - DNA, 15 bp, Homo sapiens
atagtcctaaacttc

SEQ ID NO: 53938 - DNA, 15 bp, Homo sapiens
aatagtcctaaactt

SEQ ID NO: 53939 - DNA, 15 bp, Homo sapiens
gaatagtcctaaact

SEQ ID NO: 53940 - DNA, 15 bp, Homo sapiens
ggaatagtcctaaac

SEQ ID NO: 53941 - DNA, 15 bp, Homo sapiens
gggaatagtcctaaa

SEQ ID NO: 53942 - DNA, 15 bp, Homo sapiens
agggaatagtcctaa

SEQ ID NO: 53943 - DNA, 15 bp, Homo sapiens
cagggaatagtccta

SEQ ID NO: 53944 - DNA, 15 bp, Homo sapiens
tcagggaatagtcct

SEQ ID NO: 53945 - DNA, 15 bp, Homo sapiens
atcagggaatagtcc

SEQ ID NO: 53946 - DNA, 15 bp, Homo sapiens
gatcagggaatagtc

SEQ ID NO: 53947 - DNA, 15 bp, Homo sapiens
ggatcagggaatagt

SEQ ID NO: 53948 - DNA, 15 bp, Homo sapiens
cggatcagggaatag

SEQ ID NO: 53949 - DNA, 15 bp, Homo sapiens
gcggatcagggaata

SEQ ID NO: 53950 - DNA, 15 bp, Homo sapiens
agcggatcagggaat

SEQ ID NO: 53951 - DNA, 15 bp, Homo sapiens
cagcggatcagggaa

SEQ ID NO: 53952 - DNA, 15 bp, Homo sapiens
ccagcggatcaggga

SEQ ID NO: 53953 - DNA, 15 bp, Homo sapiens
cccagcggatcaggg

SEQ ID NO: 53954 - DNA, 15 bp, Homo sapiens
tcccagcggatcagg

SEQ ID NO: 53955 - DNA, 15 bp, Homo sapiens
ctcccagcggatcag

SEQ ID NO: 53956 - DNA, 15 bp, Homo sapiens
cctcccagcggatca

SEQ ID NO: 53957 - DNA, 15 bp, Homo sapiens
gcctcccagcggatc

SEQ ID NO: 53958 - DNA, 15 bp, Homo sapiens
tgcctcccagcggat

SEQ ID NO: 53959 - DNA, 15 bp, Homo sapiens
ctgcctcccagcgga

SEQ ID NO: 53960 - DNA, 15 bp, Homo sapiens
cctgcctcccagcgg

SEQ ID NO: 53961 - DNA, 15 bp, Homo sapiens
acctgcctcccagcg

SEQ ID NO: 53962 - DNA, 15 bp, Homo sapiens
aacctgcctcccagc

SEQ ID NO: 53963 - DNA, 15 bp, Homo sapiens
taacctgcctcccag

SEQ ID NO: 53964 - DNA, 15 bp, Homo sapiens
gtaacctgcctccca

SEQ ID NO: 53965 - DNA, 15 bp, Homo sapiens
agtaacctgcctccc

SEQ ID NO: 53966 - DNA, 15 bp, Homo sapiens
cagtaacctgcctcc

SEQ ID NO: 53967 - DNA, 15 bp, Homo sapiens
tcagtaacctgcctc

SEQ ID NO: 53968 - DNA, 15 bp, Homo sapiens
ctcagtaacctgcct

SEQ ID NO: 53969 - DNA, 15 bp, Homo sapiens
cctcagtaacctgcc

SEQ ID NO: 53970 - DNA, 15 bp, Homo sapiens
tcctcagtaacctgc

SEQ ID NO: 53971 - DNA, 15 bp, Homo sapiens
ttcctcagtaacctg

SEQ ID NO: 53972 - DNA, 15 bp, Homo sapiens
cttcctcagtaacct

SEQ ID NO: 53973 - DNA, 15 bp, Homo sapiens
acttcctcagtaacc

SEQ ID NO: 53974 - DNA, 15 bp, Homo sapiens
gacttcctcagtaac

SEQ ID NO: 53975 - DNA, 15 bp, Homo sapiens
ggacttcctcagtaa

SEQ ID NO: 53976 - DNA, 15 bp, Homo sapiens
gggacttcctcagta

SEQ ID NO: 53977 - DNA, 15 bp, Homo sapiens
agggacttcctcagt

SEQ ID NO: 53978 - DNA, 15 bp, Homo sapiens
aagggacttcctcag

SEQ ID NO: 53979 - DNA, 15 bp, Homo sapiens
aaagggacttcctca

SEQ ID NO: 53980 - DNA, 15 bp, Homo sapiens
taaagggacttcctc

SEQ ID NO: 53981 - DNA, 15 bp, Homo sapiens
ttaaagggacttcct

SEQ ID NO: 53982 - DNA, 15 bp, Homo sapiens
tttaaagggacttcc

SEQ ID NO: 53983 - DNA, 15 bp, Homo sapiens
ttttaaagggacttc

SEQ ID NO: 53984 - DNA, 15 bp, Homo sapiens
tttttaaagggactt

SEQ ID NO: 53985 - DNA, 15 bp, Homo sapiens
gtttttaaagggact

SEQ ID NO: 53986 - DNA, 15 bp, Homo sapiens
tgtttttaaagggac

SEQ ID NO: 53987 - DNA, 15 bp, Homo sapiens
ttgtttttaaaggga

SEQ ID NO: 53988 - DNA, 15 bp, Homo sapiens
tttgtttttaaaggg

SEQ ID NO: 53989 - DNA, 15 bp, Homo sapiens
ctttgtttttaaagg

SEQ ID NO: 53990 - DNA, 15 bp, Homo sapiens
cctttgtttttaaag

SEQ ID NO: 53991 - DNA, 15 bp, Homo sapiens
tcctttgtttttaaa

SEQ ID NO: 53992 - DNA, 15 bp, Homo sapiens
ctcctttgtttttaa

SEQ ID NO: 53993 - DNA, 15 bp, Homo sapiens
actcctttgttttta

SEQ ID NO: 53994 - DNA, 15 bp, Homo sapiens
aactcctttgttttt

SEQ ID NO: 53995 - DNA, 15 bp, Homo sapiens
aaactcctttgtttt

SEQ ID NO: 53996 - DNA, 15 bp, Homo sapiens
taaactcctttgttt

SEQ ID NO: 53997 - DNA, 15 bp, Homo sapiens
ataaactcctttgtt

SEQ ID NO: 53998 - DNA, 15 bp, Homo sapiens
tataaactcctttgt

SEQ ID NO: 53999 - DNA, 15 bp, Homo sapiens
gtataaactcctttg

SEQ ID NO: 54000 - DNA, 15 bp, Homo sapiens
agtataaactccttt

SEQ ID NO: 54001 - DNA, 15 bp, Homo sapiens
cagtataaactcctt

SEQ ID NO: 54002 - DNA, 15 bp, Homo sapiens
tcagtataaactcct

SEQ ID NO: 54003 - DNA, 15 bp, Homo sapiens
ctcagtataaactcc

SEQ ID NO: 54004 - DNA, 15 bp, Homo sapiens
tctcagtataaactc

SEQ ID NO: 54005 - DNA, 15 bp, Homo sapiens
ttctcagtataaact

SEQ ID NO: 54006 - DNA, 15 bp, Homo sapiens
tttctcagtataaac

SEQ ID NO: 54007 - DNA, 15 bp, Homo sapiens
ttttctcagtataaa

SEQ ID NO: 54008 - DNA, 15 bp, Homo sapiens
cttttctcagtataa

SEQ ID NO: 54009 - DNA, 15 bp, Homo sapiens
gcttttctcagtata

SEQ ID NO: 54010 - DNA, 15 bp, Homo sapiens
tgcttttctcagtat

SEQ ID NO: 54011 - DNA, 15 bp, Homo sapiens
atgcttttctcagta

SEQ ID NO: 54012 - DNA, 15 bp, Homo sapiens
tatgcttttctcagt

SEQ ID NO: 54013 - DNA, 15 bp, Homo sapiens
ttatgcttttctcag

SEQ ID NO: 54014 - DNA, 15 bp, Homo sapiens
tttatgcttttctca

SEQ ID NO: 54015 - DNA, 15 bp, Homo sapiens
gtttatgcttttctc

SEQ ID NO: 54016 - DNA, 15 bp, Homo sapiens
tgtttatgcttttct

SEQ ID NO: 54017 - DNA, 15 bp, Homo sapiens
ctgtttatgcttttc

SEQ ID NO: 54018 - DNA, 15 bp, Homo sapiens
actgtttatgctttt

SEQ ID NO: 54019 - DNA, 15 bp, Homo sapiens
cactgtttatgcttt

SEQ ID NO: 54020 - DNA, 15 bp, Homo sapiens
tcactgtttatgctt

SEQ ID NO: 54021 - DNA, 15 bp, Homo sapiens
atcactgtttatgct

SEQ ID NO: 54022 - DNA, 15 bp, Homo sapiens
aatcactgtttatgc

SEQ ID NO: 54023 - DNA, 15 bp, Homo sapiens
aaatcactgtttatg

SEQ ID NO: 54024 - DNA, 15 bp, Homo sapiens
caaatcactgtttat

SEQ ID NO: 54025 - DNA, 15 bp, Homo sapiens
acaaatcactgttta

SEQ ID NO: 54026 - DNA, 15 bp, Homo sapiens
tacaaatcactgttt

SEQ ID NO: 54027 - DNA, 15 bp, Homo sapiens
atacaaatcactgtt

SEQ ID NO: 54028 - DNA, 15 bp, Homo sapiens
catacaaatcactgt

SEQ ID NO: 54029 - DNA, 15 bp, Homo sapiens
ccatacaaatcactg

SEQ ID NO: 54030 - DNA, 15 bp, Homo sapiens
tccatacaaatcact

SEQ ID NO: 54031 - DNA, 15 bp, Homo sapiens
atccatacaaatcac

SEQ ID NO: 54032 - DNA, 15 bp, Homo sapiens
aatccatacaaatca

SEQ ID NO: 54033 - DNA, 15 bp, Homo sapiens
gaatccatacaaatc

SEQ ID NO: 54034 - DNA, 15 bp, Homo sapiens
tgaatccatacaaat

SEQ ID NO: 54035 - DNA, 15 bp, Homo sapiens
gtgaatccatacaaa

SEQ ID NO: 54036 - DNA, 15 bp, Homo sapiens
tgtgaatccatacaa

SEQ ID NO: 54037 - DNA, 15 bp, Homo sapiens
gtgtgaatccataca

SEQ ID NO: 54038 - DNA, 15 bp, Homo sapiens
agtgtgaatccatac

SEQ ID NO: 54039 - DNA, 15 bp, Homo sapiens
cagtgtgaatccata

SEQ ID NO: 54040 - DNA, 15 bp, Homo sapiens
tcagtgtgaatccat

SEQ ID NO: 54041 - DNA, 15 bp, Homo sapiens
gtcagtgtgaatcca

SEQ ID NO: 54042 - DNA, 15 bp, Homo sapiens
agtcagtgtgaatcc

SEQ ID NO: 54043 - DNA, 15 bp, Homo sapiens
tagtcagtgtgaatc

SEQ ID NO: 54044 - DNA, 15 bp, Homo sapiens
ttagtcagtgtgaat

SEQ ID NO: 54045 - DNA, 15 bp, Homo sapiens
attagtcagtgtgaa

SEQ ID NO: 54046 - DNA, 15 bp, Homo sapiens
tattagtcagtgtga

SEQ ID NO: 54047 - DNA, 15 bp, Homo sapiens
atattagtcagtgtg

SEQ ID NO: 54048 - DNA, 15 bp, Homo sapiens
tatattagtcagtgt

SEQ ID NO: 54049 - DNA, 15 bp, Homo sapiens
ctatattagtcagtg

SEQ ID NO: 54050 - DNA, 15 bp, Homo sapiens
gctatattagtcagt

SEQ ID NO: 54051 - DNA, 15 bp, Homo sapiens
agctatattagtcag

SEQ ID NO: 54052 - DNA, 15 bp, Homo sapiens
gagctatattagtca

SEQ ID NO: 54053 - DNA, 15 bp, Homo sapiens
tgagctatattagtc

SEQ ID NO: 54054 - DNA, 15 bp, Homo sapiens
atgagctatattagt

SEQ ID NO: 54055 - DNA, 15 bp, Homo sapiens
catgagctatattag

SEQ ID NO: 54056 - DNA, 15 bp, Homo sapiens
gcatgagctatatta

SEQ ID NO: 54057 - DNA, 15 bp, Homo sapiens
ggcatgagctatatt

SEQ ID NO: 54058 - DNA, 15 bp, Homo sapiens
tggcatgagctatat

SEQ ID NO: 54059 - DNA, 15 bp, Homo sapiens
atggcatgagctata

SEQ ID NO: 54060 - DNA, 15 bp, Homo sapiens
aatggcatgagctat

SEQ ID NO: 54061 - DNA, 15 bp, Homo sapiens
taatggcatgagcta

SEQ ID NO: 54062 - DNA, 15 bp, Homo sapiens
ttaatggcatgagct

SEQ ID NO: 54063 - DNA, 15 bp, Homo sapiens
tttaatggcatgagc

SEQ ID NO: 54064 - DNA, 15 bp, Homo sapiens
ctttaatggcatgag

SEQ ID NO: 54065 - DNA, 15 bp, Homo sapiens
actttaatggcatga

SEQ ID NO: 54066 - DNA, 15 bp, Homo sapiens
cactttaatggcatg

SEQ ID NO: 54067 - DNA, 15 bp, Homo sapiens
ccactttaatggcat

SEQ ID NO: 54068 - DNA, 15 bp, Homo sapiens
cccactttaatggca

SEQ ID NO: 54069 - DNA, 15 bp, Homo sapiens
ccccactttaatggc

SEQ ID NO: 54070 - DNA, 15 bp, Homo sapiens
accccactttaatgg

SEQ ID NO: 54071 - DNA, 15 bp, Homo sapiens
gaccccactttaatg

SEQ ID NO: 54072 - DNA, 15 bp, Homo sapiens
agaccccactttaat

SEQ ID NO: 54073 - DNA, 15 bp, Homo sapiens
gagaccccactttaa

SEQ ID NO: 54074 - DNA, 15 bp, Homo sapiens
agagaccccacttta

SEQ ID NO: 54075 - DNA, 15 bp, Homo sapiens
aagagaccccacttt

SEQ ID NO: 54076 - DNA, 15 bp, Homo sapiens
gaagagaccccactt

SEQ ID NO: 54077 - DNA, 15 bp, Homo sapiens
agaagagaccccact

SEQ ID NO: 54078 - DNA, 15 bp, Homo sapiens
gagaagagaccccac

SEQ ID NO: 54079 - DNA, 15 bp, Homo sapiens
agagaagagacccca

SEQ ID NO: 54080 - DNA, 15 bp, Homo sapiens
tagagaagagacccc

SEQ ID NO: 54081 - DNA, 15 bp, Homo sapiens
ttagagaagagaccc

SEQ ID NO: 54082 - DNA, 15 bp, Homo sapiens
tttagagaagagacc

SEQ ID NO: 54083 - DNA, 15 bp, Homo sapiens
ctttagagaagagac

SEQ ID NO: 54084 - DNA, 15 bp, Homo sapiens
cctttagagaagaga

SEQ ID NO: 54085 - DNA, 15 bp, Homo sapiens
tcctttagagaagag

SEQ ID NO: 54086 - DNA, 15 bp, Homo sapiens
ctcctttagagaaga

SEQ ID NO: 54087 - DNA, 15 bp, Homo sapiens
cctcctttagagaag

SEQ ID NO: 54088 - DNA, 15 bp, Homo sapiens
ccctcctttagagaa

SEQ ID NO: 54089 - DNA, 15 bp, Homo sapiens
accctcctttagaga

SEQ ID NO: 54090 - DNA, 15 bp, Homo sapiens
aaccctcctttagag

SEQ ID NO: 54091 - DNA, 15 bp, Homo sapiens
taaccctcctttaga

SEQ ID NO: 54092 - DNA, 15 bp, Homo sapiens
ataaccctcctttag

SEQ ID NO: 54093 - DNA, 15 bp, Homo sapiens
tataaccctccttta

SEQ ID NO: 54094 - DNA, 15 bp, Homo sapiens
atataaccctccttt

SEQ ID NO: 54095 - DNA, 15 bp, Homo sapiens
catataaccctcctt

SEQ ID NO: 54096 - DNA, 15 bp, Homo sapiens
tcatataaccctcct

SEQ ID NO: 54097 - DNA, 15 bp, Homo sapiens
atcatataaccctcc

SEQ ID NO: 54098 - DNA, 15 bp, Homo sapiens
gatcatataaccctc

SEQ ID NO: 54099 - DNA, 15 bp, Homo sapiens
agatcatataaccct

SEQ ID NO: 54100 - DNA, 15 bp, Homo sapiens
tagatcatataaccc

SEQ ID NO: 54101 - DNA, 15 bp, Homo sapiens
ctagatcatataacc

SEQ ID NO: 54102 - DNA, 15 bp, Homo sapiens
gctagatcatataac

SEQ ID NO: 54103 - DNA, 15 bp, Homo sapiens
ggctagatcatataa

SEQ ID NO: 54104 - DNA, 15 bp, Homo sapiens
gggctagatcatata

SEQ ID NO: 54105 - DNA, 15 bp, Homo sapiens
ggggctagatcatat

SEQ ID NO: 54106 - DNA, 15 bp, Homo sapiens
cggggctagatcata

SEQ ID NO: 54107 - DNA, 15 bp, Homo sapiens
acggggctagatcat

SEQ ID NO: 54108 - DNA, 15 bp, Homo sapiens
tacggggctagatca

SEQ ID NO: 54109 - DNA, 15 bp, Homo sapiens
ctacggggctagatc

SEQ ID NO: 54110 - DNA, 15 bp, Homo sapiens
tctacggggctagat

SEQ ID NO: 54111 - DNA, 15 bp, Homo sapiens
gtctacggggctaga

SEQ ID NO: 54112 - DNA, 15 bp, Homo sapiens
ggtctacggggctag

SEQ ID NO: 54113 - DNA, 15 bp, Homo sapiens
aggtctacggggcta

SEQ ID NO: 54114 - DNA, 15 bp, Homo sapiens
taggtctacggggct

SEQ ID NO: 54115 - DNA, 15 bp, Homo sapiens
ttaggtctacggggc

SEQ ID NO: 54116 - DNA, 15 bp, Homo sapiens
cttaggtctacgggg

SEQ ID NO: 54117 - DNA, 15 bp, Homo sapiens
acttaggtctacggg

SEQ ID NO: 54118 - DNA, 15 bp, Homo sapiens
cacttaggtctacgg

SEQ ID NO: 54119 - DNA, 15 bp, Homo sapiens
acacttaggtctacg

SEQ ID NO: 54120 - DNA, 15 bp, Homo sapiens
cacacttaggtctac

SEQ ID NO: 54121 - DNA, 15 bp, Homo sapiens
ccacacttaggtcta

SEQ ID NO: 54122 - DNA, 15 bp, Homo sapiens
accacacttaggtct

SEQ ID NO: 54123 - DNA, 15 bp, Homo sapiens
aaccacacttaggtc

SEQ ID NO: 54124 - DNA, 15 bp, Homo sapiens
aaaccacacttaggt

SEQ ID NO: 54125 - DNA, 15 bp, Homo sapiens
gaaaccacacttagg

SEQ ID NO: 54126 - DNA, 15 bp, Homo sapiens
tgaaaccacacttag

SEQ ID NO: 54127 - DNA, 15 bp, Homo sapiens
ctgaaaccacactta

SEQ ID NO: 54128 - DNA, 15 bp, Homo sapiens
tctgaaaccacactt

SEQ ID NO: 54129 - DNA, 15 bp, Homo sapiens
gtctgaaaccacact

SEQ ID NO: 54130 - DNA, 15 bp, Homo sapiens
ggtctgaaaccacac

SEQ ID NO: 54131 - DNA, 15 bp, Homo sapiens
aggtctgaaaccaca

SEQ ID NO: 54132 - DNA, 15 bp, Homo sapiens
caggtctgaaaccac

SEQ ID NO: 54133 - DNA, 15 bp, Homo sapiens
acaggtctgaaacca

SEQ ID NO: 54134 - DNA, 15 bp, Homo sapiens
aacaggtctgaaacc

SEQ ID NO: 54135 - DNA, 15 bp, Homo sapiens
gaacaggtctgaaac

SEQ ID NO: 54136 - DNA, 15 bp, Homo sapiens
agaacaggtctgaaa

SEQ ID NO: 54137 - DNA, 15 bp, Homo sapiens
aagaacaggtctgaa

SEQ ID NO: 54138 - DNA, 15 bp, Homo sapiens
gaagaacaggtctga

SEQ ID NO: 54139 - DNA, 15 bp, Homo sapiens
ggaagaacaggtctg

SEQ ID NO: 54140 - DNA, 15 bp, Homo sapiens
aggaagaacaggtct

SEQ ID NO: 54141 - DNA, 15 bp, Homo sapiens
caggaagaacaggtc

SEQ ID NO: 54142 - DNA, 15 bp, Homo sapiens
ccaggaagaacaggt

SEQ ID NO: 54143 - DNA, 15 bp, Homo sapiens
accaggaagaacagg

SEQ ID NO: 54144 - DNA, 15 bp, Homo sapiens
gaccaggaagaacag

SEQ ID NO: 54145 - DNA, 15 bp, Homo sapiens
ggaccaggaagaaca

SEQ ID NO: 54146 - DNA, 15 bp, Homo sapiens
aggaccaggaagaac

SEQ ID NO: 54147 - DNA, 15 bp, Homo sapiens
gaggaccaggaagaa

SEQ ID NO: 54148 - DNA, 15 bp, Homo sapiens
agaggaccaggaaga

SEQ ID NO: 54149 - DNA, 15 bp, Homo sapiens
gagaggaccaggaag

SEQ ID NO: 54150 - DNA, 15 bp, Homo sapiens
ggagaggaccaggaa

SEQ ID NO: 54151 - DNA, 15 bp, Homo sapiens
aggagaggaccagga

SEQ ID NO: 54152 - DNA, 15 bp, Homo sapiens
aaggagaggaccagg

SEQ ID NO: 54153 - DNA, 15 bp, Homo sapiens
caaggagaggaccag

SEQ ID NO: 54154 - DNA, 15 bp, Homo sapiens
ccaaggagaggacca

SEQ ID NO: 54155 - DNA, 15 bp, Homo sapiens
tccaaggagaggacc

SEQ ID NO: 54156 - DNA, 15 bp, Homo sapiens
ttccaaggagaggac

SEQ ID NO: 54157 - DNA, 15 bp, Homo sapiens
attccaaggagagga

SEQ ID NO: 54158 - DNA, 15 bp, Homo sapiens
gattccaaggagagg

SEQ ID NO: 54159 - DNA, 15 bp, Homo sapiens
ggattccaaggagag

SEQ ID NO: 54160 - DNA, 15 bp, Homo sapiens
tggattccaaggaga

SEQ ID NO: 54161 - DNA, 15 bp, Homo sapiens
atggattccaaggag

SEQ ID NO: 54162 - DNA, 15 bp, Homo sapiens
tatggattccaagga

SEQ ID NO: 54163 - DNA, 15 bp, Homo sapiens
atatggattccaagg

SEQ ID NO: 54164 - DNA, 15 bp, Homo sapiens
aatatggattccaag

SEQ ID NO: 54165 - DNA, 15 bp, Homo sapiens
aaatatggattccaa

SEQ ID NO: 54166 - DNA, 15 bp, Homo sapiens
gaaatatggattcca

SEQ ID NO: 54167 - DNA, 15 bp, Homo sapiens
agaaatatggattcc

SEQ ID NO: 54168 - DNA, 15 bp, Homo sapiens
tagaaatatggattc

SEQ ID NO: 54169 - DNA, 15 bp, Homo sapiens
gtagaaatatggatt

SEQ ID NO: 54170 - DNA, 15 bp, Homo sapiens
agtagaaatatggat

SEQ ID NO: 54171 - DNA, 15 bp, Homo sapiens
tagtagaaatatgga

SEQ ID NO: 54172 - DNA, 15 bp, Homo sapiens
ctagtagaaatatgg

SEQ ID NO: 54173 - DNA, 15 bp, Homo sapiens
actagtagaaatatg

SEQ ID NO: 54174 - DNA, 15 bp, Homo sapiens
aactagtagaaatat

SEQ ID NO: 54175 - DNA, 15 bp, Homo sapiens
caactagtagaaata

SEQ ID NO: 54176 - DNA, 15 bp, Homo sapiens
ccaactagtagaaat

SEQ ID NO: 54177 - DNA, 15 bp, Homo sapiens
tccaactagtagaaa

SEQ ID NO: 54178 - DNA, 15 bp, Homo sapiens
gtccaactagtagaa

SEQ ID NO: 54179 - DNA, 15 bp, Homo sapiens
agtccaactagtaga

SEQ ID NO: 54180 - DNA, 15 bp, Homo sapiens
aagtccaactagtag

SEQ ID NO: 54181 - DNA, 15 bp, Homo sapiens
aaagtccaactagta

SEQ ID NO: 54182 - DNA, 15 bp, Homo sapiens
aaaagtccaactagt

SEQ ID NO: 54183 - DNA, 15 bp, Homo sapiens
aaaaagtccaactag

SEQ ID NO: 54184 - DNA, 15 bp, Homo sapiens
gaaaaagtccaacta

SEQ ID NO: 54185 - DNA, 15 bp, Homo sapiens
agaaaaagtccaact

SEQ ID NO: 54186 - DNA, 15 bp, Homo sapiens
cagaaaaagtccaac

SEQ ID NO: 54187 - DNA, 15 bp, Homo sapiens
acagaaaaagtccaa

SEQ ID NO: 54188 - DNA, 15 bp, Homo sapiens
aacagaaaaagtcca

SEQ ID NO: 54189 - DNA, 15 bp, Homo sapiens
aaacagaaaaagtcc

SEQ ID NO: 54190 - DNA, 15 bp, Homo sapiens
caaacagaaaaagtc

SEQ ID NO: 54191 - DNA, 15 bp, Homo sapiens
acaaacagaaaaagt

SEQ ID NO: 54192 - DNA, 15 bp, Homo sapiens
gacaaacagaaaaag

SEQ ID NO: 54193 - DNA, 15 bp, Homo sapiens
agacaaacagaaaaa

SEQ ID NO: 54194 - DNA, 15 bp, Homo sapiens
cagacaaacagaaaa

SEQ ID NO: 54195 - DNA, 15 bp, Homo sapiens
ccagacaaacagaaa

SEQ ID NO: 54196 - DNA, 15 bp, Homo sapiens
gccagacaaacagaa

SEQ ID NO: 54197 - DNA, 15 bp, Homo sapiens
agccagacaaacaga

SEQ ID NO: 54198 - DNA, 15 bp, Homo sapiens
gagccagacaaacag

SEQ ID NO: 54199 - DNA, 15 bp, Homo sapiens
agagccagacaaaca

SEQ ID NO: 54200 - DNA, 15 bp, Homo sapiens
gagagccagacaaac

SEQ ID NO: 54201 - DNA, 15 bp, Homo sapiens
tgagagccagacaaa

SEQ ID NO: 54202 - DNA, 15 bp, Homo sapiens
ctgagagccagacaa

SEQ ID NO: 54203 - DNA, 15 bp, Homo sapiens
tctgagagccagaca

SEQ ID NO: 54204 - DNA, 15 bp, Homo sapiens
ctctgagagccagac

SEQ ID NO: 54205 - DNA, 15 bp, Homo sapiens
cctctgagagccaga

SEQ ID NO: 54206 - DNA, 15 bp, Homo sapiens
tcctctgagagccag

SEQ ID NO: 54207 - DNA, 15 bp, Homo sapiens
atcctctgagagcca

SEQ ID NO: 54208 - DNA, 15 bp, Homo sapiens
aatcctctgagagcc

SEQ ID NO: 54209 - DNA, 15 bp, Homo sapiens
taatcctctgagagc

SEQ ID NO: 54210 - DNA, 15 bp, Homo sapiens
ataatcctctgagag

SEQ ID NO: 54211 - DNA, 15 bp, Homo sapiens
tataatcctctgaga

SEQ ID NO: 54212 - DNA, 15 bp, Homo sapiens
ctataatcctctgag

SEQ ID NO: 54213 - DNA, 15 bp, Homo sapiens
cctataatcctctga

SEQ ID NO: 54214 - DNA, 15 bp, Homo sapiens
tcctataatcctctg

SEQ ID NO: 54215 - DNA, 15 bp, Homo sapiens
ctcctataatcctct

SEQ ID NO: 54216 - DNA, 15 bp, Homo sapiens
cctcctataatcctc

SEQ ID NO: 54217 - DNA, 15 bp, Homo sapiens
gcctcctataatcct

SEQ ID NO: 54218 - DNA, 15 bp, Homo sapiens
ggcctcctataatcc

SEQ ID NO: 54219 - DNA, 15 bp, Homo sapiens
gggcctcctataatc

SEQ ID NO: 54220 - DNA, 15 bp, Homo sapiens
agggcctcctataat

SEQ ID NO: 54221 - DNA, 15 bp, Homo sapiens
cagggcctcctataa

SEQ ID NO: 54222 - DNA, 15 bp, Homo sapiens
acagggcctcctata

SEQ ID NO: 54223 - DNA, 15 bp, Homo sapiens
cacagggcctcctat

SEQ ID NO: 54224 - DNA, 15 bp, Homo sapiens
tcacagggcctccta

SEQ ID NO: 54225 - DNA, 15 bp, Homo sapiens
ttcacagggcctcct

SEQ ID NO: 54226 - DNA, 15 bp, Homo sapiens
cttcacagggcctcc

SEQ ID NO: 54227 - DNA, 15 bp, Homo sapiens
acttcacagggcctc

SEQ ID NO: 54228 - DNA, 15 bp, Homo sapiens
cacttcacagggcct

SEQ ID NO: 54229 - DNA, 15 bp, Homo sapiens
tcacttcacagggcc

SEQ ID NO: 54230 - DNA, 15 bp, Homo sapiens
gtcacttcacagggc

SEQ ID NO: 54231 - DNA, 15 bp, Homo sapiens
agtcacttcacaggg

SEQ ID NO: 54232 - DNA, 15 bp, Homo sapiens
gagtcacttcacagg

SEQ ID NO: 54233 - DNA, 15 bp, Homo sapiens
tgagtcacttcacag

SEQ ID NO: 54234 - DNA, 15 bp, Homo sapiens
ctgagtcacttcaca

SEQ ID NO: 54235 - DNA, 15 bp, Homo sapiens
actgagtcacttcac

SEQ ID NO: 54236 - DNA, 15 bp, Homo sapiens
cactgagtcacttca

SEQ ID NO: 54237 - DNA, 15 bp, Homo sapiens
tcactgagtcacttc

SEQ ID NO: 54238 - DNA, 15 bp, Homo sapiens
ttcactgagtcactt

SEQ ID NO: 54239 - DNA, 15 bp, Homo sapiens
attcactgagtcact

SEQ ID NO: 54240 - DNA, 15 bp, Homo sapiens
aattcactgagtcac

SEQ ID NO: 54241 - DNA, 15 bp, Homo sapiens
aaattcactgagtca

SEQ ID NO: 54242 - DNA, 15 bp, Homo sapiens
aaaattcactgagtc

SEQ ID NO: 54243 - DNA, 15 bp, Homo sapiens
caaaattcactgagt

SEQ ID NO: 54244 - DNA, 15 bp, Homo sapiens
tcaaaattcactgag

SEQ ID NO: 54245 - DNA, 15 bp, Homo sapiens
atcaaaattcactga

SEQ ID NO: 54246 - DNA, 15 bp, Homo sapiens
aatcaaaattcactg

SEQ ID NO: 54247 - DNA, 15 bp, Homo sapiens
aaatcaaaattcact

SEQ ID NO: 54248 - DNA, 15 bp, Homo sapiens
caaatcaaaattcac

SEQ ID NO: 54249 - DNA, 15 bp, Homo sapiens
acaaatcaaaattca

SEQ ID NO: 54250 - DNA, 15 bp, Homo sapiens
cacaaatcaaaattc

SEQ ID NO: 54251 - DNA, 15 bp, Homo sapiens
ccacaaatcaaaatt

SEQ ID NO: 54252 - DNA, 15 bp, Homo sapiens
cccacaaatcaaaat

SEQ ID NO: 54253 - DNA, 15 bp, Homo sapiens
gcccacaaatcaaaa

SEQ ID NO: 54254 - DNA, 15 bp, Homo sapiens
tgcccacaaatcaaa

SEQ ID NO: 54255 - DNA, 15 bp, Homo sapiens
ttgcccacaaatcaa

SEQ ID NO: 54256 - DNA, 15 bp, Homo sapiens
cttgcccacaaatca

SEQ ID NO: 54257 - DNA, 15 bp, Homo sapiens
acttgcccacaaatc

SEQ ID NO: 54258 - DNA, 15 bp, Homo sapiens
tacttgcccacaaat

SEQ ID NO: 54259 - DNA, 15 bp, Homo sapiens
ctacttgcccacaaa

SEQ ID NO: 54260 - DNA, 15 bp, Homo sapiens
tctacttgcccacaa

SEQ ID NO: 54261 - DNA, 15 bp, Homo sapiens
atctacttgcccaca

SEQ ID NO: 54262 - DNA, 15 bp, Homo sapiens
catctacttgcccac

SEQ ID NO: 54263 - DNA, 15 bp, Homo sapiens
ccatctacttgccca

SEQ ID NO: 54264 - DNA, 15 bp, Homo sapiens
accatctacttgccc

SEQ ID NO: 54265 - DNA, 15 bp, Homo sapiens
aaccatctacttgcc

SEQ ID NO: 54266 - DNA, 15 bp, Homo sapiens
gaaccatctacttgc

SEQ ID NO: 54267 - DNA, 15 bp, Homo sapiens
ggaaccatctacttg

SEQ ID NO: 54268 - DNA, 15 bp, Homo sapiens
gggaaccatctactt

SEQ ID NO: 54269 - DNA, 15 bp, Homo sapiens
agggaaccatctact

SEQ ID NO: 54270 - DNA, 15 bp, Homo sapiens
tagggaaccatctac

SEQ ID NO: 54271 - DNA, 15 bp, Homo sapiens
ctagggaaccatcta

SEQ ID NO: 54272 - DNA, 15 bp, Homo sapiens
actagggaaccatct

SEQ ID NO: 54273 - DNA, 15 bp, Homo sapiens
gactagggaaccatc

SEQ ID NO: 54274 - DNA, 15 bp, Homo sapiens
agactagggaaccat

SEQ ID NO: 54275 - DNA, 15 bp, Homo sapiens
cagactagggaacca

SEQ ID NO: 54276 - DNA, 15 bp, Homo sapiens
tcagactagggaacc

SEQ ID NO: 54277 - DNA, 15 bp, Homo sapiens
ttcagactagggaac

SEQ ID NO: 54278 - DNA, 15 bp, Homo sapiens
tttcagactagggaa

SEQ ID NO: 54279 - DNA, 15 bp, Homo sapiens
atttcagactaggga

SEQ ID NO: 54280 - DNA, 15 bp, Homo sapiens
aatttcagactaggg

SEQ ID NO: 54281 - DNA, 15 bp, Homo sapiens
caatttcagactagg

SEQ ID NO: 54282 - DNA, 15 bp, Homo sapiens
tcaatttcagactag

SEQ ID NO: 54283 - DNA, 15 bp, Homo sapiens
gtcaatttcagacta

SEQ ID NO: 54284 - DNA, 15 bp, Homo sapiens
agtcaatttcagact

SEQ ID NO: 54285 - DNA, 15 bp, Homo sapiens
aagtcaatttcagac

SEQ ID NO: 54286 - DNA, 15 bp, Homo sapiens
aaagtcaatttcaga

SEQ ID NO: 54287 - DNA, 15 bp, Homo sapiens
caaagtcaatttcag

SEQ ID NO: 54288 - DNA, 15 bp, Homo sapiens
gcaaagtcaatttca

SEQ ID NO: 54289 - DNA, 15 bp, Homo sapiens
ggcaaagtcaatttc

SEQ ID NO: 54290 - DNA, 15 bp, Homo sapiens
aggcaaagtcaattt

SEQ ID NO: 54291 - DNA, 15 bp, Homo sapiens
aaggcaaagtcaatt

SEQ ID NO: 54292 - DNA, 15 bp, Homo sapiens
taaggcaaagtcaat

SEQ ID NO: 54293 - DNA, 15 bp, Homo sapiens
ctaaggcaaagtcaa

SEQ ID NO: 54294 - DNA, 15 bp, Homo sapiens
cctaaggcaaagtca

SEQ ID NO: 54295 - DNA, 15 bp, Homo sapiens
acctaaggcaaagtc

SEQ ID NO: 54296 - DNA, 15 bp, Homo sapiens
cacctaaggcaaagt

SEQ ID NO: 54297 - DNA, 15 bp, Homo sapiens
gcacctaaggcaaag

SEQ ID NO: 54298 - DNA, 15 bp, Homo sapiens
agcacctaaggcaaa

SEQ ID NO: 54299 - DNA, 15 bp, Homo sapiens
aagcacctaaggcaa

SEQ ID NO: 54300 - DNA, 15 bp, Homo sapiens
gaagcacctaaggca

SEQ ID NO: 54301 - DNA, 15 bp, Homo sapiens
tgaagcacctaaggc

SEQ ID NO: 54302 - DNA, 15 bp, Homo sapiens
ttgaagcacctaagg

SEQ ID NO: 54303 - DNA, 15 bp, Homo sapiens
attgaagcacctaag

SEQ ID NO: 54304 - DNA, 15 bp, Homo sapiens
aattgaagcacctaa

SEQ ID NO: 54305 - DNA, 15 bp, Homo sapiens
gaattgaagcaccta

SEQ ID NO: 54306 - DNA, 15 bp, Homo sapiens
agaattgaagcacct

SEQ ID NO: 54307 - DNA, 15 bp, Homo sapiens
aagaattgaagcacc

SEQ ID NO: 54308 - DNA, 15 bp, Homo sapiens
gaagaattgaagcac

SEQ ID NO: 54309 - DNA, 15 bp, Homo sapiens
tgaagaattgaagca

SEQ ID NO: 54310 - DNA, 15 bp, Homo sapiens
atgaagaattgaagc

SEQ ID NO: 54311 - DNA, 15 bp, Homo sapiens
tatgaagaattgaag

SEQ ID NO: 54312 - DNA, 15 bp, Homo sapiens
ttatgaagaattgaa

SEQ ID NO: 54313 - DNA, 15 bp, Homo sapiens
cttatgaagaattga

SEQ ID NO: 54314 - DNA, 15 bp, Homo sapiens
gcttatgaagaattg

SEQ ID NO: 54315 - DNA, 15 bp, Homo sapiens
agcttatgaagaatt

SEQ ID NO: 54316 - DNA, 15 bp, Homo sapiens
gagcttatgaagaat

SEQ ID NO: 54317 - DNA, 15 bp, Homo sapiens
ggagcttatgaagaa

SEQ ID NO: 54318 - DNA, 15 bp, Homo sapiens
gggagcttatgaaga

SEQ ID NO: 54319 - DNA, 15 bp, Homo sapiens
tgggagcttatgaag

SEQ ID NO: 54320 - DNA, 15 bp, Homo sapiens
ctgggagcttatgaa

SEQ ID NO: 54321 - DNA, 15 bp, Homo sapiens
actgggagcttatga

SEQ ID NO: 54322 - DNA, 15 bp, Homo sapiens
aactgggagcttatg

SEQ ID NO: 54323 - DNA, 15 bp, Homo sapiens
gaactgggagcttat

SEQ ID NO: 54324 - DNA, 15 bp, Homo sapiens
agaactgggagctta

SEQ ID NO: 54325 - DNA, 15 bp, Homo sapiens
aagaactgggagctt

SEQ ID NO: 54326 - DNA, 15 bp, Homo sapiens
taagaactgggagct

SEQ ID NO: 54327 - DNA, 15 bp, Homo sapiens
ttaagaactgggagc

SEQ ID NO: 54328 - DNA, 15 bp, Homo sapiens
tttaagaactgggag

SEQ ID NO: 54329 - DNA, 15 bp, Homo sapiens
ctttaagaactggga

SEQ ID NO: 54330 - DNA, 15 bp, Homo sapiens
cctttaagaactggg

SEQ ID NO: 54331 - DNA, 15 bp, Homo sapiens
tcctttaagaactgg

SEQ ID NO: 54332 - DNA, 15 bp, Homo sapiens
gtcctttaagaactg

SEQ ID NO: 54333 - DNA, 15 bp, Homo sapiens
tgtcctttaagaact

SEQ ID NO: 54334 - DNA, 15 bp, Homo sapiens
ttgtcctttaagaac

SEQ ID NO: 54335 - DNA, 15 bp, Homo sapiens
cttgtcctttaagaa

SEQ ID NO: 54336 - DNA, 15 bp, Homo sapiens
tcttgtcctttaaga

SEQ ID NO: 54337 - DNA, 15 bp, Homo sapiens
atcttgtcctttaag

SEQ ID NO: 54338 - DNA, 15 bp, Homo sapiens
gatcttgtcctttaa

SEQ ID NO: 54339 - DNA, 15 bp, Homo sapiens
ggatcttgtccttta

SEQ ID NO: 54340 - DNA, 15 bp, Homo sapiens
aggatcttgtccttt

SEQ ID NO: 54341 - DNA, 15 bp, Homo sapiens
aaggatcttgtcctt

SEQ ID NO: 54342 - DNA, 15 bp, Homo sapiens
caaggatcttgtcct

SEQ ID NO: 54343 - DNA, 15 bp, Homo sapiens
acaaggatcttgtcc

SEQ ID NO: 54344 - DNA, 15 bp, Homo sapiens
tacaaggatcttgtc

SEQ ID NO: 54345 - DNA, 15 bp, Homo sapiens
ttacaaggatcttgt

SEQ ID NO: 54346 - DNA, 15 bp, Homo sapiens
tttacaaggatcttg

SEQ ID NO: 54347 - DNA, 15 bp, Homo sapiens
gtttacaaggatctt

SEQ ID NO: 54348 - DNA, 15 bp, Homo sapiens
tgtttacaaggatct

SEQ ID NO: 54349 - DNA, 15 bp, Homo sapiens
atgtttacaaggatc

SEQ ID NO: 54350 - DNA, 15 bp, Homo sapiens
catgtttacaaggat

SEQ ID NO: 54351 - DNA, 15 bp, Homo sapiens
ccatgtttacaagga

SEQ ID NO: 54352 - DNA, 15 bp, Homo sapiens
gccatgtttacaagg

SEQ ID NO: 54353 - DNA, 15 bp, Homo sapiens
tgccatgtttacaag

SEQ ID NO: 54354 - DNA, 15 bp, Homo sapiens
ttgccatgtttacaa

SEQ ID NO: 54355 - DNA, 15 bp, Homo sapiens
attgccatgtttaca

SEQ ID NO: 54356 - DNA, 15 bp, Homo sapiens
cattgccatgtttac

SEQ ID NO: 54357 - DNA, 15 bp, Homo sapiens
ccattgccatgttta

SEQ ID NO: 54358 - DNA, 15 bp, Homo sapiens
gccattgccatgttt

SEQ ID NO: 54359 - DNA, 15 bp, Homo sapiens
tgccattgccatgtt

SEQ ID NO: 54360 - DNA, 15 bp, Homo sapiens
atgccattgccatgt

SEQ ID NO: 54361 - DNA, 15 bp, Homo sapiens
aatgccattgccatg

SEQ ID NO: 54362 - DNA, 15 bp, Homo sapiens
gaatgccattgccat

SEQ ID NO: 54363 - DNA, 15 bp, Homo sapiens
tgaatgccattgcca

SEQ ID NO: 54364 - DNA, 15 bp, Homo sapiens
atgaatgccattgcc

SEQ ID NO: 54365 - DNA, 15 bp, Homo sapiens
aatgaatgccattgc

SEQ ID NO: 54366 - DNA, 15 bp, Homo sapiens
taatgaatgccattg

SEQ ID NO: 54367 - DNA, 15 bp, Homo sapiens
ctaatgaatgccatt

SEQ ID NO: 54368 - DNA, 15 bp, Homo sapiens
cctaatgaatgccat

SEQ ID NO: 54369 - DNA, 15 bp, Homo sapiens
tcctaatgaatgcca

SEQ ID NO: 54370 - DNA, 15 bp, Homo sapiens
ttcctaatgaatgcc

SEQ ID NO: 54371 - DNA, 15 bp, Homo sapiens
attcctaatgaatgc

SEQ ID NO: 54372 - DNA, 15 bp, Homo sapiens
gattcctaatgaatg

SEQ ID NO: 54373 - DNA, 15 bp, Homo sapiens
agattcctaatgaat

SEQ ID NO: 54374 - DNA, 15 bp, Homo sapiens
tagattcctaatgaa

SEQ ID NO: 54375 - DNA, 15 bp, Homo sapiens
ctagattcctaatga

SEQ ID NO: 54376 - DNA, 15 bp, Homo sapiens
gctagattcctaatg

SEQ ID NO: 54377 - DNA, 15 bp, Homo sapiens
agctagattcctaat

SEQ ID NO: 54378 - DNA, 15 bp, Homo sapiens
cagctagattcctaa

SEQ ID NO: 54379 - DNA, 15 bp, Homo sapiens
ccagctagattccta

SEQ ID NO: 54380 - DNA, 15 bp, Homo sapiens
cccagctagattcct

SEQ ID NO: 54381 - DNA, 15 bp, Homo sapiens
tcccagctagattcc

SEQ ID NO: 54382 - DNA, 15 bp, Homo sapiens
ttcccagctagattc

SEQ ID NO: 54383 - DNA, 15 bp, Homo sapiens
tttcccagctagatt

SEQ ID NO: 54384 - DNA, 15 bp, Homo sapiens
ttttcccagctagat

SEQ ID NO: 54385 - DNA, 15 bp, Homo sapiens
attttcccagctaga

SEQ ID NO: 54386 - DNA, 15 bp, Homo sapiens
gattttcccagctag

SEQ ID NO: 54387 - DNA, 15 bp, Homo sapiens
ggattttcccagcta

SEQ ID NO: 54388 - DNA, 15 bp, Homo sapiens
tggattttcccagct

SEQ ID NO: 54389 - DNA, 15 bp, Homo sapiens
ctggattttcccagc

SEQ ID NO: 54390 - DNA, 15 bp, Homo sapiens
actggattttcccag

SEQ ID NO: 54391 - DNA, 15 bp, Homo sapiens
cactggattttccca

SEQ ID NO: 54392 - DNA, 15 bp, Homo sapiens
acactggattttccc

SEQ ID NO: 54393 - DNA, 15 bp, Homo sapiens
cacactggattttcc

SEQ ID NO: 54394 - DNA, 15 bp, Homo sapiens
acacactggattttc

SEQ ID NO: 54395 - DNA, 15 bp, Homo sapiens
tacacactggatttt

SEQ ID NO: 54396 - DNA, 15 bp, Homo sapiens
atacacactggattt

SEQ ID NO: 54397 - DNA, 15 bp, Homo sapiens
catacacactggatt

SEQ ID NO: 54398 - DNA, 15 bp, Homo sapiens
gcatacacactggat

SEQ ID NO: 54399 - DNA, 15 bp, Homo sapiens
agcatacacactgga

SEQ ID NO: 54400 - DNA, 15 bp, Homo sapiens
aagcatacacactgg

SEQ ID NO: 54401 - DNA, 15 bp, Homo sapiens
caagcatacacactg

SEQ ID NO: 54402 - DNA, 15 bp, Homo sapiens
ccaagcatacacact

SEQ ID NO: 54403 - DNA, 15 bp, Homo sapiens
tccaagcatacacac

SEQ ID NO: 54404 - DNA, 15 bp, Homo sapiens
ttccaagcatacaca

SEQ ID NO: 54405 - DNA, 15 bp, Homo sapiens
tttccaagcatacac

SEQ ID NO: 54406 - DNA, 15 bp, Homo sapiens
atttccaagcataca

SEQ ID NO: 54407 - DNA, 15 bp, Homo sapiens
catttccaagcatac

SEQ ID NO: 54408 - DNA, 15 bp, Homo sapiens
tcatttccaagcata

SEQ ID NO: 54409 - DNA, 15 bp, Homo sapiens
ctcatttccaagcat

SEQ ID NO: 54410 - DNA, 15 bp, Homo sapiens
cctcatttccaagca

SEQ ID NO: 54411 - DNA, 15 bp, Homo sapiens
ccctcatttccaagc

SEQ ID NO: 54412 - DNA, 15 bp, Homo sapiens
tccctcatttccaag

SEQ ID NO: 54413 - DNA, 15 bp, Homo sapiens
atccctcatttccaa

SEQ ID NO: 54414 - DNA, 15 bp, Homo sapiens
gatccctcatttcca

SEQ ID NO: 54415 - DNA, 15 bp, Homo sapiens
agatccctcatttcc

SEQ ID NO: 54416 - DNA, 15 bp, Homo sapiens
cagatccctcatttc

SEQ ID NO: 54417 - DNA, 15 bp, Homo sapiens
ccagatccctcattt

SEQ ID NO: 54418 - DNA, 15 bp, Homo sapiens
cccagatccctcatt

SEQ ID NO: 54419 - DNA, 15 bp, Homo sapiens
ccccagatccctcat

SEQ ID NO: 54420 - DNA, 15 bp, Homo sapiens
gccccagatccctca

SEQ ID NO: 54421 - DNA, 15 bp, Homo sapiens
agccccagatccctc

SEQ ID NO: 54422 - DNA, 15 bp, Homo sapiens
cagccccagatccct

SEQ ID NO: 54423 - DNA, 15 bp, Homo sapiens
ccagccccagatccc

SEQ ID NO: 54424 - DNA, 15 bp, Homo sapiens
tccagccccagatcc

SEQ ID NO: 54425 - DNA, 15 bp, Homo sapiens
ctccagccccagatc

SEQ ID NO: 54426 - DNA, 15 bp, Homo sapiens
tctccagccccagat

SEQ ID NO: 54427 - DNA, 15 bp, Homo sapiens
ctctccagccccaga

SEQ ID NO: 54428 - DNA, 15 bp, Homo sapiens
tctctccagccccag

SEQ ID NO: 54429 - DNA, 15 bp, Homo sapiens
ttctctccagcccca

SEQ ID NO: 54430 - DNA, 15 bp, Homo sapiens
tttctctccagcccc

SEQ ID NO: 54431 - DNA, 15 bp, Homo sapiens
ctttctctccagccc

SEQ ID NO: 54432 - DNA, 15 bp, Homo sapiens
cctttctctccagcc

SEQ ID NO: 54433 - DNA, 15 bp, Homo sapiens
gcctttctctccagc

SEQ ID NO: 54434 - DNA, 15 bp, Homo sapiens
tgcctttctctccag

SEQ ID NO: 54435 - DNA, 15 bp, Homo sapiens
atgcctttctctcca

SEQ ID NO: 54436 - DNA, 15 bp, Homo sapiens
catgcctttctctcc

SEQ ID NO: 54437 - DNA, 15 bp, Homo sapiens
ccatgcctttctctc

SEQ ID NO: 54438 - DNA, 15 bp, Homo sapiens
cccatgcctttctct

SEQ ID NO: 54439 - DNA, 15 bp, Homo sapiens
gcccatgcctttctc

SEQ ID NO: 54440 - DNA, 15 bp, Homo sapiens
tgcccatgcctttct

SEQ ID NO: 54441 - DNA, 15 bp, Homo sapiens
atgcccatgcctttc

SEQ ID NO: 54442 - DNA, 15 bp, Homo sapiens
catgcccatgccttt

SEQ ID NO: 54443 - DNA, 15 bp, Homo sapiens
gcatgcccatgcctt

SEQ ID NO: 54444 - DNA, 15 bp, Homo sapiens
ggcatgcccatgcct

SEQ ID NO: 54445 - DNA, 15 bp, Homo sapiens
aggcatgcccatgcc

SEQ ID NO: 54446 - DNA, 15 bp, Homo sapiens
aaggcatgcccatgc

SEQ ID NO: 54447 - DNA, 15 bp, Homo sapiens
caaggcatgcccatg

SEQ ID NO: 54448 - DNA, 15 bp, Homo sapiens
ccaaggcatgcccat

SEQ ID NO: 54449 - DNA, 15 bp, Homo sapiens
tccaaggcatgccca

SEQ ID NO: 54450 - DNA, 15 bp, Homo sapiens
ctccaaggcatgccc

SEQ ID NO: 54451 - DNA, 15 bp, Homo sapiens
cctccaaggcatgcc

SEQ ID NO: 54452 - DNA, 15 bp, Homo sapiens
ccctccaaggcatgc

SEQ ID NO: 54453 - DNA, 15 bp, Homo sapiens
tccctccaaggcatg

SEQ ID NO: 54454 - DNA, 15 bp, Homo sapiens
gtccctccaaggcat

SEQ ID NO: 54455 - DNA, 15 bp, Homo sapiens
agtccctccaaggca

SEQ ID NO: 54456 - DNA, 15 bp, Homo sapiens
aagtccctccaaggc

SEQ ID NO: 54457 - DNA, 15 bp, Homo sapiens
caagtccctccaagg

SEQ ID NO: 54458 - DNA, 15 bp, Homo sapiens
acaagtccctccaag

SEQ ID NO: 54459 - DNA, 15 bp, Homo sapiens
cacaagtccctccaa

SEQ ID NO: 54460 - DNA, 15 bp, Homo sapiens
acacaagtccctcca

SEQ ID NO: 54461 - DNA, 15 bp, Homo sapiens
cacacaagtccctcc

SEQ ID NO: 54462 - DNA, 15 bp, Homo sapiens
acacacaagtccctc

SEQ ID NO: 54463 - DNA, 15 bp, Homo sapiens
gacacacaagtccct

SEQ ID NO: 54464 - DNA, 15 bp, Homo sapiens
tgacacacaagtccc

SEQ ID NO: 54465 - DNA, 15 bp, Homo sapiens
ttgacacacaagtcc

SEQ ID NO: 54466 - DNA, 15 bp, Homo sapiens
cttgacacacaagtc

SEQ ID NO: 54467 - DNA, 15 bp, Homo sapiens
gcttgacacacaagt

SEQ ID NO: 54468 - DNA, 15 bp, Homo sapiens
agcttgacacacaag

SEQ ID NO: 54469 - DNA, 15 bp, Homo sapiens
cagcttgacacacaa

SEQ ID NO: 54470 - DNA, 15 bp, Homo sapiens
tcagcttgacacaca

SEQ ID NO: 54471 - DNA, 15 bp, Homo sapiens
ctcagcttgacacac

SEQ ID NO: 54472 - DNA, 15 bp, Homo sapiens
cctcagcttgacaca

SEQ ID NO: 54473 - DNA, 15 bp, Homo sapiens
tcctcagcttgacac

SEQ ID NO: 54474 - DNA, 15 bp, Homo sapiens
gtcctcagcttgaca

SEQ ID NO: 54475 - DNA, 15 bp, Homo sapiens
ggtcctcagcttgac

SEQ ID NO: 54476 - DNA, 15 bp, Homo sapiens
aggtcctcagcttga

SEQ ID NO: 54477 - DNA, 15 bp, Homo sapiens
aaggtcctcagcttg

SEQ ID NO: 54478 - DNA, 15 bp, Homo sapiens
aaaggtcctcagctt

SEQ ID NO: 54479 - DNA, 15 bp, Homo sapiens
taaaggtcctcagct

SEQ ID NO: 54480 - DNA, 15 bp, Homo sapiens
gtaaaggtcctcagc

SEQ ID NO: 54481 - DNA, 15 bp, Homo sapiens
agtaaaggtcctcag

SEQ ID NO: 54482 - DNA, 15 bp, Homo sapiens
aagtaaaggtcctca

SEQ ID NO: 54483 - DNA, 15 bp, Homo sapiens
aaagtaaaggtcctc

SEQ ID NO: 54484 - DNA, 15 bp, Homo sapiens
taaagtaaaggtcct

SEQ ID NO: 54485 - DNA, 15 bp, Homo sapiens
ttaaagtaaaggtcc

SEQ ID NO: 54486 - DNA, 15 bp, Homo sapiens
cttaaagtaaaggtc

SEQ ID NO: 54487 - DNA, 15 bp, Homo sapiens
gcttaaagtaaaggt

SEQ ID NO: 54488 - DNA, 15 bp, Homo sapiens
agcttaaagtaaagg

SEQ ID NO: 54489 - DNA, 15 bp, Homo sapiens
gagcttaaagtaaag

SEQ ID NO: 54490 - DNA, 15 bp, Homo sapiens
agagcttaaagtaaa

SEQ ID NO: 54491 - DNA, 15 bp, Homo sapiens
tagagcttaaagtaa

SEQ ID NO: 54492 - DNA, 15 bp, Homo sapiens
ctagagcttaaagta

SEQ ID NO: 54493 - DNA, 15 bp, Homo sapiens
cctagagcttaaagt

SEQ ID NO: 54494 - DNA, 15 bp, Homo sapiens
ccctagagcttaaag

SEQ ID NO: 54495 - DNA, 15 bp, Homo sapiens
cccctagagcttaaa

SEQ ID NO: 54496 - DNA, 15 bp, Homo sapiens
tcccctagagcttaa

SEQ ID NO: 54497 - DNA, 15 bp, Homo sapiens
gtcccctagagctta

SEQ ID NO: 54498 - DNA, 15 bp, Homo sapiens
ggtcccctagagctt

SEQ ID NO: 54499 - DNA, 15 bp, Homo sapiens
tggtcccctagagct

SEQ ID NO: 54500 - DNA, 15 bp, Homo sapiens
ctggtcccctagagc

SEQ ID NO: 54501 - DNA, 15 bp, Homo sapiens
cctggtcccctagag

SEQ ID NO: 54502 - DNA, 15 bp, Homo sapiens
gcctggtcccctaga

SEQ ID NO: 54503 - DNA, 15 bp, Homo sapiens
tgcctggtcccctag

SEQ ID NO: 54504 - DNA, 15 bp, Homo sapiens
ttgcctggtccccta

SEQ ID NO: 54505 - DNA, 15 bp, Homo sapiens
cttgcctggtcccct

SEQ ID NO: 54506 - DNA, 15 bp, Homo sapiens
ccttgcctggtcccc

SEQ ID NO: 54507 - DNA, 15 bp, Homo sapiens
cccttgcctggtccc

SEQ ID NO: 54508 - DNA, 15 bp, Homo sapiens
ccccttgcctggtcc

SEQ ID NO: 54509 - DNA, 15 bp, Homo sapiens
tccccttgcctggtc

SEQ ID NO: 54510 - DNA, 15 bp, Homo sapiens
ctccccttgcctggt

SEQ ID NO: 54511 - DNA, 15 bp, Homo sapiens
tctccccttgcctgg

SEQ ID NO: 54512 - DNA, 15 bp, Homo sapiens
atctccccttgcctg

SEQ ID NO: 54513 - DNA, 15 bp, Homo sapiens
catctccccttgcct

SEQ ID NO: 54514 - DNA, 15 bp, Homo sapiens
acatctccccttgcc

SEQ ID NO: 54515 - DNA, 15 bp, Homo sapiens
tacatctccccttgc

SEQ ID NO: 54516 - DNA, 15 bp, Homo sapiens
ctacatctccccttg

SEQ ID NO: 54517 - DNA, 15 bp, Homo sapiens
tctacatctcccctt

SEQ ID NO: 54518 - DNA, 15 bp, Homo sapiens
atctacatctcccct

SEQ ID NO: 54519 - DNA, 15 bp, Homo sapiens
tatctacatctcccc

SEQ ID NO: 54520 - DNA, 15 bp, Homo sapiens
gtatctacatctccc

SEQ ID NO: 54521 - DNA, 15 bp, Homo sapiens
cgtatctacatctcc

SEQ ID NO: 54522 - DNA, 15 bp, Homo sapiens
acgtatctacatctc

SEQ ID NO: 54523 - DNA, 15 bp, Homo sapiens
aacgtatctacatct

SEQ ID NO: 54524 - DNA, 15 bp, Homo sapiens
taacgtatctacatc

SEQ ID NO: 54525 - DNA, 15 bp, Homo sapiens
gtaacgtatctacat

SEQ ID NO: 54526 - DNA, 15 bp, Homo sapiens
agtaacgtatctaca

SEQ ID NO: 54527 - DNA, 15 bp, Homo sapiens
gagtaacgtatctac

SEQ ID NO: 54528 - DNA, 15 bp, Homo sapiens
agagtaacgtatcta

SEQ ID NO: 54529 - DNA, 15 bp, Homo sapiens
cagagtaacgtatct

SEQ ID NO: 54530 - DNA, 15 bp, Homo sapiens
tcagagtaacgtatc

SEQ ID NO: 54531 - DNA, 15 bp, Homo sapiens
atcagagtaacgtat

SEQ ID NO: 54532 - DNA, 15 bp, Homo sapiens
catcagagtaacgta

SEQ ID NO: 54533 - DNA, 15 bp, Homo sapiens
ccatcagagtaacgt

SEQ ID NO: 54534 - DNA, 15 bp, Homo sapiens
cccatcagagtaacg

SEQ ID NO: 54535 - DNA, 15 bp, Homo sapiens
ccccatcagagtaac

SEQ ID NO: 54536 - DNA, 15 bp, Homo sapiens
accccatcagagtaa

SEQ ID NO: 54537 - DNA, 15 bp, Homo sapiens
caccccatcagagta

SEQ ID NO: 54538 - DNA, 15 bp, Homo sapiens
ccaccccatcagagt

SEQ ID NO: 54539 - DNA, 15 bp, Homo sapiens
tccaccccatcagag

SEQ ID NO: 54540 - DNA, 15 bp, Homo sapiens
atccaccccatcaga

SEQ ID NO: 54541 - DNA, 15 bp, Homo sapiens
catccaccccatcag

SEQ ID NO: 54542 - DNA, 15 bp, Homo sapiens
tcatccaccccatca

SEQ ID NO: 54543 - DNA, 15 bp, Homo sapiens
ttcatccaccccatc

SEQ ID NO: 54544 - DNA, 15 bp, Homo sapiens
attcatccaccccat

SEQ ID NO: 54545 - DNA, 15 bp, Homo sapiens
aattcatccacccca

SEQ ID NO: 54546 - DNA, 15 bp, Homo sapiens
caattcatccacccc

SEQ ID NO: 54547 - DNA, 15 bp, Homo sapiens
tcaattcatccaccc

SEQ ID NO: 54548 - DNA, 15 bp, Homo sapiens
ttcaattcatccacc

SEQ ID NO: 54549 - DNA, 15 bp, Homo sapiens
cttcaattcatccac

SEQ ID NO: 54550 - DNA, 15 bp, Homo sapiens
tcttcaattcatcca

SEQ ID NO: 54551 - DNA, 15 bp, Homo sapiens
ttcttcaattcatcc

SEQ ID NO: 54552 - DNA, 15 bp, Homo sapiens
cttcttcaattcatc

SEQ ID NO: 54553 - DNA, 15 bp, Homo sapiens
ccttcttcaattcat

SEQ ID NO: 54554 - DNA, 15 bp, Homo sapiens
tccttcttcaattca

SEQ ID NO: 54555 - DNA, 15 bp, Homo sapiens
atccttcttcaattc

SEQ ID NO: 54556 - DNA, 15 bp, Homo sapiens
catccttcttcaatt

SEQ ID NO: 54557 - DNA, 15 bp, Homo sapiens
tcatccttcttcaat

SEQ ID NO: 54558 - DNA, 15 bp, Homo sapiens
ctcatccttcttcaa

SEQ ID NO: 54559 - DNA, 15 bp, Homo sapiens
cctcatccttcttca

SEQ ID NO: 54560 - DNA, 15 bp, Homo sapiens
gcctcatccttcttc

SEQ ID NO: 54561 - DNA, 15 bp, Homo sapiens
tgcctcatccttctt

SEQ ID NO: 54562 - DNA, 15 bp, Homo sapiens
ttgcctcatccttct

SEQ ID NO: 54563 - DNA, 15 bp, Homo sapiens
cttgcctcatccttc

SEQ ID NO: 54564 - DNA, 15 bp, Homo sapiens
tcttgcctcatcctt

SEQ ID NO: 54565 - DNA, 15 bp, Homo sapiens
ttcttgcctcatcct

SEQ ID NO: 54566 - DNA, 15 bp, Homo sapiens
attcttgcctcatcc

SEQ ID NO: 54567 - DNA, 15 bp, Homo sapiens
cattcttgcctcatc

SEQ ID NO: 54568 - DNA, 15 bp, Homo sapiens
tcattcttgcctcat

SEQ ID NO: 54569 - DNA, 15 bp, Homo sapiens
ttcattcttgcctca

SEQ ID NO: 54570 - DNA, 15 bp, Homo sapiens
cttcattcttgcctc

SEQ ID NO: 54571 - DNA, 15 bp, Homo sapiens
ccttcattcttgcct

SEQ ID NO: 54572 - DNA, 15 bp, Homo sapiens
gccttcattcttgcc

SEQ ID NO: 54573 - DNA, 15 bp, Homo sapiens
tgccttcattcttgc

SEQ ID NO: 54574 - DNA, 15 bp, Homo sapiens
ctgccttcattcttg

SEQ ID NO: 54575 - DNA, 15 bp, Homo sapiens
tctgccttcattctt

SEQ ID NO: 54576 - DNA, 15 bp, Homo sapiens
ctctgccttcattct

SEQ ID NO: 54577 - DNA, 15 bp, Homo sapiens
tctctgccttcattc

SEQ ID NO: 54578 - DNA, 15 bp, Homo sapiens
gtctctgccttcatt

SEQ ID NO: 54579 - DNA, 15 bp, Homo sapiens
ggtctctgccttcat

SEQ ID NO: 54580 - DNA, 15 bp, Homo sapiens
tggtctctgccttca

SEQ ID NO: 54581 - DNA, 15 bp, Homo sapiens
ctggtctctgccttc

SEQ ID NO: 54582 - DNA, 15 bp, Homo sapiens
cctggtctctgcctt

SEQ ID NO: 54583 - DNA, 15 bp, Homo sapiens
ccctggtctctgcct

SEQ ID NO: 54584 - DNA, 15 bp, Homo sapiens
tccctggtctctgcc

SEQ ID NO: 54585 - DNA, 15 bp, Homo sapiens
ctccctggtctctgc

SEQ ID NO: 54586 - DNA, 15 bp, Homo sapiens
cctccctggtctctg

SEQ ID NO: 54587 - DNA, 15 bp, Homo sapiens
tcctccctggtctct

SEQ ID NO: 54588 - DNA, 15 bp, Homo sapiens
ctcctccctggtctc

SEQ ID NO: 54589 - DNA, 15 bp, Homo sapiens
cctcctccctggtct

SEQ ID NO: 54590 - DNA, 15 bp, Homo sapiens
gcctcctccctggtc

SEQ ID NO: 54591 - DNA, 15 bp, Homo sapiens
agcctcctccctggt

SEQ ID NO: 54592 - DNA, 15 bp, Homo sapiens
gagcctcctccctgg

SEQ ID NO: 54593 - DNA, 15 bp, Homo sapiens
agagcctcctccctg

SEQ ID NO: 54594 - DNA, 15 bp, Homo sapiens
gagagcctcctccct

SEQ ID NO: 54595 - DNA, 15 bp, Homo sapiens
ggagagcctcctccc

SEQ ID NO: 54596 - DNA, 15 bp, Homo sapiens
tggagagcctcctcc

SEQ ID NO: 54597 - DNA, 15 bp, Homo sapiens
ttggagagcctcctc

SEQ ID NO: 54598 - DNA, 15 bp, Homo sapiens
cttggagagcctcct

SEQ ID NO: 54599 - DNA, 15 bp, Homo sapiens
acttggagagcctcc

SEQ ID NO: 54600 - DNA, 15 bp, Homo sapiens
cacttggagagcctc

SEQ ID NO: 54601 - DNA, 15 bp, Homo sapiens
ccacttggagagcct

SEQ ID NO: 54602 - DNA, 15 bp, Homo sapiens
gccacttggagagcc

SEQ ID NO: 54603 - DNA, 15 bp, Homo sapiens
ggccacttggagagc

SEQ ID NO: 54604 - DNA, 15 bp, Homo sapiens
tggccacttggagag

SEQ ID NO: 54605 - DNA, 15 bp, Homo sapiens
ttggccacttggaga

SEQ ID NO: 54606 - DNA, 15 bp, Homo sapiens
cttggccacttggag

SEQ ID NO: 54607 - DNA, 15 bp, Homo sapiens
ccttggccacttgga

SEQ ID NO: 54608 - DNA, 15 bp, Homo sapiens
gccttggccacttgg

SEQ ID NO: 54609 - DNA, 15 bp, Homo sapiens
tgccttggccacttg

SEQ ID NO: 54610 - DNA, 15 bp, Homo sapiens
atgccttggccactt

SEQ ID NO: 54611 - DNA, 15 bp, Homo sapiens
tatgccttggccact

SEQ ID NO: 54612 - DNA, 15 bp, Homo sapiens
ttatgccttggccac

SEQ ID NO: 54613 - DNA, 15 bp, Homo sapiens
tttatgccttggcca

SEQ ID NO: 54614 - DNA, 15 bp, Homo sapiens
ctttatgccttggcc

SEQ ID NO: 54615 - DNA, 15 bp, Homo sapiens
gctttatgccttggc

SEQ ID NO: 54616 - DNA, 15 bp, Homo sapiens
tgctttatgccttgg

SEQ ID NO: 54617 - DNA, 15 bp, Homo sapiens
ttgctttatgccttg

SEQ ID NO: 54618 - DNA, 15 bp, Homo sapiens
cttgctttatgcctt

SEQ ID NO: 54619 - DNA, 15 bp, Homo sapiens
tcttgctttatgcct

SEQ ID NO: 54620 - DNA, 15 bp, Homo sapiens
ttcttgctttatgcc

SEQ ID NO: 54621 - DNA, 15 bp, Homo sapiens
tttcttgctttatgc

SEQ ID NO: 54622 - DNA, 15 bp, Homo sapiens
atttcttgctttatg

SEQ ID NO: 54623 - DNA, 15 bp, Homo sapiens
catttcttgctttat

SEQ ID NO: 54624 - DNA, 15 bp, Homo sapiens
tcatttcttgcttta

SEQ ID NO: 54625 - DNA, 15 bp, Homo sapiens
ctcatttcttgcttt

SEQ ID NO: 54626 - DNA, 15 bp, Homo sapiens
cctcatttcttgctt

SEQ ID NO: 54627 - DNA, 15 bp, Homo sapiens
gcctcatttcttgct

SEQ ID NO: 54628 - DNA, 15 bp, Homo sapiens
ggcctcatttcttgc

SEQ ID NO: 54629 - DNA, 15 bp, Homo sapiens
aggcctcatttcttg

SEQ ID NO: 54630 - DNA, 15 bp, Homo sapiens
caggcctcatttctt

SEQ ID NO: 54631 - DNA, 15 bp, Homo sapiens
ccaggcctcatttct

SEQ ID NO: 54632 - DNA, 15 bp, Homo sapiens
accaggcctcatttc

SEQ ID NO: 54633 - DNA, 15 bp, Homo sapiens
caccaggcctcattt

SEQ ID NO: 54634 - DNA, 15 bp, Homo sapiens
tcaccaggcctcatt

SEQ ID NO: 54635 - DNA, 15 bp, Homo sapiens
gtcaccaggcctcat

SEQ ID NO: 54636 - DNA, 15 bp, Homo sapiens
agtcaccaggcctca

SEQ ID NO: 54637 - DNA, 15 bp, Homo sapiens
cagtcaccaggcctc

SEQ ID NO: 54638 - DNA, 15 bp, Homo sapiens
gcagtcaccaggcct

SEQ ID NO: 54639 - DNA, 15 bp, Homo sapiens
agcagtcaccaggcc

SEQ ID NO: 54640 - DNA, 15 bp, Homo sapiens
aagcagtcaccaggc

SEQ ID NO: 54641 - DNA, 15 bp, Homo sapiens
taagcagtcaccagg

SEQ ID NO: 54642 - DNA, 15 bp, Homo sapiens
ctaagcagtcaccag

SEQ ID NO: 54643 - DNA, 15 bp, Homo sapiens
actaagcagtcacca

SEQ ID NO: 54644 - DNA, 15 bp, Homo sapiens
cactaagcagtcacc

SEQ ID NO: 54645 - DNA, 15 bp, Homo sapiens
ccactaagcagtcac

SEQ ID NO: 54646 - DNA, 15 bp, Homo sapiens
gccactaagcagtca

SEQ ID NO: 54647 - DNA, 15 bp, Homo sapiens
tgccactaagcagtc

SEQ ID NO: 54648 - DNA, 15 bp, Homo sapiens
ctgccactaagcagt

SEQ ID NO: 54649 - DNA, 15 bp, Homo sapiens
tctgccactaagcag

SEQ ID NO: 54650 - DNA, 15 bp, Homo sapiens
ctctgccactaagca

SEQ ID NO: 54651 - DNA, 15 bp, Homo sapiens
gctctgccactaagc

SEQ ID NO: 54652 - DNA, 15 bp, Homo sapiens
tgctctgccactaag

SEQ ID NO: 54653 - DNA, 15 bp, Homo sapiens
ctgctctgccactaa

SEQ ID NO: 54654 - DNA, 15 bp, Homo sapiens
actgctctgccacta

SEQ ID NO: 54655 - DNA, 15 bp, Homo sapiens
cactgctctgccact

SEQ ID NO: 54656 - DNA, 15 bp, Homo sapiens
tcactgctctgccac

SEQ ID NO: 54657 - DNA, 15 bp, Homo sapiens
ttcactgctctgcca

SEQ ID NO: 54658 - DNA, 15 bp, Homo sapiens
tttcactgctctgcc

SEQ ID NO: 54659 - DNA, 15 bp, Homo sapiens
ctttcactgctctgc

SEQ ID NO: 54660 - DNA, 15 bp, Homo sapiens
tctttcactgctctg

SEQ ID NO: 54661 - DNA, 15 bp, Homo sapiens
ctctttcactgctct

SEQ ID NO: 54662 - DNA, 15 bp, Homo sapiens
tctctttcactgctc

SEQ ID NO: 54663 - DNA, 15 bp, Homo sapiens
ctctctttcactgct

SEQ ID NO: 54664 - DNA, 15 bp, Homo sapiens
cctctctttcactgc

SEQ ID NO: 54665 - DNA, 15 bp, Homo sapiens
ccctctctttcactg

SEQ ID NO: 54666 - DNA, 15 bp, Homo sapiens
tccctctctttcact

SEQ ID NO: 54667 - DNA, 15 bp, Homo sapiens
ctccctctctttcac

SEQ ID NO: 54668 - DNA, 15 bp, Homo sapiens
cctccctctctttca

SEQ ID NO: 54669 - DNA, 15 bp, Homo sapiens
gcctccctctctttc

SEQ ID NO: 54670 - DNA, 15 bp, Homo sapiens
tgcctccctctcttt

SEQ ID NO: 54671 - DNA, 15 bp, Homo sapiens
atgcctccctctctt

SEQ ID NO: 54672 - DNA, 15 bp, Homo sapiens
gatgcctccctctct

SEQ ID NO: 54673 - DNA, 15 bp, Homo sapiens
tgatgcctccctctc

SEQ ID NO: 54674 - DNA, 15 bp, Homo sapiens
ttgatgcctccctct

SEQ ID NO: 54675 - DNA, 15 bp, Homo sapiens
tttgatgcctccctc

SEQ ID NO: 54676 - DNA, 15 bp, Homo sapiens
ctttgatgcctccct

SEQ ID NO: 54677 - DNA, 15 bp, Homo sapiens
actttgatgcctccc

SEQ ID NO: 54678 - DNA, 15 bp, Homo sapiens
cactttgatgcctcc

SEQ ID NO: 54679 - DNA, 15 bp, Homo sapiens
tcactttgatgcctc

SEQ ID NO: 54680 - DNA, 15 bp, Homo sapiens
ctcactttgatgcct

SEQ ID NO: 54681 - DNA, 15 bp, Homo sapiens
actcactttgatgcc

SEQ ID NO: 54682 - DNA, 15 bp, Homo sapiens
gactcactttgatgc

SEQ ID NO: 54683 - DNA, 15 bp, Homo sapiens
agactcactttgatg

SEQ ID NO: 54684 - DNA, 15 bp, Homo sapiens
gagactcactttgat

SEQ ID NO: 54685 - DNA, 15 bp, Homo sapiens
cgagactcactttga

SEQ ID NO: 54686 - DNA, 15 bp, Homo sapiens
tcgagactcactttg

SEQ ID NO: 54687 - DNA, 15 bp, Homo sapiens
atcgagactcacttt

SEQ ID NO: 54688 - DNA, 15 bp, Homo sapiens
aatcgagactcactt

SEQ ID NO: 54689 - DNA, 15 bp, Homo sapiens
aaatcgagactcact

SEQ ID NO: 54690 - DNA, 15 bp, Homo sapiens
gaaatcgagactcac

SEQ ID NO: 54691 - DNA, 15 bp, Homo sapiens
agaaatcgagactca

SEQ ID NO: 54692 - DNA, 15 bp, Homo sapiens
tagaaatcgagactc

SEQ ID NO: 54693 - DNA, 15 bp, Homo sapiens
ctagaaatcgagact

SEQ ID NO: 54694 - DNA, 15 bp, Homo sapiens
gctagaaatcgagac

SEQ ID NO: 54695 - DNA, 15 bp, Homo sapiens
agctagaaatcgaga

SEQ ID NO: 54696 - DNA, 15 bp, Homo sapiens
cagctagaaatcgag

SEQ ID NO: 54697 - DNA, 15 bp, Homo sapiens
ccagctagaaatcga

SEQ ID NO: 54698 - DNA, 15 bp, Homo sapiens
cccagctagaaatcg

SEQ ID NO: 54699 - DNA, 15 bp, Homo sapiens
acccagctagaaatc

SEQ ID NO: 54700 - DNA, 15 bp, Homo sapiens
cacccagctagaaat

SEQ ID NO: 54701 - DNA, 15 bp, Homo sapiens
ccacccagctagaaa

SEQ ID NO: 54702 - DNA, 15 bp, Homo sapiens
cccacccagctagaa

SEQ ID NO: 54703 - DNA, 15 bp, Homo sapiens
acccacccagctaga

SEQ ID NO: 54704 - DNA, 15 bp, Homo sapiens
cacccacccagctag

SEQ ID NO: 54705 - DNA, 15 bp, Homo sapiens
ccacccacccagcta

SEQ ID NO: 54706 - DNA, 15 bp, Homo sapiens
accacccacccagct

SEQ ID NO: 54707 - DNA, 15 bp, Homo sapiens
taccacccacccagc

SEQ ID NO: 54708 - DNA, 15 bp, Homo sapiens
ctaccacccacccag

SEQ ID NO: 54709 - DNA, 15 bp, Homo sapiens
gctaccacccaccca

SEQ ID NO: 54710 - DNA, 15 bp, Homo sapiens
cgctaccacccaccc

SEQ ID NO: 54711 - DNA, 15 bp, Homo sapiens
tcgctaccacccacc

SEQ ID NO: 54712 - DNA, 15 bp, Homo sapiens
atcgctaccacccac

SEQ ID NO: 54713 - DNA, 15 bp, Homo sapiens
catcgctaccaccca

SEQ ID NO: 54714 - DNA, 15 bp, Homo sapiens
acatcgctaccaccc

SEQ ID NO: 54715 - DNA, 15 bp, Homo sapiens
gacatcgctaccacc

SEQ ID NO: 54716 - DNA, 15 bp, Homo sapiens
ggacatcgctaccac

SEQ ID NO: 54717 - DNA, 15 bp, Homo sapiens
tggacatcgctacca

SEQ ID NO: 54718 - DNA, 15 bp, Homo sapiens
ctggacatcgctacc

SEQ ID NO: 54719 - DNA, 15 bp, Homo sapiens
actggacatcgctac

SEQ ID NO: 54720 - DNA, 15 bp, Homo sapiens
tactggacatcgcta

SEQ ID NO: 54721 - DNA, 15 bp, Homo sapiens
ctactggacatcgct

SEQ ID NO: 54722 - DNA, 15 bp, Homo sapiens
cctactggacatcgc

SEQ ID NO: 54723 - DNA, 15 bp, Homo sapiens
gcctactggacatcg

SEQ ID NO: 54724 - DNA, 15 bp, Homo sapiens
ggcctactggacatc

SEQ ID NO: 54725 - DNA, 15 bp, Homo sapiens
tggcctactggacat

SEQ ID NO: 54726 - DNA, 15 bp, Homo sapiens
ctggcctactggaca

SEQ ID NO: 54727 - DNA, 15 bp, Homo sapiens
actggcctactggac

SEQ ID NO: 54728 - DNA, 15 bp, Homo sapiens
cactggcctactgga

SEQ ID NO: 54729 - DNA, 15 bp, Homo sapiens
ccactggcctactgg

SEQ ID NO: 54730 - DNA, 15 bp, Homo sapiens
gccactggcctactg

SEQ ID NO: 54731 - DNA, 15 bp, Homo sapiens
agccactggcctact

SEQ ID NO: 54732 - DNA, 15 bp, Homo sapiens
tagccactggcctac

SEQ ID NO: 54733 - DNA, 15 bp, Homo sapiens
gtagccactggccta

SEQ ID NO: 54734 - DNA, 15 bp, Homo sapiens
agtagccactggcct

SEQ ID NO: 54735 - DNA, 15 bp, Homo sapiens
cagtagccactggcc

SEQ ID NO: 54736 - DNA, 15 bp, Homo sapiens
tcagtagccactggc

SEQ ID NO: 54737 - DNA, 15 bp, Homo sapiens
ctcagtagccactgg

SEQ ID NO: 54738 - DNA, 15 bp, Homo sapiens
cctcagtagccactg

SEQ ID NO: 54739 - DNA, 15 bp, Homo sapiens
acctcagtagccact

SEQ ID NO: 54740 - DNA, 15 bp, Homo sapiens
gacctcagtagccac

SEQ ID NO: 54741 - DNA, 15 bp, Homo sapiens
agacctcagtagcca

SEQ ID NO: 54742 - DNA, 15 bp, Homo sapiens
cagacctcagtagcc

SEQ ID NO: 54743 - DNA, 15 bp, Homo sapiens
gcagacctcagtagc

SEQ ID NO: 54744 - DNA, 15 bp, Homo sapiens
tgcagacctcagtag

SEQ ID NO: 54745 - DNA, 15 bp, Homo sapiens
ctgcagacctcagta

SEQ ID NO: 54746 - DNA, 15 bp, Homo sapiens
actgcagacctcagt

SEQ ID NO: 54747 - DNA, 15 bp, Homo sapiens
cactgcagacctcag

SEQ ID NO: 54748 - DNA, 15 bp, Homo sapiens
ccactgcagacctca

SEQ ID NO: 54749 - DNA, 15 bp, Homo sapiens
tccactgcagacctc

SEQ ID NO: 54750 - DNA, 15 bp, Homo sapiens
ctccactgcagacct

SEQ ID NO: 54751 - DNA, 15 bp, Homo sapiens
cctccactgcagacc

SEQ ID NO: 54752 - DNA, 15 bp, Homo sapiens
tcctccactgcagac

SEQ ID NO: 54753 - DNA, 15 bp, Homo sapiens
ctcctccactgcaga

SEQ ID NO: 54754 - DNA, 15 bp, Homo sapiens
cctcctccactgcag

SEQ ID NO: 54755 - DNA, 15 bp, Homo sapiens
ccctcctccactgca

SEQ ID NO: 54756 - DNA, 15 bp, Homo sapiens
accctcctccactgc

SEQ ID NO: 54757 - DNA, 15 bp, Homo sapiens
caccctcctccactg

SEQ ID NO: 54758 - DNA, 15 bp, Homo sapiens
ccaccctcctccact

SEQ ID NO: 54759 - DNA, 15 bp, Homo sapiens
accaccctcctccac

SEQ ID NO: 54760 - DNA, 15 bp, Homo sapiens
aaccaccctcctcca

SEQ ID NO: 54761 - DNA, 15 bp, Homo sapiens
caaccaccctcctcc

SEQ ID NO: 54762 - DNA, 15 bp, Homo sapiens
ccaaccaccctcctc

SEQ ID NO: 54763 - DNA, 15 bp, Homo sapiens
cccaaccaccctcct

SEQ ID NO: 54764 - DNA, 15 bp, Homo sapiens
gcccaaccaccctcc

SEQ ID NO: 54765 - DNA, 15 bp, Homo sapiens
agcccaaccaccctc

SEQ ID NO: 54766 - DNA, 15 bp, Homo sapiens
cagcccaaccaccct

SEQ ID NO: 54767 - DNA, 15 bp, Homo sapiens
ccagcccaaccaccc

SEQ ID NO: 54768 - DNA, 15 bp, Homo sapiens
tccagcccaaccacc

SEQ ID NO: 54769 - DNA, 15 bp, Homo sapiens
ctccagcccaaccac

SEQ ID NO: 54770 - DNA, 15 bp, Homo sapiens
tctccagcccaacca

SEQ ID NO: 54771 - DNA, 15 bp, Homo sapiens
gtctccagcccaacc

SEQ ID NO: 54772 - DNA, 15 bp, Homo sapiens
tgtctccagcccaac

SEQ ID NO: 54773 - DNA, 15 bp, Homo sapiens
ctgtctccagcccaa

SEQ ID NO: 54774 - DNA, 15 bp, Homo sapiens
tctgtctccagccca

SEQ ID NO: 54775 - DNA, 15 bp, Homo sapiens
atctgtctccagccc

SEQ ID NO: 54776 - DNA, 15 bp, Homo sapiens
catctgtctccagcc

SEQ ID NO: 54777 - DNA, 15 bp, Homo sapiens
tcatctgtctccagc

SEQ ID NO: 54778 - DNA, 15 bp, Homo sapiens
atcatctgtctccag

SEQ ID NO: 54779 - DNA, 15 bp, Homo sapiens
catcatctgtctcca

SEQ ID NO: 54780 - DNA, 15 bp, Homo sapiens
tcatcatctgtctcc

SEQ ID NO: 54781 - DNA, 15 bp, Homo sapiens
ctcatcatctgtctc

SEQ ID NO: 54782 - DNA, 15 bp, Homo sapiens
cctcatcatctgtct

SEQ ID NO: 54783 - DNA, 15 bp, Homo sapiens
ccctcatcatctgtc

SEQ ID NO: 54784 - DNA, 15 bp, Homo sapiens
tccctcatcatctgt

SEQ ID NO: 54785 - DNA, 15 bp, Homo sapiens
ctccctcatcatctg

SEQ ID NO: 54786 - DNA, 15 bp, Homo sapiens
actccctcatcatct

SEQ ID NO: 54787 - DNA, 15 bp, Homo sapiens
gactccctcatcatc

SEQ ID NO: 54788 - DNA, 15 bp, Homo sapiens
tgactccctcatcat

SEQ ID NO: 54789 - DNA, 15 bp, Homo sapiens
atgactccctcatca

SEQ ID NO: 54790 - DNA, 15 bp, Homo sapiens
gatgactccctcatc

SEQ ID NO: 54791 - DNA, 15 bp, Homo sapiens
tgatgactccctcat

SEQ ID NO: 54792 - DNA, 15 bp, Homo sapiens
ctgatgactccctca

SEQ ID NO: 54793 - DNA, 15 bp, Homo sapiens
gctgatgactccctc

SEQ ID NO: 54794 - DNA, 15 bp, Homo sapiens
ggctgatgactccct

SEQ ID NO: 54795 - DNA, 15 bp, Homo sapiens
aggctgatgactccc

SEQ ID NO: 54796 - DNA, 15 bp, Homo sapiens
caggctgatgactcc

SEQ ID NO: 54797 - DNA, 15 bp, Homo sapiens
acaggctgatgactc

SEQ ID NO: 54798 - DNA, 15 bp, Homo sapiens
cacaggctgatgact

SEQ ID NO: 54799 - DNA, 15 bp, Homo sapiens
ccacaggctgatgac

SEQ ID NO: 54800 - DNA, 15 bp, Homo sapiens
cccacaggctgatga

SEQ ID NO: 54801 - DNA, 15 bp, Homo sapiens
acccacaggctgatg

SEQ ID NO: 54802 - DNA, 15 bp, Homo sapiens
cacccacaggctgat

SEQ ID NO: 54803 - DNA, 15 bp, Homo sapiens
ccacccacaggctga

SEQ ID NO: 54804 - DNA, 15 bp, Homo sapiens
tccacccacaggctg

SEQ ID NO: 54805 - DNA, 15 bp, Homo sapiens
ttccacccacaggct

SEQ ID NO: 54806 - DNA, 15 bp, Homo sapiens
cttccacccacaggc

SEQ ID NO: 54807 - DNA, 15 bp, Homo sapiens
tcttccacccacagg

SEQ ID NO: 54808 - DNA, 15 bp, Homo sapiens
ttcttccacccacag

SEQ ID NO: 54809 - DNA, 15 bp, Homo sapiens
tttcttccacccaca

SEQ ID NO: 54810 - DNA, 15 bp, Homo sapiens
ttttcttccacccac

SEQ ID NO: 54811 - DNA, 15 bp, Homo sapiens
cttttcttccaccca

SEQ ID NO: 54812 - DNA, 15 bp, Homo sapiens
ccttttcttccaccc

SEQ ID NO: 54813 - DNA, 15 bp, Homo sapiens
cccttttcttccacc

SEQ ID NO: 54814 - DNA, 15 bp, Homo sapiens
tcccttttcttccac

SEQ ID NO: 54815 - DNA, 15 bp, Homo sapiens
ttcccttttcttcca

SEQ ID NO: 54816 - DNA, 15 bp, Homo sapiens
gttcccttttcttcc

SEQ ID NO: 54817 - DNA, 15 bp, Homo sapiens
ggttcccttttcttc

SEQ ID NO: 54818 - DNA, 15 bp, Homo sapiens
aggttcccttttctt

SEQ ID NO: 54819 - DNA, 15 bp, Homo sapiens
gaggttcccttttct

SEQ ID NO: 54820 - DNA, 15 bp, Homo sapiens
agaggttcccttttc

SEQ ID NO: 54821 - DNA, 15 bp, Homo sapiens
aagaggttccctttt

SEQ ID NO: 54822 - DNA, 15 bp, Homo sapiens
gaagaggttcccttt

SEQ ID NO: 54823 - DNA, 15 bp, Homo sapiens
ggaagaggttccctt

SEQ ID NO: 54824 - DNA, 15 bp, Homo sapiens
tggaagaggttccct

SEQ ID NO: 54825 - DNA, 15 bp, Homo sapiens
ttggaagaggttccc

SEQ ID NO: 54826 - DNA, 15 bp, Homo sapiens
gttggaagaggttcc

SEQ ID NO: 54827 - DNA, 15 bp, Homo sapiens
agttggaagaggttc

SEQ ID NO: 54828 - DNA, 15 bp, Homo sapiens
cagttggaagaggtt

SEQ ID NO: 54829 - DNA, 15 bp, Homo sapiens
acagttggaagaggt

SEQ ID NO: 54830 - DNA, 15 bp, Homo sapiens
aacagttggaagagg

SEQ ID NO: 54831 - DNA, 15 bp, Homo sapiens
aaacagttggaagag

SEQ ID NO: 54832 - DNA, 15 bp, Homo sapiens
aaaacagttggaaga

SEQ ID NO: 54833 - DNA, 15 bp, Homo sapiens
gaaaacagttggaag

SEQ ID NO: 54834 - DNA, 15 bp, Homo sapiens
agaaaacagttggaa

SEQ ID NO: 54835 - DNA, 15 bp, Homo sapiens
aagaaaacagttgga

SEQ ID NO: 54836 - DNA, 15 bp, Homo sapiens
aaagaaaacagttgg

SEQ ID NO: 54837 - DNA, 15 bp, Homo sapiens
caaagaaaacagttg

SEQ ID NO: 54838 - DNA, 15 bp, Homo sapiens
gcaaagaaaacagtt

SEQ ID NO: 54839 - DNA, 15 bp, Homo sapiens
agcaaagaaaacagt

SEQ ID NO: 54840 - DNA, 15 bp, Homo sapiens
aagcaaagaaaacag

SEQ ID NO: 54841 - DNA, 15 bp, Homo sapiens
gaagcaaagaaaaca

SEQ ID NO: 54842 - DNA, 15 bp, Homo sapiens
agaagcaaagaaaac

SEQ ID NO: 54843 - DNA, 15 bp, Homo sapiens
aagaagcaaagaaaa

SEQ ID NO: 54844 - DNA, 15 bp, Homo sapiens
gaagaagcaaagaaa

SEQ ID NO: 54845 - DNA, 15 bp, Homo sapiens
ggaagaagcaaagaa

SEQ ID NO: 54846 - DNA, 15 bp, Homo sapiens
gggaagaagcaaaga

SEQ ID NO: 54847 - DNA, 15 bp, Homo sapiens
agggaagaagcaaag

SEQ ID NO: 54848 - DNA, 15 bp, Homo sapiens
gagggaagaagcaaa

SEQ ID NO: 54849 - DNA, 15 bp, Homo sapiens
agagggaagaagcaa

SEQ ID NO: 54850 - DNA, 15 bp, Homo sapiens
gagagggaagaagca

SEQ ID NO: 54851 - DNA, 15 bp, Homo sapiens
agagagggaagaagc

SEQ ID NO: 54852 - DNA, 15 bp, Homo sapiens
aagagagggaagaag

SEQ ID NO: 54853 - DNA, 15 bp, Homo sapiens
aaagagagggaagaa

SEQ ID NO: 54854 - DNA, 15 bp, Homo sapiens
gaaagagagggaaga

SEQ ID NO: 54855 - DNA, 15 bp, Homo sapiens
agaaagagagggaag

SEQ ID NO: 54856 - DNA, 15 bp, Homo sapiens
gagaaagagagggaa

SEQ ID NO: 54857 - DNA, 15 bp, Homo sapiens
agagaaagagaggga

SEQ ID NO: 54858 - DNA, 15 bp, Homo sapiens
aagagaaagagaggg

SEQ ID NO: 54859 - DNA, 15 bp, Homo sapiens
aaagagaaagagagg

SEQ ID NO: 54860 - DNA, 15 bp, Homo sapiens
aaaagagaaagagag

SEQ ID NO: 54861 - DNA, 15 bp, Homo sapiens
aaaaagagaaagaga

SEQ ID NO: 54862 - DNA, 15 bp, Homo sapiens
aaaaaagagaaagag

SEQ ID NO: 54863 - DNA, 15 bp, Homo sapiens
aaaaaaagagaaaga

SEQ ID NO: 54864 - DNA, 15 bp, Homo sapiens
aaaaaaaagagaaag

SEQ ID NO: 54865 - DNA, 15 bp, Homo sapiens
aaaaaaaaagagaaa

SEQ ID NO: 54866 - DNA, 15 bp, Homo sapiens
aaaaaaaaaagagaa

SEQ ID NO: 54867 - DNA, 15 bp, Homo sapiens
tccaaaaaaaaaaaa

SEQ ID NO: 54868 - DNA, 15 bp, Homo sapiens
gtccaaaaaaaaaaa

SEQ ID NO: 54869 - DNA, 15 bp, Homo sapiens
tgtccaaaaaaaaaa

SEQ ID NO: 54870 - DNA, 15 bp, Homo sapiens
ctgtccaaaaaaaaa

SEQ ID NO: 54871 - DNA, 15 bp, Homo sapiens
tctgtccaaaaaaaa

SEQ ID NO: 54872 - DNA, 15 bp, Homo sapiens
ctctgtccaaaaaaa

SEQ ID NO: 54873 - DNA, 15 bp, Homo sapiens
actctgtccaaaaaa

SEQ ID NO: 54874 - DNA, 15 bp, Homo sapiens
gactctgtccaaaaa

SEQ ID NO: 54875 - DNA, 15 bp, Homo sapiens
agactctgtccaaaa

SEQ ID NO: 54876 - DNA, 15 bp, Homo sapiens
aagactctgtccaaa

SEQ ID NO: 54877 - DNA, 15 bp, Homo sapiens
caagactctgtccaa

SEQ ID NO: 54878 - DNA, 15 bp, Homo sapiens
gcaagactctgtcca

SEQ ID NO: 54879 - DNA, 15 bp, Homo sapiens
agcaagactctgtcc

SEQ ID NO: 54880 - DNA, 15 bp, Homo sapiens
ggtgacagagcaaga

SEQ ID NO: 54881 - DNA, 15 bp, Homo sapiens
gggtgacagagcaag

SEQ ID NO: 54882 - DNA, 15 bp, Homo sapiens
tgggtgacagagcaa

SEQ ID NO: 54883 - DNA, 15 bp, Homo sapiens
ctgggtgacagagca

SEQ ID NO: 54884 - DNA, 15 bp, Homo sapiens
tcagcctgggtgaca

SEQ ID NO: 54885 - DNA, 15 bp, Homo sapiens
ttcagcctgggtgac

SEQ ID NO: 54886 - DNA, 15 bp, Homo sapiens
tttcagcctgggtga

SEQ ID NO: 54887 - DNA, 15 bp, Homo sapiens
atttcagcctgggtg

SEQ ID NO: 54888 - DNA, 15 bp, Homo sapiens
catttcagcctgggt

SEQ ID NO: 54889 - DNA, 15 bp, Homo sapiens
gcatttcagcctggg

SEQ ID NO: 54890 - DNA, 15 bp, Homo sapiens
tgcatttcagcctgg

SEQ ID NO: 54891 - DNA, 15 bp, Homo sapiens
ctgcatttcagcctg

SEQ ID NO: 54892 - DNA, 15 bp, Homo sapiens
actgcatttcagcct

SEQ ID NO: 54893 - DNA, 15 bp, Homo sapiens
cactgcatttcagcc

SEQ ID NO: 54894 - DNA, 15 bp, Homo sapiens
ccactgcatttcagc

SEQ ID NO: 54895 - DNA, 15 bp, Homo sapiens
gccactgcatttcag

SEQ ID NO: 54896 - DNA, 15 bp, Homo sapiens
tgccactgcatttca

SEQ ID NO: 54897 - DNA, 15 bp, Homo sapiens
atgccactgcatttc

SEQ ID NO: 54898 - DNA, 15 bp, Homo sapiens
catgccactgcattt

SEQ ID NO: 54899 - DNA, 15 bp, Homo sapiens
tcatgccactgcatt

SEQ ID NO: 54900 - DNA, 15 bp, Homo sapiens
atcatgccactgcat

SEQ ID NO: 54901 - DNA, 15 bp, Homo sapiens
gagccaagatcatgc

SEQ ID NO: 54902 - DNA, 15 bp, Homo sapiens
tgagccaagatcatg

SEQ ID NO: 54903 - DNA, 15 bp, Homo sapiens
ggtgagccaagatca

SEQ ID NO: 54904 - DNA, 15 bp, Homo sapiens
tggtgagccaagatc

SEQ ID NO: 54905 - DNA, 15 bp, Homo sapiens
gtggtgagccaagat

SEQ ID NO: 54906 - DNA, 15 bp, Homo sapiens
tgtggtgagccaaga

SEQ ID NO: 54907 - DNA, 15 bp, Homo sapiens
ctgtggtgagccaag

SEQ ID NO: 54908 - DNA, 15 bp, Homo sapiens
gctgtggtgagccaa

SEQ ID NO: 54909 - DNA, 15 bp, Homo sapiens
ggctgtggtgagcca

SEQ ID NO: 54910 - DNA, 15 bp, Homo sapiens
aggctgtggtgagcc

SEQ ID NO: 54911 - DNA, 15 bp, Homo sapiens
gaggctgtggtgagc

SEQ ID NO: 54912 - DNA, 15 bp, Homo sapiens
ggaggctgtggtgag

SEQ ID NO: 54913 - DNA, 15 bp, Homo sapiens
cggaggctgtggtga

SEQ ID NO: 54914 - DNA, 15 bp, Homo sapiens
gcggaggctgtggtg

SEQ ID NO: 54915 - DNA, 15 bp, Homo sapiens
ggcggaggctgtggt

SEQ ID NO: 54916 - DNA, 15 bp, Homo sapiens
aggcggaggctgtgg

SEQ ID NO: 54917 - DNA, 15 bp, Homo sapiens
gaggcggaggctgtg

SEQ ID NO: 54918 - DNA, 15 bp, Homo sapiens
ggaggcggaggctgt

SEQ ID NO: 54919 - DNA, 15 bp, Homo sapiens
aggaggcggaggctg

SEQ ID NO: 54920 - DNA, 15 bp, Homo sapiens
caggaggcggaggct

SEQ ID NO: 54921 - DNA, 15 bp, Homo sapiens
ccaggaggcggaggc

SEQ ID NO: 54922 - DNA, 15 bp, Homo sapiens
cccaggaggcggagg

SEQ ID NO: 54923 - DNA, 15 bp, Homo sapiens
acccaggaggcggag

SEQ ID NO: 54924 - DNA, 15 bp, Homo sapiens
aacccaggaggcgga

SEQ ID NO: 54925 - DNA, 15 bp, Homo sapiens
gaacccaggaggcgg

SEQ ID NO: 54926 - DNA, 15 bp, Homo sapiens
tgaacccaggaggcg

SEQ ID NO: 54927 - DNA, 15 bp, Homo sapiens
tgcttgaacccagga

SEQ ID NO: 54928 - DNA, 15 bp, Homo sapiens
ttgcttgaacccagg

SEQ ID NO: 54929 - DNA, 15 bp, Homo sapiens
attgcttgaacccag

SEQ ID NO: 54930 - DNA, 15 bp, Homo sapiens
aattgcttgaaccca

SEQ ID NO: 54931 - DNA, 15 bp, Homo sapiens
acaggagaattgctt

SEQ ID NO: 54932 - DNA, 15 bp, Homo sapiens
gacaggagaattgct

SEQ ID NO: 54933 - DNA, 15 bp, Homo sapiens
agacaggagaattgc

SEQ ID NO: 54934 - DNA, 15 bp, Homo sapiens
gagacaggagaattg

SEQ ID NO: 54935 - DNA, 15 bp, Homo sapiens
tgagacaggagaatt

SEQ ID NO: 54936 - DNA, 15 bp, Homo sapiens
tggaggctgagacag

SEQ ID NO: 54937 - DNA, 15 bp, Homo sapiens
ctggaggctgagaca

SEQ ID NO: 54938 - DNA, 15 bp, Homo sapiens
tctggaggctgagac

SEQ ID NO: 54939 - DNA, 15 bp, Homo sapiens
ctctggaggctgaga

SEQ ID NO: 54940 - DNA, 15 bp, Homo sapiens
ctactctggaggctg

SEQ ID NO: 54941 - DNA, 15 bp, Homo sapiens
gctactctggaggct

SEQ ID NO: 54942 - DNA, 15 bp, Homo sapiens
agctactctggaggc

SEQ ID NO: 54943 - DNA, 15 bp, Homo sapiens
cagctactctggagg

SEQ ID NO: 54944 - DNA, 15 bp, Homo sapiens
ccagctactctggag

SEQ ID NO: 54945 - DNA, 15 bp, Homo sapiens
cccagctactctgga

SEQ ID NO: 54946 - DNA, 15 bp, Homo sapiens
tcccagctactctgg

SEQ ID NO: 54947 - DNA, 15 bp, Homo sapiens
atcccagctactctg

SEQ ID NO: 54948 - DNA, 15 bp, Homo sapiens
aatcccagctactct

SEQ ID NO: 54949 - DNA, 15 bp, Homo sapiens
tgtgcctgtaatccc

SEQ ID NO: 54950 - DNA, 15 bp, Homo sapiens
atgtgcctgtaatcc

SEQ ID NO: 54951 - DNA, 15 bp, Homo sapiens
tatgtgcctgtaatc

SEQ ID NO: 54952 - DNA, 15 bp, Homo sapiens
atatgtgcctgtaat

SEQ ID NO: 54953 - DNA, 15 bp, Homo sapiens
gatatgtgcctgtaa

SEQ ID NO: 54954 - DNA, 15 bp, Homo sapiens
tgatatgtgcctgta

SEQ ID NO: 54955 - DNA, 15 bp, Homo sapiens
gtgatatgtgcctgt

SEQ ID NO: 54956 - DNA, 15 bp, Homo sapiens
agtgatatgtgcctg

SEQ ID NO: 54957 - DNA, 15 bp, Homo sapiens
cagtgatatgtgcct

SEQ ID NO: 54958 - DNA, 15 bp, Homo sapiens
acagtgatatgtgcc

SEQ ID NO: 54959 - DNA, 15 bp, Homo sapiens
cacagtgatatgtgc

SEQ ID NO: 54960 - DNA, 15 bp, Homo sapiens
gcacagtgatatgtg

SEQ ID NO: 54961 - DNA, 15 bp, Homo sapiens
ggcacagtgatatgt

SEQ ID NO: 54962 - DNA, 15 bp, Homo sapiens
gggcacagtgatatg

SEQ ID NO: 54963 - DNA, 15 bp, Homo sapiens
cgggcacagtgatat

SEQ ID NO: 54964 - DNA, 15 bp, Homo sapiens
ccgggcacagtgata

SEQ ID NO: 54965 - DNA, 15 bp, Homo sapiens
gccgggcacagtgat

SEQ ID NO: 54966 - DNA, 15 bp, Homo sapiens
agccgggcacagtga

SEQ ID NO: 54967 - DNA, 15 bp, Homo sapiens
tagccgggcacagtg

SEQ ID NO: 54968 - DNA, 15 bp, Homo sapiens
ttagccgggcacagt

SEQ ID NO: 54969 - DNA, 15 bp, Homo sapiens
attagccgggcacag

SEQ ID NO: 54970 - DNA, 15 bp, Homo sapiens
aattagccgggcaca

SEQ ID NO: 54971 - DNA, 15 bp, Homo sapiens
aaattagccgggcac

SEQ ID NO: 54972 - DNA, 15 bp, Homo sapiens
aaaattagccgggca

SEQ ID NO: 54973 - DNA, 15 bp, Homo sapiens
cactgaaaatacaaa

SEQ ID NO: 54974 - DNA, 15 bp, Homo sapiens
ccactgaaaatacaa

SEQ ID NO: 54975 - DNA, 15 bp, Homo sapiens
tccactgaaaataca

SEQ ID NO: 54976 - DNA, 15 bp, Homo sapiens
ctccactgaaaatac

SEQ ID NO: 54977 - DNA, 15 bp, Homo sapiens
tctccactgaaaata

SEQ ID NO: 54978 - DNA, 15 bp, Homo sapiens
atctccactgaaaat

SEQ ID NO: 54979 - DNA, 15 bp, Homo sapiens
catctccactgaaaa

SEQ ID NO: 54980 - DNA, 15 bp, Homo sapiens
ccatctccactgaaa

SEQ ID NO: 54981 - DNA, 15 bp, Homo sapiens
cccatctccactgaa

SEQ ID NO: 54982 - DNA, 15 bp, Homo sapiens
tcccatctccactga

SEQ ID NO: 54983 - DNA, 15 bp, Homo sapiens
atcccatctccactg

SEQ ID NO: 54984 - DNA, 15 bp, Homo sapiens
aatcccatctccact

SEQ ID NO: 54985 - DNA, 15 bp, Homo sapiens
aaatcccatctccac

SEQ ID NO: 54986 - DNA, 15 bp, Homo sapiens
gaaatcccatctcca

SEQ ID NO: 54987 - DNA, 15 bp, Homo sapiens
tgaaatcccatctcc

SEQ ID NO: 54988 - DNA, 15 bp, Homo sapiens
gtgaaatcccatctc

SEQ ID NO: 54989 - DNA, 15 bp, Homo sapiens
ggtgaaatcccatct

SEQ ID NO: 54990 - DNA, 15 bp, Homo sapiens
tggtgaaatcccatc

SEQ ID NO: 54991 - DNA, 15 bp, Homo sapiens
atggtgaaatcccat

SEQ ID NO: 54992 - DNA, 15 bp, Homo sapiens
catggtgaaatccca

SEQ ID NO: 54993 - DNA, 15 bp, Homo sapiens
acatggtgaaatccc

SEQ ID NO: 54994 - DNA, 15 bp, Homo sapiens
aacatggtgaaatcc

SEQ ID NO: 54995 - DNA, 15 bp, Homo sapiens
cgaccaacatggtga

SEQ ID NO: 54996 - DNA, 15 bp, Homo sapiens
ccgaccaacatggtg

SEQ ID NO: 54997 - DNA, 15 bp, Homo sapiens
cccgaccaacatggt

SEQ ID NO: 54998 - DNA, 15 bp, Homo sapiens
gcccgaccaacatgg

SEQ ID NO: 54999 - DNA, 15 bp, Homo sapiens
agcccgaccaacatg

SEQ ID NO: 55000 - DNA, 15 bp, Homo sapiens
cagcccgaccaacat

SEQ ID NO: 55001 - DNA, 15 bp, Homo sapiens
ccagcccgaccaaca

SEQ ID NO: 55002 - DNA, 15 bp, Homo sapiens
tccagcccgaccaac

SEQ ID NO: 55003 - DNA, 15 bp, Homo sapiens
ttccagcccgaccaa

SEQ ID NO: 55004 - DNA, 15 bp, Homo sapiens
attccagcccgacca

SEQ ID NO: 55005 - DNA, 15 bp, Homo sapiens
cattccagcccgacc

SEQ ID NO: 55006 - DNA, 15 bp, Homo sapiens
tcattccagcccgac

SEQ ID NO: 55007 - DNA, 15 bp, Homo sapiens
ttcattccagcccga

SEQ ID NO: 55008 - DNA, 15 bp, Homo sapiens
gttcattccagcccg

SEQ ID NO: 55009 - DNA, 15 bp, Homo sapiens
agttcattccagccc

SEQ ID NO: 55010 - DNA, 15 bp, Homo sapiens
gagttcattccagcc

SEQ ID NO: 55011 - DNA, 15 bp, Homo sapiens
ggagttcattccagc

SEQ ID NO: 55012 - DNA, 15 bp, Homo sapiens
aggagttcattccag

SEQ ID NO: 55013 - DNA, 15 bp, Homo sapiens
caggagttcattcca

SEQ ID NO: 55014 - DNA, 15 bp, Homo sapiens
tcaggagttcattcc

SEQ ID NO: 55015 - DNA, 15 bp, Homo sapiens
gtcaggagttcattc

SEQ ID NO: 55016 - DNA, 15 bp, Homo sapiens
ggtcaggagttcatt

SEQ ID NO: 55017 - DNA, 15 bp, Homo sapiens
aggtcaggagttcat

SEQ ID NO: 55018 - DNA, 15 bp, Homo sapiens
aggtggatcacttga

SEQ ID NO: 55019 - DNA, 15 bp, Homo sapiens
caggtggatcacttg

SEQ ID NO: 55020 - DNA, 15 bp, Homo sapiens
gcaggtggatcactt

SEQ ID NO: 55021 - DNA, 15 bp, Homo sapiens
ggcaggtggatcact

SEQ ID NO: 55022 - DNA, 15 bp, Homo sapiens
aggcaggtggatcac

SEQ ID NO: 55023 - DNA, 15 bp, Homo sapiens
gtaatcccaacactt

SEQ ID NO: 55024 - DNA, 15 bp, Homo sapiens
tgtaatcccaacact

SEQ ID NO: 55025 - DNA, 15 bp, Homo sapiens
ctgtaatcccaacac

SEQ ID NO: 55026 - DNA, 15 bp, Homo sapiens
aggccgggcgcggtg

SEQ ID NO: 55027 - DNA, 15 bp, Homo sapiens
aaggccgggcgcggt

SEQ ID NO: 55028 - DNA, 15 bp, Homo sapiens
aaaggccgggcgcgg

SEQ ID NO: 55029 - DNA, 15 bp, Homo sapiens
gaaaggccgggcgcg

SEQ ID NO: 55030 - DNA, 15 bp, Homo sapiens
agaaaggccgggcgc

SEQ ID NO: 55031 - DNA, 15 bp, Homo sapiens
aagaaaggccgggcg

SEQ ID NO: 55032 - DNA, 15 bp, Homo sapiens
gaagaaaggccgggc

SEQ ID NO: 55033 - DNA, 15 bp, Homo sapiens
ggaagaaaggccggg

SEQ ID NO: 55034 - DNA, 15 bp, Homo sapiens
gggaagaaaggccgg

SEQ ID NO: 55035 - DNA, 15 bp, Homo sapiens
agggaagaaaggccg

SEQ ID NO: 55036 - DNA, 15 bp, Homo sapiens
gagggaagaaaggcc

SEQ ID NO: 55037 - DNA, 15 bp, Homo sapiens
agagggaagaaaggc

SEQ ID NO: 55038 - DNA, 15 bp, Homo sapiens
gagagggaagaaagg

SEQ ID NO: 55039 - DNA, 15 bp, Homo sapiens
agagagggaagaaag

SEQ ID NO: 55040 - DNA, 15 bp, Homo sapiens
aagagagggaagaaa

SEQ ID NO: 55041 - DNA, 15 bp, Homo sapiens
taagagagggaagaa

SEQ ID NO: 55042 - DNA, 15 bp, Homo sapiens
ttaagagagggaaga

SEQ ID NO: 55043 - DNA, 15 bp, Homo sapiens
tttaagagagggaag

SEQ ID NO: 55044 - DNA, 15 bp, Homo sapiens
ctttaagagagggaa

SEQ ID NO: 55045 - DNA, 15 bp, Homo sapiens
tctttaagagaggga

SEQ ID NO: 55046 - DNA, 15 bp, Homo sapiens
ctctttaagagaggg

SEQ ID NO: 55047 - DNA, 15 bp, Homo sapiens
actctttaagagagg

SEQ ID NO: 55048 - DNA, 15 bp, Homo sapiens
cactctttaagagag

SEQ ID NO: 55049 - DNA, 15 bp, Homo sapiens
acactctttaagaga

SEQ ID NO: 55050 - DNA, 15 bp, Homo sapiens
aacactctttaagag

SEQ ID NO: 55051 - DNA, 15 bp, Homo sapiens
aaacactctttaaga

SEQ ID NO: 55052 - DNA, 15 bp, Homo sapiens
taaacactctttaag

SEQ ID NO: 55053 - DNA, 15 bp, Homo sapiens
ataaacactctttaa

SEQ ID NO: 55054 - DNA, 15 bp, Homo sapiens
aataaacactcttta

SEQ ID NO: 55055 - DNA, 15 bp, Homo sapiens
aaataaacactcttt

SEQ ID NO: 55056 - DNA, 15 bp, Homo sapiens
taaataaacactctt

SEQ ID NO: 55057 - DNA, 15 bp, Homo sapiens
ttaaataaacactct

SEQ ID NO: 55058 - DNA, 15 bp, Homo sapiens
attaaataaacactc

SEQ ID NO: 55059 - DNA, 15 bp, Homo sapiens
aattaaataaacact

SEQ ID NO: 55060 - DNA, 15 bp, Homo sapiens
gaattaaataaacac

SEQ ID NO: 55061 - DNA, 15 bp, Homo sapiens
ggaattaaataaaca

SEQ ID NO: 55062 - DNA, 15 bp, Homo sapiens
tggaattaaataaac

SEQ ID NO: 55063 - DNA, 15 bp, Homo sapiens
gtggaattaaataaa

SEQ ID NO: 55064 - DNA, 15 bp, Homo sapiens
tgtggaattaaataa

SEQ ID NO: 55065 - DNA, 15 bp, Homo sapiens
ttgtggaattaaata

SEQ ID NO: 55066 - DNA, 15 bp, Homo sapiens
tttgtggaattaaat

SEQ ID NO: 55067 - DNA, 15 bp, Homo sapiens
gtttgtggaattaaa

SEQ ID NO: 55068 - DNA, 15 bp, Homo sapiens
tgtttgtggaattaa

SEQ ID NO: 55069 - DNA, 15 bp, Homo sapiens
atgtttgtggaatta

SEQ ID NO: 55070 - DNA, 15 bp, Homo sapiens
catgtttgtggaatt

SEQ ID NO: 55071 - DNA, 15 bp, Homo sapiens
tcatgtttgtggaat

SEQ ID NO: 55072 - DNA, 15 bp, Homo sapiens
ctcatgtttgtggaa

SEQ ID NO: 55073 - DNA, 15 bp, Homo sapiens
gctcatgtttgtgga

SEQ ID NO: 55074 - DNA, 15 bp, Homo sapiens
agctcatgtttgtgg

SEQ ID NO: 55075 - DNA, 15 bp, Homo sapiens
aagctcatgtttgtg

SEQ ID NO: 55076 - DNA, 15 bp, Homo sapiens
caagctcatgtttgt

SEQ ID NO: 55077 - DNA, 15 bp, Homo sapiens
acaagctcatgtttg

SEQ ID NO: 55078 - DNA, 15 bp, Homo sapiens
gacaagctcatgttt

SEQ ID NO: 55079 - DNA, 15 bp, Homo sapiens
tgacaagctcatgtt

SEQ ID NO: 55080 - DNA, 15 bp, Homo sapiens
gtgacaagctcatgt

SEQ ID NO: 55081 - DNA, 15 bp, Homo sapiens
ggtgacaagctcatg

SEQ ID NO: 55082 - DNA, 15 bp, Homo sapiens
gggtgacaagctcat

SEQ ID NO: 55083 - DNA, 15 bp, Homo sapiens
ggggtgacaagctca

SEQ ID NO: 55084 - DNA, 15 bp, Homo sapiens
gggggtgacaagctc

SEQ ID NO: 55085 - DNA, 15 bp, Homo sapiens
agggggtgacaagct

SEQ ID NO: 55086 - DNA, 15 bp, Homo sapiens
cagggggtgacaagc

SEQ ID NO: 55087 - DNA, 15 bp, Homo sapiens
acagggggtgacaag

SEQ ID NO: 55088 - DNA, 15 bp, Homo sapiens
tacagggggtgacaa

SEQ ID NO: 55089 - DNA, 15 bp, Homo sapiens
ctacagggggtgaca

SEQ ID NO: 55090 - DNA, 15 bp, Homo sapiens
gctacagggggtgac

SEQ ID NO: 55091 - DNA, 15 bp, Homo sapiens
ggctacagggggtga

SEQ ID NO: 55092 - DNA, 15 bp, Homo sapiens
aggctacagggggtg

SEQ ID NO: 55093 - DNA, 15 bp, Homo sapiens
caggctacagggggt

SEQ ID NO: 55094 - DNA, 15 bp, Homo sapiens
ccaggctacaggggg

SEQ ID NO: 55095 - DNA, 15 bp, Homo sapiens
gccaggctacagggg

SEQ ID NO: 55096 - DNA, 15 bp, Homo sapiens
tgccaggctacaggg

SEQ ID NO: 55097 - DNA, 15 bp, Homo sapiens
atgccaggctacagg

SEQ ID NO: 55098 - DNA, 15 bp, Homo sapiens
gatgccaggctacag

SEQ ID NO: 55099 - DNA, 15 bp, Homo sapiens
agatgccaggctaca

SEQ ID NO: 55100 - DNA, 15 bp, Homo sapiens
gagatgccaggctac

SEQ ID NO: 55101 - DNA, 15 bp, Homo sapiens
ggagatgccaggcta

SEQ ID NO: 55102 - DNA, 15 bp, Homo sapiens
aggagatgccaggct

SEQ ID NO: 55103 - DNA, 15 bp, Homo sapiens
taggagatgccaggc

SEQ ID NO: 55104 - DNA, 15 bp, Homo sapiens
gtaggagatgccagg

SEQ ID NO: 55105 - DNA, 15 bp, Homo sapiens
tgtaggagatgccag

SEQ ID NO: 55106 - DNA, 15 bp, Homo sapiens
gtgtaggagatgcca

SEQ ID NO: 55107 - DNA, 15 bp, Homo sapiens
cgtgtaggagatgcc

SEQ ID NO: 55108 - DNA, 15 bp, Homo sapiens
tcgtgtaggagatgc

SEQ ID NO: 55109 - DNA, 15 bp, Homo sapiens
ctcgtgtaggagatg

SEQ ID NO: 55110 - DNA, 15 bp, Homo sapiens
cctcgtgtaggagat

SEQ ID NO: 55111 - DNA, 15 bp, Homo sapiens
acctcgtgtaggaga

SEQ ID NO: 55112 - DNA, 15 bp, Homo sapiens
cacctcgtgtaggag

SEQ ID NO: 55113 - DNA, 15 bp, Homo sapiens
tcacctcgtgtagga

SEQ ID NO: 55114 - DNA, 15 bp, Homo sapiens
atcacctcgtgtagg

SEQ ID NO: 55115 - DNA, 15 bp, Homo sapiens
catcacctcgtgtag

SEQ ID NO: 55116 - DNA, 15 bp, Homo sapiens
ccatcacctcgtgta

SEQ ID NO: 55117 - DNA, 15 bp, Homo sapiens
gccatcacctcgtgt

SEQ ID NO: 55118 - DNA, 15 bp, Homo sapiens
agccatcacctcgtg

SEQ ID NO: 55119 - DNA, 15 bp, Homo sapiens
cagccatcacctcgt

SEQ ID NO: 55120 - DNA, 15 bp, Homo sapiens
tcagccatcacctcg

SEQ ID NO: 55121 - DNA, 15 bp, Homo sapiens
ctcagccatcacctc

SEQ ID NO: 55122 - DNA, 15 bp, Homo sapiens
cctcagccatcacct

SEQ ID NO: 55123 - DNA, 15 bp, Homo sapiens
gcctcagccatcacc

SEQ ID NO: 55124 - DNA, 15 bp, Homo sapiens
agcctcagccatcac

SEQ ID NO: 55125 - DNA, 15 bp, Homo sapiens
aagcctcagccatca

SEQ ID NO: 55126 - DNA, 15 bp, Homo sapiens
gaagcctcagccatc

SEQ ID NO: 55127 - DNA, 15 bp, Homo sapiens
agaagcctcagccat

SEQ ID NO: 55128 - DNA, 15 bp, Homo sapiens
cagaagcctcagcca

SEQ ID NO: 55129 - DNA, 15 bp, Homo sapiens
gcagaagcctcagcc

SEQ ID NO: 55130 - DNA, 15 bp, Homo sapiens
agcagaagcctcagc

SEQ ID NO: 55131 - DNA, 15 bp, Homo sapiens
aagcagaagcctcag

SEQ ID NO: 55132 - DNA, 15 bp, Homo sapiens
gaagcagaagcctca

SEQ ID NO: 55133 - DNA, 15 bp, Homo sapiens
agaagcagaagcctc

SEQ ID NO: 55134 - DNA, 15 bp, Homo sapiens
cagaagcagaagcct

SEQ ID NO: 55135 - DNA, 15 bp, Homo sapiens
gcagaagcagaagcc

SEQ ID NO: 55136 - DNA, 15 bp, Homo sapiens
agcagaagcagaagc

SEQ ID NO: 55137 - DNA, 15 bp, Homo sapiens
cagcagaagcagaag

SEQ ID NO: 55138 - DNA, 15 bp, Homo sapiens
ccagcagaagcagaa

SEQ ID NO: 55139 - DNA, 15 bp, Homo sapiens
cccagcagaagcaga

SEQ ID NO: 55140 - DNA, 15 bp, Homo sapiens
ccccagcagaagcag

SEQ ID NO: 55141 - DNA, 15 bp, Homo sapiens
accccagcagaagca

SEQ ID NO: 55142 - DNA, 15 bp, Homo sapiens
taccccagcagaagc

SEQ ID NO: 55143 - DNA, 15 bp, Homo sapiens
ctaccccagcagaag

SEQ ID NO: 55144 - DNA, 15 bp, Homo sapiens
gctaccccagcagaa

SEQ ID NO: 55145 - DNA, 15 bp, Homo sapiens
agctaccccagcaga

SEQ ID NO: 55146 - DNA, 15 bp, Homo sapiens
gagctaccccagcag

SEQ ID NO: 55147 - DNA, 15 bp, Homo sapiens
agagctaccccagca

SEQ ID NO: 55148 - DNA, 15 bp, Homo sapiens
cagagctaccccagc

SEQ ID NO: 55149 - DNA, 15 bp, Homo sapiens
tcagagctaccccag

SEQ ID NO: 55150 - DNA, 15 bp, Homo sapiens
atcagagctacccca

SEQ ID NO: 55151 - DNA, 15 bp, Homo sapiens
gatcagagctacccc

SEQ ID NO: 55152 - DNA, 15 bp, Homo sapiens
agatcagagctaccc

SEQ ID NO: 55153 - DNA, 15 bp, Homo sapiens
aagatcagagctacc

SEQ ID NO: 55154 - DNA, 15 bp, Homo sapiens
aaagatcagagctac

SEQ ID NO: 55155 - DNA, 15 bp, Homo sapiens
gaaagatcagagcta

SEQ ID NO: 55156 - DNA, 15 bp, Homo sapiens
agaaagatcagagct

SEQ ID NO: 55157 - DNA, 15 bp, Homo sapiens
cagaaagatcagagc

SEQ ID NO: 55158 - DNA, 15 bp, Homo sapiens
gcagaaagatcagag

SEQ ID NO: 55159 - DNA, 15 bp, Homo sapiens
agcagaaagatcaga

SEQ ID NO: 55160 - DNA, 15 bp, Homo sapiens
aagcagaaagatcag

SEQ ID NO: 55161 - DNA, 15 bp, Homo sapiens
aaagcagaaagatca

SEQ ID NO: 55162 - DNA, 15 bp, Homo sapiens
gaaagcagaaagatc

SEQ ID NO: 55163 - DNA, 15 bp, Homo sapiens
agaaagcagaaagat

SEQ ID NO: 55164 - DNA, 15 bp, Homo sapiens
gagaaagcagaaaga

SEQ ID NO: 55165 - DNA, 15 bp, Homo sapiens
agagaaagcagaaag

SEQ ID NO: 55166 - DNA, 15 bp, Homo sapiens
cagagaaagcagaaa

SEQ ID NO: 55167 - DNA, 15 bp, Homo sapiens
ccagagaaagcagaa

SEQ ID NO: 55168 - DNA, 15 bp, Homo sapiens
gccagagaaagcaga

SEQ ID NO: 55169 - DNA, 15 bp, Homo sapiens
tgccagagaaagcag

SEQ ID NO: 55170 - DNA, 15 bp, Homo sapiens
gtgccagagaaagca

SEQ ID NO: 55171 - DNA, 15 bp, Homo sapiens
agtgccagagaaagc

SEQ ID NO: 55172 - DNA, 15 bp, Homo sapiens
cagtgccagagaaag

SEQ ID NO: 55173 - DNA, 15 bp, Homo sapiens
acagtgccagagaaa

SEQ ID NO: 55174 - DNA, 15 bp, Homo sapiens
gacagtgccagagaa

SEQ ID NO: 55175 - DNA, 15 bp, Homo sapiens
agacagtgccagaga

SEQ ID NO: 55176 - DNA, 15 bp, Homo sapiens
tagacagtgccagag

SEQ ID NO: 55177 - DNA, 15 bp, Homo sapiens
gtagacagtgccaga

SEQ ID NO: 55178 - DNA, 15 bp, Homo sapiens
ggtagacagtgccag

SEQ ID NO: 55179 - DNA, 15 bp, Homo sapiens
gggtagacagtgcca

SEQ ID NO: 55180 - DNA, 15 bp, Homo sapiens
tgggtagacagtgcc

SEQ ID NO: 55181 - DNA, 15 bp, Homo sapiens
atgggtagacagtgc

SEQ ID NO: 55182 - DNA, 15 bp, Homo sapiens
catgggtagacagtg

SEQ ID NO: 55183 - DNA, 15 bp, Homo sapiens
acatgggtagacagt

SEQ ID NO: 55184 - DNA, 15 bp, Homo sapiens
aacatgggtagacag

SEQ ID NO: 55185 - DNA, 15 bp, Homo sapiens
caacatgggtagaca

SEQ ID NO: 55186 - DNA, 15 bp, Homo sapiens
gcaacatgggtagac

SEQ ID NO: 55187 - DNA, 15 bp, Homo sapiens
ggcaacatgggtaga

SEQ ID NO: 55188 - DNA, 15 bp, Homo sapiens
aggcaacatgggtag

SEQ ID NO: 55189 - DNA, 15 bp, Homo sapiens
gaggcaacatgggta

SEQ ID NO: 55190 - DNA, 15 bp, Homo sapiens
tgaggcaacatgggt

SEQ ID NO: 55191 - DNA, 15 bp, Homo sapiens
gtgaggcaacatggg

SEQ ID NO: 55192 - DNA, 15 bp, Homo sapiens
ggtgaggcaacatgg

SEQ ID NO: 55193 - DNA, 15 bp, Homo sapiens
gggtgaggcaacatg

SEQ ID NO: 55194 - DNA, 15 bp, Homo sapiens
ggggtgaggcaacat

SEQ ID NO: 55195 - DNA, 15 bp, Homo sapiens
tggggtgaggcaaca

SEQ ID NO: 55196 - DNA, 15 bp, Homo sapiens
gtggggtgaggcaac

SEQ ID NO: 55197 - DNA, 15 bp, Homo sapiens
tgtggggtgaggcaa

SEQ ID NO: 55198 - DNA, 15 bp, Homo sapiens
ctgtggggtgaggca

SEQ ID NO: 55199 - DNA, 15 bp, Homo sapiens
cctgtggggtgaggc

SEQ ID NO: 55200 - DNA, 15 bp, Homo sapiens
acctgtggggtgagg

SEQ ID NO: 55201 - DNA, 15 bp, Homo sapiens
gacctgtggggtgag

SEQ ID NO: 55202 - DNA, 15 bp, Homo sapiens
ggacctgtggggtga

SEQ ID NO: 55203 - DNA, 15 bp, Homo sapiens
gggacctgtggggtg

SEQ ID NO: 55204 - DNA, 15 bp, Homo sapiens
tgggacctgtggggt

SEQ ID NO: 55205 - DNA, 15 bp, Homo sapiens
ctgggacctgtgggg

SEQ ID NO: 55206 - DNA, 15 bp, Homo sapiens
cctgggacctgtggg

SEQ ID NO: 55207 - DNA, 15 bp, Homo sapiens
ccctgggacctgtgg

SEQ ID NO: 55208 - DNA, 15 bp, Homo sapiens
gccctgggacctgtg

SEQ ID NO: 55209 - DNA, 15 bp, Homo sapiens
tgccctgggacctgt

SEQ ID NO: 55210 - DNA, 15 bp, Homo sapiens
gtgccctgggacctg

SEQ ID NO: 55211 - DNA, 15 bp, Homo sapiens
ggtgccctgggacct

SEQ ID NO: 55212 - DNA, 15 bp, Homo sapiens
aggtgccctgggacc

SEQ ID NO: 55213 - DNA, 15 bp, Homo sapiens
gaggtgccctgggac

SEQ ID NO: 55214 - DNA, 15 bp, Homo sapiens
agaggtgccctggga

SEQ ID NO: 55215 - DNA, 15 bp, Homo sapiens
gagaggtgccctggg

SEQ ID NO: 55216 - DNA, 15 bp, Homo sapiens
agagaggtgccctgg

SEQ ID NO: 55217 - DNA, 15 bp, Homo sapiens
gagagaggtgccctg

SEQ ID NO: 55218 - DNA, 15 bp, Homo sapiens
cgagagaggtgccct

SEQ ID NO: 55219 - DNA, 15 bp, Homo sapiens
ccgagagaggtgccc

SEQ ID NO: 55220 - DNA, 15 bp, Homo sapiens
cccgagagaggtgcc

SEQ ID NO: 55221 - DNA, 15 bp, Homo sapiens
gcccgagagaggtgc

SEQ ID NO: 55222 - DNA, 15 bp, Homo sapiens
tgcccgagagaggtg

SEQ ID NO: 55223 - DNA, 15 bp, Homo sapiens
ttgcccgagagaggt

SEQ ID NO: 55224 - DNA, 15 bp, Homo sapiens
cttgcccgagagagg

SEQ ID NO: 55225 - DNA, 15 bp, Homo sapiens
acttgcccgagagag

SEQ ID NO: 55226 - DNA, 15 bp, Homo sapiens
gacttgcccgagaga

SEQ ID NO: 55227 - DNA, 15 bp, Homo sapiens
agacttgcccgagag

SEQ ID NO: 55228 - DNA, 15 bp, Homo sapiens
aagacttgcccgaga

SEQ ID NO: 55229 - DNA, 15 bp, Homo sapiens
caagacttgcccgag

SEQ ID NO: 55230 - DNA, 15 bp, Homo sapiens
ccaagacttgcccga

SEQ ID NO: 55231 - DNA, 15 bp, Homo sapiens
tccaagacttgcccg

SEQ ID NO: 55232 - DNA, 15 bp, Homo sapiens
ttccaagacttgccc

SEQ ID NO: 55233 - DNA, 15 bp, Homo sapiens
gttccaagacttgcc

SEQ ID NO: 55234 - DNA, 15 bp, Homo sapiens
ggttccaagacttgc

SEQ ID NO: 55235 - DNA, 15 bp, Homo sapiens
gggttccaagacttg

SEQ ID NO: 55236 - DNA, 15 bp, Homo sapiens
agggttccaagactt

SEQ ID NO: 55237 - DNA, 15 bp, Homo sapiens
gagggttccaagact

SEQ ID NO: 55238 - DNA, 15 bp, Homo sapiens
agagggttccaagac

SEQ ID NO: 55239 - DNA, 15 bp, Homo sapiens
cagagggttccaaga

SEQ ID NO: 55240 - DNA, 15 bp, Homo sapiens
tcagagggttccaag

SEQ ID NO: 55241 - DNA, 15 bp, Homo sapiens
gtcagagggttccaa

SEQ ID NO: 55242 - DNA, 15 bp, Homo sapiens
tgtcagagggttcca

SEQ ID NO: 55243 - DNA, 15 bp, Homo sapiens
gtgtcagagggttcc

SEQ ID NO: 55244 - DNA, 15 bp, Homo sapiens
agtgtcagagggttc

SEQ ID NO: 55245 - DNA, 15 bp, Homo sapiens
cagtgtcagagggtt

SEQ ID NO: 55246 - DNA, 15 bp, Homo sapiens
tcagtgtcagagggt

SEQ ID NO: 55247 - DNA, 15 bp, Homo sapiens
atcagtgtcagaggg

SEQ ID NO: 55248 - DNA, 15 bp, Homo sapiens
aatcagtgtcagagg

SEQ ID NO: 55249 - DNA, 15 bp, Homo sapiens
aaatcagtgtcagag

SEQ ID NO: 55250 - DNA, 15 bp, Homo sapiens
caaatcagtgtcaga

SEQ ID NO: 55251 - DNA, 15 bp, Homo sapiens
gcaaatcagtgtcag

SEQ ID NO: 55252 - DNA, 15 bp, Homo sapiens
agcaaatcagtgtca

SEQ ID NO: 55253 - DNA, 15 bp, Homo sapiens
gagcaaatcagtgtc

SEQ ID NO: 55254 - DNA, 15 bp, Homo sapiens
agagcaaatcagtgt

SEQ ID NO: 55255 - DNA, 15 bp, Homo sapiens
gagagcaaatcagtg

SEQ ID NO: 55256 - DNA, 15 bp, Homo sapiens
agagagcaaatcagt

SEQ ID NO: 55257 - DNA, 15 bp, Homo sapiens
aagagagcaaatcag

SEQ ID NO: 55258 - DNA, 15 bp, Homo sapiens
aaagagagcaaatca

SEQ ID NO: 55259 - DNA, 15 bp, Homo sapiens
aaaagagagcaaatc

SEQ ID NO: 55260 - DNA, 15 bp, Homo sapiens
gaaaagagagcaaat

SEQ ID NO: 55261 - DNA, 15 bp, Homo sapiens
agaaaagagagcaaa

SEQ ID NO: 55262 - DNA, 15 bp, Homo sapiens
cagaaaagagagcaa

SEQ ID NO: 55263 - DNA, 15 bp, Homo sapiens
tcagaaaagagagca

SEQ ID NO: 55264 - DNA, 15 bp, Homo sapiens
ctcagaaaagagagc

SEQ ID NO: 55265 - DNA, 15 bp, Homo sapiens
gctcagaaaagagag

SEQ ID NO: 55266 - DNA, 15 bp, Homo sapiens
agctcagaaaagaga

SEQ ID NO: 55267 - DNA, 15 bp, Homo sapiens
cagctcagaaaagag

SEQ ID NO: 55268 - DNA, 15 bp, Homo sapiens
gcagctcagaaaaga

SEQ ID NO: 55269 - DNA, 15 bp, Homo sapiens
agcagctcagaaaag

SEQ ID NO: 55270 - DNA, 15 bp, Homo sapiens
aagcagctcagaaaa

SEQ ID NO: 55271 - DNA, 15 bp, Homo sapiens
aaagcagctcagaaa

SEQ ID NO: 55272 - DNA, 15 bp, Homo sapiens
aaaagcagctcagaa

SEQ ID NO: 55273 - DNA, 15 bp, Homo sapiens
taaaagcagctcaga

SEQ ID NO: 55274 - DNA, 15 bp, Homo sapiens
ctaaaagcagctcag

SEQ ID NO: 55275 - DNA, 15 bp, Homo sapiens
gctaaaagcagctca

SEQ ID NO: 55276 - DNA, 15 bp, Homo sapiens
ggctaaaagcagctc

SEQ ID NO: 55277 - DNA, 15 bp, Homo sapiens
tggctaaaagcagct

SEQ ID NO: 55278 - DNA, 15 bp, Homo sapiens
gtggctaaaagcagc

SEQ ID NO: 55279 - DNA, 15 bp, Homo sapiens
ggtggctaaaagcag

SEQ ID NO: 55280 - DNA, 15 bp, Homo sapiens
gggtggctaaaagca

SEQ ID NO: 55281 - DNA, 15 bp, Homo sapiens
tgggtggctaaaagc

SEQ ID NO: 55282 - DNA, 15 bp, Homo sapiens
atgggtggctaaaag

SEQ ID NO: 55283 - DNA, 15 bp, Homo sapiens
gatgggtggctaaaa

SEQ ID NO: 55284 - DNA, 15 bp, Homo sapiens
ggatgggtggctaaa

SEQ ID NO: 55285 - DNA, 15 bp, Homo sapiens
aggatgggtggctaa

SEQ ID NO: 55286 - DNA, 15 bp, Homo sapiens
gaggatgggtggcta

SEQ ID NO: 55287 - DNA, 15 bp, Homo sapiens
cgaggatgggtggct

SEQ ID NO: 55288 - DNA, 15 bp, Homo sapiens
ccgaggatgggtggc

SEQ ID NO: 55289 - DNA, 15 bp, Homo sapiens
cccgaggatgggtgg

SEQ ID NO: 55290 - DNA, 15 bp, Homo sapiens
tcccgaggatgggtg

SEQ ID NO: 55291 - DNA, 15 bp, Homo sapiens
gtcccgaggatgggt

SEQ ID NO: 55292 - DNA, 15 bp, Homo sapiens
ggtcccgaggatggg

SEQ ID NO: 55293 - DNA, 15 bp, Homo sapiens
aggtcccgaggatgg

SEQ ID NO: 55294 - DNA, 15 bp, Homo sapiens
caggtcccgaggatg

SEQ ID NO: 55295 - DNA, 15 bp, Homo sapiens
acaggtcccgaggat

SEQ ID NO: 55296 - DNA, 15 bp, Homo sapiens
aacaggtcccgagga

SEQ ID NO: 55297 - DNA, 15 bp, Homo sapiens
aaacaggtcccgagg

SEQ ID NO: 55298 - DNA, 15 bp, Homo sapiens
aaaacaggtcccgag

SEQ ID NO: 55299 - DNA, 15 bp, Homo sapiens
gaaaacaggtcccga

SEQ ID NO: 55300 - DNA, 15 bp, Homo sapiens
agaaaacaggtcccg

SEQ ID NO: 55301 - DNA, 15 bp, Homo sapiens
gagaaaacaggtccc

SEQ ID NO: 55302 - DNA, 15 bp, Homo sapiens
agagaaaacaggtcc

SEQ ID NO: 55303 - DNA, 15 bp, Homo sapiens
gagagaaaacaggtc

SEQ ID NO: 55304 - DNA, 15 bp, Homo sapiens
agagagaaaacaggt

SEQ ID NO: 55305 - DNA, 15 bp, Homo sapiens
cagagagaaaacagg

SEQ ID NO: 55306 - DNA, 15 bp, Homo sapiens
gcagagagaaaacag

SEQ ID NO: 55307 - DNA, 15 bp, Homo sapiens
ggcagagagaaaaca

SEQ ID NO: 55308 - DNA, 15 bp, Homo sapiens
aggcagagagaaaac

SEQ ID NO: 55309 - DNA, 15 bp, Homo sapiens
gaggcagagagaaaa

SEQ ID NO: 55310 - DNA, 15 bp, Homo sapiens
ggaggcagagagaaa

SEQ ID NO: 55311 - DNA, 15 bp, Homo sapiens
tggaggcagagagaa

SEQ ID NO: 55312 - DNA, 15 bp, Homo sapiens
gtggaggcagagaga

SEQ ID NO: 55313 - DNA, 15 bp, Homo sapiens
ggtggaggcagagag

SEQ ID NO: 55314 - DNA, 15 bp, Homo sapiens
gggtggaggcagaga

SEQ ID NO: 55315 - DNA, 15 bp, Homo sapiens
ggggtggaggcagag

SEQ ID NO: 55316 - DNA, 15 bp, Homo sapiens
aggggtggaggcaga

SEQ ID NO: 55317 - DNA, 15 bp, Homo sapiens
caggggtggaggcag

SEQ ID NO: 55318 - DNA, 15 bp, Homo sapiens
gcaggggtggaggca

SEQ ID NO: 55319 - DNA, 15 bp, Homo sapiens
cgcaggggtggaggc

SEQ ID NO: 55320 - DNA, 15 bp, Homo sapiens
ccgcaggggtggagg

SEQ ID NO: 55321 - DNA, 15 bp, Homo sapiens
cccgcaggggtggag

SEQ ID NO: 55322 - DNA, 15 bp, Homo sapiens
gcccgcaggggtgga

SEQ ID NO: 55323 - DNA, 15 bp, Homo sapiens
tgcccgcaggggtgg

SEQ ID NO: 55324 - DNA, 15 bp, Homo sapiens
ctgcccgcaggggtg

SEQ ID NO: 55325 - DNA, 15 bp, Homo sapiens
actgcccgcaggggt

SEQ ID NO: 55326 - DNA, 15 bp, Homo sapiens
gactgcccgcagggg

SEQ ID NO: 55327 - DNA, 15 bp, Homo sapiens
agactgcccgcaggg

SEQ ID NO: 55328 - DNA, 15 bp, Homo sapiens
aagactgcccgcagg

SEQ ID NO: 55329 - DNA, 15 bp, Homo sapiens
taagactgcccgcag

SEQ ID NO: 55330 - DNA, 15 bp, Homo sapiens
ctaagactgcccgca

SEQ ID NO: 55331 - DNA, 15 bp, Homo sapiens
cctaagactgcccgc

SEQ ID NO: 55332 - DNA, 15 bp, Homo sapiens
acctaagactgcccg

SEQ ID NO: 55333 - DNA, 15 bp, Homo sapiens
gacctaagactgccc

SEQ ID NO: 55334 - DNA, 15 bp, Homo sapiens
agacctaagactgcc

SEQ ID NO: 55335 - DNA, 15 bp, Homo sapiens
gagacctaagactgc

SEQ ID NO: 55336 - DNA, 15 bp, Homo sapiens
ggagacctaagactg

SEQ ID NO: 55337 - DNA, 15 bp, Homo sapiens
aggagacctaagact

SEQ ID NO: 55338 - DNA, 15 bp, Homo sapiens
caggagacctaagac

SEQ ID NO: 55339 - DNA, 15 bp, Homo sapiens
gcaggagacctaaga

SEQ ID NO: 55340 - DNA, 15 bp, Homo sapiens
ggcaggagacctaag

SEQ ID NO: 55341 - DNA, 15 bp, Homo sapiens
gggcaggagacctaa

SEQ ID NO: 55342 - DNA, 15 bp, Homo sapiens
ggggcaggagaccta

SEQ ID NO: 55343 - DNA, 15 bp, Homo sapiens
aggggcaggagacct

SEQ ID NO: 55344 - DNA, 15 bp, Homo sapiens
gaggggcaggagacc

SEQ ID NO: 55345 - DNA, 15 bp, Homo sapiens
tgaggggcaggagac

SEQ ID NO: 55346 - DNA, 15 bp, Homo sapiens
gtgaggggcaggaga

SEQ ID NO: 55347 - DNA, 15 bp, Homo sapiens
cgtgaggggcaggag

SEQ ID NO: 55348 - DNA, 15 bp, Homo sapiens
tcgtgaggggcagga

SEQ ID NO: 55349 - DNA, 15 bp, Homo sapiens
ctcgtgaggggcagg

SEQ ID NO: 55350 - DNA, 15 bp, Homo sapiens
gctcgtgaggggcag

SEQ ID NO: 55351 - DNA, 15 bp, Homo sapiens
tgctcgtgaggggca

SEQ ID NO: 55352 - DNA, 15 bp, Homo sapiens
gtgctcgtgaggggc

SEQ ID NO: 55353 - DNA, 15 bp, Homo sapiens
ggtgctcgtgagggg

SEQ ID NO: 55354 - DNA, 15 bp, Homo sapiens
gggtgctcgtgaggg

SEQ ID NO: 55355 - DNA, 15 bp, Homo sapiens
ggggtgctcgtgagg

SEQ ID NO: 55356 - DNA, 15 bp, Homo sapiens
tggggtgctcgtgag

SEQ ID NO: 55357 - DNA, 15 bp, Homo sapiens
ctggggtgctcgtga

SEQ ID NO: 55358 - DNA, 15 bp, Homo sapiens
tctggggtgctcgtg

SEQ ID NO: 55359 - DNA, 15 bp, Homo sapiens
ctctggggtgctcgt

SEQ ID NO: 55360 - DNA, 15 bp, Homo sapiens
tctctggggtgctcg

SEQ ID NO: 55361 - DNA, 15 bp, Homo sapiens
ctctctggggtgctc

SEQ ID NO: 55362 - DNA, 15 bp, Homo sapiens
cctctctggggtgct

SEQ ID NO: 55363 - DNA, 15 bp, Homo sapiens
gcctctctggggtgc

SEQ ID NO: 55364 - DNA, 15 bp, Homo sapiens
ggcctctctggggtg

SEQ ID NO: 55365 - DNA, 15 bp, Homo sapiens
tggcctctctggggt

SEQ ID NO: 55366 - DNA, 15 bp, Homo sapiens
gtggcctctctgggg

SEQ ID NO: 55367 - DNA, 15 bp, Homo sapiens
cgtggcctctctggg

SEQ ID NO: 55368 - DNA, 15 bp, Homo sapiens
acgtggcctctctgg

SEQ ID NO: 55369 - DNA, 15 bp, Homo sapiens
cacgtggcctctctg

SEQ ID NO: 55370 - DNA, 15 bp, Homo sapiens
gcacgtggcctctct

SEQ ID NO: 55371 - DNA, 15 bp, Homo sapiens
agcacgtggcctctc

SEQ ID NO: 55372 - DNA, 15 bp, Homo sapiens
gagcacgtggcctct

SEQ ID NO: 55373 - DNA, 15 bp, Homo sapiens
tgagcacgtggcctc

SEQ ID NO: 55374 - DNA, 15 bp, Homo sapiens
ctgagcacgtggcct

SEQ ID NO: 55375 - DNA, 15 bp, Homo sapiens
actgagcacgtggcc

SEQ ID NO: 55376 - DNA, 15 bp, Homo sapiens
cactgagcacgtggc

SEQ ID NO: 55377 - DNA, 15 bp, Homo sapiens
tcactgagcacgtgg

SEQ ID NO: 55378 - DNA, 15 bp, Homo sapiens
atcactgagcacgtg

SEQ ID NO: 55379 - DNA, 15 bp, Homo sapiens
gatcactgagcacgt

SEQ ID NO: 55380 - DNA, 15 bp, Homo sapiens
agatcactgagcacg

SEQ ID NO: 55381 - DNA, 15 bp, Homo sapiens
gagatcactgagcac

SEQ ID NO: 55382 - DNA, 15 bp, Homo sapiens
tgagatcactgagca

SEQ ID NO: 55383 - DNA, 15 bp, Homo sapiens
ctgagatcactgagc

SEQ ID NO: 55384 - DNA, 15 bp, Homo sapiens
actgagatcactgag

SEQ ID NO: 55385 - DNA, 15 bp, Homo sapiens
cactgagatcactga

SEQ ID NO: 55386 - DNA, 15 bp, Homo sapiens
ccactgagatcactg

SEQ ID NO: 55387 - DNA, 15 bp, Homo sapiens
cccactgagatcact

SEQ ID NO: 55388 - DNA, 15 bp, Homo sapiens
gcccactgagatcac

SEQ ID NO: 55389 - DNA, 15 bp, Homo sapiens
cgcccactgagatca

SEQ ID NO: 55390 - DNA, 15 bp, Homo sapiens
gcgcccactgagatc

SEQ ID NO: 55391 - DNA, 15 bp, Homo sapiens
tgcgcccactgagat

SEQ ID NO: 55392 - DNA, 15 bp, Homo sapiens
atgcgcccactgaga

SEQ ID NO: 55393 - DNA, 15 bp, Homo sapiens
gatgcgcccactgag

SEQ ID NO: 55394 - DNA, 15 bp, Homo sapiens
agatgcgcccactga

SEQ ID NO: 55395 - DNA, 15 bp, Homo sapiens
aagatgcgcccactg

SEQ ID NO: 55396 - DNA, 15 bp, Homo sapiens
aaagatgcgcccact

SEQ ID NO: 55397 - DNA, 15 bp, Homo sapiens
gaaagatgcgcccac

SEQ ID NO: 55398 - DNA, 15 bp, Homo sapiens
agaaagatgcgccca

SEQ ID NO: 55399 - DNA, 15 bp, Homo sapiens
tagaaagatgcgccc

SEQ ID NO: 55400 - DNA, 15 bp, Homo sapiens
ctagaaagatgcgcc

SEQ ID NO: 55401 - DNA, 15 bp, Homo sapiens
actagaaagatgcgc

SEQ ID NO: 55402 - DNA, 15 bp, Homo sapiens
gactagaaagatgcg

SEQ ID NO: 55403 - DNA, 15 bp, Homo sapiens
agactagaaagatgc

SEQ ID NO: 55404 - DNA, 15 bp, Homo sapiens
aagactagaaagatg

SEQ ID NO: 55405 - DNA, 15 bp, Homo sapiens
caagactagaaagat

SEQ ID NO: 55406 - DNA, 15 bp, Homo sapiens
gcaagactagaaaga

SEQ ID NO: 55407 - DNA, 15 bp, Homo sapiens
agcaagactagaaag

SEQ ID NO: 55408 - DNA, 15 bp, Homo sapiens
tagcaagactagaaa

SEQ ID NO: 55409 - DNA, 15 bp, Homo sapiens
atagcaagactagaa

SEQ ID NO: 55410 - DNA, 15 bp, Homo sapiens
aatagcaagactaga

SEQ ID NO: 55411 - DNA, 15 bp, Homo sapiens
gaatagcaagactag

SEQ ID NO: 55412 - DNA, 15 bp, Homo sapiens
agaatagcaagacta

SEQ ID NO: 55413 - DNA, 15 bp, Homo sapiens
aagaatagcaagact

SEQ ID NO: 55414 - DNA, 15 bp, Homo sapiens
aaagaatagcaagac

SEQ ID NO: 55415 - DNA, 15 bp, Homo sapiens
aaaagaatagcaaga

SEQ ID NO: 55416 - DNA, 15 bp, Homo sapiens
aaaaagaatagcaag

SEQ ID NO: 55417 - DNA, 15 bp, Homo sapiens
caaaaagaatagcaa

SEQ ID NO: 55418 - DNA, 15 bp, Homo sapiens
ccaaaaagaatagca

SEQ ID NO: 55419 - DNA, 15 bp, Homo sapiens
gccaaaaagaatagc

SEQ ID NO: 55420 - DNA, 15 bp, Homo sapiens
ggccaaaaagaatag

SEQ ID NO: 55421 - DNA, 15 bp, Homo sapiens
tggccaaaaagaata

SEQ ID NO: 55422 - DNA, 15 bp, Homo sapiens
atggccaaaaagaat

SEQ ID NO: 55423 - DNA, 15 bp, Homo sapiens
catggccaaaaagaa

SEQ ID NO: 55424 - DNA, 15 bp, Homo sapiens
acatggccaaaaaga

SEQ ID NO: 55425 - DNA, 15 bp, Homo sapiens
aacatggccaaaaag

SEQ ID NO: 55426 - DNA, 15 bp, Homo sapiens
caacatggccaaaaa

SEQ ID NO: 55427 - DNA, 15 bp, Homo sapiens
acaacatggccaaaa

SEQ ID NO: 55428 - DNA, 15 bp, Homo sapiens
aacaacatggccaaa

SEQ ID NO: 55429 - DNA, 15 bp, Homo sapiens
gaacaacatggccaa

SEQ ID NO: 55430 - DNA, 15 bp, Homo sapiens
tgaacaacatggcca

SEQ ID NO: 55431 - DNA, 15 bp, Homo sapiens
ctgaacaacatggcc

SEQ ID NO: 55432 - DNA, 15 bp, Homo sapiens
tctgaacaacatggc

SEQ ID NO: 55433 - DNA, 15 bp, Homo sapiens
ttctgaacaacatgg

SEQ ID NO: 55434 - DNA, 15 bp, Homo sapiens
tttctgaacaacatg

SEQ ID NO: 55435 - DNA, 15 bp, Homo sapiens
gtttctgaacaacat

SEQ ID NO: 55436 - DNA, 15 bp, Homo sapiens
ggtttctgaacaaca

SEQ ID NO: 55437 - DNA, 15 bp, Homo sapiens
tggtttctgaacaac

SEQ ID NO: 55438 - DNA, 15 bp, Homo sapiens
atggtttctgaacaa

SEQ ID NO: 55439 - DNA, 15 bp, Homo sapiens
tatggtttctgaaca

SEQ ID NO: 55440 - DNA, 15 bp, Homo sapiens
gtatggtttctgaac

SEQ ID NO: 55441 - DNA, 15 bp, Homo sapiens
agtatggtttctgaa

SEQ ID NO: 55442 - DNA, 15 bp, Homo sapiens
cagtatggtttctga

SEQ ID NO: 55443 - DNA, 15 bp, Homo sapiens
ccagtatggtttctg

SEQ ID NO: 55444 - DNA, 15 bp, Homo sapiens
cccagtatggtttct

SEQ ID NO: 55445 - DNA, 15 bp, Homo sapiens
gcccagtatggtttc

SEQ ID NO: 55446 - DNA, 15 bp, Homo sapiens
tgcccagtatggttt

SEQ ID NO: 55447 - DNA, 15 bp, Homo sapiens
ctgcccagtatggtt

SEQ ID NO: 55448 - DNA, 15 bp, Homo sapiens
cctgcccagtatggt

SEQ ID NO: 55449 - DNA, 15 bp, Homo sapiens
ccctgcccagtatgg

SEQ ID NO: 55450 - DNA, 15 bp, Homo sapiens
gccctgcccagtatg

SEQ ID NO: 55451 - DNA, 15 bp, Homo sapiens
ggccctgcccagtat

SEQ ID NO: 55452 - DNA, 15 bp, Homo sapiens
cggccctgcccagta

SEQ ID NO: 55453 - DNA, 15 bp, Homo sapiens
tcggccctgcccagt

SEQ ID NO: 55454 - DNA, 15 bp, Homo sapiens
gtcggccctgcccag

SEQ ID NO: 55455 - DNA, 15 bp, Homo sapiens
agtcggccctgccca

SEQ ID NO: 55456 - DNA, 15 bp, Homo sapiens
aagtcggccctgccc

SEQ ID NO: 55457 - DNA, 15 bp, Homo sapiens
gaagtcggccctgcc

SEQ ID NO: 55458 - DNA, 15 bp, Homo sapiens
tgaagtcggccctgc

SEQ ID NO: 55459 - DNA, 15 bp, Homo sapiens
gtgaagtcggccctg

SEQ ID NO: 55460 - DNA, 15 bp, Homo sapiens
ggtgaagtcggccct

SEQ ID NO: 55461 - DNA, 15 bp, Homo sapiens
gggtgaagtcggccc

SEQ ID NO: 55462 - DNA, 15 bp, Homo sapiens
agggtgaagtcggcc

SEQ ID NO: 55463 - DNA, 15 bp, Homo sapiens
tagggtgaagtcggc

SEQ ID NO: 55464 - DNA, 15 bp, Homo sapiens
ttagggtgaagtcgg

SEQ ID NO: 55465 - DNA, 15 bp, Homo sapiens
tttagggtgaagtcg

SEQ ID NO: 55466 - DNA, 15 bp, Homo sapiens
ctttagggtgaagtc

SEQ ID NO: 55467 - DNA, 15 bp, Homo sapiens
cctttagggtgaagt

SEQ ID NO: 55468 - DNA, 15 bp, Homo sapiens
gcctttagggtgaag

SEQ ID NO: 55469 - DNA, 15 bp, Homo sapiens
agcctttagggtgaa

SEQ ID NO: 55470 - DNA, 15 bp, Homo sapiens
cagcctttagggtga

SEQ ID NO: 55471 - DNA, 15 bp, Homo sapiens
gcagcctttagggtg

SEQ ID NO: 55472 - DNA, 15 bp, Homo sapiens
cgcagcctttagggt

SEQ ID NO: 55473 - DNA, 15 bp, Homo sapiens
acgcagcctttaggg

SEQ ID NO: 55474 - DNA, 15 bp, Homo sapiens
gacgcagcctttagg

SEQ ID NO: 55475 - DNA, 15 bp, Homo sapiens
agacgcagcctttag

SEQ ID NO: 55476 - DNA, 15 bp, Homo sapiens
gagacgcagccttta

SEQ ID NO: 55477 - DNA, 15 bp, Homo sapiens
agagacgcagccttt

SEQ ID NO: 55478 - DNA, 15 bp, Homo sapiens
aagagacgcagcctt

SEQ ID NO: 55479 - DNA, 15 bp, Homo sapiens
gaagagacgcagcct

SEQ ID NO: 55480 - DNA, 15 bp, Homo sapiens
tgaagagacgcagcc

SEQ ID NO: 55481 - DNA, 15 bp, Homo sapiens
gtgaagagacgcagc

SEQ ID NO: 55482 - DNA, 15 bp, Homo sapiens
agtgaagagacgcag

SEQ ID NO: 55483 - DNA, 15 bp, Homo sapiens
gagtgaagagacgca

SEQ ID NO: 55484 - DNA, 15 bp, Homo sapiens
agagtgaagagacgc

SEQ ID NO: 55485 - DNA, 15 bp, Homo sapiens
cagagtgaagagacg

SEQ ID NO: 55486 - DNA, 15 bp, Homo sapiens
gcagagtgaagagac

SEQ ID NO: 55487 - DNA, 15 bp, Homo sapiens
agcagagtgaagaga

SEQ ID NO: 55488 - DNA, 15 bp, Homo sapiens
aagcagagtgaagag

SEQ ID NO: 55489 - DNA, 15 bp, Homo sapiens
aaagcagagtgaaga

SEQ ID NO: 55490 - DNA, 15 bp, Homo sapiens
aaaagcagagtgaag

SEQ ID NO: 55491 - DNA, 15 bp, Homo sapiens
caaaagcagagtgaa

SEQ ID NO: 55492 - DNA, 15 bp, Homo sapiens
acaaaagcagagtga

SEQ ID NO: 55493 - DNA, 15 bp, Homo sapiens
aacaaaagcagagtg

SEQ ID NO: 55494 - DNA, 15 bp, Homo sapiens
aaacaaaagcagagt

SEQ ID NO: 55495 - DNA, 15 bp, Homo sapiens
caaacaaaagcagag

SEQ ID NO: 55496 - DNA, 15 bp, Homo sapiens
acaaacaaaagcaga

SEQ ID NO: 55497 - DNA, 15 bp, Homo sapiens
aacaaacaaaagcag

SEQ ID NO: 55498 - DNA, 15 bp, Homo sapiens
gaacaaacaaaagca

SEQ ID NO: 55499 - DNA, 15 bp, Homo sapiens
ggaacaaacaaaagc

SEQ ID NO: 55500 - DNA, 15 bp, Homo sapiens
tggaacaaacaaaag

SEQ ID NO: 55501 - DNA, 15 bp, Homo sapiens
ttggaacaaacaaaa

SEQ ID NO: 55502 - DNA, 15 bp, Homo sapiens
tttggaacaaacaaa

SEQ ID NO: 55503 - DNA, 15 bp, Homo sapiens
atttggaacaaacaa

SEQ ID NO: 55504 - DNA, 15 bp, Homo sapiens
tatttggaacaaaca

SEQ ID NO: 55505 - DNA, 15 bp, Homo sapiens
ttatttggaacaaac

SEQ ID NO: 55506 - DNA, 15 bp, Homo sapiens
tttatttggaacaaa

SEQ ID NO: 55507 - DNA, 15 bp, Homo sapiens
ctttatttggaacaa

SEQ ID NO: 55508 - DNA, 15 bp, Homo sapiens
actttatttggaaca

SEQ ID NO: 55509 - DNA, 15 bp, Homo sapiens
cactttatttggaac

SEQ ID NO: 55510 - DNA, 15 bp, Homo sapiens
ccactttatttggaa

SEQ ID NO: 55511 - DNA, 15 bp, Homo sapiens
gccactttatttgga

SEQ ID NO: 55512 - DNA, 15 bp, Homo sapiens
agccactttatttgg

SEQ ID NO: 55513 - DNA, 15 bp, Homo sapiens
aagccactttatttg

SEQ ID NO: 55514 - DNA, 15 bp, Homo sapiens
gaagccactttattt

SEQ ID NO: 55515 - DNA, 15 bp, Homo sapiens
tgaagccactttatt

SEQ ID NO: 55516 - DNA, 15 bp, Homo sapiens
ctgaagccactttat

SEQ ID NO: 55517 - DNA, 15 bp, Homo sapiens
tctgaagccacttta

SEQ ID NO: 55518 - DNA, 15 bp, Homo sapiens
ttctgaagccacttt

SEQ ID NO: 55519 - DNA, 15 bp, Homo sapiens
attctgaagccactt

SEQ ID NO: 55520 - DNA, 15 bp, Homo sapiens
aattctgaagccact

SEQ ID NO: 55521 - DNA, 15 bp, Homo sapiens
caattctgaagccac

SEQ ID NO: 55522 - DNA, 15 bp, Homo sapiens
gcaattctgaagcca

SEQ ID NO: 55523 - DNA, 15 bp, Homo sapiens
agcaattctgaagcc

SEQ ID NO: 55524 - DNA, 15 bp, Homo sapiens
tagcaattctgaagc

SEQ ID NO: 55525 - DNA, 15 bp, Homo sapiens
ttagcaattctgaag

SEQ ID NO: 55526 - DNA, 15 bp, Homo sapiens
gttagcaattctgaa

SEQ ID NO: 55527 - DNA, 15 bp, Homo sapiens
ggttagcaattctga

SEQ ID NO: 55528 - DNA, 15 bp, Homo sapiens
gggttagcaattctg

SEQ ID NO: 55529 - DNA, 15 bp, Homo sapiens
agggttagcaattct

SEQ ID NO: 55530 - DNA, 15 bp, Homo sapiens
tagggttagcaattc

SEQ ID NO: 55531 - DNA, 15 bp, Homo sapiens
ctagggttagcaatt

SEQ ID NO: 55532 - DNA, 15 bp, Homo sapiens
gctagggttagcaat

SEQ ID NO: 55533 - DNA, 15 bp, Homo sapiens
ggctagggttagcaa

SEQ ID NO: 55534 - DNA, 15 bp, Homo sapiens
aggctagggttagca

SEQ ID NO: 55535 - DNA, 15 bp, Homo sapiens
gaggctagggttagc

SEQ ID NO: 55536 - DNA, 15 bp, Homo sapiens
agaggctagggttag

SEQ ID NO: 55537 - DNA, 15 bp, Homo sapiens
cagaggctagggtta

SEQ ID NO: 55538 - DNA, 15 bp, Homo sapiens
acagaggctagggtt

SEQ ID NO: 55539 - DNA, 15 bp, Homo sapiens
cacagaggctagggt

SEQ ID NO: 55540 - DNA, 15 bp, Homo sapiens
tcacagaggctaggg

SEQ ID NO: 55541 - DNA, 15 bp, Homo sapiens
ttcacagaggctagg

SEQ ID NO: 55542 - DNA, 15 bp, Homo sapiens
gttcacagaggctag

SEQ ID NO: 55543 - DNA, 15 bp, Homo sapiens
agttcacagaggcta

SEQ ID NO: 55544 - DNA, 15 bp, Homo sapiens
aagttcacagaggct

SEQ ID NO: 55545 - DNA, 15 bp, Homo sapiens
caagttcacagaggc

SEQ ID NO: 55546 - DNA, 15 bp, Homo sapiens
acaagttcacagagg

SEQ ID NO: 55547 - DNA, 15 bp, Homo sapiens
cacaagttcacagag

SEQ ID NO: 55548 - DNA, 15 bp, Homo sapiens
tcacaagttcacaga

SEQ ID NO: 55549 - DNA, 15 bp, Homo sapiens
ctcacaagttcacag

SEQ ID NO: 55550 - DNA, 15 bp, Homo sapiens
cctcacaagttcaca

SEQ ID NO: 55551 - DNA, 15 bp, Homo sapiens
acctcacaagttcac

SEQ ID NO: 55552 - DNA, 15 bp, Homo sapiens
tacctcacaagttca

SEQ ID NO: 55553 - DNA, 15 bp, Homo sapiens
gtacctcacaagttc

SEQ ID NO: 55554 - DNA, 15 bp, Homo sapiens
tgtacctcacaagtt

SEQ ID NO: 55555 - DNA, 15 bp, Homo sapiens
ttgtacctcacaagt

SEQ ID NO: 55556 - DNA, 15 bp, Homo sapiens
attgtacctcacaag

SEQ ID NO: 55557 - DNA, 15 bp, Homo sapiens
aattgtacctcacaa

SEQ ID NO: 55558 - DNA, 15 bp, Homo sapiens
aaattgtacctcaca

SEQ ID NO: 55559 - DNA, 15 bp, Homo sapiens
aaaattgtacctcac

SEQ ID NO: 55560 - DNA, 15 bp, Homo sapiens
caaaattgtacctca

SEQ ID NO: 55561 - DNA, 15 bp, Homo sapiens
acaaaattgtacctc

SEQ ID NO: 55562 - DNA, 15 bp, Homo sapiens
cacaaaattgtacct

SEQ ID NO: 55563 - DNA, 15 bp, Homo sapiens
acacaaaattgtacc

SEQ ID NO: 55564 - DNA, 15 bp, Homo sapiens
gacacaaaattgtac

SEQ ID NO: 55565 - DNA, 15 bp, Homo sapiens
agacacaaaattgta

SEQ ID NO: 55566 - DNA, 15 bp, Homo sapiens
cagacacaaaattgt

SEQ ID NO: 55567 - DNA, 15 bp, Homo sapiens
acagacacaaaattg

SEQ ID NO: 55568 - DNA, 15 bp, Homo sapiens
aacagacacaaaatt

SEQ ID NO: 55569 - DNA, 15 bp, Homo sapiens
taacagacacaaaat

SEQ ID NO: 55570 - DNA, 15 bp, Homo sapiens
ataacagacacaaaa

SEQ ID NO: 55571 - DNA, 15 bp, Homo sapiens
cataacagacacaaa

SEQ ID NO: 55572 - DNA, 15 bp, Homo sapiens
acataacagacacaa

SEQ ID NO: 55573 - DNA, 15 bp, Homo sapiens
aacataacagacaca

SEQ ID NO: 55574 - DNA, 15 bp, Homo sapiens
taacataacagacac

SEQ ID NO: 55575 - DNA, 15 bp, Homo sapiens
ttaacataacagaca

SEQ ID NO: 55576 - DNA, 15 bp, Homo sapiens
gttaacataacagac

SEQ ID NO: 55577 - DNA, 15 bp, Homo sapiens
tgttaacataacaga

SEQ ID NO: 55578 - DNA, 15 bp, Homo sapiens
ttgttaacataacag

SEQ ID NO: 55579 - DNA, 15 bp, Homo sapiens
tttgttaacataaca

SEQ ID NO: 55580 - DNA, 15 bp, Homo sapiens
ttttgttaacataac

SEQ ID NO: 55581 - DNA, 15 bp, Homo sapiens
tttttgttaacataa

SEQ ID NO: 55582 - DNA, 15 bp, Homo sapiens
atttttgttaacata

SEQ ID NO: 55583 - DNA, 15 bp, Homo sapiens
tatttttgttaacat

SEQ ID NO: 55584 - DNA, 15 bp, Homo sapiens
gtatttttgttaaca

SEQ ID NO: 55585 - DNA, 15 bp, Homo sapiens
tgtatttttgttaac

SEQ ID NO: 55586 - DNA, 15 bp, Homo sapiens
atgtatttttgttaa

SEQ ID NO: 55587 - DNA, 15 bp, Homo sapiens
tatgtatttttgtta

SEQ ID NO: 55588 - DNA, 15 bp, Homo sapiens
gtatgtatttttgtt

SEQ ID NO: 55589 - DNA, 15 bp, Homo sapiens
tgtatgtatttttgt

SEQ ID NO: 55590 - DNA, 15 bp, Homo sapiens
atgtatgtatttttg

SEQ ID NO: 55591 - DNA, 15 bp, Homo sapiens
tatgtatgtattttt

SEQ ID NO: 55592 - DNA, 15 bp, Homo sapiens
gtatgtatgtatttt

SEQ ID NO: 55593 - DNA, 15 bp, Homo sapiens
ggtatgtatgtattt

SEQ ID NO: 55594 - DNA, 15 bp, Homo sapiens
aggtatgtatgtatt

SEQ ID NO: 55595 - DNA, 15 bp, Homo sapiens
aaggtatgtatgtat

SEQ ID NO: 55596 - DNA, 15 bp, Homo sapiens
gaaggtatgtatgta

SEQ ID NO: 55597 - DNA, 15 bp, Homo sapiens
ggaaggtatgtatgt

SEQ ID NO: 55598 - DNA, 15 bp, Homo sapiens
aggaaggtatgtatg

SEQ ID NO: 55599 - DNA, 15 bp, Homo sapiens
caggaaggtatgtat

SEQ ID NO: 55600 - DNA, 15 bp, Homo sapiens
ccaggaaggtatgta

SEQ ID NO: 55601 - DNA, 15 bp, Homo sapiens
accaggaaggtatgt

SEQ ID NO: 55602 - DNA, 15 bp, Homo sapiens
caccaggaaggtatg

SEQ ID NO: 55603 - DNA, 15 bp, Homo sapiens
tcaccaggaaggtat

SEQ ID NO: 55604 - DNA, 15 bp, Homo sapiens
atcaccaggaaggta

SEQ ID NO: 55605 - DNA, 15 bp, Homo sapiens
catcaccaggaaggt

SEQ ID NO: 55606 - DNA, 15 bp, Homo sapiens
ccatcaccaggaagg

SEQ ID NO: 55607 - DNA, 15 bp, Homo sapiens
accatcaccaggaag

SEQ ID NO: 55608 - DNA, 15 bp, Homo sapiens
taccatcaccaggaa

SEQ ID NO: 55609 - DNA, 15 bp, Homo sapiens
ataccatcaccagga

SEQ ID NO: 55610 - DNA, 15 bp, Homo sapiens
tataccatcaccagg

SEQ ID NO: 55611 - DNA, 15 bp, Homo sapiens
ttataccatcaccag

SEQ ID NO: 55612 - DNA, 15 bp, Homo sapiens
tttataccatcacca

SEQ ID NO: 55613 - DNA, 15 bp, Homo sapiens
atttataccatcacc

SEQ ID NO: 55614 - DNA, 15 bp, Homo sapiens
aatttataccatcac

SEQ ID NO: 55615 - DNA, 15 bp, Homo sapiens
caatttataccatca

SEQ ID NO: 55616 - DNA, 15 bp, Homo sapiens
gcaatttataccatc

SEQ ID NO: 55617 - DNA, 15 bp, Homo sapiens
agcaatttataccat

SEQ ID NO: 55618 - DNA, 15 bp, Homo sapiens
tagcaatttatacca

SEQ ID NO: 55619 - DNA, 15 bp, Homo sapiens
atagcaatttatacc

SEQ ID NO: 55620 - DNA, 15 bp, Homo sapiens
aatagcaatttatac

SEQ ID NO: 55621 - DNA, 15 bp, Homo sapiens
gaatagcaatttata

SEQ ID NO: 55622 - DNA, 15 bp, Homo sapiens
agaatagcaatttat

SEQ ID NO: 55623 - DNA, 15 bp, Homo sapiens
gagaatagcaattta

SEQ ID NO: 55624 - DNA, 15 bp, Homo sapiens
agagaatagcaattt

SEQ ID NO: 55625 - DNA, 15 bp, Homo sapiens
tagagaatagcaatt

SEQ ID NO: 55626 - DNA, 15 bp, Homo sapiens
atagagaatagcaat

SEQ ID NO: 55627 - DNA, 15 bp, Homo sapiens
aatagagaatagcaa

SEQ ID NO: 55628 - DNA, 15 bp, Homo sapiens
caatagagaatagca

SEQ ID NO: 55629 - DNA, 15 bp, Homo sapiens
ccaatagagaatagc

SEQ ID NO: 55630 - DNA, 15 bp, Homo sapiens
tccaatagagaatag

SEQ ID NO: 55631 - DNA, 15 bp, Homo sapiens
ttccaatagagaata

SEQ ID NO: 55632 - DNA, 15 bp, Homo sapiens
tttccaatagagaat

SEQ ID NO: 55633 - DNA, 15 bp, Homo sapiens
ctttccaatagagaa

SEQ ID NO: 55634 - DNA, 15 bp, Homo sapiens
gctttccaatagaga

SEQ ID NO: 55635 - DNA, 15 bp, Homo sapiens
tgctttccaatagag

SEQ ID NO: 55636 - DNA, 15 bp, Homo sapiens
ttgctttccaataga

SEQ ID NO: 55637 - DNA, 15 bp, Homo sapiens
attgctttccaatag

SEQ ID NO: 55638 - DNA, 15 bp, Homo sapiens
aattgctttccaata

SEQ ID NO: 55639 - DNA, 15 bp, Homo sapiens
aaattgctttccaat

SEQ ID NO: 55640 - DNA, 15 bp, Homo sapiens
caaattgctttccaa

SEQ ID NO: 55641 - DNA, 15 bp, Homo sapiens
ccaaattgctttcca

SEQ ID NO: 55642 - DNA, 15 bp, Homo sapiens
tccaaattgctttcc

SEQ ID NO: 55643 - DNA, 15 bp, Homo sapiens
ttccaaattgctttc

SEQ ID NO: 55644 - DNA, 15 bp, Homo sapiens
attccaaattgcttt

SEQ ID NO: 55645 - DNA, 15 bp, Homo sapiens
cattccaaattgctt

SEQ ID NO: 55646 - DNA, 15 bp, Homo sapiens
tcattccaaattgct

SEQ ID NO: 55647 - DNA, 15 bp, Homo sapiens
ttcattccaaattgc

SEQ ID NO: 55648 - DNA, 15 bp, Homo sapiens
tttcattccaaattg

SEQ ID NO: 55649 - DNA, 15 bp, Homo sapiens
ttttcattccaaatt

SEQ ID NO: 55650 - DNA, 15 bp, Homo sapiens
attttcattccaaat

SEQ ID NO: 55651 - DNA, 15 bp, Homo sapiens
aattttcattccaaa

SEQ ID NO: 55652 - DNA, 15 bp, Homo sapiens
aaattttcattccaa

SEQ ID NO: 55653 - DNA, 15 bp, Homo sapiens
taaattttcattcca

SEQ ID NO: 55654 - DNA, 15 bp, Homo sapiens
ttaaattttcattcc

SEQ ID NO: 55655 - DNA, 15 bp, Homo sapiens
tttaaattttcattc

SEQ ID NO: 55656 - DNA, 15 bp, Homo sapiens
ctttaaattttcatt

SEQ ID NO: 55657 - DNA, 15 bp, Homo sapiens
tctttaaattttcat

SEQ ID NO: 55658 - DNA, 15 bp, Homo sapiens
ttctttaaattttca

SEQ ID NO: 55659 - DNA, 15 bp, Homo sapiens
gttctttaaattttc

SEQ ID NO: 55660 - DNA, 15 bp, Homo sapiens
ggttctttaaatttt

SEQ ID NO: 55661 - DNA, 15 bp, Homo sapiens
tggttctttaaattt

SEQ ID NO: 55662 - DNA, 15 bp, Homo sapiens
atggttctttaaatt

SEQ ID NO: 55663 - DNA, 15 bp, Homo sapiens
aatggttctttaaat

SEQ ID NO: 55664 - DNA, 15 bp, Homo sapiens
aaatggttctttaaa

SEQ ID NO: 55665 - DNA, 15 bp, Homo sapiens
aaaatggttctttaa

SEQ ID NO: 55666 - DNA, 15 bp, Homo sapiens
taaaatggttcttta

SEQ ID NO: 55667 - DNA, 15 bp, Homo sapiens
ttaaaatggttcttt

SEQ ID NO: 55668 - DNA, 15 bp, Homo sapiens
tttaaaatggttctt

SEQ ID NO: 55669 - DNA, 15 bp, Homo sapiens
ttttaaaatggttct

SEQ ID NO: 55670 - DNA, 15 bp, Homo sapiens
attttaaaatggttc

SEQ ID NO: 55671 - DNA, 15 bp, Homo sapiens
tattttaaaatggtt

SEQ ID NO: 55672 - DNA, 15 bp, Homo sapiens
atattttaaaatggt

SEQ ID NO: 55673 - DNA, 15 bp, Homo sapiens
catattttaaaatgg

SEQ ID NO: 55674 - DNA, 15 bp, Homo sapiens
gcatattttaaaatg

SEQ ID NO: 55675 - DNA, 15 bp, Homo sapiens
agcatattttaaaat

SEQ ID NO: 55676 - DNA, 15 bp, Homo sapiens
tagcatattttaaaa

SEQ ID NO: 55677 - DNA, 15 bp, Homo sapiens
atagcatattttaaa

SEQ ID NO: 55678 - DNA, 15 bp, Homo sapiens
gatagcatattttaa

SEQ ID NO: 55679 - DNA, 15 bp, Homo sapiens
ggatagcatatttta

SEQ ID NO: 55680 - DNA, 15 bp, Homo sapiens
aggatagcatatttt

SEQ ID NO: 55681 - DNA, 15 bp, Homo sapiens
caggatagcatattt

SEQ ID NO: 55682 - DNA, 15 bp, Homo sapiens
gcaggatagcatatt

SEQ ID NO: 55683 - DNA, 15 bp, Homo sapiens
cgcaggatagcatat

SEQ ID NO: 55684 - DNA, 15 bp, Homo sapiens
acgcaggatagcata

SEQ ID NO: 55685 - DNA, 15 bp, Homo sapiens
tacgcaggatagcat

SEQ ID NO: 55686 - DNA, 15 bp, Homo sapiens
gtacgcaggatagca

SEQ ID NO: 55687 - DNA, 15 bp, Homo sapiens
ggtacgcaggatagc

SEQ ID NO: 55688 - DNA, 15 bp, Homo sapiens
aggtacgcaggatag

SEQ ID NO: 55689 - DNA, 15 bp, Homo sapiens
gaggtacgcaggata

SEQ ID NO: 55690 - DNA, 15 bp, Homo sapiens
ggaggtacgcaggat

SEQ ID NO: 55691 - DNA, 15 bp, Homo sapiens
tggaggtacgcagga

SEQ ID NO: 55692 - DNA, 15 bp, Homo sapiens
atggaggtacgcagg

SEQ ID NO: 55693 - DNA, 15 bp, Homo sapiens
aatggaggtacgcag

SEQ ID NO: 55694 - DNA, 15 bp, Homo sapiens
gaatggaggtacgca

SEQ ID NO: 55695 - DNA, 15 bp, Homo sapiens
ggaatggaggtacgc

SEQ ID NO: 55696 - DNA, 15 bp, Homo sapiens
tggaatggaggtacg

SEQ ID NO: 55697 - DNA, 15 bp, Homo sapiens
gtggaatggaggtac

SEQ ID NO: 55698 - DNA, 15 bp, Homo sapiens
ggtggaatggaggta

SEQ ID NO: 55699 - DNA, 15 bp, Homo sapiens
gggtggaatggaggt

SEQ ID NO: 55700 - DNA, 15 bp, Homo sapiens
tgggtggaatggagg

SEQ ID NO: 55701 - DNA, 15 bp, Homo sapiens
gtgggtggaatggag

SEQ ID NO: 55702 - DNA, 15 bp, Homo sapiens
ggtgggtggaatgga

SEQ ID NO: 55703 - DNA, 15 bp, Homo sapiens
gggtgggtggaatgg

SEQ ID NO: 55704 - DNA, 15 bp, Homo sapiens
ggggtgggtggaatg

SEQ ID NO: 55705 - DNA, 15 bp, Homo sapiens
gggggtgggtggaat

SEQ ID NO: 55706 - DNA, 15 bp, Homo sapiens
tgggggtgggtggaa

SEQ ID NO: 55707 - DNA, 15 bp, Homo sapiens
ctgggggtgggtgga

SEQ ID NO: 55708 - DNA, 15 bp, Homo sapiens
cctgggggtgggtgg

SEQ ID NO: 55709 - DNA, 15 bp, Homo sapiens
ccctgggggtgggtg

SEQ ID NO: 55710 - DNA, 15 bp, Homo sapiens
tccctgggggtgggt

SEQ ID NO: 55711 - DNA, 15 bp, Homo sapiens
atccctgggggtggg

SEQ ID NO: 55712 - DNA, 15 bp, Homo sapiens
catccctgggggtgg

SEQ ID NO: 55713 - DNA, 15 bp, Homo sapiens
acatccctgggggtg

SEQ ID NO: 55714 - DNA, 15 bp, Homo sapiens
tacatccctgggggt

SEQ ID NO: 55715 - DNA, 15 bp, Homo sapiens
ctacatccctggggg

SEQ ID NO: 55716 - DNA, 15 bp, Homo sapiens
gctacatccctgggg

SEQ ID NO: 55717 - DNA, 15 bp, Homo sapiens
ggctacatccctggg

SEQ ID NO: 55718 - DNA, 15 bp, Homo sapiens
aggctacatccctgg

SEQ ID NO: 55719 - DNA, 15 bp, Homo sapiens
taggctacatccctg

SEQ ID NO: 55720 - DNA, 15 bp, Homo sapiens
gtaggctacatccct

SEQ ID NO: 55721 - DNA, 15 bp, Homo sapiens
agtaggctacatccc

SEQ ID NO: 55722 - DNA, 15 bp, Homo sapiens
cagtaggctacatcc

SEQ ID NO: 55723 - DNA, 15 bp, Homo sapiens
tcagtaggctacatc

SEQ ID NO: 55724 - DNA, 15 bp, Homo sapiens
ttcagtaggctacat

SEQ ID NO: 55725 - DNA, 15 bp, Homo sapiens
tttcagtaggctaca

SEQ ID NO: 55726 - DNA, 15 bp, Homo sapiens
atttcagtaggctac

SEQ ID NO: 55727 - DNA, 15 bp, Homo sapiens
tatttcagtaggcta

SEQ ID NO: 55728 - DNA, 15 bp, Homo sapiens
ttatttcagtaggct

SEQ ID NO: 55729 - DNA, 15 bp, Homo sapiens
attatttcagtaggc

SEQ ID NO: 55730 - DNA, 15 bp, Homo sapiens
aattatttcagtagg

SEQ ID NO: 55731 - DNA, 15 bp, Homo sapiens
aaattatttcagtag

SEQ ID NO: 55732 - DNA, 15 bp, Homo sapiens
aaaattatttcagta

SEQ ID NO: 55733 - DNA, 15 bp, Homo sapiens
taaaattatttcagt

SEQ ID NO: 55734 - DNA, 15 bp, Homo sapiens
ttaaaattatttcag

SEQ ID NO: 55735 - DNA, 15 bp, Homo sapiens
tttaaaattatttca

SEQ ID NO: 55736 - DNA, 15 bp, Homo sapiens
ctttaaaattatttc

SEQ ID NO: 55737 - DNA, 15 bp, Homo sapiens
tctttaaaattattt

SEQ ID NO: 55738 - DNA, 15 bp, Homo sapiens
ttctttaaaattatt

SEQ ID NO: 55739 - DNA, 15 bp, Homo sapiens
cttctttaaaattat

SEQ ID NO: 55740 - DNA, 15 bp, Homo sapiens
acttctttaaaatta

SEQ ID NO: 55741 - DNA, 15 bp, Homo sapiens
gacttctttaaaatt

SEQ ID NO: 55742 - DNA, 15 bp, Homo sapiens
tgacttctttaaaat

SEQ ID NO: 55743 - DNA, 15 bp, Homo sapiens
gtgacttctttaaaa

SEQ ID NO: 55744 - DNA, 15 bp, Homo sapiens
ggtgacttctttaaa

SEQ ID NO: 55745 - DNA, 15 bp, Homo sapiens
tggtgacttctttaa

SEQ ID NO: 55746 - DNA, 15 bp, Homo sapiens
atggtgacttcttta

SEQ ID NO: 55747 - DNA, 15 bp, Homo sapiens
tatggtgacttcttt

SEQ ID NO: 55748 - DNA, 15 bp, Homo sapiens
atatggtgacttctt

SEQ ID NO: 55749 - DNA, 15 bp, Homo sapiens
catatggtgacttct

SEQ ID NO: 55750 - DNA, 15 bp, Homo sapiens
tcatatggtgacttc

SEQ ID NO: 55751 - DNA, 15 bp, Homo sapiens
ctcatatggtgactt

SEQ ID NO: 55752 - DNA, 15 bp, Homo sapiens
tctcatatggtgact

SEQ ID NO: 55753 - DNA, 15 bp, Homo sapiens
ctctcatatggtgac

SEQ ID NO: 55754 - DNA, 15 bp, Homo sapiens
tctctcatatggtga

SEQ ID NO: 55755 - DNA, 15 bp, Homo sapiens
ttctctcatatggtg

SEQ ID NO: 55756 - DNA, 15 bp, Homo sapiens
tttctctcatatggt

SEQ ID NO: 55757 - DNA, 15 bp, Homo sapiens
ttttctctcatatgg

SEQ ID NO: 55758 - DNA, 15 bp, Homo sapiens
attttctctcatatg

SEQ ID NO: 55759 - DNA, 15 bp, Homo sapiens
cattttctctcatat

SEQ ID NO: 55760 - DNA, 15 bp, Homo sapiens
acattttctctcata

SEQ ID NO: 55761 - DNA, 15 bp, Homo sapiens
aacattttctctcat

SEQ ID NO: 55762 - DNA, 15 bp, Homo sapiens
taacattttctctca

SEQ ID NO: 55763 - DNA, 15 bp, Homo sapiens
ataacattttctctc

SEQ ID NO: 55764 - DNA, 15 bp, Homo sapiens
aataacattttctct

SEQ ID NO: 55765 - DNA, 15 bp, Homo sapiens
caataacattttctc

SEQ ID NO: 55766 - DNA, 15 bp, Homo sapiens
gcaataacattttct

SEQ ID NO: 55767 - DNA, 15 bp, Homo sapiens
agcaataacattttc

SEQ ID NO: 55768 - DNA, 15 bp, Homo sapiens
tagcaataacatttt

SEQ ID NO: 55769 - DNA, 15 bp, Homo sapiens
atagcaataacattt

SEQ ID NO: 55770 - DNA, 15 bp, Homo sapiens
tatagcaataacatt

SEQ ID NO: 55771 - DNA, 15 bp, Homo sapiens
atatagcaataacat

SEQ ID NO: 55772 - DNA, 15 bp, Homo sapiens
aatatagcaataaca

SEQ ID NO: 55773 - DNA, 15 bp, Homo sapiens
caatatagcaataac

SEQ ID NO: 55774 - DNA, 15 bp, Homo sapiens
acaatatagcaataa

SEQ ID NO: 55775 - DNA, 15 bp, Homo sapiens
aacaatatagcaata

SEQ ID NO: 55776 - DNA, 15 bp, Homo sapiens
taacaatatagcaat

SEQ ID NO: 55777 - DNA, 15 bp, Homo sapiens
ataacaatatagcaa

SEQ ID NO: 55778 - DNA, 15 bp, Homo sapiens
aataacaatatagca

SEQ ID NO: 55779 - DNA, 15 bp, Homo sapiens
caataacaatatagc

SEQ ID NO: 55780 - DNA, 15 bp, Homo sapiens
acaataacaatatag

SEQ ID NO: 55781 - DNA, 15 bp, Homo sapiens
cacaataacaatata

SEQ ID NO: 55782 - DNA, 15 bp, Homo sapiens
tcacaataacaatat

SEQ ID NO: 55783 - DNA, 15 bp, Homo sapiens
ctcacaataacaata

SEQ ID NO: 55784 - DNA, 15 bp, Homo sapiens
tctcacaataacaat

SEQ ID NO: 55785 - DNA, 15 bp, Homo sapiens
ttctcacaataacaa

SEQ ID NO: 55786 - DNA, 15 bp, Homo sapiens
tttctcacaataaca

SEQ ID NO: 55787 - DNA, 15 bp, Homo sapiens
atttctcacaataac

SEQ ID NO: 55788 - DNA, 15 bp, Homo sapiens
aatttctcacaataa

SEQ ID NO: 55789 - DNA, 15 bp, Homo sapiens
caatttctcacaata

SEQ ID NO: 55790 - DNA, 15 bp, Homo sapiens
ccaatttctcacaat

SEQ ID NO: 55791 - DNA, 15 bp, Homo sapiens
tccaatttctcacaa

SEQ ID NO: 55792 - DNA, 15 bp, Homo sapiens
ttccaatttctcaca

SEQ ID NO: 55793 - DNA, 15 bp, Homo sapiens
tttccaatttctcac

SEQ ID NO: 55794 - DNA, 15 bp, Homo sapiens
atttccaatttctca

SEQ ID NO: 55795 - DNA, 15 bp, Homo sapiens
tatttccaatttctc

SEQ ID NO: 55796 - DNA, 15 bp, Homo sapiens
ctatttccaatttct

SEQ ID NO: 55797 - DNA, 15 bp, Homo sapiens
tctatttccaatttc

SEQ ID NO: 55798 - DNA, 15 bp, Homo sapiens
gtctatttccaattt

SEQ ID NO: 55799 - DNA, 15 bp, Homo sapiens
agtctatttccaatt

SEQ ID NO: 55800 - DNA, 15 bp, Homo sapiens
tagtctatttccaat

SEQ ID NO: 55801 - DNA, 15 bp, Homo sapiens
ttagtctatttccaa

SEQ ID NO: 55802 - DNA, 15 bp, Homo sapiens
tttagtctatttcca

SEQ ID NO: 55803 - DNA, 15 bp, Homo sapiens
atttagtctatttcc

SEQ ID NO: 55804 - DNA, 15 bp, Homo sapiens
catttagtctatttc

SEQ ID NO: 55805 - DNA, 15 bp, Homo sapiens
acatttagtctattt

SEQ ID NO: 55806 - DNA, 15 bp, Homo sapiens
aacatttagtctatt

SEQ ID NO: 55807 - DNA, 15 bp, Homo sapiens
gaacatttagtctat

SEQ ID NO: 55808 - DNA, 15 bp, Homo sapiens
tgaacatttagtcta

SEQ ID NO: 55809 - DNA, 15 bp, Homo sapiens
ctgaacatttagtct

SEQ ID NO: 55810 - DNA, 15 bp, Homo sapiens
gctgaacatttagtc

SEQ ID NO: 55811 - DNA, 15 bp, Homo sapiens
tgctgaacatttagt

SEQ ID NO: 55812 - DNA, 15 bp, Homo sapiens
gtgctgaacatttag

SEQ ID NO: 55813 - DNA, 15 bp, Homo sapiens
agtgctgaacattta

SEQ ID NO: 55814 - DNA, 15 bp, Homo sapiens
tagtgctgaacattt

SEQ ID NO: 55815 - DNA, 15 bp, Homo sapiens
atagtgctgaacatt

SEQ ID NO: 55816 - DNA, 15 bp, Homo sapiens
tatagtgctgaacat

SEQ ID NO: 55817 - DNA, 15 bp, Homo sapiens
ctatagtgctgaaca

SEQ ID NO: 55818 - DNA, 15 bp, Homo sapiens
cctatagtgctgaac

SEQ ID NO: 55819 - DNA, 15 bp, Homo sapiens
tcctatagtgctgaa

SEQ ID NO: 55820 - DNA, 15 bp, Homo sapiens
ttcctatagtgctga

SEQ ID NO: 55821 - DNA, 15 bp, Homo sapiens
attcctatagtgctg

SEQ ID NO: 55822 - DNA, 15 bp, Homo sapiens
tattcctatagtgct

SEQ ID NO: 55823 - DNA, 15 bp, Homo sapiens
ttattcctatagtgc

SEQ ID NO: 55824 - DNA, 15 bp, Homo sapiens
attattcctatagtg

SEQ ID NO: 55825 - DNA, 15 bp, Homo sapiens
aattattcctatagt

SEQ ID NO: 55826 - DNA, 15 bp, Homo sapiens
taattattcctatag

SEQ ID NO: 55827 - DNA, 15 bp, Homo sapiens
ttaattattcctata

SEQ ID NO: 55828 - DNA, 15 bp, Homo sapiens
attaattattcctat

SEQ ID NO: 55829 - DNA, 15 bp, Homo sapiens
cattaattattccta

SEQ ID NO: 55830 - DNA, 15 bp, Homo sapiens
tcattaattattcct

SEQ ID NO: 55831 - DNA, 15 bp, Homo sapiens
ttcattaattattcc

SEQ ID NO: 55832 - DNA, 15 bp, Homo sapiens
tttcattaattattc

SEQ ID NO: 55833 - DNA, 15 bp, Homo sapiens
atttcattaattatt

SEQ ID NO: 55834 - DNA, 15 bp, Homo sapiens
aatttcattaattat

SEQ ID NO: 55835 - DNA, 15 bp, Homo sapiens
taatttcattaatta

SEQ ID NO: 55836 - DNA, 15 bp, Homo sapiens
gtaatttcattaatt

SEQ ID NO: 55837 - DNA, 15 bp, Homo sapiens
tgtaatttcattaat

SEQ ID NO: 55838 - DNA, 15 bp, Homo sapiens
atgtaatttcattaa

SEQ ID NO: 55839 - DNA, 15 bp, Homo sapiens
tatgtaatttcatta

SEQ ID NO: 55840 - DNA, 15 bp, Homo sapiens
atatgtaatttcatt

SEQ ID NO: 55841 - DNA, 15 bp, Homo sapiens
tatatgtaatttcat

SEQ ID NO: 55842 - DNA, 15 bp, Homo sapiens
gtatatgtaatttca

SEQ ID NO: 55843 - DNA, 15 bp, Homo sapiens
agtatatgtaatttc

SEQ ID NO: 55844 - DNA, 15 bp, Homo sapiens
gagtatatgtaattt

SEQ ID NO: 55845 - DNA, 15 bp, Homo sapiens
agagtatatgtaatt

SEQ ID NO: 55846 - DNA, 15 bp, Homo sapiens
tagagtatatgtaat

SEQ ID NO: 55847 - DNA, 15 bp, Homo sapiens
atagagtatatgtaa

SEQ ID NO: 55848 - DNA, 15 bp, Homo sapiens
tatagagtatatgta

SEQ ID NO: 55849 - DNA, 15 bp, Homo sapiens
gtatagagtatatgt

SEQ ID NO: 55850 - DNA, 15 bp, Homo sapiens
tgtatagagtatatg

SEQ ID NO: 55851 - DNA, 15 bp, Homo sapiens
ttgtatagagtatat

SEQ ID NO: 55852 - DNA, 15 bp, Homo sapiens
attgtatagagtata

SEQ ID NO: 55853 - DNA, 15 bp, Homo sapiens
gattgtatagagtat

SEQ ID NO: 55854 - DNA, 15 bp, Homo sapiens
tgattgtatagagta

SEQ ID NO: 55855 - DNA, 15 bp, Homo sapiens
atgattgtatagagt

SEQ ID NO: 55856 - DNA, 15 bp, Homo sapiens
aatgattgtatagag

SEQ ID NO: 55857 - DNA, 15 bp, Homo sapiens
taatgattgtataga

SEQ ID NO: 55858 - DNA, 15 bp, Homo sapiens
ataatgattgtatag

SEQ ID NO: 55859 - DNA, 15 bp, Homo sapiens
cataatgattgtata

SEQ ID NO: 55860 - DNA, 15 bp, Homo sapiens
gcataatgattgtat

SEQ ID NO: 55861 - DNA, 15 bp, Homo sapiens
agcataatgattgta

SEQ ID NO: 55862 - DNA, 15 bp, Homo sapiens
cagcataatgattgt

SEQ ID NO: 55863 - DNA, 15 bp, Homo sapiens
gcagcataatgattg

SEQ ID NO: 55864 - DNA, 15 bp, Homo sapiens
ggcagcataatgatt

SEQ ID NO: 55865 - DNA, 15 bp, Homo sapiens
tggcagcataatgat

SEQ ID NO: 55866 - DNA, 15 bp, Homo sapiens
atggcagcataatga

SEQ ID NO: 55867 - DNA, 15 bp, Homo sapiens
aatggcagcataatg

SEQ ID NO: 55868 - DNA, 15 bp, Homo sapiens
caatggcagcataat

SEQ ID NO: 55869 - DNA, 15 bp, Homo sapiens
tcaatggcagcataa

SEQ ID NO: 55870 - DNA, 15 bp, Homo sapiens
ttcaatggcagcata

SEQ ID NO: 55871 - DNA, 15 bp, Homo sapiens
tttcaatggcagcat

SEQ ID NO: 55872 - DNA, 15 bp, Homo sapiens
atttcaatggcagca

SEQ ID NO: 55873 - DNA, 15 bp, Homo sapiens
tatttcaatggcagc

SEQ ID NO: 55874 - DNA, 15 bp, Homo sapiens
ttatttcaatggcag

SEQ ID NO: 55875 - DNA, 15 bp, Homo sapiens
attatttcaatggca

SEQ ID NO: 55876 - DNA, 15 bp, Homo sapiens
tattatttcaatggc

SEQ ID NO: 55877 - DNA, 15 bp, Homo sapiens
ttattatttcaatgg

SEQ ID NO: 55878 - DNA, 15 bp, Homo sapiens
tttattatttcaatg

SEQ ID NO: 55879 - DNA, 15 bp, Homo sapiens
atttattatttcaat

SEQ ID NO: 55880 - DNA, 15 bp, Homo sapiens
tatttattatttcaa

SEQ ID NO: 55881 - DNA, 15 bp, Homo sapiens
gtatttattatttca

SEQ ID NO: 55882 - DNA, 15 bp, Homo sapiens
tgtatttattatttc

SEQ ID NO: 55883 - DNA, 15 bp, Homo sapiens
ttgtatttattattt

SEQ ID NO: 55884 - DNA, 15 bp, Homo sapiens
tttgtatttattatt

SEQ ID NO: 55885 - DNA, 15 bp, Homo sapiens
ctttgtatttattat

SEQ ID NO: 55886 - DNA, 15 bp, Homo sapiens
cctttgtatttatta

SEQ ID NO: 55887 - DNA, 15 bp, Homo sapiens
gcctttgtatttatt

SEQ ID NO: 55888 - DNA, 15 bp, Homo sapiens
cgcctttgtatttat

SEQ ID NO: 55889 - DNA, 15 bp, Homo sapiens
gcgcctttgtattta

SEQ ID NO: 55890 - DNA, 15 bp, Homo sapiens
tgcgcctttgtattt

SEQ ID NO: 55891 - DNA, 15 bp, Homo sapiens
ttgcgcctttgtatt

SEQ ID NO: 55892 - DNA, 15 bp, Homo sapiens
cttgcgcctttgtat

SEQ ID NO: 55893 - DNA, 15 bp, Homo sapiens
ccttgcgcctttgta

SEQ ID NO: 55894 - DNA, 15 bp, Homo sapiens
cccttgcgcctttgt

SEQ ID NO: 55895 - DNA, 15 bp, Homo sapiens
ccccttgcgcctttg

SEQ ID NO: 55896 - DNA, 15 bp, Homo sapiens
cccccttgcgccttt

SEQ ID NO: 55897 - DNA, 15 bp, Homo sapiens
ccccccttgcgcctt

SEQ ID NO: 55898 - DNA, 15 bp, Homo sapiens
tccccccttgcgcct

SEQ ID NO: 55899 - DNA, 15 bp, Homo sapiens
ttccccccttgcgcc

SEQ ID NO: 55900 - DNA, 15 bp, Homo sapiens
tttccccccttgcgc

SEQ ID NO: 55901 - DNA, 15 bp, Homo sapiens
ttttccccccttgcg

SEQ ID NO: 55902 - DNA, 15 bp, Homo sapiens
cttttccccccttgc

SEQ ID NO: 55903 - DNA, 15 bp, Homo sapiens
gcttttccccccttg

SEQ ID NO: 55904 - DNA, 15 bp, Homo sapiens
agcttttcccccctt

SEQ ID NO: 55905 - DNA, 15 bp, Homo sapiens
aagcttttcccccct

SEQ ID NO: 55906 - DNA, 15 bp, Homo sapiens
taagcttttcccccc

SEQ ID NO: 55907 - DNA, 15 bp, Homo sapiens
ataagcttttccccc

SEQ ID NO: 55908 - DNA, 15 bp, Homo sapiens
tataagcttttcccc

SEQ ID NO: 55909 - DNA, 15 bp, Homo sapiens
ttataagcttttccc

SEQ ID NO: 55910 - DNA, 15 bp, Homo sapiens
attataagcttttcc

SEQ ID NO: 55911 - DNA, 15 bp, Homo sapiens
cattataagcttttc

SEQ ID NO: 55912 - DNA, 15 bp, Homo sapiens
acattataagctttt

SEQ ID NO: 55913 - DNA, 15 bp, Homo sapiens
aacattataagcttt

SEQ ID NO: 55914 - DNA, 15 bp, Homo sapiens
taacattataagctt

SEQ ID NO: 55915 - DNA, 15 bp, Homo sapiens
ctaacattataagct

SEQ ID NO: 55916 - DNA, 15 bp, Homo sapiens
actaacattataagc

SEQ ID NO: 55917 - DNA, 15 bp, Homo sapiens
cactaacattataag

SEQ ID NO: 55918 - DNA, 15 bp, Homo sapiens
tcactaacattataa

SEQ ID NO: 55919 - DNA, 15 bp, Homo sapiens
ttcactaacattata

SEQ ID NO: 55920 - DNA, 15 bp, Homo sapiens
tttcactaacattat

SEQ ID NO: 55921 - DNA, 15 bp, Homo sapiens
gtttcactaacatta

SEQ ID NO: 55922 - DNA, 15 bp, Homo sapiens
agtttcactaacatt

SEQ ID NO: 55923 - DNA, 15 bp, Homo sapiens
tagtttcactaacat

SEQ ID NO: 55924 - DNA, 15 bp, Homo sapiens
ttagtttcactaaca

SEQ ID NO: 55925 - DNA, 15 bp, Homo sapiens
cttagtttcactaac

SEQ ID NO: 55926 - DNA, 15 bp, Homo sapiens
tcttagtttcactaa

SEQ ID NO: 55927 - DNA, 15 bp, Homo sapiens
gtcttagtttcacta

SEQ ID NO: 55928 - DNA, 15 bp, Homo sapiens
agtcttagtttcact

SEQ ID NO: 55929 - DNA, 15 bp, Homo sapiens
cagtcttagtttcac

SEQ ID NO: 55930 - DNA, 15 bp, Homo sapiens
tcagtcttagtttca

SEQ ID NO: 55931 - DNA, 15 bp, Homo sapiens
atcagtcttagtttc

SEQ ID NO: 55932 - DNA, 15 bp, Homo sapiens
aatcagtcttagttt

SEQ ID NO: 55933 - DNA, 15 bp, Homo sapiens
aaatcagtcttagtt

SEQ ID NO: 55934 - DNA, 15 bp, Homo sapiens
aaaatcagtcttagt

SEQ ID NO: 55935 - DNA, 15 bp, Homo sapiens
aaaaatcagtcttag

SEQ ID NO: 55936 - DNA, 15 bp, Homo sapiens
aaaaaatcagtctta

SEQ ID NO: 55937 - DNA, 15 bp, Homo sapiens
aaaaaaatcagtctt

SEQ ID NO: 55938 - DNA, 15 bp, Homo sapiens
taaaaaaatcagtct

SEQ ID NO: 55939 - DNA, 15 bp, Homo sapiens
ataaaaaaatcagtc

SEQ ID NO: 55940 - DNA, 15 bp, Homo sapiens
tataaaaaaatcagt

SEQ ID NO: 55941 - DNA, 15 bp, Homo sapiens
ttataaaaaaatcag

SEQ ID NO: 55942 - DNA, 15 bp, Homo sapiens
tttataaaaaaatca

SEQ ID NO: 55943 - DNA, 15 bp, Homo sapiens
ctttataaaaaaatc

SEQ ID NO: 55944 - DNA, 15 bp, Homo sapiens
gctttataaaaaaat

SEQ ID NO: 55945 - DNA, 15 bp, Homo sapiens
tgctttataaaaaaa

SEQ ID NO: 55946 - DNA, 15 bp, Homo sapiens
ctgctttataaaaaa

SEQ ID NO: 55947 - DNA, 15 bp, Homo sapiens
gctgctttataaaaa

SEQ ID NO: 55948 - DNA, 15 bp, Homo sapiens
tgctgctttataaaa

SEQ ID NO: 55949 - DNA, 15 bp, Homo sapiens
ctgctgctttataaa

SEQ ID NO: 55950 - DNA, 15 bp, Homo sapiens
actgctgctttataa

SEQ ID NO: 55951 - DNA, 15 bp, Homo sapiens
aactgctgctttata

SEQ ID NO: 55952 - DNA, 15 bp, Homo sapiens
aaactgctgctttat

SEQ ID NO: 55953 - DNA, 15 bp, Homo sapiens
aaaactgctgcttta

SEQ ID NO: 55954 - DNA, 15 bp, Homo sapiens
gaaaactgctgcttt

SEQ ID NO: 55955 - DNA, 15 bp, Homo sapiens
tgaaaactgctgctt

SEQ ID NO: 55956 - DNA, 15 bp, Homo sapiens
ctgaaaactgctgct

SEQ ID NO: 55957 - DNA, 15 bp, Homo sapiens
tctgaaaactgctgc

SEQ ID NO: 55958 - DNA, 15 bp, Homo sapiens
gtctgaaaactgctg

SEQ ID NO: 55959 - DNA, 15 bp, Homo sapiens
ggtctgaaaactgct

SEQ ID NO: 55960 - DNA, 15 bp, Homo sapiens
gggtctgaaaactgc

SEQ ID NO: 55961 - DNA, 15 bp, Homo sapiens
agggtctgaaaactg

SEQ ID NO: 55962 - DNA, 15 bp, Homo sapiens
aagggtctgaaaact

SEQ ID NO: 55963 - DNA, 15 bp, Homo sapiens
caagggtctgaaaac

SEQ ID NO: 55964 - DNA, 15 bp, Homo sapiens
ccaagggtctgaaaa

SEQ ID NO: 55965 - DNA, 15 bp, Homo sapiens
tccaagggtctgaaa

SEQ ID NO: 55966 - DNA, 15 bp, Homo sapiens
ctccaagggtctgaa

SEQ ID NO: 55967 - DNA, 15 bp, Homo sapiens
tctccaagggtctga

SEQ ID NO: 55968 - DNA, 15 bp, Homo sapiens
gtctccaagggtctg

SEQ ID NO: 55969 - DNA, 15 bp, Homo sapiens
agtctccaagggtct

SEQ ID NO: 55970 - DNA, 15 bp, Homo sapiens
gagtctccaagggtc

SEQ ID NO: 55971 - DNA, 15 bp, Homo sapiens
ggagtctccaagggt

SEQ ID NO: 55972 - DNA, 15 bp, Homo sapiens
tggagtctccaaggg

SEQ ID NO: 55973 - DNA, 15 bp, Homo sapiens
ttggagtctccaagg

SEQ ID NO: 55974 - DNA, 15 bp, Homo sapiens
attggagtctccaag

SEQ ID NO: 55975 - DNA, 15 bp, Homo sapiens
aattggagtctccaa

SEQ ID NO: 55976 - DNA, 15 bp, Homo sapiens
gaattggagtctcca

SEQ ID NO: 55977 - DNA, 15 bp, Homo sapiens
cgaattggagtctcc

SEQ ID NO: 55978 - DNA, 15 bp, Homo sapiens
ccgaattggagtctc

SEQ ID NO: 55979 - DNA, 15 bp, Homo sapiens
accgaattggagtct

SEQ ID NO: 55980 - DNA, 15 bp, Homo sapiens
taccgaattggagtc

SEQ ID NO: 55981 - DNA, 15 bp, Homo sapiens
ctaccgaattggagt

SEQ ID NO: 55982 - DNA, 15 bp, Homo sapiens
tctaccgaattggag

SEQ ID NO: 55983 - DNA, 15 bp, Homo sapiens
ttctaccgaattgga

SEQ ID NO: 55984 - DNA, 15 bp, Homo sapiens
gttctaccgaattgg

SEQ ID NO: 55985 - DNA, 15 bp, Homo sapiens
ggttctaccgaattg

SEQ ID NO: 55986 - DNA, 15 bp, Homo sapiens
tggttctaccgaatt

SEQ ID NO: 55987 - DNA, 15 bp, Homo sapiens
ctggttctaccgaat

SEQ ID NO: 55988 - DNA, 15 bp, Homo sapiens
tctggttctaccgaa

SEQ ID NO: 55989 - DNA, 15 bp, Homo sapiens
ctctggttctaccga

SEQ ID NO: 55990 - DNA, 15 bp, Homo sapiens
gctctggttctaccg

SEQ ID NO: 55991 - DNA, 15 bp, Homo sapiens
agctctggttctacc

SEQ ID NO: 55992 - DNA, 15 bp, Homo sapiens
aagctctggttctac

SEQ ID NO: 55993 - DNA, 15 bp, Homo sapiens
gaagctctggttcta

SEQ ID NO: 55994 - DNA, 15 bp, Homo sapiens
tgaagctctggttct

SEQ ID NO: 55995 - DNA, 15 bp, Homo sapiens
atgaagctctggttc

SEQ ID NO: 55996 - DNA, 15 bp, Homo sapiens
gatgaagctctggtt

SEQ ID NO: 55997 - DNA, 15 bp, Homo sapiens
agatgaagctctggt

SEQ ID NO: 55998 - DNA, 15 bp, Homo sapiens
aagatgaagctctgg

SEQ ID NO: 55999 - DNA, 15 bp, Homo sapiens
gaagatgaagctctg

SEQ ID NO: 56000 - DNA, 15 bp, Homo sapiens
agaagatgaagctct

SEQ ID NO: 56001 - DNA, 15 bp, Homo sapiens
gagaagatgaagctc

SEQ ID NO: 56002 - DNA, 15 bp, Homo sapiens
agagaagatgaagct

SEQ ID NO: 56003 - DNA, 15 bp, Homo sapiens
cagagaagatgaagc

SEQ ID NO: 56004 - DNA, 15 bp, Homo sapiens
acagagaagatgaag

SEQ ID NO: 56005 - DNA, 15 bp, Homo sapiens
gacagagaagatgaa

SEQ ID NO: 56006 - DNA, 15 bp, Homo sapiens
cgacagagaagatga

SEQ ID NO: 56007 - DNA, 15 bp, Homo sapiens
tcgacagagaagatg

SEQ ID NO: 56008 - DNA, 15 bp, Homo sapiens
ttcgacagagaagat

SEQ ID NO: 56009 - DNA, 15 bp, Homo sapiens
cttcgacagagaaga

SEQ ID NO: 56010 - DNA, 15 bp, Homo sapiens
gcttcgacagagaag

SEQ ID NO: 56011 - DNA, 15 bp, Homo sapiens
agcttcgacagagaa

SEQ ID NO: 56012 - DNA, 15 bp, Homo sapiens
cagcttcgacagaga

SEQ ID NO: 56013 - DNA, 15 bp, Homo sapiens
acagcttcgacagag

SEQ ID NO: 56014 - DNA, 15 bp, Homo sapiens
cacagcttcgacaga

SEQ ID NO: 56015 - DNA, 15 bp, Homo sapiens
tcacagcttcgacag

SEQ ID NO: 56016 - DNA, 15 bp, Homo sapiens
gtcacagcttcgaca

SEQ ID NO: 56017 - DNA, 15 bp, Homo sapiens
tgtcacagcttcgac

SEQ ID NO: 56018 - DNA, 15 bp, Homo sapiens
ctgtcacagcttcga

SEQ ID NO: 56019 - DNA, 15 bp, Homo sapiens
cctgtcacagcttcg

SEQ ID NO: 56020 - DNA, 15 bp, Homo sapiens
tcctgtcacagcttc

SEQ ID NO: 56021 - DNA, 15 bp, Homo sapiens
ctcctgtcacagctt

SEQ ID NO: 56022 - DNA, 15 bp, Homo sapiens
actcctgtcacagct

SEQ ID NO: 56023 - DNA, 15 bp, Homo sapiens
aactcctgtcacagc

SEQ ID NO: 56024 - DNA, 15 bp, Homo sapiens
caactcctgtcacag

SEQ ID NO: 56025 - DNA, 15 bp, Homo sapiens
gcaactcctgtcaca

SEQ ID NO: 56026 - DNA, 15 bp, Homo sapiens
tgcaactcctgtcac

SEQ ID NO: 56027 - DNA, 15 bp, Homo sapiens
ttgcaactcctgtca

SEQ ID NO: 56028 - DNA, 15 bp, Homo sapiens
tttgcaactcctgtc

SEQ ID NO: 56029 - DNA, 15 bp, Homo sapiens
atttgcaactcctgt

SEQ ID NO: 56030 - DNA, 15 bp, Homo sapiens
catttgcaactcctg

SEQ ID NO: 56031 - DNA, 15 bp, Homo sapiens
gcatttgcaactcct

SEQ ID NO: 56032 - DNA, 15 bp, Homo sapiens
ggcatttgcaactcc

SEQ ID NO: 56033 - DNA, 15 bp, Homo sapiens
aggcatttgcaactc

SEQ ID NO: 56034 - DNA, 15 bp, Homo sapiens
gaggcatttgcaact

SEQ ID NO: 56035 - DNA, 15 bp, Homo sapiens
agaggcatttgcaac

SEQ ID NO: 56036 - DNA, 15 bp, Homo sapiens
gagaggcatttgcaa

SEQ ID NO: 56037 - DNA, 15 bp, Homo sapiens
ggagaggcatttgca

SEQ ID NO: 56038 - DNA, 15 bp, Homo sapiens
aggagaggcatttgc

SEQ ID NO: 56039 - DNA, 15 bp, Homo sapiens
aaggagaggcatttg

SEQ ID NO: 56040 - DNA, 15 bp, Homo sapiens
aaaggagaggcattt

SEQ ID NO: 56041 - DNA, 15 bp, Homo sapiens
aaaaggagaggcatt

SEQ ID NO: 56042 - DNA, 15 bp, Homo sapiens
aaaaaggagaggcat

SEQ ID NO: 56043 - DNA, 15 bp, Homo sapiens
caaaaaggagaggca

SEQ ID NO: 56044 - DNA, 15 bp, Homo sapiens
gcaaaaaggagaggc

SEQ ID NO: 56045 - DNA, 15 bp, Homo sapiens
agcaaaaaggagagg

SEQ ID NO: 56046 - DNA, 15 bp, Homo sapiens
cagcaaaaaggagag

SEQ ID NO: 56047 - DNA, 15 bp, Homo sapiens
tcagcaaaaaggaga

SEQ ID NO: 56048 - DNA, 15 bp, Homo sapiens
ctcagcaaaaaggag

SEQ ID NO: 56049 - DNA, 15 bp, Homo sapiens
actcagcaaaaagga

SEQ ID NO: 56050 - DNA, 15 bp, Homo sapiens
aactcagcaaaaagg

SEQ ID NO: 56051 - DNA, 15 bp, Homo sapiens
aaactcagcaaaaag

SEQ ID NO: 56052 - DNA, 15 bp, Homo sapiens
caaactcagcaaaaa

SEQ ID NO: 56053 - DNA, 15 bp, Homo sapiens
gcaaactcagcaaaa

SEQ ID NO: 56054 - DNA, 15 bp, Homo sapiens
tgcaaactcagcaaa

SEQ ID NO: 56055 - DNA, 15 bp, Homo sapiens
ctgcaaactcagcaa

SEQ ID NO: 56056 - DNA, 15 bp, Homo sapiens
gctgcaaactcagca

SEQ ID NO: 56057 - DNA, 15 bp, Homo sapiens
agctgcaaactcagc

SEQ ID NO: 56058 - DNA, 15 bp, Homo sapiens
cagctgcaaactcag

SEQ ID NO: 56059 - DNA, 15 bp, Homo sapiens
gcagctgcaaactca

SEQ ID NO: 56060 - DNA, 15 bp, Homo sapiens
agcagctgcaaactc

SEQ ID NO: 56061 - DNA, 15 bp, Homo sapiens
cagcagctgcaaact

SEQ ID NO: 56062 - DNA, 15 bp, Homo sapiens
acagcagctgcaaac

SEQ ID NO: 56063 - DNA, 15 bp, Homo sapiens
aacagcagctgcaaa

SEQ ID NO: 56064 - DNA, 15 bp, Homo sapiens
aaacagcagctgcaa

SEQ ID NO: 56065 - DNA, 15 bp, Homo sapiens
aaaacagcagctgca

SEQ ID NO: 56066 - DNA, 15 bp, Homo sapiens
aaaaacagcagctgc

SEQ ID NO: 56067 - DNA, 15 bp, Homo sapiens
gaaaaacagcagctg

SEQ ID NO: 56068 - DNA, 15 bp, Homo sapiens
ggaaaaacagcagct

SEQ ID NO: 56069 - DNA, 15 bp, Homo sapiens
cggaaaaacagcagc

SEQ ID NO: 56070 - DNA, 15 bp, Homo sapiens
ccggaaaaacagcag

SEQ ID NO: 56071 - DNA, 15 bp, Homo sapiens
gccggaaaaacagca

SEQ ID NO: 56072 - DNA, 15 bp, Homo sapiens
tgccggaaaaacagc

SEQ ID NO: 56073 - DNA, 15 bp, Homo sapiens
ctgccggaaaaacag

SEQ ID NO: 56074 - DNA, 15 bp, Homo sapiens
gctgccggaaaaaca

SEQ ID NO: 56075 - DNA, 15 bp, Homo sapiens
tgctgccggaaaaac

SEQ ID NO: 56076 - DNA, 15 bp, Homo sapiens
gtgctgccggaaaaa

SEQ ID NO: 56077 - DNA, 15 bp, Homo sapiens
tgtgctgccggaaaa

SEQ ID NO: 56078 - DNA, 15 bp, Homo sapiens
atgtgctgccggaaa

SEQ ID NO: 56079 - DNA, 15 bp, Homo sapiens
gatgtgctgccggaa

SEQ ID NO: 56080 - DNA, 15 bp, Homo sapiens
agatgtgctgccgga

SEQ ID NO: 56081 - DNA, 15 bp, Homo sapiens
cagatgtgctgccgg

SEQ ID NO: 56082 - DNA, 15 bp, Homo sapiens
acagatgtgctgccg

SEQ ID NO: 56083 - DNA, 15 bp, Homo sapiens
cacagatgtgctgcc

SEQ ID NO: 56084 - DNA, 15 bp, Homo sapiens
gcacagatgtgctgc

SEQ ID NO: 56085 - DNA, 15 bp, Homo sapiens
tgcacagatgtgctg

SEQ ID NO: 56086 - DNA, 15 bp, Homo sapiens
ctgcacagatgtgct

SEQ ID NO: 56087 - DNA, 15 bp, Homo sapiens
cctgcacagatgtgc

SEQ ID NO: 56088 - DNA, 15 bp, Homo sapiens
gcctgcacagatgtg

SEQ ID NO: 56089 - DNA, 15 bp, Homo sapiens
ggcctgcacagatgt

SEQ ID NO: 56090 - DNA, 15 bp, Homo sapiens
aggcctgcacagatg

SEQ ID NO: 56091 - DNA, 15 bp, Homo sapiens
gaggcctgcacagat

SEQ ID NO: 56092 - DNA, 15 bp, Homo sapiens
agaggcctgcacaga

SEQ ID NO: 56093 - DNA, 15 bp, Homo sapiens
cagaggcctgcacag

SEQ ID NO: 56094 - DNA, 15 bp, Homo sapiens
gcagaggcctgcaca

SEQ ID NO: 56095 - DNA, 15 bp, Homo sapiens
ggcagaggcctgcac

SEQ ID NO: 56096 - DNA, 15 bp, Homo sapiens
aggcagaggcctgca

SEQ ID NO: 56097 - DNA, 15 bp, Homo sapiens
gaggcagaggcctgc

SEQ ID NO: 56098 - DNA, 15 bp, Homo sapiens
cgaggcagaggcctg

SEQ ID NO: 56099 - DNA, 15 bp, Homo sapiens
ccgaggcagaggcct

SEQ ID NO: 56100 - DNA, 15 bp, Homo sapiens
gccgaggcagaggcc

SEQ ID NO: 56101 - DNA, 15 bp, Homo sapiens
ggccgaggcagaggc

SEQ ID NO: 56102 - DNA, 15 bp, Homo sapiens
gggccgaggcagagg

SEQ ID NO: 56103 - DNA, 15 bp, Homo sapiens
ggggccgaggcagag

SEQ ID NO: 56104 - DNA, 15 bp, Homo sapiens
aggggccgaggcaga

SEQ ID NO: 56105 - DNA, 15 bp, Homo sapiens
gaggggccgaggcag

SEQ ID NO: 56106 - DNA, 15 bp, Homo sapiens
agaggggccgaggca

SEQ ID NO: 56107 - DNA, 15 bp, Homo sapiens
cagaggggccgaggc

SEQ ID NO: 56108 - DNA, 15 bp, Homo sapiens
ccagaggggccgagg

SEQ ID NO: 56109 - DNA, 15 bp, Homo sapiens
tccagaggggccgag

SEQ ID NO: 56110 - DNA, 15 bp, Homo sapiens
atccagaggggccga

SEQ ID NO: 56111 - DNA, 15 bp, Homo sapiens
gatccagaggggccg

SEQ ID NO: 56112 - DNA, 15 bp, Homo sapiens
agatccagaggggcc

SEQ ID NO: 56113 - DNA, 15 bp, Homo sapiens
cagatccagaggggc

SEQ ID NO: 56114 - DNA, 15 bp, Homo sapiens
gcagatccagagggg

SEQ ID NO: 56115 - DNA, 15 bp, Homo sapiens
agcagatccagaggg

SEQ ID NO: 56116 - DNA, 15 bp, Homo sapiens
cagcagatccagagg

SEQ ID NO: 56117 - DNA, 15 bp, Homo sapiens
tcagcagatccagag

SEQ ID NO: 56118 - DNA, 15 bp, Homo sapiens
atcagcagatccaga

SEQ ID NO: 56119 - DNA, 15 bp, Homo sapiens
aatcagcagatccag

SEQ ID NO: 56120 - DNA, 15 bp, Homo sapiens
caatcagcagatcca

SEQ ID NO: 56121 - DNA, 15 bp, Homo sapiens
tcaatcagcagatcc

SEQ ID NO: 56122 - DNA, 15 bp, Homo sapiens
ctcaatcagcagatc

SEQ ID NO: 56123 - DNA, 15 bp, Homo sapiens
gctcaatcagcagat

SEQ ID NO: 56124 - DNA, 15 bp, Homo sapiens
tgctcaatcagcaga

SEQ ID NO: 56125 - DNA, 15 bp, Homo sapiens
ctgctcaatcagcag

SEQ ID NO: 56126 - DNA, 15 bp, Homo sapiens
gctgctcaatcagca

SEQ ID NO: 56127 - DNA, 15 bp, Homo sapiens
cgctgctcaatcagc

SEQ ID NO: 56128 - DNA, 15 bp, Homo sapiens
ccgctgctcaatcag

SEQ ID NO: 56129 - DNA, 15 bp, Homo sapiens
tccgctgctcaatca

SEQ ID NO: 56130 - DNA, 15 bp, Homo sapiens
atccgctgctcaatc

SEQ ID NO: 56131 - DNA, 15 bp, Homo sapiens
aatccgctgctcaat

SEQ ID NO: 56132 - DNA, 15 bp, Homo sapiens
caatccgctgctcaa

SEQ ID NO: 56133 - DNA, 15 bp, Homo sapiens
tcaatccgctgctca

SEQ ID NO: 56134 - DNA, 15 bp, Homo sapiens
atcaatccgctgctc

SEQ ID NO: 56135 - DNA, 15 bp, Homo sapiens
gatcaatccgctgct

SEQ ID NO: 56136 - DNA, 15 bp, Homo sapiens
agatcaatccgctgc

SEQ ID NO: 56137 - DNA, 15 bp, Homo sapiens
cagatcaatccgctg

SEQ ID NO: 56138 - DNA, 15 bp, Homo sapiens
acagatcaatccgct

SEQ ID NO: 56139 - DNA, 15 bp, Homo sapiens
gacagatcaatccgc

SEQ ID NO: 56140 - DNA, 15 bp, Homo sapiens
ggacagatcaatccg

SEQ ID NO: 56141 - DNA, 15 bp, Homo sapiens
aggacagatcaatcc

SEQ ID NO: 56142 - DNA, 15 bp, Homo sapiens
aaggacagatcaatc

SEQ ID NO: 56143 - DNA, 15 bp, Homo sapiens
gaaggacagatcaat

SEQ ID NO: 56144 - DNA, 15 bp, Homo sapiens
agaaggacagatcaa

SEQ ID NO: 56145 - DNA, 15 bp, Homo sapiens
gagaaggacagatca

SEQ ID NO: 56146 - DNA, 15 bp, Homo sapiens
agagaaggacagatc

SEQ ID NO: 56147 - DNA, 15 bp, Homo sapiens
aagagaaggacagat

SEQ ID NO: 56148 - DNA, 15 bp, Homo sapiens
aaagagaaggacaga

SEQ ID NO: 56149 - DNA, 15 bp, Homo sapiens
gaaagagaaggacag

SEQ ID NO: 56150 - DNA, 15 bp, Homo sapiens
cgaaagagaaggaca

SEQ ID NO: 56151 - DNA, 15 bp, Homo sapiens
acgaaagagaaggac

SEQ ID NO: 56152 - DNA, 15 bp, Homo sapiens
cacgaaagagaagga

SEQ ID NO: 56153 - DNA, 15 bp, Homo sapiens
acacgaaagagaagg

SEQ ID NO: 56154 - DNA, 15 bp, Homo sapiens
aacacgaaagagaag

SEQ ID NO: 56155 - DNA, 15 bp, Homo sapiens
caacacgaaagagaa

SEQ ID NO: 56156 - DNA, 15 bp, Homo sapiens
tcaacacgaaagaga

SEQ ID NO: 56157 - DNA, 15 bp, Homo sapiens
gtcaacacgaaagag

SEQ ID NO: 56158 - DNA, 15 bp, Homo sapiens
ggtcaacacgaaaga

SEQ ID NO: 56159 - DNA, 15 bp, Homo sapiens
gggtcaacacgaaag

SEQ ID NO: 56160 - DNA, 15 bp, Homo sapiens
tgggtcaacacgaaa

SEQ ID NO: 56161 - DNA, 15 bp, Homo sapiens
atgggtcaacacgaa

SEQ ID NO: 56162 - DNA, 15 bp, Homo sapiens
catgggtcaacacga

SEQ ID NO: 56163 - DNA, 15 bp, Homo sapiens
acatgggtcaacacg

SEQ ID NO: 56164 - DNA, 15 bp, Homo sapiens
cacatgggtcaacac

SEQ ID NO: 56165 - DNA, 15 bp, Homo sapiens
tcacatgggtcaaca

SEQ ID NO: 56166 - DNA, 15 bp, Homo sapiens
ctcacatgggtcaac

SEQ ID NO: 56167 - DNA, 15 bp, Homo sapiens
cctcacatgggtcaa

SEQ ID NO: 56168 - DNA, 15 bp, Homo sapiens
tcctcacatgggtca

SEQ ID NO: 56169 - DNA, 15 bp, Homo sapiens
ttcctcacatgggtc

SEQ ID NO: 56170 - DNA, 15 bp, Homo sapiens
gttcctcacatgggt

SEQ ID NO: 56171 - DNA, 15 bp, Homo sapiens
ggttcctcacatggg

SEQ ID NO: 56172 - DNA, 15 bp, Homo sapiens
tggttcctcacatgg

SEQ ID NO: 56173 - DNA, 15 bp, Homo sapiens
ttggttcctcacatg

SEQ ID NO: 56174 - DNA, 15 bp, Homo sapiens
gttggttcctcacat

SEQ ID NO: 56175 - DNA, 15 bp, Homo sapiens
agttggttcctcaca

SEQ ID NO: 56176 - DNA, 15 bp, Homo sapiens
cagttggttcctcac

SEQ ID NO: 56177 - DNA, 15 bp, Homo sapiens
ccagttggttcctca

SEQ ID NO: 56178 - DNA, 15 bp, Homo sapiens
gccagttggttcctc

SEQ ID NO: 56179 - DNA, 15 bp, Homo sapiens
tgccagttggttcct

SEQ ID NO: 56180 - DNA, 15 bp, Homo sapiens
ttgccagttggttcc

SEQ ID NO: 56181 - DNA, 15 bp, Homo sapiens
cttgccagttggttc

SEQ ID NO: 56182 - DNA, 15 bp, Homo sapiens
ccttgccagttggtt

SEQ ID NO: 56183 - DNA, 15 bp, Homo sapiens
cccttgccagttggt

SEQ ID NO: 56184 - DNA, 15 bp, Homo sapiens
tcccttgccagttgg

SEQ ID NO: 56185 - DNA, 15 bp, Homo sapiens
ttcccttgccagttg

SEQ ID NO: 56186 - DNA, 15 bp, Homo sapiens
gttcccttgccagtt

SEQ ID NO: 56187 - DNA, 15 bp, Homo sapiens
tgttcccttgccagt

SEQ ID NO: 56188 - DNA, 15 bp, Homo sapiens
ttgttcccttgccag

SEQ ID NO: 56189 - DNA, 15 bp, Homo sapiens
cttgttcccttgcca

SEQ ID NO: 56190 - DNA, 15 bp, Homo sapiens
tcttgttcccttgcc

SEQ ID NO: 56191 - DNA, 15 bp, Homo sapiens
ttcttgttcccttgc

SEQ ID NO: 56192 - DNA, 15 bp, Homo sapiens
tttcttgttcccttg

SEQ ID NO: 56193 - DNA, 15 bp, Homo sapiens
atttcttgttccctt

SEQ ID NO: 56194 - DNA, 15 bp, Homo sapiens
catttcttgttccct

SEQ ID NO: 56195 - DNA, 15 bp, Homo sapiens
ccatttcttgttccc

SEQ ID NO: 56196 - DNA, 15 bp, Homo sapiens
tccatttcttgttcc

SEQ ID NO: 56197 - DNA, 15 bp, Homo sapiens
ttccatttcttgttc

SEQ ID NO: 56198 - DNA, 15 bp, Homo sapiens
tttccatttcttgtt

SEQ ID NO: 56199 - DNA, 15 bp, Homo sapiens
atttccatttcttgt

SEQ ID NO: 56200 - DNA, 15 bp, Homo sapiens
tatttccatttcttg

SEQ ID NO: 56201 - DNA, 15 bp, Homo sapiens
ctatttccatttctt

SEQ ID NO: 56202 - DNA, 15 bp, Homo sapiens
cctatttccatttct

SEQ ID NO: 56203 - DNA, 15 bp, Homo sapiens
gcctatttccatttc

SEQ ID NO: 56204 - DNA, 15 bp, Homo sapiens
ggcctatttccattt

SEQ ID NO: 56205 - DNA, 15 bp, Homo sapiens
aggcctatttccatt

SEQ ID NO: 56206 - DNA, 15 bp, Homo sapiens
gaggcctatttccat

SEQ ID NO: 56207 - DNA, 15 bp, Homo sapiens
ggaggcctatttcca

SEQ ID NO: 56208 - DNA, 15 bp, Homo sapiens
aggaggcctatttcc

SEQ ID NO: 56209 - DNA, 15 bp, Homo sapiens
aaggaggcctatttc

SEQ ID NO: 56210 - DNA, 15 bp, Homo sapiens
aaaggaggcctattt

SEQ ID NO: 56211 - DNA, 15 bp, Homo sapiens
caaaggaggcctatt

SEQ ID NO: 56212 - DNA, 15 bp, Homo sapiens
gcaaaggaggcctat

SEQ ID NO: 56213 - DNA, 15 bp, Homo sapiens
tgcaaaggaggccta

SEQ ID NO: 56214 - DNA, 15 bp, Homo sapiens
atgcaaaggaggcct

SEQ ID NO: 56215 - DNA, 15 bp, Homo sapiens
gatgcaaaggaggcc

SEQ ID NO: 56216 - DNA, 15 bp, Homo sapiens
tgatgcaaaggaggc

SEQ ID NO: 56217 - DNA, 15 bp, Homo sapiens
atgatgcaaaggagg

SEQ ID NO: 56218 - DNA, 15 bp, Homo sapiens
catgatgcaaaggag

SEQ ID NO: 56219 - DNA, 15 bp, Homo sapiens
tcatgatgcaaagga

SEQ ID NO: 56220 - DNA, 15 bp, Homo sapiens
gtcatgatgcaaagg

SEQ ID NO: 56221 - DNA, 15 bp, Homo sapiens
ggtcatgatgcaaag

SEQ ID NO: 56222 - DNA, 15 bp, Homo sapiens
aggtcatgatgcaaa

SEQ ID NO: 56223 - DNA, 15 bp, Homo sapiens
caggtcatgatgcaa

SEQ ID NO: 56224 - DNA, 15 bp, Homo sapiens
acaggtcatgatgca

SEQ ID NO: 56225 - DNA, 15 bp, Homo sapiens
tacaggtcatgatgc

SEQ ID NO: 56226 - DNA, 15 bp, Homo sapiens
gtacaggtcatgatg

SEQ ID NO: 56227 - DNA, 15 bp, Homo sapiens
tgtacaggtcatgat

SEQ ID NO: 56228 - DNA, 15 bp, Homo sapiens
atgtacaggtcatga

SEQ ID NO: 56229 - DNA, 15 bp, Homo sapiens
gatgtacaggtcatg

SEQ ID NO: 56230 - DNA, 15 bp, Homo sapiens
ggatgtacaggtcat

SEQ ID NO: 56231 - DNA, 15 bp, Homo sapiens
aggatgtacaggtca

SEQ ID NO: 56232 - DNA, 15 bp, Homo sapiens
caggatgtacaggtc

SEQ ID NO: 56233 - DNA, 15 bp, Homo sapiens
gcaggatgtacaggt

SEQ ID NO: 56234 - DNA, 15 bp, Homo sapiens
tgcaggatgtacagg

SEQ ID NO: 56235 - DNA, 15 bp, Homo sapiens
ttgcaggatgtacag

SEQ ID NO: 56236 - DNA, 15 bp, Homo sapiens
attgcaggatgtaca

SEQ ID NO: 56237 - DNA, 15 bp, Homo sapiens
aattgcaggatgtac

SEQ ID NO: 56238 - DNA, 15 bp, Homo sapiens
caattgcaggatgta

SEQ ID NO: 56239 - DNA, 15 bp, Homo sapiens
ccaattgcaggatgt

SEQ ID NO: 56240 - DNA, 15 bp, Homo sapiens
tccaattgcaggatg

SEQ ID NO: 56241 - DNA, 15 bp, Homo sapiens
ttccaattgcaggat

SEQ ID NO: 56242 - DNA, 15 bp, Homo sapiens
tttccaattgcagga

SEQ ID NO: 56243 - DNA, 15 bp, Homo sapiens
ttttccaattgcagg

SEQ ID NO: 56244 - DNA, 15 bp, Homo sapiens
cttttccaattgcag

SEQ ID NO: 56245 - DNA, 15 bp, Homo sapiens
tcttttccaattgca

SEQ ID NO: 56246 - DNA, 15 bp, Homo sapiens
atcttttccaattgc

SEQ ID NO: 56247 - DNA, 15 bp, Homo sapiens
aatcttttccaattg

SEQ ID NO: 56248 - DNA, 15 bp, Homo sapiens
caatcttttccaatt

SEQ ID NO: 56249 - DNA, 15 bp, Homo sapiens
acaatcttttccaat

SEQ ID NO: 56250 - DNA, 15 bp, Homo sapiens
tacaatcttttccaa

SEQ ID NO: 56251 - DNA, 15 bp, Homo sapiens
gtacaatcttttcca

SEQ ID NO: 56252 - DNA, 15 bp, Homo sapiens
agtacaatcttttcc

SEQ ID NO: 56253 - DNA, 15 bp, Homo sapiens
aagtacaatcttttc

SEQ ID NO: 56254 - DNA, 15 bp, Homo sapiens
aaagtacaatctttt

SEQ ID NO: 56255 - DNA, 15 bp, Homo sapiens
taaagtacaatcttt

SEQ ID NO: 56256 - DNA, 15 bp, Homo sapiens
ctaaagtacaatctt

SEQ ID NO: 56257 - DNA, 15 bp, Homo sapiens
actaaagtacaatct

SEQ ID NO: 56258 - DNA, 15 bp, Homo sapiens
aactaaagtacaatc

SEQ ID NO: 56259 - DNA, 15 bp, Homo sapiens
caactaaagtacaat

SEQ ID NO: 56260 - DNA, 15 bp, Homo sapiens
ccaactaaagtacaa

SEQ ID NO: 56261 - DNA, 15 bp, Homo sapiens
accaactaaagtaca

SEQ ID NO: 56262 - DNA, 15 bp, Homo sapiens
aaccaactaaagtac

SEQ ID NO: 56263 - DNA, 15 bp, Homo sapiens
aaaccaactaaagta

SEQ ID NO: 56264 - DNA, 15 bp, Homo sapiens
taaaccaactaaagt

SEQ ID NO: 56265 - DNA, 15 bp, Homo sapiens
ttaaaccaactaaag

SEQ ID NO: 56266 - DNA, 15 bp, Homo sapiens
gttaaaccaactaaa

SEQ ID NO: 56267 - DNA, 15 bp, Homo sapiens
ggttaaaccaactaa

SEQ ID NO: 56268 - DNA, 15 bp, Homo sapiens
tggttaaaccaacta

SEQ ID NO: 56269 - DNA, 15 bp, Homo sapiens
ctggttaaaccaact

SEQ ID NO: 56270 - DNA, 15 bp, Homo sapiens
gctggttaaaccaac

SEQ ID NO: 56271 - DNA, 15 bp, Homo sapiens
tgctggttaaaccaa

SEQ ID NO: 56272 - DNA, 15 bp, Homo sapiens
ctgctggttaaacca

SEQ ID NO: 56273 - DNA, 15 bp, Homo sapiens
gctgctggttaaacc

SEQ ID NO: 56274 - DNA, 15 bp, Homo sapiens
tgctgctggttaaac

SEQ ID NO: 56275 - DNA, 15 bp, Homo sapiens
atgctgctggttaaa

SEQ ID NO: 56276 - DNA, 15 bp, Homo sapiens
aatgctgctggttaa

SEQ ID NO: 56277 - DNA, 15 bp, Homo sapiens
taatgctgctggtta

SEQ ID NO: 56278 - DNA, 15 bp, Homo sapiens
ataatgctgctggtt

SEQ ID NO: 56279 - DNA, 15 bp, Homo sapiens
aataatgctgctggt

SEQ ID NO: 56280 - DNA, 15 bp, Homo sapiens
aaataatgctgctgg

SEQ ID NO: 56281 - DNA, 15 bp, Homo sapiens
aaaataatgctgctg

SEQ ID NO: 56282 - DNA, 15 bp, Homo sapiens
aaaaataatgctgct

SEQ ID NO: 56283 - DNA, 15 bp, Homo sapiens
gaaaaataatgctgc

SEQ ID NO: 56284 - DNA, 15 bp, Homo sapiens
agaaaaataatgctg

SEQ ID NO: 56285 - DNA, 15 bp, Homo sapiens
tagaaaaataatgct

SEQ ID NO: 56286 - DNA, 15 bp, Homo sapiens
ttagaaaaataatgc

SEQ ID NO: 56287 - DNA, 15 bp, Homo sapiens
tttagaaaaataatg

SEQ ID NO: 56288 - DNA, 15 bp, Homo sapiens
gtttagaaaaataat

SEQ ID NO: 56289 - DNA, 15 bp, Homo sapiens
agtttagaaaaataa

SEQ ID NO: 56290 - DNA, 15 bp, Homo sapiens
tagtttagaaaaata

SEQ ID NO: 56291 - DNA, 15 bp, Homo sapiens
ttagtttagaaaaat

SEQ ID NO: 56292 - DNA, 15 bp, Homo sapiens
cttagtttagaaaaa

SEQ ID NO: 56293 - DNA, 15 bp, Homo sapiens
gcttagtttagaaaa

SEQ ID NO: 56294 - DNA, 15 bp, Homo sapiens
tgcttagtttagaaa

SEQ ID NO: 56295 - DNA, 15 bp, Homo sapiens
ctgcttagtttagaa

SEQ ID NO: 56296 - DNA, 15 bp, Homo sapiens
actgcttagtttaga

SEQ ID NO: 56297 - DNA, 15 bp, Homo sapiens
tactgcttagtttag

SEQ ID NO: 56298 - DNA, 15 bp, Homo sapiens
ttactgcttagttta

SEQ ID NO: 56299 - DNA, 15 bp, Homo sapiens
cttactgcttagttt

SEQ ID NO: 56300 - DNA, 15 bp, Homo sapiens
tcttactgcttagtt

SEQ ID NO: 56301 - DNA, 15 bp, Homo sapiens
ttcttactgcttagt

SEQ ID NO: 56302 - DNA, 15 bp, Homo sapiens
cttcttactgcttag

SEQ ID NO: 56303 - DNA, 15 bp, Homo sapiens
ccttcttactgctta

SEQ ID NO: 56304 - DNA, 15 bp, Homo sapiens
tccttcttactgctt

SEQ ID NO: 56305 - DNA, 15 bp, Homo sapiens
ttccttcttactgct

SEQ ID NO: 56306 - DNA, 15 bp, Homo sapiens
attccttcttactgc

SEQ ID NO: 56307 - DNA, 15 bp, Homo sapiens
aattccttcttactg

SEQ ID NO: 56308 - DNA, 15 bp, Homo sapiens
taattccttcttact

SEQ ID NO: 56309 - DNA, 15 bp, Homo sapiens
ctaattccttcttac

SEQ ID NO: 56310 - DNA, 15 bp, Homo sapiens
cctaattccttctta

SEQ ID NO: 56311 - DNA, 15 bp, Homo sapiens
acctaattccttctt

SEQ ID NO: 56312 - DNA, 15 bp, Homo sapiens
aacctaattccttct

SEQ ID NO: 56313 - DNA, 15 bp, Homo sapiens
aaacctaattccttc

SEQ ID NO: 56314 - DNA, 15 bp, Homo sapiens
aaaacctaattcctt

SEQ ID NO: 56315 - DNA, 15 bp, Homo sapiens
taaaacctaattcct

SEQ ID NO: 56316 - DNA, 15 bp, Homo sapiens
ataaaacctaattcc

SEQ ID NO: 56317 - DNA, 15 bp, Homo sapiens
cataaaacctaattc

SEQ ID NO: 56318 - DNA, 15 bp, Homo sapiens
acataaaacctaatt

SEQ ID NO: 56319 - DNA, 15 bp, Homo sapiens
cacataaaacctaat

SEQ ID NO: 56320 - DNA, 15 bp, Homo sapiens
ccacataaaacctaa

SEQ ID NO: 56321 - DNA, 15 bp, Homo sapiens
cccacataaaaccta

SEQ ID NO: 56322 - DNA, 15 bp, Homo sapiens
tcccacataaaacct

SEQ ID NO: 56323 - DNA, 15 bp, Homo sapiens
atcccacataaaacc

SEQ ID NO: 56324 - DNA, 15 bp, Homo sapiens
gatcccacataaaac

SEQ ID NO: 56325 - DNA, 15 bp, Homo sapiens
tgatcccacataaaa

SEQ ID NO: 56326 - DNA, 15 bp, Homo sapiens
ttgatcccacataaa

SEQ ID NO: 56327 - DNA, 15 bp, Homo sapiens
gttgatcccacataa

SEQ ID NO: 56328 - DNA, 15 bp, Homo sapiens
tgttgatcccacata

SEQ ID NO: 56329 - DNA, 15 bp, Homo sapiens
ctgttgatcccacat

SEQ ID NO: 56330 - DNA, 15 bp, Homo sapiens
tctgttgatcccaca

SEQ ID NO: 56331 - DNA, 15 bp, Homo sapiens
gtctgttgatcccac

SEQ ID NO: 56332 - DNA, 15 bp, Homo sapiens
agtctgttgatccca

SEQ ID NO: 56333 - DNA, 15 bp, Homo sapiens
cagtctgttgatccc

SEQ ID NO: 56334 - DNA, 15 bp, Homo sapiens
ccagtctgttgatcc

SEQ ID NO: 56335 - DNA, 15 bp, Homo sapiens
cccagtctgttgatc

SEQ ID NO: 56336 - DNA, 15 bp, Homo sapiens
acccagtctgttgat

SEQ ID NO: 56337 - DNA, 15 bp, Homo sapiens
gacccagtctgttga

SEQ ID NO: 56338 - DNA, 15 bp, Homo sapiens
agacccagtctgttg

SEQ ID NO: 56339 - DNA, 15 bp, Homo sapiens
gagacccagtctgtt

SEQ ID NO: 56340 - DNA, 15 bp, Homo sapiens
tgagacccagtctgt

SEQ ID NO: 56341 - DNA, 15 bp, Homo sapiens
ttgagacccagtctg

SEQ ID NO: 56342 - DNA, 15 bp, Homo sapiens
tttgagacccagtct

SEQ ID NO: 56343 - DNA, 15 bp, Homo sapiens
ttttgagacccagtc

SEQ ID NO: 56344 - DNA, 15 bp, Homo sapiens
cttttgagacccagt

SEQ ID NO: 56345 - DNA, 15 bp, Homo sapiens
tcttttgagacccag

SEQ ID NO: 56346 - DNA, 15 bp, Homo sapiens
ctcttttgagaccca

SEQ ID NO: 56347 - DNA, 15 bp, Homo sapiens
cctcttttgagaccc

SEQ ID NO: 56348 - DNA, 15 bp, Homo sapiens
tcctcttttgagacc

SEQ ID NO: 56349 - DNA, 15 bp, Homo sapiens
ttcctcttttgagac

SEQ ID NO: 56350 - DNA, 15 bp, Homo sapiens
cttcctcttttgaga

SEQ ID NO: 56351 - DNA, 15 bp, Homo sapiens
ccttcctcttttgag

SEQ ID NO: 56352 - DNA, 15 bp, Homo sapiens
accttcctcttttga

SEQ ID NO: 56353 - DNA, 15 bp, Homo sapiens
caccttcctcttttg

SEQ ID NO: 56354 - DNA, 15 bp, Homo sapiens
tcaccttcctctttt

SEQ ID NO: 56355 - DNA, 15 bp, Homo sapiens
atcaccttcctcttt

SEQ ID NO: 56356 - DNA, 15 bp, Homo sapiens
tatcaccttcctctt

SEQ ID NO: 56357 - DNA, 15 bp, Homo sapiens
ctatcaccttcctct

SEQ ID NO: 56358 - DNA, 15 bp, Homo sapiens
tctatcaccttcctc

SEQ ID NO: 56359 - DNA, 15 bp, Homo sapiens
ttctatcaccttcct

SEQ ID NO: 56360 - DNA, 15 bp, Homo sapiens
gttctatcaccttcc

SEQ ID NO: 56361 - DNA, 15 bp, Homo sapiens
tgttctatcaccttc

SEQ ID NO: 56362 - DNA, 15 bp, Homo sapiens
gtgttctatcacctt

SEQ ID NO: 56363 - DNA, 15 bp, Homo sapiens
tgtgttctatcacct

SEQ ID NO: 56364 - DNA, 15 bp, Homo sapiens
ctgtgttctatcacc

SEQ ID NO: 56365 - DNA, 15 bp, Homo sapiens
actgtgttctatcac

SEQ ID NO: 56366 - DNA, 15 bp, Homo sapiens
cactgtgttctatca

SEQ ID NO: 56367 - DNA, 15 bp, Homo sapiens
ccactgtgttctatc

SEQ ID NO: 56368 - DNA, 15 bp, Homo sapiens
cccactgtgttctat

SEQ ID NO: 56369 - DNA, 15 bp, Homo sapiens
ccccactgtgttcta

SEQ ID NO: 56370 - DNA, 15 bp, Homo sapiens
tccccactgtgttct

SEQ ID NO: 56371 - DNA, 15 bp, Homo sapiens
ctccccactgtgttc

SEQ ID NO: 56372 - DNA, 15 bp, Homo sapiens
cctccccactgtgtt

SEQ ID NO: 56373 - DNA, 15 bp, Homo sapiens
ccctccccactgtgt

SEQ ID NO: 56374 - DNA, 15 bp, Homo sapiens
cccctccccactgtg

SEQ ID NO: 56375 - DNA, 15 bp, Homo sapiens
ccccctccccactgt

SEQ ID NO: 56376 - DNA, 15 bp, Homo sapiens
tccccctccccactg

SEQ ID NO: 56377 - DNA, 15 bp, Homo sapiens
ctccccctccccact

SEQ ID NO: 56378 - DNA, 15 bp, Homo sapiens
cctccccctccccac

SEQ ID NO: 56379 - DNA, 15 bp, Homo sapiens
acctccccctcccca

SEQ ID NO: 56380 - DNA, 15 bp, Homo sapiens
cacctccccctcccc

SEQ ID NO: 56381 - DNA, 15 bp, Homo sapiens
gcacctccccctccc

SEQ ID NO: 56382 - DNA, 15 bp, Homo sapiens
tgcacctccccctcc

SEQ ID NO: 56383 - DNA, 15 bp, Homo sapiens
gtgcacctccccctc

SEQ ID NO: 56384 - DNA, 15 bp, Homo sapiens
agtgcacctccccct

SEQ ID NO: 56385 - DNA, 15 bp, Homo sapiens
tagtgcacctccccc

SEQ ID NO: 56386 - DNA, 15 bp, Homo sapiens
ctagtgcacctcccc

SEQ ID NO: 56387 - DNA, 15 bp, Homo sapiens
tctagtgcacctccc

SEQ ID NO: 56388 - DNA, 15 bp, Homo sapiens
ttctagtgcacctcc

SEQ ID NO: 56389 - DNA, 15 bp, Homo sapiens
tttctagtgcacctc

SEQ ID NO: 56390 - DNA, 15 bp, Homo sapiens
gtttctagtgcacct

SEQ ID NO: 56391 - DNA, 15 bp, Homo sapiens
tgtttctagtgcacc

SEQ ID NO: 56392 - DNA, 15 bp, Homo sapiens
ctgtttctagtgcac

SEQ ID NO: 56393 - DNA, 15 bp, Homo sapiens
tctgtttctagtgca

SEQ ID NO: 56394 - DNA, 15 bp, Homo sapiens
ctctgtttctagtgc

SEQ ID NO: 56395 - DNA, 15 bp, Homo sapiens
cctctgtttctagtg

SEQ ID NO: 56396 - DNA, 15 bp, Homo sapiens
ccctctgtttctagt

SEQ ID NO: 56397 - DNA, 15 bp, Homo sapiens
gccctctgtttctag

SEQ ID NO: 56398 - DNA, 15 bp, Homo sapiens
ggccctctgtttcta

SEQ ID NO: 56399 - DNA, 15 bp, Homo sapiens
aggccctctgtttct

SEQ ID NO: 56400 - DNA, 15 bp, Homo sapiens
taggccctctgtttc

SEQ ID NO: 56401 - DNA, 15 bp, Homo sapiens
ataggccctctgttt

SEQ ID NO: 56402 - DNA, 15 bp, Homo sapiens
cataggccctctgtt

SEQ ID NO: 56403 - DNA, 15 bp, Homo sapiens
gcataggccctctgt

SEQ ID NO: 56404 - DNA, 15 bp, Homo sapiens
agcataggccctctg

SEQ ID NO: 56405 - DNA, 15 bp, Homo sapiens
aagcataggccctct

SEQ ID NO: 56406 - DNA, 15 bp, Homo sapiens
aaagcataggccctc

SEQ ID NO: 56407 - DNA, 15 bp, Homo sapiens
gaaagcataggccct

SEQ ID NO: 56408 - DNA, 15 bp, Homo sapiens
tgaaagcataggccc

SEQ ID NO: 56409 - DNA, 15 bp, Homo sapiens
atgaaagcataggcc

SEQ ID NO: 56410 - DNA, 15 bp, Homo sapiens
aatgaaagcataggc

SEQ ID NO: 56411 - DNA, 15 bp, Homo sapiens
gaatgaaagcatagg

SEQ ID NO: 56412 - DNA, 15 bp, Homo sapiens
agaatgaaagcatag

SEQ ID NO: 56413 - DNA, 15 bp, Homo sapiens
cagaatgaaagcata

SEQ ID NO: 56414 - DNA, 15 bp, Homo sapiens
ccagaatgaaagcat

SEQ ID NO: 56415 - DNA, 15 bp, Homo sapiens
gccagaatgaaagca

SEQ ID NO: 56416 - DNA, 15 bp, Homo sapiens
agccagaatgaaagc

SEQ ID NO: 56417 - DNA, 15 bp, Homo sapiens
aagccagaatgaaag

SEQ ID NO: 56418 - DNA, 15 bp, Homo sapiens
aaagccagaatgaaa

SEQ ID NO: 56419 - DNA, 15 bp, Homo sapiens
caaagccagaatgaa

SEQ ID NO: 56420 - DNA, 15 bp, Homo sapiens
gcaaagccagaatga

SEQ ID NO: 56421 - DNA, 15 bp, Homo sapiens
agcaaagccagaatg

SEQ ID NO: 56422 - DNA, 15 bp, Homo sapiens
tagcaaagccagaat

SEQ ID NO: 56423 - DNA, 15 bp, Homo sapiens
gtagcaaagccagaa

SEQ ID NO: 56424 - DNA, 15 bp, Homo sapiens
agtagcaaagccaga

SEQ ID NO: 56425 - DNA, 15 bp, Homo sapiens
aagtagcaaagccag

SEQ ID NO: 56426 - DNA, 15 bp, Homo sapiens
taagtagcaaagcca

SEQ ID NO: 56427 - DNA, 15 bp, Homo sapiens
ttaagtagcaaagcc

SEQ ID NO: 56428 - DNA, 15 bp, Homo sapiens
attaagtagcaaagc

SEQ ID NO: 56429 - DNA, 15 bp, Homo sapiens
tattaagtagcaaag

SEQ ID NO: 56430 - DNA, 15 bp, Homo sapiens
ctattaagtagcaaa

SEQ ID NO: 56431 - DNA, 15 bp, Homo sapiens
gctattaagtagcaa

SEQ ID NO: 56432 - DNA, 15 bp, Homo sapiens
agctattaagtagca

SEQ ID NO: 56433 - DNA, 15 bp, Homo sapiens
cagctattaagtagc

SEQ ID NO: 56434 - DNA, 15 bp, Homo sapiens
acagctattaagtag

SEQ ID NO: 56435 - DNA, 15 bp, Homo sapiens
cacagctattaagta

SEQ ID NO: 56436 - DNA, 15 bp, Homo sapiens
acacagctattaagt

SEQ ID NO: 56437 - DNA, 15 bp, Homo sapiens
cacacagctattaag

SEQ ID NO: 56438 - DNA, 15 bp, Homo sapiens
tcacacagctattaa

SEQ ID NO: 56439 - DNA, 15 bp, Homo sapiens
gtcacacagctatta

SEQ ID NO: 56440 - DNA, 15 bp, Homo sapiens
ggtcacacagctatt

SEQ ID NO: 56441 - DNA, 15 bp, Homo sapiens
gggtcacacagctat

SEQ ID NO: 56442 - DNA, 15 bp, Homo sapiens
tgggtcacacagcta

SEQ ID NO: 56443 - DNA, 15 bp, Homo sapiens
ttgggtcacacagct

SEQ ID NO: 56444 - DNA, 15 bp, Homo sapiens
attgggtcacacagc

SEQ ID NO: 56445 - DNA, 15 bp, Homo sapiens
gattgggtcacacag

SEQ ID NO: 56446 - DNA, 15 bp, Homo sapiens
agattgggtcacaca

SEQ ID NO: 56447 - DNA, 15 bp, Homo sapiens
aagattgggtcacac

SEQ ID NO: 56448 - DNA, 15 bp, Homo sapiens
taagattgggtcaca

SEQ ID NO: 56449 - DNA, 15 bp, Homo sapiens
ctaagattgggtcac

SEQ ID NO: 56450 - DNA, 15 bp, Homo sapiens
tctaagattgggtca

SEQ ID NO: 56451 - DNA, 15 bp, Homo sapiens
ctctaagattgggtc

SEQ ID NO: 56452 - DNA, 15 bp, Homo sapiens
tctctaagattgggt

SEQ ID NO: 56453 - DNA, 15 bp, Homo sapiens
gtctctaagattggg

SEQ ID NO: 56454 - DNA, 15 bp, Homo sapiens
agtctctaagattgg

SEQ ID NO: 56455 - DNA, 15 bp, Homo sapiens
aagtctctaagattg

SEQ ID NO: 56456 - DNA, 15 bp, Homo sapiens
taagtctctaagatt

SEQ ID NO: 56457 - DNA, 15 bp, Homo sapiens
ttaagtctctaagat

SEQ ID NO: 56458 - DNA, 15 bp, Homo sapiens
gttaagtctctaaga

SEQ ID NO: 56459 - DNA, 15 bp, Homo sapiens
ggttaagtctctaag

SEQ ID NO: 56460 - DNA, 15 bp, Homo sapiens
aggttaagtctctaa

SEQ ID NO: 56461 - DNA, 15 bp, Homo sapiens
gaggttaagtctcta

SEQ ID NO: 56462 - DNA, 15 bp, Homo sapiens
agaggttaagtctct

SEQ ID NO: 56463 - DNA, 15 bp, Homo sapiens
gagaggttaagtctc

SEQ ID NO: 56464 - DNA, 15 bp, Homo sapiens
agagaggttaagtct

SEQ ID NO: 56465 - DNA, 15 bp, Homo sapiens
cagagaggttaagtc

SEQ ID NO: 56466 - DNA, 15 bp, Homo sapiens
ttcagagaggttaag

SEQ ID NO: 56467 - DNA, 15 bp, Homo sapiens
gttcagagaggttaa

SEQ ID NO: 56468 - DNA, 15 bp, Homo sapiens
agttcagagaggtta

SEQ ID NO: 56469 - DNA, 15 bp, Homo sapiens
aagttcagagaggtt

SEQ ID NO: 56470 - DNA, 15 bp, Homo sapiens
gaagttcagagaggt

SEQ ID NO: 56471 - DNA, 15 bp, Homo sapiens
ggaagttcagagagg

SEQ ID NO: 56472 - DNA, 15 bp, Homo sapiens
tggaagttcagagag

SEQ ID NO: 56473 - DNA, 15 bp, Homo sapiens
atggaagttcagaga

SEQ ID NO: 56474 - DNA, 15 bp, Homo sapiens
aatggaagttcagag

SEQ ID NO: 56475 - DNA, 15 bp, Homo sapiens
aaatggaagttcaga

SEQ ID NO: 56476 - DNA, 15 bp, Homo sapiens
aaaatggaagttcag

SEQ ID NO: 56477 - DNA, 15 bp, Homo sapiens
gaaaatggaagttca

SEQ ID NO: 56478 - DNA, 15 bp, Homo sapiens
agaaaatggaagttc

SEQ ID NO: 56479 - DNA, 15 bp, Homo sapiens
gagaaaatggaagtt

SEQ ID NO: 56480 - DNA, 15 bp, Homo sapiens
tgagaaaatggaagt

SEQ ID NO: 56481 - DNA, 15 bp, Homo sapiens
atgagaaaatggaag

SEQ ID NO: 56482 - DNA, 15 bp, Homo sapiens
catgagaaaatggaa

SEQ ID NO: 56483 - DNA, 15 bp, Homo sapiens
acatgagaaaatgga

SEQ ID NO: 56484 - DNA, 15 bp, Homo sapiens
tacatgagaaaatgg

SEQ ID NO: 56485 - DNA, 15 bp, Homo sapiens
atacatgagaaaatg

SEQ ID NO: 56486 - DNA, 15 bp, Homo sapiens
tatacatgagaaaat

SEQ ID NO: 56487 - DNA, 15 bp, Homo sapiens
ttatacatgagaaaa

SEQ ID NO: 56488 - DNA, 15 bp, Homo sapiens
tttatacatgagaaa

SEQ ID NO: 56489 - DNA, 15 bp, Homo sapiens
ttttatacatgagaa

SEQ ID NO: 56490 - DNA, 15 bp, Homo sapiens
attttatacatgaga

SEQ ID NO: 56491 - DNA, 15 bp, Homo sapiens
cattttatacatgag

SEQ ID NO: 56492 - DNA, 15 bp, Homo sapiens
ccattttatacatga

SEQ ID NO: 56493 - DNA, 15 bp, Homo sapiens
cccattttatacatg

SEQ ID NO: 56494 - DNA, 15 bp, Homo sapiens
tcccattttatacat

SEQ ID NO: 56495 - DNA, 15 bp, Homo sapiens
ttcccattttataca

SEQ ID NO: 56496 - DNA, 15 bp, Homo sapiens
tttcccattttatac

SEQ ID NO: 56497 - DNA, 15 bp, Homo sapiens
atttcccattttata

SEQ ID NO: 56498 - DNA, 15 bp, Homo sapiens
tatttcccattttat

SEQ ID NO: 56499 - DNA, 15 bp, Homo sapiens
atatttcccatttta

SEQ ID NO: 56500 - DNA, 15 bp, Homo sapiens
aatatttcccatttt

SEQ ID NO: 56501 - DNA, 15 bp, Homo sapiens
taatatttcccattt

SEQ ID NO: 56502 - DNA, 15 bp, Homo sapiens
ttaatatttcccatt

SEQ ID NO: 56503 - DNA, 15 bp, Homo sapiens
tttaatatttcccat

SEQ ID NO: 56504 - DNA, 15 bp, Homo sapiens
ctttaatatttccca

SEQ ID NO: 56505 - DNA, 15 bp, Homo sapiens
cctttaatatttccc

SEQ ID NO: 56506 - DNA, 15 bp, Homo sapiens
tcctttaatatttcc

SEQ ID NO: 56507 - DNA, 15 bp, Homo sapiens
atcctttaatatttc

SEQ ID NO: 56508 - DNA, 15 bp, Homo sapiens
tatcctttaatattt

SEQ ID NO: 56509 - DNA, 15 bp, Homo sapiens
gtatcctttaatatt

SEQ ID NO: 56510 - DNA, 15 bp, Homo sapiens
agtatcctttaatat

SEQ ID NO: 56511 - DNA, 15 bp, Homo sapiens
gagtatcctttaata

SEQ ID NO: 56512 - DNA, 15 bp, Homo sapiens
tgagtatcctttaat

SEQ ID NO: 56513 - DNA, 15 bp, Homo sapiens
gtgagtatcctttaa

SEQ ID NO: 56514 - DNA, 15 bp, Homo sapiens
agtgagtatccttta

SEQ ID NO: 56515 - DNA, 15 bp, Homo sapiens
cagtgagtatccttt

SEQ ID NO: 56516 - DNA, 15 bp, Homo sapiens
ccagtgagtatcctt

SEQ ID NO: 56517 - DNA, 15 bp, Homo sapiens
cccagtgagtatcct

SEQ ID NO: 56518 - DNA, 15 bp, Homo sapiens
gcccagtgagtatcc

SEQ ID NO: 56519 - DNA, 15 bp, Homo sapiens
agcccagtgagtatc

SEQ ID NO: 56520 - DNA, 15 bp, Homo sapiens
cagcccagtgagtat

SEQ ID NO: 56521 - DNA, 15 bp, Homo sapiens
ccagcccagtgagta

SEQ ID NO: 56522 - DNA, 15 bp, Homo sapiens
accagcccagtgagt

SEQ ID NO: 56523 - DNA, 15 bp, Homo sapiens
caccagcccagtgag

SEQ ID NO: 56524 - DNA, 15 bp, Homo sapiens
ccaccagcccagtga

SEQ ID NO: 56525 - DNA, 15 bp, Homo sapiens
gccaccagcccagtg

SEQ ID NO: 56526 - DNA, 15 bp, Homo sapiens
agccaccagcccagt

SEQ ID NO: 56527 - DNA, 15 bp, Homo sapiens
aagccaccagcccag

SEQ ID NO: 56528 - DNA, 15 bp, Homo sapiens
caagccaccagccca

SEQ ID NO: 56529 - DNA, 15 bp, Homo sapiens
acaagccaccagccc

SEQ ID NO: 56530 - DNA, 15 bp, Homo sapiens
cacaagccaccagcc

SEQ ID NO: 56531 - DNA, 15 bp, Homo sapiens
gcacaagccaccagc

SEQ ID NO: 56532 - DNA, 15 bp, Homo sapiens
ggcacaagccaccag

SEQ ID NO: 56533 - DNA, 15 bp, Homo sapiens
caagtgctgggatta

SEQ ID NO: 56534 - DNA, 15 bp, Homo sapiens
ccaagtgctgggatt

SEQ ID NO: 56535 - DNA, 15 bp, Homo sapiens
cccaagtgctgggat

SEQ ID NO: 56536 - DNA, 15 bp, Homo sapiens
ccccaagtgctggga

SEQ ID NO: 56537 - DNA, 15 bp, Homo sapiens
tccccaagtgctggg

SEQ ID NO: 56538 - DNA, 15 bp, Homo sapiens
ctccccaagtgctgg

SEQ ID NO: 56539 - DNA, 15 bp, Homo sapiens
cctccccaagtgctg

SEQ ID NO: 56540 - DNA, 15 bp, Homo sapiens
acctccccaagtgct

SEQ ID NO: 56541 - DNA, 15 bp, Homo sapiens
aacctccccaagtgc

SEQ ID NO: 56542 - DNA, 15 bp, Homo sapiens
caacctccccaagtg

SEQ ID NO: 56543 - DNA, 15 bp, Homo sapiens
tcaacctccccaagt

SEQ ID NO: 56544 - DNA, 15 bp, Homo sapiens
ctcaacctccccaag

SEQ ID NO: 56545 - DNA, 15 bp, Homo sapiens
cctcaacctccccaa

SEQ ID NO: 56546 - DNA, 15 bp, Homo sapiens
acctcaacctcccca

SEQ ID NO: 56547 - DNA, 15 bp, Homo sapiens
cacctcaacctcccc

SEQ ID NO: 56548 - DNA, 15 bp, Homo sapiens
ccacctcaacctccc

SEQ ID NO: 56549 - DNA, 15 bp, Homo sapiens
cccacctcaacctcc

SEQ ID NO: 56550 - DNA, 15 bp, Homo sapiens
tcccacctcaacctc

SEQ ID NO: 56551 - DNA, 15 bp, Homo sapiens
ctcccacctcaacct

SEQ ID NO: 56552 - DNA, 15 bp, Homo sapiens
cctcccacctcaacc

SEQ ID NO: 56553 - DNA, 15 bp, Homo sapiens
tcctcccacctcaac

SEQ ID NO: 56554 - DNA, 15 bp, Homo sapiens
atcctcccacctcaa

SEQ ID NO: 56555 - DNA, 15 bp, Homo sapiens
gatcctcccacctca

SEQ ID NO: 56556 - DNA, 15 bp, Homo sapiens
tgatcctcccacctc

SEQ ID NO: 56557 - DNA, 15 bp, Homo sapiens
gtgatcctcccacct

SEQ ID NO: 56558 - DNA, 15 bp, Homo sapiens
agtgatcctcccacc

SEQ ID NO: 56559 - DNA, 15 bp, Homo sapiens
aagtgatcctcccac

SEQ ID NO: 56560 - DNA, 15 bp, Homo sapiens
caagtgatcctccca

SEQ ID NO: 56561 - DNA, 15 bp, Homo sapiens
tcaagtgatcctccc

SEQ ID NO: 56562 - DNA, 15 bp, Homo sapiens
gctcaagtgatcctc

SEQ ID NO: 56563 - DNA, 15 bp, Homo sapiens
ggctcaagtgatcct

SEQ ID NO: 56564 - DNA, 15 bp, Homo sapiens
gggctcaagtgatcc

SEQ ID NO: 56565 - DNA, 15 bp, Homo sapiens
tgggctcaagtgatc

SEQ ID NO: 56566 - DNA, 15 bp, Homo sapiens
ctgggctcaagtgat

SEQ ID NO: 56567 - DNA, 15 bp, Homo sapiens
cctgggctcaagtga

SEQ ID NO: 56568 - DNA, 15 bp, Homo sapiens
acctgggctcaagtg

SEQ ID NO: 56569 - DNA, 15 bp, Homo sapiens
cacctgggctcaagt

SEQ ID NO: 56570 - DNA, 15 bp, Homo sapiens
acacctgggctcaag

SEQ ID NO: 56571 - DNA, 15 bp, Homo sapiens
aacacctgggctcaa

SEQ ID NO: 56572 - DNA, 15 bp, Homo sapiens
gaacacctgggctca

SEQ ID NO: 56573 - DNA, 15 bp, Homo sapiens
tgaacacctgggctc

SEQ ID NO: 56574 - DNA, 15 bp, Homo sapiens
ttgaacacctgggct

SEQ ID NO: 56575 - DNA, 15 bp, Homo sapiens
cttgaacacctgggc

SEQ ID NO: 56576 - DNA, 15 bp, Homo sapiens
tcttgaacacctggg

SEQ ID NO: 56577 - DNA, 15 bp, Homo sapiens
gtcttgaacacctgg

SEQ ID NO: 56578 - DNA, 15 bp, Homo sapiens
ggtcttgaacacctg

SEQ ID NO: 56579 - DNA, 15 bp, Homo sapiens
tggtcttgaacacct

SEQ ID NO: 56580 - DNA, 15 bp, Homo sapiens
ctggtcttgaacacc

SEQ ID NO: 56581 - DNA, 15 bp, Homo sapiens
gctggtcttgaacac

SEQ ID NO: 56582 - DNA, 15 bp, Homo sapiens
ggctggtcttgaaca

SEQ ID NO: 56583 - DNA, 15 bp, Homo sapiens
gggctggtcttgaac

SEQ ID NO: 56584 - DNA, 15 bp, Homo sapiens
tgggctggtcttgaa

SEQ ID NO: 56585 - DNA, 15 bp, Homo sapiens
ctgggctggtcttga

SEQ ID NO: 56586 - DNA, 15 bp, Homo sapiens
cctgggctggtcttg

SEQ ID NO: 56587 - DNA, 15 bp, Homo sapiens
gcctgggctggtctt

SEQ ID NO: 56588 - DNA, 15 bp, Homo sapiens
tgcctgggctggtct

SEQ ID NO: 56589 - DNA, 15 bp, Homo sapiens
ttgcctgggctggtc

SEQ ID NO: 56590 - DNA, 15 bp, Homo sapiens
gttgcctgggctggt

SEQ ID NO: 56591 - DNA, 15 bp, Homo sapiens
tgttgcctgggctgg

SEQ ID NO: 56592 - DNA, 15 bp, Homo sapiens
atgttgcctgggctg

SEQ ID NO: 56593 - DNA, 15 bp, Homo sapiens
catgttgcctgggct

SEQ ID NO: 56594 - DNA, 15 bp, Homo sapiens
ccatgttgcctgggc

SEQ ID NO: 56595 - DNA, 15 bp, Homo sapiens
gccatgttgcctggg

SEQ ID NO: 56596 - DNA, 15 bp, Homo sapiens
tgccatgttgcctgg

SEQ ID NO: 56597 - DNA, 15 bp, Homo sapiens
ttgccatgttgcctg

SEQ ID NO: 56598 - DNA, 15 bp, Homo sapiens
cttgccatgttgcct

SEQ ID NO: 56599 - DNA, 15 bp, Homo sapiens
tcttgccatgttgcc

SEQ ID NO: 56600 - DNA, 15 bp, Homo sapiens
gtcttgccatgttgc

SEQ ID NO: 56601 - DNA, 15 bp, Homo sapiens
agtcttgccatgttg

SEQ ID NO: 56602 - DNA, 15 bp, Homo sapiens
gagtcttgccatgtt

SEQ ID NO: 56603 - DNA, 15 bp, Homo sapiens
agagtcttgccatgt

SEQ ID NO: 56604 - DNA, 15 bp, Homo sapiens
cagagtcttgccatg

SEQ ID NO: 56605 - DNA, 15 bp, Homo sapiens
acagagtcttgccat

SEQ ID NO: 56606 - DNA, 15 bp, Homo sapiens
gacagagtcttgcca

SEQ ID NO: 56607 - DNA, 15 bp, Homo sapiens
agacagagtcttgcc

SEQ ID NO: 56608 - DNA, 15 bp, Homo sapiens
gagacagagtcttgc

SEQ ID NO: 56609 - DNA, 15 bp, Homo sapiens
agagacagagtcttg

SEQ ID NO: 56610 - DNA, 15 bp, Homo sapiens
tagagacagagtctt

SEQ ID NO: 56611 - DNA, 15 bp, Homo sapiens
atagagacagagtct

SEQ ID NO: 56612 - DNA, 15 bp, Homo sapiens
catagagacagagtc

SEQ ID NO: 56613 - DNA, 15 bp, Homo sapiens
tcatagagacagagt

SEQ ID NO: 56614 - DNA, 15 bp, Homo sapiens
ttcatagagacagag

SEQ ID NO: 56615 - DNA, 15 bp, Homo sapiens
tttcatagagacaga

SEQ ID NO: 56616 - DNA, 15 bp, Homo sapiens
ttttcatagagacag

SEQ ID NO: 56617 - DNA, 15 bp, Homo sapiens
tttttcatagagaca

SEQ ID NO: 56618 - DNA, 15 bp, Homo sapiens
ttttttcatagagac

SEQ ID NO: 56619 - DNA, 15 bp, Homo sapiens
attttttcatagaga

SEQ ID NO: 56620 - DNA, 15 bp, Homo sapiens
aattttttcatagag

SEQ ID NO: 56621 - DNA, 15 bp, Homo sapiens
taattttttcataga

SEQ ID NO: 56622 - DNA, 15 bp, Homo sapiens
ttaattttttcatag

SEQ ID NO: 56623 - DNA, 15 bp, Homo sapiens
tttaattttttcata

SEQ ID NO: 56624 - DNA, 15 bp, Homo sapiens
ttttaattttttcat

SEQ ID NO: 56625 - DNA, 15 bp, Homo sapiens
tttttaattttttca

SEQ ID NO: 56626 - DNA, 15 bp, Homo sapiens
atttttaattttttc

SEQ ID NO: 56627 - DNA, 15 bp, Homo sapiens
aatttttaatttttt

SEQ ID NO: 56628 - DNA, 15 bp, Homo sapiens
taatttttaattttt

SEQ ID NO: 56629 - DNA, 15 bp, Homo sapiens
ctaatttttaatttt

SEQ ID NO: 56630 - DNA, 15 bp, Homo sapiens
gctaatttttaattt

SEQ ID NO: 56631 - DNA, 15 bp, Homo sapiens
ggctaatttttaatt

SEQ ID NO: 56632 - DNA, 15 bp, Homo sapiens
tggctaatttttaat

SEQ ID NO: 56633 - DNA, 15 bp, Homo sapiens
ctggctaatttttaa

SEQ ID NO: 56634 - DNA, 15 bp, Homo sapiens
cctggctaattttta

SEQ ID NO: 56635 - DNA, 15 bp, Homo sapiens
acctggctaattttt

SEQ ID NO: 56636 - DNA, 15 bp, Homo sapiens
cacctggctaatttt

SEQ ID NO: 56637 - DNA, 15 bp, Homo sapiens
acacctggctaattt

SEQ ID NO: 56638 - DNA, 15 bp, Homo sapiens
acaccaccacacctg

SEQ ID NO: 56639 - DNA, 15 bp, Homo sapiens
cacaccaccacacct

SEQ ID NO: 56640 - DNA, 15 bp, Homo sapiens
gcacaccaccacacc

SEQ ID NO: 56641 - DNA, 15 bp, Homo sapiens
tgcacaccaccacac

SEQ ID NO: 56642 - DNA, 15 bp, Homo sapiens
gtgcacaccaccaca

SEQ ID NO: 56643 - DNA, 15 bp, Homo sapiens
ggtgcacaccaccac

SEQ ID NO: 56644 - DNA, 15 bp, Homo sapiens
aggtgcacaccacca

SEQ ID NO: 56645 - DNA, 15 bp, Homo sapiens
caggtgcacaccacc

SEQ ID NO: 56646 - DNA, 15 bp, Homo sapiens
acaggtgcacaccac

SEQ ID NO: 56647 - DNA, 15 bp, Homo sapiens
tacaggtgcacacca

SEQ ID NO: 56648 - DNA, 15 bp, Homo sapiens
ctacaggtgcacacc

SEQ ID NO: 56649 - DNA, 15 bp, Homo sapiens
actacaggtgcacac

SEQ ID NO: 56650 - DNA, 15 bp, Homo sapiens
gactacaggtgcaca

SEQ ID NO: 56651 - DNA, 15 bp, Homo sapiens
agactacaggtgcac

SEQ ID NO: 56652 - DNA, 15 bp, Homo sapiens
aagactacaggtgca

SEQ ID NO: 56653 - DNA, 15 bp, Homo sapiens
taagactacaggtgc

SEQ ID NO: 56654 - DNA, 15 bp, Homo sapiens
ctaagactacaggtg

SEQ ID NO: 56655 - DNA, 15 bp, Homo sapiens
gctaagactacaggt

SEQ ID NO: 56656 - DNA, 15 bp, Homo sapiens
agctaagactacagg

SEQ ID NO: 56657 - DNA, 15 bp, Homo sapiens
tagctaagactacag

SEQ ID NO: 56658 - DNA, 15 bp, Homo sapiens
gtagctaagactaca

SEQ ID NO: 56659 - DNA, 15 bp, Homo sapiens
agtagctaagactac

SEQ ID NO: 56660 - DNA, 15 bp, Homo sapiens
aagtagctaagacta

SEQ ID NO: 56661 - DNA, 15 bp, Homo sapiens
caagtagctaagact

SEQ ID NO: 56662 - DNA, 15 bp, Homo sapiens
ccaagtagctaagac

SEQ ID NO: 56663 - DNA, 15 bp, Homo sapiens
accaagtagctaaga

SEQ ID NO: 56664 - DNA, 15 bp, Homo sapiens
taccaagtagctaag

SEQ ID NO: 56665 - DNA, 15 bp, Homo sapiens
ctaccaagtagctaa

SEQ ID NO: 56666 - DNA, 15 bp, Homo sapiens
cctaccaagtagcta

SEQ ID NO: 56667 - DNA, 15 bp, Homo sapiens
gcctaccaagtagct

SEQ ID NO: 56668 - DNA, 15 bp, Homo sapiens
agcctaccaagtagc

SEQ ID NO: 56669 - DNA, 15 bp, Homo sapiens
cagcctaccaagtag

SEQ ID NO: 56670 - DNA, 15 bp, Homo sapiens
tcagcctaccaagta

SEQ ID NO: 56671 - DNA, 15 bp, Homo sapiens
ctcagcctaccaagt

SEQ ID NO: 56672 - DNA, 15 bp, Homo sapiens
tctcagcctaccaag

SEQ ID NO: 56673 - DNA, 15 bp, Homo sapiens
atctcagcctaccaa

SEQ ID NO: 56674 - DNA, 15 bp, Homo sapiens
catctcagcctacca

SEQ ID NO: 56675 - DNA, 15 bp, Homo sapiens
ccatctcagcctacc

SEQ ID NO: 56676 - DNA, 15 bp, Homo sapiens
cccatctcagcctac

SEQ ID NO: 56677 - DNA, 15 bp, Homo sapiens
tcccatctcagccta

SEQ ID NO: 56678 - DNA, 15 bp, Homo sapiens
ctcccatctcagcct

SEQ ID NO: 56679 - DNA, 15 bp, Homo sapiens
cctcccatctcagcc

SEQ ID NO: 56680 - DNA, 15 bp, Homo sapiens
tcctcccatctcagc

SEQ ID NO: 56681 - DNA, 15 bp, Homo sapiens
atcctcccatctcag

SEQ ID NO: 56682 - DNA, 15 bp, Homo sapiens
gatcctcccatctca

SEQ ID NO: 56683 - DNA, 15 bp, Homo sapiens
tgatcctcccatctc

SEQ ID NO: 56684 - DNA, 15 bp, Homo sapiens
gtgatcctcccatct

SEQ ID NO: 56685 - DNA, 15 bp, Homo sapiens
agtgatcctcccatc

SEQ ID NO: 56686 - DNA, 15 bp, Homo sapiens
aagtgatcctcccat

SEQ ID NO: 56687 - DNA, 15 bp, Homo sapiens
ccaagtgatcctccc

SEQ ID NO: 56688 - DNA, 15 bp, Homo sapiens
cccaagtgatcctcc

SEQ ID NO: 56689 - DNA, 15 bp, Homo sapiens
gcccaagtgatcctc

SEQ ID NO: 56690 - DNA, 15 bp, Homo sapiens
agcccaagtgatcct

SEQ ID NO: 56691 - DNA, 15 bp, Homo sapiens
aagcccaagtgatcc

SEQ ID NO: 56692 - DNA, 15 bp, Homo sapiens
caagcccaagtgatc

SEQ ID NO: 56693 - DNA, 15 bp, Homo sapiens
ccaagcccaagtgat

SEQ ID NO: 56694 - DNA, 15 bp, Homo sapiens
cccaagcccaagtga

SEQ ID NO: 56695 - DNA, 15 bp, Homo sapiens
tcccaagcccaagtg

SEQ ID NO: 56696 - DNA, 15 bp, Homo sapiens
ctcccaagcccaagt

SEQ ID NO: 56697 - DNA, 15 bp, Homo sapiens
cctcccaagcccaag

SEQ ID NO: 56698 - DNA, 15 bp, Homo sapiens
acctcccaagcccaa

SEQ ID NO: 56699 - DNA, 15 bp, Homo sapiens
gacctcccaagccca

SEQ ID NO: 56700 - DNA, 15 bp, Homo sapiens
tgacctcccaagccc

SEQ ID NO: 56701 - DNA, 15 bp, Homo sapiens
ttgacctcccaagcc

SEQ ID NO: 56702 - DNA, 15 bp, Homo sapiens
cttgacctcccaagc

SEQ ID NO: 56703 - DNA, 15 bp, Homo sapiens
ccttgacctcccaag

SEQ ID NO: 56704 - DNA, 15 bp, Homo sapiens
gccttgacctcccaa

SEQ ID NO: 56705 - DNA, 15 bp, Homo sapiens
agccttgacctccca

SEQ ID NO: 56706 - DNA, 15 bp, Homo sapiens
cagccttgacctccc

SEQ ID NO: 56707 - DNA, 15 bp, Homo sapiens
gcagccttgacctcc

SEQ ID NO: 56708 - DNA, 15 bp, Homo sapiens
cgcagccttgacctc

SEQ ID NO: 56709 - DNA, 15 bp, Homo sapiens
ccgcagccttgacct

SEQ ID NO: 56710 - DNA, 15 bp, Homo sapiens
accgcagccttgacc

SEQ ID NO: 56711 - DNA, 15 bp, Homo sapiens
caccgcagccttgac

SEQ ID NO: 56712 - DNA, 15 bp, Homo sapiens
tcaccgcagccttga

SEQ ID NO: 56713 - DNA, 15 bp, Homo sapiens
ctcaccgcagccttg

SEQ ID NO: 56714 - DNA, 15 bp, Homo sapiens
gctcaccgcagcctt

SEQ ID NO: 56715 - DNA, 15 bp, Homo sapiens
agctcaccgcagcct

SEQ ID NO: 56716 - DNA, 15 bp, Homo sapiens
cagctcaccgcagcc

SEQ ID NO: 56717 - DNA, 15 bp, Homo sapiens
acagctcaccgcagc

SEQ ID NO: 56718 - DNA, 15 bp, Homo sapiens
cacagctcaccgcag

SEQ ID NO: 56719 - DNA, 15 bp, Homo sapiens
tcacagctcaccgca

SEQ ID NO: 56720 - DNA, 15 bp, Homo sapiens
atcacagctcaccgc

SEQ ID NO: 56721 - DNA, 15 bp, Homo sapiens
aatcacagctcaccg

SEQ ID NO: 56722 - DNA, 15 bp, Homo sapiens
gaatcacagctcacc

SEQ ID NO: 56723 - DNA, 15 bp, Homo sapiens
ggaatcacagctcac

SEQ ID NO: 56724 - DNA, 15 bp, Homo sapiens
tggaatcacagctca

SEQ ID NO: 56725 - DNA, 15 bp, Homo sapiens
atggaatcacagctc

SEQ ID NO: 56726 - DNA, 15 bp, Homo sapiens
gatggaatcacagct

SEQ ID NO: 56727 - DNA, 15 bp, Homo sapiens
tgatggaatcacagc

SEQ ID NO: 56728 - DNA, 15 bp, Homo sapiens
gtgatggaatcacag

SEQ ID NO: 56729 - DNA, 15 bp, Homo sapiens
agtgatggaatcaca

SEQ ID NO: 56730 - DNA, 15 bp, Homo sapiens
cagtgatggaatcac

SEQ ID NO: 56731 - DNA, 15 bp, Homo sapiens
gcagtgatggaatca

SEQ ID NO: 56732 - DNA, 15 bp, Homo sapiens
tgcagtgatggaatc

SEQ ID NO: 56733 - DNA, 15 bp, Homo sapiens
gtgcagtgatggaat

SEQ ID NO: 56734 - DNA, 15 bp, Homo sapiens
agtgcagtgatggaa

SEQ ID NO: 56735 - DNA, 15 bp, Homo sapiens
gagtgcagtgatgga

SEQ ID NO: 56736 - DNA, 15 bp, Homo sapiens
ggagtgcagtgatgg

SEQ ID NO: 56737 - DNA, 15 bp, Homo sapiens
tggagtgcagtgatg

SEQ ID NO: 56738 - DNA, 15 bp, Homo sapiens
gggctggagtgcagt

SEQ ID NO: 56739 - DNA, 15 bp, Homo sapiens
cgggctggagtgcag

SEQ ID NO: 56740 - DNA, 15 bp, Homo sapiens
ccgggctggagtgca

SEQ ID NO: 56741 - DNA, 15 bp, Homo sapiens
cccgggctggagtgc

SEQ ID NO: 56742 - DNA, 15 bp, Homo sapiens
gcccgggctggagtg

SEQ ID NO: 56743 - DNA, 15 bp, Homo sapiens
cgcccgggctggagt

SEQ ID NO: 56744 - DNA, 15 bp, Homo sapiens
ccgcccgggctggag

SEQ ID NO: 56745 - DNA, 15 bp, Homo sapiens
gccgcccgggctgga

SEQ ID NO: 56746 - DNA, 15 bp, Homo sapiens
tgccgcccgggctgg

SEQ ID NO: 56747 - DNA, 15 bp, Homo sapiens
ctgccgcccgggctg

SEQ ID NO: 56748 - DNA, 15 bp, Homo sapiens
tctgccgcccgggct

SEQ ID NO: 56749 - DNA, 15 bp, Homo sapiens
ctctgccgcccgggc

SEQ ID NO: 56750 - DNA, 15 bp, Homo sapiens
gctctgccgcccggg

SEQ ID NO: 56751 - DNA, 15 bp, Homo sapiens
cgctctgccgcccgg

SEQ ID NO: 56752 - DNA, 15 bp, Homo sapiens
tcgctctgccgcccg

SEQ ID NO: 56753 - DNA, 15 bp, Homo sapiens
ctcgctctgccgccc

SEQ ID NO: 56754 - DNA, 15 bp, Homo sapiens
tctcgctctgccgcc

SEQ ID NO: 56755 - DNA, 15 bp, Homo sapiens
gtctcgctctgccgc

SEQ ID NO: 56756 - DNA, 15 bp, Homo sapiens
tgtctcgctctgccg

SEQ ID NO: 56757 - DNA, 15 bp, Homo sapiens
gtgtctcgctctgcc

SEQ ID NO: 56758 - DNA, 15 bp, Homo sapiens
agtgtctcgctctgc

SEQ ID NO: 56759 - DNA, 15 bp, Homo sapiens
cagtgtctcgctctg

SEQ ID NO: 56760 - DNA, 15 bp, Homo sapiens
tcagtgtctcgctct

SEQ ID NO: 56761 - DNA, 15 bp, Homo sapiens
ttcagtgtctcgctc

SEQ ID NO: 56762 - DNA, 15 bp, Homo sapiens
attcagtgtctcgct

SEQ ID NO: 56763 - DNA, 15 bp, Homo sapiens
gattcagtgtctcgc

SEQ ID NO: 56764 - DNA, 15 bp, Homo sapiens
ggattcagtgtctcg

SEQ ID NO: 56765 - DNA, 15 bp, Homo sapiens
tggattcagtgtctc

SEQ ID NO: 56766 - DNA, 15 bp, Homo sapiens
ttggattcagtgtct

SEQ ID NO: 56767 - DNA, 15 bp, Homo sapiens
tttggattcagtgtc

SEQ ID NO: 56768 - DNA, 15 bp, Homo sapiens
gtttggattcagtgt

SEQ ID NO: 56769 - DNA, 15 bp, Homo sapiens
cgtttggattcagtg

SEQ ID NO: 56770 - DNA, 15 bp, Homo sapiens
tcgtttggattcagt

SEQ ID NO: 56771 - DNA, 15 bp, Homo sapiens
gtcgtttggattcag

SEQ ID NO: 56772 - DNA, 15 bp, Homo sapiens
tgtcgtttggattca

SEQ ID NO: 56773 - DNA, 15 bp, Homo sapiens
ttgtcgtttggattc

SEQ ID NO: 56774 - DNA, 15 bp, Homo sapiens
gttgtcgtttggatt

SEQ ID NO: 56775 - DNA, 15 bp, Homo sapiens
tgttgtcgtttggat

SEQ ID NO: 56776 - DNA, 15 bp, Homo sapiens
ttgttgtcgtttgga

SEQ ID NO: 56777 - DNA, 15 bp, Homo sapiens
gttgttgtcgtttgg

SEQ ID NO: 56778 - DNA, 15 bp, Homo sapiens
tgttgttgtcgtttg

SEQ ID NO: 56779 - DNA, 15 bp, Homo sapiens
ttgttgttgtcgttt

SEQ ID NO: 56780 - DNA, 15 bp, Homo sapiens
gttgttgttgtcgtt

SEQ ID NO: 56781 - DNA, 15 bp, Homo sapiens
tgttgttgttgtcgt

SEQ ID NO: 56782 - DNA, 15 bp, Homo sapiens
ttgttgttgttgtcg

SEQ ID NO: 56783 - DNA, 15 bp, Homo sapiens
tttgttgttgttgtc

SEQ ID NO: 56784 - DNA, 15 bp, Homo sapiens
ttttgttgttgttgt

SEQ ID NO: 56785 - DNA, 15 bp, Homo sapiens
cttttgttgttgttg

SEQ ID NO: 56786 - DNA, 15 bp, Homo sapiens
ccttttgttgttgtt

SEQ ID NO: 56787 - DNA, 15 bp, Homo sapiens
gccttttgttgttgt

SEQ ID NO: 56788 - DNA, 15 bp, Homo sapiens
tgccttttgttgttg

SEQ ID NO: 56789 - DNA, 15 bp, Homo sapiens
ttgccttttgttgtt

SEQ ID NO: 56790 - DNA, 15 bp, Homo sapiens
tttgccttttgttgt

SEQ ID NO: 56791 - DNA, 15 bp, Homo sapiens
tttttgccttttgtt

SEQ ID NO: 56792 - DNA, 15 bp, Homo sapiens
ttttttgccttttgt

SEQ ID NO: 56793 - DNA, 15 bp, Homo sapiens
tttttttgccttttg

SEQ ID NO: 56794 - DNA, 15 bp, Homo sapiens
atttttttgcctttt

SEQ ID NO: 56795 - DNA, 15 bp, Homo sapiens
tatttttttgccttt

SEQ ID NO: 56796 - DNA, 15 bp, Homo sapiens
ttatttttttgcctt

SEQ ID NO: 56797 - DNA, 15 bp, Homo sapiens
tttatttttttgcct

SEQ ID NO: 56798 - DNA, 15 bp, Homo sapiens
ttttatttttttgcc

SEQ ID NO: 56799 - DNA, 15 bp, Homo sapiens
cttttatttttttgc

SEQ ID NO: 56800 - DNA, 15 bp, Homo sapiens
acttttatttttttg

SEQ ID NO: 56801 - DNA, 15 bp, Homo sapiens
cacttttattttttt

SEQ ID NO: 56802 - DNA, 15 bp, Homo sapiens
gcacttttatttttt

SEQ ID NO: 56803 - DNA, 15 bp, Homo sapiens
ggcacttttattttt

SEQ ID NO: 56804 - DNA, 15 bp, Homo sapiens
gggcacttttatttt

SEQ ID NO: 56805 - DNA, 15 bp, Homo sapiens
agggcacttttattt

SEQ ID NO: 56806 - DNA, 15 bp, Homo sapiens
gagggcacttttatt

SEQ ID NO: 56807 - DNA, 15 bp, Homo sapiens
agagggcacttttat

SEQ ID NO: 56808 - DNA, 15 bp, Homo sapiens
aagagggcactttta

SEQ ID NO: 56809 - DNA, 15 bp, Homo sapiens
aaagagggcactttt

SEQ ID NO: 56810 - DNA, 15 bp, Homo sapiens
taaagagggcacttt

SEQ ID NO: 56811 - DNA, 15 bp, Homo sapiens
ataaagagggcactt

SEQ ID NO: 56812 - DNA, 15 bp, Homo sapiens
cataaagagggcact

SEQ ID NO: 56813 - DNA, 15 bp, Homo sapiens
ccataaagagggcac

SEQ ID NO: 56814 - DNA, 15 bp, Homo sapiens
tccataaagagggca

SEQ ID NO: 56815 - DNA, 15 bp, Homo sapiens
ctccataaagagggc

SEQ ID NO: 56816 - DNA, 15 bp, Homo sapiens
actccataaagaggg

SEQ ID NO: 56817 - DNA, 15 bp, Homo sapiens
aactccataaagagg

SEQ ID NO: 56818 - DNA, 15 bp, Homo sapiens
caactccataaagag

SEQ ID NO: 56819 - DNA, 15 bp, Homo sapiens
acaactccataaaga

SEQ ID NO: 56820 - DNA, 15 bp, Homo sapiens
cacaactccataaag

SEQ ID NO: 56821 - DNA, 15 bp, Homo sapiens
acacaactccataaa

SEQ ID NO: 56822 - DNA, 15 bp, Homo sapiens
tacacaactccataa

SEQ ID NO: 56823 - DNA, 15 bp, Homo sapiens
ttacacaactccata

SEQ ID NO: 56824 - DNA, 15 bp, Homo sapiens
cttacacaactccat

SEQ ID NO: 56825 - DNA, 15 bp, Homo sapiens
ccttacacaactcca

SEQ ID NO: 56826 - DNA, 15 bp, Homo sapiens
accttacacaactcc

SEQ ID NO: 56827 - DNA, 15 bp, Homo sapiens
caccttacacaactc

SEQ ID NO: 56828 - DNA, 15 bp, Homo sapiens
tcaccttacacaact

SEQ ID NO: 56829 - DNA, 15 bp, Homo sapiens
ttcaccttacacaac

SEQ ID NO: 56830 - DNA, 15 bp, Homo sapiens
cttcaccttacacaa

SEQ ID NO: 56831 - DNA, 15 bp, Homo sapiens
gcttcaccttacaca

SEQ ID NO: 56832 - DNA, 15 bp, Homo sapiens
tgcttcaccttacac

SEQ ID NO: 56833 - DNA, 15 bp, Homo sapiens
atgcttcaccttaca

SEQ ID NO: 56834 - DNA, 15 bp, Homo sapiens
tatgcttcaccttac

SEQ ID NO: 56835 - DNA, 15 bp, Homo sapiens
atatgcttcacctta

SEQ ID NO: 56836 - DNA, 15 bp, Homo sapiens
tatatgcttcacctt

SEQ ID NO: 56837 - DNA, 15 bp, Homo sapiens
gtatatgcttcacct

SEQ ID NO: 56838 - DNA, 15 bp, Homo sapiens
tgtatatgcttcacc

SEQ ID NO: 56839 - DNA, 15 bp, Homo sapiens
gtgtatatgcttcac

SEQ ID NO: 56840 - DNA, 15 bp, Homo sapiens
agtgtatatgcttca

SEQ ID NO: 56841 - DNA, 15 bp, Homo sapiens
tagtgtatatgcttc

SEQ ID NO: 56842 - DNA, 15 bp, Homo sapiens
atagtgtatatgctt

SEQ ID NO: 56843 - DNA, 15 bp, Homo sapiens
aatagtgtatatgct

SEQ ID NO: 56844 - DNA, 15 bp, Homo sapiens
gaatagtgtatatgc

SEQ ID NO: 56845 - DNA, 15 bp, Homo sapiens
tgaatagtgtatatg

SEQ ID NO: 56846 - DNA, 15 bp, Homo sapiens
ttgaatagtgtatat

SEQ ID NO: 56847 - DNA, 15 bp, Homo sapiens
gttgaatagtgtata

SEQ ID NO: 56848 - DNA, 15 bp, Homo sapiens
tgttgaatagtgtat

SEQ ID NO: 56849 - DNA, 15 bp, Homo sapiens
atgttgaatagtgta

SEQ ID NO: 56850 - DNA, 15 bp, Homo sapiens
tatgttgaatagtgt

SEQ ID NO: 56851 - DNA, 15 bp, Homo sapiens
ctatgttgaatagtg

SEQ ID NO: 56852 - DNA, 15 bp, Homo sapiens
actatgttgaatagt

SEQ ID NO: 56853 - DNA, 15 bp, Homo sapiens
tactatgttgaatag

SEQ ID NO: 56854 - DNA, 15 bp, Homo sapiens
ttactatgttgaata

SEQ ID NO: 56855 - DNA, 15 bp, Homo sapiens
gttactatgttgaat

SEQ ID NO: 56856 - DNA, 15 bp, Homo sapiens
agttactatgttgaa

SEQ ID NO: 56857 - DNA, 15 bp, Homo sapiens
tagttactatgttga

SEQ ID NO: 56858 - DNA, 15 bp, Homo sapiens
atagttactatgttg

SEQ ID NO: 56859 - DNA, 15 bp, Homo sapiens
tatagttactatgtt

SEQ ID NO: 56860 - DNA, 15 bp, Homo sapiens
atatagttactatgt

SEQ ID NO: 56861 - DNA, 15 bp, Homo sapiens
tatatagttactatg

SEQ ID NO: 56862 - DNA, 15 bp, Homo sapiens
ttatatagttactat

SEQ ID NO: 56863 - DNA, 15 bp, Homo sapiens
tttatatagttacta

SEQ ID NO: 56864 - DNA, 15 bp, Homo sapiens
ctttatatagttact

SEQ ID NO: 56865 - DNA, 15 bp, Homo sapiens
cctttatatagttac

SEQ ID NO: 56866 - DNA, 15 bp, Homo sapiens
tcctttatatagtta

SEQ ID NO: 56867 - DNA, 15 bp, Homo sapiens
ttcctttatatagtt

SEQ ID NO: 56868 - DNA, 15 bp, Homo sapiens
cttcctttatatagt

SEQ ID NO: 56869 - DNA, 15 bp, Homo sapiens
acttcctttatatag

SEQ ID NO: 56870 - DNA, 15 bp, Homo sapiens
tacttcctttatata

SEQ ID NO: 56871 - DNA, 15 bp, Homo sapiens
atacttcctttatat

SEQ ID NO: 56872 - DNA, 15 bp, Homo sapiens
aatacttcctttata

SEQ ID NO: 56873 - DNA, 15 bp, Homo sapiens
caatacttcctttat

SEQ ID NO: 56874 - DNA, 15 bp, Homo sapiens
acaatacttccttta

SEQ ID NO: 56875 - DNA, 15 bp, Homo sapiens
aacaatacttccttt

SEQ ID NO: 56876 - DNA, 15 bp, Homo sapiens
caacaatacttcctt

SEQ ID NO: 56877 - DNA, 15 bp, Homo sapiens
acaacaatacttcct

SEQ ID NO: 56878 - DNA, 15 bp, Homo sapiens
aacaacaatacttcc

SEQ ID NO: 56879 - DNA, 15 bp, Homo sapiens
caacaacaatacttc

SEQ ID NO: 56880 - DNA, 15 bp, Homo sapiens
acaacaacaatactt

SEQ ID NO: 56881 - DNA, 15 bp, Homo sapiens
aacaacaacaatact

SEQ ID NO: 56882 - DNA, 15 bp, Homo sapiens
taacaacaacaatac

SEQ ID NO: 56883 - DNA, 15 bp, Homo sapiens
gtaacaacaacaata

SEQ ID NO: 56884 - DNA, 15 bp, Homo sapiens
agtaacaacaacaat

SEQ ID NO: 56885 - DNA, 15 bp, Homo sapiens
cagtaacaacaacaa

SEQ ID NO: 56886 - DNA, 15 bp, Homo sapiens
acagtaacaacaaca

SEQ ID NO: 56887 - DNA, 15 bp, Homo sapiens
tacagtaacaacaac

SEQ ID NO: 56888 - DNA, 15 bp, Homo sapiens
ctacagtaacaacaa

SEQ ID NO: 56889 - DNA, 15 bp, Homo sapiens
actacagtaacaaca

SEQ ID NO: 56890 - DNA, 15 bp, Homo sapiens
aactacagtaacaac

SEQ ID NO: 56891 - DNA, 15 bp, Homo sapiens
taactacagtaacaa

SEQ ID NO: 56892 - DNA, 15 bp, Homo sapiens
ttaactacagtaaca

SEQ ID NO: 56893 - DNA, 15 bp, Homo sapiens
attaactacagtaac

SEQ ID NO: 56894 - DNA, 15 bp, Homo sapiens
tattaactacagtaa

SEQ ID NO: 56895 - DNA, 15 bp, Homo sapiens
gtattaactacagta

SEQ ID NO: 56896 - DNA, 15 bp, Homo sapiens
ggtattaactacagt

SEQ ID NO: 56897 - DNA, 15 bp, Homo sapiens
tggtattaactacag

SEQ ID NO: 56898 - DNA, 15 bp, Homo sapiens
atggtattaactaca

SEQ ID NO: 56899 - DNA, 15 bp, Homo sapiens
aatggtattaactac

SEQ ID NO: 56900 - DNA, 15 bp, Homo sapiens
taatggtattaacta

SEQ ID NO: 56901 - DNA, 15 bp, Homo sapiens
ttaatggtattaact

SEQ ID NO: 56902 - DNA, 15 bp, Homo sapiens
cttaatggtattaac

SEQ ID NO: 56903 - DNA, 15 bp, Homo sapiens
acttaatggtattaa

SEQ ID NO: 56904 - DNA, 15 bp, Homo sapiens
cacttaatggtatta

SEQ ID NO: 56905 - DNA, 15 bp, Homo sapiens
tcacttaatggtatt

SEQ ID NO: 56906 - DNA, 15 bp, Homo sapiens
ctcacttaatggtat

SEQ ID NO: 56907 - DNA, 15 bp, Homo sapiens
tctcacttaatggta

SEQ ID NO: 56908 - DNA, 15 bp, Homo sapiens
atctcacttaatggt

SEQ ID NO: 56909 - DNA, 15 bp, Homo sapiens
catctcacttaatgg

SEQ ID NO: 56910 - DNA, 15 bp, Homo sapiens
acatctcacttaatg

SEQ ID NO: 56911 - DNA, 15 bp, Homo sapiens
aacatctcacttaat

SEQ ID NO: 56912 - DNA, 15 bp, Homo sapiens
aaacatctcacttaa

SEQ ID NO: 56913 - DNA, 15 bp, Homo sapiens
gaaacatctcactta

SEQ ID NO: 56914 - DNA, 15 bp, Homo sapiens
cgaaacatctcactt

SEQ ID NO: 56915 - DNA, 15 bp, Homo sapiens
acgaaacatctcact

SEQ ID NO: 56916 - DNA, 15 bp, Homo sapiens
tacgaaacatctcac

SEQ ID NO: 56917 - DNA, 15 bp, Homo sapiens
atacgaaacatctca

SEQ ID NO: 56918 - DNA, 15 bp, Homo sapiens
tatacgaaacatctc

SEQ ID NO: 56919 - DNA, 15 bp, Homo sapiens
ctatacgaaacatct

SEQ ID NO: 56920 - DNA, 15 bp, Homo sapiens
actatacgaaacatc

SEQ ID NO: 56921 - DNA, 15 bp, Homo sapiens
cactatacgaaacat

SEQ ID NO: 56922 - DNA, 15 bp, Homo sapiens
ccactatacgaaaca

SEQ ID NO: 56923 - DNA, 15 bp, Homo sapiens
tccactatacgaaac

SEQ ID NO: 56924 - DNA, 15 bp, Homo sapiens
ttccactatacgaaa

SEQ ID NO: 56925 - DNA, 15 bp, Homo sapiens
tttccactatacgaa

SEQ ID NO: 56926 - DNA, 15 bp, Homo sapiens
ctttccactatacga

SEQ ID NO: 56927 - DNA, 15 bp, Homo sapiens
gctttccactatacg

SEQ ID NO: 56928 - DNA, 15 bp, Homo sapiens
tgctttccactatac

SEQ ID NO: 56929 - DNA, 15 bp, Homo sapiens
gtgctttccactata

SEQ ID NO: 56930 - DNA, 15 bp, Homo sapiens
tgtgctttccactat

SEQ ID NO: 56931 - DNA, 15 bp, Homo sapiens
atgtgctttccacta

SEQ ID NO: 56932 - DNA, 15 bp, Homo sapiens
catgtgctttccact

SEQ ID NO: 56933 - DNA, 15 bp, Homo sapiens
ccatgtgctttccac

SEQ ID NO: 56934 - DNA, 15 bp, Homo sapiens
tccatgtgctttcca

SEQ ID NO: 56935 - DNA, 15 bp, Homo sapiens
gtccatgtgctttcc

SEQ ID NO: 56936 - DNA, 15 bp, Homo sapiens
agtccatgtgctttc

SEQ ID NO: 56937 - DNA, 15 bp, Homo sapiens
gagtccatgtgcttt

SEQ ID NO: 56938 - DNA, 15 bp, Homo sapiens
agagtccatgtgctt

SEQ ID NO: 56939 - DNA, 15 bp, Homo sapiens
cagagtccatgtgct

SEQ ID NO: 56940 - DNA, 15 bp, Homo sapiens
tcagagtccatgtgc

SEQ ID NO: 56941 - DNA, 15 bp, Homo sapiens
ttcagagtccatgtg

SEQ ID NO: 56942 - DNA, 15 bp, Homo sapiens
attcagagtccatgt

SEQ ID NO: 56943 - DNA, 15 bp, Homo sapiens
aattcagagtccatg

SEQ ID NO: 56944 - DNA, 15 bp, Homo sapiens
gaattcagagtccat

SEQ ID NO: 56945 - DNA, 15 bp, Homo sapiens
tgaattcagagtcca

SEQ ID NO: 56946 - DNA, 15 bp, Homo sapiens
ctgaattcagagtcc

SEQ ID NO: 56947 - DNA, 15 bp, Homo sapiens
tctgaattcagagtc

SEQ ID NO: 56948 - DNA, 15 bp, Homo sapiens
gtctgaattcagagt

SEQ ID NO: 56949 - DNA, 15 bp, Homo sapiens
agtctgaattcagag

SEQ ID NO: 56950 - DNA, 15 bp, Homo sapiens
cagtctgaattcaga

SEQ ID NO: 56951 - DNA, 15 bp, Homo sapiens
ccagtctgaattcag

SEQ ID NO: 56952 - DNA, 15 bp, Homo sapiens
accagtctgaattca

SEQ ID NO: 56953 - DNA, 15 bp, Homo sapiens
gaccagtctgaattc

SEQ ID NO: 56954 - DNA, 15 bp, Homo sapiens
agaccagtctgaatt

SEQ ID NO: 56955 - DNA, 15 bp, Homo sapiens
cagaccagtctgaat

SEQ ID NO: 56956 - DNA, 15 bp, Homo sapiens
tcagaccagtctgaa

SEQ ID NO: 56957 - DNA, 15 bp, Homo sapiens
gtcagaccagtctga

SEQ ID NO: 56958 - DNA, 15 bp, Homo sapiens
agtcagaccagtctg

SEQ ID NO: 56959 - DNA, 15 bp, Homo sapiens
aagtcagaccagtct

SEQ ID NO: 56960 - DNA, 15 bp, Homo sapiens
aaagtcagaccagtc

SEQ ID NO: 56961 - DNA, 15 bp, Homo sapiens
caaagtcagaccagt

SEQ ID NO: 56962 - DNA, 15 bp, Homo sapiens
tcaaagtcagaccag

SEQ ID NO: 56963 - DNA, 15 bp, Homo sapiens
ctcaaagtcagacca

SEQ ID NO: 56964 - DNA, 15 bp, Homo sapiens
actcaaagtcagacc

SEQ ID NO: 56965 - DNA, 15 bp, Homo sapiens
gactcaaagtcagac

SEQ ID NO: 56966 - DNA, 15 bp, Homo sapiens
agactcaaagtcaga

SEQ ID NO: 56967 - DNA, 15 bp, Homo sapiens
gagactcaaagtcag

SEQ ID NO: 56968 - DNA, 15 bp, Homo sapiens
tgagactcaaagtca

SEQ ID NO: 56969 - DNA, 15 bp, Homo sapiens
ctgagactcaaagtc

SEQ ID NO: 56970 - DNA, 15 bp, Homo sapiens
gctgagactcaaagt

SEQ ID NO: 56971 - DNA, 15 bp, Homo sapiens
agctgagactcaaag

SEQ ID NO: 56972 - DNA, 15 bp, Homo sapiens
gagctgagactcaaa

SEQ ID NO: 56973 - DNA, 15 bp, Homo sapiens
ggagctgagactcaa

SEQ ID NO: 56974 - DNA, 15 bp, Homo sapiens
tggagctgagactca

SEQ ID NO: 56975 - DNA, 15 bp, Homo sapiens
gtggagctgagactc

SEQ ID NO: 56976 - DNA, 15 bp, Homo sapiens
tgtggagctgagact

SEQ ID NO: 56977 - DNA, 15 bp, Homo sapiens
atgtggagctgagac

SEQ ID NO: 56978 - DNA, 15 bp, Homo sapiens
gatgtggagctgaga

SEQ ID NO: 56979 - DNA, 15 bp, Homo sapiens
agatgtggagctgag

SEQ ID NO: 56980 - DNA, 15 bp, Homo sapiens
tagatgtggagctga

SEQ ID NO: 56981 - DNA, 15 bp, Homo sapiens
ctagatgtggagctg

SEQ ID NO: 56982 - DNA, 15 bp, Homo sapiens
actagatgtggagct

SEQ ID NO: 56983 - DNA, 15 bp, Homo sapiens
tactagatgtggagc

SEQ ID NO: 56984 - DNA, 15 bp, Homo sapiens
ttactagatgtggag

SEQ ID NO: 56985 - DNA, 15 bp, Homo sapiens
attactagatgtgga

SEQ ID NO: 56986 - DNA, 15 bp, Homo sapiens
tattactagatgtgg

SEQ ID NO: 56987 - DNA, 15 bp, Homo sapiens
gtattactagatgtg

SEQ ID NO: 56988 - DNA, 15 bp, Homo sapiens
agtattactagatgt

SEQ ID NO: 56989 - DNA, 15 bp, Homo sapiens
tagtattactagatg

SEQ ID NO: 56990 - DNA, 15 bp, Homo sapiens
atagtattactagat

SEQ ID NO: 56991 - DNA, 15 bp, Homo sapiens
catagtattactaga

SEQ ID NO: 56992 - DNA, 15 bp, Homo sapiens
tcatagtattactag

SEQ ID NO: 56993 - DNA, 15 bp, Homo sapiens
gtcatagtattacta

SEQ ID NO: 56994 - DNA, 15 bp, Homo sapiens
ggtcatagtattact

SEQ ID NO: 56995 - DNA, 15 bp, Homo sapiens
tggtcatagtattac

SEQ ID NO: 56996 - DNA, 15 bp, Homo sapiens
ttggtcatagtatta

SEQ ID NO: 56997 - DNA, 15 bp, Homo sapiens
cttggtcatagtatt

SEQ ID NO: 56998 - DNA, 15 bp, Homo sapiens
gcttggtcatagtat

SEQ ID NO: 56999 - DNA, 15 bp, Homo sapiens
ggcttggtcatagta

SEQ ID NO: 57000 - DNA, 15 bp, Homo sapiens
gggcttggtcatagt

SEQ ID NO: 57001 - DNA, 15 bp, Homo sapiens
agggcttggtcatag

SEQ ID NO: 57002 - DNA, 15 bp, Homo sapiens
cagggcttggtcata

SEQ ID NO: 57003 - DNA, 15 bp, Homo sapiens
ccagggcttggtcat

SEQ ID NO: 57004 - DNA, 15 bp, Homo sapiens
accagggcttggtca

SEQ ID NO: 57005 - DNA, 15 bp, Homo sapiens
aaccagggcttggtc

SEQ ID NO: 57006 - DNA, 15 bp, Homo sapiens
taaccagggcttggt

SEQ ID NO: 57007 - DNA, 15 bp, Homo sapiens
ttaaccagggcttgg

SEQ ID NO: 57008 - DNA, 15 bp, Homo sapiens
tttaaccagggcttg

SEQ ID NO: 57009 - DNA, 15 bp, Homo sapiens
ttttaaccagggctt

SEQ ID NO: 57010 - DNA, 15 bp, Homo sapiens
attttaaccagggct

SEQ ID NO: 57011 - DNA, 15 bp, Homo sapiens
gattttaaccagggc

SEQ ID NO: 57012 - DNA, 15 bp, Homo sapiens
tgattttaaccaggg

SEQ ID NO: 57013 - DNA, 15 bp, Homo sapiens
atgattttaaccagg

SEQ ID NO: 57014 - DNA, 15 bp, Homo sapiens
catgattttaaccag

SEQ ID NO: 57015 - DNA, 15 bp, Homo sapiens
acatgattttaacca

SEQ ID NO: 57016 - DNA, 15 bp, Homo sapiens
aacatgattttaacc

SEQ ID NO: 57017 - DNA, 15 bp, Homo sapiens
aaacatgattttaac

SEQ ID NO: 57018 - DNA, 15 bp, Homo sapiens
aaaacatgattttaa

SEQ ID NO: 57019 - DNA, 15 bp, Homo sapiens
aaaaacatgatttta

SEQ ID NO: 57020 - DNA, 15 bp, Homo sapiens
aaaaaacatgatttt

SEQ ID NO: 57021 - DNA, 15 bp, Homo sapiens
aaaaaaacatgattt

SEQ ID NO: 57022 - DNA, 15 bp, Homo sapiens
aaaaaaaacatgatt

SEQ ID NO: 57023 - DNA, 15 bp, Homo sapiens
aaaaaaaaacatgat

SEQ ID NO: 57024 - DNA, 15 bp, Homo sapiens
gaaaaaaaaacatga

SEQ ID NO: 57025 - DNA, 15 bp, Homo sapiens
agaaaaaaaaacatg

SEQ ID NO: 57026 - DNA, 15 bp, Homo sapiens
aagaaaaaaaaacat

SEQ ID NO: 57027 - DNA, 15 bp, Homo sapiens
gaagaaaaaaaaaca

SEQ ID NO: 57028 - DNA, 15 bp, Homo sapiens
tgaagaaaaaaaaac

SEQ ID NO: 57029 - DNA, 15 bp, Homo sapiens
ctgaagaaaaaaaaa

SEQ ID NO: 57030 - DNA, 15 bp, Homo sapiens
gctgaagaaaaaaaa

SEQ ID NO: 57031 - DNA, 15 bp, Homo sapiens
ggctgaagaaaaaaa

SEQ ID NO: 57032 - DNA, 15 bp, Homo sapiens
aggctgaagaaaaaa

SEQ ID NO: 57033 - DNA, 15 bp, Homo sapiens
gaggctgaagaaaaa

SEQ ID NO: 57034 - DNA, 15 bp, Homo sapiens
tgaggctgaagaaaa

SEQ ID NO: 57035 - DNA, 15 bp, Homo sapiens
ctgaggctgaagaaa

SEQ ID NO: 57036 - DNA, 15 bp, Homo sapiens
actgaggctgaagaa

SEQ ID NO: 57037 - DNA, 15 bp, Homo sapiens
gactgaggctgaaga

SEQ ID NO: 57038 - DNA, 15 bp, Homo sapiens
agactgaggctgaag

SEQ ID NO: 57039 - DNA, 15 bp, Homo sapiens
aagactgaggctgaa

SEQ ID NO: 57040 - DNA, 15 bp, Homo sapiens
gaagactgaggctga

SEQ ID NO: 57041 - DNA, 15 bp, Homo sapiens
agaagactgaggctg

SEQ ID NO: 57042 - DNA, 15 bp, Homo sapiens
gagaagactgaggct

SEQ ID NO: 57043 - DNA, 15 bp, Homo sapiens
tgagaagactgaggc

SEQ ID NO: 57044 - DNA, 15 bp, Homo sapiens
gtgagaagactgagg

SEQ ID NO: 57045 - DNA, 15 bp, Homo sapiens
tgtgagaagactgag

SEQ ID NO: 57046 - DNA, 15 bp, Homo sapiens
atgtgagaagactga

SEQ ID NO: 57047 - DNA, 15 bp, Homo sapiens
tatgtgagaagactg

SEQ ID NO: 57048 - DNA, 15 bp, Homo sapiens
atatgtgagaagact

SEQ ID NO: 57049 - DNA, 15 bp, Homo sapiens
tatatgtgagaagac

SEQ ID NO: 57050 - DNA, 15 bp, Homo sapiens
ttatatgtgagaaga

SEQ ID NO: 57051 - DNA, 15 bp, Homo sapiens
tttatatgtgagaag

SEQ ID NO: 57052 - DNA, 15 bp, Homo sapiens
ttttatatgtgagaa

SEQ ID NO: 57053 - DNA, 15 bp, Homo sapiens
attttatatgtgaga

SEQ ID NO: 57054 - DNA, 15 bp, Homo sapiens
tattttatatgtgag

SEQ ID NO: 57055 - DNA, 15 bp, Homo sapiens
ctattttatatgtga

SEQ ID NO: 57056 - DNA, 15 bp, Homo sapiens
cctattttatatgtg

SEQ ID NO: 57057 - DNA, 15 bp, Homo sapiens
ccctattttatatgt

SEQ ID NO: 57058 - DNA, 15 bp, Homo sapiens
tccctattttatatg

SEQ ID NO: 57059 - DNA, 15 bp, Homo sapiens
gtccctattttatat

SEQ ID NO: 57060 - DNA, 15 bp, Homo sapiens
tgtccctattttata

SEQ ID NO: 57061 - DNA, 15 bp, Homo sapiens
gtgtccctattttat

SEQ ID NO: 57062 - DNA, 15 bp, Homo sapiens
agtgtccctatttta

SEQ ID NO: 57063 - DNA, 15 bp, Homo sapiens
cagtgtccctatttt

SEQ ID NO: 57064 - DNA, 15 bp, Homo sapiens
acagtgtccctattt

SEQ ID NO: 57065 - DNA, 15 bp, Homo sapiens
gacagtgtccctatt

SEQ ID NO: 57066 - DNA, 15 bp, Homo sapiens
tgacagtgtccctat

SEQ ID NO: 57067 - DNA, 15 bp, Homo sapiens
atgacagtgtcccta

SEQ ID NO: 57068 - DNA, 15 bp, Homo sapiens
aatgacagtgtccct

SEQ ID NO: 57069 - DNA, 15 bp, Homo sapiens
aaatgacagtgtccc

SEQ ID NO: 57070 - DNA, 15 bp, Homo sapiens
taaatgacagtgtcc

SEQ ID NO: 57071 - DNA, 15 bp, Homo sapiens
gtaaatgacagtgtc

SEQ ID NO: 57072 - DNA, 15 bp, Homo sapiens
ggtaaatgacagtgt

SEQ ID NO: 57073 - DNA, 15 bp, Homo sapiens
aggtaaatgacagtg

SEQ ID NO: 57074 - DNA, 15 bp, Homo sapiens
gaggtaaatgacagt

SEQ ID NO: 57075 - DNA, 15 bp, Homo sapiens
tgaggtaaatgacag

SEQ ID NO: 57076 - DNA, 15 bp, Homo sapiens
ctgaggtaaatgaca

SEQ ID NO: 57077 - DNA, 15 bp, Homo sapiens
actgaggtaaatgac

SEQ ID NO: 57078 - DNA, 15 bp, Homo sapiens
aactgaggtaaatga

SEQ ID NO: 57079 - DNA, 15 bp, Homo sapiens
aaactgaggtaaatg

SEQ ID NO: 57080 - DNA, 15 bp, Homo sapiens
aaaactgaggtaaat

SEQ ID NO: 57081 - DNA, 15 bp, Homo sapiens
gaaaactgaggtaaa

SEQ ID NO: 57082 - DNA, 15 bp, Homo sapiens
agaaaactgaggtaa

SEQ ID NO: 57083 - DNA, 15 bp, Homo sapiens
cagaaaactgaggta

SEQ ID NO: 57084 - DNA, 15 bp, Homo sapiens
acagaaaactgaggt

SEQ ID NO: 57085 - DNA, 15 bp, Homo sapiens
cacagaaaactgagg

SEQ ID NO: 57086 - DNA, 15 bp, Homo sapiens
tcacagaaaactgag

SEQ ID NO: 57087 - DNA, 15 bp, Homo sapiens
ctcacagaaaactga

SEQ ID NO: 57088 - DNA, 15 bp, Homo sapiens
cctcacagaaaactg

SEQ ID NO: 57089 - DNA, 15 bp, Homo sapiens
tcctcacagaaaact

SEQ ID NO: 57090 - DNA, 15 bp, Homo sapiens
atcctcacagaaaac

SEQ ID NO: 57091 - DNA, 15 bp, Homo sapiens
tatcctcacagaaaa

SEQ ID NO: 57092 - DNA, 15 bp, Homo sapiens
ttatcctcacagaaa

SEQ ID NO: 57093 - DNA, 15 bp, Homo sapiens
tttatcctcacagaa

SEQ ID NO: 57094 - DNA, 15 bp, Homo sapiens
ttttatcctcacaga

SEQ ID NO: 57095 - DNA, 15 bp, Homo sapiens
gttttatcctcacag

SEQ ID NO: 57096 - DNA, 15 bp, Homo sapiens
tgttttatcctcaca

SEQ ID NO: 57097 - DNA, 15 bp, Homo sapiens
ttgttttatcctcac

SEQ ID NO: 57098 - DNA, 15 bp, Homo sapiens
gttgttttatcctca

SEQ ID NO: 57099 - DNA, 15 bp, Homo sapiens
cgttgttttatcctc

SEQ ID NO: 57100 - DNA, 15 bp, Homo sapiens
tcgttgttttatcct

SEQ ID NO: 57101 - DNA, 15 bp, Homo sapiens
gtcgttgttttatcc

SEQ ID NO: 57102 - DNA, 15 bp, Homo sapiens
tgtcgttgttttatc

SEQ ID NO: 57103 - DNA, 15 bp, Homo sapiens
ctgtcgttgttttat

SEQ ID NO: 57104 - DNA, 15 bp, Homo sapiens
actgtcgttgtttta

SEQ ID NO: 57105 - DNA, 15 bp, Homo sapiens
cactgtcgttgtttt

SEQ ID NO: 57106 - DNA, 15 bp, Homo sapiens
acactgtcgttgttt

SEQ ID NO: 57107 - DNA, 15 bp, Homo sapiens
tacactgtcgttgtt

SEQ ID NO: 57108 - DNA, 15 bp, Homo sapiens
atacactgtcgttgt

SEQ ID NO: 57109 - DNA, 15 bp, Homo sapiens
tatacactgtcgttg

SEQ ID NO: 57110 - DNA, 15 bp, Homo sapiens
atatacactgtcgtt

SEQ ID NO: 57111 - DNA, 15 bp, Homo sapiens
catatacactgtcgt

SEQ ID NO: 57112 - DNA, 15 bp, Homo sapiens
gcatatacactgtcg

SEQ ID NO: 57113 - DNA, 15 bp, Homo sapiens
tgcatatacactgtc

SEQ ID NO: 57114 - DNA, 15 bp, Homo sapiens
ttgcatatacactgt

SEQ ID NO: 57115 - DNA, 15 bp, Homo sapiens
cttgcatatacactg

SEQ ID NO: 57116 - DNA, 15 bp, Homo sapiens
acttgcatatacact

SEQ ID NO: 57117 - DNA, 15 bp, Homo sapiens
tacttgcatatacac

SEQ ID NO: 57118 - DNA, 15 bp, Homo sapiens
atacttgcatataca

SEQ ID NO: 57119 - DNA, 15 bp, Homo sapiens
aatacttgcatatac

SEQ ID NO: 57120 - DNA, 15 bp, Homo sapiens
aaatacttgcatata

SEQ ID NO: 57121 - DNA, 15 bp, Homo sapiens
aaaatacttgcatat

SEQ ID NO: 57122 - DNA, 15 bp, Homo sapiens
caaaatacttgcata

SEQ ID NO: 57123 - DNA, 15 bp, Homo sapiens
acaaaatacttgcat

SEQ ID NO: 57124 - DNA, 15 bp, Homo sapiens
tacaaaatacttgca

SEQ ID NO: 57125 - DNA, 15 bp, Homo sapiens
ttacaaaatacttgc

SEQ ID NO: 57126 - DNA, 15 bp, Homo sapiens
tttacaaaatacttg

SEQ ID NO: 57127 - DNA, 15 bp, Homo sapiens
atttacaaaatactt

SEQ ID NO: 57128 - DNA, 15 bp, Homo sapiens
aatttacaaaatact

SEQ ID NO: 57129 - DNA, 15 bp, Homo sapiens
aaatttacaaaatac

SEQ ID NO: 57130 - DNA, 15 bp, Homo sapiens
aaaatttacaaaata

SEQ ID NO: 57131 - DNA, 15 bp, Homo sapiens
caaaatttacaaaat

SEQ ID NO: 57132 - DNA, 15 bp, Homo sapiens
acaaaatttacaaaa

SEQ ID NO: 57133 - DNA, 15 bp, Homo sapiens
tacaaaatttacaaa

SEQ ID NO: 57134 - DNA, 15 bp, Homo sapiens
ctacaaaatttacaa

SEQ ID NO: 57135 - DNA, 15 bp, Homo sapiens
actacaaaatttaca

SEQ ID NO: 57136 - DNA, 15 bp, Homo sapiens
cactacaaaatttac

SEQ ID NO: 57137 - DNA, 15 bp, Homo sapiens
gcactacaaaattta

SEQ ID NO: 57138 - DNA, 15 bp, Homo sapiens
agcactacaaaattt

SEQ ID NO: 57139 - DNA, 15 bp, Homo sapiens
gagcactacaaaatt

SEQ ID NO: 57140 - DNA, 15 bp, Homo sapiens
ggagcactacaaaat

SEQ ID NO: 57141 - DNA, 15 bp, Homo sapiens
aggagcactacaaaa

SEQ ID NO: 57142 - DNA, 15 bp, Homo sapiens
gaggagcactacaaa

SEQ ID NO: 57143 - DNA, 15 bp, Homo sapiens
tgaggagcactacaa

SEQ ID NO: 57144 - DNA, 15 bp, Homo sapiens
ttgaggagcactaca

SEQ ID NO: 57145 - DNA, 15 bp, Homo sapiens
cttgaggagcactac

SEQ ID NO: 57146 - DNA, 15 bp, Homo sapiens
tcttgaggagcacta

SEQ ID NO: 57147 - DNA, 15 bp, Homo sapiens
atcttgaggagcact

SEQ ID NO: 57148 - DNA, 15 bp, Homo sapiens
aatcttgaggagcac

SEQ ID NO: 57149 - DNA, 15 bp, Homo sapiens
aaatcttgaggagca

SEQ ID NO: 57150 - DNA, 15 bp, Homo sapiens
taaatcttgaggagc

SEQ ID NO: 57151 - DNA, 15 bp, Homo sapiens
ctaaatcttgaggag

SEQ ID NO: 57152 - DNA, 15 bp, Homo sapiens
actaaatcttgagga

SEQ ID NO: 57153 - DNA, 15 bp, Homo sapiens
aactaaatcttgagg

SEQ ID NO: 57154 - DNA, 15 bp, Homo sapiens
caactaaatcttgag

SEQ ID NO: 57155 - DNA, 15 bp, Homo sapiens
ccaactaaatcttga

SEQ ID NO: 57156 - DNA, 15 bp, Homo sapiens
accaactaaatcttg

SEQ ID NO: 57157 - DNA, 15 bp, Homo sapiens
caccaactaaatctt

SEQ ID NO: 57158 - DNA, 15 bp, Homo sapiens
acaccaactaaatct

SEQ ID NO: 57159 - DNA, 15 bp, Homo sapiens
aacaccaactaaatc

SEQ ID NO: 57160 - DNA, 15 bp, Homo sapiens
aaacaccaactaaat

SEQ ID NO: 57161 - DNA, 15 bp, Homo sapiens
taaacaccaactaaa

SEQ ID NO: 57162 - DNA, 15 bp, Homo sapiens
gtaaacaccaactaa

SEQ ID NO: 57163 - DNA, 15 bp, Homo sapiens
agtaaacaccaacta

SEQ ID NO: 57164 - DNA, 15 bp, Homo sapiens
tagtaaacaccaact

SEQ ID NO: 57165 - DNA, 15 bp, Homo sapiens
gtagtaaacaccaac

SEQ ID NO: 57166 - DNA, 15 bp, Homo sapiens
agtagtaaacaccaa

SEQ ID NO: 57167 - DNA, 15 bp, Homo sapiens
aagtagtaaacacca

SEQ ID NO: 57168 - DNA, 15 bp, Homo sapiens
caagtagtaaacacc

SEQ ID NO: 57169 - DNA, 15 bp, Homo sapiens
acaagtagtaaacac

SEQ ID NO: 57170 - DNA, 15 bp, Homo sapiens
tacaagtagtaaaca

SEQ ID NO: 57171 - DNA, 15 bp, Homo sapiens
gtacaagtagtaaac

SEQ ID NO: 57172 - DNA, 15 bp, Homo sapiens
agtacaagtagtaaa

SEQ ID NO: 57173 - DNA, 15 bp, Homo sapiens
aagtacaagtagtaa

SEQ ID NO: 57174 - DNA, 15 bp, Homo sapiens
aaagtacaagtagta

SEQ ID NO: 57175 - DNA, 15 bp, Homo sapiens
gaaagtacaagtagt

SEQ ID NO: 57176 - DNA, 15 bp, Homo sapiens
agaaagtacaagtag

SEQ ID NO: 57177 - DNA, 15 bp, Homo sapiens
gagaaagtacaagta

SEQ ID NO: 57178 - DNA, 15 bp, Homo sapiens
tgagaaagtacaagt

SEQ ID NO: 57179 - DNA, 15 bp, Homo sapiens
gtgagaaagtacaag

SEQ ID NO: 57180 - DNA, 15 bp, Homo sapiens
agtgagaaagtacaa

SEQ ID NO: 57181 - DNA, 15 bp, Homo sapiens
cagtgagaaagtaca

SEQ ID NO: 57182 - DNA, 15 bp, Homo sapiens
ccagtgagaaagtac

SEQ ID NO: 57183 - DNA, 15 bp, Homo sapiens
tccagtgagaaagta

SEQ ID NO: 57184 - DNA, 15 bp, Homo sapiens
ttccagtgagaaagt

SEQ ID NO: 57185 - DNA, 15 bp, Homo sapiens
attccagtgagaaag

SEQ ID NO: 57186 - DNA, 15 bp, Homo sapiens
cattccagtgagaaa

SEQ ID NO: 57187 - DNA, 15 bp, Homo sapiens
ccattccagtgagaa

SEQ ID NO: 57188 - DNA, 15 bp, Homo sapiens
gccattccagtgaga

SEQ ID NO: 57189 - DNA, 15 bp, Homo sapiens
tgccattccagtgag

SEQ ID NO: 57190 - DNA, 15 bp, Homo sapiens
ctgccattccagtga

SEQ ID NO: 57191 - DNA, 15 bp, Homo sapiens
tctgccattccagtg

SEQ ID NO: 57192 - DNA, 15 bp, Homo sapiens
atctgccattccagt

SEQ ID NO: 57193 - DNA, 15 bp, Homo sapiens
catctgccattccag

SEQ ID NO: 57194 - DNA, 15 bp, Homo sapiens
gcatctgccattcca

SEQ ID NO: 57195 - DNA, 15 bp, Homo sapiens
agcatctgccattcc

SEQ ID NO: 57196 - DNA, 15 bp, Homo sapiens
cagcatctgccattc

SEQ ID NO: 57197 - DNA, 15 bp, Homo sapiens
acagcatctgccatt

SEQ ID NO: 57198 - DNA, 15 bp, Homo sapiens
aacagcatctgccat

SEQ ID NO: 57199 - DNA, 15 bp, Homo sapiens
caacagcatctgcca

SEQ ID NO: 57200 - DNA, 15 bp, Homo sapiens
ccaacagcatctgcc

SEQ ID NO: 57201 - DNA, 15 bp, Homo sapiens
tccaacagcatctgc

SEQ ID NO: 57202 - DNA, 15 bp, Homo sapiens
gtccaacagcatctg

SEQ ID NO: 57203 - DNA, 15 bp, Homo sapiens
tgtccaacagcatct

SEQ ID NO: 57204 - DNA, 15 bp, Homo sapiens
ctgtccaacagcatc

SEQ ID NO: 57205 - DNA, 15 bp, Homo sapiens
gctgtccaacagcat

SEQ ID NO: 57206 - DNA, 15 bp, Homo sapiens
tgctgtccaacagca

SEQ ID NO: 57207 - DNA, 15 bp, Homo sapiens
ctgctgtccaacagc

SEQ ID NO: 57208 - DNA, 15 bp, Homo sapiens
cctgctgtccaacag

SEQ ID NO: 57209 - DNA, 15 bp, Homo sapiens
ccctgctgtccaaca

SEQ ID NO: 57210 - DNA, 15 bp, Homo sapiens
tccctgctgtccaac

SEQ ID NO: 57211 - DNA, 15 bp, Homo sapiens
gtccctgctgtccaa

SEQ ID NO: 57212 - DNA, 15 bp, Homo sapiens
tgtccctgctgtcca

SEQ ID NO: 57213 - DNA, 15 bp, Homo sapiens
ttgtccctgctgtcc

SEQ ID NO: 57214 - DNA, 15 bp, Homo sapiens
attgtccctgctgtc

SEQ ID NO: 57215 - DNA, 15 bp, Homo sapiens
cattgtccctgctgt

SEQ ID NO: 57216 - DNA, 15 bp, Homo sapiens
tcattgtccctgctg

SEQ ID NO: 57217 - DNA, 15 bp, Homo sapiens
gtcattgtccctgct

SEQ ID NO: 57218 - DNA, 15 bp, Homo sapiens
ggtcattgtccctgc

SEQ ID NO: 57219 - DNA, 15 bp, Homo sapiens
tggtcattgtccctg

SEQ ID NO: 57220 - DNA, 15 bp, Homo sapiens
gtggtcattgtccct

SEQ ID NO: 57221 - DNA, 15 bp, Homo sapiens
agtggtcattgtccc

SEQ ID NO: 57222 - DNA, 15 bp, Homo sapiens
aagtggtcattgtcc

SEQ ID NO: 57223 - DNA, 15 bp, Homo sapiens
aaagtggtcattgtc

SEQ ID NO: 57224 - DNA, 15 bp, Homo sapiens
aaaagtggtcattgt

SEQ ID NO: 57225 - DNA, 15 bp, Homo sapiens
caaaagtggtcattg

SEQ ID NO: 57226 - DNA, 15 bp, Homo sapiens
ccaaaagtggtcatt

SEQ ID NO: 57227 - DNA, 15 bp, Homo sapiens
cccaaaagtggtcat

SEQ ID NO: 57228 - DNA, 15 bp, Homo sapiens
tcccaaaagtggtca

SEQ ID NO: 57229 - DNA, 15 bp, Homo sapiens
ttcccaaaagtggtc

SEQ ID NO: 57230 - DNA, 15 bp, Homo sapiens
gttcccaaaagtggt

SEQ ID NO: 57231 - DNA, 15 bp, Homo sapiens
tgttcccaaaagtgg

SEQ ID NO: 57232 - DNA, 15 bp, Homo sapiens
ctgttcccaaaagtg

SEQ ID NO: 57233 - DNA, 15 bp, Homo sapiens
gctgttcccaaaagt

SEQ ID NO: 57234 - DNA, 15 bp, Homo sapiens
tgctgttcccaaaag

SEQ ID NO: 57235 - DNA, 15 bp, Homo sapiens
ctgctgttcccaaaa

SEQ ID NO: 57236 - DNA, 15 bp, Homo sapiens
actgctgttcccaaa

SEQ ID NO: 57237 - DNA, 15 bp, Homo sapiens
aactgctgttcccaa

SEQ ID NO: 57238 - DNA, 15 bp, Homo sapiens
caactgctgttccca

SEQ ID NO: 57239 - DNA, 15 bp, Homo sapiens
ccaactgctgttccc

SEQ ID NO: 57240 - DNA, 15 bp, Homo sapiens
tccaactgctgttcc

SEQ ID NO: 57241 - DNA, 15 bp, Homo sapiens
atccaactgctgttc

SEQ ID NO: 57242 - DNA, 15 bp, Homo sapiens
catccaactgctgtt

SEQ ID NO: 57243 - DNA, 15 bp, Homo sapiens
ccatccaactgctgt

SEQ ID NO: 57244 - DNA, 15 bp, Homo sapiens
gccatccaactgctg

SEQ ID NO: 57245 - DNA, 15 bp, Homo sapiens
agccatccaactgct

SEQ ID NO: 57246 - DNA, 15 bp, Homo sapiens
aagccatccaactgc

SEQ ID NO: 57247 - DNA, 15 bp, Homo sapiens
taagccatccaactg

SEQ ID NO: 57248 - DNA, 15 bp, Homo sapiens
ctaagccatccaact

SEQ ID NO: 57249 - DNA, 15 bp, Homo sapiens
tctaagccatccaac

SEQ ID NO: 57250 - DNA, 15 bp, Homo sapiens
atctaagccatccaa

SEQ ID NO: 57251 - DNA, 15 bp, Homo sapiens
aatctaagccatcca

SEQ ID NO: 57252 - DNA, 15 bp, Homo sapiens
caatctaagccatcc

SEQ ID NO: 57253 - DNA, 15 bp, Homo sapiens
ccaatctaagccatc

SEQ ID NO: 57254 - DNA, 15 bp, Homo sapiens
tccaatctaagccat

SEQ ID NO: 57255 - DNA, 15 bp, Homo sapiens
gtccaatctaagcca

SEQ ID NO: 57256 - DNA, 15 bp, Homo sapiens
tgtccaatctaagcc

SEQ ID NO: 57257 - DNA, 15 bp, Homo sapiens
ctgtccaatctaagc

SEQ ID NO: 57258 - DNA, 15 bp, Homo sapiens
gctgtccaatctaag

SEQ ID NO: 57259 - DNA, 15 bp, Homo sapiens
ggctgtccaatctaa

SEQ ID NO: 57260 - DNA, 15 bp, Homo sapiens
gggctgtccaatcta

SEQ ID NO: 57261 - DNA, 15 bp, Homo sapiens
tgggctgtccaatct

SEQ ID NO: 57262 - DNA, 15 bp, Homo sapiens
ttgggctgtccaatc

SEQ ID NO: 57263 - DNA, 15 bp, Homo sapiens
cttgggctgtccaat

SEQ ID NO: 57264 - DNA, 15 bp, Homo sapiens
tcttgggctgtccaa

SEQ ID NO: 57265 - DNA, 15 bp, Homo sapiens
gtcttgggctgtcca

SEQ ID NO: 57266 - DNA, 15 bp, Homo sapiens
tgtcttgggctgtcc

SEQ ID NO: 57267 - DNA, 15 bp, Homo sapiens
atgtcttgggctgtc

SEQ ID NO: 57268 - DNA, 15 bp, Homo sapiens
gatgtcttgggctgt

SEQ ID NO: 57269 - DNA, 15 bp, Homo sapiens
cgatgtcttgggctg

SEQ ID NO: 57270 - DNA, 15 bp, Homo sapiens
acgatgtcttgggct

SEQ ID NO: 57271 - DNA, 15 bp, Homo sapiens
cacgatgtcttgggc

SEQ ID NO: 57272 - DNA, 15 bp, Homo sapiens
ccacgatgtcttggg

SEQ ID NO: 57273 - DNA, 15 bp, Homo sapiens
gccacgatgtcttgg

SEQ ID NO: 57274 - DNA, 15 bp, Homo sapiens
cgccacgatgtcttg

SEQ ID NO: 57275 - DNA, 15 bp, Homo sapiens
acgccacgatgtctt

SEQ ID NO: 57276 - DNA, 15 bp, Homo sapiens
aacgccacgatgtct

SEQ ID NO: 57277 - DNA, 15 bp, Homo sapiens
aaacgccacgatgtc

SEQ ID NO: 57278 - DNA, 15 bp, Homo sapiens
aaaacgccacgatgt

SEQ ID NO: 57279 - DNA, 15 bp, Homo sapiens
aaaaacgccacgatg

SEQ ID NO: 57280 - DNA, 15 bp, Homo sapiens
caaaaacgccacgat

SEQ ID NO: 57281 - DNA, 15 bp, Homo sapiens
ccaaaaacgccacga

SEQ ID NO: 57282 - DNA, 15 bp, Homo sapiens
gccaaaaacgccacg

SEQ ID NO: 57283 - DNA, 15 bp, Homo sapiens
ggccaaaaacgccac

SEQ ID NO: 57284 - DNA, 15 bp, Homo sapiens
tggccaaaaacgcca

SEQ ID NO: 57285 - DNA, 15 bp, Homo sapiens
ttggccaaaaacgcc

SEQ ID NO: 57286 - DNA, 15 bp, Homo sapiens
cttggccaaaaacgc

SEQ ID NO: 57287 - DNA, 15 bp, Homo sapiens
gcttggccaaaaacg

SEQ ID NO: 57288 - DNA, 15 bp, Homo sapiens
tgcttggccaaaaac

SEQ ID NO: 57289 - DNA, 15 bp, Homo sapiens
gtgcttggccaaaaa

SEQ ID NO: 57290 - DNA, 15 bp, Homo sapiens
ggtgcttggccaaaa

SEQ ID NO: 57291 - DNA, 15 bp, Homo sapiens
gggtgcttggccaaa

SEQ ID NO: 57292 - DNA, 15 bp, Homo sapiens
tgggtgcttggccaa

SEQ ID NO: 57293 - DNA, 15 bp, Homo sapiens
ctgggtgcttggcca

SEQ ID NO: 57294 - DNA, 15 bp, Homo sapiens
tctgggtgcttggcc

SEQ ID NO: 57295 - DNA, 15 bp, Homo sapiens
ctctgggtgcttggc

SEQ ID NO: 57296 - DNA, 15 bp, Homo sapiens
cctctgggtgcttgg

SEQ ID NO: 57297 - DNA, 15 bp, Homo sapiens
tcctctgggtgcttg

SEQ ID NO: 57298 - DNA, 15 bp, Homo sapiens
atcctctgggtgctt

SEQ ID NO: 57299 - DNA, 15 bp, Homo sapiens
catcctctgggtgct

SEQ ID NO: 57300 - DNA, 15 bp, Homo sapiens
acatcctctgggtgc

SEQ ID NO: 57301 - DNA, 15 bp, Homo sapiens
gacatcctctgggtg

SEQ ID NO: 57302 - DNA, 15 bp, Homo sapiens
ggacatcctctgggt

SEQ ID NO: 57303 - DNA, 15 bp, Homo sapiens
tggacatcctctggg

SEQ ID NO: 57304 - DNA, 15 bp, Homo sapiens
ctggacatcctctgg

SEQ ID NO: 57305 - DNA, 15 bp, Homo sapiens
actggacatcctctg

SEQ ID NO: 57306 - DNA, 15 bp, Homo sapiens
gactggacatcctct

SEQ ID NO: 57307 - DNA, 15 bp, Homo sapiens
ggactggacatcctc

SEQ ID NO: 57308 - DNA, 15 bp, Homo sapiens
tggactggacatcct

SEQ ID NO: 57309 - DNA, 15 bp, Homo sapiens
ctggactggacatcc

SEQ ID NO: 57310 - DNA, 15 bp, Homo sapiens
actggactggacatc

SEQ ID NO: 57311 - DNA, 15 bp, Homo sapiens
tactggactggacat

SEQ ID NO: 57312 - DNA, 15 bp, Homo sapiens
ttactggactggaca

SEQ ID NO: 57313 - DNA, 15 bp, Homo sapiens
attactggactggac

SEQ ID NO: 57314 - DNA, 15 bp, Homo sapiens
cattactggactgga

SEQ ID NO: 57315 - DNA, 15 bp, Homo sapiens
ccattactggactgg

SEQ ID NO: 57316 - DNA, 15 bp, Homo sapiens
accattactggactg

SEQ ID NO: 57317 - DNA, 15 bp, Homo sapiens
aaccattactggact

SEQ ID NO: 57318 - DNA, 15 bp, Homo sapiens
gaaccattactggac

SEQ ID NO: 57319 - DNA, 15 bp, Homo sapiens
agaaccattactgga

SEQ ID NO: 57320 - DNA, 15 bp, Homo sapiens
cagaaccattactgg

SEQ ID NO: 57321 - DNA, 15 bp, Homo sapiens
acagaaccattactg

SEQ ID NO: 57322 - DNA, 15 bp, Homo sapiens
cacagaaccattact

SEQ ID NO: 57323 - DNA, 15 bp, Homo sapiens
acacagaaccattac

SEQ ID NO: 57324 - DNA, 15 bp, Homo sapiens
tacacagaaccatta

SEQ ID NO: 57325 - DNA, 15 bp, Homo sapiens
gtacacagaaccatt

SEQ ID NO: 57326 - DNA, 15 bp, Homo sapiens
tgtacacagaaccat

SEQ ID NO: 57327 - DNA, 15 bp, Homo sapiens
gtgtacacagaacca

SEQ ID NO: 57328 - DNA, 15 bp, Homo sapiens
ggtgtacacagaacc

SEQ ID NO: 57329 - DNA, 15 bp, Homo sapiens
aggtgtacacagaac

SEQ ID NO: 57330 - DNA, 15 bp, Homo sapiens
caggtgtacacagaa

SEQ ID NO: 57331 - DNA, 15 bp, Homo sapiens
ccaggtgtacacaga

SEQ ID NO: 57332 - DNA, 15 bp, Homo sapiens
tccaggtgtacacag

SEQ ID NO: 57333 - DNA, 15 bp, Homo sapiens
ctccaggtgtacaca

SEQ ID NO: 57334 - DNA, 15 bp, Homo sapiens
tctccaggtgtacac

SEQ ID NO: 57335 - DNA, 15 bp, Homo sapiens
ctctccaggtgtaca

SEQ ID NO: 57336 - DNA, 15 bp, Homo sapiens
tctctccaggtgtac

SEQ ID NO: 57337 - DNA, 15 bp, Homo sapiens
ttctctccaggtgta

SEQ ID NO: 57338 - DNA, 15 bp, Homo sapiens
cttctctccaggtgt

SEQ ID NO: 57339 - DNA, 15 bp, Homo sapiens
gcttctctccaggtg

SEQ ID NO: 57340 - DNA, 15 bp, Homo sapiens
agcttctctccaggt

SEQ ID NO: 57341 - DNA, 15 bp, Homo sapiens
aagcttctctccagg

SEQ ID NO: 57342 - DNA, 15 bp, Homo sapiens
aaagcttctctccag

SEQ ID NO: 57343 - DNA, 15 bp, Homo sapiens
gaaagcttctctcca

SEQ ID NO: 57344 - DNA, 15 bp, Homo sapiens
tgaaagcttctctcc

SEQ ID NO: 57345 - DNA, 15 bp, Homo sapiens
ttgaaagcttctctc

SEQ ID NO: 57346 - DNA, 15 bp, Homo sapiens
gttgaaagcttctct

SEQ ID NO: 57347 - DNA, 15 bp, Homo sapiens
cgttgaaagcttctc

SEQ ID NO: 57348 - DNA, 15 bp, Homo sapiens
tcgttgaaagcttct

SEQ ID NO: 57349 - DNA, 15 bp, Homo sapiens
ctcgttgaaagcttc

SEQ ID NO: 57350 - DNA, 15 bp, Homo sapiens
tctcgttgaaagctt

SEQ ID NO: 57351 - DNA, 15 bp, Homo sapiens
gtctcgttgaaagct

SEQ ID NO: 57352 - DNA, 15 bp, Homo sapiens
agtctcgttgaaagc

SEQ ID NO: 57353 - DNA, 15 bp, Homo sapiens
tagtctcgttgaaag

SEQ ID NO: 57354 - DNA, 15 bp, Homo sapiens
ttagtctcgttgaaa

SEQ ID NO: 57355 - DNA, 15 bp, Homo sapiens
gttagtctcgttgaa

SEQ ID NO: 57356 - DNA, 15 bp, Homo sapiens
ggttagtctcgttga

SEQ ID NO: 57357 - DNA, 15 bp, Homo sapiens
tggttagtctcgttg

SEQ ID NO: 57358 - DNA, 15 bp, Homo sapiens
ctggttagtctcgtt

SEQ ID NO: 57359 - DNA, 15 bp, Homo sapiens
cctggttagtctcgt

SEQ ID NO: 57360 - DNA, 15 bp, Homo sapiens
gcctggttagtctcg

SEQ ID NO: 57361 - DNA, 15 bp, Homo sapiens
tgcctggttagtctc

SEQ ID NO: 57362 - DNA, 15 bp, Homo sapiens
ttgcctggttagtct

SEQ ID NO: 57363 - DNA, 15 bp, Homo sapiens
attgcctggttagtc

SEQ ID NO: 57364 - DNA, 15 bp, Homo sapiens
gattgcctggttagt

SEQ ID NO: 57365 - DNA, 15 bp, Homo sapiens
ggattgcctggttag

SEQ ID NO: 57366 - DNA, 15 bp, Homo sapiens
cggattgcctggtta

SEQ ID NO: 57367 - DNA, 15 bp, Homo sapiens
ccggattgcctggtt

SEQ ID NO: 57368 - DNA, 15 bp, Homo sapiens
tccggattgcctggt

SEQ ID NO: 57369 - DNA, 15 bp, Homo sapiens
gtccggattgcctgg

SEQ ID NO: 57370 - DNA, 15 bp, Homo sapiens
ggtccggattgcctg

SEQ ID NO: 57371 - DNA, 15 bp, Homo sapiens
tggtccggattgcct

SEQ ID NO: 57372 - DNA, 15 bp, Homo sapiens
atggtccggattgcc

SEQ ID NO: 57373 - DNA, 15 bp, Homo sapiens
tatggtccggattgc

SEQ ID NO: 57374 - DNA, 15 bp, Homo sapiens
atatggtccggattg

SEQ ID NO: 57375 - DNA, 15 bp, Homo sapiens
gatatggtccggatt

SEQ ID NO: 57376 - DNA, 15 bp, Homo sapiens
agatatggtccggat

SEQ ID NO: 57377 - DNA, 15 bp, Homo sapiens
gagatatggtccgga

SEQ ID NO: 57378 - DNA, 15 bp, Homo sapiens
cgagatatggtccgg

SEQ ID NO: 57379 - DNA, 15 bp, Homo sapiens
gcgagatatggtccg

SEQ ID NO: 57380 - DNA, 15 bp, Homo sapiens
agcgagatatggtcc

SEQ ID NO: 57381 - DNA, 15 bp, Homo sapiens
aagcgagatatggtc

SEQ ID NO: 57382 - DNA, 15 bp, Homo sapiens
gaagcgagatatggt

SEQ ID NO: 57383 - DNA, 15 bp, Homo sapiens
tgaagcgagatatgg

SEQ ID NO: 57384 - DNA, 15 bp, Homo sapiens
atgaagcgagatatg

SEQ ID NO: 57385 - DNA, 15 bp, Homo sapiens
catgaagcgagatat

SEQ ID NO: 57386 - DNA, 15 bp, Homo sapiens
ccatgaagcgagata

SEQ ID NO: 57387 - DNA, 15 bp, Homo sapiens
tccatgaagcgagat

SEQ ID NO: 57388 - DNA, 15 bp, Homo sapiens
ctccatgaagcgaga

SEQ ID NO: 57389 - DNA, 15 bp, Homo sapiens
cctccatgaagcgag

SEQ ID NO: 57390 - DNA, 15 bp, Homo sapiens
acctccatgaagcga

SEQ ID NO: 57391 - DNA, 15 bp, Homo sapiens
cacctccatgaagcg

SEQ ID NO: 57392 - DNA, 15 bp, Homo sapiens
tcacctccatgaagc

SEQ ID NO: 57393 - DNA, 15 bp, Homo sapiens
ttcacctccatgaag

SEQ ID NO: 57394 - DNA, 15 bp, Homo sapiens
attcacctccatgaa

SEQ ID NO: 57395 - DNA, 15 bp, Homo sapiens
gattcacctccatga

SEQ ID NO: 57396 - DNA, 15 bp, Homo sapiens
agattcacctccatg

SEQ ID NO: 57397 - DNA, 15 bp, Homo sapiens
cagattcacctccat

SEQ ID NO: 57398 - DNA, 15 bp, Homo sapiens
acagattcacctcca

SEQ ID NO: 57399 - DNA, 15 bp, Homo sapiens
aacagattcacctcc

SEQ ID NO: 57400 - DNA, 15 bp, Homo sapiens
caacagattcacctc

SEQ ID NO: 57401 - DNA, 15 bp, Homo sapiens
gcaacagattcacct

SEQ ID NO: 57402 - DNA, 15 bp, Homo sapiens
agcaacagattcacc

SEQ ID NO: 57403 - DNA, 15 bp, Homo sapiens
cagcaacagattcac

SEQ ID NO: 57404 - DNA, 15 bp, Homo sapiens
ccagcaacagattca

SEQ ID NO: 57405 - DNA, 15 bp, Homo sapiens
cccagcaacagattc

SEQ ID NO: 57406 - DNA, 15 bp, Homo sapiens
tcccagcaacagatt

SEQ ID NO: 57407 - DNA, 15 bp, Homo sapiens
atcccagcaacagat

SEQ ID NO: 57408 - DNA, 15 bp, Homo sapiens
gatcccagcaacaga

SEQ ID NO: 57409 - DNA, 15 bp, Homo sapiens
tgatcccagcaacag

SEQ ID NO: 57410 - DNA, 15 bp, Homo sapiens
atgatcccagcaaca

SEQ ID NO: 57411 - DNA, 15 bp, Homo sapiens
aatgatcccagcaac

SEQ ID NO: 57412 - DNA, 15 bp, Homo sapiens
aaatgatcccagcaa

SEQ ID NO: 57413 - DNA, 15 bp, Homo sapiens
taaatgatcccagca

SEQ ID NO: 57414 - DNA, 15 bp, Homo sapiens
ctaaatgatcccagc

SEQ ID NO: 57415 - DNA, 15 bp, Homo sapiens
tctaaatgatcccag

SEQ ID NO: 57416 - DNA, 15 bp, Homo sapiens
ttctaaatgatccca

SEQ ID NO: 57417 - DNA, 15 bp, Homo sapiens
tttctaaatgatccc

SEQ ID NO: 57418 - DNA, 15 bp, Homo sapiens
ttttctaaatgatcc

SEQ ID NO: 57419 - DNA, 15 bp, Homo sapiens
cttttctaaatgatc

SEQ ID NO: 57420 - DNA, 15 bp, Homo sapiens
tcttttctaaatgat

SEQ ID NO: 57421 - DNA, 15 bp, Homo sapiens
gtcttttctaaatga

SEQ ID NO: 57422 - DNA, 15 bp, Homo sapiens
agtcttttctaaatg

SEQ ID NO: 57423 - DNA, 15 bp, Homo sapiens
aagtcttttctaaat

SEQ ID NO: 57424 - DNA, 15 bp, Homo sapiens
taagtcttttctaaa

SEQ ID NO: 57425 - DNA, 15 bp, Homo sapiens
ttaagtcttttctaa

SEQ ID NO: 57426 - DNA, 15 bp, Homo sapiens
gttaagtcttttcta

SEQ ID NO: 57427 - DNA, 15 bp, Homo sapiens
cgttaagtcttttct

SEQ ID NO: 57428 - DNA, 15 bp, Homo sapiens
ccgttaagtcttttc

SEQ ID NO: 57429 - DNA, 15 bp, Homo sapiens
gccgttaagtctttt

SEQ ID NO: 57430 - DNA, 15 bp, Homo sapiens
agccgttaagtcttt

SEQ ID NO: 57431 - DNA, 15 bp, Homo sapiens
aagccgttaagtctt

SEQ ID NO: 57432 - DNA, 15 bp, Homo sapiens
gaagccgttaagtct

SEQ ID NO: 57433 - DNA, 15 bp, Homo sapiens
agaagccgttaagtc

SEQ ID NO: 57434 - DNA, 15 bp, Homo sapiens
aagaagccgttaagt

SEQ ID NO: 57435 - DNA, 15 bp, Homo sapiens
aaagaagccgttaag

SEQ ID NO: 57436 - DNA, 15 bp, Homo sapiens
gaaagaagccgttaa

SEQ ID NO: 57437 - DNA, 15 bp, Homo sapiens
agaaagaagccgtta

SEQ ID NO: 57438 - DNA, 15 bp, Homo sapiens
gagaaagaagccgtt

SEQ ID NO: 57439 - DNA, 15 bp, Homo sapiens
agagaaagaagccgt

SEQ ID NO: 57440 - DNA, 15 bp, Homo sapiens
cagagaaagaagccg

SEQ ID NO: 57441 - DNA, 15 bp, Homo sapiens
tcagagaaagaagcc

SEQ ID NO: 57442 - DNA, 15 bp, Homo sapiens
ctcagagaaagaagc

SEQ ID NO: 57443 - DNA, 15 bp, Homo sapiens
tctcagagaaagaag

SEQ ID NO: 57444 - DNA, 15 bp, Homo sapiens
gtctcagagaaagaa

SEQ ID NO: 57445 - DNA, 15 bp, Homo sapiens
cgtctcagagaaaga

SEQ ID NO: 57446 - DNA, 15 bp, Homo sapiens
acgtctcagagaaag

SEQ ID NO: 57447 - DNA, 15 bp, Homo sapiens
aacgtctcagagaaa

SEQ ID NO: 57448 - DNA, 15 bp, Homo sapiens
taacgtctcagagaa

SEQ ID NO: 57449 - DNA, 15 bp, Homo sapiens
gtaacgtctcagaga

SEQ ID NO: 57450 - DNA, 15 bp, Homo sapiens
tgtaacgtctcagag

SEQ ID NO: 57451 - DNA, 15 bp, Homo sapiens
ttgtaacgtctcaga

SEQ ID NO: 57452 - DNA, 15 bp, Homo sapiens
attgtaacgtctcag

SEQ ID NO: 57453 - DNA, 15 bp, Homo sapiens
tattgtaacgtctca

SEQ ID NO: 57454 - DNA, 15 bp, Homo sapiens
ttattgtaacgtctc

SEQ ID NO: 57455 - DNA, 15 bp, Homo sapiens
cttattgtaacgtct

SEQ ID NO: 57456 - DNA, 15 bp, Homo sapiens
ccttattgtaacgtc

SEQ ID NO: 57457 - DNA, 15 bp, Homo sapiens
accttattgtaacgt

SEQ ID NO: 57458 - DNA, 15 bp, Homo sapiens
aaccttattgtaacg

SEQ ID NO: 57459 - DNA, 15 bp, Homo sapiens
gaaccttattgtaac

SEQ ID NO: 57460 - DNA, 15 bp, Homo sapiens
tgaaccttattgtaa

SEQ ID NO: 57461 - DNA, 15 bp, Homo sapiens
ctgaaccttattgta

SEQ ID NO: 57462 - DNA, 15 bp, Homo sapiens
cctgaaccttattgt

SEQ ID NO: 57463 - DNA, 15 bp, Homo sapiens
gcctgaaccttattg

SEQ ID NO: 57464 - DNA, 15 bp, Homo sapiens
tgcctgaaccttatt

SEQ ID NO: 57465 - DNA, 15 bp, Homo sapiens
ctgcctgaaccttat

SEQ ID NO: 57466 - DNA, 15 bp, Homo sapiens
cctgcctgaacctta

SEQ ID NO: 57467 - DNA, 15 bp, Homo sapiens
tcctgcctgaacctt

SEQ ID NO: 57468 - DNA, 15 bp, Homo sapiens
ctcctgcctgaacct

SEQ ID NO: 57469 - DNA, 15 bp, Homo sapiens
cctcctgcctgaacc

SEQ ID NO: 57470 - DNA, 15 bp, Homo sapiens
gcctcctgcctgaac

SEQ ID NO: 57471 - DNA, 15 bp, Homo sapiens
tgcctcctgcctgaa

SEQ ID NO: 57472 - DNA, 15 bp, Homo sapiens
ttgcctcctgcctga

SEQ ID NO: 57473 - DNA, 15 bp, Homo sapiens
cttgcctcctgcctg

SEQ ID NO: 57474 - DNA, 15 bp, Homo sapiens
acttgcctcctgcct

SEQ ID NO: 57475 - DNA, 15 bp, Homo sapiens
aacttgcctcctgcc

SEQ ID NO: 57476 - DNA, 15 bp, Homo sapiens
aaacttgcctcctgc

SEQ ID NO: 57477 - DNA, 15 bp, Homo sapiens
taaacttgcctcctg

SEQ ID NO: 57478 - DNA, 15 bp, Homo sapiens
ctaaacttgcctcct

SEQ ID NO: 57479 - DNA, 15 bp, Homo sapiens
tctaaacttgcctcc

SEQ ID NO: 57480 - DNA, 15 bp, Homo sapiens
ttctaaacttgcctc

SEQ ID NO: 57481 - DNA, 15 bp, Homo sapiens
tttctaaacttgcct

SEQ ID NO: 57482 - DNA, 15 bp, Homo sapiens
atttctaaacttgcc

SEQ ID NO: 57483 - DNA, 15 bp, Homo sapiens
tatttctaaacttgc

SEQ ID NO: 57484 - DNA, 15 bp, Homo sapiens
ttatttctaaacttg

SEQ ID NO: 57485 - DNA, 15 bp, Homo sapiens
attatttctaaactt

SEQ ID NO: 57486 - DNA, 15 bp, Homo sapiens
cattatttctaaact

SEQ ID NO: 57487 - DNA, 15 bp, Homo sapiens
acattatttctaaac

SEQ ID NO: 57488 - DNA, 15 bp, Homo sapiens
tacattatttctaaa

SEQ ID NO: 57489 - DNA, 15 bp, Homo sapiens
atacattatttctaa

SEQ ID NO: 57490 - DNA, 15 bp, Homo sapiens
tatacattatttcta

SEQ ID NO: 57491 - DNA, 15 bp, Homo sapiens
ctatacattatttct

SEQ ID NO: 57492 - DNA, 15 bp, Homo sapiens
actatacattatttc

SEQ ID NO: 57493 - DNA, 15 bp, Homo sapiens
gactatacattattt

SEQ ID NO: 57494 - DNA, 15 bp, Homo sapiens
agactatacattatt

SEQ ID NO: 57495 - DNA, 15 bp, Homo sapiens
gagactatacattat

SEQ ID NO: 57496 - DNA, 15 bp, Homo sapiens
tgagactatacatta

SEQ ID NO: 57497 - DNA, 15 bp, Homo sapiens
atgagactatacatt

SEQ ID NO: 57498 - DNA, 15 bp, Homo sapiens
aatgagactatacat

SEQ ID NO: 57499 - DNA, 15 bp, Homo sapiens
aaatgagactataca

SEQ ID NO: 57500 - DNA, 15 bp, Homo sapiens
taaatgagactatac

SEQ ID NO: 57501 - DNA, 15 bp, Homo sapiens
gtaaatgagactata

SEQ ID NO: 57502 - DNA, 15 bp, Homo sapiens
tgtaaatgagactat

SEQ ID NO: 57503 - DNA, 15 bp, Homo sapiens
ttgtaaatgagacta

SEQ ID NO: 57504 - DNA, 15 bp, Homo sapiens
tttgtaaatgagact

SEQ ID NO: 57505 - DNA, 15 bp, Homo sapiens
ttttgtaaatgagac

SEQ ID NO: 57506 - DNA, 15 bp, Homo sapiens
gttttgtaaatgaga

SEQ ID NO: 57507 - DNA, 15 bp, Homo sapiens
agttttgtaaatgag

SEQ ID NO: 57508 - DNA, 15 bp, Homo sapiens
tagttttgtaaatga

SEQ ID NO: 57509 - DNA, 15 bp, Homo sapiens
atagttttgtaaatg

SEQ ID NO: 57510 - DNA, 15 bp, Homo sapiens
gatagttttgtaaat

SEQ ID NO: 57511 - DNA, 15 bp, Homo sapiens
ggatagttttgtaaa

SEQ ID NO: 57512 - DNA, 15 bp, Homo sapiens
gggatagttttgtaa

SEQ ID NO: 57513 - DNA, 15 bp, Homo sapiens
agggatagttttgta

SEQ ID NO: 57514 - DNA, 15 bp, Homo sapiens
gagggatagttttgt

SEQ ID NO: 57515 - DNA, 15 bp, Homo sapiens
tgagggatagttttg

SEQ ID NO: 57516 - DNA, 15 bp, Homo sapiens
ttgagggatagtttt

SEQ ID NO: 57517 - DNA, 15 bp, Homo sapiens
cttgagggatagttt

SEQ ID NO: 57518 - DNA, 15 bp, Homo sapiens
gcttgagggatagtt

SEQ ID NO: 57519 - DNA, 15 bp, Homo sapiens
ggcttgagggatagt

SEQ ID NO: 57520 - DNA, 15 bp, Homo sapiens
aggcttgagggatag

SEQ ID NO: 57521 - DNA, 15 bp, Homo sapiens
taggcttgagggata

SEQ ID NO: 57522 - DNA, 15 bp, Homo sapiens
ttaggcttgagggat

SEQ ID NO: 57523 - DNA, 15 bp, Homo sapiens
gttaggcttgaggga

SEQ ID NO: 57524 - DNA, 15 bp, Homo sapiens
tgttaggcttgaggg

SEQ ID NO: 57525 - DNA, 15 bp, Homo sapiens
gtgttaggcttgagg

SEQ ID NO: 57526 - DNA, 15 bp, Homo sapiens
tgtgttaggcttgag

SEQ ID NO: 57527 - DNA, 15 bp, Homo sapiens
ctgtgttaggcttga

SEQ ID NO: 57528 - DNA, 15 bp, Homo sapiens
cctgtgttaggcttg

SEQ ID NO: 57529 - DNA, 15 bp, Homo sapiens
tcctgtgttaggctt

SEQ ID NO: 57530 - DNA, 15 bp, Homo sapiens
atcctgtgttaggct

SEQ ID NO: 57531 - DNA, 15 bp, Homo sapiens
aatcctgtgttaggc

SEQ ID NO: 57532 - DNA, 15 bp, Homo sapiens
aaatcctgtgttagg

SEQ ID NO: 57533 - DNA, 15 bp, Homo sapiens
caaatcctgtgttag

SEQ ID NO: 57534 - DNA, 15 bp, Homo sapiens
tcaaatcctgtgtta

SEQ ID NO: 57535 - DNA, 15 bp, Homo sapiens
atcaaatcctgtgtt

SEQ ID NO: 57536 - DNA, 15 bp, Homo sapiens
tatcaaatcctgtgt

SEQ ID NO: 57537 - DNA, 15 bp, Homo sapiens
ttatcaaatcctgtg

SEQ ID NO: 57538 - DNA, 15 bp, Homo sapiens
gttatcaaatcctgt

SEQ ID NO: 57539 - DNA, 15 bp, Homo sapiens
tgttatcaaatcctg

SEQ ID NO: 57540 - DNA, 15 bp, Homo sapiens
ttgttatcaaatcct

SEQ ID NO: 57541 - DNA, 15 bp, Homo sapiens
tttgttatcaaatcc

SEQ ID NO: 57542 - DNA, 15 bp, Homo sapiens
ttttgttatcaaatc

SEQ ID NO: 57543 - DNA, 15 bp, Homo sapiens
cttttgttatcaaat

SEQ ID NO: 57544 - DNA, 15 bp, Homo sapiens
ccttttgttatcaaa

SEQ ID NO: 57545 - DNA, 15 bp, Homo sapiens
gccttttgttatcaa

SEQ ID NO: 57546 - DNA, 15 bp, Homo sapiens
tgccttttgttatca

SEQ ID NO: 57547 - DNA, 15 bp, Homo sapiens
gtgccttttgttatc

SEQ ID NO: 57548 - DNA, 15 bp, Homo sapiens
agtgccttttgttat

SEQ ID NO: 57549 - DNA, 15 bp, Homo sapiens
aagtgccttttgtta

SEQ ID NO: 57550 - DNA, 15 bp, Homo sapiens
taagtgccttttgtt

SEQ ID NO: 57551 - DNA, 15 bp, Homo sapiens
ttaagtgccttttgt

SEQ ID NO: 57552 - DNA, 15 bp, Homo sapiens
attaagtgccttttg

SEQ ID NO: 57553 - DNA, 15 bp, Homo sapiens
tattaagtgcctttt

SEQ ID NO: 57554 - DNA, 15 bp, Homo sapiens
ttattaagtgccttt

SEQ ID NO: 57555 - DNA, 15 bp, Homo sapiens
tttattaagtgcctt

SEQ ID NO: 57556 - DNA, 15 bp, Homo sapiens
atttattaagtgcct

SEQ ID NO: 57557 - DNA, 15 bp, Homo sapiens
catttattaagtgcc

SEQ ID NO: 57558 - DNA, 15 bp, Homo sapiens
acatttattaagtgc

SEQ ID NO: 57559 - DNA, 15 bp, Homo sapiens
aacatttattaagtg

SEQ ID NO: 57560 - DNA, 15 bp, Homo sapiens
taacatttattaagt

SEQ ID NO: 57561 - DNA, 15 bp, Homo sapiens
ctaacatttattaag

SEQ ID NO: 57562 - DNA, 15 bp, Homo sapiens
actaacatttattaa

SEQ ID NO: 57563 - DNA, 15 bp, Homo sapiens
aactaacatttatta

SEQ ID NO: 57564 - DNA, 15 bp, Homo sapiens
caactaacatttatt

SEQ ID NO: 57565 - DNA, 15 bp, Homo sapiens
tcaactaacatttat

SEQ ID NO: 57566 - DNA, 15 bp, Homo sapiens
ctcaactaacattta

SEQ ID NO: 57567 - DNA, 15 bp, Homo sapiens
actcaactaacattt

SEQ ID NO: 57568 - DNA, 15 bp, Homo sapiens
cactcaactaacatt

SEQ ID NO: 57569 - DNA, 15 bp, Homo sapiens
ccactcaactaacat

SEQ ID NO: 57570 - DNA, 15 bp, Homo sapiens
accactcaactaaca

SEQ ID NO: 57571 - DNA, 15 bp, Homo sapiens
aaccactcaactaac

SEQ ID NO: 57572 - DNA, 15 bp, Homo sapiens
caaccactcaactaa

SEQ ID NO: 57573 - DNA, 15 bp, Homo sapiens
tcaaccactcaacta

SEQ ID NO: 57574 - DNA, 15 bp, Homo sapiens
ttcaaccactcaact

SEQ ID NO: 57575 - DNA, 15 bp, Homo sapiens
attcaaccactcaac

SEQ ID NO: 57576 - DNA, 15 bp, Homo sapiens
cattcaaccactcaa

SEQ ID NO: 57577 - DNA, 15 bp, Homo sapiens
tcattcaaccactca

SEQ ID NO: 57578 - DNA, 15 bp, Homo sapiens
ctcattcaaccactc

SEQ ID NO: 57579 - DNA, 15 bp, Homo sapiens
actcattcaaccact

SEQ ID NO: 57580 - DNA, 15 bp, Homo sapiens
tactcattcaaccac

SEQ ID NO: 57581 - DNA, 15 bp, Homo sapiens
ttactcattcaacca

SEQ ID NO: 57582 - DNA, 15 bp, Homo sapiens
tttactcattcaacc

SEQ ID NO: 57583 - DNA, 15 bp, Homo sapiens
atttactcattcaac

SEQ ID NO: 57584 - DNA, 15 bp, Homo sapiens
tatttactcattcaa

SEQ ID NO: 57585 - DNA, 15 bp, Homo sapiens
ttatttactcattca

SEQ ID NO: 57586 - DNA, 15 bp, Homo sapiens
tttatttactcattc

SEQ ID NO: 57587 - DNA, 15 bp, Homo sapiens
gtttatttactcatt

SEQ ID NO: 57588 - DNA, 15 bp, Homo sapiens
agtttatttactcat

SEQ ID NO: 57589 - DNA, 15 bp, Homo sapiens
gagtttatttactca

SEQ ID NO: 57590 - DNA, 15 bp, Homo sapiens
agagtttatttactc

SEQ ID NO: 57591 - DNA, 15 bp, Homo sapiens
tagagtttatttact

SEQ ID NO: 57592 - DNA, 15 bp, Homo sapiens
ctagagtttatttac

SEQ ID NO: 57593 - DNA, 15 bp, Homo sapiens
gctagagtttattta

SEQ ID NO: 57594 - DNA, 15 bp, Homo sapiens
agctagagtttattt

SEQ ID NO: 57595 - DNA, 15 bp, Homo sapiens
aagctagagtttatt

SEQ ID NO: 57596 - DNA, 15 bp, Homo sapiens
aaagctagagtttat

SEQ ID NO: 57597 - DNA, 15 bp, Homo sapiens
taaagctagagttta

SEQ ID NO: 57598 - DNA, 15 bp, Homo sapiens
ctaaagctagagttt

SEQ ID NO: 57599 - DNA, 15 bp, Homo sapiens
actaaagctagagtt

SEQ ID NO: 57600 - DNA, 15 bp, Homo sapiens
tactaaagctagagt

SEQ ID NO: 57601 - DNA, 15 bp, Homo sapiens
ttactaaagctagag

SEQ ID NO: 57602 - DNA, 15 bp, Homo sapiens
tttactaaagctaga

SEQ ID NO: 57603 - DNA, 15 bp, Homo sapiens
atttactaaagctag

SEQ ID NO: 57604 - DNA, 15 bp, Homo sapiens
aatttactaaagcta

SEQ ID NO: 57605 - DNA, 15 bp, Homo sapiens
taatttactaaagct

SEQ ID NO: 57606 - DNA, 15 bp, Homo sapiens
ttaatttactaaagc

SEQ ID NO: 57607 - DNA, 15 bp, Homo sapiens
gttaatttactaaag

SEQ ID NO: 57608 - DNA, 15 bp, Homo sapiens
agttaatttactaaa

SEQ ID NO: 57609 - DNA, 15 bp, Homo sapiens
gagttaatttactaa

SEQ ID NO: 57610 - DNA, 15 bp, Homo sapiens
agagttaatttacta

SEQ ID NO: 57611 - DNA, 15 bp, Homo sapiens
tagagttaatttact

SEQ ID NO: 57612 - DNA, 15 bp, Homo sapiens
ctagagttaatttac

SEQ ID NO: 57613 - DNA, 15 bp, Homo sapiens
gctagagttaattta

SEQ ID NO: 57614 - DNA, 15 bp, Homo sapiens
agctagagttaattt

SEQ ID NO: 57615 - DNA, 15 bp, Homo sapiens
aagctagagttaatt

SEQ ID NO: 57616 - DNA, 15 bp, Homo sapiens
taagctagagttaat

SEQ ID NO: 57617 - DNA, 15 bp, Homo sapiens
ataagctagagttaa

SEQ ID NO: 57618 - DNA, 15 bp, Homo sapiens
aataagctagagtta

SEQ ID NO: 57619 - DNA, 15 bp, Homo sapiens
gaataagctagagtt

SEQ ID NO: 57620 - DNA, 15 bp, Homo sapiens
agaataagctagagt

SEQ ID NO: 57621 - DNA, 15 bp, Homo sapiens
tagaataagctagag

SEQ ID NO: 57622 - DNA, 15 bp, Homo sapiens
atagaataagctaga

SEQ ID NO: 57623 - DNA, 15 bp, Homo sapiens
tatagaataagctag

SEQ ID NO: 57624 - DNA, 15 bp, Homo sapiens
atatagaataagcta

SEQ ID NO: 57625 - DNA, 15 bp, Homo sapiens
tatatagaataagct

SEQ ID NO: 57626 - DNA, 15 bp, Homo sapiens
ctatatagaataagc

SEQ ID NO: 57627 - DNA, 15 bp, Homo sapiens
cctatatagaataag

SEQ ID NO: 57628 - DNA, 15 bp, Homo sapiens
gcctatatagaataa

SEQ ID NO: 57629 - DNA, 15 bp, Homo sapiens
agcctatatagaata

SEQ ID NO: 57630 - DNA, 15 bp, Homo sapiens
gagcctatatagaat

SEQ ID NO: 57631 - DNA, 15 bp, Homo sapiens
tgagcctatatagaa

SEQ ID NO: 57632 - DNA, 15 bp, Homo sapiens
ttgagcctatataga

SEQ ID NO: 57633 - DNA, 15 bp, Homo sapiens
cttgagcctatatag

SEQ ID NO: 57634 - DNA, 15 bp, Homo sapiens
tcttgagcctatata

SEQ ID NO: 57635 - DNA, 15 bp, Homo sapiens
ctcttgagcctatat

SEQ ID NO: 57636 - DNA, 15 bp, Homo sapiens
tctcttgagcctata

SEQ ID NO: 57637 - DNA, 15 bp, Homo sapiens
ttctcttgagcctat

SEQ ID NO: 57638 - DNA, 15 bp, Homo sapiens
attctcttgagccta

SEQ ID NO: 57639 - DNA, 15 bp, Homo sapiens
tattctcttgagcct

SEQ ID NO: 57640 - DNA, 15 bp, Homo sapiens
atattctcttgagcc

SEQ ID NO: 57641 - DNA, 15 bp, Homo sapiens
aatattctcttgagc

SEQ ID NO: 57642 - DNA, 15 bp, Homo sapiens
aaatattctcttgag

SEQ ID NO: 57643 - DNA, 15 bp, Homo sapiens
gaaatattctcttga

SEQ ID NO: 57644 - DNA, 15 bp, Homo sapiens
agaaatattctcttg

SEQ ID NO: 57645 - DNA, 15 bp, Homo sapiens
tagaaatattctctt

SEQ ID NO: 57646 - DNA, 15 bp, Homo sapiens
gtagaaatattctct

SEQ ID NO: 57647 - DNA, 15 bp, Homo sapiens
ggtagaaatattctc

SEQ ID NO: 57648 - DNA, 15 bp, Homo sapiens
gggtagaaatattct

SEQ ID NO: 57649 - DNA, 15 bp, Homo sapiens
tgggtagaaatattc

SEQ ID NO: 57650 - DNA, 15 bp, Homo sapiens
atgggtagaaatatt

SEQ ID NO: 57651 - DNA, 15 bp, Homo sapiens
aatgggtagaaatat

SEQ ID NO: 57652 - DNA, 15 bp, Homo sapiens
aaatgggtagaaata

SEQ ID NO: 57653 - DNA, 15 bp, Homo sapiens
aaaatgggtagaaat

SEQ ID NO: 57654 - DNA, 15 bp, Homo sapiens
gaaaatgggtagaaa

SEQ ID NO: 57655 - DNA, 15 bp, Homo sapiens
agaaaatgggtagaa

SEQ ID NO: 57656 - DNA, 15 bp, Homo sapiens
aagaaaatgggtaga

SEQ ID NO: 57657 - DNA, 15 bp, Homo sapiens
gaagaaaatgggtag

SEQ ID NO: 57658 - DNA, 15 bp, Homo sapiens
agaagaaaatgggta

SEQ ID NO: 57659 - DNA, 15 bp, Homo sapiens
tagaagaaaatgggt

SEQ ID NO: 57660 - DNA, 15 bp, Homo sapiens
ctagaagaaaatggg

SEQ ID NO: 57661 - DNA, 15 bp, Homo sapiens
cctagaagaaaatgg

SEQ ID NO: 57662 - DNA, 15 bp, Homo sapiens
acctagaagaaaatg

SEQ ID NO: 57663 - DNA, 15 bp, Homo sapiens
aacctagaagaaaat

SEQ ID NO: 57664 - DNA, 15 bp, Homo sapiens
aaacctagaagaaaa

SEQ ID NO: 57665 - DNA, 15 bp, Homo sapiens
aaaacctagaagaaa

SEQ ID NO: 57666 - DNA, 15 bp, Homo sapiens
gaaaacctagaagaa

SEQ ID NO: 57667 - DNA, 15 bp, Homo sapiens
ggaaaacctagaaga

SEQ ID NO: 57668 - DNA, 15 bp, Homo sapiens
aggaaaacctagaag

SEQ ID NO: 57669 - DNA, 15 bp, Homo sapiens
taggaaaacctagaa

SEQ ID NO: 57670 - DNA, 15 bp, Homo sapiens
ataggaaaacctaga

SEQ ID NO: 57671 - DNA, 15 bp, Homo sapiens
gataggaaaacctag

SEQ ID NO: 57672 - DNA, 15 bp, Homo sapiens
agataggaaaaccta

SEQ ID NO: 57673 - DNA, 15 bp, Homo sapiens
gagataggaaaacct

SEQ ID NO: 57674 - DNA, 15 bp, Homo sapiens
tgagataggaaaacc

SEQ ID NO: 57675 - DNA, 15 bp, Homo sapiens
ctgagataggaaaac

SEQ ID NO: 57676 - DNA, 15 bp, Homo sapiens
actgagataggaaaa

SEQ ID NO: 57677 - DNA, 15 bp, Homo sapiens
cactgagataggaaa

SEQ ID NO: 57678 - DNA, 15 bp, Homo sapiens
tcactgagataggaa

SEQ ID NO: 57679 - DNA, 15 bp, Homo sapiens
gtcactgagatagga

SEQ ID NO: 57680 - DNA, 15 bp, Homo sapiens
agtcactgagatagg

SEQ ID NO: 57681 - DNA, 15 bp, Homo sapiens
tagtcactgagatag

SEQ ID NO: 57682 - DNA, 15 bp, Homo sapiens
ttagtcactgagata

SEQ ID NO: 57683 - DNA, 15 bp, Homo sapiens
attagtcactgagat

SEQ ID NO: 57684 - DNA, 15 bp, Homo sapiens
cattagtcactgaga

SEQ ID NO: 57685 - DNA, 15 bp, Homo sapiens
ccattagtcactgag

SEQ ID NO: 57686 - DNA, 15 bp, Homo sapiens
accattagtcactga

SEQ ID NO: 57687 - DNA, 15 bp, Homo sapiens
taccattagtcactg

SEQ ID NO: 57688 - DNA, 15 bp, Homo sapiens
ctaccattagtcact

SEQ ID NO: 57689 - DNA, 15 bp, Homo sapiens
gctaccattagtcac

SEQ ID NO: 57690 - DNA, 15 bp, Homo sapiens
tgctaccattagtca

SEQ ID NO: 57691 - DNA, 15 bp, Homo sapiens
ttgctaccattagtc

SEQ ID NO: 57692 - DNA, 15 bp, Homo sapiens
tttgctaccattagt

SEQ ID NO: 57693 - DNA, 15 bp, Homo sapiens
ctttgctaccattag

SEQ ID NO: 57694 - DNA, 15 bp, Homo sapiens
gctttgctaccatta

SEQ ID NO: 57695 - DNA, 15 bp, Homo sapiens
tgctttgctaccatt

SEQ ID NO: 57696 - DNA, 15 bp, Homo sapiens
atgctttgctaccat

SEQ ID NO: 57697 - DNA, 15 bp, Homo sapiens
aatgctttgctacca

SEQ ID NO: 57698 - DNA, 15 bp, Homo sapiens
gaatgctttgctacc

SEQ ID NO: 57699 - DNA, 15 bp, Homo sapiens
ggaatgctttgctac

SEQ ID NO: 57700 - DNA, 15 bp, Homo sapiens
gggaatgctttgcta

SEQ ID NO: 57701 - DNA, 15 bp, Homo sapiens
agggaatgctttgct

SEQ ID NO: 57702 - DNA, 15 bp, Homo sapiens
aagggaatgctttgc

SEQ ID NO: 57703 - DNA, 15 bp, Homo sapiens
taagggaatgctttg

SEQ ID NO: 57704 - DNA, 15 bp, Homo sapiens
ttaagggaatgcttt

SEQ ID NO: 57705 - DNA, 15 bp, Homo sapiens
tttaagggaatgctt

SEQ ID NO: 57706 - DNA, 15 bp, Homo sapiens
ttttaagggaatgct

SEQ ID NO: 57707 - DNA, 15 bp, Homo sapiens
tttttaagggaatgc

SEQ ID NO: 57708 - DNA, 15 bp, Homo sapiens
ctttttaagggaatg

SEQ ID NO: 57709 - DNA, 15 bp, Homo sapiens
cctttttaagggaat

SEQ ID NO: 57710 - DNA, 15 bp, Homo sapiens
gcctttttaagggaa

SEQ ID NO: 57711 - DNA, 15 bp, Homo sapiens
tgcctttttaaggga

SEQ ID NO: 57712 - DNA, 15 bp, Homo sapiens
atgcctttttaaggg

SEQ ID NO: 57713 - DNA, 15 bp, Homo sapiens
aatgcctttttaagg

SEQ ID NO: 57714 - DNA, 15 bp, Homo sapiens
taatgcctttttaag

SEQ ID NO: 57715 - DNA, 15 bp, Homo sapiens
ataatgcctttttaa

SEQ ID NO: 57716 - DNA, 15 bp, Homo sapiens
aataatgccttttta

SEQ ID NO: 57717 - DNA, 15 bp, Homo sapiens
aaataatgccttttt

SEQ ID NO: 57718 - DNA, 15 bp, Homo sapiens
caaataatgcctttt

SEQ ID NO: 57719 - DNA, 15 bp, Homo sapiens
acaaataatgccttt

SEQ ID NO: 57720 - DNA, 15 bp, Homo sapiens
cacaaataatgcctt

SEQ ID NO: 57721 - DNA, 15 bp, Homo sapiens
tcacaaataatgcct

SEQ ID NO: 57722 - DNA, 15 bp, Homo sapiens
ttcacaaataatgcc

SEQ ID NO: 57723 - DNA, 15 bp, Homo sapiens
tttcacaaataatgc

SEQ ID NO: 57724 - DNA, 15 bp, Homo sapiens
gtttcacaaataatg

SEQ ID NO: 57725 - DNA, 15 bp, Homo sapiens
agtttcacaaataat

SEQ ID NO: 57726 - DNA, 15 bp, Homo sapiens
aagtttcacaaataa

SEQ ID NO: 57727 - DNA, 15 bp, Homo sapiens
taagtttcacaaata

SEQ ID NO: 57728 - DNA, 15 bp, Homo sapiens
ataagtttcacaaat

SEQ ID NO: 57729 - DNA, 15 bp, Homo sapiens
gataagtttcacaaa

SEQ ID NO: 57730 - DNA, 15 bp, Homo sapiens
agataagtttcacaa

SEQ ID NO: 57731 - DNA, 15 bp, Homo sapiens
tagataagtttcaca

SEQ ID NO: 57732 - DNA, 15 bp, Homo sapiens
ttagataagtttcac

SEQ ID NO: 57733 - DNA, 15 bp, Homo sapiens
tttagataagtttca

SEQ ID NO: 57734 - DNA, 15 bp, Homo sapiens
ttttagataagtttc

SEQ ID NO: 57735 - DNA, 15 bp, Homo sapiens
attttagataagttt

SEQ ID NO: 57736 - DNA, 15 bp, Homo sapiens
gattttagataagtt

SEQ ID NO: 57737 - DNA, 15 bp, Homo sapiens
cgattttagataagt

SEQ ID NO: 57738 - DNA, 15 bp, Homo sapiens
tcgattttagataag

SEQ ID NO: 57739 - DNA, 15 bp, Homo sapiens
ttcgattttagataa

SEQ ID NO: 57740 - DNA, 15 bp, Homo sapiens
attcgattttagata

SEQ ID NO: 57741 - DNA, 15 bp, Homo sapiens
aattcgattttagat

SEQ ID NO: 57742 - DNA, 15 bp, Homo sapiens
gaattcgattttaga

SEQ ID NO: 57743 - DNA, 15 bp, Homo sapiens
cgaattcgattttag

SEQ ID NO: 57744 - DNA, 15 bp, Homo sapiens
ccgaattcgatttta

SEQ ID NO: 57745 - DNA, 15 bp, Homo sapiens
cccgaattcgatttt

SEQ ID NO: 57746 - DNA, 15 bp, Homo sapiens
acccgaattcgattt

SEQ ID NO: 57747 - DNA, 15 bp, Homo sapiens
gacccgaattcgatt

SEQ ID NO: 57748 - DNA, 15 bp, Homo sapiens
ggacccgaattcgat

SEQ ID NO: 57749 - DNA, 15 bp, Homo sapiens
tggacccgaattcga

SEQ ID NO: 57750 - DNA, 15 bp, Homo sapiens
ttggacccgaattcg

SEQ ID NO: 57751 - DNA, 15 bp, Homo sapiens
attggacccgaattc

SEQ ID NO: 57752 - DNA, 15 bp, Homo sapiens
aattggacccgaatt

SEQ ID NO: 57753 - DNA, 15 bp, Homo sapiens
taattggacccgaat

SEQ ID NO: 57754 - DNA, 15 bp, Homo sapiens
ttaattggacccgaa

SEQ ID NO: 57755 - DNA, 15 bp, Homo sapiens
tttaattggacccga

SEQ ID NO: 57756 - DNA, 15 bp, Homo sapiens
atttaattggacccg

SEQ ID NO: 57757 - DNA, 15 bp, Homo sapiens
aatttaattggaccc

SEQ ID NO: 57758 - DNA, 15 bp, Homo sapiens
aaatttaattggacc

SEQ ID NO: 57759 - DNA, 15 bp, Homo sapiens
aaaatttaattggac

SEQ ID NO: 57760 - DNA, 15 bp, Homo sapiens
aaaaatttaattgga

SEQ ID NO: 57761 - DNA, 15 bp, Homo sapiens
caaaaatttaattgg

SEQ ID NO: 57762 - DNA, 15 bp, Homo sapiens
tcaaaaatttaattg

SEQ ID NO: 57763 - DNA, 15 bp, Homo sapiens
ttcaaaaatttaatt

SEQ ID NO: 57764 - DNA, 15 bp, Homo sapiens
tttcaaaaatttaat

SEQ ID NO: 57765 - DNA, 15 bp, Homo sapiens
atttcaaaaatttaa

SEQ ID NO: 57766 - DNA, 15 bp, Homo sapiens
aatttcaaaaattta

SEQ ID NO: 57767 - DNA, 15 bp, Homo sapiens
aaatttcaaaaattt

SEQ ID NO: 57768 - DNA, 15 bp, Homo sapiens
aaaatttcaaaaatt

SEQ ID NO: 57769 - DNA, 15 bp, Homo sapiens
taaaatttcaaaaat

SEQ ID NO: 57770 - DNA, 15 bp, Homo sapiens
ataaaatttcaaaaa

SEQ ID NO: 57771 - DNA, 15 bp, Homo sapiens
tataaaatttcaaaa

SEQ ID NO: 57772 - DNA, 15 bp, Homo sapiens
atataaaatttcaaa

SEQ ID NO: 57773 - DNA, 15 bp, Homo sapiens
aatataaaatttcaa

SEQ ID NO: 57774 - DNA, 15 bp, Homo sapiens
taatataaaatttca

SEQ ID NO: 57775 - DNA, 15 bp, Homo sapiens
ttaatataaaatttc

SEQ ID NO: 57776 - DNA, 15 bp, Homo sapiens
tttaatataaaattt

SEQ ID NO: 57777 - DNA, 15 bp, Homo sapiens
ttttaatataaaatt

SEQ ID NO: 57778 - DNA, 15 bp, Homo sapiens
tttttaatataaaat

SEQ ID NO: 57779 - DNA, 15 bp, Homo sapiens
atttttaatataaaa

SEQ ID NO: 57780 - DNA, 15 bp, Homo sapiens
aatttttaatataaa

SEQ ID NO: 57781 - DNA, 15 bp, Homo sapiens
taatttttaatataa

SEQ ID NO: 57782 - DNA, 15 bp, Homo sapiens
ataatttttaatata

SEQ ID NO: 57783 - DNA, 15 bp, Homo sapiens
taatataatttttaa

SEQ ID NO: 57784 - DNA, 15 bp, Homo sapiens
ctaatataattttta

SEQ ID NO: 57785 - DNA, 15 bp, Homo sapiens
actaatataattttt

SEQ ID NO: 57786 - DNA, 15 bp, Homo sapiens
tactaatataatttt

SEQ ID NO: 57787 - DNA, 15 bp, Homo sapiens
ctactaatataattt

SEQ ID NO: 57788 - DNA, 15 bp, Homo sapiens
cctactaatataatt

SEQ ID NO: 57789 - DNA, 15 bp, Homo sapiens
ccctactaatataat

SEQ ID NO: 57790 - DNA, 15 bp, Homo sapiens
tccctactaatataa

SEQ ID NO: 57791 - DNA, 15 bp, Homo sapiens
atccctactaatata

SEQ ID NO: 57792 - DNA, 15 bp, Homo sapiens
catccctactaatat

SEQ ID NO: 57793 - DNA, 15 bp, Homo sapiens
ccatccctactaata

SEQ ID NO: 57794 - DNA, 15 bp, Homo sapiens
cccatccctactaat

SEQ ID NO: 57795 - DNA, 15 bp, Homo sapiens
acccatccctactaa

SEQ ID NO: 57796 - DNA, 15 bp, Homo sapiens
tacccatccctacta

SEQ ID NO: 57797 - DNA, 15 bp, Homo sapiens
ttacccatccctact

SEQ ID NO: 57798 - DNA, 15 bp, Homo sapiens
cttacccatccctac

SEQ ID NO: 57799 - DNA, 15 bp, Homo sapiens
tcttacccatcccta

SEQ ID NO: 57800 - DNA, 15 bp, Homo sapiens
ctcttacccatccct

SEQ ID NO: 57801 - DNA, 15 bp, Homo sapiens
cctcttacccatccc

SEQ ID NO: 57802 - DNA, 15 bp, Homo sapiens
acctcttacccatcc

SEQ ID NO: 57803 - DNA, 15 bp, Homo sapiens
cacctcttacccatc

SEQ ID NO: 57804 - DNA, 15 bp, Homo sapiens
acacctcttacccat

SEQ ID NO: 57805 - DNA, 15 bp, Homo sapiens
aacacctcttaccca

SEQ ID NO: 57806 - DNA, 15 bp, Homo sapiens
aaacacctcttaccc

SEQ ID NO: 57807 - DNA, 15 bp, Homo sapiens
aaaacacctcttacc

SEQ ID NO: 57808 - DNA, 15 bp, Homo sapiens
caaaacacctcttac

SEQ ID NO: 57809 - DNA, 15 bp, Homo sapiens
ccaaaacacctctta

SEQ ID NO: 57810 - DNA, 15 bp, Homo sapiens
accaaaacacctctt

SEQ ID NO: 57811 - DNA, 15 bp, Homo sapiens
gaccaaaacacctct

SEQ ID NO: 57812 - DNA, 15 bp, Homo sapiens
agaccaaaacacctc

SEQ ID NO: 57813 - DNA, 15 bp, Homo sapiens
cagaccaaaacacct

SEQ ID NO: 57814 - DNA, 15 bp, Homo sapiens
ccagaccaaaacacc

SEQ ID NO: 57815 - DNA, 15 bp, Homo sapiens
accagaccaaaacac

SEQ ID NO: 57816 - DNA, 15 bp, Homo sapiens
aaccagaccaaaaca

SEQ ID NO: 57817 - DNA, 15 bp, Homo sapiens
caaccagaccaaaac

SEQ ID NO: 57818 - DNA, 15 bp, Homo sapiens
ccaaccagaccaaaa

SEQ ID NO: 57819 - DNA, 15 bp, Homo sapiens
accaaccagaccaaa

SEQ ID NO: 57820 - DNA, 15 bp, Homo sapiens
aaccaaccagaccaa

SEQ ID NO: 57821 - DNA, 15 bp, Homo sapiens
caaccaaccagacca

SEQ ID NO: 57822 - DNA, 15 bp, Homo sapiens
ccaaccaaccagacc

SEQ ID NO: 57823 - DNA, 15 bp, Homo sapiens
accaaccaaccagac

SEQ ID NO: 57824 - DNA, 15 bp, Homo sapiens
aaccaaccaaccaga

SEQ ID NO: 57825 - DNA, 15 bp, Homo sapiens
taaccaaccaaccag

SEQ ID NO: 57826 - DNA, 15 bp, Homo sapiens
ctaaccaaccaacca

SEQ ID NO: 57827 - DNA, 15 bp, Homo sapiens
actaaccaaccaacc

SEQ ID NO: 57828 - DNA, 15 bp, Homo sapiens
aactaaccaaccaac

SEQ ID NO: 57829 - DNA, 15 bp, Homo sapiens
caactaaccaaccaa

SEQ ID NO: 57830 - DNA, 15 bp, Homo sapiens
gcaactaaccaacca

SEQ ID NO: 57831 - DNA, 15 bp, Homo sapiens
agcaactaaccaacc

SEQ ID NO: 57832 - DNA, 15 bp, Homo sapiens
tagcaactaaccaac

SEQ ID NO: 57833 - DNA, 15 bp, Homo sapiens
atagcaactaaccaa

SEQ ID NO: 57834 - DNA, 15 bp, Homo sapiens
catagcaactaacca

SEQ ID NO: 57835 - DNA, 15 bp, Homo sapiens
tcatagcaactaacc

SEQ ID NO: 57836 - DNA, 15 bp, Homo sapiens
gtcatagcaactaac

SEQ ID NO: 57837 - DNA, 15 bp, Homo sapiens
agtcatagcaactaa

SEQ ID NO: 57838 - DNA, 15 bp, Homo sapiens
gagtcatagcaacta

SEQ ID NO: 57839 - DNA, 15 bp, Homo sapiens
tgagtcatagcaact

SEQ ID NO: 57840 - DNA, 15 bp, Homo sapiens
ctgagtcatagcaac

SEQ ID NO: 57841 - DNA, 15 bp, Homo sapiens
tctgagtcatagcaa

SEQ ID NO: 57842 - DNA, 15 bp, Homo sapiens
ttctgagtcatagca

SEQ ID NO: 57843 - DNA, 15 bp, Homo sapiens
attctgagtcatagc

SEQ ID NO: 57844 - DNA, 15 bp, Homo sapiens
aattctgagtcatag

SEQ ID NO: 57845 - DNA, 15 bp, Homo sapiens
caattctgagtcata

SEQ ID NO: 57846 - DNA, 15 bp, Homo sapiens
gcaattctgagtcat

SEQ ID NO: 57847 - DNA, 15 bp, Homo sapiens
agcaattctgagtca

SEQ ID NO: 57848 - DNA, 15 bp, Homo sapiens
tagcaattctgagtc

SEQ ID NO: 57849 - DNA, 15 bp, Homo sapiens
ttagcaattctgagt

SEQ ID NO: 57850 - DNA, 15 bp, Homo sapiens
cttagcaattctgag

SEQ ID NO: 57851 - DNA, 15 bp, Homo sapiens
tcttagcaattctga

SEQ ID NO: 57852 - DNA, 15 bp, Homo sapiens
ttcttagcaattctg

SEQ ID NO: 57853 - DNA, 15 bp, Homo sapiens
tttcttagcaattct

SEQ ID NO: 57854 - DNA, 15 bp, Homo sapiens
ttttcttagcaattc

SEQ ID NO: 57855 - DNA, 15 bp, Homo sapiens
gttttcttagcaatt

SEQ ID NO: 57856 - DNA, 15 bp, Homo sapiens
tgttttcttagcaat

SEQ ID NO: 57857 - DNA, 15 bp, Homo sapiens
ctgttttcttagcaa

SEQ ID NO: 57858 - DNA, 15 bp, Homo sapiens
tctgttttcttagca

SEQ ID NO: 57859 - DNA, 15 bp, Homo sapiens
ttctgttttcttagc

SEQ ID NO: 57860 - DNA, 15 bp, Homo sapiens
tttctgttttcttag

SEQ ID NO: 57861 - DNA, 15 bp, Homo sapiens
ttttctgttttctta

SEQ ID NO: 57862 - DNA, 15 bp, Homo sapiens
cttttctgttttctt

SEQ ID NO: 57863 - DNA, 15 bp, Homo sapiens
acttttctgttttct

SEQ ID NO: 57864 - DNA, 15 bp, Homo sapiens
tacttttctgttttc

SEQ ID NO: 57865 - DNA, 15 bp, Homo sapiens
ttacttttctgtttt

SEQ ID NO: 57866 - DNA, 15 bp, Homo sapiens
cttacttttctgttt

SEQ ID NO: 57867 - DNA, 15 bp, Homo sapiens
tcttacttttctgtt

SEQ ID NO: 57868 - DNA, 15 bp, Homo sapiens
atcttacttttctgt

SEQ ID NO: 57869 - DNA, 15 bp, Homo sapiens
tatcttacttttctg

SEQ ID NO: 57870 - DNA, 15 bp, Homo sapiens
ttatcttacttttct

SEQ ID NO: 57871 - DNA, 15 bp, Homo sapiens
cttatcttacttttc

SEQ ID NO: 57872 - DNA, 15 bp, Homo sapiens
tcttatcttactttt

SEQ ID NO: 57873 - DNA, 15 bp, Homo sapiens
atcttatcttacttt

SEQ ID NO: 57874 - DNA, 15 bp, Homo sapiens
gatcttatcttactt

SEQ ID NO: 57875 - DNA, 15 bp, Homo sapiens
tgatcttatcttact

SEQ ID NO: 57876 - DNA, 15 bp, Homo sapiens
atgatcttatcttac

SEQ ID NO: 57877 - DNA, 15 bp, Homo sapiens
aatgatcttatctta

SEQ ID NO: 57878 - DNA, 15 bp, Homo sapiens
caatgatcttatctt

SEQ ID NO: 57879 - DNA, 15 bp, Homo sapiens
acaatgatcttatct

SEQ ID NO: 57880 - DNA, 15 bp, Homo sapiens
aacaatgatcttatc

SEQ ID NO: 57881 - DNA, 15 bp, Homo sapiens
aaacaatgatcttat

SEQ ID NO: 57882 - DNA, 15 bp, Homo sapiens
aaaacaatgatctta

SEQ ID NO: 57883 - DNA, 15 bp, Homo sapiens
taaaacaatgatctt

SEQ ID NO: 57884 - DNA, 15 bp, Homo sapiens
ttaaaacaatgatct

SEQ ID NO: 57885 - DNA, 15 bp, Homo sapiens
gttaaaacaatgatc

SEQ ID NO: 57886 - DNA, 15 bp, Homo sapiens
ggttaaaacaatgat

SEQ ID NO: 57887 - DNA, 15 bp, Homo sapiens
aggttaaaacaatga

SEQ ID NO: 57888 - DNA, 15 bp, Homo sapiens
gaggttaaaacaatg

SEQ ID NO: 57889 - DNA, 15 bp, Homo sapiens
agaggttaaaacaat

SEQ ID NO: 57890 - DNA, 15 bp, Homo sapiens
aagaggttaaaacaa

SEQ ID NO: 57891 - DNA, 15 bp, Homo sapiens
aaagaggttaaaaca

SEQ ID NO: 57892 - DNA, 15 bp, Homo sapiens
aaaagaggttaaaac

SEQ ID NO: 57893 - DNA, 15 bp, Homo sapiens
gaggaaaagaggtta

SEQ ID NO: 57894 - DNA, 15 bp, Homo sapiens
ggaggaaaagaggtt

SEQ ID NO: 57895 - DNA, 15 bp, Homo sapiens
tggaggaaaagaggt

SEQ ID NO: 57896 - DNA, 15 bp, Homo sapiens
gtggaggaaaagagg

SEQ ID NO: 57897 - DNA, 15 bp, Homo sapiens
tgtggaggaaaagag

SEQ ID NO: 57898 - DNA, 15 bp, Homo sapiens
ttgtggaggaaaaga

SEQ ID NO: 57899 - DNA, 15 bp, Homo sapiens
tttgtggaggaaaag

SEQ ID NO: 57900 - DNA, 15 bp, Homo sapiens
ttttgtggaggaaaa

SEQ ID NO: 57901 - DNA, 15 bp, Homo sapiens
attttgtggaggaaa

SEQ ID NO: 57902 - DNA, 15 bp, Homo sapiens
gattttgtggaggaa

SEQ ID NO: 57903 - DNA, 15 bp, Homo sapiens
tgattttgtggagga

SEQ ID NO: 57904 - DNA, 15 bp, Homo sapiens
ttgattttgtggagg

SEQ ID NO: 57905 - DNA, 15 bp, Homo sapiens
attgattttgtggag

SEQ ID NO: 57906 - DNA, 15 bp, Homo sapiens
tattgattttgtgga

SEQ ID NO: 57907 - DNA, 15 bp, Homo sapiens
ttattgattttgtgg

SEQ ID NO: 57908 - DNA, 15 bp, Homo sapiens
tttattgattttgtg

SEQ ID NO: 57909 - DNA, 15 bp, Homo sapiens
atttattgattttgt

SEQ ID NO: 57910 - DNA, 15 bp, Homo sapiens
tatttattgattttg

SEQ ID NO: 57911 - DNA, 15 bp, Homo sapiens
ttatttattgatttt

SEQ ID NO: 57912 - DNA, 15 bp, Homo sapiens
gttatttattgattt

SEQ ID NO: 57913 - DNA, 15 bp, Homo sapiens
tgttatttattgatt

SEQ ID NO: 57914 - DNA, 15 bp, Homo sapiens
atgttatttattgat

SEQ ID NO: 57915 - DNA, 15 bp, Homo sapiens
tatgttatttattga

SEQ ID NO: 57916 - DNA, 15 bp, Homo sapiens
atatgttatttattg

SEQ ID NO: 57917 - DNA, 15 bp, Homo sapiens
gatatgttatttatt

SEQ ID NO: 57918 - DNA, 15 bp, Homo sapiens
ggatatgttatttat

SEQ ID NO: 57919 - DNA, 15 bp, Homo sapiens
gggatatgttattta

SEQ ID NO: 57920 - DNA, 15 bp, Homo sapiens
agggatatgttattt

SEQ ID NO: 57921 - DNA, 15 bp, Homo sapiens
tagggatatgttatt

SEQ ID NO: 57922 - DNA, 15 bp, Homo sapiens
ttagggatatgttat

SEQ ID NO: 57923 - DNA, 15 bp, Homo sapiens
tttagggatatgtta

SEQ ID NO: 57924 - DNA, 15 bp, Homo sapiens
atttagggatatgtt

SEQ ID NO: 57925 - DNA, 15 bp, Homo sapiens
aatttagggatatgt

SEQ ID NO: 57926 - DNA, 15 bp, Homo sapiens
taatttagggatatg

SEQ ID NO: 57927 - DNA, 15 bp, Homo sapiens
gtaatttagggatat

SEQ ID NO: 57928 - DNA, 15 bp, Homo sapiens
agtaatttagggata

SEQ ID NO: 57929 - DNA, 15 bp, Homo sapiens
gagtaatttagggat

SEQ ID NO: 57930 - DNA, 15 bp, Homo sapiens
agagtaatttaggga

SEQ ID NO: 57931 - DNA, 15 bp, Homo sapiens
aagagtaatttaggg

SEQ ID NO: 57932 - DNA, 15 bp, Homo sapiens
taagagtaatttagg

SEQ ID NO: 57933 - DNA, 15 bp, Homo sapiens
ctaagagtaatttag

SEQ ID NO: 57934 - DNA, 15 bp, Homo sapiens
tctaagagtaattta

SEQ ID NO: 57935 - DNA, 15 bp, Homo sapiens
ttctaagagtaattt

SEQ ID NO: 57936 - DNA, 15 bp, Homo sapiens
attctaagagtaatt

SEQ ID NO: 57937 - DNA, 15 bp, Homo sapiens
aattctaagagtaat

SEQ ID NO: 57938 - DNA, 15 bp, Homo sapiens
aaattctaagagtaa

SEQ ID NO: 57939 - DNA, 15 bp, Homo sapiens
gaaattctaagagta

SEQ ID NO: 57940 - DNA, 15 bp, Homo sapiens
agaaattctaagagt

SEQ ID NO: 57941 - DNA, 15 bp, Homo sapiens
gagaaattctaagag

SEQ ID NO: 57942 - DNA, 15 bp, Homo sapiens
agagaaattctaaga

SEQ ID NO: 57943 - DNA, 15 bp, Homo sapiens
aagagaaattctaag

SEQ ID NO: 57944 - DNA, 15 bp, Homo sapiens
taagagaaattctaa

SEQ ID NO: 57945 - DNA, 15 bp, Homo sapiens
ttaagagaaattcta

SEQ ID NO: 57946 - DNA, 15 bp, Homo sapiens
tttaagagaaattct

SEQ ID NO: 57947 - DNA, 15 bp, Homo sapiens
atttaagagaaattc

SEQ ID NO: 57948 - DNA, 15 bp, Homo sapiens
aatttaagagaaatt

SEQ ID NO: 57949 - DNA, 15 bp, Homo sapiens
caatttaagagaaat

SEQ ID NO: 57950 - DNA, 15 bp, Homo sapiens
gcaatttaagagaaa

SEQ ID NO: 57951 - DNA, 15 bp, Homo sapiens
tgcaatttaagagaa

SEQ ID NO: 57952 - DNA, 15 bp, Homo sapiens
ctgcaatttaagaga

SEQ ID NO: 57953 - DNA, 15 bp, Homo sapiens
actgcaatttaagag

SEQ ID NO: 57954 - DNA, 15 bp, Homo sapiens
cactgcaatttaaga

SEQ ID NO: 57955 - DNA, 15 bp, Homo sapiens
tcactgcaatttaag

SEQ ID NO: 57956 - DNA, 15 bp, Homo sapiens
ttcactgcaatttaa

SEQ ID NO: 57957 - DNA, 15 bp, Homo sapiens
tttcactgcaattta

SEQ ID NO: 57958 - DNA, 15 bp, Homo sapiens
ttttcactgcaattt

SEQ ID NO: 57959 - DNA, 15 bp, Homo sapiens
tttttcactgcaatt

SEQ ID NO: 57960 - DNA, 15 bp, Homo sapiens
gtttttcactgcaat

SEQ ID NO: 57961 - DNA, 15 bp, Homo sapiens
ggtttttcactgcaa

SEQ ID NO: 57962 - DNA, 15 bp, Homo sapiens
tggtttttcactgca

SEQ ID NO: 57963 - DNA, 15 bp, Homo sapiens
ttggtttttcactgc

SEQ ID NO: 57964 - DNA, 15 bp, Homo sapiens
tttggtttttcactg

SEQ ID NO: 57965 - DNA, 15 bp, Homo sapiens
ttttggtttttcact

SEQ ID NO: 57966 - DNA, 15 bp, Homo sapiens
attttggtttttcac

SEQ ID NO: 57967 - DNA, 15 bp, Homo sapiens
gattttggtttttca

SEQ ID NO: 57968 - DNA, 15 bp, Homo sapiens
ggattttggtttttc

SEQ ID NO: 57969 - DNA, 15 bp, Homo sapiens
aggattttggttttt

SEQ ID NO: 57970 - DNA, 15 bp, Homo sapiens
aaggattttggtttt

SEQ ID NO: 57971 - DNA, 15 bp, Homo sapiens
gaaggattttggttt

SEQ ID NO: 57972 - DNA, 15 bp, Homo sapiens
tgaaggattttggtt

SEQ ID NO: 57973 - DNA, 15 bp, Homo sapiens
atgaaggattttggt

SEQ ID NO: 57974 - DNA, 15 bp, Homo sapiens
aatgaaggattttgg

SEQ ID NO: 57975 - DNA, 15 bp, Homo sapiens
gaatgaaggattttg

SEQ ID NO: 57976 - DNA, 15 bp, Homo sapiens
agaatgaaggatttt

SEQ ID NO: 57977 - DNA, 15 bp, Homo sapiens
aagaatgaaggattt

SEQ ID NO: 57978 - DNA, 15 bp, Homo sapiens
caagaatgaaggatt

SEQ ID NO: 57979 - DNA, 15 bp, Homo sapiens
ccaagaatgaaggat

SEQ ID NO: 57980 - DNA, 15 bp, Homo sapiens
accaagaatgaagga

SEQ ID NO: 57981 - DNA, 15 bp, Homo sapiens
aaccaagaatgaagg

SEQ ID NO: 57982 - DNA, 15 bp, Homo sapiens
caaccaagaatgaag

SEQ ID NO: 57983 - DNA, 15 bp, Homo sapiens
tcaaccaagaatgaa

SEQ ID NO: 57984 - DNA, 15 bp, Homo sapiens
ttcaaccaagaatga

SEQ ID NO: 57985 - DNA, 15 bp, Homo sapiens
cttcaaccaagaatg

SEQ ID NO: 57986 - DNA, 15 bp, Homo sapiens
ccttcaaccaagaat

SEQ ID NO: 57987 - DNA, 15 bp, Homo sapiens
accttcaaccaagaa

SEQ ID NO: 57988 - DNA, 15 bp, Homo sapiens
aaccttcaaccaaga

SEQ ID NO: 57989 - DNA, 15 bp, Homo sapiens
caaccttcaaccaag

SEQ ID NO: 57990 - DNA, 15 bp, Homo sapiens
ccaaccttcaaccaa

SEQ ID NO: 57991 - DNA, 15 bp, Homo sapiens
tccaaccttcaacca

SEQ ID NO: 57992 - DNA, 15 bp, Homo sapiens
ttccaaccttcaacc

SEQ ID NO: 57993 - DNA, 15 bp, Homo sapiens
tttccaaccttcaac

SEQ ID NO: 57994 - DNA, 15 bp, Homo sapiens
ttttccaaccttcaa

SEQ ID NO: 57995 - DNA, 15 bp, Homo sapiens
gttttccaaccttca

SEQ ID NO: 57996 - DNA, 15 bp, Homo sapiens
agttttccaaccttc

SEQ ID NO: 57997 - DNA, 15 bp, Homo sapiens
tagttttccaacctt

SEQ ID NO: 57998 - DNA, 15 bp, Homo sapiens
gtagttttccaacct

SEQ ID NO: 57999 - DNA, 15 bp, Homo sapiens
cgtagttttccaacc

SEQ ID NO: 58000 - DNA, 15 bp, Homo sapiens
acgtagttttccaac

SEQ ID NO: 58001 - DNA, 15 bp, Homo sapiens
aacgtagttttccaa

SEQ ID NO: 58002 - DNA, 15 bp, Homo sapiens
taacgtagttttcca

SEQ ID NO: 58003 - DNA, 15 bp, Homo sapiens
ctaacgtagttttcc

SEQ ID NO: 58004 - DNA, 15 bp, Homo sapiens
tctaacgtagttttc

SEQ ID NO: 58005 - DNA, 15 bp, Homo sapiens
ctctaacgtagtttt

SEQ ID NO: 58006 - DNA, 15 bp, Homo sapiens
tctctaacgtagttt

SEQ ID NO: 58007 - DNA, 15 bp, Homo sapiens
ctctctaacgtagtt

SEQ ID NO: 58008 - DNA, 15 bp, Homo sapiens
cctctctaacgtagt

SEQ ID NO: 58009 - DNA, 15 bp, Homo sapiens
tcctctctaacgtag

SEQ ID NO: 58010 - DNA, 15 bp, Homo sapiens
atcctctctaacgta

SEQ ID NO: 58011 - DNA, 15 bp, Homo sapiens
aatcctctctaacgt

SEQ ID NO: 58012 - DNA, 15 bp, Homo sapiens
taatcctctctaacg

SEQ ID NO: 58013 - DNA, 15 bp, Homo sapiens
ctaatcctctctaac

SEQ ID NO: 58014 - DNA, 15 bp, Homo sapiens
tctaatcctctctaa

SEQ ID NO: 58015 - DNA, 15 bp, Homo sapiens
ctctaatcctctcta

SEQ ID NO: 58016 - DNA, 15 bp, Homo sapiens
tctctaatcctctct

SEQ ID NO: 58017 - DNA, 15 bp, Homo sapiens
ctctctaatcctctc

SEQ ID NO: 58018 - DNA, 15 bp, Homo sapiens
tctctctaatcctct

SEQ ID NO: 58019 - DNA, 15 bp, Homo sapiens
ctctctctaatcctc

SEQ ID NO: 58020 - DNA, 15 bp, Homo sapiens
tctctctctaatcct

SEQ ID NO: 58021 - DNA, 15 bp, Homo sapiens
ctctctctctaatcc

SEQ ID NO: 58022 - DNA, 15 bp, Homo sapiens
cctctctctctaatc

SEQ ID NO: 58023 - DNA, 15 bp, Homo sapiens
tcctctctctctaat

SEQ ID NO: 58024 - DNA, 15 bp, Homo sapiens
atcctctctctctaa

SEQ ID NO: 58025 - DNA, 15 bp, Homo sapiens
catcctctctctcta

SEQ ID NO: 58026 - DNA, 15 bp, Homo sapiens
tcatcctctctctct

SEQ ID NO: 58027 - DNA, 15 bp, Homo sapiens
ctcatcctctctctc

SEQ ID NO: 58028 - DNA, 15 bp, Homo sapiens
gctcatcctctctct

SEQ ID NO: 58029 - DNA, 15 bp, Homo sapiens
tgctcatcctctctc

SEQ ID NO: 58030 - DNA, 15 bp, Homo sapiens
ttgctcatcctctct

SEQ ID NO: 58031 - DNA, 15 bp, Homo sapiens
attgctcatcctctc

SEQ ID NO: 58032 - DNA, 15 bp, Homo sapiens
gattgctcatcctct

SEQ ID NO: 58033 - DNA, 15 bp, Homo sapiens
cgattgctcatcctc

SEQ ID NO: 58034 - DNA, 15 bp, Homo sapiens
acgattgctcatcct

SEQ ID NO: 58035 - DNA, 15 bp, Homo sapiens
cacgattgctcatcc

SEQ ID NO: 58036 - DNA, 15 bp, Homo sapiens
acacgattgctcatc

SEQ ID NO: 58037 - DNA, 15 bp, Homo sapiens
tacacgattgctcat

SEQ ID NO: 58038 - DNA, 15 bp, Homo sapiens
ctacacgattgctca

SEQ ID NO: 58039 - DNA, 15 bp, Homo sapiens
actacacgattgctc

SEQ ID NO: 58040 - DNA, 15 bp, Homo sapiens
gactacacgattgct

SEQ ID NO: 58041 - DNA, 15 bp, Homo sapiens
tgactacacgattgc

SEQ ID NO: 58042 - DNA, 15 bp, Homo sapiens
ctgactacacgattg

SEQ ID NO: 58043 - DNA, 15 bp, Homo sapiens
gctgactacacgatt

SEQ ID NO: 58044 - DNA, 15 bp, Homo sapiens
ggctgactacacgat

SEQ ID NO: 58045 - DNA, 15 bp, Homo sapiens
gggctgactacacga

SEQ ID NO: 58046 - DNA, 15 bp, Homo sapiens
agggctgactacacg

SEQ ID NO: 58047 - DNA, 15 bp, Homo sapiens
aagggctgactacac

SEQ ID NO: 58048 - DNA, 15 bp, Homo sapiens
caagggctgactaca

SEQ ID NO: 58049 - DNA, 15 bp, Homo sapiens
gcaagggctgactac

SEQ ID NO: 58050 - DNA, 15 bp, Homo sapiens
ggcaagggctgacta

SEQ ID NO: 58051 - DNA, 15 bp, Homo sapiens
aggcaagggctgact

SEQ ID NO: 58052 - DNA, 15 bp, Homo sapiens
gaggcaagggctgac

SEQ ID NO: 58053 - DNA, 15 bp, Homo sapiens
ggaggcaagggctga

SEQ ID NO: 58054 - DNA, 15 bp, Homo sapiens
aggaggcaagggctg

SEQ ID NO: 58055 - DNA, 15 bp, Homo sapiens
taggaggcaagggct

SEQ ID NO: 58056 - DNA, 15 bp, Homo sapiens
ctaggaggcaagggc

SEQ ID NO: 58057 - DNA, 15 bp, Homo sapiens
actaggaggcaaggg

SEQ ID NO: 58058 - DNA, 15 bp, Homo sapiens
cactaggaggcaagg

SEQ ID NO: 58059 - DNA, 15 bp, Homo sapiens
acactaggaggcaag

SEQ ID NO: 58060 - DNA, 15 bp, Homo sapiens
tacactaggaggcaa

SEQ ID NO: 58061 - DNA, 15 bp, Homo sapiens
ctacactaggaggca

SEQ ID NO: 58062 - DNA, 15 bp, Homo sapiens
cctacactaggaggc

SEQ ID NO: 58063 - DNA, 15 bp, Homo sapiens
tcctacactaggagg

SEQ ID NO: 58064 - DNA, 15 bp, Homo sapiens
atcctacactaggag

SEQ ID NO: 58065 - DNA, 15 bp, Homo sapiens
aatcctacactagga

SEQ ID NO: 58066 - DNA, 15 bp, Homo sapiens
aaatcctacactagg

SEQ ID NO: 58067 - DNA, 15 bp, Homo sapiens
caaatcctacactag

SEQ ID NO: 58068 - DNA, 15 bp, Homo sapiens
acaaatcctacacta

SEQ ID NO: 58069 - DNA, 15 bp, Homo sapiens
gacaaatcctacact

SEQ ID NO: 58070 - DNA, 15 bp, Homo sapiens
agacaaatcctacac

SEQ ID NO: 58071 - DNA, 15 bp, Homo sapiens
gagacaaatcctaca

SEQ ID NO: 58072 - DNA, 15 bp, Homo sapiens
tgagacaaatcctac

SEQ ID NO: 58073 - DNA, 15 bp, Homo sapiens
ctgagacaaatccta

SEQ ID NO: 58074 - DNA, 15 bp, Homo sapiens
gctgagacaaatcct

SEQ ID NO: 58075 - DNA, 15 bp, Homo sapiens
ggctgagacaaatcc

SEQ ID NO: 58076 - DNA, 15 bp, Homo sapiens
tggctgagacaaatc

SEQ ID NO: 58077 - DNA, 15 bp, Homo sapiens
gtggctgagacaaat

SEQ ID NO: 58078 - DNA, 15 bp, Homo sapiens
agtggctgagacaaa

SEQ ID NO: 58079 - DNA, 15 bp, Homo sapiens
cagtggctgagacaa

SEQ ID NO: 58080 - DNA, 15 bp, Homo sapiens
gcagtggctgagaca

SEQ ID NO: 58081 - DNA, 15 bp, Homo sapiens
agcagtggctgagac

SEQ ID NO: 58082 - DNA, 15 bp, Homo sapiens
aagcagtggctgaga

SEQ ID NO: 58083 - DNA, 15 bp, Homo sapiens
caagcagtggctgag

SEQ ID NO: 58084 - DNA, 15 bp, Homo sapiens
acaagcagtggctga

SEQ ID NO: 58085 - DNA, 15 bp, Homo sapiens
aacaagcagtggctg

SEQ ID NO: 58086 - DNA, 15 bp, Homo sapiens
caacaagcagtggct

SEQ ID NO: 58087 - DNA, 15 bp, Homo sapiens
acaacaagcagtggc

SEQ ID NO: 58088 - DNA, 15 bp, Homo sapiens
gacaacaagcagtgg

SEQ ID NO: 58089 - DNA, 15 bp, Homo sapiens
ggacaacaagcagtg

SEQ ID NO: 58090 - DNA, 15 bp, Homo sapiens
aggacaacaagcagt

SEQ ID NO: 58091 - DNA, 15 bp, Homo sapiens
caggacaacaagcag

SEQ ID NO: 58092 - DNA, 15 bp, Homo sapiens
ccaggacaacaagca

SEQ ID NO: 58093 - DNA, 15 bp, Homo sapiens
gccaggacaacaagc

SEQ ID NO: 58094 - DNA, 15 bp, Homo sapiens
agccaggacaacaag

SEQ ID NO: 58095 - DNA, 15 bp, Homo sapiens
cagccaggacaacaa

SEQ ID NO: 58096 - DNA, 15 bp, Homo sapiens
gcagccaggacaaca

SEQ ID NO: 58097 - DNA, 15 bp, Homo sapiens
ggcagccaggacaac

SEQ ID NO: 58098 - DNA, 15 bp, Homo sapiens
tggcagccaggacaa

SEQ ID NO: 58099 - DNA, 15 bp, Homo sapiens
ttggcagccaggaca

SEQ ID NO: 58100 - DNA, 15 bp, Homo sapiens
gttggcagccaggac

SEQ ID NO: 58101 - DNA, 15 bp, Homo sapiens
cgttggcagccagga

SEQ ID NO: 58102 - DNA, 15 bp, Homo sapiens
acgttggcagccagg

SEQ ID NO: 58103 - DNA, 15 bp, Homo sapiens
aacgttggcagccag

SEQ ID NO: 58104 - DNA, 15 bp, Homo sapiens
gaacgttggcagcca

SEQ ID NO: 58105 - DNA, 15 bp, Homo sapiens
agaacgttggcagcc

SEQ ID NO: 58106 - DNA, 15 bp, Homo sapiens
gagaacgttggcagc

SEQ ID NO: 58107 - DNA, 15 bp, Homo sapiens
tgagaacgttggcag

SEQ ID NO: 58108 - DNA, 15 bp, Homo sapiens
atgagaacgttggca

SEQ ID NO: 58109 - DNA, 15 bp, Homo sapiens
catgagaacgttggc

SEQ ID NO: 58110 - DNA, 15 bp, Homo sapiens
tcatgagaacgttgg

SEQ ID NO: 58111 - DNA, 15 bp, Homo sapiens
ttcatgagaacgttg

SEQ ID NO: 58112 - DNA, 15 bp, Homo sapiens
cttcatgagaacgtt

SEQ ID NO: 58113 - DNA, 15 bp, Homo sapiens
ccttcatgagaacgt

SEQ ID NO: 58114 - DNA, 15 bp, Homo sapiens
gccttcatgagaacg

SEQ ID NO: 58115 - DNA, 15 bp, Homo sapiens
agccttcatgagaac

SEQ ID NO: 58116 - DNA, 15 bp, Homo sapiens
cagccttcatgagaa

SEQ ID NO: 58117 - DNA, 15 bp, Homo sapiens
acagccttcatgaga

SEQ ID NO: 58118 - DNA, 15 bp, Homo sapiens
aacagccttcatgag

SEQ ID NO: 58119 - DNA, 15 bp, Homo sapiens
gaacagccttcatga

SEQ ID NO: 58120 - DNA, 15 bp, Homo sapiens
agaacagccttcatg

SEQ ID NO: 58121 - DNA, 15 bp, Homo sapiens
aagaacagccttcat

SEQ ID NO: 58122 - DNA, 15 bp, Homo sapiens
gaagaacagccttca

SEQ ID NO: 58123 - DNA, 15 bp, Homo sapiens
agaagaacagccttc

SEQ ID NO: 58124 - DNA, 15 bp, Homo sapiens
tagaagaacagcctt

SEQ ID NO: 58125 - DNA, 15 bp, Homo sapiens
atagaagaacagcct

SEQ ID NO: 58126 - DNA, 15 bp, Homo sapiens
gatagaagaacagcc

SEQ ID NO: 58127 - DNA, 15 bp, Homo sapiens
tgatagaagaacagc

SEQ ID NO: 58128 - DNA, 15 bp, Homo sapiens
ctgatagaagaacag

SEQ ID NO: 58129 - DNA, 15 bp, Homo sapiens
actgatagaagaaca

SEQ ID NO: 58130 - DNA, 15 bp, Homo sapiens
cactgatagaagaac

SEQ ID NO: 58131 - DNA, 15 bp, Homo sapiens
acactgatagaagaa

SEQ ID NO: 58132 - DNA, 15 bp, Homo sapiens
cacactgatagaaga

SEQ ID NO: 58133 - DNA, 15 bp, Homo sapiens
acacactgatagaag

SEQ ID NO: 58134 - DNA, 15 bp, Homo sapiens
gacacactgatagaa

SEQ ID NO: 58135 - DNA, 15 bp, Homo sapiens
tgacacactgataga

SEQ ID NO: 58136 - DNA, 15 bp, Homo sapiens
ttgacacactgatag

SEQ ID NO: 58137 - DNA, 15 bp, Homo sapiens
gttgacacactgata

SEQ ID NO: 58138 - DNA, 15 bp, Homo sapiens
ggttgacacactgat

SEQ ID NO: 58139 - DNA, 15 bp, Homo sapiens
aggttgacacactga

SEQ ID NO: 58140 - DNA, 15 bp, Homo sapiens
caggttgacacactg

SEQ ID NO: 58141 - DNA, 15 bp, Homo sapiens
tcaggttgacacact

SEQ ID NO: 58142 - DNA, 15 bp, Homo sapiens
ttcaggttgacacac

SEQ ID NO: 58143 - DNA, 15 bp, Homo sapiens
gttcaggttgacaca

SEQ ID NO: 58144 - DNA, 15 bp, Homo sapiens
tgttcaggttgacac

SEQ ID NO: 58145 - DNA, 15 bp, Homo sapiens
ttgttcaggttgaca

SEQ ID NO: 58146 - DNA, 15 bp, Homo sapiens
cttgttcaggttgac

SEQ ID NO: 58147 - DNA, 15 bp, Homo sapiens
gcttgttcaggttga

SEQ ID NO: 58148 - DNA, 15 bp, Homo sapiens
agcttgttcaggttg

SEQ ID NO: 58149 - DNA, 15 bp, Homo sapiens
tagcttgttcaggtt

SEQ ID NO: 58150 - DNA, 15 bp, Homo sapiens
ctagcttgttcaggt

SEQ ID NO: 58151 - DNA, 15 bp, Homo sapiens
tctagcttgttcagg

SEQ ID NO: 58152 - DNA, 15 bp, Homo sapiens
ttctagcttgttcag

SEQ ID NO: 58153 - DNA, 15 bp, Homo sapiens
gttctagcttgttca

SEQ ID NO: 58154 - DNA, 15 bp, Homo sapiens
ggttctagcttgttc

SEQ ID NO: 58155 - DNA, 15 bp, Homo sapiens
gggttctagcttgtt

SEQ ID NO: 58156 - DNA, 15 bp, Homo sapiens
tgggttctagcttgt

SEQ ID NO: 58157 - DNA, 15 bp, Homo sapiens
atgggttctagcttg

SEQ ID NO: 58158 - DNA, 15 bp, Homo sapiens
tatgggttctagctt

SEQ ID NO: 58159 - DNA, 15 bp, Homo sapiens
ctatgggttctagct

SEQ ID NO: 58160 - DNA, 15 bp, Homo sapiens
gctatgggttctagc

SEQ ID NO: 58161 - DNA, 15 bp, Homo sapiens
tgctatgggttctag

SEQ ID NO: 58162 - DNA, 15 bp, Homo sapiens
ttgctatgggttcta

SEQ ID NO: 58163 - DNA, 15 bp, Homo sapiens
gttgctatgggttct

SEQ ID NO: 58164 - DNA, 15 bp, Homo sapiens
tgttgctatgggttc

SEQ ID NO: 58165 - DNA, 15 bp, Homo sapiens
ctgttgctatgggtt

SEQ ID NO: 58166 - DNA, 15 bp, Homo sapiens
tctgttgctatgggt

SEQ ID NO: 58167 - DNA, 15 bp, Homo sapiens
ttctgttgctatggg

SEQ ID NO: 58168 - DNA, 15 bp, Homo sapiens
cttctgttgctatgg

SEQ ID NO: 58169 - DNA, 15 bp, Homo sapiens
acttctgttgctatg

SEQ ID NO: 58170 - DNA, 15 bp, Homo sapiens
gacttctgttgctat

SEQ ID NO: 58171 - DNA, 15 bp, Homo sapiens
agacttctgttgcta

SEQ ID NO: 58172 - DNA, 15 bp, Homo sapiens
cagacttctgttgct

SEQ ID NO: 58173 - DNA, 15 bp, Homo sapiens
ccagacttctgttgc

SEQ ID NO: 58174 - DNA, 15 bp, Homo sapiens
gccagacttctgttg

SEQ ID NO: 58175 - DNA, 15 bp, Homo sapiens
agccagacttctgtt

SEQ ID NO: 58176 - DNA, 15 bp, Homo sapiens
gagccagacttctgt

SEQ ID NO: 58177 - DNA, 15 bp, Homo sapiens
tgagccagacttctg

SEQ ID NO: 58178 - DNA, 15 bp, Homo sapiens
atgagccagacttct

SEQ ID NO: 58179 - DNA, 15 bp, Homo sapiens
gatgagccagacttc

SEQ ID NO: 58180 - DNA, 15 bp, Homo sapiens
tgatgagccagactt

SEQ ID NO: 58181 - DNA, 15 bp, Homo sapiens
ttgatgagccagact

SEQ ID NO: 58182 - DNA, 15 bp, Homo sapiens
gttgatgagccagac

SEQ ID NO: 58183 - DNA, 15 bp, Homo sapiens
tgttgatgagccaga

SEQ ID NO: 58184 - DNA, 15 bp, Homo sapiens
ttgttgatgagccag

SEQ ID NO: 58185 - DNA, 15 bp, Homo sapiens
cttgttgatgagcca

SEQ ID NO: 58186 - DNA, 15 bp, Homo sapiens
acttgttgatgagcc

SEQ ID NO: 58187 - DNA, 15 bp, Homo sapiens
gacttgttgatgagc

SEQ ID NO: 58188 - DNA, 15 bp, Homo sapiens
ggacttgttgatgag

SEQ ID NO: 58189 - DNA, 15 bp, Homo sapiens
tggacttgttgatga

SEQ ID NO: 58190 - DNA, 15 bp, Homo sapiens
atggacttgttgatg

SEQ ID NO: 58191 - DNA, 15 bp, Homo sapiens
catggacttgttgat

SEQ ID NO: 58192 - DNA, 15 bp, Homo sapiens
ccatggacttgttga

SEQ ID NO: 58193 - DNA, 15 bp, Homo sapiens
tccatggacttgttg

SEQ ID NO: 58194 - DNA, 15 bp, Homo sapiens
ctccatggacttgtt

SEQ ID NO: 58195 - DNA, 15 bp, Homo sapiens
gctccatggacttgt

SEQ ID NO: 58196 - DNA, 15 bp, Homo sapiens
agctccatggacttg

SEQ ID NO: 58197 - DNA, 15 bp, Homo sapiens
cagctccatggactt

SEQ ID NO: 58198 - DNA, 15 bp, Homo sapiens
gcagctccatggact

SEQ ID NO: 58199 - DNA, 15 bp, Homo sapiens
agcagctccatggac

SEQ ID NO: 58200 - DNA, 15 bp, Homo sapiens
cagcagctccatgga

SEQ ID NO: 58201 - DNA, 15 bp, Homo sapiens
ccagcagctccatgg

SEQ ID NO: 58202 - DNA, 15 bp, Homo sapiens
tccagcagctccatg

SEQ ID NO: 58203 - DNA, 15 bp, Homo sapiens
atccagcagctccat

SEQ ID NO: 58204 - DNA, 15 bp, Homo sapiens
catccagcagctcca

SEQ ID NO: 58205 - DNA, 15 bp, Homo sapiens
tcatccagcagctcc

SEQ ID NO: 58206 - DNA, 15 bp, Homo sapiens
ctcatccagcagctc

SEQ ID NO: 58207 - DNA, 15 bp, Homo sapiens
tctcatccagcagct

SEQ ID NO: 58208 - DNA, 15 bp, Homo sapiens
ctctcatccagcagc

SEQ ID NO: 58209 - DNA, 15 bp, Homo sapiens
cctctcatccagcag

SEQ ID NO: 58210 - DNA, 15 bp, Homo sapiens
tcctctcatccagca

SEQ ID NO: 58211 - DNA, 15 bp, Homo sapiens
ttcctctcatccagc

SEQ ID NO: 58212 - DNA, 15 bp, Homo sapiens
cttcctctcatccag

SEQ ID NO: 58213 - DNA, 15 bp, Homo sapiens
acttcctctcatcca

SEQ ID NO: 58214 - DNA, 15 bp, Homo sapiens
aacttcctctcatcc

SEQ ID NO: 58215 - DNA, 15 bp, Homo sapiens
gaacttcctctcatc

SEQ ID NO: 58216 - DNA, 15 bp, Homo sapiens
agaacttcctctcat

SEQ ID NO: 58217 - DNA, 15 bp, Homo sapiens
cagaacttcctctca

SEQ ID NO: 58218 - DNA, 15 bp, Homo sapiens
ccagaacttcctctc

SEQ ID NO: 58219 - DNA, 15 bp, Homo sapiens
cccagaacttcctct

SEQ ID NO: 58220 - DNA, 15 bp, Homo sapiens
gcccagaacttcctc

SEQ ID NO: 58221 - DNA, 15 bp, Homo sapiens
agcccagaacttcct

SEQ ID NO: 58222 - DNA, 15 bp, Homo sapiens
cagcccagaacttcc

SEQ ID NO: 58223 - DNA, 15 bp, Homo sapiens
ccagcccagaacttc

SEQ ID NO: 58224 - DNA, 15 bp, Homo sapiens
accagcccagaactt

SEQ ID NO: 58225 - DNA, 15 bp, Homo sapiens
taccagcccagaact

SEQ ID NO: 58226 - DNA, 15 bp, Homo sapiens
ataccagcccagaac

SEQ ID NO: 58227 - DNA, 15 bp, Homo sapiens
aataccagcccagaa

SEQ ID NO: 58228 - DNA, 15 bp, Homo sapiens
caataccagcccaga

SEQ ID NO: 58229 - DNA, 15 bp, Homo sapiens
acaataccagcccag

SEQ ID NO: 58230 - DNA, 15 bp, Homo sapiens
cacaataccagccca

SEQ ID NO: 58231 - DNA, 15 bp, Homo sapiens
acacaataccagccc

SEQ ID NO: 58232 - DNA, 15 bp, Homo sapiens
aacacaataccagcc

SEQ ID NO: 58233 - DNA, 15 bp, Homo sapiens
gaacacaataccagc

SEQ ID NO: 58234 - DNA, 15 bp, Homo sapiens
tgaacacaataccag

SEQ ID NO: 58235 - DNA, 15 bp, Homo sapiens
gtgaacacaatacca

SEQ ID NO: 58236 - DNA, 15 bp, Homo sapiens
agtgaacacaatacc

SEQ ID NO: 58237 - DNA, 15 bp, Homo sapiens
cagtgaacacaatac

SEQ ID NO: 58238 - DNA, 15 bp, Homo sapiens
ccagtgaacacaata

SEQ ID NO: 58239 - DNA, 15 bp, Homo sapiens
tccagtgaacacaat

SEQ ID NO: 58240 - DNA, 15 bp, Homo sapiens
ttccagtgaacacaa

SEQ ID NO: 58241 - DNA, 15 bp, Homo sapiens
attccagtgaacaca

SEQ ID NO: 58242 - DNA, 15 bp, Homo sapiens
aattccagtgaacac

SEQ ID NO: 58243 - DNA, 15 bp, Homo sapiens
taattccagtgaaca

SEQ ID NO: 58244 - DNA, 15 bp, Homo sapiens
gtaattccagtgaac

SEQ ID NO: 58245 - DNA, 15 bp, Homo sapiens
agtaattccagtgaa

SEQ ID NO: 58246 - DNA, 15 bp, Homo sapiens
gagtaattccagtga

SEQ ID NO: 58247 - DNA, 15 bp, Homo sapiens
ggagtaattccagtg

SEQ ID NO: 58248 - DNA, 15 bp, Homo sapiens
tggagtaattccagt

SEQ ID NO: 58249 - DNA, 15 bp, Homo sapiens
ctggagtaattccag

SEQ ID NO: 58250 - DNA, 15 bp, Homo sapiens
cctggagtaattcca

SEQ ID NO: 58251 - DNA, 15 bp, Homo sapiens
gcctggagtaattcc

SEQ ID NO: 58252 - DNA, 15 bp, Homo sapiens
tgcctggagtaattc

SEQ ID NO: 58253 - DNA, 15 bp, Homo sapiens
ctgcctggagtaatt

SEQ ID NO: 58254 - DNA, 15 bp, Homo sapiens
gctgcctggagtaat

SEQ ID NO: 58255 - DNA, 15 bp, Homo sapiens
tgctgcctggagtaa

SEQ ID NO: 58256 - DNA, 15 bp, Homo sapiens
atgctgcctggagta

SEQ ID NO: 58257 - DNA, 15 bp, Homo sapiens
aatgctgcctggagt

SEQ ID NO: 58258 - DNA, 15 bp, Homo sapiens
caatgctgcctggag

SEQ ID NO: 58259 - DNA, 15 bp, Homo sapiens
tcaatgctgcctgga

SEQ ID NO: 58260 - DNA, 15 bp, Homo sapiens
ctcaatgctgcctgg

SEQ ID NO: 58261 - DNA, 15 bp, Homo sapiens
gctcaatgctgcctg

SEQ ID NO: 58262 - DNA, 15 bp, Homo sapiens
agctcaatgctgcct

SEQ ID NO: 58263 - DNA, 15 bp, Homo sapiens
cagctcaatgctgcc

SEQ ID NO: 58264 - DNA, 15 bp, Homo sapiens
gcagctcaatgctgc

SEQ ID NO: 58265 - DNA, 15 bp, Homo sapiens
ggcagctcaatgctg

SEQ ID NO: 58266 - DNA, 15 bp, Homo sapiens
gggcagctcaatgct

SEQ ID NO: 58267 - DNA, 15 bp, Homo sapiens
ggggcagctcaatgc

SEQ ID NO: 58268 - DNA, 15 bp, Homo sapiens
tggggcagctcaatg

SEQ ID NO: 58269 - DNA, 15 bp, Homo sapiens
atggggcagctcaat

SEQ ID NO: 58270 - DNA, 15 bp, Homo sapiens
gatggggcagctcaa

SEQ ID NO: 58271 - DNA, 15 bp, Homo sapiens
tgatggggcagctca

SEQ ID NO: 58272 - DNA, 15 bp, Homo sapiens
atgatggggcagctc

SEQ ID NO: 58273 - DNA, 15 bp, Homo sapiens
catgatggggcagct

SEQ ID NO: 58274 - DNA, 15 bp, Homo sapiens
acatgatggggcagc

SEQ ID NO: 58275 - DNA, 15 bp, Homo sapiens
gacatgatggggcag

SEQ ID NO: 58276 - DNA, 15 bp, Homo sapiens
tgacatgatggggca

SEQ ID NO: 58277 - DNA, 15 bp, Homo sapiens
ttgacatgatggggc

SEQ ID NO: 58278 - DNA, 15 bp, Homo sapiens
cttgacatgatgggg

SEQ ID NO: 58279 - DNA, 15 bp, Homo sapiens
acttgacatgatggg

SEQ ID NO: 58280 - DNA, 15 bp, Homo sapiens
tacttgacatgatgg

SEQ ID NO: 58281 - DNA, 15 bp, Homo sapiens
gtacttgacatgatg

SEQ ID NO: 58282 - DNA, 15 bp, Homo sapiens
tgtacttgacatgat

SEQ ID NO: 58283 - DNA, 15 bp, Homo sapiens
ttgtacttgacatga

SEQ ID NO: 58284 - DNA, 15 bp, Homo sapiens
cttgtacttgacatg

SEQ ID NO: 58285 - DNA, 15 bp, Homo sapiens
tcttgtacttgacat

SEQ ID NO: 58286 - DNA, 15 bp, Homo sapiens
atcttgtacttgaca

SEQ ID NO: 58287 - DNA, 15 bp, Homo sapiens
gatcttgtacttgac

SEQ ID NO: 58288 - DNA, 15 bp, Homo sapiens
ggatcttgtacttga

SEQ ID NO: 58289 - DNA, 15 bp, Homo sapiens
cggatcttgtacttg

SEQ ID NO: 58290 - DNA, 15 bp, Homo sapiens
tcggatcttgtactt

SEQ ID NO: 58291 - DNA, 15 bp, Homo sapiens
ttcggatcttgtact

SEQ ID NO: 58292 - DNA, 15 bp, Homo sapiens
attcggatcttgtac

SEQ ID NO: 58293 - DNA, 15 bp, Homo sapiens
cattcggatcttgta

SEQ ID NO: 58294 - DNA, 15 bp, Homo sapiens
ccattcggatcttgt

SEQ ID NO: 58295 - DNA, 15 bp, Homo sapiens
tccattcggatcttg

SEQ ID NO: 58296 - DNA, 15 bp, Homo sapiens
gtccattcggatctt

SEQ ID NO: 58297 - DNA, 15 bp, Homo sapiens
tgtccattcggatct

SEQ ID NO: 58298 - DNA, 15 bp, Homo sapiens
atgtccattcggatc

SEQ ID NO: 58299 - DNA, 15 bp, Homo sapiens
aatgtccattcggat

SEQ ID NO: 58300 - DNA, 15 bp, Homo sapiens
caatgtccattcgga

SEQ ID NO: 58301 - DNA, 15 bp, Homo sapiens
tcaatgtccattcgg

SEQ ID NO: 58302 - DNA, 15 bp, Homo sapiens
gtcaatgtccattcg

SEQ ID NO: 58303 - DNA, 15 bp, Homo sapiens
tgtcaatgtccattc

SEQ ID NO: 58304 - DNA, 15 bp, Homo sapiens
ttgtcaatgtccatt

SEQ ID NO: 58305 - DNA, 15 bp, Homo sapiens
attgtcaatgtccat

SEQ ID NO: 58306 - DNA, 15 bp, Homo sapiens
cattgtcaatgtcca

SEQ ID NO: 58307 - DNA, 15 bp, Homo sapiens
acattgtcaatgtcc

SEQ ID NO: 58308 - DNA, 15 bp, Homo sapiens
cacattgtcaatgtc

SEQ ID NO: 58309 - DNA, 15 bp, Homo sapiens
ccacattgtcaatgt

SEQ ID NO: 58310 - DNA, 15 bp, Homo sapiens
tccacattgtcaatg

SEQ ID NO: 58311 - DNA, 15 bp, Homo sapiens
ctccacattgtcaat

SEQ ID NO: 58312 - DNA, 15 bp, Homo sapiens
tctccacattgtcaa

SEQ ID NO: 58313 - DNA, 15 bp, Homo sapiens
ctctccacattgtca

SEQ ID NO: 58314 - DNA, 15 bp, Homo sapiens
cctctccacattgtc

SEQ ID NO: 58315 - DNA, 15 bp, Homo sapiens
tcctctccacattgt

SEQ ID NO: 58316 - DNA, 15 bp, Homo sapiens
gtcctctccacattg

SEQ ID NO: 58317 - DNA, 15 bp, Homo sapiens
tgtcctctccacatt

SEQ ID NO: 58318 - DNA, 15 bp, Homo sapiens
ttgtcctctccacat

SEQ ID NO: 58319 - DNA, 15 bp, Homo sapiens
tttgtcctctccaca

SEQ ID NO: 58320 - DNA, 15 bp, Homo sapiens
atttgtcctctccac

SEQ ID NO: 58321 - DNA, 15 bp, Homo sapiens
tatttgtcctctcca

SEQ ID NO: 58322 - DNA, 15 bp, Homo sapiens
ttatttgtcctctcc

SEQ ID NO: 58323 - DNA, 15 bp, Homo sapiens
tttatttgtcctctc

SEQ ID NO: 58324 - DNA, 15 bp, Homo sapiens
ttttatttgtcctct

SEQ ID NO: 58325 - DNA, 15 bp, Homo sapiens
attttatttgtcctc

SEQ ID NO: 58326 - DNA, 15 bp, Homo sapiens
gattttatttgtcct

SEQ ID NO: 58327 - DNA, 15 bp, Homo sapiens
tgattttatttgtcc

SEQ ID NO: 58328 - DNA, 15 bp, Homo sapiens
ttgattttatttgtc

SEQ ID NO: 58329 - DNA, 15 bp, Homo sapiens
cttgattttatttgt

SEQ ID NO: 58330 - DNA, 15 bp, Homo sapiens
ccttgattttatttg

SEQ ID NO: 58331 - DNA, 15 bp, Homo sapiens
tccttgattttattt

SEQ ID NO: 58332 - DNA, 15 bp, Homo sapiens
atccttgattttatt

SEQ ID NO: 58333 - DNA, 15 bp, Homo sapiens
catccttgattttat

SEQ ID NO: 58334 - DNA, 15 bp, Homo sapiens
ccatccttgatttta

SEQ ID NO: 58335 - DNA, 15 bp, Homo sapiens
cccatccttgatttt

SEQ ID NO: 58336 - DNA, 15 bp, Homo sapiens
acccatccttgattt

SEQ ID NO: 58337 - DNA, 15 bp, Homo sapiens
tacccatccttgatt

SEQ ID NO: 58338 - DNA, 15 bp, Homo sapiens
ttacccatccttgat

SEQ ID NO: 58339 - DNA, 15 bp, Homo sapiens
cttacccatccttga

SEQ ID NO: 58340 - DNA, 15 bp, Homo sapiens
acttacccatccttg

SEQ ID NO: 58341 - DNA, 15 bp, Homo sapiens
cacttacccatcctt

SEQ ID NO: 58342 - DNA, 15 bp, Homo sapiens
ccacttacccatcct

SEQ ID NO: 58343 - DNA, 15 bp, Homo sapiens
tccacttacccatcc

SEQ ID NO: 58344 - DNA, 15 bp, Homo sapiens
ttccacttacccatc

SEQ ID NO: 58345 - DNA, 15 bp, Homo sapiens
attccacttacccat

SEQ ID NO: 58346 - DNA, 15 bp, Homo sapiens
gattccacttaccca

SEQ ID NO: 58347 - DNA, 15 bp, Homo sapiens
ggattccacttaccc

SEQ ID NO: 58348 - DNA, 15 bp, Homo sapiens
gggattccacttacc

SEQ ID NO: 58349 - DNA, 15 bp, Homo sapiens
tgggattccacttac

SEQ ID NO: 58350 - DNA, 15 bp, Homo sapiens
atgggattccactta

SEQ ID NO: 58351 - DNA, 15 bp, Homo sapiens
gatgggattccactt

SEQ ID NO: 58352 - DNA, 15 bp, Homo sapiens
tgatgggattccact

SEQ ID NO: 58353 - DNA, 15 bp, Homo sapiens
gtgatgggattccac

SEQ ID NO: 58354 - DNA, 15 bp, Homo sapiens
tgtgatgggattcca

SEQ ID NO: 58355 - DNA, 15 bp, Homo sapiens
gtgtgatgggattcc

SEQ ID NO: 58356 - DNA, 15 bp, Homo sapiens
ggtgtgatgggattc

SEQ ID NO: 58357 - DNA, 15 bp, Homo sapiens
tggtgtgatgggatt

SEQ ID NO: 58358 - DNA, 15 bp, Homo sapiens
ctggtgtgatgggat

SEQ ID NO: 58359 - DNA, 15 bp, Homo sapiens
gctggtgtgatggga

SEQ ID NO: 58360 - DNA, 15 bp, Homo sapiens
ggctggtgtgatggg

SEQ ID NO: 58361 - DNA, 15 bp, Homo sapiens
aggctggtgtgatgg

SEQ ID NO: 58362 - DNA, 15 bp, Homo sapiens
caggctggtgtgatg

SEQ ID NO: 58363 - DNA, 15 bp, Homo sapiens
ccaggctggtgtgat

SEQ ID NO: 58364 - DNA, 15 bp, Homo sapiens
accaggctggtgtga

SEQ ID NO: 58365 - DNA, 15 bp, Homo sapiens
gaccaggctggtgtg

SEQ ID NO: 58366 - DNA, 15 bp, Homo sapiens
agaccaggctggtgt

SEQ ID NO: 58367 - DNA, 15 bp, Homo sapiens
aagaccaggctggtg

SEQ ID NO: 58368 - DNA, 15 bp, Homo sapiens
caagaccaggctggt

SEQ ID NO: 58369 - DNA, 15 bp, Homo sapiens
ccaagaccaggctgg

SEQ ID NO: 58370 - DNA, 15 bp, Homo sapiens
cccaagaccaggctg

SEQ ID NO: 58371 - DNA, 15 bp, Homo sapiens
ccccaagaccaggct

SEQ ID NO: 58372 - DNA, 15 bp, Homo sapiens
tccccaagaccaggc

SEQ ID NO: 58373 - DNA, 15 bp, Homo sapiens
ctccccaagaccagg

SEQ ID NO: 58374 - DNA, 15 bp, Homo sapiens
cctccccaagaccag

SEQ ID NO: 58375 - DNA, 15 bp, Homo sapiens
acctccccaagacca

SEQ ID NO: 58376 - DNA, 15 bp, Homo sapiens
gacctccccaagacc

SEQ ID NO: 58377 - DNA, 15 bp, Homo sapiens
ggacctccccaagac

SEQ ID NO: 58378 - DNA, 15 bp, Homo sapiens
tggacctccccaaga

SEQ ID NO: 58379 - DNA, 15 bp, Homo sapiens
ctggacctccccaag

SEQ ID NO: 58380 - DNA, 15 bp, Homo sapiens
tctggacctccccaa

SEQ ID NO: 58381 - DNA, 15 bp, Homo sapiens
ctctggacctcccca

SEQ ID NO: 58382 - DNA, 15 bp, Homo sapiens
gctctggacctcccc

SEQ ID NO: 58383 - DNA, 15 bp, Homo sapiens
tgctctggacctccc

SEQ ID NO: 58384 - DNA, 15 bp, Homo sapiens
gtgctctggacctcc

SEQ ID NO: 58385 - DNA, 15 bp, Homo sapiens
ggtgctctggacctc

SEQ ID NO: 58386 - DNA, 15 bp, Homo sapiens
aggtgctctggacct

SEQ ID NO: 58387 - DNA, 15 bp, Homo sapiens
taggtgctctggacc

SEQ ID NO: 58388 - DNA, 15 bp, Homo sapiens
ataggtgctctggac

SEQ ID NO: 58389 - DNA, 15 bp, Homo sapiens
aataggtgctctgga

SEQ ID NO: 58390 - DNA, 15 bp, Homo sapiens
taataggtgctctgg

SEQ ID NO: 58391 - DNA, 15 bp, Homo sapiens
ataataggtgctctg

SEQ ID NO: 58392 - DNA, 15 bp, Homo sapiens
tataataggtgctct

SEQ ID NO: 58393 - DNA, 15 bp, Homo sapiens
atataataggtgctc

SEQ ID NO: 58394 - DNA, 15 bp, Homo sapiens
aatataataggtgct

SEQ ID NO: 58395 - DNA, 15 bp, Homo sapiens
taatataataggtgc

SEQ ID NO: 58396 - DNA, 15 bp, Homo sapiens
ctaatataataggtg

SEQ ID NO: 58397 - DNA, 15 bp, Homo sapiens
cctaatataataggt

SEQ ID NO: 58398 - DNA, 15 bp, Homo sapiens
tcctaatataatagg

SEQ ID NO: 58399 - DNA, 15 bp, Homo sapiens
gtcctaatataatag

SEQ ID NO: 58400 - DNA, 15 bp, Homo sapiens
tgtcctaatataata

SEQ ID NO: 58401 - DNA, 15 bp, Homo sapiens
ttgtcctaatataat

SEQ ID NO: 58402 - DNA, 15 bp, Homo sapiens
cttgtcctaatataa

SEQ ID NO: 58403 - DNA, 15 bp, Homo sapiens
tcttgtcctaatata

SEQ ID NO: 58404 - DNA, 15 bp, Homo sapiens
ctcttgtcctaatat

SEQ ID NO: 58405 - DNA, 15 bp, Homo sapiens
cctcttgtcctaata

SEQ ID NO: 58406 - DNA, 15 bp, Homo sapiens
acctcttgtcctaat

SEQ ID NO: 58407 - DNA, 15 bp, Homo sapiens
tacctcttgtcctaa

SEQ ID NO: 58408 - DNA, 15 bp, Homo sapiens
gtacctcttgtccta

SEQ ID NO: 58409 - DNA, 15 bp, Homo sapiens
agtacctcttgtcct

SEQ ID NO: 58410 - DNA, 15 bp, Homo sapiens
aagtacctcttgtcc

SEQ ID NO: 58411 - DNA, 15 bp, Homo sapiens
aaagtacctcttgtc

SEQ ID NO: 58412 - DNA, 15 bp, Homo sapiens
taaagtacctcttgt

SEQ ID NO: 58413 - DNA, 15 bp, Homo sapiens
ataaagtacctcttg

SEQ ID NO: 58414 - DNA, 15 bp, Homo sapiens
aataaagtacctctt

SEQ ID NO: 58415 - DNA, 15 bp, Homo sapiens
aaataaagtacctct

SEQ ID NO: 58416 - DNA, 15 bp, Homo sapiens
aaaataaagtacctc

SEQ ID NO: 58417 - DNA, 15 bp, Homo sapiens
taaaataaagtacct

SEQ ID NO: 58418 - DNA, 15 bp, Homo sapiens
ttaaaataaagtacc

SEQ ID NO: 58419 - DNA, 15 bp, Homo sapiens
gttaaaataaagtac

SEQ ID NO: 58420 - DNA, 15 bp, Homo sapiens
agttaaaataaagta

SEQ ID NO: 58421 - DNA, 15 bp, Homo sapiens
tagttaaaataaagt

SEQ ID NO: 58422 - DNA, 15 bp, Homo sapiens
ttagttaaaataaag

SEQ ID NO: 58423 - DNA, 15 bp, Homo sapiens
tttagttaaaataaa

SEQ ID NO: 58424 - DNA, 15 bp, Homo sapiens
ttttagttaaaataa

SEQ ID NO: 58425 - DNA, 15 bp, Homo sapiens
tttttagttaaaata

SEQ ID NO: 58426 - DNA, 15 bp, Homo sapiens
atttttagttaaaat

SEQ ID NO: 58427 - DNA, 15 bp, Homo sapiens
aatttttagttaaaa

SEQ ID NO: 58428 - DNA, 15 bp, Homo sapiens
aaatttttagttaaa

SEQ ID NO: 58429 - DNA, 15 bp, Homo sapiens
caaatttttagttaa

SEQ ID NO: 58430 - DNA, 15 bp, Homo sapiens
ccaaatttttagtta

SEQ ID NO: 58431 - DNA, 15 bp, Homo sapiens
accaaatttttagtt

SEQ ID NO: 58432 - DNA, 15 bp, Homo sapiens
taccaaatttttagt

SEQ ID NO: 58433 - DNA, 15 bp, Homo sapiens
ctaccaaatttttag

SEQ ID NO: 58434 - DNA, 15 bp, Homo sapiens
tctaccaaattttta

SEQ ID NO: 58435 - DNA, 15 bp, Homo sapiens
ttctaccaaattttt

SEQ ID NO: 58436 - DNA, 15 bp, Homo sapiens
tttctaccaaatttt

SEQ ID NO: 58437 - DNA, 15 bp, Homo sapiens
atttctaccaaattt

SEQ ID NO: 58438 - DNA, 15 bp, Homo sapiens
aatttctaccaaatt

SEQ ID NO: 58439 - DNA, 15 bp, Homo sapiens
aaatttctaccaaat

SEQ ID NO: 58440 - DNA, 15 bp, Homo sapiens
gaaatttctaccaaa

SEQ ID NO: 58441 - DNA, 15 bp, Homo sapiens
tgaaatttctaccaa

SEQ ID NO: 58442 - DNA, 15 bp, Homo sapiens
ttgaaatttctacca

SEQ ID NO: 58443 - DNA, 15 bp, Homo sapiens
gttgaaatttctacc

SEQ ID NO: 58444 - DNA, 15 bp, Homo sapiens
tgttgaaatttctac

SEQ ID NO: 58445 - DNA, 15 bp, Homo sapiens
ttgttgaaatttcta

SEQ ID NO: 58446 - DNA, 15 bp, Homo sapiens
gttgttgaaatttct

SEQ ID NO: 58447 - DNA, 15 bp, Homo sapiens
tgttgttgaaatttc

SEQ ID NO: 58448 - DNA, 15 bp, Homo sapiens
ttgttgttgaaattt

SEQ ID NO: 58449 - DNA, 15 bp, Homo sapiens
gttgttgttgaaatt

SEQ ID NO: 58450 - DNA, 15 bp, Homo sapiens
tgttgttgttgaaat

SEQ ID NO: 58451 - DNA, 15 bp, Homo sapiens
ttgttgttgttgaaa

SEQ ID NO: 58452 - DNA, 15 bp, Homo sapiens
tttgttgttgttgaa

SEQ ID NO: 58453 - DNA, 15 bp, Homo sapiens
ttttgttgttgttga

SEQ ID NO: 58454 - DNA, 15 bp, Homo sapiens
tttttgttgttgttg

SEQ ID NO: 58455 - DNA, 15 bp, Homo sapiens
ttttttgttgttgtt

SEQ ID NO: 58456 - DNA, 15 bp, Homo sapiens
tttttttgttgttgt

SEQ ID NO: 58457 - DNA, 15 bp, Homo sapiens
gtttttttgttgttg

SEQ ID NO: 58458 - DNA, 15 bp, Homo sapiens
agtttttttgttgtt

SEQ ID NO: 58459 - DNA, 15 bp, Homo sapiens
gagtttttttgttgt

SEQ ID NO: 58460 - DNA, 15 bp, Homo sapiens
tgagtttttttgttg

SEQ ID NO: 58461 - DNA, 15 bp, Homo sapiens
ttgagtttttttgtt

SEQ ID NO: 58462 - DNA, 15 bp, Homo sapiens
gttgagtttttttgt

SEQ ID NO: 58463 - DNA, 15 bp, Homo sapiens
agttgagtttttttg

SEQ ID NO: 58464 - DNA, 15 bp, Homo sapiens
aagttgagttttttt

SEQ ID NO: 58465 - DNA, 15 bp, Homo sapiens
caagttgagtttttt

SEQ ID NO: 58466 - DNA, 15 bp, Homo sapiens
ccaagttgagttttt

SEQ ID NO: 58467 - DNA, 15 bp, Homo sapiens
accaagttgagtttt

SEQ ID NO: 58468 - DNA, 15 bp, Homo sapiens
caccaagttgagttt

SEQ ID NO: 58469 - DNA, 15 bp, Homo sapiens
acaccaagttgagtt

SEQ ID NO: 58470 - DNA, 15 bp, Homo sapiens
gacaccaagttgagt

SEQ ID NO: 58471 - DNA, 15 bp, Homo sapiens
tgacaccaagttgag

SEQ ID NO: 58472 - DNA, 15 bp, Homo sapiens
atgacaccaagttga

SEQ ID NO: 58473 - DNA, 15 bp, Homo sapiens
catgacaccaagttg

SEQ ID NO: 58474 - DNA, 15 bp, Homo sapiens
tcatgacaccaagtt

SEQ ID NO: 58475 - DNA, 15 bp, Homo sapiens
atcatgacaccaagt

SEQ ID NO: 58476 - DNA, 15 bp, Homo sapiens
aatcatgacaccaag

SEQ ID NO: 58477 - DNA, 15 bp, Homo sapiens
aaatcatgacaccaa

SEQ ID NO: 58478 - DNA, 15 bp, Homo sapiens
aaaatcatgacacca

SEQ ID NO: 58479 - DNA, 15 bp, Homo sapiens
caaaatcatgacacc

SEQ ID NO: 58480 - DNA, 15 bp, Homo sapiens
ccaaaatcatgacac

SEQ ID NO: 58481 - DNA, 15 bp, Homo sapiens
accaaaatcatgaca

SEQ ID NO: 58482 - DNA, 15 bp, Homo sapiens
caccaaaatcatgac

SEQ ID NO: 58483 - DNA, 15 bp, Homo sapiens
tcaccaaaatcatga

SEQ ID NO: 58484 - DNA, 15 bp, Homo sapiens
ttcaccaaaatcatg

SEQ ID NO: 58485 - DNA, 15 bp, Homo sapiens
tttcaccaaaatcat

SEQ ID NO: 58486 - DNA, 15 bp, Homo sapiens
atttcaccaaaatca

SEQ ID NO: 58487 - DNA, 15 bp, Homo sapiens
aatttcaccaaaatc

SEQ ID NO: 58488 - DNA, 15 bp, Homo sapiens
caatttcaccaaaat

SEQ ID NO: 58489 - DNA, 15 bp, Homo sapiens
ccaatttcaccaaaa

SEQ ID NO: 58490 - DNA, 15 bp, Homo sapiens
accaatttcaccaaa

SEQ ID NO: 58491 - DNA, 15 bp, Homo sapiens
taccaatttcaccaa

SEQ ID NO: 58492 - DNA, 15 bp, Homo sapiens
gtaccaatttcacca

SEQ ID NO: 58493 - DNA, 15 bp, Homo sapiens
tgtaccaatttcacc

SEQ ID NO: 58494 - DNA, 15 bp, Homo sapiens
atgtaccaatttcac

SEQ ID NO: 58495 - DNA, 15 bp, Homo sapiens
catgtaccaatttca

SEQ ID NO: 58496 - DNA, 15 bp, Homo sapiens
tcatgtaccaatttc

SEQ ID NO: 58497 - DNA, 15 bp, Homo sapiens
gtcatgtaccaattt

SEQ ID NO: 58498 - DNA, 15 bp, Homo sapiens
agtcatgtaccaatt

SEQ ID NO: 58499 - DNA, 15 bp, Homo sapiens
aagtcatgtaccaat

SEQ ID NO: 58500 - DNA, 15 bp, Homo sapiens
caagtcatgtaccaa

SEQ ID NO: 58501 - DNA, 15 bp, Homo sapiens
gcaagtcatgtacca

SEQ ID NO: 58502 - DNA, 15 bp, Homo sapiens
agcaagtcatgtacc

SEQ ID NO: 58503 - DNA, 15 bp, Homo sapiens
cagcaagtcatgtac

SEQ ID NO: 58504 - DNA, 15 bp, Homo sapiens
ccagcaagtcatgta

SEQ ID NO: 58505 - DNA, 15 bp, Homo sapiens
tccagcaagtcatgt

SEQ ID NO: 58506 - DNA, 15 bp, Homo sapiens
ttccagcaagtcatg

SEQ ID NO: 58507 - DNA, 15 bp, Homo sapiens
cttccagcaagtcat

SEQ ID NO: 58508 - DNA, 15 bp, Homo sapiens
ccttccagcaagtca

SEQ ID NO: 58509 - DNA, 15 bp, Homo sapiens
accttccagcaagtc

SEQ ID NO: 58510 - DNA, 15 bp, Homo sapiens
aaccttccagcaagt

SEQ ID NO: 58511 - DNA, 15 bp, Homo sapiens
aaaccttccagcaag

SEQ ID NO: 58512 - DNA, 15 bp, Homo sapiens
aaaaccttccagcaa

SEQ ID NO: 58513 - DNA, 15 bp, Homo sapiens
aaaaaccttccagca

SEQ ID NO: 58514 - DNA, 15 bp, Homo sapiens
gaaaaaccttccagc

SEQ ID NO: 58515 - DNA, 15 bp, Homo sapiens
tgaaaaaccttccag

SEQ ID NO: 58516 - DNA, 15 bp, Homo sapiens
atgaaaaaccttcca

SEQ ID NO: 58517 - DNA, 15 bp, Homo sapiens
tatgaaaaaccttcc

SEQ ID NO: 58518 - DNA, 15 bp, Homo sapiens
ctatgaaaaaccttc

SEQ ID NO: 58519 - DNA, 15 bp, Homo sapiens
cctatgaaaaacctt

SEQ ID NO: 58520 - DNA, 15 bp, Homo sapiens
acctatgaaaaacct

SEQ ID NO: 58521 - DNA, 15 bp, Homo sapiens
gacctatgaaaaacc

SEQ ID NO: 58522 - DNA, 15 bp, Homo sapiens
tgacctatgaaaaac

SEQ ID NO: 58523 - DNA, 15 bp, Homo sapiens
atgacctatgaaaaa

SEQ ID NO: 58524 - DNA, 15 bp, Homo sapiens
tatgacctatgaaaa

SEQ ID NO: 58525 - DNA, 15 bp, Homo sapiens
ttatgacctatgaaa

SEQ ID NO: 58526 - DNA, 15 bp, Homo sapiens
tttatgacctatgaa

SEQ ID NO: 58527 - DNA, 15 bp, Homo sapiens
ttttatgacctatga

SEQ ID NO: 58528 - DNA, 15 bp, Homo sapiens
attttatgacctatg

SEQ ID NO: 58529 - DNA, 15 bp, Homo sapiens
tattttatgacctat

SEQ ID NO: 58530 - DNA, 15 bp, Homo sapiens
ttattttatgaccta

SEQ ID NO: 58531 - DNA, 15 bp, Homo sapiens
gttattttatgacct

SEQ ID NO: 58532 - DNA, 15 bp, Homo sapiens
tgttattttatgacc

SEQ ID NO: 58533 - DNA, 15 bp, Homo sapiens
ctgttattttatgac

SEQ ID NO: 58534 - DNA, 15 bp, Homo sapiens
actgttattttatga

SEQ ID NO: 58535 - DNA, 15 bp, Homo sapiens
tactgttattttatg

SEQ ID NO: 58536 - DNA, 15 bp, Homo sapiens
atactgttattttat

SEQ ID NO: 58537 - DNA, 15 bp, Homo sapiens
gatactgttatttta

SEQ ID NO: 58538 - DNA, 15 bp, Homo sapiens
agatactgttatttt

SEQ ID NO: 58539 - DNA, 15 bp, Homo sapiens
aagatactgttattt

SEQ ID NO: 58540 - DNA, 15 bp, Homo sapiens
aaagatactgttatt

SEQ ID NO: 58541 - DNA, 15 bp, Homo sapiens
aaaagatactgttat

SEQ ID NO: 58542 - DNA, 15 bp, Homo sapiens
caaaagatactgtta

SEQ ID NO: 58543 - DNA, 15 bp, Homo sapiens
tcaaaagatactgtt

SEQ ID NO: 58544 - DNA, 15 bp, Homo sapiens
atcaaaagatactgt

SEQ ID NO: 58545 - DNA, 15 bp, Homo sapiens
aatcaaaagatactg

SEQ ID NO: 58546 - DNA, 15 bp, Homo sapiens
aaatcaaaagatact

SEQ ID NO: 58547 - DNA, 15 bp, Homo sapiens
taaatcaaaagatac

SEQ ID NO: 58548 - DNA, 15 bp, Homo sapiens
ctaaatcaaaagata

SEQ ID NO: 58549 - DNA, 15 bp, Homo sapiens
gctaaatcaaaagat

SEQ ID NO: 58550 - DNA, 15 bp, Homo sapiens
tgctaaatcaaaaga

SEQ ID NO: 58551 - DNA, 15 bp, Homo sapiens
atgctaaatcaaaag

SEQ ID NO: 58552 - DNA, 15 bp, Homo sapiens
aatgctaaatcaaaa

SEQ ID NO: 58553 - DNA, 15 bp, Homo sapiens
aaatgctaaatcaaa

SEQ ID NO: 58554 - DNA, 15 bp, Homo sapiens
gaaatgctaaatcaa

SEQ ID NO: 58555 - DNA, 15 bp, Homo sapiens
agaaatgctaaatca

SEQ ID NO: 58556 - DNA, 15 bp, Homo sapiens
tagaaatgctaaatc

SEQ ID NO: 58557 - DNA, 15 bp, Homo sapiens
gtagaaatgctaaat

SEQ ID NO: 58558 - DNA, 15 bp, Homo sapiens
agtagaaatgctaaa

SEQ ID NO: 58559 - DNA, 15 bp, Homo sapiens
gagtagaaatgctaa

SEQ ID NO: 58560 - DNA, 15 bp, Homo sapiens
tgagtagaaatgcta

SEQ ID NO: 58561 - DNA, 15 bp, Homo sapiens
ttgagtagaaatgct

SEQ ID NO: 58562 - DNA, 15 bp, Homo sapiens
cttgagtagaaatgc

SEQ ID NO: 58563 - DNA, 15 bp, Homo sapiens
ccttgagtagaaatg

SEQ ID NO: 58564 - DNA, 15 bp, Homo sapiens
cccttgagtagaaat

SEQ ID NO: 58565 - DNA, 15 bp, Homo sapiens
tcccttgagtagaaa

SEQ ID NO: 58566 - DNA, 15 bp, Homo sapiens
ttcccttgagtagaa

SEQ ID NO: 58567 - DNA, 15 bp, Homo sapiens
attcccttgagtaga

SEQ ID NO: 58568 - DNA, 15 bp, Homo sapiens
aattcccttgagtag

SEQ ID NO: 58569 - DNA, 15 bp, Homo sapiens
taattcccttgagta

SEQ ID NO: 58570 - DNA, 15 bp, Homo sapiens
ttaattcccttgagt

SEQ ID NO: 58571 - DNA, 15 bp, Homo sapiens
attaattcccttgag

SEQ ID NO: 58572 - DNA, 15 bp, Homo sapiens
aattaattcccttga

SEQ ID NO: 58573 - DNA, 15 bp, Homo sapiens
gaattaattcccttg

SEQ ID NO: 58574 - DNA, 15 bp, Homo sapiens
ggaattaattccctt

SEQ ID NO: 58575 - DNA, 15 bp, Homo sapiens
tggaattaattccct

SEQ ID NO: 58576 - DNA, 15 bp, Homo sapiens
ctggaattaattccc

SEQ ID NO: 58577 - DNA, 15 bp, Homo sapiens
cctggaattaattcc

SEQ ID NO: 58578 - DNA, 15 bp, Homo sapiens
tcctggaattaattc

SEQ ID NO: 58579 - DNA, 15 bp, Homo sapiens
ttcctggaattaatt

SEQ ID NO: 58580 - DNA, 15 bp, Homo sapiens
attcctggaattaat

SEQ ID NO: 58581 - DNA, 15 bp, Homo sapiens
aattcctggaattaa

SEQ ID NO: 58582 - DNA, 15 bp, Homo sapiens
aaattcctggaatta

SEQ ID NO: 58583 - DNA, 15 bp, Homo sapiens
aaaattcctggaatt

SEQ ID NO: 58584 - DNA, 15 bp, Homo sapiens
caaaattcctggaat

SEQ ID NO: 58585 - DNA, 15 bp, Homo sapiens
ccaaaattcctggaa

SEQ ID NO: 58586 - DNA, 15 bp, Homo sapiens
accaaaattcctgga

SEQ ID NO: 58587 - DNA, 15 bp, Homo sapiens
caccaaaattcctgg

SEQ ID NO: 58588 - DNA, 15 bp, Homo sapiens
ccaccaaaattcctg

SEQ ID NO: 58589 - DNA, 15 bp, Homo sapiens
gccaccaaaattcct

SEQ ID NO: 58590 - DNA, 15 bp, Homo sapiens
tgccaccaaaattcc

SEQ ID NO: 58591 - DNA, 15 bp, Homo sapiens
ctgccaccaaaattc

SEQ ID NO: 58592 - DNA, 15 bp, Homo sapiens
cctgccaccaaaatt

SEQ ID NO: 58593 - DNA, 15 bp, Homo sapiens
gcctgccaccaaaat

SEQ ID NO: 58594 - DNA, 15 bp, Homo sapiens
tgcctgccaccaaaa

SEQ ID NO: 58595 - DNA, 15 bp, Homo sapiens
gtgcctgccaccaaa

SEQ ID NO: 58596 - DNA, 15 bp, Homo sapiens
ggtgcctgccaccaa

SEQ ID NO: 58597 - DNA, 15 bp, Homo sapiens
ttacaggtgcctgcc

SEQ ID NO: 58598 - DNA, 15 bp, Homo sapiens
attacaggtgcctgc

SEQ ID NO: 58599 - DNA, 15 bp, Homo sapiens
gattacaggtgcctg

SEQ ID NO: 58600 - DNA, 15 bp, Homo sapiens
ggattacaggtgcct

SEQ ID NO: 58601 - DNA, 15 bp, Homo sapiens
cctctgcctcctggg

SEQ ID NO: 58602 - DNA, 15 bp, Homo sapiens
acctctgcctcctgg

SEQ ID NO: 58603 - DNA, 15 bp, Homo sapiens
aacctctgcctcctg

SEQ ID NO: 58604 - DNA, 15 bp, Homo sapiens
caacctctgcctcct

SEQ ID NO: 58605 - DNA, 15 bp, Homo sapiens
tagctcactgcaacc

SEQ ID NO: 58606 - DNA, 15 bp, Homo sapiens
ttagctcactgcaac

SEQ ID NO: 58607 - DNA, 15 bp, Homo sapiens
cttagctcactgcaa

SEQ ID NO: 58608 - DNA, 15 bp, Homo sapiens
tcttagctcactgca

SEQ ID NO: 58609 - DNA, 15 bp, Homo sapiens
atcttagctcactgc

SEQ ID NO: 58610 - DNA, 15 bp, Homo sapiens
gatcttagctcactg

SEQ ID NO: 58611 - DNA, 15 bp, Homo sapiens
cgatcttagctcact

SEQ ID NO: 58612 - DNA, 15 bp, Homo sapiens
gcgatcttagctcac

SEQ ID NO: 58613 - DNA, 15 bp, Homo sapiens
tgcgatcttagctca

SEQ ID NO: 58614 - DNA, 15 bp, Homo sapiens
atgcgatcttagctc

SEQ ID NO: 58615 - DNA, 15 bp, Homo sapiens
gatgcgatcttagct

SEQ ID NO: 58616 - DNA, 15 bp, Homo sapiens
tgatgcgatcttagc

SEQ ID NO: 58617 - DNA, 15 bp, Homo sapiens
atgatgcgatcttag

SEQ ID NO: 58618 - DNA, 15 bp, Homo sapiens
aatgatgcgatctta

SEQ ID NO: 58619 - DNA, 15 bp, Homo sapiens
caatgatgcgatctt

SEQ ID NO: 58620 - DNA, 15 bp, Homo sapiens
gcaatgatgcgatct

SEQ ID NO: 58621 - DNA, 15 bp, Homo sapiens
tgcaatgatgcgatc

SEQ ID NO: 58622 - DNA, 15 bp, Homo sapiens
gtgcaatgatgcgat

SEQ ID NO: 58623 - DNA, 15 bp, Homo sapiens
agtgcaatgatgcga

SEQ ID NO: 58624 - DNA, 15 bp, Homo sapiens
gagtgcaatgatgcg

SEQ ID NO: 58625 - DNA, 15 bp, Homo sapiens
ggagtgcaatgatgc

SEQ ID NO: 58626 - DNA, 15 bp, Homo sapiens
gggagtgcaatgatg

SEQ ID NO: 58627 - DNA, 15 bp, Homo sapiens
cgggagtgcaatgat

SEQ ID NO: 58628 - DNA, 15 bp, Homo sapiens
gcgggagtgcaatga

SEQ ID NO: 58629 - DNA, 15 bp, Homo sapiens
ggcgggagtgcaatg

SEQ ID NO: 58630 - DNA, 15 bp, Homo sapiens
aggcgggagtgcaat

SEQ ID NO: 58631 - DNA, 15 bp, Homo sapiens
caggcgggagtgcaa

SEQ ID NO: 58632 - DNA, 15 bp, Homo sapiens
ccaggcgggagtgca

SEQ ID NO: 58633 - DNA, 15 bp, Homo sapiens
cccaggcgggagtgc

SEQ ID NO: 58634 - DNA, 15 bp, Homo sapiens
gcccaggcgggagtg

SEQ ID NO: 58635 - DNA, 15 bp, Homo sapiens
tgcccaggcgggagt

SEQ ID NO: 58636 - DNA, 15 bp, Homo sapiens
ttgcccaggcgggag

SEQ ID NO: 58637 - DNA, 15 bp, Homo sapiens
attgcccaggcggga

SEQ ID NO: 58638 - DNA, 15 bp, Homo sapiens
tattgcccaggcggg

SEQ ID NO: 58639 - DNA, 15 bp, Homo sapiens
ttattgcccaggcgg

SEQ ID NO: 58640 - DNA, 15 bp, Homo sapiens
cttattgcccaggcg

SEQ ID NO: 58641 - DNA, 15 bp, Homo sapiens
tcttattgcccaggc

SEQ ID NO: 58642 - DNA, 15 bp, Homo sapiens
ctcttattgcccagg

SEQ ID NO: 58643 - DNA, 15 bp, Homo sapiens
actcttattgcccag

SEQ ID NO: 58644 - DNA, 15 bp, Homo sapiens
cactcttattgccca

SEQ ID NO: 58645 - DNA, 15 bp, Homo sapiens
tcactcttattgccc

SEQ ID NO: 58646 - DNA, 15 bp, Homo sapiens
ttcactcttattgcc

SEQ ID NO: 58647 - DNA, 15 bp, Homo sapiens
tttcactcttattgc

SEQ ID NO: 58648 - DNA, 15 bp, Homo sapiens
gtttcactcttattg

SEQ ID NO: 58649 - DNA, 15 bp, Homo sapiens
agtttcactcttatt

SEQ ID NO: 58650 - DNA, 15 bp, Homo sapiens
gagtttcactcttat

SEQ ID NO: 58651 - DNA, 15 bp, Homo sapiens
ggagtttcactctta

SEQ ID NO: 58652 - DNA, 15 bp, Homo sapiens
tggagtttcactctt

SEQ ID NO: 58653 - DNA, 15 bp, Homo sapiens
atggagtttcactct

SEQ ID NO: 58654 - DNA, 15 bp, Homo sapiens
gatggagtttcactc

SEQ ID NO: 58655 - DNA, 15 bp, Homo sapiens
agatggagtttcact

SEQ ID NO: 58656 - DNA, 15 bp, Homo sapiens
tttgagatggagttt

SEQ ID NO: 58657 - DNA, 15 bp, Homo sapiens
ttttgagatggagtt

SEQ ID NO: 58658 - DNA, 15 bp, Homo sapiens
ctttttttttttttg

SEQ ID NO: 58659 - DNA, 15 bp, Homo sapiens
tatcttttttttttt

SEQ ID NO: 58660 - DNA, 15 bp, Homo sapiens
gtatctttttttttt

SEQ ID NO: 58661 - DNA, 15 bp, Homo sapiens
tgtatcttttttttt

SEQ ID NO: 58662 - DNA, 15 bp, Homo sapiens
ttgtatctttttttt

SEQ ID NO: 58663 - DNA, 15 bp, Homo sapiens
tttgtatcttttttt

SEQ ID NO: 58664 - DNA, 15 bp, Homo sapiens
ttttgtatctttttt

SEQ ID NO: 58665 - DNA, 15 bp, Homo sapiens
tttttgtatcttttt

SEQ ID NO: 58666 - DNA, 15 bp, Homo sapiens
atttttgtatctttt

SEQ ID NO: 58667 - DNA, 15 bp, Homo sapiens
tatttttgtatcttt

SEQ ID NO: 58668 - DNA, 15 bp, Homo sapiens
ctatttttgtatctt

SEQ ID NO: 58669 - DNA, 15 bp, Homo sapiens
tctatttttgtatct

SEQ ID NO: 58670 - DNA, 15 bp, Homo sapiens
ttctatttttgtatc

SEQ ID NO: 58671 - DNA, 15 bp, Homo sapiens
tttctatttttgtat

SEQ ID NO: 58672 - DNA, 15 bp, Homo sapiens
ttttctatttttgta

SEQ ID NO: 58673 - DNA, 15 bp, Homo sapiens
tttttctatttttgt

SEQ ID NO: 58674 - DNA, 15 bp, Homo sapiens
ctttttctatttttg

SEQ ID NO: 58675 - DNA, 15 bp, Homo sapiens
cctttttctattttt

SEQ ID NO: 58676 - DNA, 15 bp, Homo sapiens
ccctttttctatttt

SEQ ID NO: 58677 - DNA, 15 bp, Homo sapiens
cccctttttctattt

SEQ ID NO: 58678 - DNA, 15 bp, Homo sapiens
gcccctttttctatt

SEQ ID NO: 58679 - DNA, 15 bp, Homo sapiens
agcccctttttctat

SEQ ID NO: 58680 - DNA, 15 bp, Homo sapiens
aagcccctttttcta

SEQ ID NO: 58681 - DNA, 15 bp, Homo sapiens
caagcccctttttct

SEQ ID NO: 58682 - DNA, 15 bp, Homo sapiens
ccaagcccctttttc

SEQ ID NO: 58683 - DNA, 15 bp, Homo sapiens
accaagccccttttt

SEQ ID NO: 58684 - DNA, 15 bp, Homo sapiens
taccaagcccctttt

SEQ ID NO: 58685 - DNA, 15 bp, Homo sapiens
ttaccaagccccttt

SEQ ID NO: 58686 - DNA, 15 bp, Homo sapiens
cttaccaagcccctt

SEQ ID NO: 58687 - DNA, 15 bp, Homo sapiens
ccttaccaagcccct

SEQ ID NO: 58688 - DNA, 15 bp, Homo sapiens
cccttaccaagcccc

SEQ ID NO: 58689 - DNA, 15 bp, Homo sapiens
acccttaccaagccc

SEQ ID NO: 58690 - DNA, 15 bp, Homo sapiens
tacccttaccaagcc

SEQ ID NO: 58691 - DNA, 15 bp, Homo sapiens
ctacccttaccaagc

SEQ ID NO: 58692 - DNA, 15 bp, Homo sapiens
actacccttaccaag

SEQ ID NO: 58693 - DNA, 15 bp, Homo sapiens
tactacccttaccaa

SEQ ID NO: 58694 - DNA, 15 bp, Homo sapiens
ctactacccttacca

SEQ ID NO: 58695 - DNA, 15 bp, Homo sapiens
cctactacccttacc

SEQ ID NO: 58696 - DNA, 15 bp, Homo sapiens
ccctactacccttac

SEQ ID NO: 58697 - DNA, 15 bp, Homo sapiens
accctactaccctta

SEQ ID NO: 58698 - DNA, 15 bp, Homo sapiens
aaccctactaccctt

SEQ ID NO: 58699 - DNA, 15 bp, Homo sapiens
aaaccctactaccct

SEQ ID NO: 58700 - DNA, 15 bp, Homo sapiens
aaaaccctactaccc

SEQ ID NO: 58701 - DNA, 15 bp, Homo sapiens
caaaaccctactacc

SEQ ID NO: 58702 - DNA, 15 bp, Homo sapiens
ccaaaaccctactac

SEQ ID NO: 58703 - DNA, 15 bp, Homo sapiens
cccaaaaccctacta

SEQ ID NO: 58704 - DNA, 15 bp, Homo sapiens
gcccaaaaccctact

SEQ ID NO: 58705 - DNA, 15 bp, Homo sapiens
tgcccaaaaccctac

SEQ ID NO: 58706 - DNA, 15 bp, Homo sapiens
ttgcccaaaacccta

SEQ ID NO: 58707 - DNA, 15 bp, Homo sapiens
attgcccaaaaccct

SEQ ID NO: 58708 - DNA, 15 bp, Homo sapiens
aattgcccaaaaccc

SEQ ID NO: 58709 - DNA, 15 bp, Homo sapiens
aaattgcccaaaacc

SEQ ID NO: 58710 - DNA, 15 bp, Homo sapiens
aaaattgcccaaaac

SEQ ID NO: 58711 - DNA, 15 bp, Homo sapiens
aaaaattgcccaaaa

SEQ ID NO: 58712 - DNA, 15 bp, Homo sapiens
aaaaaattgcccaaa

SEQ ID NO: 58713 - DNA, 15 bp, Homo sapiens
aaaaaaattgcccaa

SEQ ID NO: 58714 - DNA, 15 bp, Homo sapiens
aaaaaaaattgccca

SEQ ID NO: 58715 - DNA, 15 bp, Homo sapiens
aaaaaaaaattgccc

SEQ ID NO: 58716 - DNA, 15 bp, Homo sapiens
aaaaaaaaaattgcc

SEQ ID NO: 58717 - DNA, 15 bp, Homo sapiens
aaaaaaaaaaattgc

SEQ ID NO: 58718 - DNA, 15 bp, Homo sapiens
aaaaaaaaaaaattg

SEQ ID NO: 58719 - DNA, 15 bp, Homo sapiens
acaataaaaaaaaaa

SEQ ID NO: 58720 - DNA, 15 bp, Homo sapiens
tacaataaaaaaaaa

SEQ ID NO: 58721 - DNA, 15 bp, Homo sapiens
atacaataaaaaaaa

SEQ ID NO: 58722 - DNA, 15 bp, Homo sapiens
catacaataaaaaaa

SEQ ID NO: 58723 - DNA, 15 bp, Homo sapiens
ccatacaataaaaaa

SEQ ID NO: 58724 - DNA, 15 bp, Homo sapiens
accatacaataaaaa

SEQ ID NO: 58725 - DNA, 15 bp, Homo sapiens
aaccatacaataaaa

SEQ ID NO: 58726 - DNA, 15 bp, Homo sapiens
gaaccatacaataaa

SEQ ID NO: 58727 - DNA, 15 bp, Homo sapiens
agaaccatacaataa

SEQ ID NO: 58728 - DNA, 15 bp, Homo sapiens
tagaaccatacaata

SEQ ID NO: 58729 - DNA, 15 bp, Homo sapiens
ttagaaccatacaat

SEQ ID NO: 58730 - DNA, 15 bp, Homo sapiens
tttagaaccatacaa

SEQ ID NO: 58731 - DNA, 15 bp, Homo sapiens
ctttagaaccataca

SEQ ID NO: 58732 - DNA, 15 bp, Homo sapiens
cctttagaaccatac

SEQ ID NO: 58733 - DNA, 15 bp, Homo sapiens
tcctttagaaccata

SEQ ID NO: 58734 - DNA, 15 bp, Homo sapiens
ttcctttagaaccat

SEQ ID NO: 58735 - DNA, 15 bp, Homo sapiens
attcctttagaacca

SEQ ID NO: 58736 - DNA, 15 bp, Homo sapiens
cattcctttagaacc

SEQ ID NO: 58737 - DNA, 15 bp, Homo sapiens
ccattcctttagaac

SEQ ID NO: 58738 - DNA, 15 bp, Homo sapiens
accattcctttagaa

SEQ ID NO: 58739 - DNA, 15 bp, Homo sapiens
aaccattcctttaga

SEQ ID NO: 58740 - DNA, 15 bp, Homo sapiens
caaccattcctttag

SEQ ID NO: 58741 - DNA, 15 bp, Homo sapiens
tcaaccattccttta

SEQ ID NO: 58742 - DNA, 15 bp, Homo sapiens
atcaaccattccttt

SEQ ID NO: 58743 - DNA, 15 bp, Homo sapiens
aatcaaccattcctt

SEQ ID NO: 58744 - DNA, 15 bp, Homo sapiens
taatcaaccattcct

SEQ ID NO: 58745 - DNA, 15 bp, Homo sapiens
gtaatcaaccattcc

SEQ ID NO: 58746 - DNA, 15 bp, Homo sapiens
ggtaatcaaccattc

SEQ ID NO: 58747 - DNA, 15 bp, Homo sapiens
aggtaatcaaccatt

SEQ ID NO: 58748 - DNA, 15 bp, Homo sapiens
caggtaatcaaccat

SEQ ID NO: 58749 - DNA, 15 bp, Homo sapiens
acaggtaatcaacca

SEQ ID NO: 58750 - DNA, 15 bp, Homo sapiens
cacaggtaatcaacc

SEQ ID NO: 58751 - DNA, 15 bp, Homo sapiens
ccacaggtaatcaac

SEQ ID NO: 58752 - DNA, 15 bp, Homo sapiens
accacaggtaatcaa

SEQ ID NO: 58753 - DNA, 15 bp, Homo sapiens
aaccacaggtaatca

SEQ ID NO: 58754 - DNA, 15 bp, Homo sapiens
aaaccacaggtaatc

SEQ ID NO: 58755 - DNA, 15 bp, Homo sapiens
caaaccacaggtaat

SEQ ID NO: 58756 - DNA, 15 bp, Homo sapiens
ccaaaccacaggtaa

SEQ ID NO: 58757 - DNA, 15 bp, Homo sapiens
accaaaccacaggta

SEQ ID NO: 58758 - DNA, 15 bp, Homo sapiens
aaccaaaccacaggt

SEQ ID NO: 58759 - DNA, 15 bp, Homo sapiens
aaaccaaaccacagg

SEQ ID NO: 58760 - DNA, 15 bp, Homo sapiens
aaaaccaaaccacag

SEQ ID NO: 58761 - DNA, 15 bp, Homo sapiens
taaaaccaaaccaca

SEQ ID NO: 58762 - DNA, 15 bp, Homo sapiens
ctaaaaccaaaccac

SEQ ID NO: 58763 - DNA, 15 bp, Homo sapiens
cctaaaaccaaacca

SEQ ID NO: 58764 - DNA, 15 bp, Homo sapiens
acctaaaaccaaacc

SEQ ID NO: 58765 - DNA, 15 bp, Homo sapiens
tacctaaaaccaaac

SEQ ID NO: 58766 - DNA, 15 bp, Homo sapiens
gtacctaaaaccaaa

SEQ ID NO: 58767 - DNA, 15 bp, Homo sapiens
agtacctaaaaccaa

SEQ ID NO: 58768 - DNA, 15 bp, Homo sapiens
cagtacctaaaacca

SEQ ID NO: 58769 - DNA, 15 bp, Homo sapiens
ccagtacctaaaacc

SEQ ID NO: 58770 - DNA, 15 bp, Homo sapiens
cccagtacctaaaac

SEQ ID NO: 58771 - DNA, 15 bp, Homo sapiens
tcccagtacctaaaa

SEQ ID NO: 58772 - DNA, 15 bp, Homo sapiens
gtcccagtacctaaa

SEQ ID NO: 58773 - DNA, 15 bp, Homo sapiens
ggtcccagtacctaa

SEQ ID NO: 58774 - DNA, 15 bp, Homo sapiens
gggtcccagtaccta

SEQ ID NO: 58775 - DNA, 15 bp, Homo sapiens
agggtcccagtacct

SEQ ID NO: 58776 - DNA, 15 bp, Homo sapiens
cagggtcccagtacc

SEQ ID NO: 58777 - DNA, 15 bp, Homo sapiens
ccagggtcccagtac

SEQ ID NO: 58778 - DNA, 15 bp, Homo sapiens
accagggtcccagta

SEQ ID NO: 58779 - DNA, 15 bp, Homo sapiens
gaccagggtcccagt

SEQ ID NO: 58780 - DNA, 15 bp, Homo sapiens
ggaccagggtcccag

SEQ ID NO: 58781 - DNA, 15 bp, Homo sapiens
aggaccagggtccca

SEQ ID NO: 58782 - DNA, 15 bp, Homo sapiens
gaggaccagggtccc

SEQ ID NO: 58783 - DNA, 15 bp, Homo sapiens
cgaggaccagggtcc

SEQ ID NO: 58784 - DNA, 15 bp, Homo sapiens
tcgaggaccagggtc

SEQ ID NO: 58785 - DNA, 15 bp, Homo sapiens
ctcgaggaccagggt

SEQ ID NO: 58786 - DNA, 15 bp, Homo sapiens
gctcgaggaccaggg

SEQ ID NO: 58787 - DNA, 15 bp, Homo sapiens
agctcgaggaccagg

SEQ ID NO: 58788 - DNA, 15 bp, Homo sapiens
cagctcgaggaccag

SEQ ID NO: 58789 - DNA, 15 bp, Homo sapiens
tcagctcgaggacca

SEQ ID NO: 58790 - DNA, 15 bp, Homo sapiens
gtcagctcgaggacc

SEQ ID NO: 58791 - DNA, 15 bp, Homo sapiens
ggtcagctcgaggac

SEQ ID NO: 58792 - DNA, 15 bp, Homo sapiens
gggtcagctcgagga

SEQ ID NO: 58793 - DNA, 15 bp, Homo sapiens
ggggtcagctcgagg

SEQ ID NO: 58794 - DNA, 15 bp, Homo sapiens
aggggtcagctcgag

SEQ ID NO: 58795 - DNA, 15 bp, Homo sapiens
aaggggtcagctcga

SEQ ID NO: 58796 - DNA, 15 bp, Homo sapiens
aaaggggtcagctcg

SEQ ID NO: 58797 - DNA, 15 bp, Homo sapiens
caaaggggtcagctc

SEQ ID NO: 58798 - DNA, 15 bp, Homo sapiens
tcaaaggggtcagct

SEQ ID NO: 58799 - DNA, 15 bp, Homo sapiens
ctcaaaggggtcagc

SEQ ID NO: 58800 - DNA, 15 bp, Homo sapiens
cctcaaaggggtcag

SEQ ID NO: 58801 - DNA, 15 bp, Homo sapiens
tcctcaaaggggtca

SEQ ID NO: 58802 - DNA, 15 bp, Homo sapiens
gtcctcaaaggggtc

SEQ ID NO: 58803 - DNA, 15 bp, Homo sapiens
tgtcctcaaaggggt

SEQ ID NO: 58804 - DNA, 15 bp, Homo sapiens
atgtcctcaaagggg

SEQ ID NO: 58805 - DNA, 15 bp, Homo sapiens
catgtcctcaaaggg

SEQ ID NO: 58806 - DNA, 15 bp, Homo sapiens
gcatgtcctcaaagg

SEQ ID NO: 58807 - DNA, 15 bp, Homo sapiens
cgcatgtcctcaaag

SEQ ID NO: 58808 - DNA, 15 bp, Homo sapiens
ccgcatgtcctcaaa

SEQ ID NO: 58809 - DNA, 15 bp, Homo sapiens
accgcatgtcctcaa

SEQ ID NO: 58810 - DNA, 15 bp, Homo sapiens
taccgcatgtcctca

SEQ ID NO: 58811 - DNA, 15 bp, Homo sapiens
gtaccgcatgtcctc

SEQ ID NO: 58812 - DNA, 15 bp, Homo sapiens
cgtaccgcatgtcct

SEQ ID NO: 58813 - DNA, 15 bp, Homo sapiens
acgtaccgcatgtcc

SEQ ID NO: 58814 - DNA, 15 bp, Homo sapiens
gacgtaccgcatgtc

SEQ ID NO: 58815 - DNA, 15 bp, Homo sapiens
agacgtaccgcatgt

SEQ ID NO: 58816 - DNA, 15 bp, Homo sapiens
cagacgtaccgcatg

SEQ ID NO: 58817 - DNA, 15 bp, Homo sapiens
ccagacgtaccgcat

SEQ ID NO: 58818 - DNA, 15 bp, Homo sapiens
cccagacgtaccgca

SEQ ID NO: 58819 - DNA, 15 bp, Homo sapiens
ccccagacgtaccgc

SEQ ID NO: 58820 - DNA, 15 bp, Homo sapiens
cccccagacgtaccg

SEQ ID NO: 58821 - DNA, 15 bp, Homo sapiens
ccccccagacgtacc

SEQ ID NO: 58822 - DNA, 15 bp, Homo sapiens
cccccccagacgtac

SEQ ID NO: 58823 - DNA, 15 bp, Homo sapiens
gcccccccagacgta

SEQ ID NO: 58824 - DNA, 15 bp, Homo sapiens
agcccccccagacgt

SEQ ID NO: 58825 - DNA, 15 bp, Homo sapiens
aagcccccccagacg

SEQ ID NO: 58826 - DNA, 15 bp, Homo sapiens
gaagcccccccagac

SEQ ID NO: 58827 - DNA, 15 bp, Homo sapiens
cgaagcccccccaga

SEQ ID NO: 58828 - DNA, 15 bp, Homo sapiens
gcgaagcccccccag

SEQ ID NO: 58829 - DNA, 15 bp, Homo sapiens
ggcgaagccccccca

SEQ ID NO: 58830 - DNA, 15 bp, Homo sapiens
aggcgaagccccccc

SEQ ID NO: 58831 - DNA, 15 bp, Homo sapiens
taggcgaagcccccc

SEQ ID NO: 58832 - DNA, 15 bp, Homo sapiens
gtaggcgaagccccc

SEQ ID NO: 58833 - DNA, 15 bp, Homo sapiens
agtaggcgaagcccc

SEQ ID NO: 58834 - DNA, 15 bp, Homo sapiens
aagtaggcgaagccc

SEQ ID NO: 58835 - DNA, 15 bp, Homo sapiens
caagtaggcgaagcc

SEQ ID NO: 58836 - DNA, 15 bp, Homo sapiens
gcaagtaggcgaagc

SEQ ID NO: 58837 - DNA, 15 bp, Homo sapiens
tgcaagtaggcgaag

SEQ ID NO: 58838 - DNA, 15 bp, Homo sapiens
ctgcaagtaggcgaa

SEQ ID NO: 58839 - DNA, 15 bp, Homo sapiens
cctgcaagtaggcga

SEQ ID NO: 58840 - DNA, 15 bp, Homo sapiens
tcctgcaagtaggcg

SEQ ID NO: 58841 - DNA, 15 bp, Homo sapiens
atcctgcaagtaggc

SEQ ID NO: 58842 - DNA, 15 bp, Homo sapiens
catcctgcaagtagg

SEQ ID NO: 58843 - DNA, 15 bp, Homo sapiens
acatcctgcaagtag

SEQ ID NO: 58844 - DNA, 15 bp, Homo sapiens
cacatcctgcaagta

SEQ ID NO: 58845 - DNA, 15 bp, Homo sapiens
ccacatcctgcaagt

SEQ ID NO: 58846 - DNA, 15 bp, Homo sapiens
accacatcctgcaag

SEQ ID NO: 58847 - DNA, 15 bp, Homo sapiens
caccacatcctgcaa

SEQ ID NO: 58848 - DNA, 15 bp, Homo sapiens
ccaccacatcctgca

SEQ ID NO: 58849 - DNA, 15 bp, Homo sapiens
tccaccacatcctgc

SEQ ID NO: 58850 - DNA, 15 bp, Homo sapiens
ctccaccacatcctg

SEQ ID NO: 58851 - DNA, 15 bp, Homo sapiens
gctccaccacatcct

SEQ ID NO: 58852 - DNA, 15 bp, Homo sapiens
tgctccaccacatcc

SEQ ID NO: 58853 - DNA, 15 bp, Homo sapiens
ctgctccaccacatc

SEQ ID NO: 58854 - DNA, 15 bp, Homo sapiens
cctgctccaccacat

SEQ ID NO: 58855 - DNA, 15 bp, Homo sapiens
gcctgctccaccaca

SEQ ID NO: 58856 - DNA, 15 bp, Homo sapiens
tgcctgctccaccac

SEQ ID NO: 58857 - DNA, 15 bp, Homo sapiens
ttgcctgctccacca

SEQ ID NO: 58858 - DNA, 15 bp, Homo sapiens
attgcctgctccacc

SEQ ID NO: 58859 - DNA, 15 bp, Homo sapiens
gattgcctgctccac

SEQ ID NO: 58860 - DNA, 15 bp, Homo sapiens
tgattgcctgctcca

SEQ ID NO: 58861 - DNA, 15 bp, Homo sapiens
atgattgcctgctcc

SEQ ID NO: 58862 - DNA, 15 bp, Homo sapiens
gatgattgcctgctc

SEQ ID NO: 58863 - DNA, 15 bp, Homo sapiens
tgatgattgcctgct

SEQ ID NO: 58864 - DNA, 15 bp, Homo sapiens
ctgatgattgcctgc

SEQ ID NO: 58865 - DNA, 15 bp, Homo sapiens
cctgatgattgcctg

SEQ ID NO: 58866 - DNA, 15 bp, Homo sapiens
ccctgatgattgcct

SEQ ID NO: 58867 - DNA, 15 bp, Homo sapiens
accctgatgattgcc

SEQ ID NO: 58868 - DNA, 15 bp, Homo sapiens
caccctgatgattgc

SEQ ID NO: 58869 - DNA, 15 bp, Homo sapiens
gcaccctgatgattg

SEQ ID NO: 58870 - DNA, 15 bp, Homo sapiens
agcaccctgatgatt

SEQ ID NO: 58871 - DNA, 15 bp, Homo sapiens
cagcaccctgatgat

SEQ ID NO: 58872 - DNA, 15 bp, Homo sapiens
tcagcaccctgatga

SEQ ID NO: 58873 - DNA, 15 bp, Homo sapiens
gtcagcaccctgatg

SEQ ID NO: 58874 - DNA, 15 bp, Homo sapiens
cgtcagcaccctgat

SEQ ID NO: 58875 - DNA, 15 bp, Homo sapiens
ccgtcagcaccctga

SEQ ID NO: 58876 - DNA, 15 bp, Homo sapiens
cccgtcagcaccctg

SEQ ID NO: 58877 - DNA, 15 bp, Homo sapiens
gcccgtcagcaccct

SEQ ID NO: 58878 - DNA, 15 bp, Homo sapiens
tgcccgtcagcaccc

SEQ ID NO: 58879 - DNA, 15 bp, Homo sapiens
gtgcccgtcagcacc

SEQ ID NO: 58880 - DNA, 15 bp, Homo sapiens
ggtgcccgtcagcac

SEQ ID NO: 58881 - DNA, 15 bp, Homo sapiens
cggtgcccgtcagca

SEQ ID NO: 58882 - DNA, 15 bp, Homo sapiens
tcggtgcccgtcagc

SEQ ID NO: 58883 - DNA, 15 bp, Homo sapiens
ctcggtgcccgtcag

SEQ ID NO: 58884 - DNA, 15 bp, Homo sapiens
tctcggtgcccgtca

SEQ ID NO: 58885 - DNA, 15 bp, Homo sapiens
ttctcggtgcccgtc

SEQ ID NO: 58886 - DNA, 15 bp, Homo sapiens
cttctcggtgcccgt

SEQ ID NO: 58887 - DNA, 15 bp, Homo sapiens
tcttctcggtgcccg

SEQ ID NO: 58888 - DNA, 15 bp, Homo sapiens
ttcttctcggtgccc

SEQ ID NO: 58889 - DNA, 15 bp, Homo sapiens
tttcttctcggtgcc

SEQ ID NO: 58890 - DNA, 15 bp, Homo sapiens
ttttcttctcggtgc

SEQ ID NO: 58891 - DNA, 15 bp, Homo sapiens
gttttcttctcggtg

SEQ ID NO: 58892 - DNA, 15 bp, Homo sapiens
agttttcttctcggt

SEQ ID NO: 58893 - DNA, 15 bp, Homo sapiens
cagttttcttctcgg

SEQ ID NO: 58894 - DNA, 15 bp, Homo sapiens
ccagttttcttctcg

SEQ ID NO: 58895 - DNA, 15 bp, Homo sapiens
accagttttcttctc

SEQ ID NO: 58896 - DNA, 15 bp, Homo sapiens
caccagttttcttct

SEQ ID NO: 58897 - DNA, 15 bp, Homo sapiens
acaccagttttcttc

SEQ ID NO: 58898 - DNA, 15 bp, Homo sapiens
gacaccagttttctt

SEQ ID NO: 58899 - DNA, 15 bp, Homo sapiens
agacaccagttttct

SEQ ID NO: 58900 - DNA, 15 bp, Homo sapiens
tagacaccagttttc

SEQ ID NO: 58901 - DNA, 15 bp, Homo sapiens
atagacaccagtttt

SEQ ID NO: 58902 - DNA, 15 bp, Homo sapiens
tatagacaccagttt

SEQ ID NO: 58903 - DNA, 15 bp, Homo sapiens
atatagacaccagtt

SEQ ID NO: 58904 - DNA, 15 bp, Homo sapiens
catatagacaccagt

SEQ ID NO: 58905 - DNA, 15 bp, Homo sapiens
gcatatagacaccag

SEQ ID NO: 58906 - DNA, 15 bp, Homo sapiens
tgcatatagacacca

SEQ ID NO: 58907 - DNA, 15 bp, Homo sapiens
ttgcatatagacacc

SEQ ID NO: 58908 - DNA, 15 bp, Homo sapiens
gttgcatatagacac

SEQ ID NO: 58909 - DNA, 15 bp, Homo sapiens
tgttgcatatagaca

SEQ ID NO: 58910 - DNA, 15 bp, Homo sapiens
ctgttgcatatagac

SEQ ID NO: 58911 - DNA, 15 bp, Homo sapiens
tctgttgcatataga

SEQ ID NO: 58912 - DNA, 15 bp, Homo sapiens
atctgttgcatatag

SEQ ID NO: 58913 - DNA, 15 bp, Homo sapiens
catctgttgcatata

SEQ ID NO: 58914 - DNA, 15 bp, Homo sapiens
gcatctgttgcatat

SEQ ID NO: 58915 - DNA, 15 bp, Homo sapiens
ggcatctgttgcata

SEQ ID NO: 58916 - DNA, 15 bp, Homo sapiens
gggcatctgttgcat

SEQ ID NO: 58917 - DNA, 15 bp, Homo sapiens
agggcatctgttgca

SEQ ID NO: 58918 - DNA, 15 bp, Homo sapiens
tagggcatctgttgc

SEQ ID NO: 58919 - DNA, 15 bp, Homo sapiens
atagggcatctgttg

SEQ ID NO: 58920 - DNA, 15 bp, Homo sapiens
gatagggcatctgtt

SEQ ID NO: 58921 - DNA, 15 bp, Homo sapiens
ggatagggcatctgt

SEQ ID NO: 58922 - DNA, 15 bp, Homo sapiens
gggatagggcatctg

SEQ ID NO: 58923 - DNA, 15 bp, Homo sapiens
agggatagggcatct

SEQ ID NO: 58924 - DNA, 15 bp, Homo sapiens
cagggatagggcatc

SEQ ID NO: 58925 - DNA, 15 bp, Homo sapiens
acagggatagggcat

SEQ ID NO: 58926 - DNA, 15 bp, Homo sapiens
aacagggatagggca

SEQ ID NO: 58927 - DNA, 15 bp, Homo sapiens
taacagggatagggc

SEQ ID NO: 58928 - DNA, 15 bp, Homo sapiens
gtaacagggataggg

SEQ ID NO: 58929 - DNA, 15 bp, Homo sapiens
cgtaacagggatagg

SEQ ID NO: 58930 - DNA, 15 bp, Homo sapiens
acgtaacagggatag

SEQ ID NO: 58931 - DNA, 15 bp, Homo sapiens
aacgtaacagggata

SEQ ID NO: 58932 - DNA, 15 bp, Homo sapiens
caacgtaacagggat

SEQ ID NO: 58933 - DNA, 15 bp, Homo sapiens
tcaacgtaacaggga

SEQ ID NO: 58934 - DNA, 15 bp, Homo sapiens
atcaacgtaacaggg

SEQ ID NO: 58935 - DNA, 15 bp, Homo sapiens
catcaacgtaacagg

SEQ ID NO: 58936 - DNA, 15 bp, Homo sapiens
tcatcaacgtaacag

SEQ ID NO: 58937 - DNA, 15 bp, Homo sapiens
gtcatcaacgtaaca

SEQ ID NO: 58938 - DNA, 15 bp, Homo sapiens
tgtcatcaacgtaac

SEQ ID NO: 58939 - DNA, 15 bp, Homo sapiens
atgtcatcaacgtaa

SEQ ID NO: 58940 - DNA, 15 bp, Homo sapiens
catgtcatcaacgta

SEQ ID NO: 58941 - DNA, 15 bp, Homo sapiens
acatgtcatcaacgt

SEQ ID NO: 58942 - DNA, 15 bp, Homo sapiens
tacatgtcatcaacg

SEQ ID NO: 58943 - DNA, 15 bp, Homo sapiens
ttacatgtcatcaac

SEQ ID NO: 58944 - DNA, 15 bp, Homo sapiens
cttacatgtcatcaa

SEQ ID NO: 58945 - DNA, 15 bp, Homo sapiens
acttacatgtcatca

SEQ ID NO: 58946 - DNA, 15 bp, Homo sapiens
aacttacatgtcatc

SEQ ID NO: 58947 - DNA, 15 bp, Homo sapiens
taacttacatgtcat

SEQ ID NO: 58948 - DNA, 15 bp, Homo sapiens
gtaacttacatgtca

SEQ ID NO: 58949 - DNA, 15 bp, Homo sapiens
ggtaacttacatgtc

SEQ ID NO: 58950 - DNA, 15 bp, Homo sapiens
aggtaacttacatgt

SEQ ID NO: 58951 - DNA, 15 bp, Homo sapiens
caggtaacttacatg

SEQ ID NO: 58952 - DNA, 15 bp, Homo sapiens
gcaggtaacttacat

SEQ ID NO: 58953 - DNA, 15 bp, Homo sapiens
tgcaggtaacttaca

SEQ ID NO: 58954 - DNA, 15 bp, Homo sapiens
ttgcaggtaacttac

SEQ ID NO: 58955 - DNA, 15 bp, Homo sapiens
cttgcaggtaactta

SEQ ID NO: 58956 - DNA, 15 bp, Homo sapiens
gcttgcaggtaactt

SEQ ID NO: 58957 - DNA, 15 bp, Homo sapiens
ggcttgcaggtaact

SEQ ID NO: 58958 - DNA, 15 bp, Homo sapiens
tggcttgcaggtaac

SEQ ID NO: 58959 - DNA, 15 bp, Homo sapiens
gtggcttgcaggtaa

SEQ ID NO: 58960 - DNA, 15 bp, Homo sapiens
agtggcttgcaggta

SEQ ID NO: 58961 - DNA, 15 bp, Homo sapiens
cagtggcttgcaggt

SEQ ID NO: 58962 - DNA, 15 bp, Homo sapiens
acagtggcttgcagg

SEQ ID NO: 58963 - DNA, 15 bp, Homo sapiens
aacagtggcttgcag

SEQ ID NO: 58964 - DNA, 15 bp, Homo sapiens
aaacagtggcttgca

SEQ ID NO: 58965 - DNA, 15 bp, Homo sapiens
aaaacagtggcttgc

SEQ ID NO: 58966 - DNA, 15 bp, Homo sapiens
aaaaacagtggcttg

SEQ ID NO: 58967 - DNA, 15 bp, Homo sapiens
taaaaacagtggctt

SEQ ID NO: 58968 - DNA, 15 bp, Homo sapiens
ttaaaaacagtggct

SEQ ID NO: 58969 - DNA, 15 bp, Homo sapiens
gttaaaaacagtggc

SEQ ID NO: 58970 - DNA, 15 bp, Homo sapiens
ggttaaaaacagtgg

SEQ ID NO: 58971 - DNA, 15 bp, Homo sapiens
tggttaaaaacagtg

SEQ ID NO: 58972 - DNA, 15 bp, Homo sapiens
ctggttaaaaacagt

SEQ ID NO: 58973 - DNA, 15 bp, Homo sapiens
actggttaaaaacag

SEQ ID NO: 58974 - DNA, 15 bp, Homo sapiens
aactggttaaaaaca

SEQ ID NO: 58975 - DNA, 15 bp, Homo sapiens
aaactggttaaaaac

SEQ ID NO: 58976 - DNA, 15 bp, Homo sapiens
taaactggttaaaaa

SEQ ID NO: 58977 - DNA, 15 bp, Homo sapiens
ataaactggttaaaa

SEQ ID NO: 58978 - DNA, 15 bp, Homo sapiens
tataaactggttaaa

SEQ ID NO: 58979 - DNA, 15 bp, Homo sapiens
gtataaactggttaa

SEQ ID NO: 58980 - DNA, 15 bp, Homo sapiens
agtataaactggtta

SEQ ID NO: 58981 - DNA, 15 bp, Homo sapiens
cagtataaactggtt

SEQ ID NO: 58982 - DNA, 15 bp, Homo sapiens
acagtataaactggt

SEQ ID NO: 58983 - DNA, 15 bp, Homo sapiens
cacagtataaactgg

SEQ ID NO: 58984 - DNA, 15 bp, Homo sapiens
gcacagtataaactg

SEQ ID NO: 58985 - DNA, 15 bp, Homo sapiens
ggcacagtataaact

SEQ ID NO: 58986 - DNA, 15 bp, Homo sapiens
tggcacagtataaac

SEQ ID NO: 58987 - DNA, 15 bp, Homo sapiens
ctggcacagtataaa

SEQ ID NO: 58988 - DNA, 15 bp, Homo sapiens
tctggcacagtataa

SEQ ID NO: 58989 - DNA, 15 bp, Homo sapiens
atctggcacagtata

SEQ ID NO: 58990 - DNA, 15 bp, Homo sapiens
catctggcacagtat

SEQ ID NO: 58991 - DNA, 15 bp, Homo sapiens
ccatctggcacagta

SEQ ID NO: 58992 - DNA, 15 bp, Homo sapiens
cccatctggcacagt

SEQ ID NO: 58993 - DNA, 15 bp, Homo sapiens
ccccatctggcacag

SEQ ID NO: 58994 - DNA, 15 bp, Homo sapiens
cccccatctggcaca

SEQ ID NO: 58995 - DNA, 15 bp, Homo sapiens
acccccatctggcac

SEQ ID NO: 58996 - DNA, 15 bp, Homo sapiens
cacccccatctggca

SEQ ID NO: 58997 - DNA, 15 bp, Homo sapiens
acacccccatctggc

SEQ ID NO: 58998 - DNA, 15 bp, Homo sapiens
tacacccccatctgg

SEQ ID NO: 58999 - DNA, 15 bp, Homo sapiens
atacacccccatctg

SEQ ID NO: 59000 - DNA, 15 bp, Homo sapiens
tatacacccccatct

SEQ ID NO: 59001 - DNA, 15 bp, Homo sapiens
atatacacccccatc

SEQ ID NO: 59002 - DNA, 15 bp, Homo sapiens
tatatacacccccat

SEQ ID NO: 59003 - DNA, 15 bp, Homo sapiens
atatatacaccccca

SEQ ID NO: 59004 - DNA, 15 bp, Homo sapiens
catatatacaccccc

SEQ ID NO: 59005 - DNA, 15 bp, Homo sapiens
acatatatacacccc

SEQ ID NO: 59006 - DNA, 15 bp, Homo sapiens
cacatatatacaccc

SEQ ID NO: 59007 - DNA, 15 bp, Homo sapiens
acacatatatacacc

SEQ ID NO: 59008 - DNA, 15 bp, Homo sapiens
cacacatatatacac

SEQ ID NO: 59009 - DNA, 15 bp, Homo sapiens
acacacatatataca

SEQ ID NO: 59010 - DNA, 15 bp, Homo sapiens
cacacacatatatac

SEQ ID NO: 59011 - DNA, 15 bp, Homo sapiens
gcacacacatatata

SEQ ID NO: 59012 - DNA, 15 bp, Homo sapiens
tgcacacacatatat

SEQ ID NO: 59013 - DNA, 15 bp, Homo sapiens
atgcacacacatata

SEQ ID NO: 59014 - DNA, 15 bp, Homo sapiens
catgcacacacatat

SEQ ID NO: 59015 - DNA, 15 bp, Homo sapiens
acatgcacacacata

SEQ ID NO: 59016 - DNA, 15 bp, Homo sapiens
cacatgcacacacat

SEQ ID NO: 59017 - DNA, 15 bp, Homo sapiens
gcacatgcacacaca

SEQ ID NO: 59018 - DNA, 15 bp, Homo sapiens
tgcacatgcacacac

SEQ ID NO: 59019 - DNA, 15 bp, Homo sapiens
atgcacatgcacaca

SEQ ID NO: 59020 - DNA, 15 bp, Homo sapiens
catgcacatgcacac

SEQ ID NO: 59021 - DNA, 15 bp, Homo sapiens
gcatgcacatgcaca

SEQ ID NO: 59022 - DNA, 15 bp, Homo sapiens
tgcatgcacatgcac

SEQ ID NO: 59023 - DNA, 15 bp, Homo sapiens
atgcatgcacatgca

SEQ ID NO: 59024 - DNA, 15 bp, Homo sapiens
catgcatgcacatgc

SEQ ID NO: 59025 - DNA, 15 bp, Homo sapiens
acatgcatgcacatg

SEQ ID NO: 59026 - DNA, 15 bp, Homo sapiens
cacatgcatgcacat

SEQ ID NO: 59027 - DNA, 15 bp, Homo sapiens
tcacacatgcatgca

SEQ ID NO: 59028 - DNA, 15 bp, Homo sapiens
ttcacacatgcatgc

SEQ ID NO: 59029 - DNA, 15 bp, Homo sapiens
attcacacatgcatg

SEQ ID NO: 59030 - DNA, 15 bp, Homo sapiens
cattcacacatgcat

SEQ ID NO: 59031 - DNA, 15 bp, Homo sapiens
tcattcacacatgca

SEQ ID NO: 59032 - DNA, 15 bp, Homo sapiens
atcattcacacatgc

SEQ ID NO: 59033 - DNA, 15 bp, Homo sapiens
gatcattcacacatg

SEQ ID NO: 59034 - DNA, 15 bp, Homo sapiens
agatcattcacacat

SEQ ID NO: 59035 - DNA, 15 bp, Homo sapiens
cagatcattcacaca

SEQ ID NO: 59036 - DNA, 15 bp, Homo sapiens
ccagatcattcacac

SEQ ID NO: 59037 - DNA, 15 bp, Homo sapiens
tccagatcattcaca

SEQ ID NO: 59038 - DNA, 15 bp, Homo sapiens
ttccagatcattcac

SEQ ID NO: 59039 - DNA, 15 bp, Homo sapiens
tttccagatcattca

SEQ ID NO: 59040 - DNA, 15 bp, Homo sapiens
atttccagatcattc

SEQ ID NO: 59041 - DNA, 15 bp, Homo sapiens
tatttccagatcatt

SEQ ID NO: 59042 - DNA, 15 bp, Homo sapiens
ttatttccagatcat

SEQ ID NO: 59043 - DNA, 15 bp, Homo sapiens
cttatttccagatca

SEQ ID NO: 59044 - DNA, 15 bp, Homo sapiens
tcttatttccagatc

SEQ ID NO: 59045 - DNA, 15 bp, Homo sapiens
atcttatttccagat

SEQ ID NO: 59046 - DNA, 15 bp, Homo sapiens
catcttatttccaga

SEQ ID NO: 59047 - DNA, 15 bp, Homo sapiens
gcatcttatttccag

SEQ ID NO: 59048 - DNA, 15 bp, Homo sapiens
ggcatcttatttcca

SEQ ID NO: 59049 - DNA, 15 bp, Homo sapiens
tggcatcttatttcc

SEQ ID NO: 59050 - DNA, 15 bp, Homo sapiens
ctggcatcttatttc

SEQ ID NO: 59051 - DNA, 15 bp, Homo sapiens
tctggcatcttattt

SEQ ID NO: 59052 - DNA, 15 bp, Homo sapiens
atctggcatcttatt

SEQ ID NO: 59053 - DNA, 15 bp, Homo sapiens
catctggcatcttat

SEQ ID NO: 59054 - DNA, 15 bp, Homo sapiens
acatctggcatctta

SEQ ID NO: 59055 - DNA, 15 bp, Homo sapiens
tacatctggcatctt

SEQ ID NO: 59056 - DNA, 15 bp, Homo sapiens
ttacatctggcatct

SEQ ID NO: 59057 - DNA, 15 bp, Homo sapiens
cttacatctggcatc

SEQ ID NO: 59058 - DNA, 15 bp, Homo sapiens
acttacatctggcat

SEQ ID NO: 59059 - DNA, 15 bp, Homo sapiens
aacttacatctggca

SEQ ID NO: 59060 - DNA, 15 bp, Homo sapiens
caacttacatctggc

SEQ ID NO: 59061 - DNA, 15 bp, Homo sapiens
acaacttacatctgg

SEQ ID NO: 59062 - DNA, 15 bp, Homo sapiens
gacaacttacatctg

SEQ ID NO: 59063 - DNA, 15 bp, Homo sapiens
tgacaacttacatct

SEQ ID NO: 59064 - DNA, 15 bp, Homo sapiens
ttgacaacttacatc

SEQ ID NO: 59065 - DNA, 15 bp, Homo sapiens
gttgacaacttacat

SEQ ID NO: 59066 - DNA, 15 bp, Homo sapiens
tgttgacaacttaca

SEQ ID NO: 59067 - DNA, 15 bp, Homo sapiens
ctgttgacaacttac

SEQ ID NO: 59068 - DNA, 15 bp, Homo sapiens
actgttgacaactta

SEQ ID NO: 59069 - DNA, 15 bp, Homo sapiens
aactgttgacaactt

SEQ ID NO: 59070 - DNA, 15 bp, Homo sapiens
caactgttgacaact

SEQ ID NO: 59071 - DNA, 15 bp, Homo sapiens
gcaactgttgacaac

SEQ ID NO: 59072 - DNA, 15 bp, Homo sapiens
tgcaactgttgacaa

SEQ ID NO: 59073 - DNA, 15 bp, Homo sapiens
ctgcaactgttgaca

SEQ ID NO: 59074 - DNA, 15 bp, Homo sapiens
gctgcaactgttgac

SEQ ID NO: 59075 - DNA, 15 bp, Homo sapiens
ggctgcaactgttga

SEQ ID NO: 59076 - DNA, 15 bp, Homo sapiens
tggctgcaactgttg

SEQ ID NO: 59077 - DNA, 15 bp, Homo sapiens
gtggctgcaactgtt

SEQ ID NO: 59078 - DNA, 15 bp, Homo sapiens
tgtggctgcaactgt

SEQ ID NO: 59079 - DNA, 15 bp, Homo sapiens
atgtggctgcaactg

SEQ ID NO: 59080 - DNA, 15 bp, Homo sapiens
catgtggctgcaact

SEQ ID NO: 59081 - DNA, 15 bp, Homo sapiens
tcatgtggctgcaac

SEQ ID NO: 59082 - DNA, 15 bp, Homo sapiens
gtcatgtggctgcaa

SEQ ID NO: 59083 - DNA, 15 bp, Homo sapiens
tgtcatgtggctgca

SEQ ID NO: 59084 - DNA, 15 bp, Homo sapiens
ctgtcatgtggctgc

SEQ ID NO: 59085 - DNA, 15 bp, Homo sapiens
tctgtcatgtggctg

SEQ ID NO: 59086 - DNA, 15 bp, Homo sapiens
gtctgtcatgtggct

SEQ ID NO: 59087 - DNA, 15 bp, Homo sapiens
tgtctgtcatgtggc

SEQ ID NO: 59088 - DNA, 15 bp, Homo sapiens
atgtctgtcatgtgg

SEQ ID NO: 59089 - DNA, 15 bp, Homo sapiens
tatgtctgtcatgtg

SEQ ID NO: 59090 - DNA, 15 bp, Homo sapiens
ctatgtctgtcatgt

SEQ ID NO: 59091 - DNA, 15 bp, Homo sapiens
tctatgtctgtcatg

SEQ ID NO: 59092 - DNA, 15 bp, Homo sapiens
atctatgtctgtcat

SEQ ID NO: 59093 - DNA, 15 bp, Homo sapiens
tatctatgtctgtca

SEQ ID NO: 59094 - DNA, 15 bp, Homo sapiens
atatctatgtctgtc

SEQ ID NO: 59095 - DNA, 15 bp, Homo sapiens
tatatctatgtctgt

SEQ ID NO: 59096 - DNA, 15 bp, Homo sapiens
atatatctatgtctg

SEQ ID NO: 59097 - DNA, 15 bp, Homo sapiens
catatatctatgtct

SEQ ID NO: 59098 - DNA, 15 bp, Homo sapiens
acatatatctatgtc

SEQ ID NO: 59099 - DNA, 15 bp, Homo sapiens
cacatatatctatgt

SEQ ID NO: 59100 - DNA, 15 bp, Homo sapiens
gcacatatatctatg

SEQ ID NO: 59101 - DNA, 15 bp, Homo sapiens
tgcacatatatctat

SEQ ID NO: 59102 - DNA, 15 bp, Homo sapiens
gtgcacatatatcta

SEQ ID NO: 59103 - DNA, 15 bp, Homo sapiens
tgtgcacatatatct

SEQ ID NO: 59104 - DNA, 15 bp, Homo sapiens
gtgtgcacatatatc

SEQ ID NO: 59105 - DNA, 15 bp, Homo sapiens
tgtgtgcacatatat

SEQ ID NO: 59106 - DNA, 15 bp, Homo sapiens
gtgtgtgcacatata

SEQ ID NO: 59107 - DNA, 15 bp, Homo sapiens
agtgtgtgcacatat

SEQ ID NO: 59108 - DNA, 15 bp, Homo sapiens
tagtgtgtgcacata

SEQ ID NO: 59109 - DNA, 15 bp, Homo sapiens
ctagtgtgtgcacat

SEQ ID NO: 59110 - DNA, 15 bp, Homo sapiens
actagtgtgtgcaca

SEQ ID NO: 59111 - DNA, 15 bp, Homo sapiens
tactagtgtgtgcac

SEQ ID NO: 59112 - DNA, 15 bp, Homo sapiens
ttactagtgtgtgca

SEQ ID NO: 59113 - DNA, 15 bp, Homo sapiens
tttactagtgtgtgc

SEQ ID NO: 59114 - DNA, 15 bp, Homo sapiens
gtttactagtgtgtg

SEQ ID NO: 59115 - DNA, 15 bp, Homo sapiens
ggtttactagtgtgt

SEQ ID NO: 59116 - DNA, 15 bp, Homo sapiens
aggtttactagtgtg

SEQ ID NO: 59117 - DNA, 15 bp, Homo sapiens
gaggtttactagtgt

SEQ ID NO: 59118 - DNA, 15 bp, Homo sapiens
agaggtttactagtg

SEQ ID NO: 59119 - DNA, 15 bp, Homo sapiens
aagaggtttactagt

SEQ ID NO: 59120 - DNA, 15 bp, Homo sapiens
aaagaggtttactag

SEQ ID NO: 59121 - DNA, 15 bp, Homo sapiens
gaaagaggtttacta

SEQ ID NO: 59122 - DNA, 15 bp, Homo sapiens
ggaaagaggtttact

SEQ ID NO: 59123 - DNA, 15 bp, Homo sapiens
aggaaagaggtttac

SEQ ID NO: 59124 - DNA, 15 bp, Homo sapiens
aaggaaagaggttta

SEQ ID NO: 59125 - DNA, 15 bp, Homo sapiens
gaaggaaagaggttt

SEQ ID NO: 59126 - DNA, 15 bp, Homo sapiens
agaaggaaagaggtt

SEQ ID NO: 59127 - DNA, 15 bp, Homo sapiens
gagaaggaaagaggt

SEQ ID NO: 59128 - DNA, 15 bp, Homo sapiens
tgagaaggaaagagg

SEQ ID NO: 59129 - DNA, 15 bp, Homo sapiens
atgagaaggaaagag

SEQ ID NO: 59130 - DNA, 15 bp, Homo sapiens
gatgagaaggaaaga

SEQ ID NO: 59131 - DNA, 15 bp, Homo sapiens
ggatgagaaggaaag

SEQ ID NO: 59132 - DNA, 15 bp, Homo sapiens
tggatgagaaggaaa

SEQ ID NO: 59133 - DNA, 15 bp, Homo sapiens
atggatgagaaggaa

SEQ ID NO: 59134 - DNA, 15 bp, Homo sapiens
catggatgagaagga

SEQ ID NO: 59135 - DNA, 15 bp, Homo sapiens
ccatggatgagaagg

SEQ ID NO: 59136 - DNA, 15 bp, Homo sapiens
accatggatgagaag

SEQ ID NO: 59137 - DNA, 15 bp, Homo sapiens
aaccatggatgagaa

SEQ ID NO: 59138 - DNA, 15 bp, Homo sapiens
caaccatggatgaga

SEQ ID NO: 59139 - DNA, 15 bp, Homo sapiens
gcaaccatggatgag

SEQ ID NO: 59140 - DNA, 15 bp, Homo sapiens
ggcaaccatggatga

SEQ ID NO: 59141 - DNA, 15 bp, Homo sapiens
tggcaaccatggatg

SEQ ID NO: 59142 - DNA, 15 bp, Homo sapiens
gtggcaaccatggat

SEQ ID NO: 59143 - DNA, 15 bp, Homo sapiens
agtggcaaccatgga

SEQ ID NO: 59144 - DNA, 15 bp, Homo sapiens
aagtggcaaccatgg

SEQ ID NO: 59145 - DNA, 15 bp, Homo sapiens
aaagtggcaaccatg

SEQ ID NO: 59146 - DNA, 15 bp, Homo sapiens
aaaagtggcaaccat

SEQ ID NO: 59147 - DNA, 15 bp, Homo sapiens
taaaagtggcaacca

SEQ ID NO: 59148 - DNA, 15 bp, Homo sapiens
ataaaagtggcaacc

SEQ ID NO: 59149 - DNA, 15 bp, Homo sapiens
gataaaagtggcaac

SEQ ID NO: 59150 - DNA, 15 bp, Homo sapiens
agataaaagtggcaa

SEQ ID NO: 59151 - DNA, 15 bp, Homo sapiens
aagataaaagtggca

SEQ ID NO: 59152 - DNA, 15 bp, Homo sapiens
aaagataaaagtggc

SEQ ID NO: 59153 - DNA, 15 bp, Homo sapiens
aaaagataaaagtgg

SEQ ID NO: 59154 - DNA, 15 bp, Homo sapiens
aaaaagataaaagtg

SEQ ID NO: 59155 - DNA, 15 bp, Homo sapiens
taaaaagataaaagt

SEQ ID NO: 59156 - DNA, 15 bp, Homo sapiens
ataaaaagataaaag

SEQ ID NO: 59157 - DNA, 15 bp, Homo sapiens
aataaaaagataaaa

SEQ ID NO: 59158 - DNA, 15 bp, Homo sapiens
aaataaaaagataaa

SEQ ID NO: 59159 - DNA, 15 bp, Homo sapiens
aaaataaaaagataa

SEQ ID NO: 59160 - DNA, 15 bp, Homo sapiens
aaaaataaaaagata

SEQ ID NO: 59161 - DNA, 15 bp, Homo sapiens
taaaaataaaaagat

SEQ ID NO: 59162 - DNA, 15 bp, Homo sapiens
ataaaaataaaaaga

SEQ ID NO: 59163 - DNA, 15 bp, Homo sapiens
aataaaaataaaaag

SEQ ID NO: 59164 - DNA, 15 bp, Homo sapiens
aaaaaaaaaaataaa

SEQ ID NO: 59165 - DNA, 15 bp, Homo sapiens
caaaaaaaaaaataa

SEQ ID NO: 59166 - DNA, 15 bp, Homo sapiens
tcaaaaaaaaaaata

SEQ ID NO: 59167 - DNA, 15 bp, Homo sapiens
ctcaaaaaaaaaaat

SEQ ID NO: 59168 - DNA, 15 bp, Homo sapiens
gcgagactccatctc

SEQ ID NO: 59169 - DNA, 15 bp, Homo sapiens
agcgagactccatct

SEQ ID NO: 59170 - DNA, 15 bp, Homo sapiens
gagcgagactccatc

SEQ ID NO: 59171 - DNA, 15 bp, Homo sapiens
agagcgagactccat

SEQ ID NO: 59172 - DNA, 15 bp, Homo sapiens
tcagagcgagactcc

SEQ ID NO: 59173 - DNA, 15 bp, Homo sapiens
gtcagagcgagactc

SEQ ID NO: 59174 - DNA, 15 bp, Homo sapiens
cgtcagagcgagact

SEQ ID NO: 59175 - DNA, 15 bp, Homo sapiens
gcgtcagagcgagac

SEQ ID NO: 59176 - DNA, 15 bp, Homo sapiens
ggcgtcagagcgaga

SEQ ID NO: 59177 - DNA, 15 bp, Homo sapiens
gggcgtcagagcgag

SEQ ID NO: 59178 - DNA, 15 bp, Homo sapiens
tgggcgtcagagcga

SEQ ID NO: 59179 - DNA, 15 bp, Homo sapiens
ctgggcgtcagagcg

SEQ ID NO: 59180 - DNA, 15 bp, Homo sapiens
cctgggcgtcagagc

SEQ ID NO: 59181 - DNA, 15 bp, Homo sapiens
gcctgggcgtcagag

SEQ ID NO: 59182 - DNA, 15 bp, Homo sapiens
agcctgggcgtcaga

SEQ ID NO: 59183 - DNA, 15 bp, Homo sapiens
cagcctgggcgtcag

SEQ ID NO: 59184 - DNA, 15 bp, Homo sapiens
ccagcctgggcgtca

SEQ ID NO: 59185 - DNA, 15 bp, Homo sapiens
tccagcctgggcgtc

SEQ ID NO: 59186 - DNA, 15 bp, Homo sapiens
ctccagcctgggcgt

SEQ ID NO: 59187 - DNA, 15 bp, Homo sapiens
agccactgcactcca

SEQ ID NO: 59188 - DNA, 15 bp, Homo sapiens
gagccactgcactcc

SEQ ID NO: 59189 - DNA, 15 bp, Homo sapiens
cgagccactgcactc

SEQ ID NO: 59190 - DNA, 15 bp, Homo sapiens
tcgagccactgcact

SEQ ID NO: 59191 - DNA, 15 bp, Homo sapiens
atcgagccactgcac

SEQ ID NO: 59192 - DNA, 15 bp, Homo sapiens
gatcgagccactgca

SEQ ID NO: 59193 - DNA, 15 bp, Homo sapiens
agatcgagccactgc

SEQ ID NO: 59194 - DNA, 15 bp, Homo sapiens
gagatcgagccactg

SEQ ID NO: 59195 - DNA, 15 bp, Homo sapiens
cgagatcgagccact

SEQ ID NO: 59196 - DNA, 15 bp, Homo sapiens
ccgagatcgagccac

SEQ ID NO: 59197 - DNA, 15 bp, Homo sapiens
gccgagatcgagcca

SEQ ID NO: 59198 - DNA, 15 bp, Homo sapiens
agccgagatcgagcc

SEQ ID NO: 59199 - DNA, 15 bp, Homo sapiens
gagccgagatcgagc

SEQ ID NO: 59200 - DNA, 15 bp, Homo sapiens
tgagccgagatcgag

SEQ ID NO: 59201 - DNA, 15 bp, Homo sapiens
gtgagccgagatcga

SEQ ID NO: 59202 - DNA, 15 bp, Homo sapiens
agtgagccgagatcg

SEQ ID NO: 59203 - DNA, 15 bp, Homo sapiens
aaggttgcagtgagc

SEQ ID NO: 59204 - DNA, 15 bp, Homo sapiens
aaaggttgcagtgag

SEQ ID NO: 59205 - DNA, 15 bp, Homo sapiens
caaaggttgcagtga

SEQ ID NO: 59206 - DNA, 15 bp, Homo sapiens
gcaaaggttgcagtg

SEQ ID NO: 59207 - DNA, 15 bp, Homo sapiens
ggcaaaggttgcagt

SEQ ID NO: 59208 - DNA, 15 bp, Homo sapiens
aggcaaaggttgcag

SEQ ID NO: 59209 - DNA, 15 bp, Homo sapiens
gaggcaaaggttgca

SEQ ID NO: 59210 - DNA, 15 bp, Homo sapiens
ggaggcaaaggttgc

SEQ ID NO: 59211 - DNA, 15 bp, Homo sapiens
gggaggcaaaggttg

SEQ ID NO: 59212 - DNA, 15 bp, Homo sapiens
cgggaggcaaaggtt

SEQ ID NO: 59213 - DNA, 15 bp, Homo sapiens
ccgggaggcaaaggt

SEQ ID NO: 59214 - DNA, 15 bp, Homo sapiens
cccgggaggcaaagg

SEQ ID NO: 59215 - DNA, 15 bp, Homo sapiens
acccgggaggcaaag

SEQ ID NO: 59216 - DNA, 15 bp, Homo sapiens
aacccgggaggcaaa

SEQ ID NO: 59217 - DNA, 15 bp, Homo sapiens
gaacccgggaggcaa

SEQ ID NO: 59218 - DNA, 15 bp, Homo sapiens
agcttgaacccggga

SEQ ID NO: 59219 - DNA, 15 bp, Homo sapiens
tagcttgaacccggg

SEQ ID NO: 59220 - DNA, 15 bp, Homo sapiens
atagcttgaacccgg

SEQ ID NO: 59221 - DNA, 15 bp, Homo sapiens
aatagcttgaacccg

SEQ ID NO: 59222 - DNA, 15 bp, Homo sapiens
gaatagcttgaaccc

SEQ ID NO: 59223 - DNA, 15 bp, Homo sapiens
agaatagcttgaacc

SEQ ID NO: 59224 - DNA, 15 bp, Homo sapiens
gagaatagcttgaac

SEQ ID NO: 59225 - DNA, 15 bp, Homo sapiens
ggagaatagcttgaa

SEQ ID NO: 59226 - DNA, 15 bp, Homo sapiens
aggagaatagcttga

SEQ ID NO: 59227 - DNA, 15 bp, Homo sapiens
caggagaatagcttg

SEQ ID NO: 59228 - DNA, 15 bp, Homo sapiens
gcaggagaatagctt

SEQ ID NO: 59229 - DNA, 15 bp, Homo sapiens
ggcaggagaatagct

SEQ ID NO: 59230 - DNA, 15 bp, Homo sapiens
aggcaggagaatagc

SEQ ID NO: 59231 - DNA, 15 bp, Homo sapiens
gaggcaggagaatag

SEQ ID NO: 59232 - DNA, 15 bp, Homo sapiens
tgaggcaggagaata

SEQ ID NO: 59233 - DNA, 15 bp, Homo sapiens
gtggaggctgaggca

SEQ ID NO: 59234 - DNA, 15 bp, Homo sapiens
tgtggaggctgaggc

SEQ ID NO: 59235 - DNA, 15 bp, Homo sapiens
ctgtggaggctgagg

SEQ ID NO: 59236 - DNA, 15 bp, Homo sapiens
actgtggaggctgag

SEQ ID NO: 59237 - DNA, 15 bp, Homo sapiens
tactgtggaggctga

SEQ ID NO: 59238 - DNA, 15 bp, Homo sapiens
ctactgtggaggctg

SEQ ID NO: 59239 - DNA, 15 bp, Homo sapiens
gctactgtggaggct

SEQ ID NO: 59240 - DNA, 15 bp, Homo sapiens
agctactgtggaggc

SEQ ID NO: 59241 - DNA, 15 bp, Homo sapiens
cagctactgtggagg

SEQ ID NO: 59242 - DNA, 15 bp, Homo sapiens
ccagctactgtggag

SEQ ID NO: 59243 - DNA, 15 bp, Homo sapiens
cccagctactgtgga

SEQ ID NO: 59244 - DNA, 15 bp, Homo sapiens
tcccagctactgtgg

SEQ ID NO: 59245 - DNA, 15 bp, Homo sapiens
gtcccagctactgtg

SEQ ID NO: 59246 - DNA, 15 bp, Homo sapiens
agtcccagctactgt

SEQ ID NO: 59247 - DNA, 15 bp, Homo sapiens
tagtcccagctactg

SEQ ID NO: 59248 - DNA, 15 bp, Homo sapiens
agcctgtagtcccag

SEQ ID NO: 59249 - DNA, 15 bp, Homo sapiens
gagcctgtagtccca

SEQ ID NO: 59250 - DNA, 15 bp, Homo sapiens
tgagcctgtagtccc

SEQ ID NO: 59251 - DNA, 15 bp, Homo sapiens
atgagcctgtagtcc

SEQ ID NO: 59252 - DNA, 15 bp, Homo sapiens
catgagcctgtagtc

SEQ ID NO: 59253 - DNA, 15 bp, Homo sapiens
gcatgagcctgtagt

SEQ ID NO: 59254 - DNA, 15 bp, Homo sapiens
agcatgagcctgtag

SEQ ID NO: 59255 - DNA, 15 bp, Homo sapiens
cagcatgagcctgta

SEQ ID NO: 59256 - DNA, 15 bp, Homo sapiens
gcagcatgagcctgt

SEQ ID NO: 59257 - DNA, 15 bp, Homo sapiens
ggcagcatgagcctg

SEQ ID NO: 59258 - DNA, 15 bp, Homo sapiens
tggcagcatgagcct

SEQ ID NO: 59259 - DNA, 15 bp, Homo sapiens
gtggcagcatgagcc

SEQ ID NO: 59260 - DNA, 15 bp, Homo sapiens
cgtggcagcatgagc

SEQ ID NO: 59261 - DNA, 15 bp, Homo sapiens
gcgtggcagcatgag

SEQ ID NO: 59262 - DNA, 15 bp, Homo sapiens
ggcgtggcagcatga

SEQ ID NO: 59263 - DNA, 15 bp, Homo sapiens
gggcgtggcagcatg

SEQ ID NO: 59264 - DNA, 15 bp, Homo sapiens
cgggcgtggcagcat

SEQ ID NO: 59265 - DNA, 15 bp, Homo sapiens
ccgggcgtggcagca

SEQ ID NO: 59266 - DNA, 15 bp, Homo sapiens
gccgggcgtggcagc

SEQ ID NO: 59267 - DNA, 15 bp, Homo sapiens
agccgggcgtggcag

SEQ ID NO: 59268 - DNA, 15 bp, Homo sapiens
cagccgggcgtggca

SEQ ID NO: 59269 - DNA, 15 bp, Homo sapiens
tcagccgggcgtggc

SEQ ID NO: 59270 - DNA, 15 bp, Homo sapiens
gtcagccgggcgtgg

SEQ ID NO: 59271 - DNA, 15 bp, Homo sapiens
agtcagccgggcgtg

SEQ ID NO: 59272 - DNA, 15 bp, Homo sapiens
aagtcagccgggcgt

SEQ ID NO: 59273 - DNA, 15 bp, Homo sapiens
aaagtcagccgggcg

SEQ ID NO: 59274 - DNA, 15 bp, Homo sapiens
aaaagtcagccgggc

SEQ ID NO: 59275 - DNA, 15 bp, Homo sapiens
aaaaagtcagccggg

SEQ ID NO: 59276 - DNA, 15 bp, Homo sapiens
caaaaagtcagccgg

SEQ ID NO: 59277 - DNA, 15 bp, Homo sapiens
acaaaaagtcagccg

SEQ ID NO: 59278 - DNA, 15 bp, Homo sapiens
tacaaaaagtcagcc

SEQ ID NO: 59279 - DNA, 15 bp, Homo sapiens
atacaaaaagtcagc

SEQ ID NO: 59280 - DNA, 15 bp, Homo sapiens
aatacaaaaagtcag

SEQ ID NO: 59281 - DNA, 15 bp, Homo sapiens
aaatacaaaaagtca

SEQ ID NO: 59282 - DNA, 15 bp, Homo sapiens
aaaatacaaaaagtc

SEQ ID NO: 59283 - DNA, 15 bp, Homo sapiens
taaaatacaaaaagt

SEQ ID NO: 59284 - DNA, 15 bp, Homo sapiens
ctaaaatacaaaaag

SEQ ID NO: 59285 - DNA, 15 bp, Homo sapiens
actaaaatacaaaaa

SEQ ID NO: 59286 - DNA, 15 bp, Homo sapiens
tactaaaatacaaaa

SEQ ID NO: 59287 - DNA, 15 bp, Homo sapiens
ctactaaaatacaaa

SEQ ID NO: 59288 - DNA, 15 bp, Homo sapiens
tctactaaaatacaa

SEQ ID NO: 59289 - DNA, 15 bp, Homo sapiens
ctctactaaaataca

SEQ ID NO: 59290 - DNA, 15 bp, Homo sapiens
tctctactaaaatac

SEQ ID NO: 59291 - DNA, 15 bp, Homo sapiens
gtctctactaaaata

SEQ ID NO: 59292 - DNA, 15 bp, Homo sapiens
cgtctctactaaaat

SEQ ID NO: 59293 - DNA, 15 bp, Homo sapiens
aaacctcgtctctac

SEQ ID NO: 59294 - DNA, 15 bp, Homo sapiens
gaaacctcgtctcta

SEQ ID NO: 59295 - DNA, 15 bp, Homo sapiens
tgaaacctcgtctct

SEQ ID NO: 59296 - DNA, 15 bp, Homo sapiens
gtgaaacctcgtctc

SEQ ID NO: 59297 - DNA, 15 bp, Homo sapiens
ggtgaaacctcgtct

SEQ ID NO: 59298 - DNA, 15 bp, Homo sapiens
tggtgaaacctcgtc

SEQ ID NO: 59299 - DNA, 15 bp, Homo sapiens
atggtgaaacctcgt

SEQ ID NO: 59300 - DNA, 15 bp, Homo sapiens
catggtgaaacctcg

SEQ ID NO: 59301 - DNA, 15 bp, Homo sapiens
acatggtgaaacctc

SEQ ID NO: 59302 - DNA, 15 bp, Homo sapiens
aacatggtgaaacct

SEQ ID NO: 59303 - DNA, 15 bp, Homo sapiens
taacatggtgaaacc

SEQ ID NO: 59304 - DNA, 15 bp, Homo sapiens
gtaacatggtgaaac

SEQ ID NO: 59305 - DNA, 15 bp, Homo sapiens
ggtaacatggtgaaa

SEQ ID NO: 59306 - DNA, 15 bp, Homo sapiens
gggtaacatggtgaa

SEQ ID NO: 59307 - DNA, 15 bp, Homo sapiens
tgggtaacatggtga

SEQ ID NO: 59308 - DNA, 15 bp, Homo sapiens
ctgggtaacatggtg

SEQ ID NO: 59309 - DNA, 15 bp, Homo sapiens
cctgggtaacatggt

SEQ ID NO: 59310 - DNA, 15 bp, Homo sapiens
gcctgggtaacatgg

SEQ ID NO: 59311 - DNA, 15 bp, Homo sapiens
agcctgggtaacatg

SEQ ID NO: 59312 - DNA, 15 bp, Homo sapiens
tagcctgggtaacat

SEQ ID NO: 59313 - DNA, 15 bp, Homo sapiens
gtctagcctgggtaa

SEQ ID NO: 59314 - DNA, 15 bp, Homo sapiens
agtctagcctgggta

SEQ ID NO: 59315 - DNA, 15 bp, Homo sapiens
aagtctagcctgggt

SEQ ID NO: 59316 - DNA, 15 bp, Homo sapiens
gaagtctagcctggg

SEQ ID NO: 59317 - DNA, 15 bp, Homo sapiens
tgaagtctagcctgg

SEQ ID NO: 59318 - DNA, 15 bp, Homo sapiens
ttgaagtctagcctg

SEQ ID NO: 59319 - DNA, 15 bp, Homo sapiens
gttgaagtctagcct

SEQ ID NO: 59320 - DNA, 15 bp, Homo sapiens
agttgaagtctagcc

SEQ ID NO: 59321 - DNA, 15 bp, Homo sapiens
gagttgaagtctagc

SEQ ID NO: 59322 - DNA, 15 bp, Homo sapiens
ggagttgaagtctag

SEQ ID NO: 59323 - DNA, 15 bp, Homo sapiens
aggagttgaagtcta

SEQ ID NO: 59324 - DNA, 15 bp, Homo sapiens
caggagttgaagtct

SEQ ID NO: 59325 - DNA, 15 bp, Homo sapiens
tcaggagttgaagtc

SEQ ID NO: 59326 - DNA, 15 bp, Homo sapiens
ctcaggagttgaagt

SEQ ID NO: 59327 - DNA, 15 bp, Homo sapiens
gctcaggagttgaag

SEQ ID NO: 59328 - DNA, 15 bp, Homo sapiens
agctcaggagttgaa

SEQ ID NO: 59329 - DNA, 15 bp, Homo sapiens
gagctcaggagttga

SEQ ID NO: 59330 - DNA, 15 bp, Homo sapiens
tgagctcaggagttg

SEQ ID NO: 59331 - DNA, 15 bp, Homo sapiens
ctgagctcaggagtt

SEQ ID NO: 59332 - DNA, 15 bp, Homo sapiens
cctgagctcaggagt

SEQ ID NO: 59333 - DNA, 15 bp, Homo sapiens
gcctgagctcaggag

SEQ ID NO: 59334 - DNA, 15 bp, Homo sapiens
tgcctgagctcagga

SEQ ID NO: 59335 - DNA, 15 bp, Homo sapiens
ttgcctgagctcagg

SEQ ID NO: 59336 - DNA, 15 bp, Homo sapiens
attgcctgagctcag

SEQ ID NO: 59337 - DNA, 15 bp, Homo sapiens
gattgcctgagctca

SEQ ID NO: 59338 - DNA, 15 bp, Homo sapiens
ggattgcctgagctc

SEQ ID NO: 59339 - DNA, 15 bp, Homo sapiens
tggattgcctgagct

SEQ ID NO: 59340 - DNA, 15 bp, Homo sapiens
gtggattgcctgagc

SEQ ID NO: 59341 - DNA, 15 bp, Homo sapiens
ggtggattgcctgag

SEQ ID NO: 59342 - DNA, 15 bp, Homo sapiens
gggtggattgcctga

SEQ ID NO: 59343 - DNA, 15 bp, Homo sapiens
agggtggattgcctg

SEQ ID NO: 59344 - DNA, 15 bp, Homo sapiens
gagggtggattgcct

SEQ ID NO: 59345 - DNA, 15 bp, Homo sapiens
ggagggtggattgcc

SEQ ID NO: 59346 - DNA, 15 bp, Homo sapiens
aggagggtggattgc

SEQ ID NO: 59347 - DNA, 15 bp, Homo sapiens
aaggagggtggattg

SEQ ID NO: 59348 - DNA, 15 bp, Homo sapiens
caaggagggtggatt

SEQ ID NO: 59349 - DNA, 15 bp, Homo sapiens
ccaaggagggtggat

SEQ ID NO: 59350 - DNA, 15 bp, Homo sapiens
gccaaggagggtgga

SEQ ID NO: 59351 - DNA, 15 bp, Homo sapiens
ggccaaggagggtgg

SEQ ID NO: 59352 - DNA, 15 bp, Homo sapiens
aggccaaggagggtg

SEQ ID NO: 59353 - DNA, 15 bp, Homo sapiens
gaggccaaggagggt

SEQ ID NO: 59354 - DNA, 15 bp, Homo sapiens
ggaggccaaggaggg

SEQ ID NO: 59355 - DNA, 15 bp, Homo sapiens
gggaggccaaggagg

SEQ ID NO: 59356 - DNA, 15 bp, Homo sapiens
tgggaggccaaggag

SEQ ID NO: 59357 - DNA, 15 bp, Homo sapiens
ttgggaggccaagga

SEQ ID NO: 59358 - DNA, 15 bp, Homo sapiens
gggctgggtgcagtg

SEQ ID NO: 59359 - DNA, 15 bp, Homo sapiens
tgggctgggtgcagt

SEQ ID NO: 59360 - DNA, 15 bp, Homo sapiens
gtgggctgggtgcag

SEQ ID NO: 59361 - DNA, 15 bp, Homo sapiens
ggtgggctgggtgca

SEQ ID NO: 59362 - DNA, 15 bp, Homo sapiens
tggtgggctgggtgc

SEQ ID NO: 59363 - DNA, 15 bp, Homo sapiens
gtggtgggctgggtg

SEQ ID NO: 59364 - DNA, 15 bp, Homo sapiens
agtggtgggctgggt

SEQ ID NO: 59365 - DNA, 15 bp, Homo sapiens
aagtggtgggctggg

SEQ ID NO: 59366 - DNA, 15 bp, Homo sapiens
aaagtggtgggctgg

SEQ ID NO: 59367 - DNA, 15 bp, Homo sapiens
taaagtggtgggctg

SEQ ID NO: 59368 - DNA, 15 bp, Homo sapiens
ttaaagtggtgggct

SEQ ID NO: 59369 - DNA, 15 bp, Homo sapiens
attaaagtggtgggc

SEQ ID NO: 59370 - DNA, 15 bp, Homo sapiens
aattaaagtggtggg

SEQ ID NO: 59371 - DNA, 15 bp, Homo sapiens
aaattaaagtggtgg

SEQ ID NO: 59372 - DNA, 15 bp, Homo sapiens
aaaattaaagtggtg

SEQ ID NO: 59373 - DNA, 15 bp, Homo sapiens
aaaaattaaagtggt

SEQ ID NO: 59374 - DNA, 15 bp, Homo sapiens
aaaaaattaaagtgg

SEQ ID NO: 59375 - DNA, 15 bp, Homo sapiens
taaaaaattaaagtg

SEQ ID NO: 59376 - DNA, 15 bp, Homo sapiens
gtaaaaaattaaagt

SEQ ID NO: 59377 - DNA, 15 bp, Homo sapiens
tgtaaaaaattaaag

SEQ ID NO: 59378 - DNA, 15 bp, Homo sapiens
gtgtaaaaaattaaa

SEQ ID NO: 59379 - DNA, 15 bp, Homo sapiens
agtgtaaaaaattaa

SEQ ID NO: 59380 - DNA, 15 bp, Homo sapiens
gagtgtaaaaaatta

SEQ ID NO: 59381 - DNA, 15 bp, Homo sapiens
agagtgtaaaaaatt

SEQ ID NO: 59382 - DNA, 15 bp, Homo sapiens
tagagtgtaaaaaat

SEQ ID NO: 59383 - DNA, 15 bp, Homo sapiens
gtagagtgtaaaaaa

SEQ ID NO: 59384 - DNA, 15 bp, Homo sapiens
ggtagagtgtaaaaa

SEQ ID NO: 59385 - DNA, 15 bp, Homo sapiens
gggtagagtgtaaaa

SEQ ID NO: 59386 - DNA, 15 bp, Homo sapiens
agggtagagtgtaaa

SEQ ID NO: 59387 - DNA, 15 bp, Homo sapiens
aagggtagagtgtaa

SEQ ID NO: 59388 - DNA, 15 bp, Homo sapiens
aaagggtagagtgta

SEQ ID NO: 59389 - DNA, 15 bp, Homo sapiens
aaaagggtagagtgt

SEQ ID NO: 59390 - DNA, 15 bp, Homo sapiens
caaaagggtagagtg

SEQ ID NO: 59391 - DNA, 15 bp, Homo sapiens
ccaaaagggtagagt

SEQ ID NO: 59392 - DNA, 15 bp, Homo sapiens
accaaaagggtagag

SEQ ID NO: 59393 - DNA, 15 bp, Homo sapiens
gaccaaaagggtaga

SEQ ID NO: 59394 - DNA, 15 bp, Homo sapiens
tgaccaaaagggtag

SEQ ID NO: 59395 - DNA, 15 bp, Homo sapiens
ttgaccaaaagggta

SEQ ID NO: 59396 - DNA, 15 bp, Homo sapiens
tttgaccaaaagggt

SEQ ID NO: 59397 - DNA, 15 bp, Homo sapiens
ttttgaccaaaaggg

SEQ ID NO: 59398 - DNA, 15 bp, Homo sapiens
attttgaccaaaagg

SEQ ID NO: 59399 - DNA, 15 bp, Homo sapiens
aattttgaccaaaag

SEQ ID NO: 59400 - DNA, 15 bp, Homo sapiens
aaattttgaccaaaa

SEQ ID NO: 59401 - DNA, 15 bp, Homo sapiens
caaattttgaccaaa

SEQ ID NO: 59402 - DNA, 15 bp, Homo sapiens
gcaaattttgaccaa

SEQ ID NO: 59403 - DNA, 15 bp, Homo sapiens
agcaaattttgacca

SEQ ID NO: 59404 - DNA, 15 bp, Homo sapiens
gagcaaattttgacc

SEQ ID NO: 59405 - DNA, 15 bp, Homo sapiens
tgagcaaattttgac

SEQ ID NO: 59406 - DNA, 15 bp, Homo sapiens
ttgagcaaattttga

SEQ ID NO: 59407 - DNA, 15 bp, Homo sapiens
attgagcaaattttg

SEQ ID NO: 59408 - DNA, 15 bp, Homo sapiens
gattgagcaaatttt

SEQ ID NO: 59409 - DNA, 15 bp, Homo sapiens
agattgagcaaattt

SEQ ID NO: 59410 - DNA, 15 bp, Homo sapiens
cagattgagcaaatt

SEQ ID NO: 59411 - DNA, 15 bp, Homo sapiens
gcagattgagcaaat

SEQ ID NO: 59412 - DNA, 15 bp, Homo sapiens
tgcagattgagcaaa

SEQ ID NO: 59413 - DNA, 15 bp, Homo sapiens
ttgcagattgagcaa

SEQ ID NO: 59414 - DNA, 15 bp, Homo sapiens
cttgcagattgagca

SEQ ID NO: 59415 - DNA, 15 bp, Homo sapiens
gcttgcagattgagc

SEQ ID NO: 59416 - DNA, 15 bp, Homo sapiens
agcttgcagattgag

SEQ ID NO: 59417 - DNA, 15 bp, Homo sapiens
aagcttgcagattga

SEQ ID NO: 59418 - DNA, 15 bp, Homo sapiens
taagcttgcagattg

SEQ ID NO: 59419 - DNA, 15 bp, Homo sapiens
ttaagcttgcagatt

SEQ ID NO: 59420 - DNA, 15 bp, Homo sapiens
tttaagcttgcagat

SEQ ID NO: 59421 - DNA, 15 bp, Homo sapiens
ttttaagcttgcaga

SEQ ID NO: 59422 - DNA, 15 bp, Homo sapiens
attttaagcttgcag

SEQ ID NO: 59423 - DNA, 15 bp, Homo sapiens
cattttaagcttgca

SEQ ID NO: 59424 - DNA, 15 bp, Homo sapiens
acattttaagcttgc

SEQ ID NO: 59425 - DNA, 15 bp, Homo sapiens
cacattttaagcttg

SEQ ID NO: 59426 - DNA, 15 bp, Homo sapiens
acacattttaagctt

SEQ ID NO: 59427 - DNA, 15 bp, Homo sapiens
gacacattttaagct

SEQ ID NO: 59428 - DNA, 15 bp, Homo sapiens
tgacacattttaagc

SEQ ID NO: 59429 - DNA, 15 bp, Homo sapiens
atgacacattttaag

SEQ ID NO: 59430 - DNA, 15 bp, Homo sapiens
catgacacattttaa

SEQ ID NO: 59431 - DNA, 15 bp, Homo sapiens
tcatgacacatttta

SEQ ID NO: 59432 - DNA, 15 bp, Homo sapiens
gtcatgacacatttt

SEQ ID NO: 59433 - DNA, 15 bp, Homo sapiens
tgtcatgacacattt

SEQ ID NO: 59434 - DNA, 15 bp, Homo sapiens
ttgtcatgacacatt

SEQ ID NO: 59435 - DNA, 15 bp, Homo sapiens
tttgtcatgacacat

SEQ ID NO: 59436 - DNA, 15 bp, Homo sapiens
gtttgtcatgacaca

SEQ ID NO: 59437 - DNA, 15 bp, Homo sapiens
tgtttgtcatgacac

SEQ ID NO: 59438 - DNA, 15 bp, Homo sapiens
gtgtttgtcatgaca

SEQ ID NO: 59439 - DNA, 15 bp, Homo sapiens
tgtgtttgtcatgac

SEQ ID NO: 59440 - DNA, 15 bp, Homo sapiens
atgtgtttgtcatga

SEQ ID NO: 59441 - DNA, 15 bp, Homo sapiens
catgtgtttgtcatg

SEQ ID NO: 59442 - DNA, 15 bp, Homo sapiens
gcatgtgtttgtcat

SEQ ID NO: 59443 - DNA, 15 bp, Homo sapiens
tgcatgtgtttgtca

SEQ ID NO: 59444 - DNA, 15 bp, Homo sapiens
ttgcatgtgtttgtc

SEQ ID NO: 59445 - DNA, 15 bp, Homo sapiens
cttgcatgtgtttgt

SEQ ID NO: 59446 - DNA, 15 bp, Homo sapiens
gcttgcatgtgtttg

SEQ ID NO: 59447 - DNA, 15 bp, Homo sapiens
tgcttgcatgtgttt

SEQ ID NO: 59448 - DNA, 15 bp, Homo sapiens
gtgcttgcatgtgtt

SEQ ID NO: 59449 - DNA, 15 bp, Homo sapiens
tgtgcttgcatgtgt

SEQ ID NO: 59450 - DNA, 15 bp, Homo sapiens
atgtgcttgcatgtg

SEQ ID NO: 59451 - DNA, 15 bp, Homo sapiens
tatgtgcttgcatgt

SEQ ID NO: 59452 - DNA, 15 bp, Homo sapiens
gtatgtgcttgcatg

SEQ ID NO: 59453 - DNA, 15 bp, Homo sapiens
agtatgtgcttgcat

SEQ ID NO: 59454 - DNA, 15 bp, Homo sapiens
gagtatgtgcttgca

SEQ ID NO: 59455 - DNA, 15 bp, Homo sapiens
tgagtatgtgcttgc

SEQ ID NO: 59456 - DNA, 15 bp, Homo sapiens
gtgagtatgtgcttg

SEQ ID NO: 59457 - DNA, 15 bp, Homo sapiens
tgtgagtatgtgctt

SEQ ID NO: 59458 - DNA, 15 bp, Homo sapiens
gtgtgagtatgtgct

SEQ ID NO: 59459 - DNA, 15 bp, Homo sapiens
tgtgtgagtatgtgc

SEQ ID NO: 59460 - DNA, 15 bp, Homo sapiens
atgtgtgagtatgtg

SEQ ID NO: 59461 - DNA, 15 bp, Homo sapiens
tatgtgtgagtatgt

SEQ ID NO: 59462 - DNA, 15 bp, Homo sapiens
ctatgtgtgagtatg

SEQ ID NO: 59463 - DNA, 15 bp, Homo sapiens
tctatgtgtgagtat

SEQ ID NO: 59464 - DNA, 15 bp, Homo sapiens
atctatgtgtgagta

SEQ ID NO: 59465 - DNA, 15 bp, Homo sapiens
catctatgtgtgagt

SEQ ID NO: 59466 - DNA, 15 bp, Homo sapiens
gcatctatgtgtgag

SEQ ID NO: 59467 - DNA, 15 bp, Homo sapiens
tgcatctatgtgtga

SEQ ID NO: 59468 - DNA, 15 bp, Homo sapiens
ctgcatctatgtgtg

SEQ ID NO: 59469 - DNA, 15 bp, Homo sapiens
tctgcatctatgtgt

SEQ ID NO: 59470 - DNA, 15 bp, Homo sapiens
ttctgcatctatgtg

SEQ ID NO: 59471 - DNA, 15 bp, Homo sapiens
tttctgcatctatgt

SEQ ID NO: 59472 - DNA, 15 bp, Homo sapiens
gtttctgcatctatg

SEQ ID NO: 59473 - DNA, 15 bp, Homo sapiens
tgtttctgcatctat

SEQ ID NO: 59474 - DNA, 15 bp, Homo sapiens
ctgtttctgcatcta

SEQ ID NO: 59475 - DNA, 15 bp, Homo sapiens
gctgtttctgcatct

SEQ ID NO: 59476 - DNA, 15 bp, Homo sapiens
cgctgtttctgcatc

SEQ ID NO: 59477 - DNA, 15 bp, Homo sapiens
acgctgtttctgcat

SEQ ID NO: 59478 - DNA, 15 bp, Homo sapiens
gacgctgtttctgca

SEQ ID NO: 59479 - DNA, 15 bp, Homo sapiens
agacgctgtttctgc

SEQ ID NO: 59480 - DNA, 15 bp, Homo sapiens
tagacgctgtttctg

SEQ ID NO: 59481 - DNA, 15 bp, Homo sapiens
ttagacgctgtttct

SEQ ID NO: 59482 - DNA, 15 bp, Homo sapiens
tttagacgctgtttc

SEQ ID NO: 59483 - DNA, 15 bp, Homo sapiens
gtttagacgctgttt

SEQ ID NO: 59484 - DNA, 15 bp, Homo sapiens
agtttagacgctgtt

SEQ ID NO: 59485 - DNA, 15 bp, Homo sapiens
aagtttagacgctgt

SEQ ID NO: 59486 - DNA, 15 bp, Homo sapiens
taagtttagacgctg

SEQ ID NO: 59487 - DNA, 15 bp, Homo sapiens
ataagtttagacgct

SEQ ID NO: 59488 - DNA, 15 bp, Homo sapiens
tataagtttagacgc

SEQ ID NO: 59489 - DNA, 15 bp, Homo sapiens
ttataagtttagacg

SEQ ID NO: 59490 - DNA, 15 bp, Homo sapiens
tttataagtttagac

SEQ ID NO: 59491 - DNA, 15 bp, Homo sapiens
ttttataagtttaga

SEQ ID NO: 59492 - DNA, 15 bp, Homo sapiens
cttttataagtttag

SEQ ID NO: 59493 - DNA, 15 bp, Homo sapiens
gcttttataagttta

SEQ ID NO: 59494 - DNA, 15 bp, Homo sapiens
tgcttttataagttt

SEQ ID NO: 59495 - DNA, 15 bp, Homo sapiens
gtgcttttataagtt

SEQ ID NO: 59496 - DNA, 15 bp, Homo sapiens
tgtgcttttataagt

SEQ ID NO: 59497 - DNA, 15 bp, Homo sapiens
ctgtgcttttataag

SEQ ID NO: 59498 - DNA, 15 bp, Homo sapiens
actgtgcttttataa

SEQ ID NO: 59499 - DNA, 15 bp, Homo sapiens
aactgtgcttttata

SEQ ID NO: 59500 - DNA, 15 bp, Homo sapiens
aaactgtgcttttat

SEQ ID NO: 59501 - DNA, 15 bp, Homo sapiens
taaactgtgctttta

SEQ ID NO: 59502 - DNA, 15 bp, Homo sapiens
ataaactgtgctttt

SEQ ID NO: 59503 - DNA, 15 bp, Homo sapiens
cataaactgtgcttt

SEQ ID NO: 59504 - DNA, 15 bp, Homo sapiens
acataaactgtgctt

SEQ ID NO: 59505 - DNA, 15 bp, Homo sapiens
tacataaactgtgct

SEQ ID NO: 59506 - DNA, 15 bp, Homo sapiens
ttacataaactgtgc

SEQ ID NO: 59507 - DNA, 15 bp, Homo sapiens
tttacataaactgtg

SEQ ID NO: 59508 - DNA, 15 bp, Homo sapiens
atttacataaactgt

SEQ ID NO: 59509 - DNA, 15 bp, Homo sapiens
catttacataaactg

SEQ ID NO: 59510 - DNA, 15 bp, Homo sapiens
acatttacataaact

SEQ ID NO: 59511 - DNA, 15 bp, Homo sapiens
cacatttacataaac

SEQ ID NO: 59512 - DNA, 15 bp, Homo sapiens
acacatttacataaa

SEQ ID NO: 59513 - DNA, 15 bp, Homo sapiens
cacacatttacataa

SEQ ID NO: 59514 - DNA, 15 bp, Homo sapiens
gcacacatttacata

SEQ ID NO: 59515 - DNA, 15 bp, Homo sapiens
tgcacacatttacat

SEQ ID NO: 59516 - DNA, 15 bp, Homo sapiens
gtgcacacatttaca

SEQ ID NO: 59517 - DNA, 15 bp, Homo sapiens
agtgcacacatttac

SEQ ID NO: 59518 - DNA, 15 bp, Homo sapiens
aagtgcacacattta

SEQ ID NO: 59519 - DNA, 15 bp, Homo sapiens
gaagtgcacacattt

SEQ ID NO: 59520 - DNA, 15 bp, Homo sapiens
agaagtgcacacatt

SEQ ID NO: 59521 - DNA, 15 bp, Homo sapiens
aagaagtgcacacat

SEQ ID NO: 59522 - DNA, 15 bp, Homo sapiens
gaagaagtgcacaca

SEQ ID NO: 59523 - DNA, 15 bp, Homo sapiens
agaagaagtgcacac

SEQ ID NO: 59524 - DNA, 15 bp, Homo sapiens
gagaagaagtgcaca

SEQ ID NO: 59525 - DNA, 15 bp, Homo sapiens
ggagaagaagtgcac

SEQ ID NO: 59526 - DNA, 15 bp, Homo sapiens
gggagaagaagtgca

SEQ ID NO: 59527 - DNA, 15 bp, Homo sapiens
agggagaagaagtgc

SEQ ID NO: 59528 - DNA, 15 bp, Homo sapiens
tagggagaagaagtg

SEQ ID NO: 59529 - DNA, 15 bp, Homo sapiens
ctagggagaagaagt

SEQ ID NO: 59530 - DNA, 15 bp, Homo sapiens
cctagggagaagaag

SEQ ID NO: 59531 - DNA, 15 bp, Homo sapiens
acctagggagaagaa

SEQ ID NO: 59532 - DNA, 15 bp, Homo sapiens
cacctagggagaaga

SEQ ID NO: 59533 - DNA, 15 bp, Homo sapiens
ccacctagggagaag

SEQ ID NO: 59534 - DNA, 15 bp, Homo sapiens
accacctagggagaa

SEQ ID NO: 59535 - DNA, 15 bp, Homo sapiens
taccacctagggaga

SEQ ID NO: 59536 - DNA, 15 bp, Homo sapiens
ttaccacctagggag

SEQ ID NO: 59537 - DNA, 15 bp, Homo sapiens
tttaccacctaggga

SEQ ID NO: 59538 - DNA, 15 bp, Homo sapiens
gtttaccacctaggg

SEQ ID NO: 59539 - DNA, 15 bp, Homo sapiens
ggtttaccacctagg

SEQ ID NO: 59540 - DNA, 15 bp, Homo sapiens
tggtttaccacctag

SEQ ID NO: 59541 - DNA, 15 bp, Homo sapiens
gtggtttaccaccta

SEQ ID NO: 59542 - DNA, 15 bp, Homo sapiens
tgtggtttaccacct

SEQ ID NO: 59543 - DNA, 15 bp, Homo sapiens
atgtggtttaccacc

SEQ ID NO: 59544 - DNA, 15 bp, Homo sapiens
aatgtggtttaccac

SEQ ID NO: 59545 - DNA, 15 bp, Homo sapiens
aaatgtggtttacca

SEQ ID NO: 59546 - DNA, 15 bp, Homo sapiens
gaaatgtggtttacc

SEQ ID NO: 59547 - DNA, 15 bp, Homo sapiens
tgaaatgtggtttac

SEQ ID NO: 59548 - DNA, 15 bp, Homo sapiens
ttgaaatgtggttta

SEQ ID NO: 59549 - DNA, 15 bp, Homo sapiens
tttgaaatgtggttt

SEQ ID NO: 59550 - DNA, 15 bp, Homo sapiens
ttttgaaatgtggtt

SEQ ID NO: 59551 - DNA, 15 bp, Homo sapiens
gttttgaaatgtggt

SEQ ID NO: 59552 - DNA, 15 bp, Homo sapiens
tgttttgaaatgtgg

SEQ ID NO: 59553 - DNA, 15 bp, Homo sapiens
ttgttttgaaatgtg

SEQ ID NO: 59554 - DNA, 15 bp, Homo sapiens
gttgttttgaaatgt

SEQ ID NO: 59555 - DNA, 15 bp, Homo sapiens
ggttgttttgaaatg

SEQ ID NO: 59556 - DNA, 15 bp, Homo sapiens
gggttgttttgaaat

SEQ ID NO: 59557 - DNA, 15 bp, Homo sapiens
tgggttgttttgaaa

SEQ ID NO: 59558 - DNA, 15 bp, Homo sapiens
ttgggttgttttgaa

SEQ ID NO: 59559 - DNA, 15 bp, Homo sapiens
tttgggttgttttga

SEQ ID NO: 59560 - DNA, 15 bp, Homo sapiens
atttgggttgttttg

SEQ ID NO: 59561 - DNA, 15 bp, Homo sapiens
tatttgggttgtttt

SEQ ID NO: 59562 - DNA, 15 bp, Homo sapiens
ttatttgggttgttt

SEQ ID NO: 59563 - DNA, 15 bp, Homo sapiens
tttatttgggttgtt

SEQ ID NO: 59564 - DNA, 15 bp, Homo sapiens
ttttatttgggttgt

SEQ ID NO: 59565 - DNA, 15 bp, Homo sapiens
gttttatttgggttg

SEQ ID NO: 59566 - DNA, 15 bp, Homo sapiens
agttttatttgggtt

SEQ ID NO: 59567 - DNA, 15 bp, Homo sapiens
cagttttatttgggt

SEQ ID NO: 59568 - DNA, 15 bp, Homo sapiens
tcagttttatttggg

SEQ ID NO: 59569 - DNA, 15 bp, Homo sapiens
ttcagttttatttgg

SEQ ID NO: 59570 - DNA, 15 bp, Homo sapiens
gttcagttttatttg

SEQ ID NO: 59571 - DNA, 15 bp, Homo sapiens
tgttcagttttattt

SEQ ID NO: 59572 - DNA, 15 bp, Homo sapiens
ttgttcagttttatt

SEQ ID NO: 59573 - DNA, 15 bp, Homo sapiens
tttgttcagttttat

SEQ ID NO: 59574 - DNA, 15 bp, Homo sapiens
ctttgttcagtttta

SEQ ID NO: 59575 - DNA, 15 bp, Homo sapiens
gctttgttcagtttt

SEQ ID NO: 59576 - DNA, 15 bp, Homo sapiens
agctttgttcagttt

SEQ ID NO: 59577 - DNA, 15 bp, Homo sapiens
aagctttgttcagtt

SEQ ID NO: 59578 - DNA, 15 bp, Homo sapiens
gaagctttgttcagt

SEQ ID NO: 59579 - DNA, 15 bp, Homo sapiens
agaagctttgttcag

SEQ ID NO: 59580 - DNA, 15 bp, Homo sapiens
aagaagctttgttca

SEQ ID NO: 59581 - DNA, 15 bp, Homo sapiens
gaagaagctttgttc

SEQ ID NO: 59582 - DNA, 15 bp, Homo sapiens
ggaagaagctttgtt

SEQ ID NO: 59583 - DNA, 15 bp, Homo sapiens
aggaagaagctttgt

SEQ ID NO: 59584 - DNA, 15 bp, Homo sapiens
gaggaagaagctttg

SEQ ID NO: 59585 - DNA, 15 bp, Homo sapiens
agaggaagaagcttt

SEQ ID NO: 59586 - DNA, 15 bp, Homo sapiens
aagaggaagaagctt

SEQ ID NO: 59587 - DNA, 15 bp, Homo sapiens
taagaggaagaagct

SEQ ID NO: 59588 - DNA, 15 bp, Homo sapiens
ctaagaggaagaagc

SEQ ID NO: 59589 - DNA, 15 bp, Homo sapiens
tctaagaggaagaag

SEQ ID NO: 59590 - DNA, 15 bp, Homo sapiens
gtctaagaggaagaa

SEQ ID NO: 59591 - DNA, 15 bp, Homo sapiens
agtctaagaggaaga

SEQ ID NO: 59592 - DNA, 15 bp, Homo sapiens
aagtctaagaggaag

SEQ ID NO: 59593 - DNA, 15 bp, Homo sapiens
aaagtctaagaggaa

SEQ ID NO: 59594 - DNA, 15 bp, Homo sapiens
aaaagtctaagagga

SEQ ID NO: 59595 - DNA, 15 bp, Homo sapiens
aaaaagtctaagagg

SEQ ID NO: 59596 - DNA, 15 bp, Homo sapiens
taaaaagtctaagag

SEQ ID NO: 59597 - DNA, 15 bp, Homo sapiens
ctaaaaagtctaaga

SEQ ID NO: 59598 - DNA, 15 bp, Homo sapiens
tctaaaaagtctaag

SEQ ID NO: 59599 - DNA, 15 bp, Homo sapiens
ttctaaaaagtctaa

SEQ ID NO: 59600 - DNA, 15 bp, Homo sapiens
tttctaaaaagtcta

SEQ ID NO: 59601 - DNA, 15 bp, Homo sapiens
ttttctaaaaagtct

SEQ ID NO: 59602 - DNA, 15 bp, Homo sapiens
attttctaaaaagtc

SEQ ID NO: 59603 - DNA, 15 bp, Homo sapiens
gattttctaaaaagt

SEQ ID NO: 59604 - DNA, 15 bp, Homo sapiens
agattttctaaaaag

SEQ ID NO: 59605 - DNA, 15 bp, Homo sapiens
aagattttctaaaaa

SEQ ID NO: 59606 - DNA, 15 bp, Homo sapiens
aaagattttctaaaa

SEQ ID NO: 59607 - DNA, 15 bp, Homo sapiens
gaaagattttctaaa

SEQ ID NO: 59608 - DNA, 15 bp, Homo sapiens
tgaaagattttctaa

SEQ ID NO: 59609 - DNA, 15 bp, Homo sapiens
ctgaaagattttcta

SEQ ID NO: 59610 - DNA, 15 bp, Homo sapiens
actgaaagattttct

SEQ ID NO: 59611 - DNA, 15 bp, Homo sapiens
cactgaaagattttc

SEQ ID NO: 59612 - DNA, 15 bp, Homo sapiens
gcactgaaagatttt

SEQ ID NO: 59613 - DNA, 15 bp, Homo sapiens
agcactgaaagattt

SEQ ID NO: 59614 - DNA, 15 bp, Homo sapiens
cagcactgaaagatt

SEQ ID NO: 59615 - DNA, 15 bp, Homo sapiens
tcagcactgaaagat

SEQ ID NO: 59616 - DNA, 15 bp, Homo sapiens
ctcagcactgaaaga

SEQ ID NO: 59617 - DNA, 15 bp, Homo sapiens
actcagcactgaaag

SEQ ID NO: 59618 - DNA, 15 bp, Homo sapiens
gactcagcactgaaa

SEQ ID NO: 59619 - DNA, 15 bp, Homo sapiens
tgactcagcactgaa

SEQ ID NO: 59620 - DNA, 15 bp, Homo sapiens
gtgactcagcactga

SEQ ID NO: 59621 - DNA, 15 bp, Homo sapiens
agtgactcagcactg

SEQ ID NO: 59622 - DNA, 15 bp, Homo sapiens
tagtgactcagcact

SEQ ID NO: 59623 - DNA, 15 bp, Homo sapiens
ttagtgactcagcac

SEQ ID NO: 59624 - DNA, 15 bp, Homo sapiens
cttagtgactcagca

SEQ ID NO: 59625 - DNA, 15 bp, Homo sapiens
gcttagtgactcagc

SEQ ID NO: 59626 - DNA, 15 bp, Homo sapiens
agcttagtgactcag

SEQ ID NO: 59627 - DNA, 15 bp, Homo sapiens
cagcttagtgactca

SEQ ID NO: 59628 - DNA, 15 bp, Homo sapiens
gcagcttagtgactc

SEQ ID NO: 59629 - DNA, 15 bp, Homo sapiens
ggcagcttagtgact

SEQ ID NO: 59630 - DNA, 15 bp, Homo sapiens
tggcagcttagtgac

SEQ ID NO: 59631 - DNA, 15 bp, Homo sapiens
ttggcagcttagtga

SEQ ID NO: 59632 - DNA, 15 bp, Homo sapiens
cttggcagcttagtg

SEQ ID NO: 59633 - DNA, 15 bp, Homo sapiens
acttggcagcttagt

SEQ ID NO: 59634 - DNA, 15 bp, Homo sapiens
aacttggcagcttag

SEQ ID NO: 59635 - DNA, 15 bp, Homo sapiens
gaacttggcagctta

SEQ ID NO: 59636 - DNA, 15 bp, Homo sapiens
agaacttggcagctt

SEQ ID NO: 59637 - DNA, 15 bp, Homo sapiens
gagaacttggcagct

SEQ ID NO: 59638 - DNA, 15 bp, Homo sapiens
tgagaacttggcagc

SEQ ID NO: 59639 - DNA, 15 bp, Homo sapiens
atgagaacttggcag

SEQ ID NO: 59640 - DNA, 15 bp, Homo sapiens
aatgagaacttggca

SEQ ID NO: 59641 - DNA, 15 bp, Homo sapiens
caatgagaacttggc

SEQ ID NO: 59642 - DNA, 15 bp, Homo sapiens
acaatgagaacttgg

SEQ ID NO: 59643 - DNA, 15 bp, Homo sapiens
cacaatgagaacttg

SEQ ID NO: 59644 - DNA, 15 bp, Homo sapiens
ccacaatgagaactt

SEQ ID NO: 59645 - DNA, 15 bp, Homo sapiens
cccacaatgagaact

SEQ ID NO: 59646 - DNA, 15 bp, Homo sapiens
tcccacaatgagaac

SEQ ID NO: 59647 - DNA, 15 bp, Homo sapiens
ttcccacaatgagaa

SEQ ID NO: 59648 - DNA, 15 bp, Homo sapiens
gttcccacaatgaga

SEQ ID NO: 59649 - DNA, 15 bp, Homo sapiens
agttcccacaatgag

SEQ ID NO: 59650 - DNA, 15 bp, Homo sapiens
tagttcccacaatga

SEQ ID NO: 59651 - DNA, 15 bp, Homo sapiens
atagttcccacaatg

SEQ ID NO: 59652 - DNA, 15 bp, Homo sapiens
catagttcccacaat

SEQ ID NO: 59653 - DNA, 15 bp, Homo sapiens
gcatagttcccacaa

SEQ ID NO: 59654 - DNA, 15 bp, Homo sapiens
ggcatagttcccaca

SEQ ID NO: 59655 - DNA, 15 bp, Homo sapiens
aggcatagttcccac

SEQ ID NO: 59656 - DNA, 15 bp, Homo sapiens
aaggcatagttccca

SEQ ID NO: 59657 - DNA, 15 bp, Homo sapiens
aaaggcatagttccc

SEQ ID NO: 59658 - DNA, 15 bp, Homo sapiens
caaaggcatagttcc

SEQ ID NO: 59659 - DNA, 15 bp, Homo sapiens
ccaaaggcatagttc

SEQ ID NO: 59660 - DNA, 15 bp, Homo sapiens
tccaaaggcatagtt

SEQ ID NO: 59661 - DNA, 15 bp, Homo sapiens
atccaaaggcatagt

SEQ ID NO: 59662 - DNA, 15 bp, Homo sapiens
catccaaaggcatag

SEQ ID NO: 59663 - DNA, 15 bp, Homo sapiens
acatccaaaggcata

SEQ ID NO: 59664 - DNA, 15 bp, Homo sapiens
tacatccaaaggcat

SEQ ID NO: 59665 - DNA, 15 bp, Homo sapiens
ttacatccaaaggca

SEQ ID NO: 59666 - DNA, 15 bp, Homo sapiens
attacatccaaaggc

SEQ ID NO: 59667 - DNA, 15 bp, Homo sapiens
cattacatccaaagg

SEQ ID NO: 59668 - DNA, 15 bp, Homo sapiens
tcattacatccaaag

SEQ ID NO: 59669 - DNA, 15 bp, Homo sapiens
atcattacatccaaa

SEQ ID NO: 59670 - DNA, 15 bp, Homo sapiens
aatcattacatccaa

SEQ ID NO: 59671 - DNA, 15 bp, Homo sapiens
aaatcattacatcca

SEQ ID NO: 59672 - DNA, 15 bp, Homo sapiens
gaaatcattacatcc

SEQ ID NO: 59673 - DNA, 15 bp, Homo sapiens
agaaatcattacatc

SEQ ID NO: 59674 - DNA, 15 bp, Homo sapiens
aagaaatcattacat

SEQ ID NO: 59675 - DNA, 15 bp, Homo sapiens
gaagaaatcattaca

SEQ ID NO: 59676 - DNA, 15 bp, Homo sapiens
agaagaaatcattac

SEQ ID NO: 59677 - DNA, 15 bp, Homo sapiens
tagaagaaatcatta

SEQ ID NO: 59678 - DNA, 15 bp, Homo sapiens
ttagaagaaatcatt

SEQ ID NO: 59679 - DNA, 15 bp, Homo sapiens
cttagaagaaatcat

SEQ ID NO: 59680 - DNA, 15 bp, Homo sapiens
tcttagaagaaatca

SEQ ID NO: 59681 - DNA, 15 bp, Homo sapiens
gtcttagaagaaatc

SEQ ID NO: 59682 - DNA, 15 bp, Homo sapiens
tgtcttagaagaaat

SEQ ID NO: 59683 - DNA, 15 bp, Homo sapiens
ttgtcttagaagaaa

SEQ ID NO: 59684 - DNA, 15 bp, Homo sapiens
attgtcttagaagaa

SEQ ID NO: 59685 - DNA, 15 bp, Homo sapiens
cattgtcttagaaga

SEQ ID NO: 59686 - DNA, 15 bp, Homo sapiens
ccattgtcttagaag

SEQ ID NO: 59687 - DNA, 15 bp, Homo sapiens
cccattgtcttagaa

SEQ ID NO: 59688 - DNA, 15 bp, Homo sapiens
gcccattgtcttaga

SEQ ID NO: 59689 - DNA, 15 bp, Homo sapiens
cgcccattgtcttag

SEQ ID NO: 59690 - DNA, 15 bp, Homo sapiens
ccgcccattgtctta

SEQ ID NO: 59691 - DNA, 15 bp, Homo sapiens
tccgcccattgtctt

SEQ ID NO: 59692 - DNA, 15 bp, Homo sapiens
ctccgcccattgtct

SEQ ID NO: 59693 - DNA, 15 bp, Homo sapiens
cctccgcccattgtc

SEQ ID NO: 59694 - DNA, 15 bp, Homo sapiens
acctccgcccattgt

SEQ ID NO: 59695 - DNA, 15 bp, Homo sapiens
cacctccgcccattg

SEQ ID NO: 59696 - DNA, 15 bp, Homo sapiens
acacctccgcccatt

SEQ ID NO: 59697 - DNA, 15 bp, Homo sapiens
tacacctccgcccat

SEQ ID NO: 59698 - DNA, 15 bp, Homo sapiens
ctacacctccgccca

SEQ ID NO: 59699 - DNA, 15 bp, Homo sapiens
actacacctccgccc

SEQ ID NO: 59700 - DNA, 15 bp, Homo sapiens
aactacacctccgcc

SEQ ID NO: 59701 - DNA, 15 bp, Homo sapiens
taactacacctccgc

SEQ ID NO: 59702 - DNA, 15 bp, Homo sapiens
ataactacacctccg

SEQ ID NO: 59703 - DNA, 15 bp, Homo sapiens
aataactacacctcc

SEQ ID NO: 59704 - DNA, 15 bp, Homo sapiens
caataactacacctc

SEQ ID NO: 59705 - DNA, 15 bp, Homo sapiens
gcaataactacacct

SEQ ID NO: 59706 - DNA, 15 bp, Homo sapiens
tgcaataactacacc

SEQ ID NO: 59707 - DNA, 15 bp, Homo sapiens
ctgcaataactacac

SEQ ID NO: 59708 - DNA, 15 bp, Homo sapiens
tctgcaataactaca

SEQ ID NO: 59709 - DNA, 15 bp, Homo sapiens
gtctgcaataactac

SEQ ID NO: 59710 - DNA, 15 bp, Homo sapiens
tgtctgcaataacta

SEQ ID NO: 59711 - DNA, 15 bp, Homo sapiens
atgtctgcaataact

SEQ ID NO: 59712 - DNA, 15 bp, Homo sapiens
gatgtctgcaataac

SEQ ID NO: 59713 - DNA, 15 bp, Homo sapiens
agatgtctgcaataa

SEQ ID NO: 59714 - DNA, 15 bp, Homo sapiens
cagatgtctgcaata

SEQ ID NO: 59715 - DNA, 15 bp, Homo sapiens
tcagatgtctgcaat

SEQ ID NO: 59716 - DNA, 15 bp, Homo sapiens
ttcagatgtctgcaa

SEQ ID NO: 59717 - DNA, 15 bp, Homo sapiens
tttcagatgtctgca

SEQ ID NO: 59718 - DNA, 15 bp, Homo sapiens
atttcagatgtctgc

SEQ ID NO: 59719 - DNA, 15 bp, Homo sapiens
tatttcagatgtctg

SEQ ID NO: 59720 - DNA, 15 bp, Homo sapiens
atatttcagatgtct

SEQ ID NO: 59721 - DNA, 15 bp, Homo sapiens
catatttcagatgtc

SEQ ID NO: 59722 - DNA, 15 bp, Homo sapiens
acatatttcagatgt

SEQ ID NO: 59723 - DNA, 15 bp, Homo sapiens
tacatatttcagatg

SEQ ID NO: 59724 - DNA, 15 bp, Homo sapiens
ttacatatttcagat

SEQ ID NO: 59725 - DNA, 15 bp, Homo sapiens
attacatatttcaga

SEQ ID NO: 59726 - DNA, 15 bp, Homo sapiens
cattacatatttcag

SEQ ID NO: 59727 - DNA, 15 bp, Homo sapiens
acattacatatttca

SEQ ID NO: 59728 - DNA, 15 bp, Homo sapiens
aacattacatatttc

SEQ ID NO: 59729 - DNA, 15 bp, Homo sapiens
aaacattacatattt

SEQ ID NO: 59730 - DNA, 15 bp, Homo sapiens
gaaacattacatatt

SEQ ID NO: 59731 - DNA, 15 bp, Homo sapiens
agaaacattacatat

SEQ ID NO: 59732 - DNA, 15 bp, Homo sapiens
aagaaacattacata

SEQ ID NO: 59733 - DNA, 15 bp, Homo sapiens
gaagaaacattacat

SEQ ID NO: 59734 - DNA, 15 bp, Homo sapiens
ggaagaaacattaca

SEQ ID NO: 59735 - DNA, 15 bp, Homo sapiens
tggaagaaacattac

SEQ ID NO: 59736 - DNA, 15 bp, Homo sapiens
ctggaagaaacatta

SEQ ID NO: 59737 - DNA, 15 bp, Homo sapiens
tctggaagaaacatt

SEQ ID NO: 59738 - DNA, 15 bp, Homo sapiens
atctggaagaaacat

SEQ ID NO: 59739 - DNA, 15 bp, Homo sapiens
aatctggaagaaaca

SEQ ID NO: 59740 - DNA, 15 bp, Homo sapiens
gaatctggaagaaac

SEQ ID NO: 59741 - DNA, 15 bp, Homo sapiens
agaatctggaagaaa

SEQ ID NO: 59742 - DNA, 15 bp, Homo sapiens
cagaatctggaagaa

SEQ ID NO: 59743 - DNA, 15 bp, Homo sapiens
ccagaatctggaaga

SEQ ID NO: 59744 - DNA, 15 bp, Homo sapiens
tccagaatctggaag

SEQ ID NO: 59745 - DNA, 15 bp, Homo sapiens
ttccagaatctggaa

SEQ ID NO: 59746 - DNA, 15 bp, Homo sapiens
tttccagaatctgga

SEQ ID NO: 59747 - DNA, 15 bp, Homo sapiens
atttccagaatctgg

SEQ ID NO: 59748 - DNA, 15 bp, Homo sapiens
aatttccagaatctg

SEQ ID NO: 59749 - DNA, 15 bp, Homo sapiens
gaatttccagaatct

SEQ ID NO: 59750 - DNA, 15 bp, Homo sapiens
agaatttccagaatc

SEQ ID NO: 59751 - DNA, 15 bp, Homo sapiens
gagaatttccagaat

SEQ ID NO: 59752 - DNA, 15 bp, Homo sapiens
agagaatttccagaa

SEQ ID NO: 59753 - DNA, 15 bp, Homo sapiens
aagagaatttccaga

SEQ ID NO: 59754 - DNA, 15 bp, Homo sapiens
taagagaatttccag

SEQ ID NO: 59755 - DNA, 15 bp, Homo sapiens
ataagagaatttcca

SEQ ID NO: 59756 - DNA, 15 bp, Homo sapiens
aataagagaatttcc

SEQ ID NO: 59757 - DNA, 15 bp, Homo sapiens
gaataagagaatttc

SEQ ID NO: 59758 - DNA, 15 bp, Homo sapiens
agaataagagaattt

SEQ ID NO: 59759 - DNA, 15 bp, Homo sapiens
gagaataagagaatt

SEQ ID NO: 59760 - DNA, 15 bp, Homo sapiens
agagaataagagaat

SEQ ID NO: 59761 - DNA, 15 bp, Homo sapiens
cagagaataagagaa

SEQ ID NO: 59762 - DNA, 15 bp, Homo sapiens
acagagaataagaga

SEQ ID NO: 59763 - DNA, 15 bp, Homo sapiens
cacagagaataagag

SEQ ID NO: 59764 - DNA, 15 bp, Homo sapiens
ccacagagaataaga

SEQ ID NO: 59765 - DNA, 15 bp, Homo sapiens
accacagagaataag

SEQ ID NO: 59766 - DNA, 15 bp, Homo sapiens
aaccacagagaataa

SEQ ID NO: 59767 - DNA, 15 bp, Homo sapiens
caaccacagagaata

SEQ ID NO: 59768 - DNA, 15 bp, Homo sapiens
ccaaccacagagaat

SEQ ID NO: 59769 - DNA, 15 bp, Homo sapiens
accaaccacagagaa

SEQ ID NO: 59770 - DNA, 15 bp, Homo sapiens
caccaaccacagaga

SEQ ID NO: 59771 - DNA, 15 bp, Homo sapiens
ccaccaaccacagag

SEQ ID NO: 59772 - DNA, 15 bp, Homo sapiens
accaccaaccacaga

SEQ ID NO: 59773 - DNA, 15 bp, Homo sapiens
caccaccaaccacag

SEQ ID NO: 59774 - DNA, 15 bp, Homo sapiens
ccaccaccaaccaca

SEQ ID NO: 59775 - DNA, 15 bp, Homo sapiens
accaccaccaaccac

SEQ ID NO: 59776 - DNA, 15 bp, Homo sapiens
caccaccaccaacca

SEQ ID NO: 59777 - DNA, 15 bp, Homo sapiens
ccaccaccaccaacc

SEQ ID NO: 59778 - DNA, 15 bp, Homo sapiens
accaccaccaccaac

SEQ ID NO: 59779 - DNA, 15 bp, Homo sapiens
caccaccaccaccaa

SEQ ID NO: 59780 - DNA, 15 bp, Homo sapiens
ccaccaccaccacca

SEQ ID NO: 59781 - DNA, 15 bp, Homo sapiens
cccaccaccaccacc

SEQ ID NO: 59782 - DNA, 15 bp, Homo sapiens
tcccaccaccaccac

SEQ ID NO: 59783 - DNA, 15 bp, Homo sapiens
atcccaccaccacca

SEQ ID NO: 59784 - DNA, 15 bp, Homo sapiens
catcccaccaccacc

SEQ ID NO: 59785 - DNA, 15 bp, Homo sapiens
acatcccaccaccac

SEQ ID NO: 59786 - DNA, 15 bp, Homo sapiens
cacatcccaccacca

SEQ ID NO: 59787 - DNA, 15 bp, Homo sapiens
acacatcccaccacc

SEQ ID NO: 59788 - DNA, 15 bp, Homo sapiens
cacacatcccaccac

SEQ ID NO: 59789 - DNA, 15 bp, Homo sapiens
acacacatcccacca

SEQ ID NO: 59790 - DNA, 15 bp, Homo sapiens
cacacacatcccacc

SEQ ID NO: 59791 - DNA, 15 bp, Homo sapiens
acacacacatcccac

SEQ ID NO: 59792 - DNA, 15 bp, Homo sapiens
cacacacacatccca

SEQ ID NO: 59793 - DNA, 15 bp, Homo sapiens
acacacacacatccc

SEQ ID NO: 59794 - DNA, 15 bp, Homo sapiens
cacacacacacatcc

SEQ ID NO: 59795 - DNA, 15 bp, Homo sapiens
acacacacacacatc

SEQ ID NO: 59796 - DNA, 15 bp, Homo sapiens
ctacacacacacaca

SEQ ID NO: 59797 - DNA, 15 bp, Homo sapiens
cctacacacacacac

SEQ ID NO: 59798 - DNA, 15 bp, Homo sapiens
ccctacacacacaca

SEQ ID NO: 59799 - DNA, 15 bp, Homo sapiens
tccctacacacacac

SEQ ID NO: 59800 - DNA, 15 bp, Homo sapiens
atccctacacacaca

SEQ ID NO: 59801 - DNA, 15 bp, Homo sapiens
gatccctacacacac

SEQ ID NO: 59802 - DNA, 15 bp, Homo sapiens
tgatccctacacaca

SEQ ID NO: 59803 - DNA, 15 bp, Homo sapiens
ctgatccctacacac

SEQ ID NO: 59804 - DNA, 15 bp, Homo sapiens
cctgatccctacaca

SEQ ID NO: 59805 - DNA, 15 bp, Homo sapiens
tcctgatccctacac

SEQ ID NO: 59806 - DNA, 15 bp, Homo sapiens
atcctgatccctaca

SEQ ID NO: 59807 - DNA, 15 bp, Homo sapiens
catcctgatccctac

SEQ ID NO: 59808 - DNA, 15 bp, Homo sapiens
gcatcctgatcccta

SEQ ID NO: 59809 - DNA, 15 bp, Homo sapiens
cgcatcctgatccct

SEQ ID NO: 59810 - DNA, 15 bp, Homo sapiens
ccgcatcctgatccc

SEQ ID NO: 59811 - DNA, 15 bp, Homo sapiens
cccgcatcctgatcc

SEQ ID NO: 59812 - DNA, 15 bp, Homo sapiens
tcccgcatcctgatc

SEQ ID NO: 59813 - DNA, 15 bp, Homo sapiens
ctcccgcatcctgat

SEQ ID NO: 59814 - DNA, 15 bp, Homo sapiens
cctcccgcatcctga

SEQ ID NO: 59815 - DNA, 15 bp, Homo sapiens
tcctcccgcatcctg

SEQ ID NO: 59816 - DNA, 15 bp, Homo sapiens
ctcctcccgcatcct

SEQ ID NO: 59817 - DNA, 15 bp, Homo sapiens
gctcctcccgcatcc

SEQ ID NO: 59818 - DNA, 15 bp, Homo sapiens
agctcctcccgcatc

SEQ ID NO: 59819 - DNA, 15 bp, Homo sapiens
cagctcctcccgcat

SEQ ID NO: 59820 - DNA, 15 bp, Homo sapiens
ccagctcctcccgca

SEQ ID NO: 59821 - DNA, 15 bp, Homo sapiens
cccagctcctcccgc

SEQ ID NO: 59822 - DNA, 15 bp, Homo sapiens
acccagctcctcccg

SEQ ID NO: 59823 - DNA, 15 bp, Homo sapiens
aacccagctcctccc

SEQ ID NO: 59824 - DNA, 15 bp, Homo sapiens
gaacccagctcctcc

SEQ ID NO: 59825 - DNA, 15 bp, Homo sapiens
agaacccagctcctc

SEQ ID NO: 59826 - DNA, 15 bp, Homo sapiens
cagaacccagctcct

SEQ ID NO: 59827 - DNA, 15 bp, Homo sapiens
gcagaacccagctcc

SEQ ID NO: 59828 - DNA, 15 bp, Homo sapiens
agcagaacccagctc

SEQ ID NO: 59829 - DNA, 15 bp, Homo sapiens
aagcagaacccagct

SEQ ID NO: 59830 - DNA, 15 bp, Homo sapiens
caagcagaacccagc

SEQ ID NO: 59831 - DNA, 15 bp, Homo sapiens
acaagcagaacccag

SEQ ID NO: 59832 - DNA, 15 bp, Homo sapiens
tacaagcagaaccca

SEQ ID NO: 59833 - DNA, 15 bp, Homo sapiens
atacaagcagaaccc

SEQ ID NO: 59834 - DNA, 15 bp, Homo sapiens
aatacaagcagaacc

SEQ ID NO: 59835 - DNA, 15 bp, Homo sapiens
caatacaagcagaac

SEQ ID NO: 59836 - DNA, 15 bp, Homo sapiens
ccaatacaagcagaa

SEQ ID NO: 59837 - DNA, 15 bp, Homo sapiens
accaatacaagcaga

SEQ ID NO: 59838 - DNA, 15 bp, Homo sapiens
aaccaatacaagcag

SEQ ID NO: 59839 - DNA, 15 bp, Homo sapiens
gaaccaatacaagca

SEQ ID NO: 59840 - DNA, 15 bp, Homo sapiens
agaaccaatacaagc

SEQ ID NO: 59841 - DNA, 15 bp, Homo sapiens
gagaaccaatacaag

SEQ ID NO: 59842 - DNA, 15 bp, Homo sapiens
agagaaccaatacaa

SEQ ID NO: 59843 - DNA, 15 bp, Homo sapiens
cagagaaccaataca

SEQ ID NO: 59844 - DNA, 15 bp, Homo sapiens
acagagaaccaatac

SEQ ID NO: 59845 - DNA, 15 bp, Homo sapiens
aacagagaaccaata

SEQ ID NO: 59846 - DNA, 15 bp, Homo sapiens
aaacagagaaccaat

SEQ ID NO: 59847 - DNA, 15 bp, Homo sapiens
aaaacagagaaccaa

SEQ ID NO: 59848 - DNA, 15 bp, Homo sapiens
caaaacagagaacca

SEQ ID NO: 59849 - DNA, 15 bp, Homo sapiens
gcaaaacagagaacc

SEQ ID NO: 59850 - DNA, 15 bp, Homo sapiens
tgcaaaacagagaac

SEQ ID NO: 59851 - DNA, 15 bp, Homo sapiens
atgcaaaacagagaa

SEQ ID NO: 59852 - DNA, 15 bp, Homo sapiens
aatgcaaaacagaga

SEQ ID NO: 59853 - DNA, 15 bp, Homo sapiens
caatgcaaaacagag

SEQ ID NO: 59854 - DNA, 15 bp, Homo sapiens
tcaatgcaaaacaga

SEQ ID NO: 59855 - DNA, 15 bp, Homo sapiens
ttcaatgcaaaacag

SEQ ID NO: 59856 - DNA, 15 bp, Homo sapiens
attcaatgcaaaaca

SEQ ID NO: 59857 - DNA, 15 bp, Homo sapiens
tattcaatgcaaaac

SEQ ID NO: 59858 - DNA, 15 bp, Homo sapiens
ctattcaatgcaaaa

SEQ ID NO: 59859 - DNA, 15 bp, Homo sapiens
actattcaatgcaaa

SEQ ID NO: 59860 - DNA, 15 bp, Homo sapiens
cactattcaatgcaa

SEQ ID NO: 59861 - DNA, 15 bp, Homo sapiens
acactattcaatgca

SEQ ID NO: 59862 - DNA, 15 bp, Homo sapiens
cacactattcaatgc

SEQ ID NO: 59863 - DNA, 15 bp, Homo sapiens
acacactattcaatg

SEQ ID NO: 59864 - DNA, 15 bp, Homo sapiens
aacacactattcaat

SEQ ID NO: 59865 - DNA, 15 bp, Homo sapiens
aaacacactattcaa

SEQ ID NO: 59866 - DNA, 15 bp, Homo sapiens
gaaacacactattca

SEQ ID NO: 59867 - DNA, 15 bp, Homo sapiens
ggaaacacactattc

SEQ ID NO: 59868 - DNA, 15 bp, Homo sapiens
aggaaacacactatt

SEQ ID NO: 59869 - DNA, 15 bp, Homo sapiens
aaggaaacacactat

SEQ ID NO: 59870 - DNA, 15 bp, Homo sapiens
caaggaaacacacta

SEQ ID NO: 59871 - DNA, 15 bp, Homo sapiens
acaaggaaacacact

SEQ ID NO: 59872 - DNA, 15 bp, Homo sapiens
tacaaggaaacacac

SEQ ID NO: 59873 - DNA, 15 bp, Homo sapiens
atacaaggaaacaca

SEQ ID NO: 59874 - DNA, 15 bp, Homo sapiens
catacaaggaaacac

SEQ ID NO: 59875 - DNA, 15 bp, Homo sapiens
ccatacaaggaaaca

SEQ ID NO: 59876 - DNA, 15 bp, Homo sapiens
gccatacaaggaaac

SEQ ID NO: 59877 - DNA, 15 bp, Homo sapiens
agccatacaaggaaa

SEQ ID NO: 59878 - DNA, 15 bp, Homo sapiens
tagccatacaaggaa

SEQ ID NO: 59879 - DNA, 15 bp, Homo sapiens
atagccatacaagga

SEQ ID NO: 59880 - DNA, 15 bp, Homo sapiens
gatagccatacaagg

SEQ ID NO: 59881 - DNA, 15 bp, Homo sapiens
agatagccatacaag

SEQ ID NO: 59882 - DNA, 15 bp, Homo sapiens
tagatagccatacaa

SEQ ID NO: 59883 - DNA, 15 bp, Homo sapiens
atagatagccataca

SEQ ID NO: 59884 - DNA, 15 bp, Homo sapiens
tatagatagccatac

SEQ ID NO: 59885 - DNA, 15 bp, Homo sapiens
ctatagatagccata

SEQ ID NO: 59886 - DNA, 15 bp, Homo sapiens
gctatagatagccat

SEQ ID NO: 59887 - DNA, 15 bp, Homo sapiens
agctatagatagcca

SEQ ID NO: 59888 - DNA, 15 bp, Homo sapiens
aagctatagatagcc

SEQ ID NO: 59889 - DNA, 15 bp, Homo sapiens
aaagctatagatagc

SEQ ID NO: 59890 - DNA, 15 bp, Homo sapiens
aaaagctatagatag

SEQ ID NO: 59891 - DNA, 15 bp, Homo sapiens
gaaaagctatagata

SEQ ID NO: 59892 - DNA, 15 bp, Homo sapiens
tgaaaagctatagat

SEQ ID NO: 59893 - DNA, 15 bp, Homo sapiens
ttgaaaagctataga

SEQ ID NO: 59894 - DNA, 15 bp, Homo sapiens
cttgaaaagctatag

SEQ ID NO: 59895 - DNA, 15 bp, Homo sapiens
ccttgaaaagctata

SEQ ID NO: 59896 - DNA, 15 bp, Homo sapiens
accttgaaaagctat

SEQ ID NO: 59897 - DNA, 15 bp, Homo sapiens
gaccttgaaaagcta

SEQ ID NO: 59898 - DNA, 15 bp, Homo sapiens
tgaccttgaaaagct

SEQ ID NO: 59899 - DNA, 15 bp, Homo sapiens
gtgaccttgaaaagc

SEQ ID NO: 59900 - DNA, 15 bp, Homo sapiens
ggtgaccttgaaaag

SEQ ID NO: 59901 - DNA, 15 bp, Homo sapiens
tggtgaccttgaaaa

SEQ ID NO: 59902 - DNA, 15 bp, Homo sapiens
ctggtgaccttgaaa

SEQ ID NO: 59903 - DNA, 15 bp, Homo sapiens
tctggtgaccttgaa

SEQ ID NO: 59904 - DNA, 15 bp, Homo sapiens
ttctggtgaccttga

SEQ ID NO: 59905 - DNA, 15 bp, Homo sapiens
tttctggtgaccttg

SEQ ID NO: 59906 - DNA, 15 bp, Homo sapiens
atttctggtgacctt

SEQ ID NO: 59907 - DNA, 15 bp, Homo sapiens
aatttctggtgacct

SEQ ID NO: 59908 - DNA, 15 bp, Homo sapiens
taatttctggtgacc

SEQ ID NO: 59909 - DNA, 15 bp, Homo sapiens
ataatttctggtgac

SEQ ID NO: 59910 - DNA, 15 bp, Homo sapiens
gataatttctggtga

SEQ ID NO: 59911 - DNA, 15 bp, Homo sapiens
ggataatttctggtg

SEQ ID NO: 59912 - DNA, 15 bp, Homo sapiens
aggataatttctggt

SEQ ID NO: 59913 - DNA, 15 bp, Homo sapiens
caggataatttctgg

SEQ ID NO: 59914 - DNA, 15 bp, Homo sapiens
acaggataatttctg

SEQ ID NO: 59915 - DNA, 15 bp, Homo sapiens
aacaggataatttct

SEQ ID NO: 59916 - DNA, 15 bp, Homo sapiens
aaacaggataatttc

SEQ ID NO: 59917 - DNA, 15 bp, Homo sapiens
aaaacaggataattt

SEQ ID NO: 59918 - DNA, 15 bp, Homo sapiens
aaaaacaggataatt

SEQ ID NO: 59919 - DNA, 15 bp, Homo sapiens
gaaaaacaggataat

SEQ ID NO: 59920 - DNA, 15 bp, Homo sapiens
tgaaaaacaggataa

SEQ ID NO: 59921 - DNA, 15 bp, Homo sapiens
gtgaaaaacaggata

SEQ ID NO: 59922 - DNA, 15 bp, Homo sapiens
ggtgaaaaacaggat

SEQ ID NO: 59923 - DNA, 15 bp, Homo sapiens
aggtgaaaaacagga

SEQ ID NO: 59924 - DNA, 15 bp, Homo sapiens
aaggtgaaaaacagg

SEQ ID NO: 59925 - DNA, 15 bp, Homo sapiens
gaaggtgaaaaacag

SEQ ID NO: 59926 - DNA, 15 bp, Homo sapiens
agaaggtgaaaaaca

SEQ ID NO: 59927 - DNA, 15 bp, Homo sapiens
tagaaggtgaaaaac

SEQ ID NO: 59928 - DNA, 15 bp, Homo sapiens
ttagaaggtgaaaaa

SEQ ID NO: 59929 - DNA, 15 bp, Homo sapiens
tttagaaggtgaaaa

SEQ ID NO: 59930 - DNA, 15 bp, Homo sapiens
gtttagaaggtgaaa

SEQ ID NO: 59931 - DNA, 15 bp, Homo sapiens
tgtttagaaggtgaa

SEQ ID NO: 59932 - DNA, 15 bp, Homo sapiens
ttgtttagaaggtga

SEQ ID NO: 59933 - DNA, 15 bp, Homo sapiens
attgtttagaaggtg

SEQ ID NO: 59934 - DNA, 15 bp, Homo sapiens
aattgtttagaaggt

SEQ ID NO: 59935 - DNA, 15 bp, Homo sapiens
taattgtttagaagg

SEQ ID NO: 59936 - DNA, 15 bp, Homo sapiens
ctaattgtttagaag

SEQ ID NO: 59937 - DNA, 15 bp, Homo sapiens
gctaattgtttagaa

SEQ ID NO: 59938 - DNA, 15 bp, Homo sapiens
agctaattgtttaga

SEQ ID NO: 59939 - DNA, 15 bp, Homo sapiens
cagctaattgtttag

SEQ ID NO: 59940 - DNA, 15 bp, Homo sapiens
ccagctaattgttta

SEQ ID NO: 59941 - DNA, 15 bp, Homo sapiens
tccagctaattgttt

SEQ ID NO: 59942 - DNA, 15 bp, Homo sapiens
ttccagctaattgtt

SEQ ID NO: 59943 - DNA, 15 bp, Homo sapiens
attccagctaattgt

SEQ ID NO: 59944 - DNA, 15 bp, Homo sapiens
aattccagctaattg

SEQ ID NO: 59945 - DNA, 15 bp, Homo sapiens
aaattccagctaatt

SEQ ID NO: 59946 - DNA, 15 bp, Homo sapiens
aaaattccagctaat

SEQ ID NO: 59947 - DNA, 15 bp, Homo sapiens
aaaaattccagctaa

SEQ ID NO: 59948 - DNA, 15 bp, Homo sapiens
gaaaaattccagcta

SEQ ID NO: 59949 - DNA, 15 bp, Homo sapiens
tgaaaaattccagct

SEQ ID NO: 59950 - DNA, 15 bp, Homo sapiens
ttgaaaaattccagc

SEQ ID NO: 59951 - DNA, 15 bp, Homo sapiens
tttgaaaaattccag

SEQ ID NO: 59952 - DNA, 15 bp, Homo sapiens
ctttgaaaaattcca

SEQ ID NO: 59953 - DNA, 15 bp, Homo sapiens
cctttgaaaaattcc

SEQ ID NO: 59954 - DNA, 15 bp, Homo sapiens
tcctttgaaaaattc

SEQ ID NO: 59955 - DNA, 15 bp, Homo sapiens
ttcctttgaaaaatt

SEQ ID NO: 59956 - DNA, 15 bp, Homo sapiens
cttcctttgaaaaat

SEQ ID NO: 59957 - DNA, 15 bp, Homo sapiens
tcttcctttgaaaaa

SEQ ID NO: 59958 - DNA, 15 bp, Homo sapiens
gtcttcctttgaaaa

SEQ ID NO: 59959 - DNA, 15 bp, Homo sapiens
agtcttcctttgaaa

SEQ ID NO: 59960 - DNA, 15 bp, Homo sapiens
aagtcttcctttgaa

SEQ ID NO: 59961 - DNA, 15 bp, Homo sapiens
aaagtcttcctttga

SEQ ID NO: 59962 - DNA, 15 bp, Homo sapiens
aaaagtcttcctttg

SEQ ID NO: 59963 - DNA, 15 bp, Homo sapiens
taaaagtcttccttt

SEQ ID NO: 59964 - DNA, 15 bp, Homo sapiens
gtaaaagtcttcctt

SEQ ID NO: 59965 - DNA, 15 bp, Homo sapiens
tgtaaaagtcttcct

SEQ ID NO: 59966 - DNA, 15 bp, Homo sapiens
ttgtaaaagtcttcc

SEQ ID NO: 59967 - DNA, 15 bp, Homo sapiens
tttgtaaaagtcttc

SEQ ID NO: 59968 - DNA, 15 bp, Homo sapiens
ctttgtaaaagtctt

SEQ ID NO: 59969 - DNA, 15 bp, Homo sapiens
tctttgtaaaagtct

SEQ ID NO: 59970 - DNA, 15 bp, Homo sapiens
gtctttgtaaaagtc

SEQ ID NO: 59971 - DNA, 15 bp, Homo sapiens
ggtctttgtaaaagt

SEQ ID NO: 59972 - DNA, 15 bp, Homo sapiens
gggtctttgtaaaag

SEQ ID NO: 59973 - DNA, 15 bp, Homo sapiens
ggggtctttgtaaaa

SEQ ID NO: 59974 - DNA, 15 bp, Homo sapiens
aggggtctttgtaaa

SEQ ID NO: 59975 - DNA, 15 bp, Homo sapiens
taggggtctttgtaa

SEQ ID NO: 59976 - DNA, 15 bp, Homo sapiens
ttaggggtctttgta

SEQ ID NO: 59977 - DNA, 15 bp, Homo sapiens
cttaggggtctttgt

SEQ ID NO: 59978 - DNA, 15 bp, Homo sapiens
gcttaggggtctttg

SEQ ID NO: 59979 - DNA, 15 bp, Homo sapiens
agcttaggggtcttt

SEQ ID NO: 59980 - DNA, 15 bp, Homo sapiens
tagcttaggggtctt

SEQ ID NO: 59981 - DNA, 15 bp, Homo sapiens
ttagcttaggggtct

SEQ ID NO: 59982 - DNA, 15 bp, Homo sapiens
cttagcttaggggtc

SEQ ID NO: 59983 - DNA, 15 bp, Homo sapiens
ccttagcttaggggt

SEQ ID NO: 59984 - DNA, 15 bp, Homo sapiens
accttagcttagggg

SEQ ID NO: 59985 - DNA, 15 bp, Homo sapiens
aaccttagcttaggg

SEQ ID NO: 59986 - DNA, 15 bp, Homo sapiens
aaaccttagcttagg

SEQ ID NO: 59987 - DNA, 15 bp, Homo sapiens
taaaccttagcttag

SEQ ID NO: 59988 - DNA, 15 bp, Homo sapiens
gtaaaccttagctta

SEQ ID NO: 59989 - DNA, 15 bp, Homo sapiens
agtaaaccttagctt

SEQ ID NO: 59990 - DNA, 15 bp, Homo sapiens
gagtaaaccttagct

SEQ ID NO: 59991 - DNA, 15 bp, Homo sapiens
agagtaaaccttagc

SEQ ID NO: 59992 - DNA, 15 bp, Homo sapiens
tagagtaaaccttag

SEQ ID NO: 59993 - DNA, 15 bp, Homo sapiens
ctagagtaaacctta

SEQ ID NO: 59994 - DNA, 15 bp, Homo sapiens
tctagagtaaacctt

SEQ ID NO: 59995 - DNA, 15 bp, Homo sapiens
ttctagagtaaacct

SEQ ID NO: 59996 - DNA, 15 bp, Homo sapiens
tttctagagtaaacc

SEQ ID NO: 59997 - DNA, 15 bp, Homo sapiens
ctttctagagtaaac

SEQ ID NO: 59998 - DNA, 15 bp, Homo sapiens
cctttctagagtaaa

SEQ ID NO: 59999 - DNA, 15 bp, Homo sapiens
tcctttctagagtaa

SEQ ID NO: 60000 - DNA, 15 bp, Homo sapiens
atcctttctagagta

SEQ ID NO: 60001 - DNA, 15 bp, Homo sapiens
catcctttctagagt

SEQ ID NO: 60002 - DNA, 15 bp, Homo sapiens
acatcctttctagag

SEQ ID NO: 60003 - DNA, 15 bp, Homo sapiens
gacatcctttctaga

SEQ ID NO: 60004 - DNA, 15 bp, Homo sapiens
agacatcctttctag

SEQ ID NO: 60005 - DNA, 15 bp, Homo sapiens
aagacatcctttcta

SEQ ID NO: 60006 - DNA, 15 bp, Homo sapiens
taagacatcctttct

SEQ ID NO: 60007 - DNA, 15 bp, Homo sapiens
ttaagacatcctttc

SEQ ID NO: 60008 - DNA, 15 bp, Homo sapiens
cttaagacatccttt

SEQ ID NO: 60009 - DNA, 15 bp, Homo sapiens
tcttaagacatcctt

SEQ ID NO: 60010 - DNA, 15 bp, Homo sapiens
gtcttaagacatcct

SEQ ID NO: 60011 - DNA, 15 bp, Homo sapiens
tgtcttaagacatcc

SEQ ID NO: 60012 - DNA, 15 bp, Homo sapiens
ctgtcttaagacatc

SEQ ID NO: 60013 - DNA, 15 bp, Homo sapiens
cctgtcttaagacat

SEQ ID NO: 60014 - DNA, 15 bp, Homo sapiens
ccctgtcttaagaca

SEQ ID NO: 60015 - DNA, 15 bp, Homo sapiens
gccctgtcttaagac

SEQ ID NO: 60016 - DNA, 15 bp, Homo sapiens
tgccctgtcttaaga

SEQ ID NO: 60017 - DNA, 15 bp, Homo sapiens
gtgccctgtcttaag

SEQ ID NO: 60018 - DNA, 15 bp, Homo sapiens
tgtgccctgtcttaa

SEQ ID NO: 60019 - DNA, 15 bp, Homo sapiens
ctgtgccctgtctta

SEQ ID NO: 60020 - DNA, 15 bp, Homo sapiens
cctgtgccctgtctt

SEQ ID NO: 60021 - DNA, 15 bp, Homo sapiens
tcctgtgccctgtct

SEQ ID NO: 60022 - DNA, 15 bp, Homo sapiens
ctcctgtgccctgtc

SEQ ID NO: 60023 - DNA, 15 bp, Homo sapiens
actcctgtgccctgt

SEQ ID NO: 60024 - DNA, 15 bp, Homo sapiens
aactcctgtgccctg

SEQ ID NO: 60025 - DNA, 15 bp, Homo sapiens
gaactcctgtgccct

SEQ ID NO: 60026 - DNA, 15 bp, Homo sapiens
tgaactcctgtgccc

SEQ ID NO: 60027 - DNA, 15 bp, Homo sapiens
ctgaactcctgtgcc

SEQ ID NO: 60028 - DNA, 15 bp, Homo sapiens
tctgaactcctgtgc

SEQ ID NO: 60029 - DNA, 15 bp, Homo sapiens
ctctgaactcctgtg

SEQ ID NO: 60030 - DNA, 15 bp, Homo sapiens
cctctgaactcctgt

SEQ ID NO: 60031 - DNA, 15 bp, Homo sapiens
gcctctgaactcctg

SEQ ID NO: 60032 - DNA, 15 bp, Homo sapiens
tgcctctgaactcct

SEQ ID NO: 60033 - DNA, 15 bp, Homo sapiens
atgcctctgaactcc

SEQ ID NO: 60034 - DNA, 15 bp, Homo sapiens
aatgcctctgaactc

SEQ ID NO: 60035 - DNA, 15 bp, Homo sapiens
taatgcctctgaact

SEQ ID NO: 60036 - DNA, 15 bp, Homo sapiens
ttaatgcctctgaac

SEQ ID NO: 60037 - DNA, 15 bp, Homo sapiens
cttaatgcctctgaa

SEQ ID NO: 60038 - DNA, 15 bp, Homo sapiens
tcttaatgcctctga

SEQ ID NO: 60039 - DNA, 15 bp, Homo sapiens
ctcttaatgcctctg

SEQ ID NO: 60040 - DNA, 15 bp, Homo sapiens
gctcttaatgcctct

SEQ ID NO: 60041 - DNA, 15 bp, Homo sapiens
agctcttaatgcctc

SEQ ID NO: 60042 - DNA, 15 bp, Homo sapiens
cagctcttaatgcct

SEQ ID NO: 60043 - DNA, 15 bp, Homo sapiens
ccagctcttaatgcc

SEQ ID NO: 60044 - DNA, 15 bp, Homo sapiens
accagctcttaatgc

SEQ ID NO: 60045 - DNA, 15 bp, Homo sapiens
caccagctcttaatg

SEQ ID NO: 60046 - DNA, 15 bp, Homo sapiens
gcaccagctcttaat

SEQ ID NO: 60047 - DNA, 15 bp, Homo sapiens
ggcaccagctcttaa

SEQ ID NO: 60048 - DNA, 15 bp, Homo sapiens
aggcaccagctctta

SEQ ID NO: 60049 - DNA, 15 bp, Homo sapiens
caggcaccagctctt

SEQ ID NO: 60050 - DNA, 15 bp, Homo sapiens
acaggcaccagctct

SEQ ID NO: 60051 - DNA, 15 bp, Homo sapiens
aacaggcaccagctc

SEQ ID NO: 60052 - DNA, 15 bp, Homo sapiens
caacaggcaccagct

SEQ ID NO: 60053 - DNA, 15 bp, Homo sapiens
acaacaggcaccagc

SEQ ID NO: 60054 - DNA, 15 bp, Homo sapiens
gacaacaggcaccag

SEQ ID NO: 60055 - DNA, 15 bp, Homo sapiens
tgacaacaggcacca

SEQ ID NO: 60056 - DNA, 15 bp, Homo sapiens
atgacaacaggcacc

SEQ ID NO: 60057 - DNA, 15 bp, Homo sapiens
catgacaacaggcac

SEQ ID NO: 60058 - DNA, 15 bp, Homo sapiens
acatgacaacaggca

SEQ ID NO: 60059 - DNA, 15 bp, Homo sapiens
tacatgacaacaggc

SEQ ID NO: 60060 - DNA, 15 bp, Homo sapiens
ctacatgacaacagg

SEQ ID NO: 60061 - DNA, 15 bp, Homo sapiens
actacatgacaacag

SEQ ID NO: 60062 - DNA, 15 bp, Homo sapiens
cactacatgacaaca

SEQ ID NO: 60063 - DNA, 15 bp, Homo sapiens
tcactacatgacaac

SEQ ID NO: 60064 - DNA, 15 bp, Homo sapiens
ctcactacatgacaa

SEQ ID NO: 60065 - DNA, 15 bp, Homo sapiens
actcactacatgaca

SEQ ID NO: 60066 - DNA, 15 bp, Homo sapiens
tactcactacatgac

SEQ ID NO: 60067 - DNA, 15 bp, Homo sapiens
atactcactacatga

SEQ ID NO: 60068 - DNA, 15 bp, Homo sapiens
catactcactacatg

SEQ ID NO: 60069 - DNA, 15 bp, Homo sapiens
acatactcactacat

SEQ ID NO: 60070 - DNA, 15 bp, Homo sapiens
cacatactcactaca

SEQ ID NO: 60071 - DNA, 15 bp, Homo sapiens
gcacatactcactac

SEQ ID NO: 60072 - DNA, 15 bp, Homo sapiens
ggcacatactcacta

SEQ ID NO: 60073 - DNA, 15 bp, Homo sapiens
aggcacatactcact

SEQ ID NO: 60074 - DNA, 15 bp, Homo sapiens
taggcacatactcac

SEQ ID NO: 60075 - DNA, 15 bp, Homo sapiens
gtaggcacatactca

SEQ ID NO: 60076 - DNA, 15 bp, Homo sapiens
tgtaggcacatactc

SEQ ID NO: 60077 - DNA, 15 bp, Homo sapiens
atgtaggcacatact

SEQ ID NO: 60078 - DNA, 15 bp, Homo sapiens
catgtaggcacatac

SEQ ID NO: 60079 - DNA, 15 bp, Homo sapiens
ccatgtaggcacata

SEQ ID NO: 60080 - DNA, 15 bp, Homo sapiens
accatgtaggcacat

SEQ ID NO: 60081 - DNA, 15 bp, Homo sapiens
taccatgtaggcaca

SEQ ID NO: 60082 - DNA, 15 bp, Homo sapiens
ttaccatgtaggcac

SEQ ID NO: 60083 - DNA, 15 bp, Homo sapiens
tttaccatgtaggca

SEQ ID NO: 60084 - DNA, 15 bp, Homo sapiens
ctttaccatgtaggc

SEQ ID NO: 60085 - DNA, 15 bp, Homo sapiens
gctttaccatgtagg

SEQ ID NO: 60086 - DNA, 15 bp, Homo sapiens
agctttaccatgtag

SEQ ID NO: 60087 - DNA, 15 bp, Homo sapiens
aagctttaccatgta

SEQ ID NO: 60088 - DNA, 15 bp, Homo sapiens
aaagctttaccatgt

SEQ ID NO: 60089 - DNA, 15 bp, Homo sapiens
caaagctttaccatg

SEQ ID NO: 60090 - DNA, 15 bp, Homo sapiens
tcaaagctttaccat

SEQ ID NO: 60091 - DNA, 15 bp, Homo sapiens
gtcaaagctttacca

SEQ ID NO: 60092 - DNA, 15 bp, Homo sapiens
cgtcaaagctttacc

SEQ ID NO: 60093 - DNA, 15 bp, Homo sapiens
acgtcaaagctttac

SEQ ID NO: 60094 - DNA, 15 bp, Homo sapiens
cacgtcaaagcttta

SEQ ID NO: 60095 - DNA, 15 bp, Homo sapiens
tcacgtcaaagcttt

SEQ ID NO: 60096 - DNA, 15 bp, Homo sapiens
ttcacgtcaaagctt

SEQ ID NO: 60097 - DNA, 15 bp, Homo sapiens
gttcacgtcaaagct

SEQ ID NO: 60098 - DNA, 15 bp, Homo sapiens
ggttcacgtcaaagc

SEQ ID NO: 60099 - DNA, 15 bp, Homo sapiens
aggttcacgtcaaag

SEQ ID NO: 60100 - DNA, 15 bp, Homo sapiens
gaggttcacgtcaaa

SEQ ID NO: 60101 - DNA, 15 bp, Homo sapiens
tgaggttcacgtcaa

SEQ ID NO: 60102 - DNA, 15 bp, Homo sapiens
ttgaggttcacgtca

SEQ ID NO: 60103 - DNA, 15 bp, Homo sapiens
cttgaggttcacgtc

SEQ ID NO: 60104 - DNA, 15 bp, Homo sapiens
acttgaggttcacgt

SEQ ID NO: 60105 - DNA, 15 bp, Homo sapiens
aacttgaggttcacg

SEQ ID NO: 60106 - DNA, 15 bp, Homo sapiens
gaacttgaggttcac

SEQ ID NO: 60107 - DNA, 15 bp, Homo sapiens
tgaacttgaggttca

SEQ ID NO: 60108 - DNA, 15 bp, Homo sapiens
ctgaacttgaggttc

SEQ ID NO: 60109 - DNA, 15 bp, Homo sapiens
cctgaacttgaggtt

SEQ ID NO: 60110 - DNA, 15 bp, Homo sapiens
ccctgaacttgaggt

SEQ ID NO: 60111 - DNA, 15 bp, Homo sapiens
accctgaacttgagg

SEQ ID NO: 60112 - DNA, 15 bp, Homo sapiens
gaccctgaacttgag

SEQ ID NO: 60113 - DNA, 15 bp, Homo sapiens
ggaccctgaacttga

SEQ ID NO: 60114 - DNA, 15 bp, Homo sapiens
tggaccctgaacttg

SEQ ID NO: 60115 - DNA, 15 bp, Homo sapiens
ttggaccctgaactt

SEQ ID NO: 60116 - DNA, 15 bp, Homo sapiens
tttggaccctgaact

SEQ ID NO: 60117 - DNA, 15 bp, Homo sapiens
ttttggaccctgaac

SEQ ID NO: 60118 - DNA, 15 bp, Homo sapiens
attttggaccctgaa

SEQ ID NO: 60119 - DNA, 15 bp, Homo sapiens
gattttggaccctga

SEQ ID NO: 60120 - DNA, 15 bp, Homo sapiens
agattttggaccctg

SEQ ID NO: 60121 - DNA, 15 bp, Homo sapiens
cagattttggaccct

SEQ ID NO: 60122 - DNA, 15 bp, Homo sapiens
acagattttggaccc

SEQ ID NO: 60123 - DNA, 15 bp, Homo sapiens
cacagattttggacc

SEQ ID NO: 60124 - DNA, 15 bp, Homo sapiens
acacagattttggac

SEQ ID NO: 60125 - DNA, 15 bp, Homo sapiens
cacacagattttgga

SEQ ID NO: 60126 - DNA, 15 bp, Homo sapiens
gcacacagattttgg

SEQ ID NO: 60127 - DNA, 15 bp, Homo sapiens
ggcacacagattttg

SEQ ID NO: 60128 - DNA, 15 bp, Homo sapiens
aggcacacagatttt

SEQ ID NO: 60129 - DNA, 15 bp, Homo sapiens
aaggcacacagattt

SEQ ID NO: 60130 - DNA, 15 bp, Homo sapiens
aaaggcacacagatt

SEQ ID NO: 60131 - DNA, 15 bp, Homo sapiens
aaaaggcacacagat

SEQ ID NO: 60132 - DNA, 15 bp, Homo sapiens
aaaaaggcacacaga

SEQ ID NO: 60133 - DNA, 15 bp, Homo sapiens
taaaaaggcacacag

SEQ ID NO: 60134 - DNA, 15 bp, Homo sapiens
gtaaaaaggcacaca

SEQ ID NO: 60135 - DNA, 15 bp, Homo sapiens
agtaaaaaggcacac

SEQ ID NO: 60136 - DNA, 15 bp, Homo sapiens
aagtaaaaaggcaca

SEQ ID NO: 60137 - DNA, 15 bp, Homo sapiens
aaagtaaaaaggcac

SEQ ID NO: 60138 - DNA, 15 bp, Homo sapiens
caaagtaaaaaggca

SEQ ID NO: 60139 - DNA, 15 bp, Homo sapiens
gcaaagtaaaaaggc

SEQ ID NO: 60140 - DNA, 15 bp, Homo sapiens
tgcaaagtaaaaagg

SEQ ID NO: 60141 - DNA, 15 bp, Homo sapiens
gtgcaaagtaaaaag

SEQ ID NO: 60142 - DNA, 15 bp, Homo sapiens
tgtgcaaagtaaaaa

SEQ ID NO: 60143 - DNA, 15 bp, Homo sapiens
atgtgcaaagtaaaa

SEQ ID NO: 60144 - DNA, 15 bp, Homo sapiens
gatgtgcaaagtaaa

SEQ ID NO: 60145 - DNA, 15 bp, Homo sapiens
agatgtgcaaagtaa

SEQ ID NO: 60146 - DNA, 15 bp, Homo sapiens
cagatgtgcaaagta

SEQ ID NO: 60147 - DNA, 15 bp, Homo sapiens
gcagatgtgcaaagt

SEQ ID NO: 60148 - DNA, 15 bp, Homo sapiens
tgcagatgtgcaaag

SEQ ID NO: 60149 - DNA, 15 bp, Homo sapiens
atgcagatgtgcaaa

SEQ ID NO: 60150 - DNA, 15 bp, Homo sapiens
aatgcagatgtgcaa

SEQ ID NO: 60151 - DNA, 15 bp, Homo sapiens
aaatgcagatgtgca

SEQ ID NO: 60152 - DNA, 15 bp, Homo sapiens
aaaatgcagatgtgc

SEQ ID NO: 60153 - DNA, 15 bp, Homo sapiens
gaaaatgcagatgtg

SEQ ID NO: 60154 - DNA, 15 bp, Homo sapiens
agaaaatgcagatgt

SEQ ID NO: 60155 - DNA, 15 bp, Homo sapiens
tagaaaatgcagatg

SEQ ID NO: 60156 - DNA, 15 bp, Homo sapiens
atagaaaatgcagat

SEQ ID NO: 60157 - DNA, 15 bp, Homo sapiens
aatagaaaatgcaga

SEQ ID NO: 60158 - DNA, 15 bp, Homo sapiens
gaatagaaaatgcag

SEQ ID NO: 60159 - DNA, 15 bp, Homo sapiens
agaatagaaaatgca

SEQ ID NO: 60160 - DNA, 15 bp, Homo sapiens
tagaatagaaaatgc

SEQ ID NO: 60161 - DNA, 15 bp, Homo sapiens
ctagaatagaaaatg

SEQ ID NO: 60162 - DNA, 15 bp, Homo sapiens
gctagaatagaaaat

SEQ ID NO: 60163 - DNA, 15 bp, Homo sapiens
agctagaatagaaaa

SEQ ID NO: 60164 - DNA, 15 bp, Homo sapiens
aagctagaatagaaa

SEQ ID NO: 60165 - DNA, 15 bp, Homo sapiens
caagctagaatagaa

SEQ ID NO: 60166 - DNA, 15 bp, Homo sapiens
ccaagctagaataga

SEQ ID NO: 60167 - DNA, 15 bp, Homo sapiens
tccaagctagaatag

SEQ ID NO: 60168 - DNA, 15 bp, Homo sapiens
ttccaagctagaata

SEQ ID NO: 60169 - DNA, 15 bp, Homo sapiens
attccaagctagaat

SEQ ID NO: 60170 - DNA, 15 bp, Homo sapiens
gattccaagctagaa

SEQ ID NO: 60171 - DNA, 15 bp, Homo sapiens
agattccaagctaga

SEQ ID NO: 60172 - DNA, 15 bp, Homo sapiens
cagattccaagctag

SEQ ID NO: 60173 - DNA, 15 bp, Homo sapiens
tcagattccaagcta

SEQ ID NO: 60174 - DNA, 15 bp, Homo sapiens
ttcagattccaagct

SEQ ID NO: 60175 - DNA, 15 bp, Homo sapiens
tttcagattccaagc

SEQ ID NO: 60176 - DNA, 15 bp, Homo sapiens
gtttcagattccaag

SEQ ID NO: 60177 - DNA, 15 bp, Homo sapiens
tgtttcagattccaa

SEQ ID NO: 60178 - DNA, 15 bp, Homo sapiens
atgtttcagattcca

SEQ ID NO: 60179 - DNA, 15 bp, Homo sapiens
aatgtttcagattcc

SEQ ID NO: 60180 - DNA, 15 bp, Homo sapiens
caatgtttcagattc

SEQ ID NO: 60181 - DNA, 15 bp, Homo sapiens
tcaatgtttcagatt

SEQ ID NO: 60182 - DNA, 15 bp, Homo sapiens
gtcaatgtttcagat

SEQ ID NO: 60183 - DNA, 15 bp, Homo sapiens
tgtcaatgtttcaga

SEQ ID NO: 60184 - DNA, 15 bp, Homo sapiens
ttgtcaatgtttcag

SEQ ID NO: 60185 - DNA, 15 bp, Homo sapiens
cttgtcaatgtttca

SEQ ID NO: 60186 - DNA, 15 bp, Homo sapiens
tcttgtcaatgtttc

SEQ ID NO: 60187 - DNA, 15 bp, Homo sapiens
ctcttgtcaatgttt

SEQ ID NO: 60188 - DNA, 15 bp, Homo sapiens
gctcttgtcaatgtt

SEQ ID NO: 60189 - DNA, 15 bp, Homo sapiens
agctcttgtcaatgt

SEQ ID NO: 60190 - DNA, 15 bp, Homo sapiens
cagctcttgtcaatg

SEQ ID NO: 60191 - DNA, 15 bp, Homo sapiens
gcagctcttgtcaat

SEQ ID NO: 60192 - DNA, 15 bp, Homo sapiens
ggcagctcttgtcaa

SEQ ID NO: 60193 - DNA, 15 bp, Homo sapiens
aggcagctcttgtca

SEQ ID NO: 60194 - DNA, 15 bp, Homo sapiens
caggcagctcttgtc

SEQ ID NO: 60195 - DNA, 15 bp, Homo sapiens
tcaggcagctcttgt

SEQ ID NO: 60196 - DNA, 15 bp, Homo sapiens
ttcaggcagctcttg

SEQ ID NO: 60197 - DNA, 15 bp, Homo sapiens
tttcaggcagctctt

SEQ ID NO: 60198 - DNA, 15 bp, Homo sapiens
atttcaggcagctct

SEQ ID NO: 60199 - DNA, 15 bp, Homo sapiens
catttcaggcagctc

SEQ ID NO: 60200 - DNA, 15 bp, Homo sapiens
acatttcaggcagct

SEQ ID NO: 60201 - DNA, 15 bp, Homo sapiens
tacatttcaggcagc

SEQ ID NO: 60202 - DNA, 15 bp, Homo sapiens
atacatttcaggcag

SEQ ID NO: 60203 - DNA, 15 bp, Homo sapiens
catacatttcaggca

SEQ ID NO: 60204 - DNA, 15 bp, Homo sapiens
acatacatttcaggc

SEQ ID NO: 60205 - DNA, 15 bp, Homo sapiens
gacatacatttcagg

SEQ ID NO: 60206 - DNA, 15 bp, Homo sapiens
agacatacatttcag

SEQ ID NO: 60207 - DNA, 15 bp, Homo sapiens
cagacatacatttca

SEQ ID NO: 60208 - DNA, 15 bp, Homo sapiens
acagacatacatttc

SEQ ID NO: 60209 - DNA, 15 bp, Homo sapiens
cacagacatacattt

SEQ ID NO: 60210 - DNA, 15 bp, Homo sapiens
ccacagacatacatt

SEQ ID NO: 60211 - DNA, 15 bp, Homo sapiens
accacagacatacat

SEQ ID NO: 60212 - DNA, 15 bp, Homo sapiens
caccacagacataca

SEQ ID NO: 60213 - DNA, 15 bp, Homo sapiens
acaccacagacatac

SEQ ID NO: 60214 - DNA, 15 bp, Homo sapiens
cacaccacagacata

SEQ ID NO: 60215 - DNA, 15 bp, Homo sapiens
tcacaccacagacat

SEQ ID NO: 60216 - DNA, 15 bp, Homo sapiens
atcacaccacagaca

SEQ ID NO: 60217 - DNA, 15 bp, Homo sapiens
aatcacaccacagac

SEQ ID NO: 60218 - DNA, 15 bp, Homo sapiens
taatcacaccacaga

SEQ ID NO: 60219 - DNA, 15 bp, Homo sapiens
ctaatcacaccacag

SEQ ID NO: 60220 - DNA, 15 bp, Homo sapiens
tctaatcacaccaca

SEQ ID NO: 60221 - DNA, 15 bp, Homo sapiens
ctctaatcacaccac

SEQ ID NO: 60222 - DNA, 15 bp, Homo sapiens
actctaatcacacca

SEQ ID NO: 60223 - DNA, 15 bp, Homo sapiens
aactctaatcacacc

SEQ ID NO: 60224 - DNA, 15 bp, Homo sapiens
taactctaatcacac

SEQ ID NO: 60225 - DNA, 15 bp, Homo sapiens
gtaactctaatcaca

SEQ ID NO: 60226 - DNA, 15 bp, Homo sapiens
cgtaactctaatcac

SEQ ID NO: 60227 - DNA, 15 bp, Homo sapiens
tcgtaactctaatca

SEQ ID NO: 60228 - DNA, 15 bp, Homo sapiens
atcgtaactctaatc

SEQ ID NO: 60229 - DNA, 15 bp, Homo sapiens
tatcgtaactctaat

SEQ ID NO: 60230 - DNA, 15 bp, Homo sapiens
ttatcgtaactctaa

SEQ ID NO: 60231 - DNA, 15 bp, Homo sapiens
cttatcgtaactcta

SEQ ID NO: 60232 - DNA, 15 bp, Homo sapiens
gcttatcgtaactct

SEQ ID NO: 60233 - DNA, 15 bp, Homo sapiens
tgcttatcgtaactc

SEQ ID NO: 60234 - DNA, 15 bp, Homo sapiens
ttgcttatcgtaact

SEQ ID NO: 60235 - DNA, 15 bp, Homo sapiens
cttgcttatcgtaac

SEQ ID NO: 60236 - DNA, 15 bp, Homo sapiens
acttgcttatcgtaa

SEQ ID NO: 60237 - DNA, 15 bp, Homo sapiens
gacttgcttatcgta

SEQ ID NO: 60238 - DNA, 15 bp, Homo sapiens
tgacttgcttatcgt

SEQ ID NO: 60239 - DNA, 15 bp, Homo sapiens
ttgacttgcttatcg

SEQ ID NO: 60240 - DNA, 15 bp, Homo sapiens
attgacttgcttatc

SEQ ID NO: 60241 - DNA, 15 bp, Homo sapiens
tattgacttgcttat

SEQ ID NO: 60242 - DNA, 15 bp, Homo sapiens
ctattgacttgctta

SEQ ID NO: 60243 - DNA, 15 bp, Homo sapiens
actattgacttgctt

SEQ ID NO: 60244 - DNA, 15 bp, Homo sapiens
cactattgacttgct

SEQ ID NO: 60245 - DNA, 15 bp, Homo sapiens
tcactattgacttgc

SEQ ID NO: 60246 - DNA, 15 bp, Homo sapiens
ctcactattgacttg

SEQ ID NO: 60247 - DNA, 15 bp, Homo sapiens
tctcactattgactt

SEQ ID NO: 60248 - DNA, 15 bp, Homo sapiens
atctcactattgact

SEQ ID NO: 60249 - DNA, 15 bp, Homo sapiens
catctcactattgac

SEQ ID NO: 60250 - DNA, 15 bp, Homo sapiens
tcatctcactattga

SEQ ID NO: 60251 - DNA, 15 bp, Homo sapiens
gtcatctcactattg

SEQ ID NO: 60252 - DNA, 15 bp, Homo sapiens
ggtcatctcactatt

SEQ ID NO: 60253 - DNA, 15 bp, Homo sapiens
aggtcatctcactat

SEQ ID NO: 60254 - DNA, 15 bp, Homo sapiens
aaggtcatctcacta

SEQ ID NO: 60255 - DNA, 15 bp, Homo sapiens
caaggtcatctcact

SEQ ID NO: 60256 - DNA, 15 bp, Homo sapiens
ccaaggtcatctcac

SEQ ID NO: 60257 - DNA, 15 bp, Homo sapiens
tccaaggtcatctca

SEQ ID NO: 60258 - DNA, 15 bp, Homo sapiens
ctccaaggtcatctc

SEQ ID NO: 60259 - DNA, 15 bp, Homo sapiens
tctccaaggtcatct

SEQ ID NO: 60260 - DNA, 15 bp, Homo sapiens
atctccaaggtcatc

SEQ ID NO: 60261 - DNA, 15 bp, Homo sapiens
catctccaaggtcat

SEQ ID NO: 60262 - DNA, 15 bp, Homo sapiens
acatctccaaggtca

SEQ ID NO: 60263 - DNA, 15 bp, Homo sapiens
aacatctccaaggtc

SEQ ID NO: 60264 - DNA, 15 bp, Homo sapiens
caacatctccaaggt

SEQ ID NO: 60265 - DNA, 15 bp, Homo sapiens
tcaacatctccaagg

SEQ ID NO: 60266 - DNA, 15 bp, Homo sapiens
ttcaacatctccaag

SEQ ID NO: 60267 - DNA, 15 bp, Homo sapiens
gttcaacatctccaa

SEQ ID NO: 60268 - DNA, 15 bp, Homo sapiens
agttcaacatctcca

SEQ ID NO: 60269 - DNA, 15 bp, Homo sapiens
aagttcaacatctcc

SEQ ID NO: 60270 - DNA, 15 bp, Homo sapiens
aaagttcaacatctc

SEQ ID NO: 60271 - DNA, 15 bp, Homo sapiens
aaaagttcaacatct

SEQ ID NO: 60272 - DNA, 15 bp, Homo sapiens
caaaagttcaacatc

SEQ ID NO: 60273 - DNA, 15 bp, Homo sapiens
acaaaagttcaacat

SEQ ID NO: 60274 - DNA, 15 bp, Homo sapiens
cacaaaagttcaaca

SEQ ID NO: 60275 - DNA, 15 bp, Homo sapiens
tcacaaaagttcaac

SEQ ID NO: 60276 - DNA, 15 bp, Homo sapiens
ctcacaaaagttcaa

SEQ ID NO: 60277 - DNA, 15 bp, Homo sapiens
tctcacaaaagttca

SEQ ID NO: 60278 - DNA, 15 bp, Homo sapiens
ctctcacaaaagttc

SEQ ID NO: 60279 - DNA, 15 bp, Homo sapiens
tctctcacaaaagtt

SEQ ID NO: 60280 - DNA, 15 bp, Homo sapiens
ttctctcacaaaagt

SEQ ID NO: 60281 - DNA, 15 bp, Homo sapiens
attctctcacaaaag

SEQ ID NO: 60282 - DNA, 15 bp, Homo sapiens
cattctctcacaaaa

SEQ ID NO: 60283 - DNA, 15 bp, Homo sapiens
tcattctctcacaaa

SEQ ID NO: 60284 - DNA, 15 bp, Homo sapiens
ctcattctctcacaa

SEQ ID NO: 60285 - DNA, 15 bp, Homo sapiens
actcattctctcaca

SEQ ID NO: 60286 - DNA, 15 bp, Homo sapiens
aactcattctctcac

SEQ ID NO: 60287 - DNA, 15 bp, Homo sapiens
caactcattctctca

SEQ ID NO: 60288 - DNA, 15 bp, Homo sapiens
acaactcattctctc

SEQ ID NO: 60289 - DNA, 15 bp, Homo sapiens
aacaactcattctct

SEQ ID NO: 60290 - DNA, 15 bp, Homo sapiens
aaacaactcattctc

SEQ ID NO: 60291 - DNA, 15 bp, Homo sapiens
aaaacaactcattct

SEQ ID NO: 60292 - DNA, 15 bp, Homo sapiens
aaaaacaactcattc

SEQ ID NO: 60293 - DNA, 15 bp, Homo sapiens
aaaaaacaactcatt

SEQ ID NO: 60294 - DNA, 15 bp, Homo sapiens
aaaaaaacaactcat

SEQ ID NO: 60295 - DNA, 15 bp, Homo sapiens
caaaaaaacaactca

SEQ ID NO: 60296 - DNA, 15 bp, Homo sapiens
acaaaaaaacaactc

SEQ ID NO: 60297 - DNA, 15 bp, Homo sapiens
aacaaaaaaacaact

SEQ ID NO: 60298 - DNA, 15 bp, Homo sapiens
aaacaaaaaaacaac

SEQ ID NO: 60299 - DNA, 15 bp, Homo sapiens
aaaacaaaaaaacaa

SEQ ID NO: 60300 - DNA, 15 bp, Homo sapiens
caaaacaaaaaaaca

SEQ ID NO: 60301 - DNA, 15 bp, Homo sapiens
ccaaaacaaaaaaac

SEQ ID NO: 60302 - DNA, 15 bp, Homo sapiens
accaaaacaaaaaaa

SEQ ID NO: 60303 - DNA, 15 bp, Homo sapiens
aaccaaaacaaaaaa

SEQ ID NO: 60304 - DNA, 15 bp, Homo sapiens
aaaccaaaacaaaaa

SEQ ID NO: 60305 - DNA, 15 bp, Homo sapiens
aaaaccaaaacaaaa

SEQ ID NO: 60306 - DNA, 15 bp, Homo sapiens
aaaaaccaaaacaaa

SEQ ID NO: 60307 - DNA, 15 bp, Homo sapiens
taaaaaccaaaacaa

SEQ ID NO: 60308 - DNA, 15 bp, Homo sapiens
ctaaaaaccaaaaca

SEQ ID NO: 60309 - DNA, 15 bp, Homo sapiens
actaaaaaccaaaac

SEQ ID NO: 60310 - DNA, 15 bp, Homo sapiens
tactaaaaaccaaaa

SEQ ID NO: 60311 - DNA, 15 bp, Homo sapiens
gtactaaaaaccaaa

SEQ ID NO: 60312 - DNA, 15 bp, Homo sapiens
agtactaaaaaccaa

SEQ ID NO: 60313 - DNA, 15 bp, Homo sapiens
aagtactaaaaacca

SEQ ID NO: 60314 - DNA, 15 bp, Homo sapiens
aaagtactaaaaacc

SEQ ID NO: 60315 - DNA, 15 bp, Homo sapiens
taaagtactaaaaac

SEQ ID NO: 60316 - DNA, 15 bp, Homo sapiens
ttaaagtactaaaaa

SEQ ID NO: 60317 - DNA, 15 bp, Homo sapiens
gttaaagtactaaaa

SEQ ID NO: 60318 - DNA, 15 bp, Homo sapiens
tgttaaagtactaaa

SEQ ID NO: 60319 - DNA, 15 bp, Homo sapiens
atgttaaagtactaa

SEQ ID NO: 60320 - DNA, 15 bp, Homo sapiens
tatgttaaagtacta

SEQ ID NO: 60321 - DNA, 15 bp, Homo sapiens
ttatgttaaagtact

SEQ ID NO: 60322 - DNA, 15 bp, Homo sapiens
attatgttaaagtac

SEQ ID NO: 60323 - DNA, 15 bp, Homo sapiens
gattatgttaaagta

SEQ ID NO: 60324 - DNA, 15 bp, Homo sapiens
agattatgttaaagt

SEQ ID NO: 60325 - DNA, 15 bp, Homo sapiens
tagattatgttaaag

SEQ ID NO: 60326 - DNA, 15 bp, Homo sapiens
gtagattatgttaaa

SEQ ID NO: 60327 - DNA, 15 bp, Homo sapiens
ggtagattatgttaa

SEQ ID NO: 60328 - DNA, 15 bp, Homo sapiens
aggtagattatgtta

SEQ ID NO: 60329 - DNA, 15 bp, Homo sapiens
aaggtagattatgtt

SEQ ID NO: 60330 - DNA, 15 bp, Homo sapiens
aaaggtagattatgt

SEQ ID NO: 60331 - DNA, 15 bp, Homo sapiens
taaaggtagattatg

SEQ ID NO: 60332 - DNA, 15 bp, Homo sapiens
ctaaaggtagattat

SEQ ID NO: 60333 - DNA, 15 bp, Homo sapiens
actaaaggtagatta

SEQ ID NO: 60334 - DNA, 15 bp, Homo sapiens
aactaaaggtagatt

SEQ ID NO: 60335 - DNA, 15 bp, Homo sapiens
aaactaaaggtagat

SEQ ID NO: 60336 - DNA, 15 bp, Homo sapiens
taaactaaaggtaga

SEQ ID NO: 60337 - DNA, 15 bp, Homo sapiens
ttaaactaaaggtag

SEQ ID NO: 60338 - DNA, 15 bp, Homo sapiens
cttaaactaaaggta

SEQ ID NO: 60339 - DNA, 15 bp, Homo sapiens
acttaaactaaaggt

SEQ ID NO: 60340 - DNA, 15 bp, Homo sapiens
tacttaaactaaagg

SEQ ID NO: 60341 - DNA, 15 bp, Homo sapiens
atacttaaactaaag

SEQ ID NO: 60342 - DNA, 15 bp, Homo sapiens
gatacttaaactaaa

SEQ ID NO: 60343 - DNA, 15 bp, Homo sapiens
cgatacttaaactaa

SEQ ID NO: 60344 - DNA, 15 bp, Homo sapiens
gcgatacttaaacta

SEQ ID NO: 60345 - DNA, 15 bp, Homo sapiens
agcgatacttaaact

SEQ ID NO: 60346 - DNA, 15 bp, Homo sapiens
gagcgatacttaaac

SEQ ID NO: 60347 - DNA, 15 bp, Homo sapiens
tgagcgatacttaaa

SEQ ID NO: 60348 - DNA, 15 bp, Homo sapiens
gtgagcgatacttaa

SEQ ID NO: 60349 - DNA, 15 bp, Homo sapiens
tgtgagcgatactta

SEQ ID NO: 60350 - DNA, 15 bp, Homo sapiens
ctgtgagcgatactt

SEQ ID NO: 60351 - DNA, 15 bp, Homo sapiens
actgtgagcgatact

SEQ ID NO: 60352 - DNA, 15 bp, Homo sapiens
aactgtgagcgatac

SEQ ID NO: 60353 - DNA, 15 bp, Homo sapiens
taactgtgagcgata

SEQ ID NO: 60354 - DNA, 15 bp, Homo sapiens
gtaactgtgagcgat

SEQ ID NO: 60355 - DNA, 15 bp, Homo sapiens
ggtaactgtgagcga

SEQ ID NO: 60356 - DNA, 15 bp, Homo sapiens
aggtaactgtgagcg

SEQ ID NO: 60357 - DNA, 15 bp, Homo sapiens
taggtaactgtgagc

SEQ ID NO: 60358 - DNA, 15 bp, Homo sapiens
ctaggtaactgtgag

SEQ ID NO: 60359 - DNA, 15 bp, Homo sapiens
actaggtaactgtga

SEQ ID NO: 60360 - DNA, 15 bp, Homo sapiens
aactaggtaactgtg

SEQ ID NO: 60361 - DNA, 15 bp, Homo sapiens
taactaggtaactgt

SEQ ID NO: 60362 - DNA, 15 bp, Homo sapiens
gtaactaggtaactg

SEQ ID NO: 60363 - DNA, 15 bp, Homo sapiens
agtaactaggtaact

SEQ ID NO: 60364 - DNA, 15 bp, Homo sapiens
cagtaactaggtaac

SEQ ID NO: 60365 - DNA, 15 bp, Homo sapiens
tcagtaactaggtaa

SEQ ID NO: 60366 - DNA, 15 bp, Homo sapiens
ttcagtaactaggta

SEQ ID NO: 60367 - DNA, 15 bp, Homo sapiens
cttcagtaactaggt

SEQ ID NO: 60368 - DNA, 15 bp, Homo sapiens
gcttcagtaactagg

SEQ ID NO: 60369 - DNA, 15 bp, Homo sapiens
tgcttcagtaactag

SEQ ID NO: 60370 - DNA, 15 bp, Homo sapiens
ttgcttcagtaacta

SEQ ID NO: 60371 - DNA, 15 bp, Homo sapiens
cttgcttcagtaact

SEQ ID NO: 60372 - DNA, 15 bp, Homo sapiens
gcttgcttcagtaac

SEQ ID NO: 60373 - DNA, 15 bp, Homo sapiens
ggcttgcttcagtaa

SEQ ID NO: 60374 - DNA, 15 bp, Homo sapiens
gggcttgcttcagta

SEQ ID NO: 60375 - DNA, 15 bp, Homo sapiens
ggggcttgcttcagt

SEQ ID NO: 60376 - DNA, 15 bp, Homo sapiens
gggggcttgcttcag

SEQ ID NO: 60377 - DNA, 15 bp, Homo sapiens
tgggggcttgcttca

SEQ ID NO: 60378 - DNA, 15 bp, Homo sapiens
ttgggggcttgcttc

SEQ ID NO: 60379 - DNA, 15 bp, Homo sapiens
tttgggggcttgctt

SEQ ID NO: 60380 - DNA, 15 bp, Homo sapiens
ctttgggggcttgct

SEQ ID NO: 60381 - DNA, 15 bp, Homo sapiens
tctttgggggcttgc

SEQ ID NO: 60382 - DNA, 15 bp, Homo sapiens
ttctttgggggcttg

SEQ ID NO: 60383 - DNA, 15 bp, Homo sapiens
tttctttgggggctt

SEQ ID NO: 60384 - DNA, 15 bp, Homo sapiens
atttctttgggggct

SEQ ID NO: 60385 - DNA, 15 bp, Homo sapiens
aatttctttgggggc

SEQ ID NO: 60386 - DNA, 15 bp, Homo sapiens
aaatttctttggggg

SEQ ID NO: 60387 - DNA, 15 bp, Homo sapiens
caaatttctttgggg

SEQ ID NO: 60388 - DNA, 15 bp, Homo sapiens
ccaaatttctttggg

SEQ ID NO: 60389 - DNA, 15 bp, Homo sapiens
accaaatttctttgg

SEQ ID NO: 60390 - DNA, 15 bp, Homo sapiens
aaccaaatttctttg

SEQ ID NO: 60391 - DNA, 15 bp, Homo sapiens
aaaccaaatttcttt

SEQ ID NO: 60392 - DNA, 15 bp, Homo sapiens
caaaccaaatttctt

SEQ ID NO: 60393 - DNA, 15 bp, Homo sapiens
ccaaaccaaatttct

SEQ ID NO: 60394 - DNA, 15 bp, Homo sapiens
gccaaaccaaatttc

SEQ ID NO: 60395 - DNA, 15 bp, Homo sapiens
tgccaaaccaaattt

SEQ ID NO: 60396 - DNA, 15 bp, Homo sapiens
ttgccaaaccaaatt

SEQ ID NO: 60397 - DNA, 15 bp, Homo sapiens
gttgccaaaccaaat

SEQ ID NO: 60398 - DNA, 15 bp, Homo sapiens
tgttgccaaaccaaa

SEQ ID NO: 60399 - DNA, 15 bp, Homo sapiens
gtgttgccaaaccaa

SEQ ID NO: 60400 - DNA, 15 bp, Homo sapiens
agtgttgccaaacca

SEQ ID NO: 60401 - DNA, 15 bp, Homo sapiens
aagtgttgccaaacc

SEQ ID NO: 60402 - DNA, 15 bp, Homo sapiens
aaagtgttgccaaac

SEQ ID NO: 60403 - DNA, 15 bp, Homo sapiens
caaagtgttgccaaa

SEQ ID NO: 60404 - DNA, 15 bp, Homo sapiens
acaaagtgttgccaa

SEQ ID NO: 60405 - DNA, 15 bp, Homo sapiens
aacaaagtgttgcca

SEQ ID NO: 60406 - DNA, 15 bp, Homo sapiens
taacaaagtgttgcc

SEQ ID NO: 60407 - DNA, 15 bp, Homo sapiens
ctaacaaagtgttgc

SEQ ID NO: 60408 - DNA, 15 bp, Homo sapiens
gctaacaaagtgttg

SEQ ID NO: 60409 - DNA, 15 bp, Homo sapiens
ggctaacaaagtgtt

SEQ ID NO: 60410 - DNA, 15 bp, Homo sapiens
aggctaacaaagtgt

SEQ ID NO: 60411 - DNA, 15 bp, Homo sapiens
gaggctaacaaagtg

SEQ ID NO: 60412 - DNA, 15 bp, Homo sapiens
cgaggctaacaaagt

SEQ ID NO: 60413 - DNA, 15 bp, Homo sapiens
acgaggctaacaaag

SEQ ID NO: 60414 - DNA, 15 bp, Homo sapiens
aacgaggctaacaaa

SEQ ID NO: 60415 - DNA, 15 bp, Homo sapiens
aaacgaggctaacaa

SEQ ID NO: 60416 - DNA, 15 bp, Homo sapiens
aaaacgaggctaaca

SEQ ID NO: 60417 - DNA, 15 bp, Homo sapiens
aaaaacgaggctaac

SEQ ID NO: 60418 - DNA, 15 bp, Homo sapiens
gaaaaacgaggctaa

SEQ ID NO: 60419 - DNA, 15 bp, Homo sapiens
agaaaaacgaggcta

SEQ ID NO: 60420 - DNA, 15 bp, Homo sapiens
gagaaaaacgaggct

SEQ ID NO: 60421 - DNA, 15 bp, Homo sapiens
agagaaaaacgaggc

SEQ ID NO: 60422 - DNA, 15 bp, Homo sapiens
gagagaaaaacgagg

SEQ ID NO: 60423 - DNA, 15 bp, Homo sapiens
agagagaaaaacgag

SEQ ID NO: 60424 - DNA, 15 bp, Homo sapiens
tagagagaaaaacga

SEQ ID NO: 60425 - DNA, 15 bp, Homo sapiens
gtagagagaaaaacg

SEQ ID NO: 60426 - DNA, 15 bp, Homo sapiens
tgtagagagaaaaac

SEQ ID NO: 60427 - DNA, 15 bp, Homo sapiens
atgtagagagaaaaa

SEQ ID NO: 60428 - DNA, 15 bp, Homo sapiens
aatgtagagagaaaa

SEQ ID NO: 60429 - DNA, 15 bp, Homo sapiens
caatgtagagagaaa

SEQ ID NO: 60430 - DNA, 15 bp, Homo sapiens
gcaatgtagagagaa

SEQ ID NO: 60431 - DNA, 15 bp, Homo sapiens
tgcaatgtagagaga

SEQ ID NO: 60432 - DNA, 15 bp, Homo sapiens
atgcaatgtagagag

SEQ ID NO: 60433 - DNA, 15 bp, Homo sapiens
aatgcaatgtagaga

SEQ ID NO: 60434 - DNA, 15 bp, Homo sapiens
caatgcaatgtagag

SEQ ID NO: 60435 - DNA, 15 bp, Homo sapiens
gcaatgcaatgtaga

SEQ ID NO: 60436 - DNA, 15 bp, Homo sapiens
agcaatgcaatgtag

SEQ ID NO: 60437 - DNA, 15 bp, Homo sapiens
gagcaatgcaatgta

SEQ ID NO: 60438 - DNA, 15 bp, Homo sapiens
cgagcaatgcaatgt

SEQ ID NO: 60439 - DNA, 15 bp, Homo sapiens
acgagcaatgcaatg

SEQ ID NO: 60440 - DNA, 15 bp, Homo sapiens
cacgagcaatgcaat

SEQ ID NO: 60441 - DNA, 15 bp, Homo sapiens
tcacgagcaatgcaa

SEQ ID NO: 60442 - DNA, 15 bp, Homo sapiens
ttcacgagcaatgca

SEQ ID NO: 60443 - DNA, 15 bp, Homo sapiens
cttcacgagcaatgc

SEQ ID NO: 60444 - DNA, 15 bp, Homo sapiens
gcttcacgagcaatg

SEQ ID NO: 60445 - DNA, 15 bp, Homo sapiens
tgcttcacgagcaat

SEQ ID NO: 60446 - DNA, 15 bp, Homo sapiens
atgcttcacgagcaa

SEQ ID NO: 60447 - DNA, 15 bp, Homo sapiens
aatgcttcacgagca

SEQ ID NO: 60448 - DNA, 15 bp, Homo sapiens
caatgcttcacgagc

SEQ ID NO: 60449 - DNA, 15 bp, Homo sapiens
ccaatgcttcacgag

SEQ ID NO: 60450 - DNA, 15 bp, Homo sapiens
tccaatgcttcacga

SEQ ID NO: 60451 - DNA, 15 bp, Homo sapiens
atccaatgcttcacg

SEQ ID NO: 60452 - DNA, 15 bp, Homo sapiens
gatccaatgcttcac

SEQ ID NO: 60453 - DNA, 15 bp, Homo sapiens
tgatccaatgcttca

SEQ ID NO: 60454 - DNA, 15 bp, Homo sapiens
atgatccaatgcttc

SEQ ID NO: 60455 - DNA, 15 bp, Homo sapiens
tatgatccaatgctt

SEQ ID NO: 60456 - DNA, 15 bp, Homo sapiens
gtatgatccaatgct

SEQ ID NO: 60457 - DNA, 15 bp, Homo sapiens
cgtatgatccaatgc

SEQ ID NO: 60458 - DNA, 15 bp, Homo sapiens
acgtatgatccaatg

SEQ ID NO: 60459 - DNA, 15 bp, Homo sapiens
tacgtatgatccaat

SEQ ID NO: 60460 - DNA, 15 bp, Homo sapiens
gtacgtatgatccaa

SEQ ID NO: 60461 - DNA, 15 bp, Homo sapiens
tgtacgtatgatcca

SEQ ID NO: 60462 - DNA, 15 bp, Homo sapiens
atgtacgtatgatcc

SEQ ID NO: 60463 - DNA, 15 bp, Homo sapiens
aatgtacgtatgatc

SEQ ID NO: 60464 - DNA, 15 bp, Homo sapiens
aaatgtacgtatgat

SEQ ID NO: 60465 - DNA, 15 bp, Homo sapiens
gaaatgtacgtatga

SEQ ID NO: 60466 - DNA, 15 bp, Homo sapiens
tgaaatgtacgtatg

SEQ ID NO: 60467 - DNA, 15 bp, Homo sapiens
ctgaaatgtacgtat

SEQ ID NO: 60468 - DNA, 15 bp, Homo sapiens
tctgaaatgtacgta

SEQ ID NO: 60469 - DNA, 15 bp, Homo sapiens
ctctgaaatgtacgt

SEQ ID NO: 60470 - DNA, 15 bp, Homo sapiens
actctgaaatgtacg

SEQ ID NO: 60471 - DNA, 15 bp, Homo sapiens
gactctgaaatgtac

SEQ ID NO: 60472 - DNA, 15 bp, Homo sapiens
agactctgaaatgta

SEQ ID NO: 60473 - DNA, 15 bp, Homo sapiens
tagactctgaaatgt

SEQ ID NO: 60474 - DNA, 15 bp, Homo sapiens
ctagactctgaaatg

SEQ ID NO: 60475 - DNA, 15 bp, Homo sapiens
tctagactctgaaat

SEQ ID NO: 60476 - DNA, 15 bp, Homo sapiens
ctctagactctgaaa

SEQ ID NO: 60477 - DNA, 15 bp, Homo sapiens
cctctagactctgaa

SEQ ID NO: 60478 - DNA, 15 bp, Homo sapiens
ccctctagactctga

SEQ ID NO: 60479 - DNA, 15 bp, Homo sapiens
gccctctagactctg

SEQ ID NO: 60480 - DNA, 15 bp, Homo sapiens
ggccctctagactct

SEQ ID NO: 60481 - DNA, 15 bp, Homo sapiens
aggccctctagactc

SEQ ID NO: 60482 - DNA, 15 bp, Homo sapiens
caggccctctagact

SEQ ID NO: 60483 - DNA, 15 bp, Homo sapiens
acaggccctctagac

SEQ ID NO: 60484 - DNA, 15 bp, Homo sapiens
gacaggccctctaga

SEQ ID NO: 60485 - DNA, 15 bp, Homo sapiens
ggacaggccctctag

SEQ ID NO: 60486 - DNA, 15 bp, Homo sapiens
aggacaggccctcta

SEQ ID NO: 60487 - DNA, 15 bp, Homo sapiens
aaggacaggccctct

SEQ ID NO: 60488 - DNA, 15 bp, Homo sapiens
gaaggacaggccctc

SEQ ID NO: 60489 - DNA, 15 bp, Homo sapiens
agaaggacaggccct

SEQ ID NO: 60490 - DNA, 15 bp, Homo sapiens
cagaaggacaggccc

SEQ ID NO: 60491 - DNA, 15 bp, Homo sapiens
acagaaggacaggcc

SEQ ID NO: 60492 - DNA, 15 bp, Homo sapiens
cacagaaggacaggc

SEQ ID NO: 60493 - DNA, 15 bp, Homo sapiens
ccacagaaggacagg

SEQ ID NO: 60494 - DNA, 15 bp, Homo sapiens
gccacagaaggacag

SEQ ID NO: 60495 - DNA, 15 bp, Homo sapiens
ggccacagaaggaca

SEQ ID NO: 60496 - DNA, 15 bp, Homo sapiens
gggccacagaaggac

SEQ ID NO: 60497 - DNA, 15 bp, Homo sapiens
tgggccacagaagga

SEQ ID NO: 60498 - DNA, 15 bp, Homo sapiens
ctgggccacagaagg

SEQ ID NO: 60499 - DNA, 15 bp, Homo sapiens
tctgggccacagaag

SEQ ID NO: 60500 - DNA, 15 bp, Homo sapiens
atctgggccacagaa

SEQ ID NO: 60501 - DNA, 15 bp, Homo sapiens
catctgggccacaga

SEQ ID NO: 60502 - DNA, 15 bp, Homo sapiens
acatctgggccacag

SEQ ID NO: 60503 - DNA, 15 bp, Homo sapiens
cacatctgggccaca

SEQ ID NO: 60504 - DNA, 15 bp, Homo sapiens
ccacatctgggccac

SEQ ID NO: 60505 - DNA, 15 bp, Homo sapiens
accacatctgggcca

SEQ ID NO: 60506 - DNA, 15 bp, Homo sapiens
caccacatctgggcc

SEQ ID NO: 60507 - DNA, 15 bp, Homo sapiens
gcaccacatctgggc

SEQ ID NO: 60508 - DNA, 15 bp, Homo sapiens
agcaccacatctggg

SEQ ID NO: 60509 - DNA, 15 bp, Homo sapiens
gagcaccacatctgg

SEQ ID NO: 60510 - DNA, 15 bp, Homo sapiens
ggagcaccacatctg

SEQ ID NO: 60511 - DNA, 15 bp, Homo sapiens
gggagcaccacatct

SEQ ID NO: 60512 - DNA, 15 bp, Homo sapiens
agggagcaccacatc

SEQ ID NO: 60513 - DNA, 15 bp, Homo sapiens
gagggagcaccacat

SEQ ID NO: 60514 - DNA, 15 bp, Homo sapiens
agagggagcaccaca

SEQ ID NO: 60515 - DNA, 15 bp, Homo sapiens
tagagggagcaccac

SEQ ID NO: 60516 - DNA, 15 bp, Homo sapiens
ctagagggagcacca

SEQ ID NO: 60517 - DNA, 15 bp, Homo sapiens
gctagagggagcacc

SEQ ID NO: 60518 - DNA, 15 bp, Homo sapiens
tgctagagggagcac

SEQ ID NO: 60519 - DNA, 15 bp, Homo sapiens
atgctagagggagca

SEQ ID NO: 60520 - DNA, 15 bp, Homo sapiens
catgctagagggagc

SEQ ID NO: 60521 - DNA, 15 bp, Homo sapiens
gcatgctagagggag

SEQ ID NO: 60522 - DNA, 15 bp, Homo sapiens
tgcatgctagaggga

SEQ ID NO: 60523 - DNA, 15 bp, Homo sapiens
ctgcatgctagaggg

SEQ ID NO: 60524 - DNA, 15 bp, Homo sapiens
cctgcatgctagagg

SEQ ID NO: 60525 - DNA, 15 bp, Homo sapiens
gcctgcatgctagag

SEQ ID NO: 60526 - DNA, 15 bp, Homo sapiens
agcctgcatgctaga

SEQ ID NO: 60527 - DNA, 15 bp, Homo sapiens
gagcctgcatgctag

SEQ ID NO: 60528 - DNA, 15 bp, Homo sapiens
tgagcctgcatgcta

SEQ ID NO: 60529 - DNA, 15 bp, Homo sapiens
ctgagcctgcatgct

SEQ ID NO: 60530 - DNA, 15 bp, Homo sapiens
tctgagcctgcatgc

SEQ ID NO: 60531 - DNA, 15 bp, Homo sapiens
ctctgagcctgcatg

SEQ ID NO: 60532 - DNA, 15 bp, Homo sapiens
cctctgagcctgcat

SEQ ID NO: 60533 - DNA, 15 bp, Homo sapiens
gcctctgagcctgca

SEQ ID NO: 60534 - DNA, 15 bp, Homo sapiens
ggcctctgagcctgc

SEQ ID NO: 60535 - DNA, 15 bp, Homo sapiens
aggcctctgagcctg

SEQ ID NO: 60536 - DNA, 15 bp, Homo sapiens
aaggcctctgagcct

SEQ ID NO: 60537 - DNA, 15 bp, Homo sapiens
caaggcctctgagcc

SEQ ID NO: 60538 - DNA, 15 bp, Homo sapiens
ccaaggcctctgagc

SEQ ID NO: 60539 - DNA, 15 bp, Homo sapiens
gccaaggcctctgag

SEQ ID NO: 60540 - DNA, 15 bp, Homo sapiens
ggccaaggcctctga

SEQ ID NO: 60541 - DNA, 15 bp, Homo sapiens
gggccaaggcctctg

SEQ ID NO: 60542 - DNA, 15 bp, Homo sapiens
tgggccaaggcctct

SEQ ID NO: 60543 - DNA, 15 bp, Homo sapiens
atgggccaaggcctc

SEQ ID NO: 60544 - DNA, 15 bp, Homo sapiens
gatgggccaaggcct

SEQ ID NO: 60545 - DNA, 15 bp, Homo sapiens
tgatgggccaaggcc

SEQ ID NO: 60546 - DNA, 15 bp, Homo sapiens
gtgatgggccaaggc

SEQ ID NO: 60547 - DNA, 15 bp, Homo sapiens
ggtgatgggccaagg

SEQ ID NO: 60548 - DNA, 15 bp, Homo sapiens
gggtgatgggccaag

SEQ ID NO: 60549 - DNA, 15 bp, Homo sapiens
agggtgatgggccaa

SEQ ID NO: 60550 - DNA, 15 bp, Homo sapiens
cagggtgatgggcca

SEQ ID NO: 60551 - DNA, 15 bp, Homo sapiens
ccagggtgatgggcc

SEQ ID NO: 60552 - DNA, 15 bp, Homo sapiens
gccagggtgatgggc

SEQ ID NO: 60553 - DNA, 15 bp, Homo sapiens
agccagggtgatggg

SEQ ID NO: 60554 - DNA, 15 bp, Homo sapiens
gagccagggtgatgg

SEQ ID NO: 60555 - DNA, 15 bp, Homo sapiens
tgagccagggtgatg

SEQ ID NO: 60556 - DNA, 15 bp, Homo sapiens
gtgagccagggtgat

SEQ ID NO: 60557 - DNA, 15 bp, Homo sapiens
cgtgagccagggtga

SEQ ID NO: 60558 - DNA, 15 bp, Homo sapiens
acgtgagccagggtg

SEQ ID NO: 60559 - DNA, 15 bp, Homo sapiens
cacgtgagccagggt

SEQ ID NO: 60560 - DNA, 15 bp, Homo sapiens
acacgtgagccaggg

SEQ ID NO: 60561 - DNA, 15 bp, Homo sapiens
cacacgtgagccagg

SEQ ID NO: 60562 - DNA, 15 bp, Homo sapiens
acacacgtgagccag

SEQ ID NO: 60563 - DNA, 15 bp, Homo sapiens
gacacacgtgagcca

SEQ ID NO: 60564 - DNA, 15 bp, Homo sapiens
agacacacgtgagcc

SEQ ID NO: 60565 - DNA, 15 bp, Homo sapiens
aagacacacgtgagc

SEQ ID NO: 60566 - DNA, 15 bp, Homo sapiens
aaagacacacgtgag

SEQ ID NO: 60567 - DNA, 15 bp, Homo sapiens
gaaagacacacgtga

SEQ ID NO: 60568 - DNA, 15 bp, Homo sapiens
agaaagacacacgtg

SEQ ID NO: 60569 - DNA, 15 bp, Homo sapiens
aagaaagacacacgt

SEQ ID NO: 60570 - DNA, 15 bp, Homo sapiens
aaagaaagacacacg

SEQ ID NO: 60571 - DNA, 15 bp, Homo sapiens
gaaagaaagacacac

SEQ ID NO: 60572 - DNA, 15 bp, Homo sapiens
agaaagaaagacaca

SEQ ID NO: 60573 - DNA, 15 bp, Homo sapiens
gagaaagaaagacac

SEQ ID NO: 60574 - DNA, 15 bp, Homo sapiens
ggagaaagaaagaca

SEQ ID NO: 60575 - DNA, 15 bp, Homo sapiens
gggagaaagaaagac

SEQ ID NO: 60576 - DNA, 15 bp, Homo sapiens
ggggagaaagaaaga

SEQ ID NO: 60577 - DNA, 15 bp, Homo sapiens
aggggagaaagaaag

SEQ ID NO: 60578 - DNA, 15 bp, Homo sapiens
aaggggagaaagaaa

SEQ ID NO: 60579 - DNA, 15 bp, Homo sapiens
caaggggagaaagaa

SEQ ID NO: 60580 - DNA, 15 bp, Homo sapiens
acaaggggagaaaga

SEQ ID NO: 60581 - DNA, 15 bp, Homo sapiens
gacaaggggagaaag

SEQ ID NO: 60582 - DNA, 15 bp, Homo sapiens
ggacaaggggagaaa

SEQ ID NO: 60583 - DNA, 15 bp, Homo sapiens
aggacaaggggagaa

SEQ ID NO: 60584 - DNA, 15 bp, Homo sapiens
aaggacaaggggaga

SEQ ID NO: 60585 - DNA, 15 bp, Homo sapiens
gaaggacaaggggag

SEQ ID NO: 60586 - DNA, 15 bp, Homo sapiens
ggaaggacaagggga

SEQ ID NO: 60587 - DNA, 15 bp, Homo sapiens
aggaaggacaagggg

SEQ ID NO: 60588 - DNA, 15 bp, Homo sapiens
aaggaaggacaaggg

SEQ ID NO: 60589 - DNA, 15 bp, Homo sapiens
caaggaaggacaagg

SEQ ID NO: 60590 - DNA, 15 bp, Homo sapiens
ccaaggaaggacaag

SEQ ID NO: 60591 - DNA, 15 bp, Homo sapiens
cccaaggaaggacaa

SEQ ID NO: 60592 - DNA, 15 bp, Homo sapiens
ccccaaggaaggaca

SEQ ID NO: 60593 - DNA, 15 bp, Homo sapiens
gccccaaggaaggac

SEQ ID NO: 60594 - DNA, 15 bp, Homo sapiens
ggccccaaggaagga

SEQ ID NO: 60595 - DNA, 15 bp, Homo sapiens
aggccccaaggaagg

SEQ ID NO: 60596 - DNA, 15 bp, Homo sapiens
gaggccccaaggaag

SEQ ID NO: 60597 - DNA, 15 bp, Homo sapiens
ggaggccccaaggaa

SEQ ID NO: 60598 - DNA, 15 bp, Homo sapiens
tggaggccccaagga

SEQ ID NO: 60599 - DNA, 15 bp, Homo sapiens
ctggaggccccaagg

SEQ ID NO: 60600 - DNA, 15 bp, Homo sapiens
gctggaggccccaag

SEQ ID NO: 60601 - DNA, 15 bp, Homo sapiens
agctggaggccccaa

SEQ ID NO: 60602 - DNA, 15 bp, Homo sapiens
aagctggaggcccca

SEQ ID NO: 60603 - DNA, 15 bp, Homo sapiens
aaagctggaggcccc

SEQ ID NO: 60604 - DNA, 15 bp, Homo sapiens
gaaagctggaggccc

SEQ ID NO: 60605 - DNA, 15 bp, Homo sapiens
agaaagctggaggcc

SEQ ID NO: 60606 - DNA, 15 bp, Homo sapiens
cagaaagctggaggc

SEQ ID NO: 60607 - DNA, 15 bp, Homo sapiens
gcagaaagctggagg

SEQ ID NO: 60608 - DNA, 15 bp, Homo sapiens
cgcagaaagctggag

SEQ ID NO: 60609 - DNA, 15 bp, Homo sapiens
ccgcagaaagctgga

SEQ ID NO: 60610 - DNA, 15 bp, Homo sapiens
cccgcagaaagctgg

SEQ ID NO: 60611 - DNA, 15 bp, Homo sapiens
acccgcagaaagctg

SEQ ID NO: 60612 - DNA, 15 bp, Homo sapiens
cacccgcagaaagct

SEQ ID NO: 60613 - DNA, 15 bp, Homo sapiens
tcacccgcagaaagc

SEQ ID NO: 60614 - DNA, 15 bp, Homo sapiens
atcacccgcagaaag

SEQ ID NO: 60615 - DNA, 15 bp, Homo sapiens
catcacccgcagaaa

SEQ ID NO: 60616 - DNA, 15 bp, Homo sapiens
tcatcacccgcagaa

SEQ ID NO: 60617 - DNA, 15 bp, Homo sapiens
ctcatcacccgcaga

SEQ ID NO: 60618 - DNA, 15 bp, Homo sapiens
gctcatcacccgcag

SEQ ID NO: 60619 - DNA, 15 bp, Homo sapiens
ggctcatcacccgca

SEQ ID NO: 60620 - DNA, 15 bp, Homo sapiens
cggctcatcacccgc

SEQ ID NO: 60621 - DNA, 15 bp, Homo sapiens
ccggctcatcacccg

SEQ ID NO: 60622 - DNA, 15 bp, Homo sapiens
accggctcatcaccc

SEQ ID NO: 60623 - DNA, 15 bp, Homo sapiens
gaccggctcatcacc

SEQ ID NO: 60624 - DNA, 15 bp, Homo sapiens
tgaccggctcatcac

SEQ ID NO: 60625 - DNA, 15 bp, Homo sapiens
ttgaccggctcatca

SEQ ID NO: 60626 - DNA, 15 bp, Homo sapiens
attgaccggctcatc

SEQ ID NO: 60627 - DNA, 15 bp, Homo sapiens
cattgaccggctcat

SEQ ID NO: 60628 - DNA, 15 bp, Homo sapiens
gcattgaccggctca

SEQ ID NO: 60629 - DNA, 15 bp, Homo sapiens
ggcattgaccggctc

SEQ ID NO: 60630 - DNA, 15 bp, Homo sapiens
gggcattgaccggct

SEQ ID NO: 60631 - DNA, 15 bp, Homo sapiens
ggggcattgaccggc

SEQ ID NO: 60632 - DNA, 15 bp, Homo sapiens
aggggcattgaccgg

SEQ ID NO: 60633 - DNA, 15 bp, Homo sapiens
gaggggcattgaccg

SEQ ID NO: 60634 - DNA, 15 bp, Homo sapiens
agaggggcattgacc

SEQ ID NO: 60635 - DNA, 15 bp, Homo sapiens
aagaggggcattgac

SEQ ID NO: 60636 - DNA, 15 bp, Homo sapiens
gaagaggggcattga

SEQ ID NO: 60637 - DNA, 15 bp, Homo sapiens
tgaagaggggcattg

SEQ ID NO: 60638 - DNA, 15 bp, Homo sapiens
atgaagaggggcatt

SEQ ID NO: 60639 - DNA, 15 bp, Homo sapiens
catgaagaggggcat

SEQ ID NO: 60640 - DNA, 15 bp, Homo sapiens
tcatgaagaggggca

SEQ ID NO: 60641 - DNA, 15 bp, Homo sapiens
gtcatgaagaggggc

SEQ ID NO: 60642 - DNA, 15 bp, Homo sapiens
cgtcatgaagagggg

SEQ ID NO: 60643 - DNA, 15 bp, Homo sapiens
gcgtcatgaagaggg

SEQ ID NO: 60644 - DNA, 15 bp, Homo sapiens
agcgtcatgaagagg

SEQ ID NO: 60645 - DNA, 15 bp, Homo sapiens
cagcgtcatgaagag

SEQ ID NO: 60646 - DNA, 15 bp, Homo sapiens
ccagcgtcatgaaga

SEQ ID NO: 60647 - DNA, 15 bp, Homo sapiens
gccagcgtcatgaag

SEQ ID NO: 60648 - DNA, 15 bp, Homo sapiens
ggccagcgtcatgaa

SEQ ID NO: 60649 - DNA, 15 bp, Homo sapiens
aggccagcgtcatga

SEQ ID NO: 60650 - DNA, 15 bp, Homo sapiens
caggccagcgtcatg

SEQ ID NO: 60651 - DNA, 15 bp, Homo sapiens
ccaggccagcgtcat

SEQ ID NO: 60652 - DNA, 15 bp, Homo sapiens
tccaggccagcgtca

SEQ ID NO: 60653 - DNA, 15 bp, Homo sapiens
atccaggccagcgtc

SEQ ID NO: 60654 - DNA, 15 bp, Homo sapiens
aatccaggccagcgt

SEQ ID NO: 60655 - DNA, 15 bp, Homo sapiens
aaatccaggccagcg

SEQ ID NO: 60656 - DNA, 15 bp, Homo sapiens
taaatccaggccagc

SEQ ID NO: 60657 - DNA, 15 bp, Homo sapiens
gtaaatccaggccag

SEQ ID NO: 60658 - DNA, 15 bp, Homo sapiens
agtaaatccaggcca

SEQ ID NO: 60659 - DNA, 15 bp, Homo sapiens
gagtaaatccaggcc

SEQ ID NO: 60660 - DNA, 15 bp, Homo sapiens
tgagtaaatccaggc

SEQ ID NO: 60661 - DNA, 15 bp, Homo sapiens
ctgagtaaatccagg

SEQ ID NO: 60662 - DNA, 15 bp, Homo sapiens
actgagtaaatccag

SEQ ID NO: 60663 - DNA, 15 bp, Homo sapiens
cactgagtaaatcca

SEQ ID NO: 60664 - DNA, 15 bp, Homo sapiens
ccactgagtaaatcc

SEQ ID NO: 60665 - DNA, 15 bp, Homo sapiens
gccactgagtaaatc

SEQ ID NO: 60666 - DNA, 15 bp, Homo sapiens
agccactgagtaaat

SEQ ID NO: 60667 - DNA, 15 bp, Homo sapiens
cagccactgagtaaa

SEQ ID NO: 60668 - DNA, 15 bp, Homo sapiens
acagccactgagtaa

SEQ ID NO: 60669 - DNA, 15 bp, Homo sapiens
cacagccactgagta

SEQ ID NO: 60670 - DNA, 15 bp, Homo sapiens
tcacagccactgagt

SEQ ID NO: 60671 - DNA, 15 bp, Homo sapiens
atcacagccactgag

SEQ ID NO: 60672 - DNA, 15 bp, Homo sapiens
gatcacagccactga

SEQ ID NO: 60673 - DNA, 15 bp, Homo sapiens
tgatcacagccactg

SEQ ID NO: 60674 - DNA, 15 bp, Homo sapiens
atgatcacagccact

SEQ ID NO: 60675 - DNA, 15 bp, Homo sapiens
gatgatcacagccac

SEQ ID NO: 60676 - DNA, 15 bp, Homo sapiens
tgatgatcacagcca

SEQ ID NO: 60677 - DNA, 15 bp, Homo sapiens
ttgatgatcacagcc

SEQ ID NO: 60678 - DNA, 15 bp, Homo sapiens
cttgatgatcacagc

SEQ ID NO: 60679 - DNA, 15 bp, Homo sapiens
ccttgatgatcacag

SEQ ID NO: 60680 - DNA, 15 bp, Homo sapiens
cccttgatgatcaca

SEQ ID NO: 60681 - DNA, 15 bp, Homo sapiens
gcccttgatgatcac

SEQ ID NO: 60682 - DNA, 15 bp, Homo sapiens
tgcccttgatgatca

SEQ ID NO: 60683 - DNA, 15 bp, Homo sapiens
atgcccttgatgatc

SEQ ID NO: 60684 - DNA, 15 bp, Homo sapiens
gatgcccttgatgat

SEQ ID NO: 60685 - DNA, 15 bp, Homo sapiens
cgatgcccttgatga

SEQ ID NO: 60686 - DNA, 15 bp, Homo sapiens
acgatgcccttgatg

SEQ ID NO: 60687 - DNA, 15 bp, Homo sapiens
cacgatgcccttgat

SEQ ID NO: 60688 - DNA, 15 bp, Homo sapiens
acacgatgcccttga

SEQ ID NO: 60689 - DNA, 15 bp, Homo sapiens
tacacgatgcccttg

SEQ ID NO: 60690 - DNA, 15 bp, Homo sapiens
atacacgatgccctt

SEQ ID NO: 60691 - DNA, 15 bp, Homo sapiens
catacacgatgccct

SEQ ID NO: 60692 - DNA, 15 bp, Homo sapiens
tcatacacgatgccc

SEQ ID NO: 60693 - DNA, 15 bp, Homo sapiens
ctcatacacgatgcc

SEQ ID NO: 60694 - DNA, 15 bp, Homo sapiens
tctcatacacgatgc

SEQ ID NO: 60695 - DNA, 15 bp, Homo sapiens
ttctcatacacgatg

SEQ ID NO: 60696 - DNA, 15 bp, Homo sapiens
cttctcatacacgat

SEQ ID NO: 60697 - DNA, 15 bp, Homo sapiens
ccttctcatacacga

SEQ ID NO: 60698 - DNA, 15 bp, Homo sapiens
tccttctcatacacg

SEQ ID NO: 60699 - DNA, 15 bp, Homo sapiens
ctccttctcatacac

SEQ ID NO: 60700 - DNA, 15 bp, Homo sapiens
cctccttctcataca

SEQ ID NO: 60701 - DNA, 15 bp, Homo sapiens
gcctccttctcatac

SEQ ID NO: 60702 - DNA, 15 bp, Homo sapiens
tgcctccttctcata

SEQ ID NO: 60703 - DNA, 15 bp, Homo sapiens
gtgcctccttctcat

SEQ ID NO: 60704 - DNA, 15 bp, Homo sapiens
cgtgcctccttctca

SEQ ID NO: 60705 - DNA, 15 bp, Homo sapiens
ccgtgcctccttctc

SEQ ID NO: 60706 - DNA, 15 bp, Homo sapiens
gccgtgcctccttct

SEQ ID NO: 60707 - DNA, 15 bp, Homo sapiens
agccgtgcctccttc

SEQ ID NO: 60708 - DNA, 15 bp, Homo sapiens
cagccgtgcctcctt

SEQ ID NO: 60709 - DNA, 15 bp, Homo sapiens
tcagccgtgcctcct

SEQ ID NO: 60710 - DNA, 15 bp, Homo sapiens
ttcagccgtgcctcc

SEQ ID NO: 60711 - DNA, 15 bp, Homo sapiens
tttcagccgtgcctc

SEQ ID NO: 60712 - DNA, 15 bp, Homo sapiens
ctttcagccgtgcct

SEQ ID NO: 60713 - DNA, 15 bp, Homo sapiens
tctttcagccgtgcc

SEQ ID NO: 60714 - DNA, 15 bp, Homo sapiens
ctctttcagccgtgc

SEQ ID NO: 60715 - DNA, 15 bp, Homo sapiens
tctctttcagccgtg

SEQ ID NO: 60716 - DNA, 15 bp, Homo sapiens
gtctctttcagccgt

SEQ ID NO: 60717 - DNA, 15 bp, Homo sapiens
ggtctctttcagccg

SEQ ID NO: 60718 - DNA, 15 bp, Homo sapiens
tggtctctttcagcc

SEQ ID NO: 60719 - DNA, 15 bp, Homo sapiens
atggtctctttcagc

SEQ ID NO: 60720 - DNA, 15 bp, Homo sapiens
catggtctctttcag

SEQ ID NO: 60721 - DNA, 15 bp, Homo sapiens
gcatggtctctttca

SEQ ID NO: 60722 - DNA, 15 bp, Homo sapiens
cgcatggtctctttc

SEQ ID NO: 60723 - DNA, 15 bp, Homo sapiens
ccgcatggtctcttt

SEQ ID NO: 60724 - DNA, 15 bp, Homo sapiens
tccgcatggtctctt

SEQ ID NO: 60725 - DNA, 15 bp, Homo sapiens
atccgcatggtctct

SEQ ID NO: 60726 - DNA, 15 bp, Homo sapiens
gatccgcatggtctc

SEQ ID NO: 60727 - DNA, 15 bp, Homo sapiens
tgatccgcatggtct

SEQ ID NO: 60728 - DNA, 15 bp, Homo sapiens
atgatccgcatggtc

SEQ ID NO: 60729 - DNA, 15 bp, Homo sapiens
catgatccgcatggt

SEQ ID NO: 60730 - DNA, 15 bp, Homo sapiens
ccatgatccgcatgg

SEQ ID NO: 60731 - DNA, 15 bp, Homo sapiens
cccatgatccgcatg

SEQ ID NO: 60732 - DNA, 15 bp, Homo sapiens
gcccatgatccgcat

SEQ ID NO: 60733 - DNA, 15 bp, Homo sapiens
ggcccatgatccgca

SEQ ID NO: 60734 - DNA, 15 bp, Homo sapiens
aggcccatgatccgc

SEQ ID NO: 60735 - DNA, 15 bp, Homo sapiens
caggcccatgatccg

SEQ ID NO: 60736 - DNA, 15 bp, Homo sapiens
ccaggcccatgatcc

SEQ ID NO: 60737 - DNA, 15 bp, Homo sapiens
tccaggcccatgatc

SEQ ID NO: 60738 - DNA, 15 bp, Homo sapiens
gtccaggcccatgat

SEQ ID NO: 60739 - DNA, 15 bp, Homo sapiens
tgtccaggcccatga

SEQ ID NO: 60740 - DNA, 15 bp, Homo sapiens
ttgtccaggcccatg

SEQ ID NO: 60741 - DNA, 15 bp, Homo sapiens
gttgtccaggcccat

SEQ ID NO: 60742 - DNA, 15 bp, Homo sapiens
tgttgtccaggccca

SEQ ID NO: 60743 - DNA, 15 bp, Homo sapiens
ctgttgtccaggccc

SEQ ID NO: 60744 - DNA, 15 bp, Homo sapiens
gctgttgtccaggcc

SEQ ID NO: 60745 - DNA, 15 bp, Homo sapiens
tgctgttgtccaggc

SEQ ID NO: 60746 - DNA, 15 bp, Homo sapiens
atgctgttgtccagg

SEQ ID NO: 60747 - DNA, 15 bp, Homo sapiens
gatgctgttgtccag

SEQ ID NO: 60748 - DNA, 15 bp, Homo sapiens
ggatgctgttgtcca

SEQ ID NO: 60749 - DNA, 15 bp, Homo sapiens
aggatgctgttgtcc

SEQ ID NO: 60750 - DNA, 15 bp, Homo sapiens
gaggatgctgttgtc

SEQ ID NO: 60751 - DNA, 15 bp, Homo sapiens
agaggatgctgttgt

SEQ ID NO: 60752 - DNA, 15 bp, Homo sapiens
cagaggatgctgttg

SEQ ID NO: 60753 - DNA, 15 bp, Homo sapiens
ccagaggatgctgtt

SEQ ID NO: 60754 - DNA, 15 bp, Homo sapiens
accagaggatgctgt

SEQ ID NO: 60755 - DNA, 15 bp, Homo sapiens
aaccagaggatgctg

SEQ ID NO: 60756 - DNA, 15 bp, Homo sapiens
aaaccagaggatgct

SEQ ID NO: 60757 - DNA, 15 bp, Homo sapiens
taaaccagaggatgc

SEQ ID NO: 60758 - DNA, 15 bp, Homo sapiens
ctaaaccagaggatg

SEQ ID NO: 60759 - DNA, 15 bp, Homo sapiens
gctaaaccagaggat

SEQ ID NO: 60760 - DNA, 15 bp, Homo sapiens
agctaaaccagagga

SEQ ID NO: 60761 - DNA, 15 bp, Homo sapiens
cagctaaaccagagg

SEQ ID NO: 60762 - DNA, 15 bp, Homo sapiens
ccagctaaaccagag

SEQ ID NO: 60763 - DNA, 15 bp, Homo sapiens
accagctaaaccaga

SEQ ID NO: 60764 - DNA, 15 bp, Homo sapiens
aaccagctaaaccag

SEQ ID NO: 60765 - DNA, 15 bp, Homo sapiens
gaaccagctaaacca

SEQ ID NO: 60766 - DNA, 15 bp, Homo sapiens
tgaaccagctaaacc

SEQ ID NO: 60767 - DNA, 15 bp, Homo sapiens
atgaaccagctaaac

SEQ ID NO: 60768 - DNA, 15 bp, Homo sapiens
aatgaaccagctaaa

SEQ ID NO: 60769 - DNA, 15 bp, Homo sapiens
taatgaaccagctaa

SEQ ID NO: 60770 - DNA, 15 bp, Homo sapiens
ctaatgaaccagcta

SEQ ID NO: 60771 - DNA, 15 bp, Homo sapiens
actaatgaaccagct

SEQ ID NO: 60772 - DNA, 15 bp, Homo sapiens
tactaatgaaccagc

SEQ ID NO: 60773 - DNA, 15 bp, Homo sapiens
ctactaatgaaccag

SEQ ID NO: 60774 - DNA, 15 bp, Homo sapiens
gctactaatgaacca

SEQ ID NO: 60775 - DNA, 15 bp, Homo sapiens
ggctactaatgaacc

SEQ ID NO: 60776 - DNA, 15 bp, Homo sapiens
aggctactaatgaac

SEQ ID NO: 60777 - DNA, 15 bp, Homo sapiens
gaggctactaatgaa

SEQ ID NO: 60778 - DNA, 15 bp, Homo sapiens
tgaggctactaatga

SEQ ID NO: 60779 - DNA, 15 bp, Homo sapiens
atgaggctactaatg

SEQ ID NO: 60780 - DNA, 15 bp, Homo sapiens
aatgaggctactaat

SEQ ID NO: 60781 - DNA, 15 bp, Homo sapiens
gaatgaggctactaa

SEQ ID NO: 60782 - DNA, 15 bp, Homo sapiens
ggaatgaggctacta

SEQ ID NO: 60783 - DNA, 15 bp, Homo sapiens
aggaatgaggctact

SEQ ID NO: 60784 - DNA, 15 bp, Homo sapiens
gaggaatgaggctac

SEQ ID NO: 60785 - DNA, 15 bp, Homo sapiens
agaggaatgaggcta

SEQ ID NO: 60786 - DNA, 15 bp, Homo sapiens
aagaggaatgaggct

SEQ ID NO: 60787 - DNA, 15 bp, Homo sapiens
gaagaggaatgaggc

SEQ ID NO: 60788 - DNA, 15 bp, Homo sapiens
agaagaggaatgagg

SEQ ID NO: 60789 - DNA, 15 bp, Homo sapiens
aagaagaggaatgag

SEQ ID NO: 60790 - DNA, 15 bp, Homo sapiens
caagaagaggaatga

SEQ ID NO: 60791 - DNA, 15 bp, Homo sapiens
acaagaagaggaatg

SEQ ID NO: 60792 - DNA, 15 bp, Homo sapiens
cacaagaagaggaat

SEQ ID NO: 60793 - DNA, 15 bp, Homo sapiens
tcacaagaagaggaa

SEQ ID NO: 60794 - DNA, 15 bp, Homo sapiens
ctcacaagaagagga

SEQ ID NO: 60795 - DNA, 15 bp, Homo sapiens
gctcacaagaagagg

SEQ ID NO: 60796 - DNA, 15 bp, Homo sapiens
cgctcacaagaagag

SEQ ID NO: 60797 - DNA, 15 bp, Homo sapiens
gcgctcacaagaaga

SEQ ID NO: 60798 - DNA, 15 bp, Homo sapiens
agcgctcacaagaag

SEQ ID NO: 60799 - DNA, 15 bp, Homo sapiens
cagcgctcacaagaa

SEQ ID NO: 60800 - DNA, 15 bp, Homo sapiens
ccagcgctcacaaga

SEQ ID NO: 60801 - DNA, 15 bp, Homo sapiens
gccagcgctcacaag

SEQ ID NO: 60802 - DNA, 15 bp, Homo sapiens
ggccagcgctcacaa

SEQ ID NO: 60803 - DNA, 15 bp, Homo sapiens
aggccagcgctcaca

SEQ ID NO: 60804 - DNA, 15 bp, Homo sapiens
caggccagcgctcac

SEQ ID NO: 60805 - DNA, 15 bp, Homo sapiens
gcaggccagcgctca

SEQ ID NO: 60806 - DNA, 15 bp, Homo sapiens
agcaggccagcgctc

SEQ ID NO: 60807 - DNA, 15 bp, Homo sapiens
tagcaggccagcgct

SEQ ID NO: 60808 - DNA, 15 bp, Homo sapiens
ctagcaggccagcgc

SEQ ID NO: 60809 - DNA, 15 bp, Homo sapiens
actagcaggccagcg

SEQ ID NO: 60810 - DNA, 15 bp, Homo sapiens
cactagcaggccagc

SEQ ID NO: 60811 - DNA, 15 bp, Homo sapiens
ccactagcaggccag

SEQ ID NO: 60812 - DNA, 15 bp, Homo sapiens
accactagcaggcca

SEQ ID NO: 60813 - DNA, 15 bp, Homo sapiens
gaccactagcaggcc

SEQ ID NO: 60814 - DNA, 15 bp, Homo sapiens
tgaccactagcaggc

SEQ ID NO: 60815 - DNA, 15 bp, Homo sapiens
atgaccactagcagg

SEQ ID NO: 60816 - DNA, 15 bp, Homo sapiens
gatgaccactagcag

SEQ ID NO: 60817 - DNA, 15 bp, Homo sapiens
ggatgaccactagca

SEQ ID NO: 60818 - DNA, 15 bp, Homo sapiens
aggatgaccactagc

SEQ ID NO: 60819 - DNA, 15 bp, Homo sapiens
caggatgaccactag

SEQ ID NO: 60820 - DNA, 15 bp, Homo sapiens
tcaggatgaccacta

SEQ ID NO: 60821 - DNA, 15 bp, Homo sapiens
ttcaggatgaccact

SEQ ID NO: 60822 - DNA, 15 bp, Homo sapiens
cttcaggatgaccac

SEQ ID NO: 60823 - DNA, 15 bp, Homo sapiens
ccttcaggatgacca

SEQ ID NO: 60824 - DNA, 15 bp, Homo sapiens
accttcaggatgacc

SEQ ID NO: 60825 - DNA, 15 bp, Homo sapiens
taccttcaggatgac

SEQ ID NO: 60826 - DNA, 15 bp, Homo sapiens
ttaccttcaggatga

SEQ ID NO: 60827 - DNA, 15 bp, Homo sapiens
cttaccttcaggatg

SEQ ID NO: 60828 - DNA, 15 bp, Homo sapiens
ccttaccttcaggat

SEQ ID NO: 60829 - DNA, 15 bp, Homo sapiens
gccttaccttcagga

SEQ ID NO: 60830 - DNA, 15 bp, Homo sapiens
tgccttaccttcagg

SEQ ID NO: 60831 - DNA, 15 bp, Homo sapiens
ctgccttaccttcag

SEQ ID NO: 60832 - DNA, 15 bp, Homo sapiens
gctgccttaccttca

SEQ ID NO: 60833 - DNA, 15 bp, Homo sapiens
ggctgccttaccttc

SEQ ID NO: 60834 - DNA, 15 bp, Homo sapiens
aggctgccttacctt

SEQ ID NO: 60835 - DNA, 15 bp, Homo sapiens
gaggctgccttacct

SEQ ID NO: 60836 - DNA, 15 bp, Homo sapiens
tgaggctgccttacc

SEQ ID NO: 60837 - DNA, 15 bp, Homo sapiens
gtgaggctgccttac

SEQ ID NO: 60838 - DNA, 15 bp, Homo sapiens
agtgaggctgcctta

SEQ ID NO: 60839 - DNA, 15 bp, Homo sapiens
gagtgaggctgcctt

SEQ ID NO: 60840 - DNA, 15 bp, Homo sapiens
cgagtgaggctgcct

SEQ ID NO: 60841 - DNA, 15 bp, Homo sapiens
gcgagtgaggctgcc

SEQ ID NO: 60842 - DNA, 15 bp, Homo sapiens
agcgagtgaggctgc

SEQ ID NO: 60843 - DNA, 15 bp, Homo sapiens
gagcgagtgaggctg

SEQ ID NO: 60844 - DNA, 15 bp, Homo sapiens
agagcgagtgaggct

SEQ ID NO: 60845 - DNA, 15 bp, Homo sapiens
aagagcgagtgaggc

SEQ ID NO: 60846 - DNA, 15 bp, Homo sapiens
gaagagcgagtgagg

SEQ ID NO: 60847 - DNA, 15 bp, Homo sapiens
ggaagagcgagtgag

SEQ ID NO: 60848 - DNA, 15 bp, Homo sapiens
gggaagagcgagtga

SEQ ID NO: 60849 - DNA, 15 bp, Homo sapiens
agggaagagcgagtg

SEQ ID NO: 60850 - DNA, 15 bp, Homo sapiens
cagggaagagcgagt

SEQ ID NO: 60851 - DNA, 15 bp, Homo sapiens
gcagggaagagcgag

SEQ ID NO: 60852 - DNA, 15 bp, Homo sapiens
ggcagggaagagcga

SEQ ID NO: 60853 - DNA, 15 bp, Homo sapiens
tggcagggaagagcg

SEQ ID NO: 60854 - DNA, 15 bp, Homo sapiens
ctggcagggaagagc

SEQ ID NO: 60855 - DNA, 15 bp, Homo sapiens
cctggcagggaagag

SEQ ID NO: 60856 - DNA, 15 bp, Homo sapiens
tcctggcagggaaga

SEQ ID NO: 60857 - DNA, 15 bp, Homo sapiens
ttcctggcagggaag

SEQ ID NO: 60858 - DNA, 15 bp, Homo sapiens
tttcctggcagggaa

SEQ ID NO: 60859 - DNA, 15 bp, Homo sapiens
gtttcctggcaggga

SEQ ID NO: 60860 - DNA, 15 bp, Homo sapiens
agtttcctggcaggg

SEQ ID NO: 60861 - DNA, 15 bp, Homo sapiens
gagtttcctggcagg

SEQ ID NO: 60862 - DNA, 15 bp, Homo sapiens
ggagtttcctggcag

SEQ ID NO: 60863 - DNA, 15 bp, Homo sapiens
cggagtttcctggca

SEQ ID NO: 60864 - DNA, 15 bp, Homo sapiens
tcggagtttcctggc

SEQ ID NO: 60865 - DNA, 15 bp, Homo sapiens
ttcggagtttcctgg

SEQ ID NO: 60866 - DNA, 15 bp, Homo sapiens
tttcggagtttcctg

SEQ ID NO: 60867 - DNA, 15 bp, Homo sapiens
atttcggagtttcct

SEQ ID NO: 60868 - DNA, 15 bp, Homo sapiens
tatttcggagtttcc

SEQ ID NO: 60869 - DNA, 15 bp, Homo sapiens
ctatttcggagtttc

SEQ ID NO: 60870 - DNA, 15 bp, Homo sapiens
gctatttcggagttt

SEQ ID NO: 60871 - DNA, 15 bp, Homo sapiens
agctatttcggagtt

SEQ ID NO: 60872 - DNA, 15 bp, Homo sapiens
gagctatttcggagt

SEQ ID NO: 60873 - DNA, 15 bp, Homo sapiens
tgagctatttcggag

SEQ ID NO: 60874 - DNA, 15 bp, Homo sapiens
ttgagctatttcgga

SEQ ID NO: 60875 - DNA, 15 bp, Homo sapiens
gttgagctatttcgg

SEQ ID NO: 60876 - DNA, 15 bp, Homo sapiens
tgttgagctatttcg

SEQ ID NO: 60877 - DNA, 15 bp, Homo sapiens
gtgttgagctatttc

SEQ ID NO: 60878 - DNA, 15 bp, Homo sapiens
cgtgttgagctattt

SEQ ID NO: 60879 - DNA, 15 bp, Homo sapiens
ccgtgttgagctatt

SEQ ID NO: 60880 - DNA, 15 bp, Homo sapiens
cccgtgttgagctat

SEQ ID NO: 60881 - DNA, 15 bp, Homo sapiens
gcccgtgttgagcta

SEQ ID NO: 60882 - DNA, 15 bp, Homo sapiens
agcccgtgttgagct

SEQ ID NO: 60883 - DNA, 15 bp, Homo sapiens
tagcccgtgttgagc

SEQ ID NO: 60884 - DNA, 15 bp, Homo sapiens
ttagcccgtgttgag

SEQ ID NO: 60885 - DNA, 15 bp, Homo sapiens
cttagcccgtgttga

SEQ ID NO: 60886 - DNA, 15 bp, Homo sapiens
ccttagcccgtgttg

SEQ ID NO: 60887 - DNA, 15 bp, Homo sapiens
cccttagcccgtgtt

SEQ ID NO: 60888 - DNA, 15 bp, Homo sapiens
tcccttagcccgtgt

SEQ ID NO: 60889 - DNA, 15 bp, Homo sapiens
ctcccttagcccgtg

SEQ ID NO: 60890 - DNA, 15 bp, Homo sapiens
cctcccttagcccgt

SEQ ID NO: 60891 - DNA, 15 bp, Homo sapiens
tcctcccttagcccg

SEQ ID NO: 60892 - DNA, 15 bp, Homo sapiens
ctcctcccttagccc

SEQ ID NO: 60893 - DNA, 15 bp, Homo sapiens
tctcctcccttagcc

SEQ ID NO: 60894 - DNA, 15 bp, Homo sapiens
ttctcctcccttagc

SEQ ID NO: 60895 - DNA, 15 bp, Homo sapiens
cttctcctcccttag

SEQ ID NO: 60896 - DNA, 15 bp, Homo sapiens
tcttctcctccctta

SEQ ID NO: 60897 - DNA, 15 bp, Homo sapiens
ttcttctcctccctt

SEQ ID NO: 60898 - DNA, 15 bp, Homo sapiens
cttcttctcctccct

SEQ ID NO: 60899 - DNA, 15 bp, Homo sapiens
tcttcttctcctccc

SEQ ID NO: 60900 - DNA, 15 bp, Homo sapiens
ttcttcttctcctcc

SEQ ID NO: 60901 - DNA, 15 bp, Homo sapiens
tttcttcttctcctc

SEQ ID NO: 60902 - DNA, 15 bp, Homo sapiens
ttttcttcttctcct

SEQ ID NO: 60903 - DNA, 15 bp, Homo sapiens
tttttcttcttctcc

SEQ ID NO: 60904 - DNA, 15 bp, Homo sapiens
ttttttcttcttctc

SEQ ID NO: 60905 - DNA, 15 bp, Homo sapiens
tttttttcttcttct

SEQ ID NO: 60906 - DNA, 15 bp, Homo sapiens
ttttttttcttcttc

SEQ ID NO: 60907 - DNA, 15 bp, Homo sapiens
attttttttcttctt

SEQ ID NO: 60908 - DNA, 15 bp, Homo sapiens
gattttttttcttct

SEQ ID NO: 60909 - DNA, 15 bp, Homo sapiens
ggattttttttcttc

SEQ ID NO: 60910 - DNA, 15 bp, Homo sapiens
tggattttttttctt

SEQ ID NO: 60911 - DNA, 15 bp, Homo sapiens
ttggattttttttct

SEQ ID NO: 60912 - DNA, 15 bp, Homo sapiens
cttggattttttttc

SEQ ID NO: 60913 - DNA, 15 bp, Homo sapiens
gcttggatttttttt

SEQ ID NO: 60914 - DNA, 15 bp, Homo sapiens
ggcttggattttttt

SEQ ID NO: 60915 - DNA, 15 bp, Homo sapiens
aggcttggatttttt

SEQ ID NO: 60916 - DNA, 15 bp, Homo sapiens
gaggcttggattttt

SEQ ID NO: 60917 - DNA, 15 bp, Homo sapiens
agaggcttggatttt

SEQ ID NO: 60918 - DNA, 15 bp, Homo sapiens
cagaggcttggattt

SEQ ID NO: 60919 - DNA, 15 bp, Homo sapiens
ccagaggcttggatt

SEQ ID NO: 60920 - DNA, 15 bp, Homo sapiens
accagaggcttggat

SEQ ID NO: 60921 - DNA, 15 bp, Homo sapiens
taccagaggcttgga

SEQ ID NO: 60922 - DNA, 15 bp, Homo sapiens
ctaccagaggcttgg

SEQ ID NO: 60923 - DNA, 15 bp, Homo sapiens
tctaccagaggcttg

SEQ ID NO: 60924 - DNA, 15 bp, Homo sapiens
ctctaccagaggctt

SEQ ID NO: 60925 - DNA, 15 bp, Homo sapiens
tctctaccagaggct

SEQ ID NO: 60926 - DNA, 15 bp, Homo sapiens
ttctctaccagaggc

SEQ ID NO: 60927 - DNA, 15 bp, Homo sapiens
cttctctaccagagg

SEQ ID NO: 60928 - DNA, 15 bp, Homo sapiens
ccttctctaccagag

SEQ ID NO: 60929 - DNA, 15 bp, Homo sapiens
cccttctctaccaga

SEQ ID NO: 60930 - DNA, 15 bp, Homo sapiens
ccccttctctaccag

SEQ ID NO: 60931 - DNA, 15 bp, Homo sapiens
accccttctctacca

SEQ ID NO: 60932 - DNA, 15 bp, Homo sapiens
gaccccttctctacc

SEQ ID NO: 60933 - DNA, 15 bp, Homo sapiens
tgaccccttctctac

SEQ ID NO: 60934 - DNA, 15 bp, Homo sapiens
atgaccccttctcta

SEQ ID NO: 60935 - DNA, 15 bp, Homo sapiens
tatgaccccttctct

SEQ ID NO: 60936 - DNA, 15 bp, Homo sapiens
gtatgaccccttctc

SEQ ID NO: 60937 - DNA, 15 bp, Homo sapiens
ggtatgaccccttct

SEQ ID NO: 60938 - DNA, 15 bp, Homo sapiens
aggtatgaccccttc

SEQ ID NO: 60939 - DNA, 15 bp, Homo sapiens
caggtatgacccctt

SEQ ID NO: 60940 - DNA, 15 bp, Homo sapiens
acaggtatgacccct

SEQ ID NO: 60941 - DNA, 15 bp, Homo sapiens
gacaggtatgacccc

SEQ ID NO: 60942 - DNA, 15 bp, Homo sapiens
tgacaggtatgaccc

SEQ ID NO: 60943 - DNA, 15 bp, Homo sapiens
atgacaggtatgacc

SEQ ID NO: 60944 - DNA, 15 bp, Homo sapiens
aatgacaggtatgac

SEQ ID NO: 60945 - DNA, 15 bp, Homo sapiens
aaatgacaggtatga

SEQ ID NO: 60946 - DNA, 15 bp, Homo sapiens
gaaatgacaggtatg

SEQ ID NO: 60947 - DNA, 15 bp, Homo sapiens
ggaaatgacaggtat

SEQ ID NO: 60948 - DNA, 15 bp, Homo sapiens
aggaaatgacaggta

SEQ ID NO: 60949 - DNA, 15 bp, Homo sapiens
caggaaatgacaggt

SEQ ID NO: 60950 - DNA, 15 bp, Homo sapiens
gcaggaaatgacagg

SEQ ID NO: 60951 - DNA, 15 bp, Homo sapiens
tgcaggaaatgacag

SEQ ID NO: 60952 - DNA, 15 bp, Homo sapiens
ttgcaggaaatgaca

SEQ ID NO: 60953 - DNA, 15 bp, Homo sapiens
attgcaggaaatgac

SEQ ID NO: 60954 - DNA, 15 bp, Homo sapiens
aattgcaggaaatga

SEQ ID NO: 60955 - DNA, 15 bp, Homo sapiens
aaattgcaggaaatg

SEQ ID NO: 60956 - DNA, 15 bp, Homo sapiens
gaaattgcaggaaat

SEQ ID NO: 60957 - DNA, 15 bp, Homo sapiens
tgaaattgcaggaaa

SEQ ID NO: 60958 - DNA, 15 bp, Homo sapiens
atgaaattgcaggaa

SEQ ID NO: 60959 - DNA, 15 bp, Homo sapiens
gatgaaattgcagga

SEQ ID NO: 60960 - DNA, 15 bp, Homo sapiens
ggatgaaattgcagg

SEQ ID NO: 60961 - DNA, 15 bp, Homo sapiens
tggatgaaattgcag

SEQ ID NO: 60962 - DNA, 15 bp, Homo sapiens
atggatgaaattgca

SEQ ID NO: 60963 - DNA, 15 bp, Homo sapiens
aatggatgaaattgc

SEQ ID NO: 60964 - DNA, 15 bp, Homo sapiens
aaatggatgaaattg

SEQ ID NO: 60965 - DNA, 15 bp, Homo sapiens
taaatggatgaaatt

SEQ ID NO: 60966 - DNA, 15 bp, Homo sapiens
ataaatggatgaaat

SEQ ID NO: 60967 - DNA, 15 bp, Homo sapiens
tataaatggatgaaa

SEQ ID NO: 60968 - DNA, 15 bp, Homo sapiens
ctataaatggatgaa

SEQ ID NO: 60969 - DNA, 15 bp, Homo sapiens
actataaatggatga

SEQ ID NO: 60970 - DNA, 15 bp, Homo sapiens
aactataaatggatg

SEQ ID NO: 60971 - DNA, 15 bp, Homo sapiens
caactataaatggat

SEQ ID NO: 60972 - DNA, 15 bp, Homo sapiens
ccaactataaatgga

SEQ ID NO: 60973 - DNA, 15 bp, Homo sapiens
cccaactataaatgg

SEQ ID NO: 60974 - DNA, 15 bp, Homo sapiens
ccccaactataaatg

SEQ ID NO: 60975 - DNA, 15 bp, Homo sapiens
tccccaactataaat

SEQ ID NO: 60976 - DNA, 15 bp, Homo sapiens
ttccccaactataaa

SEQ ID NO: 60977 - DNA, 15 bp, Homo sapiens
tttccccaactataa

SEQ ID NO: 60978 - DNA, 15 bp, Homo sapiens
ctttccccaactata

SEQ ID NO: 60979 - DNA, 15 bp, Homo sapiens
actttccccaactat

SEQ ID NO: 60980 - DNA, 15 bp, Homo sapiens
cactttccccaacta

SEQ ID NO: 60981 - DNA, 15 bp, Homo sapiens
tcactttccccaact

SEQ ID NO: 60982 - DNA, 15 bp, Homo sapiens
ctcactttccccaac

SEQ ID NO: 60983 - DNA, 15 bp, Homo sapiens
cctcactttccccaa

SEQ ID NO: 60984 - DNA, 15 bp, Homo sapiens
gcctcactttcccca

SEQ ID NO: 60985 - DNA, 15 bp, Homo sapiens
ggcctcactttcccc

SEQ ID NO: 60986 - DNA, 15 bp, Homo sapiens
gggcctcactttccc

SEQ ID NO: 60987 - DNA, 15 bp, Homo sapiens
tgggcctcactttcc

SEQ ID NO: 60988 - DNA, 15 bp, Homo sapiens
ctgggcctcactttc

SEQ ID NO: 60989 - DNA, 15 bp, Homo sapiens
tctgggcctcacttt

SEQ ID NO: 60990 - DNA, 15 bp, Homo sapiens
ctctgggcctcactt

SEQ ID NO: 60991 - DNA, 15 bp, Homo sapiens
tctctgggcctcact

SEQ ID NO: 60992 - DNA, 15 bp, Homo sapiens
ctctctgggcctcac

SEQ ID NO: 60993 - DNA, 15 bp, Homo sapiens
cctctctgggcctca

SEQ ID NO: 60994 - DNA, 15 bp, Homo sapiens
ccctctctgggcctc

SEQ ID NO: 60995 - DNA, 15 bp, Homo sapiens
cccctctctgggcct

SEQ ID NO: 60996 - DNA, 15 bp, Homo sapiens
gcccctctctgggcc

SEQ ID NO: 60997 - DNA, 15 bp, Homo sapiens
tgcccctctctgggc

SEQ ID NO: 60998 - DNA, 15 bp, Homo sapiens
ctgcccctctctggg

SEQ ID NO: 60999 - DNA, 15 bp, Homo sapiens
actgcccctctctgg

SEQ ID NO: 61000 - DNA, 15 bp, Homo sapiens
cactgcccctctctg

SEQ ID NO: 61001 - DNA, 15 bp, Homo sapiens
tcactgcccctctct

SEQ ID NO: 61002 - DNA, 15 bp, Homo sapiens
gtcactgcccctctc

SEQ ID NO: 61003 - DNA, 15 bp, Homo sapiens
agtcactgcccctct

SEQ ID NO: 61004 - DNA, 15 bp, Homo sapiens
aagtcactgcccctc

SEQ ID NO: 61005 - DNA, 15 bp, Homo sapiens
caagtcactgcccct

SEQ ID NO: 61006 - DNA, 15 bp, Homo sapiens
gcaagtcactgcccc

SEQ ID NO: 61007 - DNA, 15 bp, Homo sapiens
ggcaagtcactgccc

SEQ ID NO: 61008 - DNA, 15 bp, Homo sapiens
gggcaagtcactgcc

SEQ ID NO: 61009 - DNA, 15 bp, Homo sapiens
tgggcaagtcactgc

SEQ ID NO: 61010 - DNA, 15 bp, Homo sapiens
ttgggcaagtcactg

SEQ ID NO: 61011 - DNA, 15 bp, Homo sapiens
cttgggcaagtcact

SEQ ID NO: 61012 - DNA, 15 bp, Homo sapiens
ccttgggcaagtcac

SEQ ID NO: 61013 - DNA, 15 bp, Homo sapiens
accttgggcaagtca

SEQ ID NO: 61014 - DNA, 15 bp, Homo sapiens
gaccttgggcaagtc

SEQ ID NO: 61015 - DNA, 15 bp, Homo sapiens
tgaccttgggcaagt

SEQ ID NO: 61016 - DNA, 15 bp, Homo sapiens
ttgaccttgggcaag

SEQ ID NO: 61017 - DNA, 15 bp, Homo sapiens
gttgaccttgggcaa

SEQ ID NO: 61018 - DNA, 15 bp, Homo sapiens
ggttgaccttgggca

SEQ ID NO: 61019 - DNA, 15 bp, Homo sapiens
gggttgaccttgggc

SEQ ID NO: 61020 - DNA, 15 bp, Homo sapiens
tgggttgaccttggg

SEQ ID NO: 61021 - DNA, 15 bp, Homo sapiens
ctgggttgaccttgg

SEQ ID NO: 61022 - DNA, 15 bp, Homo sapiens
gctgggttgaccttg

SEQ ID NO: 61023 - DNA, 15 bp, Homo sapiens
ggctgggttgacctt

SEQ ID NO: 61024 - DNA, 15 bp, Homo sapiens
cggctgggttgacct

SEQ ID NO: 61025 - DNA, 15 bp, Homo sapiens
ccggctgggttgacc

SEQ ID NO: 61026 - DNA, 15 bp, Homo sapiens
cccggctgggttgac

SEQ ID NO: 61027 - DNA, 15 bp, Homo sapiens
acccggctgggttga

SEQ ID NO: 61028 - DNA, 15 bp, Homo sapiens
tacccggctgggttg

SEQ ID NO: 61029 - DNA, 15 bp, Homo sapiens
ctacccggctgggtt

SEQ ID NO: 61030 - DNA, 15 bp, Homo sapiens
gctacccggctgggt

SEQ ID NO: 61031 - DNA, 15 bp, Homo sapiens
tgctacccggctggg

SEQ ID NO: 61032 - DNA, 15 bp, Homo sapiens
ctgctacccggctgg

SEQ ID NO: 61033 - DNA, 15 bp, Homo sapiens
gctgctacccggctg

SEQ ID NO: 61034 - DNA, 15 bp, Homo sapiens
agctgctacccggct

SEQ ID NO: 61035 - DNA, 15 bp, Homo sapiens
tagctgctacccggc

SEQ ID NO: 61036 - DNA, 15 bp, Homo sapiens
ttagctgctacccgg

SEQ ID NO: 61037 - DNA, 15 bp, Homo sapiens
cttagctgctacccg

SEQ ID NO: 61038 - DNA, 15 bp, Homo sapiens
acttagctgctaccc

SEQ ID NO: 61039 - DNA, 15 bp, Homo sapiens
tacttagctgctacc

SEQ ID NO: 61040 - DNA, 15 bp, Homo sapiens
ctacttagctgctac

SEQ ID NO: 61041 - DNA, 15 bp, Homo sapiens
cctacttagctgcta

SEQ ID NO: 61042 - DNA, 15 bp, Homo sapiens
tcctacttagctgct

SEQ ID NO: 61043 - DNA, 15 bp, Homo sapiens
atcctacttagctgc

SEQ ID NO: 61044 - DNA, 15 bp, Homo sapiens
catcctacttagctg

SEQ ID NO: 61045 - DNA, 15 bp, Homo sapiens
tcatcctacttagct

SEQ ID NO: 61046 - DNA, 15 bp, Homo sapiens
ctcatcctacttagc

SEQ ID NO: 61047 - DNA, 15 bp, Homo sapiens
tctcatcctacttag

SEQ ID NO: 61048 - DNA, 15 bp, Homo sapiens
ctctcatcctactta

SEQ ID NO: 61049 - DNA, 15 bp, Homo sapiens
actctcatcctactt

SEQ ID NO: 61050 - DNA, 15 bp, Homo sapiens
cactctcatcctact

SEQ ID NO: 61051 - DNA, 15 bp, Homo sapiens
gcactctcatcctac

SEQ ID NO: 61052 - DNA, 15 bp, Homo sapiens
tgcactctcatccta

SEQ ID NO: 61053 - DNA, 15 bp, Homo sapiens
ctgcactctcatcct

SEQ ID NO: 61054 - DNA, 15 bp, Homo sapiens
cctgcactctcatcc

SEQ ID NO: 61055 - DNA, 15 bp, Homo sapiens
ccctgcactctcatc

SEQ ID NO: 61056 - DNA, 15 bp, Homo sapiens
accctgcactctcat

SEQ ID NO: 61057 - DNA, 15 bp, Homo sapiens
aaccctgcactctca

SEQ ID NO: 61058 - DNA, 15 bp, Homo sapiens
gaaccctgcactctc

SEQ ID NO: 61059 - DNA, 15 bp, Homo sapiens
tgaaccctgcactct

SEQ ID NO: 61060 - DNA, 15 bp, Homo sapiens
atgaaccctgcactc

SEQ ID NO: 61061 - DNA, 15 bp, Homo sapiens
catgaaccctgcact

SEQ ID NO: 61062 - DNA, 15 bp, Homo sapiens
gcatgaaccctgcac

SEQ ID NO: 61063 - DNA, 15 bp, Homo sapiens
agcatgaaccctgca

SEQ ID NO: 61064 - DNA, 15 bp, Homo sapiens
aagcatgaaccctgc

SEQ ID NO: 61065 - DNA, 15 bp, Homo sapiens
aaagcatgaaccctg

SEQ ID NO: 61066 - DNA, 15 bp, Homo sapiens
gaaagcatgaaccct

SEQ ID NO: 61067 - DNA, 15 bp, Homo sapiens
ggaaagcatgaaccc

SEQ ID NO: 61068 - DNA, 15 bp, Homo sapiens
tggaaagcatgaacc

SEQ ID NO: 61069 - DNA, 15 bp, Homo sapiens
ctggaaagcatgaac

SEQ ID NO: 61070 - DNA, 15 bp, Homo sapiens
tctggaaagcatgaa

SEQ ID NO: 61071 - DNA, 15 bp, Homo sapiens
atctggaaagcatga

SEQ ID NO: 61072 - DNA, 15 bp, Homo sapiens
tatctggaaagcatg

SEQ ID NO: 61073 - DNA, 15 bp, Homo sapiens
ttatctggaaagcat

SEQ ID NO: 61074 - DNA, 15 bp, Homo sapiens
gttatctggaaagca

SEQ ID NO: 61075 - DNA, 15 bp, Homo sapiens
ggttatctggaaagc

SEQ ID NO: 61076 - DNA, 15 bp, Homo sapiens
tggttatctggaaag

SEQ ID NO: 61077 - DNA, 15 bp, Homo sapiens
gtggttatctggaaa

SEQ ID NO: 61078 - DNA, 15 bp, Homo sapiens
tgtggttatctggaa

SEQ ID NO: 61079 - DNA, 15 bp, Homo sapiens
atgtggttatctgga

SEQ ID NO: 61080 - DNA, 15 bp, Homo sapiens
catgtggttatctgg

SEQ ID NO: 61081 - DNA, 15 bp, Homo sapiens
gcatgtggttatctg

SEQ ID NO: 61082 - DNA, 15 bp, Homo sapiens
agcatgtggttatct

SEQ ID NO: 61083 - DNA, 15 bp, Homo sapiens
gagcatgtggttatc

SEQ ID NO: 61084 - DNA, 15 bp, Homo sapiens
tgagcatgtggttat

SEQ ID NO: 61085 - DNA, 15 bp, Homo sapiens
ttgagcatgtggtta

SEQ ID NO: 61086 - DNA, 15 bp, Homo sapiens
gttgagcatgtggtt

SEQ ID NO: 61087 - DNA, 15 bp, Homo sapiens
agttgagcatgtggt

SEQ ID NO: 61088 - DNA, 15 bp, Homo sapiens
cagttgagcatgtgg

SEQ ID NO: 61089 - DNA, 15 bp, Homo sapiens
acagttgagcatgtg

SEQ ID NO: 61090 - DNA, 15 bp, Homo sapiens
cacagttgagcatgt

SEQ ID NO: 61091 - DNA, 15 bp, Homo sapiens
gcacagttgagcatg

SEQ ID NO: 61092 - DNA, 15 bp, Homo sapiens
ggcacagttgagcat

SEQ ID NO: 61093 - DNA, 15 bp, Homo sapiens
tggcacagttgagca

SEQ ID NO: 61094 - DNA, 15 bp, Homo sapiens
atggcacagttgagc

SEQ ID NO: 61095 - DNA, 15 bp, Homo sapiens
catggcacagttgag

SEQ ID NO: 61096 - DNA, 15 bp, Homo sapiens
gcatggcacagttga

SEQ ID NO: 61097 - DNA, 15 bp, Homo sapiens
agcatggcacagttg

SEQ ID NO: 61098 - DNA, 15 bp, Homo sapiens
cagcatggcacagtt

SEQ ID NO: 61099 - DNA, 15 bp, Homo sapiens
acagcatggcacagt

SEQ ID NO: 61100 - DNA, 15 bp, Homo sapiens
gacagcatggcacag

SEQ ID NO: 61101 - DNA, 15 bp, Homo sapiens
agacagcatggcaca

SEQ ID NO: 61102 - DNA, 15 bp, Homo sapiens
gagacagcatggcac

SEQ ID NO: 61103 - DNA, 15 bp, Homo sapiens
tgagacagcatggca

SEQ ID NO: 61104 - DNA, 15 bp, Homo sapiens
atgagacagcatggc

SEQ ID NO: 61105 - DNA, 15 bp, Homo sapiens
aatgagacagcatgg

SEQ ID NO: 61106 - DNA, 15 bp, Homo sapiens
caatgagacagcatg

SEQ ID NO: 61107 - DNA, 15 bp, Homo sapiens
ccaatgagacagcat

SEQ ID NO: 61108 - DNA, 15 bp, Homo sapiens
accaatgagacagca

SEQ ID NO: 61109 - DNA, 15 bp, Homo sapiens
taccaatgagacagc

SEQ ID NO: 61110 - DNA, 15 bp, Homo sapiens
ctaccaatgagacag

SEQ ID NO: 61111 - DNA, 15 bp, Homo sapiens
actaccaatgagaca

SEQ ID NO: 61112 - DNA, 15 bp, Homo sapiens
cactaccaatgagac

SEQ ID NO: 61113 - DNA, 15 bp, Homo sapiens
ccactaccaatgaga

SEQ ID NO: 61114 - DNA, 15 bp, Homo sapiens
accactaccaatgag

SEQ ID NO: 61115 - DNA, 15 bp, Homo sapiens
aaccactaccaatga

SEQ ID NO: 61116 - DNA, 15 bp, Homo sapiens
gaaccactaccaatg

SEQ ID NO: 61117 - DNA, 15 bp, Homo sapiens
tgaaccactaccaat

SEQ ID NO: 61118 - DNA, 15 bp, Homo sapiens
atgaaccactaccaa

SEQ ID NO: 61119 - DNA, 15 bp, Homo sapiens
catgaaccactacca

SEQ ID NO: 61120 - DNA, 15 bp, Homo sapiens
ccatgaaccactacc

SEQ ID NO: 61121 - DNA, 15 bp, Homo sapiens
gccatgaaccactac

SEQ ID NO: 61122 - DNA, 15 bp, Homo sapiens
tgccatgaaccacta

SEQ ID NO: 61123 - DNA, 15 bp, Homo sapiens
ctgccatgaaccact

SEQ ID NO: 61124 - DNA, 15 bp, Homo sapiens
gctgccatgaaccac

SEQ ID NO: 61125 - DNA, 15 bp, Homo sapiens
tgctgccatgaacca

SEQ ID NO: 61126 - DNA, 15 bp, Homo sapiens
atgctgccatgaacc

SEQ ID NO: 61127 - DNA, 15 bp, Homo sapiens
gatgctgccatgaac

SEQ ID NO: 61128 - DNA, 15 bp, Homo sapiens
agatgctgccatgaa

SEQ ID NO: 61129 - DNA, 15 bp, Homo sapiens
cagatgctgccatga

SEQ ID NO: 61130 - DNA, 15 bp, Homo sapiens
tcagatgctgccatg

SEQ ID NO: 61131 - DNA, 15 bp, Homo sapiens
ttcagatgctgccat

SEQ ID NO: 61132 - DNA, 15 bp, Homo sapiens
tttcagatgctgcca

SEQ ID NO: 61133 - DNA, 15 bp, Homo sapiens
ctttcagatgctgcc

SEQ ID NO: 61134 - DNA, 15 bp, Homo sapiens
gctttcagatgctgc

SEQ ID NO: 61135 - DNA, 15 bp, Homo sapiens
agctttcagatgctg

SEQ ID NO: 61136 - DNA, 15 bp, Homo sapiens
tagctttcagatgct

SEQ ID NO: 61137 - DNA, 15 bp, Homo sapiens
atagctttcagatgc

SEQ ID NO: 61138 - DNA, 15 bp, Homo sapiens
aatagctttcagatg

SEQ ID NO: 61139 - DNA, 15 bp, Homo sapiens
aaatagctttcagat

SEQ ID NO: 61140 - DNA, 15 bp, Homo sapiens
taaatagctttcaga

SEQ ID NO: 61141 - DNA, 15 bp, Homo sapiens
ataaatagctttcag

SEQ ID NO: 61142 - DNA, 15 bp, Homo sapiens
aataaatagctttca

SEQ ID NO: 61143 - DNA, 15 bp, Homo sapiens
aaataaatagctttc

SEQ ID NO: 61144 - DNA, 15 bp, Homo sapiens
aaaataaatagcttt

SEQ ID NO: 61145 - DNA, 15 bp, Homo sapiens
gaaaataaatagctt

SEQ ID NO: 61146 - DNA, 15 bp, Homo sapiens
agaaaataaatagct

SEQ ID NO: 61147 - DNA, 15 bp, Homo sapiens
aagaaaataaatagc

SEQ ID NO: 61148 - DNA, 15 bp, Homo sapiens
taagaaaataaatag

SEQ ID NO: 61149 - DNA, 15 bp, Homo sapiens
ctaagaaaataaata

SEQ ID NO: 61150 - DNA, 15 bp, Homo sapiens
tctaagaaaataaat

SEQ ID NO: 61151 - DNA, 15 bp, Homo sapiens
atctaagaaaataaa

SEQ ID NO: 61152 - DNA, 15 bp, Homo sapiens
tatctaagaaaataa

SEQ ID NO: 61153 - DNA, 15 bp, Homo sapiens
atatctaagaaaata

SEQ ID NO: 61154 - DNA, 15 bp, Homo sapiens
tatatctaagaaaat

SEQ ID NO: 61155 - DNA, 15 bp, Homo sapiens
atatatctaagaaaa

SEQ ID NO: 61156 - DNA, 15 bp, Homo sapiens
aatatatctaagaaa

SEQ ID NO: 61157 - DNA, 15 bp, Homo sapiens
caatatatctaagaa

SEQ ID NO: 61158 - DNA, 15 bp, Homo sapiens
ccaatatatctaaga

SEQ ID NO: 61159 - DNA, 15 bp, Homo sapiens
cccaatatatctaag

SEQ ID NO: 61160 - DNA, 15 bp, Homo sapiens
acccaatatatctaa

SEQ ID NO: 61161 - DNA, 15 bp, Homo sapiens
cacccaatatatcta

SEQ ID NO: 61162 - DNA, 15 bp, Homo sapiens
ccacccaatatatct

SEQ ID NO: 61163 - DNA, 15 bp, Homo sapiens
gccacccaatatatc

SEQ ID NO: 61164 - DNA, 15 bp, Homo sapiens
cgccacccaatatat

SEQ ID NO: 61165 - DNA, 15 bp, Homo sapiens
tcgccacccaatata

SEQ ID NO: 61166 - DNA, 15 bp, Homo sapiens
atcgccacccaatat

SEQ ID NO: 61167 - DNA, 15 bp, Homo sapiens
aatcgccacccaata

SEQ ID NO: 61168 - DNA, 15 bp, Homo sapiens
gaatcgccacccaat

SEQ ID NO: 61169 - DNA, 15 bp, Homo sapiens
agaatcgccacccaa

SEQ ID NO: 61170 - DNA, 15 bp, Homo sapiens
aagaatcgccaccca

SEQ ID NO: 61171 - DNA, 15 bp, Homo sapiens
gaagaatcgccaccc

SEQ ID NO: 61172 - DNA, 15 bp, Homo sapiens
ggaagaatcgccacc

SEQ ID NO: 61173 - DNA, 15 bp, Homo sapiens
aggaagaatcgccac

SEQ ID NO: 61174 - DNA, 15 bp, Homo sapiens
taggaagaatcgcca

SEQ ID NO: 61175 - DNA, 15 bp, Homo sapiens
ttaggaagaatcgcc

SEQ ID NO: 61176 - DNA, 15 bp, Homo sapiens
cttaggaagaatcgc

SEQ ID NO: 61177 - DNA, 15 bp, Homo sapiens
acttaggaagaatcg

SEQ ID NO: 61178 - DNA, 15 bp, Homo sapiens
aacttaggaagaatc

SEQ ID NO: 61179 - DNA, 15 bp, Homo sapiens
aaacttaggaagaat

SEQ ID NO: 61180 - DNA, 15 bp, Homo sapiens
gaaacttaggaagaa

SEQ ID NO: 61181 - DNA, 15 bp, Homo sapiens
agaaacttaggaaga

SEQ ID NO: 61182 - DNA, 15 bp, Homo sapiens
tagaaacttaggaag

SEQ ID NO: 61183 - DNA, 15 bp, Homo sapiens
ttagaaacttaggaa

SEQ ID NO: 61184 - DNA, 15 bp, Homo sapiens
cttagaaacttagga

SEQ ID NO: 61185 - DNA, 15 bp, Homo sapiens
tcttagaaacttagg

SEQ ID NO: 61186 - DNA, 15 bp, Homo sapiens
ttcttagaaacttag

SEQ ID NO: 61187 - DNA, 15 bp, Homo sapiens
gttcttagaaactta

SEQ ID NO: 61188 - DNA, 15 bp, Homo sapiens
tgttcttagaaactt

SEQ ID NO: 61189 - DNA, 15 bp, Homo sapiens
ttgttcttagaaact

SEQ ID NO: 61190 - DNA, 15 bp, Homo sapiens
attgttcttagaaac

SEQ ID NO: 61191 - DNA, 15 bp, Homo sapiens
tattgttcttagaaa

SEQ ID NO: 61192 - DNA, 15 bp, Homo sapiens
ttattgttcttagaa

SEQ ID NO: 61193 - DNA, 15 bp, Homo sapiens
attattgttcttaga

SEQ ID NO: 61194 - DNA, 15 bp, Homo sapiens
gattattgttcttag

SEQ ID NO: 61195 - DNA, 15 bp, Homo sapiens
tgattattgttctta

SEQ ID NO: 61196 - DNA, 15 bp, Homo sapiens
ctgattattgttctt

SEQ ID NO: 61197 - DNA, 15 bp, Homo sapiens
tctgattattgttct

SEQ ID NO: 61198 - DNA, 15 bp, Homo sapiens
ttctgattattgttc

SEQ ID NO: 61199 - DNA, 15 bp, Homo sapiens
cttctgattattgtt

SEQ ID NO: 61200 - DNA, 15 bp, Homo sapiens
ccttctgattattgt

SEQ ID NO: 61201 - DNA, 15 bp, Homo sapiens
tccttctgattattg

SEQ ID NO: 61202 - DNA, 15 bp, Homo sapiens
atccttctgattatt

SEQ ID NO: 61203 - DNA, 15 bp, Homo sapiens
tatccttctgattat

SEQ ID NO: 61204 - DNA, 15 bp, Homo sapiens
atatccttctgatta

SEQ ID NO: 61205 - DNA, 15 bp, Homo sapiens
tatatccttctgatt

SEQ ID NO: 61206 - DNA, 15 bp, Homo sapiens
atatatccttctgat

SEQ ID NO: 61207 - DNA, 15 bp, Homo sapiens
tatatatccttctga

SEQ ID NO: 61208 - DNA, 15 bp, Homo sapiens
atatatatccttctg

SEQ ID NO: 61209 - DNA, 15 bp, Homo sapiens
aatatatatccttct

SEQ ID NO: 61210 - DNA, 15 bp, Homo sapiens
caatatatatccttc

SEQ ID NO: 61211 - DNA, 15 bp, Homo sapiens
acaatatatatcctt

SEQ ID NO: 61212 - DNA, 15 bp, Homo sapiens
aacaatatatatcct

SEQ ID NO: 61213 - DNA, 15 bp, Homo sapiens
caacaatatatatcc

SEQ ID NO: 61214 - DNA, 15 bp, Homo sapiens
gcaacaatatatatc

SEQ ID NO: 61215 - DNA, 15 bp, Homo sapiens
tgcaacaatatatat

SEQ ID NO: 61216 - DNA, 15 bp, Homo sapiens
ctgcaacaatatata

SEQ ID NO: 61217 - DNA, 15 bp, Homo sapiens
cctgcaacaatatat

SEQ ID NO: 61218 - DNA, 15 bp, Homo sapiens
acctgcaacaatata

SEQ ID NO: 61219 - DNA, 15 bp, Homo sapiens
aacctgcaacaatat

SEQ ID NO: 61220 - DNA, 15 bp, Homo sapiens
taacctgcaacaata

SEQ ID NO: 61221 - DNA, 15 bp, Homo sapiens
ctaacctgcaacaat

SEQ ID NO: 61222 - DNA, 15 bp, Homo sapiens
tctaacctgcaacaa

SEQ ID NO: 61223 - DNA, 15 bp, Homo sapiens
gtctaacctgcaaca

SEQ ID NO: 61224 - DNA, 15 bp, Homo sapiens
agtctaacctgcaac

SEQ ID NO: 61225 - DNA, 15 bp, Homo sapiens
cagtctaacctgcaa

SEQ ID NO: 61226 - DNA, 15 bp, Homo sapiens
acagtctaacctgca

SEQ ID NO: 61227 - DNA, 15 bp, Homo sapiens
gacagtctaacctgc

SEQ ID NO: 61228 - DNA, 15 bp, Homo sapiens
agacagtctaacctg

SEQ ID NO: 61229 - DNA, 15 bp, Homo sapiens
cagacagtctaacct

SEQ ID NO: 61230 - DNA, 15 bp, Homo sapiens
ccagacagtctaacc

SEQ ID NO: 61231 - DNA, 15 bp, Homo sapiens
tccagacagtctaac

SEQ ID NO: 61232 - DNA, 15 bp, Homo sapiens
ttccagacagtctaa

SEQ ID NO: 61233 - DNA, 15 bp, Homo sapiens
cttccagacagtcta

SEQ ID NO: 61234 - DNA, 15 bp, Homo sapiens
gcttccagacagtct

SEQ ID NO: 61235 - DNA, 15 bp, Homo sapiens
tgcttccagacagtc

SEQ ID NO: 61236 - DNA, 15 bp, Homo sapiens
ctgcttccagacagt

SEQ ID NO: 61237 - DNA, 15 bp, Homo sapiens
tctgcttccagacag

SEQ ID NO: 61238 - DNA, 15 bp, Homo sapiens
ctctgcttccagaca

SEQ ID NO: 61239 - DNA, 15 bp, Homo sapiens
cctctgcttccagac

SEQ ID NO: 61240 - DNA, 15 bp, Homo sapiens
gcctctgcttccaga

SEQ ID NO: 61241 - DNA, 15 bp, Homo sapiens
agcctctgcttccag

SEQ ID NO: 61242 - DNA, 15 bp, Homo sapiens
cagcctctgcttcca

SEQ ID NO: 61243 - DNA, 15 bp, Homo sapiens
tcagcctctgcttcc

SEQ ID NO: 61244 - DNA, 15 bp, Homo sapiens
ttcagcctctgcttc

SEQ ID NO: 61245 - DNA, 15 bp, Homo sapiens
tttcagcctctgctt

SEQ ID NO: 61246 - DNA, 15 bp, Homo sapiens
atttcagcctctgct

SEQ ID NO: 61247 - DNA, 15 bp, Homo sapiens
tatttcagcctctgc

SEQ ID NO: 61248 - DNA, 15 bp, Homo sapiens
ctatttcagcctctg

SEQ ID NO: 61249 - DNA, 15 bp, Homo sapiens
tctatttcagcctct

SEQ ID NO: 61250 - DNA, 15 bp, Homo sapiens
ctctatttcagcctc

SEQ ID NO: 61251 - DNA, 15 bp, Homo sapiens
actctatttcagcct

SEQ ID NO: 61252 - DNA, 15 bp, Homo sapiens
aactctatttcagcc

SEQ ID NO: 61253 - DNA, 15 bp, Homo sapiens
aaactctatttcagc

SEQ ID NO: 61254 - DNA, 15 bp, Homo sapiens
caaactctatttcag

SEQ ID NO: 61255 - DNA, 15 bp, Homo sapiens
tcaaactctatttca

SEQ ID NO: 61256 - DNA, 15 bp, Homo sapiens
atcaaactctatttc

SEQ ID NO: 61257 - DNA, 15 bp, Homo sapiens
catcaaactctattt

SEQ ID NO: 61258 - DNA, 15 bp, Homo sapiens
acatcaaactctatt

SEQ ID NO: 61259 - DNA, 15 bp, Homo sapiens
tacatcaaactctat

SEQ ID NO: 61260 - DNA, 15 bp, Homo sapiens
atacatcaaactcta

SEQ ID NO: 61261 - DNA, 15 bp, Homo sapiens
catacatcaaactct

SEQ ID NO: 61262 - DNA, 15 bp, Homo sapiens
ccatacatcaaactc

SEQ ID NO: 61263 - DNA, 15 bp, Homo sapiens
cccatacatcaaact

SEQ ID NO: 61264 - DNA, 15 bp, Homo sapiens
acccatacatcaaac

SEQ ID NO: 61265 - DNA, 15 bp, Homo sapiens
tacccatacatcaaa

SEQ ID NO: 61266 - DNA, 15 bp, Homo sapiens
atacccatacatcaa

SEQ ID NO: 61267 - DNA, 15 bp, Homo sapiens
aatacccatacatca

SEQ ID NO: 61268 - DNA, 15 bp, Homo sapiens
aaatacccatacatc

SEQ ID NO: 61269 - DNA, 15 bp, Homo sapiens
taaatacccatacat

SEQ ID NO: 61270 - DNA, 15 bp, Homo sapiens
ataaatacccataca

SEQ ID NO: 61271 - DNA, 15 bp, Homo sapiens
cataaatacccatac

SEQ ID NO: 61272 - DNA, 15 bp, Homo sapiens
tcataaatacccata

SEQ ID NO: 61273 - DNA, 15 bp, Homo sapiens
ctcataaatacccat

SEQ ID NO: 61274 - DNA, 15 bp, Homo sapiens
cctcataaataccca

SEQ ID NO: 61275 - DNA, 15 bp, Homo sapiens
ccctcataaataccc

SEQ ID NO: 61276 - DNA, 15 bp, Homo sapiens
gccctcataaatacc

SEQ ID NO: 61277 - DNA, 15 bp, Homo sapiens
agccctcataaatac

SEQ ID NO: 61278 - DNA, 15 bp, Homo sapiens
gagccctcataaata

SEQ ID NO: 61279 - DNA, 15 bp, Homo sapiens
tgagccctcataaat

SEQ ID NO: 61280 - DNA, 15 bp, Homo sapiens
ttgagccctcataaa

SEQ ID NO: 61281 - DNA, 15 bp, Homo sapiens
attgagccctcataa

SEQ ID NO: 61282 - DNA, 15 bp, Homo sapiens
tattgagccctcata

SEQ ID NO: 61283 - DNA, 15 bp, Homo sapiens
gtattgagccctcat

SEQ ID NO: 61284 - DNA, 15 bp, Homo sapiens
ggtattgagccctca

SEQ ID NO: 61285 - DNA, 15 bp, Homo sapiens
aggtattgagccctc

SEQ ID NO: 61286 - DNA, 15 bp, Homo sapiens
taggtattgagccct

SEQ ID NO: 61287 - DNA, 15 bp, Homo sapiens
ataggtattgagccc

SEQ ID NO: 61288 - DNA, 15 bp, Homo sapiens
cataggtattgagcc

SEQ ID NO: 61289 - DNA, 15 bp, Homo sapiens
ccataggtattgagc

SEQ ID NO: 61290 - DNA, 15 bp, Homo sapiens
tccataggtattgag

SEQ ID NO: 61291 - DNA, 15 bp, Homo sapiens
ttccataggtattga

SEQ ID NO: 61292 - DNA, 15 bp, Homo sapiens
cttccataggtattg

SEQ ID NO: 61293 - DNA, 15 bp, Homo sapiens
tcttccataggtatt

SEQ ID NO: 61294 - DNA, 15 bp, Homo sapiens
ctcttccataggtat

SEQ ID NO: 61295 - DNA, 15 bp, Homo sapiens
tctcttccataggta

SEQ ID NO: 61296 - DNA, 15 bp, Homo sapiens
atctcttccataggt

SEQ ID NO: 61297 - DNA, 15 bp, Homo sapiens
tatctcttccatagg

SEQ ID NO: 61298 - DNA, 15 bp, Homo sapiens
atatctcttccatag

SEQ ID NO: 61299 - DNA, 15 bp, Homo sapiens
catatctcttccata

SEQ ID NO: 61300 - DNA, 15 bp, Homo sapiens
ccatatctcttccat

SEQ ID NO: 61301 - DNA, 15 bp, Homo sapiens
tccatatctcttcca

SEQ ID NO: 61302 - DNA, 15 bp, Homo sapiens
ttccatatctcttcc

SEQ ID NO: 61303 - DNA, 15 bp, Homo sapiens
cttccatatctcttc

SEQ ID NO: 61304 - DNA, 15 bp, Homo sapiens
tcttccatatctctt

SEQ ID NO: 61305 - DNA, 15 bp, Homo sapiens
atcttccatatctct

SEQ ID NO: 61306 - DNA, 15 bp, Homo sapiens
catcttccatatctc

SEQ ID NO: 61307 - DNA, 15 bp, Homo sapiens
gcatcttccatatct

SEQ ID NO: 61308 - DNA, 15 bp, Homo sapiens
tgcatcttccatatc

SEQ ID NO: 61309 - DNA, 15 bp, Homo sapiens
ctgcatcttccatat

SEQ ID NO: 61310 - DNA, 15 bp, Homo sapiens
cctgcatcttccata

SEQ ID NO: 61311 - DNA, 15 bp, Homo sapiens
tcctgcatcttccat

SEQ ID NO: 61312 - DNA, 15 bp, Homo sapiens
atcctgcatcttcca

SEQ ID NO: 61313 - DNA, 15 bp, Homo sapiens
aatcctgcatcttcc

SEQ ID NO: 61314 - DNA, 15 bp, Homo sapiens
caatcctgcatcttc

SEQ ID NO: 61315 - DNA, 15 bp, Homo sapiens
ccaatcctgcatctt

SEQ ID NO: 61316 - DNA, 15 bp, Homo sapiens
cccaatcctgcatct

SEQ ID NO: 61317 - DNA, 15 bp, Homo sapiens
gcccaatcctgcatc

SEQ ID NO: 61318 - DNA, 15 bp, Homo sapiens
tgcccaatcctgcat

SEQ ID NO: 61319 - DNA, 15 bp, Homo sapiens
ctgcccaatcctgca

SEQ ID NO: 61320 - DNA, 15 bp, Homo sapiens
tctgcccaatcctgc

SEQ ID NO: 61321 - DNA, 15 bp, Homo sapiens
ctctgcccaatcctg

SEQ ID NO: 61322 - DNA, 15 bp, Homo sapiens
cctctgcccaatcct

SEQ ID NO: 61323 - DNA, 15 bp, Homo sapiens
ccctctgcccaatcc

SEQ ID NO: 61324 - DNA, 15 bp, Homo sapiens
tccctctgcccaatc

SEQ ID NO: 61325 - DNA, 15 bp, Homo sapiens
ctccctctgcccaat

SEQ ID NO: 61326 - DNA, 15 bp, Homo sapiens
cctccctctgcccaa

SEQ ID NO: 61327 - DNA, 15 bp, Homo sapiens
tcctccctctgccca

SEQ ID NO: 61328 - DNA, 15 bp, Homo sapiens
ctcctccctctgccc

SEQ ID NO: 61329 - DNA, 15 bp, Homo sapiens
actcctccctctgcc

SEQ ID NO: 61330 - DNA, 15 bp, Homo sapiens
aactcctccctctgc

SEQ ID NO: 61331 - DNA, 15 bp, Homo sapiens
caactcctccctctg

SEQ ID NO: 61332 - DNA, 15 bp, Homo sapiens
tcaactcctccctct

SEQ ID NO: 61333 - DNA, 15 bp, Homo sapiens
ttcaactcctccctc

SEQ ID NO: 61334 - DNA, 15 bp, Homo sapiens
gttcaactcctccct

SEQ ID NO: 61335 - DNA, 15 bp, Homo sapiens
agttcaactcctccc

SEQ ID NO: 61336 - DNA, 15 bp, Homo sapiens
cagttcaactcctcc

SEQ ID NO: 61337 - DNA, 15 bp, Homo sapiens
acagttcaactcctc

SEQ ID NO: 61338 - DNA, 15 bp, Homo sapiens
cacagttcaactcct

SEQ ID NO: 61339 - DNA, 15 bp, Homo sapiens
tcacagttcaactcc

SEQ ID NO: 61340 - DNA, 15 bp, Homo sapiens
atcacagttcaactc

SEQ ID NO: 61341 - DNA, 15 bp, Homo sapiens
tatcacagttcaact

SEQ ID NO: 61342 - DNA, 15 bp, Homo sapiens
atatcacagttcaac

SEQ ID NO: 61343 - DNA, 15 bp, Homo sapiens
tatatcacagttcaa

SEQ ID NO: 61344 - DNA, 15 bp, Homo sapiens
ctatatcacagttca

SEQ ID NO: 61345 - DNA, 15 bp, Homo sapiens
cctatatcacagttc

SEQ ID NO: 61346 - DNA, 15 bp, Homo sapiens
ccctatatcacagtt

SEQ ID NO: 61347 - DNA, 15 bp, Homo sapiens
gccctatatcacagt

SEQ ID NO: 61348 - DNA, 15 bp, Homo sapiens
ggccctatatcacag

SEQ ID NO: 61349 - DNA, 15 bp, Homo sapiens
tggccctatatcaca

SEQ ID NO: 61350 - DNA, 15 bp, Homo sapiens
ttggccctatatcac

SEQ ID NO: 61351 - DNA, 15 bp, Homo sapiens
gttggccctatatca

SEQ ID NO: 61352 - DNA, 15 bp, Homo sapiens
ggttggccctatatc

SEQ ID NO: 61353 - DNA, 15 bp, Homo sapiens
gggttggccctatat

SEQ ID NO: 61354 - DNA, 15 bp, Homo sapiens
ggggttggccctata

SEQ ID NO: 61355 - DNA, 15 bp, Homo sapiens
cggggttggccctat

SEQ ID NO: 61356 - DNA, 15 bp, Homo sapiens
acggggttggcccta

SEQ ID NO: 61357 - DNA, 15 bp, Homo sapiens
cacggggttggccct

SEQ ID NO: 61358 - DNA, 15 bp, Homo sapiens
ccacggggttggccc

SEQ ID NO: 61359 - DNA, 15 bp, Homo sapiens
cccacggggttggcc

SEQ ID NO: 61360 - DNA, 15 bp, Homo sapiens
ccccacggggttggc

SEQ ID NO: 61361 - DNA, 15 bp, Homo sapiens
gccccacggggttgg

SEQ ID NO: 61362 - DNA, 15 bp, Homo sapiens
tgccccacggggttg

SEQ ID NO: 61363 - DNA, 15 bp, Homo sapiens
gtgccccacggggtt

SEQ ID NO: 61364 - DNA, 15 bp, Homo sapiens
agtgccccacggggt

SEQ ID NO: 61365 - DNA, 15 bp, Homo sapiens
gagtgccccacgggg

SEQ ID NO: 61366 - DNA, 15 bp, Homo sapiens
agagtgccccacggg

SEQ ID NO: 61367 - DNA, 15 bp, Homo sapiens
tagagtgccccacgg

SEQ ID NO: 61368 - DNA, 15 bp, Homo sapiens
ctagagtgccccacg

SEQ ID NO: 61369 - DNA, 15 bp, Homo sapiens
tctagagtgccccac

SEQ ID NO: 61370 - DNA, 15 bp, Homo sapiens
ctctagagtgcccca

SEQ ID NO: 61371 - DNA, 15 bp, Homo sapiens
tctctagagtgcccc

SEQ ID NO: 61372 - DNA, 15 bp, Homo sapiens
ttctctagagtgccc

SEQ ID NO: 61373 - DNA, 15 bp, Homo sapiens
attctctagagtgcc

SEQ ID NO: 61374 - DNA, 15 bp, Homo sapiens
tattctctagagtgc

SEQ ID NO: 61375 - DNA, 15 bp, Homo sapiens
atattctctagagtg

SEQ ID NO: 61376 - DNA, 15 bp, Homo sapiens
catattctctagagt

SEQ ID NO: 61377 - DNA, 15 bp, Homo sapiens
gcatattctctagag

SEQ ID NO: 61378 - DNA, 15 bp, Homo sapiens
tgcatattctctaga

SEQ ID NO: 61379 - DNA, 15 bp, Homo sapiens
ctgcatattctctag

SEQ ID NO: 61380 - DNA, 15 bp, Homo sapiens
gctgcatattctcta

SEQ ID NO: 61381 - DNA, 15 bp, Homo sapiens
agctgcatattctct

SEQ ID NO: 61382 - DNA, 15 bp, Homo sapiens
aagctgcatattctc

SEQ ID NO: 61383 - DNA, 15 bp, Homo sapiens
caagctgcatattct

SEQ ID NO: 61384 - DNA, 15 bp, Homo sapiens
acaagctgcatattc

SEQ ID NO: 61385 - DNA, 15 bp, Homo sapiens
aacaagctgcatatt

SEQ ID NO: 61386 - DNA, 15 bp, Homo sapiens
caacaagctgcatat

SEQ ID NO: 61387 - DNA, 15 bp, Homo sapiens
ccaacaagctgcata

SEQ ID NO: 61388 - DNA, 15 bp, Homo sapiens
tccaacaagctgcat

SEQ ID NO: 61389 - DNA, 15 bp, Homo sapiens
ctccaacaagctgca

SEQ ID NO: 61390 - DNA, 15 bp, Homo sapiens
actccaacaagctgc

SEQ ID NO: 61391 - DNA, 15 bp, Homo sapiens
aactccaacaagctg

SEQ ID NO: 61392 - DNA, 15 bp, Homo sapiens
caactccaacaagct

SEQ ID NO: 61393 - DNA, 15 bp, Homo sapiens
acaactccaacaagc

SEQ ID NO: 61394 - DNA, 15 bp, Homo sapiens
aacaactccaacaag

SEQ ID NO: 61395 - DNA, 15 bp, Homo sapiens
gaacaactccaacaa

SEQ ID NO: 61396 - DNA, 15 bp, Homo sapiens
agaacaactccaaca

SEQ ID NO: 61397 - DNA, 15 bp, Homo sapiens
aagaacaactccaac

SEQ ID NO: 61398 - DNA, 15 bp, Homo sapiens
gaagaacaactccaa

SEQ ID NO: 61399 - DNA, 15 bp, Homo sapiens
tgaagaacaactcca

SEQ ID NO: 61400 - DNA, 15 bp, Homo sapiens
atgaagaacaactcc

SEQ ID NO: 61401 - DNA, 15 bp, Homo sapiens
gatgaagaacaactc

SEQ ID NO: 61402 - DNA, 15 bp, Homo sapiens
cgatgaagaacaact

SEQ ID NO: 61403 - DNA, 15 bp, Homo sapiens
tcgatgaagaacaac

SEQ ID NO: 61404 - DNA, 15 bp, Homo sapiens
ctcgatgaagaacaa

SEQ ID NO: 61405 - DNA, 15 bp, Homo sapiens
gctcgatgaagaaca

SEQ ID NO: 61406 - DNA, 15 bp, Homo sapiens
agctcgatgaagaac

SEQ ID NO: 61407 - DNA, 15 bp, Homo sapiens
cagctcgatgaagaa

SEQ ID NO: 61408 - DNA, 15 bp, Homo sapiens
tcagctcgatgaaga

SEQ ID NO: 61409 - DNA, 15 bp, Homo sapiens
ttcagctcgatgaag

SEQ ID NO: 61410 - DNA, 15 bp, Homo sapiens
tttcagctcgatgaa

SEQ ID NO: 61411 - DNA, 15 bp, Homo sapiens
gtttcagctcgatga

SEQ ID NO: 61412 - DNA, 15 bp, Homo sapiens
tgtttcagctcgatg

SEQ ID NO: 61413 - DNA, 15 bp, Homo sapiens
atgtttcagctcgat

SEQ ID NO: 61414 - DNA, 15 bp, Homo sapiens
gatgtttcagctcga

SEQ ID NO: 61415 - DNA, 15 bp, Homo sapiens
ggatgtttcagctcg

SEQ ID NO: 61416 - DNA, 15 bp, Homo sapiens
tggatgtttcagctc

SEQ ID NO: 61417 - DNA, 15 bp, Homo sapiens
ctggatgtttcagct

SEQ ID NO: 61418 - DNA, 15 bp, Homo sapiens
gctggatgtttcagc

SEQ ID NO: 61419 - DNA, 15 bp, Homo sapiens
ggctggatgtttcag

SEQ ID NO: 61420 - DNA, 15 bp, Homo sapiens
gggctggatgtttca

SEQ ID NO: 61421 - DNA, 15 bp, Homo sapiens
agggctggatgtttc

SEQ ID NO: 61422 - DNA, 15 bp, Homo sapiens
aagggctggatgttt

SEQ ID NO: 61423 - DNA, 15 bp, Homo sapiens
aaagggctggatgtt

SEQ ID NO: 61424 - DNA, 15 bp, Homo sapiens
caaagggctggatgt

SEQ ID NO: 61425 - DNA, 15 bp, Homo sapiens
acaaagggctggatg

SEQ ID NO: 61426 - DNA, 15 bp, Homo sapiens
cacaaagggctggat

SEQ ID NO: 61427 - DNA, 15 bp, Homo sapiens
gcacaaagggctgga

SEQ ID NO: 61428 - DNA, 15 bp, Homo sapiens
agcacaaagggctgg

SEQ ID NO: 61429 - DNA, 15 bp, Homo sapiens
gagcacaaagggctg

SEQ ID NO: 61430 - DNA, 15 bp, Homo sapiens
ggagcacaaagggct

SEQ ID NO: 61431 - DNA, 15 bp, Homo sapiens
gggagcacaaagggc

SEQ ID NO: 61432 - DNA, 15 bp, Homo sapiens
ggggagcacaaaggg

SEQ ID NO: 61433 - DNA, 15 bp, Homo sapiens
gggggagcacaaagg

SEQ ID NO: 61434 - DNA, 15 bp, Homo sapiens
tgggggagcacaaag

SEQ ID NO: 61435 - DNA, 15 bp, Homo sapiens
ttgggggagcacaaa

SEQ ID NO: 61436 - DNA, 15 bp, Homo sapiens
cttgggggagcacaa

SEQ ID NO: 61437 - DNA, 15 bp, Homo sapiens
ccttgggggagcaca

SEQ ID NO: 61438 - DNA, 15 bp, Homo sapiens
gccttgggggagcac

SEQ ID NO: 61439 - DNA, 15 bp, Homo sapiens
ggccttgggggagca

SEQ ID NO: 61440 - DNA, 15 bp, Homo sapiens
aggccttgggggagc

SEQ ID NO: 61441 - DNA, 15 bp, Homo sapiens
gaggccttgggggag

SEQ ID NO: 61442 - DNA, 15 bp, Homo sapiens
ggaggccttggggga

SEQ ID NO: 61443 - DNA, 15 bp, Homo sapiens
gggaggccttggggg

SEQ ID NO: 61444 - DNA, 15 bp, Homo sapiens
agggaggccttgggg

SEQ ID NO: 61445 - DNA, 15 bp, Homo sapiens
gagggaggccttggg

SEQ ID NO: 61446 - DNA, 15 bp, Homo sapiens
ggagggaggccttgg

SEQ ID NO: 61447 - DNA, 15 bp, Homo sapiens
aggagggaggccttg

SEQ ID NO: 61448 - DNA, 15 bp, Homo sapiens
caggagggaggcctt

SEQ ID NO: 61449 - DNA, 15 bp, Homo sapiens
tcaggagggaggcct

SEQ ID NO: 61450 - DNA, 15 bp, Homo sapiens
gtcaggagggaggcc

SEQ ID NO: 61451 - DNA, 15 bp, Homo sapiens
tgtcaggagggaggc

SEQ ID NO: 61452 - DNA, 15 bp, Homo sapiens
gtgtcaggagggagg

SEQ ID NO: 61453 - DNA, 15 bp, Homo sapiens
ggtgtcaggagggag

SEQ ID NO: 61454 - DNA, 15 bp, Homo sapiens
tggtgtcaggaggga

SEQ ID NO: 61455 - DNA, 15 bp, Homo sapiens
gtggtgtcaggaggg

SEQ ID NO: 61456 - DNA, 15 bp, Homo sapiens
ggtggtgtcaggagg

SEQ ID NO: 61457 - DNA, 15 bp, Homo sapiens
aggtggtgtcaggag

SEQ ID NO: 61458 - DNA, 15 bp, Homo sapiens
taggtggtgtcagga

SEQ ID NO: 61459 - DNA, 15 bp, Homo sapiens
gtaggtggtgtcagg

SEQ ID NO: 61460 - DNA, 15 bp, Homo sapiens
ggtaggtggtgtcag

SEQ ID NO: 61461 - DNA, 15 bp, Homo sapiens
aggtaggtggtgtca

SEQ ID NO: 61462 - DNA, 15 bp, Homo sapiens
gaggtaggtggtgtc

SEQ ID NO: 61463 - DNA, 15 bp, Homo sapiens
tgaggtaggtggtgt

SEQ ID NO: 61464 - DNA, 15 bp, Homo sapiens
ctgaggtaggtggtg

SEQ ID NO: 61465 - DNA, 15 bp, Homo sapiens
gctgaggtaggtggt

SEQ ID NO: 61466 - DNA, 15 bp, Homo sapiens
ggctgaggtaggtgg

SEQ ID NO: 61467 - DNA, 15 bp, Homo sapiens
gggctgaggtaggtg

SEQ ID NO: 61468 - DNA, 15 bp, Homo sapiens
agggctgaggtaggt

SEQ ID NO: 61469 - DNA, 15 bp, Homo sapiens
gagggctgaggtagg

SEQ ID NO: 61470 - DNA, 15 bp, Homo sapiens
agagggctgaggtag

SEQ ID NO: 61471 - DNA, 15 bp, Homo sapiens
gagagggctgaggta

SEQ ID NO: 61472 - DNA, 15 bp, Homo sapiens
tgagagggctgaggt

SEQ ID NO: 61473 - DNA, 15 bp, Homo sapiens
ttgagagggctgagg

SEQ ID NO: 61474 - DNA, 15 bp, Homo sapiens
attgagagggctgag

SEQ ID NO: 61475 - DNA, 15 bp, Homo sapiens
gattgagagggctga

SEQ ID NO: 61476 - DNA, 15 bp, Homo sapiens
tgattgagagggctg

SEQ ID NO: 61477 - DNA, 15 bp, Homo sapiens
ttgattgagagggct

SEQ ID NO: 61478 - DNA, 15 bp, Homo sapiens
attgattgagagggc

SEQ ID NO: 61479 - DNA, 15 bp, Homo sapiens
gattgattgagaggg

SEQ ID NO: 61480 - DNA, 15 bp, Homo sapiens
tgattgattgagagg

SEQ ID NO: 61481 - DNA, 15 bp, Homo sapiens
gtgattgattgagag

SEQ ID NO: 61482 - DNA, 15 bp, Homo sapiens
agtgattgattgaga

SEQ ID NO: 61483 - DNA, 15 bp, Homo sapiens
cagtgattgattgag

SEQ ID NO: 61484 - DNA, 15 bp, Homo sapiens
ccagtgattgattga

SEQ ID NO: 61485 - DNA, 15 bp, Homo sapiens
tccagtgattgattg

SEQ ID NO: 61486 - DNA, 15 bp, Homo sapiens
atccagtgattgatt

SEQ ID NO: 61487 - DNA, 15 bp, Homo sapiens
catccagtgattgat

SEQ ID NO: 61488 - DNA, 15 bp, Homo sapiens
acatccagtgattga

SEQ ID NO: 61489 - DNA, 15 bp, Homo sapiens
cacatccagtgattg

SEQ ID NO: 61490 - DNA, 15 bp, Homo sapiens
ccacatccagtgatt

SEQ ID NO: 61491 - DNA, 15 bp, Homo sapiens
cccacatccagtgat

SEQ ID NO: 61492 - DNA, 15 bp, Homo sapiens
gcccacatccagtga

SEQ ID NO: 61493 - DNA, 15 bp, Homo sapiens
agcccacatccagtg

SEQ ID NO: 61494 - DNA, 15 bp, Homo sapiens
cagcccacatccagt

SEQ ID NO: 61495 - DNA, 15 bp, Homo sapiens
gcagcccacatccag

SEQ ID NO: 61496 - DNA, 15 bp, Homo sapiens
ggcagcccacatcca

SEQ ID NO: 61497 - DNA, 15 bp, Homo sapiens
gggcagcccacatcc

SEQ ID NO: 61498 - DNA, 15 bp, Homo sapiens
agggcagcccacatc

SEQ ID NO: 61499 - DNA, 15 bp, Homo sapiens
cagggcagcccacat

SEQ ID NO: 61500 - DNA, 15 bp, Homo sapiens
ccagggcagcccaca

SEQ ID NO: 61501 - DNA, 15 bp, Homo sapiens
cccagggcagcccac

SEQ ID NO: 61502 - DNA, 15 bp, Homo sapiens
tcccagggcagccca

SEQ ID NO: 61503 - DNA, 15 bp, Homo sapiens
ttcccagggcagccc

SEQ ID NO: 61504 - DNA, 15 bp, Homo sapiens
cttcccagggcagcc

SEQ ID NO: 61505 - DNA, 15 bp, Homo sapiens
ccttcccagggcagc

SEQ ID NO: 61506 - DNA, 15 bp, Homo sapiens
accttcccagggcag

SEQ ID NO: 61507 - DNA, 15 bp, Homo sapiens
gaccttcccagggca

SEQ ID NO: 61508 - DNA, 15 bp, Homo sapiens
cgaccttcccagggc

SEQ ID NO: 61509 - DNA, 15 bp, Homo sapiens
acgaccttcccaggg

SEQ ID NO: 61510 - DNA, 15 bp, Homo sapiens
cacgaccttcccagg

SEQ ID NO: 61511 - DNA, 15 bp, Homo sapiens
gcacgaccttcccag

SEQ ID NO: 61512 - DNA, 15 bp, Homo sapiens
ggcacgaccttccca

SEQ ID NO: 61513 - DNA, 15 bp, Homo sapiens
gggcacgaccttccc

SEQ ID NO: 61514 - DNA, 15 bp, Homo sapiens
ggggcacgaccttcc

SEQ ID NO: 61515 - DNA, 15 bp, Homo sapiens
tggggcacgaccttc

SEQ ID NO: 61516 - DNA, 15 bp, Homo sapiens
ctggggcacgacctt

SEQ ID NO: 61517 - DNA, 15 bp, Homo sapiens
cctggggcacgacct

SEQ ID NO: 61518 - DNA, 15 bp, Homo sapiens
ccctggggcacgacc

SEQ ID NO: 61519 - DNA, 15 bp, Homo sapiens
gccctggggcacgac

SEQ ID NO: 61520 - DNA, 15 bp, Homo sapiens
ggccctggggcacga

SEQ ID NO: 61521 - DNA, 15 bp, Homo sapiens
aggccctggggcacg

SEQ ID NO: 61522 - DNA, 15 bp, Homo sapiens
taggccctggggcac

SEQ ID NO: 61523 - DNA, 15 bp, Homo sapiens
gtaggccctggggca

SEQ ID NO: 61524 - DNA, 15 bp, Homo sapiens
tgtaggccctggggc

SEQ ID NO: 61525 - DNA, 15 bp, Homo sapiens
atgtaggccctgggg

SEQ ID NO: 61526 - DNA, 15 bp, Homo sapiens
catgtaggccctggg

SEQ ID NO: 61527 - DNA, 15 bp, Homo sapiens
ccatgtaggccctgg

SEQ ID NO: 61528 - DNA, 15 bp, Homo sapiens
gccatgtaggccctg

SEQ ID NO: 61529 - DNA, 15 bp, Homo sapiens
agccatgtaggccct

SEQ ID NO: 61530 - DNA, 15 bp, Homo sapiens
gagccatgtaggccc

SEQ ID NO: 61531 - DNA, 15 bp, Homo sapiens
agagccatgtaggcc

SEQ ID NO: 61532 - DNA, 15 bp, Homo sapiens
gagagccatgtaggc

SEQ ID NO: 61533 - DNA, 15 bp, Homo sapiens
agagagccatgtagg

SEQ ID NO: 61534 - DNA, 15 bp, Homo sapiens
cagagagccatgtag

SEQ ID NO: 61535 - DNA, 15 bp, Homo sapiens
gcagagagccatgta

SEQ ID NO: 61536 - DNA, 15 bp, Homo sapiens
agcagagagccatgt

SEQ ID NO: 61537 - DNA, 15 bp, Homo sapiens
cagcagagagccatg

SEQ ID NO: 61538 - DNA, 15 bp, Homo sapiens
gcagcagagagccat

SEQ ID NO: 61539 - DNA, 15 bp, Homo sapiens
agcagcagagagcca

SEQ ID NO: 61540 - DNA, 15 bp, Homo sapiens
cagcagcagagagcc

SEQ ID NO: 61541 - DNA, 15 bp, Homo sapiens
acagcagcagagagc

SEQ ID NO: 61542 - DNA, 15 bp, Homo sapiens
cacagcagcagagag

SEQ ID NO: 61543 - DNA, 15 bp, Homo sapiens
tcacagcagcagaga

SEQ ID NO: 61544 - DNA, 15 bp, Homo sapiens
gtcacagcagcagag

SEQ ID NO: 61545 - DNA, 15 bp, Homo sapiens
tgtcacagcagcaga

SEQ ID NO: 61546 - DNA, 15 bp, Homo sapiens
ttgtcacagcagcag

SEQ ID NO: 61547 - DNA, 15 bp, Homo sapiens
tttgtcacagcagca

SEQ ID NO: 61548 - DNA, 15 bp, Homo sapiens
gtttgtcacagcagc

SEQ ID NO: 61549 - DNA, 15 bp, Homo sapiens
ggtttgtcacagcag

SEQ ID NO: 61550 - DNA, 15 bp, Homo sapiens
gggtttgtcacagca

SEQ ID NO: 61551 - DNA, 15 bp, Homo sapiens
tgggtttgtcacagc

SEQ ID NO: 61552 - DNA, 15 bp, Homo sapiens
ctgggtttgtcacag

SEQ ID NO: 61553 - DNA, 15 bp, Homo sapiens
tctgggtttgtcaca

SEQ ID NO: 61554 - DNA, 15 bp, Homo sapiens
ctctgggtttgtcac

SEQ ID NO: 61555 - DNA, 15 bp, Homo sapiens
actctgggtttgtca

SEQ ID NO: 61556 - DNA, 15 bp, Homo sapiens
aactctgggtttgtc

SEQ ID NO: 61557 - DNA, 15 bp, Homo sapiens
caactctgggtttgt

SEQ ID NO: 61558 - DNA, 15 bp, Homo sapiens
gcaactctgggtttg

SEQ ID NO: 61559 - DNA, 15 bp, Homo sapiens
agcaactctgggttt

SEQ ID NO: 61560 - DNA, 15 bp, Homo sapiens
cagcaactctgggtt

SEQ ID NO: 61561 - DNA, 15 bp, Homo sapiens
tcagcaactctgggt

SEQ ID NO: 61562 - DNA, 15 bp, Homo sapiens
atcagcaactctggg

SEQ ID NO: 61563 - DNA, 15 bp, Homo sapiens
catcagcaactctgg

SEQ ID NO: 61564 - DNA, 15 bp, Homo sapiens
gcatcagcaactctg

SEQ ID NO: 61565 - DNA, 15 bp, Homo sapiens
ggcatcagcaactct

SEQ ID NO: 61566 - DNA, 15 bp, Homo sapiens
aggcatcagcaactc

SEQ ID NO: 61567 - DNA, 15 bp, Homo sapiens
caggcatcagcaact

SEQ ID NO: 61568 - DNA, 15 bp, Homo sapiens
tcaggcatcagcaac

SEQ ID NO: 61569 - DNA, 15 bp, Homo sapiens
ctcaggcatcagcaa

SEQ ID NO: 61570 - DNA, 15 bp, Homo sapiens
cctcaggcatcagca

SEQ ID NO: 61571 - DNA, 15 bp, Homo sapiens
gcctcaggcatcagc

SEQ ID NO: 61572 - DNA, 15 bp, Homo sapiens
ggcctcaggcatcag

SEQ ID NO: 61573 - DNA, 15 bp, Homo sapiens
cggcctcaggcatca

SEQ ID NO: 61574 - DNA, 15 bp, Homo sapiens
acggcctcaggcatc

SEQ ID NO: 61575 - DNA, 15 bp, Homo sapiens
gacggcctcaggcat

SEQ ID NO: 61576 - DNA, 15 bp, Homo sapiens
agacggcctcaggca

SEQ ID NO: 61577 - DNA, 15 bp, Homo sapiens
tagacggcctcaggc

SEQ ID NO: 61578 - DNA, 15 bp, Homo sapiens
gtagacggcctcagg

SEQ ID NO: 61579 - DNA, 15 bp, Homo sapiens
agtagacggcctcag

SEQ ID NO: 61580 - DNA, 15 bp, Homo sapiens
cagtagacggcctca

SEQ ID NO: 61581 - DNA, 15 bp, Homo sapiens
tcagtagacggcctc

SEQ ID NO: 61582 - DNA, 15 bp, Homo sapiens
gtcagtagacggcct

SEQ ID NO: 61583 - DNA, 15 bp, Homo sapiens
tgtcagtagacggcc

SEQ ID NO: 61584 - DNA, 15 bp, Homo sapiens
ctgtcagtagacggc

SEQ ID NO: 61585 - DNA, 15 bp, Homo sapiens
gctgtcagtagacgg

SEQ ID NO: 61586 - DNA, 15 bp, Homo sapiens
agctgtcagtagacg

SEQ ID NO: 61587 - DNA, 15 bp, Homo sapiens
cagctgtcagtagac

SEQ ID NO: 61588 - DNA, 15 bp, Homo sapiens
ccagctgtcagtaga

SEQ ID NO: 61589 - DNA, 15 bp, Homo sapiens
cccagctgtcagtag

SEQ ID NO: 61590 - DNA, 15 bp, Homo sapiens
gcccagctgtcagta

SEQ ID NO: 61591 - DNA, 15 bp, Homo sapiens
tgcccagctgtcagt

SEQ ID NO: 61592 - DNA, 15 bp, Homo sapiens
ttgcccagctgtcag

SEQ ID NO: 61593 - DNA, 15 bp, Homo sapiens
gttgcccagctgtca

SEQ ID NO: 61594 - DNA, 15 bp, Homo sapiens
tgttgcccagctgtc

SEQ ID NO: 61595 - DNA, 15 bp, Homo sapiens
ttgttgcccagctgt

SEQ ID NO: 61596 - DNA, 15 bp, Homo sapiens
cttgttgcccagctg

SEQ ID NO: 61597 - DNA, 15 bp, Homo sapiens
ccttgttgcccagct

SEQ ID NO: 61598 - DNA, 15 bp, Homo sapiens
gccttgttgcccagc

SEQ ID NO: 61599 - DNA, 15 bp, Homo sapiens
agccttgttgcccag

SEQ ID NO: 61600 - DNA, 15 bp, Homo sapiens
aagccttgttgccca

SEQ ID NO: 61601 - DNA, 15 bp, Homo sapiens
gaagccttgttgccc

SEQ ID NO: 61602 - DNA, 15 bp, Homo sapiens
ggaagccttgttgcc

SEQ ID NO: 61603 - DNA, 15 bp, Homo sapiens
gggaagccttgttgc

SEQ ID NO: 61604 - DNA, 15 bp, Homo sapiens
agggaagccttgttg

SEQ ID NO: 61605 - DNA, 15 bp, Homo sapiens
cagggaagccttgtt

SEQ ID NO: 61606 - DNA, 15 bp, Homo sapiens
tcagggaagccttgt

SEQ ID NO: 61607 - DNA, 15 bp, Homo sapiens
ttcagggaagccttg

SEQ ID NO: 61608 - DNA, 15 bp, Homo sapiens
attcagggaagcctt

SEQ ID NO: 61609 - DNA, 15 bp, Homo sapiens
cattcagggaagcct

SEQ ID NO: 61610 - DNA, 15 bp, Homo sapiens
ccattcagggaagcc

SEQ ID NO: 61611 - DNA, 15 bp, Homo sapiens
cccattcagggaagc

SEQ ID NO: 61612 - DNA, 15 bp, Homo sapiens
ccccattcagggaag

SEQ ID NO: 61613 - DNA, 15 bp, Homo sapiens
tccccattcagggaa

SEQ ID NO: 61614 - DNA, 15 bp, Homo sapiens
gtccccattcaggga

SEQ ID NO: 61615 - DNA, 15 bp, Homo sapiens
agtccccattcaggg

SEQ ID NO: 61616 - DNA, 15 bp, Homo sapiens
gagtccccattcagg

SEQ ID NO: 61617 - DNA, 15 bp, Homo sapiens
agagtccccattcag

SEQ ID NO: 61618 - DNA, 15 bp, Homo sapiens
cagagtccccattca

SEQ ID NO: 61619 - DNA, 15 bp, Homo sapiens
ccagagtccccattc

SEQ ID NO: 61620 - DNA, 15 bp, Homo sapiens
cccagagtccccatt

SEQ ID NO: 61621 - DNA, 15 bp, Homo sapiens
gcccagagtccccat

SEQ ID NO: 61622 - DNA, 15 bp, Homo sapiens
tgcccagagtcccca

SEQ ID NO: 61623 - DNA, 15 bp, Homo sapiens
ctgcccagagtcccc

SEQ ID NO: 61624 - DNA, 15 bp, Homo sapiens
actgcccagagtccc

SEQ ID NO: 61625 - DNA, 15 bp, Homo sapiens
cactgcccagagtcc

SEQ ID NO: 61626 - DNA, 15 bp, Homo sapiens
gcactgcccagagtc

SEQ ID NO: 61627 - DNA, 15 bp, Homo sapiens
tgcactgcccagagt

SEQ ID NO: 61628 - DNA, 15 bp, Homo sapiens
ctgcactgcccagag

SEQ ID NO: 61629 - DNA, 15 bp, Homo sapiens
actgcactgcccaga

SEQ ID NO: 61630 - DNA, 15 bp, Homo sapiens
aactgcactgcccag

SEQ ID NO: 61631 - DNA, 15 bp, Homo sapiens
aaactgcactgccca

SEQ ID NO: 61632 - DNA, 15 bp, Homo sapiens
aaaactgcactgccc

SEQ ID NO: 61633 - DNA, 15 bp, Homo sapiens
caaaactgcactgcc

SEQ ID NO: 61634 - DNA, 15 bp, Homo sapiens
acaaaactgcactgc

SEQ ID NO: 61635 - DNA, 15 bp, Homo sapiens
cacaaaactgcactg

SEQ ID NO: 61636 - DNA, 15 bp, Homo sapiens
acacaaaactgcact

SEQ ID NO: 61637 - DNA, 15 bp, Homo sapiens
gacacaaaactgcac

SEQ ID NO: 61638 - DNA, 15 bp, Homo sapiens
agacacaaaactgca

SEQ ID NO: 61639 - DNA, 15 bp, Homo sapiens
cagacacaaaactgc

SEQ ID NO: 61640 - DNA, 15 bp, Homo sapiens
tcagacacaaaactg

SEQ ID NO: 61641 - DNA, 15 bp, Homo sapiens
ttcagacacaaaact

SEQ ID NO: 61642 - DNA, 15 bp, Homo sapiens
gttcagacacaaaac

SEQ ID NO: 61643 - DNA, 15 bp, Homo sapiens
ggttcagacacaaaa

SEQ ID NO: 61644 - DNA, 15 bp, Homo sapiens
tggttcagacacaaa

SEQ ID NO: 61645 - DNA, 15 bp, Homo sapiens
atggttcagacacaa

SEQ ID NO: 61646 - DNA, 15 bp, Homo sapiens
tatggttcagacaca

SEQ ID NO: 61647 - DNA, 15 bp, Homo sapiens
gtatggttcagacac

SEQ ID NO: 61648 - DNA, 15 bp, Homo sapiens
tgtatggttcagaca

SEQ ID NO: 61649 - DNA, 15 bp, Homo sapiens
atgtatggttcagac

SEQ ID NO: 61650 - DNA, 15 bp, Homo sapiens
aatgtatggttcaga

SEQ ID NO: 61651 - DNA, 15 bp, Homo sapiens
taatgtatggttcag

SEQ ID NO: 61652 - DNA, 15 bp, Homo sapiens
ttaatgtatggttca

SEQ ID NO: 61653 - DNA, 15 bp, Homo sapiens
attaatgtatggttc

SEQ ID NO: 61654 - DNA, 15 bp, Homo sapiens
tattaatgtatggtt

SEQ ID NO: 61655 - DNA, 15 bp, Homo sapiens
atattaatgtatggt

SEQ ID NO: 61656 - DNA, 15 bp, Homo sapiens
tatattaatgtatgg

SEQ ID NO: 61657 - DNA, 15 bp, Homo sapiens
atatattaatgtatg

SEQ ID NO: 61658 - DNA, 15 bp, Homo sapiens
aatatattaatgtat

SEQ ID NO: 61659 - DNA, 15 bp, Homo sapiens
aaatatattaatgta

SEQ ID NO: 61660 - DNA, 15 bp, Homo sapiens
taaatatattaatgt

SEQ ID NO: 61661 - DNA, 15 bp, Homo sapiens
ataaatatattaatg

SEQ ID NO: 61662 - DNA, 15 bp, Homo sapiens
tataaatatattaat

SEQ ID NO: 61663 - DNA, 15 bp, Homo sapiens
atataaatatattaa

SEQ ID NO: 61664 - DNA, 15 bp, Homo sapiens
gatataaatatatta

SEQ ID NO: 61665 - DNA, 15 bp, Homo sapiens
ggatataaatatatt

SEQ ID NO: 61666 - DNA, 15 bp, Homo sapiens
cggatataaatatat

SEQ ID NO: 61667 - DNA, 15 bp, Homo sapiens
tcggatataaatata

SEQ ID NO: 61668 - DNA, 15 bp, Homo sapiens
ttcggatataaatat

SEQ ID NO: 61669 - DNA, 15 bp, Homo sapiens
attcggatataaata

SEQ ID NO: 61670 - DNA, 15 bp, Homo sapiens
aattcggatataaat

SEQ ID NO: 61671 - DNA, 15 bp, Homo sapiens
aaattcggatataaa

SEQ ID NO: 61672 - DNA, 15 bp, Homo sapiens
aaaattcggatataa

SEQ ID NO: 61673 - DNA, 15 bp, Homo sapiens
gaaaattcggatata

SEQ ID NO: 61674 - DNA, 15 bp, Homo sapiens
agaaaattcggatat

SEQ ID NO: 61675 - DNA, 15 bp, Homo sapiens
aagaaaattcggata

SEQ ID NO: 61676 - DNA, 15 bp, Homo sapiens
aaagaaaattcggat

SEQ ID NO: 61677 - DNA, 15 bp, Homo sapiens
gaaagaaaattcgga

SEQ ID NO: 61678 - DNA, 15 bp, Homo sapiens
agaaagaaaattcgg

SEQ ID NO: 61679 - DNA, 15 bp, Homo sapiens
gagaaagaaaattcg

SEQ ID NO: 61680 - DNA, 15 bp, Homo sapiens
agagaaagaaaattc

SEQ ID NO: 61681 - DNA, 15 bp, Homo sapiens
cagagaaagaaaatt

SEQ ID NO: 61682 - DNA, 15 bp, Homo sapiens
gcagagaaagaaaat

SEQ ID NO: 61683 - DNA, 15 bp, Homo sapiens
tgcagagaaagaaaa

SEQ ID NO: 61684 - DNA, 15 bp, Homo sapiens
ttgcagagaaagaaa

SEQ ID NO: 61685 - DNA, 15 bp, Homo sapiens
cttgcagagaaagaa

SEQ ID NO: 61686 - DNA, 15 bp, Homo sapiens
gcttgcagagaaaga

SEQ ID NO: 61687 - DNA, 15 bp, Homo sapiens
tgcttgcagagaaag

SEQ ID NO: 61688 - DNA, 15 bp, Homo sapiens
atgcttgcagagaaa

SEQ ID NO: 61689 - DNA, 15 bp, Homo sapiens
aatgcttgcagagaa

SEQ ID NO: 61690 - DNA, 15 bp, Homo sapiens
aaatgcttgcagaga

SEQ ID NO: 61691 - DNA, 15 bp, Homo sapiens
gaaatgcttgcagag

SEQ ID NO: 61692 - DNA, 15 bp, Homo sapiens
tgaaatgcttgcaga

SEQ ID NO: 61693 - DNA, 15 bp, Homo sapiens
atgaaatgcttgcag

SEQ ID NO: 61694 - DNA, 15 bp, Homo sapiens
tatgaaatgcttgca

SEQ ID NO: 61695 - DNA, 15 bp, Homo sapiens
atatgaaatgcttgc

SEQ ID NO: 61696 - DNA, 15 bp, Homo sapiens
tatatgaaatgcttg

SEQ ID NO: 61697 - DNA, 15 bp, Homo sapiens
ttatatgaaatgctt

SEQ ID NO: 61698 - DNA, 15 bp, Homo sapiens
tttatatgaaatgct

SEQ ID NO: 61699 - DNA, 15 bp, Homo sapiens
ctttatatgaaatgc

SEQ ID NO: 61700 - DNA, 15 bp, Homo sapiens
tctttatatgaaatg

SEQ ID NO: 61701 - DNA, 15 bp, Homo sapiens
gtctttatatgaaat

SEQ ID NO: 61702 - DNA, 15 bp, Homo sapiens
tgtctttatatgaaa

SEQ ID NO: 61703 - DNA, 15 bp, Homo sapiens
gtgtctttatatgaa

SEQ ID NO: 61704 - DNA, 15 bp, Homo sapiens
tgtgtctttatatga

SEQ ID NO: 61705 - DNA, 15 bp, Homo sapiens
atgtgtctttatatg

SEQ ID NO: 61706 - DNA, 15 bp, Homo sapiens
gatgtgtctttatat

SEQ ID NO: 61707 - DNA, 15 bp, Homo sapiens
tgatgtgtctttata

SEQ ID NO: 61708 - DNA, 15 bp, Homo sapiens
ctgatgtgtctttat

SEQ ID NO: 61709 - DNA, 15 bp, Homo sapiens
cctgatgtgtcttta

SEQ ID NO: 61710 - DNA, 15 bp, Homo sapiens
acctgatgtgtcttt

SEQ ID NO: 61711 - DNA, 15 bp, Homo sapiens
tacctgatgtgtctt

SEQ ID NO: 61712 - DNA, 15 bp, Homo sapiens
ttacctgatgtgtct

SEQ ID NO: 61713 - DNA, 15 bp, Homo sapiens
tttacctgatgtgtc

SEQ ID NO: 61714 - DNA, 15 bp, Homo sapiens
ttttacctgatgtgt

SEQ ID NO: 61715 - DNA, 15 bp, Homo sapiens
tttttacctgatgtg

SEQ ID NO: 61716 - DNA, 15 bp, Homo sapiens
atttttacctgatgt

SEQ ID NO: 61717 - DNA, 15 bp, Homo sapiens
tatttttacctgatg

SEQ ID NO: 61718 - DNA, 15 bp, Homo sapiens
ttatttttacctgat

SEQ ID NO: 61719 - DNA, 15 bp, Homo sapiens
tttatttttacctga

SEQ ID NO: 61720 - DNA, 15 bp, Homo sapiens
atttatttttacctg

SEQ ID NO: 61721 - DNA, 15 bp, Homo sapiens
catttatttttacct

SEQ ID NO: 61722 - DNA, 15 bp, Homo sapiens
acatttatttttacc

SEQ ID NO: 61723 - DNA, 15 bp, Homo sapiens
aacatttatttttac

SEQ ID NO: 61724 - DNA, 15 bp, Homo sapiens
aaacatttattttta

SEQ ID NO: 61725 - DNA, 15 bp, Homo sapiens
aaaacatttattttt

SEQ ID NO: 61726 - DNA, 15 bp, Homo sapiens
aaaaacatttatttt

SEQ ID NO: 61727 - DNA, 15 bp, Homo sapiens
caaaaacatttattt

SEQ ID NO: 61728 - DNA, 15 bp, Homo sapiens
tcaaaaacatttatt

SEQ ID NO: 61729 - DNA, 15 bp, Homo sapiens
ttcaaaaacatttat

SEQ ID NO: 61730 - DNA, 15 bp, Homo sapiens
cttcaaaaacattta

SEQ ID NO: 61731 - DNA, 15 bp, Homo sapiens
gcttcaaaaacattt

SEQ ID NO: 61732 - DNA, 15 bp, Homo sapiens
tgcttcaaaaacatt

SEQ ID NO: 61733 - DNA, 15 bp, Homo sapiens
ttgcttcaaaaacat

SEQ ID NO: 61734 - DNA, 15 bp, Homo sapiens
tttgcttcaaaaaca

SEQ ID NO: 61735 - DNA, 15 bp, Homo sapiens
ttttgcttcaaaaac

SEQ ID NO: 61736 - DNA, 15 bp, Homo sapiens
cttttgcttcaaaaa

SEQ ID NO: 61737 - DNA, 15 bp, Homo sapiens
ccttttgcttcaaaa

SEQ ID NO: 61738 - DNA, 15 bp, Homo sapiens
tccttttgcttcaaa

SEQ ID NO: 61739 - DNA, 15 bp, Homo sapiens
ctccttttgcttcaa

SEQ ID NO: 61740 - DNA, 15 bp, Homo sapiens
actccttttgcttca

SEQ ID NO: 61741 - DNA, 15 bp, Homo sapiens
tactccttttgcttc

SEQ ID NO: 61742 - DNA, 15 bp, Homo sapiens
gtactccttttgctt

SEQ ID NO: 61743 - DNA, 15 bp, Homo sapiens
tgtactccttttgct

SEQ ID NO: 61744 - DNA, 15 bp, Homo sapiens
ttgtactccttttgc

SEQ ID NO: 61745 - DNA, 15 bp, Homo sapiens
tttgtactccttttg

SEQ ID NO: 61746 - DNA, 15 bp, Homo sapiens
ctttgtactcctttt

SEQ ID NO: 61747 - DNA, 15 bp, Homo sapiens
tctttgtactccttt

SEQ ID NO: 61748 - DNA, 15 bp, Homo sapiens
ctctttgtactcctt

SEQ ID NO: 61749 - DNA, 15 bp, Homo sapiens
tctctttgtactcct

SEQ ID NO: 61750 - DNA, 15 bp, Homo sapiens
atctctttgtactcc

SEQ ID NO: 61751 - DNA, 15 bp, Homo sapiens
tatctctttgtactc

SEQ ID NO: 61752 - DNA, 15 bp, Homo sapiens
ttatctctttgtact

SEQ ID NO: 61753 - DNA, 15 bp, Homo sapiens
cttatctctttgtac

SEQ ID NO: 61754 - DNA, 15 bp, Homo sapiens
tcttatctctttgta

SEQ ID NO: 61755 - DNA, 15 bp, Homo sapiens
ttcttatctctttgt

SEQ ID NO: 61756 - DNA, 15 bp, Homo sapiens
gttcttatctctttg

SEQ ID NO: 61757 - DNA, 15 bp, Homo sapiens
agttcttatctcttt

SEQ ID NO: 61758 - DNA, 15 bp, Homo sapiens
tagttcttatctctt

SEQ ID NO: 61759 - DNA, 15 bp, Homo sapiens
ttagttcttatctct

SEQ ID NO: 61760 - DNA, 15 bp, Homo sapiens
gttagttcttatctc

SEQ ID NO: 61761 - DNA, 15 bp, Homo sapiens
agttagttcttatct

SEQ ID NO: 61762 - DNA, 15 bp, Homo sapiens
tagttagttcttatc

SEQ ID NO: 61763 - DNA, 15 bp, Homo sapiens
ttagttagttcttat

SEQ ID NO: 61764 - DNA, 15 bp, Homo sapiens
attagttagttctta

SEQ ID NO: 61765 - DNA, 15 bp, Homo sapiens
aattagttagttctt

SEQ ID NO: 61766 - DNA, 15 bp, Homo sapiens
aaattagttagttct

SEQ ID NO: 61767 - DNA, 15 bp, Homo sapiens
taaattagttagttc

SEQ ID NO: 61768 - DNA, 15 bp, Homo sapiens
ttaaattagttagtt

SEQ ID NO: 61769 - DNA, 15 bp, Homo sapiens
attaaattagttagt

SEQ ID NO: 61770 - DNA, 15 bp, Homo sapiens
tattaaattagttag

SEQ ID NO: 61771 - DNA, 15 bp, Homo sapiens
gtattaaattagtta

SEQ ID NO: 61772 - DNA, 15 bp, Homo sapiens
agtattaaattagtt

SEQ ID NO: 61773 - DNA, 15 bp, Homo sapiens
tagtattaaattagt

SEQ ID NO: 61774 - DNA, 15 bp, Homo sapiens
ctagtattaaattag

SEQ ID NO: 61775 - DNA, 15 bp, Homo sapiens
actagtattaaatta

SEQ ID NO: 61776 - DNA, 15 bp, Homo sapiens
aactagtattaaatt

SEQ ID NO: 61777 - DNA, 15 bp, Homo sapiens
taactagtattaaat

SEQ ID NO: 61778 - DNA, 15 bp, Homo sapiens
gtaactagtattaaa

SEQ ID NO: 61779 - DNA, 15 bp, Homo sapiens
ggtaactagtattaa

SEQ ID NO: 61780 - DNA, 15 bp, Homo sapiens
tggtaactagtatta

SEQ ID NO: 61781 - DNA, 15 bp, Homo sapiens
atggtaactagtatt

SEQ ID NO: 61782 - DNA, 15 bp, Homo sapiens
gatggtaactagtat

SEQ ID NO: 61783 - DNA, 15 bp, Homo sapiens
agatggtaactagta

SEQ ID NO: 61784 - DNA, 15 bp, Homo sapiens
cagatggtaactagt

SEQ ID NO: 61785 - DNA, 15 bp, Homo sapiens
acagatggtaactag

SEQ ID NO: 61786 - DNA, 15 bp, Homo sapiens
aacagatggtaacta

SEQ ID NO: 61787 - DNA, 15 bp, Homo sapiens
taacagatggtaact

SEQ ID NO: 61788 - DNA, 15 bp, Homo sapiens
gtaacagatggtaac

SEQ ID NO: 61789 - DNA, 15 bp, Homo sapiens
tgtaacagatggtaa

SEQ ID NO: 61790 - DNA, 15 bp, Homo sapiens
ttgtaacagatggta

SEQ ID NO: 61791 - DNA, 15 bp, Homo sapiens
tttgtaacagatggt

SEQ ID NO: 61792 - DNA, 15 bp, Homo sapiens
atttgtaacagatgg

SEQ ID NO: 61793 - DNA, 15 bp, Homo sapiens
tatttgtaacagatg

SEQ ID NO: 61794 - DNA, 15 bp, Homo sapiens
ctatttgtaacagat

SEQ ID NO: 61795 - DNA, 15 bp, Homo sapiens
actatttgtaacaga

SEQ ID NO: 61796 - DNA, 15 bp, Homo sapiens
aactatttgtaacag

SEQ ID NO: 61797 - DNA, 15 bp, Homo sapiens
gaactatttgtaaca

SEQ ID NO: 61798 - DNA, 15 bp, Homo sapiens
ggaactatttgtaac

SEQ ID NO: 61799 - DNA, 15 bp, Homo sapiens
aggaactatttgtaa

SEQ ID NO: 61800 - DNA, 15 bp, Homo sapiens
taggaactatttgta

SEQ ID NO: 61801 - DNA, 15 bp, Homo sapiens
gtaggaactatttgt

SEQ ID NO: 61802 - DNA, 15 bp, Homo sapiens
agtaggaactatttg

SEQ ID NO: 61803 - DNA, 15 bp, Homo sapiens
cagtaggaactattt

SEQ ID NO: 61804 - DNA, 15 bp, Homo sapiens
tcagtaggaactatt

SEQ ID NO: 61805 - DNA, 15 bp, Homo sapiens
atcagtaggaactat

SEQ ID NO: 61806 - DNA, 15 bp, Homo sapiens
aatcagtaggaacta

SEQ ID NO: 61807 - DNA, 15 bp, Homo sapiens
caatcagtaggaact

SEQ ID NO: 61808 - DNA, 15 bp, Homo sapiens
gcaatcagtaggaac

SEQ ID NO: 61809 - DNA, 15 bp, Homo sapiens
ggcaatcagtaggaa

SEQ ID NO: 61810 - DNA, 15 bp, Homo sapiens
tggcaatcagtagga

SEQ ID NO: 61811 - DNA, 15 bp, Homo sapiens
ttggcaatcagtagg

SEQ ID NO: 61812 - DNA, 15 bp, Homo sapiens
cttggcaatcagtag

SEQ ID NO: 61813 - DNA, 15 bp, Homo sapiens
ccttggcaatcagta

SEQ ID NO: 61814 - DNA, 15 bp, Homo sapiens
tccttggcaatcagt

SEQ ID NO: 61815 - DNA, 15 bp, Homo sapiens
gtccttggcaatcag

SEQ ID NO: 61816 - DNA, 15 bp, Homo sapiens
agtccttggcaatca

SEQ ID NO: 61817 - DNA, 15 bp, Homo sapiens
cagtccttggcaatc

SEQ ID NO: 61818 - DNA, 15 bp, Homo sapiens
acagtccttggcaat

SEQ ID NO: 61819 - DNA, 15 bp, Homo sapiens
aacagtccttggcaa

SEQ ID NO: 61820 - DNA, 15 bp, Homo sapiens
aaacagtccttggca

SEQ ID NO: 61821 - DNA, 15 bp, Homo sapiens
taaacagtccttggc

SEQ ID NO: 61822 - DNA, 15 bp, Homo sapiens
ttaaacagtccttgg

SEQ ID NO: 61823 - DNA, 15 bp, Homo sapiens
tttaaacagtccttg

SEQ ID NO: 61824 - DNA, 15 bp, Homo sapiens
gtttaaacagtcctt

SEQ ID NO: 61825 - DNA, 15 bp, Homo sapiens
tgtttaaacagtcct

SEQ ID NO: 61826 - DNA, 15 bp, Homo sapiens
gtgtttaaacagtcc

SEQ ID NO: 61827 - DNA, 15 bp, Homo sapiens
tgtgtttaaacagtc

SEQ ID NO: 61828 - DNA, 15 bp, Homo sapiens
atgtgtttaaacagt

SEQ ID NO: 61829 - DNA, 15 bp, Homo sapiens
gatgtgtttaaacag

SEQ ID NO: 61830 - DNA, 15 bp, Homo sapiens
tgatgtgtttaaaca

SEQ ID NO: 61831 - DNA, 15 bp, Homo sapiens
gtgatgtgtttaaac

SEQ ID NO: 61832 - DNA, 15 bp, Homo sapiens
tgtgatgtgtttaaa

SEQ ID NO: 61833 - DNA, 15 bp, Homo sapiens
atgtgatgtgtttaa

SEQ ID NO: 61834 - DNA, 15 bp, Homo sapiens
catgtgatgtgttta

SEQ ID NO: 61835 - DNA, 15 bp, Homo sapiens
ccatgtgatgtgttt

SEQ ID NO: 61836 - DNA, 15 bp, Homo sapiens
cccatgtgatgtgtt

SEQ ID NO: 61837 - DNA, 15 bp, Homo sapiens
gcccatgtgatgtgt

SEQ ID NO: 61838 - DNA, 15 bp, Homo sapiens
agcccatgtgatgtg

SEQ ID NO: 61839 - DNA, 15 bp, Homo sapiens
aagcccatgtgatgt

SEQ ID NO: 61840 - DNA, 15 bp, Homo sapiens
gaagcccatgtgatg

SEQ ID NO: 61841 - DNA, 15 bp, Homo sapiens
agaagcccatgtgat

SEQ ID NO: 61842 - DNA, 15 bp, Homo sapiens
aagaagcccatgtga

SEQ ID NO: 61843 - DNA, 15 bp, Homo sapiens
gaagaagcccatgtg

SEQ ID NO: 61844 - DNA, 15 bp, Homo sapiens
agaagaagcccatgt

SEQ ID NO: 61845 - DNA, 15 bp, Homo sapiens
aagaagaagcccatg

SEQ ID NO: 61846 - DNA, 15 bp, Homo sapiens
gaagaagaagcccat

SEQ ID NO: 61847 - DNA, 15 bp, Homo sapiens
agaagaagaagccca

SEQ ID NO: 61848 - DNA, 15 bp, Homo sapiens
tagaagaagaagccc

SEQ ID NO: 61849 - DNA, 15 bp, Homo sapiens
atagaagaagaagcc

SEQ ID NO: 61850 - DNA, 15 bp, Homo sapiens
gatagaagaagaagc

SEQ ID NO: 61851 - DNA, 15 bp, Homo sapiens
ggatagaagaagaag

SEQ ID NO: 61852 - DNA, 15 bp, Homo sapiens
aggatagaagaagaa

SEQ ID NO: 61853 - DNA, 15 bp, Homo sapiens
gaggatagaagaaga

SEQ ID NO: 61854 - DNA, 15 bp, Homo sapiens
tgaggatagaagaag

SEQ ID NO: 61855 - DNA, 15 bp, Homo sapiens
gtgaggatagaagaa

SEQ ID NO: 61856 - DNA, 15 bp, Homo sapiens
agtgaggatagaaga

SEQ ID NO: 61857 - DNA, 15 bp, Homo sapiens
tagtgaggatagaag

SEQ ID NO: 61858 - DNA, 15 bp, Homo sapiens
ttagtgaggatagaa

SEQ ID NO: 61859 - DNA, 15 bp, Homo sapiens
gttagtgaggataga

SEQ ID NO: 61860 - DNA, 15 bp, Homo sapiens
ggttagtgaggatag

SEQ ID NO: 61861 - DNA, 15 bp, Homo sapiens
gggttagtgaggata

SEQ ID NO: 61862 - DNA, 15 bp, Homo sapiens
agggttagtgaggat

SEQ ID NO: 61863 - DNA, 15 bp, Homo sapiens
aagggttagtgagga

SEQ ID NO: 61864 - DNA, 15 bp, Homo sapiens
aaagggttagtgagg

SEQ ID NO: 61865 - DNA, 15 bp, Homo sapiens
aaaagggttagtgag

SEQ ID NO: 61866 - DNA, 15 bp, Homo sapiens
taaaagggttagtga

SEQ ID NO: 61867 - DNA, 15 bp, Homo sapiens
ttaaaagggttagtg

SEQ ID NO: 61868 - DNA, 15 bp, Homo sapiens
gttaaaagggttagt

SEQ ID NO: 61869 - DNA, 15 bp, Homo sapiens
tgttaaaagggttag

SEQ ID NO: 61870 - DNA, 15 bp, Homo sapiens
ctgttaaaagggtta

SEQ ID NO: 61871 - DNA, 15 bp, Homo sapiens
tctgttaaaagggtt

SEQ ID NO: 61872 - DNA, 15 bp, Homo sapiens
gtctgttaaaagggt

SEQ ID NO: 61873 - DNA, 15 bp, Homo sapiens
tgtctgttaaaaggg

SEQ ID NO: 61874 - DNA, 15 bp, Homo sapiens
ttgtctgttaaaagg

SEQ ID NO: 61875 - DNA, 15 bp, Homo sapiens
cttgtctgttaaaag

SEQ ID NO: 61876 - DNA, 15 bp, Homo sapiens
ccttgtctgttaaaa

SEQ ID NO: 61877 - DNA, 15 bp, Homo sapiens
tccttgtctgttaaa

SEQ ID NO: 61878 - DNA, 15 bp, Homo sapiens
ttccttgtctgttaa

SEQ ID NO: 61879 - DNA, 15 bp, Homo sapiens
tttccttgtctgtta

SEQ ID NO: 61880 - DNA, 15 bp, Homo sapiens
atttccttgtctgtt

SEQ ID NO: 61881 - DNA, 15 bp, Homo sapiens
catttccttgtctgt

SEQ ID NO: 61882 - DNA, 15 bp, Homo sapiens
tcatttccttgtctg

SEQ ID NO: 61883 - DNA, 15 bp, Homo sapiens
ctcatttccttgtct

SEQ ID NO: 61884 - DNA, 15 bp, Homo sapiens
cctcatttccttgtc

SEQ ID NO: 61885 - DNA, 15 bp, Homo sapiens
gcctcatttccttgt

SEQ ID NO: 61886 - DNA, 15 bp, Homo sapiens
agcctcatttccttg

SEQ ID NO: 61887 - DNA, 15 bp, Homo sapiens
gagcctcatttcctt

SEQ ID NO: 61888 - DNA, 15 bp, Homo sapiens
tgagcctcatttcct

SEQ ID NO: 61889 - DNA, 15 bp, Homo sapiens
ctgagcctcatttcc

SEQ ID NO: 61890 - DNA, 15 bp, Homo sapiens
cctgagcctcatttc

SEQ ID NO: 61891 - DNA, 15 bp, Homo sapiens
tcctgagcctcattt

SEQ ID NO: 61892 - DNA, 15 bp, Homo sapiens
ttcctgagcctcatt

SEQ ID NO: 61893 - DNA, 15 bp, Homo sapiens
cttcctgagcctcat

SEQ ID NO: 61894 - DNA, 15 bp, Homo sapiens
ccttcctgagcctca

SEQ ID NO: 61895 - DNA, 15 bp, Homo sapiens
accttcctgagcctc

SEQ ID NO: 61896 - DNA, 15 bp, Homo sapiens
gaccttcctgagcct

SEQ ID NO: 61897 - DNA, 15 bp, Homo sapiens
tgaccttcctgagcc

SEQ ID NO: 61898 - DNA, 15 bp, Homo sapiens
ttgaccttcctgagc

SEQ ID NO: 61899 - DNA, 15 bp, Homo sapiens
cttgaccttcctgag

SEQ ID NO: 61900 - DNA, 15 bp, Homo sapiens
ccttgaccttcctga

SEQ ID NO: 61901 - DNA, 15 bp, Homo sapiens
tccttgaccttcctg

SEQ ID NO: 61902 - DNA, 15 bp, Homo sapiens
gtccttgaccttcct

SEQ ID NO: 61903 - DNA, 15 bp, Homo sapiens
agtccttgaccttcc

SEQ ID NO: 61904 - DNA, 15 bp, Homo sapiens
aagtccttgaccttc

SEQ ID NO: 61905 - DNA, 15 bp, Homo sapiens
aaagtccttgacctt

SEQ ID NO: 61906 - DNA, 15 bp, Homo sapiens
taaagtccttgacct

SEQ ID NO: 61907 - DNA, 15 bp, Homo sapiens
ataaagtccttgacc

SEQ ID NO: 61908 - DNA, 15 bp, Homo sapiens
aataaagtccttgac

SEQ ID NO: 61909 - DNA, 15 bp, Homo sapiens
caataaagtccttga

SEQ ID NO: 61910 - DNA, 15 bp, Homo sapiens
tcaataaagtccttg

SEQ ID NO: 61911 - DNA, 15 bp, Homo sapiens
ctcaataaagtcctt

SEQ ID NO: 61912 - DNA, 15 bp, Homo sapiens
cctcaataaagtcct

SEQ ID NO: 61913 - DNA, 15 bp, Homo sapiens
acctcaataaagtcc

SEQ ID NO: 61914 - DNA, 15 bp, Homo sapiens
aacctcaataaagtc

SEQ ID NO: 61915 - DNA, 15 bp, Homo sapiens
gaacctcaataaagt

SEQ ID NO: 61916 - DNA, 15 bp, Homo sapiens
ggaacctcaataaag

SEQ ID NO: 61917 - DNA, 15 bp, Homo sapiens
tggaacctcaataaa

SEQ ID NO: 61918 - DNA, 15 bp, Homo sapiens
gtggaacctcaataa

SEQ ID NO: 61919 - DNA, 15 bp, Homo sapiens
tgtggaacctcaata

SEQ ID NO: 61920 - DNA, 15 bp, Homo sapiens
ctgtggaacctcaat

SEQ ID NO: 61921 - DNA, 15 bp, Homo sapiens
actgtggaacctcaa

SEQ ID NO: 61922 - DNA, 15 bp, Homo sapiens
tactgtggaacctca

SEQ ID NO: 61923 - DNA, 15 bp, Homo sapiens
ctactgtggaacctc

SEQ ID NO: 61924 - DNA, 15 bp, Homo sapiens
cctactgtggaacct

SEQ ID NO: 61925 - DNA, 15 bp, Homo sapiens
tcctactgtggaacc

SEQ ID NO: 61926 - DNA, 15 bp, Homo sapiens
atcctactgtggaac

SEQ ID NO: 61927 - DNA, 15 bp, Homo sapiens
tatcctactgtggaa

SEQ ID NO: 61928 - DNA, 15 bp, Homo sapiens
gtatcctactgtgga

SEQ ID NO: 61929 - DNA, 15 bp, Homo sapiens
tgtatcctactgtgg

SEQ ID NO: 61930 - DNA, 15 bp, Homo sapiens
ctgtatcctactgtg

SEQ ID NO: 61931 - DNA, 15 bp, Homo sapiens
actgtatcctactgt

SEQ ID NO: 61932 - DNA, 15 bp, Homo sapiens
aactgtatcctactg

SEQ ID NO: 61933 - DNA, 15 bp, Homo sapiens
gaactgtatcctact

SEQ ID NO: 61934 - DNA, 15 bp, Homo sapiens
agaactgtatcctac

SEQ ID NO: 61935 - DNA, 15 bp, Homo sapiens
aagaactgtatccta

SEQ ID NO: 61936 - DNA, 15 bp, Homo sapiens
caagaactgtatcct

SEQ ID NO: 61937 - DNA, 15 bp, Homo sapiens
gcaagaactgtatcc

SEQ ID NO: 61938 - DNA, 15 bp, Homo sapiens
agcaagaactgtatc

SEQ ID NO: 61939 - DNA, 15 bp, Homo sapiens
tagcaagaactgtat

SEQ ID NO: 61940 - DNA, 15 bp, Homo sapiens
ttagcaagaactgta

SEQ ID NO: 61941 - DNA, 15 bp, Homo sapiens
tttagcaagaactgt

SEQ ID NO: 61942 - DNA, 15 bp, Homo sapiens
ttttagcaagaactg

SEQ ID NO: 61943 - DNA, 15 bp, Homo sapiens
cttttagcaagaact

SEQ ID NO: 61944 - DNA, 15 bp, Homo sapiens
gcttttagcaagaac

SEQ ID NO: 61945 - DNA, 15 bp, Homo sapiens
tgcttttagcaagaa

SEQ ID NO: 61946 - DNA, 15 bp, Homo sapiens
ttgcttttagcaaga

SEQ ID NO: 61947 - DNA, 15 bp, Homo sapiens
gttgcttttagcaag

SEQ ID NO: 61948 - DNA, 15 bp, Homo sapiens
ggttgcttttagcaa

SEQ ID NO: 61949 - DNA, 15 bp, Homo sapiens
gggttgcttttagca

SEQ ID NO: 61950 - DNA, 15 bp, Homo sapiens
ggggttgcttttagc

SEQ ID NO: 61951 - DNA, 15 bp, Homo sapiens
aggggttgcttttag

SEQ ID NO: 61952 - DNA, 15 bp, Homo sapiens
gaggggttgctttta

SEQ ID NO: 61953 - DNA, 15 bp, Homo sapiens
ggaggggttgctttt

SEQ ID NO: 61954 - DNA, 15 bp, Homo sapiens
gggaggggttgcttt

SEQ ID NO: 61955 - DNA, 15 bp, Homo sapiens
agggaggggttgctt

SEQ ID NO: 61956 - DNA, 15 bp, Homo sapiens
gagggaggggttgct

SEQ ID NO: 61957 - DNA, 15 bp, Homo sapiens
tgagggaggggttgc

SEQ ID NO: 61958 - DNA, 15 bp, Homo sapiens
atgagggaggggttg

SEQ ID NO: 61959 - DNA, 15 bp, Homo sapiens
catgagggaggggtt

SEQ ID NO: 61960 - DNA, 15 bp, Homo sapiens
gcatgagggaggggt

SEQ ID NO: 61961 - DNA, 15 bp, Homo sapiens
agcatgagggagggg

SEQ ID NO: 61962 - DNA, 15 bp, Homo sapiens
gagcatgagggaggg

SEQ ID NO: 61963 - DNA, 15 bp, Homo sapiens
agagcatgagggagg

SEQ ID NO: 61964 - DNA, 15 bp, Homo sapiens
cagagcatgagggag

SEQ ID NO: 61965 - DNA, 15 bp, Homo sapiens
acagagcatgaggga

SEQ ID NO: 61966 - DNA, 15 bp, Homo sapiens
aacagagcatgaggg

SEQ ID NO: 61967 - DNA, 15 bp, Homo sapiens
taacagagcatgagg

SEQ ID NO: 61968 - DNA, 15 bp, Homo sapiens
ataacagagcatgag

SEQ ID NO: 61969 - DNA, 15 bp, Homo sapiens
gataacagagcatga

SEQ ID NO: 61970 - DNA, 15 bp, Homo sapiens
agataacagagcatg

SEQ ID NO: 61971 - DNA, 15 bp, Homo sapiens
tagataacagagcat

SEQ ID NO: 61972 - DNA, 15 bp, Homo sapiens
ttagataacagagca

SEQ ID NO: 61973 - DNA, 15 bp, Homo sapiens
gttagataacagagc

SEQ ID NO: 61974 - DNA, 15 bp, Homo sapiens
agttagataacagag

SEQ ID NO: 61975 - DNA, 15 bp, Homo sapiens
cagttagataacaga

SEQ ID NO: 61976 - DNA, 15 bp, Homo sapiens
gcagttagataacag

SEQ ID NO: 61977 - DNA, 15 bp, Homo sapiens
tgcagttagataaca

SEQ ID NO: 61978 - DNA, 15 bp, Homo sapiens
ttgcagttagataac

SEQ ID NO: 61979 - DNA, 15 bp, Homo sapiens
cttgcagttagataa

SEQ ID NO: 61980 - DNA, 15 bp, Homo sapiens
ccttgcagttagata

SEQ ID NO: 61981 - DNA, 15 bp, Homo sapiens
cccttgcagttagat

SEQ ID NO: 61982 - DNA, 15 bp, Homo sapiens
ccccttgcagttaga

SEQ ID NO: 61983 - DNA, 15 bp, Homo sapiens
tccccttgcagttag

SEQ ID NO: 61984 - DNA, 15 bp, Homo sapiens
ttccccttgcagtta

SEQ ID NO: 61985 - DNA, 15 bp, Homo sapiens
cttccccttgcagtt

SEQ ID NO: 61986 - DNA, 15 bp, Homo sapiens
ccttccccttgcagt

SEQ ID NO: 61987 - DNA, 15 bp, Homo sapiens
accttccccttgcag

SEQ ID NO: 61988 - DNA, 15 bp, Homo sapiens
gaccttccccttgca

SEQ ID NO: 61989 - DNA, 15 bp, Homo sapiens
tgaccttccccttgc

SEQ ID NO: 61990 - DNA, 15 bp, Homo sapiens
ctgaccttccccttg

SEQ ID NO: 61991 - DNA, 15 bp, Homo sapiens
actgaccttcccctt

SEQ ID NO: 61992 - DNA, 15 bp, Homo sapiens
cactgaccttcccct

SEQ ID NO: 61993 - DNA, 15 bp, Homo sapiens
ccactgaccttcccc

SEQ ID NO: 61994 - DNA, 15 bp, Homo sapiens
gccactgaccttccc

SEQ ID NO: 61995 - DNA, 15 bp, Homo sapiens
tgccactgaccttcc

SEQ ID NO: 61996 - DNA, 15 bp, Homo sapiens
ctgccactgaccttc

SEQ ID NO: 61997 - DNA, 15 bp, Homo sapiens
tctgccactgacctt

SEQ ID NO: 61998 - DNA, 15 bp, Homo sapiens
ctctgccactgacct

SEQ ID NO: 61999 - DNA, 15 bp, Homo sapiens
cctctgccactgacc

SEQ ID NO: 62000 - DNA, 15 bp, Homo sapiens
acctctgccactgac

SEQ ID NO: 62001 - DNA, 15 bp, Homo sapiens
tacctctgccactga

SEQ ID NO: 62002 - DNA, 15 bp, Homo sapiens
ctacctctgccactg

SEQ ID NO: 62003 - DNA, 15 bp, Homo sapiens
actacctctgccact

SEQ ID NO: 62004 - DNA, 15 bp, Homo sapiens
cactacctctgccac

SEQ ID NO: 62005 - DNA, 15 bp, Homo sapiens
ccactacctctgcca

SEQ ID NO: 62006 - DNA, 15 bp, Homo sapiens
accactacctctgcc

SEQ ID NO: 62007 - DNA, 15 bp, Homo sapiens
gaccactacctctgc

SEQ ID NO: 62008 - DNA, 15 bp, Homo sapiens
ggaccactacctctg

SEQ ID NO: 62009 - DNA, 15 bp, Homo sapiens
gggaccactacctct

SEQ ID NO: 62010 - DNA, 15 bp, Homo sapiens
tgggaccactacctc

SEQ ID NO: 62011 - DNA, 15 bp, Homo sapiens
atgggaccactacct

SEQ ID NO: 62012 - DNA, 15 bp, Homo sapiens
catgggaccactacc

SEQ ID NO: 62013 - DNA, 15 bp, Homo sapiens
ccatgggaccactac

SEQ ID NO: 62014 - DNA, 15 bp, Homo sapiens
accatgggaccacta

SEQ ID NO: 62015 - DNA, 15 bp, Homo sapiens
aaccatgggaccact

SEQ ID NO: 62016 - DNA, 15 bp, Homo sapiens
caaccatgggaccac

SEQ ID NO: 62017 - DNA, 15 bp, Homo sapiens
ccaaccatgggacca

SEQ ID NO: 62018 - DNA, 15 bp, Homo sapiens
accaaccatgggacc

SEQ ID NO: 62019 - DNA, 15 bp, Homo sapiens
caccaaccatgggac

SEQ ID NO: 62020 - DNA, 15 bp, Homo sapiens
gcaccaaccatggga

SEQ ID NO: 62021 - DNA, 15 bp, Homo sapiens
tgcaccaaccatggg

SEQ ID NO: 62022 - DNA, 15 bp, Homo sapiens
atgcaccaaccatgg

SEQ ID NO: 62023 - DNA, 15 bp, Homo sapiens
tatgcaccaaccatg

SEQ ID NO: 62024 - DNA, 15 bp, Homo sapiens
ttatgcaccaaccat

SEQ ID NO: 62025 - DNA, 15 bp, Homo sapiens
cttatgcaccaacca

SEQ ID NO: 62026 - DNA, 15 bp, Homo sapiens
tcttatgcaccaacc

SEQ ID NO: 62027 - DNA, 15 bp, Homo sapiens
ctcttatgcaccaac

SEQ ID NO: 62028 - DNA, 15 bp, Homo sapiens
gctcttatgcaccaa

SEQ ID NO: 62029 - DNA, 15 bp, Homo sapiens
agctcttatgcacca

SEQ ID NO: 62030 - DNA, 15 bp, Homo sapiens
cagctcttatgcacc

SEQ ID NO: 62031 - DNA, 15 bp, Homo sapiens
gcagctcttatgcac

SEQ ID NO: 62032 - DNA, 15 bp, Homo sapiens
agcagctcttatgca

SEQ ID NO: 62033 - DNA, 15 bp, Homo sapiens
gagcagctcttatgc

SEQ ID NO: 62034 - DNA, 15 bp, Homo sapiens
agagcagctcttatg

SEQ ID NO: 62035 - DNA, 15 bp, Homo sapiens
cagagcagctcttat

SEQ ID NO: 62036 - DNA, 15 bp, Homo sapiens
tcagagcagctctta

SEQ ID NO: 62037 - DNA, 15 bp, Homo sapiens
ctcagagcagctctt

SEQ ID NO: 62038 - DNA, 15 bp, Homo sapiens
tctcagagcagctct

SEQ ID NO: 62039 - DNA, 15 bp, Homo sapiens
gtctcagagcagctc

SEQ ID NO: 62040 - DNA, 15 bp, Homo sapiens
tgtctcagagcagct

SEQ ID NO: 62041 - DNA, 15 bp, Homo sapiens
ttgtctcagagcagc

SEQ ID NO: 62042 - DNA, 15 bp, Homo sapiens
gttgtctcagagcag

SEQ ID NO: 62043 - DNA, 15 bp, Homo sapiens
agttgtctcagagca

SEQ ID NO: 62044 - DNA, 15 bp, Homo sapiens
cagttgtctcagagc

SEQ ID NO: 62045 - DNA, 15 bp, Homo sapiens
gcagttgtctcagag

SEQ ID NO: 62046 - DNA, 15 bp, Homo sapiens
tgcagttgtctcaga

SEQ ID NO: 62047 - DNA, 15 bp, Homo sapiens
atgcagttgtctcag

SEQ ID NO: 62048 - DNA, 15 bp, Homo sapiens
catgcagttgtctca

SEQ ID NO: 62049 - DNA, 15 bp, Homo sapiens
gcatgcagttgtctc

SEQ ID NO: 62050 - DNA, 15 bp, Homo sapiens
agcatgcagttgtct

SEQ ID NO: 62051 - DNA, 15 bp, Homo sapiens
cagcatgcagttgtc

SEQ ID NO: 62052 - DNA, 15 bp, Homo sapiens
ccagcatgcagttgt

SEQ ID NO: 62053 - DNA, 15 bp, Homo sapiens
accagcatgcagttg

SEQ ID NO: 62054 - DNA, 15 bp, Homo sapiens
caccagcatgcagtt

SEQ ID NO: 62055 - DNA, 15 bp, Homo sapiens
ccaccagcatgcagt

SEQ ID NO: 62056 - DNA, 15 bp, Homo sapiens
cccaccagcatgcag

SEQ ID NO: 62057 - DNA, 15 bp, Homo sapiens
acccaccagcatgca

SEQ ID NO: 62058 - DNA, 15 bp, Homo sapiens
gacccaccagcatgc

SEQ ID NO: 62059 - DNA, 15 bp, Homo sapiens
ggacccaccagcatg

SEQ ID NO: 62060 - DNA, 15 bp, Homo sapiens
aggacccaccagcat

SEQ ID NO: 62061 - DNA, 15 bp, Homo sapiens
caggacccaccagca

SEQ ID NO: 62062 - DNA, 15 bp, Homo sapiens
gcaggacccaccagc

SEQ ID NO: 62063 - DNA, 15 bp, Homo sapiens
tgcaggacccaccag

SEQ ID NO: 62064 - DNA, 15 bp, Homo sapiens
ctgcaggacccacca

SEQ ID NO: 62065 - DNA, 15 bp, Homo sapiens
tctgcaggacccacc

SEQ ID NO: 62066 - DNA, 15 bp, Homo sapiens
gtctgcaggacccac

SEQ ID NO: 62067 - DNA, 15 bp, Homo sapiens
tgtctgcaggaccca

SEQ ID NO: 62068 - DNA, 15 bp, Homo sapiens
atgtctgcaggaccc

SEQ ID NO: 62069 - DNA, 15 bp, Homo sapiens
catgtctgcaggacc

SEQ ID NO: 62070 - DNA, 15 bp, Homo sapiens
acatgtctgcaggac

SEQ ID NO: 62071 - DNA, 15 bp, Homo sapiens
tacatgtctgcagga

SEQ ID NO: 62072 - DNA, 15 bp, Homo sapiens
gtacatgtctgcagg

SEQ ID NO: 62073 - DNA, 15 bp, Homo sapiens
ggtacatgtctgcag

SEQ ID NO: 62074 - DNA, 15 bp, Homo sapiens
gggtacatgtctgca

SEQ ID NO: 62075 - DNA, 15 bp, Homo sapiens
tgggtacatgtctgc

SEQ ID NO: 62076 - DNA, 15 bp, Homo sapiens
atgggtacatgtctg

SEQ ID NO: 62077 - DNA, 15 bp, Homo sapiens
gatgggtacatgtct

SEQ ID NO: 62078 - DNA, 15 bp, Homo sapiens
tgatgggtacatgtc

SEQ ID NO: 62079 - DNA, 15 bp, Homo sapiens
ctgatgggtacatgt

SEQ ID NO: 62080 - DNA, 15 bp, Homo sapiens
gctgatgggtacatg

SEQ ID NO: 62081 - DNA, 15 bp, Homo sapiens
ggctgatgggtacat

SEQ ID NO: 62082 - DNA, 15 bp, Homo sapiens
cggctgatgggtaca

SEQ ID NO: 62083 - DNA, 15 bp, Homo sapiens
ccggctgatgggtac

SEQ ID NO: 62084 - DNA, 15 bp, Homo sapiens
tccggctgatgggta

SEQ ID NO: 62085 - DNA, 15 bp, Homo sapiens
ctccggctgatgggt

SEQ ID NO: 62086 - DNA, 15 bp, Homo sapiens
tctccggctgatggg

SEQ ID NO: 62087 - DNA, 15 bp, Homo sapiens
atctccggctgatgg

SEQ ID NO: 62088 - DNA, 15 bp, Homo sapiens
tatctccggctgatg

SEQ ID NO: 62089 - DNA, 15 bp, Homo sapiens
ctatctccggctgat

SEQ ID NO: 62090 - DNA, 15 bp, Homo sapiens
cctatctccggctga

SEQ ID NO: 62091 - DNA, 15 bp, Homo sapiens
gcctatctccggctg

SEQ ID NO: 62092 - DNA, 15 bp, Homo sapiens
agcctatctccggct

SEQ ID NO: 62093 - DNA, 15 bp, Homo sapiens
gagcctatctccggc

SEQ ID NO: 62094 - DNA, 15 bp, Homo sapiens
tgagcctatctccgg

SEQ ID NO: 62095 - DNA, 15 bp, Homo sapiens
ttgagcctatctccg

SEQ ID NO: 62096 - DNA, 15 bp, Homo sapiens
tttgagcctatctcc

SEQ ID NO: 62097 - DNA, 15 bp, Homo sapiens
ttttgagcctatctc

SEQ ID NO: 62098 - DNA, 15 bp, Homo sapiens
attttgagcctatct

SEQ ID NO: 62099 - DNA, 15 bp, Homo sapiens
tattttgagcctatc

SEQ ID NO: 62100 - DNA, 15 bp, Homo sapiens
atattttgagcctat

SEQ ID NO: 62101 - DNA, 15 bp, Homo sapiens
gatattttgagccta

SEQ ID NO: 62102 - DNA, 15 bp, Homo sapiens
ggatattttgagcct

SEQ ID NO: 62103 - DNA, 15 bp, Homo sapiens
tggatattttgagcc

SEQ ID NO: 62104 - DNA, 15 bp, Homo sapiens
gtggatattttgagc

SEQ ID NO: 62105 - DNA, 15 bp, Homo sapiens
tgtggatattttgag

SEQ ID NO: 62106 - DNA, 15 bp, Homo sapiens
ttgtggatattttga

SEQ ID NO: 62107 - DNA, 15 bp, Homo sapiens
cttgtggatattttg

SEQ ID NO: 62108 - DNA, 15 bp, Homo sapiens
tcttgtggatatttt

SEQ ID NO: 62109 - DNA, 15 bp, Homo sapiens
ctcttgtggatattt

SEQ ID NO: 62110 - DNA, 15 bp, Homo sapiens
actcttgtggatatt

SEQ ID NO: 62111 - DNA, 15 bp, Homo sapiens
aactcttgtggatat

SEQ ID NO: 62112 - DNA, 15 bp, Homo sapiens
aaactcttgtggata

SEQ ID NO: 62113 - DNA, 15 bp, Homo sapiens
caaactcttgtggat

SEQ ID NO: 62114 - DNA, 15 bp, Homo sapiens
ccaaactcttgtgga

SEQ ID NO: 62115 - DNA, 15 bp, Homo sapiens
tccaaactcttgtgg

SEQ ID NO: 62116 - DNA, 15 bp, Homo sapiens
atccaaactcttgtg

SEQ ID NO: 62117 - DNA, 15 bp, Homo sapiens
catccaaactcttgt

SEQ ID NO: 62118 - DNA, 15 bp, Homo sapiens
tcatccaaactcttg

SEQ ID NO: 62119 - DNA, 15 bp, Homo sapiens
atcatccaaactctt

SEQ ID NO: 62120 - DNA, 15 bp, Homo sapiens
aatcatccaaactct

SEQ ID NO: 62121 - DNA, 15 bp, Homo sapiens
caatcatccaaactc

SEQ ID NO: 62122 - DNA, 15 bp, Homo sapiens
acaatcatccaaact

SEQ ID NO: 62123 - DNA, 15 bp, Homo sapiens
cacaatcatccaaac

SEQ ID NO: 62124 - DNA, 15 bp, Homo sapiens
ccacaatcatccaaa

SEQ ID NO: 62125 - DNA, 15 bp, Homo sapiens
cccacaatcatccaa

SEQ ID NO: 62126 - DNA, 15 bp, Homo sapiens
tcccacaatcatcca

SEQ ID NO: 62127 - DNA, 15 bp, Homo sapiens
ttcccacaatcatcc

SEQ ID NO: 62128 - DNA, 15 bp, Homo sapiens
attcccacaatcatc

SEQ ID NO: 62129 - DNA, 15 bp, Homo sapiens
cattcccacaatcat

SEQ ID NO: 62130 - DNA, 15 bp, Homo sapiens
gcattcccacaatca

SEQ ID NO: 62131 - DNA, 15 bp, Homo sapiens
tgcattcccacaatc

SEQ ID NO: 62132 - DNA, 15 bp, Homo sapiens
ctgcattcccacaat

SEQ ID NO: 62133 - DNA, 15 bp, Homo sapiens
tctgcattcccacaa

SEQ ID NO: 62134 - DNA, 15 bp, Homo sapiens
ttctgcattcccaca

SEQ ID NO: 62135 - DNA, 15 bp, Homo sapiens
attctgcattcccac

SEQ ID NO: 62136 - DNA, 15 bp, Homo sapiens
gattctgcattccca

SEQ ID NO: 62137 - DNA, 15 bp, Homo sapiens
ggattctgcattccc

SEQ ID NO: 62138 - DNA, 15 bp, Homo sapiens
tggattctgcattcc

SEQ ID NO: 62139 - DNA, 15 bp, Homo sapiens
atggattctgcattc

SEQ ID NO: 62140 - DNA, 15 bp, Homo sapiens
catggattctgcatt

SEQ ID NO: 62141 - DNA, 15 bp, Homo sapiens
ccatggattctgcat

SEQ ID NO: 62142 - DNA, 15 bp, Homo sapiens
accatggattctgca

SEQ ID NO: 62143 - DNA, 15 bp, Homo sapiens
caccatggattctgc

SEQ ID NO: 62144 - DNA, 15 bp, Homo sapiens
tcaccatggattctg

SEQ ID NO: 62145 - DNA, 15 bp, Homo sapiens
atcaccatggattct

SEQ ID NO: 62146 - DNA, 15 bp, Homo sapiens
gatcaccatggattc

SEQ ID NO: 62147 - DNA, 15 bp, Homo sapiens
tgatcaccatggatt

SEQ ID NO: 62148 - DNA, 15 bp, Homo sapiens
ttgatcaccatggat

SEQ ID NO: 62149 - DNA, 15 bp, Homo sapiens
cttgatcaccatgga

SEQ ID NO: 62150 - DNA, 15 bp, Homo sapiens
tcttgatcaccatgg

SEQ ID NO: 62151 - DNA, 15 bp, Homo sapiens
ctcttgatcaccatg

SEQ ID NO: 62152 - DNA, 15 bp, Homo sapiens
cctcttgatcaccat

SEQ ID NO: 62153 - DNA, 15 bp, Homo sapiens
ccctcttgatcacca

SEQ ID NO: 62154 - DNA, 15 bp, Homo sapiens
tccctcttgatcacc

SEQ ID NO: 62155 - DNA, 15 bp, Homo sapiens
ttccctcttgatcac

SEQ ID NO: 62156 - DNA, 15 bp, Homo sapiens
tttccctcttgatca

SEQ ID NO: 62157 - DNA, 15 bp, Homo sapiens
ctttccctcttgatc

SEQ ID NO: 62158 - DNA, 15 bp, Homo sapiens
actttccctcttgat

SEQ ID NO: 62159 - DNA, 15 bp, Homo sapiens
gactttccctcttga

SEQ ID NO: 62160 - DNA, 15 bp, Homo sapiens
tgactttccctcttg

SEQ ID NO: 62161 - DNA, 15 bp, Homo sapiens
ttgactttccctctt

SEQ ID NO: 62162 - DNA, 15 bp, Homo sapiens
cttgactttccctct

SEQ ID NO: 62163 - DNA, 15 bp, Homo sapiens
acttgactttccctc

SEQ ID NO: 62164 - DNA, 15 bp, Homo sapiens
aacttgactttccct

SEQ ID NO: 62165 - DNA, 15 bp, Homo sapiens
caacttgactttccc

SEQ ID NO: 62166 - DNA, 15 bp, Homo sapiens
gcaacttgactttcc

SEQ ID NO: 62167 - DNA, 15 bp, Homo sapiens
ggcaacttgactttc

SEQ ID NO: 62168 - DNA, 15 bp, Homo sapiens
aggcaacttgacttt

SEQ ID NO: 62169 - DNA, 15 bp, Homo sapiens
caggcaacttgactt

SEQ ID NO: 62170 - DNA, 15 bp, Homo sapiens
ccaggcaacttgact

SEQ ID NO: 62171 - DNA, 15 bp, Homo sapiens
gccaggcaacttgac

SEQ ID NO: 62172 - DNA, 15 bp, Homo sapiens
ggccaggcaacttga

SEQ ID NO: 62173 - DNA, 15 bp, Homo sapiens
tggccaggcaacttg

SEQ ID NO: 62174 - DNA, 15 bp, Homo sapiens
atggccaggcaactt

SEQ ID NO: 62175 - DNA, 15 bp, Homo sapiens
aatggccaggcaact

SEQ ID NO: 62176 - DNA, 15 bp, Homo sapiens
aaatggccaggcaac

SEQ ID NO: 62177 - DNA, 15 bp, Homo sapiens
aaaatggccaggcaa

SEQ ID NO: 62178 - DNA, 15 bp, Homo sapiens
gaaaatggccaggca

SEQ ID NO: 62179 - DNA, 15 bp, Homo sapiens
ggaaaatggccaggc

SEQ ID NO: 62180 - DNA, 15 bp, Homo sapiens
aggaaaatggccagg

SEQ ID NO: 62181 - DNA, 15 bp, Homo sapiens
aaggaaaatggccag

SEQ ID NO: 62182 - DNA, 15 bp, Homo sapiens
caaggaaaatggcca

SEQ ID NO: 62183 - DNA, 15 bp, Homo sapiens
ccaaggaaaatggcc

SEQ ID NO: 62184 - DNA, 15 bp, Homo sapiens
gccaaggaaaatggc

SEQ ID NO: 62185 - DNA, 15 bp, Homo sapiens
agccaaggaaaatgg

SEQ ID NO: 62186 - DNA, 15 bp, Homo sapiens
aagccaaggaaaatg

SEQ ID NO: 62187 - DNA, 15 bp, Homo sapiens
aaagccaaggaaaat

SEQ ID NO: 62188 - DNA, 15 bp, Homo sapiens
aaaagccaaggaaaa

SEQ ID NO: 62189 - DNA, 15 bp, Homo sapiens
taaaagccaaggaaa

SEQ ID NO: 62190 - DNA, 15 bp, Homo sapiens
ctaaaagccaaggaa

SEQ ID NO: 62191 - DNA, 15 bp, Homo sapiens
tctaaaagccaagga

SEQ ID NO: 62192 - DNA, 15 bp, Homo sapiens
gtctaaaagccaagg

SEQ ID NO: 62193 - DNA, 15 bp, Homo sapiens
tgtctaaaagccaag

SEQ ID NO: 62194 - DNA, 15 bp, Homo sapiens
ctgtctaaaagccaa

SEQ ID NO: 62195 - DNA, 15 bp, Homo sapiens
tctgtctaaaagcca

SEQ ID NO: 62196 - DNA, 15 bp, Homo sapiens
ttctgtctaaaagcc

SEQ ID NO: 62197 - DNA, 15 bp, Homo sapiens
tttctgtctaaaagc

SEQ ID NO: 62198 - DNA, 15 bp, Homo sapiens
ttttctgtctaaaag

SEQ ID NO: 62199 - DNA, 15 bp, Homo sapiens
cttttctgtctaaaa

SEQ ID NO: 62200 - DNA, 15 bp, Homo sapiens
acttttctgtctaaa

SEQ ID NO: 62201 - DNA, 15 bp, Homo sapiens
aacttttctgtctaa

SEQ ID NO: 62202 - DNA, 15 bp, Homo sapiens
taacttttctgtcta

SEQ ID NO: 62203 - DNA, 15 bp, Homo sapiens
gtaacttttctgtct

SEQ ID NO: 62204 - DNA, 15 bp, Homo sapiens
cgtaacttttctgtc

SEQ ID NO: 62205 - DNA, 15 bp, Homo sapiens
acgtaacttttctgt

SEQ ID NO: 62206 - DNA, 15 bp, Homo sapiens
cacgtaacttttctg

SEQ ID NO: 62207 - DNA, 15 bp, Homo sapiens
ccacgtaacttttct

SEQ ID NO: 62208 - DNA, 15 bp, Homo sapiens
cccacgtaacttttc

SEQ ID NO: 62209 - DNA, 15 bp, Homo sapiens
tcccacgtaactttt

SEQ ID NO: 62210 - DNA, 15 bp, Homo sapiens
atcccacgtaacttt

SEQ ID NO: 62211 - DNA, 15 bp, Homo sapiens
tatcccacgtaactt

SEQ ID NO: 62212 - DNA, 15 bp, Homo sapiens
atatcccacgtaact

SEQ ID NO: 62213 - DNA, 15 bp, Homo sapiens
aatatcccacgtaac

SEQ ID NO: 62214 - DNA, 15 bp, Homo sapiens
taatatcccacgtaa

SEQ ID NO: 62215 - DNA, 15 bp, Homo sapiens
ataatatcccacgta

SEQ ID NO: 62216 - DNA, 15 bp, Homo sapiens
gataatatcccacgt

SEQ ID NO: 62217 - DNA, 15 bp, Homo sapiens
agataatatcccacg

SEQ ID NO: 62218 - DNA, 15 bp, Homo sapiens
gagataatatcccac

SEQ ID NO: 62219 - DNA, 15 bp, Homo sapiens
ggagataatatccca

SEQ ID NO: 62220 - DNA, 15 bp, Homo sapiens
gggagataatatccc

SEQ ID NO: 62221 - DNA, 15 bp, Homo sapiens
tgggagataatatcc

SEQ ID NO: 62222 - DNA, 15 bp, Homo sapiens
gtgggagataatatc

SEQ ID NO: 62223 - DNA, 15 bp, Homo sapiens
tgtgggagataatat

SEQ ID NO: 62224 - DNA, 15 bp, Homo sapiens
ctgtgggagataata

SEQ ID NO: 62225 - DNA, 15 bp, Homo sapiens
gctgtgggagataat

SEQ ID NO: 62226 - DNA, 15 bp, Homo sapiens
agctgtgggagataa

SEQ ID NO: 62227 - DNA, 15 bp, Homo sapiens
gagctgtgggagata

SEQ ID NO: 62228 - DNA, 15 bp, Homo sapiens
agagctgtgggagat

SEQ ID NO: 62229 - DNA, 15 bp, Homo sapiens
aagagctgtgggaga

SEQ ID NO: 62230 - DNA, 15 bp, Homo sapiens
gaagagctgtgggag

SEQ ID NO: 62231 - DNA, 15 bp, Homo sapiens
agaagagctgtggga

SEQ ID NO: 62232 - DNA, 15 bp, Homo sapiens
cagaagagctgtggg

SEQ ID NO: 62233 - DNA, 15 bp, Homo sapiens
acagaagagctgtgg

SEQ ID NO: 62234 - DNA, 15 bp, Homo sapiens
cacagaagagctgtg

SEQ ID NO: 62235 - DNA, 15 bp, Homo sapiens
ccacagaagagctgt

SEQ ID NO: 62236 - DNA, 15 bp, Homo sapiens
accacagaagagctg

SEQ ID NO: 62237 - DNA, 15 bp, Homo sapiens
caccacagaagagct

SEQ ID NO: 62238 - DNA, 15 bp, Homo sapiens
gcaccacagaagagc

SEQ ID NO: 62239 - DNA, 15 bp, Homo sapiens
ggcaccacagaagag

SEQ ID NO: 62240 - DNA, 15 bp, Homo sapiens
tggcaccacagaaga

SEQ ID NO: 62241 - DNA, 15 bp, Homo sapiens
gtggcaccacagaag

SEQ ID NO: 62242 - DNA, 15 bp, Homo sapiens
ggtggcaccacagaa

SEQ ID NO: 62243 - DNA, 15 bp, Homo sapiens
tggtggcaccacaga

SEQ ID NO: 62244 - DNA, 15 bp, Homo sapiens
ctggtggcaccacag

SEQ ID NO: 62245 - DNA, 15 bp, Homo sapiens
actggtggcaccaca

SEQ ID NO: 62246 - DNA, 15 bp, Homo sapiens
gactggtggcaccac

SEQ ID NO: 62247 - DNA, 15 bp, Homo sapiens
tgactggtggcacca

SEQ ID NO: 62248 - DNA, 15 bp, Homo sapiens
atgactggtggcacc

SEQ ID NO: 62249 - DNA, 15 bp, Homo sapiens
tatgactggtggcac

SEQ ID NO: 62250 - DNA, 15 bp, Homo sapiens
ctatgactggtggca

SEQ ID NO: 62251 - DNA, 15 bp, Homo sapiens
actatgactggtggc

SEQ ID NO: 62252 - DNA, 15 bp, Homo sapiens
gactatgactggtgg

SEQ ID NO: 62253 - DNA, 15 bp, Homo sapiens
ggactatgactggtg

SEQ ID NO: 62254 - DNA, 15 bp, Homo sapiens
aggactatgactggt

SEQ ID NO: 62255 - DNA, 15 bp, Homo sapiens
aaggactatgactgg

SEQ ID NO: 62256 - DNA, 15 bp, Homo sapiens
taaggactatgactg

SEQ ID NO: 62257 - DNA, 15 bp, Homo sapiens
ataaggactatgact

SEQ ID NO: 62258 - DNA, 15 bp, Homo sapiens
tataaggactatgac

SEQ ID NO: 62259 - DNA, 15 bp, Homo sapiens
atataaggactatga

SEQ ID NO: 62260 - DNA, 15 bp, Homo sapiens
tatataaggactatg

SEQ ID NO: 62261 - DNA, 15 bp, Homo sapiens
ttatataaggactat

SEQ ID NO: 62262 - DNA, 15 bp, Homo sapiens
cttatataaggacta

SEQ ID NO: 62263 - DNA, 15 bp, Homo sapiens
ccttatataaggact

SEQ ID NO: 62264 - DNA, 15 bp, Homo sapiens
tccttatataaggac

SEQ ID NO: 62265 - DNA, 15 bp, Homo sapiens
ctccttatataagga

SEQ ID NO: 62266 - DNA, 15 bp, Homo sapiens
tctccttatataagg

SEQ ID NO: 62267 - DNA, 15 bp, Homo sapiens
ttctccttatataag

SEQ ID NO: 62268 - DNA, 15 bp, Homo sapiens
tttctccttatataa

SEQ ID NO: 62269 - DNA, 15 bp, Homo sapiens
gtttctccttatata

SEQ ID NO: 62270 - DNA, 15 bp, Homo sapiens
ggtttctccttatat

SEQ ID NO: 62271 - DNA, 15 bp, Homo sapiens
tggtttctccttata

SEQ ID NO: 62272 - DNA, 15 bp, Homo sapiens
ctggtttctccttat

SEQ ID NO: 62273 - DNA, 15 bp, Homo sapiens
actggtttctcctta

SEQ ID NO: 62274 - DNA, 15 bp, Homo sapiens
aactggtttctcctt

SEQ ID NO: 62275 - DNA, 15 bp, Homo sapiens
caactggtttctcct

SEQ ID NO: 62276 - DNA, 15 bp, Homo sapiens
tcaactggtttctcc

SEQ ID NO: 62277 - DNA, 15 bp, Homo sapiens
ttcaactggtttctc

SEQ ID NO: 62278 - DNA, 15 bp, Homo sapiens
tttcaactggtttct

SEQ ID NO: 62279 - DNA, 15 bp, Homo sapiens
atttcaactggtttc

SEQ ID NO: 62280 - DNA, 15 bp, Homo sapiens
aatttcaactggttt

SEQ ID NO: 62281 - DNA, 15 bp, Homo sapiens
taatttcaactggtt

SEQ ID NO: 62282 - DNA, 15 bp, Homo sapiens
gtaatttcaactggt

SEQ ID NO: 62283 - DNA, 15 bp, Homo sapiens
ggtaatttcaactgg

SEQ ID NO: 62284 - DNA, 15 bp, Homo sapiens
aggtaatttcaactg

SEQ ID NO: 62285 - DNA, 15 bp, Homo sapiens
taggtaatttcaact

SEQ ID NO: 62286 - DNA, 15 bp, Homo sapiens
ataggtaatttcaac

SEQ ID NO: 62287 - DNA, 15 bp, Homo sapiens
aataggtaatttcaa

SEQ ID NO: 62288 - DNA, 15 bp, Homo sapiens
caataggtaatttca

SEQ ID NO: 62289 - DNA, 15 bp, Homo sapiens
tcaataggtaatttc

SEQ ID NO: 62290 - DNA, 15 bp, Homo sapiens
ttcaataggtaattt

SEQ ID NO: 62291 - DNA, 15 bp, Homo sapiens
cttcaataggtaatt

SEQ ID NO: 62292 - DNA, 15 bp, Homo sapiens
tcttcaataggtaat

SEQ ID NO: 62293 - DNA, 15 bp, Homo sapiens
ttcttcaataggtaa

SEQ ID NO: 62294 - DNA, 15 bp, Homo sapiens
tttcttcaataggta

SEQ ID NO: 62295 - DNA, 15 bp, Homo sapiens
gtttcttcaataggt

SEQ ID NO: 62296 - DNA, 15 bp, Homo sapiens
tgtttcttcaatagg

SEQ ID NO: 62297 - DNA, 15 bp, Homo sapiens
ttgtttcttcaatag

SEQ ID NO: 62298 - DNA, 15 bp, Homo sapiens
tttgtttcttcaata

SEQ ID NO: 62299 - DNA, 15 bp, Homo sapiens
ctttgtttcttcaat

SEQ ID NO: 62300 - DNA, 15 bp, Homo sapiens
tctttgtttcttcaa

SEQ ID NO: 62301 - DNA, 15 bp, Homo sapiens
ctctttgtttcttca

SEQ ID NO: 62302 - DNA, 15 bp, Homo sapiens
gctctttgtttcttc

SEQ ID NO: 62303 - DNA, 15 bp, Homo sapiens
tgctctttgtttctt

SEQ ID NO: 62304 - DNA, 15 bp, Homo sapiens
ttgctctttgtttct

SEQ ID NO: 62305 - DNA, 15 bp, Homo sapiens
tttgctctttgtttc

SEQ ID NO: 62306 - DNA, 15 bp, Homo sapiens
gtttgctctttgttt

SEQ ID NO: 62307 - DNA, 15 bp, Homo sapiens
agtttgctctttgtt

SEQ ID NO: 62308 - DNA, 15 bp, Homo sapiens
gagtttgctctttgt

SEQ ID NO: 62309 - DNA, 15 bp, Homo sapiens
cgagtttgctctttg

SEQ ID NO: 62310 - DNA, 15 bp, Homo sapiens
gcgagtttgctcttt

SEQ ID NO: 62311 - DNA, 15 bp, Homo sapiens
ggcgagtttgctctt

SEQ ID NO: 62312 - DNA, 15 bp, Homo sapiens
gggcgagtttgctct

SEQ ID NO: 62313 - DNA, 15 bp, Homo sapiens
tgggcgagtttgctc

SEQ ID NO: 62314 - DNA, 15 bp, Homo sapiens
gtgggcgagtttgct

SEQ ID NO: 62315 - DNA, 15 bp, Homo sapiens
agtgggcgagtttgc

SEQ ID NO: 62316 - DNA, 15 bp, Homo sapiens
cagtgggcgagtttg

SEQ ID NO: 62317 - DNA, 15 bp, Homo sapiens
tcagtgggcgagttt

SEQ ID NO: 62318 - DNA, 15 bp, Homo sapiens
ttcagtgggcgagtt

SEQ ID NO: 62319 - DNA, 15 bp, Homo sapiens
tttcagtgggcgagt

SEQ ID NO: 62320 - DNA, 15 bp, Homo sapiens
atttcagtgggcgag

SEQ ID NO: 62321 - DNA, 15 bp, Homo sapiens
catttcagtgggcga

SEQ ID NO: 62322 - DNA, 15 bp, Homo sapiens
gcatttcagtgggcg

SEQ ID NO: 62323 - DNA, 15 bp, Homo sapiens
cgcatttcagtgggc

SEQ ID NO: 62324 - DNA, 15 bp, Homo sapiens
acgcatttcagtggg

SEQ ID NO: 62325 - DNA, 15 bp, Homo sapiens
tacgcatttcagtgg

SEQ ID NO: 62326 - DNA, 15 bp, Homo sapiens
ctacgcatttcagtg

SEQ ID NO: 62327 - DNA, 15 bp, Homo sapiens
tctacgcatttcagt

SEQ ID NO: 62328 - DNA, 15 bp, Homo sapiens
ttctacgcatttcag

SEQ ID NO: 62329 - DNA, 15 bp, Homo sapiens
tttctacgcatttca

SEQ ID NO: 62330 - DNA, 15 bp, Homo sapiens
ctttctacgcatttc

SEQ ID NO: 62331 - DNA, 15 bp, Homo sapiens
gctttctacgcattt

SEQ ID NO: 62332 - DNA, 15 bp, Homo sapiens
ggctttctacgcatt

SEQ ID NO: 62333 - DNA, 15 bp, Homo sapiens
gggctttctacgcat

SEQ ID NO: 62334 - DNA, 15 bp, Homo sapiens
agggctttctacgca

SEQ ID NO: 62335 - DNA, 15 bp, Homo sapiens
cagggctttctacgc

SEQ ID NO: 62336 - DNA, 15 bp, Homo sapiens
ccagggctttctacg

SEQ ID NO: 62337 - DNA, 15 bp, Homo sapiens
tccagggctttctac

SEQ ID NO: 62338 - DNA, 15 bp, Homo sapiens
gtccagggctttcta

SEQ ID NO: 62339 - DNA, 15 bp, Homo sapiens
agtccagggctttct

SEQ ID NO: 62340 - DNA, 15 bp, Homo sapiens
gagtccagggctttc

SEQ ID NO: 62341 - DNA, 15 bp, Homo sapiens
agagtccagggcttt

SEQ ID NO: 62342 - DNA, 15 bp, Homo sapiens
cagagtccagggctt

SEQ ID NO: 62343 - DNA, 15 bp, Homo sapiens
acagagtccagggct

SEQ ID NO: 62344 - DNA, 15 bp, Homo sapiens
aacagagtccagggc

SEQ ID NO: 62345 - DNA, 15 bp, Homo sapiens
caacagagtccaggg

SEQ ID NO: 62346 - DNA, 15 bp, Homo sapiens
acaacagagtccagg

SEQ ID NO: 62347 - DNA, 15 bp, Homo sapiens
tacaacagagtccag

SEQ ID NO: 62348 - DNA, 15 bp, Homo sapiens
atacaacagagtcca

SEQ ID NO: 62349 - DNA, 15 bp, Homo sapiens
aatacaacagagtcc

SEQ ID NO: 62350 - DNA, 15 bp, Homo sapiens
gaatacaacagagtc

SEQ ID NO: 62351 - DNA, 15 bp, Homo sapiens
tgaatacaacagagt

SEQ ID NO: 62352 - DNA, 15 bp, Homo sapiens
atgaatacaacagag

SEQ ID NO: 62353 - DNA, 15 bp, Homo sapiens
tatgaatacaacaga

SEQ ID NO: 62354 - DNA, 15 bp, Homo sapiens
ttatgaatacaacag

SEQ ID NO: 62355 - DNA, 15 bp, Homo sapiens
gttatgaatacaaca

SEQ ID NO: 62356 - DNA, 15 bp, Homo sapiens
agttatgaatacaac

SEQ ID NO: 62357 - DNA, 15 bp, Homo sapiens
gagttatgaatacaa

SEQ ID NO: 62358 - DNA, 15 bp, Homo sapiens
agagttatgaataca

SEQ ID NO: 62359 - DNA, 15 bp, Homo sapiens
cagagttatgaatac

SEQ ID NO: 62360 - DNA, 15 bp, Homo sapiens
gcagagttatgaata

SEQ ID NO: 62361 - DNA, 15 bp, Homo sapiens
ggcagagttatgaat

SEQ ID NO: 62362 - DNA, 15 bp, Homo sapiens
tggcagagttatgaa

SEQ ID NO: 62363 - DNA, 15 bp, Homo sapiens
atggcagagttatga

SEQ ID NO: 62364 - DNA, 15 bp, Homo sapiens
aatggcagagttatg

SEQ ID NO: 62365 - DNA, 15 bp, Homo sapiens
taatggcagagttat

SEQ ID NO: 62366 - DNA, 15 bp, Homo sapiens
ataatggcagagtta

SEQ ID NO: 62367 - DNA, 15 bp, Homo sapiens
aataatggcagagtt

SEQ ID NO: 62368 - DNA, 15 bp, Homo sapiens
aaataatggcagagt

SEQ ID NO: 62369 - DNA, 15 bp, Homo sapiens
aaaataatggcagag

SEQ ID NO: 62370 - DNA, 15 bp, Homo sapiens
aaaaataatggcaga

SEQ ID NO: 62371 - DNA, 15 bp, Homo sapiens
gaaaaataatggcag

SEQ ID NO: 62372 - DNA, 15 bp, Homo sapiens
agaaaaataatggca

SEQ ID NO: 62373 - DNA, 15 bp, Homo sapiens
cagaaaaataatggc

SEQ ID NO: 62374 - DNA, 15 bp, Homo sapiens
gcagaaaaataatgg

SEQ ID NO: 62375 - DNA, 15 bp, Homo sapiens
cgcagaaaaataatg

SEQ ID NO: 62376 - DNA, 15 bp, Homo sapiens
acgcagaaaaataat

SEQ ID NO: 62377 - DNA, 15 bp, Homo sapiens
tacgcagaaaaataa

SEQ ID NO: 62378 - DNA, 15 bp, Homo sapiens
ctacgcagaaaaata

SEQ ID NO: 62379 - DNA, 15 bp, Homo sapiens
actacgcagaaaaat

SEQ ID NO: 62380 - DNA, 15 bp, Homo sapiens
aactacgcagaaaaa

SEQ ID NO: 62381 - DNA, 15 bp, Homo sapiens
aaactacgcagaaaa

SEQ ID NO: 62382 - DNA, 15 bp, Homo sapiens
aaaactacgcagaaa

SEQ ID NO: 62383 - DNA, 15 bp, Homo sapiens
caaaactacgcagaa

SEQ ID NO: 62384 - DNA, 15 bp, Homo sapiens
ccaaaactacgcaga

SEQ ID NO: 62385 - DNA, 15 bp, Homo sapiens
cccaaaactacgcag

SEQ ID NO: 62386 - DNA, 15 bp, Homo sapiens
acccaaaactacgca

SEQ ID NO: 62387 - DNA, 15 bp, Homo sapiens
tacccaaaactacgc

SEQ ID NO: 62388 - DNA, 15 bp, Homo sapiens
ttacccaaaactacg

SEQ ID NO: 62389 - DNA, 15 bp, Homo sapiens
cttacccaaaactac

SEQ ID NO: 62390 - DNA, 15 bp, Homo sapiens
acttacccaaaacta

SEQ ID NO: 62391 - DNA, 15 bp, Homo sapiens
gacttacccaaaact

SEQ ID NO: 62392 - DNA, 15 bp, Homo sapiens
tgacttacccaaaac

SEQ ID NO: 62393 - DNA, 15 bp, Homo sapiens
gtgacttacccaaaa

SEQ ID NO: 62394 - DNA, 15 bp, Homo sapiens
agtgacttacccaaa

SEQ ID NO: 62395 - DNA, 15 bp, Homo sapiens
aagtgacttacccaa

SEQ ID NO: 62396 - DNA, 15 bp, Homo sapiens
taagtgacttaccca

SEQ ID NO: 62397 - DNA, 15 bp, Homo sapiens
ataagtgacttaccc

SEQ ID NO: 62398 - DNA, 15 bp, Homo sapiens
gataagtgacttacc

SEQ ID NO: 62399 - DNA, 15 bp, Homo sapiens
agataagtgacttac

SEQ ID NO: 62400 - DNA, 15 bp, Homo sapiens
aagataagtgactta

SEQ ID NO: 62401 - DNA, 15 bp, Homo sapiens
gaagataagtgactt

SEQ ID NO: 62402 - DNA, 15 bp, Homo sapiens
agaagataagtgact

SEQ ID NO: 62403 - DNA, 15 bp, Homo sapiens
aagaagataagtgac

SEQ ID NO: 62404 - DNA, 15 bp, Homo sapiens
aaagaagataagtga

SEQ ID NO: 62405 - DNA, 15 bp, Homo sapiens
taaagaagataagtg

SEQ ID NO: 62406 - DNA, 15 bp, Homo sapiens
ctaaagaagataagt

SEQ ID NO: 62407 - DNA, 15 bp, Homo sapiens
cctaaagaagataag

SEQ ID NO: 62408 - DNA, 15 bp, Homo sapiens
tcctaaagaagataa

SEQ ID NO: 62409 - DNA, 15 bp, Homo sapiens
atcctaaagaagata

SEQ ID NO: 62410 - DNA, 15 bp, Homo sapiens
catcctaaagaagat

SEQ ID NO: 62411 - DNA, 15 bp, Homo sapiens
ccatcctaaagaaga

SEQ ID NO: 62412 - DNA, 15 bp, Homo sapiens
accatcctaaagaag

SEQ ID NO: 62413 - DNA, 15 bp, Homo sapiens
taccatcctaaagaa

SEQ ID NO: 62414 - DNA, 15 bp, Homo sapiens
ttaccatcctaaaga

SEQ ID NO: 62415 - DNA, 15 bp, Homo sapiens
attaccatcctaaag

SEQ ID NO: 62416 - DNA, 15 bp, Homo sapiens
cattaccatcctaaa

SEQ ID NO: 62417 - DNA, 15 bp, Homo sapiens
tcattaccatcctaa

SEQ ID NO: 62418 - DNA, 15 bp, Homo sapiens
atcattaccatccta

SEQ ID NO: 62419 - DNA, 15 bp, Homo sapiens
gatcattaccatcct

SEQ ID NO: 62420 - DNA, 15 bp, Homo sapiens
tgatcattaccatcc

SEQ ID NO: 62421 - DNA, 15 bp, Homo sapiens
ctgatcattaccatc

SEQ ID NO: 62422 - DNA, 15 bp, Homo sapiens
actgatcattaccat

SEQ ID NO: 62423 - DNA, 15 bp, Homo sapiens
aactgatcattacca

SEQ ID NO: 62424 - DNA, 15 bp, Homo sapiens
caactgatcattacc

SEQ ID NO: 62425 - DNA, 15 bp, Homo sapiens
gcaactgatcattac

SEQ ID NO: 62426 - DNA, 15 bp, Homo sapiens
ggcaactgatcatta

SEQ ID NO: 62427 - DNA, 15 bp, Homo sapiens
aggcaactgatcatt

SEQ ID NO: 62428 - DNA, 15 bp, Homo sapiens
gaggcaactgatcat

SEQ ID NO: 62429 - DNA, 15 bp, Homo sapiens
tgaggcaactgatca

SEQ ID NO: 62430 - DNA, 15 bp, Homo sapiens
atgaggcaactgatc

SEQ ID NO: 62431 - DNA, 15 bp, Homo sapiens
gatgaggcaactgat

SEQ ID NO: 62432 - DNA, 15 bp, Homo sapiens
tgatgaggcaactga

SEQ ID NO: 62433 - DNA, 15 bp, Homo sapiens
ctgatgaggcaactg

SEQ ID NO: 62434 - DNA, 15 bp, Homo sapiens
tctgatgaggcaact

SEQ ID NO: 62435 - DNA, 15 bp, Homo sapiens
ttctgatgaggcaac

SEQ ID NO: 62436 - DNA, 15 bp, Homo sapiens
tttctgatgaggcaa

SEQ ID NO: 62437 - DNA, 15 bp, Homo sapiens
ctttctgatgaggca

SEQ ID NO: 62438 - DNA, 15 bp, Homo sapiens
tctttctgatgaggc

SEQ ID NO: 62439 - DNA, 15 bp, Homo sapiens
atctttctgatgagg

SEQ ID NO: 62440 - DNA, 15 bp, Homo sapiens
catctttctgatgag

SEQ ID NO: 62441 - DNA, 15 bp, Homo sapiens
tcatctttctgatga

SEQ ID NO: 62442 - DNA, 15 bp, Homo sapiens
ttcatctttctgatg

SEQ ID NO: 62443 - DNA, 15 bp, Homo sapiens
gttcatctttctgat

SEQ ID NO: 62444 - DNA, 15 bp, Homo sapiens
tgttcatctttctga

SEQ ID NO: 62445 - DNA, 15 bp, Homo sapiens
ctgttcatctttctg

SEQ ID NO: 62446 - DNA, 15 bp, Homo sapiens
gctgttcatctttct

SEQ ID NO: 62447 - DNA, 15 bp, Homo sapiens
tgctgttcatctttc

SEQ ID NO: 62448 - DNA, 15 bp, Homo sapiens
atgctgttcatcttt

SEQ ID NO: 62449 - DNA, 15 bp, Homo sapiens
aatgctgttcatctt

SEQ ID NO: 62450 - DNA, 15 bp, Homo sapiens
taatgctgttcatct

SEQ ID NO: 62451 - DNA, 15 bp, Homo sapiens
gtaatgctgttcatc

SEQ ID NO: 62452 - DNA, 15 bp, Homo sapiens
cgtaatgctgttcat

SEQ ID NO: 62453 - DNA, 15 bp, Homo sapiens
gcgtaatgctgttca

SEQ ID NO: 62454 - DNA, 15 bp, Homo sapiens
ggcgtaatgctgttc

SEQ ID NO: 62455 - DNA, 15 bp, Homo sapiens
aggcgtaatgctgtt

SEQ ID NO: 62456 - DNA, 15 bp, Homo sapiens
gaggcgtaatgctgt

SEQ ID NO: 62457 - DNA, 15 bp, Homo sapiens
agaggcgtaatgctg

SEQ ID NO: 62458 - DNA, 15 bp, Homo sapiens
cagaggcgtaatgct

SEQ ID NO: 62459 - DNA, 15 bp, Homo sapiens
gcagaggcgtaatgc

SEQ ID NO: 62460 - DNA, 15 bp, Homo sapiens
tgcagaggcgtaatg

SEQ ID NO: 62461 - DNA, 15 bp, Homo sapiens
atgcagaggcgtaat

SEQ ID NO: 62462 - DNA, 15 bp, Homo sapiens
aatgcagaggcgtaa

SEQ ID NO: 62463 - DNA, 15 bp, Homo sapiens
caatgcagaggcgta

SEQ ID NO: 62464 - DNA, 15 bp, Homo sapiens
acaatgcagaggcgt

SEQ ID NO: 62465 - DNA, 15 bp, Homo sapiens
gacaatgcagaggcg

SEQ ID NO: 62466 - DNA, 15 bp, Homo sapiens
agacaatgcagaggc

SEQ ID NO: 62467 - DNA, 15 bp, Homo sapiens
gagacaatgcagagg

SEQ ID NO: 62468 - DNA, 15 bp, Homo sapiens
agagacaatgcagag

SEQ ID NO: 62469 - DNA, 15 bp, Homo sapiens
tagagacaatgcaga

SEQ ID NO: 62470 - DNA, 15 bp, Homo sapiens
ttagagacaatgcag

SEQ ID NO: 62471 - DNA, 15 bp, Homo sapiens
gttagagacaatgca

SEQ ID NO: 62472 - DNA, 15 bp, Homo sapiens
tgttagagacaatgc

SEQ ID NO: 62473 - DNA, 15 bp, Homo sapiens
atgttagagacaatg

SEQ ID NO: 62474 - DNA, 15 bp, Homo sapiens
catgttagagacaat

SEQ ID NO: 62475 - DNA, 15 bp, Homo sapiens
tcatgttagagacaa

SEQ ID NO: 62476 - DNA, 15 bp, Homo sapiens
ctcatgttagagaca

SEQ ID NO: 62477 - DNA, 15 bp, Homo sapiens
actcatgttagagac

SEQ ID NO: 62478 - DNA, 15 bp, Homo sapiens
tactcatgttagaga

SEQ ID NO: 62479 - DNA, 15 bp, Homo sapiens
ctactcatgttagag

SEQ ID NO: 62480 - DNA, 15 bp, Homo sapiens
cctactcatgttaga

SEQ ID NO: 62481 - DNA, 15 bp, Homo sapiens
tcctactcatgttag

SEQ ID NO: 62482 - DNA, 15 bp, Homo sapiens
ttcctactcatgtta

SEQ ID NO: 62483 - DNA, 15 bp, Homo sapiens
attcctactcatgtt

SEQ ID NO: 62484 - DNA, 15 bp, Homo sapiens
tattcctactcatgt

SEQ ID NO: 62485 - DNA, 15 bp, Homo sapiens
ttattcctactcatg

SEQ ID NO: 62486 - DNA, 15 bp, Homo sapiens
tttattcctactcat

SEQ ID NO: 62487 - DNA, 15 bp, Homo sapiens
gtttattcctactca

SEQ ID NO: 62488 - DNA, 15 bp, Homo sapiens
ggtttattcctactc

SEQ ID NO: 62489 - DNA, 15 bp, Homo sapiens
gggtttattcctact

SEQ ID NO: 62490 - DNA, 15 bp, Homo sapiens
agggtttattcctac

SEQ ID NO: 62491 - DNA, 15 bp, Homo sapiens
cagggtttattccta

SEQ ID NO: 62492 - DNA, 15 bp, Homo sapiens
acagggtttattcct

SEQ ID NO: 62493 - DNA, 15 bp, Homo sapiens
gacagggtttattcc

SEQ ID NO: 62494 - DNA, 15 bp, Homo sapiens
agacagggtttattc

SEQ ID NO: 62495 - DNA, 15 bp, Homo sapiens
aagacagggtttatt

SEQ ID NO: 62496 - DNA, 15 bp, Homo sapiens
aaagacagggtttat

SEQ ID NO: 62497 - DNA, 15 bp, Homo sapiens
aaaagacagggttta

SEQ ID NO: 62498 - DNA, 15 bp, Homo sapiens
aaaaagacagggttt

SEQ ID NO: 62499 - DNA, 15 bp, Homo sapiens
aaaaaagacagggtt

SEQ ID NO: 62500 - DNA, 15 bp, Homo sapiens
gaaaaaagacagggt

SEQ ID NO: 62501 - DNA, 15 bp, Homo sapiens
agaaaaaagacaggg

SEQ ID NO: 62502 - DNA, 15 bp, Homo sapiens
cagaaaaaagacagg

SEQ ID NO: 62503 - DNA, 15 bp, Homo sapiens
acagaaaaaagacag

SEQ ID NO: 62504 - DNA, 15 bp, Homo sapiens
tacagaaaaaagaca

SEQ ID NO: 62505 - DNA, 15 bp, Homo sapiens
ctacagaaaaaagac

SEQ ID NO: 62506 - DNA, 15 bp, Homo sapiens
tctacagaaaaaaga

SEQ ID NO: 62507 - DNA, 15 bp, Homo sapiens
atctacagaaaaaag

SEQ ID NO: 62508 - DNA, 15 bp, Homo sapiens
gatctacagaaaaaa

SEQ ID NO: 62509 - DNA, 15 bp, Homo sapiens
tgatctacagaaaaa

SEQ ID NO: 62510 - DNA, 15 bp, Homo sapiens
atgatctacagaaaa

SEQ ID NO: 62511 - DNA, 15 bp, Homo sapiens
tatgatctacagaaa

SEQ ID NO: 62512 - DNA, 15 bp, Homo sapiens
gtatgatctacagaa

SEQ ID NO: 62513 - DNA, 15 bp, Homo sapiens
tgtatgatctacaga

SEQ ID NO: 62514 - DNA, 15 bp, Homo sapiens
ttgtatgatctacag

SEQ ID NO: 62515 - DNA, 15 bp, Homo sapiens
cttgtatgatctaca

SEQ ID NO: 62516 - DNA, 15 bp, Homo sapiens
acttgtatgatctac

SEQ ID NO: 62517 - DNA, 15 bp, Homo sapiens
cacttgtatgatcta

SEQ ID NO: 62518 - DNA, 15 bp, Homo sapiens
tcacttgtatgatct

SEQ ID NO: 62519 - DNA, 15 bp, Homo sapiens
ctcacttgtatgatc

SEQ ID NO: 62520 - DNA, 15 bp, Homo sapiens
actcacttgtatgat

SEQ ID NO: 62521 - DNA, 15 bp, Homo sapiens
cactcacttgtatga

SEQ ID NO: 62522 - DNA, 15 bp, Homo sapiens
gcactcacttgtatg

SEQ ID NO: 62523 - DNA, 15 bp, Homo sapiens
agcactcacttgtat

SEQ ID NO: 62524 - DNA, 15 bp, Homo sapiens
aagcactcacttgta

SEQ ID NO: 62525 - DNA, 15 bp, Homo sapiens
caagcactcacttgt

SEQ ID NO: 62526 - DNA, 15 bp, Homo sapiens
ccaagcactcacttg

SEQ ID NO: 62527 - DNA, 15 bp, Homo sapiens
cccaagcactcactt

SEQ ID NO: 62528 - DNA, 15 bp, Homo sapiens
tcccaagcactcact

SEQ ID NO: 62529 - DNA, 15 bp, Homo sapiens
atcccaagcactcac

SEQ ID NO: 62530 - DNA, 15 bp, Homo sapiens
aatcccaagcactca

SEQ ID NO: 62531 - DNA, 15 bp, Homo sapiens
caatcccaagcactc

SEQ ID NO: 62532 - DNA, 15 bp, Homo sapiens
acaatcccaagcact

SEQ ID NO: 62533 - DNA, 15 bp, Homo sapiens
aacaatcccaagcac

SEQ ID NO: 62534 - DNA, 15 bp, Homo sapiens
caacaatcccaagca

SEQ ID NO: 62535 - DNA, 15 bp, Homo sapiens
tcaacaatcccaagc

SEQ ID NO: 62536 - DNA, 15 bp, Homo sapiens
ctcaacaatcccaag

SEQ ID NO: 62537 - DNA, 15 bp, Homo sapiens
cctcaacaatcccaa

SEQ ID NO: 62538 - DNA, 15 bp, Homo sapiens
gcctcaacaatccca

SEQ ID NO: 62539 - DNA, 15 bp, Homo sapiens
tgcctcaacaatccc

SEQ ID NO: 62540 - DNA, 15 bp, Homo sapiens
ctgcctcaacaatcc

SEQ ID NO: 62541 - DNA, 15 bp, Homo sapiens
gctgcctcaacaatc

SEQ ID NO: 62542 - DNA, 15 bp, Homo sapiens
tgctgcctcaacaat

SEQ ID NO: 62543 - DNA, 15 bp, Homo sapiens
gtgctgcctcaacaa

SEQ ID NO: 62544 - DNA, 15 bp, Homo sapiens
tgtgctgcctcaaca

SEQ ID NO: 62545 - DNA, 15 bp, Homo sapiens
atgtgctgcctcaac

SEQ ID NO: 62546 - DNA, 15 bp, Homo sapiens
aatgtgctgcctcaa

SEQ ID NO: 62547 - DNA, 15 bp, Homo sapiens
aaatgtgctgcctca

SEQ ID NO: 62548 - DNA, 15 bp, Homo sapiens
caaatgtgctgcctc

SEQ ID NO: 62549 - DNA, 15 bp, Homo sapiens
tcaaatgtgctgcct

SEQ ID NO: 62550 - DNA, 15 bp, Homo sapiens
atcaaatgtgctgcc

SEQ ID NO: 62551 - DNA, 15 bp, Homo sapiens
catcaaatgtgctgc

SEQ ID NO: 62552 - DNA, 15 bp, Homo sapiens
acatcaaatgtgctg

SEQ ID NO: 62553 - DNA, 15 bp, Homo sapiens
cacatcaaatgtgct

SEQ ID NO: 62554 - DNA, 15 bp, Homo sapiens
acacatcaaatgtgc

SEQ ID NO: 62555 - DNA, 15 bp, Homo sapiens
gacacatcaaatgtg

SEQ ID NO: 62556 - DNA, 15 bp, Homo sapiens
agacacatcaaatgt

SEQ ID NO: 62557 - DNA, 15 bp, Homo sapiens
gagacacatcaaatg

SEQ ID NO: 62558 - DNA, 15 bp, Homo sapiens
agagacacatcaaat

SEQ ID NO: 62559 - DNA, 15 bp, Homo sapiens
aagagacacatcaaa

SEQ ID NO: 62560 - DNA, 15 bp, Homo sapiens
gaagagacacatcaa

SEQ ID NO: 62561 - DNA, 15 bp, Homo sapiens
ggaagagacacatca

SEQ ID NO: 62562 - DNA, 15 bp, Homo sapiens
aggaagagacacatc

SEQ ID NO: 62563 - DNA, 15 bp, Homo sapiens
aaggaagagacacat

SEQ ID NO: 62564 - DNA, 15 bp, Homo sapiens
gaaggaagagacaca

SEQ ID NO: 62565 - DNA, 15 bp, Homo sapiens
ggaaggaagagacac

SEQ ID NO: 62566 - DNA, 15 bp, Homo sapiens
gggaaggaagagaca

SEQ ID NO: 62567 - DNA, 15 bp, Homo sapiens
tgggaaggaagagac

SEQ ID NO: 62568 - DNA, 15 bp, Homo sapiens
ctgggaaggaagaga

SEQ ID NO: 62569 - DNA, 15 bp, Homo sapiens
actgggaaggaagag

SEQ ID NO: 62570 - DNA, 15 bp, Homo sapiens
aactgggaaggaaga

SEQ ID NO: 62571 - DNA, 15 bp, Homo sapiens
taactgggaaggaag

SEQ ID NO: 62572 - DNA, 15 bp, Homo sapiens
ctaactgggaaggaa

SEQ ID NO: 62573 - DNA, 15 bp, Homo sapiens
cctaactgggaagga

SEQ ID NO: 62574 - DNA, 15 bp, Homo sapiens
tcctaactgggaagg

SEQ ID NO: 62575 - DNA, 15 bp, Homo sapiens
ttcctaactgggaag

SEQ ID NO: 62576 - DNA, 15 bp, Homo sapiens
tttcctaactgggaa

SEQ ID NO: 62577 - DNA, 15 bp, Homo sapiens
gtttcctaactggga

SEQ ID NO: 62578 - DNA, 15 bp, Homo sapiens
ggtttcctaactggg

SEQ ID NO: 62579 - DNA, 15 bp, Homo sapiens
aggtttcctaactgg

SEQ ID NO: 62580 - DNA, 15 bp, Homo sapiens
caggtttcctaactg

SEQ ID NO: 62581 - DNA, 15 bp, Homo sapiens
gcaggtttcctaact

SEQ ID NO: 62582 - DNA, 15 bp, Homo sapiens
agcaggtttcctaac

SEQ ID NO: 62583 - DNA, 15 bp, Homo sapiens
cagcaggtttcctaa

SEQ ID NO: 62584 - DNA, 15 bp, Homo sapiens
gcagcaggtttccta

SEQ ID NO: 62585 - DNA, 15 bp, Homo sapiens
ggcagcaggtttcct

SEQ ID NO: 62586 - DNA, 15 bp, Homo sapiens
gggcagcaggtttcc

SEQ ID NO: 62587 - DNA, 15 bp, Homo sapiens
agggcagcaggtttc

SEQ ID NO: 62588 - DNA, 15 bp, Homo sapiens
tagggcagcaggttt

SEQ ID NO: 62589 - DNA, 15 bp, Homo sapiens
gtagggcagcaggtt

SEQ ID NO: 62590 - DNA, 15 bp, Homo sapiens
tgtagggcagcaggt

SEQ ID NO: 62591 - DNA, 15 bp, Homo sapiens
ctgtagggcagcagg

SEQ ID NO: 62592 - DNA, 15 bp, Homo sapiens
actgtagggcagcag

SEQ ID NO: 62593 - DNA, 15 bp, Homo sapiens
cactgtagggcagca

SEQ ID NO: 62594 - DNA, 15 bp, Homo sapiens
tcactgtagggcagc

SEQ ID NO: 62595 - DNA, 15 bp, Homo sapiens
atcactgtagggcag

SEQ ID NO: 62596 - DNA, 15 bp, Homo sapiens
gatcactgtagggca

SEQ ID NO: 62597 - DNA, 15 bp, Homo sapiens
ggatcactgtagggc

SEQ ID NO: 62598 - DNA, 15 bp, Homo sapiens
gggatcactgtaggg

SEQ ID NO: 62599 - DNA, 15 bp, Homo sapiens
tgggatcactgtagg

SEQ ID NO: 62600 - DNA, 15 bp, Homo sapiens
ctgggatcactgtag

SEQ ID NO: 62601 - DNA, 15 bp, Homo sapiens
gctgggatcactgta

SEQ ID NO: 62602 - DNA, 15 bp, Homo sapiens
cgctgggatcactgt

SEQ ID NO: 62603 - DNA, 15 bp, Homo sapiens
acgctgggatcactg

SEQ ID NO: 62604 - DNA, 15 bp, Homo sapiens
cacgctgggatcact

SEQ ID NO: 62605 - DNA, 15 bp, Homo sapiens
ccacgctgggatcac

SEQ ID NO: 62606 - DNA, 15 bp, Homo sapiens
accacgctgggatca

SEQ ID NO: 62607 - DNA, 15 bp, Homo sapiens
caccacgctgggatc

SEQ ID NO: 62608 - DNA, 15 bp, Homo sapiens
acaccacgctgggat

SEQ ID NO: 62609 - DNA, 15 bp, Homo sapiens
aacaccacgctggga

SEQ ID NO: 62610 - DNA, 15 bp, Homo sapiens
aaacaccacgctggg

SEQ ID NO: 62611 - DNA, 15 bp, Homo sapiens
caaacaccacgctgg

SEQ ID NO: 62612 - DNA, 15 bp, Homo sapiens
acaaacaccacgctg

SEQ ID NO: 62613 - DNA, 15 bp, Homo sapiens
gacaaacaccacgct

SEQ ID NO: 62614 - DNA, 15 bp, Homo sapiens
agacaaacaccacgc

SEQ ID NO: 62615 - DNA, 15 bp, Homo sapiens
aagacaaacaccacg

SEQ ID NO: 62616 - DNA, 15 bp, Homo sapiens
gaagacaaacaccac

SEQ ID NO: 62617 - DNA, 15 bp, Homo sapiens
ggaagacaaacacca

SEQ ID NO: 62618 - DNA, 15 bp, Homo sapiens
aggaagacaaacacc

SEQ ID NO: 62619 - DNA, 15 bp, Homo sapiens
caggaagacaaacac

SEQ ID NO: 62620 - DNA, 15 bp, Homo sapiens
acaggaagacaaaca

SEQ ID NO: 62621 - DNA, 15 bp, Homo sapiens
gacaggaagacaaac

SEQ ID NO: 62622 - DNA, 15 bp, Homo sapiens
ggacaggaagacaaa

SEQ ID NO: 62623 - DNA, 15 bp, Homo sapiens
cggacaggaagacaa

SEQ ID NO: 62624 - DNA, 15 bp, Homo sapiens
acggacaggaagaca

SEQ ID NO: 62625 - DNA, 15 bp, Homo sapiens
cacggacaggaagac

SEQ ID NO: 62626 - DNA, 15 bp, Homo sapiens
acacggacaggaaga

SEQ ID NO: 62627 - DNA, 15 bp, Homo sapiens
aacacggacaggaag

SEQ ID NO: 62628 - DNA, 15 bp, Homo sapiens
aaacacggacaggaa

SEQ ID NO: 62629 - DNA, 15 bp, Homo sapiens
caaacacggacagga

SEQ ID NO: 62630 - DNA, 15 bp, Homo sapiens
gcaaacacggacagg

SEQ ID NO: 62631 - DNA, 15 bp, Homo sapiens
agcaaacacggacag

SEQ ID NO: 62632 - DNA, 15 bp, Homo sapiens
cagcaaacacggaca

SEQ ID NO: 62633 - DNA, 15 bp, Homo sapiens
acagcaaacacggac

SEQ ID NO: 62634 - DNA, 15 bp, Homo sapiens
cacagcaaacacgga

SEQ ID NO: 62635 - DNA, 15 bp, Homo sapiens
ccacagcaaacacgg

SEQ ID NO: 62636 - DNA, 15 bp, Homo sapiens
accacagcaaacacg

SEQ ID NO: 62637 - DNA, 15 bp, Homo sapiens
caccacagcaaacac

SEQ ID NO: 62638 - DNA, 15 bp, Homo sapiens
tcaccacagcaaaca

SEQ ID NO: 62639 - DNA, 15 bp, Homo sapiens
gtcaccacagcaaac

SEQ ID NO: 62640 - DNA, 15 bp, Homo sapiens
tgtcaccacagcaaa

SEQ ID NO: 62641 - DNA, 15 bp, Homo sapiens
ttgtcaccacagcaa

SEQ ID NO: 62642 - DNA, 15 bp, Homo sapiens
attgtcaccacagca

SEQ ID NO: 62643 - DNA, 15 bp, Homo sapiens
gattgtcaccacagc

SEQ ID NO: 62644 - DNA, 15 bp, Homo sapiens
ggattgtcaccacag

SEQ ID NO: 62645 - DNA, 15 bp, Homo sapiens
aggattgtcaccaca

SEQ ID NO: 62646 - DNA, 15 bp, Homo sapiens
caggattgtcaccac

SEQ ID NO: 62647 - DNA, 15 bp, Homo sapiens
gcaggattgtcacca

SEQ ID NO: 62648 - DNA, 15 bp, Homo sapiens
tgcaggattgtcacc

SEQ ID NO: 62649 - DNA, 15 bp, Homo sapiens
ctgcaggattgtcac

SEQ ID NO: 62650 - DNA, 15 bp, Homo sapiens
actgcaggattgtca

SEQ ID NO: 62651 - DNA, 15 bp, Homo sapiens
cactgcaggattgtc

SEQ ID NO: 62652 - DNA, 15 bp, Homo sapiens
gcactgcaggattgt

SEQ ID NO: 62653 - DNA, 15 bp, Homo sapiens
agcactgcaggattg

SEQ ID NO: 62654 - DNA, 15 bp, Homo sapiens
aagcactgcaggatt

SEQ ID NO: 62655 - DNA, 15 bp, Homo sapiens
gaagcactgcaggat

SEQ ID NO: 62656 - DNA, 15 bp, Homo sapiens
ggaagcactgcagga

SEQ ID NO: 62657 - DNA, 15 bp, Homo sapiens
aggaagcactgcagg

SEQ ID NO: 62658 - DNA, 15 bp, Homo sapiens
caggaagcactgcag

SEQ ID NO: 62659 - DNA, 15 bp, Homo sapiens
tcaggaagcactgca

SEQ ID NO: 62660 - DNA, 15 bp, Homo sapiens
atcaggaagcactgc

SEQ ID NO: 62661 - DNA, 15 bp, Homo sapiens
aatcaggaagcactg

SEQ ID NO: 62662 - DNA, 15 bp, Homo sapiens
taatcaggaagcact

SEQ ID NO: 62663 - DNA, 15 bp, Homo sapiens
ctaatcaggaagcac

SEQ ID NO: 62664 - DNA, 15 bp, Homo sapiens
gctaatcaggaagca

SEQ ID NO: 62665 - DNA, 15 bp, Homo sapiens
tgctaatcaggaagc

SEQ ID NO: 62666 - DNA, 15 bp, Homo sapiens
gtgctaatcaggaag

SEQ ID NO: 62667 - DNA, 15 bp, Homo sapiens
tgtgctaatcaggaa

SEQ ID NO: 62668 - DNA, 15 bp, Homo sapiens
gtgtgctaatcagga

SEQ ID NO: 62669 - DNA, 15 bp, Homo sapiens
agtgtgctaatcagg

SEQ ID NO: 62670 - DNA, 15 bp, Homo sapiens
gagtgtgctaatcag

SEQ ID NO: 62671 - DNA, 15 bp, Homo sapiens
agagtgtgctaatca

SEQ ID NO: 62672 - DNA, 15 bp, Homo sapiens
aagagtgtgctaatc

SEQ ID NO: 62673 - DNA, 15 bp, Homo sapiens
gaagagtgtgctaat

SEQ ID NO: 62674 - DNA, 15 bp, Homo sapiens
agaagagtgtgctaa

SEQ ID NO: 62675 - DNA, 15 bp, Homo sapiens
gagaagagtgtgcta

SEQ ID NO: 62676 - DNA, 15 bp, Homo sapiens
ggagaagagtgtgct

SEQ ID NO: 62677 - DNA, 15 bp, Homo sapiens
tggagaagagtgtgc

SEQ ID NO: 62678 - DNA, 15 bp, Homo sapiens
ctggagaagagtgtg

SEQ ID NO: 62679 - DNA, 15 bp, Homo sapiens
tctggagaagagtgt

SEQ ID NO: 62680 - DNA, 15 bp, Homo sapiens
ctctggagaagagtg

SEQ ID NO: 62681 - DNA, 15 bp, Homo sapiens
gctctggagaagagt

SEQ ID NO: 62682 - DNA, 15 bp, Homo sapiens
ggctctggagaagag

SEQ ID NO: 62683 - DNA, 15 bp, Homo sapiens
tggctctggagaaga

SEQ ID NO: 62684 - DNA, 15 bp, Homo sapiens
ttggctctggagaag

SEQ ID NO: 62685 - DNA, 15 bp, Homo sapiens
gttggctctggagaa

SEQ ID NO: 62686 - DNA, 15 bp, Homo sapiens
ggttggctctggaga

SEQ ID NO: 62687 - DNA, 15 bp, Homo sapiens
aggttggctctggag

SEQ ID NO: 62688 - DNA, 15 bp, Homo sapiens
caggttggctctgga

SEQ ID NO: 62689 - DNA, 15 bp, Homo sapiens
ccaggttggctctgg

SEQ ID NO: 62690 - DNA, 15 bp, Homo sapiens
gccaggttggctctg

SEQ ID NO: 62691 - DNA, 15 bp, Homo sapiens
tgccaggttggctct

SEQ ID NO: 62692 - DNA, 15 bp, Homo sapiens
ctgccaggttggctc

SEQ ID NO: 62693 - DNA, 15 bp, Homo sapiens
gctgccaggttggct

SEQ ID NO: 62694 - DNA, 15 bp, Homo sapiens
tgctgccaggttggc

SEQ ID NO: 62695 - DNA, 15 bp, Homo sapiens
ctgctgccaggttgg

SEQ ID NO: 62696 - DNA, 15 bp, Homo sapiens
gctgctgccaggttg

SEQ ID NO: 62697 - DNA, 15 bp, Homo sapiens
ggctgctgccaggtt

SEQ ID NO: 62698 - DNA, 15 bp, Homo sapiens
aggctgctgccaggt

SEQ ID NO: 62699 - DNA, 15 bp, Homo sapiens
caggctgctgccagg

SEQ ID NO: 62700 - DNA, 15 bp, Homo sapiens
acaggctgctgccag

SEQ ID NO: 62701 - DNA, 15 bp, Homo sapiens
cacaggctgctgcca

SEQ ID NO: 62702 - DNA, 15 bp, Homo sapiens
ccacaggctgctgcc

SEQ ID NO: 62703 - DNA, 15 bp, Homo sapiens
cccacaggctgctgc

SEQ ID NO: 62704 - DNA, 15 bp, Homo sapiens
ccccacaggctgctg

SEQ ID NO: 62705 - DNA, 15 bp, Homo sapiens
cccccacaggctgct

SEQ ID NO: 62706 - DNA, 15 bp, Homo sapiens
gcccccacaggctgc

SEQ ID NO: 62707 - DNA, 15 bp, Homo sapiens
tgcccccacaggctg

SEQ ID NO: 62708 - DNA, 15 bp, Homo sapiens
atgcccccacaggct

SEQ ID NO: 62709 - DNA, 15 bp, Homo sapiens
gatgcccccacaggc

SEQ ID NO: 62710 - DNA, 15 bp, Homo sapiens
tgatgcccccacagg

SEQ ID NO: 62711 - DNA, 15 bp, Homo sapiens
atgatgcccccacag

SEQ ID NO: 62712 - DNA, 15 bp, Homo sapiens
gatgatgcccccaca

SEQ ID NO: 62713 - DNA, 15 bp, Homo sapiens
agatgatgcccccac

SEQ ID NO: 62714 - DNA, 15 bp, Homo sapiens
tagatgatgccccca

SEQ ID NO: 62715 - DNA, 15 bp, Homo sapiens
gtagatgatgccccc

SEQ ID NO: 62716 - DNA, 15 bp, Homo sapiens
agtagatgatgcccc

SEQ ID NO: 62717 - DNA, 15 bp, Homo sapiens
aagtagatgatgccc

SEQ ID NO: 62718 - DNA, 15 bp, Homo sapiens
gaagtagatgatgcc

SEQ ID NO: 62719 - DNA, 15 bp, Homo sapiens
tgaagtagatgatgc

SEQ ID NO: 62720 - DNA, 15 bp, Homo sapiens
gtgaagtagatgatg

SEQ ID NO: 62721 - DNA, 15 bp, Homo sapiens
cgtgaagtagatgat

SEQ ID NO: 62722 - DNA, 15 bp, Homo sapiens
gcgtgaagtagatga

SEQ ID NO: 62723 - DNA, 15 bp, Homo sapiens
agcgtgaagtagatg

SEQ ID NO: 62724 - DNA, 15 bp, Homo sapiens
cagcgtgaagtagat

SEQ ID NO: 62725 - DNA, 15 bp, Homo sapiens
acagcgtgaagtaga

SEQ ID NO: 62726 - DNA, 15 bp, Homo sapiens
tacagcgtgaagtag

SEQ ID NO: 62727 - DNA, 15 bp, Homo sapiens
gtacagcgtgaagta

SEQ ID NO: 62728 - DNA, 15 bp, Homo sapiens
ggtacagcgtgaagt

SEQ ID NO: 62729 - DNA, 15 bp, Homo sapiens
aggtacagcgtgaag

SEQ ID NO: 62730 - DNA, 15 bp, Homo sapiens
caggtacagcgtgaa

SEQ ID NO: 62731 - DNA, 15 bp, Homo sapiens
gcaggtacagcgtga

SEQ ID NO: 62732 - DNA, 15 bp, Homo sapiens
ggcaggtacagcgtg

SEQ ID NO: 62733 - DNA, 15 bp, Homo sapiens
gggcaggtacagcgt

SEQ ID NO: 62734 - DNA, 15 bp, Homo sapiens
agggcaggtacagcg

SEQ ID NO: 62735 - DNA, 15 bp, Homo sapiens
tagggcaggtacagc

SEQ ID NO: 62736 - DNA, 15 bp, Homo sapiens
gtagggcaggtacag

SEQ ID NO: 62737 - DNA, 15 bp, Homo sapiens
cgtagggcaggtaca

SEQ ID NO: 62738 - DNA, 15 bp, Homo sapiens
acgtagggcaggtac

SEQ ID NO: 62739 - DNA, 15 bp, Homo sapiens
gacgtagggcaggta

SEQ ID NO: 62740 - DNA, 15 bp, Homo sapiens
ggacgtagggcaggt

SEQ ID NO: 62741 - DNA, 15 bp, Homo sapiens
aggacgtagggcagg

SEQ ID NO: 62742 - DNA, 15 bp, Homo sapiens
caggacgtagggcag

SEQ ID NO: 62743 - DNA, 15 bp, Homo sapiens
acaggacgtagggca

SEQ ID NO: 62744 - DNA, 15 bp, Homo sapiens
cacaggacgtagggc

SEQ ID NO: 62745 - DNA, 15 bp, Homo sapiens
acacaggacgtaggg

SEQ ID NO: 62746 - DNA, 15 bp, Homo sapiens
cacacaggacgtagg

SEQ ID NO: 62747 - DNA, 15 bp, Homo sapiens
acacacaggacgtag

SEQ ID NO: 62748 - DNA, 15 bp, Homo sapiens
cacacacaggacgta

SEQ ID NO: 62749 - DNA, 15 bp, Homo sapiens
ccacacacaggacgt

SEQ ID NO: 62750 - DNA, 15 bp, Homo sapiens
gccacacacaggacg

SEQ ID NO: 62751 - DNA, 15 bp, Homo sapiens
tgccacacacaggac

SEQ ID NO: 62752 - DNA, 15 bp, Homo sapiens
atgccacacacagga

SEQ ID NO: 62753 - DNA, 15 bp, Homo sapiens
catgccacacacagg

SEQ ID NO: 62754 - DNA, 15 bp, Homo sapiens
ccatgccacacacag

SEQ ID NO: 62755 - DNA, 15 bp, Homo sapiens
gccatgccacacaca

SEQ ID NO: 62756 - DNA, 15 bp, Homo sapiens
tgccatgccacacac

SEQ ID NO: 62757 - DNA, 15 bp, Homo sapiens
ctgccatgccacaca

SEQ ID NO: 62758 - DNA, 15 bp, Homo sapiens
cctgccatgccacac

SEQ ID NO: 62759 - DNA, 15 bp, Homo sapiens
tcctgccatgccaca

SEQ ID NO: 62760 - DNA, 15 bp, Homo sapiens
gtcctgccatgccac

SEQ ID NO: 62761 - DNA, 15 bp, Homo sapiens
agtcctgccatgcca

SEQ ID NO: 62762 - DNA, 15 bp, Homo sapiens
tagtcctgccatgcc

SEQ ID NO: 62763 - DNA, 15 bp, Homo sapiens
gtagtcctgccatgc

SEQ ID NO: 62764 - DNA, 15 bp, Homo sapiens
cgtagtcctgccatg

SEQ ID NO: 62765 - DNA, 15 bp, Homo sapiens
acgtagtcctgccat

SEQ ID NO: 62766 - DNA, 15 bp, Homo sapiens
cacgtagtcctgcca

SEQ ID NO: 62767 - DNA, 15 bp, Homo sapiens
ccacgtagtcctgcc

SEQ ID NO: 62768 - DNA, 15 bp, Homo sapiens
cccacgtagtcctgc

SEQ ID NO: 62769 - DNA, 15 bp, Homo sapiens
gcccacgtagtcctg

SEQ ID NO: 62770 - DNA, 15 bp, Homo sapiens
agcccacgtagtcct

SEQ ID NO: 62771 - DNA, 15 bp, Homo sapiens
aagcccacgtagtcc

SEQ ID NO: 62772 - DNA, 15 bp, Homo sapiens
gaagcccacgtagtc

SEQ ID NO: 62773 - DNA, 15 bp, Homo sapiens
tgaagcccacgtagt

SEQ ID NO: 62774 - DNA, 15 bp, Homo sapiens
gtgaagcccacgtag

SEQ ID NO: 62775 - DNA, 15 bp, Homo sapiens
tgtgaagcccacgta

SEQ ID NO: 62776 - DNA, 15 bp, Homo sapiens
gtgtgaagcccacgt

SEQ ID NO: 62777 - DNA, 15 bp, Homo sapiens
agtgtgaagcccacg

SEQ ID NO: 62778 - DNA, 15 bp, Homo sapiens
gagtgtgaagcccac

SEQ ID NO: 62779 - DNA, 15 bp, Homo sapiens
tgagtgtgaagccca

SEQ ID NO: 62780 - DNA, 15 bp, Homo sapiens
ttgagtgtgaagccc

SEQ ID NO: 62781 - DNA, 15 bp, Homo sapiens
cttgagtgtgaagcc

SEQ ID NO: 62782 - DNA, 15 bp, Homo sapiens
tcttgagtgtgaagc

SEQ ID NO: 62783 - DNA, 15 bp, Homo sapiens
atcttgagtgtgaag

SEQ ID NO: 62784 - DNA, 15 bp, Homo sapiens
gatcttgagtgtgaa

SEQ ID NO: 62785 - DNA, 15 bp, Homo sapiens
agatcttgagtgtga

SEQ ID NO: 62786 - DNA, 15 bp, Homo sapiens
aagatcttgagtgtg

SEQ ID NO: 62787 - DNA, 15 bp, Homo sapiens
gaagatcttgagtgt

SEQ ID NO: 62788 - DNA, 15 bp, Homo sapiens
cgaagatcttgagtg

SEQ ID NO: 62789 - DNA, 15 bp, Homo sapiens
gcgaagatcttgagt

SEQ ID NO: 62790 - DNA, 15 bp, Homo sapiens
agcgaagatcttgag

SEQ ID NO: 62791 - DNA, 15 bp, Homo sapiens
cagcgaagatcttga

SEQ ID NO: 62792 - DNA, 15 bp, Homo sapiens
acagcgaagatcttg

SEQ ID NO: 62793 - DNA, 15 bp, Homo sapiens
cacagcgaagatctt

SEQ ID NO: 62794 - DNA, 15 bp, Homo sapiens
tcacagcgaagatct

SEQ ID NO: 62795 - DNA, 15 bp, Homo sapiens
ctcacagcgaagatc

SEQ ID NO: 62796 - DNA, 15 bp, Homo sapiens
actcacagcgaagat

SEQ ID NO: 62797 - DNA, 15 bp, Homo sapiens
tactcacagcgaaga

SEQ ID NO: 62798 - DNA, 15 bp, Homo sapiens
gtactcacagcgaag

SEQ ID NO: 62799 - DNA, 15 bp, Homo sapiens
ggtactcacagcgaa

SEQ ID NO: 62800 - DNA, 15 bp, Homo sapiens
aggtactcacagcga

SEQ ID NO: 62801 - DNA, 15 bp, Homo sapiens
gaggtactcacagcg

SEQ ID NO: 62802 - DNA, 15 bp, Homo sapiens
agaggtactcacagc

SEQ ID NO: 62803 - DNA, 15 bp, Homo sapiens
cagaggtactcacag

SEQ ID NO: 62804 - DNA, 15 bp, Homo sapiens
ccagaggtactcaca

SEQ ID NO: 62805 - DNA, 15 bp, Homo sapiens
gccagaggtactcac

SEQ ID NO: 62806 - DNA, 15 bp, Homo sapiens
ggccagaggtactca

SEQ ID NO: 62807 - DNA, 15 bp, Homo sapiens
aggccagaggtactc

SEQ ID NO: 62808 - DNA, 15 bp, Homo sapiens
aaggccagaggtact

SEQ ID NO: 62809 - DNA, 15 bp, Homo sapiens
aaaggccagaggtac

SEQ ID NO: 62810 - DNA, 15 bp, Homo sapiens
gaaaggccagaggta

SEQ ID NO: 62811 - DNA, 15 bp, Homo sapiens
agaaaggccagaggt

SEQ ID NO: 62812 - DNA, 15 bp, Homo sapiens
aagaaaggccagagg

SEQ ID NO: 62813 - DNA, 15 bp, Homo sapiens
gaagaaaggccagag

SEQ ID NO: 62814 - DNA, 15 bp, Homo sapiens
tgaagaaaggccaga

SEQ ID NO: 62815 - DNA, 15 bp, Homo sapiens
ctgaagaaaggccag

SEQ ID NO: 62816 - DNA, 15 bp, Homo sapiens
actgaagaaaggcca

SEQ ID NO: 62817 - DNA, 15 bp, Homo sapiens
cactgaagaaaggcc

SEQ ID NO: 62818 - DNA, 15 bp, Homo sapiens
ccactgaagaaaggc

SEQ ID NO: 62819 - DNA, 15 bp, Homo sapiens
gccactgaagaaagg

SEQ ID NO: 62820 - DNA, 15 bp, Homo sapiens
agccactgaagaaag

SEQ ID NO: 62821 - DNA, 15 bp, Homo sapiens
cagccactgaagaaa

SEQ ID NO: 62822 - DNA, 15 bp, Homo sapiens
acagccactgaagaa

SEQ ID NO: 62823 - DNA, 15 bp, Homo sapiens
tacagccactgaaga

SEQ ID NO: 62824 - DNA, 15 bp, Homo sapiens
ctacagccactgaag

SEQ ID NO: 62825 - DNA, 15 bp, Homo sapiens
cctacagccactgaa

SEQ ID NO: 62826 - DNA, 15 bp, Homo sapiens
gcctacagccactga

SEQ ID NO: 62827 - DNA, 15 bp, Homo sapiens
tgcctacagccactg

SEQ ID NO: 62828 - DNA, 15 bp, Homo sapiens
atgcctacagccact

SEQ ID NO: 62829 - DNA, 15 bp, Homo sapiens
aatgcctacagccac

SEQ ID NO: 62830 - DNA, 15 bp, Homo sapiens
aaatgcctacagcca

SEQ ID NO: 62831 - DNA, 15 bp, Homo sapiens
caaatgcctacagcc

SEQ ID NO: 62832 - DNA, 15 bp, Homo sapiens
tcaaatgcctacagc

SEQ ID NO: 62833 - DNA, 15 bp, Homo sapiens
gtcaaatgcctacag

SEQ ID NO: 62834 - DNA, 15 bp, Homo sapiens
ggtcaaatgcctaca

SEQ ID NO: 62835 - DNA, 15 bp, Homo sapiens
aggtcaaatgcctac

SEQ ID NO: 62836 - DNA, 15 bp, Homo sapiens
aaggtcaaatgccta

SEQ ID NO: 62837 - DNA, 15 bp, Homo sapiens
gaaggtcaaatgcct

SEQ ID NO: 62838 - DNA, 15 bp, Homo sapiens
ggaaggtcaaatgcc

SEQ ID NO: 62839 - DNA, 15 bp, Homo sapiens
aggaaggtcaaatgc

SEQ ID NO: 62840 - DNA, 15 bp, Homo sapiens
aaggaaggtcaaatg

SEQ ID NO: 62841 - DNA, 15 bp, Homo sapiens
aaaggaaggtcaaat

SEQ ID NO: 62842 - DNA, 15 bp, Homo sapiens
caaaggaaggtcaaa

SEQ ID NO: 62843 - DNA, 15 bp, Homo sapiens
ccaaaggaaggtcaa

SEQ ID NO: 62844 - DNA, 15 bp, Homo sapiens
tccaaaggaaggtca

SEQ ID NO: 62845 - DNA, 15 bp, Homo sapiens
ctccaaaggaaggtc

SEQ ID NO: 62846 - DNA, 15 bp, Homo sapiens
actccaaaggaaggt

SEQ ID NO: 62847 - DNA, 15 bp, Homo sapiens
gactccaaaggaagg

SEQ ID NO: 62848 - DNA, 15 bp, Homo sapiens
ggactccaaaggaag

SEQ ID NO: 62849 - DNA, 15 bp, Homo sapiens
gggactccaaaggaa

SEQ ID NO: 62850 - DNA, 15 bp, Homo sapiens
agggactccaaagga

SEQ ID NO: 62851 - DNA, 15 bp, Homo sapiens
cagggactccaaagg

SEQ ID NO: 62852 - DNA, 15 bp, Homo sapiens
tcagggactccaaag

SEQ ID NO: 62853 - DNA, 15 bp, Homo sapiens
ttcagggactccaaa

SEQ ID NO: 62854 - DNA, 15 bp, Homo sapiens
attcagggactccaa

SEQ ID NO: 62855 - DNA, 15 bp, Homo sapiens
tattcagggactcca

SEQ ID NO: 62856 - DNA, 15 bp, Homo sapiens
ttattcagggactcc

SEQ ID NO: 62857 - DNA, 15 bp, Homo sapiens
tttattcagggactc

SEQ ID NO: 62858 - DNA, 15 bp, Homo sapiens
ttttattcagggact

SEQ ID NO: 62859 - DNA, 15 bp, Homo sapiens
cttttattcagggac

SEQ ID NO: 62860 - DNA, 15 bp, Homo sapiens
gcttttattcaggga

SEQ ID NO: 62861 - DNA, 15 bp, Homo sapiens
tgcttttattcaggg

SEQ ID NO: 62862 - DNA, 15 bp, Homo sapiens
ctgcttttattcagg

SEQ ID NO: 62863 - DNA, 15 bp, Homo sapiens
gctgcttttattcag

SEQ ID NO: 62864 - DNA, 15 bp, Homo sapiens
tgctgcttttattca

SEQ ID NO: 62865 - DNA, 15 bp, Homo sapiens
ttgctgcttttattc

SEQ ID NO: 62866 - DNA, 15 bp, Homo sapiens
cttgctgcttttatt

SEQ ID NO: 62867 - DNA, 15 bp, Homo sapiens
acttgctgcttttat

SEQ ID NO: 62868 - DNA, 15 bp, Homo sapiens
aacttgctgctttta

SEQ ID NO: 62869 - DNA, 15 bp, Homo sapiens
caacttgctgctttt

SEQ ID NO: 62870 - DNA, 15 bp, Homo sapiens
tcaacttgctgcttt

SEQ ID NO: 62871 - DNA, 15 bp, Homo sapiens
ctcaacttgctgctt

SEQ ID NO: 62872 - DNA, 15 bp, Homo sapiens
tctcaacttgctgct

SEQ ID NO: 62873 - DNA, 15 bp, Homo sapiens
ttctcaacttgctgc

SEQ ID NO: 62874 - DNA, 15 bp, Homo sapiens
gttctcaacttgctg

SEQ ID NO: 62875 - DNA, 15 bp, Homo sapiens
tgttctcaacttgct

SEQ ID NO: 62876 - DNA, 15 bp, Homo sapiens
ctgttctcaacttgc

SEQ ID NO: 62877 - DNA, 15 bp, Homo sapiens
tctgttctcaacttg

SEQ ID NO: 62878 - DNA, 15 bp, Homo sapiens
ttctgttctcaactt

SEQ ID NO: 62879 - DNA, 15 bp, Homo sapiens
cttctgttctcaact

SEQ ID NO: 62880 - DNA, 15 bp, Homo sapiens
tcttctgttctcaac

SEQ ID NO: 62881 - DNA, 15 bp, Homo sapiens
atcttctgttctcaa

SEQ ID NO: 62882 - DNA, 15 bp, Homo sapiens
catcttctgttctca

SEQ ID NO: 62883 - DNA, 15 bp, Homo sapiens
tcatcttctgttctc

SEQ ID NO: 62884 - DNA, 15 bp, Homo sapiens
atcatcttctgttct

SEQ ID NO: 62885 - DNA, 15 bp, Homo sapiens
aatcatcttctgttc

SEQ ID NO: 62886 - DNA, 15 bp, Homo sapiens
caatcatcttctgtt

SEQ ID NO: 62887 - DNA, 15 bp, Homo sapiens
acaatcatcttctgt

SEQ ID NO: 62888 - DNA, 15 bp, Homo sapiens
gacaatcatcttctg

SEQ ID NO: 62889 - DNA, 15 bp, Homo sapiens
agacaatcatcttct

SEQ ID NO: 62890 - DNA, 15 bp, Homo sapiens
aagacaatcatcttc

SEQ ID NO: 62891 - DNA, 15 bp, Homo sapiens
aaagacaatcatctt

SEQ ID NO: 62892 - DNA, 15 bp, Homo sapiens
aaaagacaatcatct

SEQ ID NO: 62893 - DNA, 15 bp, Homo sapiens
gaaaagacaatcatc

SEQ ID NO: 62894 - DNA, 15 bp, Homo sapiens
ggaaaagacaatcat

SEQ ID NO: 62895 - DNA, 15 bp, Homo sapiens
tggaaaagacaatca

SEQ ID NO: 62896 - DNA, 15 bp, Homo sapiens
ttggaaaagacaatc

SEQ ID NO: 62897 - DNA, 15 bp, Homo sapiens
attggaaaagacaat

SEQ ID NO: 62898 - DNA, 15 bp, Homo sapiens
cattggaaaagacaa

SEQ ID NO: 62899 - DNA, 15 bp, Homo sapiens
ccattggaaaagaca

SEQ ID NO: 62900 - DNA, 15 bp, Homo sapiens
cccattggaaaagac

SEQ ID NO: 62901 - DNA, 15 bp, Homo sapiens
tcccattggaaaaga

SEQ ID NO: 62902 - DNA, 15 bp, Homo sapiens
gtcccattggaaaag

SEQ ID NO: 62903 - DNA, 15 bp, Homo sapiens
tgtcccattggaaaa

SEQ ID NO: 62904 - DNA, 15 bp, Homo sapiens
atgtcccattggaaa

SEQ ID NO: 62905 - DNA, 15 bp, Homo sapiens
catgtcccattggaa

SEQ ID NO: 62906 - DNA, 15 bp, Homo sapiens
tcatgtcccattgga

SEQ ID NO: 62907 - DNA, 15 bp, Homo sapiens
ttcatgtcccattgg

SEQ ID NO: 62908 - DNA, 15 bp, Homo sapiens
gttcatgtcccattg

SEQ ID NO: 62909 - DNA, 15 bp, Homo sapiens
ggttcatgtcccatt

SEQ ID NO: 62910 - DNA, 15 bp, Homo sapiens
aggttcatgtcccat

SEQ ID NO: 62911 - DNA, 15 bp, Homo sapiens
aaggttcatgtccca

SEQ ID NO: 62912 - DNA, 15 bp, Homo sapiens
taaggttcatgtccc

SEQ ID NO: 62913 - DNA, 15 bp, Homo sapiens
ctaaggttcatgtcc

SEQ ID NO: 62914 - DNA, 15 bp, Homo sapiens
gctaaggttcatgtc

SEQ ID NO: 62915 - DNA, 15 bp, Homo sapiens
agctaaggttcatgt

SEQ ID NO: 62916 - DNA, 15 bp, Homo sapiens
gagctaaggttcatg

SEQ ID NO: 62917 - DNA, 15 bp, Homo sapiens
agagctaaggttcat

SEQ ID NO: 62918 - DNA, 15 bp, Homo sapiens
tagagctaaggttca

SEQ ID NO: 62919 - DNA, 15 bp, Homo sapiens
ctagagctaaggttc

SEQ ID NO: 62920 - DNA, 15 bp, Homo sapiens
tctagagctaaggtt

SEQ ID NO: 62921 - DNA, 15 bp, Homo sapiens
atctagagctaaggt

SEQ ID NO: 62922 - DNA, 15 bp, Homo sapiens
aatctagagctaagg

SEQ ID NO: 62923 - DNA, 15 bp, Homo sapiens
gaatctagagctaag

SEQ ID NO: 62924 - DNA, 15 bp, Homo sapiens
agaatctagagctaa

SEQ ID NO: 62925 - DNA, 15 bp, Homo sapiens
tagaatctagagcta

SEQ ID NO: 62926 - DNA, 15 bp, Homo sapiens
ttagaatctagagct

SEQ ID NO: 62927 - DNA, 15 bp, Homo sapiens
cttagaatctagagc

SEQ ID NO: 62928 - DNA, 15 bp, Homo sapiens
gcttagaatctagag

SEQ ID NO: 62929 - DNA, 15 bp, Homo sapiens
agcttagaatctaga

SEQ ID NO: 62930 - DNA, 15 bp, Homo sapiens
gagcttagaatctag

SEQ ID NO: 62931 - DNA, 15 bp, Homo sapiens
agagcttagaatcta

SEQ ID NO: 62932 - DNA, 15 bp, Homo sapiens
aagagcttagaatct

SEQ ID NO: 62933 - DNA, 15 bp, Homo sapiens
aaagagcttagaatc

SEQ ID NO: 62934 - DNA, 15 bp, Homo sapiens
taaagagcttagaat

SEQ ID NO: 62935 - DNA, 15 bp, Homo sapiens
ttaaagagcttagaa

SEQ ID NO: 62936 - DNA, 15 bp, Homo sapiens
cttaaagagcttaga

SEQ ID NO: 62937 - DNA, 15 bp, Homo sapiens
ccttaaagagcttag

SEQ ID NO: 62938 - DNA, 15 bp, Homo sapiens
cccttaaagagctta

SEQ ID NO: 62939 - DNA, 15 bp, Homo sapiens
acccttaaagagctt

SEQ ID NO: 62940 - DNA, 15 bp, Homo sapiens
tacccttaaagagct

SEQ ID NO: 62941 - DNA, 15 bp, Homo sapiens
ttacccttaaagagc

SEQ ID NO: 62942 - DNA, 15 bp, Homo sapiens
cttacccttaaagag

SEQ ID NO: 62943 - DNA, 15 bp, Homo sapiens
ccttacccttaaaga

SEQ ID NO: 62944 - DNA, 15 bp, Homo sapiens
cccttacccttaaag

SEQ ID NO: 62945 - DNA, 15 bp, Homo sapiens
gcccttacccttaaa

SEQ ID NO: 62946 - DNA, 15 bp, Homo sapiens
tgcccttacccttaa

SEQ ID NO: 62947 - DNA, 15 bp, Homo sapiens
ttgcccttaccctta

SEQ ID NO: 62948 - DNA, 15 bp, Homo sapiens
cttgcccttaccctt

SEQ ID NO: 62949 - DNA, 15 bp, Homo sapiens
gcttgcccttaccct

SEQ ID NO: 62950 - DNA, 15 bp, Homo sapiens
tgcttgcccttaccc

SEQ ID NO: 62951 - DNA, 15 bp, Homo sapiens
atgcttgcccttacc

SEQ ID NO: 62952 - DNA, 15 bp, Homo sapiens
aatgcttgcccttac

SEQ ID NO: 62953 - DNA, 15 bp, Homo sapiens
caatgcttgccctta

SEQ ID NO: 62954 - DNA, 15 bp, Homo sapiens
acaatgcttgccctt

SEQ ID NO: 62955 - DNA, 15 bp, Homo sapiens
cacaatgcttgccct

SEQ ID NO: 62956 - DNA, 15 bp, Homo sapiens
acacaatgcttgccc

SEQ ID NO: 62957 - DNA, 15 bp, Homo sapiens
aacacaatgcttgcc

SEQ ID NO: 62958 - DNA, 15 bp, Homo sapiens
aaacacaatgcttgc

SEQ ID NO: 62959 - DNA, 15 bp, Homo sapiens
aaaacacaatgcttg

SEQ ID NO: 62960 - DNA, 15 bp, Homo sapiens
taaaacacaatgctt

SEQ ID NO: 62961 - DNA, 15 bp, Homo sapiens
ataaaacacaatgct

SEQ ID NO: 62962 - DNA, 15 bp, Homo sapiens
aataaaacacaatgc

SEQ ID NO: 62963 - DNA, 15 bp, Homo sapiens
taataaaacacaatg

SEQ ID NO: 62964 - DNA, 15 bp, Homo sapiens
ttaataaaacacaat

SEQ ID NO: 62965 - DNA, 15 bp, Homo sapiens
tttaataaaacacaa

SEQ ID NO: 62966 - DNA, 15 bp, Homo sapiens
atttaataaaacaca

SEQ ID NO: 62967 - DNA, 15 bp, Homo sapiens
aatttaataaaacac

SEQ ID NO: 62968 - DNA, 15 bp, Homo sapiens
caatttaataaaaca

SEQ ID NO: 62969 - DNA, 15 bp, Homo sapiens
acaatttaataaaac

SEQ ID NO: 62970 - DNA, 15 bp, Homo sapiens
aacaatttaataaaa

SEQ ID NO: 62971 - DNA, 15 bp, Homo sapiens
aaacaatttaataaa

SEQ ID NO: 62972 - DNA, 15 bp, Homo sapiens
taaacaatttaataa

SEQ ID NO: 62973 - DNA, 15 bp, Homo sapiens
gtaaacaatttaata

SEQ ID NO: 62974 - DNA, 15 bp, Homo sapiens
ggtaaacaatttaat

SEQ ID NO: 62975 - DNA, 15 bp, Homo sapiens
aggtaaacaatttaa

SEQ ID NO: 62976 - DNA, 15 bp, Homo sapiens
aaggtaaacaattta

SEQ ID NO: 62977 - DNA, 15 bp, Homo sapiens
aaaggtaaacaattt

SEQ ID NO: 62978 - DNA, 15 bp, Homo sapiens
taaaggtaaacaatt

SEQ ID NO: 62979 - DNA, 15 bp, Homo sapiens
ctaaaggtaaacaat

SEQ ID NO: 62980 - DNA, 15 bp, Homo sapiens
actaaaggtaaacaa

SEQ ID NO: 62981 - DNA, 15 bp, Homo sapiens
gactaaaggtaaaca

SEQ ID NO: 62982 - DNA, 15 bp, Homo sapiens
agactaaaggtaaac

SEQ ID NO: 62983 - DNA, 15 bp, Homo sapiens
aagactaaaggtaaa

SEQ ID NO: 62984 - DNA, 15 bp, Homo sapiens
gaagactaaaggtaa

SEQ ID NO: 62985 - DNA, 15 bp, Homo sapiens
agaagactaaaggta

SEQ ID NO: 62986 - DNA, 15 bp, Homo sapiens
gagaagactaaaggt

SEQ ID NO: 62987 - DNA, 15 bp, Homo sapiens
tgagaagactaaagg

SEQ ID NO: 62988 - DNA, 15 bp, Homo sapiens
ctgagaagactaaag

SEQ ID NO: 62989 - DNA, 15 bp, Homo sapiens
actgagaagactaaa

SEQ ID NO: 62990 - DNA, 15 bp, Homo sapiens
cactgagaagactaa

SEQ ID NO: 62991 - DNA, 15 bp, Homo sapiens
tcactgagaagacta

SEQ ID NO: 62992 - DNA, 15 bp, Homo sapiens
ttcactgagaagact

SEQ ID NO: 62993 - DNA, 15 bp, Homo sapiens
attcactgagaagac

SEQ ID NO: 62994 - DNA, 15 bp, Homo sapiens
gattcactgagaaga

SEQ ID NO: 62995 - DNA, 15 bp, Homo sapiens
ggattcactgagaag

SEQ ID NO: 62996 - DNA, 15 bp, Homo sapiens
aggattcactgagaa

SEQ ID NO: 62997 - DNA, 15 bp, Homo sapiens
caggattcactgaga

SEQ ID NO: 62998 - DNA, 15 bp, Homo sapiens
ccaggattcactgag

SEQ ID NO: 62999 - DNA, 15 bp, Homo sapiens
accaggattcactga

SEQ ID NO: 63000 - DNA, 15 bp, Homo sapiens
aaccaggattcactg

SEQ ID NO: 63001 - DNA, 15 bp, Homo sapiens
caaccaggattcact

SEQ ID NO: 63002 - DNA, 15 bp, Homo sapiens
tcaaccaggattcac

SEQ ID NO: 63003 - DNA, 15 bp, Homo sapiens
ttcaaccaggattca

SEQ ID NO: 63004 - DNA, 15 bp, Homo sapiens
attcaaccaggattc

SEQ ID NO: 63005 - DNA, 15 bp, Homo sapiens
aattcaaccaggatt

SEQ ID NO: 63006 - DNA, 15 bp, Homo sapiens
caattcaaccaggat

SEQ ID NO: 63007 - DNA, 15 bp, Homo sapiens
tcaattcaaccagga

SEQ ID NO: 63008 - DNA, 15 bp, Homo sapiens
ttcaattcaaccagg

SEQ ID NO: 63009 - DNA, 15 bp, Homo sapiens
attcaattcaaccag

SEQ ID NO: 63010 - DNA, 15 bp, Homo sapiens
aattcaattcaacca

SEQ ID NO: 63011 - DNA, 15 bp, Homo sapiens
caattcaattcaacc

SEQ ID NO: 63012 - DNA, 15 bp, Homo sapiens
tcaattcaattcaac

SEQ ID NO: 63013 - DNA, 15 bp, Homo sapiens
ttcaattcaattcaa

SEQ ID NO: 63014 - DNA, 15 bp, Homo sapiens
attcaattcaattca

SEQ ID NO: 63015 - DNA, 15 bp, Homo sapiens
cattcaattcaattc

SEQ ID NO: 63016 - DNA, 15 bp, Homo sapiens
ccattcaattcaatt

SEQ ID NO: 63017 - DNA, 15 bp, Homo sapiens
tccattcaattcaat

SEQ ID NO: 63018 - DNA, 15 bp, Homo sapiens
ttccattcaattcaa

SEQ ID NO: 63019 - DNA, 15 bp, Homo sapiens
attccattcaattca

SEQ ID NO: 63020 - DNA, 15 bp, Homo sapiens
aattccattcaattc

SEQ ID NO: 63021 - DNA, 15 bp, Homo sapiens
aaattccattcaatt

SEQ ID NO: 63022 - DNA, 15 bp, Homo sapiens
aaaattccattcaat

SEQ ID NO: 63023 - DNA, 15 bp, Homo sapiens
aaaaattccattcaa

SEQ ID NO: 63024 - DNA, 15 bp, Homo sapiens
gaaaaattccattca

SEQ ID NO: 63025 - DNA, 15 bp, Homo sapiens
ggaaaaattccattc

SEQ ID NO: 63026 - DNA, 15 bp, Homo sapiens
cggaaaaattccatt

SEQ ID NO: 63027 - DNA, 15 bp, Homo sapiens
tcggaaaaattccat

SEQ ID NO: 63028 - DNA, 15 bp, Homo sapiens
ctcggaaaaattcca

SEQ ID NO: 63029 - DNA, 15 bp, Homo sapiens
tctcggaaaaattcc

SEQ ID NO: 63030 - DNA, 15 bp, Homo sapiens
ctctcggaaaaattc

SEQ ID NO: 63031 - DNA, 15 bp, Homo sapiens
gctctcggaaaaatt

SEQ ID NO: 63032 - DNA, 15 bp, Homo sapiens
ggctctcggaaaaat

SEQ ID NO: 63033 - DNA, 15 bp, Homo sapiens
tggctctcggaaaaa

SEQ ID NO: 63034 - DNA, 15 bp, Homo sapiens
ctggctctcggaaaa

SEQ ID NO: 63035 - DNA, 15 bp, Homo sapiens
tctggctctcggaaa

SEQ ID NO: 63036 - DNA, 15 bp, Homo sapiens
gtctggctctcggaa

SEQ ID NO: 63037 - DNA, 15 bp, Homo sapiens
agtctggctctcgga

SEQ ID NO: 63038 - DNA, 15 bp, Homo sapiens
cagtctggctctcgg

SEQ ID NO: 63039 - DNA, 15 bp, Homo sapiens
gcagtctggctctcg

SEQ ID NO: 63040 - DNA, 15 bp, Homo sapiens
tgcagtctggctctc

SEQ ID NO: 63041 - DNA, 15 bp, Homo sapiens
atgcagtctggctct

SEQ ID NO: 63042 - DNA, 15 bp, Homo sapiens
gatgcagtctggctc

SEQ ID NO: 63043 - DNA, 15 bp, Homo sapiens
agatgcagtctggct

SEQ ID NO: 63044 - DNA, 15 bp, Homo sapiens
aagatgcagtctggc

SEQ ID NO: 63045 - DNA, 15 bp, Homo sapiens
caagatgcagtctgg

SEQ ID NO: 63046 - DNA, 15 bp, Homo sapiens
tcaagatgcagtctg

SEQ ID NO: 63047 - DNA, 15 bp, Homo sapiens
ttcaagatgcagtct

SEQ ID NO: 63048 - DNA, 15 bp, Homo sapiens
gttcaagatgcagtc

SEQ ID NO: 63049 - DNA, 15 bp, Homo sapiens
agttcaagatgcagt

SEQ ID NO: 63050 - DNA, 15 bp, Homo sapiens
cagttcaagatgcag

SEQ ID NO: 63051 - DNA, 15 bp, Homo sapiens
ccagttcaagatgca

SEQ ID NO: 63052 - DNA, 15 bp, Homo sapiens
cccagttcaagatgc

SEQ ID NO: 63053 - DNA, 15 bp, Homo sapiens
gcccagttcaagatg

SEQ ID NO: 63054 - DNA, 15 bp, Homo sapiens
agcccagttcaagat

SEQ ID NO: 63055 - DNA, 15 bp, Homo sapiens
cagcccagttcaaga

SEQ ID NO: 63056 - DNA, 15 bp, Homo sapiens
ccagcccagttcaag

SEQ ID NO: 63057 - DNA, 15 bp, Homo sapiens
cccagcccagttcaa

SEQ ID NO: 63058 - DNA, 15 bp, Homo sapiens
ccccagcccagttca

SEQ ID NO: 63059 - DNA, 15 bp, Homo sapiens
tccccagcccagttc

SEQ ID NO: 63060 - DNA, 15 bp, Homo sapiens
atccccagcccagtt

SEQ ID NO: 63061 - DNA, 15 bp, Homo sapiens
tatccccagcccagt

SEQ ID NO: 63062 - DNA, 15 bp, Homo sapiens
ttatccccagcccag

SEQ ID NO: 63063 - DNA, 15 bp, Homo sapiens
tttatccccagccca

SEQ ID NO: 63064 - DNA, 15 bp, Homo sapiens
atttatccccagccc

SEQ ID NO: 63065 - DNA, 15 bp, Homo sapiens
catttatccccagcc

SEQ ID NO: 63066 - DNA, 15 bp, Homo sapiens
ccatttatccccagc

SEQ ID NO: 63067 - DNA, 15 bp, Homo sapiens
gccatttatccccag

SEQ ID NO: 63068 - DNA, 15 bp, Homo sapiens
tgccatttatcccca

SEQ ID NO: 63069 - DNA, 15 bp, Homo sapiens
atgccatttatcccc

SEQ ID NO: 63070 - DNA, 15 bp, Homo sapiens
aatgccatttatccc

SEQ ID NO: 63071 - DNA, 15 bp, Homo sapiens
caatgccatttatcc

SEQ ID NO: 63072 - DNA, 15 bp, Homo sapiens
tcaatgccatttatc

SEQ ID NO: 63073 - DNA, 15 bp, Homo sapiens
ctcaatgccatttat

SEQ ID NO: 63074 - DNA, 15 bp, Homo sapiens
cctcaatgccattta

SEQ ID NO: 63075 - DNA, 15 bp, Homo sapiens
tcctcaatgccattt

SEQ ID NO: 63076 - DNA, 15 bp, Homo sapiens
ttcctcaatgccatt

SEQ ID NO: 63077 - DNA, 15 bp, Homo sapiens
attcctcaatgccat

SEQ ID NO: 63078 - DNA, 15 bp, Homo sapiens
cattcctcaatgcca

SEQ ID NO: 63079 - DNA, 15 bp, Homo sapiens
ccattcctcaatgcc

SEQ ID NO: 63080 - DNA, 15 bp, Homo sapiens
gccattcctcaatgc

SEQ ID NO: 63081 - DNA, 15 bp, Homo sapiens
agccattcctcaatg

SEQ ID NO: 63082 - DNA, 15 bp, Homo sapiens
aagccattcctcaat

SEQ ID NO: 63083 - DNA, 15 bp, Homo sapiens
gaagccattcctcaa

SEQ ID NO: 63084 - DNA, 15 bp, Homo sapiens
tgaagccattcctca

SEQ ID NO: 63085 - DNA, 15 bp, Homo sapiens
ctgaagccattcctc

SEQ ID NO: 63086 - DNA, 15 bp, Homo sapiens
cctgaagccattcct

SEQ ID NO: 63087 - DNA, 15 bp, Homo sapiens
gcctgaagccattcc

SEQ ID NO: 63088 - DNA, 15 bp, Homo sapiens
tgcctgaagccattc

SEQ ID NO: 63089 - DNA, 15 bp, Homo sapiens
ttgcctgaagccatt

SEQ ID NO: 63090 - DNA, 15 bp, Homo sapiens
gttgcctgaagccat

SEQ ID NO: 63091 - DNA, 15 bp, Homo sapiens
tgttgcctgaagcca

SEQ ID NO: 63092 - DNA, 15 bp, Homo sapiens
ctgttgcctgaagcc

SEQ ID NO: 63093 - DNA, 15 bp, Homo sapiens
tctgttgcctgaagc

SEQ ID NO: 63094 - DNA, 15 bp, Homo sapiens
atctgttgcctgaag

SEQ ID NO: 63095 - DNA, 15 bp, Homo sapiens
catctgttgcctgaa

SEQ ID NO: 63096 - DNA, 15 bp, Homo sapiens
gcatctgttgcctga

SEQ ID NO: 63097 - DNA, 15 bp, Homo sapiens
ggcatctgttgcctg

SEQ ID NO: 63098 - DNA, 15 bp, Homo sapiens
tggcatctgttgcct

SEQ ID NO: 63099 - DNA, 15 bp, Homo sapiens
atggcatctgttgcc

SEQ ID NO: 63100 - DNA, 15 bp, Homo sapiens
gatggcatctgttgc

SEQ ID NO: 63101 - DNA, 15 bp, Homo sapiens
agatggcatctgttg

SEQ ID NO: 63102 - DNA, 15 bp, Homo sapiens
gagatggcatctgtt

SEQ ID NO: 63103 - DNA, 15 bp, Homo sapiens
agagatggcatctgt

SEQ ID NO: 63104 - DNA, 15 bp, Homo sapiens
cagagatggcatctg

SEQ ID NO: 63105 - DNA, 15 bp, Homo sapiens
gcagagatggcatct

SEQ ID NO: 63106 - DNA, 15 bp, Homo sapiens
ggcagagatggcatc

SEQ ID NO: 63107 - DNA, 15 bp, Homo sapiens
gggcagagatggcat

SEQ ID NO: 63108 - DNA, 15 bp, Homo sapiens
agggcagagatggca

SEQ ID NO: 63109 - DNA, 15 bp, Homo sapiens
aagggcagagatggc

SEQ ID NO: 63110 - DNA, 15 bp, Homo sapiens
aaagggcagagatgg

SEQ ID NO: 63111 - DNA, 15 bp, Homo sapiens
taaagggcagagatg

SEQ ID NO: 63112 - DNA, 15 bp, Homo sapiens
ataaagggcagagat

SEQ ID NO: 63113 - DNA, 15 bp, Homo sapiens
gataaagggcagaga

SEQ ID NO: 63114 - DNA, 15 bp, Homo sapiens
agataaagggcagag

SEQ ID NO: 63115 - DNA, 15 bp, Homo sapiens
gagataaagggcaga

SEQ ID NO: 63116 - DNA, 15 bp, Homo sapiens
ggagataaagggcag

SEQ ID NO: 63117 - DNA, 15 bp, Homo sapiens
gggagataaagggca

SEQ ID NO: 63118 - DNA, 15 bp, Homo sapiens
tgggagataaagggc

SEQ ID NO: 63119 - DNA, 15 bp, Homo sapiens
ctgggagataaaggg

SEQ ID NO: 63120 - DNA, 15 bp, Homo sapiens
gctgggagataaagg

SEQ ID NO: 63121 - DNA, 15 bp, Homo sapiens
agctgggagataaag

SEQ ID NO: 63122 - DNA, 15 bp, Homo sapiens
gagctgggagataaa

SEQ ID NO: 63123 - DNA, 15 bp, Homo sapiens
agagctgggagataa

SEQ ID NO: 63124 - DNA, 15 bp, Homo sapiens
cagagctgggagata

SEQ ID NO: 63125 - DNA, 15 bp, Homo sapiens
acagagctgggagat

SEQ ID NO: 63126 - DNA, 15 bp, Homo sapiens
aacagagctgggaga

SEQ ID NO: 63127 - DNA, 15 bp, Homo sapiens
caacagagctgggag

SEQ ID NO: 63128 - DNA, 15 bp, Homo sapiens
ccaacagagctggga

SEQ ID NO: 63129 - DNA, 15 bp, Homo sapiens
gccaacagagctggg

SEQ ID NO: 63130 - DNA, 15 bp, Homo sapiens
agccaacagagctgg

SEQ ID NO: 63131 - DNA, 15 bp, Homo sapiens
tagccaacagagctg

SEQ ID NO: 63132 - DNA, 15 bp, Homo sapiens
atagccaacagagct

SEQ ID NO: 63133 - DNA, 15 bp, Homo sapiens
catagccaacagagc

SEQ ID NO: 63134 - DNA, 15 bp, Homo sapiens
acatagccaacagag

SEQ ID NO: 63135 - DNA, 15 bp, Homo sapiens
aacatagccaacaga

SEQ ID NO: 63136 - DNA, 15 bp, Homo sapiens
taacatagccaacag

SEQ ID NO: 63137 - DNA, 15 bp, Homo sapiens
ttaacatagccaaca

SEQ ID NO: 63138 - DNA, 15 bp, Homo sapiens
cttaacatagccaac

SEQ ID NO: 63139 - DNA, 15 bp, Homo sapiens
gcttaacatagccaa

SEQ ID NO: 63140 - DNA, 15 bp, Homo sapiens
agcttaacatagcca

SEQ ID NO: 63141 - DNA, 15 bp, Homo sapiens
gagcttaacatagcc

SEQ ID NO: 63142 - DNA, 15 bp, Homo sapiens
tgagcttaacatagc

SEQ ID NO: 63143 - DNA, 15 bp, Homo sapiens
atgagcttaacatag

SEQ ID NO: 63144 - DNA, 15 bp, Homo sapiens
catgagcttaacata

SEQ ID NO: 63145 - DNA, 15 bp, Homo sapiens
tcatgagcttaacat

SEQ ID NO: 63146 - DNA, 15 bp, Homo sapiens
gtcatgagcttaaca

SEQ ID NO: 63147 - DNA, 15 bp, Homo sapiens
tgtcatgagcttaac

SEQ ID NO: 63148 - DNA, 15 bp, Homo sapiens
ttgtcatgagcttaa

SEQ ID NO: 63149 - DNA, 15 bp, Homo sapiens
tttgtcatgagctta

SEQ ID NO: 63150 - DNA, 15 bp, Homo sapiens
ctttgtcatgagctt

SEQ ID NO: 63151 - DNA, 15 bp, Homo sapiens
gctttgtcatgagct

SEQ ID NO: 63152 - DNA, 15 bp, Homo sapiens
ggctttgtcatgagc

SEQ ID NO: 63153 - DNA, 15 bp, Homo sapiens
tggctttgtcatgag

SEQ ID NO: 63154 - DNA, 15 bp, Homo sapiens
ttggctttgtcatga

SEQ ID NO: 63155 - DNA, 15 bp, Homo sapiens
cttggctttgtcatg

SEQ ID NO: 63156 - DNA, 15 bp, Homo sapiens
ccttggctttgtcat

SEQ ID NO: 63157 - DNA, 15 bp, Homo sapiens
gccttggctttgtca

SEQ ID NO: 63158 - DNA, 15 bp, Homo sapiens
ggccttggctttgtc

SEQ ID NO: 63159 - DNA, 15 bp, Homo sapiens
tggccttggctttgt

SEQ ID NO: 63160 - DNA, 15 bp, Homo sapiens
gtggccttggctttg

SEQ ID NO: 63161 - DNA, 15 bp, Homo sapiens
tgtggccttggcttt

SEQ ID NO: 63162 - DNA, 15 bp, Homo sapiens
ttgtggccttggctt

SEQ ID NO: 63163 - DNA, 15 bp, Homo sapiens
tttgtggccttggct

SEQ ID NO: 63164 - DNA, 15 bp, Homo sapiens
atttgtggccttggc

SEQ ID NO: 63165 - DNA, 15 bp, Homo sapiens
tatttgtggccttgg

SEQ ID NO: 63166 - DNA, 15 bp, Homo sapiens
ctatttgtggccttg

SEQ ID NO: 63167 - DNA, 15 bp, Homo sapiens
tctatttgtggcctt

SEQ ID NO: 63168 - DNA, 15 bp, Homo sapiens
ttctatttgtggcct

SEQ ID NO: 63169 - DNA, 15 bp, Homo sapiens
gttctatttgtggcc

SEQ ID NO: 63170 - DNA, 15 bp, Homo sapiens
agttctatttgtggc

SEQ ID NO: 63171 - DNA, 15 bp, Homo sapiens
cagttctatttgtgg

SEQ ID NO: 63172 - DNA, 15 bp, Homo sapiens
tcagttctatttgtg

SEQ ID NO: 63173 - DNA, 15 bp, Homo sapiens
ttcagttctatttgt

SEQ ID NO: 63174 - DNA, 15 bp, Homo sapiens
tttcagttctatttg

SEQ ID NO: 63175 - DNA, 15 bp, Homo sapiens
ttttcagttctattt

SEQ ID NO: 63176 - DNA, 15 bp, Homo sapiens
gttttcagttctatt

SEQ ID NO: 63177 - DNA, 15 bp, Homo sapiens
agttttcagttctat

SEQ ID NO: 63178 - DNA, 15 bp, Homo sapiens
gagttttcagttcta

SEQ ID NO: 63179 - DNA, 15 bp, Homo sapiens
agagttttcagttct

SEQ ID NO: 63180 - DNA, 15 bp, Homo sapiens
aagagttttcagttc

SEQ ID NO: 63181 - DNA, 15 bp, Homo sapiens
caagagttttcagtt

SEQ ID NO: 63182 - DNA, 15 bp, Homo sapiens
tcaagagttttcagt

SEQ ID NO: 63183 - DNA, 15 bp, Homo sapiens
atcaagagttttcag

SEQ ID NO: 63184 - DNA, 15 bp, Homo sapiens
catcaagagttttca

SEQ ID NO: 63185 - DNA, 15 bp, Homo sapiens
acatcaagagttttc

SEQ ID NO: 63186 - DNA, 15 bp, Homo sapiens
gacatcaagagtttt

SEQ ID NO: 63187 - DNA, 15 bp, Homo sapiens
tgacatcaagagttt

SEQ ID NO: 63188 - DNA, 15 bp, Homo sapiens
ctgacatcaagagtt

SEQ ID NO: 63189 - DNA, 15 bp, Homo sapiens
tctgacatcaagagt

SEQ ID NO: 63190 - DNA, 15 bp, Homo sapiens
ctctgacatcaagag

SEQ ID NO: 63191 - DNA, 15 bp, Homo sapiens
tctctgacatcaaga

SEQ ID NO: 63192 - DNA, 15 bp, Homo sapiens
atctctgacatcaag

SEQ ID NO: 63193 - DNA, 15 bp, Homo sapiens
catctctgacatcaa

SEQ ID NO: 63194 - DNA, 15 bp, Homo sapiens
tcatctctgacatca

SEQ ID NO: 63195 - DNA, 15 bp, Homo sapiens
gtcatctctgacatc

SEQ ID NO: 63196 - DNA, 15 bp, Homo sapiens
ggtcatctctgacat

SEQ ID NO: 63197 - DNA, 15 bp, Homo sapiens
aggtcatctctgaca

SEQ ID NO: 63198 - DNA, 15 bp, Homo sapiens
gaggtcatctctgac

SEQ ID NO: 63199 - DNA, 15 bp, Homo sapiens
agaggtcatctctga

SEQ ID NO: 63200 - DNA, 15 bp, Homo sapiens
gagaggtcatctctg

SEQ ID NO: 63201 - DNA, 15 bp, Homo sapiens
agagaggtcatctct

SEQ ID NO: 63202 - DNA, 15 bp, Homo sapiens
aagagaggtcatctc

SEQ ID NO: 63203 - DNA, 15 bp, Homo sapiens
caagagaggtcatct

SEQ ID NO: 63204 - DNA, 15 bp, Homo sapiens
acaagagaggtcatc

SEQ ID NO: 63205 - DNA, 15 bp, Homo sapiens
gacaagagaggtcat

SEQ ID NO: 63206 - DNA, 15 bp, Homo sapiens
agacaagagaggtca

SEQ ID NO: 63207 - DNA, 15 bp, Homo sapiens
aagacaagagaggtc

SEQ ID NO: 63208 - DNA, 15 bp, Homo sapiens
gaagacaagagaggt

SEQ ID NO: 63209 - DNA, 15 bp, Homo sapiens
ggaagacaagagagg

SEQ ID NO: 63210 - DNA, 15 bp, Homo sapiens
aggaagacaagagag

SEQ ID NO: 63211 - DNA, 15 bp, Homo sapiens
aaggaagacaagaga

SEQ ID NO: 63212 - DNA, 15 bp, Homo sapiens
caaggaagacaagag

SEQ ID NO: 63213 - DNA, 15 bp, Homo sapiens
acaaggaagacaaga

SEQ ID NO: 63214 - DNA, 15 bp, Homo sapiens
cacaaggaagacaag

SEQ ID NO: 63215 - DNA, 15 bp, Homo sapiens
acacaaggaagacaa

SEQ ID NO: 63216 - DNA, 15 bp, Homo sapiens
gacacaaggaagaca

SEQ ID NO: 63217 - DNA, 15 bp, Homo sapiens
ggacacaaggaagac

SEQ ID NO: 63218 - DNA, 15 bp, Homo sapiens
tggacacaaggaaga

SEQ ID NO: 63219 - DNA, 15 bp, Homo sapiens
ctggacacaaggaag

SEQ ID NO: 63220 - DNA, 15 bp, Homo sapiens
actggacacaaggaa

SEQ ID NO: 63221 - DNA, 15 bp, Homo sapiens
tactggacacaagga

SEQ ID NO: 63222 - DNA, 15 bp, Homo sapiens
atactggacacaagg

SEQ ID NO: 63223 - DNA, 15 bp, Homo sapiens
catactggacacaag

SEQ ID NO: 63224 - DNA, 15 bp, Homo sapiens
ccatactggacacaa

SEQ ID NO: 63225 - DNA, 15 bp, Homo sapiens
accatactggacaca

SEQ ID NO: 63226 - DNA, 15 bp, Homo sapiens
caccatactggacac

SEQ ID NO: 63227 - DNA, 15 bp, Homo sapiens
acaccatactggaca

SEQ ID NO: 63228 - DNA, 15 bp, Homo sapiens
aacaccatactggac

SEQ ID NO: 63229 - DNA, 15 bp, Homo sapiens
aaacaccatactgga

SEQ ID NO: 63230 - DNA, 15 bp, Homo sapiens
aaaacaccatactgg

SEQ ID NO: 63231 - DNA, 15 bp, Homo sapiens
caaaacaccatactg

SEQ ID NO: 63232 - DNA, 15 bp, Homo sapiens
gcaaaacaccatact

SEQ ID NO: 63233 - DNA, 15 bp, Homo sapiens
agcaaaacaccatac

SEQ ID NO: 63234 - DNA, 15 bp, Homo sapiens
aagcaaaacaccata

SEQ ID NO: 63235 - DNA, 15 bp, Homo sapiens
caagcaaaacaccat

SEQ ID NO: 63236 - DNA, 15 bp, Homo sapiens
tcaagcaaaacacca

SEQ ID NO: 63237 - DNA, 15 bp, Homo sapiens
ctcaagcaaaacacc

SEQ ID NO: 63238 - DNA, 15 bp, Homo sapiens
actcaagcaaaacac

SEQ ID NO: 63239 - DNA, 15 bp, Homo sapiens
tactcaagcaaaaca

SEQ ID NO: 63240 - DNA, 15 bp, Homo sapiens
ttactcaagcaaaac

SEQ ID NO: 63241 - DNA, 15 bp, Homo sapiens
attactcaagcaaaa

SEQ ID NO: 63242 - DNA, 15 bp, Homo sapiens
cattactcaagcaaa

SEQ ID NO: 63243 - DNA, 15 bp, Homo sapiens
acattactcaagcaa

SEQ ID NO: 63244 - DNA, 15 bp, Homo sapiens
aacattactcaagca

SEQ ID NO: 63245 - DNA, 15 bp, Homo sapiens
aaacattactcaagc

SEQ ID NO: 63246 - DNA, 15 bp, Homo sapiens
aaaacattactcaag

SEQ ID NO: 63247 - DNA, 15 bp, Homo sapiens
gaaaacattactcaa

SEQ ID NO: 63248 - DNA, 15 bp, Homo sapiens
agaaaacattactca

SEQ ID NO: 63249 - DNA, 15 bp, Homo sapiens
cagaaaacattactc

SEQ ID NO: 63250 - DNA, 15 bp, Homo sapiens
tcagaaaacattact

SEQ ID NO: 63251 - DNA, 15 bp, Homo sapiens
ttcagaaaacattac

SEQ ID NO: 63252 - DNA, 15 bp, Homo sapiens
gttcagaaaacatta

SEQ ID NO: 63253 - DNA, 15 bp, Homo sapiens
agttcagaaaacatt

SEQ ID NO: 63254 - DNA, 15 bp, Homo sapiens
tagttcagaaaacat

SEQ ID NO: 63255 - DNA, 15 bp, Homo sapiens
ttagttcagaaaaca

SEQ ID NO: 63256 - DNA, 15 bp, Homo sapiens
cttagttcagaaaac

SEQ ID NO: 63257 - DNA, 15 bp, Homo sapiens
gcttagttcagaaaa

SEQ ID NO: 63258 - DNA, 15 bp, Homo sapiens
tgcttagttcagaaa

SEQ ID NO: 63259 - DNA, 15 bp, Homo sapiens
gtgcttagttcagaa

SEQ ID NO: 63260 - DNA, 15 bp, Homo sapiens
tgtgcttagttcaga

SEQ ID NO: 63261 - DNA, 15 bp, Homo sapiens
ttgtgcttagttcag

SEQ ID NO: 63262 - DNA, 15 bp, Homo sapiens
gttgtgcttagttca

SEQ ID NO: 63263 - DNA, 15 bp, Homo sapiens
agttgtgcttagttc

SEQ ID NO: 63264 - DNA, 15 bp, Homo sapiens
cagttgtgcttagtt

SEQ ID NO: 63265 - DNA, 15 bp, Homo sapiens
tcagttgtgcttagt

SEQ ID NO: 63266 - DNA, 15 bp, Homo sapiens
ctcagttgtgcttag

SEQ ID NO: 63267 - DNA, 15 bp, Homo sapiens
cctcagttgtgctta

SEQ ID NO: 63268 - DNA, 15 bp, Homo sapiens
tcctcagttgtgctt

SEQ ID NO: 63269 - DNA, 15 bp, Homo sapiens
ctcctcagttgtgct

SEQ ID NO: 63270 - DNA, 15 bp, Homo sapiens
gctcctcagttgtgc

SEQ ID NO: 63271 - DNA, 15 bp, Homo sapiens
tgctcctcagttgtg

SEQ ID NO: 63272 - DNA, 15 bp, Homo sapiens
ctgctcctcagttgt

SEQ ID NO: 63273 - DNA, 15 bp, Homo sapiens
cctgctcctcagttg

SEQ ID NO: 63274 - DNA, 15 bp, Homo sapiens
acctgctcctcagtt

SEQ ID NO: 63275 - DNA, 15 bp, Homo sapiens
cacctgctcctcagt

SEQ ID NO: 63276 - DNA, 15 bp, Homo sapiens
gcacctgctcctcag

SEQ ID NO: 63277 - DNA, 15 bp, Homo sapiens
ggcacctgctcctca

SEQ ID NO: 63278 - DNA, 15 bp, Homo sapiens
aggcacctgctcctc

SEQ ID NO: 63279 - DNA, 15 bp, Homo sapiens
gaggcacctgctcct

SEQ ID NO: 63280 - DNA, 15 bp, Homo sapiens
tgaggcacctgctcc

SEQ ID NO: 63281 - DNA, 15 bp, Homo sapiens
atgaggcacctgctc

SEQ ID NO: 63282 - DNA, 15 bp, Homo sapiens
gatgaggcacctgct

SEQ ID NO: 63283 - DNA, 15 bp, Homo sapiens
ggatgaggcacctgc

SEQ ID NO: 63284 - DNA, 15 bp, Homo sapiens
gggatgaggcacctg

SEQ ID NO: 63285 - DNA, 15 bp, Homo sapiens
tgggatgaggcacct

SEQ ID NO: 63286 - DNA, 15 bp, Homo sapiens
gtgggatgaggcacc

SEQ ID NO: 63287 - DNA, 15 bp, Homo sapiens
tgtgggatgaggcac

SEQ ID NO: 63288 - DNA, 15 bp, Homo sapiens
ttgtgggatgaggca

SEQ ID NO: 63289 - DNA, 15 bp, Homo sapiens
tttgtgggatgaggc

SEQ ID NO: 63290 - DNA, 15 bp, Homo sapiens
atttgtgggatgagg

SEQ ID NO: 63291 - DNA, 15 bp, Homo sapiens
aatttgtgggatgag

SEQ ID NO: 63292 - DNA, 15 bp, Homo sapiens
gaatttgtgggatga

SEQ ID NO: 63293 - DNA, 15 bp, Homo sapiens
ggaatttgtgggatg

SEQ ID NO: 63294 - DNA, 15 bp, Homo sapiens
aggaatttgtgggat

SEQ ID NO: 63295 - DNA, 15 bp, Homo sapiens
caggaatttgtggga

SEQ ID NO: 63296 - DNA, 15 bp, Homo sapiens
tcaggaatttgtggg

SEQ ID NO: 63297 - DNA, 15 bp, Homo sapiens
gtcaggaatttgtgg

SEQ ID NO: 63298 - DNA, 15 bp, Homo sapiens
agtcaggaatttgtg

SEQ ID NO: 63299 - DNA, 15 bp, Homo sapiens
aagtcaggaatttgt

SEQ ID NO: 63300 - DNA, 15 bp, Homo sapiens
caagtcaggaatttg

SEQ ID NO: 63301 - DNA, 15 bp, Homo sapiens
ccaagtcaggaattt

SEQ ID NO: 63302 - DNA, 15 bp, Homo sapiens
tccaagtcaggaatt

SEQ ID NO: 63303 - DNA, 15 bp, Homo sapiens
gtccaagtcaggaat

SEQ ID NO: 63304 - DNA, 15 bp, Homo sapiens
tgtccaagtcaggaa

SEQ ID NO: 63305 - DNA, 15 bp, Homo sapiens
gtgtccaagtcagga

SEQ ID NO: 63306 - DNA, 15 bp, Homo sapiens
agtgtccaagtcagg

SEQ ID NO: 63307 - DNA, 15 bp, Homo sapiens
aagtgtccaagtcag

SEQ ID NO: 63308 - DNA, 15 bp, Homo sapiens
gaagtgtccaagtca

SEQ ID NO: 63309 - DNA, 15 bp, Homo sapiens
ggaagtgtccaagtc

SEQ ID NO: 63310 - DNA, 15 bp, Homo sapiens
aggaagtgtccaagt

SEQ ID NO: 63311 - DNA, 15 bp, Homo sapiens
aaggaagtgtccaag

SEQ ID NO: 63312 - DNA, 15 bp, Homo sapiens
gaaggaagtgtccaa

SEQ ID NO: 63313 - DNA, 15 bp, Homo sapiens
ggaaggaagtgtcca

SEQ ID NO: 63314 - DNA, 15 bp, Homo sapiens
gggaaggaagtgtcc

SEQ ID NO: 63315 - DNA, 15 bp, Homo sapiens
agggaaggaagtgtc

SEQ ID NO: 63316 - DNA, 15 bp, Homo sapiens
gagggaaggaagtgt

SEQ ID NO: 63317 - DNA, 15 bp, Homo sapiens
cgagggaaggaagtg

SEQ ID NO: 63318 - DNA, 15 bp, Homo sapiens
acgagggaaggaagt

SEQ ID NO: 63319 - DNA, 15 bp, Homo sapiens
tacgagggaaggaag

SEQ ID NO: 63320 - DNA, 15 bp, Homo sapiens
gtacgagggaaggaa

SEQ ID NO: 63321 - DNA, 15 bp, Homo sapiens
tgtacgagggaagga

SEQ ID NO: 63322 - DNA, 15 bp, Homo sapiens
ctgtacgagggaagg

SEQ ID NO: 63323 - DNA, 15 bp, Homo sapiens
tctgtacgagggaag

SEQ ID NO: 63324 - DNA, 15 bp, Homo sapiens
ctctgtacgagggaa

SEQ ID NO: 63325 - DNA, 15 bp, Homo sapiens
gctctgtacgaggga

SEQ ID NO: 63326 - DNA, 15 bp, Homo sapiens
tgctctgtacgaggg

SEQ ID NO: 63327 - DNA, 15 bp, Homo sapiens
ctgctctgtacgagg

SEQ ID NO: 63328 - DNA, 15 bp, Homo sapiens
cctgctctgtacgag

SEQ ID NO: 63329 - DNA, 15 bp, Homo sapiens
ccctgctctgtacga

SEQ ID NO: 63330 - DNA, 15 bp, Homo sapiens
cccctgctctgtacg

SEQ ID NO: 63331 - DNA, 15 bp, Homo sapiens
ccccctgctctgtac

SEQ ID NO: 63332 - DNA, 15 bp, Homo sapiens
tccccctgctctgta

SEQ ID NO: 63333 - DNA, 15 bp, Homo sapiens
atccccctgctctgt

SEQ ID NO: 63334 - DNA, 15 bp, Homo sapiens
tatccccctgctctg

SEQ ID NO: 63335 - DNA, 15 bp, Homo sapiens
atatccccctgctct

SEQ ID NO: 63336 - DNA, 15 bp, Homo sapiens
gatatccccctgctc

SEQ ID NO: 63337 - DNA, 15 bp, Homo sapiens
agatatccccctgct

SEQ ID NO: 63338 - DNA, 15 bp, Homo sapiens
aagatatccccctgc

SEQ ID NO: 63339 - DNA, 15 bp, Homo sapiens
caagatatccccctg

SEQ ID NO: 63340 - DNA, 15 bp, Homo sapiens
ccaagatatccccct

SEQ ID NO: 63341 - DNA, 15 bp, Homo sapiens
tccaagatatccccc

SEQ ID NO: 63342 - DNA, 15 bp, Homo sapiens
ctccaagatatcccc

SEQ ID NO: 63343 - DNA, 15 bp, Homo sapiens
tctccaagatatccc

SEQ ID NO: 63344 - DNA, 15 bp, Homo sapiens
ctctccaagatatcc

SEQ ID NO: 63345 - DNA, 15 bp, Homo sapiens
actctccaagatatc

SEQ ID NO: 63346 - DNA, 15 bp, Homo sapiens
cactctccaagatat

SEQ ID NO: 63347 - DNA, 15 bp, Homo sapiens
acactctccaagata

SEQ ID NO: 63348 - DNA, 15 bp, Homo sapiens
cacactctccaagat

SEQ ID NO: 63349 - DNA, 15 bp, Homo sapiens
acacactctccaaga

SEQ ID NO: 63350 - DNA, 15 bp, Homo sapiens
cacacactctccaag

SEQ ID NO: 63351 - DNA, 15 bp, Homo sapiens
tcacacactctccaa

SEQ ID NO: 63352 - DNA, 15 bp, Homo sapiens
ctcacacactctcca

SEQ ID NO: 63353 - DNA, 15 bp, Homo sapiens
gctcacacactctcc

SEQ ID NO: 63354 - DNA, 15 bp, Homo sapiens
ggctcacacactctc

SEQ ID NO: 63355 - DNA, 15 bp, Homo sapiens
gggctcacacactct

SEQ ID NO: 63356 - DNA, 15 bp, Homo sapiens
ggggctcacacactc

SEQ ID NO: 63357 - DNA, 15 bp, Homo sapiens
aggggctcacacact

SEQ ID NO: 63358 - DNA, 15 bp, Homo sapiens
taggggctcacacac

SEQ ID NO: 63359 - DNA, 15 bp, Homo sapiens
gtaggggctcacaca

SEQ ID NO: 63360 - DNA, 15 bp, Homo sapiens
tgtaggggctcacac

SEQ ID NO: 63361 - DNA, 15 bp, Homo sapiens
ttgtaggggctcaca

SEQ ID NO: 63362 - DNA, 15 bp, Homo sapiens
cttgtaggggctcac

SEQ ID NO: 63363 - DNA, 15 bp, Homo sapiens
acttgtaggggctca

SEQ ID NO: 63364 - DNA, 15 bp, Homo sapiens
cacttgtaggggctc

SEQ ID NO: 63365 - DNA, 15 bp, Homo sapiens
gcacttgtaggggct

SEQ ID NO: 63366 - DNA, 15 bp, Homo sapiens
tgcacttgtaggggc

SEQ ID NO: 63367 - DNA, 15 bp, Homo sapiens
ttgcacttgtagggg

SEQ ID NO: 63368 - DNA, 15 bp, Homo sapiens
cttgcacttgtaggg

SEQ ID NO: 63369 - DNA, 15 bp, Homo sapiens
acttgcacttgtagg

SEQ ID NO: 63370 - DNA, 15 bp, Homo sapiens
aacttgcacttgtag

SEQ ID NO: 63371 - DNA, 15 bp, Homo sapiens
caacttgcacttgta

SEQ ID NO: 63372 - DNA, 15 bp, Homo sapiens
acaacttgcacttgt

SEQ ID NO: 63373 - DNA, 15 bp, Homo sapiens
gacaacttgcacttg

SEQ ID NO: 63374 - DNA, 15 bp, Homo sapiens
tgacaacttgcactt

SEQ ID NO: 63375 - DNA, 15 bp, Homo sapiens
ctgacaacttgcact

SEQ ID NO: 63376 - DNA, 15 bp, Homo sapiens
tctgacaacttgcac

SEQ ID NO: 63377 - DNA, 15 bp, Homo sapiens
atctgacaacttgca

SEQ ID NO: 63378 - DNA, 15 bp, Homo sapiens
catctgacaacttgc

SEQ ID NO: 63379 - DNA, 15 bp, Homo sapiens
acatctgacaacttg

SEQ ID NO: 63380 - DNA, 15 bp, Homo sapiens
gacatctgacaactt

SEQ ID NO: 63381 - DNA, 15 bp, Homo sapiens
ggacatctgacaact

SEQ ID NO: 63382 - DNA, 15 bp, Homo sapiens
gggacatctgacaac

SEQ ID NO: 63383 - DNA, 15 bp, Homo sapiens
ggggacatctgacaa

SEQ ID NO: 63384 - DNA, 15 bp, Homo sapiens
tggggacatctgaca

SEQ ID NO: 63385 - DNA, 15 bp, Homo sapiens
ctggggacatctgac

SEQ ID NO: 63386 - DNA, 15 bp, Homo sapiens
cctggggacatctga

SEQ ID NO: 63387 - DNA, 15 bp, Homo sapiens
acctggggacatctg

SEQ ID NO: 63388 - DNA, 15 bp, Homo sapiens
gacctggggacatct

SEQ ID NO: 63389 - DNA, 15 bp, Homo sapiens
tgacctggggacatc

SEQ ID NO: 63390 - DNA, 15 bp, Homo sapiens
gtgacctggggacat

SEQ ID NO: 63391 - DNA, 15 bp, Homo sapiens
agtgacctggggaca

SEQ ID NO: 63392 - DNA, 15 bp, Homo sapiens
aagtgacctggggac

SEQ ID NO: 63393 - DNA, 15 bp, Homo sapiens
taagtgacctgggga

SEQ ID NO: 63394 - DNA, 15 bp, Homo sapiens
ataagtgacctgggg

SEQ ID NO: 63395 - DNA, 15 bp, Homo sapiens
gataagtgacctggg

SEQ ID NO: 63396 - DNA, 15 bp, Homo sapiens
tgataagtgacctgg

SEQ ID NO: 63397 - DNA, 15 bp, Homo sapiens
ctgataagtgacctg

SEQ ID NO: 63398 - DNA, 15 bp, Homo sapiens
cctgataagtgacct

SEQ ID NO: 63399 - DNA, 15 bp, Homo sapiens
tcctgataagtgacc

SEQ ID NO: 63400 - DNA, 15 bp, Homo sapiens
ttcctgataagtgac

SEQ ID NO: 63401 - DNA, 15 bp, Homo sapiens
tttcctgataagtga

SEQ ID NO: 63402 - DNA, 15 bp, Homo sapiens
ctttcctgataagtg

SEQ ID NO: 63403 - DNA, 15 bp, Homo sapiens
gctttcctgataagt

SEQ ID NO: 63404 - DNA, 15 bp, Homo sapiens
agctttcctgataag

SEQ ID NO: 63405 - DNA, 15 bp, Homo sapiens
tagctttcctgataa

SEQ ID NO: 63406 - DNA, 15 bp, Homo sapiens
ttagctttcctgata

SEQ ID NO: 63407 - DNA, 15 bp, Homo sapiens
cttagctttcctgat

SEQ ID NO: 63408 - DNA, 15 bp, Homo sapiens
tcttagctttcctga

SEQ ID NO: 63409 - DNA, 15 bp, Homo sapiens
ctcttagctttcctg

SEQ ID NO: 63410 - DNA, 15 bp, Homo sapiens
actcttagctttcct

SEQ ID NO: 63411 - DNA, 15 bp, Homo sapiens
cactcttagctttcc

SEQ ID NO: 63412 - DNA, 15 bp, Homo sapiens
tcactcttagctttc

SEQ ID NO: 63413 - DNA, 15 bp, Homo sapiens
gtcactcttagcttt

SEQ ID NO: 63414 - DNA, 15 bp, Homo sapiens
agtcactcttagctt

SEQ ID NO: 63415 - DNA, 15 bp, Homo sapiens
gagtcactcttagct

SEQ ID NO: 63416 - DNA, 15 bp, Homo sapiens
tgagtcactcttagc

SEQ ID NO: 63417 - DNA, 15 bp, Homo sapiens
atgagtcactcttag

SEQ ID NO: 63418 - DNA, 15 bp, Homo sapiens
tatgagtcactctta

SEQ ID NO: 63419 - DNA, 15 bp, Homo sapiens
ctatgagtcactctt

SEQ ID NO: 63420 - DNA, 15 bp, Homo sapiens
cctatgagtcactct

SEQ ID NO: 63421 - DNA, 15 bp, Homo sapiens
tcctatgagtcactc

SEQ ID NO: 63422 - DNA, 15 bp, Homo sapiens
atcctatgagtcact

SEQ ID NO: 63423 - DNA, 15 bp, Homo sapiens
catcctatgagtcac

SEQ ID NO: 63424 - DNA, 15 bp, Homo sapiens
gcatcctatgagtca

SEQ ID NO: 63425 - DNA, 15 bp, Homo sapiens
agcatcctatgagtc

SEQ ID NO: 63426 - DNA, 15 bp, Homo sapiens
gagcatcctatgagt

SEQ ID NO: 63427 - DNA, 15 bp, Homo sapiens
ggagcatcctatgag

SEQ ID NO: 63428 - DNA, 15 bp, Homo sapiens
aggagcatcctatga

SEQ ID NO: 63429 - DNA, 15 bp, Homo sapiens
caggagcatcctatg

SEQ ID NO: 63430 - DNA, 15 bp, Homo sapiens
acaggagcatcctat

SEQ ID NO: 63431 - DNA, 15 bp, Homo sapiens
aacaggagcatccta

SEQ ID NO: 63432 - DNA, 15 bp, Homo sapiens
caacaggagcatcct

SEQ ID NO: 63433 - DNA, 15 bp, Homo sapiens
gcaacaggagcatcc

SEQ ID NO: 63434 - DNA, 15 bp, Homo sapiens
ggcaacaggagcatc

SEQ ID NO: 63435 - DNA, 15 bp, Homo sapiens
aggcaacaggagcat

SEQ ID NO: 63436 - DNA, 15 bp, Homo sapiens
gaggcaacaggagca

SEQ ID NO: 63437 - DNA, 15 bp, Homo sapiens
tgaggcaacaggagc

SEQ ID NO: 63438 - DNA, 15 bp, Homo sapiens
ctgaggcaacaggag

SEQ ID NO: 63439 - DNA, 15 bp, Homo sapiens
actgaggcaacagga

SEQ ID NO: 63440 - DNA, 15 bp, Homo sapiens
gactgaggcaacagg

SEQ ID NO: 63441 - DNA, 15 bp, Homo sapiens
agactgaggcaacag

SEQ ID NO: 63442 - DNA, 15 bp, Homo sapiens
cagactgaggcaaca

SEQ ID NO: 63443 - DNA, 15 bp, Homo sapiens
ccagactgaggcaac

SEQ ID NO: 63444 - DNA, 15 bp, Homo sapiens
cccagactgaggcaa

SEQ ID NO: 63445 - DNA, 15 bp, Homo sapiens
gcccagactgaggca

SEQ ID NO: 63446 - DNA, 15 bp, Homo sapiens
agcccagactgaggc

SEQ ID NO: 63447 - DNA, 15 bp, Homo sapiens
aagcccagactgagg

SEQ ID NO: 63448 - DNA, 15 bp, Homo sapiens
gaagcccagactgag

SEQ ID NO: 63449 - DNA, 15 bp, Homo sapiens
tgaagcccagactga

SEQ ID NO: 63450 - DNA, 15 bp, Homo sapiens
atgaagcccagactg

SEQ ID NO: 63451 - DNA, 15 bp, Homo sapiens
tatgaagcccagact

SEQ ID NO: 63452 - DNA, 15 bp, Homo sapiens
ctatgaagcccagac

SEQ ID NO: 63453 - DNA, 15 bp, Homo sapiens
cctatgaagcccaga

SEQ ID NO: 63454 - DNA, 15 bp, Homo sapiens
gcctatgaagcccag

SEQ ID NO: 63455 - DNA, 15 bp, Homo sapiens
tgcctatgaagccca

SEQ ID NO: 63456 - DNA, 15 bp, Homo sapiens
atgcctatgaagccc

SEQ ID NO: 63457 - DNA, 15 bp, Homo sapiens
gatgcctatgaagcc

SEQ ID NO: 63458 - DNA, 15 bp, Homo sapiens
tgatgcctatgaagc

SEQ ID NO: 63459 - DNA, 15 bp, Homo sapiens
ctgatgcctatgaag

SEQ ID NO: 63460 - DNA, 15 bp, Homo sapiens
gctgatgcctatgaa

SEQ ID NO: 63461 - DNA, 15 bp, Homo sapiens
tgctgatgcctatga

SEQ ID NO: 63462 - DNA, 15 bp, Homo sapiens
ctgctgatgcctatg

SEQ ID NO: 63463 - DNA, 15 bp, Homo sapiens
gctgctgatgcctat

SEQ ID NO: 63464 - DNA, 15 bp, Homo sapiens
ggctgctgatgccta

SEQ ID NO: 63465 - DNA, 15 bp, Homo sapiens
gggctgctgatgcct

SEQ ID NO: 63466 - DNA, 15 bp, Homo sapiens
ggggctgctgatgcc

SEQ ID NO: 63467 - DNA, 15 bp, Homo sapiens
tggggctgctgatgc

SEQ ID NO: 63468 - DNA, 15 bp, Homo sapiens
ttggggctgctgatg

SEQ ID NO: 63469 - DNA, 15 bp, Homo sapiens
tttggggctgctgat

SEQ ID NO: 63470 - DNA, 15 bp, Homo sapiens
gtttggggctgctga

SEQ ID NO: 63471 - DNA, 15 bp, Homo sapiens
tgtttggggctgctg

SEQ ID NO: 63472 - DNA, 15 bp, Homo sapiens
ctgtttggggctgct

SEQ ID NO: 63473 - DNA, 15 bp, Homo sapiens
cctgtttggggctgc

SEQ ID NO: 63474 - DNA, 15 bp, Homo sapiens
gcctgtttggggctg

SEQ ID NO: 63475 - DNA, 15 bp, Homo sapiens
tgcctgtttggggct

SEQ ID NO: 63476 - DNA, 15 bp, Homo sapiens
gtgcctgtttggggc

SEQ ID NO: 63477 - DNA, 15 bp, Homo sapiens
ggtgcctgtttgggg

SEQ ID NO: 63478 - DNA, 15 bp, Homo sapiens
aggtgcctgtttggg

SEQ ID NO: 63479 - DNA, 15 bp, Homo sapiens
gaggtgcctgtttgg

SEQ ID NO: 63480 - DNA, 15 bp, Homo sapiens
agaggtgcctgtttg

SEQ ID NO: 63481 - DNA, 15 bp, Homo sapiens
cagaggtgcctgttt

SEQ ID NO: 63482 - DNA, 15 bp, Homo sapiens
tcagaggtgcctgtt

SEQ ID NO: 63483 - DNA, 15 bp, Homo sapiens
atcagaggtgcctgt

SEQ ID NO: 63484 - DNA, 15 bp, Homo sapiens
gatcagaggtgcctg

SEQ ID NO: 63485 - DNA, 15 bp, Homo sapiens
ggatcagaggtgcct

SEQ ID NO: 63486 - DNA, 15 bp, Homo sapiens
aggatcagaggtgcc

SEQ ID NO: 63487 - DNA, 15 bp, Homo sapiens
caggatcagaggtgc

SEQ ID NO: 63488 - DNA, 15 bp, Homo sapiens
tcaggatcagaggtg

SEQ ID NO: 63489 - DNA, 15 bp, Homo sapiens
ctcaggatcagaggt

SEQ ID NO: 63490 - DNA, 15 bp, Homo sapiens
gctcaggatcagagg

SEQ ID NO: 63491 - DNA, 15 bp, Homo sapiens
ggctcaggatcagag

SEQ ID NO: 63492 - DNA, 15 bp, Homo sapiens
tggctcaggatcaga

SEQ ID NO: 63493 - DNA, 15 bp, Homo sapiens
atggctcaggatcag

SEQ ID NO: 63494 - DNA, 15 bp, Homo sapiens
gatggctcaggatca

SEQ ID NO: 63495 - DNA, 15 bp, Homo sapiens
ggatggctcaggatc

SEQ ID NO: 63496 - DNA, 15 bp, Homo sapiens
aggatggctcaggat

SEQ ID NO: 63497 - DNA, 15 bp, Homo sapiens
aaggatggctcagga

SEQ ID NO: 63498 - DNA, 15 bp, Homo sapiens
caaggatggctcagg

SEQ ID NO: 63499 - DNA, 15 bp, Homo sapiens
ccaaggatggctcag

SEQ ID NO: 63500 - DNA, 15 bp, Homo sapiens
gccaaggatggctca

SEQ ID NO: 63501 - DNA, 15 bp, Homo sapiens
agccaaggatggctc

SEQ ID NO: 63502 - DNA, 15 bp, Homo sapiens
cagccaaggatggct

SEQ ID NO: 63503 - DNA, 15 bp, Homo sapiens
tcagccaaggatggc

SEQ ID NO: 63504 - DNA, 15 bp, Homo sapiens
ctcagccaaggatgg

SEQ ID NO: 63505 - DNA, 15 bp, Homo sapiens
gctcagccaaggatg

SEQ ID NO: 63506 - DNA, 15 bp, Homo sapiens
tgctcagccaaggat

SEQ ID NO: 63507 - DNA, 15 bp, Homo sapiens
ctgctcagccaagga

SEQ ID NO: 63508 - DNA, 15 bp, Homo sapiens
cctgctcagccaagg

SEQ ID NO: 63509 - DNA, 15 bp, Homo sapiens
ccctgctcagccaag

SEQ ID NO: 63510 - DNA, 15 bp, Homo sapiens
tccctgctcagccaa

SEQ ID NO: 63511 - DNA, 15 bp, Homo sapiens
ctccctgctcagcca

SEQ ID NO: 63512 - DNA, 15 bp, Homo sapiens
gctccctgctcagcc

SEQ ID NO: 63513 - DNA, 15 bp, Homo sapiens
ggctccctgctcagc

SEQ ID NO: 63514 - DNA, 15 bp, Homo sapiens
aggctccctgctcag

SEQ ID NO: 63515 - DNA, 15 bp, Homo sapiens
gaggctccctgctca

SEQ ID NO: 63516 - DNA, 15 bp, Homo sapiens
tgaggctccctgctc

SEQ ID NO: 63517 - DNA, 15 bp, Homo sapiens
ctgaggctccctgct

SEQ ID NO: 63518 - DNA, 15 bp, Homo sapiens
tctgaggctccctgc

SEQ ID NO: 63519 - DNA, 15 bp, Homo sapiens
ttctgaggctccctg

SEQ ID NO: 63520 - DNA, 15 bp, Homo sapiens
cttctgaggctccct

SEQ ID NO: 63521 - DNA, 15 bp, Homo sapiens
tcttctgaggctccc

SEQ ID NO: 63522 - DNA, 15 bp, Homo sapiens
gtcttctgaggctcc

SEQ ID NO: 63523 - DNA, 15 bp, Homo sapiens
agtcttctgaggctc

SEQ ID NO: 63524 - DNA, 15 bp, Homo sapiens
cagtcttctgaggct

SEQ ID NO: 63525 - DNA, 15 bp, Homo sapiens
acagtcttctgaggc

SEQ ID NO: 63526 - DNA, 15 bp, Homo sapiens
cacagtcttctgagg

SEQ ID NO: 63527 - DNA, 15 bp, Homo sapiens
ccacagtcttctgag

SEQ ID NO: 63528 - DNA, 15 bp, Homo sapiens
cccacagtcttctga

SEQ ID NO: 63529 - DNA, 15 bp, Homo sapiens
acccacagtcttctg

SEQ ID NO: 63530 - DNA, 15 bp, Homo sapiens
tacccacagtcttct

SEQ ID NO: 63531 - DNA, 15 bp, Homo sapiens
atacccacagtcttc

SEQ ID NO: 63532 - DNA, 15 bp, Homo sapiens
catacccacagtctt

SEQ ID NO: 63533 - DNA, 15 bp, Homo sapiens
gcatacccacagtct

SEQ ID NO: 63534 - DNA, 15 bp, Homo sapiens
cgcatacccacagtc

SEQ ID NO: 63535 - DNA, 15 bp, Homo sapiens
gcgcatacccacagt

SEQ ID NO: 63536 - DNA, 15 bp, Homo sapiens
tgcgcatacccacag

SEQ ID NO: 63537 - DNA, 15 bp, Homo sapiens
atgcgcatacccaca

SEQ ID NO: 63538 - DNA, 15 bp, Homo sapiens
catgcgcatacccac

SEQ ID NO: 63539 - DNA, 15 bp, Homo sapiens
acatgcgcataccca

SEQ ID NO: 63540 - DNA, 15 bp, Homo sapiens
cacatgcgcataccc

SEQ ID NO: 63541 - DNA, 15 bp, Homo sapiens
acacatgcgcatacc

SEQ ID NO: 63542 - DNA, 15 bp, Homo sapiens
cacacatgcgcatac

SEQ ID NO: 63543 - DNA, 15 bp, Homo sapiens
acacacatgcgcata

SEQ ID NO: 63544 - DNA, 15 bp, Homo sapiens
cacacacatgcgcat

SEQ ID NO: 63545 - DNA, 15 bp, Homo sapiens
ccacacacatgcgca

SEQ ID NO: 63546 - DNA, 15 bp, Homo sapiens
cccacacacatgcgc

SEQ ID NO: 63547 - DNA, 15 bp, Homo sapiens
ccccacacacatgcg

SEQ ID NO: 63548 - DNA, 15 bp, Homo sapiens
cccccacacacatgc

SEQ ID NO: 63549 - DNA, 15 bp, Homo sapiens
tcccccacacacatg

SEQ ID NO: 63550 - DNA, 15 bp, Homo sapiens
ttcccccacacacat

SEQ ID NO: 63551 - DNA, 15 bp, Homo sapiens
gttcccccacacaca

SEQ ID NO: 63552 - DNA, 15 bp, Homo sapiens
tgttcccccacacac

SEQ ID NO: 63553 - DNA, 15 bp, Homo sapiens
ctgttcccccacaca

SEQ ID NO: 63554 - DNA, 15 bp, Homo sapiens
cctgttcccccacac

SEQ ID NO: 63555 - DNA, 15 bp, Homo sapiens
tcctgttcccccaca

SEQ ID NO: 63556 - DNA, 15 bp, Homo sapiens
atcctgttcccccac

SEQ ID NO: 63557 - DNA, 15 bp, Homo sapiens
aatcctgttccccca

SEQ ID NO: 63558 - DNA, 15 bp, Homo sapiens
caatcctgttccccc

SEQ ID NO: 63559 - DNA, 15 bp, Homo sapiens
gcaatcctgttcccc

SEQ ID NO: 63560 - DNA, 15 bp, Homo sapiens
agcaatcctgttccc

SEQ ID NO: 63561 - DNA, 15 bp, Homo sapiens
cagcaatcctgttcc

SEQ ID NO: 63562 - DNA, 15 bp, Homo sapiens
tcagcaatcctgttc

SEQ ID NO: 63563 - DNA, 15 bp, Homo sapiens
ctcagcaatcctgtt

SEQ ID NO: 63564 - DNA, 15 bp, Homo sapiens
gctcagcaatcctgt

SEQ ID NO: 63565 - DNA, 15 bp, Homo sapiens
ggctcagcaatcctg

SEQ ID NO: 63566 - DNA, 15 bp, Homo sapiens
aggctcagcaatcct

SEQ ID NO: 63567 - DNA, 15 bp, Homo sapiens
aaggctcagcaatcc

SEQ ID NO: 63568 - DNA, 15 bp, Homo sapiens
caaggctcagcaatc

SEQ ID NO: 63569 - DNA, 15 bp, Homo sapiens
ccaaggctcagcaat

SEQ ID NO: 63570 - DNA, 15 bp, Homo sapiens
cccaaggctcagcaa

SEQ ID NO: 63571 - DNA, 15 bp, Homo sapiens
ccccaaggctcagca

SEQ ID NO: 63572 - DNA, 15 bp, Homo sapiens
gccccaaggctcagc

SEQ ID NO: 63573 - DNA, 15 bp, Homo sapiens
tgccccaaggctcag

SEQ ID NO: 63574 - DNA, 15 bp, Homo sapiens
atgccccaaggctca

SEQ ID NO: 63575 - DNA, 15 bp, Homo sapiens
gatgccccaaggctc

SEQ ID NO: 63576 - DNA, 15 bp, Homo sapiens
agatgccccaaggct

SEQ ID NO: 63577 - DNA, 15 bp, Homo sapiens
aagatgccccaaggc

SEQ ID NO: 63578 - DNA, 15 bp, Homo sapiens
aaagatgccccaagg

SEQ ID NO: 63579 - DNA, 15 bp, Homo sapiens
caaagatgccccaag

SEQ ID NO: 63580 - DNA, 15 bp, Homo sapiens
ccaaagatgccccaa

SEQ ID NO: 63581 - DNA, 15 bp, Homo sapiens
tccaaagatgcccca

SEQ ID NO: 63582 - DNA, 15 bp, Homo sapiens
ttccaaagatgcccc

SEQ ID NO: 63583 - DNA, 15 bp, Homo sapiens
tttccaaagatgccc

SEQ ID NO: 63584 - DNA, 15 bp, Homo sapiens
gtttccaaagatgcc

SEQ ID NO: 63585 - DNA, 15 bp, Homo sapiens
tgtttccaaagatgc

SEQ ID NO: 63586 - DNA, 15 bp, Homo sapiens
atgtttccaaagatg

SEQ ID NO: 63587 - DNA, 15 bp, Homo sapiens
tatgtttccaaagat

SEQ ID NO: 63588 - DNA, 15 bp, Homo sapiens
ttatgtttccaaaga

SEQ ID NO: 63589 - DNA, 15 bp, Homo sapiens
tttatgtttccaaag

SEQ ID NO: 63590 - DNA, 15 bp, Homo sapiens
ctttatgtttccaaa

SEQ ID NO: 63591 - DNA, 15 bp, Homo sapiens
actttatgtttccaa

SEQ ID NO: 63592 - DNA, 15 bp, Homo sapiens
aactttatgtttcca

SEQ ID NO: 63593 - DNA, 15 bp, Homo sapiens
aaactttatgtttcc

SEQ ID NO: 63594 - DNA, 15 bp, Homo sapiens
aaaactttatgtttc

SEQ ID NO: 63595 - DNA, 15 bp, Homo sapiens
taaaactttatgttt

SEQ ID NO: 63596 - DNA, 15 bp, Homo sapiens
ttaaaactttatgtt

SEQ ID NO: 63597 - DNA, 15 bp, Homo sapiens
tttaaaactttatgt

SEQ ID NO: 63598 - DNA, 15 bp, Homo sapiens
ttttaaaactttatg

SEQ ID NO: 63599 - DNA, 15 bp, Homo sapiens
cttttaaaactttat

SEQ ID NO: 63600 - DNA, 15 bp, Homo sapiens
acttttaaaacttta

SEQ ID NO: 63601 - DNA, 15 bp, Homo sapiens
aacttttaaaacttt

SEQ ID NO: 63602 - DNA, 15 bp, Homo sapiens
aaacttttaaaactt

SEQ ID NO: 63603 - DNA, 15 bp, Homo sapiens
aaaacttttaaaact

SEQ ID NO: 63604 - DNA, 15 bp, Homo sapiens
taaaacttttaaaac

SEQ ID NO: 63605 - DNA, 15 bp, Homo sapiens
ataaaacttttaaaa

SEQ ID NO: 63606 - DNA, 15 bp, Homo sapiens
cataaaacttttaaa

SEQ ID NO: 63607 - DNA, 15 bp, Homo sapiens
gcataaaacttttaa

SEQ ID NO: 63608 - DNA, 15 bp, Homo sapiens
agcataaaactttta

SEQ ID NO: 63609 - DNA, 15 bp, Homo sapiens
aagcataaaactttt

SEQ ID NO: 63610 - DNA, 15 bp, Homo sapiens
gaagcataaaacttt

SEQ ID NO: 63611 - DNA, 15 bp, Homo sapiens
tgaagcataaaactt

SEQ ID NO: 63612 - DNA, 15 bp, Homo sapiens
gtgaagcataaaact

SEQ ID NO: 63613 - DNA, 15 bp, Homo sapiens
agtgaagcataaaac

SEQ ID NO: 63614 - DNA, 15 bp, Homo sapiens
cagtgaagcataaaa

SEQ ID NO: 63615 - DNA, 15 bp, Homo sapiens
acagtgaagcataaa

SEQ ID NO: 63616 - DNA, 15 bp, Homo sapiens
tacagtgaagcataa

SEQ ID NO: 63617 - DNA, 15 bp, Homo sapiens
atacagtgaagcata

SEQ ID NO: 63618 - DNA, 15 bp, Homo sapiens
tatacagtgaagcat

SEQ ID NO: 63619 - DNA, 15 bp, Homo sapiens
atatacagtgaagca

SEQ ID NO: 63620 - DNA, 15 bp, Homo sapiens
catatacagtgaagc

SEQ ID NO: 63621 - DNA, 15 bp, Homo sapiens
gcatatacagtgaag

SEQ ID NO: 63622 - DNA, 15 bp, Homo sapiens
tgcatatacagtgaa

SEQ ID NO: 63623 - DNA, 15 bp, Homo sapiens
atgcatatacagtga

SEQ ID NO: 63624 - DNA, 15 bp, Homo sapiens
aatgcatatacagtg

SEQ ID NO: 63625 - DNA, 15 bp, Homo sapiens
aaatgcatatacagt

SEQ ID NO: 63626 - DNA, 15 bp, Homo sapiens
gaaatgcatatacag

SEQ ID NO: 63627 - DNA, 15 bp, Homo sapiens
agaaatgcatataca

SEQ ID NO: 63628 - DNA, 15 bp, Homo sapiens
cagaaatgcatatac

SEQ ID NO: 63629 - DNA, 15 bp, Homo sapiens
tcagaaatgcatata

SEQ ID NO: 63630 - DNA, 15 bp, Homo sapiens
ttcagaaatgcatat

SEQ ID NO: 63631 - DNA, 15 bp, Homo sapiens
tttcagaaatgcata

SEQ ID NO: 63632 - DNA, 15 bp, Homo sapiens
atttcagaaatgcat

SEQ ID NO: 63633 - DNA, 15 bp, Homo sapiens
catttcagaaatgca

SEQ ID NO: 63634 - DNA, 15 bp, Homo sapiens
acatttcagaaatgc

SEQ ID NO: 63635 - DNA, 15 bp, Homo sapiens
aacatttcagaaatg

SEQ ID NO: 63636 - DNA, 15 bp, Homo sapiens
aaacatttcagaaat

SEQ ID NO: 63637 - DNA, 15 bp, Homo sapiens
caaacatttcagaaa

SEQ ID NO: 63638 - DNA, 15 bp, Homo sapiens
acaaacatttcagaa

SEQ ID NO: 63639 - DNA, 15 bp, Homo sapiens
tacaaacatttcaga

SEQ ID NO: 63640 - DNA, 15 bp, Homo sapiens
atacaaacatttcag

SEQ ID NO: 63641 - DNA, 15 bp, Homo sapiens
tatacaaacatttca

SEQ ID NO: 63642 - DNA, 15 bp, Homo sapiens
atatacaaacatttc

SEQ ID NO: 63643 - DNA, 15 bp, Homo sapiens
tatatacaaacattt

SEQ ID NO: 63644 - DNA, 15 bp, Homo sapiens
ttatatacaaacatt

SEQ ID NO: 63645 - DNA, 15 bp, Homo sapiens
attatatacaaacat

SEQ ID NO: 63646 - DNA, 15 bp, Homo sapiens
cattatatacaaaca

SEQ ID NO: 63647 - DNA, 15 bp, Homo sapiens
tcattatatacaaac

SEQ ID NO: 63648 - DNA, 15 bp, Homo sapiens
ctcattatatacaaa

SEQ ID NO: 63649 - DNA, 15 bp, Homo sapiens
actcattatatacaa

SEQ ID NO: 63650 - DNA, 15 bp, Homo sapiens
cactcattatataca

SEQ ID NO: 63651 - DNA, 15 bp, Homo sapiens
ccactcattatatac

SEQ ID NO: 63652 - DNA, 15 bp, Homo sapiens
accactcattatata

SEQ ID NO: 63653 - DNA, 15 bp, Homo sapiens
aaccactcattatat

SEQ ID NO: 63654 - DNA, 15 bp, Homo sapiens
taaccactcattata

SEQ ID NO: 63655 - DNA, 15 bp, Homo sapiens
gtaaccactcattat

SEQ ID NO: 63656 - DNA, 15 bp, Homo sapiens
tgtaaccactcatta

SEQ ID NO: 63657 - DNA, 15 bp, Homo sapiens
ttgtaaccactcatt

SEQ ID NO: 63658 - DNA, 15 bp, Homo sapiens
tttgtaaccactcat

SEQ ID NO: 63659 - DNA, 15 bp, Homo sapiens
atttgtaaccactca

SEQ ID NO: 63660 - DNA, 15 bp, Homo sapiens
catttgtaaccactc

SEQ ID NO: 63661 - DNA, 15 bp, Homo sapiens
ccatttgtaaccact

SEQ ID NO: 63662 - DNA, 15 bp, Homo sapiens
tccatttgtaaccac

SEQ ID NO: 63663 - DNA, 15 bp, Homo sapiens
ttccatttgtaacca

SEQ ID NO: 63664 - DNA, 15 bp, Homo sapiens
attccatttgtaacc

SEQ ID NO: 63665 - DNA, 15 bp, Homo sapiens
gattccatttgtaac

SEQ ID NO: 63666 - DNA, 15 bp, Homo sapiens
tgattccatttgtaa

SEQ ID NO: 63667 - DNA, 15 bp, Homo sapiens
atgattccatttgta

SEQ ID NO: 63668 - DNA, 15 bp, Homo sapiens
aatgattccatttgt

SEQ ID NO: 63669 - DNA, 15 bp, Homo sapiens
aaatgattccatttg

SEQ ID NO: 63670 - DNA, 15 bp, Homo sapiens
aaaatgattccattt

SEQ ID NO: 63671 - DNA, 15 bp, Homo sapiens
taaaatgattccatt

SEQ ID NO: 63672 - DNA, 15 bp, Homo sapiens
ataaaatgattccat

SEQ ID NO: 63673 - DNA, 15 bp, Homo sapiens
tataaaatgattcca

SEQ ID NO: 63674 - DNA, 15 bp, Homo sapiens
atataaaatgattcc

SEQ ID NO: 63675 - DNA, 15 bp, Homo sapiens
catataaaatgattc

SEQ ID NO: 63676 - DNA, 15 bp, Homo sapiens
acatataaaatgatt

SEQ ID NO: 63677 - DNA, 15 bp, Homo sapiens
aacatataaaatgat

SEQ ID NO: 63678 - DNA, 15 bp, Homo sapiens
taacatataaaatga

SEQ ID NO: 63679 - DNA, 15 bp, Homo sapiens
gtaacatataaaatg

SEQ ID NO: 63680 - DNA, 15 bp, Homo sapiens
agtaacatataaaat

SEQ ID NO: 63681 - DNA, 15 bp, Homo sapiens
aagtaacatataaaa

SEQ ID NO: 63682 - DNA, 15 bp, Homo sapiens
caagtaacatataaa

SEQ ID NO: 63683 - DNA, 15 bp, Homo sapiens
ccaagtaacatataa

SEQ ID NO: 63684 - DNA, 15 bp, Homo sapiens
accaagtaacatata

SEQ ID NO: 63685 - DNA, 15 bp, Homo sapiens
taccaagtaacatat

SEQ ID NO: 63686 - DNA, 15 bp, Homo sapiens
ctaccaagtaacata

SEQ ID NO: 63687 - DNA, 15 bp, Homo sapiens
gctaccaagtaacat

SEQ ID NO: 63688 - DNA, 15 bp, Homo sapiens
ggctaccaagtaaca

SEQ ID NO: 63689 - DNA, 15 bp, Homo sapiens
gggctaccaagtaac

SEQ ID NO: 63690 - DNA, 15 bp, Homo sapiens
tgggctaccaagtaa

SEQ ID NO: 63691 - DNA, 15 bp, Homo sapiens
gtgggctaccaagta

SEQ ID NO: 63692 - DNA, 15 bp, Homo sapiens
ggtgggctaccaagt

SEQ ID NO: 63693 - DNA, 15 bp, Homo sapiens
tggtgggctaccaag

SEQ ID NO: 63694 - DNA, 15 bp, Homo sapiens
gtggtgggctaccaa

SEQ ID NO: 63695 - DNA, 15 bp, Homo sapiens
agtggtgggctacca

SEQ ID NO: 63696 - DNA, 15 bp, Homo sapiens
gagtggtgggctacc

SEQ ID NO: 63697 - DNA, 15 bp, Homo sapiens
ggagtggtgggctac

SEQ ID NO: 63698 - DNA, 15 bp, Homo sapiens
gggagtggtgggcta

SEQ ID NO: 63699 - DNA, 15 bp, Homo sapiens
ggggagtggtgggct

SEQ ID NO: 63700 - DNA, 15 bp, Homo sapiens
aggggagtggtgggc

SEQ ID NO: 63701 - DNA, 15 bp, Homo sapiens
taggggagtggtggg

SEQ ID NO: 63702 - DNA, 15 bp, Homo sapiens
ttaggggagtggtgg

SEQ ID NO: 63703 - DNA, 15 bp, Homo sapiens
tttaggggagtggtg

SEQ ID NO: 63704 - DNA, 15 bp, Homo sapiens
ctttaggggagtggt

SEQ ID NO: 63705 - DNA, 15 bp, Homo sapiens
cctttaggggagtgg

SEQ ID NO: 63706 - DNA, 15 bp, Homo sapiens
ccctttaggggagtg

SEQ ID NO: 63707 - DNA, 15 bp, Homo sapiens
tccctttaggggagt

SEQ ID NO: 63708 - DNA, 15 bp, Homo sapiens
gtccctttaggggag

SEQ ID NO: 63709 - DNA, 15 bp, Homo sapiens
agtccctttagggga

SEQ ID NO: 63710 - DNA, 15 bp, Homo sapiens
gagtccctttagggg

SEQ ID NO: 63711 - DNA, 15 bp, Homo sapiens
agagtccctttaggg

SEQ ID NO: 63712 - DNA, 15 bp, Homo sapiens
tagagtccctttagg

SEQ ID NO: 63713 - DNA, 15 bp, Homo sapiens
atagagtccctttag

SEQ ID NO: 63714 - DNA, 15 bp, Homo sapiens
tatagagtcccttta

SEQ ID NO: 63715 - DNA, 15 bp, Homo sapiens
ctatagagtcccttt

SEQ ID NO: 63716 - DNA, 15 bp, Homo sapiens
cctatagagtccctt

SEQ ID NO: 63717 - DNA, 15 bp, Homo sapiens
acctatagagtccct

SEQ ID NO: 63718 - DNA, 15 bp, Homo sapiens
tacctatagagtccc

SEQ ID NO: 63719 - DNA, 15 bp, Homo sapiens
ttacctatagagtcc

SEQ ID NO: 63720 - DNA, 15 bp, Homo sapiens
tttacctatagagtc

SEQ ID NO: 63721 - DNA, 15 bp, Homo sapiens
atttacctatagagt

SEQ ID NO: 63722 - DNA, 15 bp, Homo sapiens
tatttacctatagag

SEQ ID NO: 63723 - DNA, 15 bp, Homo sapiens
gtatttacctataga

SEQ ID NO: 63724 - DNA, 15 bp, Homo sapiens
agtatttacctatag

SEQ ID NO: 63725 - DNA, 15 bp, Homo sapiens
tagtatttacctata

SEQ ID NO: 63726 - DNA, 15 bp, Homo sapiens
gtagtatttacctat

SEQ ID NO: 63727 - DNA, 15 bp, Homo sapiens
agtagtatttaccta

SEQ ID NO: 63728 - DNA, 15 bp, Homo sapiens
aagtagtatttacct

SEQ ID NO: 63729 - DNA, 15 bp, Homo sapiens
gaagtagtatttacc

SEQ ID NO: 63730 - DNA, 15 bp, Homo sapiens
agaagtagtatttac

SEQ ID NO: 63731 - DNA, 15 bp, Homo sapiens
cagaagtagtattta

SEQ ID NO: 63732 - DNA, 15 bp, Homo sapiens
gcagaagtagtattt

SEQ ID NO: 63733 - DNA, 15 bp, Homo sapiens
tgcagaagtagtatt

SEQ ID NO: 63734 - DNA, 15 bp, Homo sapiens
gtgcagaagtagtat

SEQ ID NO: 63735 - DNA, 15 bp, Homo sapiens
ggtgcagaagtagta

SEQ ID NO: 63736 - DNA, 15 bp, Homo sapiens
aggtgcagaagtagt

SEQ ID NO: 63737 - DNA, 15 bp, Homo sapiens
aaggtgcagaagtag

SEQ ID NO: 63738 - DNA, 15 bp, Homo sapiens
taaggtgcagaagta

SEQ ID NO: 63739 - DNA, 15 bp, Homo sapiens
ataaggtgcagaagt

SEQ ID NO: 63740 - DNA, 15 bp, Homo sapiens
cataaggtgcagaag

SEQ ID NO: 63741 - DNA, 15 bp, Homo sapiens
tcataaggtgcagaa

SEQ ID NO: 63742 - DNA, 15 bp, Homo sapiens
atcataaggtgcaga

SEQ ID NO: 63743 - DNA, 15 bp, Homo sapiens
aatcataaggtgcag

SEQ ID NO: 63744 - DNA, 15 bp, Homo sapiens
caatcataaggtgca

SEQ ID NO: 63745 - DNA, 15 bp, Homo sapiens
tcaatcataaggtgc

SEQ ID NO: 63746 - DNA, 15 bp, Homo sapiens
atcaatcataaggtg

SEQ ID NO: 63747 - DNA, 15 bp, Homo sapiens
gatcaatcataaggt

SEQ ID NO: 63748 - DNA, 15 bp, Homo sapiens
ggatcaatcataagg

SEQ ID NO: 63749 - DNA, 15 bp, Homo sapiens
tggatcaatcataag

SEQ ID NO: 63750 - DNA, 15 bp, Homo sapiens
atggatcaatcataa

SEQ ID NO: 63751 - DNA, 15 bp, Homo sapiens
aatggatcaatcata

SEQ ID NO: 63752 - DNA, 15 bp, Homo sapiens
aaatggatcaatcat

SEQ ID NO: 63753 - DNA, 15 bp, Homo sapiens
aaaatggatcaatca

SEQ ID NO: 63754 - DNA, 15 bp, Homo sapiens
caaaatggatcaatc

SEQ ID NO: 63755 - DNA, 15 bp, Homo sapiens
gcaaaatggatcaat

SEQ ID NO: 63756 - DNA, 15 bp, Homo sapiens
tgcaaaatggatcaa

SEQ ID NO: 63757 - DNA, 15 bp, Homo sapiens
ttgcaaaatggatca

SEQ ID NO: 63758 - DNA, 15 bp, Homo sapiens
tttgcaaaatggatc

SEQ ID NO: 63759 - DNA, 15 bp, Homo sapiens
atttgcaaaatggat

SEQ ID NO: 63760 - DNA, 15 bp, Homo sapiens
aatttgcaaaatgga

SEQ ID NO: 63761 - DNA, 15 bp, Homo sapiens
gaatttgcaaaatgg

SEQ ID NO: 63762 - DNA, 15 bp, Homo sapiens
tgaatttgcaaaatg

SEQ ID NO: 63763 - DNA, 15 bp, Homo sapiens
ttgaatttgcaaaat

SEQ ID NO: 63764 - DNA, 15 bp, Homo sapiens
tttgaatttgcaaaa

SEQ ID NO: 63765 - DNA, 15 bp, Homo sapiens
atttgaatttgcaaa

SEQ ID NO: 63766 - DNA, 15 bp, Homo sapiens
aatttgaatttgcaa

SEQ ID NO: 63767 - DNA, 15 bp, Homo sapiens
aaatttgaatttgca

SEQ ID NO: 63768 - DNA, 15 bp, Homo sapiens
gaaatttgaatttgc

SEQ ID NO: 63769 - DNA, 15 bp, Homo sapiens
agaaatttgaatttg

SEQ ID NO: 63770 - DNA, 15 bp, Homo sapiens
gagaaatttgaattt

SEQ ID NO: 63771 - DNA, 15 bp, Homo sapiens
ggagaaatttgaatt

SEQ ID NO: 63772 - DNA, 15 bp, Homo sapiens
tggagaaatttgaat

SEQ ID NO: 63773 - DNA, 15 bp, Homo sapiens
ctggagaaatttgaa

SEQ ID NO: 63774 - DNA, 15 bp, Homo sapiens
cctggagaaatttga

SEQ ID NO: 63775 - DNA, 15 bp, Homo sapiens
acctggagaaatttg

SEQ ID NO: 63776 - DNA, 15 bp, Homo sapiens
tacctggagaaattt

SEQ ID NO: 63777 - DNA, 15 bp, Homo sapiens
atacctggagaaatt

SEQ ID NO: 63778 - DNA, 15 bp, Homo sapiens
tatacctggagaaat

SEQ ID NO: 63779 - DNA, 15 bp, Homo sapiens
ttatacctggagaaa

SEQ ID NO: 63780 - DNA, 15 bp, Homo sapiens
attatacctggagaa

SEQ ID NO: 63781 - DNA, 15 bp, Homo sapiens
aattatacctggaga

SEQ ID NO: 63782 - DNA, 15 bp, Homo sapiens
aaattatacctggag

SEQ ID NO: 63783 - DNA, 15 bp, Homo sapiens
taaattatacctgga

SEQ ID NO: 63784 - DNA, 15 bp, Homo sapiens
gtaaattatacctgg

SEQ ID NO: 63785 - DNA, 15 bp, Homo sapiens
tgtaaattatacctg

SEQ ID NO: 63786 - DNA, 15 bp, Homo sapiens
gtgtaaattatacct

SEQ ID NO: 63787 - DNA, 15 bp, Homo sapiens
agtgtaaattatacc

SEQ ID NO: 63788 - DNA, 15 bp, Homo sapiens
tagtgtaaattatac

SEQ ID NO: 63789 - DNA, 15 bp, Homo sapiens
ctagtgtaaattata

SEQ ID NO: 63790 - DNA, 15 bp, Homo sapiens
tctagtgtaaattat

SEQ ID NO: 63791 - DNA, 15 bp, Homo sapiens
ttctagtgtaaatta

SEQ ID NO: 63792 - DNA, 15 bp, Homo sapiens
cttctagtgtaaatt

SEQ ID NO: 63793 - DNA, 15 bp, Homo sapiens
tcttctagtgtaaat

SEQ ID NO: 63794 - DNA, 15 bp, Homo sapiens
ctcttctagtgtaaa

SEQ ID NO: 63795 - DNA, 15 bp, Homo sapiens
caaagcacaggtatg

SEQ ID NO: 63796 - DNA, 15 bp, Homo sapiens
gcaaagcacaggtat

SEQ ID NO: 63797 - DNA, 15 bp, Homo sapiens
agcaaagcacaggta

SEQ ID NO: 63798 - DNA, 15 bp, Homo sapiens
aagcaaagcacaggt

SEQ ID NO: 63799 - DNA, 15 bp, Homo sapiens
aaagcaaagcacagg

SEQ ID NO: 63800 - DNA, 15 bp, Homo sapiens
gaaagcaaagcacag

SEQ ID NO: 63801 - DNA, 15 bp, Homo sapiens
tgaaagcaaagcaca

SEQ ID NO: 63802 - DNA, 15 bp, Homo sapiens
ctgaaagcaaagcac

SEQ ID NO: 63803 - DNA, 15 bp, Homo sapiens
cctgaaagcaaagca

SEQ ID NO: 63804 - DNA, 15 bp, Homo sapiens
gcctgaaagcaaagc

SEQ ID NO: 63805 - DNA, 15 bp, Homo sapiens
ggcctgaaagcaaag

SEQ ID NO: 63806 - DNA, 15 bp, Homo sapiens
tggcctgaaagcaaa

SEQ ID NO: 63807 - DNA, 15 bp, Homo sapiens
ctggcctgaaagcaa

SEQ ID NO: 63808 - DNA, 15 bp, Homo sapiens
actggcctgaaagca

SEQ ID NO: 63809 - DNA, 15 bp, Homo sapiens
tactggcctgaaagc

SEQ ID NO: 63810 - DNA, 15 bp, Homo sapiens
gtactggcctgaaag

SEQ ID NO: 63811 - DNA, 15 bp, Homo sapiens
cgtactggcctgaaa

SEQ ID NO: 63812 - DNA, 15 bp, Homo sapiens
ccgtactggcctgaa

SEQ ID NO: 63813 - DNA, 15 bp, Homo sapiens
tccgtactggcctga

SEQ ID NO: 63814 - DNA, 15 bp, Homo sapiens
ttccgtactggcctg

SEQ ID NO: 63815 - DNA, 15 bp, Homo sapiens
attccgtactggcct

SEQ ID NO: 63816 - DNA, 15 bp, Homo sapiens
aattccgtactggcc

SEQ ID NO: 63817 - DNA, 15 bp, Homo sapiens
gaattccgtactggc

SEQ ID NO: 63818 - DNA, 15 bp, Homo sapiens
ggaattccgtactgg

SEQ ID NO: 63819 - DNA, 15 bp, Homo sapiens
gggaattccgtactg

SEQ ID NO: 63820 - DNA, 15 bp, Homo sapiens
tgggaattccgtact

SEQ ID NO: 63821 - DNA, 15 bp, Homo sapiens
ctgggaattccgtac

SEQ ID NO: 63822 - DNA, 15 bp, Homo sapiens
cctgggaattccgta

SEQ ID NO: 63823 - DNA, 15 bp, Homo sapiens
gcctgggaattccgt

SEQ ID NO: 63824 - DNA, 15 bp, Homo sapiens
ggcctgggaattccg

SEQ ID NO: 63825 - DNA, 15 bp, Homo sapiens
gggcctgggaattcc

SEQ ID NO: 63826 - DNA, 15 bp, Homo sapiens
agggcctgggaattc

SEQ ID NO: 63827 - DNA, 15 bp, Homo sapiens
cagggcctgggaatt

SEQ ID NO: 63828 - DNA, 15 bp, Homo sapiens
ccagggcctgggaat

SEQ ID NO: 63829 - DNA, 15 bp, Homo sapiens
accagggcctgggaa

SEQ ID NO: 63830 - DNA, 15 bp, Homo sapiens
taccagggcctggga

SEQ ID NO: 63831 - DNA, 15 bp, Homo sapiens
ataccagggcctggg

SEQ ID NO: 63832 - DNA, 15 bp, Homo sapiens
aataccagggcctgg

SEQ ID NO: 63833 - DNA, 15 bp, Homo sapiens
aaataccagggcctg

SEQ ID NO: 63834 - DNA, 15 bp, Homo sapiens
aaaataccagggcct

SEQ ID NO: 63835 - DNA, 15 bp, Homo sapiens
gaaaataccagggcc

SEQ ID NO: 63836 - DNA, 15 bp, Homo sapiens
ggaaaataccagggc

SEQ ID NO: 63837 - DNA, 15 bp, Homo sapiens
aggaaaataccaggg

SEQ ID NO: 63838 - DNA, 15 bp, Homo sapiens
aaggaaaataccagg

SEQ ID NO: 63839 - DNA, 15 bp, Homo sapiens
caaggaaaataccag

SEQ ID NO: 63840 - DNA, 15 bp, Homo sapiens
gcaaggaaaatacca

SEQ ID NO: 63841 - DNA, 15 bp, Homo sapiens
tgcaaggaaaatacc

SEQ ID NO: 63842 - DNA, 15 bp, Homo sapiens
gtgcaaggaaaatac

SEQ ID NO: 63843 - DNA, 15 bp, Homo sapiens
ggtgcaaggaaaata

SEQ ID NO: 63844 - DNA, 15 bp, Homo sapiens
tggtgcaaggaaaat

SEQ ID NO: 63845 - DNA, 15 bp, Homo sapiens
ttggtgcaaggaaaa

SEQ ID NO: 63846 - DNA, 15 bp, Homo sapiens
cttggtgcaaggaaa

SEQ ID NO: 63847 - DNA, 15 bp, Homo sapiens
acttggtgcaaggaa

SEQ ID NO: 63848 - DNA, 15 bp, Homo sapiens
gacttggtgcaagga

SEQ ID NO: 63849 - DNA, 15 bp, Homo sapiens
ggacttggtgcaagg

SEQ ID NO: 63850 - DNA, 15 bp, Homo sapiens
aggacttggtgcaag

SEQ ID NO: 63851 - DNA, 15 bp, Homo sapiens
taggacttggtgcaa

SEQ ID NO: 63852 - DNA, 15 bp, Homo sapiens
gtaggacttggtgca

SEQ ID NO: 63853 - DNA, 15 bp, Homo sapiens
agtaggacttggtgc

SEQ ID NO: 63854 - DNA, 15 bp, Homo sapiens
cagtaggacttggtg

SEQ ID NO: 63855 - DNA, 15 bp, Homo sapiens
ccagtaggacttggt

SEQ ID NO: 63856 - DNA, 15 bp, Homo sapiens
accagtaggacttgg

SEQ ID NO: 63857 - DNA, 15 bp, Homo sapiens
aaccagtaggacttg

SEQ ID NO: 63858 - DNA, 15 bp, Homo sapiens
aaaccagtaggactt

SEQ ID NO: 63859 - DNA, 15 bp, Homo sapiens
caaaccagtaggact

SEQ ID NO: 63860 - DNA, 15 bp, Homo sapiens
ccaaaccagtaggac

SEQ ID NO: 63861 - DNA, 15 bp, Homo sapiens
gccaaaccagtagga

SEQ ID NO: 63862 - DNA, 15 bp, Homo sapiens
cgccaaaccagtagg

SEQ ID NO: 63863 - DNA, 15 bp, Homo sapiens
tcgccaaaccagtag

SEQ ID NO: 63864 - DNA, 15 bp, Homo sapiens
ctcgccaaaccagta

SEQ ID NO: 63865 - DNA, 15 bp, Homo sapiens
cctcgccaaaccagt

SEQ ID NO: 63866 - DNA, 15 bp, Homo sapiens
tcctcgccaaaccag

SEQ ID NO: 63867 - DNA, 15 bp, Homo sapiens
ttcctcgccaaacca

SEQ ID NO: 63868 - DNA, 15 bp, Homo sapiens
tttcctcgccaaacc

SEQ ID NO: 63869 - DNA, 15 bp, Homo sapiens
ctttcctcgccaaac

SEQ ID NO: 63870 - DNA, 15 bp, Homo sapiens
actttcctcgccaaa

SEQ ID NO: 63871 - DNA, 15 bp, Homo sapiens
cactttcctcgccaa

SEQ ID NO: 63872 - DNA, 15 bp, Homo sapiens
tcactttcctcgcca

SEQ ID NO: 63873 - DNA, 15 bp, Homo sapiens
atcactttcctcgcc

SEQ ID NO: 63874 - DNA, 15 bp, Homo sapiens
catcactttcctcgc

SEQ ID NO: 63875 - DNA, 15 bp, Homo sapiens
tcatcactttcctcg

SEQ ID NO: 63876 - DNA, 15 bp, Homo sapiens
ctcatcactttcctc

SEQ ID NO: 63877 - DNA, 15 bp, Homo sapiens
tctcatcactttcct

SEQ ID NO: 63878 - DNA, 15 bp, Homo sapiens
ttctcatcactttcc

SEQ ID NO: 63879 - DNA, 15 bp, Homo sapiens
cttctcatcactttc

SEQ ID NO: 63880 - DNA, 15 bp, Homo sapiens
tcttctcatcacttt

SEQ ID NO: 63881 - DNA, 15 bp, Homo sapiens
ctcttctcatcactt

SEQ ID NO: 63882 - DNA, 15 bp, Homo sapiens
gctcttctcatcact

SEQ ID NO: 63883 - DNA, 15 bp, Homo sapiens
ggctcttctcatcac

SEQ ID NO: 63884 - DNA, 15 bp, Homo sapiens
tggctcttctcatca

SEQ ID NO: 63885 - DNA, 15 bp, Homo sapiens
gtggctcttctcatc

SEQ ID NO: 63886 - DNA, 15 bp, Homo sapiens
ggtggctcttctcat

SEQ ID NO: 63887 - DNA, 15 bp, Homo sapiens
gggtggctcttctca

SEQ ID NO: 63888 - DNA, 15 bp, Homo sapiens
agggtggctcttctc

SEQ ID NO: 63889 - DNA, 15 bp, Homo sapiens
cagggtggctcttct

SEQ ID NO: 63890 - DNA, 15 bp, Homo sapiens
ccagggtggctcttc

SEQ ID NO: 63891 - DNA, 15 bp, Homo sapiens
accagggtggctctt

SEQ ID NO: 63892 - DNA, 15 bp, Homo sapiens
aaccagggtggctct

SEQ ID NO: 63893 - DNA, 15 bp, Homo sapiens
gaaccagggtggctc

SEQ ID NO: 63894 - DNA, 15 bp, Homo sapiens
ggaaccagggtggct

SEQ ID NO: 63895 - DNA, 15 bp, Homo sapiens
tggaaccagggtggc

SEQ ID NO: 63896 - DNA, 15 bp, Homo sapiens
ttggaaccagggtgg

SEQ ID NO: 63897 - DNA, 15 bp, Homo sapiens
gttggaaccagggtg

SEQ ID NO: 63898 - DNA, 15 bp, Homo sapiens
ggttggaaccagggt

SEQ ID NO: 63899 - DNA, 15 bp, Homo sapiens
tggttggaaccaggg

SEQ ID NO: 63900 - DNA, 15 bp, Homo sapiens
ctggttggaaccagg

SEQ ID NO: 63901 - DNA, 15 bp, Homo sapiens
tctggttggaaccag

SEQ ID NO: 63902 - DNA, 15 bp, Homo sapiens
ttctggttggaacca

SEQ ID NO: 63903 - DNA, 15 bp, Homo sapiens
cttctggttggaacc

SEQ ID NO: 63904 - DNA, 15 bp, Homo sapiens
tcttctggttggaac

SEQ ID NO: 63905 - DNA, 15 bp, Homo sapiens
ctcttctggttggaa

SEQ ID NO: 63906 - DNA, 15 bp, Homo sapiens
tctcttctggttgga

SEQ ID NO: 63907 - DNA, 15 bp, Homo sapiens
ttctcttctggttgg

SEQ ID NO: 63908 - DNA, 15 bp, Homo sapiens
attctcttctggttg

SEQ ID NO: 63909 - DNA, 15 bp, Homo sapiens
tattctcttctggtt

SEQ ID NO: 63910 - DNA, 15 bp, Homo sapiens
atattctcttctggt

SEQ ID NO: 63911 - DNA, 15 bp, Homo sapiens
gatattctcttctgg

SEQ ID NO: 63912 - DNA, 15 bp, Homo sapiens
tgatattctcttctg

SEQ ID NO: 63913 - DNA, 15 bp, Homo sapiens
ctgatattctcttct

SEQ ID NO: 63914 - DNA, 15 bp, Homo sapiens
tctgatattctcttc

SEQ ID NO: 63915 - DNA, 15 bp, Homo sapiens
ttctgatattctctt

SEQ ID NO: 63916 - DNA, 15 bp, Homo sapiens
tttctgatattctct

SEQ ID NO: 63917 - DNA, 15 bp, Homo sapiens
ctttctgatattctc

SEQ ID NO: 63918 - DNA, 15 bp, Homo sapiens
actttctgatattct

SEQ ID NO: 63919 - DNA, 15 bp, Homo sapiens
tactttctgatattc

SEQ ID NO: 63920 - DNA, 15 bp, Homo sapiens
ttactttctgatatt

SEQ ID NO: 63921 - DNA, 15 bp, Homo sapiens
cttactttctgatat

SEQ ID NO: 63922 - DNA, 15 bp, Homo sapiens
acttactttctgata

SEQ ID NO: 63923 - DNA, 15 bp, Homo sapiens
cacttactttctgat

SEQ ID NO: 63924 - DNA, 15 bp, Homo sapiens
gcacttactttctga

SEQ ID NO: 63925 - DNA, 15 bp, Homo sapiens
agcacttactttctg

SEQ ID NO: 63926 - DNA, 15 bp, Homo sapiens
cagcacttactttct

SEQ ID NO: 63927 - DNA, 15 bp, Homo sapiens
acagcacttactttc

SEQ ID NO: 63928 - DNA, 15 bp, Homo sapiens
aacagcacttacttt

SEQ ID NO: 63929 - DNA, 15 bp, Homo sapiens
caacagcacttactt

SEQ ID NO: 63930 - DNA, 15 bp, Homo sapiens
tcaacagcacttact

SEQ ID NO: 63931 - DNA, 15 bp, Homo sapiens
gtcaacagcacttac

SEQ ID NO: 63932 - DNA, 15 bp, Homo sapiens
ggtcaacagcactta

SEQ ID NO: 63933 - DNA, 15 bp, Homo sapiens
aggtcaacagcactt

SEQ ID NO: 63934 - DNA, 15 bp, Homo sapiens
gaggtcaacagcact

SEQ ID NO: 63935 - DNA, 15 bp, Homo sapiens
ggaggtcaacagcac

SEQ ID NO: 63936 - DNA, 15 bp, Homo sapiens
aggaggtcaacagca

SEQ ID NO: 63937 - DNA, 15 bp, Homo sapiens
caggaggtcaacagc

SEQ ID NO: 63938 - DNA, 15 bp, Homo sapiens
gcaggaggtcaacag

SEQ ID NO: 63939 - DNA, 15 bp, Homo sapiens
agcaggaggtcaaca

SEQ ID NO: 63940 - DNA, 15 bp, Homo sapiens
gagcaggaggtcaac

SEQ ID NO: 63941 - DNA, 15 bp, Homo sapiens
agagcaggaggtcaa

SEQ ID NO: 63942 - DNA, 15 bp, Homo sapiens
aagagcaggaggtca

SEQ ID NO: 63943 - DNA, 15 bp, Homo sapiens
aaagagcaggaggtc

SEQ ID NO: 63944 - DNA, 15 bp, Homo sapiens
gaaagagcaggaggt

SEQ ID NO: 63945 - DNA, 15 bp, Homo sapiens
agaaagagcaggagg

SEQ ID NO: 63946 - DNA, 15 bp, Homo sapiens
aagaaagagcaggag

SEQ ID NO: 63947 - DNA, 15 bp, Homo sapiens
aaagaaagagcagga

SEQ ID NO: 63948 - DNA, 15 bp, Homo sapiens
taaagaaagagcagg

SEQ ID NO: 63949 - DNA, 15 bp, Homo sapiens
ttaaagaaagagcag

SEQ ID NO: 63950 - DNA, 15 bp, Homo sapiens
gttaaagaaagagca

SEQ ID NO: 63951 - DNA, 15 bp, Homo sapiens
ggttaaagaaagagc

SEQ ID NO: 63952 - DNA, 15 bp, Homo sapiens
aggttaaagaaagag

SEQ ID NO: 63953 - DNA, 15 bp, Homo sapiens
taggttaaagaaaga

SEQ ID NO: 63954 - DNA, 15 bp, Homo sapiens
ctaggttaaagaaag

SEQ ID NO: 63955 - DNA, 15 bp, Homo sapiens
actaggttaaagaaa

SEQ ID NO: 63956 - DNA, 15 bp, Homo sapiens
cactaggttaaagaa

SEQ ID NO: 63957 - DNA, 15 bp, Homo sapiens
gcactaggttaaaga

SEQ ID NO: 63958 - DNA, 15 bp, Homo sapiens
agcactaggttaaag

SEQ ID NO: 63959 - DNA, 15 bp, Homo sapiens
cagcactaggttaaa

SEQ ID NO: 63960 - DNA, 15 bp, Homo sapiens
gcagcactaggttaa

SEQ ID NO: 63961 - DNA, 15 bp, Homo sapiens
agcagcactaggtta

SEQ ID NO: 63962 - DNA, 15 bp, Homo sapiens
cagcagcactaggtt

SEQ ID NO: 63963 - DNA, 15 bp, Homo sapiens
gcagcagcactaggt

SEQ ID NO: 63964 - DNA, 15 bp, Homo sapiens
ggcagcagcactagg

SEQ ID NO: 63965 - DNA, 15 bp, Homo sapiens
aggcagcagcactag

SEQ ID NO: 63966 - DNA, 15 bp, Homo sapiens
gaggcagcagcacta

SEQ ID NO: 63967 - DNA, 15 bp, Homo sapiens
agaggcagcagcact

SEQ ID NO: 63968 - DNA, 15 bp, Homo sapiens
cagaggcagcagcac

SEQ ID NO: 63969 - DNA, 15 bp, Homo sapiens
gcagaggcagcagca

SEQ ID NO: 63970 - DNA, 15 bp, Homo sapiens
agcagaggcagcagc

SEQ ID NO: 63971 - DNA, 15 bp, Homo sapiens
tagcagaggcagcag

SEQ ID NO: 63972 - DNA, 15 bp, Homo sapiens
ttagcagaggcagca

SEQ ID NO: 63973 - DNA, 15 bp, Homo sapiens
gttagcagaggcagc

SEQ ID NO: 63974 - DNA, 15 bp, Homo sapiens
agttagcagaggcag

SEQ ID NO: 63975 - DNA, 15 bp, Homo sapiens
cagttagcagaggca

SEQ ID NO: 63976 - DNA, 15 bp, Homo sapiens
acagttagcagaggc

SEQ ID NO: 63977 - DNA, 15 bp, Homo sapiens
aacagttagcagagg

SEQ ID NO: 63978 - DNA, 15 bp, Homo sapiens
caacagttagcagag

SEQ ID NO: 63979 - DNA, 15 bp, Homo sapiens
ccaacagttagcaga

SEQ ID NO: 63980 - DNA, 15 bp, Homo sapiens
cccaacagttagcag

SEQ ID NO: 63981 - DNA, 15 bp, Homo sapiens
ccccaacagttagca

SEQ ID NO: 63982 - DNA, 15 bp, Homo sapiens
cccccaacagttagc

SEQ ID NO: 63983 - DNA, 15 bp, Homo sapiens
gcccccaacagttag

SEQ ID NO: 63984 - DNA, 15 bp, Homo sapiens
tgcccccaacagtta

SEQ ID NO: 63985 - DNA, 15 bp, Homo sapiens
ttgcccccaacagtt

SEQ ID NO: 63986 - DNA, 15 bp, Homo sapiens
cttgcccccaacagt

SEQ ID NO: 63987 - DNA, 15 bp, Homo sapiens
gcttgcccccaacag

SEQ ID NO: 63988 - DNA, 15 bp, Homo sapiens
cgcttgcccccaaca

SEQ ID NO: 63989 - DNA, 15 bp, Homo sapiens
tcgcttgcccccaac

SEQ ID NO: 63990 - DNA, 15 bp, Homo sapiens
atcgcttgcccccaa

SEQ ID NO: 63991 - DNA, 15 bp, Homo sapiens
catcgcttgccccca

SEQ ID NO: 63992 - DNA, 15 bp, Homo sapiens
acatcgcttgccccc

SEQ ID NO: 63993 - DNA, 15 bp, Homo sapiens
gacatcgcttgcccc

SEQ ID NO: 63994 - DNA, 15 bp, Homo sapiens
agacatcgcttgccc

SEQ ID NO: 63995 - DNA, 15 bp, Homo sapiens
gagacatcgcttgcc

SEQ ID NO: 63996 - DNA, 15 bp, Homo sapiens
ggagacatcgcttgc

SEQ ID NO: 63997 - DNA, 15 bp, Homo sapiens
aggagacatcgcttg

SEQ ID NO: 63998 - DNA, 15 bp, Homo sapiens
caggagacatcgctt

SEQ ID NO: 63999 - DNA, 15 bp, Homo sapiens
gcaggagacatcgct

SEQ ID NO: 64000 - DNA, 15 bp, Homo sapiens
ggcaggagacatcgc

SEQ ID NO: 64001 - DNA, 15 bp, Homo sapiens
aggcaggagacatcg

SEQ ID NO: 64002 - DNA, 15 bp, Homo sapiens
aaggcaggagacatc

SEQ ID NO: 64003 - DNA, 15 bp, Homo sapiens
aaaggcaggagacat

SEQ ID NO: 64004 - DNA, 15 bp, Homo sapiens
gaaaggcaggagaca

SEQ ID NO: 64005 - DNA, 15 bp, Homo sapiens
agaaaggcaggagac

SEQ ID NO: 64006 - DNA, 15 bp, Homo sapiens
tagaaaggcaggaga

SEQ ID NO: 64007 - DNA, 15 bp, Homo sapiens
ttagaaaggcaggag

SEQ ID NO: 64008 - DNA, 15 bp, Homo sapiens
tttagaaaggcagga

SEQ ID NO: 64009 - DNA, 15 bp, Homo sapiens
ttttagaaaggcagg

SEQ ID NO: 64010 - DNA, 15 bp, Homo sapiens
cttttagaaaggcag

SEQ ID NO: 64011 - DNA, 15 bp, Homo sapiens
tcttttagaaaggca

SEQ ID NO: 64012 - DNA, 15 bp, Homo sapiens
gtcttttagaaaggc

SEQ ID NO: 64013 - DNA, 15 bp, Homo sapiens
agtcttttagaaagg

SEQ ID NO: 64014 - DNA, 15 bp, Homo sapiens
cagtcttttagaaag

SEQ ID NO: 64015 - DNA, 15 bp, Homo sapiens
acagtcttttagaaa

SEQ ID NO: 64016 - DNA, 15 bp, Homo sapiens
cacagtcttttagaa

SEQ ID NO: 64017 - DNA, 15 bp, Homo sapiens
tcacagtcttttaga

SEQ ID NO: 64018 - DNA, 15 bp, Homo sapiens
ttcacagtcttttag

SEQ ID NO: 64019 - DNA, 15 bp, Homo sapiens
tttcacagtctttta

SEQ ID NO: 64020 - DNA, 15 bp, Homo sapiens
gtttcacagtctttt

SEQ ID NO: 64021 - DNA, 15 bp, Homo sapiens
ggtttcacagtcttt

SEQ ID NO: 64022 - DNA, 15 bp, Homo sapiens
tggtttcacagtctt

SEQ ID NO: 64023 - DNA, 15 bp, Homo sapiens
gtggtttcacagtct

SEQ ID NO: 64024 - DNA, 15 bp, Homo sapiens
agtggtttcacagtc

SEQ ID NO: 64025 - DNA, 15 bp, Homo sapiens
gagtggtttcacagt

SEQ ID NO: 64026 - DNA, 15 bp, Homo sapiens
ggagtggtttcacag

SEQ ID NO: 64027 - DNA, 15 bp, Homo sapiens
tggagtggtttcaca

SEQ ID NO: 64028 - DNA, 15 bp, Homo sapiens
ctggagtggtttcac

SEQ ID NO: 64029 - DNA, 15 bp, Homo sapiens
cctggagtggtttca

SEQ ID NO: 64030 - DNA, 15 bp, Homo sapiens
ccctggagtggtttc

SEQ ID NO: 64031 - DNA, 15 bp, Homo sapiens
cccctggagtggttt

SEQ ID NO: 64032 - DNA, 15 bp, Homo sapiens
gcccctggagtggtt

SEQ ID NO: 64033 - DNA, 15 bp, Homo sapiens
tgcccctggagtggt

SEQ ID NO: 64034 - DNA, 15 bp, Homo sapiens
ctgcccctggagtgg

SEQ ID NO: 64035 - DNA, 15 bp, Homo sapiens
tctgcccctggagtg

SEQ ID NO: 64036 - DNA, 15 bp, Homo sapiens
ctctgcccctggagt

SEQ ID NO: 64037 - DNA, 15 bp, Homo sapiens
tctctgcccctggag

SEQ ID NO: 64038 - DNA, 15 bp, Homo sapiens
ttctctgcccctgga

SEQ ID NO: 64039 - DNA, 15 bp, Homo sapiens
tttctctgcccctgg

SEQ ID NO: 64040 - DNA, 15 bp, Homo sapiens
atttctctgcccctg

SEQ ID NO: 64041 - DNA, 15 bp, Homo sapiens
gatttctctgcccct

SEQ ID NO: 64042 - DNA, 15 bp, Homo sapiens
tgatttctctgcccc

SEQ ID NO: 64043 - DNA, 15 bp, Homo sapiens
gtgatttctctgccc

SEQ ID NO: 64044 - DNA, 15 bp, Homo sapiens
tgtgatttctctgcc

SEQ ID NO: 64045 - DNA, 15 bp, Homo sapiens
atgtgatttctctgc

SEQ ID NO: 64046 - DNA, 15 bp, Homo sapiens
catgtgatttctctg

SEQ ID NO: 64047 - DNA, 15 bp, Homo sapiens
gcatgtgatttctct

SEQ ID NO: 64048 - DNA, 15 bp, Homo sapiens
tgcatgtgatttctc

SEQ ID NO: 64049 - DNA, 15 bp, Homo sapiens
ctgcatgtgatttct

SEQ ID NO: 64050 - DNA, 15 bp, Homo sapiens
actgcatgtgatttc

SEQ ID NO: 64051 - DNA, 15 bp, Homo sapiens
cactgcatgtgattt

SEQ ID NO: 64052 - DNA, 15 bp, Homo sapiens
acactgcatgtgatt

SEQ ID NO: 64053 - DNA, 15 bp, Homo sapiens
gacactgcatgtgat

SEQ ID NO: 64054 - DNA, 15 bp, Homo sapiens
ggacactgcatgtga

SEQ ID NO: 64055 - DNA, 15 bp, Homo sapiens
gggacactgcatgtg

SEQ ID NO: 64056 - DNA, 15 bp, Homo sapiens
agggacactgcatgt

SEQ ID NO: 64057 - DNA, 15 bp, Homo sapiens
aagggacactgcatg

SEQ ID NO: 64058 - DNA, 15 bp, Homo sapiens
aaagggacactgcat

SEQ ID NO: 64059 - DNA, 15 bp, Homo sapiens
gaaagggacactgca

SEQ ID NO: 64060 - DNA, 15 bp, Homo sapiens
ggaaagggacactgc

SEQ ID NO: 64061 - DNA, 15 bp, Homo sapiens
tggaaagggacactg

SEQ ID NO: 64062 - DNA, 15 bp, Homo sapiens
ttggaaagggacact

SEQ ID NO: 64063 - DNA, 15 bp, Homo sapiens
tttggaaagggacac

SEQ ID NO: 64064 - DNA, 15 bp, Homo sapiens
atttggaaagggaca

SEQ ID NO: 64065 - DNA, 15 bp, Homo sapiens
gatttggaaagggac

SEQ ID NO: 64066 - DNA, 15 bp, Homo sapiens
ggatttggaaaggga

SEQ ID NO: 64067 - DNA, 15 bp, Homo sapiens
aggatttggaaaggg

SEQ ID NO: 64068 - DNA, 15 bp, Homo sapiens
gaggatttggaaagg

SEQ ID NO: 64069 - DNA, 15 bp, Homo sapiens
ggaggatttggaaag

SEQ ID NO: 64070 - DNA, 15 bp, Homo sapiens
gggaggatttggaaa

SEQ ID NO: 64071 - DNA, 15 bp, Homo sapiens
tgggaggatttggaa

SEQ ID NO: 64072 - DNA, 15 bp, Homo sapiens
atgggaggatttgga

SEQ ID NO: 64073 - DNA, 15 bp, Homo sapiens
catgggaggatttgg

SEQ ID NO: 64074 - DNA, 15 bp, Homo sapiens
gcatgggaggatttg

SEQ ID NO: 64075 - DNA, 15 bp, Homo sapiens
ggcatgggaggattt

SEQ ID NO: 64076 - DNA, 15 bp, Homo sapiens
tggcatgggaggatt

SEQ ID NO: 64077 - DNA, 15 bp, Homo sapiens
atggcatgggaggat

SEQ ID NO: 64078 - DNA, 15 bp, Homo sapiens
aatggcatgggagga

SEQ ID NO: 64079 - DNA, 15 bp, Homo sapiens
aaatggcatgggagg

SEQ ID NO: 64080 - DNA, 15 bp, Homo sapiens
taaatggcatgggag

SEQ ID NO: 64081 - DNA, 15 bp, Homo sapiens
ataaatggcatggga

SEQ ID NO: 64082 - DNA, 15 bp, Homo sapiens
cataaatggcatggg

SEQ ID NO: 64083 - DNA, 15 bp, Homo sapiens
acataaatggcatgg

SEQ ID NO: 64084 - DNA, 15 bp, Homo sapiens
gacataaatggcatg

SEQ ID NO: 64085 - DNA, 15 bp, Homo sapiens
ggacataaatggcat

SEQ ID NO: 64086 - DNA, 15 bp, Homo sapiens
tggacataaatggca

SEQ ID NO: 64087 - DNA, 15 bp, Homo sapiens
ttggacataaatggc

SEQ ID NO: 64088 - DNA, 15 bp, Homo sapiens
attggacataaatgg

SEQ ID NO: 64089 - DNA, 15 bp, Homo sapiens
cattggacataaatg

SEQ ID NO: 64090 - DNA, 15 bp, Homo sapiens
gcattggacataaat

SEQ ID NO: 64091 - DNA, 15 bp, Homo sapiens
agcattggacataaa

SEQ ID NO: 64092 - DNA, 15 bp, Homo sapiens
cagcattggacataa

SEQ ID NO: 64093 - DNA, 15 bp, Homo sapiens
acagcattggacata

SEQ ID NO: 64094 - DNA, 15 bp, Homo sapiens
aacagcattggacat

SEQ ID NO: 64095 - DNA, 15 bp, Homo sapiens
caacagcattggaca

SEQ ID NO: 64096 - DNA, 15 bp, Homo sapiens
tcaacagcattggac

SEQ ID NO: 64097 - DNA, 15 bp, Homo sapiens
gtcaacagcattgga

SEQ ID NO: 64098 - DNA, 15 bp, Homo sapiens
ggtcaacagcattgg

SEQ ID NO: 64099 - DNA, 15 bp, Homo sapiens
aggtcaacagcattg

SEQ ID NO: 64100 - DNA, 15 bp, Homo sapiens
taggtcaacagcatt

SEQ ID NO: 64101 - DNA, 15 bp, Homo sapiens
ataggtcaacagcat

SEQ ID NO: 64102 - DNA, 15 bp, Homo sapiens
aataggtcaacagca

SEQ ID NO: 64103 - DNA, 15 bp, Homo sapiens
caataggtcaacagc

SEQ ID NO: 64104 - DNA, 15 bp, Homo sapiens
ccaataggtcaacag

SEQ ID NO: 64105 - DNA, 15 bp, Homo sapiens
cccaataggtcaaca

SEQ ID NO: 64106 - DNA, 15 bp, Homo sapiens
tcccaataggtcaac

SEQ ID NO: 64107 - DNA, 15 bp, Homo sapiens
ctcccaataggtcaa

SEQ ID NO: 64108 - DNA, 15 bp, Homo sapiens
actcccaataggtca

SEQ ID NO: 64109 - DNA, 15 bp, Homo sapiens
aactcccaataggtc

SEQ ID NO: 64110 - DNA, 15 bp, Homo sapiens
gaactcccaataggt

SEQ ID NO: 64111 - DNA, 15 bp, Homo sapiens
tgaactcccaatagg

SEQ ID NO: 64112 - DNA, 15 bp, Homo sapiens
gtgaactcccaatag

SEQ ID NO: 64113 - DNA, 15 bp, Homo sapiens
cgtgaactcccaata

SEQ ID NO: 64114 - DNA, 15 bp, Homo sapiens
ccgtgaactcccaat

SEQ ID NO: 64115 - DNA, 15 bp, Homo sapiens
accgtgaactcccaa

SEQ ID NO: 64116 - DNA, 15 bp, Homo sapiens
gaccgtgaactccca

SEQ ID NO: 64117 - DNA, 15 bp, Homo sapiens
agaccgtgaactccc

SEQ ID NO: 64118 - DNA, 15 bp, Homo sapiens
gagaccgtgaactcc

SEQ ID NO: 64119 - DNA, 15 bp, Homo sapiens
cgagaccgtgaactc

SEQ ID NO: 64120 - DNA, 15 bp, Homo sapiens
tcgagaccgtgaact

SEQ ID NO: 64121 - DNA, 15 bp, Homo sapiens
atcgagaccgtgaac

SEQ ID NO: 64122 - DNA, 15 bp, Homo sapiens
gatcgagaccgtgaa

SEQ ID NO: 64123 - DNA, 15 bp, Homo sapiens
ggatcgagaccgtga

SEQ ID NO: 64124 - DNA, 15 bp, Homo sapiens
gggatcgagaccgtg

SEQ ID NO: 64125 - DNA, 15 bp, Homo sapiens
agggatcgagaccgt

SEQ ID NO: 64126 - DNA, 15 bp, Homo sapiens
cagggatcgagaccg

SEQ ID NO: 64127 - DNA, 15 bp, Homo sapiens
tcagggatcgagacc

SEQ ID NO: 64128 - DNA, 15 bp, Homo sapiens
ctcagggatcgagac

SEQ ID NO: 64129 - DNA, 15 bp, Homo sapiens
cctcagggatcgaga

SEQ ID NO: 64130 - DNA, 15 bp, Homo sapiens
ccctcagggatcgag

SEQ ID NO: 64131 - DNA, 15 bp, Homo sapiens
tccctcagggatcga

SEQ ID NO: 64132 - DNA, 15 bp, Homo sapiens
gtccctcagggatcg

SEQ ID NO: 64133 - DNA, 15 bp, Homo sapiens
tgtccctcagggatc

SEQ ID NO: 64134 - DNA, 15 bp, Homo sapiens
atgtccctcagggat

SEQ ID NO: 64135 - DNA, 15 bp, Homo sapiens
aatgtccctcaggga

SEQ ID NO: 64136 - DNA, 15 bp, Homo sapiens
aaatgtccctcaggg

SEQ ID NO: 64137 - DNA, 15 bp, Homo sapiens
aaaatgtccctcagg

SEQ ID NO: 64138 - DNA, 15 bp, Homo sapiens
gaaaatgtccctcag

SEQ ID NO: 64139 - DNA, 15 bp, Homo sapiens
agaaaatgtccctca

SEQ ID NO: 64140 - DNA, 15 bp, Homo sapiens
aagaaaatgtccctc

SEQ ID NO: 64141 - DNA, 15 bp, Homo sapiens
aaagaaaatgtccct

SEQ ID NO: 64142 - DNA, 15 bp, Homo sapiens
caaagaaaatgtccc

SEQ ID NO: 64143 - DNA, 15 bp, Homo sapiens
acaaagaaaatgtcc

SEQ ID NO: 64144 - DNA, 15 bp, Homo sapiens
aacaaagaaaatgtc

SEQ ID NO: 64145 - DNA, 15 bp, Homo sapiens
caacaaagaaaatgt

SEQ ID NO: 64146 - DNA, 15 bp, Homo sapiens
acaacaaagaaaatg

SEQ ID NO: 64147 - DNA, 15 bp, Homo sapiens
gacaacaaagaaaat

SEQ ID NO: 64148 - DNA, 15 bp, Homo sapiens
agacaacaaagaaaa

SEQ ID NO: 64149 - DNA, 15 bp, Homo sapiens
aagacaacaaagaaa

SEQ ID NO: 64150 - DNA, 15 bp, Homo sapiens
caagacaacaaagaa

SEQ ID NO: 64151 - DNA, 15 bp, Homo sapiens
ccaagacaacaaaga

SEQ ID NO: 64152 - DNA, 15 bp, Homo sapiens
gccaagacaacaaag

SEQ ID NO: 64153 - DNA, 15 bp, Homo sapiens
agccaagacaacaaa

SEQ ID NO: 64154 - DNA, 15 bp, Homo sapiens
aagccaagacaacaa

SEQ ID NO: 64155 - DNA, 15 bp, Homo sapiens
gaagccaagacaaca

SEQ ID NO: 64156 - DNA, 15 bp, Homo sapiens
agaagccaagacaac

SEQ ID NO: 64157 - DNA, 15 bp, Homo sapiens
tagaagccaagacaa

SEQ ID NO: 64158 - DNA, 15 bp, Homo sapiens
ctagaagccaagaca

SEQ ID NO: 64159 - DNA, 15 bp, Homo sapiens
tctagaagccaagac

SEQ ID NO: 64160 - DNA, 15 bp, Homo sapiens
ttctagaagccaaga

SEQ ID NO: 64161 - DNA, 15 bp, Homo sapiens
cttctagaagccaag

SEQ ID NO: 64162 - DNA, 15 bp, Homo sapiens
tcttctagaagccaa

SEQ ID NO: 64163 - DNA, 15 bp, Homo sapiens
ctcttctagaagcca

SEQ ID NO: 64164 - DNA, 15 bp, Homo sapiens
actcttctagaagcc

SEQ ID NO: 64165 - DNA, 15 bp, Homo sapiens
tactcttctagaagc

SEQ ID NO: 64166 - DNA, 15 bp, Homo sapiens
atactcttctagaag

SEQ ID NO: 64167 - DNA, 15 bp, Homo sapiens
gatactcttctagaa

SEQ ID NO: 64168 - DNA, 15 bp, Homo sapiens
agatactcttctaga

SEQ ID NO: 64169 - DNA, 15 bp, Homo sapiens
aagatactcttctag

SEQ ID NO: 64170 - DNA, 15 bp, Homo sapiens
aaagatactcttcta

SEQ ID NO: 64171 - DNA, 15 bp, Homo sapiens
aaaagatactcttct

SEQ ID NO: 64172 - DNA, 15 bp, Homo sapiens
taaaagatactcttc

SEQ ID NO: 64173 - DNA, 15 bp, Homo sapiens
gtaaaagatactctt

SEQ ID NO: 64174 - DNA, 15 bp, Homo sapiens
agtaaaagatactct

SEQ ID NO: 64175 - DNA, 15 bp, Homo sapiens
aagtaaaagatactc

SEQ ID NO: 64176 - DNA, 15 bp, Homo sapiens
caagtaaaagatact

SEQ ID NO: 64177 - DNA, 15 bp, Homo sapiens
gcaagtaaaagatac

SEQ ID NO: 64178 - DNA, 15 bp, Homo sapiens
ggcaagtaaaagata

SEQ ID NO: 64179 - DNA, 15 bp, Homo sapiens
gggcaagtaaaagat

SEQ ID NO: 64180 - DNA, 15 bp, Homo sapiens
ggggcaagtaaaaga

SEQ ID NO: 64181 - DNA, 15 bp, Homo sapiens
gggggcaagtaaaag

SEQ ID NO: 64182 - DNA, 15 bp, Homo sapiens
agggggcaagtaaaa

SEQ ID NO: 64183 - DNA, 15 bp, Homo sapiens
gagggggcaagtaaa

SEQ ID NO: 64184 - DNA, 15 bp, Homo sapiens
ggagggggcaagtaa

SEQ ID NO: 64185 - DNA, 15 bp, Homo sapiens
gggagggggcaagta

SEQ ID NO: 64186 - DNA, 15 bp, Homo sapiens
tgggagggggcaagt

SEQ ID NO: 64187 - DNA, 15 bp, Homo sapiens
ttgggagggggcaag

SEQ ID NO: 64188 - DNA, 15 bp, Homo sapiens
tttgggagggggcaa

SEQ ID NO: 64189 - DNA, 15 bp, Homo sapiens
gtttgggagggggca

SEQ ID NO: 64190 - DNA, 15 bp, Homo sapiens
tgtttgggagggggc

SEQ ID NO: 64191 - DNA, 15 bp, Homo sapiens
gtgtttgggaggggg

SEQ ID NO: 64192 - DNA, 15 bp, Homo sapiens
tgtgtttgggagggg

SEQ ID NO: 64193 - DNA, 15 bp, Homo sapiens
gtgtgtttgggaggg

SEQ ID NO: 64194 - DNA, 15 bp, Homo sapiens
tgtgtgtttgggagg

SEQ ID NO: 64195 - DNA, 15 bp, Homo sapiens
atgtgtgtttgggag

SEQ ID NO: 64196 - DNA, 15 bp, Homo sapiens
aatgtgtgtttggga

SEQ ID NO: 64197 - DNA, 15 bp, Homo sapiens
aaatgtgtgtttggg

SEQ ID NO: 64198 - DNA, 15 bp, Homo sapiens
gaaatgtgtgtttgg

SEQ ID NO: 64199 - DNA, 15 bp, Homo sapiens
tgaaatgtgtgtttg

SEQ ID NO: 64200 - DNA, 15 bp, Homo sapiens
atgaaatgtgtgttt

SEQ ID NO: 64201 - DNA, 15 bp, Homo sapiens
catgaaatgtgtgtt

SEQ ID NO: 64202 - DNA, 15 bp, Homo sapiens
ccatgaaatgtgtgt

SEQ ID NO: 64203 - DNA, 15 bp, Homo sapiens
accatgaaatgtgtg

SEQ ID NO: 64204 - DNA, 15 bp, Homo sapiens
gaccatgaaatgtgt

SEQ ID NO: 64205 - DNA, 15 bp, Homo sapiens
agaccatgaaatgtg

SEQ ID NO: 64206 - DNA, 15 bp, Homo sapiens
gagaccatgaaatgt

SEQ ID NO: 64207 - DNA, 15 bp, Homo sapiens
ggagaccatgaaatg

SEQ ID NO: 64208 - DNA, 15 bp, Homo sapiens
aggagaccatgaaat

SEQ ID NO: 64209 - DNA, 15 bp, Homo sapiens
taggagaccatgaaa

SEQ ID NO: 64210 - DNA, 15 bp, Homo sapiens
ttaggagaccatgaa

SEQ ID NO: 64211 - DNA, 15 bp, Homo sapiens
gttaggagaccatga

SEQ ID NO: 64212 - DNA, 15 bp, Homo sapiens
tgttaggagaccatg

SEQ ID NO: 64213 - DNA, 15 bp, Homo sapiens
ttgttaggagaccat

SEQ ID NO: 64214 - DNA, 15 bp, Homo sapiens
cttgttaggagacca

SEQ ID NO: 64215 - DNA, 15 bp, Homo sapiens
gcttgttaggagacc

SEQ ID NO: 64216 - DNA, 15 bp, Homo sapiens
agcttgttaggagac

SEQ ID NO: 64217 - DNA, 15 bp, Homo sapiens
tagcttgttaggaga

SEQ ID NO: 64218 - DNA, 15 bp, Homo sapiens
ctagcttgttaggag

SEQ ID NO: 64219 - DNA, 15 bp, Homo sapiens
tctagcttgttagga

SEQ ID NO: 64220 - DNA, 15 bp, Homo sapiens
ttctagcttgttagg

SEQ ID NO: 64221 - DNA, 15 bp, Homo sapiens
cttctagcttgttag

SEQ ID NO: 64222 - DNA, 15 bp, Homo sapiens
tcttctagcttgtta

SEQ ID NO: 64223 - DNA, 15 bp, Homo sapiens
ttcttctagcttgtt

SEQ ID NO: 64224 - DNA, 15 bp, Homo sapiens
tttcttctagcttgt

SEQ ID NO: 64225 - DNA, 15 bp, Homo sapiens
ctttcttctagcttg

SEQ ID NO: 64226 - DNA, 15 bp, Homo sapiens
tctttcttctagctt

SEQ ID NO: 64227 - DNA, 15 bp, Homo sapiens
ctctttcttctagct

SEQ ID NO: 64228 - DNA, 15 bp, Homo sapiens
cctctttcttctagc

SEQ ID NO: 64229 - DNA, 15 bp, Homo sapiens
acctctttcttctag

SEQ ID NO: 64230 - DNA, 15 bp, Homo sapiens
tacctctttcttcta

SEQ ID NO: 64231 - DNA, 15 bp, Homo sapiens
ttacctctttcttct

SEQ ID NO: 64232 - DNA, 15 bp, Homo sapiens
tttacctctttcttc

SEQ ID NO: 64233 - DNA, 15 bp, Homo sapiens
ctttacctctttctt

SEQ ID NO: 64234 - DNA, 15 bp, Homo sapiens
tctttacctctttct

SEQ ID NO: 64235 - DNA, 15 bp, Homo sapiens
gtctttacctctttc

SEQ ID NO: 64236 - DNA, 15 bp, Homo sapiens
tgtctttacctcttt

SEQ ID NO: 64237 - DNA, 15 bp, Homo sapiens
ttgtctttacctctt

SEQ ID NO: 64238 - DNA, 15 bp, Homo sapiens
cttgtctttacctct

SEQ ID NO: 64239 - DNA, 15 bp, Homo sapiens
gcttgtctttacctc

SEQ ID NO: 64240 - DNA, 15 bp, Homo sapiens
cgcttgtctttacct

SEQ ID NO: 64241 - DNA, 15 bp, Homo sapiens
acgcttgtctttacc

SEQ ID NO: 64242 - DNA, 15 bp, Homo sapiens
cacgcttgtctttac

SEQ ID NO: 64243 - DNA, 15 bp, Homo sapiens
tcacgcttgtcttta

SEQ ID NO: 64244 - DNA, 15 bp, Homo sapiens
atcacgcttgtcttt

SEQ ID NO: 64245 - DNA, 15 bp, Homo sapiens
aatcacgcttgtctt

SEQ ID NO: 64246 - DNA, 15 bp, Homo sapiens
caatcacgcttgtct

SEQ ID NO: 64247 - DNA, 15 bp, Homo sapiens
acaatcacgcttgtc

SEQ ID NO: 64248 - DNA, 15 bp, Homo sapiens
cacaatcacgcttgt

SEQ ID NO: 64249 - DNA, 15 bp, Homo sapiens
ccacaatcacgcttg

SEQ ID NO: 64250 - DNA, 15 bp, Homo sapiens
tccacaatcacgctt

SEQ ID NO: 64251 - DNA, 15 bp, Homo sapiens
ttccacaatcacgct

SEQ ID NO: 64252 - DNA, 15 bp, Homo sapiens
gttccacaatcacgc

SEQ ID NO: 64253 - DNA, 15 bp, Homo sapiens
ggttccacaatcacg

SEQ ID NO: 64254 - DNA, 15 bp, Homo sapiens
tggttccacaatcac

SEQ ID NO: 64255 - DNA, 15 bp, Homo sapiens
atggttccacaatca

SEQ ID NO: 64256 - DNA, 15 bp, Homo sapiens
tatggttccacaatc

SEQ ID NO: 64257 - DNA, 15 bp, Homo sapiens
ctatggttccacaat

SEQ ID NO: 64258 - DNA, 15 bp, Homo sapiens
gctatggttccacaa

SEQ ID NO: 64259 - DNA, 15 bp, Homo sapiens
ggctatggttccaca

SEQ ID NO: 64260 - DNA, 15 bp, Homo sapiens
aggctatggttccac

SEQ ID NO: 64261 - DNA, 15 bp, Homo sapiens
gaggctatggttcca

SEQ ID NO: 64262 - DNA, 15 bp, Homo sapiens
cgaggctatggttcc

SEQ ID NO: 64263 - DNA, 15 bp, Homo sapiens
gcgaggctatggttc

SEQ ID NO: 64264 - DNA, 15 bp, Homo sapiens
agcgaggctatggtt

SEQ ID NO: 64265 - DNA, 15 bp, Homo sapiens
cagcgaggctatggt

SEQ ID NO: 64266 - DNA, 15 bp, Homo sapiens
gcagcgaggctatgg

SEQ ID NO: 64267 - DNA, 15 bp, Homo sapiens
ggcagcgaggctatg

SEQ ID NO: 64268 - DNA, 15 bp, Homo sapiens
aggcagcgaggctat

SEQ ID NO: 64269 - DNA, 15 bp, Homo sapiens
caggcagcgaggcta

SEQ ID NO: 64270 - DNA, 15 bp, Homo sapiens
gcaggcagcgaggct

SEQ ID NO: 64271 - DNA, 15 bp, Homo sapiens
ggcaggcagcgaggc

SEQ ID NO: 64272 - DNA, 15 bp, Homo sapiens
aggcaggcagcgagg

SEQ ID NO: 64273 - DNA, 15 bp, Homo sapiens
caggcaggcagcgag

SEQ ID NO: 64274 - DNA, 15 bp, Homo sapiens
acaggcaggcagcga

SEQ ID NO: 64275 - DNA, 15 bp, Homo sapiens
cacaggcaggcagcg

SEQ ID NO: 64276 - DNA, 15 bp, Homo sapiens
tcacaggcaggcagc

SEQ ID NO: 64277 - DNA, 15 bp, Homo sapiens
gtcacaggcaggcag

SEQ ID NO: 64278 - DNA, 15 bp, Homo sapiens
tgtcacaggcaggca

SEQ ID NO: 64279 - DNA, 15 bp, Homo sapiens
atgtcacaggcaggc

SEQ ID NO: 64280 - DNA, 15 bp, Homo sapiens
catgtcacaggcagg

SEQ ID NO: 64281 - DNA, 15 bp, Homo sapiens
ccatgtcacaggcag

SEQ ID NO: 64282 - DNA, 15 bp, Homo sapiens
accatgtcacaggca

SEQ ID NO: 64283 - DNA, 15 bp, Homo sapiens
caccatgtcacaggc

SEQ ID NO: 64284 - DNA, 15 bp, Homo sapiens
tcaccatgtcacagg

SEQ ID NO: 64285 - DNA, 15 bp, Homo sapiens
gtcaccatgtcacag

SEQ ID NO: 64286 - DNA, 15 bp, Homo sapiens
ggtcaccatgtcaca

SEQ ID NO: 64287 - DNA, 15 bp, Homo sapiens
aggtcaccatgtcac

SEQ ID NO: 64288 - DNA, 15 bp, Homo sapiens
caggtcaccatgtca

SEQ ID NO: 64289 - DNA, 15 bp, Homo sapiens
acaggtcaccatgtc

SEQ ID NO: 64290 - DNA, 15 bp, Homo sapiens
cacaggtcaccatgt

SEQ ID NO: 64291 - DNA, 15 bp, Homo sapiens
acacaggtcaccatg

SEQ ID NO: 64292 - DNA, 15 bp, Homo sapiens
tacacaggtcaccat

SEQ ID NO: 64293 - DNA, 15 bp, Homo sapiens
atacacaggtcacca

SEQ ID NO: 64294 - DNA, 15 bp, Homo sapiens
gatacacaggtcacc

SEQ ID NO: 64295 - DNA, 15 bp, Homo sapiens
tgatacacaggtcac

SEQ ID NO: 64296 - DNA, 15 bp, Homo sapiens
ctgatacacaggtca

SEQ ID NO: 64297 - DNA, 15 bp, Homo sapiens
gctgatacacaggtc

SEQ ID NO: 64298 - DNA, 15 bp, Homo sapiens
ggctgatacacaggt

SEQ ID NO: 64299 - DNA, 15 bp, Homo sapiens
aggctgatacacagg

SEQ ID NO: 64300 - DNA, 15 bp, Homo sapiens
caggctgatacacag

SEQ ID NO: 64301 - DNA, 15 bp, Homo sapiens
acaggctgatacaca

SEQ ID NO: 64302 - DNA, 15 bp, Homo sapiens
cacaggctgatacac

SEQ ID NO: 64303 - DNA, 15 bp, Homo sapiens
acacaggctgataca

SEQ ID NO: 64304 - DNA, 15 bp, Homo sapiens
cacacaggctgatac

SEQ ID NO: 64305 - DNA, 15 bp, Homo sapiens
ccacacaggctgata

SEQ ID NO: 64306 - DNA, 15 bp, Homo sapiens
cccacacaggctgat

SEQ ID NO: 64307 - DNA, 15 bp, Homo sapiens
gcccacacaggctga

SEQ ID NO: 64308 - DNA, 15 bp, Homo sapiens
agcccacacaggctg

SEQ ID NO: 64309 - DNA, 15 bp, Homo sapiens
cagcccacacaggct

SEQ ID NO: 64310 - DNA, 15 bp, Homo sapiens
tcagcccacacaggc

SEQ ID NO: 64311 - DNA, 15 bp, Homo sapiens
ctcagcccacacagg

SEQ ID NO: 64312 - DNA, 15 bp, Homo sapiens
tctcagcccacacag

SEQ ID NO: 64313 - DNA, 15 bp, Homo sapiens
gtctcagcccacaca

SEQ ID NO: 64314 - DNA, 15 bp, Homo sapiens
ggtctcagcccacac

SEQ ID NO: 64315 - DNA, 15 bp, Homo sapiens
tggtctcagcccaca

SEQ ID NO: 64316 - DNA, 15 bp, Homo sapiens
ttggtctcagcccac

SEQ ID NO: 64317 - DNA, 15 bp, Homo sapiens
cttggtctcagccca

SEQ ID NO: 64318 - DNA, 15 bp, Homo sapiens
acttggtctcagccc

SEQ ID NO: 64319 - DNA, 15 bp, Homo sapiens
cacttggtctcagcc

SEQ ID NO: 64320 - DNA, 15 bp, Homo sapiens
ccacttggtctcagc

SEQ ID NO: 64321 - DNA, 15 bp, Homo sapiens
gccacttggtctcag

SEQ ID NO: 64322 - DNA, 15 bp, Homo sapiens
agccacttggtctca

SEQ ID NO: 64323 - DNA, 15 bp, Homo sapiens
tagccacttggtctc

SEQ ID NO: 64324 - DNA, 15 bp, Homo sapiens
gtagccacttggtct

SEQ ID NO: 64325 - DNA, 15 bp, Homo sapiens
ggtagccacttggtc

SEQ ID NO: 64326 - DNA, 15 bp, Homo sapiens
tggtagccacttggt

SEQ ID NO: 64327 - DNA, 15 bp, Homo sapiens
gtggtagccacttgg

SEQ ID NO: 64328 - DNA, 15 bp, Homo sapiens
tgtggtagccacttg

SEQ ID NO: 64329 - DNA, 15 bp, Homo sapiens
ctgtggtagccactt

SEQ ID NO: 64330 - DNA, 15 bp, Homo sapiens
tctgtggtagccact

SEQ ID NO: 64331 - DNA, 15 bp, Homo sapiens
ctctgtggtagccac

SEQ ID NO: 64332 - DNA, 15 bp, Homo sapiens
gctctgtggtagcca

SEQ ID NO: 64333 - DNA, 15 bp, Homo sapiens
agctctgtggtagcc

SEQ ID NO: 64334 - DNA, 15 bp, Homo sapiens
gagctctgtggtagc

SEQ ID NO: 64335 - DNA, 15 bp, Homo sapiens
tgagctctgtggtag

SEQ ID NO: 64336 - DNA, 15 bp, Homo sapiens
ctgagctctgtggta

SEQ ID NO: 64337 - DNA, 15 bp, Homo sapiens
gctgagctctgtggt

SEQ ID NO: 64338 - DNA, 15 bp, Homo sapiens
ggctgagctctgtgg

SEQ ID NO: 64339 - DNA, 15 bp, Homo sapiens
aggctgagctctgtg

SEQ ID NO: 64340 - DNA, 15 bp, Homo sapiens
taggctgagctctgt

SEQ ID NO: 64341 - DNA, 15 bp, Homo sapiens
ataggctgagctctg

SEQ ID NO: 64342 - DNA, 15 bp, Homo sapiens
cataggctgagctct

SEQ ID NO: 64343 - DNA, 15 bp, Homo sapiens
gcataggctgagctc

SEQ ID NO: 64344 - DNA, 15 bp, Homo sapiens
agcataggctgagct

SEQ ID NO: 64345 - DNA, 15 bp, Homo sapiens
aagcataggctgagc

SEQ ID NO: 64346 - DNA, 15 bp, Homo sapiens
gaagcataggctgag

SEQ ID NO: 64347 - DNA, 15 bp, Homo sapiens
tgaagcataggctga

SEQ ID NO: 64348 - DNA, 15 bp, Homo sapiens
atgaagcataggctg

SEQ ID NO: 64349 - DNA, 15 bp, Homo sapiens
tatgaagcataggct

SEQ ID NO: 64350 - DNA, 15 bp, Homo sapiens
ttatgaagcataggc

SEQ ID NO: 64351 - DNA, 15 bp, Homo sapiens
attatgaagcatagg

SEQ ID NO: 64352 - DNA, 15 bp, Homo sapiens
cattatgaagcatag

SEQ ID NO: 64353 - DNA, 15 bp, Homo sapiens
acattatgaagcata

SEQ ID NO: 64354 - DNA, 15 bp, Homo sapiens
tacattatgaagcat

SEQ ID NO: 64355 - DNA, 15 bp, Homo sapiens
ttacattatgaagca

SEQ ID NO: 64356 - DNA, 15 bp, Homo sapiens
attacattatgaagc

SEQ ID NO: 64357 - DNA, 15 bp, Homo sapiens
gattacattatgaag

SEQ ID NO: 64358 - DNA, 15 bp, Homo sapiens
tgattacattatgaa

SEQ ID NO: 64359 - DNA, 15 bp, Homo sapiens
atgattacattatga

SEQ ID NO: 64360 - DNA, 15 bp, Homo sapiens
aatgattacattatg

SEQ ID NO: 64361 - DNA, 15 bp, Homo sapiens
taatgattacattat

SEQ ID NO: 64362 - DNA, 15 bp, Homo sapiens
gtaatgattacatta

SEQ ID NO: 64363 - DNA, 15 bp, Homo sapiens
ggtaatgattacatt

SEQ ID NO: 64364 - DNA, 15 bp, Homo sapiens
gggtaatgattacat

SEQ ID NO: 64365 - DNA, 15 bp, Homo sapiens
tgggtaatgattaca

SEQ ID NO: 64366 - DNA, 15 bp, Homo sapiens
ctgggtaatgattac

SEQ ID NO: 64367 - DNA, 15 bp, Homo sapiens
tctgggtaatgatta

SEQ ID NO: 64368 - DNA, 15 bp, Homo sapiens
atctgggtaatgatt

SEQ ID NO: 64369 - DNA, 15 bp, Homo sapiens
gatctgggtaatgat

SEQ ID NO: 64370 - DNA, 15 bp, Homo sapiens
ggatctgggtaatga

SEQ ID NO: 64371 - DNA, 15 bp, Homo sapiens
gggatctgggtaatg

SEQ ID NO: 64372 - DNA, 15 bp, Homo sapiens
agggatctgggtaat

SEQ ID NO: 64373 - DNA, 15 bp, Homo sapiens
tagggatctgggtaa

SEQ ID NO: 64374 - DNA, 15 bp, Homo sapiens
ttagggatctgggta

SEQ ID NO: 64375 - DNA, 15 bp, Homo sapiens
attagggatctgggt

SEQ ID NO: 64376 - DNA, 15 bp, Homo sapiens
gattagggatctggg

SEQ ID NO: 64377 - DNA, 15 bp, Homo sapiens
ggattagggatctgg

SEQ ID NO: 64378 - DNA, 15 bp, Homo sapiens
aggattagggatctg

SEQ ID NO: 64379 - DNA, 15 bp, Homo sapiens
gaggattagggatct

SEQ ID NO: 64380 - DNA, 15 bp, Homo sapiens
agaggattagggatc

SEQ ID NO: 64381 - DNA, 15 bp, Homo sapiens
gagaggattagggat

SEQ ID NO: 64382 - DNA, 15 bp, Homo sapiens
agagaggattaggga

SEQ ID NO: 64383 - DNA, 15 bp, Homo sapiens
aagagaggattaggg

SEQ ID NO: 64384 - DNA, 15 bp, Homo sapiens
caagagaggattagg

SEQ ID NO: 64385 - DNA, 15 bp, Homo sapiens
ccaagagaggattag

SEQ ID NO: 64386 - DNA, 15 bp, Homo sapiens
gccaagagaggatta

SEQ ID NO: 64387 - DNA, 15 bp, Homo sapiens
agccaagagaggatt

SEQ ID NO: 64388 - DNA, 15 bp, Homo sapiens
gagccaagagaggat

SEQ ID NO: 64389 - DNA, 15 bp, Homo sapiens
agagccaagagagga

SEQ ID NO: 64390 - DNA, 15 bp, Homo sapiens
aagagccaagagagg

SEQ ID NO: 64391 - DNA, 15 bp, Homo sapiens
taagagccaagagag

SEQ ID NO: 64392 - DNA, 15 bp, Homo sapiens
ttaagagccaagaga

SEQ ID NO: 64393 - DNA, 15 bp, Homo sapiens
gttaagagccaagag

SEQ ID NO: 64394 - DNA, 15 bp, Homo sapiens
agttaagagccaaga

SEQ ID NO: 64395 - DNA, 15 bp, Homo sapiens
cagttaagagccaag

SEQ ID NO: 64396 - DNA, 15 bp, Homo sapiens
gcagttaagagccaa

SEQ ID NO: 64397 - DNA, 15 bp, Homo sapiens
tgcagttaagagcca

SEQ ID NO: 64398 - DNA, 15 bp, Homo sapiens
ctgcagttaagagcc

SEQ ID NO: 64399 - DNA, 15 bp, Homo sapiens
tctgcagttaagagc

SEQ ID NO: 64400 - DNA, 15 bp, Homo sapiens
gtctgcagttaagag

SEQ ID NO: 64401 - DNA, 15 bp, Homo sapiens
tgtctgcagttaaga

SEQ ID NO: 64402 - DNA, 15 bp, Homo sapiens
ctgtctgcagttaag

SEQ ID NO: 64403 - DNA, 15 bp, Homo sapiens
tctgtctgcagttaa

SEQ ID NO: 64404 - DNA, 15 bp, Homo sapiens
ctctgtctgcagtta

SEQ ID NO: 64405 - DNA, 15 bp, Homo sapiens
tctctgtctgcagtt

SEQ ID NO: 64406 - DNA, 15 bp, Homo sapiens
atctctgtctgcagt

SEQ ID NO: 64407 - DNA, 15 bp, Homo sapiens
catctctgtctgcag

SEQ ID NO: 64408 - DNA, 15 bp, Homo sapiens
acatctctgtctgca

SEQ ID NO: 64409 - DNA, 15 bp, Homo sapiens
gacatctctgtctgc

SEQ ID NO: 64410 - DNA, 15 bp, Homo sapiens
ggacatctctgtctg

SEQ ID NO: 64411 - DNA, 15 bp, Homo sapiens
tggacatctctgtct

SEQ ID NO: 64412 - DNA, 15 bp, Homo sapiens
gtggacatctctgtc

SEQ ID NO: 64413 - DNA, 15 bp, Homo sapiens
tgtggacatctctgt

SEQ ID NO: 64414 - DNA, 15 bp, Homo sapiens
ctgtggacatctctg

SEQ ID NO: 64415 - DNA, 15 bp, Homo sapiens
gctgtggacatctct

SEQ ID NO: 64416 - DNA, 15 bp, Homo sapiens
agctgtggacatctc

SEQ ID NO: 64417 - DNA, 15 bp, Homo sapiens
gagctgtggacatct

SEQ ID NO: 64418 - DNA, 15 bp, Homo sapiens
tgagctgtggacatc

SEQ ID NO: 64419 - DNA, 15 bp, Homo sapiens
atgagctgtggacat

SEQ ID NO: 64420 - DNA, 15 bp, Homo sapiens
gatgagctgtggaca

SEQ ID NO: 64421 - DNA, 15 bp, Homo sapiens
tgatgagctgtggac

SEQ ID NO: 64422 - DNA, 15 bp, Homo sapiens
ttgatgagctgtgga

SEQ ID NO: 64423 - DNA, 15 bp, Homo sapiens
tttgatgagctgtgg

SEQ ID NO: 64424 - DNA, 15 bp, Homo sapiens
ctttgatgagctgtg

SEQ ID NO: 64425 - DNA, 15 bp, Homo sapiens
cctttgatgagctgt

SEQ ID NO: 64426 - DNA, 15 bp, Homo sapiens
gcctttgatgagctg

SEQ ID NO: 64427 - DNA, 15 bp, Homo sapiens
agcctttgatgagct

SEQ ID NO: 64428 - DNA, 15 bp, Homo sapiens
gagcctttgatgagc

SEQ ID NO: 64429 - DNA, 15 bp, Homo sapiens
agagcctttgatgag

SEQ ID NO: 64430 - DNA, 15 bp, Homo sapiens
cagagcctttgatga

SEQ ID NO: 64431 - DNA, 15 bp, Homo sapiens
gcagagcctttgatg

SEQ ID NO: 64432 - DNA, 15 bp, Homo sapiens
ggcagagcctttgat

SEQ ID NO: 64433 - DNA, 15 bp, Homo sapiens
aggcagagcctttga

SEQ ID NO: 64434 - DNA, 15 bp, Homo sapiens
aaggcagagcctttg

SEQ ID NO: 64435 - DNA, 15 bp, Homo sapiens
gaaggcagagccttt

SEQ ID NO: 64436 - DNA, 15 bp, Homo sapiens
agaaggcagagcctt

SEQ ID NO: 64437 - DNA, 15 bp, Homo sapiens
cagaaggcagagcct

SEQ ID NO: 64438 - DNA, 15 bp, Homo sapiens
ccagaaggcagagcc

SEQ ID NO: 64439 - DNA, 15 bp, Homo sapiens
cccagaaggcagagc

SEQ ID NO: 64440 - DNA, 15 bp, Homo sapiens
acccagaaggcagag

SEQ ID NO: 64441 - DNA, 15 bp, Homo sapiens
aacccagaaggcaga

SEQ ID NO: 64442 - DNA, 15 bp, Homo sapiens
gaacccagaaggcag

SEQ ID NO: 64443 - DNA, 15 bp, Homo sapiens
agaacccagaaggca

SEQ ID NO: 64444 - DNA, 15 bp, Homo sapiens
aagaacccagaaggc

SEQ ID NO: 64445 - DNA, 15 bp, Homo sapiens
aaagaacccagaagg

SEQ ID NO: 64446 - DNA, 15 bp, Homo sapiens
caaagaacccagaag

SEQ ID NO: 64447 - DNA, 15 bp, Homo sapiens
acaaagaacccagaa

SEQ ID NO: 64448 - DNA, 15 bp, Homo sapiens
cacaaagaacccaga

SEQ ID NO: 64449 - DNA, 15 bp, Homo sapiens
gcacaaagaacccag

SEQ ID NO: 64450 - DNA, 15 bp, Homo sapiens
agcacaaagaaccca

SEQ ID NO: 64451 - DNA, 15 bp, Homo sapiens
aagcacaaagaaccc

SEQ ID NO: 64452 - DNA, 15 bp, Homo sapiens
taagcacaaagaacc

SEQ ID NO: 64453 - DNA, 15 bp, Homo sapiens
ctaagcacaaagaac

SEQ ID NO: 64454 - DNA, 15 bp, Homo sapiens
tctaagcacaaagaa

SEQ ID NO: 64455 - DNA, 15 bp, Homo sapiens
ctctaagcacaaaga

SEQ ID NO: 64456 - DNA, 15 bp, Homo sapiens
actctaagcacaaag

SEQ ID NO: 64457 - DNA, 15 bp, Homo sapiens
cactctaagcacaaa

SEQ ID NO: 64458 - DNA, 15 bp, Homo sapiens
ccactctaagcacaa

SEQ ID NO: 64459 - DNA, 15 bp, Homo sapiens
gccactctaagcaca

SEQ ID NO: 64460 - DNA, 15 bp, Homo sapiens
agccactctaagcac

SEQ ID NO: 64461 - DNA, 15 bp, Homo sapiens
aagccactctaagca

SEQ ID NO: 64462 - DNA, 15 bp, Homo sapiens
gaagccactctaagc

SEQ ID NO: 64463 - DNA, 15 bp, Homo sapiens
ggaagccactctaag

SEQ ID NO: 64464 - DNA, 15 bp, Homo sapiens
aggaagccactctaa

SEQ ID NO: 64465 - DNA, 15 bp, Homo sapiens
taggaagccactcta

SEQ ID NO: 64466 - DNA, 15 bp, Homo sapiens
ttaggaagccactct

SEQ ID NO: 64467 - DNA, 15 bp, Homo sapiens
tttaggaagccactc

SEQ ID NO: 64468 - DNA, 15 bp, Homo sapiens
atttaggaagccact

SEQ ID NO: 64469 - DNA, 15 bp, Homo sapiens
tatttaggaagccac

SEQ ID NO: 64470 - DNA, 15 bp, Homo sapiens
atatttaggaagcca

SEQ ID NO: 64471 - DNA, 15 bp, Homo sapiens
aatatttaggaagcc

SEQ ID NO: 64472 - DNA, 15 bp, Homo sapiens
aaatatttaggaagc

SEQ ID NO: 64473 - DNA, 15 bp, Homo sapiens
taaatatttaggaag

SEQ ID NO: 64474 - DNA, 15 bp, Homo sapiens
ttaaatatttaggaa

SEQ ID NO: 64475 - DNA, 15 bp, Homo sapiens
attaaatatttagga

SEQ ID NO: 64476 - DNA, 15 bp, Homo sapiens
tattaaatatttagg

SEQ ID NO: 64477 - DNA, 15 bp, Homo sapiens
ctattaaatatttag

SEQ ID NO: 64478 - DNA, 15 bp, Homo sapiens
cctattaaatattta

SEQ ID NO: 64479 - DNA, 15 bp, Homo sapiens
acctattaaatattt

SEQ ID NO: 64480 - DNA, 15 bp, Homo sapiens
gacctattaaatatt

SEQ ID NO: 64481 - DNA, 15 bp, Homo sapiens
ggacctattaaatat

SEQ ID NO: 64482 - DNA, 15 bp, Homo sapiens
gggacctattaaata

SEQ ID NO: 64483 - DNA, 15 bp, Homo sapiens
agggacctattaaat

SEQ ID NO: 64484 - DNA, 15 bp, Homo sapiens
aagggacctattaaa

SEQ ID NO: 64485 - DNA, 15 bp, Homo sapiens
aaagggacctattaa

SEQ ID NO: 64486 - DNA, 15 bp, Homo sapiens
aaaagggacctatta

SEQ ID NO: 64487 - DNA, 15 bp, Homo sapiens
gaaaagggacctatt

SEQ ID NO: 64488 - DNA, 15 bp, Homo sapiens
agaaaagggacctat

SEQ ID NO: 64489 - DNA, 15 bp, Homo sapiens
cagaaaagggaccta

SEQ ID NO: 64490 - DNA, 15 bp, Homo sapiens
gcagaaaagggacct

SEQ ID NO: 64491 - DNA, 15 bp, Homo sapiens
ggcagaaaagggacc

SEQ ID NO: 64492 - DNA, 15 bp, Homo sapiens
tggcagaaaagggac

SEQ ID NO: 64493 - DNA, 15 bp, Homo sapiens
ctggcagaaaaggga

SEQ ID NO: 64494 - DNA, 15 bp, Homo sapiens
actggcagaaaaggg

SEQ ID NO: 64495 - DNA, 15 bp, Homo sapiens
gactggcagaaaagg

SEQ ID NO: 64496 - DNA, 15 bp, Homo sapiens
agactggcagaaaag

SEQ ID NO: 64497 - DNA, 15 bp, Homo sapiens
gagactggcagaaaa

SEQ ID NO: 64498 - DNA, 15 bp, Homo sapiens
agagactggcagaaa

SEQ ID NO: 64499 - DNA, 15 bp, Homo sapiens
aagagactggcagaa

SEQ ID NO: 64500 - DNA, 15 bp, Homo sapiens
gaagagactggcaga

SEQ ID NO: 64501 - DNA, 15 bp, Homo sapiens
agaagagactggcag

SEQ ID NO: 64502 - DNA, 15 bp, Homo sapiens
cagaagagactggca

SEQ ID NO: 64503 - DNA, 15 bp, Homo sapiens
acagaagagactggc

SEQ ID NO: 64504 - DNA, 15 bp, Homo sapiens
cacagaagagactgg

SEQ ID NO: 64505 - DNA, 15 bp, Homo sapiens
gcacagaagagactg

SEQ ID NO: 64506 - DNA, 15 bp, Homo sapiens
ggcacagaagagact

SEQ ID NO: 64507 - DNA, 15 bp, Homo sapiens
gggcacagaagagac

SEQ ID NO: 64508 - DNA, 15 bp, Homo sapiens
tgggcacagaagaga

SEQ ID NO: 64509 - DNA, 15 bp, Homo sapiens
atgggcacagaagag

SEQ ID NO: 64510 - DNA, 15 bp, Homo sapiens
gatgggcacagaaga

SEQ ID NO: 64511 - DNA, 15 bp, Homo sapiens
ggatgggcacagaag

SEQ ID NO: 64512 - DNA, 15 bp, Homo sapiens
gggatgggcacagaa

SEQ ID NO: 64513 - DNA, 15 bp, Homo sapiens
ggggatgggcacaga

SEQ ID NO: 64514 - DNA, 15 bp, Homo sapiens
aggggatgggcacag

SEQ ID NO: 64515 - DNA, 15 bp, Homo sapiens
caggggatgggcaca

SEQ ID NO: 64516 - DNA, 15 bp, Homo sapiens
tcaggggatgggcac

SEQ ID NO: 64517 - DNA, 15 bp, Homo sapiens
atcaggggatgggca

SEQ ID NO: 64518 - DNA, 15 bp, Homo sapiens
aatcaggggatgggc

SEQ ID NO: 64519 - DNA, 15 bp, Homo sapiens
caatcaggggatggg

SEQ ID NO: 64520 - DNA, 15 bp, Homo sapiens
gcaatcaggggatgg

SEQ ID NO: 64521 - DNA, 15 bp, Homo sapiens
ggcaatcaggggatg

SEQ ID NO: 64522 - DNA, 15 bp, Homo sapiens
gggcaatcaggggat

SEQ ID NO: 64523 - DNA, 15 bp, Homo sapiens
agggcaatcagggga

SEQ ID NO: 64524 - DNA, 15 bp, Homo sapiens
aagggcaatcagggg

SEQ ID NO: 64525 - DNA, 15 bp, Homo sapiens
caagggcaatcaggg

SEQ ID NO: 64526 - DNA, 15 bp, Homo sapiens
ccaagggcaatcagg

SEQ ID NO: 64527 - DNA, 15 bp, Homo sapiens
accaagggcaatcag

SEQ ID NO: 64528 - DNA, 15 bp, Homo sapiens
taccaagggcaatca

SEQ ID NO: 64529 - DNA, 15 bp, Homo sapiens
ttaccaagggcaatc

SEQ ID NO: 64530 - DNA, 15 bp, Homo sapiens
tttaccaagggcaat

SEQ ID NO: 64531 - DNA, 15 bp, Homo sapiens
ttttaccaagggcaa

SEQ ID NO: 64532 - DNA, 15 bp, Homo sapiens
cttttaccaagggca

SEQ ID NO: 64533 - DNA, 15 bp, Homo sapiens
acttttaccaagggc

SEQ ID NO: 64534 - DNA, 15 bp, Homo sapiens
tacttttaccaaggg

SEQ ID NO: 64535 - DNA, 15 bp, Homo sapiens
atacttttaccaagg

SEQ ID NO: 64536 - DNA, 15 bp, Homo sapiens
catacttttaccaag

SEQ ID NO: 64537 - DNA, 15 bp, Homo sapiens
tcatacttttaccaa

SEQ ID NO: 64538 - DNA, 15 bp, Homo sapiens
atcatacttttacca

SEQ ID NO: 64539 - DNA, 15 bp, Homo sapiens
catcatacttttacc

SEQ ID NO: 64540 - DNA, 15 bp, Homo sapiens
gcatcatacttttac

SEQ ID NO: 64541 - DNA, 15 bp, Homo sapiens
ggcatcatactttta

SEQ ID NO: 64542 - DNA, 15 bp, Homo sapiens
gggcatcatactttt

SEQ ID NO: 64543 - DNA, 15 bp, Homo sapiens
ggggcatcatacttt

SEQ ID NO: 64544 - DNA, 15 bp, Homo sapiens
aggggcatcatactt

SEQ ID NO: 64545 - DNA, 15 bp, Homo sapiens
aaggggcatcatact

SEQ ID NO: 64546 - DNA, 15 bp, Homo sapiens
taaggggcatcatac

SEQ ID NO: 64547 - DNA, 15 bp, Homo sapiens
ctaaggggcatcata

SEQ ID NO: 64548 - DNA, 15 bp, Homo sapiens
actaaggggcatcat

SEQ ID NO: 64549 - DNA, 15 bp, Homo sapiens
cactaaggggcatca

SEQ ID NO: 64550 - DNA, 15 bp, Homo sapiens
acactaaggggcatc

SEQ ID NO: 64551 - DNA, 15 bp, Homo sapiens
tacactaaggggcat

SEQ ID NO: 64552 - DNA, 15 bp, Homo sapiens
ctacactaaggggca

SEQ ID NO: 64553 - DNA, 15 bp, Homo sapiens
gctacactaaggggc

SEQ ID NO: 64554 - DNA, 15 bp, Homo sapiens
tgctacactaagggg

SEQ ID NO: 64555 - DNA, 15 bp, Homo sapiens
gtgctacactaaggg

SEQ ID NO: 64556 - DNA, 15 bp, Homo sapiens
cgtgctacactaagg

SEQ ID NO: 64557 - DNA, 15 bp, Homo sapiens
gcgtgctacactaag

SEQ ID NO: 64558 - DNA, 15 bp, Homo sapiens
agcgtgctacactaa

SEQ ID NO: 64559 - DNA, 15 bp, Homo sapiens
aagcgtgctacacta

SEQ ID NO: 64560 - DNA, 15 bp, Homo sapiens
caagcgtgctacact

SEQ ID NO: 64561 - DNA, 15 bp, Homo sapiens
gcaagcgtgctacac

SEQ ID NO: 64562 - DNA, 15 bp, Homo sapiens
ggcaagcgtgctaca

SEQ ID NO: 64563 - DNA, 15 bp, Homo sapiens
aggcaagcgtgctac

SEQ ID NO: 64564 - DNA, 15 bp, Homo sapiens
caggcaagcgtgcta

SEQ ID NO: 64565 - DNA, 15 bp, Homo sapiens
gcaggcaagcgtgct

SEQ ID NO: 64566 - DNA, 15 bp, Homo sapiens
agcaggcaagcgtgc

SEQ ID NO: 64567 - DNA, 15 bp, Homo sapiens
cagcaggcaagcgtg

SEQ ID NO: 64568 - DNA, 15 bp, Homo sapiens
acagcaggcaagcgt

SEQ ID NO: 64569 - DNA, 15 bp, Homo sapiens
aacagcaggcaagcg

SEQ ID NO: 64570 - DNA, 15 bp, Homo sapiens
gaacagcaggcaagc

SEQ ID NO: 64571 - DNA, 15 bp, Homo sapiens
ggaacagcaggcaag

SEQ ID NO: 64572 - DNA, 15 bp, Homo sapiens
aggaacagcaggcaa

SEQ ID NO: 64573 - DNA, 15 bp, Homo sapiens
taggaacagcaggca

SEQ ID NO: 64574 - DNA, 15 bp, Homo sapiens
ttaggaacagcaggc

SEQ ID NO: 64575 - DNA, 15 bp, Homo sapiens
attaggaacagcagg

SEQ ID NO: 64576 - DNA, 15 bp, Homo sapiens
gattaggaacagcag

SEQ ID NO: 64577 - DNA, 15 bp, Homo sapiens
tgattaggaacagca

SEQ ID NO: 64578 - DNA, 15 bp, Homo sapiens
atgattaggaacagc

SEQ ID NO: 64579 - DNA, 15 bp, Homo sapiens
gatgattaggaacag

SEQ ID NO: 64580 - DNA, 15 bp, Homo sapiens
agatgattaggaaca

SEQ ID NO: 64581 - DNA, 15 bp, Homo sapiens
aagatgattaggaac

SEQ ID NO: 64582 - DNA, 15 bp, Homo sapiens
gaagatgattaggaa

SEQ ID NO: 64583 - DNA, 15 bp, Homo sapiens
agaagatgattagga

SEQ ID NO: 64584 - DNA, 15 bp, Homo sapiens
gagaagatgattagg

SEQ ID NO: 64585 - DNA, 15 bp, Homo sapiens
ggagaagatgattag

SEQ ID NO: 64586 - DNA, 15 bp, Homo sapiens
aggagaagatgatta

SEQ ID NO: 64587 - DNA, 15 bp, Homo sapiens
taggagaagatgatt

SEQ ID NO: 64588 - DNA, 15 bp, Homo sapiens
gtaggagaagatgat

SEQ ID NO: 64589 - DNA, 15 bp, Homo sapiens
ggtaggagaagatga

SEQ ID NO: 64590 - DNA, 15 bp, Homo sapiens
aggtaggagaagatg

SEQ ID NO: 64591 - DNA, 15 bp, Homo sapiens
gaggtaggagaagat

SEQ ID NO: 64592 - DNA, 15 bp, Homo sapiens
ggaggtaggagaaga

SEQ ID NO: 64593 - DNA, 15 bp, Homo sapiens
aggaggtaggagaag

SEQ ID NO: 64594 - DNA, 15 bp, Homo sapiens
gaggaggtaggagaa

SEQ ID NO: 64595 - DNA, 15 bp, Homo sapiens
agaggaggtaggaga

SEQ ID NO: 64596 - DNA, 15 bp, Homo sapiens
aagaggaggtaggag

SEQ ID NO: 64597 - DNA, 15 bp, Homo sapiens
aaagaggaggtagga

SEQ ID NO: 64598 - DNA, 15 bp, Homo sapiens
taaagaggaggtagg

SEQ ID NO: 64599 - DNA, 15 bp, Homo sapiens
gtaaagaggaggtag

SEQ ID NO: 64600 - DNA, 15 bp, Homo sapiens
tgtaaagaggaggta

SEQ ID NO: 64601 - DNA, 15 bp, Homo sapiens
gtgtaaagaggaggt

SEQ ID NO: 64602 - DNA, 15 bp, Homo sapiens
ggtgtaaagaggagg

SEQ ID NO: 64603 - DNA, 15 bp, Homo sapiens
aggtgtaaagaggag

SEQ ID NO: 64604 - DNA, 15 bp, Homo sapiens
taggtgtaaagagga

SEQ ID NO: 64605 - DNA, 15 bp, Homo sapiens
ctaggtgtaaagagg

SEQ ID NO: 64606 - DNA, 15 bp, Homo sapiens
gctaggtgtaaagag

SEQ ID NO: 64607 - DNA, 15 bp, Homo sapiens
agctaggtgtaaaga

SEQ ID NO: 64608 - DNA, 15 bp, Homo sapiens
gagctaggtgtaaag

SEQ ID NO: 64609 - DNA, 15 bp, Homo sapiens
ggagctaggtgtaaa

SEQ ID NO: 64610 - DNA, 15 bp, Homo sapiens
aggagctaggtgtaa

SEQ ID NO: 64611 - DNA, 15 bp, Homo sapiens
caggagctaggtgta

SEQ ID NO: 64612 - DNA, 15 bp, Homo sapiens
acaggagctaggtgt

SEQ ID NO: 64613 - DNA, 15 bp, Homo sapiens
aacaggagctaggtg

SEQ ID NO: 64614 - DNA, 15 bp, Homo sapiens
aaacaggagctaggt

SEQ ID NO: 64615 - DNA, 15 bp, Homo sapiens
gaaacaggagctagg

SEQ ID NO: 64616 - DNA, 15 bp, Homo sapiens
tgaaacaggagctag

SEQ ID NO: 64617 - DNA, 15 bp, Homo sapiens
ctgaaacaggagcta

SEQ ID NO: 64618 - DNA, 15 bp, Homo sapiens
actgaaacaggagct

SEQ ID NO: 64619 - DNA, 15 bp, Homo sapiens
gactgaaacaggagc

SEQ ID NO: 64620 - DNA, 15 bp, Homo sapiens
tgactgaaacaggag

SEQ ID NO: 64621 - DNA, 15 bp, Homo sapiens
gtgactgaaacagga

SEQ ID NO: 64622 - DNA, 15 bp, Homo sapiens
ggtgactgaaacagg

SEQ ID NO: 64623 - DNA, 15 bp, Homo sapiens
aggtgactgaaacag

SEQ ID NO: 64624 - DNA, 15 bp, Homo sapiens
taggtgactgaaaca

SEQ ID NO: 64625 - DNA, 15 bp, Homo sapiens
ctaggtgactgaaac

SEQ ID NO: 64626 - DNA, 15 bp, Homo sapiens
tctaggtgactgaaa

SEQ ID NO: 64627 - DNA, 15 bp, Homo sapiens
ttctaggtgactgaa

SEQ ID NO: 64628 - DNA, 15 bp, Homo sapiens
tttctaggtgactga

SEQ ID NO: 64629 - DNA, 15 bp, Homo sapiens
atttctaggtgactg

SEQ ID NO: 64630 - DNA, 15 bp, Homo sapiens
catttctaggtgact

SEQ ID NO: 64631 - DNA, 15 bp, Homo sapiens
gcatttctaggtgac

SEQ ID NO: 64632 - DNA, 15 bp, Homo sapiens
agcatttctaggtga

SEQ ID NO: 64633 - DNA, 15 bp, Homo sapiens
gagcatttctaggtg

SEQ ID NO: 64634 - DNA, 15 bp, Homo sapiens
tgagcatttctaggt

SEQ ID NO: 64635 - DNA, 15 bp, Homo sapiens
gtgagcatttctagg

SEQ ID NO: 64636 - DNA, 15 bp, Homo sapiens
tgtgagcatttctag

SEQ ID NO: 64637 - DNA, 15 bp, Homo sapiens
ctgtgagcatttcta

SEQ ID NO: 64638 - DNA, 15 bp, Homo sapiens
actgtgagcatttct

SEQ ID NO: 64639 - DNA, 15 bp, Homo sapiens
gactgtgagcatttc

SEQ ID NO: 64640 - DNA, 15 bp, Homo sapiens
cgactgtgagcattt

SEQ ID NO: 64641 - DNA, 15 bp, Homo sapiens
gcgactgtgagcatt

SEQ ID NO: 64642 - DNA, 15 bp, Homo sapiens
agcgactgtgagcat

SEQ ID NO: 64643 - DNA, 15 bp, Homo sapiens
cagcgactgtgagca

SEQ ID NO: 64644 - DNA, 15 bp, Homo sapiens
ccagcgactgtgagc

SEQ ID NO: 64645 - DNA, 15 bp, Homo sapiens
tccagcgactgtgag

SEQ ID NO: 64646 - DNA, 15 bp, Homo sapiens
ttccagcgactgtga

SEQ ID NO: 64647 - DNA, 15 bp, Homo sapiens
attccagcgactgtg

SEQ ID NO: 64648 - DNA, 15 bp, Homo sapiens
tattccagcgactgt

SEQ ID NO: 64649 - DNA, 15 bp, Homo sapiens
atattccagcgactg

SEQ ID NO: 64650 - DNA, 15 bp, Homo sapiens
catattccagcgact

SEQ ID NO: 64651 - DNA, 15 bp, Homo sapiens
acatattccagcgac

SEQ ID NO: 64652 - DNA, 15 bp, Homo sapiens
gacatattccagcga

SEQ ID NO: 64653 - DNA, 15 bp, Homo sapiens
tgacatattccagcg

SEQ ID NO: 64654 - DNA, 15 bp, Homo sapiens
atgacatattccagc

SEQ ID NO: 64655 - DNA, 15 bp, Homo sapiens
catgacatattccag

SEQ ID NO: 64656 - DNA, 15 bp, Homo sapiens
acatgacatattcca

SEQ ID NO: 64657 - DNA, 15 bp, Homo sapiens
aacatgacatattcc

SEQ ID NO: 64658 - DNA, 15 bp, Homo sapiens
gaacatgacatattc

SEQ ID NO: 64659 - DNA, 15 bp, Homo sapiens
agaacatgacatatt

SEQ ID NO: 64660 - DNA, 15 bp, Homo sapiens
aagaacatgacatat

SEQ ID NO: 64661 - DNA, 15 bp, Homo sapiens
gaagaacatgacata

SEQ ID NO: 64662 - DNA, 15 bp, Homo sapiens
ggaagaacatgacat

SEQ ID NO: 64663 - DNA, 15 bp, Homo sapiens
tggaagaacatgaca

SEQ ID NO: 64664 - DNA, 15 bp, Homo sapiens
gtggaagaacatgac

SEQ ID NO: 64665 - DNA, 15 bp, Homo sapiens
tgtggaagaacatga

SEQ ID NO: 64666 - DNA, 15 bp, Homo sapiens
gtgtggaagaacatg

SEQ ID NO: 64667 - DNA, 15 bp, Homo sapiens
ggtgtggaagaacat

SEQ ID NO: 64668 - DNA, 15 bp, Homo sapiens
aggtgtggaagaaca

SEQ ID NO: 64669 - DNA, 15 bp, Homo sapiens
gaggtgtggaagaac

SEQ ID NO: 64670 - DNA, 15 bp, Homo sapiens
ggaggtgtggaagaa

SEQ ID NO: 64671 - DNA, 15 bp, Homo sapiens
tggaggtgtggaaga

SEQ ID NO: 64672 - DNA, 15 bp, Homo sapiens
atggaggtgtggaag

SEQ ID NO: 64673 - DNA, 15 bp, Homo sapiens
catggaggtgtggaa

SEQ ID NO: 64674 - DNA, 15 bp, Homo sapiens
gcatggaggtgtgga

SEQ ID NO: 64675 - DNA, 15 bp, Homo sapiens
ggcatggaggtgtgg

SEQ ID NO: 64676 - DNA, 15 bp, Homo sapiens
aggcatggaggtgtg

SEQ ID NO: 64677 - DNA, 15 bp, Homo sapiens
aaggcatggaggtgt

SEQ ID NO: 64678 - DNA, 15 bp, Homo sapiens
aaaggcatggaggtg

SEQ ID NO: 64679 - DNA, 15 bp, Homo sapiens
caaaggcatggaggt

SEQ ID NO: 64680 - DNA, 15 bp, Homo sapiens
acaaaggcatggagg

SEQ ID NO: 64681 - DNA, 15 bp, Homo sapiens
tacaaaggcatggag

SEQ ID NO: 64682 - DNA, 15 bp, Homo sapiens
ctacaaaggcatgga

SEQ ID NO: 64683 - DNA, 15 bp, Homo sapiens
cctacaaaggcatgg

SEQ ID NO: 64684 - DNA, 15 bp, Homo sapiens
acctacaaaggcatg

SEQ ID NO: 64685 - DNA, 15 bp, Homo sapiens
tacctacaaaggcat

SEQ ID NO: 64686 - DNA, 15 bp, Homo sapiens
gtacctacaaaggca

SEQ ID NO: 64687 - DNA, 15 bp, Homo sapiens
agtacctacaaaggc

SEQ ID NO: 64688 - DNA, 15 bp, Homo sapiens
cagtacctacaaagg

SEQ ID NO: 64689 - DNA, 15 bp, Homo sapiens
acagtacctacaaag

SEQ ID NO: 64690 - DNA, 15 bp, Homo sapiens
aacagtacctacaaa

SEQ ID NO: 64691 - DNA, 15 bp, Homo sapiens
aaacagtacctacaa

SEQ ID NO: 64692 - DNA, 15 bp, Homo sapiens
caaacagtacctaca

SEQ ID NO: 64693 - DNA, 15 bp, Homo sapiens
gcaaacagtacctac

SEQ ID NO: 64694 - DNA, 15 bp, Homo sapiens
agcaaacagtaccta

SEQ ID NO: 64695 - DNA, 15 bp, Homo sapiens
gagcaaacagtacct

SEQ ID NO: 64696 - DNA, 15 bp, Homo sapiens
agagcaaacagtacc

SEQ ID NO: 64697 - DNA, 15 bp, Homo sapiens
gagagcaaacagtac

SEQ ID NO: 64698 - DNA, 15 bp, Homo sapiens
tgagagcaaacagta

SEQ ID NO: 64699 - DNA, 15 bp, Homo sapiens
gtgagagcaaacagt

SEQ ID NO: 64700 - DNA, 15 bp, Homo sapiens
tgtgagagcaaacag

SEQ ID NO: 64701 - DNA, 15 bp, Homo sapiens
ctgtgagagcaaaca

SEQ ID NO: 64702 - DNA, 15 bp, Homo sapiens
cctgtgagagcaaac

SEQ ID NO: 64703 - DNA, 15 bp, Homo sapiens
tcctgtgagagcaaa

SEQ ID NO: 64704 - DNA, 15 bp, Homo sapiens
ctcctgtgagagcaa

SEQ ID NO: 64705 - DNA, 15 bp, Homo sapiens
tctcctgtgagagca

SEQ ID NO: 64706 - DNA, 15 bp, Homo sapiens
ttctcctgtgagagc

SEQ ID NO: 64707 - DNA, 15 bp, Homo sapiens
gttctcctgtgagag

SEQ ID NO: 64708 - DNA, 15 bp, Homo sapiens
agttctcctgtgaga

SEQ ID NO: 64709 - DNA, 15 bp, Homo sapiens
aagttctcctgtgag

SEQ ID NO: 64710 - DNA, 15 bp, Homo sapiens
aaagttctcctgtga

SEQ ID NO: 64711 - DNA, 15 bp, Homo sapiens
gaaagttctcctgtg

SEQ ID NO: 64712 - DNA, 15 bp, Homo sapiens
agaaagttctcctgt

SEQ ID NO: 64713 - DNA, 15 bp, Homo sapiens
gagaaagttctcctg

SEQ ID NO: 64714 - DNA, 15 bp, Homo sapiens
agagaaagttctcct

SEQ ID NO: 64715 - DNA, 15 bp, Homo sapiens
gagagaaagttctcc

SEQ ID NO: 64716 - DNA, 15 bp, Homo sapiens
agagagaaagttctc

SEQ ID NO: 64717 - DNA, 15 bp, Homo sapiens
tagagagaaagttct

SEQ ID NO: 64718 - DNA, 15 bp, Homo sapiens
ttagagagaaagttc

SEQ ID NO: 64719 - DNA, 15 bp, Homo sapiens
gttagagagaaagtt

SEQ ID NO: 64720 - DNA, 15 bp, Homo sapiens
agttagagagaaagt

SEQ ID NO: 64721 - DNA, 15 bp, Homo sapiens
aagttagagagaaag

SEQ ID NO: 64722 - DNA, 15 bp, Homo sapiens
caagttagagagaaa

SEQ ID NO: 64723 - DNA, 15 bp, Homo sapiens
gcaagttagagagaa

SEQ ID NO: 64724 - DNA, 15 bp, Homo sapiens
ggcaagttagagaga

SEQ ID NO: 64725 - DNA, 15 bp, Homo sapiens
aggcaagttagagag

SEQ ID NO: 64726 - DNA, 15 bp, Homo sapiens
taggcaagttagaga

SEQ ID NO: 64727 - DNA, 15 bp, Homo sapiens
ataggcaagttagag

SEQ ID NO: 64728 - DNA, 15 bp, Homo sapiens
gataggcaagttaga

SEQ ID NO: 64729 - DNA, 15 bp, Homo sapiens
agataggcaagttag

SEQ ID NO: 64730 - DNA, 15 bp, Homo sapiens
aagataggcaagtta

SEQ ID NO: 64731 - DNA, 15 bp, Homo sapiens
gaagataggcaagtt

SEQ ID NO: 64732 - DNA, 15 bp, Homo sapiens
agaagataggcaagt

SEQ ID NO: 64733 - DNA, 15 bp, Homo sapiens
gagaagataggcaag

SEQ ID NO: 64734 - DNA, 15 bp, Homo sapiens
tgagaagataggcaa

SEQ ID NO: 64735 - DNA, 15 bp, Homo sapiens
ttgagaagataggca

SEQ ID NO: 64736 - DNA, 15 bp, Homo sapiens
gttgagaagataggc

SEQ ID NO: 64737 - DNA, 15 bp, Homo sapiens
agttgagaagatagg

SEQ ID NO: 64738 - DNA, 15 bp, Homo sapiens
gagttgagaagatag

SEQ ID NO: 64739 - DNA, 15 bp, Homo sapiens
ggagttgagaagata

SEQ ID NO: 64740 - DNA, 15 bp, Homo sapiens
aggagttgagaagat

SEQ ID NO: 64741 - DNA, 15 bp, Homo sapiens
gaggagttgagaaga

SEQ ID NO: 64742 - DNA, 15 bp, Homo sapiens
ggaggagttgagaag

SEQ ID NO: 64743 - DNA, 15 bp, Homo sapiens
aggaggagttgagaa

SEQ ID NO: 64744 - DNA, 15 bp, Homo sapiens
aaggaggagttgaga

SEQ ID NO: 64745 - DNA, 15 bp, Homo sapiens
aaaggaggagttgag

SEQ ID NO: 64746 - DNA, 15 bp, Homo sapiens
gaaaggaggagttga

SEQ ID NO: 64747 - DNA, 15 bp, Homo sapiens
agaaaggaggagttg

SEQ ID NO: 64748 - DNA, 15 bp, Homo sapiens
gagaaaggaggagtt

SEQ ID NO: 64749 - DNA, 15 bp, Homo sapiens
agagaaaggaggagt

SEQ ID NO: 64750 - DNA, 15 bp, Homo sapiens
gagagaaaggaggag

SEQ ID NO: 64751 - DNA, 15 bp, Homo sapiens
ggagagaaaggagga

SEQ ID NO: 64752 - DNA, 15 bp, Homo sapiens
tggagagaaaggagg

SEQ ID NO: 64753 - DNA, 15 bp, Homo sapiens
ttggagagaaaggag

SEQ ID NO: 64754 - DNA, 15 bp, Homo sapiens
cttggagagaaagga

SEQ ID NO: 64755 - DNA, 15 bp, Homo sapiens
tcttggagagaaagg

SEQ ID NO: 64756 - DNA, 15 bp, Homo sapiens
atcttggagagaaag

SEQ ID NO: 64757 - DNA, 15 bp, Homo sapiens
gatcttggagagaaa

SEQ ID NO: 64758 - DNA, 15 bp, Homo sapiens
agatcttggagagaa

SEQ ID NO: 64759 - DNA, 15 bp, Homo sapiens
tagatcttggagaga

SEQ ID NO: 64760 - DNA, 15 bp, Homo sapiens
ctagatcttggagag

SEQ ID NO: 64761 - DNA, 15 bp, Homo sapiens
actagatcttggaga

SEQ ID NO: 64762 - DNA, 15 bp, Homo sapiens
aactagatcttggag

SEQ ID NO: 64763 - DNA, 15 bp, Homo sapiens
gaactagatcttgga

SEQ ID NO: 64764 - DNA, 15 bp, Homo sapiens
ggaactagatcttgg

SEQ ID NO: 64765 - DNA, 15 bp, Homo sapiens
cggaactagatcttg

SEQ ID NO: 64766 - DNA, 15 bp, Homo sapiens
ccggaactagatctt

SEQ ID NO: 64767 - DNA, 15 bp, Homo sapiens
tccggaactagatct

SEQ ID NO: 64768 - DNA, 15 bp, Homo sapiens
atccggaactagatc

SEQ ID NO: 64769 - DNA, 15 bp, Homo sapiens
gatccggaactagat

SEQ ID NO: 64770 - DNA, 15 bp, Homo sapiens
ggatccggaactaga

SEQ ID NO: 64771 - DNA, 15 bp, Homo sapiens
gggatccggaactag

SEQ ID NO: 64772 - DNA, 15 bp, Homo sapiens
ggggatccggaacta

SEQ ID NO: 64773 - DNA, 15 bp, Homo sapiens
aggggatccggaact

SEQ ID NO: 64774 - DNA, 15 bp, Homo sapiens
gaggggatccggaac

SEQ ID NO: 64775 - DNA, 15 bp, Homo sapiens
ggaggggatccggaa

SEQ ID NO: 64776 - DNA, 15 bp, Homo sapiens
gggaggggatccgga

SEQ ID NO: 64777 - DNA, 15 bp, Homo sapiens
ggggaggggatccgg

SEQ ID NO: 64778 - DNA, 15 bp, Homo sapiens
aggggaggggatccg

SEQ ID NO: 64779 - DNA, 15 bp, Homo sapiens
caggggaggggatcc

SEQ ID NO: 64780 - DNA, 15 bp, Homo sapiens
tcaggggaggggatc

SEQ ID NO: 64781 - DNA, 15 bp, Homo sapiens
ctcaggggaggggat

SEQ ID NO: 64782 - DNA, 15 bp, Homo sapiens
gctcaggggagggga

SEQ ID NO: 64783 - DNA, 15 bp, Homo sapiens
tgctcaggggagggg

SEQ ID NO: 64784 - DNA, 15 bp, Homo sapiens
atgctcaggggaggg

SEQ ID NO: 64785 - DNA, 15 bp, Homo sapiens
gatgctcaggggagg

SEQ ID NO: 64786 - DNA, 15 bp, Homo sapiens
ggatgctcaggggag

SEQ ID NO: 64787 - DNA, 15 bp, Homo sapiens
gggatgctcagggga

SEQ ID NO: 64788 - DNA, 15 bp, Homo sapiens
agggatgctcagggg

SEQ ID NO: 64789 - DNA, 15 bp, Homo sapiens
gagggatgctcaggg

SEQ ID NO: 64790 - DNA, 15 bp, Homo sapiens
ggagggatgctcagg

SEQ ID NO: 64791 - DNA, 15 bp, Homo sapiens
aggagggatgctcag

SEQ ID NO: 64792 - DNA, 15 bp, Homo sapiens
aaggagggatgctca

SEQ ID NO: 64793 - DNA, 15 bp, Homo sapiens
caaggagggatgctc

SEQ ID NO: 64794 - DNA, 15 bp, Homo sapiens
ccaaggagggatgct

SEQ ID NO: 64795 - DNA, 15 bp, Homo sapiens
accaaggagggatgc

SEQ ID NO: 64796 - DNA, 15 bp, Homo sapiens
aaccaaggagggatg

SEQ ID NO: 64797 - DNA, 15 bp, Homo sapiens
gaaccaaggagggat

SEQ ID NO: 64798 - DNA, 15 bp, Homo sapiens
agaaccaaggaggga

SEQ ID NO: 64799 - DNA, 15 bp, Homo sapiens
gagaaccaaggaggg

SEQ ID NO: 64800 - DNA, 15 bp, Homo sapiens
tgagaaccaaggagg

SEQ ID NO: 64801 - DNA, 15 bp, Homo sapiens
ctgagaaccaaggag

SEQ ID NO: 64802 - DNA, 15 bp, Homo sapiens
cctgagaaccaagga

SEQ ID NO: 64803 - DNA, 15 bp, Homo sapiens
acctgagaaccaagg

SEQ ID NO: 64804 - DNA, 15 bp, Homo sapiens
tacctgagaaccaag

SEQ ID NO: 64805 - DNA, 15 bp, Homo sapiens
ctacctgagaaccaa

SEQ ID NO: 64806 - DNA, 15 bp, Homo sapiens
actacctgagaacca

SEQ ID NO: 64807 - DNA, 15 bp, Homo sapiens
gactacctgagaacc

SEQ ID NO: 64808 - DNA, 15 bp, Homo sapiens
tgactacctgagaac

SEQ ID NO: 64809 - DNA, 15 bp, Homo sapiens
ctgactacctgagaa

SEQ ID NO: 64810 - DNA, 15 bp, Homo sapiens
actgactacctgaga

SEQ ID NO: 64811 - DNA, 15 bp, Homo sapiens
gactgactacctgag

SEQ ID NO: 64812 - DNA, 15 bp, Homo sapiens
tgactgactacctga

SEQ ID NO: 64813 - DNA, 15 bp, Homo sapiens
gtgactgactacctg

SEQ ID NO: 64814 - DNA, 15 bp, Homo sapiens
agtgactgactacct

SEQ ID NO: 64815 - DNA, 15 bp, Homo sapiens
gagtgactgactacc

SEQ ID NO: 64816 - DNA, 15 bp, Homo sapiens
agagtgactgactac

SEQ ID NO: 64817 - DNA, 15 bp, Homo sapiens
gagagtgactgacta

SEQ ID NO: 64818 - DNA, 15 bp, Homo sapiens
agagagtgactgact

SEQ ID NO: 64819 - DNA, 15 bp, Homo sapiens
cagagagtgactgac

SEQ ID NO: 64820 - DNA, 15 bp, Homo sapiens
gcagagagtgactga

SEQ ID NO: 64821 - DNA, 15 bp, Homo sapiens
ggcagagagtgactg

SEQ ID NO: 64822 - DNA, 15 bp, Homo sapiens
gggcagagagtgact

SEQ ID NO: 64823 - DNA, 15 bp, Homo sapiens
agggcagagagtgac

SEQ ID NO: 64824 - DNA, 15 bp, Homo sapiens
cagggcagagagtga

SEQ ID NO: 64825 - DNA, 15 bp, Homo sapiens
tcagggcagagagtg

SEQ ID NO: 64826 - DNA, 15 bp, Homo sapiens
ttcagggcagagagt

SEQ ID NO: 64827 - DNA, 15 bp, Homo sapiens
gttcagggcagagag

SEQ ID NO: 64828 - DNA, 15 bp, Homo sapiens
agttcagggcagaga

SEQ ID NO: 64829 - DNA, 15 bp, Homo sapiens
aagttcagggcagag

SEQ ID NO: 64830 - DNA, 15 bp, Homo sapiens
gaagttcagggcaga

SEQ ID NO: 64831 - DNA, 15 bp, Homo sapiens
ggaagttcagggcag

SEQ ID NO: 64832 - DNA, 15 bp, Homo sapiens
tggaagttcagggca

SEQ ID NO: 64833 - DNA, 15 bp, Homo sapiens
atggaagttcagggc

SEQ ID NO: 64834 - DNA, 15 bp, Homo sapiens
catggaagttcaggg

SEQ ID NO: 64835 - DNA, 15 bp, Homo sapiens
ccatggaagttcagg

SEQ ID NO: 64836 - DNA, 15 bp, Homo sapiens
gccatggaagttcag

SEQ ID NO: 64837 - DNA, 15 bp, Homo sapiens
tgccatggaagttca

SEQ ID NO: 64838 - DNA, 15 bp, Homo sapiens
gtgccatggaagttc

SEQ ID NO: 64839 - DNA, 15 bp, Homo sapiens
cgtgccatggaagtt

SEQ ID NO: 64840 - DNA, 15 bp, Homo sapiens
acgtgccatggaagt

SEQ ID NO: 64841 - DNA, 15 bp, Homo sapiens
cacgtgccatggaag

SEQ ID NO: 64842 - DNA, 15 bp, Homo sapiens
tcacgtgccatggaa

SEQ ID NO: 64843 - DNA, 15 bp, Homo sapiens
ttcacgtgccatgga

SEQ ID NO: 64844 - DNA, 15 bp, Homo sapiens
tttcacgtgccatgg

SEQ ID NO: 64845 - DNA, 15 bp, Homo sapiens
ctttcacgtgccatg

SEQ ID NO: 64846 - DNA, 15 bp, Homo sapiens
tctttcacgtgccat

SEQ ID NO: 64847 - DNA, 15 bp, Homo sapiens
ttctttcacgtgcca

SEQ ID NO: 64848 - DNA, 15 bp, Homo sapiens
tttctttcacgtgcc

SEQ ID NO: 64849 - DNA, 15 bp, Homo sapiens
ttttctttcacgtgc

SEQ ID NO: 64850 - DNA, 15 bp, Homo sapiens
attttctttcacgtg

SEQ ID NO: 64851 - DNA, 15 bp, Homo sapiens
gattttctttcacgt

SEQ ID NO: 64852 - DNA, 15 bp, Homo sapiens
agattttctttcacg

SEQ ID NO: 64853 - DNA, 15 bp, Homo sapiens
aagattttctttcac

SEQ ID NO: 64854 - DNA, 15 bp, Homo sapiens
aaagattttctttca

SEQ ID NO: 64855 - DNA, 15 bp, Homo sapiens
aaaagattttctttc

SEQ ID NO: 64856 - DNA, 15 bp, Homo sapiens
aaaaagattttcttt

SEQ ID NO: 64857 - DNA, 15 bp, Homo sapiens
taaaaagattttctt

SEQ ID NO: 64858 - DNA, 15 bp, Homo sapiens
ataaaaagattttct

SEQ ID NO: 64859 - DNA, 15 bp, Homo sapiens
aataaaaagattttc

SEQ ID NO: 64860 - DNA, 15 bp, Homo sapiens
aaataaaaagatttt

SEQ ID NO: 64861 - DNA, 15 bp, Homo sapiens
aaaataaaaagattt

SEQ ID NO: 64862 - DNA, 15 bp, Homo sapiens
taaaataaaaagatt

SEQ ID NO: 64863 - DNA, 15 bp, Homo sapiens
ttaaaataaaaagat

SEQ ID NO: 64864 - DNA, 15 bp, Homo sapiens
tttaaaataaaaaga

SEQ ID NO: 64865 - DNA, 15 bp, Homo sapiens
ttttaaaataaaaag

SEQ ID NO: 64866 - DNA, 15 bp, Homo sapiens
gttttaaaataaaaa

SEQ ID NO: 64867 - DNA, 15 bp, Homo sapiens
tgttttaaaataaaa

SEQ ID NO: 64868 - DNA, 15 bp, Homo sapiens
ttgttttaaaataaa

SEQ ID NO: 64869 - DNA, 15 bp, Homo sapiens
attgttttaaaataa

SEQ ID NO: 64870 - DNA, 15 bp, Homo sapiens
aattgttttaaaata

SEQ ID NO: 64871 - DNA, 15 bp, Homo sapiens
taattgttttaaaat

SEQ ID NO: 64872 - DNA, 15 bp, Homo sapiens
gtaattgttttaaaa

SEQ ID NO: 64873 - DNA, 15 bp, Homo sapiens
tgtaattgttttaaa

SEQ ID NO: 64874 - DNA, 15 bp, Homo sapiens
ctgtaattgttttaa

SEQ ID NO: 64875 - DNA, 15 bp, Homo sapiens
tctgtaattgtttta

SEQ ID NO: 64876 - DNA, 15 bp, Homo sapiens
gtctgtaattgtttt

SEQ ID NO: 64877 - DNA, 15 bp, Homo sapiens
agtctgtaattgttt

SEQ ID NO: 64878 - DNA, 15 bp, Homo sapiens
gagtctgtaattgtt

SEQ ID NO: 64879 - DNA, 15 bp, Homo sapiens
tgagtctgtaattgt

SEQ ID NO: 64880 - DNA, 15 bp, Homo sapiens
gtgagtctgtaattg

SEQ ID NO: 64881 - DNA, 15 bp, Homo sapiens
tgtgagtctgtaatt

SEQ ID NO: 64882 - DNA, 15 bp, Homo sapiens
ttgtgagtctgtaat

SEQ ID NO: 64883 - DNA, 15 bp, Homo sapiens
cttgtgagtctgtaa

SEQ ID NO: 64884 - DNA, 15 bp, Homo sapiens
tcttgtgagtctgta

SEQ ID NO: 64885 - DNA, 15 bp, Homo sapiens
ttcttgtgagtctgt

SEQ ID NO: 64886 - DNA, 15 bp, Homo sapiens
cttcttgtgagtctg

SEQ ID NO: 64887 - DNA, 15 bp, Homo sapiens
acttcttgtgagtct

SEQ ID NO: 64888 - DNA, 15 bp, Homo sapiens
tacttcttgtgagtc

SEQ ID NO: 64889 - DNA, 15 bp, Homo sapiens
ttacttcttgtgagt

SEQ ID NO: 64890 - DNA, 15 bp, Homo sapiens
attacttcttgtgag

SEQ ID NO: 64891 - DNA, 15 bp, Homo sapiens
tattacttcttgtga

SEQ ID NO: 64892 - DNA, 15 bp, Homo sapiens
gtattacttcttgtg

SEQ ID NO: 64893 - DNA, 15 bp, Homo sapiens
tgtattacttcttgt

SEQ ID NO: 64894 - DNA, 15 bp, Homo sapiens
ttgtattacttcttg

SEQ ID NO: 64895 - DNA, 15 bp, Homo sapiens
tttgtattacttctt

SEQ ID NO: 64896 - DNA, 15 bp, Homo sapiens
atttgtattacttct

SEQ ID NO: 64897 - DNA, 15 bp, Homo sapiens
aatttgtattacttc

SEQ ID NO: 64898 - DNA, 15 bp, Homo sapiens
taatttgtattactt

SEQ ID NO: 64899 - DNA, 15 bp, Homo sapiens
gtaatttgtattact

SEQ ID NO: 64900 - DNA, 15 bp, Homo sapiens
tgtaatttgtattac

SEQ ID NO: 64901 - DNA, 15 bp, Homo sapiens
atgtaatttgtatta

SEQ ID NO: 64902 - DNA, 15 bp, Homo sapiens
catgtaatttgtatt

SEQ ID NO: 64903 - DNA, 15 bp, Homo sapiens
tcatgtaatttgtat

SEQ ID NO: 64904 - DNA, 15 bp, Homo sapiens
ctcatgtaatttgta

SEQ ID NO: 64905 - DNA, 15 bp, Homo sapiens
cctcatgtaatttgt

SEQ ID NO: 64906 - DNA, 15 bp, Homo sapiens
ccctcatgtaatttg

SEQ ID NO: 64907 - DNA, 15 bp, Homo sapiens
cccctcatgtaattt

SEQ ID NO: 64908 - DNA, 15 bp, Homo sapiens
ccccctcatgtaatt

SEQ ID NO: 64909 - DNA, 15 bp, Homo sapiens
accccctcatgtaat

SEQ ID NO: 64910 - DNA, 15 bp, Homo sapiens
aaccccctcatgtaa

SEQ ID NO: 64911 - DNA, 15 bp, Homo sapiens
gaaccccctcatgta

SEQ ID NO: 64912 - DNA, 15 bp, Homo sapiens
ggaaccccctcatgt

SEQ ID NO: 64913 - DNA, 15 bp, Homo sapiens
gggaaccccctcatg

SEQ ID NO: 64914 - DNA, 15 bp, Homo sapiens
agggaaccccctcat

SEQ ID NO: 64915 - DNA, 15 bp, Homo sapiens
aagggaaccccctca

SEQ ID NO: 64916 - DNA, 15 bp, Homo sapiens
taagggaaccccctc

SEQ ID NO: 64917 - DNA, 15 bp, Homo sapiens
ttaagggaaccccct

SEQ ID NO: 64918 - DNA, 15 bp, Homo sapiens
tttaagggaaccccc

SEQ ID NO: 64919 - DNA, 15 bp, Homo sapiens
gtttaagggaacccc

SEQ ID NO: 64920 - DNA, 15 bp, Homo sapiens
ggtttaagggaaccc

SEQ ID NO: 64921 - DNA, 15 bp, Homo sapiens
aggtttaagggaacc

SEQ ID NO: 64922 - DNA, 15 bp, Homo sapiens
aaggtttaagggaac

SEQ ID NO: 64923 - DNA, 15 bp, Homo sapiens
aaaggtttaagggaa

SEQ ID NO: 64924 - DNA, 15 bp, Homo sapiens
gaaaggtttaaggga

SEQ ID NO: 64925 - DNA, 15 bp, Homo sapiens
tgaaaggtttaaggg

SEQ ID NO: 64926 - DNA, 15 bp, Homo sapiens
atgaaaggtttaagg

SEQ ID NO: 64927 - DNA, 15 bp, Homo sapiens
gatgaaaggtttaag

SEQ ID NO: 64928 - DNA, 15 bp, Homo sapiens
ggatgaaaggtttaa
